(19) United States
(12) Patent Application Publication
(10) Pub. No.: US 2005/0203280 A1
(43) Pub. Date: Sep. 15, 2005

(54) Alloiococcus otitidis open reading frames (orfs) encoding polypeptide antigens, immunogenic compositions and uses thereof

(76) Inventors: John Calhoun McMichael, Rochester, NY (US); Robert John Zagursky, Victor, NY (US); Leah Diane Fletcher, Geneseo, NY (US)

Correspondence Address: WYETH;PATENT LAW GROUP, 5 GIRALDA FARMS, MADISON, NJ, 07940, US

(21) Appl. No.: 10/501,282

(22) PCT Filed: Nov. 25, 2002
(86) PCT No.: PCT/US02/36123

§ 371 Date: Jul. 9, 2004

(30) Foreign Application Priority Data
Nov. 29, 2001 (US) 60333777
Nov. 18, 2002 (US) 60426742

(51) Int. Cl. C12Q 1/68; C07H 21/04; C07K 14/195

(52) U.S. Cl. 530/350; 435/6; 435/69.1; 435/252.3; 435/320.1; 536/23.7

(57) ABSTRACT

The present invention relates to the complete genomic sequence of Gram-positive bacterium, Alloiococcus otitidis. The present invention also relates to polynucleotide sequences encoding polypeptides of Alloiococcus otitidis. In particular, the invention relates to antigenic polypeptides encoded by the Alloiococcus otitidis open reading frames (ORFs), and to their use in immunogenic compositions, therapeutics, diagnostics and the like.

### FIELD OF THE INVENTION

[0001] The present invention relates to the genomic sequence of Alloiococcus otitidis and polynucleotide sequences encoding polypeptides of the Gram-positive bacterium, Alloiococcus otitidis. The invention also relates to polynucleotides and polynucleotides encoding polypeptides, preferably antigenic polypeptides, encoded by the Alloiococcus otitidis open reading frames and the uses thereof.

### BACKGROUND OF THE INVENTION

[0002] Otitis media, an inflammation of the middle ear, is the most frequent cause of visits to pediatricians' offices in the United States (Schappert, 1991). Approximately 80% of all children experience at least one episode of Otitis media by the age of three (Klein, 1994). There are three main types of otitis media: Acute otitis media (AOM), otorrhea, and otitis media with effusion (OME). Alloiococcus otitidis has only been associated with otitis media with effusion (OME), but this may be due to the difficulty of its detection by standard bacterial culturing methods. Its detection in the effusions is likely due to the fact that the effusions are normally sterile and few or no competing bacterial species are isolated from them. Without the interference of a faster growing nasophryngeal species, the culture plates are incubated for the longer duration needed to detect Alloiococcus otitidis colonies.

[0003] Three other bacterial species are commonly isolated from middle ear effusions. These are nontypable Haemophilus influenzae, Moraxella catarrhalis, and Streptococcus pneumoniae. One or more of these species have been found in one study to be associated with about 77% of all cases of OME using a PCR detection method (Post, 2000). This study did not include assaying for Alloiococcus otitidis, so a portion of the unaccounted cases may be due to this organism.

[0004] The bacterium Alloiococcus otitidis was first isolated from the middle ear fluids of 10 children in the Buffalo, N.Y. area with persistent OME and characterized as a large catalase negative, Gram-positive cocci that tend to occur in clumps, often in tetrads. It is slow growing and requires 2 to 5 days at 37° C. before colonies are seen on sheep blood agar plates (Table 1). The bacterium was named Alloiococcus otitis by Aguirre and Collins (1992), who showed that it was different from other known Gram-positive species based on its 16S rRNA sequence. Recently the bacterium's name has been changed from Alloiococcus otitis to Alloiococcus otitidis (Hendolin, et al. Pediatr. Infect. Dis. J. 18:860 (1999), Hendolin et al. J. Clin. Microbiol. 38:125 (2000)).

[0005] Several studies of the epidemiology Alloiococcus otitidis indicate it is associated with otitis media with effusion. These are summarized in Table 1. These studies have been carried out using both culture and PCR techniques. The number of cases detected by culture, as might be expected from the fastidious growth requirements of the bacterium, was less than the number detected by PCR. Assuming that the bacterium is detected more accurately by the PCR method, the bacterium is detected in between 10 and 50% of patients with OME. This frequency suggests that this organism represents a significant public health problem. Consequently, there is a need for immunogenic compositions to prevent symptoms caused by Alloiococcus otitidis infections. There is also a need for compositions for diagnosing Alloiococcus otitidis infections.

TABLE 1
SUMMARY OF STUDIES INDICATING AN ASSOCIATION
OF ALLOIOCOCCUS OTITIDIS
WITH OTITIS MEDIA WITH EFFUSION (OME).

| % Detected | N^{a} | Method | Reference |
|---|---|---|---|
| 8 | 200 | Culture | Faden & Dryja, J. Clin. |
| | | | Microbiol. 27: 2488 (1989) |
| 3 | 100 | Culture | Sih et al., ICAAC (1992) |
| 20 | 25 | PCR | Hendolin et al., J. Clin. Microbiol. |
| | | | 35: 2854 (1997) |
| 50 | 12 | PCR | Beswick, et al. Lancet |
| | | | 345: 386 (1999) |
| 42 | 67 | PCR | Hendolin, et al. Pediatr. Infect. |
| | | | Dis. J. 18: 860 (1999) |
| 10 | 49 | PCR | Hendolin et al. J. Clin. |
| | | | Microbiol. 38: 125 (2000) |

^{a}Number of persons in study.

### SUMMARY OF THE INVENTION

[0006] The present invention broadly relates to Alloiococcus otitidis genomic sequence. Particularly, the invention relates to newly identified polynucleotide open reading frames (ORFs) comprised within the genomic nucleotide sequence of Alloiococcus otitidis, and to polypeptides encoded by the ORFs. More particularly, the ORFs encode polypeptides that are surface localized, secreted, or exposed on Alloiococcus otitidis.

[0007] Thus, in certain aspects, the invention relates to Alloiococcus otitidis ORFs that encode Alloiococcus otitidis polypeptides. In preferred embodiments, these Alloiococcus otitidis polypeptides are antigenic polypeptides. As defined hereinafter, an Alloiococcus otitidis antigenic polypeptide, antigen or immunogen, is an Alloiococcus otitidis polypeptide that is immunoreactive with an antibody or an Alloiococcus otitidis polypeptide that elicits an immune response. In other embodiments, the invention relates to the polynucleotides encoding these antigenic polypeptides. In other aspects, the invention relates to vectors comprising Alloiococcus otitidis ORFs and cells or animals transformed with these vectors. The invention relates also to methods of detecting these nucleic acids or polypeptides and kits for diagnosing Alloiococcus otitidis infection. The invention further relates to pharmaceutical compositions, in particular immunogenic compositions, for the prevention and/or treatment of bacterial infection, in particular Alloiococcus otitidis.

[0008] In a preferred embodiment, the immunogenic compositions are used for the treatment or prevention of non-systemic diseases, particularly of the Otitis media, which are induced or worsened by Alloiococcus otitidis.

[0009] In particular embodiments, the invention relates to an isolated polynucleotide of an Alloiococcus otitidis genomic sequence, wherein the polynucleotide comprises a nucleotide sequence having at least about 70% identity to a nucleotide sequence chosen from one of odd numbered sequences set out in SEQ ID NO: 1 through 6649, a degenerate variant thereof, or a fragment thereof. As defined hereinafter, a “degenerate variant” is defined as a polynucleotide that differs from the nucleotide sequence shown in SEQ ID NO:1 through SEQ ID NO:6649 (and fragments thereof) due to degeneracy of the genetic code, but still encodes the same Alloiococcus otitidis polypeptide (i.e., SEQ ID NO:2 through SEQ ID NO:6650) as that encoded by the nucleotide sequence shown in SEQ ID NO:1 through SEQ ID NO:6649.

[0010] In other embodiments, the polynucleotide is a complement to a nucleotide sequence chosen from one of the odd numbered sequences set out in SEQ ID NO: 1 through SEQ ID NO: 6649, a degenerate variant thereof, or a fragment thereof. In yet other embodiments, the polynucleotide is selected from the group consisting of genomic DNA, cDNA and RNA or may further comprise heterologous nucleotides.

[0011] In another embodiment, the invention comprises an isolated polynucleotide that hybridizes to a nucleotide sequence chosen from one of odd numbered sequences set out in SEQ ID NO: 1 through SEQ ID NO: 6649, a complement hereof, a degenerate variant thereof, or a fragment thereof, under high stringency hybridization conditions. In yet other embodiments, the polynucleotide hybridizes under intermediate stringency hybridization conditions.

[0012] In a preferred embodiment, an isolated polynucleotide of a an Alloiococcus otitidis genomic sequence comprises a nucleotide sequence chosen from one of odd numbered sequences set out in SEQ ID NO: 1 through SEQ ID NO: 6649, a fragment thereof, or a degenerate variant thereof, and encodes a polypeptide, a biological equivalent thereof, or a fragment thereof, selected from the group consisting of (a) an Alloiococcus otitidis polypeptide predicted by SignaIP algorithm analysis as having met all four criteria set out in the SignaIP algorithm for a polypeptide having a signal peptide and a subset of these are predicted by HMM SignaIP algorithm analysis as having a signal peptide; (b) an Alloiococcus otitidis polypeptide predicted by SignaIP algorithm analysis as having met three of the four criteria set out in the SignaIP algorithm for a polypeptide having a signal peptide and a subset of these predicted by HMM SignaIP algorithm analysis as having a signal peptide; (c) an Alloiococcus otitidis polypeptide predicted by HMM SignaIP algorithm analysis as having a signal peptide; (d) an Alloiococcus otitidis polypeptide predicted by HMM SignaIP algorithm analysis as being a non-secretory protein; (e) an Alloiococcus otitidis polypeptide identified by Pfam analysis; (f) an Alloiococcus otitidis polypeptide identified by BlastP analysis as being secreted, surface exposed, vaccine candidate; (g) an Alloiococcus otitidis polypeptide identified using proteomics methodology as sharing homology with putative surface exposed proteins of Streptococcus pneumoniae; (h) an Alloiococcus otitidis polypeptide having a LPXTG motif, wherein the polypeptide is covalently attached to the peptidoglycan layer; (i) an Alloiococcus otitidis lipoprotein; (j) an Alloiococcus otitidis polypeptide non-covalently associated with the peptidoglycan layer; (k) an Alloiococcus otitidis polypeptide having an RGDX motif wherein X is not a proline residue; (I) an Alloiococcus otitidis polypeptide predicted by BlastP as being involved in capsule biosynthesis and transport; (m) an Alloiococcus otitidis polypeptide identified by BlastP as being localized within the capsule loci of the Alloiococcus otitidis genome; (n) an Alloiococcus otitidis polypeptide predicted by BlastP as being associated with sporulation; (o) an Alloiococcus otitidis polypeptide encoded by unique ORFs identified by BlastP analysis as having a BlastP ‘E Value’ of >e⁻¹⁰; (p) an Alloiococcus otitidis polypeptide identified by Glimmer™ ORF finder program; (q) an Alloiococcus otitidis polypeptide identified by GeneMark™ ORF finder program; (r) an Alloiococcus otitidis polypeptide identified by Applicants' assignee's ORF finder program that searches for an ATG, GTG or TTG Start codon between a Stop-Stop ORF; and (s) an Alloiococcus otitidis polypeptide identified by Applicants' assignee's ORF finder program that searches for a transmembrane domain between two Stop codons and a Start codon immediately upstream of this transmembrane region.

[0013] In one aspect of this embodiment, the polynucleotide is a complement to a nucleotide sequence selected from one of odd numbered sequences set out in SEQ ID NO: 1 and SEQ ID NO: 6649, a degenerate variant thereof, or a fragment thereof. In yet other aspects of this embodiment, the polynucleotide is selected from the group consisting of DNA, chromosomal DNA, cDNA and RNA or may further comprise heterologous nucleotides. In another aspect of the invention, the polynucleotide encodes a fusion polypeptide.

[0014] In a preferred embodiment, the invention comprises an isolated polynucleotide of the Alloiococcus otitidis genomic sequence encoding a polypeptide, which is predicted by SignaIP algorithm analysis as having met all four criteria set out in the SignaIP algorithm for a polypeptide having a signal peptide, and the polynucleotide is selected from one of Seq. ID No. 89, Seq. ID No. 127, Seq. ID No.131, Seq. ID No.133, Seq. ID No. 161, Seq. ID No.163, Seq. ID No. 213, Seq. ID No. 215, Seq. ID No. 225, Seq. ID No. 249, Seq. ID No. 251, Seq. ID No. 287, Seq. ID No. 289, Seq. ID No. 369, Seq. ID No. 371, Seq. ID No. 375, Seq. ID No. 377, Seq. ID No. 497, Seq. ID No. 503, Seq. ID No. 505, Seq. ID No. 527, Seq. ID No. 549, Seq. ID No. 575, Seq. ID No. 617, Seq. ID No. 657, Seq. ID No. 659, Seq. ID No. 661, Seq. ID No. 675, Seq. ID No. 715, Seq. ID No. 717, Seq. ID No. 745, Seq. ID No. 747, Seq. ID No. 755, Seq. ID No. 757, Seq. ID No. 759, Seq. ID No. 761, Seq. ID No. 773, Seq. ID No. 807, Seq. ID No. 967, Seq. ID No. 973, Seq. ID No. 975, Seq. ID No. 1013, Seq. ID No. 1025, Seq. ID No. 1027, Seq. ID No. 1039, Seq. ID No. 1075, Seq. ID No. 1089, Seq. ID No. 1195, Seq. ID No. 1197, Seq. ID No. 1207, Seq. ID No. 1239, Seq. ID No. 1243, Seq. ID No. 1245, Seq. ID No. 1269, Seq. ID No. 1315, Seq. ID No. 1317, Seq. ID No. 1331, Seq. ID No. 1365, Seq. ID No. 1367, Seq. ID No. 1369, Seq. ID No. 1445, Seq. ID No. 1447, Seq. ID No. 1513, Seq. ID No. 1517, Seq. ID No. 1545, Seq. ID No. 1549, Seq. ID No. 1561, Seq. ID No. 1569, Seq. ID No. 1571, Seq. ID No. 1585, Seq. ID No. 1643, Seq. ID No. 1653, Seq. ID No. 1661, Seq. ID No. 1663, Seq. ID No. 1707, Seq. ID No. 1733, Seq. ID No. 1737, Seq. ID No. 1755, Seq. ID No. 1765, Seq. ID No. 1767, Seq. ID No. 1775, Seq. ID No. 1791, Seq. ID No. 1805, Seq. ID No. 1875, Seq. ID No. 1969, Seq. ID No. 1981, Seq. ID No. 2053, Seq. ID No. 2055, Seq. ID No. 2087, Seq. ID No. 2089, Seq. ID No. 2091, Seq. ID No. 2105, Seq. ID No. 2115, Seq. ID No. 2149, Seq. ID No. 2151, Seq. ID No. 2159, Seq. ID No. 2177, Seq. ID No. 2277, Seq. ID No. 2293, Seq. ID No. 2321, Seq. ID No. 2347, Seq. ID No. 2351, Seq. ID No. 2353, Seq. ID No. 2365, Seq. ID No. 2395, Seq. ID No. 2421, Seq. ID No. 2425, Seq. ID No. 2427, Seq. ID No. 2429, Seq. ID No. 2449, Seq. ID No. 2459, Seq. ID No. 2525, Seq. ID No. 2531, Seq. ID No. 2607, Seq. ID No. 2651, Seq. ID No. 2679, Seq. ID No. 2693, Seq. ID No. 2699, Seq. ID No. 2703, Seq. ID No. 2753, Seq. ID No. 2785, Seq. ID No. 2813, Seq. ID No. 2829, Seq. ID No. 2835, Seq. ID No. 2841, Seq. ID No. 2879, Seq. ID No. 2881, Seq. ID No. 2935, Seq. ID No. 2937, Seq. ID No. 2949, Seq. ID No. 2965, Seq. ID No. 2967, Seq. ID No. 2973, Seq. ID No. 3007, Seq. ID No. 3009, Seq. ID No. 3011, Seq. ID No. 3029, Seq. ID No. 3031, Seq. ID No. 3109, Seq. ID No. 3111, Seq. ID No. 3219, Seq. ID No. 3223, Seq. ID No. 3273, Seq. ID No. 3297, Seq. ID No. 3331, Seq. ID No. 3335, Seq. ID No. 3341, Seq. ID No. 3349, Seq. ID No. 3353, Seq. ID No. 3355, Seq. ID No. 3377, Seq. ID No. 3391, Seq. ID No. 3425, Seq. ID No. 3449, Seq. ID No. 3493, Seq. ID No. 3573, Seq. ID No. 3611, Seq. ID No. 3619, Seq. ID No. 3689, Seq. ID No. 3753, Seq. ID No. 3755, Seq. ID No. 3765, Seq. ID No. 3781, Seq. ID No. 3783, Seq. ID No. 3851, Seq. ID No. 3903, Seq. ID No. 4005, Seq. ID No. 4007, Seq. ID No. 4027, Seq. ID No. 4073, Seq. ID No. 4137, Seq. ID No. 4141, Seq. ID No. 4143, Seq. ID No. 4145, Seq. ID No. 4225, Seq. ID No. 4343, Seq. ID No. 4385, Seq. ID No. 4399, Seq. ID No. 4469, Seq. ID No. 4483, Seq. ID No. 4493, Seq. ID No. 4495, Seq. ID No. 4533, Seq. ID No. 4699, Seq. ID No. 4709, Seq. ID No. 4711, Seq. ID No. 4735, Seq. ID No. 4827, Seq. ID No. 4871, Seq. ID No. 4873, Seq. ID No. 4879, Seq. ID No. 4921, Seq. ID No. 4981, Seq. ID No. 5115, Seq. ID No. 5267, Seq. ID No. 5341, Seq. ID No. 5387, Seq. ID No. 5465, Seq. ID No. 5467, Seq. ID No. 5479, Seq. ID No. 5497, Seq. ID No. 5513, Seq. ID No. 5543, Seq. ID No. 5545, Seq. ID No. 5567, Seq. ID No. 5587, Seq. ID No. 5589, Seq. ID No. 5591, Seq. ID No. 5611, Seq. ID No. 5621, Seq. ID No. 5641, Seq. ID No. 5681, Seq. ID No. 5719, Seq. ID No. 5771, Seq. ID No. 5783, Seq. ID No. 5895, Seq. ID No. 5899, Seq. ID No. 5901, Seq. ID No. 5927, Seq. ID No. 5929, Seq. ID No. 5939, Seq. ID No. 5987, Seq. ID No. 6013, Seq. ID No. 6087, Seq. ID No. 6089, Seq. ID No. 6091, Seq. ID No. 6093, Seq. ID No. 6095, Seq. ID No. 6103, Seq. ID No. 6169, Seq. ID No. 6185, Seq. ID No. 6187, Seq. ID No. 6195, Seq. ID No. 6197, Seq. ID No. 6203, Seq. ID No. 6205, Seq. ID No. 6221, Seq. ID No. 6223, Seq. ID No. 6229, Seq. ID No. 6291, Seq. ID No. 6415, Seq. ID No. 6417, Seq. ID No. 6473, Seq. ID No. 6507, Seq. ID No. 6543, Seq. ID No. 6595, Seq. ID No. 6597, Seq. ID No. 6599, Seq. ID No. 6601, and Seq. ID No. 6603.

[0015] In yet another preferred embodiment, the invention comprises an isolated polynucleotide of the Alloiococcus otitidis genomic sequence encoding a polypeptide which is predicted by SignaIP algorithm analysis as having met three of the four criteria set out in the SignaIP algorithm for a polypeptide having a signal peptide and which is predicted by HMM Signal P algorithm analysis as having a signal peptide, and the polynucleotide is selected from one of Seq. ID No. 7, Seq. ID No. 11, Seq. ID No. 23, Seq. ID No. 45, Seq. ID No. 47, Seq. ID No. 53, Seq. ID No. 59, Seq. ID No. 65, Seq. ID No. 67, Seq. ID No. 87, Seq. ID No. 91, Seq. ID No. 139, Seq. ID No. 151, Seq. ID No. 159, Seq. ID No. 165, Seq. ID No. 169, Seq. ID No. 185, Seq. ID No. 211, Seq. ID No. 217, Seq. ID No. 235, Seq. ID No. 237, Seq. ID No. 239, Seq. ID No. 271, Seq. ID No. 285, Seq. ID No. 291, Seq. ID No. 327, Seq. ID No. 349, Seq. ID No. 385, Seq. ID No. 387, Seq. ID No. 407, Seq. ID No. 427, Seq. ID No. 431, Seq. ID No. 455, Seq. ID No. 457, Seq. ID No. 495, Seq. ID No. 499, Seq. ID No. 511, Seq. ID No. 513, Seq. ID No. 515, Seq. ID No. 525, Seq. ID No. 545, Seq. ID No. 547, Seq. ID No. 557, Seq. ID No. 569, Seq. ID No. 589, Seq. ID No. 591, Seq. ID No. 593, Seq. ID No. 595, Seq. ID No. 609, Seq. ID No. 637, Seq. ID No. 639, Seq. ID No. 641, Seq. ID No. 653, Seq. ID No. 669, Seq. ID No. 679, Seq. ID No. 719, Seq. ID No. 723, Seq. ID No. 739, Seq. ID No. 749, Seq. ID No. 751, Seq. ID No. 763, Seq. ID No. 765, Seq. ID No. 769, Seq. ID No. 777, Seq. ID No. 779, Seq. ID No. 781, Seq. ID No. 819, Seq. ID No. 895, Seq. ID No. 903, Seq. ID No. 905, Seq. ID No. 909, Seq. ID No. 935, Seq. ID No. 937, Seq. ID No. 951, Seq. ID No. 955, Seq. ID No. 979, Seq. ID No. 981, Seq. ID No. 983, Seq. ID No. 985, Seq. ID No. 1005, Seq. ID No. 1007, Seq. ID No. 1009, Seq. ID No. 1015, Seq. ID No. 1019, Seq. ID No. 1029, Seq. ID No. 1031, Seq. ID No. 1047, Seq. ID No. 1091, Seq. ID No. 1111, Seq. ID No. 1137, Seq. ID No. 1151, Seq. ID No. 1153, Seq. ID No. 1169, Seq. ID No. 1173, Seq. ID No. 1183, Seq. ID No. 1191, Seq. ID No. 1193, Seq. ID No. 1213, Seq. ID No. 1223, Seq. ID No. 1229, Seq. ID No. 1247, Seq. ID No. 1259, Seq. ID No. 1283, Seq. ID No. 1307, Seq. ID No. 1319, Seq. ID No. 1321, Seq. ID No. 1327, Seq. ID No. 1341, Seq. ID No. 1343, Seq. ID No. 1347, Seq. ID No. 1389, Seq. ID No. 1401, Seq. ID No. 1429, Seq. ID No. 1479, Seq. ID No. 1551, Seq. ID No. 1559, Seq. ID No. 1579, Seq. ID No. 1587, Seq. ID No. 1621, Seq. ID No. 1627, Seq. ID No. 1633, Seq. ID No. 1645, Seq. ID No. 1647, Seq. ID No. 1649, Seq. ID No. 1655, Seq. ID No. 1665, Seq. ID No. 1667, Seq. ID No. 1671, Seq. ID No. 1677, Seq. ID No. 1679, Seq. ID No. 1681, Seq. ID No. 1695, Seq. ID No. 1703, Seq. ID No. 1705, Seq. ID No. 1731, Seq. ID No. 1753, Seq. ID No. 1759, Seq. ID No. 1763, Seq. ID No. 1787, Seq. ID No. 1797, Seq. ID No. 1821, Seq. ID No. 1823, Seq. ID No. 1833, Seq. ID No. 1839, Seq. ID No. 1841, Seq. ID No. 1843, Seq. ID No. 1893, Seq. ID No. 1917, Seq. ID No. 1919, Seq. ID No. 1971, Seq. ID No. 1991, Seq. ID No. 2013, Seq. ID No. 2015, Seq. ID No. 2017, Seq. ID No. 2019, Seq. ID No. 2033, Seq. ID No. 2035, Seq. ID No. 2049, Seq. ID No. 2081, Seq. ID No. 2083, Seq. ID No. 2085, Seq. ID No. 2111, Seq. ID No. 2113, Seq. ID No. 2123, Seq. ID No. 2125, Seq. ID No. 2127, Seq. ID No. 2131, Seq. ID No. 2133, Seq. ID No. 2153, Seq. ID No. 2161, Seq. ID No. 2171, Seq. ID No. 2175, Seq. ID No. 2179, Seq. ID No. 2187, Seq. ID No. 2201; Seq. ID No. 2203, Seq. ID No. 2221, Seq. ID No. 2237, Seq. ID No. 2249, Seq. ID No. 2251, Seq. ID No. 2255, Seq. ID No. 2261, Seq. ID No. 2263, Seq. ID No. 2271, Seq. ID No. 2279, Seq. ID No. 2283, Seq. ID No. 2285, Seq. ID No. 2289, Seq. ID No. 2295, Seq. ID No. 2305, Seq. ID No. 2307, Seq. ID No. 2317, Seq. ID No. 2319, Seq. ID No. 2323, Seq. ID No. 2325, Seq. ID No. 2343, Seq. ID No. 2349, Seq. ID No. 2385, Seq. ID No. 2393, Seq. ID No. 2423, Seq. ID No. 2453, Seq. ID No. 2491, Seq. ID No. 2497, Seq. ID No. 2499, Seq. ID No. 2507, Seq. ID No. 2515, Seq. ID No. 2517, Seq. ID No. 2521, Seq. ID No. 2523, Seq. ID No. 2527, Seq. ID No. 2533, Seq. ID No. 2535, Seq. ID No. 2541, Seq. ID No. 2543, Seq. ID No. 2547, Seq. ID No. 2549, Seq. ID No. 2557, Seq. ID No. 2573, Seq. ID No. 2583, Seq. ID No. 2601, Seq. ID No. 2603, Seq. ID No. 2621, Seq. ID No. 2653, Seq. ID No. 2681, Seq. ID No. 2691, Seq. ID No. 2701, Seq. ID No. 2733, Seq. ID No. 2739, Seq. ID No. 2801, Seq. ID No. 2807, Seq. ID No. 2815, Seq. ID No. 2819, Seq. ID No. 2821, Seq. ID No. 2823, Seq. ID No. 2833, Seq. ID No. 2837, Seq. ID No. 2839, Seq. ID No. 2845, Seq. ID No. 2853, Seq. ID No. 2861, Seq. ID No. 2865, Seq. ID No. 2873, Seq. ID No. 2875, Seq. ID No. 2877, Seq. ID No. 2883, Seq. ID No. 2895, Seq. ID No. 2905, Seq. ID No. 2939, Seq. ID No. 2941, Seq. ID No. 2947, Seq. ID No. 2981, Seq. ID No. 2983, Seq. ID No. 2987, Seq. ID No. 2991, Seq. ID No. 2995, Seq. ID No. 3001, Seq. ID No. 3005, Seq. ID No. 3021, Seq. ID No. 3025, Seq. ID No. 3043, Seq. ID No. 3045, Seq. ID No. 3073, Seq. ID No. 3075, Seq. ID No. 3155, Seq. ID No. 3163, Seq. ID No. 3165, Seq. ID No. 3167, Seq. ID No. 3183, Seq. ID No. 3213, Seq. ID No. 3215, Seq. ID No. 3235, Seq. ID No. 3245, Seq. ID No. 3261, Seq. ID No. 3263, Seq. ID No. 3265, Seq. ID No. 3269, Seq. ID No. 3271, Seq. ID No. 3275, Seq. ID No. 3277, Seq. ID No. 3317, Seq. ID No. 3325, Seq. ID No. 3337, Seq. ID No. 3351, Seq. ID No. 3389, Seq. ID No. 3405, Seq. ID No. 3419, Seq. ID No. 3421, Seq. ID No. 3423, Seq. ID No. 3451, Seq. ID No. 3453, Seq. ID No. 3455, Seq. ID No. 3491, Seq. ID No. 3495, Seq. ID No. 3503, Seq. ID No. 3505, Seq. ID No. 3517, Seq. ID No. 3519, Seq. ID No. 3545, Seq. ID No. 3547, Seq. ID No. 3571, Seq. ID No. 3593, Seq. ID No. 3617, Seq. ID No. 3621, Seq. ID No. 3629, Seq. ID No. 3663, Seq. ID No. 3701, Seq. ID No. 3703, Seq. ID No. 3723, Seq. ID No. 3737, Seq. ID No. 3741, Seq. ID No. 3745, Seq. ID No. 3747, Seq. ID No. 3759, Seq. ID No. 3763, Seq. ID No. 3767, Seq. ID No. 3769, Seq. ID No. 3771, Seq. ID No. 3785, Seq. ID No. 3793, Seq. ID No. 3813, Seq. ID No. 3837, Seq. ID No. 3839, Seq. ID No. 3861, Seq. ID No. 3865, Seq. ID No. 3889, Seq. ID No. 3891, Seq. ID No. 3895, Seq. ID No. 3915, Seq. ID No. 3923, Seq. ID No. 3925, Seq. ID No. 3929, Seq. ID No. 3965, Seq. ID No. 3975, Seq. ID No. 3979, Seq. ID No. 3995, Seq. ID No. 3997, Seq. ID No. 4009, Seq. ID No. 4039, Seq. ID No. 4041, Seq. ID No. 4061, Seq. ID No. 4079, Seq. ID No. 4081, Seq. ID No. 4111, Seq. ID No. 4113, Seq. ID No. 4135, Seq. ID No. 4139, Seq. ID No. 4155, Seq. ID No. 4181, Seq. ID No. 4203, Seq. ID No. 4221, Seq. ID No. 4247, Seq. ID No. 4253, Seq. ID No. 4257, Seq. ID No. 4259, Seq. ID No. 4261, Seq. ID No. 4263, Seq. ID No. 4269, Seq. ID No. 4311, Seq. ID No. 4379, Seq. ID No. 4389, Seq. ID No. 4391, Seq. ID No. 4471, Seq. ID No. 4473, Seq. ID No. 4481, Seq. ID No. 4525, Seq. ID No. 4551, Seq. ID No. 4561, Seq. ID No. 4573, Seq. ID No. 4617, Seq. ID No. 4639, Seq. ID No. 4659, Seq. ID No. 4681, Seq. ID No. 4701, Seq. ID No. 4705, Seq. ID No. 4713, Seq. ID No. 4717, Seq. ID No. 4721, Seq. ID No. 4737, Seq. ID No. 4741, Seq. ID No. 4813, Seq. ID No. 4817, Seq. ID No. 4819, Seq. ID No. 4829, Seq. ID No. 4831, Seq. ID No. 4851, Seq. ID No. 4869, Seq. ID No. 4875, Seq. ID No. 4913, Seq. ID No. 4919, Seq. ID No. 4929, Seq. ID No. 4931, Seq. ID No. 4983, Seq. ID No. 4993, Seq. ID No. 5011, Seq. ID No. 5023, Seq. ID No. 5031, Seq. ID No. 5033, Seq. ID No. 5035, Seq. ID No. 5043, Seq. ID No. 5061, Seq. ID No. 5063, Seq. ID No. 5069, Seq. ID No. 5103, Seq. ID No. 5121, Seq. ID No. 5123, Seq. ID No. 5131, Seq. ID No. 5133, Seq. ID No. 5135, Seq. ID No. 5137, Seq. ID No. 5139, Seq. ID No. 5141, Seq. ID No. 5151, Seq. ID No. 5159, Seq. ID No. 5161, Seq. ID No. 5165, Seq. ID No. 5167, Seq. ID No. 5175, Seq. ID No. 5177, Seq. ID No. 5205, Seq. ID No. 5207, Seq. ID No. 5211, Seq. ID No. 5215, Seq. ID No. 5219, Seq. ID No. 5223, Seq. ID No. 5285, Seq. ID No. 5287, Seq. ID No. 5329, Seq. ID No. 5331, Seq. ID No. 5377, Seq. ID No. 5379, Seq. ID No. 5381, Seq. ID No. 5385, Seq. ID No. 5405, Seq. ID No. 5407, Seq. ID No. 5453, Seq. ID No. 5459, Seq. ID No. 5461, Seq. ID No. 5463, Seq. ID No. 5481, Seq. ID No. 5509, Seq. ID No. 5529, Seq. ID No. 5531, Seq. ID No. 5557, Seq. ID No. 5569, Seq. ID No. 5577, Seq. ID No. 5623, Seq. ID No. 5625, Seq. ID No. 5643, Seq. ID No. 5659, Seq. ID No. 5661, Seq. ID No. 5683, Seq. ID No. 5685, Seq. ID No. 5709, Seq. ID No. 5711, Seq. ID No. 5733, Seq. ID No. 5739, Seq. ID No. 5765, Seq. ID No. 5797, Seq. ID No. 5827, Seq. ID No. 5889, Seq. ID No. 5893, Seq. ID No. 5905, Seq. ID No. 5909, Seq. ID No. 5911, Seq. ID No. 5923, Seq. ID No. 5963, Seq. ID No. 5965, Seq. ID No. 6025, Seq. ID No. 6027, Seq. ID No. 6031, Seq. ID No. 6043, Seq. ID No. 6045, Seq. ID No. 6047, Seq. ID No. 6053, Seq. ID No. 6059, Seq. ID No. 6109, Seq. ID No. 6111, Seq. ID No. 6115, Seq. ID No. 6117, Seq. ID No. 6127, Seq. ID No. 6131, Seq. ID No. 6135, Seq. ID No. 6137, Seq. ID No. 6161, Seq. ID No. 6165, Seq. ID No. 6183, Seq. ID No. 6189, Seq. ID No. 6191, Seq. ID No. 6193, Seq. ID No. 6207, Seq. ID No. 6209, Seq. ID No. 6217, Seq. ID No. 6225, Seq. ID No. 6235, Seq. ID No. 6243, Seq. ID No. 6249, Seq. ID No. 6253, Seq. ID No. 6259, Seq. ID No. 6265, Seq. ID No. 6267, Seq. ID No. 6275, Seq. ID No. 6283, Seq. ID No. 6285, Seq. ID No. 6303, Seq. ID No. 6325, Seq. ID No. 6327, Seq. ID No. 6363, Seq. ID No. 6365, Seq. ID No. 6367, Seq. ID No. 6385, Seq. ID No. 6425, Seq. ID No. 6427, Seq. ID No. 6429, Seq. ID No. 6431, Seq. ID No. 6453, Seq. ID No. 6465, Seq. ID No. 6469, Seq. ID No. 6471, Seq. ID No. 6479, Seq. ID No. 6539, Seq. ID No. 6541, Seq. ID No. 6571, Seq. ID No. 6573, Seq. ID No. 6639, Seq. ID No. 6643, and Seq. ID No. 6645.

[0016] In yet another preferred embodiment, the invention comprises an isolated polynucleotide of the Alloiococcus otitidis genomic sequence encoding a polypeptide, which is predicted by HMM SignaIP algorithm analysis as having a signal peptide, and the polynucleotide is selected from one of Seq. ID No. 3, Seq. ID No. 7, Seq. ID No. 9, Seq. ID No. 19, Seq. ID No. 21, Seq. ID No. 31, Seq. ID No. 33, Seq. ID No. 45, Seq. ID No. 47, Seq. ID No. 49, Seq. ID No. 53, Seq. ID No. 65, Seq. ID No. 67, Seq. ID No. 85, Seq. ID No. 87, Seq. ID No. 105, Seq. ID No. 111, Seq. ID No. 123, Seq. ID No. 131, Seq. ID No. 133, Seq. ID No. 141, Seq. ID No. 159, Seq. ID No. 161, Seq. ID No. 163, Seq. ID No. 171, Seq. ID No. 191, Seq. ID No. 209, Seq. ID No. 211, Seq. ID No. 213, Seq. ID No. 215, Seq. ID No. 217, Seq. ID No. 225, Seq. ID No. 235, Seq. ID No. 237, Seq. ID No. 249, Seq. ID No. 251, Seq. ID No. 255, Seq. ID No. 257, Seq. ID No. 259, Seq. ID No. 271, Seq. ID No. 273, Seq. ID No. 277, Seq. ID No. 285, Seq. ID No. 287, Seq. ID No. 289, Seq. ID No. 327, Seq. ID No. 329, Seq. ID No. 357, Seq. ID No. 359, Seq. ID No. 373, Seq. ID No. 375, Seq. ID No. 393, Seq. ID No. 401, Seq. ID No. 403, Seq. ID No. 455, Seq. ID No. 457, Seq. ID No. 477, Seq. ID No. 487, Seq. ID No. 489, Seq. ID No. 491, Seq. ID No. 493, Seq. ID No. 495, Seq. ID No. 497, Seq. ID No. 499, Seq. ID No. 503, Seq. ID No. 505, Seq. ID No. 509, Seq. ID No. 511, Seq. ID No. 513, Seq. ID No. 515, Seq. ID No. 525, Seq. ID No. 527, Seq. ID No. 545, Seq. ID No. 547, Seq. ID No. 549, Seq. ID No. 557, Seq. ID No. 567, Seq. ID No. 569, Seq. ID No. 575, Seq. ID No. 577, Seq. ID No. 579, Seq. ID No. 591, Seq. ID No. 593, Seq. ID No. 599, Seq. ID No. 617, Seq. ID No. 637, Seq. ID No. 639, Seq. ID No. 641, Seq. ID No. 643, Seq. ID No. 645, Seq. ID No. 647, Seq. ID No. 653, Seq. ID No. 655, Seq. ID No. 657, Seq. ID No. 659, Seq. ID No. 661, Seq. ID No. 667, Seq. ID No. 669, Seq. ID No. 675, Seq. ID No. 677, Seq. ID No. 679, Seq. ID No. 715, Seq. ID No. 717, Seq. ID No. 719, Seq. ID No. 721, Seq. ID No. 723, Seq. ID No. 725, Seq. ID No. 745, Seq. ID No. 747, Seq. ID No. 749, Seq. ID No. 751, Seq. ID No. 755, Seq. ID No. 757, Seq. ID No. 759, Seq. ID No. 761, Seq. ID No. 763, Seq. ID No. 765, Seq. ID No. 769, Seq. ID No. 777, Seq. ID No. 779, Seq. ID No. 781, Seq. ID No. 807, Seq. ID No. 809, Seq. ID No. 819, Seq. ID No. 825, Seq. ID No. 863, Seq. ID No. 893, Seq. ID No. 901, Seq. ID No. 935, Seq. ID No. 937, Seq. ID No. 941, Seq. ID No. 943, Seq. ID No. 955, Seq. ID No. 957, Seq. ID No. 967, Seq. ID No. 979, Seq. ID No. 981, Seq. ID No. 983, Seq. ID No. 985, Seq. ID No. 1001, Seq. ID No. 1003, Seq. ID No. 1005, Seq. ID No. 1007, Seq. ID No. 1009, Seq. ID No. 1011, Seq. ID No. 1013, Seq. ID No. 1015, Seq. ID No. 1019, Seq. ID No. 1029, Seq. ID No. 1031, Seq. ID No. 1033, Seq. ID No. 1035, Seq. ID No. 1037, Seq. ID No. 1039, Seq. ID No. 1045, Seq. ID No. 1055, Seq. ID No. 1075, Seq. ID No. 1077, Seq. ID No. 1105, Seq. ID No. 1107, Seq. ID No. 1131, Seq. ID No. 1135, Seq. ID No. 1137, Seq. ID No. 1139, Seq. ID No. 1151, Seq. ID No. 1165, Seq. ID No. 1167, Seq. ID No. 1169, Seq. ID No. 1173, Seq. ID No. 1183, Seq. ID No. 1195, Seq. ID No. 1197, Seq. ID No. 1203, Seq. ID No. 1213, Seq. ID No. 1223, Seq. ID No. 1227, Seq. ID No. 1229, Seq. ID No. 1237, Seq. ID No. 1243, Seq. ID No. 1245, Seq. ID No. 1259, Seq. ID No. 1265, Seq. ID No. 1267, Seq. ID No. 1269, Seq. ID No. 1271, Seq. ID No. 1283, Seq. ID No. 1287, Seq. ID No. 1289, Seq. ID No. 1291, Seq. ID No. 1295, Seq. ID No. 1297, Seq. ID No. 1303, Seq. ID No. 1305, Seq. ID No. 1315, Seq. ID No. 1317, Seq. ID No. 1319, Seq. ID No. 1325, Seq. ID No. 1327, Seq. ID No. 1329, Seq. ID No. 1331, Seq. ID No. 1337, Seq. ID No. 1341, Seq. ID No. 1343, Seq. ID No. 1347, Seq. ID No. 1349, Seq. ID No. 1351, Seq. ID No. 1353, Seq. ID No. 1365, Seq. ID No. 1367, Seq. ID No. 1369, Seq. ID No. 1371, Seq. ID No. 1381, Seq. ID No. 1401, Seq. ID No. 1429, Seq. ID No. 1435, Seq. ID No. 1445, Seq. ID No. 1447, Seq. ID No. 1481, Seq. ID No. 1513, Seq. ID No. 1515, Seq. ID No. 1517, Seq. ID No. 1529, Seq. ID No. 1533, Seq. ID No. 1535, Seq. ID No. 1545, Seq. ID No. 1547, Seq. ID No. 1551, Seq. ID No. 1553, Seq. ID No. 1559, Seq. ID No. 1561, Seq. ID No. 1563, Seq. ID No. 1571, Seq. ID No. 1579, Seq. ID No. 1583, Seq. ID No. 1585, Seq. ID No. 1621, Seq. ID No. 1633, Seq. ID No. 1639, Seq. ID No. 1643, Seq. ID No. 1645, Seq. ID No. 1647, Seq. ID No. 1649, Seq. ID No. 1653, Seq. ID No. 1661, Seq. ID No. 1663, Seq. ID No. 1665, Seq. ID No. 1671, Seq. ID No. 1673, Seq. ID No. 1677, Seq. ID No. 1679, Seq. ID No. 1681, Seq. ID No. 1693, Seq. ID No. 1707, Seq. ID No. 1711, Seq. ID No. 1731, Seq. ID No. 1733, Seq. ID No. 1737, Seq. ID No. 1753, Seq. ID No. 1755, Seq. ID No. 1757, Seq. ID No. 1765, Seq. ID No. 1767, Seq. ID No. 1771, Seq. ID No. 1781, Seq. ID No. 1787, Seq. ID No. 1791, Seq. ID No. 1797, Seq. ID No. 1805, Seq. ID No. 1819, Seq. ID No. 1821, Seq. ID No. 1823, Seq. ID No. 1839, Seq. ID No. 1857, Seq. ID No. 1869, Seq. ID No. 1875, Seq. ID No. 1891, Seq. ID No. 1893, Seq. ID No. 1895, Seq. ID No. 1915, Seq. ID No. 1917, Seq. ID No. 1919, Seq. ID No. 1923, Seq. ID No. 1927, Seq. ID No. 1929, Seq. ID No. 1969, Seq. ID No. 1981, Seq. ID No. 1991, Seq. ID No. 1993, Seq. ID No. 2005, Seq. ID No. 2013, Seq. ID No. 2017, Seq. ID No. 2019, Seq. ID No. 2025, Seq. ID No. 2027, Seq. ID No. 2033, Seq. ID No. 2035, Seq. ID No. 2041, Seq. ID No. 2049, Seq. ID No. 2053, Seq. ID No. 2055, Seq. ID No. 2087, Seq. ID No. 2089, Seq. ID No. 2091, Seq. ID No. 2105, Seq. ID No. 2107, Seq. ID No. 2109, Seq. ID No. 2113, Seq. ID No. 2115, Seq. ID No. 2121, Seq. ID No. 2123, Seq. ID No. 2125, Seq. ID No. 2127, Seq. ID No. 2149, Seq. ID No. 2151, Seq. ID No. 2155, Seq. ID No. 2157, Seq. ID No. 2159, Seq. ID No. 2171, Seq. ID No. 2173, Seq. ID No. 2177, Seq. ID No. 2187, Seq. ID No. 2191, Seq. ID No. 2205, Seq. ID No. 2237, Seq. ID No. 2239, Seq. ID No. 2245, Seq. ID No. 2249, Seq. ID No. 2251, Seq. ID No. 2255, Seq. ID No. 2259, Seq. ID No. 2271, Seq. ID No. 2283, Seq. ID No. 2289, Seq. ID No. 2291, Seq. ID No. 2293, Seq. ID No. 2295, Seq. ID No. 2303, Seq. ID No. 2305, Seq. ID No. 2307, Seq. ID No. 2317, Seq. ID No. 2319, Seq. ID No. 2321, Seq. ID No. 2323, Seq. ID No. 2325, Seq. ID No. 2327, Seq. ID No. 2329, Seq. ID No. 2333, Seq. ID No. 2343, Seq. ID No. 2347, Seq. ID No. 2349, Seq. ID No. 2351, Seq. ID No. 2353, Seq. ID No. 2355, Seq. ID No. 2357, Seq. ID No. 2365, Seq. ID No. 2367, Seq. ID No. 2371, Seq. ID No. 2375, Seq. ID No. 2387, Seq. ID No. 2389, Seq. ID No. 2391, Seq. ID No. 2393, Seq. ID No. 2407, Seq. ID No. 2419, Seq. ID No. 2421, Seq. ID No. 2425, Seq. ID No. 2427, Seq. ID No. 2429, Seq. ID No. 2433, Seq. ID No. 2449, Seq. ID No. 2459, Seq. ID No. 2487, Seq. ID No. 2489, Seq. ID No. 2491, Seq. ID No. 2493, Seq. ID No. 2497, Seq. ID No. 2499, Seq. ID No. 2501, Seq. ID No. 2503, Seq. ID No. 2507, Seq. ID No. 2515, Seq. ID No. 2517, Seq. ID No. 2523, Seq. ID No. 2525, Seq. ID No. 2527, Seq. ID No. 2531, Seq. ID No. 2533, Seq. ID No. 2535, Seq. ID No. 2537, Seq. ID No. 2541, Seq. ID No. 2543, Seq. ID No. 2545, Seq. ID No. 2555, Seq. ID No. 2557, Seq. ID No. 2565, Seq. ID No. 2569, Seq. ID No. 2571, Seq. ID No. 2583, Seq. ID No. 2591, Seq. ID No. 2597, Seq. ID No. 2599, Seq. ID No. 2601, Seq. ID No. 2607, Seq. ID No. 2611, Seq. ID No. 2621, Seq. ID No. 2627, Seq. ID No. 2629, Seq. ID No. 2651, Seq. ID No. 2679, Seq. ID No. 2681, Seq. ID No. 2683, Seq. ID No. 2691, Seq. ID No. 2693, Seq. ID No. 2695, Seq. ID No. 2697, Seq. ID No. 2699, Seq. ID No. 2701, Seq. ID No. 2703, Seq. ID No. 2705, Seq. ID No. 2707, Seq. ID No. 2717, Seq. ID No. 2729, Seq. ID No. 2731, Seq. ID No. 2733, Seq. ID No. 2783, Seq. ID No. 2785, Seq. ID No. 2801, Seq. ID No. 2809, Seq. ID No. 2813, Seq. ID No. 2815, Seq. ID No. 2819, Seq. ID No. 2821, Seq. ID No. 2823, Seq. ID No. 2831, Seq. ID No. 2833, Seq. ID No. 2835, Seq. ID No. 2837, Seq. ID No. 2839, Seq. ID No. 2841, Seq. ID No. 2845, Seq. ID No. 2853, Seq. ID No. 2855, Seq. ID No. 2859, Seq. ID No. 2861, Seq. ID No. 2873, Seq. ID No. 2881, Seq. ID No. 2893, Seq. ID No. 2905, Seq. ID No. 2935, Seq. ID No. 2937, Seq. ID No. 2939, Seq. ID No. 2941, Seq. ID No. 2947, Seq. ID No. 2949, Seq. ID No. 2951, Seq. ID No. 2969, Seq. ID No. 2973, Seq. ID No. 2975, Seq. ID No. 2977, Seq. ID No. 2981, Seq. ID No. 2983, Seq. ID No. 2987, Seq. ID No. 2991, Seq. ID No. 2995, Seq. ID No. 2997, Seq. ID No. 3005, Seq. ID No. 3007, Seq. ID No. 3009, Seq. ID No. 3011, Seq. ID No. 3013, Seq. ID No. 3023, Seq. ID No. 3025, Seq. ID No. 3027, Seq. ID No. 3029, Seq. ID No. 3031, Seq. ID No. 3043, Seq. ID No. 3055, Seq. ID No. 3063, Seq. ID No. 3071, Seq. ID No. 3073, Seq. ID No. 3075, Seq. ID No. 3077, Seq. ID No. 3119, Seq. ID No. 3121, Seq. ID No. 3123, Seq. ID No. 3145, Seq. ID No. 3155, Seq. ID No. 3157, Seq. ID No. 3163, Seq. ID No. 3165, Seq. ID No. 3173, Seq. ID No. 3183, Seq. ID No. 3193, Seq. ID No. 3201, Seq. ID No. 3213, Seq. ID No. 3215, Seq. ID No. 3217, Seq. ID No. 3219, Seq. ID No. 3241, Seq. ID No. 3243, Seq. ID No. 3245, Seq. ID No. 3249, Seq. ID No. 3255, Seq. ID No. 3257, Seq. ID No. 3261, Seq. ID No. 3263, Seq. ID No. 3269, Seq. ID No. 3275, Seq. ID No. 3277, Seq. ID No. 3297, Seq. ID No. 3317, Seq. ID No. 3323, Seq. ID No. 3325, Seq. ID No. 3331, Seq. ID No. 3335, Seq. ID No. 3337, Seq. ID No. 3339, Seq. ID No. 3349, Seq. ID No. 3351, Seq. ID No. 3353, Seq. ID No. 3355, Seq. ID No. 3357, Seq. ID No. 3359, Seq. ID No. 3375, Seq. ID No. 3377, Seq. ID No. 3389, Seq. ID No. 3391, Seq. ID No. 3395, Seq. ID No. 3405, Seq. ID No. 3415, Seq. ID No. 3421, Seq. ID No. 3425, Seq. ID No. 3427, Seq. ID No. 3433, Seq. ID No. 3441, Seq. ID No. 3449, Seq. ID No. 3451, Seq. ID No. 3453, Seq. ID No. 3455, Seq. ID No. 3457, Seq. ID No. 3463, Seq. ID No. 3481, Seq. ID No. 3491, Seq. ID No. 3493, Seq. ID No. 3503, Seq. ID No. 3505, Seq. ID No. 3517, Seq. ID No. 3519, Seq. ID No. 3527, Seq. ID No. 3531, Seq. ID No. 3539, Seq. ID No. 3561, Seq. ID No. 3573, Seq. ID No. 3581, Seq. ID No. 3587, Seq. ID No. 3593, Seq. ID No. 3595, Seq. ID No. 3611, Seq. ID No. 3617, Seq. ID No. 3619, Seq. ID No. 3621, Seq. ID No. 3625, Seq. ID No. 3629, Seq. ID No. 3635, Seq. ID No. 3677, Seq ID No. 3679, Seq. ID No. 3689, Seq. ID No. 3717, Seq. ID No. 3723, Seq. ID No. 3727, Seq. ID No. 3741, Seq. ID No. 3745, Seq. ID No. 3753, Seq. ID No. 3755, Seq. ID No. 3757, Seq. ID No. 3761, Seq. ID No. 3763, Seq. ID No. 3765, Seq. ID No. 3781, Seq. ID No. 3783, Seq. ID No. 3793, Seq. ID No. 3799, Seq. ID No. 3807, Seq. ID No. 3813, Seq. ID No. 3815, Seq. ID No. 3817, Seq. ID No. 3837, Seq. ID No. 3839, Seq. ID No. 3849, Seq. ID No. 3851, Seq. ID No. 3853, Seq. ID No. 3859, Seq. ID No. 3861, Seq. ID No. 3863, Seq. ID No. 3865, Seq. ID No. 3879, Seq. ID No. 3889, Seq. ID No. 3891, Seq. ID No. 3895, Seq. ID No. 3903, Seq. ID No. 3915, Seq. ID No. 3923, Seq. ID No. 3925, Seq. ID No. 3959, Seq. ID No. 3963, Seq. ID No. 3973, Seq. ID No. 3975, Seq. ID No. 3993, Seq. ID No. 3995, Seq. ID No. 3997, Seq. ID No. 4005, Seq. ID No. 4007, Seq. ID No. 4009, Seq. ID No. 4025, Seq. ID No. 4027, Seq. ID No. 4039, Seq. ID No. 4041, Seq. ID No. 4043, Seq. ID No. 4045, Seq. ID No. 4047, Seq. ID No. 4049, Seq. ID No. 4061, Seq. ID No. 4071, Seq. ID No. 4073, Seq. ID No. 4079, Seq. ID No. 4081, Seq. ID No. 4083, Seq. ID No. 4101, Seq. ID No. 4103, Seq. ID No. 4111, Seq. ID No. 4133, Seq. ID No. 4135, Seq. ID No. 4137, Seq. ID No. 4139, Seq. ID No. 4141, Seq. ID No. 4143, Seq. ID No. 4145, Seq. ID No. 4151, Seq. ID No. 4153, Seq. ID No. 4181, Seq. ID No. 4221, Seq. ID No. 4223, Seq. ID No. 4225, Seq. ID No. 4227, Seq. ID No. 4231, Seq. ID No. 4233, Seq. ID No. 4241, Seq. ID No. 4247, Seq. ID No. 4253, Seq. ID No. 4257, Seq. ID No. 4259, Seq. ID No. 4261, Seq. ID No. 4263, Seq. ID No. 4265, Seq. ID No. 4269, Seq. ID No. 4275, Seq. ID No. 4285, Seq. ID No. 4287, Seq. ID No. 4297, Seq. ID No. 4307, Seq. ID No. 4311, Seq. ID No. 4313, Seq. ID No. 4343, Seq. ID No. 4389, Seq. ID No. 4391, Seq. ID No. 4399, Seq. ID No. 4403, Seq. ID No. 4437, Seq. ID No. 4439, Seq. ID No. 4441, Seq. ID No. 4469, Seq. ID No. 4473, Seq. ID No. 4481, Seq. ID No. 4483, Seq. ID No. 4485, Seq. ID No. 4493, Seq. ID No. 4495, Seq. ID No. 4497, Seq. ID No. 4513, Seq. ID No. 4515, Seq. ID No. 4527, Seq. ID No. 4529, Seq. ID No. 4533, Seq. ID No. 4587, Seq. ID No. 4589, Seq. ID No. 4639, Seq. ID No. 4641, Seq. ID No. 4643, Seq. ID No. 4659, Seq. ID No. 4681, Seq. ID No. 4687, Seq. ID No. 4695, Seq. ID No. 4705, Seq. ID No. 4707, Seq. ID No. 4709, Seq. ID No. 4711, Seq. ID No. 4715, Seq. ID No. 4717, Seq. ID No. 4737, Seq. ID No. 4759, Seq. ID No. 4813, Seq. ID No. 4827, Seq. ID No. 4853, Seq. ID No. 4863, Seq. ID No. 4869, Seq. ID No. 4871, Seq. ID No. 4873, Seq. ID No. 4875, Seq. ID No. 4919, Seq. ID No. 4921, Seq. ID No. 4923, Seq. ID No. 4929, Seq. ID No. 4931, Seq. ID No. 4949, Seq. ID No. 4951, Seq. ID No. 4975, Seq. ID No. 4987, Seq. ID No. 4999, Seq. ID No. 5013, Seq. ID No. 5031, Seq. ID No. 5061, Seq. ID No. 5063, Seq. ID No. 5069, Seq. ID No. 5085, Seq. ID No. 5103, Seq. ID No. 5115, Seq. ID No. 5123, Seq. ID No. 5125, Seq. ID No. 5129, Seq. ID No. 5131, Seq. ID No. 5133, Seq. ID No. 5135, Seq. ID No. 5137, Seq. ID No. 5139, Seq. ID No. 5141, Seq. ID No. 5159, Seq. ID No. 5165, Seq. ID No. 5175, Seq. ID No. 5197, Seq. ID No. 5199, Seq. ID No. 5205, Seq. ID No. 5207, Seq. ID No. 5213, Seq. ID No. 5219, Seq. ID No. 5223, Seq. ID No. 5267, Seq. ID No. 5273, Seq. ID No. 5275, Seq. ID No. 5277, Seq. ID No. 5279, Seq. ID No. 5281, Seq. ID No. 5285, Seq. ID No. 5327, Seq. ID No. 5329, Seq. ID No. 5331, Seq. ID No. 5341, Seq. ID No. 5377, Seq. ID No. 5379, Seq. ID No. 5385, Seq. ID No; 5387, Seq. ID No. 5405, Seq. ID No. 5413, Seq. ID No. 5415, Seq. ID No. 5433, Seq. ID No. 5453, Seq. ID No. 5459, Seq. ID No. 5461, Seq. ID No. 5463, Seq. ID No. 5465, Seq. ID No. 5491, Seq. ID No. 5497, Seq. ID No. 5509, Seq. ID No. 5513, Seq. ID No. 5515, Seq. ID No. 5517, Seq. ID No. 5525, Seq. ID No. 5529, Seq. ID No. 5531, Seq. ID No. 5533, Seq. ID No. 5543, Seq. ID No. 5545, Seq. ID No. 5569, Seq. ID No. 5587, Seq. ID No. 5589, Seq. ID No. 5591, Seq. ID No. 5593, Seq. ID No. 5595, Seq. ID No. 5597, Seq. ID No. 5609, Seq. ID No. 5611, Seq. ID No. 5621, Seq. ID No. 5623, Seq. ID No. 5625, Seq. ID No. 5633, Seq. ID No. 5637, Seq. ID No. 5639, Seq. ID No. 5641, Seq. ID No. 5643, Seq. ID No. 5649, Seq. ID No. 5659, Seq. ID No. 5667, Seq. ID No. 5681, Seq. ID No. 5683, Seq. ID No. 5685, Seq. ID No. 5687, Seq. ID No. 5689, Seq. ID No. 5699, Seq. ID No. 5703, Seq. ID No. 5705, Seq. ID No. 5709, Seq. ID No. 5711, Seq. ID No. 5719, Seq. ID No. 5729, Seq. ID No. 5733, Seq. ID No. 5735, Seq. ID No. 5739, Seq. ID No. 5763, Seq. ID No. 5765, Seq. ID No. 5767, Seq. ID No. 5771, Seq. ID No. 5783, Seq. ID No. 5785, Seq. ID No. 5791, Seq. ID No. 5797, Seq. ID No. 5829, Seq. ID No. 5879, Seq. ID No. 5883, Seq. ID No. 5885, Seq. ID No. 5889, Seq. ID No. 5893, Seq. ID No. 5895, Seq. ID No. 5899, Seq. ID No. 5901, Seq. ID No. 5905, Seq. ID No. 5909, Seq. ID No. 5921, Seq. ID No. 5923, Seq. ID No. 5927, Seq. ID No. 5929, Seq. ID No. 5939, Seq. ID No. 6023, Seq. ID No. 6025, Seq. ID No. 6027, Seq. ID No. 6043, Seq. ID No. 6047, Seq. ID No. 6053, Seq. ID No. 6059, Seq. ID No. 6063, Seq. ID No. 6067, Seq. ID No. 6087, Seq. ID No. 6089, Seq. ID No. 6091, Seq. ID No. 6095, Seq. ID No. 6103, Seq. ID No. 6107, Seq. ID No. 6109, Seq. ID No. 6111, Seq. ID No. 6115, Seq. ID No. 6117, Seq. ID No. 6135, Seq. ID No. 6137, Seq. ID No. 6159, Seq. ID No. 6161, Seq. ID No. 6163, Seq. ID No. 6165, Seq. ID No. 6169, Seq. ID No. 6183, Seq. ID No. 6185, Seq. ID No. 6187, Seq. ID No. 6189, Seq. ID No. 6191, Seq. ID No. 6197, Seq. ID No. 6203, Seq. ID No. 6205, Seq. ID No. 6209, Seq. ID No. 6217, Seq. ID No. 6221, Seq. ID No. 6223, Seq. ID No. 6225, Seq. ID No. 6227, Seq. ID No. 6229, Seq. ID No. 6235, Seq. ID No. 6237, Seq. ID No. 6241, Seq. ID No. 6243, Seq. ID No. 6245, Seq. ID No. 6249, Seq. ID No. 6253, Seq. ID No. 6259, Seq. ID No. 6263, Seq. ID No. 6265, Seq. ID No. 6267, Seq. ID No. 6273, Seq. ID No. 6275, Seq. ID No. 6283, Seq. ID No. 6285, Seq. ID No. 6289, Seq. ID No. 6301, Seq. ID No. 6303, Seq. ID No. 6325, Seq. ID No. 6327, Seq. ID No. 6363, Seq. ID No. 6365, Seq. ID No. 6377, Seq. ID No. 6381, Seq. ID No. 6383, Seq. ID No. 6415, Seq. ID No. 6425, Seq. ID No. 6427, Seq. ID No. 6429, Seq. ID No. 6431, Seq. ID No. 6473, Seq. ID No. 6479, Seq. ID No. 6497, Seq. ID No. 6517, Seq. ID No. 6541, Seq. ID No. 6543, Seq. ID No. 6555, Seq. ID No. 6557, Seq. ID No. 6571, Seq. ID No. 6573, Seq. ID No. 6581, Seq. ID No. 6593, Seq. ID No. 6595, Seq. ID No. 6597, Seq. ID No. 6599, Seq. ID No. 6601, Seq. ID No. 6603, Seq. ID No. 6631, Seq. ID No. 6637, Seq. ID No. 6639, Seq. ID No. 6643, Seq. ID No. 6645, and Seq. ID No. 6649.

[0017] In still yet another preferred embodiment, the invention comprises an isolated polynucleotide of the Alloiococcus otitidis genomic sequence encoding a polypeptide, which is predicted by HMM SignaIP algorithm analysis as being a non-secretory protein, and the polypeptide is selected from Seq. ID No. 1, Seq. ID No. 5, Seq. ID No. 11, Seq.

[0018] ID No. 13, Seq. ID No. 15, Seq. ID No. 17, Seq. ID No. 23, Seq. ID No. 25, Seq. ID No. 27, Seq. ID No. 29, Seq. ID No. 35, Seq. ID No. 37, Seq. ID No. 39, Seq. ID No. 41, Seq. ID No. 43, Seq. ID No. 51, Seq. ID No. 55, Seq. ID No. 57, Seq. ID No. 59, Seq. ID No. 61, Seq. ID No. 63, Seq. ID No. 69, Seq. ID No. 71, Seq. ID No. 73, Seq. ID No. 75, Seq. ID No. 77, Seq. ID No. 79, Seq. ID No. 81, Seq. ID No. 83, Seq. ID No. 89, Seq. ID No. 91, Seq. ID No. 93, Seq. ID No. 95, Seq. ID No. 97, Seq. ID No. 99, Seq. ID No. 101, Seq. ID No. 103, Seq. ID No. 107, Seq. ID No. 109, Seq. ID No. 113, Seq. ID No. 115, Seq. ID No. 117, Seq. ID No. 119, Seq. ID No. 121, Seq. ID No. 125, Seq. ID No. 127, Seq. ID No. 129, Seq. ID No. 135, Seq. ID No. 137, Seq. ID No. 139, Seq. ID No. 143, Seq. ID No. 145, Seq. ID No. 147, Seq. ID No. 149, Seq. ID No. 151, Seq. ID No. 153, Seq. ID No. 155, Seq. ID No. 157, Seq. ID No. 165, Seq. ID No. 167, Seq. ID No. 169, Seq. ID No. 173, Seq. ID No. 175, Seq. ID No. 177, Seq. ID No. 179, Seq. ID No. 181, Seq. ID No. 183, Seq. ID No. 185, Seq. ID No. 187, Seq. ID No. 189, Seq. ID No. 193, Seq. ID No. 195, Seq. ID No. 197, Seq. ID No. 199, Seq. ID No. 201, Seq. ID No. 203, Seq. ID No. 205, Seq. ID No. 207, Seq. ID No. 219, Seq. ID No. 221, Seq. ID No. 223, Seq. ID No. 227, Seq. ID No. 229, Seq. ID No. 231, Seq. ID No. 233, Seq. ID No. 239, Seq. ID No. 241, Seq. ID No. 243, Seq. ID No. 245, Seq. ID No. 247, Seq. ID No. 253, Seq. ID No. 261, Seq. ID No. 263, Seq. ID No. 265, Seq. ID No. 267, Seq. ID No. 269, Seq. ID No. 275, Seq. ID No. 279, Seq. ID No. 281, Seq. ID No. 283, Seq. ID No. 291, Seq. ID No. 293, Seq. ID No. 295, Seq. ID No. 297, Seq. ID No. 299, Seq. ID No. 301, Seq. ID No. 303, Seq. ID No. 305, Seq. ID No. 307, Seq. ID No. 309, Seq. ID No. 311, Seq. ID No. 313, Seq. ID No. 315, Seq. ID No. 317, Seq. ID No. 319, Seq. ID No. 321, Seq. ID No. 323, Seq. ID No. 325, Seq. ID No. 331, Seq. ID No. 333, Seq. ID No. 335, Seq. ID No. 337, Seq. ID No. 339, Seq. ID No. 341, Seq. ID No. 343, Seq. ID No. 345, Seq. ID No. 347, Seq. ID No. 349, Seq. ID No. 351, Seq. ID No. 353, Seq. ID No. 355, Seq. ID No. 361, Seq. ID No. 363, Seq. ID No. 365, Seq. ID No. 367, Seq. ID No. 369, Seq. ID No. 371, Seq. ID No. 377, Seq. ID No. 379, Seq. ID No. 381, Seq. ID No. 383, Seq. ID No. 385, Seq. ID No. 387, Seq. ID No. 389, Seq. ID No. 391, Seq. ID No. 395, Seq. ID No. 397, Seq. ID No. 399, Seq. ID No. 405, Seq. ID No. 407, Seq. ID No. 409, Seq. ID No. 411, Seq. ID No. 413, Seq. ID No. 415, Seq. ID No. 417, Seq. ID No. 419, Seq. ID No. 421, Seq. ID No. 423, Seq. ID No. 425, Seq. ID No. 427, Seq. ID No. 429, Seq. ID No. 431, Seq. ID No. 433, Seq. ID No. 435, Seq. ID No. 437, Seq. ID No. 439, Seq. ID No. 441, Seq. ID No. 443, Seq. ID No. 445, Seq. ID No. 447, Seq. ID No. 449, Seq. ID No. 451, Seq. ID No. 453, Seq. ID No. 459, Seq. ID No. 461, Seq. ID No. 463, Seq. ID No. 465, Seq. ID No. 467, Seq. ID No. 469, Seq. ID No. 471, Seq. ID No. 473, Seq. ID No. 475, Seq. ID No. 479, Seq. ID No. 481, Seq. ID No. 483, Seq. ID No. 485, Seq. ID No. 501, Seq. ID No. 507, Seq. ID No. 517, Seq. ID No. 519, Seq. ID No. 521, Seq. ID No. 523, Seq. ID No. 529, Seq. ID No. 531, Seq. ID No. 533, Seq. ID No. 535, Seq. ID No. 637, Seq. ID No. 539, Seq. ID No. 541, Seq. ID No. 543, Seq. ID No. 551, Seq. ID No. 553, Seq. ID No. 555, Seq. ID No. 559, Seq. ID No. 561, Seq. ID No. 563, Seq. ID No. 565, Seq. ID No. 571, Seq. ID No. 573, Seq. ID No. 581, Seq. ID No. 583, Seq. ID No. 585, Seq. ID No. 587, Seq. ID No. 589, Seq. ID No. 595, Seq. ID No. 597, Seq. ID No. 601, Seq. ID No. 603, Seq. ID No. 605, Seq. ID No. 607, Seq. ID No. 609, Seq. ID No. 611, Seq. ID No. 613, Seq. ID No. 615, Seq. ID No. 619, Seq. ID No. 621, Seq. ID No. 623, Seq. ID No. 625, Seq. ID No. 627, Seq. ID No. 629, Seq. ID No. 631, Seq. ID No. 633, Seq. ID No. 635, Seq. ID No. 649, Seq. ID No. 651, Seq. ID No. 663, Seq. ID No. 665, Seq. ID No. 671, Seq. ID No. 673, Seq. ID No. 681, Seq. ID No. 683, Seq. ID No. 685, Seq. ID No. 687, Seq. ID No. 689, Seq. ID No. 691, Seq. ID No. 693, Seq. ID No. 695, Seq. ID No. 697, Seq. ID No. 699, Seq. ID No. 701, Seq. ID No. 703, Seq. ID No. 705, Seq. ID No. 707, Seq. ID No. 709, Seq. ID No. 711, Seq. ID No. 713, Seq. ID No. 727, Seq. ID No. 729, Seq. ID No. 731, Seq. ID No. 733, Seq. ID No. 735, Seq. ID No. 737, Seq. ID No. 739, Seq. ID No. 741, Seq. ID No. 743, Seq. ID No. 753, Seq. ID No. 767, Seq. ID No. 771, Seq. ID No. 773, Seq. ID No. 775, Seq. ID No. 783, Seq. ID No. 785, Seq. ID No. 787, Seq. ID No. 789, Seq. ID No. 791, Seq. ID No. 793, Seq. ID No. 795, Seq. ID No. 797, Seq. ID No. 799, Seq. ID No. 801, Seq. ID No. 803, Seq. ID No. 805, Seq. ID No. 811, Seq. ID No. 813, Seq. ID No. 815, Seq. ID No. 817, Seq. ID No. 821, Seq. ID No. 823, Seq. ID No. 827, Seq. ID No. 829, Seq. ID No. 831, Seq. ID No. 833, Seq. ID No. 835, Seq. ID No. 837, Seq. ID No. 839, Seq. ID No. 841, Seq. ID No. 843, Seq. ID No. 845, Seq. ID No. 847, Seq. ID No. 849, Seq. ID No. 851, Seq. ID No. 853, Seq. ID No. 855, Seq. ID No. 857, Seq. ID No. 859, Seq. ID No. 861, Seq. ID No. 865, Seq. ID No. 867, Seq. ID No. 869, Seq. ID No. 871, Seq. ID No. 873, Seq. ID No. 875, Seq. ID No. 877, Seq. ID No. 879, Seq. ID No. 881, Seq. ID No. 883, Seq. ID No. 885, Seq. ID No. 887, Seq. ID No. 889, Seq. ID No. 891, Seq. ID No. 895, Seq. ID No. 897, Seq. ID No. 899, Seq. ID No. 903, Seq. ID No. 905, Seq. ID No. 907, Seq. ID No. 909, Seq. ID No. 911, Seq. ID No. 913, Seq. ID No. 915, Seq. ID No. 917, Seq. ID No. 919, Seq. ID No. 921, Seq. ID No. 923, Seq. ID No. 925, Seq. ID No. 927, Seq. ID No. 929, Seq. ID No. 931, Seq. ID No. 933, Seq. ID No. 939, Seq. ID No. 945, Seq. ID No. 947, Seq. ID No. 949, Seq. ID No. 951, Seq. ID No. 953, Seq. ID No. 959, Seq. ID No. 961, Seq. ID No. 963, Seq. ID No. 965, Seq. ID No. 969, Seq. ID No. 971, Seq. ID No. 973, Seq. ID No. 975, Seq. ID No. 977, Seq. ID No. 987, Seq. ID No. 989, Seq. ID No. 991, Seq. ID No. 993, Seq. ID No. 995, Seq. ID No. 997, Seq. ID No. 999, Seq. ID No. 1017, Seq. ID No. 1021, Seq. ID No. 1023, Seq. ID No. 1025, Seq. ID No. 1027, Seq. ID No. 1041, Seq. ID No. 1043, Seq. ID No. 1047, Seq. ID No. 1049, Seq. ID No. 1051, Seq. ID No. 1053, Seq. ID No. 1057, Seq. ID No. 1059, Seq. ID No. 1061, Seq. ID No. 1063, Seq. ID No. 1065, Seq. ID No. 1067, Seq. ID No. 1069, Seq. ID No. 1071, Seq. ID No. 1073, Seq. ID No. 1079, Seq. ID No. 1081, Seq. ID No. 1083, Seq. ID No. 1085, Seq. ID No. 1087, Seq. ID No. 1089, Seq. ID No. 1091, Seq. ID No. 1093, Seq. ID No. 1095, Seq. ID No. 1097, Seq. ID No. 1099, Seq. ID No. 1101, Seq. ID No. 1103, Seq. ID No. 1109, Seq. ID No. 1111, Seq. ID No. 1113, Seq. ID No. 1115, Seq. ID No. 1117, Seq. ID No. 1119, Seq. ID No. 1121, Seq. ID No. 1123, Seq. ID No. 1125, Seq. ID No. 1127, Seq. ID No. 1129, Seq. ID No. 1133, Seq. ID No. 1141, Seq. ID No. 1143, Seq. ID No. 1145, Seq. ID No. 1147, Seq. ID No. 1149, Seq. ID No. 1153, Seq. ID No. 1155, Seq. ID No. 1157, Seq. ID No. 1159, Seq. ID No. 1161, Seq. ID No. 1163, Seq. ID No. 1171, Seq. ID No. 1175, Seq. ID No. 1177, Seq. ID No. 1179, Seq. ID No. 1181, Seq. ID No. 1185, Seq. ID No. 1187, Seq. ID No. 1189, Seq. ID No. 1191, Seq. ID No. 1193, Seq. ID No. 1199, Seq. ID No. 1201, Seq. ID No. 1205, Seq. ID No. 1207, Seq. ID No. 1209, Seq. ID No. 1211, Seq. ID No. 1215, Seq. ID No. 1217, Seq. ID No. 1219, Seq. ID No. 1221, Seq. ID No. 1225, Seq. ID No. 1231, Seq. ID No. 1233, Seq. ID No. 1235, Seq. ID No. 1239, Seq. ID No. 1241, Seq. ID No. 1247, Seq. ID No. 1249, Seq. ID No. 1251, Seq. ID No. 1253, Seq. ID No. 1255, Seq. ID No. 1257, Seq. ID No. 1261, Seq. ID No. 1263, Seq. ID No. 1273, Seq. ID No. 1275, Seq. ID No. 1277, Seq. ID No. 1279, Seq. ID No. 1281, Seq. ID No. 1285, Seq. ID No. 1293, Seq. ID No. 1299, Seq. ID No. 1301, Seq. ID No. 1307, Seq. ID No. 1309, Seq. ID No. 1311, Seq. ID No. 1313, Seq. ID No. 1321, Seq. ID No. 1323, Seq. ID No. 1333, Seq. ID No. 1335, Seq. ID No. 1339, Seq. ID No. 1345, Seq. ID No. 1355, Seq. ID No. 1357, Seq. ID No. 1359, Seq. ID No. 1361, Seq. ID No. 1363, Seq. ID No. 1373, Seq. ID No. 1375, Seq. ID No. 1377, Seq. ID No. 1379, Seq. ID No. 1383, Seq. ID No. 1385, Seq. ID No. 1387, Seq. ID No. 1389, Seq. ID No. 1391, Seq. ID No. 1393, Seq. ID No. 1395, Seq. ID No. 1397, Seq. ID No. 1399, Seq. ID No. 1403, Seq. ID No. 1405, Seq. ID No. 1407, Seq. ID No. 1409, Seq. ID No. 1411, Seq. ID No. 1413, Seq. ID No. 1415, Seq. ID No. 1417, Seq. ID No. 1419, Seq. ID No. 1421, Seq. ID No. 1423, Seq. ID No. 1425, Seq. ID No. 1427, Seq. ID No. 1431, Seq. ID No. 1433, Seq. ID No. 1437, Seq. ID No. 1439, Seq. ID No. 1441, Seq. ID No. 1443, Seq. ID No. 1449, Seq. ID No. 1451, Seq. ID No. 1453, Seq. ID No. 1455, Seq. ID No. 1457, Seq. ID No. 1459, Seq. ID No. 1461, Seq. ID No. 1463, Seq. ID No. 1465, Seq. ID No. 1467, Seq. ID No. 1469, Seq. ID No. 1471, Seq. ID No. 1473, Seq. ID No. 1475, Seq. ID No. 1477, Seq. ID No. 1479, Seq. ID No. 1483, Seq. ID No. 1485, Seq. ID No. 1487, Seq. ID No. 1489, Seq. ID No. 1491, Seq. ID No. 1493, Seq. ID No. 1495, Seq. ID No. 1497, Seq. ID No. 1499, Seq. ID No. 1501, Seq. ID No. 1503, Seq. ID No. 1505, Seq. ID No. 1507, Seq. ID No. 1509, Seq. ID No. 1511, Seq. ID No. 1519, Seq. ID No. 1521, Seq. ID No. 1523, Seq. ID No. 1525, Seq. ID No. 1527, Seq. ID No. 1531, Seq. ID No. 1537, Seq. ID No. 1539, Seq. ID No. 1541, Seq. ID No. 1543, Seq. ID No. 1549, Seq. ID No. 1555, Seq. ID No. 1557, Seq. ID No. 1565, Seq. ID No. 1567, Seq. ID No. 1569, Seq. ID No. 1573, Seq. ID No. 1575, Seq. ID No. 1577, Seq. ID No. 1581, Seq. ID No. 1587, Seq. ID No. 1589, Seq. ID No. 1591, Seq. ID No. 1593, Seq. ID No. 1595, Seq. ID No. 1597, Seq. ID No. 1601, Seq. ID No. 1603, Seq. ID No. 1605, Seq. ID No. 1607, Seq. ID No. 1609, Seq. ID No. 1611, Seq. ID No. 1613, Seq. ID No. 1615, Seq. ID No. 1617, Seq. ID No. 1619, Seq. ID No. 1623, Seq. ID No. 1625, Seq. ID No. 1627, Seq. ID No. 1629, Seq. ID No. 1631, Seq. ID No. 1635, Seq. ID No. 1637, Seq. ID No. 1641, Seq. ID No. 1651, Seq. ID No. 1655, Seq. ID No. 1657, Seq. ID No. 1659, Seq. ID No. 1667, Seq. ID No. 1669, Seq. ID No. 1675, Seq. ID No. 1683, Seq. ID No. 1685, Seq. ID No. 1687, Seq. ID No. 1689, Seq. ID No. 1691, Seq. ID No. 1695, Seq. ID No. 1697, Seq. ID No. 1699, Seq. ID No. 1701, Seq. ID No. 1703, Seq. ID No. 1705, Seq. ID No. 1709, Seq. ID No. 1713, Seq. ID No. 1715, Seq. ID No. 1717, Seq. ID No. 1719, Seq. ID No. 1721, Seq. ID No. 1723, Seq. ID No. 1725, Seq. ID No. 1727, Seq. ID No. 1729, Seq. ID No. 1735, Seq. ID No. 1739, Seq. ID No. 1741, Seq. ID No. 1743, Seq. ID No. 1745, Seq. ID No. 1747, Seq. ID No. 1749, Seq. ID No. 1751, Seq. ID No. 1759, Seq. ID No. 1761, Seq. ID No. 1763, Seq. ID No. 1769, Seq. ID No. 1773, Seq. ID No. 1775, Seq. ID No. 1777, Seq. ID No. 1779, Seq. ID No. 1783, Seq. ID No. 1785, Seq. ID No. 1789, Seq. ID No. 1793, Seq. ID No. 1795, Seq. ID No. 1799, Seq. ID No. 1801, Seq. ID No. 1803, Seq. ID No. 1807, Seq. ID No. 1809, Seq. ID No. 1811, Seq. ID No. 1813, Seq. ID No. 1815, Seq. ID No. 1817, Seq. ID No. 1825, Seq. ID No. 1827, Seq. ID No. 1829, Seq. ID No. 1831, Seq. ID No. 1833, Seq. ID No. 1835, Seq. ID No. 1837, Seq. ID No. 1841, Seq. ID No. 1843, Seq. ID No. 1845, Seq. ID No. 1847, Seq. ID No. 1849, Seq. ID No. 1851, Seq. ID No. 1853, Seq. ID No. 1855, Seq. ID No. 1859, Seq. ID No. 1861, Seq. ID No. 1863, Seq. ID No. 1865, Seq. ID No. 1867, Seq. ID No. 1871, Seq. ID No. 1873, Seq. ID No. 1877, Seq. ID No. 1879, Seq. ID No. 1881, Seq. ID No. 1883, Seq. ID No. 1885, Seq. ID No. 1887, Seq. ID No. 1889, Seq. ID No. 1897, Seq. ID No. 1899, Seq. ID No. 1901, Seq. ID No. 1903, Seq. ID No. 1905, Seq. ID No. 1907, Seq. ID No. 1909, Seq. ID No. 1911, Seq. ID No. 1913, Seq. ID No. 1921, Seq. ID No. 1925, Seq. ID No. 1931, Seq. ID No. 1933, Seq. ID No. 1935, Seq. ID No. 1937, Seq. ID No. 1939, Seq. ID No. 1941, Seq. ID No. 1943, Seq. ID No. 1945, Seq. ID No. 1947, Seq. ID No. 1949, Seq. ID No. 1951, Seq. ID No. 1953, Seq. ID No. 1955, Seq. ID No. 1957, Seq. ID No. 1959, Seq. ID No. 1961, Seq. ID No. 1963, Seq. ID No. 1965, Seq. ID No. 1967, Seq. ID No. 1971, Seq. ID No. 1973, Seq. ID No. 1975, Seq. ID No. 1977, Seq. ID No. 1979, Seq. ID No. 1983, Seq. ID No. 1985, Seq. ID No. 1987, Seq. ID No. 1989, Seq. ID No. 1995, Seq. ID No. 1997, Seq. ID No. 1999, Seq. ID No. 2001, Seq. ID No. 2003, Seq. ID No. 2007, Seq. ID No. 2009, Seq. ID No. 2011, Seq. ID No. 2015, Seq. ID No. 2021, Seq. ID No. 2023, Seq. ID No. 2029, Seq. ID No. 2031, Seq. ID No. 2037, Seq. ID No. 2039, Seq. ID No. 2043, Seq. ID No. 2045, Seq. ID No. 2047, Seq. ID No. 2051, Seq. ID No. 2057, Seq. ID No. 2059, Seq. ID No. 2061, Seq. ID No. 2063, Seq. ID No. 2065, Seq. ID No. 2067, Seq. ID No. 2069, Seq. ID No. 2071, Seq. ID No. 2073, Seq. ID No. 2075, Seq. ID No. 2077, Seq. ID No. 2079, Seq. ID No. 2081, Seq. ID No. 2083, Seq. ID No. 2085, Seq. ID No. 2093, Seq. ID No. 2095, Seq. ID No. 2097, Seq. ID No. 2099, Seq. ID No. 2101, Seq. ID No. 2103, Seq. ID No. 2111, Seq. ID No. 2117, Seq. ID No. 2119, Seq. ID No. 2129, Seq. ID No. 2131, Seq. ID No. 2133, Seq. ID No. 2135, Seq. ID No. 2137, Seq. ID No. 2139, Seq. ID No. 2141, Seq. ID No. 2143, Seq. ID No. 2145, Seq. ID No. 2147, Seq. ID No. 2153, Seq. ID No. 2161, Seq. ID No. 2163, Seq. ID No. 2165, Seq. ID No. 2167, Seq. ID No. 2169, Seq. ID No. 2175, Seq. ID No. 2179, Seq. ID No. 2181, Seq. ID No. 2183, Seq. ID No. 2185, Seq. ID No. 2189, Seq. ID No. 2193, Seq. ID No. 2195, Seq. ID No. 2197, Seq. ID No. 2199, Seq. ID No. 2201, Seq. ID No. 2203, Seq. ID No. 2207, Seq. ID No. 2209, Seq. ID No. 2211, Seq. ID No. 2213, Seq. ID No. 2215, Seq. ID No. 2217, Seq. ID No. 2219, Seq. ID No. 2221, Seq. ID No. 2223, Seq. ID No. 2225, Seq. ID No. 2227, Seq. ID No. 2229, Seq. ID No. 2231, Seq. ID No. 2233, Seq. ID No. 2235, Seq. ID No. 2241, Seq. ID No. 2243, Seq. ID No. 2247, Seq. ID No. 2253, Seq. ID No. 2257, Seq. ID No. 2261, Seq. ID No. 2263, Seq. ID No. 2265, Seq. ID No. 2267, Seq. ID No. 2269, Seq. ID No. 2273, Seq. ID No. 2275, Seq. ID No. 2277, Seq. ID No. 2279, Seq. ID No. 2281, Seq. ID No. 2285, Seq. ID No. 2287, Seq. ID No. 2297, Seq. ID No. 2299, Seq. ID No. 2301, Seq. ID No. 2309, Seq. ID No. 2311, Seq. ID No. 2313, Seq. ID No. 2315, Seq. ID No. 2331, Seq. ID No. 2335, Seq. ID No. 2337, Seq. ID No. 2339, Seq. ID No. 2341, Seq. ID No. 2345, Seq. ID No. 2359, Seq. ID No. 2361, Seq. ID No. 2363, Seq. ID No. 2369, Seq. ID No. 2373, Seq. ID No. 2377, Seq. ID No. 2379, Seq. ID No. 2381, Seq. ID No. 2383, Seq. ID No. 2385, Seq. ID No. 2395, Seq. ID No. 2397, Seq. ID No. 2399, Seq. ID No. 2401, Seq. ID No. 2403, Seq. ID No. 2405, Seq. ID No. 2409, Seq. ID No. 2411, Seq. ID No. 2413, Seq. ID No. 2415, Seq. ID No. 2417, Seq. ID No. 2423, Seq. ID No. 2431, Seq. ID No. 2435, Seq. ID No. 2437, Seq. ID No. 2439, Seq. ID No. 2441, Seq. ID No. 2443, Seq. ID No. 2445, Seq. ID No. 2447, Seq. ID No. 2451, Seq. ID No. 2453, Seq. ID No. 2455, Seq. ID No. 2457, Seq. ID No. 2461, Seq. ID No. 2463, Seq. ID No. 2465, Seq. ID No. 2467, Seq. ID No. 2469, Seq. ID No. 2471, Seq. ID No. 2473, Seq. ID No. 2475, Seq. ID No. 2477, Seq. ID No. 2479, Seq. ID No. 2481, Seq. ID No. 2483, Seq. ID No. 2485, Seq. ID No. 2495, Seq. ID No. 2505, Seq. ID No. 2509, Seq. ID No. 2511, Seq. ID No. 2513, Seq. ID No. 2519, Seq. ID No. 2521, Seq. ID No. 2529, Seq. ID No. 2539, Seq. ID No. 2547, Seq. ID No. 2549, Seq. ID No. 2551, Seq. ID No. 2553, Seq. ID No. 2559, Seq. ID No. 2561, Seq. ID No. 2563, Seq. ID No. 2567, Seq. ID No. 2573, Seq. ID No. 2575, Seq. ID No. 2577, Seq. ID No. 2579, Seq. ID No. 2581, Seq. ID No. 2585, Seq. ID No. 2587, Seq. ID No. 2589, Seq. ID No. 2593, Seq. ID No. 2595, Seq. ID No. 2603, Seq. ID No. 2605, Seq. ID No. 2609, Seq. ID No. 2613, Seq. ID No. 2615, Seq. ID No. 2617, Seq. ID No. 2619, Seq. ID No. 2623, Seq. ID No. 2625, Seq. ID No. 2631, Seq. ID No. 2633, Seq. ID No. 2635, Seq. ID No. 2637, Seq. ID No. 2639, Seq. ID No. 2641, Seq. ID No. 2643, Seq. ID No. 2645, Seq. ID No. 2647, Seq. ID No. 2649, Seq. ID No. 2653, Seq. ID No. 2655, Seq. ID No. 2657, Seq. ID No. 2659, Seq. ID No. 2661, Seq. ID No. 2663, Seq. ID No. 2665, Seq. ID No. 2667, Seq. ID No. 2669, Seq. ID No. 2671, Seq. ID No. 2673, Seq. ID No. 2675, Seq. ID No. 2677, Seq. ID No. 2685, Seq. ID No. 2687, Seq. ID No. 2689, Seq. ID No. 2709, Seq. ID No. 2711, Seq. ID No. 2713, Seq. ID No. 2715, Seq. ID No. 2719, Seq. ID No. 2721, Seq. ID No. 2723, Seq. ID No. 2725, Seq. ID No. 2727, Seq. ID No. 2735, Seq. ID No. 2737, Seq. ID No. 2739, Seq. ID No. 2741, Seq. ID No. 2743, Seq. ID No. 2745, Seq. ID No. 2747, Seq. ID No. 2749, Seq. ID No. 2751, Seq. ID No. 2753, Seq. ID No. 2755,;Seq. ID No. 2757, Seq. ID No. 2759, Seq. ID No. 2761, Seq. ID No. 2763, Seq. ID No. 2765, Seq. ID No. 2767, Seq. ID No. 2769, Seq. ID No. 2771, Seq. ID No. 2773, Seq. ID No. 2775, Seq. ID No. 2777, Seq. ID No. 2779, Seq. ID No. 2781, Seq. ID No. 2787, Seq. ID No. 2789, Seq. ID No. 2791, Seq. ID No. 2793, Seq. ID No. 2795, Seq. ID No. 2797, Seq. ID No. 2799, Seq. ID No. 2803, Seq. ID No. 2805, Seq. ID No. 2807, Seq. ID No. 2811, Seq. ID No. 2817, Seq. ID No. 2825, Seq. ID No. 2827, Seq. ID No. 2829, Seq. ID No. 2843, Seq. ID No. 2847, Seq. ID No. 2849, Seq. ID No. 2851, Seq. ID No. 2857, Seq. ID No. 2863, Seq. ID No. 2865, Seq. ID No. 2867, Seq. ID No. 2869, Seq. ID No. 2871, Seq. ID No. 2875, Seq. ID No. 2877, Seq. ID No. 2879, Seq. ID No. 2883, Seq. ID No. 2885, Seq. ID No. 2887, Seq. ID No. 2889, Seq. ID No. 2891, Seq. ID No. 2895, Seq. ID No. 2897, Seq. ID No. 2899, Seq. ID No. 2901, Seq. ID No. 2903, Seq. ID No. 2907, Seq. ID No. 2909, Seq. ID No. 2911, Seq. ID No. 2913, Seq. ID No. 2915, Seq. ID No. 2917, Seq. ID No. 2919, Seq. ID No. 2921, Seq. ID No. 2923, Seq. ID No. 2925, Seq. ID No. 2927, Seq. ID No. 2929, Seq. ID No. 2931, Seq. ID No. 2933, Seq. ID No. 2943, Seq. ID No. 2945, Seq. ID No. 2953, Seq. ID No. 2955, Seq. ID No. 2957, Seq. ID No. 2959, Seq. ID No. 2961, Seq. ID No. 2963, Seq. ID No. 2965, Seq. ID No. 2967, Seq. ID No. 2971, Seq. ID No. 2979, Seq. ID No. 2985, Seq. ID No. 2989, Seq. ID No. 2993, Seq. ID No. 2999, Seq. ID No. 3001, Seq. ID No. 3003, Seq. ID No. 3015, Seq. ID No. 3017, Seq. ID No. 3019, Seq. ID No. 3021, Seq. ID No. 3033, Seq. ID No. 3035, Seq. ID No. 3037, Seq. ID No. 3039, Seq. ID No. 3041, Seq. ID No. 3045, Seq. ID No. 3047, Seq. ID No. 3049, Seq. ID No. 3051, Seq. ID No. 3053, Seq. ID No. 3057, Seq. ID No. 3059, Seq. ID No. 3061, Seq. ID No. 3065, Seq. ID No. 3067, Seq. ID No. 3069, Seq. ID No. 3079, Seq. ID No. 3081, Seq. ID No. 3083, Seq. ID No. 3085, Seq. ID No. 3087, Seq. ID No. 3089, Seq. ID No. 3091, Seq. ID No. 3093, Seq. ID No. 3095, Seq. ID No. 3097, Seq. ID No. 3099, Seq. ID No. 3101, Seq. ID No. 3103, Seq. ID No. 3105, Seq. ID No. 3107, Seq. ID No. 3109, Seq. ID No. 3111, Seq. ID No. 3113, Seq. ID No. 3115, Seq. ID No. 3117, Seq. ID No. 3125, Seq. ID No. 3127, Seq. ID No. 3129, Seq. ID No. 3131, Seq. ID No. 3133, Seq. ID No. 3135, Seq. ID No. 3137, Seq. ID No. 3139, Seq. ID No. 3141, Seq. ID No. 3143, Seq. ID No. 3147, Seq. ID No. 3149, Seq. ID No. 3151, Seq. ID No. 3153, Seq. ID No. 3159, Seq. ID No. 3161, Seq. ID No. 3167, Seq. ID No. 3169, Seq. ID No. 3171, Seq. ID No. 3175, Seq. ID No. 3177, Seq. ID No. 3179, Seq. ID No. 3181, Seq. ID No. 3185, Seq. ID No. 3187, Seq. ID No. 3189, Seq. ID No. 3191, Seq. ID No. 3195, Seq. ID No. 3197, Seq. ID No. 3199, Seq. ID No. 3203, Seq. ID No. 3205, Seq. ID No. 3207, Seq. ID No. 3209, Seq. ID No. 3211, Seq. ID No. 3221, Seq. ID No. 3223, Seq. ID No. 3225, Seq. ID No. 3227, Seq. ID No. 3229, Seq. ID No. 3231, Seq. ID No. 3233, Seq. ID No. 3235, Seq. ID No. 3237, Seq. ID No. 3239, Seq. ID No. 3247, Seq. ID No. 3251, Seq. ID No. 3253, Seq. ID No. 3259, Seq. ID No. 3265, Seq. ID No. 3267, Seq. ID No. 3271, Seq. ID No. 3273, Seq. ID No. 3279, Seq. ID No. 3281, Seq. ID No. 3283, Seq. ID No. 3285, Seq. ID No. 3287, Seq. ID No. 3289, Seq. ID No. 3291, Seq. ID No. 3293, Seq. ID No. 3295, Seq. ID No. 3299, Seq. ID No. 3301, Seq. ID No. 3303, Seq. ID No. 3305, Seq. ID No. 3307, Seq. ID No. 3309, Seq. ID No. 3311, Seq. ID No. 3313, Seq. ID No. 3315, Seq. ID No. 3319, Seq. ID No. 3321, Seq. ID No. 3327, Seq. ID No. 3329, Seq. ID No. 3333, Seq. ID No. 3341, Seq. ID No. 3343, Seq. ID No. 3345, Seq. ID No. 3347, Seq. ID No. 3361, Seq. ID No. 3363, Seq. ID No. 3365, Seq. ID No. 3367, Seq. ID No. 3369, Seq. ID No. 3371, Seq. ID No. 3373, Seq. ID No. 3379, Seq. ID No. 3381, Seq. ID No. 3383, Seq. ID No. 3385, Seq. ID No. 3387, Seq. ID No. 3393, Seq. ID No. 3397, Seq. ID No. 3399, Seq. ID No. 3401, Seq. ID No. 3403, Seq. ID No. 3407, Seq. ID No. 3409, Seq. ID No. 3411, Seq. ID No. 3413, Seq. ID No. 3417, Seq. ID No. 3419, Seq. ID No. 3423, Seq. ID No. 3429, Seq. ID No. 3431, Seq. ID No. 3435, Seq. ID No. 3437, Seq. ID No. 3439, Seq. ID No. 3443, Seq. ID No. 3445, Seq. ID No. 3447, Seq. ID No. 3459, Seq. ID No. 3461, Seq. ID No. 3465, Seq. ID No. 3467, Seq. ID No. 3469, Seq. ID No. 3471, Seq. ID No. 3473, Seq. ID No. 3475, Seq. ID No. 3477, Seq. ID No. 3479, Seq. ID No. 3483, Seq. ID No. 3485, Seq. ID No. 3487, Seq. ID No. 3489, Seq. ID No. 3495, Seq. ID No. 3497, Seq. ID No. 3499, Seq. ID No. 3501, Seq. ID No. 3507, Seq. ID No. 3509, Seq. ID No. 3511, Seq. ID No. 3513, Seq. ID No. 3515, Seq. ID No. 3521, Seq. ID No. 3523, Seq. ID No. 3525, Seq. ID No. 3529, Seq. ID No. 3533, Seq. ID No. 3535, Seq. ID No. 3537, Seq. ID No. 3541, Seq. ID No. 3543, Seq. ID No. 3545, Seq. ID No. 3547, Seq. ID No. 3549, Seq. ID No. 3551, Seq. ID No. 3553, Seq. ID No. 3555, Seq. ID No. 3557, Seq. ID No. 3559, Seq. ID No. 3563, Seq. ID No. 3565, Seq. ID No. 3567, Seq. ID No. 3569, Seq. ID No. 3571, Seq. ID No. 3575, Seq. ID No. 3577, Seq. ID No. 3579, Seq. ID No. 3583, Seq. ID No. 3585, Seq. ID No. 3589, Seq. ID No. 3591, Seq. ID No. 3597, Seq. ID No. 3599, Seq. ID No. 3601, Seq. ID No. 3603, Seq. ID No. 3605, Seq. ID No. 3607, Seq. ID No. 3609, Seq. ID No. 3613, Seq. ID No. 3615, Seq. ID No. 3623, Seq. ID No. 3627, Seq. ID No. 3631, Seq. ID No. 3633, Seq. ID No. 3637, Seq. ID No. 3639, Seq. ID No. 3641, Seq. ID No. 3643, Seq. ID No. 3645, Seq. ID No. 3647, Seq. ID No. 3649, Seq. ID No. 3651, Seq. ID No. 3653, Seq. ID No. 3655, Seq. ID No. 3657, Seq. ID No. 3659, Seq. ID No. 3661, Seq. ID No. 3663, Seq. ID No. 3665, Seq. ID No. 3667, Seq. ID No. 3669, Seq. ID No. 3671, Seq. ID No. 3673, Seq. ID No. 3675, Seq. ID No. 3681, Seq. ID No. 3683, Seq. ID No. 3685, Seq. ID No. 3687, Seq. ID No. 3691, Seq. ID No. 3693, Seq. ID No. 3695, Seq. ID No. 3697, Seq. ID No. 3699, Seq. ID No. 3701, Seq. ID No. 3703, Seq. ID No. 3705, Seq. ID No. 3707, Seq. ID No. 3709, Seq. ID No. 3711, Seq. ID No. 3713, Seq. ID No. 3715, Seq. ID No. 3719, Seq. ID No. 3721, Seq. ID No. 3725, Seq. ID No. 3729, Seq. ID No. 3731, Seq. ID No. 3733, Seq. ID No. 3735, Seq. ID No. 3737, Seq. ID No. 3739, Seq. ID No. 3743, Seq. ID No. 3747, Seq. ID No. 3749, Seq. ID No. 3751, Seq. ID No. 3759, Seq. ID No. 3767, Seq. ID No. 3769, Seq. ID No. 3771, Seq. ID No. 3773, Seq. ID No. 3775, Seq. ID No. 3777, Seq. ID No. 3779, Seq. ID No. 3785, Seq. ID No. 3787, Seq. ID No. 3789, Seq. ID No. 3791, Seq. ID No. 3795, Seq. ID No. 3797, Seq. ID No. 3801, Seq. ID No. 3803, Seq. ID No. 3805, Seq. ID No. 3809, Seq. ID No. 3811, Seq. ID No. 3819, Seq. ID No. 3821, Seq. ID No. 3823, Seq. ID No. 3825, Seq. ID No. 3827, Seq. ID No. 3829, Seq. ID No. 3831, Seq. ID No. 3833, Seq. ID No. 3835, Seq. ID No. 3841, Seq. ID No. 3843, Seq. ID No. 3845, Seq. ID No. 3847, Seq. ID No. 3855, Seq. ID No. 3857, Seq. ID No. 3867, Seq. ID No. 3869, Seq. ID No. 3871, Seq. ID No. 3873, Seq. ID No. 3875, Seq. ID No. 3877, Seq. ID No. 3881, Seq. ID No. 3883, Seq. ID No. 3885, Seq. ID No. 3887, Seq. ID No. 3893, Seq. ID No. 3897, Seq. ID No. 3899, Seq. ID No. 3901, Seq. ID No. 3905, Seq. ID No. 3907, Seq. ID No. 3909, Seq. ID No. 3911, Seq. ID No. 3913, Seq. ID No. 3917, Seq. ID No. 3919, Seq. ID No. 3921, Seq. ID No. 3927, Seq. ID No. 3929, Seq. ID No. 3931, Seq. ID No. 3933, Seq. ID No. 3935, Seq. ID No. 3937, Seq. ID No. 3939, Seq. ID No. 3941, Seq. ID No. 3943, Seq. ID No. 3945, Seq. ID No. 3947, Seq. ID No. 3949, Seq. ID No. 3951, Seq. ID No. 3953, Seq. ID No. 3955, Seq. ID No. 3957, Seq. ID No. 3961, Seq. ID No. 3965, Seq. ID No. 3967, Seq. ID No. 3969, Seq. ID No. 3971, Seq. ID No. 3977, Seq. ID No. 3979, Seq. ID No. 3981, Seq. ID No. 3983, Seq. ID No. 3985, Seq. ID No. 3987, Seq. ID No. 3989, Seq. ID No. 3991, Seq. ID No. 3999, Seq. ID No. 4001, Seq. ID No. 4003, Seq. ID No. 4011, Seq. ID No. 4013, Seq. ID No. 4015, Seq. ID No. 4017, Seq. ID No. 4019, Seq. ID No. 4021, Seq. ID No. 4023, Seq. ID No. 4029, Seq. ID No. 4031, Seq. ID No. 4033, Seq. ID No. 4035, Seq. ID No. 4037, Seq. ID No. 4051, Seq. ID No. 4053, Seq. ID No. 4055, Seq. ID No. 4057, Seq. ID No. 4059, Seq. ID No. 4063, Seq. ID No. 4065, Seq. ID No. 4067, Seq. ID No. 4069, Seq. ID No. 4075, Seq. ID No. 4077, Seq. ID No. 4085, Seq. ID No. 4087, Seq. ID No. 4089, Seq. ID No. 4091, Seq. ID No. 4093, Seq. ID No. 4095, Seq. ID No. 4097, Seq. ID No. 4099, Seq. ID No. 4105, Seq. ID No. 4107, Seq. ID No. 4109, Seq. ID No. 4113, Seq. ID No. 4115, Seq. ID No. 4117, Seq. ID No. 4119, Seq. ID No. 4121, Seq. ID No. 4123, Seq. ID No. 4125, Seq. ID No. 4127, Seq. ID No. 4129, Seq. ID No. 4131, Seq. ID No. 4147, Seq. ID No. 4149, Seq. ID No. 4155, Seq. ID No. 4157, Seq. ID No. 4159, Seq. ID No. 4161, Seq. ID No. 4163, Seq. ID No. 4165, Seq. ID No. 4167, Seq. ID No. 4169, Seq. ID No. 4171, Seq. ID No. 4173, Seq. ID No. 4175, Seq. ID No. 4177, Seq. ID No. 4179, Seq. ID No. 4183, Seq. ID No. 4185, Seq. ID No. 4187, Seq. ID No. 4189, Seq. ID No. 4191, Seq. ID No. 4193, Seq. ID No. 4195, Seq. ID No. 4197, Seq. ID No. 4199, Seq. ID No. 4201, Seq. ID No. 4203, Seq. ID No. 4205, Seq. ID No. 4207, Seq. ID No. 4209, Seq. ID No. 4211, Seq. ID No. 4213, Seq. ID No. 4215, Seq. ID No. 4217, Seq. ID No. 4219, Seq. ID No. 4229, Seq. ID No. 4235, Seq. ID No. 4237, Seq. ID No. 4239, Seq. ID No. 4243, Seq. ID No. 4245, Seq. ID No. 4249, Seq. ID No. 4251, Seq. ID No. 4255, Seq. ID No. 4267, Seq. ID No. 4271, Seq. ID No. 4273, Seq. ID No. 4277, Seq. ID No. 4279, Seq. ID No. 4281,.Seq. ID No. 4283, Seq. ID No. 4289, Seq. ID No. 4291, Seq. ID No. 4293, Seq. ID No. 4295, Seq. ID No. 4299, Seq. ID No. 4301, Seq. ID No. 4303, Seq. ID No. 4305, Seq. ID No. 4309, Seq. ID No. 4315, Seq. ID No. 4317, Seq. ID No. 4319, Seq. ID No. 4321, Seq. ID No. 4323, Seq. ID No. 4325, Seq. ID No. 4327, Seq. ID No. 4329, Seq. ID No. 4331, Seq. ID No. 4333, Seq. ID No. 4335, Seq. ID No. 4337, Seq. ID No. 4339, Seq. ID No. 4341, Seq. ID No. 4345, Seq. ID No. 4347, Seq. ID No. 4349, Seq. ID No. 4351, Seq. ID No. 4353, Seq. ID No. 4355, Seq. ID No. 4357, Seq. ID No. 4359, Seq. ID No. 4361, Seq. ID No. 4363, Seq. ID No. 4365, Seq. ID No. 4367, Seq. ID No. 4369, Seq. ID No. 4371, Seq. ID No. 4373, Seq. ID No. 4375, Seq. ID No. 4377, Seq. ID No. 4381, Seq. ID No. 4383, Seq. ID No. 4387, Seq. ID No. 4393, Seq. ID No. 4395, Seq. ID No. 4397, Seq. ID No. 4401, Seq. ID No. 4405, Seq. ID No. 4407, Seq. ID No. 4409, Seq. ID No. 4411, Seq. ID No. 4413, Seq. ID No. 4415, Seq. ID No. 4417, Seq. ID No. 4419, Seq. ID No. 4421, Seq. ID No. 4423, Seq. ID No. 4425, Seq. ID No. 4427, Seq. ID No. 4429, Seq. ID No. 4431, Seq. ID No. 4433, Seq. ID No. 4435, Seq. ID No. 4443, Seq. ID No. 4445, Seq. ID No. 4447, Seq. ID No. 4449, Seq. ID No. 4451, Seq. ID No. 4453, Seq. ID No. 4455, Seq. ID No. 4457, Seq. ID No. 4459, Seq. ID No. 4461, Seq. ID No. 4463, Seq. ID No. 4465, Seq. ID No. 4467, Seq. ID No. 4471, Seq. ID No. 4475, Seq. ID No. 4477, Seq. ID No. 4479, Seq. ID No. 4487, Seq. ID No. 4489, Seq. ID No. 4491, Seq. ID No. 4499, Seq. ID No. 4501, Seq. ID No. 4503, Seq. ID No. 4505, Seq. ID No. 4507, Seq. ID No. 4509, Seq. ID No. 4511, Seq. ID No. 4517, Seq. ID No. 4519, Seq. ID No. 4521, Seq. ID No. 4523, Seq. ID No. 4525, Seq. ID No. 4531, Seq. ID No. 4535, Seq. ID No. 4537, Seq. ID No. 4539, Seq. ID No. 4541, Seq. ID No. 4543, Seq. ID No. 4545, Seq. ID No. 4547, Seq. ID No. 4549, Seq. ID No. 4551, Seq. ID No. 4553, Seq. ID No. 4555, Seq. ID No. 4557, Seq. ID No. 4559, Seq. ID No. 4561, Seq. ID No. 4563, Seq. ID No. 4565, Seq. ID No. 5 4567, Seq. ID No. 4569, Seq. ID No. 4571, Seq. ID No. 4573, Seq. ID No. 4575, Seq. ID No. 4577, Seq. ID No. 4579, Seq. ID No. 4581, Seq. ID No. 4583, Seq. ID No. 4585, Seq. ID No. 4591, Seq. ID No. 4593, Seq. ID No. 4595, Seq. ID No. 4597, Seq. ID No. 4599, Seq. ID No. 4601, Seq. ID No. 4603, Seq. ID No. 4605, Seq. ID No. 4607, Seq. ID No. 4609, Seq. ID No. 4611, Seq. ID No. 4613, Seq. ID No. 4615, Seq. ID No. 4617, lo Seq. ID No. 4619, Seq. ID No. 4621, Seq. ID No. 4623, Seq. ID No. 4625, Seq. ID No. 4627, Seq. ID No. 4629, Seq. ID No. 4631, Seq. ID No. 4633, Seq. ID No. 4635, Seq. ID No. 4637, Seq. ID No. 4645, Seq. ID No. 4647, Seq. ID No. 4649, Seq. ID No. 4651, Seq. ID No. 4653, Seq. ID No. 4655, Seq. ID No. 4657, Seq. ID No. 4661, Seq. ID No. 4663, Seq. ID No. 4665, Seq. ID No. 4667, Seq. ID No. 4669, Seq. ID No. 4671, Seq. ID 15 No. 4673, Seq. ID No. 4675, Seq. ID No. 4677, Seq. ID No. 4679, Seq. ID No. 4683, Seq. ID No. 4685, Seq. ID No. 4689, Seq. ID No. 4691, Seq. ID No. 4693, Seq. ID No. 4697, Seq. ID No. 4699, Seq. ID No. 4701, Seq. ID No. 4703, Seq. ID No. 4713, Seq. ID No. 4719, Seq. ID No. 4721, Seq. ID No. 4723, Seq. ID No. 4725, Seq. ID No. 4727, Seq. ID No. 4729, Seq. ID No. 4731, Seq. ID No. 4733, Seq. ID No. 4735, Seq. ID No. 20 4739, Seq. ID No. 4741, Seq. ID No. 4743, Seq. ID No. 4745, Seq. ID No. 4747, Seq. ID No. 4749, Seq. ID No. 4751, Seq. ID No. 4753, Seq. ID No. 4755, Seq. ID No. 4757, Seq. ID No. 4761, Seq. ID No. 4763, Seq. ID No. 4765, Seq. ID No. 4767, Seq. ID No. 4769, Seq. ID No. 4771, Seq. ID No. 4773, Seq. ID No. 4775, Seq. ID No. 4777, Seq. ID No. 4779, Seq. ID No. 4781, Seq. ID No. 4783, Seq. ID No. 4785, Seq. ID No. 4787, 25 Seq. ID No. 4789, Seq. ID No. 4791, Seq. ID No. 4793, Seq. ID No. 4795, Seq. ID No. 4797, Seq. ID No. 4799, Seq. ID No. 4801, Seq. ID No. 4803, Seq. ID No. 4805, Seq. ID No. 4807, Seq. ID No. 4809, Seq. ID No. 4811, Seq. ID No. 4815, Seq. ID No. 4817, Seq. ID No. 4819, Seq. ID No. 4821, Seq. ID No. 4823, Seq. ID No. 4825, Seq. ID No. 4829, Seq. ID No. 4831, Seq. ID No. 4833, Seq. ID No. 4835, Seq. ID No. 4837, Seq. ID 30 No. 4839, Seq. ID No. 4841, Seq. ID No. 4843, Seq. ID No. 4845, Seq. ID No. 4847, Seq. ID No. 4849, Seq. ID No. 4851, Seq. ID No. 4855, Seq. ID No. 4857, Seq. ID No. 4859, Seq. ID No. 4861, Seq. ID No. 4865, Seq. ID No. 4867, Seq. ID No. 4877, Seq. ID No. 4879, Seq. ID No. 4881, Seq. ID No. 4883, Seq. ID No. 4885, Seq. ID No. 4887, Seq. ID No. 4889, Seq. ID No. 4891, Seq. ID No. 4893, Seq. ID No. 4895, Seq. ID No. 4897, Seq. ID No. 4899, Seq. ID No. 4901, Seq. ID No. 4903, Seq. ID No. 4905, Seq. ID No. 4907, Seq. ID No. 4909, Seq. ID No. 4911, Seq. ID No. 4913, Seq. ID No. 4915, Seq. ID No. 4917, Seq. ID No. 4925, Seq. ID No. 4927, Seq. ID No. 4933, Seq. ID No. 4935, Seq. ID No. 4937, Seq. ID No. 4939, Seq. ID No. 4941, Seq. ID No. 4943, Seq. ID No. 4945, Seq. ID No. 4947, Seq. ID No. 4953, Seq. ID No. 4955, Seq. ID No. 4957, Seq. ID No. 4959, Seq. ID No. 4961, Seq. ID No. 4963, Seq. ID No. 4965, Seq. ID No. 4967, Seq. ID No. 4969, Seq. ID No. 4971, Seq. ID No. 4973, Seq. ID No. 4977, Seq. ID No. 4979, Seq. ID No. 4981, Seq. ID No. 4983, Seq. ID No. 4985, Seq. ID No. 4989, Seq. ID No. 4991, Seq. ID No. 4993, Seq. ID No. 4995, Seq. ID No. 4997, Seq. ID No. 5001, Seq. ID No. 5003, Seq. ID No. 5005, Seq. ID No. 5007, Seq. ID No. 5009, Seq. ID No. 5011, Seq. ID No. 5015, Seq. ID No. 5017, Seq. ID No. 5019, Seq. ID No. 5021, Seq. ID No. 5023, Seq. ID No. 5025, Seq. ID No. 5027, Seq. ID No. 5029, Seq. ID No. 5033, Seq. ID No. 5035, Seq. ID No. 5037, Seq. ID No. 5039, Seq. ID No. 5041, Seq. ID No. 5043, Seq. ID No. 5045, Seq. ID No. 5047, Seq. ID No. 5049, Seq. ID No. 5051, Seq. ID No. 5053, Seq. ID No. 5055, Seq. ID No. 5057, Seq. ID No. 5059, Seq. ID No. 5065, Seq. ID No. 5067; Seq. ID No. 5071, Seq. ID No. 5073, Seq. ID No. 5075, Seq. ID No. 5077, Seq. ID No. 5079, Seq. ID No. 5081, Seq. ID No. 5083, Seq. ID No. 5087, Seq. ID No. 5089, Seq. ID No. 5091, Seq. ID No. 5093, Seq. ID No. 5095, Seq. ID No. 5097, Seq. ID No. 5099, Seq. ID No. 5101, Seq. ID No. 5105, Seq. ID No. 5107, Seq. ID No. 5109, Seq. ID No. 5111, Seq. ID No. 5113, Seq. ID No. 5117, Seq. ID No. 5119, Seq. ID No. 5121, Seq. ID No. 5127, Seq. ID No. 5143, Seq. ID No. 5145, Seq. ID No. 5147, Seq. ID No. 5149, Seq. ID No. 5151, Seq. ID No. 5153, Seq. ID No. 5155, Seq. ID No. 5157, Seq. ID No. 5161, Seq. ID No. 5163, Seq. ID No. 5167, Seq. ID No. 5169, Seq. ID No. 5171, Seq. ID No. 5173, Seq. ID No. 5177, Seq. ID No. 5179, Seq. ID No. 5181, Seq. ID No. 5183, Seq. ID No. 5185, Seq. ID No. 5187, Seq. ID No. 5189, Seq. ID No. 5191, Seq. ID No. 5193, Seq. ID No. 5195, Seq. ID No. 5201, Seq. ID No. 5203, Seq. ID No. 5209, Seq. ID No. 5211, Seq. ID No. 5215, Seq. ID No. 5217, Seq. ID No. 5221, Seq. ID No. 5225, Seq. ID No. 5227, Seq. ID No. 5229, Seq. ID No. 5231, Seq. ID No. 5233, Seq. ID No. 5235, Seq. ID No. 5237, Seq. ID No. 5239, Seq. ID No. 5241, Seq. ID No. 5243, Seq. ID No. 5245, Seq. ID No. 5247, Seq. ID No. 5249, Seq. ID No. 5251, Seq. ID No. 5253, Seq. ID No. 5255, Seq. ID No. 5257, Seq. ID No. 5259, Seq. ID No. 5261, Seq. ID No. 5263, Seq. ID No. 5265, Seq. ID No. 5269, Seq. ID No. 5271, Seq. ID No. 5283, Seq. ID No. 5287, Seq. ID No. 5289, Seq. ID No. 5291, Seq. ID No. 5293, Seq. ID No. 5295, Seq. ID No. 5297, Seq. ID No. 5299, Seq. ID No. 5301, Seq. ID No. 5303, Seq. ID No. 5305, Seq. ID No. 5307, Seq. ID No. 5309, Seq. ID No. 5311, Seq. ID No. 5313, Seq. ID No. 5315, Seq. ID No. 5317, Seq. ID No. 5319, Seq. ID No. 5321, Seq. ID No. 5323, Seq. ID No. 5325, Seq. ID No. 5333, Seq. ID No. 5335, Seq. ID No. 5337, Seq. ID No. 5339, Seq. ID No. 5343, Seq. ID No. 5345, Seq. ID No. 5347, Seq. ID No. 5349, Seq. ID No. 5351, Seq. ID No. 5353, Seq. ID No. 5355, Seq. ID No. 5357, Seq. ID No. 5359, Seq. ID No. 5361, Seq. ID No. 5363, Seq. ID No. 5365, Seq. ID No. 5367, Seq. ID No. 5369, Seq. ID No. 5371, Seq. ID No. 5373, Seq. ID No. 5375, Seq. ID No. 5381, Seq. ID No. 5383, Seq. ID No. 5389, Seq. ID No. 5391, Seq. ID No. 5393, Seq. ID No. 5395, Seq. ID No. 5397, Seq. ID No. 5399, Seq. ID No. 5401, Seq. ID No. 5403, Seq. ID No. 5407, Seq. ID No. 5409, Seq. ID No. 5411, Seq. ID No. 5417, Seq. ID No. 5419, Seq. ID No. 5421, Seq. ID No. 5423, Seq. ID No. 5425, Seq. ID No. 5427, Seq. ID No. 5429, Seq. ID No. 5431, Seq. ID No. 5435, Seq. ID No. 5437, Seq. ID No. 5439, Seq. ID No. 5441, Seq. ID No. 5443, Seq. ID No. 5445, Seq. ID No. 5447, Seq. ID No. 5449, Seq. ID No. 5451, Seq. ID No. 5455, Seq. ID No. 5457, Seq. ID No. 5467, Seq. ID No. 5469, Seq. ID No. 5471, Seq. ID No. 5473, Seq. ID No. 5475, Seq. ID No. 5477, Seq. ID No. 5479, Seq. ID No. 5481, Seq. ID No. 5483, Seq. ID No. 5485, Seq. ID No. 5487, Seq. ID No. 5489, Seq. ID No. 5493, Seq. ID No. 5495, Seq. ID No. 5499, Seq. ID No. 5501, Seq. ID No. 5503, Seq. ID No. 5505, Seq. ID No. 5507, Seq. ID No. 5511, Seq. ID No. 5519, Seq. ID No. 5521, Seq. ID No. 5523, Seq. ID No. 5527, Seq. ID No. 5535, Seq. ID No. 5537, Seq. ID No. 5539, Seq. ID No. 5541, Seq. ID No. 5547, Seq. ID No. 5549, Seq. ID No. 5551, Seq. ID No. 5553, Seq. ID No. 5555, Seq. ID No. 5557, Seq. ID No. 5559, Seq. ID No. 5561, Seq. ID No. 5563, Seq. ID No. 5565, Seq. ID No. 5567, Seq. ID No. 5571, Seq. ID No. 5573, Seq. ID No. 5575, Seq. ID No. 5577, Seq. ID No. 5579, Seq. ID No. 5581, Seq. ID No. 5583, Seq. ID No. 5585, Seq. ID No. 5599, Seq. ID No. 5601, Seq. ID No. 5603, Seq. ID No. 5605, Seq. ID No. 5607, Seq. ID No. 5613, Seq. ID No. 5615, Seq. ID No. 5617, Seq. ID No. 5619, Seq. ID No. 5627, Seq. ID No. 5629, Seq. ID No. 5631, Seq. ID No. 5635, Seq. ID No. 5645, Seq. ID No. 5647, Seq. ID No. 5651, Seq. ID No. 5653, Seq. ID No. 5655, Seq. ID No. 5657, Seq. ID No. 5661, Seq. ID No. 5663, Seq. ID No. 5665, Seq. ID No. 5669, Seq. ID No. 5671, Seq. ID No. 5673, Seq. ID No. 5675, Seq. ID No. 5677, Seq. ID No. 5679, Seq. ID No. 5691, Seq. ID No. 5693, Seq. ID No. 5695, Seq. ID No. 5697, Seq. ID No. 5701, Seq. ID No. 5707, Seq. ID No. 5713, Seq. ID No. 5715, Seq. ID No. 5717, Seq. ID No. 5721, Seq. ID No. 5723, Seq. ID No. 5725, Seq. ID No. 5727, Seq. ID No. 5731, Seq. ID No. 5737, Seq. ID No. 5741, Seq. ID No. 5743, Seq. ID No. 5745, Seq. ID No. 5747, Seq. ID No. 5749, Seq. ID No. 5751, Seq. ID No. 5753, Seq. ID No. 5755, Seq. ID No. 5757, Seq. ID No. 5759, Seq. ID No. 5761, Seq. ID No. 5769, Seq. ID No. 5773, Seq. ID No. 5775, Seq. ID No. 5777, Seq. ID No. 5779, Seq. ID No. 5781, Seq. ID No. 5787, Seq. ID No. 5789, Seq. ID No. 5793, Seq. ID No. 5795, Seq. ID No. 5799, Seq. ID No. 5801, Seq. ID No. 5803, Seq. ID No. 5805, Seq. ID No. 5807, Seq. ID No. 5809, Seq. ID No. 5811, Seq. ID No. 5813, Seq. ID No. 5815, Seq. ID No. 5817, Seq. ID No. 5819, Seq. ID No. 5821, Seq. ID No. 5823, Seq. ID No. 5825, Seq. ID No. 5827, Seq. ID No. 5831, Seq. ID No. 5833, Seq. ID No. 5835, Seq. ID No. 5837, Seq. ID No. 5839, Seq. ID No. 5841, Seq. ID No. 5843, Seq. ID No. 5845, Seq. ID No. 5847, Seq. ID No. 5849, Seq. ID No. 5851, Seq. ID No. 5853, Seq. ID No. 5855, Seq. ID No. 5857, Seq. ID No. 5859, Seq. ID No. 5861, Seq. ID No. 5863, Seq. ID No. 5865, Seq. ID No. 5867, Seq. ID No. 5869, Seq. ID No. 5871, Seq. ID No. 5873, Seq. ID No. 5875, Seq. ID No. 5877, Seq. ID No. 5881, Seq. ID No. 5887, Seq. ID No. 5891, Seq. ID No. 5897, Seq. ID No. 5903, Seq. ID No. 5907, Seq. ID No. 5911, Seq. ID No. 5913, Seq. ID No. 5915, Seq. ID No. 5917, Seq. ID No. 5919, Seq. ID No. 5925, Seq. ID No. 5931, Seq. ID No. 5933, Seq. ID No. 5935, Seq. ID No. 5937, Seq. ID No. 5941, Seq. ID No. 5943, Seq. ID No. 5945, Seq. ID No. 5947, Seq. ID No. 5949, Seq. ID No. 5951, Seq. ID No. 5953, Seq. ID No. 5955, Seq. ID No. 5957, Seq. ID No. 5959, Seq. ID No. 5961, Seq. ID No. 5963, Seq. ID No. 5965, Seq. ID No. 5967, Seq. ID No. 5969, Seq. ID No. 5971, Seq. ID No. 5973, Seq. ID No. 5975, Seq. ID No. 5977, Seq. ID No. 5979, Seq. ID No. 5981, Seq. ID No. 5983, Seq. ID No. 5985, Seq. ID No. 5987, Seq. ID No. 5989, Seq. ID No. 5991, Seq. ID No. 5993, Seq. ID No. 5995, Seq. ID No. 5997, Seq. ID No. 5999, Seq. ID No. 6001, Seq. ID No. 6003, Seq. ID No. 6005, Seq. ID No. 6007, Seq. ID No. 6009, Seq. ID No. 6011, Seq. ID No. 6013, Seq. ID No. 6015, Seq. ID No. 6017, Seq. ID No. 6019, Seq. ID No. 6021, Seq. ID No. 6029, Seq. ID No. 6031, Seq. ID No. 6033, Seq. ID No. 6035, Seq. ID No. 6037, Seq. ID No. 6039, Seq. ID No. 6041, Seq. ID No. 6045, Seq. ID No. 6049, Seq. ID No. 6051, Seq. ID No. 6055, Seq. ID No. 6057, Seq. ID No. 6061, Seq. ID No. 6065, Seq. ID No. 6069, Seq. ID No. 6071, Seq. ID No. 6073, Seq. ID No. 6075, Seq. ID No. 6077, Seq. ID No. 6079, Seq. ID No. 6081, Seq. ID No. 6083, Seq. ID No. 6085, Seq. ID No. 6093, Seq. ID No. 6097, Seq. ID No. 6099, Seq. ID No. 6101, Seq. ID No. 6105, Seq. ID No. 6113, Seq. ID No. 6119, Seq. ID No. 6121, Seq. ID No. 6123, Seq. ID No. 6125, Seq. ID No. 6127, Seq. ID No. 6129, Seq. ID No. 6131, Seq. ID No. 6133, Seq. ID No. 6139, Seq. ID No. 6141, Seq. ID No. 6143, Seq. ID No. 6145, Seq. ID No. 6147, Seq. ID No. 6149, Seq. ID No. 6151, Seq. ID No. 6153, Seq. ID No. 6155, Seq. ID No. 6157, Seq. ID No. 6167, Seq. ID No. 6171, Seq. ID No. 6173, Seq. ID No. 6175, Seq. ID No. 6177, Seq. ID No. 6179, Seq. ID No. 6181, Seq. ID No. 6193, Seq. ID No. 6195, Seq. ID No. 6199, Seq. ID No. 6201, Seq. ID No. 6207, Seq. ID No. 6211, Seq. ID No. 6213, Seq. ID No. 6215, Seq. ID No. 6219, Seq. ID No. 6231, Seq. ID No. 6233, Seq. ID No. 6239, Seq. ID No. 6247, Seq. ID No. 6251, Seq. ID No. 6255, Seq. ID No. 6257, Seq. ID No. 6261, Seq. ID No. 6269, Seq. ID No. 6271, Seq. ID No. 6277, Seq. ID No. 6279, Seq. ID No. 6281, Seq. ID No. 6287, Seq. ID No. 6291, Seq. ID No. 6293, Seq. ID No. 6295, Seq. ID No. 6297, Seq. ID No. 6299, Seq. ID No. 6305, Seq. ID No. 6307, Seq. ID No. 6309, Seq. ID No. 6311, Seq. ID No. 6313, Seq. ID No. 6315, Seq. ID No. 6317, Seq. ID No. 6319, Seq. ID No. 6321, Seq. ID No. 6323, Seq. ID No. 6329, Seq. ID No. 6331, Seq. ID No. 6333, Seq. ID No. 6335, Seq. ID No. 6337, Seq. ID No. 6339, Seq. ID No. 6341, Seq. ID No. 6343, Seq. ID No. 6345, Seq. ID No. 6347, Seq. ID No. 6349, Seq. ID No. 6351, Seq. ID No. 6353, Seq. ID No. 6355, Seq. ID No. 6357, Seq. ID No. 6359, Seq. ID No. 6361, Seq. ID No. 6367, Seq. ID No. 6369, Seq. ID No. 6371, Seq. ID No. 6373, Seq. ID No. 6375, Seq. ID No. 6379, Seq. ID No. 6385, Seq. ID No. 6387, Seq. ID No. 6389, Seq. ID No. 6391, Seq. ID No. 6393, Seq. ID No. 6395, Seq. ID No. 6397, Seq. ID No. 6399, Seq. ID No. 6401, Seq. ID No. 6403, Seq. ID No. 6405, Seq. ID No. 6407, Seq. ID No. 6409, Seq. ID No. 6411, Seq. ID No. 6413, Seq. ID No. 6417, Seq. ID No. 6419, Seq. ID No. 6421, Seq. ID No. 6423, Seq. ID No. 6433, Seq. ID No. 6435, Seq. ID No. 6437, Seq. ID No. 6439, Seq. ID No. 6441, Seq. ID No. 6443, Seq. ID No. 6445, Seq. ID No. 6447, Seq. ID No. 6449, Seq. ID No. 6451, Seq. ID No. 6453, Seq. ID No. 6455, Seq. ID No. 6457, Seq. ID No. 6459, Seq. ID No. 6461, Seq. ID No. 6463, Seq. ID No. 6465, Seq. ID No. 6467, Seq. ID No. 6469, Seq. ID No. 6471, Seq. ID No. 6475, Seq. ID No. 6477, Seq. ID No. 6481, Seq. ID No. 6483, Seq. ID No. 6485, Seq. ID No. 6487, Seq. ID No. 6489, Seq. ID No. 6491, Seq. ID No. 6493, Seq. ID No. 6495, Seq. ID No. 6499, Seq. ID No. 6501, Seq. ID No. 6503, Seq. ID No. 6505, Seq. ID No. 6507, Seq. ID No. 6509, Seq. ID No. 6511, Seq. ID No. 6513, Seq. ID No. 6515, Seq. ID No. 6519, Seq. ID No. 6521, Seq. ID No. 6523, Seq. ID No. 6525, Seq. ID No. 6527, Seq. ID No. 6529, Seq. ID No. 6531, Seq. ID No. 6533, Seq. ID No. 6535, Seq. ID No. 6537, Seq. ID No. 6539, Seq. ID No. 6545, Seq. ID No. 6547, Seq. ID No. 6549, Seq. ID No. 6551, Seq. ID No. 6553, Seq. ID No. 6559, Seq. ID No. 6561, Seq. ID No. 6563, Seq. ID No. 6565, Seq. ID No. 6567, Seq. ID No. 6569, Seq. ID No. 6575, Seq. ID No. 6577, Seq. ID No. 6579, Seq. ID No. 6583, Seq. ID No. 6585, Seq. ID No. 6587, Seq. ID No. 6589, Seq. ID No. 6591, Seq. ID No. 6605, Seq. ID No. 6607, Seq. ID No. 6609, Seq. ID No. 6611, Seq. ID No. 6613, Seq. ID No. 6615, Seq. ID No. 6617, Seq. ID No. 6619, Seq. ID No. 6621, Seq. ID No. 6623, Seq. ID No. 6625, Seq. ID No. 6627, Seq. ID No. 6629, Seq. ID No. 6633, Seq. ID No. 6635, Seq. ID No. 6641, and Seq. ID No. 6647.

[0019] In yet another preferred embodiment, the invention comprises an isolated polynucleotide of the Alloiococcus otitidis genomic sequence encoding a polypeptide, which was identified by BlastP analysis, and the polynucleotide is selected from one of Seq. ID No. 9, Seq. ID No. 17, Seq. ID No. 45, Seq. ID No. 49, Seq. ID No. 53, Seq. ID No. 59, Seq. ID No. 89, Seq. ID No. 145, Seq. ID No. 157, Seq. ID No. 167, Seq. ID No. 171, Seq. ID No. 191, Seq. ID No. 215, Seq. ID No. 217, Seq. ID No. 225, Seq. ID No. 239, Seq. ID No. 253, Seq. ID No. 273, Seq. ID No. 277, Seq. ID No. 289, Seq. ID No. 329, Seq. ID No. 343, Seq. ID No. 345, Seq. ID No. 375, Seq. ID No. 501, Seq. ID No. 505, Seq. ID No. 511, Seq. ID No. 515, Seq. ID No. 529, Seq. ID No. 569, Seq. ID No. 575, Seq. ID No. 593, Seq. ID No. 595, Seq. ID No. 637, Seq. ID No. 659, Seq. ID No. 669, Seq. ID No. 675, Seq. ID No. 681, Seq. ID No. 729, Seq. ID No. 779, Seq. ID No. 819, Seq. ID No. 895, Seq. ID No. 921, Seq. ID No. 935, Seq. ID No. 955, Seq. ID No. 967, Seq. ID No. 985, Seq. ID No. 1017, Seq. ID No. 1039, Seq. ID No. 1075, Seq. ID No. 1089, Seq. ID No. 1137, Seq. ID No. 1223, Seq. ID No. 1241, Seq. ID No. 1315, Seq. ID No. 1331, Seq. ID No. 1369, Seq. ID No. 1459, Seq. ID No. 1517, Seq. ID No. 1561, Seq. ID No. 1563, Seq. ID No. 1567, Seq. ID No. 1571, Seq. ID No. 1573, Seq. ID No. 1601, Seq. ID No. 1607, Seq. ID No. 1613, Seq. ID No. 1619, Seq. ID No. 1641, Seq. ID No. 1647, Seq. ID No. 1653, Seq. ID No. 1657, Seq. ID No. 1665, Seq. ID No. 1699, Seq. ID No. 1713, Seq. ID No. 1751, Seq. ID No. 1771, Seq. ID No. 1785, Seq. ID No. 1789, Seq. ID No. 1791, Seq. ID No. 1797, Seq. ID No. 1811, Seq. ID No. 1817, Seq. ID No. 1819, Seq. ID No. 1821, Seq. ID No. 1871, Seq. ID No. 1895, Seq. ID No. 1905, Seq. ID No. 1913, Seq. ID No. 1919, Seq. ID No. 1923, Seq. ID No. 1965, Seq. ID No. 1971, Seq. ID No. 1999, Seq. ID No. 2047, Seq. ID No. 2055, Seq. ID No. 2091, Seq. ID No. 2093, Seq. ID No. 2115, Seq. ID No. 2119, Seq. ID No. 2127, Seq. ID No. 2165, Seq. ID No. 2179, Seq. ID No. 2207, Seq. ID No. 2223, Seq. ID No. 2227, Seq. ID No. 2241, Seq. ID No. 2253, Seq. ID No. 2263, Seq. ID No. 2269, Seq. ID No. 2275, Seq. ID No. 2301, Seq. ID No. 2315, Seq. ID No. 2329, Seq. ID No. 2333, Seq. ID No. 2343, Seq. ID No. 2345, Seq. ID No. 2363, Seq. ID No. 2373, Seq. ID No. 2391, Seq. ID No. 2417, Seq. ID No. 2429, Seq. ID No. 2465, Seq. ID No. 2475, Seq. ID No. 2483, Seq. ID No. 2513, Seq. ID No. 2525, Seq. ID No. 2589, Seq. ID No. 2613, Seq. ID No. 2651, Seq. ID No. 2669, Seq. ID No. 2677, Seq. ID No. 2687, Seq. ID No. 2689, Seq. ID No. 2693, Seq. ID No. 2703, Seq. ID No. 2709, Seq. ID No. 2715, Seq. ID No. 2751, Seq. ID No. 2753, Seq. ID No. 2767, Seq. ID No. 2787, Seq. ID No. 2791, Seq. ID No. 2803, Seq. ID No. 2867, Seq. ID No. 2871, Seq. ID No. 2907, Seq. ID No. 2919, Seq. ID No. 2921, Seq. ID No. 2923, Seq. ID No. 2927, Seq. ID No. 2933, Seq. ID No. 2957, Seq. ID No. 2979, Seq. ID No. 2999, Seq. ID No. 3005, Seq. ID No. 3019, Seq. ID No. 3031, Seq. ID No. 3035, Seq. ID No. 3055, Seq. ID No. 3067, Seq. ID No. 3085, Seq. ID No. 3165, Seq. ID No. 3183, Seq. ID No. 3189, Seq. ID No. 3197, Seq. ID No. 3211, Seq. ID No. 3251, Seq. ID No. 3257, Seq. ID No. 3259, Seq. ID No. 3297, Seq. ID No. 3319, Seq. ID No. 3323, Seq. ID No. 3335, Seq. ID No. 3337, Seq. ID No. 3355, Seq. ID No. 3359, Seq. ID No. 3377, Seq. ID No. 3397, Seq. ID No. 3405, Seq. ID No. 3415, Seq. ID No. 3425, Seq. ID No. 3427, Seq. ID No. 3461, Seq. ID No. 3463, Seq. ID No. 3487, Seq. ID No. 3493, Seq. ID No. 3497, Seq. ID No. 3507, Seq. ID No. 3519, Seq. ID No. 3521, Seq. ID No. 3529, Seq. ID No. 3535, Seq. ID No. 3629, Seq. ID No. 3635, Seq. ID No. 3727, Seq. ID No. 3759, Seq. ID No. 3771, Seq. ID No. 3793, Seq. ID No. 3839, Seq. ID No. 3851, Seq. ID No. 3863, Seq. ID No. 3865, Seq. ID No. 3883, Seq. ID No. 3891, Seq. ID No. 3913, Seq. ID No. 3925, Seq. ID No. 3929, Seq. ID No. 3975, Seq. ID No. 3981, Seq. ID No. 4027, Seq. ID No. 4039, Seq. ID No. 4061, Seq. ID No. 4073, Seq. ID No. 4081, Seq. ID No. 4103, Seq. ID No. 4111, Seq. ID No. 4137, Seq. ID No. 4225, Seq. ID No. 4247, Seq. ID No. 4343, Seq. ID No. 4379, Seq. ID No. 4389, Seq. ID No. 4469, Seq. ID No. 4473, Seq. ID No. 4481, Seq. ID No. 4485, Seq. ID No. 4493, Seq. ID No. 4529, Seq. ID No. 4643, Seq. ID No. 4705, Seq. ID No. 4713, Seq. ID No. 4717, Seq. ID No. 4813, Seq. ID No. 4815, Seq. ID No. 4825, Seq. ID No. 4827, Seq. ID No. 4833, Seq. ID No. 4837, Seq. ID No. 4851, Seq. ID No. 4863, Seq. ID No. 4875, Seq. ID No. 4879, Seq. ID No. 4893, Seq. ID No. 4901, Seq. ID No. 4919, Seq. ID No. 4931, Seq. ID No. 4959, Seq. ID No. 4963, Seq. ID No. 4985, Seq. ID No. 5113, Seq. ID No. 5115, Seq. ID No. 5117, Seq. ID No. 5125, Seq. ID No. 5141, Seq. ID No. 5183, Seq. ID No. 5201, Seq. ID No. 5205, Seq. ID No. 5213, Seq. ID No. 5219, Seq. ID No. 5279, Seq. ID No. 5285, Seq. ID No. 5331, Seq. ID No. 5381, Seq. ID No. 5389, Seq. ID No. 5405, Seq. ID No. 5411, Seq. ID No. 5419, Seq. ID No. 5433, Seq. ID No. 5463, Seq. ID No. 5477, Seq. ID No. 5491, Seq. ID No. 5509, Seq. ID No. 5513, Seq. ID No. 5525, Seq. ID No. 5529, Seq. ID No. 5537, Seq. ID No. 5567, Seq. ID No. 5599, Seq. ID No. 5621, Seq. ID No. 5637, Seq. ID No. 5699, Seq. ID No. 5723, Seq. ID No. 5733, Seq. ID No. 5761, Seq. ID No. 5791, Seq. ID No. 5895, Seq. ID No. 5901, Seq. ID No. 5903, Seq. ID No. 5909, Seq. ID No. 5913, Seq. ID No. 5919, Seq. ID No. 5929, Seq. ID No. 5939, Seq. ID No. 6001, Seq. ID No. 6043, Seq. ID No. 6053, Seq. ID No. 6057, Seq. ID No. 6089, Seq. ID No. 6095, Seq. ID No. 6103, Seq. ID No. 6111, Seq. ID No. 6117, Seq. ID No. 6165, Seq. ID No. 6169, Seq. ID No. 6185, Seq. ID No. 6191, Seq. ID No. 6209, Seq. ID No. 6229, Seq. ID No. 6257, Seq. ID No. 6263, Seq. ID No. 6271, Seq. ID No. 6275, Seq. ID No. 6289, Seq. ID No. 6303, Seq. ID No. 6365, Seq. ID No. 6369, Seq. ID No. 6383, and Seq. ID No. 6415.

[0020] In still yet another preferred embodiment, the invention comprises an isolated polynucleotide of the Alloiococcus otitidis genomic sequence encoding a polypeptide identified by Pfam analysis, and the polynucleotide is selected from one of Seq. ID No. 89, Seq. ID No. 145, Seq. ID No. 155, Seq. ID No. 167, Seq. ID No. 173, Seq. ID No. 191, Seq. ID No. 215, Seq. ID No. 219, Seq. ID No. 221, Seq. ID No. 223, Seq. ID No. 225, Seq. ID No. 233, Seq. ID No. 239, Seq. ID No. 251, Seq. ID No. 253, Seq. ID No. 271, Seq. ID No. 291, Seq. ID No. 331, Seq. ID No. 341, Seq. ID No. 345, Seq. ID No. 375, Seq. ID No. 501, Seq. ID No. 505, Seq. ID No. 511, Seq. ID No. 529, Seq. ID No. 567, Seq. ID No. 569, Seq. ID No. 575, Seq. ID No. 593, Seq. ID No. 595, Seq. ID No. 601, Seq. ID No. 637, Seq. ID No. 649, Seq. ID No. 661, Seq. ID No. 669, Seq. ID No. 675, Seq. ID No. 681, Seq. ID No. 683, Seq. ID No. 729, Seq. ID No. 753, Seq. ID No. 779, Seq. ID No. 827, Seq. ID No. 839, Seq. ID No. 895, Seq. ID No. 939, Seq. ID No. 969, Seq. ID No. 985, Seq. ID No. 1015, Seq. ID No. 1039, Seq. ID No. 1075, Seq. ID No. 1137, Seq. ID No. 1155, Seq. ID No. 1163, Seq. ID No. 1175, Seq. ID No. 1223, Seq. ID No. 1231, Seq. ID No. 1237, Seq. ID No. 1241, Seq. ID No. 1261, Seq. ID No. 1331, Seq. ID No. 1339, Seq. ID No. 1369, Seq. ID No. 1477, Seq. ID No. 1517, Seq. ID No. 1531, Seq. ID No. 1539, Seq. ID No. 1549, Seq. ID No. 1563, Seq. ID No. 1567, Seq. ID No. 1571, Seq. ID No. 1573, Seq. ID No. 1589, Seq. ID No. 1595, Seq. ID No. 1647, Seq. ID No. 1657, Seq. ID No. 1771, Seq. ID No. 1785, Seq. ID No. 1789, Seq. ID No. 1819, Seq. ID No. 1821, Seq. ID No. 1969, Seq. ID No. 2015, Seq. ID No. 2047, Seq. ID No. 2087, Seq. ID No. 2089, Seq. ID No. 2093, Seq. ID No. 211.5, Seq. ID No. 2117, Seq. ID No. 2127, Seq. ID No. 2141, Seq. ID No. 2179, Seq. ID No. 2207, Seq. ID No. 2223, Seq. ID No. 2253, Seq. ID No. 2275, Seq. ID No. 2301, Seq. ID No. 2315, Seq. ID No. 2329, Seq. ID No. 2343, Seq. ID No. 2349, Seq. ID No. 2363, Seq. ID No. 2381, Seq. ID No. 2391, Seq. ID No. 2417, Seq. ID No. 2421, Seq. ID No. 2423, Seq. ID No. 2429, Seq. ID No. 2481, Seq. ID No. 2487, Seq. ID No. 2489, Seq. ID No. 2491, Seq. ID No. 2509, Seq. ID No. 2519, Seq. ID No. 2525, Seq. ID No. 2547, Seq. ID No. 2553, Seq. ID No. 2563, Seq. ID No. 2587, Seq. ID No. 2599, Seq. ID No. 2607, Seq. ID No. 2613, Seq. ID No. 2651, Seq. ID No. 2675, Seq. ID No. 2681, Seq. ID No. 2687, Seq. ID No. 2693, Seq. ID No. 2699, Seq. ID No. 2703, Seq. ID No. 2709, Seq. ID No. 2711, Seq. ID No. 2727, Seq. ID No. 2753, Seq. ID No. 2819, Seq. ID No. 2821, Seq. ID No. 2823, Seq. ID No. 2867, Seq. ID No. 2871, Seq. ID No. 2907, Seq. ID No. 2919, Seq. ID No. 2957, Seq. ID No. 2971, Seq. ID No. 2979, Seq. ID No. 2999, Seq. ID No. 3005, Seq. ID No. 3019, Seq. ID No. 3035, Seq. ID No. 3065; Seq. ID No. 3085, Seq. ID No. 3149, Seq. ID No. 3165, Seq. ID No. 3183, Seq. ID No. 3203, Seq. ID No. 3211, Seq. ID No. 3251, Seq. ID No. 3259, Seq. ID No. 3319, Seq. ID No. 3323, Seq. ID No. 3335, Seq. ID No. 3337, Seq. ID No. 3347, Seq. ID No. 3359, Seq. ID No. 3377, Seq. ID No. 3379, Seq. ID No. 3399, Seq. ID No. 3425, Seq. ID No. 3483, Seq. ID No. 3495, Seq. ID No. 3497, Seq. ID No. 3519, Seq. ID No. 3529, Seq. ID No. 3599, Seq. ID No. 3611, Seq. ID No. 3615, Seq. ID No. 3619, Seq. ID No. 3663, Seq. ID No. 3739, Seq. ID No. 3759, Seq. ID No. 3771, Seq. ID No. 3797, Seq. ID No. 3825, Seq. ID No. 3841, Seq. ID No. 3855, Seq. ID No. 3863, Seq. ID No. 3901, Seq. ID No. 3929, Seq. ID No. 4015, Seq. ID No. 4017, Seq. ID No. 4055, Seq. ID No. 4075, Seq. ID No. 4085, Seq. ID No. 4089, Seq. ID No. 4099, Seq. ID No. 4105, Seq. ID No. 4129, Seq. ID No. 4203, Seq. ID No. 4243, Seq. ID No. 4251, Seq. ID No. 4343, Seq. ID No. 4383, Seq. ID No. 4475, Seq. ID No. 4481, Seq. ID No. 4487, Seq. ID No. 4491, Seq. ID No. 4533, Seq. ID No. 4627, Seq. ID No. 4705, Seq. ID No. 4713, Seq. ID No. 4717, Seq. ID No. 4719, Seq. ID No. 4729, Seq. ID No. 4789, Seq. ID No. 4791, Seq. ID No. 4793, Seq. ID No. 4803, Seq. ID No. 4813, Seq. ID No. 4815, Seq. ID No. 4825, Seq. ID No. 4833, Seq. ID No. 4837, Seq. ID No. 4875, Seq. ID No. 4879, Seq. ID No. 4919, Seq. ID No. 4931, Seq. ID No. 4947, Seq. ID No. 4985, Seq. ID No. 5077, Seq. ID No. 5115, Seq. ID No. 5117, Seq. ID No. 5127, Seq. ID No. 5141, Seq. ID No. 5193, Seq. ID No. 5215, Seq. ID No. 5219, Seq. ID No. 5275, Seq. ID No. 5381, Seq. ID No. 5389, Seq. ID No. 5409, Seq. ID No. 5411, Seq. ID No. 5475, Seq. ID No. 5491, Seq. ID No. 5513, Seq. ID No. 5519, Seq. ID No. 5525, Seq. ID No. 5529, Seq. ID No. 5537, Seq. ID No. 5557, Seq. ID No. 5581, Seq. ID No. 5599, Seq. ID No. 5637, Seq. ID No. 5685, Seq. ID No. 5723, Seq. ID No. 5755, Seq. ID No. 5761, Seq. ID No. 5895, Seq. ID No. 5901, Seq. ID No. 5903, Seq. ID No. 5911, Seq. ID No. 5913, Seq. ID No. 5919, Seq. ID No. 5923, Seq. ID No. 5929, Seq. ID No. 6001, Seq. ID No. 6043, Seq. ID No. 6053, Seq. ID No. 6055, Seq. ID No. 6089, Seq. ID No. 6095, Seq. ID No. 6111, Seq. ID No. 6117, Seq. ID No. 6165, Seq. ID No. 6169, Seq. ID No. 6187, Seq. ID No. 6195, Seq. ID No. 6219, Seq. ID No. 6233, Seq. ID No. 6269, Seq. ID No. 6275, Seq. ID No. 6279, Seq. ID No. 6287, Seq. ID No. 6297, Seq. ID No. 6299, Seq. ID No. 6305, Seq. ID No. 6311, Seq. ID No. 6369, Seq. ID No. 6379, Seq. ID No. 6587, and Seq. ID No. 6591.

[0021] In another preferred embodiment, the invention comprises an isolated polynucleotide of the Alloiococcus otitidis genomic sequence encoding a polypeptide, and which has been identified using the proteomic methods used for studying surface proteins of Streptococcus pneumoniae, and the polynucleotide is selected from one of Seq. ID No. 1, Seq. ID No. 5, Seq. ID No. 93, Seq. ID No. 95, Seq. ID No. 103, Seq. ID No. 107, Seq. ID No. 157, Seq. ID No. 223, Seq. ID No. 225, Seq. ID No. 233, Seq. ID No. 239, Seq. ID No. 253, Seq. ID No. 317, Seq. ID No. 321, Seq. ID No. 341, Seq. ID No. 345, Seq. ID No. 353, Seq. ID No. 361, Seq. ID No. 363, Seq. ID No. 365, Seq. ID No. 375, Seq. ID No. 379, Seq. ID No. 383, Seq. ID No. 389, Seq. ID No. 391, Seq. ID No. 397, Seq. ID No. 405, Seq. ID No. 409, Seq. ID No. 415, Seq. ID No. 423, Seq. ID No. 425, Seq. ID No. 427, Seq. ID No. 429, Seq. ID No. 435, Seq. ID No. 437, Seq. ID No. 439, Seq. ID No. 441, Seq. ID No. 443, Seq. ID No. 445, Seq. ID No. 447, Seq. ID No. 449, Seq. ID No. 461, Seq. ID No. 463, Seq. ID No. 465, Seq. ID No. 513, Seq. ID No. 543, Seq. ID No. 551, Seq. ID No. 553, Seq. ID No. 559, Seq. ID No. 595, Seq. ID No. 601, Seq. ID No. 637, Seq. ID No. 649, Seq. ID No. 657, Seq. ID No. 669, Seq. ID No. 675, Seq. ID No. 683, Seq. ID No. 753, Seq. ID No. 929, Seq. ID No. 969, Seq. ID No. 1041, Seq. ID No. 1043, Seq. ID No. 1085, Seq. ID No. 1089, Seq. ID No. 1093, Seq. ID No. 1097, Seq. ID No. 1099, Seq. ID No. 1101, Seq. ID No. 1175, Seq. ID No. 1205, Seq. ID No. 1237, Seq. ID No. 1459, Seq. ID No. 1495, Seq. ID No. 1497, Seq. ID No. 1503, Seq. ID No. 1517, Seq. ID No. 1527, Seq. ID No. 1531, Seq. ID No. 1539, Seq. ID No. 1543, Seq. ID No. 1549, Seq. ID No. 1573, Seq. ID No. 1657, Seq. ID No. 1709, Seq. ID No. 1767, Seq. ID No. 1785, Seq. ID No. 1821, Seq. ID No. 1889, Seq. ID No. 1925, Seq. ID No. 1969, Seq. ID No. 2003, Seq. ID No. 2047, Seq. ID No. 2075, Seq. ID No. 2089, Seq. ID No. 2093, Seq. ID No. 2117, Seq. ID No. 2137, Seq. ID No. 2143, Seq. ID No. 2205, Seq. ID No. 2235, Seq. ID No. 2257, Seq. ID No. 2301, Seq. ID No. 2363, Seq. ID No. 2423, Seq. ID No. 2445, Seq. ID No. 2451, Seq. ID No. 2481, Seq. ID No. 2495, Seq. ID No. 2505, Seq. ID No. 2577, Seq. ID No. 2587, Seq. ID No. 2613, Seq. ID No. 2633, Seq. ID No. 2651, Seq. ID No. 2665, Seq. ID No. 2669, Seq. ID No. 2677, Seq. ID No. 2687, Seq. ID No. 2693, Seq. ID No. 2699, Seq. ID No. 2711, Seq. ID No. 2715, Seq. ID No. 2757, Seq. ID No. 2791, Seq. ID No. 2793, Seq. ID No. 2803, Seq. ID No. 2867, Seq. ID No. 2919, Seq. ID No. 2929, Seq. ID No. 3005, Seq. ID No. 3019, Seq. ID No. 3125, Seq. ID No. 3137, Seq. ID No. 3161, Seq. ID No. 3179, Seq. ID No. 3251, Seq. ID No. 3259, Seq. ID No. 3285, Seq. ID No. 3309, Seq. ID No. 3317, Seq. ID No. 3337, Seq. ID No. 3345, Seq. ID No. 3359, Seq. ID No. 3475, Seq. ID No. 3515, Seq. ID No. 3521, Seq. ID No. 3641, Seq. ID No. 3695, Seq. ID No. 3793, Seq. ID No. 3901, Seq. ID No. 3927, Seq. ID No. 3987, Seq. ID No. 4001, Seq. ID No. 4057, Seq. ID No. 4081, Seq. ID No. 4111, Seq. ID No. 4125, Seq. ID No. 4193, Seq. ID No. 4195, Seq. ID No. 4237, Seq. ID No. 4247, Seq. ID No. 4383, Seq. ID No. 4393, Seq. ID No. 4397, Seq. ID No. 4401, Seq. ID No. 4435, Seq. ID No. 4449, Seq. ID No. 4471, Seq. ID No. 4491, Seq. ID No. 4511, Seq. ID No. 4519, Seq. ID No. 4531, Seq. ID No. 4549, Seq. ID No. 4577, Seq. ID No. 4581, Seq. ID No. 4585, Seq. ID No. 4609, Seq. ID No. 4611, Seq. ID No. 4613, Seq. ID No. 4675, Seq. ID No. 4685, Seq. ID No. 4719, Seq. ID No. 4729, Seq. ID No. 4743, Seq. ID No. 4755, Seq. ID No. 4781, Seq. ID No. 4787, Seq. ID No. 4837, Seq. ID No. 4841, Seq. ID No. 4849, Seq. ID No. 4855, Seq. ID No. 4889, Seq. ID No. 4901, Seq. ID No. 4915, Seq. ID No. 4917, Seq. ID No. 4931, Seq. ID No. 4935, Seq. ID No. 4977, Seq. ID No. 5025, Seq. ID No. 5029, Seq. ID No. 5109, Seq. ID No. 5115, Seq. ID No. 5117, Seq. ID No. 5155, Seq. ID No. 5185, Seq. ID No. 5201, Seq. ID No. 5203, Seq. ID No. 5219, Seq. ID No. 5261, Seq. ID No. 5289, Seq. ID No. 5295, Seq. ID No. 5377, Seq. ID No. 5389, Seq. ID No. 5399, Seq. ID No. 5411, Seq. ID No. 5537, Seq. ID No. 5621, Seq. ID No. 5627, Seq. ID No. 5657, Seq. ID No. 5675, Seq. ID No. 5717, Seq. ID No. 5777, Seq. ID No. 5859, Seq. ID No. 5901, Seq. ID No. 5913, Seq. ID No. 5919, Seq. ID No. 5925, Seq. ID No. 5933, Seq. ID No. 6055, Seq. ID No. 6129, Seq. ID No. 6133, Seq. ID No. 6187, Seq. ID No. 6193, Seq. ID No. 6219, Seq. ID No. 6271, Seq. ID No. 6277, Seq. ID No. 6369, Seq. ID No. 6375, Seq. ID No. 6379, Seq. ID No. 6389, Seq. ID No. 6591, and Seq. ID No. 6605.

[0022] In another preferred embodiment, the invention comprises an isolated polynucleotide of the Alloiococcus otitidis genomic sequence encoding a polypeptide, wherein the polypeptide encoded by the polynucleotide was identified using HMM LPXTG motif finder as having a LPXTG motif, and wherein the polypeptide is covalently attached to the peptidoglycan layer, and the polynucleotide is selected from one Seq. ID No. 503, Seq. ID No. 505, Seq. ID No. 1315, Seq. ID No. 1317, Seq. ID No. 1363, Seq. ID No. 1365, Seq. ID No. 1367, Seq. ID No. 1369, Seq. ID No. 1559, Seq. ID No. 1561, Seq. ID No. 1581, Seq. ID No. 1739, Seq. ID No. 1741, Seq. ID No. 2811, Seq. ID No. 2813, Seq. ID No. 3619, Seq. ID No. 5587, Seq. ID No. 5589, Seq. ID No. 5591, Seq. ID No. 5781, Seq. ID No. 5783, and Seq. ID No. 6103.

[0023] In another preferred embodiment, the invention comprises an isolated polynucleotide of the Alloiococcus otitidis genomic sequence encoding a lipoprotein as predicted by HMM Lipo software program, and the polynucleotide is selected from Seq. ID No. 45, Seq. ID No. 47, Seq. ID No. 171, Seq. ID No. 225, Seq. ID No. 419, Seq. ID No. 513, Seq. ID No. 575, Seq. ID No. 591, Seq. ID No. 593, Seq. ID No. 657, Seq. ID No. 659, Seq. ID No. 669, Seq. ID No. 675, Seq. ID No. 745, Seq. ID No. 747, Seq. ID No. 935, Seq. ID No. 1045, Seq. ID No. 1075, Seq. ID No. 1137, Seq. ID No. 1173, Seq. ID No. 1191, Seq. ID No. 1193, Seq. ID No. 1195, Seq. ID No. 1563, Seq. ID No. 1661, Seq. ID No. 1663, Seq. ID No. 1665, Seq. ID No. 1791, Seq. ID No. 1797, Seq. ID No. 1917, Seq. ID No. 1969, Seq. ID No. 2115, Seq. ID No. 2159, Seq. ID No. 2429, Seq. ID No. 2527, Seq. ID No. 2699, Seq. ID No. 2815, Seq. ID No. 2875, Seq. ID No. 2975, Seq. ID No. 2977, Seq. ID No. 2991, Seq. ID No. 3043, Seq. ID No. 3323, Seq. ID No. 3337, Seq. ID No. 4133, Seq. ID No. 4137, Seq. ID No. 4481, Seq. ID No. 4705, Seq. ID No. 4827, Seq. ID No. 4869, Seq. ID No. 5115, Seq. ID No. 5377, Seq. ID No. 5379, Seq. ID No. 5491, Seq. ID No. 5509, Seq. ID No. 5513, Seq. ID No. 5525, Seq. ID No. 5529, Seq. ID No. 5531, Seq. ID No. 5889, Seq. ID No. 5909, Seq. ID No. 6025, Seq. ID No. 6027, Seq. ID No. 6087, Seq. ID No. 6089, Seq. ID No. 6325, Seq. ID No. 6327, Seq. ID No. 6415, Seq. ID No. 6637, Seq. ID No. 6639, and Seq. ID No. 6645.

[0024] In another preferred embodiment, the invention comprises an isolated polynucleotide of the Alloiococcus otitidis genomic sequence encoding a polypeptide, wherein the polypeptide encoded by the polynucleotide is predicted by HMM program to be non-covalently bound to the peptidoglycan layer, and the polynucleotide is selected from Seq. ID No. 3589, Seq. ID No. 3987, Seq. ID No. 5219, and Seq. ID No. 5337.

[0025] In another preferred embodiment, the invention comprises an isolated polynucleotide of the Alloiococcus otitidis genomic sequence encoding a polypeptide, wherein the polypeptide encodes a polypeptide having a RGDX motif wherein X is not a proline, and the polynucleotide is selected from Seq. ID No. 37, Seq. ID No. 99, Seq. ID No. 107, Seq. ID No. 109, Seq. ID No. 111, Seq. ID No. 351, Seq. ID No. 353, Seq. ID No. 465, Seq. ID No. 467, Seq. ID No. 469, Seq. ID No. 471, Seq. ID No. 683, Seq. ID No. 821, Seq. ID No. 823, Seq. ID No. 1021, Seq. ID No. 1023, Seq. ID No. 1157, Seq. ID No. 1159, Seq. ID No. 1233, Seq. ID No. 1333, Seq. ID No. 1335, Seq. ID No. 1449, Seq. ID No. 1559, Seq. ID No. 1561, Seq. ID No. 1563, Seq. ID No. 1625, Seq. ID No. 1777, Seq. ID No. 1827, Seq. ID No. 1829, Seq. ID No. 1871, Seq. ID No. 1925, Seq. ID No. 2135, Seq. ID No. 2145, Seq. ID No. 2173, Seq. ID No. 2175, Seq. ID No. 2177, Seq. ID No. 2179, Seq. ID No. 2259, Seq. ID No. 2317, Seq. ID No. 2319, Seq. ID No. 2321, Seq. ID No. 2323, Seq. ID No. 2325, Seq. ID No. 2327, Seq. ID No. 2329, Seq. ID No. 2401, Seq. ID No. 2671, Seq. ID No. 2863, Seq. ID No. 2869, Seq. ID No. 2919, Seq. ID No. 2921, Seq. ID No. 2993, Seq. ID No. 3087, Seq. ID No. 3137, Seq. ID No. 3279, Seq. ID No. 3281, Seq. ID No. 3283, Seq. ID No. 3333, Seq. ID No. 3335, Seq. ID No. 3497, Seq. ID No. 3499, Seq. ID No. 3501, Seq. ID No. 3533, Seq. ID No. 3671, Seq. ID No. 3673, Seq. ID No. 3675, Seq. ID No. 3837, Seq. ID No. 3839, Seq. ID No. 3841, Seq. ID No. 3843, Seq. ID No. 3929, Seq. ID No. 3961, Seq. ID No. 4037, Seq. ID No. 4193, Seq. ID No. 4239, Seq. ID No. 4327, Seq. ID No. 4329, Seq. ID No. 4333, Seq. ID No. 4393, Seq. ID No. 4463, Seq. ID No. 4465, Seq. ID No. 4467, Seq. ID No. 4597, Seq. ID No. 4629, Seq. ID No. 4631, Seq. ID No. 4675, Seq. ID No. 4677, Seq. ID No. 4679, Seq. ID No. 4689, Seq. ID No. 4691, Seq. ID No. 4693, Seq. ID No. 4781, Seq. ID No. 4799, Seq. ID No. 4801, Seq. ID No. 4803, Seq. ID No. 4861, Seq. ID No. 5009, Seq. ID No. 5143, Seq. ID No. 5145, Seq. ID No. 5179, Seq. ID No. 5181, Seq. ID No. 5183, Seq. ID No. 5249, Seq. ID No. 5251, Seq. ID No. 5253, Seq. ID No. 5259, Seq. ID No. 5261, Seq. ID No. 5293, Seq. ID No. 5295, Seq. ID No. 5297, Seq. ID No. 5299, Seq. ID No. 5307, Seq. ID No. 5309, Seq. ID No. 5411, Seq. ID No. 5535, Seq. ID No. 5537, Seq. ID No. 5745, Seq. ID No. 5821, Seq. ID No. 5823, Seq. ID No. 5825, Seq. ID No. 6029, Seq. ID No. 6171, Seq. ID No. 6307, Seq. ID No. 6309, and Seq. ID No. 6311.

[0026] In another preferred embodiment, the polynucleotide is selected from the Alloiococcus otitidis polynucleotides that are predicted by BlastP analysis as encoding polypeptides involved in capsule biosynthesis and transport, and the polynucleotide is selected from Seq. ID No. 49, Seq. ID No. 51, Seq. ID No. 53, Seq. ID No. 59, Seq. ID No. 195, Seq. ID No. 689, Seq. ID No. 703, Seq. ID No. 925, Seq. ID No. 1597, Seq. ID No. 1601, Seq. ID No. 1607, Seq. ID No. 1611, Seq. ID No. 1613, Seq. ID No. 1713, Seq. ID No. 2029, Seq. ID No. 2263, Seq. ID No. 2269, Seq. ID No. 2373, Seq. ID No. 2437, Seq. ID No. 2651, Seq. ID No. 2767, Seq. ID No. 2907, Seq. ID No. 3397, Seq. ID No. 3399, Seq. ID No. 3479, Seq. ID No. 3487, Seq. ID No. 3491, Seq. ID No. 3493, Seq. ID No. 3495, Seq. ID No. 3497, Seq. ID No. 3519, Seq. ID No. 3521, Seq. ID No. 3529, Seq. ID No. 3535, Seq. ID No. 3561, Seq. ID No. 3883, Seq. ID No. 3891, Seq. ID No. 3981, and Seq. ID No. 4087.

[0027] In yet another preferred embodiment, the polynucleotide is selected from the Alloiococcus otitidis polynucleotides that encodes a polypeptide identified by BlastP analysis as being localized within the capsular loci of the Alloiococcus otitidis genome, and the polynucleotide is selected from one of Seq. ID No. 45, Seq. ID No. 47, Seq. ID No. 51, Seq. ID No. 53, Seq. ID No. 55, Seq. ID No. 57, Seq. ID No. 59, Seq. ID No. 683, Seq. ID No. 685, Seq. ID No. 687, Seq. ID No. 689, Seq. ID No. 691, Seq. ID No. 693, Seq. ID No. 695, Seq. ID No. 697, Seq. ID No. 699, Seq. ID No. 701, Seq. ID No. 703, Seq. ID No. 705, Seq. ID No. 707, Seq. ID No. 709, Seq. ID No. 711, Seq. ID No. 713, Seq. ID No. 715, Seq. ID No. 717, Seq. ID No. 719, Seq. ID No. 721, Seq. ID No. 723, Seq. ID No. 725, Seq. ID No. 727, Seq. ID No. 729, Seq. ID No. 731, Seq. ID No. 733, Seq. ID No. 735, Seq. ID No. 737, Seq. ID No. 739, Seq. ID No. 741, Seq. ID No. 743, Seq. ID No. 745, Seq. ID No. 747, Seq. ID No. 749, Seq. ID No. 751, Seq. ID No. 753, Seq. ID No. 3389, Seq. ID No. 3391, Seq. ID No. 3393, Seq. ID No. 3395, Seq. ID No. 3397, Seq. ID No. 3399, Seq. ID No. 3401, Seq. ID No. 3403, Seq. ID No. 3405, Seq. ID No. 3407, Seq. ID No. 3409, Seq. ID No. 3411, Seq. ID No. 3413, Seq. ID No. 3415, Seq. ID No. 3417, Seq. ID No. 3419, Seq. ID No. 3421, Seq. ID No. 3423, Seq. ID No. 3425, Seq. ID No. 3427, Seq. ID No. 3429, Seq. ID No. 3431, Seq. ID No. 3433, Seq. ID No. 3435, Seq. ID No. 3437, Seq. ID No. 3439, Seq. ID No. 3441, Seq. ID No. 3443, Seq. ID No. 3445, Seq. ID No. 3447, Seq. ID No. 3449, Seq. ID No. 3451, Seq. ID No. 3453, Seq. ID No. 3455, Seq. ID No. 3457, Seq. ID No. 3459, Seq. ID No. 3461, Seq. ID No. 3463, Seq. ID No. 3465, Seq. ID No. 3467, Seq. ID No. 3469, Seq. ID No. 3471, Seq. ID No. 3473, Seq. ID No. 3475, Seq. ID No. 3477, Seq. ID No. 3479, Seq. ID No. 3481, Seq. ID No. 3483, Seq. ID No. 3485, Seq. ID No. 3487, Seq. ID No. 3489, Seq. ID No. 3491, Seq. ID No. 3493, Seq. ID No. 3495, Seq. ID No. 3497, Seq. ID No. 3499, Seq. ID No. 3501, Seq. ID No. 3503, Seq. ID No. 3505, Seq. ID No. 3507, Seq. ID No. 3509, Seq. ID No. 3511, Seq. ID No. 3513, Seq. ID No. 3515, Seq. ID No. 3517, Seq. ID No. 3519, Seq. ID No. 3521, Seq. ID No. 3523, Seq. ID No. 3525, Seq. ID No. 3527, Seq. ID No. 3529, Seq. ID No. 3531, Seq. ID No. 3533, Seq. ID No. 3535, Seq. ID No. 3537, Seq. ID No. 3539, Seq. ID No. 3541, Seq. ID No. 3543, Seq. ID No. 3545, Seq. ID No. 3547, Seq. ID No. 3549, Seq. ID No. 3551, Seq. ID No. 3553, Seq. ID No. 3555, Seq. ID No. 3557, Seq. ID No. 3559, and Seq. ID No. 3561.

[0028] In another preferred embodiment, the polynucleotide is selected from the Alloiococcus otitidis polynucleotides identified by BlastP analysis as encoding polypeptides, which are associated with sporulation, and the polynucleotide is selected from one of Seq. ID No. 1137, Seq. ID No. 1455, Seq. ID No. 2137, Seq. ID No. 2141, Seq. ID No. 2165, Seq. ID No. 2179, Seq. ID No. 2301, Seq. ID No. 2753, Seq. ID No. 4211, Seq. ID No. 4251, Seq. ID No. 4327, Seq. ID No. 4569, Seq. ID No. 4719, and Seq. ID No. 4729.

[0029] In another preferred embodiment, the polynucleotide is selected from the Alloiococcus otitidis polynucleotides identified by BlastP analysis as being unique and having a BlastP ‘E’ value of >e⁻¹⁰, and the polynucleotide is selected from one of Seq. ID No. 7, Seq. ID No. 19, Seq. ID No. 21, Seq. ID No. 23, Seq. ID No. 31, Seq. ID No. 39, Seq. ID No. 65, Seq. ID No. 67, Seq. ID No. 69, Seq. ID No. 91, Seq. ID No. 99, Seq. ID No. 105, Seq. ID No. 113, Seq. ID No. 115, Seq. ID No. 123, Seq. ID No. 125, Seq. ID No. 127, Seq. ID No. 131, Seq. ID No. 133, Seq. ID No. 139, Seq. ID No. 151, Seq. ID No. 159, Seq. ID No. 161, Seq. ID No. 163, Seq. ID No. 165, Seq. ID No. 169, Seq. ID No. 185, Seq. ID No. 189, Seq. ID No. 193, Seq. ID No. 229, Seq. ID No. 231, Seq. ID No. 255, Seq. ID No. 257, Seq. ID No. 259, Seq. ID No. 275, Seq. ID No. 337, Seq. ID No. 339, Seq. ID No. 347, Seq. ID No. 349, Seq. ID No. 357, Seq. ID No. 359, Seq. ID No. 369, Seq. ID No. 371, Seq. ID No. 377, Seq. ID No. 385, Seq. ID No. 387, Seq. ID No. 393, Seq. ID No. 399, Seq. ID No. 401, Seq. ID No. 403, Seq. ID No. 407, Seq. ID No. 419, Seq. ID No. 431, Seq. ID No. 477, Seq. ID No. 495, Seq. ID No. 507, Seq. ID No. 519, Seq. ID No. 541, Seq. ID No. 545, Seq. ID No. 547, Seq. ID No. 549, Seq. ID No. 557, Seq. ID No. 589, Seq. ID No. 617, Seq. ID No. 619, Seq. ID No. 633, Seq. ID No. 639, Seq. ID No. 641, Seq. ID No. 643, Seq. ID No. 645, Seq. ID No. 647, Seq. ID No. 651, Seq. ID No. 653, Seq. ID No. 655, Seq. ID No. 667, Seq. ID No. 691, Seq. ID No. 693, Seq. ID No. 695, Seq. ID No. 697, Seq. ID No. 715, Seq. ID No. 717, Seq. ID No. 719, Seq. ID No. 731, Seq. ID No. 733, Seq. ID No. 741, Seq. ID No. 743, Seq. ID No. 745, Seq. ID No. 747, Seq. ID No. 749, Seq. ID No. 751, Seq. ID No. 755, Seq. ID No. 757, Seq. ID No. 759, Seq. ID No. 761, Seq. ID No. 763, Seq. ID No. 765, Seq. ID No. 767, Seq. ID No. 801, Seq. ID No. 803, Seq. ID No. 805, Seq. ID No. 807, Seq. ID No. 809, Seq. ID No. 811, Seq. ID No. 813, Seq. ID No. 833, Seq. ID No. 841, Seq. ID No. 849, Seq. ID No. 851, Seq. ID No. 853, Seq. ID No. 855, Seq. ID No. 887, Seq. ID No. 889, Seq. ID No. 891, Seq. ID No. 903, Seq. ID No. 905, Seq. ID No. 909, Seq. ID No. 937, Seq. ID No. 941, Seq. ID No. 943, Seq. ID No. 951, Seq. ID No. 957, Seq. ID No. 973, Seq. ID No. 975, Seq. ID No. 987, Seq. ID No. 1005, Seq. ID No. 1007, Seq. ID No. 1009, Seq. ID No. 1011, Seq. ID No. 1019, Seq. ID No. 1025, Seq. ID No. 1027, Seq. ID No. 1045, Seq. ID No. 1047, Seq. ID No. 1071, Seq. ID No. 1073, Seq. ID No. 1077, Seq. ID No. 1105, Seq. ID No. 1107, Seq. ID No. 1111, Seq. ID No. 1131, Seq. ID No. 1135, Seq. ID No. 1139, Seq. ID No. 1151, Seq. ID No. 1153, Seq. ID No. 1165, Seq. ID No. 1167, Seq. ID No. 1169, Seq. ID No. 1171, Seq. ID No. 1173, Seq. ID No. 1181, Seq. ID No. 1183, Seq. ID No. 1185, Seq. ID No. 1187, Seq. ID No. 1189, Seq. ID No. 1191, Seq. ID No. 1193, Seq. ID No. 1195, Seq. ID No. 1197, Seq. ID No. 1199, Seq. ID No. 1201, Seq. ID No. 1203, Seq. ID No. 1207, Seq. ID No. 1213, Seq. ID No. 1227, Seq. ID No. 1229, Seq. ID No. 1239, Seq. ID No. 1243, Seq. ID No. 1245, Seq. ID No. 1247, Seq. ID No. 1249, Seq. ID No. 1259, Seq. ID No. 1265, Seq. ID No. 1267, Seq. ID No. 1269, Seq. ID No. 1271, Seq. ID No. 1273, Seq. ID No. 1275, Seq. ID No. 1277, Seq. ID No. 1279, Seq. ID No. 1281, Seq. ID No. 1283, Seq. ID No. 1285, Seq. ID No. 1287, Seq. ID No. 1289, Seq. ID No. 1291, Seq. ID No. 1293, Seq. ID No. 1295, Seq. ID No. 1297, Seq. ID No. 1299, Seq. ID No. 1301, Seq. ID No. 1303, Seq. ID No. 1305, Seq. ID No. 1307, Seq. ID No. 1309, Seq. ID No. 1311, Seq. ID No. 1313, Seq. ID No. 1319, Seq. ID No. 1321, Seq. ID No. 1323, Seq. ID No. 1325, Seq. ID No. 1327, Seq. ID No. 1337, Seq. ID No. 1341, Seq. ID No. 1343, Seq. ID No. 1347, Seq. ID No. 1349, Seq. ID No. 1351, Seq. ID No. 1353, Seq. ID No. 1355, Seq. ID No. 1371, Seq. ID No. 1379, Seq. ID No. 1381, Seq. ID No. 1389, Seq. ID No. 1397, Seq. ID No. 1399, Seq. ID No. 1401, Seq. ID No. 1417, Seq. ID No. 1419, Seq. ID No. 1421, Seq. ID No. 1423, Seq. ID No. 1439, Seq. ID No. 1445, Seq. ID No. 1447, Seq. ID No. 1457, Seq. ID No. 1465, Seq. ID No. 1479, Seq. ID No. 1511, Seq. ID No. 1551, Seq. ID No. 1553, Seq. ID No. 1555, Seq. ID No. 1557, Seq. ID No. 1579, Seq. ID No. 1609, Seq. ID No. 1621, Seq. ID No. 1623, Seq. ID No. 1625, Seq. ID No. 1627, Seq. ID No. 1629, Seq. ID No. 1631, Seq. ID No. 1633, Seq. ID No. 1639, Seq. ID No. 1643, Seq. ID No. 1655, Seq. ID No. 1667, Seq. ID No. 1671, Seq. ID No. 1693, Seq. ID No. 1695, Seq. ID No. 1701, Seq. ID No. 1703, Seq. ID No. 1705, Seq. ID No. 1721, Seq. ID No. 1723, Seq. ID No. 1731, Seq. ID No. 1737,.Seq. ID No. 1743, Seq. ID No. 1759, Seq. ID No. 1763, Seq. ID No. 1773, Seq. ID No. 1775, Seq. ID No. 1777, Seq. ID No. 1779, Seq. ID No. 1781, Seq. ID No. 1799, Seq. ID No. 1801, Seq. ID No. 1803, Seq. ID No. 1807, Seq. ID No. 1823, Seq. ID No. 1831, Seq. ID No. 1851, Seq. ID No. 1857, Seq. ID No. 1875, Seq. ID No. 1899, Seq. ID No. 1915, Seq. ID No. 1927, Seq. ID No. 1929, Seq. ID No. 1973, Seq. ID No. 1977, Seq. ID No. 1981, Seq. ID No. 2005, Seq. ID No. 2007, Seq. ID No. 2009, Seq. ID No. 2011, Seq. ID No. 2017, Seq. ID No. 2019, Seq. ID No. 2023, Seq. ID No. 2025, Seq. ID No. 2027, Seq. ID No. 2039, Seq. ID No. 2041, Seq. ID No. 2043, Seq. ID No. 2045, Seq. ID No. 2049, Seq. ID No. 2081, Seq. ID No. 2083, Seq. ID No. 2085, Seq. ID No. 2105, Seq. ID No. 2107, Seq. ID No. 2109, Seq. ID No. 2111, Seq. ID No. 2129, Seq. ID No. 2131, Seq. ID No. 2133, Seq. ID No. 2145, Seq. ID No. 2155, Seq. ID No. 2157, Seq. ID No. 2159, Seq. ID No. 2161, Seq. ID No. 2171, Seq. ID No. 2187, Seq. ID No. 2189, Seq. ID No. 2201, Seq. ID No. 2203, Seq. ID No. 2209, Seq. ID No. 2211, Seq. ID No. 2219, Seq. ID No. 2225, Seq. ID No. 2243, Seq. ID No. 2245, Seq. ID No. 2247, Seq. ID No. 2249, Seq. ID No. 2251, Seq. ID No. 2255, Seq. ID No. 2277, Seq. ID No. 2279, Seq. ID No. 2341, Seq. ID No. 2351, Seq. ID No. 2353, Seq. ID No. 2355, Seq. ID No. 2357, Seq. ID No. 2359, Seq. ID No. 2365, Seq. ID No. 2367, Seq. ID No. 2371, Seq. ID No. 2375, Seq. ID No. 2393, Seq. ID No. 2395, Seq. ID No. 2425, Seq. ID No. 2427, Seq. ID No. 2431, Seq. ID No. 2439, Seq. ID No. 2441, Seq. ID No. 2443, Seq. ID No. 2447, Seq. ID No. 2459, Seq. ID No. 2479, Seq. ID No. 2493, Seq. ID No. 2501, Seq. ID No. 2503, Seq. ID No. 2521, Seq. ID No. 2523, Seq. ID No. 2527, Seq. ID No. 2591, Seq. ID No. 2601, Seq. ID No. 2603, Seq. ID No. 2611, Seq. ID No. 2627, Seq. ID No. 2629, Seq. ID No. 2653, Seq. ID No. 2661, Seq. ID No. 2691, Seq. ID No. 2695, Seq. ID No. 2697, Seq. ID No. 2717, Seq. ID No. 2729, Seq. ID No. 2731, Seq. ID No. 2733, Seq. ID No. 2735, Seq. ID No. 2739, Seq. ID No. 2741, Seq. ID No. 2743, Seq. ID No. 2777, Seq. ID No. 2779, Seq. ID No. 2781, Seq. ID No. 2783, Seq. ID No. 2801, Seq. ID No. 2805, Seq. ID No. 2807, Seq. ID No. 2809, Seq. ID No. 2811, Seq. ID No. 2813, Seq. ID No. 2815, Seq. ID No. 2817, Seq. ID No. 2819, Seq. ID No. 2829, Seq. ID No. 2831, Seq. ID No. 2833, Seq. ID No. 2835, Seq. ID No. 2837, Seq. ID No. 2839, Seq. ID No. 2841, Seq. ID No. 2845, Seq. ID No. 2849, Seq. ID No. 2851, Seq. ID No. 2853, Seq. ID No. 2855, Seq. ID No. 2857, Seq. ID No. 2859, Seq. ID No. 2861, Seq. ID No. 2865, Seq. ID No. 2873, Seq. ID No. 2875, Seq. ID No. 2877, Seq. ID No. 2883, Seq. ID No. 2885, Seq. ID No. 2887, Seq. ID No. 2889, Seq. ID No. 2893, Seq. ID No. 2895, Seq. ID No. 2903, Seq. ID No. 2909, Seq. ID No. 2935, Seq. ID No. 2937, Seq. ID No. 2939, Seq. ID No. 2941, Seq. ID No. 2943, Seq. ID No. 2945, Seq. ID No. 2947, Seq. ID No. 2949, Seq. ID No. 2951, Seq. ID No. 2953, Seq. ID No. 2965, Seq. ID No. 2967, Seq. ID No. 2973, Seq. ID No. 2975, Seq. ID No. 2977, Seq. ID No. 2981, Seq. ID No. 2983, Seq. ID No. 2985, Seq. ID No. 2987, Seq. ID No. 2989, Seq. ID No. 2991, Seq. ID No. 3001, Seq. ID No. 3007, Seq. ID No. 3009, Seq. ID No. 3011, Seq. ID No. 3021, Seq. ID No. 3023, Seq. ID No. 3041, Seq. ID No. 3045, Seq. ID No. 3071, Seq. ID No. 3087, Seq. ID No. 3105, Seq. ID No. 3107, Seq. ID No. 3119, Seq. ID No. 3121, Seq. ID No. 3123, Seq. ID No. 3151, Seq. ID No. 3153, Seq. ID No. 3167, Seq. ID No. 3173, Seq. ID No. 3175, Seq. ID No. 3177, Seq. ID No. 3181, Seq. ID No. 3193, Seq. ID No. 3213, Seq. ID No. 3215, Seq. ID No. 3217, Seq. ID No. 3219, Seq. ID No. 3221, Seq. ID No. 3223, Seq. ID No. 3231, Seq. ID No. 3233, Seq. ID No. 3235, Seq. ID No. 3237, Seq. ID No. 3239, Seq. ID No. 3241, Seq. ID No. 3243, Seq. ID No. 3245, Seq. ID No. 3247, Seq. ID No. 3249, Seq. ID No. 3261, Seq. ID No. 3263, Seq. ID No. 3265, Seq. ID No. 3267, Seq. ID No. 3269, Seq. ID No. 3271, Seq. ID No. 3273, Seq. ID No. 3275, Seq. ID No. 3277, Seq. ID No. 3325, Seq. ID No. 3331, Seq. ID No. 3339, Seq. ID No. 3341, Seq. ID No. 3349, Seq. ID No. 3361, Seq. ID No. 3363, Seq. ID No. 3369, Seq. ID No. 3371, Seq. ID No. 3389, Seq. ID No. 3403, Seq. ID No. 3417, Seq. ID No. 3419, Seq. ID No. 3421, Seq. ID No. 3433, Seq. ID No. 3437, Seq. ID No. 3441, Seq. ID No. 3443, Seq. ID No. 3445, Seq. ID No. 3447, Seq. ID No. 3473, Seq. ID No. 3481, Seq. ID No. 3483, Seq. ID No. 3489, Seq. ID No. 3503, Seq. ID No. 3505, Seq. ID No. 3509, Seq. ID No. 3511, Seq. ID No. 3523, Seq. ID No. 3525, Seq. ID No. 3531, Seq. ID No. 3533, Seq. ID No. 3539, Seq. ID No. 3541, Seq. ID No. 3543, Seq. ID No. 3545, Seq. ID No. 3547, Seq. ID No. 3555, Seq. ID No. 3557, Seq. ID No. 3563, Seq. ID No. 3565, Seq. ID No. 3571, Seq. ID No. 3573, Seq. ID No. 3581, Seq. ID No. 3587, Seq. ID No. 3591, Seq. ID No. 3593, Seq. ID No. 3595, Seq. ID No. 3611, Seq. ID No. 3613, Seq. ID No. 3617, Seq. ID No. 3619, Seq. ID No. 3621, Seq. ID No. 3623, Seq. ID No. 3625, Seq. ID No. 3631, Seq. ID No. 3637, Seq. ID No. 3639, Seq. ID No. 3655, Seq. ID No. 3657, Seq. ID No. 3659, Seq. ID No. 3661, Seq. ID No. 3677, Seq. ID No. 3679, Seq. ID No. 3683, Seq. ID No. 3685, Seq. ID No. 3701, Seq. ID No. 3703, Seq. ID No. 3717, Seq. ID No. 3719, Seq. ID No. 3721, Seq. ID No. 3723, Seq. ID No. 3729, Seq. ID No. 3731, Seq. ID No. 3733, Seq. ID No. 3735, Seq. ID No. 3737, Seq. ID No. 3739, Seq. ID No. 3741, Seq. ID No. 3749, Seq. ID No. 3751, Seq. ID No. 3753, Seq. ID No. 3755, Seq. ID No. 3761, Seq. ID No. 3781, Seq. ID No. 3783, Seq. ID No. 3785, Seq. ID No. 3787, Seq. ID No. 3789, Seq. ID No. 3791, Seq. ID No. 3799, Seq. ID No. 3807, Seq. ID No. 3809, Seq. ID No. 3811, Se4. ID No. 3813, Seq. ID No. 3815, Seq. ID No. 3817, Seq. ID No. 3827, Seq. ID No. 3829, Seq. ID No. 3831, Seq. ID No. 3833, Seq. ID No. 3835, Seq. ID No. 3849, Seq. ID No. 3879, Seq. ID No. 3881, Seq. ID No. 3895, Seq. ID No. 3903, Seq. ID No. 3909, Seq. ID No. 3915, Seq. ID No. 3939, Seq. ID No. 3959, Seq. ID No. 3961, Seq. ID No. 3963, Seq. ID No. 3965, Seq. ID No. 3973, Seq. ID No. 3977, Seq. ID No. 3979, Seq. ID No. 3993, Seq. ID No. 3995, Seq. ID No. 3997, Seq. ID No. 4005, Seq. ID No. 4007, Seq. ID No. 4009, Seq. ID No. 4041, Seq. ID No. 4043, Seq. ID No. 4045, Seq. ID No. 4069, Seq. ID No. 4077, Seq. ID No. 4097, Seq. ID No. 4113, Seq. ID No. 4123, Seq. ID No. 4131, Seq. ID No. 4133, Seq. ID No. 4135, Seq. ID No. 4139, Seq. ID No. 4151, Seq. ID No. 4153, Seq. ID No. 4155, Seq. ID No. 4181, Seq. ID No. 4221, Seq. ID No. 4241, Seq. ID No. 4253, Seq. ID No. 4257, Seq. ID No. 4259, Seq. ID No. 4261, Seq. ID No. 4263, Seq. ID No. 4265, Seq. ID No. 4269, Seq. ID No. 4275, Seq. ID No. 4277, Seq. ID No. 4279, Seq. ID No. 4281, Seq. ID No. 4285, Seq. ID No. 4287, Seq. ID No. 4297, Seq. ID No. 4305, Seq. ID No. 4307, Seq. ID No. 4363, Seq. ID No. 4365, Seq. ID No. 4371, Seq. ID No. 4373, Seq. ID No. 4395, Seq. ID No. 4399, Seq. ID No. 4403, Seq. ID No. 4425, Seq. ID No. 4437, Seq. ID No. 4439, Seq. ID No. 4441, Seq. ID No. 4453, Seq. ID No. 4455, Seq. ID No. 4513, Seq. ID No. 4515, Seq. ID No. 4551, Seq. ID No. 4561, Seq. ID No. 4573, Seq. ID No. 4575, Seq. ID No. 4587, Seq. ID No. 4589, Seq. ID No. 4591, Seq. ID No. 4593, Seq. ID No. 4595, Seq. ID No. 4617, Seq. ID No. 4619, Seq. ID No. 4621, Seq. ID No. 4625, Seq. ID No. 4627, Seq. ID No. 4633, Seq. ID No. 4635, Seq. ID No. 4637, Seq. ID No. 4639, Seq. ID No. 4659, Seq. ID No. 4681, Seq. ID No. 4687, Seq. ID No. 4695, Seq. ID No. 4699, Seq. ID No. 4701, Seq. ID No. 4721, Seq. ID No. 4735, Seq. ID No. 4737, Seq. ID No. 4741, Seq. ID No. 4783, Seq. ID No. 4789, Seq. ID No. 4805, Seq. ID No. 4811, Seq. ID No. 4817, Seq. ID No. 4819, Seq. ID No. 4821, Seq. ID No. 4823, Seq. ID No. 4835, Seq. ID No. 4853, Seq. ID No. 4885, Seq. ID No. 4913, Seq. ID No. 4923, Seq. ID No. 4949, Seq. ID No. 4951, Seq. ID No. 4975, Seq. ID No. 4981, Seq. ID No. 4983, Seq. ID No. 4987, Seq. ID No. 4993, Seq. ID No. 4999, Seq. ID No. 5001, Seq. ID No. 5011, Seq. ID No. 5013, Seq. ID No. 5023, Seq. ID No. 5031, Seq. ID No. 5033, Seq. ID No. 5035, Seq. ID No. 5037, Seq. ID No. 5041, Seq. ID No. 5043, Seq. ID No. 5053, Seq. ID No. 5061, Seq. ID No. 5063, Seq. ID No. 5085, Seq. ID No. 5093, Seq. ID No. 5151, Seq. ID No. 5153, Seq. ID No. 5159, Seq. ID No. 5161, Seq. ID No. 5167, Seq. ID No. 5173, Seq. ID No. 5175, Seq. ID No. 5177, Seq. ID No. 5189, Seq. ID No. 5191, Seq. ID No. 5193, Seq. ID No. 5197, Seq. ID No. 5199, Seq. ID No. 5221, Seq. ID No. 5223, Seq. ID No. 5225, Seq. ID No. 5227, Seq. ID No. 5237, Seq. ID No. 5267, Seq. ID No. 5269, Seq. ID No. 5271, Seq. ID No. 5281, Seq. ID No. 5301, Seq. ID No. 5303, Seq. ID No. 5315, Seq. ID No. 5321, Seq. ID No. 5327, Seq. ID No. 5347, Seq. ID No. 5385, Seq. ID No. 5445, Seq. ID No. 5447, Seq. ID No. 5459, Seq. ID No. 5465, Seq. ID No. 5467, Seq. ID No. 5479, Seq. ID No. 5481, Seq. ID No. 5485, Seq. ID No. 5487, Seq. ID No. 5515, Seq. ID No. 5517, Seq. ID No. 5533, Seq. ID No. 5543, Seq. ID No. 5545, Seq. ID No. 5549, Seq. ID No. 5569, Seq. ID No. 5577, Seq. ID No. 5593, Seq. ID No. 5595, Seq. ID No. 5609, Seq. ID No. 5623, Seq. ID No. 5625, Seq. ID No. 5639, Seq. ID No. 5641, Seq. ID No. 5643, Seq. ID No. 5649, Seq. ID No. 5659, Seq. ID No. 5661, Seq. ID No. 5663, Seq. ID No. 5667, Seq. ID No. 5671, Seq. ID No. 5687, Seq. ID No. 5689, Seq. ID No. 5703, Seq. ID No. 5705, Seq. ID No. 5709, Seq. ID No. 5711, Seq. ID No. 5737, Seq. ID No. 5739, Seq. ID No. 5745, Seq. ID No. 5751, Seq. ID No. 5763, Seq. ID No. 5797, Seq. ID No. 5811, Seq. ID No. 5813, Seq. ID No. 5815, Seq. ID No. 5827, Seq. ID No. 5829, Seq. ID No. 5843, Seq. ID No. 5845, Seq. ID No. 5873, Seq. ID No. 5879, Seq. ID No. 5883, Seq. ID No. 5885, Seq. ID No. 5887, Seq. ID No. 5889, Seq. ID No. 5891, Seq. ID No. 5931, Seq. ID No. 5955, Seq. ID No. 5963, Seq. ID No. 5965, Seq. ID No. 5975, Seq. ID No. 5983, Seq. ID No. 5985, Seq. ID No. 5987, Seq. ID No. 5989, Seq. ID No. 6005, Seq. ID No. 6013, Seq. ID No. 6031, Seq. ID No. 6035, Seq. ID No. 6045, Seq. ID No. 6059, Seq. ID No. 6061, Seq. ID No. 6063, Seq. ID No. 6073, Seq. ID No. 6081, Seq. ID No. 6091, Seq. ID No. 6093, Seq. ID No. 6127, Seq. ID No. 6159, Seq. ID No. 6197, Seq. ID No. 6199, Seq. ID No. 6203, Seq. ID No. 6217, Seq. ID No. 6221, Seq. ID No. 6223, Seq. ID No. 6237, Seq. ID No. 6239, Seq. ID No. 6241, Seq. ID No. 6245, Seq. ID No. 6247, Seq. ID No. 6249, Seq. ID No. 6259, Seq. ID No. 6265, Seq. ID No. 6267, Seq. ID No. 6273, Seq. ID No. 6283, Seq. ID No. 6285, Seq. ID No. 6323, Seq. ID No. 6325, Seq. ID No. 6327, Seq. ID No. 6361, Seq. ID No. 6363, Seq. ID No. 6377, Seq. ID No. 6381, Seq. ID No. 6401, Seq. ID No. 6403, Seq. ID No. 6419, Seq. ID No. 6425, Seq. ID No. 6427, Seq. ID No. 6429, Seq. ID No. 6431, Seq. ID No. 6433, Seq. ID No. 6435, Seq. ID No. 6437, Seq. ID No. 6439, Seq. ID No. 6447, Seq. ID No. 6449, Seq. ID No. 6451, Seq. ID No. 6453, Seq. ID No. 6455, Seq. ID No. 6457, Seq. ID No. 6465, Seq. ID No. 6467, Seq. ID No. 6469, Seq. ID No. 6471, Seq. ID No. 6473, Seq. ID No. 6475, Seq. ID No. 6477, Seq. ID No. 6479, Seq. ID No. 6481, Seq. ID No. 6483, Seq. ID No. 6485, Seq. ID No. 6487, Seq. ID No. 6489, Seq. ID No. 6491, Seq. ID No. 6495, Seq. ID No. 6497, Seq. ID No. 6507, Seq. ID No. 6517, Seq. ID No. 6519, Seq. ID No. 6521, Seq. ID No. 6523, Seq. ID No. 6525, Seq. ID No. 6527, Seq. ID No. 6529, Seq. ID No. 6533, Seq. ID No. 6539, Seq. ID No. 6541, Seq. ID No. 6543, Seq. ID No. 6555, Seq. ID No. 6557, Seq. ID No. 6561, Seq. ID No. 6563, Seq. ID No. 6565, Seq. ID No. 6567, Seq. ID No. 6569, Seq. ID No. 6571, Seq. ID No. 6573, Seq. ID No. 6581, Seq. ID No. 6583, Seq. ID No. 6631, Seq. ID No. 6635, Seq. ID No. 6637, Seq. ID No. 6639, Seq. ID No. 6643, Seq. ID No. 6645, Seq. ID No. 6647, and Seq. ID No. 6649.

[0030] In yet another preferred embodiment, the polynucleotide is selected from the Alloiococcus otitidis polynucleotides, which encode polypeptides, identified by Glimmer™ ORF finder program, and the polynucleotide is selected from one of Seq. ID No. 1, Seq. ID No. 5, Seq. ID No. 11, Seq. ID No. 13, Seq. ID No. 15, Seq. ID No. 17, Seq. ID No. 25, Seq. ID No. 27, Seq. ID No. 29, Seq. ID No. 35, Seq. ID No. 37, Seq. ID No. 41, Seq. ID No. 43, Seq. ID No. 47, Seq. ID No. 51, Seq. ID No. 53, Seq. ID No. 59, Seq. ID No. 63, Seq. ID No. 69, Seq. ID No. 73, Seq. ID No. 75, Seq. ID No. 81, Seq. ID No. 83, Seq. ID No. 89, Seq. ID No. 93, Seq. ID No. 97, Seq. ID No. 103, Seq. ID No. 111, Seq. ID No. 121, Seq. ID No. 125, Seq. ID No. 129, Seq. ID No. 135, Seq. ID No. 137, Seq. ID No. 145, Seq. ID No. 149, Seq. ID No. 157, Seq. ID No. 167, Seq. ID No. 173, Seq. ID No. 183, Seq. ID No. 187, Seq. ID No. 189, Seq. ID No. 191, Seq. ID No. 195, Seq. ID No. 197, Seq. ID No. 203, Seq. ID No. 207, Seq. ID No. 215, Seq. ID No. 219, Seq. ID No. 223, Seq. ID No. 225, Seq. ID No. 227, Seq. ID No. 231, Seq. ID No. 233, Seq. ID No. 239, Seq. ID No. 241, Seq. ID No. 247, Seq. ID No. 253, Seq. ID No. 261, Seq. ID No. 265, Seq. ID No. 269, Seq. ID No. 273, Seq. ID No. 275, Seq. ID No. 277, Seq. ID No. 283, Seq. ID No. 291, Seq. ID No. 293, Seq. ID No. 297, Seq. ID No. 301, Seq. ID No. 307, Seq. ID No. 309, Seq. ID No. 313, Seq. ID No. 317, Seq. ID No. 321, Seq. ID No. 325, Seq. ID No. 335, Seq. ID No. 343, Seq. ID No. 345, Seq. ID No. 353, Seq. ID No. 355, Seq. ID No. 361, Seq. ID No. 363, Seq. ID No. 367, Seq. ID No. 375, Seq. ID No. 379, Seq. ID No. 383, Seq. ID No. 389, Seq. ID No. 391, Seq. ID No. 397, Seq. ID No. 405, Seq. ID No. 411, Seq. ID No. 415, Seq. ID No. 417, Seq. ID No. 423, Seq. ID No. 425, Seq. ID No. 427, Seq. ID No. 429, Seq. ID No. 435, Seq. ID No. 437, Seq. ID No. 439, Seq. ID No. 441, Seq. ID No. 445, Seq. ID No. 447, Seq. ID No. 453, Seq. ID No. 461, Seq. ID No. 463, Seq. ID No. 471, Seq. ID No. 485, Seq. ID No. 501, Seq. ID No. 505, Seq. ID No. 511, Seq. ID No. 515, Seq. ID No. 517, Seq. ID No. 521, Seq. ID No. 523, Seq. ID No. 531, Seq. ID No. 533, Seq. ID No. 539, Seq. ID No. 541, Seq. ID No. 543, Seq. ID No. 551, Seq. ID No. 555, Seq. ID No. 561, Seq. ID No. 565, Seq. ID No. 569, Seq. ID No. 575, Seq. ID No. 579, Seq. ID No. 587, Seq. ID No. 593, Seq. ID No. 597, Seq. ID No. 603, Seq. ID No. 605, Seq. ID No. 609, Seq. ID No. 611, Seq. ID No. 613, Seq. ID No. 615, Seq. ID No. 623, Seq. ID No. 627, Seq. ID No. 629, Seq. ID No. 631, Seq. ID No. 635, Seq. ID No. 637, Seq. ID No. 647, Seq. ID No. 649, Seq. ID No. 661, Seq. ID No. 669, Seq. ID No. 673, Seq. ID No. 675, Seq. ID No. 681, Seq. ID No. 683, Seq. ID No. 689, Seq. ID No. 701, Seq. ID No. 703, Seq. ID No. 709, Seq. ID No. 713, Seq. ID No. 729, Seq. ID No. 733, Seq. ID No. 735, Seq. ID No. 737, Seq. ID No. 741, Seq. ID No. 747, Seq. ID No. 751, Seq. ID No. 753, Seq. ID No. 759, Seq. ID No. 765, Seq. ID No. 767, Seq. ID No. 771, Seq. ID No. 781, Seq. ID No. 783, Seq. ID No. 787, Seq. ID No. 791, Seq. ID No. 795, Seq. ID No. 799, Seq. ID No. 807, Seq. ID No. 817, Seq. ID No. 819, Seq. ID No. 823, Seq. ID No. 827, Seq. ID No. 831, Seq. ID No. 835, Seq. ID No. 837, Seq. ID No. 839, Seq. ID No. 847, Seq. ID No. 851, Seq. ID No. 855, Seq. ID No. 859, Seq. ID No. 867, Seq. ID No. 871, Seq. ID No. 875, Seq. ID No. 881, Seq. ID No. 885, Seq. ID No. 889, Seq. ID No. 891, Seq. ID No. 895, Seq. ID No. 901, Seq. ID No. 907, Seq. ID No. 915, Seq. ID No. 919, Seq. ID No. 925, Seq. ID No. 929, Seq. ID No. 935, Seq. ID No. 939, Seq. ID No. 949, Seq. ID No. 951, Seq. ID No. 955, Seq. ID No. 961, Seq. ID No. 965, Seq. ID No. 967, Seq. ID No. 971, Seq. ID No. 985, Seq. ID No. 993, Seq. ID No. 997, Seq. ID No. 1003, Seq. ID No. 1005, Seq. ID No. 1009, Seq. ID No. 1017, Seq. ID No. 1023, Seq. ID No. 1039, Seq. ID No. 1041, Seq. ID No. 1043, Seq. ID No. 1051, Seq. ID No. 1053, Seq. ID No. 1057, Seq. ID No. 1061, Seq. ID No. 1065, Seq. ID No. 1067, Seq. ID No. 1069, Seq. ID No. 1073, Seq. ID No. 1075, Seq. ID No. 1083, Seq. ID No. 1087, Seq. ID No. 1091, Seq. ID No. 1093, Seq. ID No. 1097, Seq. ID No. 1099, Seq. ID No. 1103, Seq. ID No. 1109, Seq. ID No. 1115, Seq. ID No. 1117, Seq. ID No. 1123, Seq. ID No. 1129, Seq. ID No. 1133, Seq. ID No. 1137, Seq. ID No. 1143, Seq. ID No. 1147, Seq. ID No. 1149, Seq. ID No. 1155, Seq. ID No. 1157, Seq. ID No. 1159, Seq. ID No. 1163, Seq. ID No. 1171, Seq. ID No. 1179, Seq. ID No. 1181, Seq. ID No. 1187, Seq. ID No. 1193, Seq. ID No. 1199, Seq. ID No. 1205, Seq. ID No. 1211, Seq. ID No. 1217, Seq. ID No. 1221, Seq. ID No. 1223, Seq. ID No. 1225, Seq. ID No. 1231, Seq. ID No. 1233, Seq. ID No. 1237, Seq. ID No. 1241, Seq. ID No. 1253, Seq. ID No. 1257, Seq. ID No. 1263, Seq. ID No. 1271, Seq. ID No. 1281, Seq. ID No. 1317, Seq. ID No. 1323, Seq. ID No. 1331, Seq. ID No. 1335, Seq. ID No. 1339, Seq. ID No. 1345, Seq. ID No. 1347, Seq. ID No. 1361, Seq. ID No. 1369, Seq. ID No. 1377, Seq. ID No. 1379, Seq. ID No. 1387, Seq. ID No. 1393, Seq. ID No. 1395, Seq. ID No. 1399, Seq. ID No. 1403, Seq. ID No. 1405, Seq. ID No. 1411, Seq. ID No. 1413, Seq. ID No. 1415, Seq. ID No. 1419, Seq. ID No. 1425, Seq. ID No. 1427, Seq. ID No. 1429, Seq. ID No. 1431, Seq. ID No. 1433, Seq. ID No. 1437, Seq. ID No. 1443, Seq. ID No. 1449, Seq. ID No. 1451, Seq. ID No. 1455, Seq. ID No. 1457, Seq. ID No. 1459, Seq. ID No. 1463, Seq. ID No. 1465, Seq. ID No. 1469, Seq. ID No. 1471, Seq. ID No. 1473, Seq. ID No. 1475, Seq. ID No. 1477, Seq. ID No. 1485, Seq. ID No. 1487, Seq. ID No. 1491, Seq. ID No. 1493, Seq. ID No. 1495, Seq. ID No. 1497, Seq. ID No. 1501, Seq. ID No. 1505, Seq. ID No. 1507, Seq. ID No. 1509, Seq. ID No. 1517, Seq. ID No. 1525, Seq. ID No. 1527, Seq. ID No. 1531, Seq. ID No. 1539, Seq. ID No. 1541, Seq. ID No. 1543, Seq. ID No. 1549, Seq. ID No. 1561, Seq. ID No. 1563, Seq. ID No. 1567, Seq. ID No. 1571, Seq. ID No. 1573, Seq. ID No. 1577, Seq. ID No. 1581, Seq. ID No. 1589, Seq. ID No. 1593, Seq. ID No. 1595, Seq. ID No. 1597, Seq. ID No. 1603, Seq. ID No. 1607, Seq. ID No. 1611, Seq. ID No. 1613, Seq. ID No. 1619, Seq. ID No. 1623, Seq. ID No. 1627, Seq. ID No. 1631, Seq. ID No. 1637, Seq. ID No. 1639, Seq. ID No. 1641, Seq. ID No. 1647, Seq. ID No. 1653, Seq. ID No. 1657, Seq. ID No. 1665, Seq. ID No. 1669, Seq. ID No. 1681, Seq. ID No. 1685, Seq. ID No. 1689, Seq. ID No. 1691, Seq. ID No. 1697, Seq. ID No. 1699, Seq. ID No. 1707, Seq. ID No. 1711, Seq. ID No. 1713, Seq. ID No. 1719, Seq. ID No. 1723, Seq. ID No. 1729, Seq. ID No. 1735, Seq. ID No. 1737, Seq. ID No. 1741, Seq. ID No. 1747, Seq. ID No. 1751, Seq. ID No. 1757, Seq. ID No. 1759, Seq. ID No. 1761, Seq. ID No. 1771, Seq. ID No. 1777, Seq. ID No. 1785, Seq. ID No. 1789, Seq. ID No. 1791, Seq. ID No. 1797, Seq. ID No. 1801, Seq. ID No. 1803, Seq. ID No. 1805, Seq. ID No. 1811, Seq. ID No. 1817, Seq. ID No. 1819, Seq. ID No. 1821, Seq. ID No. 1825, Seq. ID No. 1829, Seq. ID No. 1837, Seq. ID No. 1843, Seq. ID No. 1845, Seq. ID No. 1847, Seq. ID No. 1849, Seq. ID No. 1851, Seq. ID No. 1855, Seq. ID No. 1859, Seq. ID No. 1863, Seq. ID No. 1865, Seq. ID No. 1867, Seq. ID No. 1871, Seq. ID No. 1873, Seq. ID No. 1877, Seq. ID No. 1885, Seq. ID No. 1887, Seq. ID No. 1889, Seq. ID No. 1895, Seq. ID No. 1897, Seq. ID No. 1899, Seq. ID No. 1903, Seq. ID No. 1905, Seq. ID No. 1913, Seq. ID No. 1919, Seq. ID No. 1923, Seq. ID No. 1925, Seq. ID No. 1931, Seq. ID No. 1935, Seq. ID No. 1937, Seq. ID No. 1943, Seq. ID No. 1945, Seq. ID No. 1949, Seq. ID No. 1953, Seq. ID No. 1957, Seq. ID No. 1959, Seq. ID No. 1961, Seq. ID No. 1965, Seq. ID No. 1967, Seq. ID No. 1971, Seq. ID No. 1975, Seq. ID No. 1979, Seq. ID No. 1983, Seq. ID No. 1987, Seq. ID No. 1989, Seq. ID No. 1991, Seq. ID No. 1999, Seq. ID No. 2001, Seq. ID No. 2003, Seq. ID No. 2009, Seq. ID No. 2015, Seq. ID No. 2019, Seq. ID No. 2021, Seq. ID No. 2031, Seq. ID No. 2035, Seq. ID No. 2037, Seq. ID No. 2045, Seq. ID No. 2047, Seq. ID No. 2055, Seq. ID No. 2059, Seq. ID No. 2065, Seq. ID No. 2067, Seq. ID No. 2069, Seq. ID No. 2071, Seq. ID No. 2073, Seq. ID No. 2079, Seq. ID No. 2091, Seq. ID No. 2093, Seq. ID No. 2097, Seq. ID No. 2099, Seq. ID No. 2103, Seq. ID No. 2115, Seq. ID No. 2119, Seq. ID No. 2127, Seq. ID No. 2135, Seq. ID No. 2137, Seq. ID No. 2141, Seq. ID No. 2143, Seq. ID No. 2147, Seq. ID No. 2153, Seq. ID No. 2159, Seq. ID No. 2161, Seq. ID No. 2165, Seq. ID No. 2169, Seq. ID No. 2179, Seq. ID No. 2183, Seq. ID No. 2185, Seq. ID No. 2189, Seq. ID No. 2191, Seq. ID No. 2193, Seq. ID No. 2195, Seq. ID No. 2199, Seq. ID No. 2207, Seq. ID No. 2217, Seq. ID No. 2219, Seq. ID No. 2221, Seq. ID No. 2223, Seq. ID No. 2227, Seq. ID No. 2229, Seq. ID No. 2231, Seq. ID No. 2233, Seq. ID No. 2241, Seq. ID No. 2245, Seq. ID No. 2251, Seq. ID No. 2253, Seq. ID No. 2257, Seq. ID No. 2259, Seq. ID No. 2263, Seq. ID No. 2267, Seq. ID No. 2269, Seq. ID No. 2275, Seq. ID No. 2281, Seq. ID No. 2287, Seq. ID No. 2297, Seq. ID No. 2299, Seq. ID No. 2301, Seq. ID No. 2315, Seq. ID No. 2329, Seq. ID No. 2333, Seq. ID No. 2335, Seq. ID No. 2339, Seq. ID No. 2343, Seq. ID No. 2345, Seq. ID No. 2349, Seq. ID No. 2351, Seq. ID No. 2357, Seq. ID No. 2359, Seq. ID No. 2363, Seq. ID No. 2365, Seq. ID No. 2369, Seq. ID No. 2373, Seq. ID No. 2381, Seq. ID No. 2391, Seq. ID No. 2399, Seq. ID No. 2401, Seq. ID No. 2405, Seq. ID No. 2409, Seq. ID No. 2415, Seq. ID No. 2417, Seq. ID No. 2421, Seq. ID No. 2423, Seq. ID No. 2427, Seq. ID No. 2429, Seq. ID No. 2431, Seq. ID No. 2435, Seq. ID No. 2437, Seq. ID No. 2439, Seq. ID No. 2443, Seq. ID No. 2445, Seq. ID No. 2449, Seq. ID No. 2451, Seq. ID No. 2453, Seq. ID No. 2457, Seq. ID No. 2463, Seq. ID No. 2465, Seq. ID No. 2469, Seq. ID No. 2471, Seq. ID No. 2475, Seq. ID No. 2477, Seq. ID No. 2483, Seq. ID No. 2485, Seq. ID No. 2491, Seq. ID No. 2495, Seq. ID No. 2505, Seq. ID No. 2507, Seq. ID No. 2513, Seq. ID No. 2519, Seq. ID No. 2525, Seq. ID No. 2529, Seq. ID No. 2535, Seq. ID No. 2537, Seq. ID No. 2539, Seq. ID No. 2549, Seq. ID No. 2553, Seq. ID No. 2563, Seq. ID No. 2567, Seq. ID No. 2575, Seq. ID No. 2577, Seq. ID No. 2581, Seq. ID No. 2589, Seq. ID No. 2593, Seq. ID No. 2595, Seq. ID No. 2599, Seq. ID No. 2603, Seq. ID No. 2607, Seq. ID No. 2609, Seq. ID No. 2613, Seq. ID No. 2617, Seq. ID No. 2619, Seq. ID No. 2623, Seq. ID No. 2625, Seq. ID No. 2631, Seq. ID No. 2633, Seq. ID No. 2639, Seq. ID No. 2641, Seq. ID No. 2645, Seq. ID No. 2649, Seq. ID No. 2651, Seq. ID No. 2655, Seq. ID No. 2659, Seq. ID No. 2663, Seq. ID No. 2667, Seq. ID No. 2669, Seq. ID No. 2671, Seq. ID No. 2677, Seq. ID No. 26$7, Seq. ID No. 2689, Seq. ID No. 2693, Seq. ID No. 2699, Seq. ID No. 2703, Seq. ID No. 2709, Seq. ID No. 2711, Seq. ID No. 2715, Seq. ID No. 2719, Seq. ID No. 2725, Seq. ID No. 2727, Seq. ID No. 2737, Seq. ID No. 2743, Seq. ID No. 2747, Seq. ID No. 2751, Seq. ID No. 2753, Seq. ID No. 2759, Seq. ID No. 2763, Seq. ID No. 2765, Seq. ID No. 2767, Seq. ID No. 2771, Seq. ID No. 2773, Seq. ID No. 2775, Seq. ID No. 2781, Seq. ID No. 2787, Seq. ID No. 2789, Seq. ID No. 2791, Seq. ID No. 2793, Seq. ID No. 2797, Seq. ID No. 2799, Seq. ID No. 2803, Seq. ID No. 2805, Seq. ID No. 2811, Seq. ID No. 2815, Seq. ID No. 2823, Seq. ID No. 2827, Seq. ID No. 2843, Seq. ID No. 2847, Seq. ID No. 2863, Seq. ID No. 2867, Seq. ID No. 2869, Seq. ID No. 2871, Seq. ID No. 2877, Seq. ID No. 2881, Seq. ID No. 2891, Seq. ID No. 2899, Seq. ID No. 2901, Seq. ID No. 2903, Seq. ID No. 2907, Seq. ID No. 2911, Seq. ID No. 2913, Seq. ID No. 2917, Seq. ID No. 2919, Seq. ID No. 2921, Seq. ID No. 2923, Seq. ID No. 2927, Seq. ID No. 2933, Seq. ID No. 2945, Seq. ID No. 2953, Seq. ID No. 2957, Seq. ID No. 2963, Seq. ID No. 2971, Seq. ID No. 2973, Seq. ID No. 2977, Seq. ID No. 2979, Seq. ID No. 2983, Seq. ID No. 2985, Seq. ID No. 2991, Seq. ID No. 2993, Seq. ID No. 2999, Seq. ID No. 3001, Seq. ID No. 3005, Seq. ID No. 3011, Seq. ID No. 3019, Seq. ID No. 3027, Seq. ID No. 3033, Seq. ID No. 3035, Seq. ID No. 3039, Seq. ID No. 3043, Seq. ID No. 3045, Seq. ID No. 3049, Seq. ID No. 3055, Seq. ID No. 3059, Seq. ID No. 3061, Seq. ID No. 3067, Seq. ID No. 3069, Seq. ID No. 3081, Seq. ID No. 3089, Seq. ID No. 3091, Seq. ID No. 3093, Seq. ID No. 3097, Seq. ID No. 3103, Seq. ID No. 3107, Seq. ID No. 3111, Seq. ID No. 3117, Seq. ID No. 3125, Seq. ID No. 3133, Seq. ID No. 3135, Seq. ID No. 3137, Seq. ID No. 3141, Seq. ID No. 3143, Seq. ID No. 3149, Seq. ID No. 3155, Seq. ID No. 3157, Seq. ID No. 3159, Seq. ID No. 3161, Seq. ID No. 3165, Seq. ID No. 3171, Seq. ID No. 3177, Seq. ID No. 3179, Seq. ID No. 3183, Seq. ID No. 3185, Seq. ID No. 3189, Seq. ID No. 3191, Seq. ID No. 3197, Seq. ID No. 3203, Seq. ID No. 3205, Seq. ID No. 3211, Seq. ID No. 3217, Seq. ID No. 3221, Seq. ID No. 3227, Seq. ID No. 3229, Seq. ID No. 3233, Seq. ID No. 3235, Seq. ID No. 3239, Seq. ID No. 3249, Seq. ID No. 3251, Seq. ID No. 3253, Seq. ID No. 3257, Seq. ID No. 3259, Seq. ID No. 3263, Seq. ID No. 3265, Seq. ID No. 3271, Seq. ID No. 3273, Seq. ID No. 3277, Seq. ID No. 3283, Seq. ID No. 3285, Seq. ID No. 3287, Seq. ID No. 3289, Seq. ID No. 3293, Seq. ID No. 3295, Seq. ID No. 3299, Seq. ID No. 3303, Seq. ID No. 3307, Seq. ID No. 3313, Seq. ID No. 3315, Seq. ID No. 3319, Seq. ID No. 3323, Seq. ID No. 3329, Seq. ID No. 3335, Seq. ID No. 3337, Seq. ID No. 3347, Seq. ID No. 3355, Seq. ID No. 3359, Seq. ID No. 3363, Seq. ID No. 3367, Seq. ID No. 3377, Seq. ID No. 3379, Seq. ID No. 3383, Seq. ID No. 3387, Seq. ID No. 3399, Seq. ID No. 3401, Seq. ID No. 3403, Seq. ID No. 3409, Seq. ID No. 3413, Seq. ID No. 3415, Seq. ID No. 3417, Seq. ID No. 3425, Seq. ID No. 3427, Seq. ID No. 3431, Seq. ID No. 3435, Seq. ID No. 3437, Seq. ID No. 3439, Seq. ID No. 3447, Seq. ID No. 3459, Seq. ID No. 3461, Seq. ID No. 3467, Seq. ID No. 3469, Seq. ID No. 3471, Seq. ID No. 3473, Seq. ID No. 3475, Seq. ID No. 3479, Seq. ID No. 3483, Seq. ID No. 3485, Seq. ID No. 3487, Seq. ID No. 3495, Seq. ID No. 3501, Seq. ID No. 3505, Seq. ID No. 3507, Seq. ID No. 3509, Seq. ID No. 3511, Seq. ID No. 3519, Seq. ID No. 3521, Seq. ID No. 3525, Seq. ID No. 3529, Seq. ID No. 3533, Seq. ID No. 3537, Seq. ID No. 3543, Seq. ID No. 3549, Seq. ID No. 3553, Seq. ID No. 3561, Seq. ID No. 3565, Seq. ID No. 3569, Seq. ID No. 3575, Seq. ID No. 3579, Seq. ID No. 3583, Seq. ID No. 3585, Seq. ID No. 3589, Seq. ID No. 3599, Seq. ID No. 3605, Seq. ID No. 3607, Seq. ID No. 3609, Seq. ID No. 3611, Seq. ID No. 3615, Seq. ID No. 3619, Seq. ID No. 3629, Seq. ID No. 3635, Seq. ID No. 3639, Seq. ID No. 3641, Seq. ID No. 3643, Seq. ID No. 3645, Seq. ID No. 3651, Seq. ID No. 3653, Seq. ID No. 3659, Seq. ID No. 3663, Seq. ID No. 3665, Seq. ID No. 3667, Seq. ID No. 3669, Seq. ID No. 3675, Seq. ID No. 3681, Seq. ID No. 3689, Seq. ID No. 3695, Seq. ID No. 3699, Seq. ID No. 3709, Seq. ID No. 3715, Seq. ID No. 3721, Seq. ID No. 3727, Seq. ID No. 3729, Seq. ID No. 3733, Seq. ID No. 3735, Seq. ID No. 3739, Seq. ID No. 3741, Seq. ID No. 3747, Seq. ID No. 3751, Seq. ID No. 3759, Seq. ID No. 3771, Seq. ID No. 3775, Seq. ID No. 3779, Seq. ID No. 3783, Seq. ID No. 3791, Seq. ID No. 3797, Seq. ID No. 3803, Seq. ID No. 3805, Seq. ID No. 3811, Seq. ID No. 3813, Seq. ID No. 3819, Seq. ID No. 3823, Seq. ID No. 3825, Seq. ID No. 3833, Seq. ID No. 3835, Seq. ID No. 3843, Seq. ID No. 3847, Seq. ID No. 3855, Seq. ID No.3857, Seq. ID No. 3863, Seq. ID No. 3867, Seq. ID No. 3873, Seq. ID No. 3877, Seq. ID No. 3881, Seq. ID No. 3883, Seq. ID No. 3885, Seq. ID No. 3893, Seq. ID No. 3897, Seq. ID No. 3901, Seq. ID No. 3907, Seq. ID No. 3913, Seq. ID No. 3915, Seq. ID No. 3917, Seq. ID No. 3919, Seq. ID No. 3925, Seq. ID No. 3929, Seq. ID No. 3933, Seq. ID No. 3935, Seq. ID No. 3937, Seq. ID No. 3941, Seq. ID No. 3943, Seq. ID No. 3945, Seq. ID No. 3949, Seq. ID No. 3951, Seq. ID No. 3955, Seq. ID No. 3957, Seq. ID No. 3971, Seq. ID No. 3975, Seq. ID No. 3983, Seq. ID No. 3985, Seq. ID No. 3987, Seq. ID No. 3991, Seq. ID No. 4003, Seq. ID No. 4009, Seq. ID No. 4013, Seq. ID No. 4015, Seq. ID No. 4017, Seq. ID No. 4021, Seq. ID No. 4023, Seq. ID No. 4029, Seq. ID No. 4031, Seq. ID No. 4035, Seq. ID No. 4037, Seq. ID No. 4039, Seq. ID No. 4049, Seq. ID No. 4055, Seq. ID No. 4057, Seq. ID No. 4061, Seq. ID No. 4063, Seq. ID No. 4067, Seq. ID No. 4069, Seq. ID No. 4075, Seq. ID No. 4077, Seq. ID No. 4079, Seq. ID No. 4087, Seq. ID No. 4089, Seq. ID No. 4095, Seq. ID No. 4097, Seq. ID No. 4099, Seq. ID No. 4105, Seq. ID No. 4111, Seq. ID No. 4117, Seq. ID No. 4121, Seq. ID No. 4123, Seq. ID No. 4127, Seq. ID No. 4129, Seq. ID No. 4133, Seq. ID No. 4137, Seq. ID No. 4145, Seq. ID No. 4149, Seq. ID No. 4157, Seq. ID No. 4161, Seq. ID No. 4163, Seq. ID No. 4167, Seq. ID No. 4173, Seq. ID No. 4179, Seq. ID No. 4185, Seq. ID No. 4191, Seq. ID No. 4193, Seq. ID No. 4195, Seq. ID No. 4197, Seq. ID No. 4199, Seq. ID No. 4201, Seq. ID No. 4203, Seq. ID No. 4205, Seq. ID No. 4211, Seq. ID No. 4215, Seq. ID No. 4217, Seq. ID No. 4219, Seq. ID No. 4235, Seq. ID No. 4237, Seq. ID No. 4239, Seq. ID No. 4243, Seq. ID No. 4251, Seq. ID No. 4255, Seq. ID No. 4263, Seq. ID No. 4267, Seq. ID No. 4271, Seq. ID No. 4273, Seq. ID No. 4279, Seq. ID No. 4281, Seq. ID No. 4283, Seq. ID No. 4291, Seq. ID No. 4295, Seq. ID No. 4299, Seq. ID No. 4301, Seq. ID No. 4303, Seq. ID No. 4307, Seq. ID No. 4309, Seq. ID No. 4313, Seq. ID No. 4317, Seq. ID No. 4323, Seq. ID No. 4325, Seq. ID No. 4329, Seq. ID No. 4331, Seq. ID No. 4333, Seq. ID No. 4339, Seq. ID No. 4343, Seq. ID No. 4347, Seq. ID No. 4353, Seq. ID No. 4355, Seq. ID No. 4357, Seq. ID No. 4365, Seq. ID No. 4369, Seq. ID No. 4373, Seq. ID No. 4375, Seq. ID No. 4377, Seq. ID No. 4379, Seq. ID No. 4381, Seq. ID No. 4383, Seq. ID No. 4391, Seq. ID No. 4393, Seq. ID No. 4397, Seq. ID No. 4401, Seq. ID No. 4411, Seq. ID No. 4417, Seq. ID No. 4423, Seq. ID No. 4431, Seq. ID No. 4433, Seq. ID No. 4435, Seq. ID No. 4443, Seq. ID No. 4447, Seq. ID No. 4451, Seq. ID No. 4459, Seq. ID No. 4461, Seq. ID No. 4467, Seq. ID No. 4471, Seq. ID No. 4475, Seq. ID No. 4479, Seq. ID No. 4481, Seq. ID No. 4487, Seq. ID No. 4491, Seq. ID No. 4501, Seq. ID No. 4505, Seq. ID No. 4511, Seq. ID No. 4523, Seq. ID No. 4531, Seq. ID No. 4533, Seq. ID No. 4537, Seq. ID No. 4539, Seq. ID No. 4541, Seq. ID No. 4543, Seq. ID No. 4547, Seq. ID No. 4549, Seq. ID No. 4559, Seq. ID No. 4565, Seq. ID No. 4567, Seq. ID No. 4571, Seq. ID No. 4575, Seq. ID No. 4577, Seq. ID No. 4581, Seq. ID No. 4585, Seq. ID No. 4591, Seq. ID No. 4595, Seq. ID No. 4597, Seq. ID No. 4603, Seq. ID No. 4607, Seq. ID No. 4609, Seq. ID No. 4611, Seq. ID No. 4615, Seq. ID No. 4623, Seq. ID No. 4627, Seq. ID No. 4631, Seq. ID No. 4635, Seq. ID No. 4637, Seq. ID No. 4643, Seq. ID No. 4649, Seq. ID No. 4651, Seq. ID No. 4653, Seq. ID No. 4657, Seq. ID No. 4661, Seq. ID No. 4663, Seq. ID No. 4669, Seq. ID No. 4671, Seq. ID No. 4673, Seq. ID No. 4679, Seq. ID No. 4685, Seq. ID No. 4693, Seq. ID No. 4697, Seq. ID No. 4703, Seq. ID No. 4705, Seq. ID No. 4713, Seq. ID No. 4717, Seq. ID No. 4719, Seq. ID No. 4725, Seq. ID No. 4729, Seq. ID No. 4731, Seq. ID No. 4733, Seq. ID No. 4739, Seq. ID No. 4743, Seq. ID No. 4745, Seq. ID No. 4747, Seq. ID No. 4749, Seq. ID No. 4751, Seq. ID No. 4757, Seq. ID No. 4765, Seq. ID No. 4769, Seq. ID No. 4777, Seq. ID No. 4779, Seq. ID No. 4781, Seq. ID No. 4787, Seq. ID No. 4789, Seq. ID No. 4791, Seq. ID No. 4797, Seq. ID No. 4803, Seq. ID No. 4807, Seq. ID No. 4809, Seq. ID No. 4811, Seq. ID No. 4813, Seq. ID No. 4815, Seq. ID No. 4821, Seq. ID No. 4823, Seq. ID No. 4825, Seq. ID No. 4827, Seq. ID No. 4833, Seq. ID No. 4835, Seq. ID No. 4837, Seq. ID No. 4843, Seq. ID No. 4845, Seq. ID No. 4847, Seq. ID No. 4849, Seq. ID No. 4859, Seq. ID No. 4861, Seq. ID No. 4865, Seq. ID No. 4867, Seq. ID No. 4875, Seq. ID No. 4877, Seq. ID No. 4879, Seq. ID No. 4881, Seq. ID No. 4883, Seq. ID No. 4885, Seq. ID No. 4887, Seq. ID No. 4893, Seq. ID No. 4899, Seq. ID No. 4901, Seq. ID No. 4903, Seq. ID No. 4905, Seq. ID No. 4907, Seq. ID No. 4911, Seq. ID No. 4915, Seq. ID No. 4917, Seq. ID No. 4919, Seq. ID No. 4921, Seq. ID No. 4927, Seq. ID No. 4931, Seq. ID No. 4935, Seq. ID No. 4939, Seq. ID No. 4941, Seq. ID No. 4943, Seq. ID No. 4945, Seq. ID No. 4947, Seq. ID No. 4953, Seq. ID No. 4957, Seq. ID No. 4959, Seq. ID No. 4963, Seq. ID No. 4965, Seq. ID No. 4969, Seq. ID No. 4971, Seq. ID No. 4973, Seq. ID No. 4979, Seq. ID No. 4985, Seq. ID No. 4989, Seq. ID No. 4991, Seq. ID No. 4995, Seq. ID No. 4997, Seq. ID No. 5001, Seq. ID No. 5007, Seq. ID No. 5009, Seq. ID No. 5017, Seq. ID No. 5021, Seq. ID No. 5027, Seq. ID No. 5029, Seq. ID No. 5039, Seq. ID No. 5047, Seq. ID No. 5051, Seq. ID No. 5053, Seq. ID No. 5055, Seq. ID No. 5059, Seq. ID No. 5061, Seq. ID No. 5069, Seq. ID No. 5077, Seq. ID No. 5079, Seq. ID No. 5081, Seq. ID No. 5083, Seq. ID No. 5087, Seq. ID No. 5091, Seq. ID No. 5093, Seq. ID No. 5097, Seq. ID No. 5103, Seq. ID No. 5105, Seq. ID No. 5109, Seq. ID No. 5111, Seq. ID No. 5113, Seq. ID No. 5115, Seq. ID No. 5117, Seq. ID No. 5127, Seq. ID No. 5141, Seq. ID No. 5145, Seq. ID No. 5149, Seq. ID No. 5153, Seq. ID No. 5157, Seq. ID No. 5165, Seq. ID No. 5169, Seq. ID No. 5171, Seq. ID No. 5177, Seq. ID No. 5183, Seq. ID No. 5185, Seq. ID No. 5187, Seq. ID No. 5193, Seq. ID No. 5195, Seq. ID No. 5201, Seq. ID No. 5203, Seq. ID No. 5205, Seq. ID No. 5209, Seq. ID No. 5211, Seq. ID No. 5215, Seq. ID No. 5219, Seq. ID No. 5227, Seq. ID No. 5231, Seq. ID No. 5235, Seq. ID No. 5237, Seq. ID No. 5239, Seq. ID No. 5243, Seq. ID No. 5245, Seq. ID No. 5247, Seq. ID No. 5253, Seq. ID No. 5255, Seq. ID No. 5257, Seq. ID No. 5261, Seq. ID No. 5263, Seq. ID No. 5271, Seq. ID No. 5275, Seq. ID No. 5283, Seq. ID No. 5291, Seq. ID No. 5299, Seq. ID No. 5305, Seq. ID No. 5309, Seq. ID No. 5311, Seq. ID No. 5313, Seq. ID No. 5319, Seq. ID No. 5323, Seq. ID No. 5325, Seq. ID No. 5335, Seq. ID No. 5337, Seq. ID No. 5341, Seq. ID No. 5345, Seq. ID No. 5351, Seq. ID No. 5355, Seq. ID No. 5363, Seq. ID No. 5365, Seq. ID No. 5367, Seq. ID No. 5371, Seq. ID No. 5373, Seq. ID No. 5381, Seq. ID No. 5383, Seq. ID No. 5387, Seq. ID No. 5389, Seq. ID No. 5391, Seq. ID No. 5393, Seq. ID No. 5395, Seq. ID No. 5397, Seq. ID No. 5399, Seq. ID No. 5401, Seq. ID No. 5403, Seq. ID No. 5409, Seq. ID No. 5411, Seq. ID No. 5415, Seq. ID No. 5417, Seq. ID No. 5419, Seq. ID No. 5421, Seq. ID No. 5423, Seq. ID No. 5427, Seq. ID No. 5431, Seq. ID No. 5433, Seq. ID No. 5439, Seq. ID No. 5441, Seq. ID No. 5443, Seq. ID No. 5447, Seq. ID No. 5449, Seq. ID No. 5451, Seq. ID No. 5453, Seq. ID No. 5455, Seq. ID No. 5457, Seq. ID No. 5473, Seq. ID No. 5477, Seq. ID No. 5483, Seq. ID No. 5487, Seq. ID No. 5491, Seq. ID No. 5495, Seq. ID No. 5499, Seq. ID No. 5503, Seq. ID No. 5507, Seq. ID No. 5509, Seq. ID No. 5513, Seq. ID No. 5527, Seq. ID No. 5531, Seq. ID No. 5537, Seq. ID No. 5539, Seq. ID No. 5541, Seq. ID No. 5547, Seq. ID No. 5553, Seq. ID No. 5557, Seq. ID No. 5559, Seq. ID No. 5563, Seq. ID No. 5567, Seq. ID No. 5571, Seq. ID No. 5575, Seq. ID No. 5581, Seq. ID No. 5585, Seq. ID No. 5591, Seq. ID No. 5599, Seq. ID No. 5601, Seq. ID No. 5605, Seq. ID No. 5615, Seq. ID No. 5621, Seq. ID No. 5629, Seq. ID No. 5631, Seq. ID No. 5637, Seq. ID No. 5647, Seq. ID No. 5651, Seq. ID No. 5655, Seq. ID No. 5657, Seq. ID No. 5661, Seq. ID No. 5665, Seq. ID No. 5669, Seq. ID No. 5671, Seq. ID No. 5673, Seq. ID No. 5679, Seq. ID No. 5685, Seq. ID No. 5693, Seq. ID No. 5697, Seq. ID No. 5699, Seq. ID No. 5701, Seq. ID No. 5707, Seq. ID No. 5715, Seq. ID No. 5717, Seq. ID No. 5723, Seq. ID No. 5727, Seq. ID No. 5735, Seq. ID No. 5739, Seq. ID No. 5749, Seq. ID No. 5751, Seq. ID No. 5755, Seq. ID No. 5761, Seq. ID No. 5771, Seq. ID No. 5775, Seq. ID No. 5777, Seq. ID No. 5779, Seq. ID No. 5783, Seq. ID No. 5789, Seq. ID No. 5795, Seq. ID No. 5801, Seq. ID No. 5803, Seq. ID No. 5809, Seq. ID No. 5815, Seq. ID No. 5819, Seq. ID No. 5825, Seq. ID No. 5833, Seq. ID No. 5835, Seq. ID No. 5841, Seq. ID No. 5845, Seq. ID No. 5847, Seq. ID No. 5849, Seq. ID No. 5851, Seq. ID No. 5853, Seq. ID No. 5855, Seq. ID No. 5859, Seq. ID No. 5865, Seq. ID No. 5871, Seq. ID No. 5875, Seq. ID No. 5877, Seq. ID No. 5881, Seq. ID No. 5887, Seq. ID No. 5891, Seq. ID No. 5895, Seq. ID No. 5897, Seq. ID No. 5901, Seq. ID No. 5903, Seq. ID No. 5911, Seq. ID No. 5913, Seq. ID No. 5915, Seq. ID No. 5917, Seq. ID No. 5919, Seq. ID No. 5929, Seq. ID No. 5931, Seq. ID No. 5933, Seq. ID No. 5937, Seq. ID No. 5941, Seq. ID No. 5943, Seq. ID No. 5947, Seq. ID No. 5951, Seq. ID No. 5953, Seq. ID No. 5955, Seq. ID No. 5957, Seq. ID No. 5961, Seq. ID No. 5969, Seq. ID No. 5973, Seq. ID No. 5979, Seq. ID No. 5981, Seq. ID No. 5985, Seq. ID No. 5989, Seq. ID No. 5993, Seq. ID No. 6001, Seq. ID No. 6003, Seq. ID No. 6011, Seq. ID No. 6015, Seq. ID No. 6017, Seq. ID No. 6021, Seq. ID No. 6027, Seq. ID No. 6029, Seq. ID No. 6033, Seq. ID No. 6035, Seq. ID No. 6041, Seq. ID No. 6043, Seq. ID No. 6053, Seq. ID No. 6057, Seq. ID No. 6065, Seq. ID No. 6071, Seq. ID No. 6079, Seq. ID No. 6085, Seq. ID No. 6089, Seq. ID No. 6095, Seq. ID No. 6097, Seq. ID No. 6101, Seq. ID No. 6103, Seq. ID No. 6111, Seq. ID No. 6113, Seq. ID No. 6117, Seq. ID No,. 6123, Seq. ID No. 6125, Seq. ID No. 6129, Seq. ID No. 6131, Seq. ID No. 6133, Seq. ID No. 6141, Seq. ID No. 6145, Seq. ID No. 6149, Seq. ID No. 6157, Seq. ID No. 6165, Seq. ID No. 6169, Seq. ID No. 6171, Seq. ID No. 6175, Seq. ID No. 6177, Seq. ID No. 6181, Seq. ID No. 6187, Seq. ID No. 6195, Seq. ID No. 6201, Seq. ID No. 6209, Seq. ID No. 6213, Seq. ID No. 6215, Seq. ID No. 6219, Seq. ID No. 6233, Seq. ID No. 6235, Seq. ID No. 6243, Seq. ID No. 6249, Seq. ID No. 6251, Seq. ID No. 6257, Seq. ID No. 6261, Seq. ID No. 6263, Seq. ID No. 6271, Seq. ID No. 6275, Seq. ID No. 6277, Seq. ID No. 6281, Seq. ID No. 6287, Seq. ID No. 6297, Seq. ID No. 6299, Seq. ID No. 6305, Seq. ID No. 6311, Seq. ID No. 6315, Seq. ID No. 6321, Seq. ID No. 6323, Seq. ID No. 6327, Seq. ID No. 6331, Seq. ID No. 6333, Seq. ID No. 6337, Seq. ID No. 6339, Seq. ID No. 6341, Seq. ID No. 6343, Seq. ID No. 6345, Seq. ID No. 6353, Seq. ID No. 6357, Seq. ID No. 6359, Seq. ID No. 6361, Seq. ID No. 6367, Seq. ID No. 6369, Seq. ID No. 6373, Seq. ID No. 6375, Seq. ID No. 6377, Seq. ID No. 6379, Seq. ID No. 6389, Seq. ID No. 6395, Seq. ID No. 6399, Seq. ID No. 6403, Seq. ID No. 6407, Seq. ID No. 6411, Seq. ID No. 6413, Seq. ID No. 6417, Seq. ID No. 6423, Seq. ID No. 6433, Seq. ID No. 6437, Seq. ID. No. 6439, Seq. ID No. 6445, Seq. ID No. 6449, Seq. ID No. 6451, Seq. ID No. 6457, Seq. ID No. 6459, Seq. ID No. 6461, Seq. ID No. 6463, Seq. ID No. 6477, Seq. ID No. 6481, Seq. ID No. 6483, Seq. ID No. 6487, Seq. ID No. 6489, Seq. ID No. 6491, Seq. ID No. 6493, Seq. ID No. 6495, Seq. ID No. 6503, Seq. ID No. 6505, Seq. ID No. 6511, Seq. ID No. 6515, Seq. ID No. 6519, Seq. ID No. 6523, Seq. ID No. 6525, Seq. ID No. 6529, Seq. ID No. 6531, Seq. ID No. 6533, Seq. ID No. 6537, Seq. ID No. 6545, Seq. ID No. 6551, Seq. ID No. 6553, Seq. ID No. 6559, Seq. ID No. 6563, Seq. ID No. 6567, Seq. ID No. 6577, Seq. ID No. 6579, Seq. ID No. 6583, Seq. ID No. 6585, Seq. ID No. 6587, Seq. ID No. 6589, Seq. ID No. 6603, Seq. ID No. 6605, Seq. ID No. 6609, Seq. ID No. 6613, Seq. ID No. 6615, Seq. ID No. 6617, Seq. ID No. 6621, Seq. ID No. 6623, Seq. ID No. 6627, Seq. ID No. 6629, Seq. ID No. 6633, and Seq. ID No. 6639.

[0031] In yet another preferred embodiment, the polynucleotide is selected from the Alloiococcus otitidis polynucleotides, which encode polypeptides, identified by GeneMark™ ORF finder program, and the polynucleotide is selected from one of Seq. ID No. 1, Seq. ID No. 3, Seq. ID No. 11, Seq. ID No. 13, Seq. ID No. 15, Seq. ID No. 17, Seq. ID No. 25, Seq. ID No. 27, Seq. ID No. 29, Seq. ID No. 35, Seq. ID No. 37, Seq. ID No. 39, Seq. ID No. 41, Seq. ID No. 43, Seq. ID No. 45, Seq. ID No. 49, Seq. ID No. 53, Seq. ID No. 57, Seq. ID No. 61, Seq. ID No. 69, Seq. ID No. 71, Seq. ID No. 75, Seq. ID No. 81, Seq. ID No. 83, Seq. ID No. 89, Seq. ID No. 95, Seq. ID No. 101, Seq. ID No. 111, Seq. ID No. 119, Seq. ID No. 125, Seq. ID No. 129, Seq. ID No. 135, Seq. ID No. 137, Seq. ID No. 141, Seq. ID No. 147, Seq. ID No. 151, Seq. ID No. 155, Seq. ID No. 167, Seq. ID No. 171, Seq. ID No. 181, Seq. ID No. 185, Seq. ID No. 187, Seq. ID No. 189, Seq. ID No. 191, Seq. ID No. 195, Seq. ID No. 199, Seq. ID No. 207, Seq. ID No. 213, Seq. ID No. 219, Seq. ID No. 221, Seq. ID No. 225, Seq. ID No. 227, Seq. ID No. 229, Seq. ID No. 233, Seq. ID No. 239, Seq. ID No. 241, Seq. ID No. 243, Seq. ID No. 253, Seq. ID No. 261, Seq. ID No. 263, Seq. ID No. 267, Seq. ID No. 273, Seq. ID No. 275, Seq. ID No. 277, Seq. ID No. 279, Seq. ID No. 291, Seq. ID No. 293, Seq. ID No. 295, Seq. ID No. 299, Seq. ID No. 303, Seq. ID No. 309, Seq. ID No. 311, Seq. ID No. 315, Seq. ID No. 319, Seq. ID No. 323, Seq. ID No. 331, Seq. ID No. 341, Seq. ID No. 345, Seq. ID No. 351, Seq. ID No. 355, Seq. ID No. 361, Seq. ID No. 363, Seq. ID No. 365, Seq. ID No. 375, Seq. ID No. 379, Seq. ID No. 381, Seq. ID No. 383, Seq. ID No. 389, Seq. ID No. 391, Seq. ID No. 395, Seq. ID No. 399, Seq. ID No. 405, Seq. ID No. 409, Seq. ID No. 413, Seq. ID No. 417, Seq. ID No. 421, Seq. ID No. 423, Seq. ID No. 425, Seq. ID No. 427, Seq. ID No. 429, Seq. ID No. 435, Seq. ID No. 437, Seq. ID No. 439, Seq. ID No. 441, Seq. ID No. 443, Seq. ID No. 445, Seq. ID No. 447, Seq. ID No. 449, Seq. ID No. 459, Seq. ID No. 465, Seq. ID No. 485, Seq. ID No. 501, Seq. ID No. 505, Seq. ID No. 511, Seq. ID No. 513, Seq. ID No. 517, Seq. ID No. 519, Seq. ID No. 523, Seq. ID No. 529, Seq. ID No. 533, Seq. ID No. 535, Seq. ID No. 541, Seq. ID No. 543, Seq. ID No. 551, Seq. ID No. 553, Seq. ID No. 559, Seq. ID No. 563, Seq. ID No. 569, Seq. ID No. 575, Seq. ID No. 579, Seq. ID No. 583, Seq. ID No. 591, Seq. ID No. 595, Seq. ID No. 601, Seq. ID No. 605, Seq. ID No. 607, Seq. ID No. 611, Seq. ID No. 613, Seq. ID No. 615, Seq. ID No. 621, Seq. ID No. 627, Seq. ID No. 629, Seq. ID No. 633, Seq. ID No. 635, Seq. ID No. 637, Seq. ID No. 643, Seq. ID No. 649, Seq. ID No. 651, Seq. ID No. 655, Seq. ID No. 657, Seq. ID No. 669, Seq. ID No. 671, Seq. ID No. 675, Seq. ID No. 681, Seq. ID No. 683, Seq. ID No. 685, Seq. ID No. 693, Seq. ID No. 703, Seq. ID No. 705, Seq. ID No. 711, Seq. ID No. 725, Seq. ID No. 731, Seq. ID No. 735, Seq. ID No. 737, Seq. ID No. 741, Seq. ID No. 743, Seq. ID No. 749, Seq. ID No. 753, Seq. ID No. 759, Seq. ID No. 773, Seq. ID No. 781, Seq. ID No. 783, Seq. ID No. 785, Seq. ID No. 789, Seq. ID No. 793, Seq. ID No. 797, Seq. ID No. 803, Seq. ID No. 815, Seq. ID No. 819, Seq. ID No. 821, Seq. ID No. 827, Seq. ID No. 831, Seq. ID No. 833, Seq. ID No. 835, Seq. ID No. 837, Seq. ID No. 841, Seq. ID No. 843, Seq. ID No. 849, Seq. ID No. 851, Seq. ID No. 853, Seq. ID No. 857, Seq. ID No. 865, Seq. ID No. 869, Seq. ID No. 873, Seq. ID No. 877, Seq. ID No. 883, Seq. ID No. 887, Seq. ID No. 891, Seq. ID No. 895, Seq. ID No. 901, Seq. ID No. 907, Seq. ID No. 911, Seq. ID No. 917, Seq. ID No. 921, Seq. ID No. 927, Seq. ID No. 935, Seq. ID No. 939, Seq. ID No. 945, Seq. ID No. 951, Seq. ID No. 953, Seq. ID No. 959, Seq. ID No. 963, Seq. ID No. 967, Seq. ID No. 969, Seq. ID No. 977, Seq. ID No. 989, Seq. ID No. 995, Seq. ID No. 999, Seq. ID No. 1005, Seq. ID No. 1007, Seq. ID No. 1015, Seq. ID No. 1021, Seq. ID No. 1035, Seq. ID No. 1041, Seq. ID No. 1043, Seq. ID No. 1049, Seq. ID No. 1053, Seq. ID No. 1057, Seq. ID No. 1059, Seq. ID No. 1063, Seq. ID No. 1067, Seq. ID No. 1069, Seq. ID No. 1071, Seq. ID No. 1075, Seq. ID No. 1083, Seq. ID No. 1085, Seq. ID No. 1089, Seq. ID No. 1093, Seq. ID No. 1097, Seq. ID No. 1099, Seq. ID No. 1101, Seq. ID No. 1109, Seq. ID No. 1113, Seq. ID No. 1117, Seq. ID No. 1121, Seq. ID No. 1129, Seq. ID No. 1133, Seq. ID No. 1137, Seq. ID No. 1141, Seq. ID No. 1145, Seq. ID No. 1149, Seq. ID No. 1155, Seq. ID No. 1157, Seq. ID No. 1159, Seq. ID No. 1163, Seq. ID No. 1171, Seq. ID No. 1173, Seq. ID No. 1175, Seq. ID No. 1181, Seq. ID No. 1185, Seq. ID No. 1189, Seq. ID No. 1199, Seq. ID No. 1205, Seq. ID No. 1209, Seq. ID No. 1215, Seq. ID No. 1219, Seq. ID No. 1223, Seq. ID No. 1225, Seq. ID No. 1233, Seq. ID No. 1235, Seq. ID No. 1241, Seq. ID No. 1251, Seq. ID No. 1255, Seq. ID No. 1261, Seq. ID No. 1271, Seq. ID No. 1281, Seq. ID No. 1315, Seq. ID No. 1323, Seq. ID No. 1331, Seq. ID No. 1333, Seq. ID No. 1339, Seq. ID No. 1345, Seq. ID No. 1347, Seq. ID No. 1355, Seq. ID No. 1357, Seq. ID No. 1369, Seq. ID No. 1373, Seq. ID No. 1387, Seq. ID No. 1391, Seq. ID No. 1395, Seq. ID No. 1397, Seq. ID No. 1403, Seq. ID No. 1405, Seq. ID No. 1407, Seq. ID No. 1413, Seq. ID No. 1415, Seq. ID No. 1417, Seq. ID No. 1425, Seq. ID No. 1427, Seq. ID No. 1429, Seq. ID No. 1431, Seq. ID No. 1433, Seq. ID No. 1435, Seq. ID No. 1439, Seq. ID No. 1441, Seq. ID No. 1451, Seq. ID No. 1453, Seq. ID No. 1459, Seq. ID No. 1461, Seq. ID No. 1469, Seq. ID No. 1471, Seq. ID No. 1473, Seq. ID No. 1475, Seq. ID No. 1477, Seq. ID No. 1483, Seq. ID No. 1487, Seq. ID No. 1489, Seq. ID No. 1493, Seq. ID No. 1495, Seq. ID No. 1497, Seq. ID No. 1501, Seq. ID No. 1503, Seq. ID No. 1507, Seq. ID No. 1509, Seq. ID No. 1517; Seq. ID No. 1521, Seq. ID No. 1527, Seq. ID No. 1531, Seq. ID No. 1537, Seq. ID No. 1541, Seq. ID No. 1543, Seq. ID No. 1549, Seq. ID No. 1561, Seq. ID No. 1563, Seq. ID No. 1565, Seq. ID No. 1569, Seq. ID No. 1573, Seq. ID No. 1575, Seq. ID No. 1581, Seq. ID No. 1587, Seq. ID No. 1591, Seq. ID No. 1595, Seq. ID No. 1597, Seq. ID No. 1605, Seq. ID No. 1609, Seq. ID No. 1613, Seq. ID No. 1619, Seq. ID No. 1623, Seq. ID No. 1627, Seq. ID No. 1629, Seq. ID No. 1635, Seq. ID No. 1641, Seq. ID No. 1647, Seq. ID No. 1651, Seq. ID No. 1657, Seq. ID No. 1659, Seq. ID No. 1667, Seq. ID No. 1669, Seq. ID No. 1679, Seq. ID No. 1683, Seq. ID No. 1687, Seq. ID No. 1691, Seq. ID No. 1697, Seq. ID No. 1699, Seq. ID No. 1701, Seq. ID No. 1707, Seq. ID No. 1709, Seq. ID No. 1713, Seq. ID No. 1717, Seq. ID No. 1721, Seq. ID No. 1725, Seq. ID No. 1735, Seq. ID No. 1737, Seq. ID No. 1739, Seq. ID No. 1743, Seq. ID No. 1745, Seq. ID No. 1749, Seq. ID No. 1755, Seq. ID No. 1769, Seq. ID No. 1773, Seq. ID No. 1777, Seq. ID No. 1785, Seq. ID No. 1789, Seq. ID No. 1791, Seq. ID No. 1797, Seq. ID No. 1799, Seq. ID No. 1803, Seq. ID No. 1805, Seq. ID No. 1807, Seq. ID No. 1817, Seq. ID No. 1819, Seq. ID No. 1821, Seq. ID No. 1825, Seq. ID No. 1827, Seq. ID No. 1831, Seq. ID No. 1835, Seq. ID No. 1841, Seq. ID No. 1845, Seq. ID No. 1847, Seq. ID No. 1849, Seq. ID No. 1851, Seq. ID No. 1855, Seq. ID No. 1859, Seq. ID No. 1861, Seq. ID No. 1865, Seq. ID No. 1867, Seq. ID No. 1871, Seq. ID No. 1873, Seq. ID No. 1877, Seq. ID No. 1879, Seq. ID No. 1887, Seq. ID No. 1889, Seq. ID No. 1895, Seq. ID No. 1897, Seq. ID No. 1899, Seq. ID No. 1901, Seq. ID No. 1905, Seq. ID No. 1909, Seq. ID No. 1917, Seq. ID No. 1921, Seq. ID No. 1925, Seq. ID No. 1931, Seq. ID No. 1933, Seq. ID No. 1937, Seq. ID No. 1939, Seq. ID No. 1945, Seq. ID No. 1947, Seq. ID No. 1951, Seq. ID No. 1955, Seq. ID No. 1959, Seq. ID No. 1961, Seq. ID No. 1965, Seq. ID No. 1967, Seq. ID No. 1969, Seq. ID No. 1973, Seq. ID No. 1977, Seq. ID No. 1979, Seq. ID No. 1983, Seq. ID No. 1989, Seq. ID No. 1991, Seq. ID No. 1997, Seq. ID No. 2001, Seq. ID No. 2003, Seq. ID No. 2011, Seq. ID No. 2021, Seq. ID No. 2023, Seq. ID No. 2029, Seq. ID No. 2033, Seq. ID No. 2037, Seq. ID No. 2039, Seq. ID No. 2045, Seq. ID No. 2047, Seq. ID No. 2051, Seq. ID No. 2057, Seq. ID No. 2061, Seq. ID No. 2067, Seq. ID No. 2069, Seq. ID No. 2071, Seq. ID No. 2073, Seq. ID No. 2077, Seq. ID No. 2089, Seq. ID No. 2093, Seq. ID No. 2095, Seq. ID No. 2099, Seq. ID No. 2101, Seq. ID No. 2113, Seq. ID No. 2117, Seq. ID No. 2123, Seq. ID No. 2135, Seq. ID No. 2137, Seq. ID No. 2139, Seq. ID No. 2143, Seq. ID No. 2147, Seq. ID No. 2153, Seq. ID No. 2159, Seq. ID No. 2163, Seq. ID No. 2167, Seq. ID No. 2175, Seq. ID No. 2181, Seq. ID No. 2185, Seq. ID No. 2189, Seq. ID No. 2193, Seq. ID No. 2195, Seq. ID No. 2197, Seq. ID No. 2205, Seq. ID No. 2217, Seq. ID No. 2219, Seq. ID No. 2223, Seq. ID No. 2225, Seq. ID No. 2229, Seq. ID No. 2235, Seq. ID No. 2239, Seq. ID No. 2243, Seq. ID No. 2245, Seq. ID No. 2247, Seq. ID No. 2253, Seq. ID No. 2255, Seq. ID No. 2257, Seq. ID No. 2259, Seq. ID No. 2261, Seq. ID No. 2265, Seq. ID No. 2269, Seq. ID No. 2273, Seq. ID No. 2285, Seq. ID No. 2297, Seq. ID No. 2299, Seq. ID No. 2301, Seq. ID No. 2313, Seq. ID No. 2327, Seq. ID No. 2331, Seq. ID No. 2335, Seq. ID No. 2337, Seq. ID No. 2341, Seq. ID No. 2343, Seq. ID No. 2345, Seq. ID No. 2349, Seq. ID No. 2351, Seq. ID No. 2357, Seq. ID No. 2359, Seq. ID No. 2361, Seq. ID No. 2365, Seq. ID No. 2369, Seq. ID No. 2373, Seq. ID No. 2377, Seq. ID No. 2383, Seq. ID No. 2397, Seq. ID No. 2401, Seq. ID No. 2403, Seq. ID No. 2409, Seq. ID No. 2411, Seq. ID No. 2417, Seq. ID No. 2421, Seq. ID No. 2423, Seq. ID No. 2425, Seq. ID No. 2429, Seq. ID No. 2435, Seq. ID No. 2437, Seq. ID No. 2439, Seq. ID No. 2441, Seq. ID No. 2445, Seq. ID No. 2449, Seq. ID No. 2451, Seq. ID No. 2453, Seq. ID No. 2461, Seq. ID No. 2465, Seq. ID No. 2467, Seq. ID No. 2471, Seq. ID No. 2473, Seq. ID No. 2477, Seq. ID No. 2479, Seq. ID No. 2481, Seq. ID No. 2485, Seq. ID No. 2487, Seq. ID No. 2495, Seq. ID No. 2505, Seq. ID No. 2507, Seq. ID No. 2509, Seq. ID No. 2519, Seq. ID No. 2525, Seq. ID No. 2527, Seq. ID No. 2529, Seq. ID No. 2535, Seq. ID No. 2537, Seq. ID No. 2539, Seq. ID No. 2547, Seq. ID No. 2551, Seq. ID No. 2563, Seq. ID No. 2565, Seq. ID No. 2573, Seq. ID No. 2577, Seq. ID No. 2579, Seq. ID No. 2585, Seq. ID No. 2593, Seq. ID No. 2595, Seq. ID No. 2599, Seq. ID No. 2607, Seq. ID No. 2609, Seq. ID No. 2613, Seq. ID No. 2615, Seq. ID No. 2619, Seq. ID No. 2623, Seq. ID No. 2625, Seq. ID No. 2631, Seq. ID No. 2633, Seq. ID No. 2639, Seq. ID No. 2641, Seq. ID No. 2643, Seq. ID No. 2647, Seq. ID No. 2651, Seq. ID No. 2655, Seq. ID No. 2657, Seq. ID No. 2661, Seq. ID No. 2665, Seq. ID No. 2669, Seq. ID No. 2671, Seq. ID No. 2673, Seq. ID No. 2681, Seq. ID No. 2689, Seq. ID No. 2693, Seq. ID No. 2699, Seq. ID No. 2703, Seq. ID No. 2709, Seq. ID No. 2711, Seq. ID No. 2713, Seq. ID No. 2719, Seq. ID No. 2721, Seq. ID No. 2727, Seq. ID No. 2737, Seq. ID No. 2741, Seq. ID No. 2745, Seq. ID No. 2749, Seq. ID No. 2753, Seq. ID No. 2757, Seq. ID No. 2761, Seq. ID No. 2765, Seq. ID No. 2767, Seq. ID No. 2769, Seq. ID No. 2773, Seq. ID No. 2775, Seq. ID No. 2777, Seq. ID No. 2787, Seq. ID No. 2789, Seq. ID No. 2791, Seq. ID No. 2793, Seq. ID No. 2795, Seq. ID No. 2799, Seq. ID No. 2803, Seq. ID No. 2815, Seq. ID No. 2817, Seq. ID No. 2819, Seq. ID No. 2825, Seq. ID No. 2843, Seq. ID No. 2847, Seq. ID No. 2849, Seq. ID No. 2851, Seq. ID No. 2857, Seq. ID No. 2859, Seq. ID No. 2863, Seq. ID No. 2867, Seq. ID No. 2869, Seq. ID No. 2871, Seq. ID No. 2877, Seq. ID No. 2879, Seq. ID No. 2889, Seq. ID No. 2891, Seq. ID No. 2897, Seq. ID No. 2901, Seq. ID No. 2903, Seq. ID No. 2907, Seq. ID No. 2909, Seq. ID No. 2913, Seq. ID No. 2915, Seq. ID No. 2919, Seq. ID No. 2921, Seq. ID No. 2923, Seq. ID No. 2925, Seq. ID No. 2929, Seq. ID No. 2935, Seq. ID No. 2943, Seq. ID No. 2951, Seq. ID No. 2955, Seq. ID No. 2963, Seq. ID No. 2965, Seq. ID No. 2971, Seq. ID No. 2973; Seq. ID No. 2975, Seq. ID No. 2979, Seq. ID No. 2981, Seq. ID No. 2985, Seq. ID No. 2989, Seq. ID No. 2993, Seq. ID No. 2999, Seq. ID No. 3001, Seq. ID No. 3003, Seq. ID No. 3017, Seq. ID No. 3027, Seq. ID No. 3033, Seq. ID No. 3035, Seq. ID No. 3039, Seq. ID No. 3041, Seq. ID No. 3043, Seq. ID No. 3045, Seq. ID No. 3047, Seq. ID No. 3055, Seq. ID No. 3057, Seq. ID No. 3061, Seq. ID No. 3065, Seq. ID No. 3069, Seq. ID No. 3079, Seq. ID No. 3089, Seq. ID No. 3091, Seq. ID No. 3093, Seq. ID No. 3095, Seq. ID No. 3103, Seq. ID No. 3105, Seq. ID No. 3109, Seq. ID No. 3113, Seq. ID No. 3125, Seq. ID No. 3127, Seq. ID No. 3135, Seq. ID No. 3137, Seq. ID No. 3141, Seq. ID No. 3143, Seq. ID No. 3147, Seq. ID No. 3155, Seq. ID No. 3157, Seq. ID No. 3159, Seq. ID No. 3161, Seq. ID No. 3165, Seq. ID No. 3169, Seq. ID No. 3175, Seq. ID No. 3179, Seq. ID No. 3183, Seq. ID No. 3185, Seq. ID No. 3189, Seq. ID No. 3191, Seq. ID No. 3195, Seq. ID No. 3199, Seq. ID No. 3205, Seq. ID No. 3211, Seq. ID No. 3217, Seq. ID No. 3221, Seq. ID No. 3225, Seq. ID No. 3229, Seq. ID No. 3231, Seq. ID No. 3237, Seq. ID No. 3239, Seq. ID No. 3247, Seq. ID No. 3251, Seq. ID No. 3253, Seq. ID No. 3255, Seq. ID No. 3259, Seq. ID No. 3261, Seq. ID No. 3267, Seq. ID No. 3273, Seq. ID No. 3277, Seq. ID No. 3279, Seq. ID No. 3285, Seq. ID No. 3287, Seq. ID No. 3289, Seq. ID No. 3293, Seq. ID No. 3295, Seq. ID No. 3299, Seq. ID No. 3301, Seq. ID No. 3305, Seq. ID No. 3309, Seq. ID No. 3315, Seq. ID No. 3319, Seq. ID No. 3321, Seq. ID No. 3327, Seq. ID No. 3333, Seq. ID No. 3337, Seq. ID No. 3343, Seq. ID No. 3353, Seq. ID No. 3359, Seq. ID No. 3361, Seq. ID No. 3365, Seq. ID No. 3373, Seq. ID No. 3381, Seq. ID No. 3385, Seq. ID No. 3393, Seq. ID No. 3401, Seq. ID No. 3407, Seq. ID No. 3411, Seq. ID No. 3415, Seq. ID No. 3417, Seq. ID No. 3423, Seq. ID No. 3429, Seq. ID No. 3437, Seq. ID No. 3439, Seq. ID No. 3443, Seq. ID No. 3459, Seq. ID No. 3461, Seq. ID No. 3465, Seq. ID No. 3469, Seq. ID No. 3471, Seq. ID No. 3473, Seq. ID No. 3475, Seq. ID No. 3477, Seq. ID No. 3483, Seq. ID No. 3487, Seq. ID No. 3495, Seq. ID No. 3497, Seq. ID No. 3505, Seq. ID No. 3507, Seq. ID No. 3509, Seq. ID No. 3511, Seq. ID No. 3515, Seq. ID No. 3521, Seq. ID No. 3523, Seq. ID No. 3529, Seq. ID No. 3535, Seq. ID No. 3541, Seq. ID No. 3551, Seq. ID No. 3559, Seq. ID No. 3563, Seq. ID No. 3567, Seq. ID No. 3575, Seq. ID No. 3577, Seq. ID No. 3583, Seq. ID No. 3585, Seq. ID No. 3589, Seq. ID No. 3591, Seq. ID No. 3599, Seq. ID No. 3601, Seq. ID No. 3607, Seq. ID No. 3609, Seq. ID No. 3611, Seq. ID No. 3615, Seq. ID No. 3619, Seq. ID No. 3629, Seq. ID No. 3631, Seq. ID No. 3633, Seq. ID No. 3637, Seq. ID No. 3641, Seq. ID No. 3643, Seq. ID No. 3645, Seq. ID No. 3651, Seq. ID No. 3653, Seq. ID No. 3655, Seq. ID No. 3661, Seq. ID No. 3665, Seq. ID No. 3667, Seq. ID No. 3669, Seq. ID No. 3675, Seq. ID No. 3681, Seq. ID No. 3689, Seq. ID No. 3695, Seq. ID No. 3697, Seq. ID No. 3705, Seq. ID No. 3711, Seq. ID No. 3719, Seq. ID No. 3725, Seq. ID No. 3729, Seq. ID No. 3731, Seq. ID No. 3735, Seq. ID No. 3739, Seq. ID No. 3741, Seq. ID No. 3743, Seq. ID No. 3749, Seq. ID No. 3759, Seq. ID No. 3769, Seq. ID No. 3773, Seq. ID No. 3777, Seq. ID No. 3781, Seq. ID No. 3787, Seq. ID No. 3795, Seq. ID No. 3801, Seq. ID No. 3805, Seq. ID No. 3809, Seq. ID No. 3813, Seq. ID No. 3819, Seq. ID No. 3821, Seq. ID No. 3825, Seq. ID No. 3827, Seq. ID No. 3829, Seq. ID No. 3831, Seq. ID No. 3835, Seq. ID No. 3841, Seq. ID No. 3845, Seq. ID No. 3855, Seq. ID No. 3857, Seq. ID No. 3863, Seq. ID No. 3867, Seq. ID No. 3869, Seq. ID No. 3875, Seq. ID No. 3881, Seq. ID No. 3883, Seq. ID No. 3885, Seq. ID No. 3887, Seq. ID No. 3897, Seq. ID No. 3901, Seq. ID No. 3905, Seq. ID No. 3909, Seq. ID No. 3913, Seq. ID No. 3915, Seq. ID No. 3917, Seq. ID No. 3919, Seq. ID No. 3921, Seq. ID No. 3929, Seq. ID No. 3931, Seq. ID No. 3935, Seq. ID No. 3941, Seq. ID No. 3943, Seq. ID No. 3945, Seq. ID No. 3947, Seq. ID No. 3951, Seq. ID No. 3953, Seq. ID No. 3957, Seq. ID No. 3971, Seq. ID No. 3977, Seq. ID No. 3981, Seq. ID No. 3985, Seq. ID No. 3987, Seq. ID No. 3989, Seq. ID No. 3993, Seq. ID No. 4001, Seq. ID No. 4005, Seq. ID No. 4011, Seq. ID No. 4015, Seq. ID No. 4017, Seq. ID No. 4019, Seq. ID No. 4023, Seq. ID No. 4029, Seq. ID No. 4031, Seq. ID No. 4033, Seq. ID No. 4037, Seq. ID No. 4039, Seq. ID No. 4049, Seq. ID No. 4051, Seq. ID No. 4057, Seq. ID No. 4059, Seq. ID No. 4065, Seq. ID No. 4069, Seq. ID No. 4075, Seq. ID No. 4079, Seq. ID No. 4085, Seq. ID No. 4089, Seq. ID No. 4095, Seq. ID No. 4097, Seq. ID No. 4099, Seq. ID No. 4105, Seq. ID No. 4111, Seq. ID No. 4115, Seq. ID No. 4121, Seq. ID No. 4123, Seq. ID No. 4127, Seq. ID No. 4129, Seq. ID No. 4131, Seq. ID No. 4137, Seq. ID No. 4141, Seq. ID No. 4147, Seq. ID No. 4157, Seq. ID No. 4159, Seq. ID No. 4163, Seq. ID No. 4165, Seq. ID No. 4169, Seq. ID No. 4179, Seq. ID No. 4183, Seq. ID No. 4187, Seq. ID No. 4193, Seq. ID No. 4195, Seq. ID No. 4197, Seq. ID No. 4199, Seq. ID No. 4201, Seq. ID No. 4205, Seq. ID No. 4207, Seq. ID No. 4213, Seq. ID No. 4219, Seq. ID No. 4235, Seq. ID No. 4237, Seq. ID No. 4239, Seq. ID No. 4243, Seq. ID No. 4245, Seq. ID No. 4255, Seq. ID No. 4259, Seq. ID No. 4267, Seq. ID No. 4271, Seq. ID No. 4277, Seq. ID No. 4279, Seq. ID No. 4281, Seq. ID No. 4283, Seq. ID No. 4289, Seq. ID No. 4293, Seq. ID No. 4299, Seq. ID No. 4301, Seq. ID No. 4303, Seq. ID No. 4305, Seq. ID No. 4307, Seq. ID No. 4309, Seq. ID No. 4313, Seq. ID No. 4315, Seq. ID No. 4323, Seq. ID No. 4325, Seq. ID No. 4327, Seq. ID No. 4331, Seq. ID No. 4333, Seq. ID No. 4337, Seq. ID No. 4341, Seq. ID No. 4345, Seq. ID No. 4349, Seq. ID No. 4355, Seq. ID No. 4357, Seq. ID No. 4365, Seq. ID No. 4367, Seq. ID No. 4371, Seq. ID No. 4375, Seq. ID No. 4377, Seq. ID No. 4379, Seq. ID No. 4383, Seq. ID No. 4387, Seq. ID No. 4393, Seq. ID No. 4397, Seq. ID No. 4401, Seq. ID No. 4409, Seq. ID No. 4413, Seq. ID No. 4421, Seq. ID No. 4433, Seq. ID No. 4435, Seq. ID No. 4445, Seq. ID No. 4449, Seq. ID No. 4457, Seq. ID No. 4461, Seq. ID No. 4463, Seq. ID No. 4471, Seq. ID No. 4475, Seq. ID No. 4477, Seq. ID No. 4481, Seq. ID No. 4487, Seq. ID No. 4491, Seq. ID No. 4499, Seq. ID No. 4501, Seq. ID No. 4503, Seq. ID No. 4509, Seq. ID No. 4517, Seq. ID No. 4531, Seq. ID No. 4533, Seq. ID No. 4535, Seq. ID No. 4539, Seq. ID No. 4541, Seq. ID No. 4545, Seq. ID No. 4549, Seq. ID No. 4557, Seq. ID No. 4563, Seq. ID No. 4567, Seq. ID No. 4569, Seq. ID No. 4575, Seq. ID No. 4577, Seq. ID No. 4579, Seq. ID No. 4583, Seq. ID No. 4591, Seq. ID No. 4593, Seq. ID No. 4597, Seq. ID No. 4601, Seq. ID No. 4605, Seq. ID No. 4609, Seq. ID No. 4611, Seq. ID No. 4613, Seq. ID No. 4623, Seq. ID No. 4625, Seq. ID No. 4629, Seq. ID No. 4633, Seq. ID No. 4637, Seq. ID No. 4641, Seq. ID No. 4645, Seq. ID No. 4651, Seq. ID No. 4653, Seq. ID No. 4655, Seq. ID No. 4661, Seq. ID No. 4663, Seq. ID No. 4669, Seq. ID No. 4671, Seq. ID No. 4673, Seq. ID No. 4675, Seq. ID No. 4685, Seq. ID No. 4689, Seq. ID No. 4697, Seq. ID No. 4703, Seq. ID No. 4705, Seq. ID No. 4713, Seq. ID No. 4717, Seq. ID No. 4719, Seq. ID No. 4723, Seq. ID No. 4729, Seq. ID No. 4731, Seq. ID No. 4733, Seq. ID No. 4739, Seq. ID No. 4743, Seq. ID No. 4745, Seq. ID No. 4747, Seq. ID No. 4749, Seq. ID No. 4751, Seq. ID No. 4753, Seq. ID No. 4761, Seq. ID No. 4767, Seq. ID No. 4771, Seq. ID No. 4779, Seq. ID No. 4781, Seq. ID No. 4783, Seq. ID No. 4785, Seq. ID No. 4789, Seq. ID No. 4791, Seq. ID No. 4793, Seq. ID No. 4799, Seq. ID No. 4807, Seq. ID No. 4809, Seq. ID No. 4811, Seq. ID No. 4813, Seq. ID No. 4815, Seq. ID No. 4821, Seq. ID No. 4825, Seq. ID No. 4827, Seq. ID No. 4829, Seq. ID No. 4837, Seq. ID No. 4839, Seq. ID No. 4845, Seq. ID No. 4847, Seq. ID No. 4849, Seq. ID No. 4857, Seq. ID No. 4861, Seq. ID No. 4865, Seq. ID No. 4867, Seq. ID No. 4875, Seq. ID No. 4879, Seq. ID No. 4881, Seq. ID No. 4883, Seq. ID No. 4885, Seq. ID No. 4887, Seq. ID No. 4893, Seq. ID No. 4899, Seq. ID No. 4901, Seq. ID No. 4903, Seq. ID No. 4905, Seq. ID No. 4907, Seq. ID No. 4909, Seq. ID No. 4915, Seq. ID No. 4917, Seq. ID No. 4919, Seq. ID No. 4921, Seq. ID No. 4925, Seq. ID No. 4929, Seq. ID No. 4933, Seq. ID No. 4937, Seq. ID No. 4941, Seq. ID No. 4943, Seq. ID No. 4945, Seq. ID No. 4947, Seq. ID No. 4953, Seq. ID No. 4955, Seq. ID No. 4959, Seq. ID No. 4961, Seq. ID No. 4965, Seq. ID No. 4967, Seq. ID No. 4971, Seq. ID No. 4973, Seq. ID No. 4977, Seq. ID No. 4985, Seq. ID No. 4989, Seq. ID No. 4991, Seq. ID No. 4995, Seq. ID No. 4997, Seq. ID No. 5005, Seq. ID No. 5009, Seq. ID No. 5015, Seq. ID No. 5019, Seq. ID No. 5025, Seq. ID No. 5029, Seq. ID No. 5037, Seq. ID No. 5045, Seq. ID No. 5049, Seq. ID No. 5053, Seq. ID No. 5055, Seq. ID No. 5059, Seq. ID No. 5061, Seq. ID No. 5065, Seq. ID No. 5071, Seq. ID No. 5073, Seq. ID No. 5079, Seq. ID No. 5081, Seq. ID No. 5083, Seq. ID No. 5087, Seq. ID No. 5089, Seq. ID No. 5093, Seq. ID No. 5095, Seq. ID No. 5103, Seq. ID No. 5105, Seq. ID No. 5107, Seq. ID No. 5111, Seq. ID No. 5113, Seq. ID No. 5115, Seq. ID No. 5117, Seq. ID No. 5119, Seq. ID No. 5141, Seq. ID No. 5143, Seq. ID No. 5147, Seq. ID No. 5153, Seq. ID No. 5155, Seq. ID No. 5163, Seq. ID No. 5169, Seq. ID No. 5171, Seq. ID No. 5173, Seq. ID No. 5179, Seq. ID No. 5185, Seq. ID No. 5187, Seq. ID No. 5193, Seq. ID No. 5195, Seq. ID No. 5201, Seq. ID No. 5203, Seq. ID No. 5205, Seq. ID No. 5209, Seq. ID No. 5211, Seq. ID No. 5213, Seq. ID No. 5217, Seq. ID No. 5225, Seq. ID No. 5231, Seq. ID No. 5233, Seq. ID No. 5237, Seq. ID No. 5239, Seq. ID No. 5245, Seq. ID No. 5247, Seq. ID No. 5249, Seq. ID No. 5255, Seq. ID No. 5257, Seq. ID No. 5259, Seq. ID No. 5263, Seq. ID No. 5269, Seq. ID No. 5273, Seq. ID No. 5283, Seq. ID No. 5289, Seq. ID No. 5293, Seq. ID No. 5307, Seq. ID No. 5311, Seq. ID No. 5313, Seq. ID No. 5315, Seq. ID No. 5323, Seq. ID No. 5325, Seq. ID No. 5335, Seq. ID No. 5337, Seq. ID No. 5339, Seq. ID No. 5345, Seq. ID No. 5347, Seq. ID No. 5349, Seq. ID No. 5353, Seq. ID No. 5361, Seq. ID No. 5365, Seq. ID No. 5367, Seq. ID No. 5369, Seq. ID No. 5373, Seq. ID No. 5375, Seq. ID No. 5387, Seq. ID No. 5389, Seq. ID No. 5391, Seq. ID No. 5393, Seq. ID No. 5395, Seq. ID No. 5397, Seq. ID No. 5399, Seq. ID No. 5401, Seq. ID No. 5403, Seq. ID No. 5405, Seq. ID No. 5411, Seq. ID No. 5415, Seq. ID No. 5417, Seq. ID No. 5419, Seq. ID No. 5421, Seq. ID No. 5423, Seq. ID No. 5429, Seq. ID No. 5433, Seq. ID No. 5441, Seq. ID No. 5443, Seq. ID No. 5445, Seq. ID No. 5449, Seq. ID No. 5451, Seq. ID No. 5453, Seq. ID No. 5455, Seq. ID No. 5457, Seq. ID No. 5469, Seq. ID No. 5475, Seq. ID No. 5483, Seq. ID No. 5485, Seq. ID No. 5489, Seq. ID No. 5493, Seq. ID No. 5499, Seq. ID No. 5501, Seq. ID No. 5505, Seq. ID No. 5509, Seq. ID No. 5511, Seq. ID No. 5523, Seq. ID No. 5529, Seq. ID No. 5535, Seq. ID No. 5539, Seq. ID No. 5541, Seq. ID No. 5547, Seq. ID No. 5551, Seq. ID No. 5555, Seq. ID No. 5559, Seq. ID No. 5561, Seq. ID No. 5565, Seq. ID No. 5571, Seq. ID No. 5573, Seq. ID No. 5579, Seq. ID No. 5583, Seq. ID No. 5589, Seq. ID No. 5599, Seq. ID No. 5601, Seq. ID No. 5603, Seq. ID No. 5613, Seq. ID No. 5621, Seq. ID No. 5627, Seq. ID No. 5631, Seq. ID No. 5635, Seq. ID No. 5645, Seq. ID No. 5651, Seq. ID No. 5653, Seq. ID No. 5657, Seq. ID No. 5661, Seq. ID No. 5663, Seq. ID No. 5665, Seq. ID No. 5669, Seq. ID No. 5671, Seq. ID No. 5673, Seq. ID No. 5675, Seq. ID No. 5681, Seq. ID No. 5693, Seq. ID No. 5695, Seq. ID No. 5699, Seq. ID No. 5701, Seq. ID No. 5707, Seq. ID No. 5713, Seq. ID No. 5717, Seq. ID No. 5723, Seq. ID No. 5725, Seq. ID No. 5731, Seq. ID No. 5737, Seq. ID No. 5747, Seq. ID No. 5751, Seq. ID No. 5755, Seq. ID No. 5759, Seq. ID No. 5771, Seq. ID No. 5773, Seq. ID No. 5777, Seq. ID No. 5779, Seq. ID No. 5781, Seq. ID No. 5785, Seq. ID No. 5793, Seq. ID No. 5799, Seq. ID No. 5805, Seq. ID No. 5811, Seq. ID No. 5815, Seq. ID No. 5817, Seq. ID No. 5823, Seq. ID No. 5831, Seq. ID No. 5835, Seq. ID No. 5839, Seq. ID No. 5843, Seq. ID No. 5847, Seq. ID No. 5849, Seq. ID No. 5851, Seq. ID No. 5853, Seq. ID No. 5855, Seq. ID No. 5857, Seq. ID No. 5861, Seq. ID No. 5867, Seq. ID No. 5875, Seq. ID No. 5877, Seq. ID No. 5881, Seq. ID No. 5889, Seq. ID No. 5895, Seq. ID No. 5897, Seq. ID No. 5901, Seq. ID No. 5903, Seq. ID No. 5907, Seq. ID No. 5913, Seq. ID No. 5915, Seq. ID No. 5917, Seq. ID No. 5919, Seq. ID No. 5925, Seq. ID No. 5931, Seq. ID No. 5933, Seq. ID No. 5935, Seq. ID No. 5941, Seq. ID No. 5943, Seq. ID No. 5945, Seq. ID No. 5949, Seq. ID No. 5955, Seq. ID No. 5957, Seq. ID No. 5958, Seq. ID No. 5967, Seq. ID No. 5971, Seq. ID No. 5975, Seq. ID No. 5977, Seq. ID No. 5981, Seq. ID No. 5983, Seq. ID No. 5985, Seq. ID No. 5989, Seq. ID No. 5991, Seq. ID No. 5995, Seq. ID No. 5997, Seq. ID No. 6003, Seq. ID No. 6005, Seq. ID No. 6007, Seq. ID No. 6015, Seq. ID No. 6017, Seq. ID No. 6019, Seq. ID No. 6023, Seq. ID No. 6029, Seq. ID No. 6033, Seq. ID No. 6035, Seq. ID No. 6037, Seq. ID No. 6043, Seq. ID No. 6049, Seq. ID No. 6055, Seq. ID No. 6065, Seq. ID No. 6069, Seq. ID No. 6075, Seq. ID No. 6081, Seq. ID No. 6083, Seq. ID No. 6087, Seq. ID No. 6095, Seq. ID No. 6097, Seq. ID No. 6099, Seq. ID No. 6103, Seq. ID No. 6105, Seq. ID No. 6113, Seq. ID No. 6115, Seq. ID No. 6119, Seq. ID No. 6125, Seq. ID No. 6127, Seq. ID No. 6129, Seq. ID No. 6131, Seq. ID No. 6133, Seq. ID No. 6141, Seq. ID No. 6143, Seq. ID No. 6147, Seq. ID No. 6153, Seq. ID No. 6165, Seq. ID No. 6169, Seq. ID No. 6171, Seq. ID No. 6173, Seq. ID No. 6177, Seq. ID No. 6179, Seq. ID No. 6187, Seq. ID No. 6193, Seq. ID No. 6201, Seq. ID No. 6207, Seq. ID No. 6211, Seq. ID No. 6215, Seq. ID No. 6219, Seq. ID No. 6231, Seq. ID No. 6235, Seq. ID No. 6243, Seq. ID No. 6247, Seq. ID No. 6251, Seq. ID No. 6255, Seq. ID No. 6261, Seq. ID No. 6263, Seq. ID No. 6269, Seq. ID No. 6275, Seq. ID No. 6277, Seq. ID No. 6279, Seq. ID No. 6287, Seq. ID No. 6291, Seq. ID No. 6299, Seq. ID No. 6305, Seq. ID No. 6307, Seq. ID No. 6313, Seq. ID No. 6315, Seq. ID No. 6321, Seq. ID No. 6323, Seq. ID No. 6325, Seq. ID No. 6331, Seq. ID No. 6335, Seq. ID No. 6339, Seq. ID No. 6341, Seq. ID No. 6343, Seq. ID No. 6345, Seq. ID No. 6347, Seq. ID No. 6355, Seq. ID No. 6359, Seq. ID No. 6361, Seq. ID No. 6365, Seq. ID No. 6369, Seq. ID No. 6371, Seq. ID No. 6375, Seq. ID No. 6377, Seq. ID No. 6379, Seq. ID No. 6387, Seq. ID No. 6391, Seq. ID No. 6397, Seq. ID No. 6401, Seq. ID No. 6405, Seq. ID No. 6409, Seq. ID No. 6413, Seq. ID No. 6417, Seq. ID No. 6419, Seq. ID No. 6423, Seq. ID No. 6429, Seq. ID No. 6433, Seq. ID No. 6435, Seq. ID No. 6439, Seq. ID No. 6445, Seq. ID No. 6447, Seq. ID No. 6451, Seq. ID No. 6455, Seq. ID No. 6459, Seq. ID No. 6461, Seq. ID No. 6463, Seq. ID No. 6475, Seq. ID No. 6481, Seq. ID No. 6483, Seq. ID No. 6485, Seq. ID No. 6487, Seq. ID No. 6489, Seq. ID No. 6491, Seq. ID No. 6493, Seq. ID No. 6495, Seq. ID No. 6499, Seq. ID No. 6505, Seq. ID No. 6509, Seq. ID No. 6513, Seq. ID No. 6519, Seq. ID No. 6521, Seq. ID No. 6525, Seq. ID No. 6527, Seq. ID No. 6531, Seq. ID No. 6533, Seq. ID No. 6535, Seq. ID No. 6545, Seq. ID No. 6551, Seq. ID No. 6553, Seq. ID No. 6559, Seq. ID No. 6561, Seq. ID No. 6563, Seq. ID No. 6565, Seq. ID No. 6567, Seq. ID No. 6569, Seq. ID No. 6575, Seq. ID No. 6579, Seq. ID No. 6583, Seq. ID No. 6585, Seq. ID No. 6591, Seq. ID No. 6595, Seq. ID No. 6605, Seq. ID No. 6607, Seq. ID No. 6611, Seq. ID No. 6615, Seq. ID No. 6617, Seq. ID No. 6619, Seq. ID No. 6623, Seq. ID No. 6625, Seq. ID No. 6629, Seq. ID No. 6633, Seq. ID No. 6635, Seq. ID No. 6641, and Seq. ID No. 6647.

[0032] In another preferred embodiment, the invention comprises an isolated polynucleotide of the Alloiococcus otitidis genomic sequence encoding a polypeptide, which has been identified by the Applicants' assignee's ORF finder program that searches for an ATG, GTG or TTG Start codon between “Stop-Stop” region, and the polynucleotide is selected from one of Seq. ID No. 1, Seq. ID No. 5, Seq. ID No. 11, Seq. ID No. 13, Seq. ID No. 15, Seq. ID No. 17, Seq. ID No. 19, Seq. ID No. 21, Seq. ID No. 23, Seq. ID No. 27, Seq. ID No. 29, Seq. ID No. 31, Seq. ID No. 35, Seq. ID No. 37, Seq. ID No. 41, Seq. ID No. 43, Seq. ID No. 45, Seq. ID No. 47, Seq. ID No. 49, Seq. ID No. 51, Seq. ID No. 53, Seq. ID No. 55, Seq. ID No. 57, Seq. ID No. 59, Seq. ID No. 65, Seq. ID No. 67, Seq. ID No. 75, Seq. ID No. 77, Seq. ID No. 79, Seq. ID No. 81, Seq. ID No. 83, Seq. ID No. 89, Seq. ID No. 91, Seq. ID No. 93, Seq. ID No. 97, Seq. ID No. 99, Seq. ID No. 103, Seq. ID No. 105, Seq. ID No. 107, Seq. ID No. 109, Seq. ID No. 111, Seq. ID No. 113, Seq. ID No. 115, Seq. ID No. 117, Seq. ID No. 119, Seq. ID No. 121, Seq. ID No. 127, Seq. ID No. 129, Seq. ID No. 131, Seq. ID No. 133, Seq. ID No. 135, Seq. ID No. 137, Seq. ID No. 139, Seq. ID No. 143, Seq. ID No. 145, Seq. ID No. 147, Seq. ID No. 149, Seq. ID No. 153, Seq. ID No. 155, Seq. ID No. 157, Seq. ID No. 159, Seq. ID No. 161, Seq. ID No. 163, Seq. ID No. 165, Seq. ID No. 167, Seq. ID No. 169, Seq. ID No. 171, Seq. ID No. 175, Seq. ID No. 177, Seq. ID No. 179, Seq. ID No. 181, Seq. ID No. 183, Seq. ID No. 187, Seq. ID No. 191, Seq. ID No. 193, Seq. ID No. 195, Seq. ID No. 201, Seq. ID No. 205, Seq. ID No. 207, Seq. ID No. 215, Seq. ID No. 219, Seq. ID No. 221, Seq. ID No. 223, Seq. ID No. 225, Seq. ID No. 227, Seq. ID No. 231, Seq. ID No. 233, Seq. ID No. 239, Seq. ID No. 243, Seq. ID No. 245, Seq. ID No. 247, Seq. ID No. 253, Seq. ID No. 257, Seq. ID No. 259, Seq. ID No. 261, Seq. ID No. 263, Seq. ID No. 265, Seq. ID No. 267, Seq. ID No. 269, Seq. ID No. 273, Seq. ID No. 277, Seq. ID No. 279, Seq. ID No. 281, Seq. ID No. 283, Seq. ID No. 291, Seq. ID No. 293, Seq. ID No. 297, Seq. ID No. 301, Seq. ID No. 305, Seq. ID No. 307, Seq. ID No. 309, Seq. ID No. 313, Seq. ID No. 317, Seq. ID No. 321, Seq. ID No. 323, Seq. ID No. 325, Seq. ID No. 331, Seq. ID No. 333, Seq. ID No. 335, Seq. ID No. 337, Seq. ID No. 339, Seq. ID No. 343, Seq. ID No. 345, Seq. ID No. 347, Seq. ID No. 349, Seq. ID No. 353, Seq. ID No. 355, Seq. ID No. 357, Seq. ID No. 359, Seq. ID No. 361, Seq. ID No. 363, Seq. ID No. 365, Seq. ID No. 367, Seq. ID No. 369, Seq. ID No. 371, Seq. ID No. 375, Seq. ID No. 377, Seq. ID No. 379, Seq. ID No. 383, Seq. ID No. 385, Seq. ID No. 387, Seq. ID No. 389, Seq. ID No. 391, Seq. ID No. 393, Seq. ID No. 397, Seq. ID No. 401, Seq. ID No. 403, Seq. ID No. 405, Seq. ID No. 407, Seq. ID No. 409, Seq. ID No. 415, Seq. ID No. 423, Seq. ID No. 425, Seq. ID No. 427, Seq. ID No. 429, Seq. ID No. 431, Seq. ID No. 433, Seq. ID No. 435, Seq. ID No. 437, Seq. ID No. 439, Seq. ID No. 441, Seq. ID No. 443, Seq. ID No. 445, Seq. ID No. 447, Seq. ID No. 451, Seq. ID No. 453, Seq. ID No. 455, Seq. ID No. 457, Seq. ID No. 461, Seq. ID No. 463, Seq. ID No. 467, Seq. ID No. 469, Seq. ID No. 471, Seq. ID No. 473, Seq. ID No. 475, Seq. ID No. 477, Seq. ID No. 479, Seq. ID No. 481, Seq. ID No. 483, Seq. ID No. 485, Seq. ID No. 489, Seq. ID No. 491, Seq. ID No. 493, Seq. ID No. 495, Seq. ID No. 501, Seq. ID No. 505, Seq. ID No. 507, Seq. ID No. 511, Seq. ID No. 515, Seq. ID No. 517, Seq. ID No. 523, Seq. ID No. 529, Seq. ID No. 531, Seq. ID No. 533, Seq. ID No. 537, Seq. ID No. 539, Seq. ID No. 543, Seq. ID No. 547, Seq. ID No. 549, Seq. ID No. 551, Seq. ID No. 553, Seq. ID No. 555, Seq. ID No. 557, Seq. ID No. 559, Seq. ID No. 561, Seq. ID No. 565, Seq. ID No. 569, Seq. ID No. 571, Seq. ID No. 573, Seq. ID No. 575, Seq. ID No. 579, Seq. ID No. 581, Seq. ID No. 585, Seq. ID No. 587, Seq. ID No. 589, Seq. ID No. 591, Seq. ID No. 593, Seq. ID No. 595, Seq. ID No. 597, Seq. ID No. 599, Seq. ID No. 601, Seq. ID No. 603, Seq. ID No. 605, Seq. ID No. 609, Seq. ID No. 613, Seq. ID No. 615, Seq. ID No. 617, Seq. ID No. 619, Seq. ID No. 621, Seq. ID No. 623, Seq. ID No. 625, Seq. ID No. 627, Seq. ID No. 635, Seq. ID No. 637, Seq. ID No. 643, Seq. ID No. 645, Seq. ID No. 647, Seq. ID No. 649, Seq. ID No. 655, Seq. ID No. 663, Seq. ID No. 665, Seq. ID No. 667, Seq. ID No. 669, Seq. ID No. 675, Seq. ID No. 681, Seq. ID No. 683, Seq. ID No. 687, Seq. ID No. 689, Seq. ID No. 691, Seq. ID No. 695, Seq. ID No. 697, Seq. ID No. 699, Seq. ID No. 701, Seq. ID No. 703, Seq. ID No. 705, Seq. ID No. 707, Seq. ID No. 709, Seq. ID No. 713, Seq. ID No. 725, Seq. ID No. 727, Seq. ID No. 729, Seq. ID No. 731, Seq. ID No. 733, Seq. ID No. 735, Seq. ID No. 739, Seq. ID No. 741, Seq. ID No. 745, Seq. ID No. 747, Seq. ID No. 749, Seq. ID No. 751, Seq. ID No. 753, Seq. ID No. 759, Seq. ID No. 763, Seq. ID No. 765, Seq. ID No. 773, Seq. ID No. 775, Seq. ID No. 781, Seq. ID No. 783, Seq. ID No. 787, Seq. ID No. 793, Seq. ID No. 795, Seq. ID No. 799, Seq. ID No. 801, Seq. ID No. 805, Seq. ID No. 807, Seq. ID No. 809, Seq. ID No. 811, Seq. ID No. 813, Seq. ID No. 815, Seq. ID No. 817, Seq. ID No. 819, Seq. ID No. 821, Seq. ID No. 823, Seq. ID No. 827, Seq. ID No. 829, Seq. ID No. 831, Seq. ID No. 835, Seq. ID No. 837, Seq. ID No. 839, Seq. ID No. 843, Seq. ID No. 845, Seq. ID No. 847, Seq. ID No. 855, Seq. ID No. 859, Seq. ID No. 861, Seq. ID No. 865, Seq. ID No. 867, Seq. ID No. 871, Seq. ID No. 873, Seq. ID No. 875, Seq. ID No. 877, Seq. ID No. 879, Seq. ID No. 881, Seq. ID No. 885, Seq. ID No. 895, Seq. ID No. 897, Seq. ID No. 899, Seq. ID No. 901, Seq. ID No. 903, Seq. ID No. 905, Seq. ID No. 907, Seq. ID No. 909, Seq. ID No. 913, Seq. ID No. 915, Seq. ID No. 921, Seq. ID No. 923, Seq. ID No. 925, Seq. ID No. 931, Seq. ID No. 933, Seq. ID No. 935, Seq. ID No. 937, Seq. ID No. 939, Seq. ID No. 941, Seq. ID No. 943, Seq. ID No. 947, Seq. ID No. 949, Seq. ID No. 951, Seq. ID No. 953, Seq. ID No. 955, Seq. ID No. 957, Seq. ID No. 961, Seq. ID No. 963, Seq. ID No. 965, Seq. ID No. 967, Seq. ID No. 969, Seq. ID No. 971, Seq. ID No. 973, Seq. ID No. 975, Seq. ID No. 981, Seq. ID No. 983, Seq. ID No. 985, Seq. ID No. 987, Seq. ID No. 989, Seq. ID No. 991, Seq. ID No. 993, Seq. ID No. 995, Seq. ID No. 997, Seq. ID No. 1001, Seq. ID No. 1003, Seq. ID No. 1005, Seq. ID No. 1007, Seq. ID No. 1009, Seq. ID No. 1017, Seq. ID No. 1019, Seq. ID No. 1023, Seq. ID No. 1025, Seq. ID No. 1027, Seq. ID No. 1039, Seq. ID No. 1041, Seq. ID No. 1043, Seq. ID No. 1045, Seq. ID No. 1047, Seq. ID No. 1049, Seq. ID No. 1051, Seq. ID No. 1057, Seq. ID No. 1059, Seq. ID No. 1061, Seq. ID No. 1065, Seq. ID No. 1069, Seq. ID No. 1075, Seq. ID No. 1077, Seq. ID No. 1079, Seq. ID No. 1081, Seq. ID No. 1083, Seq. ID No. 1085, Seq. ID No. 1087, Seq. ID No. 1091, Seq. ID No. 1093, Seq. ID No. 1095, Seq. ID No. 1097, Seq. ID No. 1099, Seq. ID No. 1101, Seq. ID No. 1103, Seq. ID No. 1107, Seq. ID No. 1109, Seq. ID No. 1111, Seq. ID No. 1113, Seq. ID No. 1115, Seq. ID No. 1119, Seq. ID No. 1121, Seq. ID No. 1123, Seq. ID No. 1125, Seq. ID No. 1127, Seq. ID No. 1129, Seq. ID No. 1131, Seq. ID No. 1137, Seq. ID No. 1139, Seq. ID No. 1141, Seq. ID No. 1143, Seq. ID No. 1145, Seq. ID No. 1147, Seq. ID No. 1149, Seq. ID No. 1151, Seq. ID No. 1153, Seq. ID No. 1155, Seq. ID No. 1157, Seq. ID No. 1159, Seq. ID No. 1161, Seq. ID No. 1163, Seq. ID No. 1171, Seq. ID No. 1175, Seq. ID No. 1177, Seq. ID No. 1179, Seq. ID No. 1181, Seq. ID No. 1187, Seq. ID No. 1191, Seq. ID No. 1193, Seq. ID No. 1195, Seq. ID No. 1197, Seq. ID No. 1201, Seq. ID No. 1203, Seq. ID No. 1205, Seq. ID No. 1207, Seq. ID No. 1211, Seq. ID No. 1213, Seq. ID No. 1215, Seq. ID No. 1217, Seq. ID No. 1221, Seq. ID No. 1223, Seq. ID No. 1225, Seq. ID No. 1231, Seq. ID No. 1233, Seq. ID No. 1237, Seq. ID No. 1239, Seq. ID No. 1241, Seq. ID No. 1245, Seq. ID No. 1247, Seq. ID No. 1249, Seq. ID No. 1251, Seq. ID No. 1253, Seq. ID No. 1255, Seq. ID No. 1257, Seq. ID No. 1259, Seq. ID No. 1261, Seq. ID No. 1263, Seq. ID No. 1271, Seq. ID No. 1273, Seq. ID No. 1275, Seq. ID No. 1277, Seq. ID No. 1279, Seq. ID No. 1285, Seq. ID No. 1289, Seq. ID No. 1291, Seq. ID No. 1293, Seq. ID No. 1295, Seq. ID No. 1297, Seq. ID No. 1299, Seq. ID No. 1301, Seq. ID No. 1303, Seq. ID No. 1305, Seq. ID No. 1307, Seq. ID No. 1309, Seq. ID No. 1311, Seq. ID No. 1313, Seq. ID No. 1317, Seq. ID No. 1319, Seq. ID No. 1321, Seq. ID No. 1331, Seq. ID No. 1333, Seq. ID No. 1335, Seq. ID No. 1337, Seq. ID No. 1339, Seq. ID No. 1343, Seq. ID No. 1345, Seq. ID No. 1347, Seq. ID No. 1349, Seq. ID No. 1351, Seq. ID No. 1359, Seq. ID No. 1361, Seq. ID No. 1363, Seq. ID No. 1365, Seq. ID No. 1369, Seq. ID No. 1371, Seq. ID No. 1375, Seq. ID No. 1377, Seq. ID No. 1381, Seq. ID No. 1383, Seq. ID No. 1385, Seq. ID No. 1387, Seq. ID No. 1389, Seq. ID No. 1391, Seq. ID No. 1393, Seq. ID No. 1401, Seq. ID No. 1403, Seq. ID No. 1407, Seq. ID No. 1409, Seq. ID No. 1411, Seq. ID No. 1413, Seq. ID No. 1415, Seq. ID No. 1419, Seq. ID No. 1421, Seq. ID No. 1423, Seq. ID No. 1425, Seq. ID No. 1427, Seq. ID No. 1429, Seq. ID No. 1433, Seq. ID No. 1437, Seq. ID No. 1441, Seq. ID No. 1443, Seq. ID No. 1447, Seq. ID No. 1449, Seq. ID No. 1451, Seq. ID No. 1455, Seq. ID No. 1459, Seq. ID No. 1463, Seq. ID No. 1465, Seq. ID No. 1467, Seq. ID No. 1469, Seq. ID No. 1471, Seq. ID No. 1473, Seq. ID No. 1475, Seq. ID No. 1477, Seq. ID No. 1479, Seq. ID No. 1483, Seq. ID No. 1485, Seq. ID No. 1487, Seq. ID No. 1491, Seq. ID No. 1493, Seq. ID No. 1495, Seq. ID No. 1497, Seq. ID No. 1499, Seq. ID No. 1501, Seq. ID No. 1505, Seq. ID No. 1507, Seq. ID No. 1511, Seq. ID No. 1517, Seq. ID No. 1519, Seq. ID No. 1523, Seq. ID No. 1525, Seq. ID No. 1527, Seq. ID No. 1531, Seq. ID No. 1539, Seq. ID No. 1543, Seq. ID No. 1549, Seq. ID No. 1551, Seq. ID No. 1553, Seq. ID No. 1555, Seq. ID No. 1557, Seq. ID No. 1561, Seq. ID No. 1563, Seq. ID No. 1565, Seq. ID No. 1567, Seq. ID No. 1571, Seq. ID No. 1573, Seq. ID No. 1575, Seq. ID No. 1577, Seq. ID No. 1579, Seq. ID No. 1581, Seq. ID No. 1589, Seq. ID No. 1593, Seq. ID No. 1595, Seq. ID No. 1597, Seq. ID No. 1599, Seq. ID No. 1601, Seq. ID No. 1607, Seq. ID No. 1611, Seq. ID No. 1613, Seq. ID No. 1615, Seq. ID No. 1617, Seq. ID No. 1619, Seq. ID No. 1623, Seq. ID No. 1625, Seq. ID No. 1627, Seq. ID No. 1633, Seq. ID No. 1637, Seq. ID No. 1639, Seq. ID No. 1641, Seq. ID No. 1643, Seq. ID No. 1647, Seq. ID No. 1651, Seq. ID No. 1653, Seq. ID No. 1655, Seq. ID No. 1657, Seq. ID No. 1661, Seq. ID No. 1663, Seq. ID No. 1665, Seq. ID No. 1669, Seq. ID No. 1675, Seq. ID No. 1679, Seq. ID No. 1681, Seq. ID No. 1685, Seq. ID No. 1687, Seq. ID No. 1689, Seq. ID No. 1691, Seq. ID No. 1693, Seq. ID No. 1695, Seq. ID No. 1697, Seq. ID No. 1699, Seq. ID No. 1703, Seq. ID No. 1705, Seq. ID No. 1707, Seq. ID No. 1711, Seq. ID No. 1713, Seq. ID No. 1715, Seq. ID No. 1717, Seq. ID No. 1719, Seq. ID No. 1721, Seq. ID No. 1723, Seq. ID No. 1727, Seq. ID No. 1729, Seq. ID No. 1735, Seq. ID No. 1737, Seq. ID No. 1739, Seq. ID No. 1741, Seq. ID No. 1747, Seq. ID No. 1749, Seq. ID No. 1751, Seq. ID No. 1755, Seq. ID No. 1757, Seq. ID No. 1759, Seq. ID No. 1763, Seq. ID No. 1769, Seq. ID No. 1771, Seq. ID No. 1775, Seq. ID No. 1777, Seq. ID No. 1779, Seq. ID No. 1781, Seq. ID No. 1783, Seq. ID No. 1785, Seq. ID No. 1789, Seq. ID No. 1791, Seq. ID No. 1793, Seq. ID No. 1795, Seq. ID No. 1797, Seq. ID No. 1805, Seq. ID No. 1809, Seq. ID No. 1811, Seq. ID No. 1813, Seq. ID No. 1815, Seq. ID No. 1817, Seq. ID No. 1819, Seq. ID No. 1821, Seq. ID No. 1823, Seq. ID No. 1825, Seq. ID No. 1829, Seq. ID No. 1833, Seq. ID No. 1841, Seq. ID No. 1843, Seq. ID No. 1845, Seq. ID No. 1847, Seq. ID No. 1849, Seq. ID No. 1853, Seq. ID No. 1855, Seq. ID No. 1857, Seq. ID No. 1859, Seq. ID No. 1861, Seq. ID No. 1863, Seq. ID No. 1865, Seq. ID No. 1867, Seq. ID No. 1871, Seq. ID No. 1873, Seq. ID No. 1875, Seq. ID No. 1877, Seq. ID No. 1881, Seq. ID No. 1883, Seq. ID No. 1885, Seq. ID No. 1887, Seq. ID No. 1889, Seq. ID No. 1895, Seq. ID No. 1903, Seq. ID No. 1905, Seq. ID No. 1907, Seq. ID No. 1911, Seq. ID No. 1913, Seq. ID No. 1915, Seq. ID No. 1919, Seq. ID No. 1923, Seq. ID No. 1925, Seq. ID No. 1927, Seq. ID No. 1929, Seq. ID No. 1931, Seq. ID No. 1935, Seq. ID No. 1941, Seq. ID No. 1943, Seq. ID No. 1945, Seq. ID No. 1947, Seq. ID No. 1949, Seq. ID No. 1951, Seq. ID No. 1953, Seq. ID No. 1959, Seq. ID No. 1961, Seq. ID No. 1963, Seq. ID No. 1965, Seq. ID No. 1967, Seq. ID No. 1969, Seq. ID No. 1971, Seq. ID No. 1979, Seq. ID No. 1983, Seq. ID No. 1985, Seq. ID No. 1987, Seq. ID No. 1989, Seq. ID No. 1991, Seq. ID No. 1995, Seq. ID No. 1997, Seq. ID No. 1999, Seq. ID No. 2001, Seq. ID No. 2003, Seq. ID No. 2005, Seq. ID No. 2007, Seq. ID No. 2015, Seq. ID No. 2019, Seq. ID No. 2021, Seq. ID No. 2025, Seq. ID No. 2027, Seq. ID No. 2029, Seq. ID No. 2031, Seq. ID No. 2035, Seq. ID No. 2037, Seq. ID No. 2041, Seq. ID No. 2043, Seq. ID No. 2045, Seq. ID No. 2047, Seq. ID No. 2053, Seq. ID No. 2055, Seq. ID No. 2059, Seq. ID No. 2063, Seq. ID No. 2065, Seq. ID No. 2067, Seq. ID No. 2069, Seq. ID No. 2071, Seq. ID No. 2073, Seq. ID No. 2075, Seq. ID No. 2077, Seq. ID No. 2079, Seq. ID No. 2081, Seq. ID No. 2083, Seq. ID No. 2085, Seq. ID No. 2089, Seq. ID No. 2091, Seq. ID No. 2093, Seq. ID No. 2097, Seq. ID No. 2099, Seq. ID No. 2101, Seq. ID No. 2103, Seq. ID No. 2107, Seq. ID No. 2109, Seq. ID No. 2111, Seq. ID No. 2115, Seq. ID No. 2117, Seq. ID No. 2119, Seq. ID No. 2125, Seq. ID No. 2127, Seq. ID No. 2129, Seq. ID No. 2131, Seq. ID No. 2133, Seq. ID No. 2135, Seq. ID No. 2137, Seq. ID No. 2141, Seq. ID No. 2143, Seq. ID No. 2145, Seq. ID No. 2149, Seq. ID No. 2151, Seq. ID No. 2153, Seq. ID No. 2155, Seq. ID No. 2157, Seq. ID No. 2159, Seq. ID No. 2161, Seq. ID No. 2165, Seq. ID No. 2167, Seq. ID No. 2169, Seq. ID No. 2179, Seq. ID No. 2181, Seq. ID No. 2183, Seq. ID No. 2189, Seq. ID No. 2191, Seq. ID No. 2195, Seq. ID No. 2197, Seq. ID No. 2199, Seq. ID No. 2201, Seq. ID No. 2203, Seq. ID No. 2205, Seq. ID No. 2207, Seq. ID No. 2209, Seq. ID No. 2211, Seq. ID No. 2213, Seq. ID No. 2215, Seq. ID No. 2217, Seq. ID No. 2221, Seq. ID No. 2223, Seq. ID No. 2227, Seq. ID No. 2229, Seq. ID No. 2235, Seq. ID No. 2241, Seq. ID No. 2245, Seq. ID No. 2247, Seq. ID No. 2251, Seq. ID No. 2253, Seq. ID No. 2257, Seq. ID No. 2259, Seq. ID No. 2261, Seq. ID No. 2263, Seq. ID No. 2265, Seq. ID No. 2267, Seq. ID No. 2269, Seq. ID No. 2275, Seq. ID No. 2277, Seq. ID No. 2279, Seq. ID No. 2285, Seq. ID No. 2287, Seq. ID No. 2297, Seq. ID No. 2299, Seq. ID No. 2301, Seq. ID No. 2309, Seq. ID No. 2311, Seq. ID No. 2315, Seq. ID No. 2327, Seq. ID No. 2329, Seq. ID No. 2333, Seq. ID No. 2343, Seq. ID No. 2345, Seq. ID No. 2349, Seq. ID No. 2351, Seq. ID No. 2357, Seq. ID No. 2363, Seq. ID No. 2365, Seq. ID No. 2367, Seq. ID No. 2369, Seq. ID No. 2371, Seq. ID No. 2373, Seq. ID No. 2375, Seq. ID No. 2379, Seq. ID No. 2381, Seq. ID No. 2385, Seq. ID No. 2387, Seq. ID No. 2391, Seq. ID No. 2393, Seq. ID No. 2395, Seq. ID No. 2397, Seq. ID No. 2399, Seq. ID No. 2401, Seq. ID No. 2405, Seq. ID No. 2409, Seq. ID No. 2413, Seq. ID No. 2415, Seq. ID No. 2417, Seq. ID No. 2421, Seq. ID No. 2423, Seq. ID No. 2425, Seq. ID No. 2427, Seq. ID No. 2429, Seq. ID No. 2435, Seq. ID No. 2437, Seq. ID No. 2445, Seq. ID No. 2447, Seq. ID No. 2449, Seq. ID No. 2451, Seq. ID No. 2453, Seq. ID No. 2455, Seq. ID No. 2457, Seq. ID No. 2459, Seq. ID No. 2461, Seq. ID No. 2463, Seq. ID No. 2465, Seq. ID No. 2469, Seq. ID No. 2471, Seq. ID No. 2475, Seq. ID No. 2481, Seq. ID No. 2483, Seq. ID No. 2485, Seq. ID No. 2491, Seq. ID No. 2493, Seq. ID No. 2495, Seq. ID No. 2499, Seq. ID No. 2501, Seq. ID No. 2503, Seq. ID No. 2505, Seq. ID No. 2507, Seq. ID No. 2511, Seq. ID No. 2513, Seq. ID No. 2517, Seq. ID No. 2519, Seq. ID No. 2521, Seq. ID No. 2525, Seq. ID No. 2529, Seq. ID No. 2533, Seq. ID No. 2535, Seq. ID No. 2537, Seq. ID No. 2539, Seq. ID No. 2547, Seq. ID No. 2549, Seq. ID No. 2551, Seq. ID No. 2553, Seq. ID No. 2559, Seq. ID No. 2561, Seq. ID No. 2563, Seq. ID No. 2565, Seq. ID No. 2573, Seq. ID No. 2575, Seq. ID No. 2577, Seq. ID No. 2579, Seq. ID No. 2581, Seq. ID No. 2587, Seq. ID No. 2589, Seq. ID No. 2591, Seq. ID No. 2593, Seq. ID No. 2595, Seq. ID No. 2599, Seq. ID No. 2603, Seq. ID No. 2605, Seq. ID No. 2607, Seq. ID No. 2609, Seq. ID No. 2611, Seq. ID No. 2613, Seq. ID No. 2617, Seq. ID No. 2619, Seq. ID No. 2623, Seq. ID No. 2625, Seq. ID No. 2627, Seq. ID No. 2629, Seq. ID No. 2631, Seq. ID No. 2633, Seq. ID No. 2635, Seq. ID No. 2637, Seq. ID No. 2639, Seq. ID No. 2641, Seq. ID No. 2643, Seq. ID No. 2645, Seq. ID No. 2647, Seq. ID No. 2649, Seq. ID No. 2651, Seq. ID No. 2653, Seq. ID No. 2655, Seq. ID No. 2659, Seq. ID No. 2663, Seq. ID No. 2667, Seq. ID No. 2669, Seq. ID No. 2671, Seq. ID No. 2675, Seq. ID No. 2677, Seq. ID No. 2683, Seq. ID No. 2685, Seq. ID No. 2687, Seq. ID No. 2689, Seq. ID No. 2691, Seq. ID No. 2693, Seq. ID No. 2695, Seq. ID No. 2697, Seq. ID No. 2699, Seq. ID No. 2703, Seq. ID No. 2709, Seq. ID No. 2711, Seq. ID No. 2715, Seq. ID No. 2717, Seq. ID No. 2719, Seq. ID No. 2723, Seq. ID No. 2725, Seq. ID No. 2727, Seq. ID No. 2729, Seq. ID No. 2731, Seq. ID No. 2735, Seq. ID No. 2737, Seq. ID No. 2739, Seq. ID No. 2749, Seq. ID No. 2751, Seq. ID No. 2753, Seq. ID No. 2755, Seq. ID No. 2759, Seq. ID No. 2765, Seq. ID No. 2767, Seq. ID No. 2769, Seq. ID No. 2771, Seq. ID No. 2773, Seq. ID No. 2775, Seq. ID No. 2779, Seq. ID No. 2781, Seq. ID No. 2783, Seq. ID No. 2787, Seq. ID No. 2789, Seq. ID No. 2791, Seq. ID No. 2793, Seq. ID No. 2795, Seq. ID No. 2797, Seq. ID No. 2799, Seq. ID No. 2801, Seq. ID No. 2803, Seq. ID No. 2807, Seq. ID No. 2809, Seq. ID No. 2813, Seq. ID No. 2815, Seq. ID No. 2821, Seq. ID No. 2823, Seq. ID No. 2827, Seq. ID No. 2829, Seq. ID No. 2831, Seq. ID No. 2833, Seq. ID No. 2839, Seq. ID No. 2841, Seq. ID No. 2843, Seq. ID No. 2845, Seq. ID No. 2847, Seq. ID No. 2855, Seq. ID No. 2861, Seq. ID No. 2863, Seq. ID No. 2865, Seq. ID No. 2867, Seq. ID No. 2869, Seq. ID No. 2871, Seq. ID No. 2877, Seq. ID No. 2881, Seq. ID No. 2883, Seq. ID No. 2885, Seq. ID No. 2887, Seq. ID No. 2891, Seq. ID No. 2893, Seq. ID No. 2895, Seq. ID No. 2899, Seq. ID No. 2901, Seq. ID No. 2907, Seq. ID No. 2915, Seq. ID No. 2917, Seq. ID No. 2919, Seq. ID No. 2921, Seq. ID No. 2923, Seq. ID No. 2927, Seq. ID No. 2931, Seq. ID No. 2933, Seq. ID No. 2935, Seq. ID No. 2943, Seq. ID No. 2945, Seq. ID No. 2951, Seq. ID No. 2953, Seq. ID No. 2957, Seq. ID No. 2959, Seq. ID No. 2961, Seq. ID No. 2963, Seq. ID No. 2965, Seq. ID No. 2967, Seq. ID No. 2971, Seq. ID No. 2973, Seq. ID No. 2975, Seq. ID No. 2977, Seq. ID No. 2979, Seq. ID No. 2983, Seq. ID No. 2985, Seq. ID No. 2987, Seq. ID No. 2991, Seq. ID No. 2993, Seq. ID No. 2999, Seq. ID No. 3001, Seq. ID No. 3005, Seq. ID No. 3009, Seq. ID No. 3011, Seq. ID No. 3015, Seq. ID No. 3017, Seq. ID No. 3019, Seq. ID No. 3021, Seq. ID No. 3027, Seq. ID No. 3033, Seq. ID No. 3035, Seq. ID No. 3037, Seq. ID No. 3039, Seq. ID No. 3043, Seq. ID No. 3045, Seq. ID No. 3047, Seq. ID No. 3049, Seq. ID No. 3051, Seq. ID No. 3053, Seq. ID No. 3055, Seq. ID No. 3057, Seq. ID No. 3059, Seq. ID No. 3067, Seq. ID No. 3069, Seq. ID No. 3071, Seq. ID No. 3079, Seq. ID No. 3083, Seq. ID No. 3085, Seq. ID No. 3087, Seq. ID No. 3091, Seq. ID No. 3093, Seq. ID No. 3099, Seq. ID No. 3101, Seq. ID No. 3103, Seq. ID No. 3109, Seq. ID No. 3111, Seq. ID No. 3115, Seq. ID No. 3117, Seq. ID No. 3119, Seq. ID No. 3121, Seq. ID No. 3123, Seq. ID No. 3125, Seq. ID No. 3129, Seq. ID No. 3131, Seq. ID No. 3133, Seq. ID No. 3135, Seq. ID No. 3137, Seq. ID No. 3139, Seq. ID No. 3141, Seq. ID No. 3143, Seq. ID No. 3147, Seq. ID No. 3149, Seq. ID No. 3151, Seq. ID No. 3153, Seq. ID No. 3155, Seq. ID No. 3157, Seq. ID No. 3159, Seq. ID No. 3161, Seq. ID No. 3165, Seq. ID No. 3167, Seq. ID No. 3169, Seq. ID No. 3171, Seq. ID No. 3173, Seq. ID No. 3179, Seq. ID No. 3181, Seq. ID No. 3183, Seq. ID No. 3185, Seq. ID No. 3187, Seq. ID No. 3189, Seq. ID No. 3191, Seq. ID No. 3193, Seq. ID No. 3195, Seq. ID No. 3197, Seq. ID No. 3203, Seq. ID No. 3205, Seq. ID No. 3207, Seq. ID No. 3209, Seq. ID No. 3211, Seq. ID No. 3217, Seq. ID No. 3223, Seq. ID No. 3225, Seq. ID No. 3227, Seq. ID No. 3229, Seq. ID No. 3235, Seq. ID No. 3249, Seq. ID No. 3251, Seq. ID No. 3253, Seq. ID No. 3255, Seq. ID No. 3257, Seq. ID No. 3259, Seq. ID No. 3263, Seq. ID No. 3265, Seq. ID No. 3269, Seq. ID No. 3271, Seq. ID No. 3273, Seq. ID No. 3277, Seq. ID No. 3281, Seq. ID No. 3283, Seq. ID No. 3285, Seq. ID No. 3289, Seq. ID No. 3291, Seq. ID No. 3293, Seq. ID No. 3299, Seq. ID No. 3301, Seq. ID No. 3303, Seq. ID No. 3305, Seq. ID No. 3307, Seq. ID No. 3309, Seq. ID No. 3311, Seq. ID No. 3313, Seq. ID No. 3315, Seq. ID No. 3319, Seq. ID No. 3321, Seq. ID No. 3323, Seq. ID No. 3325, Seq. ID No. 3331, Seq. ID No. 3335, Seq. ID No. 3337, Seq. ID No. 3339, Seq. ID No. 3341, Seq. ID No. 3345, Seq. ID No. 3347, Seq. ID No. 3349, Seq. ID No. 3353, Seq. ID No. 3355, Seq. ID No. 3359, Seq. ID No. 3361, Seq. ID No. 3363, Seq. ID No. 3365, Seq. ID No. 3367, Seq. ID No. 3369, Seq. ID No. 3371, Seq. ID No. 3373, Seq. ID No. 3375, Seq. ID No. 3377, Seq. ID No. 3379, Seq. ID No. 3381, Seq. ID No. 3383, Seq. ID No. 3397, Seq. ID No. 3399, Seq. ID No. 3401, Seq. ID No. 3407, Seq. ID No. 3409, Seq. ID No. 3413, Seq. ID No. 3415, Seq. ID No. 3419, Seq. ID No. 3425, Seq. ID No. 3427, Seq. ID No. 3431, Seq. ID No. 3433, Seq. ID No. 3435, Seq. ID No. 3439, Seq. ID No. 3441, Seq. ID No. 3443, Seq. ID No. 3445, Seq. ID No. 3447, Seq. ID No. 3455, Seq. ID No. 3457, Seq. ID No. 3459, Seq. ID No. 3461, Seq. ID No. 3465, Seq. ID No. 3467, Seq. ID No. 3471, Seq. ID No. 3473, Seq. ID No. 3475, Seq. ID No. 3479, Seq. ID No. 3483, Seq. ID No. 3485, Seq. ID No. 3487, Seq. ID No. 3489, Seq. ID No. 3495, Seq. ID No. 3497, Seq. ID No. 3499, Seq. ID No. 3501, Seq. ID No. 3505, Seq. ID No. 3507, Seq. ID No. 3509, Seq. ID No. 3511, Seq. ID No. 3513, Seq. ID No. 3517, Seq. ID No. 3519, Seq. ID No. 3521, Seq. ID No. 3525, Seq. ID No. 3529, Seq. ID No. 3531, Seq. ID No. 3533, Seq. ID No. 3535, Seq. ID No. 3537, Seq. ID No. 3539, Seq. ID No. 3541, Seq. ID No. 3543, Seq. ID No. 3545, Seq. ID No. 3547, Seq. ID No. 3549, Seq. ID No. 3551, Seq. ID No. 3553, Seq. ID No. 3555, Seq. ID No. 3557, Seq. ID No. 3559, Seq. ID No. 3561, Seq. ID No. 3563, Seq. ID No. 3565, Seq. ID No. 3567, Seq. ID No. 3569, Seq. ID No. 3571, Seq. ID No. 3573, Seq. ID No. 3575, Seq. ID No. 3579, Seq. ID No. 3581, Seq. ID No. 3583, Seq. ID No. 3587, Seq. ID No. 3589, Seq. ID No. 3595, Seq. ID No. 3597, Seq. ID No. 3599, Seq. ID No. 3603, Seq. ID No. 3605, Seq. ID No. 3607, Seq. ID No. 3609, Seq. ID No. 3611, Seq. ID No. 3613, Seq. ID No. 3615, Seq. ID No. 3617, Seq. ID No. 3619, Seq. ID No. 3621, Seq. ID No. 3623, Seq. ID No. 3627, Seq. ID No. 3629, Seq. ID No. 3635, Seq. ID No. 3637, Seq. ID No. 3639, Seq. ID No. 3641, Seq. ID No. 3645, Seq. ID No. 3647, Seq. ID No. 3649, Seq. ID No. 3651, Seq. ID No. 3653, Seq. ID No. 3657, Seq. ID No. 3659, Seq. ID No. 3663, Seq. ID No. 3665, Seq. ID No. 3667, Seq. ID No. 3671, Seq. ID No. 3673, Seq. ID No. 3675, Seq. ID No. 3677, Seq. ID No. 3679, Seq. ID No. 3681, Seq. ID No. 3683, Seq. ID No. 3685, Seq. ID No. 3687, Seq. ID No. 3689, Seq. ID No. 3691, Seq. ID No. 3693, Seq. ID No. 3695, Seq. ID No. 3699, Seq. ID No. 3701, Seq. ID No. 3703, Seq. ID No. 3705, Seq. ID No. 3707, Seq. ID No. 3709, Seq. ID No. 3713, Seq. ID No. 3715, Seq. ID No. 3717, Seq. ID No. 3727, Seq. ID No. 3729, Seq. ID No. 3733, Seq. ID No. 3737, Seq. ID No. 3739, Seq. ID No. 3741, Seq. ID No. 3745, Seq. ID No. 3747, Seq. ID No. 3759, Seq. ID No. 3767, Seq. ID No. 3769, Seq. ID No. 3771, Seq. ID No. 3779, Seq. ID No. 3783, Seq. ID No. 3785, Seq. ID No. 3789, Seq. ID No. 3791, Seq. ID No. 3795, Seq. ID No. 3797, Seq. ID No. 3803, Seq. ID No. 3805, Seq. ID No. 3807, Seq. ID No. 3809, Seq. ID No. 3811, Seq. ID No. 3813, Seq. ID No. 3815, Seq. ID No. 3817, Seq. ID No. 3819, Seq. ID No. 3823, Seq. ID No. 3825, Seq. ID No. 3831, Seq. ID No. 3833, Seq. ID No. 3835, Seq. ID No. 3841, Seq. ID No. 3843, Seq. ID No. 3847, Seq. ID No. 3855, Seq. ID No. 3857, Seq. ID No. 3863, Seq. ID No. 3867, Seq. ID No. 3871, Seq. ID No. 3873, Seq. ID No. 3875, Seq. ID No. 3877, Seq. ID No. 3881, Seq. ID No. 3883, Seq. ID No. 3885, Seq. ID No. 3893, Seq. ID No. 3895, Seq. ID No. 3899, Seq. ID No. 3901, Seq. ID No. 3905, Seq. ID No. 3907, Seq. ID No. 3911, Seq. ID No. 3913, Seq. ID No. 3915, Seq. ID No. 3919, Seq. ID No. 3921, Seq. ID No. 3923, Seq. ID No. 3925, Seq. ID No. 3927, Seq. ID No. 3929, Seq. ID No. 3931, Seq. ID No. 3933, Seq. ID No. 3935, Seq. ID No. 3939, Seq. ID No. 3941, Seq. ID No. 3943, Seq. ID No. 3945, Seq. ID No. 3947, Seq. ID No. 3949, Seq. ID No. 3951, Seq. ID No. 3953, Seq. ID No. 3955, Seq. ID No. 3957, Seq. ID No. 3959, Seq. ID No. 3961, Seq. ID No. 3965, Seq. ID No. 3967, Seq. ID No. 3969, Seq. ID No. 3971, Seq. ID No. 3975, Seq. ID No. 3979, Seq. ID No. 3981, Seq. ID No. 3983, Seq. ID No. 3985, Seq. ID No. 3987, Seq. ID No. 3991, Seq. ID No. 3995, Seq. ID No. 3997, Seq. ID No. 3999, Seq. ID No. 4003, Seq. ID No. 4007, Seq. ID No. 4009, Seq. ID No. 4015, Seq. ID No. 4017, Seq. ID No. 4021, Seq. ID No. 4023, Seq. ID No. 4029, Seq. ID No. 4035, Seq. ID No. 4037, Seq. ID No. 4039, Seq. ID No. 4049, Seq. ID No. 4051, Seq. ID No. 4053, Seq. ID No. 4055, Seq. ID No. 4057, Seq. ID No. 4061, Seq. ID No. 4075, Seq. ID No. 4079, Seq. ID No. 4085, Seq. ID No. 4087, Seq. ID No. 4089, Seq. ID No. 4091, Seq. ID No. 4093, Seq. ID No. 4095, Seq. ID No. 4099, Seq. ID No. 4105, Seq. ID No. 4107, Seq. ID No. 4109, Seq. ID No. 4111, Seq. ID No. 4113, Seq. ID No. 4117, Seq. ID No. 4119, Seq. ID No. 4121, Seq. ID No. 4123, Seq. ID No. 4125, Seq. ID No. 4127, Seq. ID No. 4129, Seq. ID No. 4131, Seq. ID No. 4133, Seq. ID No. 4135, Seq. ID No. 4137, Seq. ID No. 4139, Seq. ID No. 4141, Seq. ID No. 4143, Seq. ID No. 4145, Seq. ID No. 4149, Seq. ID No. 4153, Seq. ID No. 4155, Seq. ID No. 4157, Seq. ID No. 4161, Seq. ID No. 4163, Seq. ID No. 4167, Seq. ID No. 4171, Seq. ID No. 4173, Seq. ID No. 4175, Seq. ID No. 4177, Seq. ID No. 4179, Seq. ID No. 4181, Seq. ID No. 4185, Seq. ID No. 4187, Seq. ID No. 4189, Seq. ID No. 4191, Seq. ID No. 4193, Seq. ID No. 4195, Seq. ID No. 4197, Seq. ID No. 4199, Seq. ID No. 4203, Seq. ID No. 4205, Seq. ID No. 4207, Seq. ID No. 4209, Seq. ID No. 4211, Seq. ID No. 4219, Seq. ID No. 4229, Seq. ID No. 4233, Seq. ID No. 4235, Seq. ID No. 4237, Seq. ID No. 4239, Seq. ID No. 4243, Seq. ID No. 4249, Seq. ID No. 4251, Seq. ID No. 4253, Seq. ID No. 4255, Seq. ID No. 4259, Seq. ID No. 4263, Seq. ID No. 4265, Seq. ID No. 4267, Seq. ID No. 4269, Seq. ID No. 4271, Seq. ID No. 4273, Seq. ID No. 4275, Seq. ID No. 4281, Seq. ID No. 4283, Seq. ID No. 4285, Seq. ID No. 4287, Seq. ID No. 4289, Seq. ID No. 4291, Seq. ID No. 4293, Seq. ID No. 4295, Seq. ID No. 4297, Seq. ID No. 4299, Seq. ID No. 4301, Seq. ID No. 4303, Seq. ID No. 4307, Seq. ID No. 4309, Seq. ID No. 4313, Seq. ID No. 4315, Seq. ID No. 4317, Seq. ID No. 4319, Seq. ID No. 4321, Seq. ID No. 4323, Seq. ID No. 4325, Seq. ID No. 4329, Seq. ID No. 4331, Seq. ID No. 4333, Seq. ID No. 4335, Seq. ID No. 4337, Seq. ID No. 4339, Seq. ID No. 4343, Seq. ID No. 4345, Seq. ID No. 4347, Seq. ID No. 4351, Seq. ID No. 4353, Seq. ID No. 4355, Seq. ID No. 4359, Seq. ID No. 4361, Seq. ID No. 4363, Seq. ID No. 4365, Seq. ID No. 4367, Seq. ID No. 4369, Seq. ID No. 4375, Seq. ID No. 4377, Seq. ID No. 4379, Seq. ID No. 4383, Seq. ID No. 4389, Seq. ID No. 4391, Seq. ID No. 4393, Seq. ID No. 4395, Seq. ID No. 4397, Seq. ID No. 4399, Seq. ID No. 4401, Seq. ID No. 4403, Seq. ID No. 4405, Seq. ID No. 4407, Seq. ID No. 4409, Seq. ID No. 4411, Seq. ID No. 4413, Seq. ID No. 4415, Seq. ID No. 4417, Seq. ID No. 4419, Seq. ID No. 4421, Seq. ID No. 4423, Seq. ID No. 4425, Seq. ID No. 4427, Seq. ID No. 4429, Seq. ID No. 4431, Seq. ID No. 4435, Seq. ID No. 4437, Seq. ID No. 4439, Seq. ID No. 4441, Seq. ID No. 4449, Seq. ID No. 4451, Seq. ID No. 4453, Seq. ID No. 4455, Seq. ID No. 4457, Seq. ID No. 4459, Seq. ID No. 4461, Seq. ID No. 4465, Seq. ID No. 4467, Seq. ID No. 4471, Seq. ID No. 4475, Seq. ID No. 4477, Seq. ID No. 4479, Seq. ID No. 4481, Seq. ID No. 4485, Seq. ID No. 4487, Seq. ID No. 4489, Seq. ID No. 4491, Seq. ID No. 4493, Seq. ID No. 4495, Seq. ID No. 4497, Seq. ID No. 4501, Seq. ID No. 4503, Seq. ID No. 4505, Seq. ID No. 4507, Seq. ID No. 4509, Seq. ID No. 4511, Seq. ID No. 4513, Seq. ID No. 4515, Seq. ID No. 4519, Seq. ID No. 4521, Seq. ID No. 4523, Seq. ID No. 4525, Seq. ID No. 4527, Seq. ID No. 4529, Seq. ID No. 4531, Seq. ID No. 4533, Seq. ID No. 4537, Seq. ID No. 4541, Seq. ID No. 4545, Seq. ID No. 4547, Seq. ID No. 4549, Seq. ID No. 4551, Seq. ID No. 4553, Seq. ID No. 4555, Seq. ID No. 4559, Seq. ID No. 4561, Seq. ID No. 4565, Seq. ID No. 4567, Seq. ID No. 4571, Seq. ID No. 4573, Seq. ID No. 4575, Seq. ID No. 4577, Seq. ID No. 4581, Seq. ID No. 4585, Seq. ID No. 4589, Seq. ID No. 4591, Seq. ID No. 4597, Seq. ID No. 4599, Seq. ID No. 4601, Seq. ID No. 4603, Seq. ID No. 4605, Seq. ID No. 4607, Seq. ID No. 4609, Seq. ID No. 4611, Seq. ID No. 4613, Seq. ID No. 4615, Seq. ID No. 4617, Seq. ID No. 4619, Seq. ID No. 4621, Seq. ID No. 4623, Seq. ID No. 4627, Seq. ID No. 4631, Seq. ID No. 4637, Seq. ID No. 4641, Seq. ID No. 4643, Seq. ID No. 4645, Seq. ID No. 4647, Seq. ID No. 4649, Seq. ID No. 4653, Seq. ID No. 4659, Seq. ID No. 4661, Seq. ID No. 4663, Seq. ID No. 4665, Seq. ID No. 4667, Seq. ID No. 4669, Seq. ID No. 4671, Seq. ID No. 4673, Seq. ID No. 4675, Seq. ID No. 4677, Seq. ID No. 4679, Seq. ID No. 4683, Seq. ID No. 4685, Seq. ID No. 468.7, Seq. ID No. 4691, Seq. ID No. 4693, Seq. ID No. 4695, Seq. ID No. 4699, Seq. ID No. 4701, Seq. ID No. 4703, Seq. ID No. 4705, Seq. ID No. 4713, Seq. ID No. 4717, Seq. ID No. 4719, Seq. ID No. 4721, Seq. ID No. 4727, Seq. ID No. 4729, Seq. ID No. 4733, Seq. ID No. 4735, Seq. ID No. 4737, Seq. ID No. 4739, Seq. ID No. 4741, Seq. ID No. 4743, Seq. ID No. 4747, Seq. ID No. 4749, Seq. ID No. 4751, Seq. ID No. 4755, Seq. ID No. 4757, Seq. ID No. 4763, Seq. ID No. 4765, Seq. ID No. 4767, Seq. ID No. 4769, Seq. ID No. 4773, Seq. ID No. 4775, Seq. ID No. 4777, Seq. ID No. 4779, Seq. ID No. 4781, Seq. ID No. 4787, Seq. ID No. 4789, Seq. ID No. 4791, Seq. ID No. 4793, Seq. ID No. 4795, Seq. ID No. 4797, Seq. ID No. 4801, Seq. ID No. 4803, Seq. ID No. 4805, Seq. ID No. 4809, Seq. ID No. 4811, Seq. ID No. 4813, Seq. ID No. 4815, Seq. ID No. 4817, Seq. ID No. 4819, Seq. ID No. 4825, Seq. ID No. 4827, Seq. ID No. 4829, Seq. ID No. 4831, Seq. ID No. 4833, Seq. ID No. 4837, Seq. ID No. 4839, Seq. ID No. 4841, Seq. ID No. 4843, Seq. ID No. 4845, Seq. ID No. 4849, Seq. ID No. 4851, Seq. ID No. 4853, Seq. ID No. 4855, Seq. ID No. 4861, Seq. ID No. 4863, Seq. ID No. 4867, Seq. ID No. 4875, Seq. ID No. 4877, Seq. ID No. 4879, Seq. ID No. 4881, Seq. ID No. 4883, Seq. ID No. 4889, Seq. ID No. 4891, Seq. ID No. 4893, Seq. ID No. 4895, Seq. ID No. 4897, Seq. ID No. 4899, Seq. ID No. 4901, Seq. ID No. 4903, Seq. ID No. 4905, Seq. ID No. 4907, Seq. ID No. 4909, Seq. ID No. 4911, Seq. ID No. 4913, Seq. ID No. 4915, Seq. ID No. 4917, Seq. ID No. 4919, Seq. ID No. 4921, Seq. ID No. 4923, Seq. ID No. 4927, Seq. ID No. 4931, Seq. ID No. 4935, Seq. ID No. 4937, Seq. ID No. 4939, Seq. ID No. 4941, Seq. ID No. 4943, Seq. ID No. 4945, Seq. ID No. 4947, Seq. ID No. 4949, Seq. ID No. 4951, Seq. ID No. 4953, Seq. ID No. 4957, Seq. ID No. 4959, Seq. ID No. 4961, Seq. ID No. 4963, Seq. ID No. 4973, Seq. ID No. 4975, Seq. ID No. 4977, Seq. ID No. 4979, Seq. ID No. 4981, Seq. ID No. 4983, Seq. ID No. 4985, Seq. ID No. 4987, Seq. ID No. 4989, Seq. ID No. 4991, Seq. ID No. 4993, Seq. ID No. 4995, Seq. ID No. 4997, Seq. ID No. 4999, Seq. ID No. 5003, Seq. ID No. 5005, Seq. ID No. 5007, Seq. ID No. 5009, Seq. ID No. 5011, Seq. ID No. 5013, Seq. ID No. 5017, Seq. ID No. 5019, Seq. ID No. 5021, Seq. ID No. 5023, Seq. ID No. 5025, Seq. ID No. 5029, Seq. ID No. 5031, Seq. ID No. 5033, Seq. ID No. 5035, Seq. ID No. 5041, Seq. ID No. 5043, Seq. ID No. 5045, Seq. ID No. 5047, Seq. ID No. 5057, Seq. ID No. 5059, Seq. ID No. 5063, Seq. ID No. 5065, Seq. ID No. 5067, Seq. ID No. 5069, Seq. ID No. 5075, Seq. ID No. 5077, Seq. ID No. 5079, Seq. ID No. 5081, Seq. ID No. 5083, Seq. ID No. 5085, Seq. ID No. 5087, Seq. ID No. 5091, Seq. ID No. 5099, Seq. ID No. 5101, Seq. ID No. 5103, Seq. ID No. 5109, Seq. ID No. 5111, Seq. ID No. 5113, Seq. ID No. 5115, Seq. ID No. 5117, Seq. ID No. 5121, Seq. ID No. 5125, Seq. ID No. 5127, Seq. ID No. 5133, Seq. ID No. 5139, Seq. ID No. 5141, Seq. ID No. 5145, Seq. ID No. 5147, Seq. ID No. 5149, Seq. ID No. 5151, Seq. ID No. 5155, Seq. ID No. 5157, Seq. ID No. 5159, Seq. ID No. 5161, Seq. ID No. 5165, Seq. ID No. 5167, Seq. ID No. 5169, Seq. ID No. 5177, Seq. ID No. 5181, Seq. ID No. 5183, Seq. ID No. 5185, Seq. ID No. 5187, Seq. ID No. 5189, Seq. ID No. 5191, Seq. ID No. 5193, Seq. ID No. 5195, Seq. ID No. 5197, Seq. ID No. 5199, Seq. ID No. 5201, Seq. ID No. 5203, Seq. ID No. 5205, Seq. ID No. 5209, Seq. ID No. 5211, Seq. ID No. 5215, Seq. ID No. 5219, Seq. ID No. 5221, Seq. ID No. 5229, Seq. ID No. 5231, Seq. ID No. 5239, Seq. ID No. 5241, Seq. ID No. 5243, Seq. ID No. 5245, Seq. ID No. 5251, Seq. ID No. 5253, Seq. ID No. 5255, Seq. ID No. 5261, Seq. ID No. 5263, Seq. ID No. 5265, Seq. ID No. 5267, Seq. ID No. 5277, Seq. ID No. 5279, Seq. ID No. 5281, Seq. ID No. 5285, Seq. ID No. 5287, Seq. ID No. 5291, Seq. ID No. 5295, Seq. ID No. 5297, Seq. ID No. 5299, Seq. ID No. 5301, Seq. ID No. 5303, Seq. ID No. 5305, Seq. ID No. 5307, Seq. ID No. 5309, Seq. ID No. 5311, Seq. ID No. 5313, Seq. ID No. 5317, Seq. ID No. 5319, Seq. ID No. 5321, Seq. ID No. 5323, Seq. ID No. 5327, Seq. ID No. 5329, Seq. ID No. 5331, Seq. ID No. 5333, Seq. ID No. 5335, Seq. ID No. 5337, Seq. ID No. 5343, Seq. ID No. 5345, Seq. ID No. 5349, Seq. ID No. 5351, Seq. ID No. 5357, Seq. ID No. 5359, Seq. ID No. 5365, Seq. ID No. 5367, Seq. ID No. 5373, Seq. ID No. 5377, Seq. ID No. 5379, Seq. ID No. 5381, Seq. ID No. 5383, Seq. ID No. 5387, Seq. ID No. 5389, Seq. ID No. 5391, Seq. ID No. 5393, Seq. ID No. 5397, Seq. ID No. 5399, Seq. ID No. 5401, Seq. ID No. 5403, Seq. ID No. 5405, Seq. ID No. 5407, Seq. ID No. 5409, Seq. ID No. 5411, Seq. ID No. 5415, Seq. ID No. 5417, Seq. ID No. 5419, Seq. ID No. 5421, Seq. ID No. 5423, Seq. ID No. 5425, Seq. ID No. 5427, Seq. ID No. 5431, Seq. ID No. 5433, Seq. ID No. 5435, Seq. ID No. 5437, Seq. ID No. 5439, Seq. ID No. 5441, Seq. ID No. 5443, Seq. ID No. 5447, Seq. ID No. 5449, Seq. ID No. 5451, Seq. ID No. 5453, Seq. ID No. 5455, Seq. ID No. 5457, Seq. ID No. 5467, Seq. ID No. 5471, Seq. ID No. 5473, Seq. ID No. 5477, Seq. ID No. 5479, Seq. ID No. 5481, Seq. ID No. 5491, Seq. ID No. 5493, Seq. ID No. 5495, Seq. ID No. 5499, Seq. ID No. 5503, Seq. ID No. 5509, Seq. ID No. 5513, Seq. ID No. 5515, Seq. ID No. 5517, Seq. ID No. 5519, Seq. ID No. 5521, Seq. ID No. 5527, Seq. ID No. 5529, Seq. ID No. 5531, Seq. ID No. 5533, Seq. ID No. 5537, Seq. ID No. 5539, Seq. ID No. 5541, Seq. ID No. 5543, Seq. ID No. 5545, Seq. ID No. 5547, Seq. ID No. 5549, Seq. ID No. 5551, Seq. ID No. 5553, Seq. ID No. 5557, Seq. ID No. 5559, Seq. ID No. 5563, Seq. ID No. 5567, Seq. ID No. 5569, Seq. ID No. 5575, Seq. ID No. 5577, Seq. ID No. 5581, Seq. ID No. 5583, Seq. ID No. 5585, Seq. ID No. 5589, Seq. ID No. 5591, Seq. ID No. 5593, Seq. ID No. 5595, Seq. ID No. 5599, Seq. ID No. 5601, Seq. ID No. 5607, Seq. ID No. 5613, Seq. ID No. 5615, Seq. ID No. 5617, Seq. ID No. 5619, Seq. ID No. 5621, Seq. ID No. 5625, Seq. ID No. 5627, Seq. ID No. 5629, Seq. ID No. 5631, Seq. ID No. 5637, Seq. ID No. 5639, Seq. ID No. 5641, Seq. ID No. 5645, Seq. ID No. 5647, Seq. ID No. 5649, Seq. ID No. 5651, Seq. ID No. 5655, Seq. ID No. 5657, Seq. ID No. 5661, Seq. ID No. 5665, Seq. ID No. 5667, Seq. ID No. 5669, Seq. ID No. 5677, Seq. ID No. 5679, Seq. ID No. 5683, Seq. ID No. 5685, Seq. ID No. 5687, Seq. ID No. 5689, Seq. ID No. 5691, Seq. ID No. 5693, Seq. ID No. 5697, Seq. ID No. 5699, Seq. ID No. 5701, Seq. ID No. 5703, Seq. ID No. 5705, Seq. ID No. 5707, Seq. ID No. 5711, Seq. ID No. 5713, Seq. ID No. 5715, Seq. ID No. 5717, Seq. ID No. 5719, Seq. ID No. 5721, Seq. ID No. 5723, Seq. ID No. 5725, Seq. ID No. 5727, Seq. ID No. 5735, Seq. ID No. 5739, Seq. ID No. 5741, Seq. ID No. 5743, Seq. ID No. 5745, Seq. ID No. 5747, Seq. ID No. 5749, Seq. ID No. 5751, Seq. ID No. 5753, Seq. ID No. 5755, Seq. ID No. 5757, Seq. ID No. 5759, Seq. ID No. 5761, Seq. ID No. 5769, Seq. ID No. 5771, Seq. ID No. 5777, Seq. ID No. 5779, Seq. ID No. 5783, Seq. ID No. 5787, Seq. ID No. 5791, Seq. ID No. 5795, Seq. ID No. 5799, Seq. ID No. 5801, Seq. ID No. 5807, Seq. ID No. 5809, Seq. ID No. 5813, Seq. ID No. 5815, Seq. ID No. 5819, Seq. ID No. 5821, Seq. ID No. 5823, Seq. ID No. 5825, Seq. ID No. 5827, Seq. ID No. 5829, Seq. ID No. 5831, Seq. ID No. 5833, Seq. ID No. 5835, Seq. ID No. 5837, Seq. ID No. 5839, Seq. ID No. 5841, Seq. ID No. 5845, Seq. ID No. 5847, Seq. ID No. 5849, Seq. ID No. 5851, Seq. ID No. 5855, Seq. ID No. 5857, Seq. ID No. 5859, Seq. ID No. 5861, Seq. ID No. 5863, Seq. ID No. 5865, Seq. ID No. 5869, Seq. ID No. 5871, Seq. ID No. 5873, Seq. ID No. 5875, Seq. ID No. 5879, Seq. ID No. 5881, Seq. ID No. 5883, Seq. ID No. 5889, Seq. ID No. 5895, Seq. ID No. 5897, Seq. ID No. 5901, Seq. ID No. 5903, Seq. ID No. 5911, Seq. ID No. 5913, Seq. ID No. 5915, Seq. ID No. 5917, Seq. ID No. 5919, Seq. ID No. 5927, Seq. ID No. 5929, Seq. ID No. 5933, Seq. ID No. 5935, Seq. ID No. 5937, Seq. ID No. 5941, Seq. ID No. 5945, Seq. ID No. 5947, Seq. ID No. 5951, Seq. ID No. 5959, Seq. ID No. 5961, Seq. ID No. 5963, Seq. ID No. 5965, Seq. ID No. 5967, Seq. ID No. 5969, Seq. ID No. 5971, Seq. ID No. 5973, Seq. ID No. 5977, Seq. ID No. 5979, Seq. ID No. 5981, Seq. ID No. 5985, Seq. ID No. 5987, Seq. ID No. 5989, Seq. ID No. 5991, Seq. ID No. 5993, Seq. ID No. 5995, Seq. ID No. 5999, Seq. ID No. 6001, Seq. ID No. 6003, Seq. ID No. 6009, Seq. ID No. 6011, Seq. ID No. 6013, Seq. ID No. 6015, Seq. ID No. 6017, Seq. ID No. 6025, Seq. ID No. 6027, Seq. ID No. 6029, Seq. ID No. 6031, Seq. ID No. 6033, Seq. ID No. 6035, Seq. ID No. 6039, Seq. ID No. 6041, Seq. ID No. 6043, Seq. ID No. 6045, Seq. ID No. 6049, Seq. ID No. 6051, Seq. ID No. 6053, Seq. ID No. 6055, Seq. ID No. 6057, Seq. ID No. 6061, Seq. ID No. 6063, Seq. ID No. 6065, Seq. ID No. 6069, Seq. ID No. 6071, Seq. ID No. 6073, Seq. ID No. 6077, Seq. ID No. 6079, Seq. ID No. 6085, Seq. ID No. 6087, Seq. ID No. 6089, Seq. ID No. 6093, Seq. ID No. 6095, Seq. ID No. 6101, Seq. ID No. 6103, Seq. ID No. 6109, Seq. ID No. 6111, Seq. ID No. 6117, Seq. ID No. 6121, Seq. ID No. 6123, Seq. ID No. 6129, Seq. ID No. 6131, Seq. ID No. 6133, Seq. ID No. 6135, Seq. ID No. 6137, Seq. ID No. 6139, Seq. ID No. 6141, Seq. ID No. 6145, Seq. ID No. 6151, Seq. ID No. 6155, Seq. ID No. 6157, Seq. ID No. 6159, Seq. ID No. 6165, Seq. ID No. 6167, Seq. ID No. 6169, Seq. ID No. 6171, Seq. ID No. 6175, Seq. ID No. 6177, Seq. ID No. 6181, Seq. ID No. 6187, Seq. ID No. 6193, Seq. ID No. 6195, Seq. ID No. 6197, Seq. ID No. 6199, Seq. ID No. 6201, Seq. ID No. 6209, Seq. ID No. 6213, Seq. ID No. 6215, Seq. ID No. 6217, Seq. ID No. 6219, Seq. ID No. 6231, Seq. ID No. 6233, Seq. ID No. 6235, Seq. ID No. 6239, Seq. ID No. 6241, Seq. ID No. 6243, Seq. ID No. 6249, Seq. ID No. 6257, Seq. ID No. 6259, Seq. ID No. 6261, Seq. ID No. 6263, Seq. ID No. 6267, Seq. ID No. 6269, Seq. ID No. 6271, Seq. ID No. 6275, Seq. ID No. 6277, Seq. ID No. 6279, Seq. ID No. 6281, Seq. ID No. 6283, Seq. ID No. 6285, Seq. ID No. 6287, Seq. ID No. 6293, Seq. ID No. 6295, Seq. ID No. 6297, Seq. ID No. 6299, Seq. ID No. 6305, Seq. ID No. 6309, Seq. ID No. 6311, Seq. ID No. 6315, Seq. ID No. 6317, Seq. ID No. 6319, Seq. ID No. 6321, Seq. ID No. 6323, Seq. ID No. 6325, Seq. ID No. 6327, Seq. ID No. 6329, Seq. ID No. 6331, Seq. ID No. 6335, Seq. ID No. 6337, Seq. ID No. 6341, Seq. ID No. 6345, Seq. ID No. 6349, Seq. ID No. 6351, Seq. ID No. 6353, Seq. ID No. 6359, Seq. ID No. 6361, Seq. ID No. 6367, Seq. ID No. 6369, Seq. ID No. 6371, Seq. ID No. 6373, Seq. ID No. 6375, Seq. ID No. 6377, Seq. ID No. 6379, Seq. ID No. 6381, Seq. ID No. 6385, Seq. ID No. 6389, Seq. ID No. 6393, Seq. ID No. 6395, Seq. ID No. 6399, Seq. ID No. 6409, Seq. ID No. 6411, Seq. ID No. 6413, Seq. ID No. 6417, Seq. ID No. 6421, Seq. ID No. 6423, Seq. ID No. 6425, Seq. ID No. 6427, Seq. ID No. 6429, Seq. ID No. 6431, Seq. ID No. 6441, Seq. ID No. 6443, Seq. ID No. 6445, Seq. ID No. 6451, Seq. ID No. 6453, Seq. ID No. 6459, Seq. ID No. 6461, Seq. ID No. 6463, Seq. ID No. 6465, Seq. ID No. 6467, Seq. ID No. 6469, Seq. ID No. 6471, Seq. ID No. 6473, Seq. ID No. 6479, Seq. ID No. 6483, Seq. ID No. 6493, Seq. ID No. 6495, Seq. ID No. 6497, Seq. ID No. 6501, Seq. ID No. 6503, Seq. ID No. 6505, Seq. ID No. 6507, Seq. ID No. 6511, Seq. ID No. 6517, Seq. ID No. 6523, Seq. ID No. 6525, Seq. ID No. 6535, Seq. ID No. 6537, Seq. ID No. 6539, Seq. ID No. 6541, Seq. ID No. 6543, Seq. ID No. 6545, Seq. ID No. 6547, Seq. ID No. 6549, Seq. ID No. 6551, Seq. ID No. 6553, Seq. ID No. 6555, Seq. ID No. 6557, Seq. ID No. 6559, Seq. ID No. 6563, Seq. ID No. 6573, Seq. ID No. 6575, Seq. ID No. 6577, Seq. ID No. 6579, Seq. ID No. 6583, Seq. ID No. 6585, Seq. ID No. 6587, Seq. ID No. 6591, Seq. ID No. 6597, Seq. ID No. 6601, Seq. ID No. 6603, Seq. ID No. 6605, Seq. ID No. 6609, Seq. ID No. 6611, Seq. ID No. 6613, Seq. ID No. 6615, Seq. ID No. 6617, Seq. ID No. 6619, Seq. ID No. 6621, Seq. ID No. 6623, Seq. ID No. 6627, Seq. ID No. 6629, Seq. ID No. 6631, Seq. ID No. 6633, Seq. ID No. 6637, Seq. ID No. 6639, Seq. ID No. 6643, Seq. ID No. 6645, and Seq. ID No. 6649.

[0033] In another preferred embodiment, the invention comprises an isolated polynucleotide of the Alloiococcus otitidis genomic sequence encoding a polypeptide, which has been by identified by the Applicants' assignee's ORF finder program that searches for a transmembrane domain between two Stop codons and a Start codon immediately upstream of this transmembrane region, and the polynucleotide is selected from Seq. ID No. 7, Seq. ID No. 9, Seq. ID No. 33, Seq. ID No. 47, Seq. ID No. 67, Seq. ID No. 85, Seq. ID No. 87, Seq. ID No. 123, Seq. ID No. 133, Seq. ID No. 141, Seq. ID No. 159, Seq. ID No. 163, Seq. ID No. 191, Seq. ID No. 209, Seq. ID No. 211, Seq. ID No. 215, Seq. ID No. 217, Seq. ID No. 225, Seq. ID No. 235, Seq. ID No. 237, Seq. ID No. 249, Seq. ID No. 251, Seq. ID No. 255, Seq. ID No. 271, Seq. ID No. 277, Seq. ID No. 285, Seq. ID No. 287, Seq. ID No. 289, Seq. ID No. 327, Seq. ID No. 329, Seq. ID No. 373, Seq. ID No. 375, Seq. ID No. 419, Seq. ID No. 487, Seq. ID No. 497, Seq. ID No. 499, Seq. ID No. 503, Seq. ID No. 505, Seq. ID No. 509, Seq. ID No. 511, Seq. ID No. 515, Seq. ID No. 525, Seq. ID No. 527, Seq. ID No. 545, Seq. ID No. 567, Seq. ID No. 569, Seq. ID No. 575, Seq. ID No. 577, Seq. ID No. 579, Seq. ID No. 593, Seq. ID No. 617, Seq. ID No. 637, Seq. ID No. 639, Seq. ID No. 641, Seq. ID No. 645, Seq. ID No. 653, Seq. ID No. 655, Seq. ID No. 659, Seq. ID No. 669, Seq. ID No. 675, Seq. ID No. 677, Seq. ID No. 679, Seq. ID No. 715, Seq. ID No. 717, Seq. ID No. 719, Seq. ID No. 721, Seq. ID No. 723, Seq. ID No. 747, Seq. ID No. 751, Seq. ID No. 755, Seq. ID No. 757, Seq. ID No. 759, Seq. ID No. 761, Seq. ID No. 763, Seq. ID No. 769, Seq. ID No. 777, Seq. ID No. 779, Seq. ID No. 807, Seq. ID No. 809, Seq. ID No. 819, Seq. ID No. 825, Seq. ID No. 863, Seq. ID No. 893, Seq. ID No. 901, Seq. ID No. 935, Seq. ID No. 943, Seq. ID No. 955, Seq. ID No. 967, Seq. ID No. 979, Seq. ID No. 1005, Seq. ID No. 1009, Seq. ID No. 1011, Seq. ID No. 1013, Seq. ID No. 1015, Seq. ID No. 1019, Seq. ID No. 1029, Seq. ID No. 1031, Seq. ID No. 1033, Seq. ID No. 1037, Seq. ID No. 1039, Seq. ID No. 1045, Seq. ID No. 1055, Seq. ID No. 1075, Seq. ID No. 1105, Seq. ID No. 1131, Seq. ID No. 1135, Seq. ID No. 1137, Seq. ID No. 1165, Seq. ID No. 1167, Seq. ID No. 1169, Seq. ID No. 1183, Seq. ID No. 1193, Seq. ID No. 1197, Seq. ID No. 1213, Seq. ID No. 1223, Seq. ID No. 1227, Seq. ID No. 1229, Seq. ID No. 1237, Seq. ID No. 1243, Seq. ID No. 1265, Seq. ID No. 1267, Seq. ID No. 1269, Seq. ID No. 1271, Seq. ID No. 1283, Seq. ID No. 1287, Seq. ID No. 1291, Seq. ID No. 1297, Seq. ID No. 1305, Seq. ID No. 1315, Seq. ID No. 1325, Seq. ID No. 1327, Seq. ID No. 1329, Seq. ID No. 1331, Seq. ID No. 1341, Seq. ID No. 1353, Seq. ID No. 1367, Seq. ID No. 1401, Seq. ID No. 1429, Seq. ID No. 1435, Seq. ID No. 1445, Seq. ID No. 1481, Seq. ID No. 1513, Seq. ID No. 1515, Seq. ID No. 1517, Seq. ID No. 1529, Seq. ID No. 1533, Seq. ID No. 1535, Seq. ID No. 1545, Seq. ID No. 1547, Seq. ID No. 1551, Seq. ID No. 1559, Seq. ID No. 1563, Seq. ID No. 1571, Seq. ID No. 1579, Seq. ID No. 1583, Seq. ID No. 1585, Seq. ID No. 1621, Seq. ID No. 1633, Seq. ID No. 1643, Seq. ID No. 1645, Seq. ID No. 1647, Seq. ID No. 1649, Seq. ID No. 1653, Seq. ID No. 1671, Seq. ID No. 1673, Seq. ID No. 1677, Seq. ID No. 1681, Seq. ID No. 1707, Seq. ID No. 1731, Seq. ID No. 1733, Seq. ID No. 1737, Seq. ID No. 1753, Seq. ID No. 1757, Seq. ID No. 1765, Seq. ID No. 1767, Seq. ID No. 1787, Seq. ID No. 1791, Seq. ID No. 1797, Seq. ID No. 1805, Seq. ID No. 1819, Seq. ID No. 1821, Seq. ID No. 1823, Seq. ID No. 1839, Seq. ID No. 1869, Seq. ID No. 1875, Seq. ID No. 1891, Seq. ID No. 1893, Seq. ID No. 1895, Seq. ID No. 1923, Seq. ID No. 1927, Seq. ID No. 1969, Seq. ID No. 1981, Seq. ID No. 1991, Seq. ID No. 1993, Seq. ID No. 2013, Seq. ID No. 2017, Seq. ID No. 2027, Seq. ID No. 2033, Seq. ID No. 2041, Seq. ID No. 2049, Seq. ID No. 2053, Seq. ID No. 2087, Seq. ID No. 2089, Seq. ID No. 2105, Seq. ID No. 2115, Seq. ID No. 2121, Seq. ID No. 2127, Seq. ID No. 2151, Seq. ID No. 2159, Seq. ID No. 2171, Seq. ID No. 2173, Seq. ID No. 2177, Seq. ID No. 2187, Seq. ID No. 2237, Seq. ID No. 2239, Seq. ID No. 2245, Seq. ID No. 2249, Seq. ID No. 2271, Seq. ID No. 2283, Seq. ID No. 2289, Seq. ID No. 2291, Seq. ID No. 2293, Seq. ID No. 2295, Seq. ID No. 2303, Seq. ID No. 2305, Seq. ID No. 2307, Seq. ID No. 2317, Seq. ID No. 2319, Seq. ID No. 2321, Seq. ID No. 2323, Seq. ID No. 2325, Seq. ID No. 2327, Seq. ID No. 2333, Seq. ID No. 2343, Seq. ID No. 2347, Seq. ID No. 2349, Seq. ID No. 2351, Seq. ID No. 2353, Seq. ID No. 2355, Seq. ID No. 2357, Seq. ID No. 2365, Seq. ID No. 2389, Seq. ID No. 2391, Seq. ID No. 2407, Seq. ID No. 2419, Seq. ID No. 2421, Seq. ID No. 2427, Seq. ID No. 2429, Seq. ID No. 2433, Seq. ID No. 2449, Seq. ID No. 2459, Seq. ID No. 2489, Seq. ID No. 2497, Seq. ID No. 2503, Seq. ID No. 2507, Seq. ID No. 2515, Seq. ID No. 2523, Seq. ID No. 2525, Seq. ID No. 2531, Seq. ID No. 2535, Seq. ID No. 2537, Seq. ID No. 2541, Seq. ID No. 2543, Seq. ID No. 2545, Seq. ID No. 2555, Seq. ID No. 2557, Seq. ID No. 2569, Seq. ID No. 2571, Seq. ID No. 2583, Seq. ID No. 2591, Seq. ID No. 2597, Seq. ID No. 2599, Seq. ID No. 2601, Seq. ID No. 2607, Seq. ID No. 2611, Seq. ID No. 2621, Seq. ID No. 2629, Seq. ID No. 2651, Seq. ID No. 2679, Seq. ID No. 2693, Seq. ID No. 2701, Seq. ID No. 2703, Seq. ID No. 2705, Seq. ID No. 2707, Seq. ID No. 2731, Seq. ID No. 2733, Seq. ID No. 2783, Seq. ID No. 2785, Seq. ID No. 2813, Seq. ID No. 2815, Seq. ID No. 2823, Seq. ID No. 2835, Seq. ID No. 2837, Seq. ID No. 2841, Seq. ID No. 2853, Seq. ID No. 2873, Seq. ID No. 2875, Seq. ID No. 2881, Seq. ID No. 2905, Seq. ID No. 2935, Seq. ID No. 2937, Seq. ID No. 2939, Seq. ID No. 2941, Seq. ID No. 2947, Seq. ID No. 2949, Seq. ID No. 2969, Seq. ID No. 2973, Seq. ID No. 2977, Seq. ID No. 2981, Seq. ID No. 2987, Seq. ID No. 2991, Seq. ID No. 2995, Seq. ID No. 2997, Seq. ID No. 3005, Seq. ID No. 3007, Seq. ID No. 3013, Seq. ID No. 3023, Seq. ID No. 3025, Seq. ID No. 3027, Seq. ID No. 3029, Seq. ID No. 3031, Seq. ID No. 3043, Seq. ID No. 3055, Seq. ID No. 3063, Seq. ID No. 3071, Seq. ID No. 3073, Seq. ID No. 3075, Seq. ID No. 3077, Seq. ID No. 3123, Seq. ID No. 3145, Seq. ID No. 3155, Seq. ID No. 3157, Seq. ID No. 3163, Seq. ID No. 3183, Seq. ID No. 3193, Seq. ID No. 3201, Seq. ID No. 3213, Seq. ID No. 3215, Seq. ID No. 3217, Seq. ID No. 3219, Seq. ID No. 3241, Seq. ID No. 3243, Seq. ID No. 3245, Seq. ID No. 3249, Seq. ID No. 3257, Seq. ID No. 3261, Seq. ID No. 3269, Seq. ID No. 3275, Seq. ID No. 3297, Seq. ID No. 3317, Seq. ID No. 3323, Seq. ID No. 3337, Seq. ID No. 3339, Seq. ID No. 3349, Seq. ID No. 3351, Seq. ID No. 3353, Seq. ID No. 3357, Seq. ID No. 3359, Seq. ID No. 3377, Seq. ID No. 3389, Seq. ID No. 3391, Seq. ID No. 3395, Seq. ID No. 3405, Seq. ID No. 3421, Seq. ID No. 3425, Seq. ID No. 3449, Seq. ID No. 3451, Seq. ID No. 3453, Seq. ID No. 3455, Seq. ID No. 3457, Seq. ID No. 3463, Seq. ID No. 3481, Seq. ID No. 3491, Seq. ID No. 3493, Seq. ID No. 3503, Seq. ID No. 3505, Seq. ID No. 3527, Seq. ID No. 3593, Seq. ID No. 3595, Seq. ID No. 3621, Seq. ID No. 3625, Seq. ID No. 3635, Seq. ID No. 3679, Seq. ID No. 3723, Seq. ID No. 3727, Seq. ID No. 3745, Seq. ID No. 3753, Seq. ID No. 3755, Seq. ID No. 3757, Seq. ID No. 3761, Seq. ID No. 3763, Seq. ID No. 3765, Seq. ID No. 3783, Seq. ID No. 3793, Seq. ID No. 3799, Seq. ID No. 3813, Seq. ID No. 3837, Seq. ID No. 3839, Seq. ID No. 3849, Seq. ID No. 3851, Seq. ID No. 3853, Seq. ID No. 3859, Seq. ID No. 3861, Seq. ID No. 3863, Seq. ID No. 3865, Seq. ID No. 3879, Seq. ID No. 3889, Seq. ID No. 3891, Seq. ID No. 3903, Seq. ID No. 3925, Seq. ID No. 3963, Seq. ID No. 3973, Seq. ID No. 3975, Seq. ID No. 4005, Seq. ID No. 4025, Seq. ID No. 4027, Seq. ID No. 4039, Seq. ID No. 4041, Seq. ID No. 4043, Seq. ID No. 4045, Seq. ID No. 4047, Seq. ID No. 4061, Seq. ID No. 4071, Seq. ID No. 4073, Seq. ID No. 4079, Seq. ID No. 4081, Seq. ID No. 4083, Seq. ID No. 4101, Seq. ID No. 4103, Seq. ID No. 4111, Seq. ID No. 4133, Seq. ID No. 4137, Seq. ID No. 4139, Seq. ID No. 4145, Seq. ID No. 4151, Seq. ID No. 4221, Seq. ID No. 4223, Seq. ID No. 4225, Seq. ID No. 4227, Seq. ID No. 4231, Seq. ID No. 4241, Seq. ID No. 4247, Seq. ID No. 4253, Seq. ID No. 4257, Seq. ID No. 4261, Seq. ID No. 4307, Seq. ID No. 4311, Seq. ID No. 4313, Seq. ID No. 4343, Seq. ID No. 4379, Seq. ID No. 4385, Seq. ID No. 4389, Seq. ID No. 4439, Seq. ID No. 4469, Seq. ID No. 4473, Seq. ID No. 4481, Seq. ID No. 4483, Seq. ID No. 4485, Seq. ID No. 4497, Seq. ID No. 4515, Seq. ID No. 4533, Seq. ID No. 4587, Seq. ID No. 4639, Seq. ID No. 4643, Seq. ID No. 4681, Seq. ID No. 4705, Seq. ID No. 4707, Seq. ID No. 4709, Seq. ID No. 4711, Seq. ID No. 4715, Seq. ID No. 4717, Seq. ID No. 4737, Seq. ID No. 4759, Seq. ID No. 4813, Seq. ID No. 4827, Seq. ID No. 4869, Seq. ID No. 4871, Seq. ID No. 4873, Seq. ID No. 4875, Seq. ID No. 4919, Seq. ID No. 4931, Seq. ID No. 4949, Seq. ID No. 4951, Seq. ID No. 4987, Seq. ID No. 5031, Seq. ID No. 5061, Seq. ID No. 5085, Seq. ID No. 5103, Seq. ID No. 5123, Seq. ID No. 5129, Seq. ID No. 5131, Seq. ID No. 5135, Seq. ID No. 5137, Seq. ID No. 5141, Seq. ID No. 5165, Seq. ID No. 5175, Seq. ID No. 5199, Seq. ID No. 5205, Seq. ID No. 5207, Seq. ID No. 5213, Seq. ID No. 5219, Seq. ID No. 5223, Seq. ID No. 5267, Seq. ID No. 5281, Seq. ID No. 5385, Seq. ID No. 5387, Seq. ID No. 5413, Seq. ID No. 5415, Seq. ID No. 5433, Seq. ID No. 5453, Seq. ID No. 5459, Seq. ID No. 5461, Seq. ID No. 5463, Seq. ID No. 5465, Seq. ID No. 5491, Seq. ID No. 5497, Seq. ID No. 5509, Seq. ID No. 5513, Seq. ID No. 5525, Seq. ID No. 5531, Seq. ID No. 5569, Seq. ID No. 5587, Seq. ID No. 5595, Seq. ID No. 5597, Seq. ID No. 5609, Seq. ID No. 5611, Seq. ID No. 5621, Seq. ID No. 5623, Seq. ID No. 5633, Seq. ID No. 5637, Seq. ID No. 5643, Seq. ID No. 5649, Seq. ID No. 5659, Seq. ID No. 5683, Seq. ID No. 5685, Seq. ID No. 5699, Seq. ID No. 5705, Seq. ID No. 5709, Seq. ID No. 5729, Seq. ID No. 5733, Seq. ID No. 5763, Seq. ID No. 5765, Seq. ID No. 5767, Seq. ID No. 5771, Seq. ID No. 5783, Seq. ID No. 5791, Seq. ID No. 5797, Seq. ID No. 5885, Seq. ID No. 5889, Seq. ID No. 5893, Seq. ID No. 5895, Seq. ID No. 5899, Seq. ID No. 5901, Seq. ID No. 5905, Seq. ID No. 5909, Seq. ID No. 5921, Seq. ID No. 5923, Seq. ID No. 5927, Seq. ID No. 5939, Seq. ID No. 6027, Seq. ID No. 6043, Seq. ID No. 6047, Seq. ID No. 6059, Seq. ID No. 6067, Seq. ID No. 6089, Seq. ID No. 6091, Seq. ID No. 6107, Seq. ID No. 6111, Seq. ID No. 6117, Seq. ID No. 6161, Seq. ID No. 6163, Seq. ID No. 6165, Seq. ID No. 6169, Seq. ID No. 6183, Seq. ID No. 6185, Seq. ID No. 6189, Seq. ID No. 6191, Seq. ID No. 6197, Seq. ID No. 6203, Seq. ID No. 6205, Seq. ID No. 6209, Seq. ID No. 6221, Seq. ID No. 6223, Seq. ID No. 6225, Seq. ID No. 6227, Seq. ID No. 6229, Seq. ID No. 6235, Seq. ID No. 6237, Seq. ID No. 6243, Seq. ID No. 6245, Seq. ID No. 6249, Seq. ID No. 6253, Seq. ID No. 6263, Seq. ID No. 6265, Seq. ID No. 6273, Seq. ID No. 6275, Seq. ID No. 6285, Seq. ID No. 6289, Seq. ID No. 6301, Seq. ID No. 6303, Seq. ID No. 6363, Seq. ID No. 6377, Seq. ID No. 6381, Seq. ID No. 6383, Seq. ID No. 6415, Seq. ID No. 6427, Seq. ID No. 6431, Seq. ID No. 6473, Seq. ID No. 6497, Seq. ID No. 6571, Seq. ID No. 6581, Seq. ID No. 6593, Seq. ID No. 6599, Seq. ID No. 6631, and Seq. ID No. 6639.

[0034] In one preferred embodiment,the invention comprises an isolated polynucleotide of an Alloiococcus otitidis genomic sequence, wherein the polynucleotide comprises a nucleotide sequence having at least about 70% identity to a nucleotide sequence contained within SEQ ID NO: 6651, a complement thereof, a degenerate variant thereof, and a fragment thereof.

[0035] In other preferred embodiments, the invention comprises an isolated polypeptide encoded by a polynucleotide and having at least about 70% identity to a nucleotide sequence chosen from one of the odd numbered sequence listings set out in SEQ ID NO: 1 through SEQ ID NO: 6649.

[0036] In certain aspects, the invention relates to Alloiococcus otitidis polypeptides. More particularly, the invention relates to Alloiococcus otitidis polypeptides, more preferably antigenic polypeptides, encoded by Alloiococcus otitidis polynucleotide open reading frames. Thus, in certain embodiments, an isolated polypeptide is encoded by a polynucleotide comprising a nucleotide sequence having at least about 70% identity to a nucleotide sequence chosen from one of odd numbered sequences set out in SEQ ID NO: 1 through SEQ ID NO: 6649, a complement thereof, a degenerate variant thereof, or a fragment thereof. In a preferred embodiment, the isolated polypeptide encoded by one of the above polynucleotides comprises an amino acid sequence having at least about 70% identity to an amino acid sequence chosen from one of the even numbered sequences set out in SEQ ID NO: 2 through SEQ ID NO: 6650, a biological equivalent thereof, or a fragment thereof. In other embodiments, the polypeptide is a fusion polypeptide. In a preferred embodiment, the polypeptide immunoreacts with seropositive serum of an individual previously infected with Alloiococcus otitidis, a biological equivalent thereof, or a fragment thereof.

[0037] In other preferred embodiments, the isolated polypeptide encoded is selected from (a) an Alloiococcus otitidis polypeptide predicted by SignalP algorithm analysis as having met all four criteria set out in the SignalP algorithm for a polypeptide having a signal peptide and a subset of these are predicted by HMM SignalP algorithm analysis as having a signal peptide; (b) an Alloiococcus otitidis polypeptide predicted by SignalP algorithm analysis as having met three of the four criteria set out in the SignalP algorithm for a polypeptide having a signal peptide and a subset of these predicted by HMM SignalP algorithm analysis as having a signal peptide; (c) an Alloiococcus otitidis polypeptide predicted by HMM SignalP algorithm analysis as having a signal peptide; (d) an Alloiococcus otitidis polypeptide predicted by HMM SignalP algorithm analysis as being a non-secretory protein; (e) an Alloiococcus otitidis polypeptide identified by Pfam analysis; (f) an Alloiococcus otitidis polypeptide identified by BlastP analysis; (g) an Alloiococcus otitidis polypeptide identified using proteomics methodology as sharing homology with surface exposed proteins of Streptococcus pneumoniae; (h) an Alloiococcus otitidis polypeptide having a LPXTG motif, wherein the polypeptide is covalently attached to the peptidoglycan layer; (i) an Alloiococcus otitidis lipoprotein; (j) an Alloiococcus otitidis polypeptide non-covalently associated with the peptidoglycan layer; (k) an Alloiococcus otitidis polypeptide having an RGDX motif wherein X is not a proline residue; (l) an Alloiococcus otitidis polypeptide predicted by BlastP as being involved in capsule biosynthesis and transport; (m) an Alloiococcus otitidis polypeptide identified by BlastP as being localized within the capsule loci of the Alloiococcus otitidis genome; (n) an Alloiococcus otitidis polypeptide predicted by BlastP as being associated with sporulation; (o) an Alloiococcus otitidis polypeptide encoded by unique ORFs identified by BlastP analysis as having a BlastP ‘E Value’ of >e⁻¹⁰; (p) an Alloiococcus otitidis polypeptide identified by Glimmer™ ORF finder program; (q) an Alloiococcus otitidis polypeptide identified by GeneMark™ ORF finder program; (r) an Alloiococcus otitidis polypeptide identified by Applicants' assignee's ORF finder program that searches for an ATG, GTG or TTG Start codon between a Stop-Stop region; and (s) an Alloiococcus otitidis polypeptide identified by Applicants' assignee's ORF finder program that searches for a transmembrane domain between two Stop codons and a Start codon immediately upstream of this transmembrane region.

[0038] In a preferred embodiment, the polypeptide is selected from the Alloiococcus otitidis polypeptides predicted by SignalP algorithm analysis as having met all four criteria set out in the SignalP algorithm for a polypeptide having a signal peptide and is selected from one of Seq. ID No. 90, Seq. ID No. 128, Seq. ID No. 132, Seq. ID No. 134, Seq. ID No. 162, Seq. ID No. 164, Seq. ID No. 214, Seq. ID No. 216, Seq. ID No. 226, Seq. ID No. 250, Seq. ID No. 252, Seq. ID No. 288, Seq. ID No. 290, Seq. ID No. 370, Seq. ID No. 372, Seq. ID No. 376, Seq. ID No. 378, Seq. ID No. 498, Seq. ID No. 504, Seq. ID No. 506, Seq. ID No. 528, Seq. ID No. 550, Seq. ID No. 576, Seq. ID No. 618, Seq. ID No. 658, Seq. ID No. 660, Seq. ID No. 662, Seq. ID No. 676, Seq. ID No. 716, Seq. ID No. 718, Seq. ID No. 746, Seq. ID No. 748, Seq. ID No. 756, Seq. ID No. 758, Seq. ID No. 760, Seq. ID No. 762, Seq. ID No. 774, Seq. ID No. 808, Seq. ID No. 968, Seq. ID No. 974, Seq. ID No. 976, Seq. ID No. 1014, Seq. ID No. 1026, Seq. ID No. 1028, Seq. ID No. 1040, Seq. ID No. 1076, Seq. ID No. 1090, Seq. ID No. 1196, Seq. ID No. 1198, Seq. ID No. 1208, Seq. ID No. 1240, Seq. ID No. 1244, Seq. ID No. 1246, Seq. ID No. 1270, Seq. ID No. 1316, Seq. ID No. 1318, Seq. ID No. 1332, Seq. ID No. 1366, Seq. ID No. 1368, Seq. ID No. 1370, Seq. ID No. 1446, Seq. ID No. 1448, Seq. ID No. 1514, Seq. ID No. 1518, Seq. ID No. 1546, Seq. ID No. 1550, Seq. ID No. 1562, Seq. ID No. 1570, Seq. ID No. 1572, Seq. ID No. 1586, Seq. ID No. 1644, Seq. ID No. 1654, Seq. ID No. 1662, Seq. ID No. 1664, Seq. ID No. 1708, Seq. ID No. 1734, Seq. ID No. 1738, Seq. ID No. 1756, Seq. ID No. 1766, Seq. ID No. 1768, Seq. ID No. 1776, Seq. ID No. 1792, Seq. ID No. 1806, Seq. ID No. 1876, Seq. ID No. 1970, Seq. ID No. 1982, Seq. ID No. 2054, Seq. ID No. 2056, Seq. ID No. 2088, Seq. ID No. 2090, Seq. ID No. 2092, Seq. ID No. 2106, Seq. ID No. 2116, Seq. ID No. 2150, Seq. ID No. 2152, Seq. ID No. 2160, Seq. ID No. 2178, Seq. ID No. 2278, Seq. ID No. 2294, Seq. ID No. 2322, Seq. ID No. 2348, Seq. ID No. 2352, Seq. ID No. 2354, Seq. ID No. 2366, Seq. ID No. 2396, Seq. ID No. 2422, Seq. ID No. 2426, Seq. ID No. 2428, Seq. ID No. 2430, Seq. ID No. 2450, Seq. ID No. 2460, Seq. ID No. 2526, Seq. ID No. 2532, Seq. ID No. 2608, Seq. ID No. 2652, Seq. ID No. 2680, Seq. ID No. 2694, Seq. ID No. 2700, Seq. ID No. 2704, Seq. ID No. 2754, Seq. ID No. 2786, Seq. ID No. 2814, Seq. ID No. 2830, Seq. ID No. 2836, Seq. ID No. 2842, Seq. ID No. 2880, Seq. ID No. 2882, Seq. ID No. 2936, Seq. ID No. 2938, Seq. ID No. 2950, Seq. ID No. 2966, Seq. ID No. 2968, Seq. ID No. 2974, Seq. ID No. 3008, Seq. ID No. 3010, Seq. ID No. 3012, Seq. ID No. 3030, Seq. ID No. 3032, Seq. ID No. 3110, Seq. ID No. 3112, Seq. ID No. 3220, Seq. ID No. 3224, Seq. ID No. 3274, Seq. ID No. 3298, Seq. ID No. 3332, Seq. ID No. 3336, Seq. ID No. 3342, Seq. ID No. 3350, Seq. ID No. 3354, Seq. ID No. 3356, Seq. ID No. 3378, Seq. ID No. 3392, Seq. ID No. 3426, Seq. ID No. 3450, Seq. ID No. 3494, Seq. ID No. 3574, Seq. ID No. 3612, Seq. ID No. 3620, Seq. ID No. 3690, Seq. ID No. 3754, Seq. ID No. 3756, Seq. ID No. 3766, Seq. ID No. 3782, Seq. ID No. 3784, Seq. ID No. 3852, Seq. ID No. 3904, Seq. ID No. 4006, Seq. ID No. 4008, Seq. ID No. 4028, Seq. ID No. 4074, Seq. ID No. 4138, Seq. ID No. 4142, Seq. ID No. 4144, Seq. ID No. 4146, Seq. ID No. 4226, Seq. ID No. 4344, Seq. ID No. 4386, Seq. ID No. 4400, Seq. ID No. 4470, Seq. ID No. 4484, Seq. ID No. 4494, Seq. ID No. 4496, Seq. ID No. 4534, Seq. ID No. 4700, Seq. ID No. 4710, Seq. ID No. 4712, Seq. ID No. 4736, Seq. ID No. 4828, Seq. ID No. 4872, Seq. ID No. 4874, Seq. ID No. 4880, Seq. ID No. 4922, Seq. ID No. 4982, Seq. ID No. 5116, Seq. ID No. 5268, Seq. ID No. 5342, Seq. ID No. 5388, Seq. ID No. 5466, Seq. ID No. 5468, Seq. ID No. 5480, Seq. ID No. 5498, Seq. ID No. 5514, Seq. ID No. 5544, Seq. ID No. 5546, Seq. ID No. 5568, Seq. ID No. 5588, Seq. ID No. 5590, Seq. ID No. 5592, Seq. ID No. 5612, Seq. ID No. 5622, Seq. ID No. 5642, Seq. ID No. 5682, Seq. ID No. 5720, Seq. ID No. 5772, Seq. ID No. 5784, Seq. ID No. 5896, Seq. ID No. 5900, Seq. ID No. 5902, Seq. ID No. 5928, Seq. ID No. 5930, Seq. ID No. 5940, Seq. ID No. 5988, Seq. ID No. 6014, Seq. ID No. 6088, Seq. ID No. 6090, Seq. ID No. 6092, Seq. ID No. 6094, Seq. ID No. 6096, Seq. ID No. 6104, Seq. ID No. 6170, Seq. ID No. 6186, Seq. ID No. 6188, Seq. ID No. 6196, Seq. ID No. 6198, Seq. ID No. 6204, Seq. ID No. 6206, Seq. ID No. 6222, Seq. ID No. 6224, Seq. ID No. 6230, Seq. ID No. 6292, Seq. ID No. 6416, Seq. ID No. 6418, Seq. ID No. 6474, Seq. ID No. 6508, Seq. ID No. 6544, Seq. ID No. 6596, Seq. ID No. 6598, Seq. ID No. 6600, Seq. ID No. 6602, and Seq. ID No. 6604.

[0039] In another preferred embodiment, the polypeptide is selected from Alloiococcus otitidis polypeptides predicted by SignalP algorithm analysis as having met three of the four criteria set out in the SignalP algorithm for a polypeptide having a signal peptide and predicted by HMM SignalP algorithm analysis as having a signal peptide and is selected from one of Seq. ID No. 8, Seq. ID No. 12, Seq. ID No. 24, Seq. ID No. 46, Seq. ID No. 48, Seq. ID No. 54, Seq. ID No. 60, Seq. ID No. 66, Seq. ID No. 68, Seq. ID No. 88, Seq. ID No. 92, Seq. ID No. 140, Seq. ID No. 152, Seq. ID No. 160, Seq. ID No. 166, Seq. ID No. 170, Seq. ID No. 186, Seq. ID No. 212, Seq. ID No. 218, Seq. ID No. 236, Seq. ID No. 238, Seq. ID No. 240, Seq. ID No. 272, Seq. ID No. 286, Seq. ID No. 292, Seq. ID No. 328, Seq. ID No. 350, Seq. ID No. 386, Seq. ID No. 388, Seq. ID No. 408, Seq. ID No. 428, Seq. ID No. 432, Seq. ID No. 456, Seq. ID No. 458, Seq. ID No. 496, Seq. ID No. 500, Seq. ID No. 512, Seq. ID No. 514, Seq. ID No. 516, Seq. ID No. 526, Seq. ID No. 546, Seq. ID No. 548, Seq. ID No. 558, Seq. ID No. 570, Seq. ID No. 590, Seq. ID No. 592, Seq. ID No. 594, Seq. ID No. 596, Seq. ID No. 610, Seq. ID No. 638, Seq. ID No. 640, Seq. ID No. 642, Seq. ID No. 654, Seq. ID No. 670, Seq. ID No. 680, Seq. ID No. 720, Seq. ID No. 724, Seq. ID No. 740, Seq. ID No. 750, Seq. ID No. 752, Seq. ID No. 764, Seq. ID No. 766, Seq. ID No. 770, Seq. ID No. 778, Seq. ID No. 780, Seq. ID No. 782, Seq. ID No. 820, Seq. ID No. 896, Seq. ID No. 904, Seq. ID No. 906, Seq. ID No. 910, Seq. ID No. 936, Seq. ID No. 938, Seq. ID No. 952, Seq. ID No. 956, Seq. ID No. 980, Seq. ID No. 982, Seq. ID No. 984, Seq. ID No. 986, Seq. ID No. 1006, Seq. ID No. 1008, Seq. ID No. 1010, Seq. ID No. 1016, Seq. ID No. 1020, Seq. ID No. 1030, Seq. ID No. 1032, Seq. ID No. 1048, Seq. ID No. 1092, Seq. ID No. 1112, Seq. ID No. 1138, Seq. ID No. 1152, Seq. ID No. 1154, Seq. ID No. 1170, Seq. ID No. 1174, Seq. ID No. 1184, Seq. ID No. 1192, Seq. ID No. 1194, Seq. ID No. 1214, Seq. ID No. 1224, Seq. ID No. 1230, Seq. ID No. 1248, Seq. ID No. 1260, Seq. ID No. 1284, Seq. ID No. 1308, Seq. ID No. 1320, Seq. ID No. 1322, Seq. ID No. 1328, Seq. ID No. 1342, Seq. ID No. 1344, Seq. ID No. 1348, Seq. ID No. 1390, Seq. ID No. 1402, Seq. ID No. 1430, Seq. ID No. 1480, Seq. ID No. 1552, Seq. ID No. 1560, Seq. ID No. 1580, Seq. ID No. 1588, Seq. ID No. 1622, Seq. ID No. 1628, Seq. ID No. 1634, Seq. ID No. 1646, Seq. ID No. 1648, Seq. ID No. 1650, Seq. ID No. 1656, Seq. ID No. 1666, Seq. ID No. 1668, Seq. ID No. 1672, Seq. ID No. 1678, Seq. ID No. 1680, Seq. ID No. 1682, Seq. ID No. 1696, Seq. ID No. 1704, Seq. ID No. 1706, Seq. ID No. 1732, Seq. ID No. 1754, Seq. ID No. 1760, Seq. ID No. 1764, Seq. ID No. 1788, Seq. ID No. 1798, Seq. ID No. 1822, Seq. ID No. 1824, Seq. ID No. 1834, Seq. ID No. 1840, Seq. ID No. 1842, Seq. ID No. 1844, Seq. ID No. 1894, Seq. ID No. 1918, Seq. ID No. 1920, Seq. ID No. 1972, Seq. ID No. 1992, Seq. ID No. 2014, Seq. ID No. 2016, Seq. ID No. 2018, Seq. ID No. 2020, Seq. ID No. 2034, Seq. ID No. 2036, Seq. ID No. 2050, Seq. ID No. 2082, Seq. ID No. 2084, Seq. ID No. 2086, Seq. ID No. 2112, Seq. ID No. 2114, Seq. ID No. 2124, Seq. ID No. 2126, Seq. ID No. 2128, Seq. ID No. 2132, Seq. ID No. 2134, Seq. ID No. 2154, Seq. ID No. 2162, Seq. ID No. 2172, Seq. ID No. 2176, Seq. ID No. 2180, Seq. ID No. 2188, Seq. ID No. 2202, Seq. ID No. 2204, Seq. ID No. 2222, Seq. ID No. 2238, Seq. ID No. 2250, Seq. ID No. 2252, Seq. ID No. 2256, Seq. ID No. 2262, Seq. ID No. 2264, Seq. ID No. 2272, Seq. ID No. 2280, Seq. ID No. 2284, Seq. ID No. 2286, Seq. ID No. 2290, Seq. ID No. 2296, Seq. ID No. 2306, Seq. ID No. 2308, Seq. ID No. 2318, Seq. ID No. 2320, Seq. ID No. 2324, Seq. ID No. 2326, Seq. ID No. 2344, Seq. ID No. 2350, Seq. ID No. 2386, Seq. ID No. 2394, Seq. ID No. 2424, Seq. ID No. 2454, Seq. ID No. 2492, Seq. ID No. 2498, Seq. ID No. 2500, Seq. ID No. 2508, Seq. ID No. 2516, Seq. ID No. 2518, Seq. ID No. 2522, Seq. ID No. 2524, Seq. ID No. 2528, Seq. ID No. 2534, Seq. ID No. 2536, Seq. ID No. 2542, Seq. ID No. 2544, Seq. ID No. 2548, Seq. ID No. 2550, Seq. ID No. 2558, Seq. ID No. 2574, Seq. ID No. 2584, Seq. ID No. 2602, Seq. ID No. 2604, Seq. ID No. 2622, Seq. ID No. 2654, Seq. ID No. 2682, Seq. ID No. 2692, Seq. ID No. 2702, Seq. ID No. 2734, Seq. ID No. 2740, Seq. ID No. 2802, Seq. ID No. 2808, Seq. ID No. 2816, Seq. ID No. 2820, Seq. ID No. 2822, Seq. ID No. 2824, Seq. ID No. 2834, Seq. ID No. 2838, Seq. ID No. 2840, Seq. ID No. 2846, Seq. ID No. 2854, Seq. ID No. 2862, Seq. ID No. 2866, Seq. ID No. 2874, Seq. ID No. 2876, Seq. ID No. 2878, Seq. ID No. 2884, Seq. ID No. 2896, Seq. ID No. 2906, Seq. ID No. 2940, Seq. ID No. 2942, Seq. ID No. 2948, Seq. ID No. 2982, Seq. ID No. 2984, Seq. ID No. 2988, Seq. ID No. 2992, Seq. ID No. 2996, Seq. ID No. 3002, Seq. ID No. 3006, Seq. ID No. 3022, Seq. ID No. 3026, Seq. ID No. 3044, Seq. ID No. 3046, Seq. ID No. 3074, Seq. ID No. 3076, Seq. ID No. 3156, Seq. ID No. 3164, Seq. ID No. 3166, Seq. ID No. 3168, Seq. ID No. 3184, Seq. ID No. 3214, Seq. ID No. 3216, Seq. ID No. 3236, Seq. ID No. 3246, Seq. ID No. 3262, Seq. ID No. 3264, Seq. ID No. 3266, Seq. ID No. 3270, Seq. ID No. 3272, Seq. ID No. 3276, Seq. ID No. 3278, Seq. ID No. 3318, Seq. ID No. 3326, Seq. ID No. 3338, Seq. ID No. 3352, Seq. ID No. 3390, Seq. ID No. 3406, Seq. ID No. 3420, Seq. ID No. 3422, Seq. ID No. 3424, Seq. ID No. 3452, Seq. ID No. 3454, Seq. ID No. 3456, Seq. ID No. 3492, Seq. ID No. 3496, Seq. ID No. 3504, Seq. ID No. 3506, Seq. ID No. 3518, Seq. ID No. 3520, Seq. ID No. 3546, Seq. ID No. 3548, Seq. ID No. 3572, Seq. ID No. 3594, Seq. ID No. 3618, Seq. ID No. 3622, Seq. ID No. 3630, Seq. ID No. 3664, Seq. ID No. 3702, Seq. ID No. 3704, Seq. ID No. 3724, Seq. ID No. 3738, Seq. ID No. 3742, Seq. ID No. 3746, Seq. ID No. 3748, Seq. ID No. 3760, Seq. ID No. 3764, Seq. ID No. 3768, Seq. ID No. 3770, Seq. ID No. 3772, Seq. ID No. 3786, Seq. ID No. 3794, Seq. ID No. 3814, Seq. ID No. 3838, Seq. ID No. 3840, Seq. ID No. 3862, Seq. ID No. 3866, Seq. ID No. 3890, Seq. ID No. 3892, Seq. ID No. 3896, Seq. ID No. 3916, Seq. ID No. 3924, Seq. ID No. 3926, Seq. ID No. 3930, Seq. ID No. 3966, Seq. ID No. 3976, Seq. ID No. 3980, Seq. ID No. 3996, Seq. ID No. 3998, Seq. ID No. 4010, Seq. ID No. 4040, Seq. ID No. 4042, Seq. ID No. 4062, Seq. ID No. 4080, Seq. ID No. 4082, Seq. ID No. 4112, Seq. ID No. 4114, Seq. ID No. 4136, Seq. ID No. 4140, Seq. ID No. 4156, Seq. ID No. 4182, Seq. ID No. 4204, Seq. ID No. 4222, Seq. ID No. 4248, Seq. ID No. 4254, Seq. ID No. 4258, Seq. ID No. 4260, Seq. ID No. 4262, Seq. ID No. 4264, Seq. ID No. 4270, Seq. ID No. 4312, Seq. ID No. 4380, Seq. ID No. 4390, Seq. ID No. 4392, Seq. ID No. 4472, Seq. ID No. 4474, Seq. ID No. 4482, Seq. ID No. 4526, Seq. ID No. 4552, Seq. ID No. 4562, Seq. ID No. 4574, Seq. ID No. 4618, Seq. ID No. 4640, Seq. ID No. 4660, Seq. ID No. 4682, Seq. ID No. 4702, Seq. ID No. 4706, Seq. ID No. 4714, Seq. ID No. 4718, Seq. ID No. 4722, Seq. ID No. 4738, Seq. ID No. 4742, Seq. ID No. 4814, Seq. ID No. 4818, Seq. ID No. 4820, Seq. ID No. 4830, Seq. ID No. 4832, Seq. ID No. 4852, Seq. ID No. 4870, Seq. ID No. 4876, Seq. ID No. 4914, Seq. ID No. 4920, Seq. ID No. 4930, Seq. ID No. 4932, Seq. ID No. 4984, Seq. ID No. 4994, Seq. ID No. 5012, Seq. ID No. 5024, Seq. ID No. 5032, Seq. ID No. 5034, Seq. ID No. 5036, Seq. ID No. 5044, Seq. ID No. 5062, Seq. ID No. 5064, Seq. ID No. 5070, Seq. ID No. 5104, Seq. ID No. 5122, Seq. ID No. 5124, Seq. ID No. 5132, Seq. ID No. 5134, Seq. ID No. 5136, Seq. ID No. 5138, Seq. ID No. 5140, Seq. ID No. 5142, Seq. ID No. 5152, Seq. ID No. 5160, Seq. ID No. 5162, Seq. ID No. 5166, Seq. ID No. 5168, Seq. ID No. 5176, Seq. ID No. 5178, Seq. ID No. 5206, Seq. ID No. 5208, Seq. ID No. 5212, Seq. ID No. 5216, Seq. ID No. 5220, Seq. ID No. 5224, Seq. ID No. 5286, Seq. ID No. 5288, Seq. ID No. 5330, Seq. ID No. 5332, Seq. ID No. 5378, Seq. ID No. 5380, Seq. ID No. 5382, Seq. ID No. 5386, Seq. ID No. 5406, Seq. ID No. 5408, Seq. ID No. 5454, Seq. ID No. 5460, Seq. ID No. 5462, Seq. ID No. 5464, Seq. ID No. 5482, Seq. ID No. 5510, Seq. ID No. 5530, Seq. ID No. 5532, Seq. ID No. 5558, Seq. ID No. 5570, Seq. ID No. 5578, Seq. ID No. 5624, Seq. ID No. 5626, Seq. ID No. 5644, Seq. ID No. 5660, Seq. ID No. 5662, Seq. ID No. 5684, Seq. ID No. 5686, Seq. ID No. 5710, Seq. ID No. 5712, Seq. ID No. 5734, Seq. ID No. 5740, Seq. ID No. 5766, Seq. ID No. 5798, Seq. ID No. 5828, Seq. ID No. 5890, Seq. ID No. 5894, Seq. ID No. 5906, Seq. ID No. 5910, Seq. ID No. 5912, Seq. ID No. 5924, Seq. ID No. 5964, Seq. ID No. 5966, Seq. ID No. 6026, Seq. ID No. 6028, Seq. ID No. 6032, Seq. ID No. 6044, Seq. ID No. 6046, Seq. ID No. 6048, Seq. ID No. 6054, Seq. ID No. 6060, Seq. ID No. 6110, Seq. ID No. 6112, Seq. ID No. 6116, Seq. ID No. 6118, Seq. ID No. 6128, Seq. ID No. 6132, Seq. ID No. 6136, Seq. ID No. 6138, Seq. ID No. 6162, Seq. ID No. 6166, Seq. ID No. 6184, Seq. ID No. 6190, Seq. ID No. 6192, Seq. ID No. 6194, Seq. ID No. 6208, Seq. ID No. 6210, Seq. ID No. 6218, Seq. ID No. 6226, Seq. ID No. 6236, Seq. ID No. 6244, Seq. ID No. 6250, Seq. ID No. 6254, Seq. ID No. 6260, Seq. ID No. 6266, Seq. ID No. 6268, Seq. ID No. 6276, Seq. ID No. 6284, Seq. ID No. 6286, Seq. ID No. 6304, Seq. ID No. 6326, Seq. ID No. 6328, Seq. ID No. 6364, Seq. ID No. 6366, Seq. ID No. 6368, Seq. ID No. 6386, Seq. ID No. 6426, Seq. ID No. 6428, Seq. ID No. 6430, Seq. ID No. 6432, Seq. ID No. 6454, Seq. ID No. 6466, Seq. ID No. 6470, Seq. ID No. 6472, Seq. ID No. 6480, Seq. ID No. 6540, Seq. ID No. 6542, Seq. ID No. 6572, Seq. ID No. 6574, Seq. ID No. 6640, Seq. ID No. 6644, and Seq. ID No. 6646.

[0040] In yet another preferred embodiment, the polypeptide is selected from the Alloiococcus otitidis polypeptides, which are predicted by HMM SignalP algorithm analysis as having a signal peptide and is selected from one of Seq. ID No. 4, Seq. ID No. 8, Seq. ID No. 10, Seq. ID No. 20, Seq. ID No. 22, Seq. ID No. 32, Seq. ID No. 34, Seq. ID No. 46, Seq. ID No. 48, Seq. ID No. 50, Seq. ID No. 54, Seq. ID No. 66, Seq. ID No. 68, Seq. ID No. 86, Seq. ID No. 88, Seq. ID No. 106, Seq. ID No. 112, Seq. ID No. 124, Seq. ID No. 132, Seq. ID No. 134, Seq. ID No. 142, Seq. ID No. 160, Seq. ID No. 162, Seq. ID No. 164, Seq. ID No. 172, Seq. ID No. 192, Seq. ID No. 210, Seq. ID No. 212, Seq. ID No. 214, Seq. ID No. 216, Seq. ID No. 218, Seq. ID No. 226, Seq. ID No. 236, Seq. ID No. 238, Seq. ID No. 250, Seq. ID No. 252, Seq. ID No. 256, Seq. ID No. 258, Seq. ID No. 260, Seq. ID No. 272, Seq. ID No. 274, Seq. ID No. 278, Seq. ID No. 286, Seq. ID No. 288, Seq. ID No. 290, Seq. ID No. 328, Seq. ID No. 330, Seq. ID No. 358, Seq. ID No. 360, Seq. ID No. 374, Seq. ID No. 376, Seq. ID No. 394, Seq. ID No. 402, Seq. ID No. 404, Seq. ID No. 456, Seq. ID No. 458, Seq. ID No. 478, Seq. ID No. 488, Seq. ID No. 490, Seq. ID No. 492, Seq. ID No. 494, Seq. ID No. 496, Seq. ID No. 498, Seq. ID No. 500, Seq. ID No. 504, Seq. ID No. 506, Seq. ID No. 510, Seq. ID No. 512, Seq. ID No. 514, Seq. ID No. 516, Seq. ID No. 526, Seq. ID No. 528, Seq. ID No. 546, Seq. ID No. 548, Seq. ID No. 550, Seq. ID No. 558, Seq. ID No. 568, Seq. ID No. 570, Seq. ID No. 576, Seq. ID No. 578, Seq. ID No. 580, Seq. ID No. 592, Seq. ID No. 594, Seq. ID No. 600, Seq. ID No. 618, Seq. ID No. 638, Seq. ID No. 640, Seq. ID No. 642, Seq. ID No. 644, Seq. ID No. 646, Seq. ID No. 648, Seq. ID No. 654, Seq. ID No. 656, Seq. ID No. 658, Seq. ID No. 660, Seq. ID No. 662, Seq. ID No. 668, Seq. ID No. 670, Seq. ID No. 676, Seq. ID No. 678, Seq. ID No. 680, Seq. ID No. 716, Seq. ID No. 718, Seq. ID No. 720, Seq. ID No. 722, Seq. ID No. 724, Seq. ID No. 726, Seq. ID No. 746, Seq. ID No. 748, Seq. ID No. 750, Seq. ID No. 752, Seq. ID No. 756, Seq. ID No. 758, Seq. ID No. 760, Seq. ID No. 762, Seq. ID No. 764, Seq. ID No. 766, Seq. ID No. 770, Seq. ID No. 778, Seq. ID No. 780, Seq. ID No. 782, Seq. ID No. 808, Seq. ID No. 810, Seq. ID No. 820, Seq. ID No. 826, Seq. ID No. 864, Seq. ID No. 894, Seq. ID No. 902, Seq. ID No. 936, Seq. ID No. 938, Seq. ID No. 942, Seq. ID No. 944, Seq. ID No. 956, Seq. ID No. 958, Seq. ID No. 968, Seq. ID No. 980, Seq. ID No. 982, Seq. ID No. 984, Seq. ID No. 986, Seq. ID No. 1002, Seq. ID No. 1004, Seq. ID No. 1006, Seq. ID No. 1008, Seq. ID No. 1010, Seq. ID No. 1012, Seq. ID No. 1014, Seq. ID No. 1016, Seq. ID No. 1020, Seq. ID No. 1030, Seq. ID No. 1032, Seq. ID No. 1034, Seq. ID No. 1036, Seq. ID No. 1038, Seq. ID No. 1040, Seq. ID No. 1046, Seq. ID No. 1056, Seq. ID No. 1076, Seq. ID No. 1078, Seq. ID No. 1106, Seq. ID No. 1108, Seq. ID No. 1132, Seq. ID No. 1136, Seq. ID No. 1138, Seq. ID No. 1140, Seq. ID No. 1152, Seq. ID No. 1166, Seq. ID No. 1168, Seq. ID No. 1170, Seq. ID No. 1174, Seq. ID No. 1184, Seq. ID No. 1196, Seq. ID No. 1198, Seq. ID No. 1204, Seq. ID No. 1214, Seq. ID No. 1224, Seq. ID No. 1228, Seq. ID No. 1230, Seq. ID No. 1238, Seq. ID No. 1244, Seq. ID No. 1246, Seq. ID No. 1260, Seq. ID No. 1266, Seq. ID No. 1268, Seq. ID No. 1270, Seq. ID No. 1272, Seq. ID No. 1284, Seq. ID No. 1288, Seq. ID No. 1290, Seq. ID No. 1292, Seq. ID No. 1296, Seq. ID No. 1298, Seq. ID No. 1304, Seq. ID No. 1306, Seq. ID No. 1316, Seq. ID No. 1318, Seq. ID No. 1320, Seq. ID No. 1326, Seq. ID No. 1328, Seq. ID No. 1330, Seq. ID No. 1332, Seq. ID No. 1338, Seq. ID No. 1342, Seq. ID No. 1344, Seq. ID No. 1348, Seq. ID No. 1350, Seq. ID No. 1352, Seq. ID No. 1354, Seq. ID No. 1366, Seq. ID No. 1368, Seq. ID No. 1370, Seq. ID No. 1372, Seq. ID No. 1382, Seq. ID No. 1402, Seq. ID No. 1430, Seq. ID No. 1436, Seq. ID No. 1446, Seq. ID No. 1448, Seq. ID No. 1482, Seq. ID No. 1514, Seq. ID No. 1516, Seq. ID No. 1518, Seq. ID No. 1530, Seq. ID No. 1534, Seq. ID No. 1536, Seq. ID No. 1546, Seq. ID No. 1548, Seq. ID No. 1552, Seq. ID No. 1554, Seq. ID No. 1560, Seq. ID No. 1562, Seq. ID No. 1564, Seq. ID No. 1572, Seq. ID No. 1580, Seq. ID No. 1584, Seq. ID No. 1586, Seq. ID No. 1622, Seq. ID No. 1634, Seq. ID No. 1640, Seq. ID No. 1644, Seq. ID No. 1646, Seq. ID No. 1648, Seq. ID No. 1650, Seq. ID No. 1654, Seq. ID No. 1662, Seq. ID No. 1664, Seq. ID No. 1666, Seq. ID No. 1672, Seq. ID No. 1674, Seq. ID No. 1678, Seq. ID No. 1680, Seq. ID No. 1682, Seq. ID No. 1694, Seq. ID No. 1708, Seq. ID No. 1712, Seq. ID No. 1732, Seq. ID No. 1734, Seq. ID No. 1738, Seq. ID No. 1754, Seq. ID No. 1756, Seq. ID No. 1758, Seq. ID No. 1766, Seq. ID No. 1768, Seq. ID No. 1772, Seq. ID No. 1782, Seq. ID No. 1788, Seq. ID No. 1792, Seq. ID No. 1798, Seq. ID No. 1806, Seq. ID No. 1820, Seq. ID No. 1822, Seq. ID No. 1824, Seq. ID No. 1840, Seq. ID No. 1858, Seq. ID No. 1870, Seq. ID No. 1876, Seq. ID No. 1892, Seq. ID No. 1894, Seq. ID No. 1896, Seq. ID No. 1916, Seq. ID No. 1918, Seq. ID No. 1920, Seq. ID No. 1924, Seq. ID No. 1928, Seq. ID No. 1930, Seq. ID No. 1970, Seq. ID No. 1982, Seq. ID No. 1992, Seq. ID No. 1994, Seq. ID No. 2006, Seq. ID No. 2014, Seq. ID No. 2018, Seq. ID No. 2020, Seq. ID No. 2026, Seq. ID No. 2028, Seq. ID No. 2034, Seq. ID No. 2036, Seq. ID No. 2042, Seq. ID No. 2050, Seq. ID No. 2054, Seq. ID No. 2056, Seq. ID No. 2088, Seq. ID No. 2090, Seq. ID No. 2092, Seq. ID No. 2106, Seq. ID No. 2108, Seq. ID No. 2110, Seq. ID No. 2114, Seq. ID No. 2116, Seq. ID No. 2122, Seq. ID No. 2124, Seq. ID No. 2126, Seq. ID No. 2128, Seq. ID No. 2150, Seq. ID No. 2152, Seq. ID No. 2156, Seq. ID No. 2158, Seq. ID No. 2160, Seq. ID No. 2172, Seq. ID No. 2174, Seq. ID No. 2178, Seq. ID No. 2188, Seq. ID No. 2192, Seq. ID No. 2206, Seq. ID No. 2238, Seq. ID No. 2240, Seq. ID No. 2246, Seq. ID No. 2250, Seq. ID No. 2252, Seq. ID No. 2256, Seq. ID No. 2260, Seq. ID No. 2272, Seq. ID No. 2284, Seq. ID No. 2290, Seq. ID No. 2292, Seq. ID No. 2294, Seq. ID No. 2296, Seq. ID No. 2304, Seq. ID No. 2306, Seq. ID No. 2308, Seq. ID No. 2318, Seq. ID No. 2320, Seq. ID No. 2322, Seq. ID No. 2324, Seq. ID No. 2326, Seq. ID No. 2328, Seq. ID No. 2330, Seq. ID No. 2334, Seq. ID No. 2344, Seq. ID No. 2348, Seq. ID No. 2350, Seq. ID No. 2352, Seq. ID No. 2354, Seq. ID No. 2356, Seq. ID No. 2358, Seq. ID No. 2366, Seq. ID No. 2368, Seq. ID No. 2372, Seq. ID No. 2376, Seq. ID No. 2388, Seq. ID No. 2390, Seq. ID No. 2392, Seq. ID No. 2394, Seq. ID No. 2408, Seq. ID No. 2420, Seq. ID No. 2422, Seq. ID No. 2426, Seq. ID No. 2428, Seq. ID No. 2430, Seq. ID No. 2434, Seq. ID No. 2450, Seq. ID No. 2460, Seq. ID No. 2488, Seq. ID No. 2490, Seq. ID No. 2492, Seq. ID No. 2494, Seq. ID No. 2498, Seq. ID No. 2500, Seq. ID No. 2502, Seq. ID No. 2504, Seq. ID No. 2508, Seq. ID No. 2516, Seq. ID No. 2518, Seq. ID No. 2524, Seq. ID No. 2526, Seq. ID No. 2528, Seq. ID No. 2532, Seq. ID No. 2534, Seq. ID No. 2536, Seq. ID No. 2538, Seq. ID No. 2542, Seq. ID No. 2544, Seq. ID No. 2546, Seq. ID No. 2556, Seq. ID No. 2558, Seq. ID No. 2566, Seq. ID No. 2570, Seq. ID No. 2572, Seq. ID No. 2584, Seq. ID No. 2592, Seq. ID No. 2598, Seq. ID No. 2600, Seq. ID No. 2602, Seq. ID No. 2608, Seq. ID No. 2612, Seq. ID No. 2622, Seq. ID No. 2628, Seq. ID No. 2630, Seq. ID No. 2652, Seq. ID No. 2680, Seq. ID No. 2682, Seq. ID No. 2684, Seq. ID No. 2692, Seq. ID No. 2694, Seq. ID No. 2696, Seq. ID No. 2698, Seq. ID No. 2700, Seq. ID No. 2702, Seq. ID No. 2704, Seq. ID No. 2706, Seq. ID No. 2708, Seq. ID No. 2718, Seq. ID No. 2730, Seq. ID No. 2732, Seq. ID No. 2734, Seq. ID No. 2784, Seq. ID No. 2786, Seq. ID No. 2802, Seq. ID No. 2810, Seq. ID No. 2814, Seq. ID No. 2816, Seq. ID No. 2820, Seq. ID No. 2822, Seq. ID No. 2824, Seq. ID No. 2832, Seq. ID No. 2834, Seq. ID No. 2836, Seq. ID No. 2838, Seq. ID No. 2840, Seq. ID No. 2842, Seq. ID No. 2846, Seq. ID No. 2854, Seq. ID No. 2856, Seq. ID No. 2860, Seq. ID No. 2862, Seq. ID No. 2874, Seq. ID No. 2882, Seq. ID No. 2894, Seq. ID No. 2906, Seq. ID No. 2936, Seq. ID No. 2938, Seq. ID No. 2940, Seq. ID No. 2942, Seq. ID No. 2948, Seq. ID No. 2950, Seq. ID No. 2952, Seq. ID No. 2970, Seq. ID No. 2974, Seq. ID No. 2976, Seq. ID No. 2978, Seq. ID No. 2982, Seq. ID No. 2984, Seq. ID No. 2988, Seq. ID No. 2992, Seq. ID No. 2996, Seq. ID No. 2998, Seq. ID No. 3006, Seq. ID No. 3008, Seq. ID No. 3010, Seq. ID No. 3012, Seq. ID No. 3014, Seq. ID No. 3024, Seq. ID No. 3026, Seq. ID No. 3028, Seq. ID No. 3030, Seq. ID No. 3032, Seq. ID No. 3044, Seq. ID No. 3056, Seq. ID No. 3064, Seq. ID No. 3072, Seq. ID No. 3074, Seq. ID No. 3076, Seq. ID No. 3078, Seq. ID No. 3120, Seq. ID No. 3122, Seq. ID No. 3124, Seq. ID No. 3146, Seq. ID No. 3156, Seq. ID No. 3158, Seq. ID No. 3164, Seq. ID No. 3166, Seq. ID No. 3174, Seq. ID No. 3184, Seq. ID No. 3194, Seq. ID No. 3202, Seq. ID No. 3214, Seq. ID No. 3216, Seq. ID No. 3218, Seq. ID No. 3220, Seq. ID No. 3242, Seq. ID No. 3244, Seq. ID No. 3246, Seq. ID No. 3250, Seq. ID No. 3256, Seq. ID No. 3258, Seq. ID No. 3262, Seq. ID No. 3264, Seq. ID No. 3270, Seq. ID No. 3276, Seq. ID No. 3278, Seq. ID No. 3298, Seq. ID No. 3318, Seq. ID No. 3324, Seq. ID No. 3326, Seq. ID No. 3332, Seq. ID No. 3336, Seq. ID No. 3338, Seq. ID No. 3340, Seq. ID No. 3350, Seq. ID No. 3352, Seq. ID No. 3354, Seq. ID No. 3356, Seq. ID No. 3358, Seq. ID No. 3360, Seq. ID No. 3376, Seq. ID No. 3378, Seq. ID No. 3390, Seq. ID No. 3392, Seq. ID No. 3396, Seq. ID No. 3406, Seq. ID No. 3416, Seq. ID No. 3422, Seq. ID No. 3426, Seq. ID No. 3428, Seq. ID No. 3434, Seq. ID No. 3442, Seq. ID No. 3450, Seq. ID No. 3452, Seq. ID No. 3454, Seq. ID No. 3456, Seq. ID No. 3458, Seq. ID No. 3464, Seq. ID No. 3482, Seq. ID No. 3492, Seq. ID No. 3494, Seq. ID No. 3504, Seq. ID No. 3506, Seq. ID No. 3518, Seq. ID No. 3520, Seq. ID No. 3528, Seq. ID No. 3532, Seq. ID No. 3540, Seq. ID No. 3562, Seq. ID No. 3574, Seq. ID No. 3582, Seq. ID No. 3588, Seq. ID No. 3594, Seq. ID No. 3596, Seq. ID No. 3612, Seq. ID No. 3618, Seq. ID No. 3620, Seq. ID No. 3622, Seq. ID No. 3626, Seq. ID No. 3630, Seq. ID No. 3636, Seq. ID No. 3678, Seq. ID No. 3680, Seq. ID No. 3690, Seq. ID No. 3718, Seq. ID No. 3724, Seq. ID No. 3728, Seq. ID No. 3742, Seq. ID No. 3746, Seq. ID No. 3754, Seq. ID No. 3756, Seq. ID No. 3758, Seq. ID No. 3762, Seq. ID No. 3764, Seq. ID No. 3766, Seq. ID No. 3782, Seq. ID No. 3784, Seq. ID No. 3794, Seq. ID No. 3800, Seq. ID No. 3808, Seq. ID No. 3814, Seq. ID No. 3816, Seq. ID No. 3818, Seq. ID No. 3838, Seq. ID No. 3840, Seq. ID No. 3850, Seq. ID No. 3852, Seq. ID No. 3854, Seq. ID No. 3860, Seq. ID No. 3862, Seq. ID No. 3864, Seq. ID No. 3866, Seq. ID No. 3880, Seq. ID No. 3890, Seq. ID No. 3892, Seq. ID No. 3896, Seq. ID No. 3904, Seq. ID No. 3916, Seq. ID No. 3924, Seq. ID No. 3926, Seq. ID No. 3960, Seq. ID No. 3964, Seq. ID No. 3974, Seq. ID No. 3976, Seq. ID No. 3994, Seq. ID No. 3996, Seq. ID No. 3998, Seq. ID No. 4006, Seq. ID No. 4008, Seq. ID No. 4010, Seq. ID No. 4026, Seq. ID No. 4028, Seq. ID No. 4040, Seq. ID No. 4042, Seq. ID No. 4044, Seq. ID No. 4046, Seq. ID No. 4048, Seq. ID No. 4050, Seq. ID No. 4062, Seq. ID No. 4072, Seq. ID No. 4074, Seq. ID No. 4080, Seq. ID No. 4082, Seq. ID No. 4084, Seq. ID No. 4102, Seq. ID No. 4104, Seq. ID No. 4112, Seq. ID No. 4134, Seq. ID No. 4136, Seq. ID No. 4138, Seq. ID No. 4140, Seq. ID No. 4142, Seq. ID No. 4144, Seq. ID No. 4146, Seq. ID No. 4152, Seq. ID No. 4154, Seq. ID No. 4182, Seq. ID No. 4222, Seq. ID No. 4224, Seq. ID No. 4226, Seq. ID No. 4228, Seq. ID No. 4232, Seq. ID No. 4234, Seq. ID No. 4242, Seq. ID No. 4248, Seq. ID No. 4254, Seq. ID No. 4258, Seq. ID No. 4260, Seq. ID No. 4262, Seq. ID No. 4264, Seq. ID No. 4266, Seq. ID No. 4270, Seq. ID No. 4276, Seq. ID No. 4286, Seq. ID No. 4288, Seq. ID No. 4298, Seq. ID No. 4308, Seq. ID No. 4312, Seq. ID No. 4314, Seq. ID No. 4344, Seq. ID No. 4380, Seq. ID No. 4386, Seq. ID No. 4390, Seq. ID No. 4392, Seq. ID No. 4400, Seq. ID No. 4404, Seq. ID No. 4438, Seq. ID No. 4440, Seq. ID No. 4442, Seq. ID No. 4470, Seq. ID No. 4474, Seq. ID No. 4482, Seq. ID No. 4484, Seq. ID No. 4486, Seq. ID No. 4494, Seq. ID No. 4496, Seq. ID No. 4498, Seq. ID No. 4514, Seq. ID No. 4516, Seq. ID No. 4528, Seq. ID No. 4530, Seq. ID No. 4534, Seq. ID No. 4588, Seq. ID No. 4590, Seq. ID No. 4640, Seq. ID No. 4642, Seq. ID No. 4644, Seq. ID No. 4660, Seq. ID No. 4682, Seq. ID No. 4688, Seq. ID No. 4696, Seq. ID No. 4706, Seq. ID No. 4708, Seq. ID No. 4710, Seq. ID No. 4712, Seq. ID No. 4716, Seq. ID No. 4718, Seq. ID No. 4738, Seq. ID No. 4760, Seq. ID No. 4814, Seq. ID No. 4828, Seq. ID No. 4854, Seq. ID No. 4864, Seq. ID No. 4870, Seq. ID No. 4872, Seq. ID No. 4874, Seq. ID No. 4876, Seq. ID No. 4920, Seq. ID No. 4922, Seq. ID No. 4924, Seq. ID No. 4930, Seq. ID No. 4932, Seq. ID No. 4950, Seq. ID No. 4952, Seq. ID No. 4976, Seq. ID No. 4988, Seq. ID No. 5000, Seq. ID No. 5014, Seq. ID No. 5032, Seq. ID No. 5062, Seq. ID No. 5064, Seq. ID No. 5070, Seq. ID No. 5086, Seq. ID No. 5104, Seq. ID No. 5116, Seq. ID No. 5124, Seq. ID No. 5126, Seq. ID No. 5130, Seq. ID No. 5132, Seq. ID No. 5134, Seq. ID No. 5136, Seq. ID No. 5138, Seq. ID No. 5140, Seq. ID No. 5142, Seq. ID No. 5160, Seq. ID No. 5166, Seq. ID No. 5176, Seq. ID No. 5198, Seq. ID No. 5200, Seq. ID No. 5206, Seq. ID No. 5208, Seq. ID No. 5214, Seq. ID No. 5220, Seq. ID No. 5224, Seq. ID No. 5268, Seq. ID No. 5274, Seq. ID No. 5276, Seq. ID No. 5278, Seq. ID No. 5280, Seq. ID No. 5282, Seq. ID No. 5286, Seq. ID No. 5328, Seq. ID No. 5330, Seq. ID No. 5332, Seq. ID No. 5342, Seq. ID No. 5378, Seq. ID No. 5380, Seq. ID No. 5386, Seq. ID No. 5388, Seq. ID No. 5406, Seq. ID No. 5414, Seq. ID No. 5416, Seq. ID No. 5434, Seq. ID No. 5454, Seq. ID No. 5460, Seq. ID No. 5462, Seq. ID No. 5464, Seq. ID No. 5466, Seq. ID No. 5492, Seq. ID No. 5498, Seq. ID No. 5510, Seq. ID No. 5514, Seq. ID No. 5516, Seq. ID No. 5518, Seq. ID No. 5526, Seq. ID No. 5530, Seq. ID No. 5532, Seq. ID No. 5534, Seq. ID No. 5544, Seq. ID No. 5546, Seq. ID No. 5570, Seq. ID No. 5588, Seq. ID No. 5590, Seq. ID No. 5592, Seq. ID No. 5594, Seq. ID No. 5596, Seq. ID No. 5598, Seq. ID No. 5610, Seq. ID No. 5612, Seq. ID No. 5622, Seq. ID No. 5624, Seq. ID No. 5626, Seq. ID No. 5634, Seq. ID No. 5638, Seq. ID No. 5640, Seq. ID No. 5642, Seq. ID No. 5644, Seq. ID No. 5650, Seq. ID No. 5660, Seq. ID No. 5668, Seq. ID No. 5682, Seq. ID No. 5684, Seq. ID No. 5686, Seq. ID No. 5688, Seq. ID No. 5690, Seq. ID No. 5700, Seq. ID No. 5704, Seq. ID No. 5706, Seq. ID No. 5710, Seq. ID No. 5712, Seq. ID No. 5720, Seq. ID No. 5730, Seq. ID No. 5734, Seq. ID No. 5736, Seq. ID No. 5740, Seq. ID No. 5764, Seq. ID No. 5766, Seq. ID No. 5768, Seq. ID No. 5772, Seq. ID No. 5784, Seq. ID No. 5786, Seq. ID No. 5792, Seq. ID No. 5798, Seq. ID No. 5830, Seq. ID No. 5880, Seq. ID No. 5884, Seq. ID No. 5886, Seq. ID No. 5890, Seq. ID No. 5894, Seq. ID No. 5896, Seq. ID No. 5900, Seq. ID No. 5902, Seq. ID No. 5906, Seq. ID No. 5910, Seq. ID No. 5922, Seq. ID No. 5924, Seq. ID No. 5928, Seq. ID No. 5930, Seq. ID No. 5940, Seq. ID No. 6024, Seq. ID No. 6026, Seq. ID No. 6028, Seq. ID No. 6044, Seq. ID No. 6048, Seq. ID No. 6054, Seq. ID No. 6060, Seq. ID No. 6064, Seq. ID No. 6068, Seq. ID No. 6088, Seq. ID No. 6090, Seq. ID No. 6092, Seq. ID No. 6096, Seq. ID No. 6104, Seq. ID No. 6108, Seq. ID No. 6110, Seq. ID No. 6112, Seq. ID No. 6116, Seq. ID No. 6118, Seq. ID No. 6136, Seq. ID No. 6138, Seq. ID No. 6160, Seq. ID No. 6162, Seq. ID No. 6164, Seq. ID No. 6166, Seq. ID No. 6170, Seq. ID No. 6184, Seq. ID No. 6186, Seq. ID No. 6188, Seq. ID No. 6190, Seq. ID No. 6192, Seq. ID No. 6198, Seq. ID No. 6204, Seq. ID No. 6206, Seq. ID No. 6210, Seq. ID No. 6218, Seq. ID No. 6222, Seq. ID No. 6224, Seq. ID No. 6226, Seq. ID No. 6228, Seq. ID No. 6230, Seq. ID No. 6236, Seq. ID No. 6238, Seq. ID No. 6242, Seq. ID No. 6244, Seq. ID No. 6246, Seq. ID No. 6250, Seq. ID No. 6254, Seq. ID No. 6260, Seq. ID No. 6264, Seq. ID No. 6266, Seq. ID No. 6268, Seq. ID No. 6274, Seq. ID No. 6276, Seq. ID No. 6284, Seq. ID No. 6286, Seq. ID No. 6290, Seq. ID No. 6302, Seq. ID No. 6304, Seq. ID No. 6326, Seq. ID No. 6328, Seq. ID No. 6364, Seq. ID No. 6366, Seq. ID No. 6378, Seq. ID No. 6382, Seq. ID No. 6384, Seq. ID No. 6416, Seq. ID No. 6426, Seq. ID No. 6428, Seq. ID No. 6430, Seq. ID No. 6432, Seq. ID No. 6474, Seq. ID No. 6480, Seq. ID No. 6498, Seq. ID No. 6518, Seq. ID No. 6542, Seq. ID No. 6544, Seq. ID No. 6556, Seq. ID No. 6558, Seq. ID No. 6572, Seq. ID No. 6574, Seq. ID No. 6582, Seq. ID No. 6594, Seq. ID No. 6596, Seq. ID No. 6598, Seq. ID No. 6600, Seq. ID No. 6602, Seq. ID No. 6604, Seq. ID No. 6632, Seq. ID No. 6638, Seq. ID No. 6640, Seq. ID No. 6644, Seq. ID No. 6646, and Seq. ID No. 6650.

[0041] In yet another embodiment, the Alloiococcus otitidis polypeptide is one that is predicted by HMM SignalP algorithm analysis as being a non-secretory protein, and is selected from one of Seq. ID No. 2, Seq. ID No. 6, Seq. ID No. 12, Seq. ID No. 14, Seq. ID No. 16, Seq. ID No. 18, Seq. ID No. 24, Seq. ID No. 26, Seq. ID No. 28, Seq. ID No. 30, Seq. ID No. 36, Seq. ID No. 38, Seq. ID No. 40, Seq. ID No. 42, Seq. ID No. 44, Seq. ID No. 52, Seq. ID No. 56, Seq. ID No. 58, Seq. ID No. 60, Seq. ID No. 62, Seq. ID No. 64, Seq. ID No. 70, Seq. ID No. 72, Seq. ID No. 74, Seq. ID No. 76, Seq. ID No. 78, Seq. ID No. 80, Seq. ID No. 82, Seq. ID No. 84, Seq. ID No. 90, Seq. ID No. 92, Seq. ID No. 94, Seq. ID No. 96, Seq. ID No. 98, Seq. ID No. 100, Seq. ID No. 102, Seq. ID No. 104, Seq. ID No. 108, Seq. ID No. 110, Seq. ID No. 114, Seq. ID No. 116, Seq. ID No. 118, Seq. ID No. 120, Seq. ID No. 122, Seq. ID No. 126, Seq. ID No. 128, Seq. ID No. 130, Seq. ID No. 136, Seq. ID No. 138, Seq. ID No. 140, Seq. ID No. 144, Seq. ID No. 146, Seq. ID No. 148, Seq. ID No. 150, Seq. ID No. 152, Seq. ID No. 154, Seq. ID No. 156, Seq. ID No. 158, Seq. ID No. 166, Seq. ID No. 168, Seq. ID No. 170, Seq. ID No. 174, Seq. ID No. 176, Seq. ID No. 178, Seq. ID No. 180, Seq. ID No. 182, Seq. ID No. 184, Seq. ID No. 186, Seq. ID No. 188, Seq. ID No. 190, Seq. ID No. 194, Seq. ID No. 196, Seq. ID No. 198, Seq. ID No. 200, Seq. ID No. 202, Seq. ID No. 204, Seq. ID No. 206, Seq. ID No. 208, Seq. ID No. 220, Seq. ID No. 222, Seq. ID No. 224, Seq. ID No. 228, Seq. ID No. 230, Seq. ID No. 232, Seq. ID No. 234, Seq. ID No. 240, Seq. ID No. 242, Seq. ID No. 244, Seq. ID No. 246, Seq. ID No. 248, Seq. ID No. 254, Seq. ID No. 262, Seq. ID No. 264, Seq. ID No. 266, Seq. ID No. 268, Seq. ID No. 270, Seq. ID No. 276, Seq. ID No. 280, Seq. ID No. 282, Seq. ID No. 284, Seq. ID No. 292, Seq. ID No. 294, Seq. ID No. 296, Seq. ID No. 298, Seq. ID No. 300, Seq. ID No. 302, Seq. ID No. 304, Seq. ID No. 306, Seq. ID No. 308, Seq. ID No. 310, Seq. ID No. 312, Seq. ID No. 314, Seq. ID No. 316, Seq. ID No. 318, Seq. ID No. 320, Seq. ID No. 322; Seq. ID No. 324, Seq. ID No. 326, Seq. ID No. 332, Seq. ID No. 334, Seq. ID No. 336, Seq. ID No. 338, Seq. ID No. 340, Seq. ID No. 342, Seq. ID No. 344, Seq. ID No. 346, Seq. ID No. 348, Seq. ID No. 350, Seq. ID No. 352, Seq. ID No. 354, Seq. ID No. 356, Seq. ID No. 362, Seq. ID No. 364, Seq. ID No. 366, Seq. ID No. 368, Seq. ID No. 370, Seq. ID No. 372, Seq. ID No. 378, Seq. ID No. 380, Seq. ID No. 382, Seq. ID No. 384, Seq. ID No. 386, Seq. ID No. 388, Seq. ID No. 390, Seq. ID No. 392, Seq. ID No. 396, Seq. ID No. 398, Seq. ID No. 400, Seq. ID No. 406, Seq. ID No. 408, Seq. ID No. 410, Seq. ID No. 412, Seq. ID No. 414, Seq. ID No. 416, Seq. ID No. 418, Seq. ID No. 420, Seq. ID No. 422, Seq. ID No. 424, Seq. ID No. 426, Seq. ID No. 428, Seq. ID No. 430, Seq. ID No. 432, Seq. ID No. 434, Seq. ID No. 436, Seq. ID No. 438, Seq. ID No. 440, Seq. ID No. 442, Seq. ID No. 444, Seq. ID No. 446, Seq. ID No. 448, Seq. ID No. 450, Seq. ID No. 452, Seq. ID No. 454, Seq. ID No. 460, Seq. ID No. 462, Seq. ID No. 464, Seq. ID No. 466, Seq. ID No. 468, Seq. ID No. 470, Seq. ID No. 472, Seq. ID No. 474, Seq. ID No. 476, Seq. ID No. 480, Seq. ID No. 482, Seq. ID No. 484, Seq. ID No. 486, Seq. ID No. 502, Seq. ID No. 508, Seq. ID No. 518, Seq. ID No. 520, Seq. ID No. 522, Seq. ID No. 524, Seq. ID No. 530, Seq. ID No. 532, Seq. ID No. 534, Seq. ID No. 536, Seq. ID No. 538, Seq. ID No. 540, Seq. ID No. 542, Seq. ID No. 544, Seq. ID No. 552, Seq. ID No. 554, Seq. ID No. 556, Seq. ID No. 560, Seq. ID No. 562, Seq. ID No. 564, Seq. ID No. 566, Seq. ID No. 572, Seq. ID No. 574, Seq. ID No. 582, Seq. ID No. 584, Seq. ID No. 586, Seq. ID No. 588, Seq. ID No. 590, Seq. ID No. 596, Seq. ID No. 598, Seq. ID No. 602, Seq. ID No. 604, Seq. ID No. 606, Seq. ID No. 608, Seq. ID No. 610, Seq. ID No. 612, Seq. ID No. 614, Seq. ID No. 616, Seq. ID No. 620, Seq. ID No. 622, Seq. ID No. 624, Seq. ID No. 626, Seq. ID No. 628, Seq. ID No. 630, Seq. ID No. 632, Seq. ID No. 634, Seq. ID No. 636, Seq. ID No. 650, Seq. ID No. 652, Seq. ID No. 664, Seq. ID No. 666, Seq. ID No. 672, Seq. ID No. 674, Seq. ID No. 682, Seq. ID No. 684, Seq. ID No. 686, Seq. ID No. 688, Seq. ID No. 690, Seq. ID No. 692, Seq. ID No. 694, Seq. ID No. 696, Seq. ID No. 698, Seq. ID No. 700, Seq. ID No. 702, Seq. ID No. 704, Seq. ID No. 706, Seq. ID No. 708, Seq. ID No. 710, Seq. ID No. 712, Seq. ID No. 714, Seq. ID No. 728, Seq. ID No. 730, Seq. ID No. 732, Seq. ID No. 734, Seq. ID No. 736, Seq. ID No. 738, Seq. ID No. 740, Seq. ID No. 742, Seq. ID No. 744, Seq. ID No. 754, Seq. ID No. 768, Seq. ID No. 772, Seq. ID No. 774, Seq. ID No. 776, Seq. ID No. 784, Seq. ID No. 786, Seq. ID No. 788, Seq. ID No. 790, Seq. ID No. 792, Seq. ID No. 794, Seq. ID No. 796, Seq. ID No. 798, Seq. ID No. 800, Seq. ID No. 802, Seq. ID No. 804, Seq. ID No. 806, Seq. ID No. 812, Seq. ID No. 814, Seq. ID No. 816, Seq. ID No. 818, Seq. ID No. 822, Seq. ID No. 824, Seq. ID No. 828, Seq. ID No. 830, Seq. ID No. 832, Seq. ID No. 834, Seq. ID No. 836, Seq. ID No. 838, Seq. ID No. 840, Seq. ID No. 842, Seq. ID No. 844, Seq. ID No. 846, Seq. ID No. 848, Seq. ID No. 850, Seq. ID No. 852, Seq. ID No. 854, Seq. ID No. 856, Seq. ID No. 858, Seq. ID No. 860, Seq. ID No. 862, Seq. ID No. 866, Seq. ID No. 868, Seq. ID No. 870, Seq. ID No. 872, Seq. ID No. 874, Seq. ID No. 876, Seq. ID No. 878, Seq. ID No. 880, Seq. ID No. 882, Seq. ID No. 884, Seq. ID No. 886, Seq. ID No. 888, Seq. ID No. 890, Seq. ID No. 892, Seq. ID No. 896, Seq. ID No. 898, Seq. ID No. 900, Seq. ID No. 904, Seq. ID No. 906, Seq. ID No. 908, Seq. ID No. 910, Seq. ID No. 912, Seq. ID No. 914, Seq. ID No. 916, Seq. ID No. 918, Seq. ID No. 920, Seq. ID No. 922, Seq. ID No. 924, Seq. ID No. 926, Seq. ID No. 928, Seq. ID No. 930, Seq. ID No. 932, Seq. ID No. 934, Seq. ID No. 940, Seq. ID No. 946, Seq. ID No. 948, Seq. ID No. 950, Seq. ID No. 952, Seq. ID No. 954, Seq. ID No. 960, Seq. ID No. 962, Seq. ID No. 964, Seq. ID No. 966, Seq. ID No. 970, Seq. ID No. 972, Seq. ID No. 974, Seq. ID No. 976, Seq. ID No. 978, Seq. ID No. 988, Seq. ID No. 990, Seq. ID No. 992, Seq. ID No. 994, Seq. ID No. 996, Seq. ID No. 998, Seq. ID No. 1000, Seq. ID No. 1018, Seq. ID No. 1022, Seq. ID No. 1024, Seq. ID No. 1026, Seq. ID No. 1028, Seq. ID No. 1042, Seq. ID No. 1044, Seq. ID No. 1048, Seq. ID No. 1050, Seq. ID No. 1052, Seq. ID No. 1054, Seq. ID No. 1058, Seq. ID No. 1060, Seq. ID No. 1062, Seq. ID No. 1064, Seq. ID No. 1066, Seq. ID No. 1068, Seq. ID No. 1070, Seq. ID No. 1072, Seq. ID No. 1074, Seq. ID No. 1080, Seq. ID No. 1082, Seq. ID No. 1084, Seq. ID No. 1086, Seq. ID No. 1088, Seq. ID No. 1090, Seq. ID No. 1092, Seq. ID No. 1094, Seq. ID No. 1096, Seq. ID No. 1098, Seq. ID No. 1100, Seq. ID No. 1102, Seq. ID No. 1104, Seq. ID No. 1110, Seq. ID No. 1112, Seq. ID No. 1114, Seq. ID No. 1116, Seq. ID No. 1118, Seq. ID No. 1120, Seq. ID No. 1122, Seq. ID No. 1124, Seq. ID No. 1126, Seq. ID No. 1128, Seq. ID No. 1130, Seq. ID No. 1134, Seq. ID No. 1142, Seq. ID No. 1144, Seq. ID No. 1146, Seq. ID No. 1148, Seq. ID No. 1150, Seq. ID No. 1154, Seq. ID No. 1156, Seq. ID No. 1158, Seq. ID No. 1160, Seq. ID No. 1162, Seq. ID No. 1164, Seq. ID No. 1172, Seq. ID No. 1176, Seq. ID No. 1178, Seq. ID No. 1180, Seq. ID No. 1182, Seq. ID No. 1186, Seq. ID No. 1188, Seq. ID No. 1190, Seq. ID No. 1192, Seq. ID No. 1194, Seq. ID No. 1200, Seq. ID No. 1202, Seq. ID No. 1206, Seq. ID No. 1208, Seq. ID No. 1210, Seq. ID No. 1212, Seq. ID No. 1216, Seq. ID No. 1218, Seq. ID No. 1220, Seq. ID No. 1222, Seq. ID No. 1226, Seq. ID No. 1232, Seq. ID No. 1234, Seq. ID No. 1236, Seq. ID No. 1240, Seq. ID No. 1242, Seq. ID No. 1248, Seq. ID No. 1250, Seq. ID No. 1252, Seq. ID No. 1254, Seq. ID No. 1256, Seq. ID No. 1258, Seq. ID No. 1262, Seq. ID No. 1264, Seq. ID No. 1274, Seq. ID No. 1276, Seq. ID No. 1278, Seq. ID No. 1280, Seq. ID No. 1282, Seq. ID No. 1286, Seq. ID No. 1294, Seq. ID No. 1300, Seq. ID No. 1302, Seq. ID No. 1308, Seq. ID No. 1310, Seq. ID No. 1312, Seq. ID No. 1314, Seq. ID No. 1322, Seq. ID No. 1324, Seq. ID No. 1334, Seq. ID No. 1336, Seq. ID No. 1340, Seq. ID No. 1346, Seq. ID No. 1356, Seq. ID No. 1358, Seq. ID No. 1360, Seq. ID No. 1362, Seq. ID No. 1364, Seq. ID No. 1374, Seq. ID No. 1376, Seq. ID No. 1378, Seq. ID No. 1380, Seq. ID No. 1384, Seq. ID No. 1386, Seq. ID No. 1388, Seq. ID No. 1390, Seq. ID No. 1392, Seq. ID No. 1394, Seq. ID No. 1396, Seq. ID No. 1398, Seq. ID No. 1400, Seq. ID No. 1404, Seq. ID No. 1406, Seq. ID No. 1408, Seq. ID No. 1410, Seq. ID No. 1412, Seq. ID No. 1414, Seq. ID No. 1416, Seq. ID No. 1418, Seq. ID No. 1420, Seq. ID No. 1422, Seq. ID No. 1424, Seq. ID No. 1426, Seq. ID No. 1428, Seq. ID No. 1432, Seq. ID No. 1434, Seq. ID No. 1438, Seq. ID No. 1440, Seq. ID No. 1442, Seq. ID No. 1444, Seq. ID No. 1450, Seq. ID No. 1452, Seq. ID No. 1454, Seq. ID No. 1456, Seq. ID No. 1458, Seq. ID No. 1460, Seq. ID No. 1462, Seq. ID No. 1464, Seq. ID No. 1466, Seq. ID No. 1468, Seq. ID No. 1470, Seq. ID No. 1472, Seq. ID No. 1474, Seq. ID No. 1476, Seq. ID No. 1478, Seq. ID No. 1480, Seq. ID No. 1484, Seq. ID No. 1486, Seq. ID No. 1488, Seq. ID No. 1490, Seq. ID No. 1492, Seq. ID No. 1494, Seq. ID No. 1496, Seq. ID No. 1498, Seq. ID No. 1500, Seq. ID No. 1502, Seq. ID No. 1504, Seq. ID No. 1506, Seq. ID No. 1508, Seq. ID No. 1510, Seq. ID No. 1512, Seq. ID No. 1520, Seq. ID No. 1522, Seq. ID No. 1524, Seq.-ID No. 1526, Seq. ID No. 1528, Seq. ID No. 1532, Seq. ID No. 1538, Seq. ID No. 1540, Seq. ID No. 1542, Seq. ID No. 1544, Seq. ID No. 1550, Seq. ID No. 1556, Seq. ID No. 1558, Seq. ID No. 1566, Seq. ID No. 1568, Seq. ID No. 1570, Seq. ID No. 1574, Seq. ID No. 1576, Seq. ID No. 1578, Seq. ID No. 1582, Seq. ID No. 1588, Seq. ID No. 1590, Seq. ID No. 1592, Seq. ID No. 1594, Seq. ID No. 1596, Seq. ID No. 1598, Seq. ID No. 1602, Seq. ID No. 1604, Seq. ID No. 1606, Seq. ID No. 1608, Seq. ID No. 1610, Seq. ID No. 1612, Seq. ID No. 1614, Seq. ID No. 1616, Seq. ID No. 1618, Seq. ID No. 1620, Seq. ID No. 1624, Seq. ID No. 1626, Seq. ID No. 1628, Seq. ID No. 1630, Seq. ID No. 1632, Seq. ID No. 1636, Seq. ID No. 1638, Seq. ID No. 1642, Seq. ID No. 1652, Seq. ID No. 1656, Seq. ID No. 1658, Seq. ID No. 1660, Seq. ID No. 1668, Seq. ID No. 1670, Seq. ID No. 1676, Seq. ID No. 1684, Seq. ID No. 1686, Seq. ID No. 1688, Seq. ID No. 1690, Seq. ID No. 1692, Seq. ID No. 1696, Seq. ID No. 1698, Seq. ID No. 1700, Seq. ID No. 1702, Seq. ID No. 1704, Seq. ID No. 1706, Seq. ID No. 1710, Seq. ID No. 1714, Seq. ID No. 1716, Seq. ID No. 1718, Seq. ID No. 1720, Seq. ID No. 1722, Seq. ID No. 1724, Seq. ID No. 1726, Seq. ID No. 1728, Seq. ID No. 1730, Seq. ID No. 1736, Seq. ID No. 1740, Seq. ID No. 1742, Seq. ID No. 1744, Seq. ID No. 1746, Seq. ID No. 1748, Seq. ID No. 1750, Seq. ID No. 1752, Seq. ID No. 1760, Seq. ID No. 1762, Seq. ID No. 1764, Seq. ID No. 1770, Seq. ID No. 1774, Seq. ID No. 1776, Seq. ID No. 1778, Seq. ID No. 1780, Seq. ID No. 1784, Seq. ID No. 1786, Seq. ID No. 1790, Seq. ID No. 1794, Seq. ID No. 1796, Seq. ID No. 1800, Seq. ID No. 1802, Seq. ID No. 1804, Seq. ID No. 1808, Seq. ID No. 1810, Seq. ID No. 1812, Seq. ID No. 1814, Seq. ID No. 1816, Seq. ID No. 1818, Seq. ID No. 1826, Seq. ID No. 1828, Seq. ID No. 1830, Seq. ID No. 1832, Seq. ID No. 1834, Seq. ID No. 1836, Seq. ID No. 1838, Seq. ID No. 1842, Seq. ID No. 1844, Seq. ID No. 1846, Seq. ID No. 1848, Seq. ID No. 1850, Seq. ID No. 1852, Seq. ID No. 1854, Seq. ID No. 1856, Seq. ID No. 1860, Seq. ID No. 1862, Seq. ID No. 1864, Seq. ID No. 1866, Seq. ID No. 1868, Seq. ID No. 1872, Seq. ID No. 1874, Seq. ID No. 1878, Seq. ID No. 1880, Seq. ID No. 1882, Seq. ID No. 1884, Seq. ID No. 1886, Seq. ID No. 1888, Seq. ID No. 1890, Seq. ID No. 1898, Seq. ID No. 1900, Seq. ID No. 1902, Seq. ID No. 1904, Seq. ID No. 1906, Seq. ID No. 1908, Seq. ID No. 1910, Seq. ID No. 1912, Seq. ID No. 1914, Seq. ID No. 1922, Seq. ID No. 1926, Seq. ID No. 1932, Seq. ID No. 1934, Seq. ID No. 1936, Seq. ID No. 1938, Seq. ID No. 1940, Seq. ID No. 1942, Seq. ID No. 1944, Seq. ID No. 1946, Seq. ID No. 1948, Seq. ID No. 1950, Seq. ID No. 1952, Seq. ID No. 1954, Seq. ID No. 1956, Seq. ID No. 1958, Seq. ID No. 1960, Seq. ID No. 1962, Seq. ID No. 1964, Seq. ID No. 1966, Seq. ID No. 1968, Seq. ID No. 1972, Seq. ID No. 1974, Seq. ID No. 1976, Seq. ID No. 1978, Seq. ID No. 1980, Seq. ID No. 1984, Seq. ID No. 1986, Seq. ID No. 1988, Seq. ID No. 1990, Seq. ID No. 1996, Seq. ID No. 1998, Seq. ID No. 2000, Seq. ID No. 2002, Seq. ID No. 2004, Seq. ID No. 2008, Seq. ID No. 2010, Seq. ID No. 2012, Seq. ID No. 2016, Seq. ID No. 2022, Seq. ID No. 2024, Seq. ID No. 2030, Seq. ID No. 2032, Seq. ID No. 2038, Seq. ID No. 2040, Seq. ID No. 2044, Seq. ID No. 2046, Seq. ID No. 2048, Seq. ID No. 2052, Seq. ID No. 2058, Seq. ID No. 2060, Seq. ID No. 2062, Seq. ID No. 2064, Seq. ID No. 2066, Seq. ID No. 2068, Seq. ID No. 2070, Seq. ID No. 2072, Seq. ID No. 2074, Seq. ID No. 2076, Seq. ID No. 2078, Seq. ID No. 2080, Seq. ID No. 2082, Seq. ID No. 2084, Seq. ID No. 2086, Seq. ID No. 2094, Seq. ID No. 2096, Seq. ID No. 2098, Seq. ID No. 2100, Seq. ID No. 2102, Seq. ID No. 2104, Seq. ID No. 2112, Seq. ID No. 2118, Seq. ID No. 2120, Seq. ID No. 2130, Seq. ID No. 2132, Seq. ID No. 2134, Seq. ID No. 2136, Seq. ID No. 2138, Seq. ID No. 2140, Seq. ID No. 2142, Seq. ID No. 2144, Seq. ID No. 2146, Seq. ID No. 2148, Seq. ID No. 2154, Seq. ID No. 2162, Seq. ID No. 2164, Seq. ID No. 2166, Seq. ID No. 2168, Seq. ID No. 2170, Seq. ID No. 2176, Seq. ID No. 2180, Seq. ID No. 2182, Seq. ID No. 2184, Seq. ID No. 2186, Seq. ID No. 2190, Seq. ID No. 2194, Seq. ID No. 2196, Seq. ID No. 2198, Seq. ID No. 2200, Seq. ID No. 2202, Seq. ID No. 2204, Seq. ID No. 2208, Seq. ID No. 2210, Seq. ID No. 2212, Seq. ID No. 2214, Seq. ID No. 2216, Seq. ID No. 2218, Seq. ID No. 2220, Seq. ID No. 2222, Seq. ID No. 2224, Seq. ID No. 2226, Seq. ID No. 2228, Seq. ID No. 2230, Seq. ID No. 2232, Seq. ID No. 2234, Seq. ID No. 2236, Seq. ID No. 2242, Seq. ID No. 2244, Seq. ID No. 2248, Seq. ID No. 2254, Seq. ID No. 2258, Seq. ID No. 2262, Seq. ID No. 2264, Seq. ID No. 2266, Seq. ID No. 2268, Seq. ID No. 2270, Seq. ID No. 2274, Seq. ID No. 2276, Seq. ID No. 2278, Seq. ID No. 2280, Seq. ID No. 2282, Seq. ID No. 2286, Seq. ID No. 2288, Seq. ID No. 2298, Seq. ID No. 2300, Seq. ID No. 2302, Seq. ID No. 2310, Seq. ID No. 2312, Seq. ID No. 2314, Seq. ID No. 2316, Seq. ID No. 2332, Seq. ID No. 2336, Seq. ID No. 2338, Seq. ID No. 2340, Seq. ID No. 2342, Seq. ID No. 2346, Seq. ID No. 2360, Seq. ID No. 2362, Seq. ID No. 2364, Seq. ID No. 2370, Seq. ID No. 2374, Seq. ID No. 2378, Seq. ID No. 2380, Seq. ID No. 2382, Seq. ID No. 2384, Seq. ID No. 2386, Seq. ID No. 2396, Seq. ID No. 2398, Seq. ID No. 2400, Seq. ID No. 2402, Seq. ID No. 2404, Seq. ID No. 2406, Seq. ID No. 2410, Seq. ID No. 2412, Seq. ID No. 2414, Seq. ID No. 2416, Seq. ID No. 2418, Seq. ID No. 2424, Seq. ID No. 2432, Seq. ID No. 2436, Seq. ID No. 2438, Seq. ID No. 2440, Seq. ID No. 2442, Seq. ID No. 2444, Seq. ID No. 2446, Seq. ID No. 2448, Seq. ID No. 2452, Seq. ID No. 2454, Seq. ID No. 2456, Seq. ID No. 2458, Seq. ID No. 2462, Seq. ID No. 2464, Seq. ID No. 2466, Seq. ID No. 2468, Seq. ID No. 2470, Seq. ID No. 2472, Seq. ID No. 2474, Seq. ID No. 2476, Seq. ID No. 2478, Seq. ID No. 2480, Seq. ID No. 2482, Seq. ID No. 2484, Seq. ID No. 2486, Seq. ID No. 2496, Seq. ID No. 2506, Seq. ID No. 2510, Seq. ID No. 2512, Seq. ID No. 2514, Seq. ID No. 2520, Seq. ID No. 2522, Seq. ID No. 2530, Seq. ID No. 2540, Seq. ID No. 2548, Seq. ID No. 2550, Seq. ID No. 2552, Seq. ID No. 2554, Seq. ID No. 2560, Seq. ID No. 2562, Seq. ID No. 2564, Seq. ID No. 2568, Seq. ID No. 2574, Seq. ID No. 2576, Seq. ID No. 2578, Seq. ID No. 2580, Seq. ID No. 2582, Seq. ID No. 2586, Seq. ID No. 2588, Seq. ID No. 2590, Seq. ID No. 2594, Seq. ID No. 2596, Seq. ID No. 2604, Seq. ID No. 2606, Seq. ID No. 2610, Seq. ID No. 2614, Seq. ID No. 2616, Seq. ID No. 2618, Seq. ID No. 2620, Seq. ID No. 2624, Seq. ID No. 2626, Seq. ID No. 2632, Seq. ID No. 2634, Seq. ID No. 2636, Seq. ID No. 2638, Seq. ID No. 2640, Seq. ID No. 2642, Seq. ID No. 2644, Seq. ID No. 2646, Seq. ID No. 2648, Seq. ID No. 2650, Seq. ID No. 2654, Seq. ID No. 2656, Seq. ID No. 2658, Seq. ID No. 2660, Seq. ID No. 2662, Seq. ID No. 2664, Seq. ID No. 2666, Seq. ID No. 2668, Seq. ID No. 2670, Seq. ID No. 2672, Seq. ID No. 2674, Seq. ID No. 2676, Seq. ID No. 2678, Seq. ID No. 2686, Seq. ID No. 2688, Seq. ID No. 2690, Seq. ID No. 2710, Seq. ID No. 2712, Seq. ID No. 2714, Seq. ID No. 2716, Seq. ID No. 2720, Seq. ID No. 2722, Seq. ID No. 2724, Seq. ID No. 2726, Seq. ID No. 2728, Seq. ID No. 2736, Seq. ID No. 2738, Seq. ID No. 2740, Seq. ID No. 2742, Seq. ID No. 2744, Seq. ID No. 2746, Seq. ID No. 2748, Seq. ID No. 2750, Seq. ID No. 2752, Seq. ID No. 2754, Seq. ID No. 2756, Seq. ID No. 2758, Seq. ID No. 2760, Seq. ID No. 2762, Seq. ID No. 2764, Seq. ID No. 2766, Seq. ID No. 2768, Seq. ID No. 2770, Seq. ID No. 2772, Seq. ID No. 2774, Seq. ID No. 2776, Seq. ID No. 2778, Seq. ID No. 2780, Seq. ID No. 2782, Seq. ID No. 2788, Seq. ID No. 2790, Seq. ID No. 2792, Seq. ID No. 2794, Seq. ID No. 2796, Seq. ID No. 2798, Seq. ID No. 2800, Seq. ID No. 2804, Seq. ID No. 2806, Seq. ID No. 2808, Seq. ID No. 2812, Seq. ID No. 2818, Seq. ID No. 2826, Seq. ID No. 2828, Seq. ID No. 2830, Seq. ID No. 2844, Seq. ID No. 2848, Seq. ID No. 2850, Seq. ID No. 2852, Seq. ID No. 2858, Seq. ID No. 2864, Seq. ID No. 2866, Seq. ID No. 2868, Seq. ID No. 2870, Seq. ID No. 2872, Seq. ID No. 2876, Seq. ID No. 2878, Seq. ID No. 2880, Seq. ID No. 2884, Seq. ID No. 2886, Seq. ID No. 2888, Seq. ID No. 2890, Seq. ID No. 2892, Seq. ID No. 2896, Seq. ID No. 2898, Seq. ID No. 2900, Seq. ID No. 2902, Seq. ID No. 2904, Seq. ID No. 2908, Seq. ID No. 2910, Seq. ID No. 2912, Seq. ID No. 2914, Seq. ID No. 2916, Seq. ID No. 2918, Seq. ID No. 2920, Seq. ID No. 2922, Seq. ID No. 2924, Seq. ID No. 2926, Seq. ID No. 2928, Seq. ID No. 2930, Seq. ID No. 2932, Seq. ID No. 2934, Seq. ID No. 2944, Seq. ID No. 2946, Seq. ID No. 2954, Seq. ID No. 2956, Seq. ID No. 2958, Seq. ID No. 2960, Seq. ID No. 2962, Seq. ID No. 2964, Seq. ID No. 2966, Seq. ID No. 2968, Seq. ID No. 2972, Seq. ID No. 2980, Seq. ID No. 2986, Seq. ID No. 2990, Seq. ID No. 2994, Seq. ID No. 3000, Seq. ID No. 3002, Seq. ID No. 3004, Seq. ID No. 3016, Seq. ID No. 3018, Seq. ID No. 3020, Seq. ID No. 3022, Seq. ID No. 3034, Seq. ID No. 3036, Seq. ID No. 3038, Seq. ID No. 3040, Seq. ID No. 3042, Seq. ID No. 3046, Seq. ID No. 3048, Seq. ID No. 3050, Seq. ID No. 3052, Seq. ID No. 3054, Seq. ID No. 3058, Seq. ID No. 3060, Seq. ID No. 3062, Seq. ID No. 3066, Seq. ID No. 3068, Seq. ID No. 3070, Seq. ID No. 3080, Seq. ID No. 3082, Seq. ID No. 3084, Seq. ID No. 3086, Seq. ID No. 3088, Seq. ID No. 3090, Seq. ID No. 3092, Seq. ID No. 3094, Seq. ID No. 3096, Seq. ID No. 3098, Seq. ID No. 3100, Seq. ID No. 3102, Seq. ID No. 3104, Seq. ID No. 3106, Seq. ID No. 3108, Seq. ID No. 3110, Seq. ID No. 3112, Seq. ID No. 3114, Seq. ID No. 3116, Seq. ID No. 3118, Seq. ID No. 3126, Seq. ID No. 3128, Seq. ID No. 3130, Seq. ID No. 3132, Seq. ID No. 3134, Seq. ID No. 3136, Seq. ID No. 3138, Seq. ID No. 3140, Seq. ID No. 3142, Seq. ID No. 3144, Seq. ID No. 3148, Seq. ID No. 3150, Seq. ID No. 3152, Seq. ID No. 3154, Seq. ID No. 3160, Seq. ID No. 3162, Seq. ID No. 3168, Seq. ID No. 3170, Seq. ID No. 3172, Seq. ID No. 3176, Seq. ID No. 3178, Seq. ID No. 3180, Seq. ID No. 3182, Seq. ID No. 3186, Seq. ID No. 3188, Seq. ID No. 3190, Seq. ID No. 3192, Seq. ID No. 3196, Seq. ID No. 3198, Seq. ID No. 3200, Seq. ID No. 3204, Seq. ID No. 3206, Seq. ID No. 3208, Seq. ID No. 3210, Seq. ID No. 3212, Seq. ID No. 3222, Seq. ID No. 3224, Seq. ID No. 3226, Seq. ID No. 3228, Seq. ID No. 3230, Seq. ID No. 3232, Seq. ID No. 3234, Seq. ID No. 3236, Seq. ID No. 3238, Seq. ID No. 3240, Seq. ID No. 3248, Seq. ID No. 3252, Seq. ID No. 3254, Seq. ID No. 3260, Seq. ID No. 3266, Seq. ID No. 3268, Seq. ID No. 3272, Seq. ID No. 3274, Seq. ID No. 3280, Seq. ID No. 3282, Seq. ID No. 3284, Seq. ID No. 3286, Seq. ID No. 3288, Seq. ID No. 3290, Seq. ID No. 3292, Seq. ID No. 3294, Seq. ID No. 3296, Seq. ID No. 3300, Seq. ID No. 3302, Seq. ID No. 3304, Seq. ID No. 3306, Seq. ID No. 3308, Seq. ID No. 3310, Seq. ID No. 3312, Seq. ID No. 3314, Seq. ID No. 3316, Seq. ID No. 3320, Seq. ID No. 3322, Seq. ID No. 3328, Seq. ID No. 3330, Seq. ID No. 3334, Seq. ID No. 3342, Seq. ID No. 3344, Seq. ID No. 3346, Seq. ID No. 3348, Seq. ID No. 3362, Seq. ID No. 3364; Seq. ID No. 3366, Seq. ID No. 3368, Seq. ID No. 3370, Seq. ID No. 3372, Seq. ID No. 3374, Seq. ID No. 3380, Seq. ID No. 3382, Seq. ID No. 3384, Seq. ID No. 3386, Seq. ID No. 3388, Seq. ID No. 3394, Seq. ID No. 3398, Seq. ID No. 3400, Seq. ID No. 3402, Seq. ID No. 3404, Seq. ID No. 3408, Seq. ID No. 3410, Seq. ID No. 3412, Seq. ID No. 3414, Seq. ID No. 3418, Seq. ID No. 3420, Seq. ID No. 3424, Seq. ID No. 3430, Seq. ID No. 3432, Seq. ID No. 3436, Seq. ID No. 3438, Seq. ID No. 3440, Seq. ID No. 3444, Seq. ID No. 3446, Seq. ID No. 3448, Seq. ID No. 3460, Seq. ID No. 3462, Seq. ID No. 3466, Seq. ID No. 3468, Seq. ID No. 3470, Seq. ID No. 3472, Seq. ID No. 3474, Seq. ID No. 3476, Seq. ID No. 3478, Seq. ID No. 3480, Seq. ID No. 3484, Seq. ID No. 3486, Seq. ID No. 3488, Seq. ID No. 3490, Seq. ID No. 3496, Seq. ID No. 3498, Seq. ID No. 3500, Seq. ID No. 3502, Seq. ID No. 3508, Seq. ID No. 3510, Seq. ID No. 3512, Seq. ID No. 3514, Seq. ID No. 3516, Seq. ID No. 3522, Seq. ID No. 3524, Seq. ID No. 3526, Seq. ID No. 3530, Seq. ID No. 3534, Seq. ID No. 3536, Seq. ID No. 3538, Seq. ID No. 3542, Seq. ID No. 3544, Seq. ID No. 3546, Seq. ID No. 3548, Seq. ID No. 3550, Seq. ID No. 3552, Seq. ID No. 3554, Seq. ID No. 3556, Seq. ID No. 3558, Seq. ID No. 3560, Seq. ID No. 3564, Seq. ID No. 3566, Seq. ID No. 3568, Seq. ID No. 3570, Seq. ID No. 3572, Seq. ID No. 3576, Seq. ID No. 3578, Seq. ID No. 3580, Seq. ID No. 3584, Seq. ID No. 3586, Seq. ID No. 3590, Seq. ID No. 3592, Seq. ID No. 3598, Seq. ID No. 3600, Seq. ID No. 3602, Seq. ID No. 3604, Seq. ID No. 3606, Seq. ID No. 3608, Seq. ID No. 3610, Seq. ID No. 3614, Seq. ID No. 3616, Seq. ID No. 3624, Seq. ID No. 3628, Seq. ID No. 3632, Seq. ID No. 3634, Seq. ID No. 3638, Seq. ID No. 3640, Seq. ID No. 3642, Seq. ID No. 3644, Seq. ID No. 3646, Seq. ID No. 3648, Seq. ID No. 3650, Seq. ID No. 3652, Seq. ID No. 3654, Seq. ID No. 3656, Seq. ID No. 3658, Seq. ID No. 3660, Seq. ID No. 3662, Seq. ID No. 3664, Seq. ID No. 3666, Seq. ID No. 3668, Seq. ID No. 3670, Seq. ID No. 3672, Seq. ID No. 3674, Seq. ID No. 3676, Seq. ID No. 3682, Seq. ID No. 3684, Seq. ID No. 3686, Seq. ID No. 3688, Seq. ID No. 3692, Seq. ID No. 3694, Seq. ID No. 3696, Seq. ID No. 3698, Seq. ID No. 3700, Seq. ID No. 3702, Seq. ID No. 3704, Seq. ID No. 3706, Seq. ID No. 3708, Seq. ID No. 3710, Seq. ID No. 3712, Seq. ID No. 3714, Seq. ID No. 3716, Seq. ID No. 3720, Seq. ID No. 3722, Seq. ID No. 3726, Seq. ID No. 3730, Seq. ID No. 3732, Seq. ID No. 3734, Seq. ID No. 3736, Seq. ID No. 3738, Seq. ID No. 3740, Seq. ID No. 3744, Seq. ID No. 3748, Seq. ID No. 3750, Seq. ID No. 3752, Seq. ID No. 3760, Seq. ID No. 3768, Seq. ID No. 3770, Seq. ID No. 3772, Seq. ID No. 3774, Seq. ID No. 3776, Seq. ID No. 3778, Seq. ID No. 3780, Seq. ID No. 3786, Seq. ID No. 3788, Seq. ID No. 3790, Seq. ID No. 3792, Seq. ID No. 3796, Seq. ID No. 3798, Seq. ID No. 3802, Seq. ID No. 3804, Seq. ID No. 3806, Seq. ID No. 3810, Seq. ID No. 3812, Seq. ID No. 3820, Seq. ID No. 3822, Seq. ID No. 3824, Seq. ID No. 3826, Seq. ID No. 3828, Seq. ID No. 3830, Seq. ID No. 3832, Seq. ID No. 3834, Seq. ID No. 3836, Seq. ID No. 3842, Seq. ID No. 3844, Seq. ID No. 3846, Seq. ID No. 3848, Seq. ID No. 3856, Seq. ID No. 3858, Seq. ID No. 3868, Seq. ID No. 3870, Seq. ID No. 3872, Seq. ID No. 3874, Seq. ID No. 3876, Seq. ID No. 3878, Seq. ID No. 3882, Seq. ID No. 3884, Seq. ID No. 3886, Seq. ID No. 3888, Seq. ID No. 3894, Seq. ID No. 3898, Seq. ID No. 3900, Seq. ID No. 3902, Seq. ID No. 3906, Seq. ID No. 3908, Seq. ID No. 3910, Seq. ID No. 3912, Seq. ID No. 3914, Seq. ID No. 3918, Seq. ID No. 3920, Seq. ID No. 3922, Seq. ID No. 3928, Seq. ID No. 3930, Seq. ID No. 3932, Seq. ID No. 3934, Seq. ID No. 3936, Seq. ID No. 3938, Seq. ID No. 3940, Seq. ID No. 3942, Seq. ID No. 3944, Seq. ID No. 3946, Seq. ID No. 3948, Seq. ID No. 3950, Seq. ID No. 3952, Seq. ID No. 3954, Seq. ID No. 3956, Seq. ID No. 3958, Seq. ID No. 3962, Seq. ID No. 3966, Seq. ID No. 3968, Seq. ID No. 3970, Seq. ID No. 3972, Seq. ID No. 3978, Seq. ID No. 3980, Seq. ID No. 3982, Seq. ID No. 3984, Seq. ID No. 3986, Seq. ID No. 3988, Seq. ID No. 3990, Seq. ID No. 3992, Seq. ID No. 4000, Seq. ID No. 4002, Seq. ID No. 4004, Seq. ID No. 4012, Seq. ID No. 4014, Seq. ID No. 4016, Seq. ID No. 4018, Seq. ID No. 4020, Seq. ID No. 4022, Seq. ID No. 4024, Seq. ID No. 4030, Seq. ID No. 4032, Seq. ID No. 4034, Seq. ID No. 4036, Seq. ID No. 4038, Seq. ID No. 4052, Seq. ID No. 4054, Seq. ID No. 4056, Seq. ID No. 4058, Seq. ID No. 4060, Seq. ID No. 4064, Seq. ID No. 4066, Seq. ID No. 4068, Seq. ID No. 4070, Seq. ID No. 4076, Seq. ID No. 4078, Seq. ID No. 4086, Seq. ID No. 4088, Seq. ID No. 4090, Seq. ID No. 4092, Seq. ID No. 4094, Seq. ID No. 4096, Seq. ID No. 4098, Seq. ID No. 4100, Seq. ID No. 4106, Seq. ID No. 4108, Seq. ID No. 4110, Seq. ID No. 4114, Seq. ID No. 4116, Seq. ID No. 4118, Seq. ID No. 4120, Seq. ID No. 4122, Seq. ID No. 4124, Seq. ID No. 4126, Seq. ID No. 4128, Seq. ID No. 4130, Seq. ID No. 4132, Seq. ID No. 4148, Seq. ID No. 4150, Seq. ID No. 4156, Seq. ID No. 4158, Seq. ID No. 4160, Seq. ID No. 4162, Seq. ID No. 4164, Seq. ID No. 4166, Seq. ID No. 4168, Seq. ID No. 4170, Seq. ID No. 4172, Seq. ID No. 4174, Seq. ID No. 4176, Seq. ID No. 4178, Seq. ID No. 4180, Seq. ID No. 4184, Seq. ID No. 4186, Seq. ID No. 4188, Seq. ID No. 4190, Seq. ID No. 4192, Seq. ID No. 4194, Seq. ID No. 4196, Seq. ID No. 4198, Seq. ID No. 4200, Seq. ID No. 4202, Seq. ID No. 4204, Seq. ID No. 4206, Seq. ID No. 4208, Seq. ID No. 4210, Seq. ID No. 4212, Seq. ID No. 4214, Seq. ID No. 4216, Seq. ID No. 4218, Seq. ID No. 4220, Seq. ID No. 4230, Seq. ID No. 4236, Seq. ID No. 4238, Seq. ID No. 4240, Seq. ID No. 4244, Seq. ID No. 4246, Seq. ID No. 4250, Seq. ID No. 4252, Seq. ID No. 4256, Seq. ID No. 4268, Seq. ID No. 4272, Seq. ID No. 4274, Seq. ID No. 4278, Seq. ID No. 4280, Seq. ID No. 4282, Seq. ID No. 4284, Seq. ID No. 4290, Seq. ID No. 4292, Seq. ID No. 4294, Seq. ID No. 4296, Seq. ID No. 4300, Seq. ID No. 4302, Seq. ID No. 4304, Seq. ID No. 4306, Seq. ID No. 4310, Seq. ID No. 4316, Seq. ID No. 4318, Seq. ID No. 4320, Seq. ID No. 4322, Seq. ID No. 4324, Seq. ID No. 4326, Seq. ID No. 4328, Seq. ID No. 4330, Seq. ID No. 4332, Seq. ID No. 4334, Seq. ID No. 4336, Seq. ID No. 4338, Seq. ID No. 4340, Seq. ID No. 4342, Seq. ID No. 4346, Seq. ID No. 4348, Seq. ID No. 4350, Seq. ID No. 4352, Seq. ID No. 4354, Seq. ID No. 4356, Seq. ID No. 4358, Seq. ID No. 4360, Seq. ID No. 4362, Seq. ID No. 4364, Seq. ID No. 4366, Seq. ID No. 4368, Seq. ID No. 4370, Seq. ID No. 4372, Seq. ID No. 4374, Seq. ID No. 4376, Seq. ID No. 4378, Seq. ID No. 4382, Seq. ID No. 4384, Seq. ID No. 4388, Seq. ID No. 4394, Seq. ID No. 4396, Seq. ID No. 4398, Seq. ID No. 4402, Seq. ID No. 4406, Seq. ID No. 4408, Seq. ID No. 4410, Seq. ID No. 4412, Seq. ID No. 4414, Seq. ID No. 4416, Seq. ID No. 4418, Seq. ID No. 4420, Seq. ID No. 4422, Seq. ID No. 4424, Seq. ID No. 4426, Seq. ID No. 4428, Seq. ID No. 4430, Seq. ID No. 4432, Seq. ID No. 4434, Seq. ID No. 4436, Seq. ID No. 4444, Seq. ID No. 4446, Seq. ID No. 4448, Seq. ID No. 4450, Seq. ID No. 4452, Seq. ID No. 4454, Seq. ID No. 4456, Seq. ID No. 4458, Seq. ID No. 4460, Seq. ID No. 4462, Seq. ID No. 4464, Seq. ID No. 4466, Seq. ID No. 4468, Seq. ID No. 4472, Seq. ID No. 4476, Seq. ID No. 4478, Seq. ID No. 4480, Seq. ID No. 4488, Seq. ID No. 4490, Seq. ID No. 4492, Seq. ID No. 4500, Seq. ID No. 4502, Seq. ID No. 4504, Seq. ID No. 4506, Seq. ID No. 4508, Seq. ID No. 4510, Seq. ID No. 4512, Seq. ID No. 4518, Seq. ID No. 4520, Seq. ID No. 4522, Seq. ID No. 4524, Seq. ID No. 4526, Seq. ID No. 4532, Seq. ID No. 4536, Seq. ID No. 4538, Seq. ID No. 4540, Seq. ID No. 4542, Seq. ID No. 4544, Seq. ID No. 4546, Seq. ID No. 4548, Seq. ID No. 4550, Seq. ID No. 4552, Seq. ID No. 4554, Seq. ID No. 4556, Seq. ID No. 4558, Seq. ID No. 4560, Seq. ID No. 4562, Seq. ID No. 4564, Seq. ID No. 4566, Seq. ID No. 4568, Seq. ID No. 4570, Seq. ID No. 4572, Seq. ID No. 4574, Seq. ID No. 4576, Seq. ID No. 4578, Seq. ID No. 4580, Seq. ID No. 4582, Seq. ID No. 4584, Seq. ID No. 4586, Seq. ID No. 4592, Seq. ID No. 4594, Seq. ID No. 4596, Seq. ID No. 4598, Seq. ID No. 4600, Seq. ID No. 4602, Seq. ID No. 4604, Seq. ID No. 4606, Seq. ID No. 4608, Seq. ID No. 4610, Seq. ID No. 4612, Seq. ID No. 4614, Seq. ID No. 4616, Seq. ID No. 4618, Seq. ID No. 4620, Seq. ID No. 4622, Seq. ID No. 4624, Seq. ID No. 4626, Seq. ID No. 4628, Seq. ID No. 4630, Seq. ID No. 4632, Seq. ID No. 4634, Seq. ID No. 4636, Seq. ID No. 4638, Seq. ID No. 4646, Seq. ID No. 4648, Seq. ID No. 4650, Seq. ID No. 4652, Seq. ID No. 4654, Seq. ID No. 4656, Seq. ID No. 4658, Seq. ID No. 4662, Seq. ID No. 4664, Seq. ID No. 4666, Seq. ID No. 4668, Seq. ID No. 4670, Seq. ID No. 4672, Seq. ID No. 4674, Seq. ID No. 4676, Seq. ID No. 4678, Seq. ID No. 4680, Seq. ID No. 4684, Seq. ID No. 4686, Seq. ID No. 4690, Seq. ID No. 4692, Seq. ID No. 4694, Seq. ID No. 4698, Seq. ID No. 4700, Seq. ID No. 4702, Seq. ID No. 4704, Seq. ID No. 4714, Seq. ID No. 4720, Seq. ID No. 4722, Seq. ID No. 4724, Seq. ID No. 4726, Seq. ID No. 4728, Seq. ID No. 4730, Seq. ID No. 4732, Seq. ID No. 4734, Seq. ID No. 4736, Seq. ID No. 4740, Seq. ID No. 4742, Seq. ID No. 4744, Seq. ID No. 4746, Seq. ID No. 4748, Seq. ID No. 4750, Seq. ID No. 4752, Seq. ID No. 4754, Seq. ID No. 4756, Seq. ID No. 4758, Seq. ID No. 4762, Seq. ID No. 4764, Seq. ID No. 4766, Seq. ID No. 4768, Seq. ID No. 4770, Seq. ID No. 4772, Seq. ID No. 4774, Seq. ID No. 4776, Seq. ID No. 4778, Seq. ID No. 4780, Seq. ID No. 4782, Seq. ID No. 4784, Seq. ID No. 4786, Seq. ID No. 4788, Seq. ID No. 4790, Seq. ID No. 4792, Seq. ID No. 4794, Seq. ID No. 4796, Seq. ID No. 4798, Seq. ID No. 4800, Seq. ID No. 4802, Seq. ID No. 4804, Seq. ID No. 4806, Seq. ID No. 4808, Seq. ID No. 4810, Seq. ID No. 4812, Seq. ID No. 4816, Seq. ID No. 4818, Seq. ID No. 4820, Seq. ID No. 4822, Seq. ID No. 4824, Seq. ID No. 4826, Seq. ID No. 4830, Seq. ID No. 4832, Seq. ID No. 4834, Seq. ID No. 4836, Seq. ID No. 4838, Seq. ID No. 4840, Seq. ID No. 4842, Seq. ID No. 4844, Seq. ID No. 4846, Seq. ID No. 4848, Seq. ID No. 4850, Seq. ID No. 4852, Seq. ID No. 4856, Seq. ID No. 4858, Seq. ID No. 4860, Seq. ID No. 4862, Seq. ID No. 4866, Seq. ID No. 4868, Seq. ID No. 4878, Seq. ID No. 4880, Seq. ID No. 4882, Seq. ID No. 4884, Seq. ID No. 4886, Seq. ID No. 4888, Seq. ID No. 4890, Seq. ID No. 4892, Seq. ID No. 4894, Seq. ID No. 4896, Seq. ID No. 4898, Seq. ID No. 4900, Seq. ID No. 4902, Seq. ID No. 4904, Seq. ID No. 4906, Seq. ID No. 4908, Seq. ID No. 4910, Seq. ID No. 4912, Seq. ID No. 4914, Seq. ID No. 4916, Seq. ID No. 4918, Seq. ID No. 4926, Seq. ID No. 4928, Seq. ID No. 4934, Seq. ID No. 4936, Seq. ID No. 4938, Seq. ID No. 4940, Seq. ID No. 4942, Seq. ID No. 4944, Seq. ID No. 4946, Seq. ID No. 4948, Seq. ID No. 4954, Seq. ID No. 4956, Seq. ID No. 4958, Seq. ID No. 4960, Seq. ID No. 4962, Seq. ID No. 4964, Seq. ID No. 4966, Seq. ID No. 4968, Seq. ID No. 4970, Seq. ID No. 4972, Seq. ID No. 4974, Seq. ID No. 4978, Seq. ID No. 4980, Seq. ID No. 4982, Seq. ID No. 4984, Seq. ID No. 4986, Seq. ID No. 4990, Seq. ID No. 4992, Seq. ID No. 4994, Seq. ID No. 4996, Seq. ID No. 4998, Seq. ID No. 5002, Seq. ID No. 5004, Seq. ID No. 5006, Seq. ID No. 5008, Seq. ID No. 5010, Seq. ID No. 5012, Seq. ID No. 5016, Seq. ID No. 5018, Seq. ID No. 5020, Seq. ID No. 5022, Seq. ID No. 5024, Seq. ID No. 5026, Seq. ID No. 5028, Seq. ID No. 5030, Seq. ID No. 5034, Seq. ID No. 5036, Seq. ID No. 5038, Seq. ID No. 5040, Seq. ID No. 5042, Seq. ID No. 5044, Seq. ID No. 5046, Seq. ID No. 5048, Seq. ID No. 5050, Seq. ID No. 5052, Seq. ID No. 5054, Seq. ID No. 5056, Seq. ID No. 5058, Seq. ID No. 5060, Seq. ID No. 5066, Seq. ID No. 5068, Seq. ID No. 5072, Seq. ID No. 5074, Seq. ID No. 5076, Seq. ID No. 5078, Seq. ID No. 5080, Seq. ID No. 5082, Seq. ID No. 5084, Seq. ID No. 5088, Seq. ID No. 5090, Seq. ID No. 5092, Seq. ID No. 5094, Seq. ID No. 5096, Seq. ID No. 5098, Seq. ID No. 5100, Seq. ID No. 5102, Seq. ID No. 5106, Seq. ID No. 5108, Seq. ID No. 5110, Seq. ID No. 5112, Seq. ID No. 5114, Seq. ID No. 5118, Seq. ID No. 5120, Seq. ID No. 5122, Seq. ID No. 5128, Seq. ID No. 5144, Seq. ID No. 5146, Seq. ID No. 5148, Seq. ID No. 5150, Seq. ID No. 5152, Seq. ID No. 5154, Seq. ID No. 5156, Seq. ID No. 5158, Seq. ID No. 5162, Seq. ID No. 5164, Seq. ID No. 5168, Seq. ID No. 5170, Seq. ID No. 5172, Seq. ID No. 5174, Seq. ID No. 5178, Seq. ID No. 5180, Seq. ID No. 5182, Seq. ID No. 5184, Seq. ID No. 5186, Seq. ID No. 5188, Seq. ID No. 5190, Seq. ID No. 5192, Seq. ID No. 5194, Seq. ID No. 5196, Seq. ID No. 5202, Seq. ID No. 5204, Seq. ID No. 5210, Seq. ID No. 5212, Seq. ID No. 5216, Seq. ID No. 5218, Seq. ID No. 5222, Seq. ID No. 5226, Seq. ID No. 5228, Seq. ID No. 5230, Seq. ID No. 5232, Seq. ID No. 5234, Seq. ID No. 5236, Seq. ID No. 5238, Seq. ID No. 5240, Seq. ID No. 5242, Seq. ID No. 5244, Seq. ID No. 5246, Seq. ID No. 5248, Seq. ID No. 5250, Seq. ID No. 5252, Seq. ID No. 5254, Seq. ID No. 5256, Seq. ID No. 5258, Seq. ID No. 5260, Seq. ID No. 5262, Seq. ID No. 5264, Seq. ID No. 5266, Seq. ID No. 5270, Seq. ID No. 5272, Seq. ID No. 5284, Seq. ID No. 5288, Seq. ID No. 5290, Seq. ID No. 5292, Seq. ID No. 5294, Seq. ID No. 5296, Seq. ID No. 5298, Seq. ID No. 5300, Seq. ID No. 5302, Seq. ID No. 5304, Seq. ID No. 5306, Seq. ID No. 5308, Seq. ID No. 5310, Seq. ID No. 5312, Seq. ID No. 5314, Seq. ID No. 5316, Seq. ID No. 5318, Seq. ID No. 5320, Seq. ID No. 5322, Seq. ID No. 5324, Seq. ID No. 5326, Seq. ID No. 5334, Seq. ID No. 5336, Seq. ID No. 5338, Seq. ID No. 5340, Seq. ID No. 5344, Seq. ID No. 5346, Seq. ID No. 5348, Seq. ID No. 5350, Seq. ID No. 5352, Seq. ID No. 5354, Seq. ID No. 5356, Seq. ID No. 5358, Seq. ID No. 5360, Seq. ID No. 5362, Seq. ID No. 5364, Seq. ID No. 5366, Seq. ID No. 5368, Seq. ID No. 5370, Seq. ID No. 5372, Seq. ID No. 5374, Seq. ID No. 5376, Seq. ID No. 5382, Seq. ID No. 5384, Seq. ID No. 5390, Seq. ID No. 5392, Seq. ID No. 5394, Seq. ID No. 5396, Seq. ID No. 5398, Seq. ID No. 5400, Seq. ID No. 5402, Seq. ID No. 5404, Seq. ID No. 5408, Seq. ID No. 5410, Seq. ID No. 5412, Seq. ID No. 5418, Seq. ID No. 5420, Seq. ID No. 5422, Seq. ID No. 5424, Seq. ID No. 5426, Seq. ID No. 5428, Seq. ID No. 5430, Seq. ID No. 5432, Seq. ID No. 5436, Seq. ID No. 5438, Seq. ID No. 5440, Seq. ID No. 5442, Seq. ID No. 5444, Seq. ID No. 5446, Seq. ID No. 5448, Seq. ID No. 5450, Seq. ID No. 5452, Seq. ID No. 5456, Seq. ID No. 5458, Seq. ID No. 5468, Seq. ID No. 5470, Seq. ID No. 5472, Seq. ID No. 5474, Seq. ID No. 5476, Seq. ID No. 5478, Seq. ID No. 5480, Seq. ID No. 5482, Seq. ID No. 5484, Seq. ID No. 5486, Seq. ID No. 5488, Seq. ID No. 5490, Seq. ID No. 5494, Seq. ID No. 5496, Seq. ID No. 5500, Seq. ID No. 5502, Seq. ID No. 5504, Seq. ID No. 5506, Seq. ID No. 5508, Seq. ID No. 5512, Seq. ID No. 5520, Seq. ID No. 5522, Seq. ID No. 5524, Seq. ID No. 5528, Seq. ID No. 5536, Seq. ID No. 5538, Seq. ID No. 5540, Seq. ID No. 5542, Seq. ID No. 5548, Seq. ID No. 5550, Seq. ID No. 5552, Seq. ID No. 5554, Seq. ID No. 5556, Seq. ID No. 5558, Seq. ID No. 5560, Seq. ID No. 5562, Seq. ID No. 5564, Seq. ID No. 5566, Seq. ID No. 5568, Seq. ID No. 5572, Seq. ID No. 5574, Seq. ID No. 5576, Seq. ID No. 5578, Seq. ID No. 5580, Seq. ID No. 5582, Seq. ID No. 5584, Seq. ID No. 5586, Seq. ID No. 5600, Seq. ID No. 5602, Seq. ID No. 5604, Seq. ID No. 5606, Seq. ID No. 5608, Seq. ID No. 5614, Seq. ID No. 5616, Seq. ID No. 5618, Seq. ID No. 5620, Seq. ID No. 5628, Seq. ID No. 5630, Seq. ID No. 5632, Seq. ID No. 5636, Seq. ID No. 5646, Seq. ID No. 5648, Seq. ID No. 5652, Seq. ID No. 5654, Seq. ID No. 5656, Seq. ID No. 5658, Seq. ID No. 5662, Seq. ID No. 5664, Seq. ID No. 5666, Seq. ID No. 5670, Seq. ID No. 5672, Seq. ID No. 5674, Seq. ID No. 5676, Seq. ID No. 5678, Seq. ID No. 5680, Seq. ID No. 5692, Seq. ID No. 5694, Seq. ID No. 5696, Seq. ID No. 5698, Seq. ID No. 5702, Seq. ID No. 5708, Seq. ID No. 5714, Seq. ID No. 5716, Seq. ID No. 5718, Seq. ID No. 5722, Seq. ID No. 5724, Seq. ID No. 5726, Seq. ID No. 5728, Seq. ID No. 5732, Seq. ID No. 5738, Seq. ID No. 5742, Seq. ID No. 5744, Seq. ID No. 5746, Seq. ID No. 5748, Seq. ID No. 5750, Seq. ID No. 5752, Seq. ID No. 5754, Seq. ID No. 5756, Seq. ID No. 5758, Seq. ID No. 5760, Seq. ID No. 5762, Seq. ID No. 5770, Seq. ID No. 5774, Seq. ID No. 5776, Seq. ID No. 5778, Seq. ID No. 5780, Seq. ID No. 5782, Seq. ID No. 5788, Seq. ID No. 5790, Seq. ID No. 5794, Seq. ID No. 5796, Seq. ID No. 5800, Seq. ID No. 5802, Seq. ID No. 5804, Seq. ID No. 5806, Seq. ID No. 5808, Seq. ID No. 5810, Seq. ID No. 5812, Seq. ID No. 5814, Seq. ID No. 5816, Seq. ID No. 5818, Seq. ID No. 5820, Seq. ID No. 5822, Seq. ID No. 5824, Seq. ID No. 5826, Seq. ID No. 5828, Seq. ID No. 5832, Seq. ID No. 5834, Seq. ID No. 5836, Seq. ID No. 5838, Seq. ID No. 5840, Seq. ID No. 5842, Seq. ID No. 5844, Seq. ID No. 5846, Seq. ID No. 5848, Seq. ID No. 5850, Seq. ID No. 5852, Seq. ID No. 5854, Seq. ID No. 5856, Seq. ID No. 5858, Seq. ID No. 5860, Seq. ID No. 5862, Seq. ID No. 5864, Seq. ID No. 5866, Seq. ID No. 5868, Seq. ID No. 5870, Seq. ID No. 5872, Seq. ID No. 5874, Seq. ID No. 5876, Seq. ID No. 5878, Seq. ID No. 5882, Seq. ID No. 5888, Seq. ID No. 5892, Seq. ID No. 5898, Seq. ID No. 5904, Seq. ID No. 5908, Seq. ID No. 5912, Seq. ID No. 5914, Seq. ID No. 5916, Seq. ID No. 5918, Seq. ID No. 5920, Seq. ID No. 5926, Seq. ID No. 5932, Seq. ID No. 5934, Seq. ID No. 5936, Seq. ID No. 5938, Seq. ID No. 5942, Seq. ID No. 5944, Seq. ID No. 5946, Seq. ID No. 5948, Seq. ID No. 5950, Seq. ID No. 5952, Seq. ID No. 5954, Seq. ID No. 5956, Seq. ID No. 5958, Seq. ID No. 5960, Seq. ID No. 5962, Seq. ID No. 5964, Seq. ID No. 5966, Seq. ID No. 5968, Seq. ID No. 5970, Seq. ID No. 5972, Seq. ID No. 5974, Seq. ID No. 5976, Seq. ID No. 5978, Seq. ID No. 5980, Seq. ID No. 5982, Seq. ID No. 5984, Seq. ID No. 5986, Seq. ID No. 5988, Seq. ID No. 5990, Seq. ID No. 5992, Seq. ID No. 5994, Seq. ID No. 5996, Seq. ID No. 5998, Seq. ID No. 6000, Seq. ID No. 6002, Seq. ID No. 6004, Seq. ID No. 6006, Seq. ID No. 6008, Seq. ID No. 6010, Seq. ID No. 6012, Seq. ID No. 6014, Seq. ID No. 6016, Seq. ID No. 6018, Seq. ID No. 6020, Seq. ID No. 6022, Seq. ID No. 6030, Seq. ID No. 6032, Seq. ID No. 6034, Seq. ID No. 6036, Seq. ID No. 6038, Seq. ID No. 6040, Seq. ID No. 6042, Seq. ID No. 6046, Seq. ID No. 6050, Seq. ID No. 6052, Seq. ID No. 6056, Seq. ID No. 6058, Seq. ID No. 6062, Seq. ID No. 6066, Seq. ID No. 6070, Seq. ID No. 6072, Seq. ID No. 6074, Seq. ID No. 6076, Seq. ID No. 6078, Seq. ID No. 6080, Seq. ID No. 6082, Seq. ID No. 6084, Seq. ID No. 6086, Seq. ID No. 6094, Seq. ID No. 6098, Seq. ID No. 6100, Seq. ID No. 6102, Seq. ID No. 6106, Seq. ID No. 6114, Seq. ID No. 6120, Seq. ID No. 6122, Seq. ID No. 6124, Seq. ID No. 6126, Seq. ID No. 6128, Seq. ID No. 6130, Seq. ID No. 6132, Seq. ID No. 6134, Seq. ID No. 6140, Seq. ID No. 6142, Seq. ID No. 6144, Seq. ID No. 6146, Seq. ID No. 6148, Seq. ID No. 6150, Seq. ID No. 6152, Seq. ID No. 6154, Seq. ID No. 6156, Seq. ID No. 6158, Seq. ID No. 6168, Seq. ID No. 6172, Seq. ID No. 6174, Seq. ID No. 6176, Seq. ID No. 6178, Seq. ID No. 6180, Seq. ID No. 6182, Seq. ID No. 6194, Seq. ID No. 6196, Seq. ID No. 6200, Seq. ID No. 6202, Seq. ID No. 6208, Seq. ID No. 6212, Seq. ID No. 6214, Seq. ID No. 6216, Seq. ID No. 6220, Seq. ID No. 6232, Seq. ID No. 6234, Seq. ID No. 6240, Seq. ID No. 6248, Seq. ID No. 6252, Seq. ID No. 6256, Seq. ID No. 6258, Seq. ID No. 6262, Seq. ID No. 6270, Seq. ID No. 6272, Seq. ID No. 6278, Seq. ID No. 6280, Seq. ID No. 6282, Seq. ID No. 6288, Seq. ID No. 6292, Seq. ID No. 6294, Seq. ID No. 6296, Seq. ID No. 6298, Seq. ID No. 6300, Seq. ID No. 6306, Seq. ID No. 6308, Seq. ID No. 6310, Seq. ID No. 6312, Seq. ID No. 6314, Seq. ID No. 6316, Seq. ID No. 6313, Seq. ID No. 6320, Seq. ID No. 6322, Seq. ID No. 6324, Seq. ID No. 6330, Seq. ID No. 6332, Seq. ID No. 6334, Seq. ID No. 6336, Seq. ID No. 6338, Seq. ID No. 6340, Seq. ID No. 6342, Seq. ID No. 6344, Seq. ID No. 6346, Seq. ID No. 6348, Seq. ID No. 6350, Seq. ID No. 6352, Seq. ID No. 6354, Seq. ID No. 6356, Seq. ID No. 6358, Seq. ID No. 6360, Seq. ID No. 6362, Seq. ID No. 6368, Seq. ID No. 6370, Seq. ID No. 6372, Seq. ID No. 6374, Seq. ID No. 6376, Seq. ID No. 6380, Seq. ID No. 6386, Seq. ID No. 6388, Seq. ID No. 6390, Seq. ID No. 6392, Seq. ID No. 6394, Seq. ID No. 6396, Seq. ID No. 6398, Seq. ID No. 6400, Seq. ID No. 6402, Seq. ID No. 6404, Seq. ID No. 6406, Seq. ID No. 6408, Seq. ID No. 6410, Seq. ID No. 6412, Seq. ID No. 6414, Seq. ID No. 6418, Seq. ID No. 6420, Seq. ID No. 6422, Seq. ID No. 6424, Seq. ID No. 6434, Seq. ID No. 6436, Seq. ID No. 6438, Seq. ID No. 6440, Seq. ID No. 6442, Seq. ID No. 6444, Seq. ID No. 6446, Seq. ID No. 6448, Seq. ID No. 6450, Seq. ID No. 6452, Seq. ID No. 6454, Seq. ID No. 6456, Seq. ID No. 6458, Seq. ID No. 6460, Seq. ID No. 6462, Seq. ID No. 6464, Seq. ID No. 6466, Seq. ID No. 6468, Seq. ID No. 6470, Seq. ID No. 6472, Seq. ID No. 6476, Seq. ID No. 6478, Seq. ID No. 6482, Seq. ID No. 6484, Seq. ID No. 6486, Seq. ID No. 6488, Seq. ID No. 6490, Seq. ID No. 6492, Seq. ID No. 6494, Seq. ID No. 6496, Seq. ID No. 6500, Seq. ID No. 6502, Seq. ID No. 6504, Seq. ID No. 6506, Seq. ID No. 6508, Seq. ID No. 6510, Seq. ID No. 6512, Seq. ID No. 6514, Seq. ID No. 6516, Seq. ID No. 6520, Seq. ID No. 6522, Seq. ID No. 6524, Seq. ID No. 6526, Seq. ID No. 6528, Seq. ID No. 6530, Seq. ID No. 6532, Seq. ID No. 6534, Seq. ID No. 6536, Seq. ID No. 6538, Seq. ID No. 6540, Seq. ID No. 6546, Seq. ID No. 6548, Seq. ID No. 6550, Seq. ID No. 6552, Seq. ID No. 6554, Seq. ID No. 6560, Seq. ID No. 6562, Seq. ID No. 6564, Seq. ID No. 6566, Seq. ID No. 6568, Seq. ID No. 6570, Seq. ID No. 6576, Seq. ID No. 6578, Seq. ID No. 6580, Seq. ID No. 6584, Seq. ID No. 6586, Seq. ID No. 6588, Seq. ID No. 6590, Seq. ID No. 6592, Seq. ID No. 6606, Seq. ID No. 6608, Seq. ID No. 6610, Seq. ID No. 6612, Seq. ID No. 6614, Seq. ID No. 6616, Seq. ID No. 6618, Seq. ID No. 6620, Seq. ID No. 6622, Seq. ID No. 6624, Seq. ID No. 6626, Seq. ID No. 6628, Seq. ID No. 6630, Seq. ID No. 6634, Seq. ID No. 6636, Seq. ID No. 6642, and Seq. ID No. 6648.

[0042] In another preferred embodiment, the polypeptide is selected from the Alloiococcus otitidis polypeptides identified by BlastP analysis and is selected from one of Seq. ID No. 10, Seq. ID No. 18, Seq. ID No. 46, Seq. ID No. 50, Seq. ID No. 54, Seq. ID No. 60, Seq. ID No. 90, Seq. ID No. 146, Seq. ID No. 158, Seq. ID No. 168, Seq. ID No. 172, Seq. ID No. 192, Seq. ID No. 216, Seq. ID No. 218, Seq. ID No. 226, Seq. ID No. 240, Seq. ID No. 254, Seq. ID No. 274, Seq. ID No. 278, Seq. ID No. 290, Seq. ID No. 330, Seq. ID No. 344, Seq. ID No. 346, Seq. ID No. 376, Seq. ID No. 502, Seq. ID No. 506, Seq. ID No. 512, Seq. ID No. 516, Seq. ID No. 530, Seq. ID No. 570, Seq. ID No. 576, Seq. ID No. 594, Seq. ID No. 596, Seq. ID No. 638, Seq. ID No. 660, Seq. ID No. 670, Seq. ID No. 676, Seq. ID No. 682, Seq. ID No. 730, Seq. ID No. 780, Seq. ID No. 820, Seq. ID No. 896, Seq. ID No. 922, Seq. ID No. 936, Seq. ID No. 956, Seq. ID No. 968, Seq. ID No. 986, Seq. ID No. 1018, Seq. ID No. 1040, Seq. ID No. 1076, Seq. ID No. 1090, Seq. ID No. 1138, Seq. ID No. 1224, Seq. ID No. 1242, Seq. ID No. 1316, Seq. ID No. 1332, Seq. ID No. 1370, Seq. ID No. 1460, Seq. ID No. 1518, Seq. ID No. 1562, Seq. ID No. 1564, Seq. ID No. 1568, Seq. ID No. 1572, Seq. ID No. 1574, Seq. ID No. 1602, Seq. ID No. 1608, Seq. ID No. 1614, Seq. ID No. 1620, Seq. ID No. 1642, Seq. ID No. 1648, Seq. ID No. 1654, Seq. ID No. 1658, Seq. ID No. 1666, Seq. ID No. 1700, Seq. ID No. 1714, Seq. ID No. 1752, Seq. ID No. 1772, Seq. ID No. 1786, Seq. ID No. 1790, Seq. ID No. 1792, Seq. ID No. 1798, Seq. ID No. 1812, Seq. ID No. 1818, Seq. ID No. 1820, Seq. ID No. 1822, Seq. ID No. 1872, Seq. ID No. 1896, Seq. ID No. 1906, Seq. ID No. 1914, Seq. ID No. 1920, Seq. ID No. 1924, Seq. ID No. 1966, Seq. ID No. 1972, Seq. ID No. 2000, Seq. ID No. 2048, Seq. ID No. 2056, Seq. ID No. 2092, Seq. ID No. 2094, Seq. ID No. 2116, Seq. ID No. 2120, Seq. ID No. 2128, Seq. ID No. 2166, Seq. ID No. 2180, Seq. ID No. 2208, Seq. ID No. 2224, Seq. ID No. 2228, Seq. ID No. 2242, Seq. ID No. 2254, Seq. ID No. 2264, Seq. ID No. 2270, Seq. ID No. 2276, Seq. ID No. 2302, Seq. ID No. 2316, Seq. ID No. 2330, Seq. ID No. 2334, Seq. ID No. 2344, Seq. ID No. 2346, Seq. ID No. 2364, Seq. ID No. 2374, Seq. ID No. 2392, Seq. ID No. 2418, Seq. ID No. 2430, Seq. ID No. 2466, Seq. ID No. 2476, Seq. ID No. 2484, Seq. ID No. 2514, Seq. ID No. 2526, Seq. ID No. 2590, Seq. ID No. 2614, Seq. ID No. 2652, Seq. ID No. 2670, Seq. ID No. 2678, Seq. ID No. 2688, Seq. ID No. 2690, Seq. ID No. 2694, Seq. ID No. 2704, Seq. ID No. 2710, Seq. ID No. 2716, Seq. ID No. 2752, Seq. ID No. 2754, Seq. ID No. 2768, Seq. ID No. 2788, Seq. ID No. 2792, Seq. ID No. 2804, Seq. ID No. 2868, Seq. ID No. 2872, Seq. ID No. 2908, Seq. ID No. 2920, Seq. ID No. 2922, Seq. ID No. 2924, Seq. ID No. 2928, Seq. ID No. 2934, Seq. ID No. 2958, Seq. ID No. 2980, Seq. ID No. 3000, Seq. ID No. 3006, Seq. ID No. 3020, Seq. ID No. 3032, Seq. ID No. 3036, Seq. ID No. 3056, Seq. ID No. 3068, Seq. ID No. 3086, Seq. ID No. 3166, Seq. ID No. 3184, Seq. ID No. 3190, Seq. ID No. 3198, Seq. ID No. 3212, Seq. ID No. 3252, Seq. ID No. 3258, Seq. ID No. 3260, Seq. ID No. 3298, Seq. ID No. 3320, Seq. ID No. 3324, Seq. ID No. 3336, Seq. ID No. 3338, Seq. ID No. 3356, Seq. ID No. 3360, Seq. ID No. 3378, Seq. ID No. 3398, Seq. ID No. 3406, Seq. ID No. 3416, Seq. ID No. 3426, Seq. ID No. 3428, Seq. ID No. 3462, Seq. ID No. 3464, Seq. ID No. 3488, Seq. ID No. 3494, Seq. ID No. 3498, Seq. ID No. 3508, Seq. ID No. 3520, Seq. ID No. 3522, Seq. ID No. 3530, Seq. ID No. 3536, Seq. ID No. 3630, Seq. ID No. 3636, Seq. ID No. 3728, Seq. ID No. 3760, Seq. ID No. 3772, Seq. ID No. 3794, Seq. ID No. 3840, Seq. ID No. 3852, Seq. ID No. 3864, Seq. ID No. 3866, Seq. ID No. 3884, Seq. ID No. 3892, Seq. ID No. 3914, Seq. ID No. 3926, Seq. ID No. 3930, Seq. ID No. 3976, Seq. ID No. 3982, Seq. ID No. 4028, Seq. ID No. 4040, Seq. ID No. 4062, Seq. ID No. 4074, Seq. ID No. 4082, Seq. ID No. 4104, Seq. ID No. 4112, Seq. ID No. 4138, Seq. ID No. 4226, Seq. ID No. 4248, Seq. ID No. 4344, Seq. ID No. 4380, Seq. ID No. 4390, Seq. ID No. 4470, Seq. ID No. 4474, Seq. ID No. 4482, Seq. ID No. 4486, Seq. ID No. 4494, Seq. ID No. 4530, Seq. ID No. 4644, Seq. ID No. 4706, Seq. ID No. 4714, Seq. ID No. 4718, Seq. ID No. 4814, Seq. ID No. 4816, Seq. ID No. 4826, Seq. ID No. 4828, Seq. ID No. 4834, Seq. ID No. 4838, Seq. ID No. 4852, Seq. ID No. 4864, Seq. ID No. 4876, Seq. ID No. 4880, Seq. ID No. 4894, Seq. ID No. 4902, Seq. ID No. 4920, Seq. ID No. 4932, Seq. ID No. 4960, Seq. ID No. 4964, Seq. ID No. 4986, Seq. ID No. 5114, Seq. ID No. 5116, Seq. ID No. 5118, Seq. ID No. 5126, Seq. ID No. 5142, Seq. ID No. 5184, Seq. ID No. 5202, Seq. ID No. 5206, Seq. ID No. 5214, Seq. ID No. 5220, Seq. ID No. 5280, Seq. ID No. 5286, Seq. ID No. 5332, Seq. ID No. 5382, Seq. ID No. 5390, Seq. ID No. 5406, Seq. ID No. 5412, Seq. ID No. 5420, Seq. ID No. 5434, Seq. ID No. 5464, Seq. ID No. 5478, Seq. ID No. 5492, Seq. ID No. 5510, Seq. ID No. 5514, Seq. ID No. 5526, Seq. ID No. 5530, Seq. ID No. 5538, Seq. ID No. 5568, Seq. ID No. 5600, Seq. ID No. 5622, Seq. ID No. 5638, Seq. ID No. 5700, Seq. ID No. 5724, Seq. ID No. 5734, Seq. ID No. 5762, Seq. ID No. 5792, Seq. ID No. 5896, Seq. ID No. 5902, Seq. ID No. 5904, Seq. ID No. 5910, Seq. ID No. 5914, Seq. ID No. 5920, Seq. ID No. 5930, Seq. ID No. 5940, Seq. ID No. 6002, Seq. ID No. 6044, Seq. ID No. 6054, Seq. ID No. 6058, Seq. ID No. 6090, Seq. ID No. 6096, Seq. ID No. 6104, Seq. ID No. 6112, Seq. ID No. 6118, Seq. ID No. 6166, Seq. ID No. 6170, Seq. ID No. 6186, Seq. ID No. 6192, Seq. ID No. 6210, Seq. ID No. 6230, Seq. ID No. 6258, Seq. ID No. 6264, Seq. ID No. 6272, Seq. ID No. 6276, Seq. ID No. 6290, Seq. ID No. 6304, Seq. ID No. 6366, Seq. ID No. 6370, Seq. ID No. 6384, and Seq. ID No. 6416.

[0043] In another preferred embodiment, the polypeptide is selected from the Alloiococcus otitidis polypeptides, which have been identified by Pfam analysis, and is selected from one of Seq. ID No. 90, Seq. ID No. 146, Seq. ID No. 156, Seq. ID No. 168, Seq. ID No. 174, Seq. ID No. 192, Seq. ID No. 216, Seq. ID No. 220, Seq. ID No. 222, Seq. ID No. 224, Seq. ID No. 226, Seq. ID No. 234, Seq. ID No. 240, Seq. ID No. 252, Seq. ID No. 254, Seq. ID No. 272, Seq. ID No. 292, Seq. ID No. 332, Seq. ID No. 342, Seq. ID No. 346, Seq. ID No. 376, Seq. ID No. 502, Seq. ID No. 506, Seq. ID No. 512, Seq. ID No. 530, Seq. ID No. 568, Seq. ID No. 570, Seq. ID No. 576, Seq. ID No. 594, Seq. ID No. 596, Seq. ID No. 602, Seq. ID No. 638, Seq. ID No. 650, Seq. ID No. 662, Seq. ID No. 670, Seq. ID No. 676, Seq. ID No. 682, Seq. ID No. 684, Seq. ID No. 730, Seq. ID No. 754, Seq. ID No. 780, Seq. ID No. 828, Seq. ID No. 840, Seq. ID No. 896, Seq. ID No. 940, Seq. ID No. 970, Seq. ID No. 986, Seq. ID No. 1016, Seq. ID No. 1040, Seq. ID No. 1076, Seq. ID No. 1138, Seq. ID No. 1156, Seq. ID No. 1164, Seq. ID No. 1176, Seq. ID No. 1224, Seq. ID No. 1232, Seq. ID No. 1238, Seq. ID No. 1242, Seq. ID No. 1262, Seq. ID No. 1332, Seq. ID No. 1340, Seq. ID No. 1370, Seq. ID No. 1478, Seq. ID No. 1518, Seq. ID No. 1532, Seq. ID No. 1540, Seq. ID No. 1550, Seq. ID No. 1564, Seq. ID No. 1568, Seq. ID No. 1572, Seq. ID No. 1574, Seq. ID No. 1590, Seq. ID No. 1596, Seq. ID No. 1648, Seq. ID No. 1658, Seq. ID No. 1772, Seq. ID No. 1786, Seq. ID No. 1790, Seq. ID No. 1820, Seq. ID No. 1822, Seq. ID No. 1970, Seq. ID No. 2016, Seq. ID No. 2048, Seq. ID No. 2088, Seq. ID No. 2090, Seq. ID No. 2094, Seq. ID No. 2116, Seq. ID No. 2118, Seq. ID No. 2128, Seq. ID No. 2142, Seq. ID No. 2180, Seq. ID No. 2208, Seq. ID No. 2224, Seq. ID No. 2254, Seq. ID No. 2276, Seq. ID No. 2302, Seq. ID No. 2316, Seq. ID No. 2330, Seq. ID No. 2344, Seq. ID No. 2350, Seq. ID No. 2364, Seq. ID No. 2382, Seq. ID No. 2392, Seq. ID No. 2418, Seq. ID No. 2422, Seq. ID No. 2424, Seq. ID No. 2430, Seq. ID No. 2482, Seq. ID No. 2488, Seq. ID No. 2490, Seq. ID No. 2492, Seq. ID No. 2510, Seq. ID No. 2520, Seq. ID No. 2526, Seq. ID No. 2548, Seq. ID No. 2554, Seq. ID No. 2564, Seq. ID No. 2588, Seq. ID No. 2600, Seq. ID No. 2608, Seq. ID No. 2614, Seq. ID No. 2652, Seq. ID No. 2676, Seq. ID No. 2682, Seq. ID No. 2688, Seq. ID No. 2694, Seq. ID No. 2700, Seq. ID No. 2704, Seq. ID No. 2710, Seq. ID No. 2712, Seq. ID No. 2728, Seq. ID No. 2754, Seq. ID No. 2820, Seq. ID No. 2822, Seq. ID No. 2824, Seq. ID No. 2868, Seq. ID No. 2872, Seq. ID No. 2908, Seq. ID No. 2920, Seq. ID No. 2958, Seq. ID No. 2972, Seq. ID No. 2980, Seq. ID No. 3000, Seq. ID No. 3006, Seq. ID No. 3020, Seq. ID No. 3036, Seq. ID No. 3066, Seq. ID No. 3086, Seq. ID No. 3150, Seq. ID No. 3166, Seq. ID No. 3184, Seq. ID No. 3204, Seq. ID No. 3212, Seq. ID No. 3252, Seq. ID No. 3260, Seq. ID No. 3320, Seq. ID No. 3324, Seq. ID No. 3336, Seq. ID No. 3338, Seq. ID No. 3348, Seq. ID No. 3360, Seq. ID No. 3378, Seq. ID No. 3380, Seq. ID No. 3400, Seq. ID No. 3426, Seq. ID No. 3484, Seq. ID No. 3496, Seq. ID No. 3498, Seq. ID No. 3520, Seq. ID No. 3530, Seq. ID No. 3600, Seq. ID No. 3612, Seq. ID No. 3616, Seq. ID No. 3620, Seq. ID No. 3664, Seq. ID No. 3740, Seq. ID No. 3760, Seq. ID No. 3772, Seq. ID No. 3798, Seq. ID No. 3826, Seq. ID No. 3842, Seq. ID No. 3856, Seq. ID No. 3864, Seq. ID No. 3902, Seq. ID No. 3930, Seq. ID No. 4016, Seq. ID No. 4018, Seq. ID No. 4056, Seq. ID No. 4076, Seq. ID No. 4086, Seq. ID No. 4090, Seq. ID No. 4100, Seq. ID No. 4106, Seq. ID No. 4130, Seq. ID No. 4204, Seq. ID No. 4244, Seq. ID No. 4252, Seq. ID No. 4344, Seq. ID No. 4384, Seq. ID No. 4476, Seq. ID No. 4482, Seq. ID No. 4488, Seq. ID No. 4492, Seq. ID No. 4534, Seq. ID No. 4628, Seq. ID No. 4706, Seq. ID No. 4714, Seq. ID No. 4718, Seq. ID No. 4720, Seq. ID No. 4730, Seq. ID No. 4790, Seq. ID No. 4792, Seq. ID No. 4794, Seq. ID No. 4804, Seq. ID No. 4814, Seq. ID No. 4816, Seq. ID No. 4826, Seq. ID No. 4834, Seq. ID No. 4838, Seq. ID No. 4876, Seq. ID No. 4880, Seq. ID No. 4920, Seq. ID No. 4932, Seq. ID No. 4948, Seq. ID No. 4986, Seq. ID No. 5078, Seq. ID No. 5116, Seq. ID No. 5118, Seq. ID No. 5128, Seq. ID No. 5142, Seq. ID No. 5194, Seq. ID No. 5216, Seq. ID No. 5220, Seq. ID No. 5276, Seq. ID No. 5382, Seq. ID No. 5390, Seq. ID No. 5410, Seq. ID No. 5412, Seq. ID No. 5476, Seq. ID No. 5492, Seq. ID No. 5514, Seq. ID No. 5520, Seq. ID No. 5526, Seq. ID No. 5530, Seq. ID No. 5538, Seq. ID No. 5558, Seq. ID No. 5582, Seq. ID No. 5600, Seq. ID No. 5638, Seq. ID No. 5686, Seq. ID No. 5724, Seq. ID No. 5756, Seq. ID No. 5762, Seq. ID No. 5896, Seq. ID No. 5902, Seq. ID No. 5904, Seq. ID No. 5912, Seq. ID No. 5914, Seq. ID No. 5920, Seq. ID No. 5924, Seq. ID No. 5930, Seq. ID No. 6002, Seq. ID No. 6044, Seq. ID No. 6054, Seq. ID No. 6056, Seq. ID No. 6090, Seq. ID No. 6096, Seq. ID No. 6112, Seq. ID No. 6118, Seq. ID No. 6166, Seq. ID No. 6170, Seq. ID No. 6188, Seq. ID No. 6196, Seq. ID No. 6220, Seq. ID No. 6234, Seq. ID No. 6270, Seq. ID No. 6276, Seq. ID No. 6280, Seq. ID No. 6288, Seq. ID No. 6298, Seq. ID No. 6300, Seq. ID No. 6306, Seq. ID No. 6312, Seq. ID No. 6370, Seq. ID No. 6380, Seq. ID No. 6588, and Seq. ID No. 6592.

[0044] In yet another preferred embodiment, the polypeptide is selected from the Alloiococcus otitidis polypeptides, wherein the polypeptide is identified using proteomics methodology as sharing homology with surface exposed proteins in Streptococcus pneumoniae, and is selected from one of Seq. ID No. 2, Seq. ID No. 6, Seq. ID No. 94, Seq. ID No. 96, Seq. ID No. 104, Seq. ID No. 108, Seq. ID No. 158, Seq. ID No. 224, Seq. ID No. 226, Seq. ID No. 234, Seq. ID No. 240, Seq. ID No. 254, Seq. ID No. 318, Seq. ID No. 322, Seq. ID No. 342, Seq. ID No. 346, Seq. ID No. 354, Seq. ID No. 362, Seq. ID No. 364, Seq. ID No. 366, Seq. ID No. 376, Seq. ID No. 380, Seq. ID No. 384, Seq. ID No. 390, Seq. ID No. 392, Seq. ID No. 398, Seq. ID No. 406, Seq. ID No. 410, Seq. ID No. 416, Seq. ID No. 424, Seq. ID No. 426, Seq. ID No. 428, Seq. ID No. 430, Seq. ID No. 436, Seq. ID No. 438, Seq. ID No. 440, Seq. ID No. 442, Seq. ID No. 444, Seq. ID No. 446, Seq. ID No. 448, Seq. ID No. 450, Seq. ID No. 462, Seq. ID No. 464, Seq. ID No. 466, Seq. ID No. 514, Seq. ID No. 544, Seq. ID No. 552, Seq. ID No. 554, Seq. ID No. 560, Seq. ID No. 596, Seq. ID No. 602, Seq. ID No. 638, Seq. ID No. 650, Seq. ID No. 658, Seq. ID No. 670, Seq. ID No. 676, Seq. ID No. 684, Seq. ID No. 754, Seq. ID No. 930, Seq. ID No. 970, Seq. ID No. 1042, Seq. ID No. 1044, Seq. ID No. 1086, Seq. ID No. 1090, Seq. ID No. 1094, Seq. ID No. 1098, Seq. ID No. 1100, Seq. ID No. 1102, Seq. ID No. 1176, Seq. ID No. 1206, Seq. ID No. 1238, Seq. ID No. 1460, Seq. ID No. 1496, Seq. ID No. 1498, Seq. ID No. 1504, Seq. ID No. 1518, Seq. ID No. 1528, Seq. ID No. 1532, Seq. ID No. 1540, Seq. ID No. 1544, Seq. ID No. 1550, Seq. ID No. 1574, Seq. ID No. 1658, Seq. ID No. 1710, Seq. ID No. 1768, Seq. ID No. 1786, Seq. ID No. 1822, Seq. ID No. 1890, Seq. ID No. 1926, Seq. ID No. 1970, Seq. ID No. 2004, Seq. ID No. 2048, Seq. ID No. 2076, Seq. ID No. 2090, Seq. ID No. 2094, Seq. ID No. 2118, Seq. ID No. 2138, Seq. ID No. 2144, Seq. ID No. 2206, Seq. ID No. 2236, Seq. ID No. 2258, Seq. ID No. 2302, Seq. ID No. 2364, Seq. ID No. 2424, Seq. ID No. 2446, Seq. ID No. 2452, Seq. ID No. 2482, Seq. ID No. 2496, Seq. ID No. 2506, Seq. ID No. 2578, Seq. ID No. 2588, Seq. ID No. 2614, Seq. ID No. 2634, Seq. ID No. 2652, Seq. ID No. 2666, Seq. ID No. 2670, Seq. ID No. 2678, Seq. ID No. 2688, Seq. ID No. 2694, Seq. ID No. 2700, Seq. ID No. 2712, Seq. ID No. 2716, Seq. ID No. 2758, Seq. ID No. 2792, Seq. ID No. 2794, Seq. ID No. 2804, Seq. ID No. 2868, Seq. ID No. 2920, Seq. ID No. 2930, Seq. ID No. 3006, Seq. ID No. 3020, Seq. ID No. 3126, Seq. ID No. 3138, Seq. ID No. 3162, Seq. ID No. 3180, Seq. ID No. 3252, Seq. ID No. 3260, Seq. ID No. 3286, Seq. ID No. 3310, Seq. ID No. 3318, Seq. ID No. 3338, Seq. ID No. 3346, Seq. ID No. 3360, Seq. ID No. 3476, Seq. ID No. 3516, Seq. ID No. 3522, Seq. ID No. 3642, Seq. ID No. 3696, Seq. ID No. 3794, Seq. ID No. 3902, Seq. ID No. 3928, Seq. ID No. 3988, Seq. ID No. 4002, Seq. ID No. 4058, Seq. ID No. 4082, Seq. ID No. 4112, Seq. ID No. 4126, Seq. ID No. 4194, Seq. ID No. 4196, Seq. ID No. 4238, Seq. ID No. 4248, Seq. ID No. 4384, Seq. ID No. 4394, Seq. ID No. 4398, Seq. ID No. 4402, Seq. ID No. 4436, Seq. ID No. 4450, Seq. ID No. 4472, Seq. ID No. 4492, Seq. ID No. 4512, Seq. ID No. 4520, Seq. ID No. 4532, Seq. ID No. 4550, Seq. ID No. 4578, Seq. ID No. 4582, Seq. ID No. 4586, Seq. ID No. 4610, Seq. ID No. 4612, Seq. ID No. 4614, Seq. ID No. 4676, Seq. ID No. 4686, Seq. ID No. 4720, Seq. ID No. 4730, Seq. ID No. 4744, Seq. ID No. 4756, Seq. ID No. 4782, Seq. ID No. 4788, Seq. ID No. 4838, Seq. ID No. 4842, Seq. ID No. 4850, Seq. ID No. 4856, Seq. ID No. 4890, Seq. ID No. 4902, Seq. ID No. 4916, Seq. ID No. 4918, Seq. ID No. 4932, Seq. ID No. 4936, Seq. ID No. 4978, Seq. ID No. 5026, Seq. ID No. 5030, Seq. ID No. 5110, Seq. ID No. 5116, Seq. ID No. 5118, Seq. ID No. 5156, Seq. ID No. 5186, Seq. ID No. 5202, Seq. ID No. 5204, Seq. ID No. 5220, Seq. ID No. 5262, Seq. ID No. 5290, Seq. ID No. 5296, Seq. ID No. 5378, Seq. ID No. 5390, Seq. ID No. 5400, Seq. ID No. 5412, Seq. ID No. 5538, Seq. ID No. 5622, Seq. ID No. 5628, Seq. ID No. 5658, Seq. ID No. 5676, Seq. ID No. 5718, Seq. ID No. 5778, Seq. ID No. 5860, Seq. ID No. 5902, Seq. ID No. 5914, Seq. ID No. 5920, Seq. ID No. 5926, Seq. ID No. 5934, Seq. ID No. 6056, Seq. ID No. 6130, Seq. ID No. 6134, Seq. ID No. 6188, Seq. ID No. 6194, Seq. ID No. 6220, Seq. ID No. 6272, Seq. ID No. 6278, Seq. ID No. 6370, Seq. ID No. 6376, Seq. ID No. 6380, Seq. ID No. 6390, Seq. ID No. 6592, and Seq. ID No. 6606.

[0045] In yet another preferred embodiment, the polypeptide is selected from the Alloiococcus otitidis polypeptides identified as having an LPXTG motif, which are covalently attached to the peptidoglycan layer, and is selected from one of Seq. ID No. 504, Seq. ID No. 506, Seq. ID No. 1316, Seq. ID No. 1318, Seq. ID No. 1364, Seq. ID No. 1366, Seq. ID No. 1368, Seq. ID No. 1370, Seq. ID No. 1560, Seq. ID No. 1562, Seq. ID No. 1582, Seq. ID No. 1740, Seq. ID No. 1742, Seq. ID No. 2812, Seq. ID No. 2814, Seq. ID No. 3620, Seq. ID No. 5588, Seq. ID No. 5590, Seq. ID No. 5592, Seq. ID No. 5782, Seq. ID No. 5784, and Seq. ID No. 6104.

[0046] In yet another preferred embodiment, the polypeptide is selected from the Alloiococcus otitidis polypeptides identified as lipoproteins using the HMM Lipo algorithm, and is selected from one Seq. ID No. 46, Seq. ID No. 48, Seq. ID No. 172, Seq. ID No. 226, Seq. ID No. 420, Seq. ID No. 514, Seq. ID No. 576, Seq. ID No. 592, Seq. ID No. 594, Seq. ID No. 658, Seq. ID No. 660, Seq. ID No. 670, Seq. ID No. 676, Seq. ID No. 746, Seq. ID No. 748, Seq. ID No. 936, Seq. ID No. 1046, Seq. ID No. 1076, Seq. ID No. 1138, Seq. ID No. 1174, Seq. ID No. 1192, Seq. ID No. 1194, Seq. ID No. 1196, Seq. ID No. 1564, Seq. ID No. 1662, Seq. ID No. 1664, Seq. ID No. 1666, Seq. ID No. 1792, Seq. ID No. 1798, Seq. ID No. 1918, Seq. ID No. 1970, Seq. ID No. 2116, Seq. ID No. 2160, Seq. ID No. 2430, Seq. ID No. 2528, Seq. ID No. 2700, Seq. ID No. 2816, Seq. ID No. 2876, Seq. ID No. 2976, Seq. ID No. 2978, Seq. ID No. 2992, Seq. ID No. 3044, Seq. ID No. 3324, Seq. ID No. 3338, Seq. ID No. 4134, Seq. ID No. 4138, Seq. ID No. 4482, Seq. ID No. 4706, Seq. ID No. 4828, Seq. ID No. 4870, Seq. ID No. 5116, Seq. ID No. 5378, Seq. ID No. 5380, Seq. ID No. 5492, Seq. ID No. 5510, Seq. ID No. 5514, Seq. ID No. 5526, Seq. ID No. 5530, Seq. ID No. 5532, Seq. ID No. 5890, Seq. ID No. 5910, Seq. ID No. 6026, Seq. ID No. 6028, Seq. ID No. 6088, Seq. ID No. 6090, Seq. ID No. 6326, Seq. ID No. 6328, Seq. ID No. 6416, Seq. ID No. 6638, Seq. ID No. 6640, and Seq. ID No. 6646.

[0047] In yet another preferred embodiment, the polypeptide is selected from the Alloiococcus otitidis polypeptides, wherein the polypeptide is non-covalently associated with the peptidoglycan layer and is selected from one of Seq. ID No. 3590, Seq. ID No. 3988, Seq. ID No. 5220, and Seq. ID No. 5338.

[0048] In yet another preferred embodiment, the polypeptide is selected from the Alloiococcus otitidis polypeptides having an RGDX motif wherein X is not a proline residue, and is selected from one of Seq. ID No. 38, Seq. ID No. 100, Seq. ID No. 108, Seq. ID No. 110, Seq. ID No. 112, Seq. ID No. 352, Seq. ID No. 354, Seq. ID No. 466, Seq. ID No. 468, Seq. ID No. 470, Seq. ID No. 472, Seq. ID No. 684, Seq. ID No. 822, Seq. ID No. 824, Seq. ID No. 1022, Seq. ID No. 1024, Seq. ID No. 1158, Seq. ID No. 1160, Seq. ID No. 1234, Seq. ID No. 1334, Seq. ID No. 1336, Seq. ID No. 1450, Seq. ID No. 1560, Seq. ID No. 1562, Seq. ID No. 1564, Seq. ID No. 1626, Seq. ID No. 1778, Seq. ID No. 1828, Seq. ID No. 1830, Seq. ID No. 1872, Seq. ID No. 1926, Seq. ID No. 2136, Seq. ID No. 2146, Seq. ID No. 2174, Seq. ID No. 2176, Seq. ID No. 2178, Seq. ID No. 2180, Seq. ID No. 2260, Seq. ID No. 2318, Seq. ID No. 2320, Seq. ID No. 2322, Seq. ID No. 2324, Seq. ID No. 2326, Seq. ID No. 2328, Seq. ID No. 2330, Seq. ID No. 2402, Seq. ID No. 2672, Seq. ID No. 2864, Seq. ID No. 2870, Seq. ID No. 2920, Seq. ID No. 2922, Seq. ID No. 2994, Seq. ID No. 3088, Seq. ID No. 3138, Seq. ID No. 3280, Seq. ID No. 3282, Seq. ID No. 3284, Seq. ID No. 3334, Seq. ID No. 3336, Seq. ID No. 3498, Seq. ID No. 3500, Seq. ID No. 3502, Seq. ID No. 3534, Seq. ID No. 3672, Seq. ID No. 3674, Seq. ID No. 3676, Seq. ID No. 3838, Seq. ID No. 3840, Seq. ID No. 3842, Seq. ID No. 3844, Seq. ID No. 3930, Seq. ID No. 3962, Seq. ID No. 4038, Seq. ID No. 4194, Seq. ID No. 4240, Seq. ID No. 4328, Seq. ID No. 4330, Seq. ID No. 4334, Seq. ID No. 4394, Seq. ID No. 4464, Seq. ID No. 4466, Seq. ID No. 4468, Seq. ID No. 4598, Seq. ID No. 4630, Seq. ID No. 4632, Seq. ID No. 4676, Seq. ID No. 4678, Seq. ID No. 4680, Seq. ID No. 4690, Seq. ID No. 4692, Seq. ID No. 4694, Seq. ID No. 4782, Seq. ID No. 4800, Seq. ID No. 4802, Seq. ID No. 4804, Seq. ID No. 4862, Seq. ID No. 5010, Seq. ID No. 5144, Seq. ID No. 5146, Seq. ID No. 5180, Seq. ID No. 5182, Seq. ID No. 5184, Seq. ID No. 5250, Seq. ID No. 5252, Seq. ID No. 5254, Seq. ID No. 5260, Seq. ID No. 5262, Seq. ID No. 5294, Seq. ID No. 5296, Seq. ID No. 5298, Seq. ID No. 5300, Seq. ID No. 5308, Seq. ID No. 5310, Seq. ID No. 5412, Seq. ID No. 5536, Seq. ID No. 5538, Seq. ID No. 5746, Seq. ID No. 5822, Seq. ID No. 5824, Seq. ID No. 5826, Seq. ID No. 6030, Seq. ID No. 6172, Seq. ID No. 6308, Seq. ID No. 6310, and Seq. ID No. 6312.

[0049] In another preferred embodiment, the polypeptide is selected from Alloiococcus otitidis polypeptides predicted by BlastP as being involved in capsule biosynthesis and transport, and is selected from one of Seq. ID No. 50, Seq. ID No. 52, Seq. ID No. 54, Seq. ID No. 60, Seq. ID No. 196, Seq. ID No. 690, Seq. ID No. 704, Seq. ID No. 926, Seq. ID No. 1598, Seq. ID No. 1602, Seq. ID No. 1608, Seq. ID No. 1612, Seq. ID No. 1614, Seq. ID No. 1714, Seq. ID No. 2030, Seq. ID No. 2264, Seq. ID No. 2270, Seq. ID No. 2374, Seq. ID No. 2438, Seq. ID No. 2652, Seq. ID No. 2768, Seq. ID No. 2908, Seq. ID No. 3398, Seq. ID No. 3400, Seq. ID No. 3480, Seq. ID No. 3488, Seq. ID No. 3492, Seq. ID No. 3494, Seq. ID No. 3496, Seq. ID No. 3498, Seq. ID No. 3520, Seq. ID No. 3522, Seq. ID No. 3530, Seq. ID No. 3536, Seq. ID No. 3562, Seq. ID No. 3884, Seq. ID No. 3892, Seq. ID No. 3982, and Seq. ID No. 4088.

[0050] In another preferred embodiment, the polypeptide is selected from Alloiococcus otitidis polypeptides predicted by BlastP as being localized in the capsule loci region of Alloiococcus otitidis, and is selected from one of Seq. ID No. 46, Seq. ID No. 48, Seq. ID No. 52, Seq. ID No. 54, Seq. ID No. 56, Seq. ID No. 58, Seq. ID No. 60, Seq. ID No. 684, Seq. ID No. 686, Seq. ID No. 688, Seq. ID No. 690, Seq. ID No. 692, Seq. ID No. 694, Seq. ID No. 696, Seq. ID No. 698, Seq. ID No. 700, Seq. ID No. 702, Seq. ID No. 704, Seq. ID No. 706, Seq. ID No. 708, Seq. ID No. 710, Seq. ID No. 712, Seq. ID No. 714, Seq. ID No. 716, Seq. ID No. 718, Seq. ID No. 720, Seq. ID No. 722, Seq. ID No. 724, Seq. ID No. 726, Seq. ID No. 728, Seq. ID No. 730, Seq. ID No. 732, Seq. ID No. 734, Seq. ID No. 736, Seq. ID No. 738, Seq. ID No. 740, Seq. ID No. 742, Seq. ID No. 744, Seq. ID No. 746, Seq. ID No. 748, Seq. ID No. 750, Seq. ID No. 752, Seq. ID No. 754, Seq. ID No. 3390, Seq. ID No. 3392, Seq. ID No. 3394, Seq. ID No. 3396, Seq. ID No. 3398, Seq. ID No. 3400, Seq. ID No. 3402, Seq. ID No. 3404, Seq. ID No. 3406, Seq. ID No. 3408, Seq. ID No. 3410, Seq. ID No. 3412, Seq. ID No. 3414, Seq. ID No. 3416, Seq. ID No. 3418, Seq. ID No. 3420, Seq. ID No. 3422, Seq. ID No. 3424, Seq. ID No. 3426, Seq. ID No. 3428, Seq. ID No. 3430, Seq. ID No. 3432, Seq. ID No. 3434, Seq. ID No. 3436, Seq. ID No. 3438, Seq. ID No. 3440, Seq. ID No. 3442, Seq. ID No. 3444, Seq. ID No. 3446, Seq. ID No. 3448, Seq. ID No. 3450, Seq. ID No. 3452, Seq. ID No. 3454, Seq. ID No. 3456, Seq. ID No. 3458, Seq. ID No. 3460, Seq. ID No. 3462, Seq. ID No. 3464, Seq. ID No. 3466, Seq. ID No. 3468, Seq. ID No. 3470, Seq. ID No. 3472, Seq. ID No. 3474, Seq. ID No. 3476, Seq. ID No. 3478, Seq. ID No. 3480, Seq. ID No. 3482, Seq. ID No. 3484, Seq. ID No. 3486, Seq. ID No. 3488, Seq. ID No. 3490, Seq. ID No. 3492, Seq. ID No. 3494, Seq. ID No. 3496, Seq. ID No. 3498, Seq. ID No. 3500, Seq. ID No. 3502, Seq. ID No. 3504, Seq. ID No. 3506, Seq. ID No. 3508, Seq. ID No. 3510, Seq. ID No. 3512, Seq. ID No. 3514, Seq. ID No. 3516, Seq. ID No. 3518, Seq. ID No. 3520, Seq. ID No. 3522, Seq. ID No. 3524, Seq. ID No. 3526, Seq. ID No. 3528, Seq. ID No. 3530, Seq. ID No. 3532, Seq. ID No. 3534, Seq. ID No. 3536, Seq. ID No. 3538, Seq. ID No. 3540, Seq. ID No. 3542, Seq. ID No. 3544, Seq. ID No. 3546, Seq. ID No. 3548, Seq. ID No. 3550, Seq. ID No. 3552, Seq. ID No. 3554, Seq. ID No. 3556, Seq. ID No. 3558, Seq. ID No. 3560, and Seq. ID No. 3562.

[0051] In another preferred embodiment, the polypeptide is selected from the Alloiococcus otitidis polypeptides identified by BlastP analysis to be associated with sporulation, and is selected from one of Seq. ID No. 1138, Seq. ID No. 1456, Seq. ID No. 2138, Seq. ID No. 2142, Seq. ID No. 2166, Seq. ID No. 2180, Seq. ID No. 2302, Seq. ID No. 2754, Seq. ID No. 4212, Seq. ID No. 4252, Seq. ID No. 4328, Seq. ID No. 4570, Seq. ID No. 4720, and Seq. ID No. 4730.

[0052] In another preferred embodiment, the polypeptide is selected from the Alloiococcus otitidis polypeptides identified by BlastP analysis as being encoded by unique ORFs, and is selected from one of Seq. ID No. 8, Seq. ID No. 20, Seq. ID No. 22, Seq. ID No. 24, Seq. ID No. 32, Seq. ID No. 40, Seq. ID No. 66, Seq. ID No. 68, Seq. ID No. 70, Seq. ID No. 92, Seq. ID No. 100, Seq. ID No. 106, Seq. ID No. 114, Seq. ID No. 116, Seq. ID No. 124, Seq. ID No. 126, Seq. ID No. 128, Seq. ID No. 132, Seq. ID No. 134, Seq. ID No. 140, Seq. ID No. 152, Seq. ID No. 160, Seq. ID No. 162, Seq. ID No. 164, Seq. ID No. 166, Seq. ID No. 170, Seq. ID No. 186, Seq. ID No. 190, Seq. ID No. 194, Seq. ID No. 230, Seq. ID No. 232, Seq. ID No. 256, Seq. ID No. 258, Seq. ID No. 260, Seq. ID No. 276, Seq. ID No. 338, Seq. ID No. 340, Seq. ID No. 348, Seq. ID No. 350, Seq. ID No. 358, Seq. ID No. 360, Seq. ID No. 370, Seq. ID No. 372, Seq. ID No. 378, Seq. ID No. 386, Seq. ID No. 388, Seq. ID No. 394, Seq. ID No. 400, Seq. ID No. 402, Seq. ID No. 404, Seq. ID No. 408, Seq. ID No. 420, Seq. ID No. 432, Seq. ID No. 478, Seq. ID No. 496, Seq. ID No. 508, Seq. ID No. 520, Seq. ID No. 542, Seq. ID No. 546, Seq. ID No. 548, Seq. ID No. 550, Seq. ID No. 558, Seq. ID No. 590, Seq. ID No. 618, Seq. ID No. 620, Seq. ID No. 634, Seq. ID No. 640, Seq. ID No. 642, Seq. ID No. 644, Seq. ID No. 646, Seq. ID No. 648, Seq. ID No. 652, Seq. ID No. 654, Seq. ID No. 656, Seq. ID No. 668, Seq. ID No. 692, Seq. ID No. 694, Seq. ID No. 696, Seq. ID No. 698, Seq. ID No. 716, Seq. ID No. 718, Seq. ID No. 720, Seq. ID No. 732, Seq. ID No. 734, Seq. ID No. 742, Seq. ID No. 744, Seq. ID No. 746, Seq. ID No. 748, Seq. ID No. 750, Seq. ID No. 752, Seq. ID No. 756, Seq. ID No. 758, Seq. ID No. 760, Seq. ID No. 762, Seq. ID No. 764, Seq. ID No. 766, Seq. ID No. 768, Seq. ID No. 802, Seq. ID No. 804, Seq. ID No. 806, Seq. ID No. 808, Seq. ID No. 810, Seq. ID No. 812, Seq. ID No. 814, Seq. ID No. 834, Seq. ID No. 842, Seq. ID No. 850, Seq. ID No. 852, Seq. ID No. 854, Seq. ID No. 856, Seq. ID No. 888, Seq. ID No. 890, Seq. ID No. 892, Seq. ID No. 904, Seq. ID No. 906, Seq. ID No. 910, Seq. ID No. 938, Seq. ID No. 942, Seq. ID No. 944, Seq. ID No. 952, Seq. ID No. 958, Seq. ID No. 974, Seq. ID No. 976, Seq. ID No. 988, Seq. ID No. 1006, Seq. ID No. 1008, Seq. ID No. 1010, Seq. ID No. 1012, Seq. ID No. 1020, Seq. ID No. 1026, Seq. ID No. 1028, Seq. ID No. 1046, Seq. ID No. 1048, Seq. ID No. 1072, Seq. ID No. 1074, Seq. ID No. 1078, Seq. ID No. 1106, Seq. ID No. 1108, Seq. ID No. 1112, Seq. ID No. 1132, Seq. ID No. 1136, Seq. ID No. 1140, Seq. ID No. 1152, Seq. ID No. 1154, Seq. ID No. 1166, Seq. ID No. 1168, Seq. ID No. 1170, Seq. ID No. 1172, Seq. ID No. 1174, Seq. ID No. 1182, Seq. ID No. 1184, Seq. ID No. 1186, Seq. ID No. 1188, Seq. ID No. 1190, Seq. ID No. 1192, Seq. ID No. 1194, Seq. ID No. 1196, Seq. ID No. 1198, Seq. ID No. 1200, Seq. ID No. 1202, Seq. ID No. 1204, Seq. ID No. 1208, Seq. ID No. 1214, Seq. ID No. 1228, Seq. ID No. 1230, Seq. ID No. 1240, Seq. ID No. 1244, Seq. ID No. 1246, Seq. ID No. 1248, Seq. ID No. 1250, Seq. ID No. 1260, Seq. ID No. 1266, Seq. ID No. 1268, Seq. ID No. 1270, Seq. ID No. 1272, Seq. ID No. 1274, Seq. ID No. 1276, Seq. ID No. 1278, Seq. ID No. 1280, Seq. ID No. 1282, Seq. ID No. 1284, Seq. ID No. 1286, Seq. ID No. 1288, Seq. ID No. 1290, Seq. ID No. 1292, Seq. ID No. 1294, Seq. ID No. 1296, Seq. ID No. 1298, Seq. ID No. 1300, Seq. ID No. 1302, Seq. ID No. 1304, Seq. ID No. 1306, Seq. ID No. 1308, Seq. ID No. 1310, Seq. ID No. 1312, Seq. ID No. 1314, Seq. ID No. 1320, Seq. ID No. 1322, Seq. ID No. 1324, Seq. ID No. 1326, Seq. ID No. 1328, Seq. ID No. 1338, Seq. ID No. 1342, Seq. ID No. 1344, Seq. ID No. 1348, Seq. ID No. 1350, Seq. ID No. 1352, Seq. ID No. 1354, Seq. ID No. 1356, Seq. ID No. 1372, Seq. ID No. 1380, Seq. ID No. 1382, Seq. ID No. 1390, Seq. ID No. 1398, Seq. ID No. 1400, Seq. ID No. 1402, Seq. ID No. 1418, Seq. ID No. 1420, Seq. ID No. 1422, Seq. ID No. 1424, Seq. ID No. 1440, Seq. ID No. 1446, Seq. ID No. 1448, Seq. ID No. 1458, Seq. ID No. 1466, Seq. ID No. 1480, Seq. ID No. 1512, Seq. ID No. 1552, Seq. ID No. 1554, Seq. ID No. 1556, Seq. ID No. 1558, Seq. ID No. 1580, Seq. ID No. 1610, Seq. ID No. 1622, Seq. ID No. 1624, Seq. ID No. 1626, Seq. ID No. 1628, Seq. ID No. 1630, Seq. ID No. 1632, Seq. ID No. 1634, Seq. ID No. 1640, Seq. ID No. 1644, Seq. ID No. 1656, Seq. ID No. 1668, Seq. ID No. 1672, Seq. ID No. 1694, Seq. ID No. 1696, Seq. ID No. 1702, Seq. ID No. 1704, Seq. ID No. 1706, Seq. ID No. 1722, Seq. ID No. 1724, Seq. ID No. 1732, Seq. ID No. 1738, Seq. ID No. 1744, Seq. ID No. 1760, Seq. ID No. 1764, Seq. ID No. 1774, Seq. ID No. 1776, Seq. ID No. 1778, Seq. ID No. 1780, Seq. ID No. 1782, Seq. ID No. 1800, Seq. ID No. 1802, Seq. ID No. 1804, Seq. ID No. 1808, Seq. ID No. 1824, Seq. ID No. 1832, Seq. ID No. 1852, Seq. ID No. 1858, Seq. ID No. 1876, Seq. ID No. 1900, Seq. ID No. 1916, Seq. ID No. 1928, Seq. ID No. 1930, Seq. ID No. 1974, Seq. ID No. 1978, Seq. ID No. 1982, Seq. ID No. 2006, Seq. ID No.;2008, Seq. ID No. 2010, Seq. ID No. 2012, Seq. ID No. 2018, Seq. ID No. 2020, Seq. ID No. 2024, Seq. ID No. 2026, Seq. ID No. 2028, Seq. ID No. 2040, Seq. ID No. 2042, Seq. ID No. 2044, Seq. ID No. 2046, Seq. ID No. 2050, Seq. ID No. 2082, Seq. ID No. 2084, Seq. ID No. 2086, Seq. ID No. 2106, Seq. ID No. 2108, Seq. ID No. 2110, Seq. ID No. 2112, Seq. ID No. 2130, Seq. ID No. 2132, Seq. ID No. 2134, Seq. ID No. 2146, Seq. ID No. 2156, Seq. ID No. 2158, Seq. ID No. 2160, Seq. ID No. 2162, Seq. ID No. 2172, Seq. ID No. 2188, Seq. ID No. 2190, Seq. ID No. 2202, Seq. ID No. 2204, Seq. ID No. 2210, Seq. ID No. 2212, Seq. ID No. 2220, Seq. ID No. 2226, Seq. ID No. 2244, Seq. ID No. 2246, Seq. ID No. 2248, Seq. ID No. 2250, Seq. ID No. 2252, Seq. ID No. 2256, Seq. ID No. 2278, Seq. ID No. 2280, Seq. ID No. 2342, Seq. ID No. 2352, Seq. ID No. 2354, Seq. ID No. 2356, Seq. ID No. 2358, Seq. ID No. 2360, Seq. ID No. 2366, Seq. ID No. 2368, Seq. ID No. 2372, Seq. ID No. 2373, Seq. ID No. 2394, Seq. ID No. 2396, Seq. ID No. 2426, Seq. ID No. 2428, Seq. ID No. 2432, Seq. ID No. 2440, Seq. ID No. 2442, Seq. ID No. 2444, Seq. ID No. 2448, Seq. ID No. 2460, Seq. ID No. 2480, Seq. ID No. 2494, Seq. ID No. 2502, Seq. ID No. 2504, Seq. ID No. 2522, Seq. ID No. 2524, Seq. ID No. 2528, Seq. ID No. 2592, Seq. ID No. 2602, Seq. ID No. 2604, Seq. ID No. 2612, Seq. ID No. 2628, Seq. ID No. 2630, Seq. ID No. 2654, Seq. ID No. 2662, Seq. ID No. 2692, Seq. ID No. 2696, Seq. ID No. 2698, Seq. ID No. 2718, Seq. ID No. 2730, Seq. ID No. 2732, Seq. ID No. 2734, Seq. ID No. 2736, Seq. ID No. 2740, Seq. ID No. 2742, Seq. ID No. 2744, Seq. ID No. 2778, Seq. ID No. 2780, Seq. ID No. 2782, Seq. ID No. 2784, Seq. ID No. 2802, Seq. ID No. 2806, Seq. ID No. 2808, Seq. ID No. 2810, Seq. ID No. 2812, Seq. ID No. 2814, Seq. ID No. 2816, Seq. ID No. 2818, Seq. ID No. 2820, Seq. ID No. 2830, Seq. ID No. 2832, Seq. ID No. 2834, Seq. ID No. 2836, Seq. ID No. 2838, Seq. ID No. 2840, Seq. ID No. 2842, Seq. ID No. 2846, Seq. ID No. 2850, Seq. ID No. 2852, Seq. ID No. 2854, Seq. ID No. 2856, Seq. ID No. 2858, Seq. ID No. 2860, Seq. ID No. 2862, Seq. ID No. 2866, Seq. ID No. 2874, Seq. ID No. 2876, Seq. ID No. 2878, Seq. ID No. 2884, Seq. ID No. 2886, Seq. ID No. 2888, Seq. ID No. 2890, Seq. ID No. 2894, Seq. ID No. 2896, Seq. ID No. 2904, Seq. ID No. 2910, Seq. ID No. 2936, Seq. ID No. 2938, Seq. ID No. 2940, Seq. ID No. 2942, Seq. ID No. 2944, Seq. ID No. 2946, Seq. ID No. 2948, Seq. ID No. 2950, Seq. ID No. 2952, Seq. ID No. 2954, Seq. ID No. 2966, Seq. ID No. 2968, Seq. ID No. 2974, Seq. ID No. 2976, Seq. ID No. 2978, Seq. ID No. 2982, Seq. ID No. 2984, Seq. ID No. 2986, Seq. ID No. 2988, Seq. ID No. 2990, Seq. ID No. 2992, Seq. ID No. 3002, Seq. ID No. 3008, Seq. ID No. 3010, Seq. ID No. 3012, Seq. ID No. 3022, Seq. ID No. 3024, Seq. ID No. 3042, Seq. ID No. 3046, Seq. ID No. 3072, Seq. ID No. 3088, Seq. ID No. 3106, Seq. ID No. 3108, Seq. ID No. 3120, Seq. ID No. 3122, Seq. ID No. 3124, Seq. ID No. 3152, Seq. ID No. 3154, Seq. ID No. 3168, Seq. ID No. 3174, Seq. ID No. 3176, Seq. ID No. 3178, Seq. ID No. 3182, Seq. ID No. 3194, Seq. ID No. 3214, Seq. ID No. 3216, Seq. ID No. 3218, Seq. ID No. 3220, Seq. ID No. 3222, Seq. ID No. 3224, Seq. ID No. 3232, Seq. ID No. 3234, Seq. ID No. 3236, Seq. ID No. 3238, Seq. ID No. 3240, Seq. ID No. 3242, Seq. ID No. 3244, Seq. ID No. 3246, Seq. ID No. 3248, Seq. ID No. 3250, Seq. ID No. 3262, Seq. ID No. 3264, Seq. ID No. 3266, Seq. ID No. 3268, Seq. ID No. 3270, Seq. ID No. 3272, Seq. ID No. 3274, Seq. ID No. 3276, Seq. ID No. 3278, Seq. ID No. 3326, Seq. ID No. 3332, Seq. ID No. 3340, Seq. ID No. 3342, Seq. ID No. 3350, Seq. ID No. 3362, Seq. ID No. 3364, Seq. ID No. 3370, Seq. ID No. 3372, Seq. ID No. 3390, Seq. ID No. 3404, Seq. ID No. 3418, Seq. ID No. 3420, Seq. ID No. 3422, Seq. ID No. 3434, Seq. ID No. 3438, Seq. ID No. 3442, Seq. ID No. 3444, Seq. ID No. 3446, Seq. ID No. 3448, Seq. ID No. 3474, Seq. ID No. 3482, Seq. ID No. 3484, Seq. ID No. 3490, Seq. ID No. 3504, Seq. ID No. 3506, Seq. ID No. 3510, Seq. ID No. 3512, Seq. ID No. 3524, Seq. ID No. 3526, Seq. ID No. 3532, Seq. ID No. 3534, Seq. ID No. 3540, Seq. ID No. 3542, Seq. ID No. 3544, Seq. ID No. 3546, Seq. ID No. 3548, Seq. ID No. 3556, Seq. ID No. 3558, Seq. ID No. 3564, Seq. ID No. 3566, Seq. ID No. 3572, Seq. ID No. 3574, Seq. ID No. 3582, Seq. ID No. 3588, Seq. ID No. 3592, Seq. ID No. 3594, Seq. ID No. 3596, Seq. ID No. 3612, Seq. ID No. 3614, Seq. ID No. 3618, Seq. ID No. 3620, Seq. ID No. 3622, Seq. ID No. 3624, Seq. ID No. 3626, Seq. ID No. 3632, Seq. ID No. 3638, Seq. ID No. 3640, Seq. ID No. 3656, Seq. ID No. 3658, Seq. ID No. 3660, Seq. ID No. 3662, Seq. ID No. 3678, Seq. ID No. 3680, Seq. ID No. 3684, Seq. ID No. 3686, Seq. ID No. 3702, Seq. ID No. 3704, Seq. ID No. 3718, Seq. ID No. 3720, Seq. ID No. 3722, Seq. ID No. 3724, Seq. ID No. 3730, Seq. ID No. 3732, Seq. ID No. 3734, Seq. ID No. 3736, Seq. ID No. 3738, Seq. ID No. 3740, Seq. ID No. 3742, Seq. ID No. 3750, Seq. ID No. 3752, Seq. ID No. 3754, Seq. ID No. 3756, Seq. ID No. 3762, Seq. ID No. 3782, Seq. ID No. 3784, Seq. ID No. 3786, Seq. ID No. 3788, Seq. ID No. 3790, Seq. ID No. 3792, Seq. ID No. 3800, Seq. ID No. 3808, Seq. ID No. 3810, Seq. ID No. 3812, Seq. ID No. 3814, Seq. ID No. 3816, Seq. ID No. 3818, Seq. ID No. 3828, Seq. ID No. 3830, Seq. ID No. 3832, Seq. ID No. 3834, Seq. ID No. 3836, Seq. ID No. 3850, Seq. ID No. 3880, Seq. ID No. 3882, Seq. ID No. 3896, Seq. ID No. 3904, Seq. ID No. 3910, Seq. ID No. 3916, Seq. ID No. 3940, Seq. ID No. 3960, Seq. ID No. 3962, Seq. ID No. 3964, Seq. ID No. 3966, Seq. ID No. 3974, Seq. ID No. 3978, Seq. ID No. 3980, Seq. ID No. 3994, Seq. ID No. 3996, Seq. ID No. 3998, Seq. ID No. 4006, Seq. ID No. 4008, Seq. ID No. 4010, Seq. ID No. 4042, Seq. ID No. 4044, Seq. ID No. 4046, Seq. ID No. 4070, Seq. ID No. 4078, Seq. ID No. 4098, Seq. ID No. 4114, Seq. ID No. 4124, Seq. ID No. 4132, Seq. ID No. 4134, Seq. ID No. 4136, Seq. ID No. 4140, Seq. ID No. 4152, Seq. ID No. 4154, Seq. ID No. 4156, Seq. ID No. 4182, Seq. ID No. 4222, Seq. ID No. 4242, Seq. ID No. 4254, Seq. ID No. 4258, Seq. ID No. 4260, Seq. ID No. 4262, Seq. ID No. 4264, Seq. ID No. 4266, Seq. ID No. 4270, Seq. ID No. 4276, Seq. ID No. 4278, Seq. ID No. 4280, Seq. ID No. 4282, Seq. ID No. 4286, Seq. ID No. 4288, Seq. ID No. 4298, Seq. ID No. 4306, Seq. ID No. 4308, Seq. ID No. 4364, Seq. ID No. 4366, Seq. ID No. 4372, Seq. ID No. 4374, Seq. ID No. 4396, Seq. ID No. 4400, Seq. ID No. 4404, Seq. ID No. 4426, Seq. ID No. 4438, Seq. ID No. 4440, Seq. ID No. 4442, Seq. ID No. 4454, Seq. ID No. 4456, Seq. ID No. 4514, Seq. ID No. 4516, Seq. ID No. 4552, Seq. ID No. 4562, Seq. ID No. 4574, Seq. ID No. 4576, Seq. ID No. 4588, Seq. ID No. 4590, Seq. ID No. 4592, Seq. ID No. 4594, Seq. ID No. 4596, Seq. ID No. 4618, Seq. ID No. 4620, Seq. ID No. 4622, Seq. ID No. 4626, Seq. ID No. 4628, Seq. ID No. 4634, Seq. ID No. 4636, Seq. ID No. 4638, Seq. ID No. 4640, Seq. ID No. 4660, Seq. ID No. 4682, Seq. ID No. 4688, Seq. ID No. 4696, Seq. ID No. 4700, Seq. ID No. 4702, Seq. ID No. 4722, Seq. ID No. 4736, Seq. ID No. 4738, Seq. ID No. 4742, Seq. ID No. 4784, Seq. ID No. 4790, Seq. ID No. 4806, Seq. ID No. 4812, Seq. ID No. 4818, Seq. ID No. 4820, Seq. ID No. 4822, Seq. ID No. 4824, Seq. ID No. 4836, Seq. ID No. 4854, Seq. ID No. 4886, Seq. ID No. 4914, Seq. ID No. 4924, Seq. ID No. 4950, Seq. ID No. 4952, Seq. ID No. 4976, Seq. ID No. 4982, Seq. ID No. 4984, Seq. ID No. 4988, Seq. ID No. 4994, Seq. ID No. 5000, Seq. ID No. 5002, Seq. ID No. 5012, Seq. ID No. 5014, Seq. ID No. 5024, Seq. ID No. 5032, Seq. ID No. 5034, Seq. ID No. 5036, Seq. ID No. 5038, Seq. ID No. 5042, Seq. ID No. 5044, Seq. ID No. 5054, Seq. ID No. 5062, Seq. ID No. 5064, Seq. ID No. 5086, Seq. ID No. 5094, Seq. ID No. 5152, Seq. ID No. 5154, Seq. ID No. 5160, Seq. ID No. 5162, Seq. ID No. 5168, Seq. ID No. 5174, Seq. ID No. 5176, Seq. ID No. 5178, Seq. ID No. 5190, Seq. ID No. 5192, Seq. ID No. 5194, Seq. ID No. 5198, Seq. ID No. 5200, Seq. ID No. 5222, Seq. ID No. 5224, Seq. ID No. 5226, Seq. ID No. 5228, Seq. ID No. 5238, Seq. ID No. 5268, Seq. ID No. 5270, Seq. ID No. 5272, Seq. ID No. 5282, Seq. ID No. 5302, Seq. ID No. 5304, Seq. ID No. 5316, Seq. ID No. 5322, Seq. ID No. 5328, Seq. ID No. 5348, Seq. ID No. 5386, Seq. ID No. 5446, Seq. ID No. 5448, Seq. ID No. 5460, Seq. ID No. 5466, Seq. ID No. 5468, Seq. ID No. 5480, Seq. ID No. 5482, Seq. ID No. 5486, Seq. ID No. 5488, Seq. ID No. 5516, Seq. ID No. 5518, Seq. ID No. 5534, Seq. ID No. 5544, Seq. ID No. 5546, Seq. ID No. 5550, Seq. ID No. 5570, Seq. ID No. 5578, Seq. ID No. 5594, Seq. ID No. 5596, Seq. ID No. 5610, Seq. ID No. 5624, Seq. ID No. 5626, Seq. ID No. 5640, Seq. ID No. 5642, Seq. ID No. 5644, Seq. ID No. 5650, Seq. ID No. 5660, Seq. ID No. 5662, Seq. ID No. 5664, Seq. ID No. 5668, Seq. ID No. 5672, Seq. ID No. 5688, Seq. ID No. 5690, Seq. ID No. 5704, Seq. ID No. 5706, Seq. ID No. 5710, Seq. ID No. 5712, Seq. ID No. 5738, Seq. ID No. 5740, Seq. ID No. 5746, Seq. ID No. 5752, Seq. ID No. 5764, Seq. ID No. 5798, Seq. ID No. 5812, Seq. ID No. 5814, Seq. ID No. 5816, Seq. ID No. 5828, Seq. ID No. 5830, Seq. ID No. 5844, Seq. ID No. 5846, Seq. ID No. 5874, Seq. ID No. 5880, Seq. ID No. 5884, Seq. ID No. 5886, Seq. ID No. 5888, Seq. ID No. 5890, Seq. ID No. 5892, Seq. ID No. 5932, Seq. ID No. 5956, Seq. ID No. 5964, Seq. ID No. 5966, Seq. ID No. 5976, Seq. ID No. 5984, Seq. ID No. 5986, Seq. ID No. 5988, Seq. ID No. 5990, Seq. ID No. 6006, Seq. ID No. 6014, Seq. ID No. 6032, Seq. ID No. 6036, Seq. ID No. 6046, Seq. ID No. 6060, Seq. ID No. 6062, Seq. ID No. 6064, Seq. ID No. 6074, Seq. ID No. 6082, Seq. ID No. 6092, Seq. ID No. 6094, Seq. ID No. 6128, Seq. ID No. 6160, Seq. ID No. 6198, Seq. ID No. 6200, Seq. ID No. 6204, Seq. ID No. 6218, Seq. ID No. 6222, Seq. ID No. 6224, Seq. ID No. 6238, Seq. ID No. 6240, Seq. ID No. 6242, Seq. ID No. 6246, Seq. ID No. 6248, Seq. ID No. 6250, Seq. ID No. 6260, Seq. ID No. 6266, Seq. ID No. 6268, Seq. ID No. 6274, Seq. ID No. 6284, Seq. ID No. 6286, Seq. ID No. 6324, Seq. ID No. 6326, Seq. ID No. 6328, Seq. ID No. 6362, Seq. ID No. 6364, Seq. ID No. 6378, Seq. ID No. 6382, Seq. ID No. 6402, Seq. ID No. 6404, Seq. ID No. 6420, Seq. ID No. 6426, Seq. ID No. 6428, Seq. ID No. 6430, Seq. ID No. 6432, Seq. ID No. 6434, Seq. ID No. 6436, Seq. ID No. 6438, Seq. ID No. 6440, Seq. ID No. 6448, Seq. ID No. 6450, Seq. ID No. 6452, Seq. ID No. 6454, Seq. ID No. 6456, Seq. ID No. 6458, Seq. ID No. 6466, Seq. ID No. 6468, Seq. ID No. 6470, Seq. ID No. 6472, Seq. ID No. 6474, Seq. ID No. 6476, Seq. ID No. 6478, Seq. ID No. 6480, Seq. ID No. 6482, Seq. ID No. 6484, Seq. ID No. 6486, Seq. ID No. 6488, Seq. ID No. 6490, Seq. ID No. 6492, Seq. ID No. 6496, Seq. ID No. 6498, Seq. ID No. 6508, Seq. ID No. 6518, Seq. ID No. 6520, Seq. ID No. 6522, Seq. ID No. 6524, Seq. ID No. 6526, Seq. ID No. 6528, Seq. ID No. 6530, Seq. ID No. 6534, Seq. ID No. 6540, Seq. ID No. 6542, Seq. ID No. 6544, Seq. ID No. 6556, Seq. ID No. 6558, Seq. ID No. 6562, Seq. ID No. 6564, Seq. ID No. 6566, Seq. ID No. 6568, Seq. ID No. 6570, Seq. ID No. 6572, Seq. ID No. 6574, Seq. ID No. 6582, Seq. ID No. 6584, Seq. ID No. 6632, Seq. ID No. 6636, Seq. ID No. 6638, Seq. ID No. 6640, Seq. ID No. 6644, Seq. ID No. 6646, Seq. ID No. 6648, and Seq. ID No. 6650.

[0053] In yet another preferred embodiment, the polypeptide is selected from the Alloiococcus otitidis polypeptides identified by Glimmer™ ORF finder program, and is selected from one of Seq. ID No. 2, Seq. ID No. 6, Seq. ID No. 12, Seq. ID No. 14, Seq. ID No. 16, Seq. ID No. 18, Seq. ID No. 26, Seq. ID No. 28, Seq. ID No. 30, Seq. ID No. 36, Seq. ID No. 38, Seq. ID No. 42, Seq. ID No. 44, Seq. ID No. 48, Seq. ID No. 52, Seq. ID No. 54, Seq. ID No. 60, Seq. ID No. 64, Seq. ID No. 70, Seq. ID No. 74, Seq. ID No. 76, Seq. ID No. 82, Seq. ID No. 84, Seq. ID No. 90, Seq. ID No. 94, Seq. ID No. 98, Seq. ID No. 104, Seq. ID No. 112, Seq. ID No. 122, Seq. ID No. 126, Seq. ID No. 130, Seq. ID No. 136, Seq. ID No. 138, Seq. ID No. 146, Seq. ID No. 150, Seq. ID No. 158, Seq. ID No. 168, Seq. ID No. 174, Seq. ID No. 184, Seq. ID No. 188, Seq. ID No. 190, Seq. ID No. 192, Seq. ID No. 196, Seq. ID No. 198, Seq. ID No. 204, Seq. ID No. 208, Seq. ID No. 216, Seq. ID No. 220, Seq. ID No. 224, Seq. ID No. 226, Seq. ID No. 228, Seq. ID No. 232, Seq. ID No. 234, Seq. ID No. 240, Seq. ID No. 242, Seq. ID No. 248, Seq. ID No. 254, Seq. ID No. 262, Seq. ID No. 266, Seq. ID No. 270, Seq. ID No. 274, Seq. ID No. 276, Seq. ID No. 278, Seq. ID No. 284, Seq. ID No. 292, Seq. ID No. 294, Seq. ID No. 298, Seq. ID No. 302, Seq. ID No. 308, Seq. ID No. 310, Seq. ID No. 314, Seq. ID No. 318, Seq. ID No. 322, Seq. ID No. 326, Seq. ID No. 336, Seq. ID No. 344, Seq. ID No. 346, Seq. ID No. 354, Seq. ID No. 356, Seq. ID No. 362, Seq. ID No. 364, Seq. ID No. 368, Seq. ID No. 376, Seq. ID No. 380, Seq. ID No. 384, Seq. ID No. 390, Seq. ID No. 392, Seq. ID No. 398, Seq. ID No. 406, Seq. ID No. 412, Seq. ID No. 416, Seq. ID No. 418, Seq. ID No. 424, Seq. ID No. 426, Seq. ID No. 428, Seq. ID No. 430, Seq. ID No. 436, Seq. ID No. 438, Seq. ID No. 440, Seq. ID No. 442, Seq. ID No. 446, Seq. ID No. 448, Seq. ID No. 454, Seq. ID No. 462, Seq. ID No. 464, Seq. ID No. 472, Seq. ID No. 486, Seq. ID No. 502, Seq. ID No. 506, Seq. ID No. 512, Seq. ID No. 516, Seq. ID No. 518, Seq. ID No. 522, Seq. ID No. 524, Seq. ID No. 532, Seq. ID No. 534, Seq. ID No. 540, Seq. ID No. 542, Seq. ID No. 544, Seq. ID No. 552, Seq. ID No. 556, Seq. ID No. 562, Seq. ID No. 566, Seq. ID No. 570, Seq. ID No. 576, Seq. ID No. 580, Seq. ID No. 588, Seq. ID No. 594, Seq. ID No. 598, Seq. ID No. 604, Seq. ID No. 606, Seq. ID No. 610, Seq. ID No. 612, Seq. ID No. 614, Seq. ID No. 616, Seq. ID No. 624, Seq. ID No. 628, Seq. ID No. 630, Seq. ID No. 632, Seq. ID No. 636, Seq. ID No. 638, Seq. ID No. 648, Seq. ID No. 650, Seq. ID No. 662, Seq. ID No. 670, Seq. ID No. 674, Seq. ID No. 676, Seq. ID No. 682, Seq. ID No. 684, Seq. ID No. 690, Seq. ID No. 702, Seq. ID No. 704, Seq. ID No. 710, Seq. ID No. 714, Seq. ID No. 730, Seq. ID No. 734, Seq. ID No. 736, Seq. ID No. 738, Seq. ID No. 742, Seq. ID No. 748, Seq. ID No. 752, Seq. ID No. 754, Seq. ID No. 760, Seq. ID No. 766, Seq. ID No. 768, Seq. ID No. 772, Seq. ID No. 782, Seq. ID No. 784, Seq. ID No. 788, Seq. ID No. 792, Seq. ID No. 796, Seq. ID No. 800, Seq. ID No. 808, Seq. ID No. 818, Seq. ID No. 820, Seq. ID No. 824, Seq. ID No. 828, Seq. ID No. 832, Seq. ID No. 836, Seq. ID No. 838, Seq. ID No. 840, Seq. ID No. 848, Seq. ID No. 852, Seq. ID No. 856, Seq. ID No. 860, Seq. ID No. 868, Seq. ID No. 872, Seq. ID No. 876, Seq. ID No. 882, Seq. ID No. 886, Seq. ID No. 890, Seq. ID No. 892, Seq. ID No. 896, Seq. ID No. 902, Seq. ID No. 908, Seq. ID No. 916, Seq. ID No. 920, Seq. ID No. 926, Seq. ID No. 930, Seq. ID No. 936, Seq. ID No. 940, Seq. ID No. 950, Seq. ID No. 952, Seq. ID No. 956, Seq. ID No. 962, Seq. ID No. 966, Seq. ID No. 968, Seq. ID No. 972, Seq. ID No. 986, Seq. ID No. 994, Seq. ID No. 998, Seq. ID No. 1004, Seq. ID No. 1006, Seq. ID No. 1010, Seq. ID No. 1018, Seq. ID No. 1024, Seq. ID No. 1040, Seq. ID No. 1042, Seq. ID No. 1044, Seq. ID No. 1052, Seq. ID No. 1054, Seq. ID No. 1058, Seq. ID No. 1062, Seq. ID No. 1066, Seq. ID No. 1068, Seq. ID No. 1070, Seq. ID No. 1074, Seq. ID No. 1076, Seq. ID No. 1084, Seq. ID No. 1088, Seq. ID No. 1092, Seq. ID No. 1094, Seq. ID No. 1098, Seq. ID No. 1100, Seq. ID No. 1104, Seq. ID No. 1110, Seq. ID No. 1116, Seq. ID No. 1118, Seq. ID No. 1124, Seq. ID No. 1130, Seq. ID No. 1134, Seq. ID No. 1138, Seq. ID No. 1144, Seq. ID No. 1148, Seq. ID No. 1150, Seq. ID No. 1156, Seq. ID No. 1158, Seq. ID No. 1160, Seq. ID No. 1164, Seq. ID No. 1172, Seq. ID No. 1180, Seq. ID No. 1182, Seq. ID No. 1188, Seq. ID No. 1194, Seq. ID No. 1200, Seq. ID No. 1206, Seq. ID No. 1212, Seq. ID No. 1218, Seq. ID No. 1222, Seq. ID No. 1224, Seq. ID No. 1226, Seq. ID No. 1232, Seq. ID No. 1234, Seq. ID No. 1238, Seq. ID No. 1242, Seq. ID No. 1254, Seq. ID No. 1258, Seq. ID No. 1264, Seq. ID No. 1272, Seq. ID No. 1282, Seq. ID No. 1318, Seq. ID No. 1324, Seq. ID No. 1332, Seq. ID No. 1336, Seq. ID No. 1340, Seq. ID No. 1346, Seq. ID No. 1348, Seq. ID No. 1362, Seq. ID No. 1370, Seq. ID No. 1378, Seq. ID No. 1380, Seq. ID No. 1388, Seq. ID No. 1394, Seq. ID No. 1396, Seq. ID No. 1400, Seq. ID No. 1404, Seq. ID No. 1406, Seq. ID No. 1412, Seq. ID No. 1414, Seq. ID No. 1416, Seq. ID No. 1420, Seq. ID No. 1426, Seq. ID No. 1428, Seq. ID No. 1430, Seq. ID No. 1432, Seq. ID No. 1434, Seq. ID No. 1438, Seq. ID No. 1444, Seq. ID No. 1450, Seq. ID No. 1452, Seq. ID No. 1456, Seq. ID No. 1458, Seq. ID No. 1460, Seq. ID No. 1464, Seq. ID No. 1466, Seq. ID No. 1470, Seq. ID No. 1472, Seq. ID No. 1474, Seq. ID No. 1476, Seq. ID No. 1478, Seq. ID No. 1486, Seq. ID No. 1488, Seq. ID No. 1492, Seq. ID No. 1494, Seq. ID No. 1496, Seq. ID No. 1498, Seq. ID No. 1502, Seq. ID No. 1506, Seq. ID No. 1508, Seq. ID No. 1510, Seq. ID No. 1518, Seq. ID No. 1526, Seq. ID No. 1528, Seq. ID No. 1532, Seq. ID No. 1540, Seq. ID No. 1542, Seq. ID No. 1544, Seq. ID No. 1550, Seq. ID No. 1562, Seq. ID No. 1564, Seq. ID No. 1568, Seq. ID No. 1572, Seq. ID No. 1574, Seq. ID No. 1578, Seq. ID No. 1582, Seq. ID No. 1590, Seq. ID No. 1594, Seq. ID No. 1596, Seq. ID No. 1598, Seq. ID No. 1604, Seq. ID No. 1608, Seq. ID No. 1612, Seq. ID No. 1614, Seq. ID No. 1620, Seq. ID No. 1624, Seq. ID No. 1628, Seq. ID No. 1632, Seq. ID No. 1638, Seq. ID No. 1640, Seq. ID No. 1642, Seq. ID No. 1648, Seq. ID No. 1654, Seq. ID No. 1658, Seq. ID No. 1666, Seq. ID No. 1670, Seq. ID No. 1682, Seq. ID No. 1686, Seq. ID No. 1690, Seq. ID No. 1692, Seq. ID No. 1698, Seq. ID No. 1700, Seq. ID No. 1708, Seq. ID No. 1712, Seq. ID No. 1714, Seq. ID No. 1720, Seq. ID No. 1724, Seq. ID No. 1730, Seq. ID No. 1736, Seq. ID No. 1738, Seq. ID No. 1742, Seq. ID No. 1748, Seq. ID No. 1752, Seq. ID No. 1758, Seq. ID No. 1760, Seq. ID No. 1762, Seq. ID No. 1772, Seq. ID No. 1778, Seq. ID No. 1786, Seq. ID No. 1790, Seq. ID No. 1792, Seq. ID No. 1798, Seq. ID No. 1802, Seq. ID No. 1804, Seq. ID No. 1806, Seq. ID No. 1812, Seq. ID No. 1818, Seq. ID No. 1820, Seq. ID No. 1822, Seq. ID No. 1826, Seq. ID No. 1830, Seq. ID No. 1838, Seq. ID No. 1844, Seq. ID No. 1846, Seq. ID No. 1848, Seq. ID No. 1850, Seq. ID No. 1852, Seq. ID No. 1856, Seq. ID No. 1860, Seq. ID No. 1864, Seq. ID No. 1866, Seq. ID No. 1868, Seq. ID No. 1872, Seq. ID No. 1874, Seq. ID No. 1878, Seq. ID No. 1886, Seq. ID No. 1888, Seq. ID No. 1890, Seq. ID No. 1896, Seq. ID No. 1898, Seq. ID No. 1900, Seq. ID No. 1904, Seq. ID No. 1906, Seq. ID No. 1914, Seq. ID No. 1920, Seq. ID No. 1924, Seq. ID No. 1926, Seq. ID No. 1932, Seq. ID No. 1936, Seq. ID No. 1938, Seq. ID No. 1944, Seq. ID No. 1946, Seq. ID No. 1950, Seq. ID No. 1954, Seq. ID No. 1958, Seq. ID No. 1960, Seq. ID No. 1962, Seq. ID No. 1966, Seq. ID No. 1968, Seq. ID No. 1972, Seq. ID No. 1976, Seq. ID No. 1980, Seq. ID No. 1984, Seq. ID No. 1988, Seq. ID No. 1990, Seq. ID No. 1992, Seq. ID No. 2000, Seq. ID No. 2002, Seq. ID No. 2004, Seq. ID No. 2010, Seq. ID No. 2016, Seq. ID No. 2020, Seq. ID No. 2022, Seq. ID No. 2032, Seq. ID No. 2036, Seq. ID No. 2038, Seq. ID No. 2046, Seq. ID No. 2048, Seq. ID No. 2056, Seq. ID No. 2060, Seq. ID No. 2066, Seq. ID No. 2068, Seq. ID No. 2070, Seq. ID No. 2072, Seq. ID No. 2074, Seq. ID No. 2080, Seq. ID No. 2092, Seq. ID No. 2094, Seq. ID No. 2098, Seq. ID No. 2100, Seq. ID No. 2104, Seq. ID No. 2116, Seq. ID No. 2120, Seq. ID No. 2128, Seq. ID No. 2136, Seq. ID No. 2138, Seq. ID No. 2142, Seq. ID No. 2144, Seq. ID No. 2148, Seq. ID No. 2154, Seq. ID No. 2160, Seq. ID No. 2162, Seq. ID No. 2166, Seq. ID No. 2170, Seq. ID No. 2180, Seq. ID No. 2184, Seq. ID No. 2186, Seq. ID No. 2190, Seq. ID No. 2192, Seq. ID No. 2194, Seq. ID No. 2196, Seq. ID No. 2200, Seq. ID No. 2208, Seq. ID No. 2218, Seq. ID No. 2220, Seq. ID No. 2222, Seq. ID No. 2224, Seq. ID No. 2228, Seq. ID No. 2230, Seq. ID No. 2232, Seq. ID No. 2234, Seq. ID No. 2242, Seq. ID No. 2246, Seq. ID No. 2252, Seq. ID No. 2254, Seq. ID No. 2258, Seq. ID No. 2260, Seq. ID No. 2264, Seq. ID No. 2268, Seq. ID No. 2270, Seq. ID No. 2276, Seq. ID No. 2282, Seq. ID No. 2288, Seq. ID No. 2298, Seq. ID No. 2300, Seq. ID No. 2302, Seq. ID No. 2316, Seq. ID No. 2330, Seq. ID No. 2334, Seq. ID No. 2336, Seq. ID No. 2340, Seq. ID No. 2344, Seq. ID No. 2346, Seq. ID No. 2350, Seq. ID No. 2352, Seq. ID No. 2358, Seq. ID No. 2360, Seq. ID No. 2364, Seq. ID No. 2366, Seq. ID No. 2370, Seq. ID No. 2374, Seq. ID No. 2382, Seq. ID No. 2392, Seq. ID No. 2400, Seq. ID No. 2402, Seq. ID No. 2406, Seq. ID No. 2410, Seq. ID No. 2416, Seq. ID No. 2418, Seq. ID No. 2422, Seq. ID No. 2424, Seq. ID No. 2428, Seq. ID No. 2430, Seq. ID No. 2432, Seq. ID No. 2436, Seq. ID No. 2438, Seq. ID No. 2440, Seq. ID No. 2444, Seq. ID No. 2446, Seq. ID No. 2450, Seq. ID No. 2452, Seq. ID No. 2454, Seq. ID No. 2458, Seq. ID No. 2464, Seq. ID No. 2466, Seq. ID No. 2470, Seq. ID No. 2472, Seq. ID No. 2476, Seq. ID No. 2478, Seq. ID No. 2484, Seq. ID No. 2486, Seq. ID No. 2492, Seq. ID No. 2496, Seq. ID No. 2506, Seq. ID No. 2508, Seq. ID No. 2514, Seq. ID No. 2520, Seq. ID No. 2526, Seq. ID No. 2530, Seq. ID No. 2536, Seq. ID No. 2538, Seq. ID No. 2540, Seq. ID No. 2550, Seq. ID No. 2554, Seq. ID No. 2564, Seq. ID No. 2568, Seq. ID No. 2576, Seq. ID No. 2578, Seq. ID No. 2582, Seq. ID No. 2590, Seq. ID No. 2594, Seq. ID No. 2596, Seq. ID No. 2600, Seq. ID No. 2604, Seq. ID No. 2608, Seq. ID No. 2610, Seq. ID No. 2614, Seq. ID No. 2618, Seq. ID No. 2620, Seq. ID No. 2624, Seq. ID No. 2626, Seq. ID No. 2632, Seq. ID No. 2634, Seq. ID No. 2640, Seq. ID No. 2642, Seq. ID No. 2646, Seq. ID No. 2650, Seq. ID No. 2652, Seq. ID No. 2656, Seq. ID No. 2660, Seq. ID No. 2664, Seq. ID No. 2668, Seq. ID No. 2670, Seq. ID No. 2672, Seq. ID No. 2678, Seq. ID No. 2688, Seq. ID No. 2690, Seq. ID No. 2694, Seq. ID No. 2700, Seq. ID No. 2704, Seq. ID No. 2710, Seq. ID No. 2712, Seq. ID No. 2716, Seq. ID No. 2720, Seq. ID No. 2726, Seq. ID No. 2728, Seq. ID No. 2738, Seq. ID No. 2744, Seq. ID No. 2748, Seq. ID No. 2752, Seq. ID No. 2754, Seq. ID No. 2760, Seq. ID No. 2764, Seq. ID No. 2766, Seq. ID No. 2768, Seq. ID No. 2772, Seq. ID No. 2774, Seq. ID No. 2776, Seq. ID No. 2782, Seq. ID No. 2788, Seq. ID No. 2790, Seq. ID No. 2792, Seq. ID No. 2794, Seq. ID No. 2798, Seq. ID No. 2800, Seq. ID No. 2804, Seq. ID No. 2806, Seq. ID No. 2812, Seq. ID No. 2816, Seq. ID No. 2824, Seq. ID No. 2828, Seq. ID No. 2844, Seq. ID No. 2848, Seq. ID No. 2864, Seq. ID No. 2868, Seq. ID No. 2870, Seq. ID No. 2872, Seq. ID No. 2878, Seq. ID No. 2882, Seq. ID No. 2892, Seq. ID No. 2900, Seq. ID No. 2902, Seq. ID No. 2904, Seq. ID No. 2908, Seq. ID No. 2912, Seq. ID No. 2914, Seq. ID No. 2918, Seq. ID No. 2920, Seq. ID No. 2922, Seq. ID No. 2924, Seq. ID No. 2928, Seq. ID No. 2934, Seq. ID No. 2946, Seq. ID No. 2954, Seq. ID No. 2958, Seq. ID No. 2964, Seq. ID No. 2972, Seq. ID No. 2974, Seq. ID No. 2978, Seq. ID No. 2980, Seq. ID No. 2984, Seq. ID No. 2986, Seq. ID No. 2992, Seq. ID No. 2994, Seq. ID No. 3000, Seq. ID No. 3002, Seq. ID No. 3006, Seq. ID No. 3012, Seq. ID No. 3020, Seq. ID No. 3028, Seq. ID No. 3034, Seq. ID No. 3036, Seq. ID No. 3040, Seq. ID No. 3044, Seq. ID No. 3046, Seq. ID No. 3050, Seq. ID No. 3056, Seq. ID No. 3060, Seq. ID No. 3062, Seq. ID No. 3068, Seq. ID No. 3070, Seq. ID No. 3082, Seq. ID No. 3090, Seq. ID No. 3092, Seq. ID No. 3094, Seq. ID No. 3098, Seq. ID No. 3104, Seq. ID No. 3108, Seq. ID No. 3112, Seq. ID No. 3118, Seq. ID No. 3126, Seq. ID No. 3134, Seq. ID No. 3136, Seq. ID No. 3138, Seq. ID No. 3142, Seq. ID No. 3144, Seq. ID No. 3150, Seq. ID No. 3156, Seq. ID No. 3158, Seq. ID No. 3160, Seq. ID No. 3162, Seq. ID No. 3166, Seq. ID No. 3172, Seq. ID No. 3178, Seq. ID No. 3180, Seq. ID No. 3184, Seq. ID No. 3186, Seq. ID No. 3190, Seq. ID No. 3192, Seq. ID No. 3198, Seq. ID No. 3204, Seq. ID No. 3206, Seq. ID No. 3212, Seq. ID No. 3218, Seq. ID No. 3222, Seq. ID No. 3228, Seq. ID No. 3230, Seq. ID No. 3234, Seq. ID No. 3236, Seq. ID No. 3240, Seq. ID No. 3250, Seq. ID No. 3252, Seq. ID No. 3254, Seq. ID No. 3258, Seq. ID No. 3260, Seq. ID No. 3264, Seq. ID No. 3266, Seq. ID No. 3272, Seq. ID No. 3274, Seq. ID No. 3278, Seq. ID No. 3284, Seq. ID No. 3286, Seq. ID No. 3288, Seq. ID No. 3290, Seq. ID No. 3294, Seq. ID No. 3296, Seq. ID No. 3300, Seq. ID No. 3304, Seq. ID No. 3308, Seq. ID No. 3314, Seq. ID No. 3316, Seq. ID No. 3320, Seq. ID No. 3324, Seq. ID No. 3330, Seq. ID No. 3336, Seq. ID No. 3338, Seq. ID No. 3348, Seq. ID No. 3356, Seq. ID No. 3360, Seq. ID No. 3364, Seq. ID No. 3368, Seq. ID No. 3378, Seq. ID No. 3380, Seq. ID No. 3384, Seq. ID No. 3388, Seq. ID No. 3400, Seq. ID No. 3402, Seq. ID No. 3404, Seq. ID No. 3410, Seq. ID No. 3414, Seq. ID No. 3416, Seq. ID No. 3418, Seq. ID No. 3426, Seq. ID No. 3428, Seq. ID No. 3432, Seq. ID No. 3436, Seq. ID No. 3438, Seq. ID No. 3440, Seq. ID No. 3448, Seq. ID No. 3460, Seq. ID No. 3462, Seq. ID No. 3468, Seq. ID No. 3470, Seq. ID No. 3472, Seq. ID No. 3474, Seq. ID No. 3476, Seq. ID No. 3480, Seq. ID No. 3484, Seq. ID No. 3486, Seq. ID No. 3488, Seq. ID No. 3496, Seq. ID No. 3502, Seq. ID No. 3506, Seq. ID-No. 3508, Seq. ID No. 3510, Seq. ID No. 3512, Seq. ID No. 3520, Seq. ID No. 3522, Seq. ID No. 3526, Seq. ID No. 3530, Seq. ID No. 3534, Seq. ID No. 3538, Seq. ID No. 3544, Seq. ID No. 3550, Seq. ID No. 3554, Seq. ID No. 3562, Seq. ID No. 3566, Seq. ID No. 3570, Seq. ID No. 3576, Seq. ID No. 3580, Seq. ID No. 3584, Seq. ID No. 3586, Seq. ID No. 3590, Seq. ID No. 3600, Seq. ID No. 3606, Seq. ID No. 3608, Seq. ID No. 3610, Seq. ID No. 3612, Seq. ID No. 3616, Seq. ID No. 3620, Seq. ID No. 3630, Seq. ID No. 3636, Seq. ID No. 3640, Seq. ID No. 3642, Seq. ID No. 3644, Seq. ID No. 3646, Seq. ID No. 3652, Seq. ID No. 3654, Seq. ID No. 3660, Seq. ID No. 3664, Seq. ID No. 3666, Seq. ID No. 3668, Seq. ID No. 3670, Seq. ID No. 3676, Seq. ID No. 3682, Seq. ID No. 3690, Seq. ID No. 3696, Seq. ID No. 3700, Seq. ID No. 3710, Seq. ID No. 3716, Seq. ID No. 3722, Seq. ID No. 3728, Seq. ID No. 3730, Seq. ID No. 3734, Seq. ID No. 3736, Seq. ID No. 3740, Seq. ID No. 3742, Seq. ID No. 3748, Seq. ID No. 3752, Seq. ID No. 3760, Seq. ID No. 3772, Seq. ID No. 3776, Seq. ID No. 3780, Seq. ID No. 3784, Seq. ID No. 3792, Seq. ID No. 3798, Seq. ID No. 3804, Seq. ID No. 3806, Seq. ID No. 3812, Seq. ID No. 3814, Seq. ID No. 3820, Seq. ID No. 3824, Seq. ID No. 3826, Seq. ID No. 3834, Seq. ID No. 3836, Seq. ID No. 3844, Seq. ID No. 3848, Seq. ID No. 3856, Seq. ID No. 3858, Seq. ID No. 3864, Seq. ID No. 3868, Seq. ID No. 3874, Seq. ID No. 3878, Seq. ID No. 3882, Seq. ID No. 3884, Seq. ID No. 3886, Seq. ID No. 3894, Seq. ID No. 3898, Seq. ID No. 3902, Seq. ID No. 3908, Seq. ID No. 3914, Seq. ID No. 3916, Seq. ID No. 3918, Seq. ID No. 3920, Seq. ID No. 3926, Seq. ID No. 3930, Seq. ID No. 3934, Seq. ID No. 3936, Seq. ID No. 3938, Seq. ID No. 3942, Seq. ID No. 3944, Seq. ID No. 3946, Seq. ID No. 3950, Seq. ID No. 3952, Seq. ID No. 3956, Seq. ID No. 3958, Seq. ID No. 3972, Seq. ID No. 3976, Seq. ID No. 3984, Seq. ID No. 3986, Seq. ID No. 3988, Seq. ID No. 3992, Seq. ID No. 4004, Seq. ID No. 4010, Seq. ID No. 4014, Seq. ID No. 4016, Seq. ID No. 4018, Seq. ID No. 4022, Seq. ID No. 4024, Seq. ID No. 4030, Seq. ID No. 4032, Seq. ID No. 4036, Seq. ID No. 4038, Seq. ID No. 4040, Seq. ID No. 4050, Seq. ID No. 4056, Seq. ID No. 4058, Seq. ID No. 4062, Seq. ID No. 4064, Seq. ID No. 4068, Seq. ID No. 4070, Seq. ID No. 4076, Seq. ID No. 4078, Seq. ID No. 4080, Seq. ID No. 4088, Seq. ID No. 4090, Seq. ID No. 4096, Seq. ID No. 4098, Seq. ID No. 4100, Seq. ID No. 4106, Seq. ID No. 4112, Seq. ID No. 4118, Seq. ID No. 4122, Seq. ID No. 4124, Seq. ID No. 4128, Seq. ID No. 4130, Seq. ID No. 4134, Seq. ID No. 4138, Seq. ID No. 4146, Seq. ID No. 4150, Seq. ID No. 4158, Seq. ID No. 4162, Seq. ID No. 4164, Seq. ID No. 4168, Seq. ID No. 4174, Seq. ID No. 4180, Seq. ID-No. 4186, Seq. ID No. 4192, Seq. ID No. 4194, Seq. ID No. 4196, Seq. ID No. 4198, Seq. ID No. 4200, Seq. ID No. 4202, Seq. ID No. 4204, Seq. ID No. 4206, Seq. ID No. 4212, Seq. ID No. 4216, Seq. ID No. 4218, Seq. ID No. 4220, Seq. ID No. 4236, Seq. ID No. 4238, Seq. ID No. 4240, Seq. ID No. 4244, Seq. ID No. 4252, Seq. ID No. 4256, Seq. ID No. 4264, Seq. ID No. 4268, Seq. ID No. 4272, Seq. ID No. 4274, Seq. ID No. 4280, Seq. ID No. 4282, Seq. ID No. 4284, Seq. ID No. 4292, Seq. ID No. 4296, Seq. ID No. 4300, Seq. ID No. 4302, Seq. ID No. 4304, Seq. ID No. 4308, Seq. ID No. 4310, Seq. ID No. 4314, Seq. ID No. 4318, Seq. ID No. 4324, Seq. ID No. 4326, Seq. ID No. 4330, Seq. ID No. 4332, Seq. ID No. 4334, Seq. ID No. 4340, Seq. ID No. 4344, Seq. ID No. 4348, Seq. ID No. 4354, Seq. ID No. 4356, Seq. ID No. 4358, Seq. ID No. 4366, Seq. ID No. 4370, Seq. ID No. 4374, Seq. ID No. 4376, Seq. ID No. 4378, Seq. ID No. 4380, Seq. ID No. 4382, Seq. ID No. 4384, Seq. ID No. 4392, Seq. ID No. 4394, Seq. ID No. 4398, Seq. ID No. 4402, Seq. ID No. 4412, Seq. ID No. 4418, Seq. ID No. 4424, Seq. ID No. 4432, Seq. ID No. 4434, Seq. ID No. 4436, Seq. ID No. 4444, Seq. ID No. 4448, Seq. ID No. 4452, Seq. ID No. 4460, Seq. ID No. 4462, Seq. ID No. 4468, Seq. ID No. 4472, Seq. ID No. 4476, Seq. ID No. 4480, Seq. ID No. 4482, Seq. ID No. 4488, Seq. ID No. 4492, Seq. ID No. 4502, Seq. ID No. 4506, Seq. ID No. 4512, Seq. ID No. 4524, Seq. ID No. 4532, Seq. ID No. 4534, Seq. ID No. 4538, Seq. ID No. 4540, Seq. ID No. 4542, Seq. ID No. 4544, Seq. ID No. 4548, Seq. ID No. 4550, Seq. ID No. 4560, Seq. ID No. 4566, Seq. ID No. 4568, Seq. ID No. 4572, Seq. ID No. 4576, Seq. ID No. 4578, Seq. ID No. 4582, Seq. ID No. 4586, Seq. ID No. 4592, Seq. ID No. 4596, Seq. ID No. 4598, Seq. ID No. 4604, Seq. ID No. 4608, Seq. ID No. 4610, Seq. ID No. 4612, Seq. ID No. 4616, Seq. ID No. 4624, Seq. ID No. 4628, Seq. ID No. 4632, Seq. ID No. 4636, Seq. ID No. 4638, Seq. ID No. 4644, Seq. ID No. 4650, Seq. ID No. 4652, Seq. ID No. 4654, Seq. ID No. 4658, Seq. ID No. 4662, Seq. ID No. 4664, Seq. ID No. 4670, Seq. ID No. 4672, Seq. ID No. 4674, Seq. ID No. 4680, Seq. ID No. 4686, Seq. ID No. 4694, Seq. ID No. 4698, Seq. ID No. 4704, Seq. ID No. 4706, Seq. ID No. 4714, Seq. ID No. 4718, Seq. ID No. 4720, Seq. ID No. 4726, Seq. ID No. 4730, Seq. ID No. 4732, Seq. ID No. 4734, Seq. ID No. 4740, Seq. ID No. 4744, Seq. ID No. 4746, Seq. ID No. 4748, Seq. ID No. 4750, Seq. ID No. 4752, Seq. ID No. 4758, Seq. ID No. 4766, Seq. ID No. 4770, Seq. ID No. 4778, Seq. ID No. 4780, Seq. ID No. 4782, Seq. ID No. 4788, Seq. ID No. 4790, Seq. ID No. 4792, Seq. ID No. 4798, Seq. ID No. 4804, Seq. ID No. 4808, Seq. ID No. 4810, Seq. ID No. 4812, Seq. ID No. 4814, Seq. ID No. 4816, Seq. ID No. 4822, Seq. ID No. 4824, Seq. ID No. 4826, Seq. ID No. 4828, Seq. ID No. 4834, Seq. ID No. 4836, Seq. ID No. 4838, Seq. ID No. 4844, Seq. ID No. 4846, Seq. ID No. 4848, Seq. ID No. 4850, Seq. ID No. 4860, Seq. ID No. 4862, Seq. ID No. 4866, Seq. ID No. 4868, Seq. ID No. 4876, Seq. ID No. 4878, Seq. ID No. 4880, Seq. ID No. 4882, Seq. ID No. 4884, Seq. ID No. 4886, Seq. ID No. 4888, Seq. ID No. 4894, Seq. ID No. 4900, Seq. ID No. 4902, Seq. ID No. 4904, Seq. ID No. 4906, Seq. ID No. 4908, Seq. ID No. 4912, Seq. ID No. 4916, Seq. ID No. 4918, Seq. ID No. 4920, Seq. ID No. 4922, Seq. ID No. 4928, Seq. ID No. 4932, Seq. ID No. 4936, Seq. ID No. 4940, Seq. ID No. 4942, Seq. ID No. 4944, Seq. ID No. 4946, Seq. ID No. 4948, Seq. ID No. 4954, Seq. ID No. 4958, Seq. ID No. 4960, Seq. ID No. 4964, Seq. ID No. 4966, Seq. ID No. 4970, Seq. ID No. 4972, Seq. ID No. 4974, Seq. ID No. 4980, Seq. ID No. 4986, Seq. ID No. 4990, Seq. ID No. 4992, Seq. ID No. 4996, Seq. ID No. 4998, Seq. ID No. 5002, Seq. ID No. 5008, Seq. ID No. 5010, Seq. ID No. 5018, Seq. ID No. 5022, Seq. ID No. 5028, Seq. ID No. 5030, Seq. ID No. 5040, Seq. ID No. 5048, Seq. ID No. 5052, Seq. ID No. 5054, Seq. ID No. 5056, Seq. ID No. 5060, Seq. ID No. 5062, Seq. ID No. 5070, Seq. ID No. 5078, Seq. ID No. 5080, Seq. ID No. 5082, Seq. ID No. 5084, Seq. ID No. 5088, Seq. ID No. 5092, Seq. ID No. 5094, Seq. ID No. 5098, Seq. ID No. 5104, Seq. ID No. 5106, Seq. ID No. 5110, Seq. ID No. 5112, Seq. ID No. 5114, Seq. ID No. 5116, Seq. ID No. 5118, Seq. ID No. 5128, Seq. ID No. 5142, Seq. ID No. 5146, Seq. ID No. 5150, Seq. ID No. 5154, Seq. ID No. 5158, Seq. ID No. 5166, Seq. ID No. 5170, Seq. ID No. 5172, Seq. ID No. 5178, Seq. ID No. 5184, Seq. ID No. 5186, Seq. ID No. 5188, Seq. ID No. 5194, Seq. ID No. 5196, Seq. ID No. 5202, Seq. ID No. 5204, Seq. ID No. 5206, Seq. ID No. 5210, Seq. ID No. 5212, Seq. ID No. 5216, Seq. ID No. 5220, Seq. ID No. 5228, Seq. ID No. 5232, Seq. ID No. 5236, Seq. ID No. 5238, Seq. ID No. 5240, Seq. ID No. 5244, Seq. ID No. 5246, Seq. ID No. 5248, Seq. ID No. 5254, Seq. ID No. 5256, Seq. ID No. 5258, Seq. ID No. 5262, Seq. ID No. 5264, Seq. ID No. 5272, Seq. ID No. 5276, Seq. ID No. 5284, Seq. ID No. 5292, Seq. ID No. 5300, Seq. ID No. 5306, Seq. ID No. 5310, Seq. ID No. 5312, Seq. ID No. 5314, Seq. ID No. 5320, Seq. ID No. 5324, Seq. ID No. 5326, Seq. ID No. 5336, Seq. ID No. 5338, Seq. ID No. 5342, Seq. ID No. 5346, Seq. ID No. 5352, Seq. ID No. 5356, Seq. ID No. 5364, Seq. ID No. 5366, Seq. ID No. 5368, Seq. ID No. 5372, Seq. ID No. 5374, Seq. ID No. 5382, Seq. ID No. 5384, Seq. ID No. 5388, Seq. ID No. 5390, Seq. ID No. 5392, Seq. ID No. 5394, Seq. ID No. 5396, Seq. ID No. 5398, Seq. ID No. 5400, Seq. ID No. 5402, Seq. ID No. 5404, Seq. ID No. 5410, Seq. ID No. 5412, Seq. ID No. 5416, Seq. ID No. 5418, Seq. ID No. 5420, Seq. ID No. 5422, Seq. ID No. 5424, Seq. ID No. 5428, Seq. ID No. 5432, Seq. ID No. 5434, Seq. ID No. 5440, Seq. ID No. 5442, Seq. ID No. 5444, Seq. ID No. 5448, Seq. ID No. 5450, Seq. ID No. 5452, Seq. ID No. 5454, Seq. ID No. 5456, Seq. ID No. 5458, Seq. ID No. 5474, Seq. ID No. 5478, Seq. ID No. 5484, Seq. ID No. 5488, Seq. ID No. 5492, Seq. ID No. 5496, Seq. ID No. 5500, Seq. ID No. 5504, Seq. ID No. 5508, Seq. ID No. 5510, Seq. ID No. 5514, Seq. ID No. 5528, Seq. ID No. 5532, Seq. ID No. 5538, Seq. ID No. 5540, Seq. ID No. 5542, Seq. ID No. 5548, Seq. ID No. 5554, Seq. ID No. 5558, Seq. ID No. 5560, Seq. ID No. 5564, Seq. ID No. 5568, Seq. ID No. 5572, Seq. ID No. 5576, Seq. ID No. 5582, Seq. ID No. 5586, Seq. ID No. 5592, Seq. ID No. 5600, Seq. ID No. 5602, Seq. ID No. 5606, Seq. ID No. 5616, Seq. ID No. 5622, Seq. ID No. 5630, Seq. ID No. 5632, Seq. ID No. 5638, Seq. ID No. 5648, Seq. ID No. 5652, Seq. ID No. 5656, Seq. ID No. 5658, Seq. ID No. 5662, Seq. ID No. 5666, Seq. ID No. 5670, Seq. ID No. 5672, Seq. ID No. 5674, Seq. ID No. 5680, Seq. ID No. 5686, Seq. ID No. 5694, Seq. ID No. 5698, Seq. ID No. 5700, Seq. ID No. 5702, Seq. ID No. 5708, Seq. ID No. 5716, Seq. ID No. 5718, Seq. ID No. 5724, Seq. ID No. 5728, Seq. ID No. 5736, Seq. ID No. 5740, Seq. ID No. 5750, Seq. ID No. 5752, Seq. ID No. 5756, Seq. ID No. 5762, Seq. ID No. 5772, Seq. ID No. 5776, Seq. ID No. 5778, Seq. ID No. 5780, Seq. ID No. 5784, Seq. ID No. 5790, Seq. ID No. 5796, Seq. ID No. 5802, Seq. ID No. 5804, Seq. ID No. 5810, Seq. ID No. 5816, Seq. ID No. 5820, Seq. ID No. 5826, Seq. ID No. 5834, Seq. ID No. 5836, Seq. ID No. 5842, Seq. ID No. 5846, Seq. ID No. 5848, Seq. ID No. 5850, Seq. ID No. 5852, Seq. ID No. 5854, Seq. ID No. 5856, Seq. ID No. 5860, Seq. ID No. 5866, Seq. ID No. 5872, Seq. ID No. 5876, Seq. ID No. 5878, Seq. ID No. 5882, Seq. ID No. 5888, Seq. ID No. 5892, Seq. ID No. 5896, Seq. ID No. 5898, Seq. ID No. 5902, Seq. ID No. 5904, Seq. ID No. 5912, Seq. ID No. 5914, Seq. ID No. 5916, Seq. ID No. 5918, Seq. ID No. 5920, Seq. ID No. 5930, Seq. ID No. 5932, Seq. ID No. 5934, Seq. ID No. 5938, Seq. ID No. 5942, Seq. ID No. 5944, Seq. ID No. 5948, Seq. ID No. 5952, Seq. ID No. 5954, Seq. ID No. 5956, Seq. ID No. 5958, Seq. ID No. 5962, Seq. ID No. 5970, Seq. ID No. 5974, Seq. ID No. 5980, Seq. ID No. 5982, Seq. ID No. 5986, Seq. ID No. 5990, Seq. ID No. 5994, Seq. ID No. 6002, Seq. ID No. 6004, Seq. ID No. 6012, Seq. ID No. 6016, Seq. ID No. 6018, Seq. ID No. 6022, Seq. ID No. 6028, Seq. ID No. 6030, Seq. ID No. 6034, Seq. ID No. 6036, Seq. ID No. 6042, Seq. ID No. 6044, Seq. ID No. 6054, Seq. ID No. 6058, Seq. ID No. 6066, Seq. ID No. 6072, Seq. ID No. 6080, Seq. ID No. 6086, Seq. ID No. 6090, Seq. ID No. 6096, Seq. ID No. 6098, Seq. ID No. 6102, Seq. ID No. 6104, Seq. ID No. 6112, Seq. ID No. 6114, Seq. ID No. 6118, Seq. ID No. 6124, Seq. ID No. 6126, Seq. ID No. 6130, Seq. ID No. 6132, Seq. ID No. 6134, Seq. ID No. 6142, Seq. ID No. 6146, Seq. ID No. 6150, Seq. ID No. 6158, Seq. ID No. 6166, Seq. ID No. 6170, Seq. ID No. 6172, Seq. ID No. 6176, Seq. ID No. 6178, Seq. ID No. 6182, Seq. ID No. 6188, Seq. ID No. 6196, Seq. ID No. 6202, Seq. ID No. 6210, Seq. ID No. 6214, Seq. ID No. 6216, Seq. ID No. 6220, Seq. ID No. 6234, Seq. ID No. 6236, Seq. ID No. 6244, Seq. ID No. 6250, Seq. ID No. 6252, Seq. ID No. 6258, Seq. ID No. 6262, Seq. ID No. 6264, Seq. ID No. 6272, Seq. ID No. 6276, Seq. ID No. 6278, Seq. ID No. 6282, Seq. ID No. 6288, Seq. ID No. 6298, Seq. ID No. 6300, Seq. ID No. 6306, Seq. ID No. 6312, Seq. ID No. 6316, Seq. ID No. 6322, Seq. ID No. 6324, Seq. ID No. 6328, Seq. ID No. 6332, Seq. ID No. 6334, Seq. ID No. 6338, Seq. ID No. 6340, Seq. ID No. 6342, Seq. ID No. 6344, Seq. ID No. 6346, Seq. ID No. 6354, Seq. ID No. 6358, Seq. ID No. 6360, Seq. ID No. 6362, Seq. ID No. 6368, Seq. ID No. 6370, Seq. ID No. 6374, Seq. ID No. 6376, Seq. ID No. 6378, Seq. ID No. 6380, Seq. ID No. 6390, Seq. ID No. 6396, Seq. ID No. 6400, Seq. ID No. 6404, Seq. ID No. 6408, Seq. ID No. 6412, Seq. ID No. 6414, Seq. ID No. 6418, Seq. ID No. 6424, Seq. ID No. 6434, Seq. ID No. 6438, Seq. ID No. 6440, Seq. ID No. 6446, Seq. ID No. 6450, Seq. ID No. 6452, Seq. ID No. 6458, Seq. ID No. 6460, Seq. ID No. 6462, Seq. ID No. 6464, Seq. ID No. 6478, Seq. ID No. 6482, Seq. ID No. 6484, Seq. ID No. 6488, Seq. ID No. 6490, Seq. ID No. 6492, Seq. ID No. 6494, Seq. ID No. 6496, Seq. ID No. 6504, Seq. ID No. 6506, Seq. ID No. 6512, Seq. ID No. 6516, Seq. ID No. 6520, Seq. ID No. 6524, Seq. ID No. 6526, Seq. ID No. 6530, Seq. ID No. 6532, Seq. ID No. 6534, Seq. ID No. 6538, Seq. ID No. 6546, Seq. ID No. 6552, Seq. ID No. 6554, Seq. ID No. 6560, Seq. ID No. 6564, Seq. ID No. 6568, Seq. ID No. 6578, Seq. ID No. 6580, Seq. ID No. 6584, Seq. ID No. 6586, Seq. ID No. 6588, Seq. ID No. 6590, Seq. ID No. 6604, Seq. ID No. 6606, Seq. ID No. 6610, Seq. ID No. 6614, Seq. ID No. 6616, Seq. ID No. 6618, Seq. ID No. 6622, Seq. ID No. 6624, Seq. ID No. 6628, Seq. ID No. 6630, Seq. ID No. 6634, and Seq. ID No. 6640.

[0054] In yet another preferred embodiment, the polypeptide is selected from the Alloiococcus otitidis polypeptides identified by GeneMark™ ORF finder program, and is selected from one of Seq. ID No. 2, Seq. ID No. 4, Seq. ID No. 12, Seq. ID No. 14, Seq. ID No. 16, Seq. ID No. 18, Seq. ID No. 26, Seq. ID No. 28, Seq. ID No. 30, Seq. ID No. 36, Seq. ID No. 38, Seq. ID No. 40, Seq. ID No. 42, Seq. ID No. 44, Seq. ID No. 46, Seq. ID No. 50, Seq. ID No. 54, Seq. ID No. 58, Seq. ID No. 62, Seq. ID No. 70, Seq. ID No. 72, Seq. ID No. 76, Seq. ID No. 82, Seq. ID No. 84, Seq. ID No. 90, Seq. ID No. 96, Seq. ID No. 102, Seq. ID No. 112, Seq. ID No. 120, Seq. ID No. 126, Seq. ID No. 130, Seq. ID No. 136, Seq. ID No. 138, Seq. ID No. 142, Seq. ID No. 148, Seq. ID No. 152, Seq. ID No. 156, Seq. ID No. 168, Seq. ID No. 172, Seq. ID No. 182, Seq. ID No. 186, Seq. ID No. 188, Seq. ID No. 190, Seq. ID No. 192, Seq. ID No. 196, Seq. ID No. 200, Seq. ID No. 208, Seq. ID No. 214, Seq. ID No. 220, Seq. ID No. 222, Seq. ID No. 226, Seq. ID No. 228, Seq. ID No. 230, Seq. ID No. 234, Seq. ID No. 240, Seq. ID No. 242, Seq. ID No. 244, Seq. ID No. 254, Seq. ID No. 262, Seq. ID No. 264, Seq. ID No. 268, Seq. ID No. 274, Seq. ID No. 276, Seq. ID No. 278, Seq. ID No. 280, Seq. ID No. 292, Seq. ID No. 294, Seq. ID No. 296, Seq. ID No. 300, Seq. ID No. 304, Seq. ID No. 310, Seq. ID No. 312, Seq. ID No. 316, Seq. ID No. 320, Seq. ID No. 324, Seq. ID No. 332, Seq. ID No. 342, Seq. ID No. 346, Seq. ID No. 352, Seq. ID No. 356, Seq. ID No. 362, Seq. ID No. 364, Seq. ID No. 366, Seq. ID No. 376, Seq. ID No. 380, Seq. ID No. 382, Seq. ID No. 384, Seq. ID No. 390, Seq. ID No. 392, Seq. ID No. 396, Seq. ID No. 400, Seq. ID No. 406, Seq. ID No. 410, Seq. ID No. 414, Seq. ID No. 418, Seq. ID No. 422, Seq. ID No. 424, Seq. ID No. 426, Seq. ID No. 428, Seq. ID No. 430, Seq. ID No. 436, Seq. ID No. 438, Seq. ID No. 440, Seq. ID No. 442, Seq. ID No. 444, Seq. ID No. 446, Seq. ID No. 448, Seq. ID No. 450, Seq. ID No. 460, Seq. ID No. 466, Seq. ID No. 486, Seq. ID No. 502, Seq. ID No. 506, Seq. ID No. 512, Seq. ID No. 514, Seq. ID No. 518, Seq. ID No. 520, Seq. ID No. 524, Seq. ID No. 530, Seq. ID No. 534, Seq. ID No. 536, Seq. ID No. 542, Seq. ID No. 544, Seq. ID No. 552, Seq. ID No. 554, Seq. ID No. 560, Seq. ID No. 564, Seq. ID No. 570, Seq. ID No. 576, Seq. ID No. 580, Seq. ID No. 584, Seq. ID No. 592, Seq. ID No. 596, Seq. ID No. 602, Seq. ID No. 606, Seq. ID No. 608, Seq. ID No. 612, Seq. ID No. 614, Seq. ID No. 616, Seq. ID No. 622, Seq. ID No. 628, Seq. ID No. 630, Seq. ID No. 634, Seq. ID No. 636, Seq. ID No. 638, Seq. ID No. 644, Seq. ID No. 650, Seq. ID No. 652, Seq. ID No. 656, Seq. ID No. 658, Seq. ID No. 670, Seq. ID No. 672, Seq. ID No. 676, Seq. ID No. 682, Seq. ID No. 684, Seq. ID No. 686, Seq. ID No. 694, Seq. ID No. 704, Seq. ID No. 706, Seq. ID No. 712, Seq. ID No. 726, Seq. ID No. 732, Seq. ID No. 736, Seq. ID No. 738, Seq. ID No. 742, Seq. ID No. 744, Seq. ID No. 750, Seq. ID No. 754, Seq. ID No. 760, Seq. ID No. 774, Seq. ID No. 782, Seq. ID No. 784, Seq. ID No. 786, Seq. ID No. 790, Seq. ID No. 794, Seq. ID No. 798, Seq. ID No. 804, Seq. ID No. 816, Seq. ID No. 820, Seq. ID No. 822, Seq. ID No. 828, Seq. ID No. 832, Seq. ID No. 834, Seq. ID No. 836, Seq. ID No. 838, Seq. ID No. 842, Seq. ID No. 844, Seq. ID No. 850, Seq. ID No. 852, Seq. ID No. 854, Seq. ID No. 858, Seq. ID No. 866, Seq. ID No. 870, Seq. ID No. 874, Seq. ID No. 878, Seq. ID No. 884, Seq. ID No. 888, Seq. ID No. 892, Seq. ID No. 896, Seq. ID No. 902, Seq. ID No. 908, Seq. ID No. 912, Seq. ID No. 918, Seq. ID No. 922, Seq. ID No. 928, Seq. ID No. 936, Seq. ID No. 940, Seq. ID No. 946, Seq. ID No. 952, Seq. ID No. 954, Seq. ID No. 960, Seq. ID No. 964, Seq. ID No. 968, Seq. ID No. 970, Seq. ID No. 978, Seq. ID No. 990, Seq. ID No. 996, Seq. ID No. 1000, Seq. ID No. 1006, Seq. ID No. 1008, Seq. ID No. 1016, Seq. ID No. 1022, Seq. ID No. 1036, Seq. ID No. 1042, Seq. ID No. 1044, Seq. ID No. 1050, Seq. ID No. 1054, Seq. ID No. 1058, Seq. ID No. 1060, Seq. ID No. 1064, Seq. ID No. 1068, Seq. ID No. 1070, Seq. ID No. 1072, Seq. ID No. 1076, Seq. ID No. 1084, Seq. ID No. 1086, Seq. ID No. 1090, Seq. ID No. 1094, Seq. ID No. 1098, Seq. ID No. 1100, Seq. ID No. 1102, Seq. ID No. 1110, Seq. ID No. 1114, Seq. ID No. 1118, Seq. ID No. 1122, Seq. ID No. 1130, Seq. ID No. 1134, Seq. ID No. 1138, Seq. ID No. 1142, Seq. ID No. 1146, Seq. ID No. 1150, Seq. ID No. 1156, Seq. ID No. 1158, Seq. ID No. 1160, Seq. ID No. 1164, Seq. ID No. 1172, Seq. ID No. 1174, Seq. ID No. 1176, Seq. ID No. 1182, Seq. ID No. 1186, Seq. ID No. 1190, Seq. ID No. 1200, Seq. ID No. 1206, Seq. ID No. 1210, Seq. ID No. 1216, Seq. ID No. 1220, Seq. ID No. 1224, Seq. ID No. 1226, Seq. ID No. 1234, Seq. ID No. 1236, Seq. ID No. 1242, Seq. ID No. 1252, Seq. ID No. 1256, Seq. ID No. 1262, Seq. ID No. 1272, Seq. ID No. 1282, Seq. ID No. 1316, Seq. ID No. 1324, Seq. ID No. 1332, Seq. ID No. 1334, Seq. ID No. 1340, Seq. ID No. 1346, Seq. ID No. 1348, Seq. ID No. 1356, Seq. ID No. 1358, Seq. ID No. 1370, Seq. ID No. 1374, Seq. ID No. 1388, Seq. ID No. 1392, Seq. ID No. 1396, Seq. ID No. 1398, Seq. ID No. 1404, Seq. ID No. 1406, Seq. ID No. 1408, Seq. ID No. 1414, Seq. ID No. 1416, Seq. ID No. 1418, Seq. ID No. 1426, Seq. ID No. 1428, Seq. ID No. 1430, Seq. ID No. 1432, Seq. ID No. 1434, Seq. ID No. 1436, Seq. ID No. 1440, Seq. ID No. 1442, Seq. ID No. 1452, Seq. ID No. 1454, Seq. ID No. 1460, Seq. ID No. 1462, Seq. ID No. 1470, Seq. ID No. 1472, Seq. ID No. 1474, Seq. ID No. 1476, Seq. ID No. 1478, Seq. ID No. 1484, Seq. ID No. 1488, Seq. ID No. 1490, Seq. ID No. 1494, Seq. ID No. 1496, Seq. ID No. 1498, Seq. ID No. 1502, Seq. ID No. 1504, Seq. ID No. 1508, Seq. ID No. 1510, Seq. ID No. 1518, Seq. ID No. 1522, Seq. ID No. 1528, Seq. ID No. 1532, Seq. ID No. 1538, Seq. ID No. 1542, Seq. ID No. 1544, Seq. ID No. 1550, Seq. ID No. 1562, Seq. ID No. 1564, Seq. ID No. 1566, Seq. ID No. 1570, Seq. ID No. 1574, Seq. ID No. 1576, Seq. ID No. 1582, Seq. ID No. 1588, Seq. ID No. 1592, Seq. ID No. 1596, Seq. ID No. 1598, Seq. ID No. 1606, Seq. ID No. 1610, Seq. ID No. 1614, Seq. ID No. 1620, Seq. ID No. 1624, Seq. ID No. 1628, Seq. ID No. 1630, Seq. ID No. 1636, Seq. ID No. 1642, Seq. ID No. 1648, Seq. ID No. 1652, Seq. ID No. 1658, Seq. ID No. 1660, Seq. ID No. 1668, Seq. ID No. 1670, Seq. ID No. 1680, Seq. ID No. 1684, Seq. ID No. 1688, Seq. ID No. 1692, Seq. ID No. 1698, Seq. ID No. 1700, Seq. ID No. 1702, Seq. ID No. 1708, Seq. ID No. 1710, Seq. ID No. 1714, Seq. ID No. 1718, Seq. ID No. 1722, Seq. ID No. 1726, Seq. ID No. 1736, Seq. ID No. 1738, Seq. ID No. 1740, Seq. ID No. 1744, Seq. ID No. 1746, Seq. ID No. 1750, Seq. ID No. 1756, Seq. ID No. 1770, Seq. ID No. 1774, Seq. ID No. 1778, Seq. ID No. 1786, Seq. ID No. 1790, Seq. ID No. 1792, Seq. ID No. 1798, Seq. ID No. 1800, Seq. ID No. 1804, Seq. ID No. 1806, Seq. ID No. 1808, Seq. ID No. 1818, Seq. ID No. 1820, Seq. ID No. 1822, Seq. ID No. 1826, Seq. ID No. 1828, Seq. ID No. 1832, Seq. ID No. 1836, Seq. ID No. 1842, Seq. ID No. 1846, Seq. ID No. 1848, Seq. ID No. 1850, Seq. ID No. 1852, Seq. ID No. 1856, Seq. ID No. 1860, Seq. ID No. 1862, Seq. ID No. 1866, Seq. ID No. 1868, Seq. ID No. 1872, Seq. ID No. 1874, Seq. ID No. 1878, Seq. ID No. 1880, Seq. ID No. 1888, Seq. ID No. 1890, Seq. ID No. 1896, Seq. ID No. 1898, Seq. ID No. 1900, Seq. ID No. 1902, Seq. ID No. 1906, Seq. ID No. 1910, Seq. ID No. 1918, Seq. ID No. 1922, Seq. ID No. 1926, Seq. ID No. 1932, Seq. ID No. 1934, Seq. ID No. 1938, Seq. ID No. 1940, Seq. ID No. 1946, Seq. ID No. 1948, Seq. ID No. 1952, Seq. ID No. 1956, Seq. ID No. 1960, Seq. ID No. 1962, Seq. ID No. 1966, Seq. ID No. 1968, Seq. ID No. 1970, Seq. ID No. 1974, Seq. ID No. 1978, Seq. ID No. 1980, Seq. ID No. 1984, Seq. ID No. 1990, Seq. ID No. 1992, Seq. ID No. 1998, Seq. ID No. 2002, Seq. ID No. 2004, Seq. ID No. 2012, Seq. ID No. 2022, Seq. ID No. 2024, Seq. ID No. 2030, Seq. ID No. 2034, Seq. ID No. 2038, Seq. ID No. 2040, Seq. ID No. 2046, Seq. ID No. 2048, Seq. ID No. 2052, Seq. ID No. 2058, Seq. ID No. 2062, Seq. ID No. 2068, Seq. ID No. 2070, Seq. ID No. 2072, Seq. ID No. 2074, Seq. ID No. 2078, Seq. ID No. 2090, Seq. ID No. 2094, Seq. ID No. 2096, Seq. ID No. 2100, Seq. ID No. 2102, Seq. ID No. 2114, Seq. ID No. 2118, Seq. ID No. 2124, Seq. ID No. 2136, Seq. ID No. 2138, Seq. ID No. 2140, Seq. ID No. 2144, Seq. ID No. 2148, Seq. ID No. 2154, Seq. ID No. 2160, Seq. ID No. 2164, Seq. ID No. 2168, Seq. ID No. 2176, Seq. ID No. 2182, Seq. ID No. 2186, Seq. ID No. 2190, Seq. ID No. 2194, Seq. ID No. 2196, Seq. ID No. 2198, Seq. ID No. 2206, Seq. ID No. 2218, Seq. ID No. 2220, Seq. ID No. 2224, Seq. ID No. 2226, Seq. ID No. 2230, Seq. ID No. 2236, Seq. ID No. 2240, Seq. ID No. 2244, Seq. ID No. 2246, Seq. ID No. 2248, Seq. ID No. 2254, Seq. ID No. 2256, Seq. ID No. 2258, Seq. ID No. 2260, Seq. ID No. 2262, Seq. ID No. 2266, Seq. ID No. 2270, Seq. ID No. 2274, Seq. ID No. 2286, Seq. ID No. 2298, Seq. ID No. 2300, Seq. ID No. 2302, Seq. ID No. 2314, Seq. ID No. 2328, Seq. ID No. 2332, Seq. ID No. 2336, Seq. ID No. 2338, Seq. ID No. 2342, Seq. ID No. 2344, Seq. ID No. 2346, Seq. ID No. 2350, Seq. ID No. 2352, Seq. ID No. 2358, Seq. ID No. 2360, Seq. ID No. 2362, Seq. ID No. 2366, Seq. ID No. 2370, Seq. ID No. 2374, Seq. ID No. 2378, Seq. ID No. 2384, Seq. ID No. 2398, Seq. ID No. 2402, Seq. ID No. 2404, Seq. ID No. 2410, Seq. ID No. 2412, Seq. ID No. 2418, Seq. ID No. 2422, Seq. ID No. 2424, Seq. ID No. 2426, Seq. ID No. 2430, Seq. ID No. 2436, Seq. ID No. 2438, Seq. ID No. 2440, Seq. ID No. 2442, Seq. ID No. 2446, Seq. ID No. 2450, Seq. ID No. 2452, Seq. ID No. 2454, Seq. ID No. 2462, Seq. ID No. 2466, Seq. ID No. 2468, Seq. ID No. 2472, Seq. ID No. 2474, Seq. ID No. 2478, Seq. ID No. 2480, Seq. ID No. 2482, Seq. ID No. 2486, Seq. ID No. 2488, Seq. ID No. 2496, Seq. ID No. 2506, Seq. ID No. 2508, Seq. ID No. 2510, Seq. ID No. 2520, Seq. ID No. 2526, Seq. ID No. 2528, Seq. ID No. 2530, Seq. ID No. 2536, Seq. ID No. 2538, Seq. ID No. 2540, Seq. ID No. 2548, Seq. ID No. 2552, Seq. ID No. 2564, Seq. ID No. 2566, Seq. ID No. 2574, Seq. ID No. 2578, Seq. ID No. 2580, Seq. ID No. 2586, Seq. ID No. 2594, Seq. ID No. 2596, Seq. ID No. 2600, Seq. ID No. 2608, Seq. ID No. 2610, Seq. ID No. 2614, Seq. ID No. 2616, Seq. ID No. 2620, Seq. ID No. 2624, Seq. ID No. 2626, Seq. ID No. 2632, Seq. ID No. 2634, Seq. ID No. 2640, Seq. ID No. 2642, Seq. ID No. 2644, Seq. ID No. 2648, Seq. ID No. 2652, Seq. ID No. 2656, Seq. ID No. 2658, Seq. ID No. 2662, Seq. ID No. 2666, Seq. ID No. 2670, Seq. ID No. 2672, Seq. ID No. 2674, Seq. ID No. 2682, Seq. ID No. 2690, Seq. ID No. 2694, Seq. ID No. 2700, Seq. ID No. 2704, Seq. ID No. 2710, Seq. ID No. 2712, Seq. ID No. 2714, Seq. ID No. 2720, Seq. ID No. 2722, Seq. ID No. 2728, Seq. ID No. 2738, Seq. ID No. 2742, Seq. ID No. 2746, Seq. ID No. 2750, Seq. ID No. 2754, Seq. ID No. 2758, Seq. ID No. 2762, Seq. ID No. 2766, Seq. ID No. 2768, Seq. ID No. 2770, Seq. ID No. 2774, Seq. ID No. 2776, Seq. ID No. 2778, Seq. ID No. 2788, Seq. ID No. 2790, Seq. ID No. 2792, Seq. ID No. 2794, Seq. ID No. 2796, Seq. ID No. 2800, Seq. ID No. 2804, Seq. ID No. 2816, Seq. ID No. 2818, Seq. ID No. 2820, Seq. ID No. 2826, Seq. ID No. 2844, Seq. ID No. 2848, Seq. ID No. 2850, Seq. ID No. 2852, Seq. ID No. 2858, Seq. ID No. 2860, Seq. ID No. 2864, Seq. ID No. 2868, Seq. ID No. 2870, Seq. ID No. 2872, Seq. ID No. 2878, Seq. ID No. 2880, Seq. ID No. 2890, Seq. ID No. 2892, Seq. ID No. 2898, Seq. ID No. 2902, Seq. ID No. 2904, Seq. ID No. 2908, Seq. ID No. 2910, Seq. ID No. 2914, Seq. ID No. 2916, Seq. ID No. 2920, Seq. ID No. 2922, Seq. ID No. 2924, Seq. ID No. 2926, Seq. ID No. 2930, Seq. ID No. 2936, Seq. ID No. 2944, Seq. ID No. 2952, Seq. ID No. 2956, Seq. ID No. 2964, Seq. ID No. 2966, Seq. ID No. 2972, Seq. ID No. 2974, Seq. ID No. 2976, Seq. ID No. 2980, Seq. ID No. 2982, Seq. ID No. 2986, Seq. ID No. 2990, Seq. ID No. 2994, Seq. ID No. 3000, Seq. ID No. 3002, Seq. ID No. 3004, Seq. ID No. 3018, Seq. ID No. 3028, Seq. ID No. 3034, Seq. ID No. 3036, Seq. ID No. 3040, Seq. ID No. 3042, Seq. ID No. 3044, Seq. ID No. 3046, Seq. ID No. 3048, Seq. ID No. 3056, Seq. ID No. 3058, Seq. ID No. 3062, Seq. ID No. 3066, Seq. ID No. 3070, Seq. ID No. 3080, Seq. ID No. 3090, Seq. ID No. 3092, Seq. ID No. 3094, Seq. ID No. 3096, Seq. ID No. 3104, Seq. ID No. 3106, Seq. ID No. 3110, Seq. ID No. 3114, Seq. ID No. 3126, Seq. ID No. 3128, Seq. ID No. 3136, Seq. ID No. 3138, Seq. ID No. 3142, Seq. ID No. 3144, Seq. ID No. 3148, Seq. ID No. 3156, Seq. ID No. 3158, Seq. ID No. 3160, Seq. ID No. 3162, Seq. ID No. 3166, Seq. ID No. 3170, Seq. ID No. 3176, Seq. ID No. 3180, Seq. ID No. 3184, Seq. ID No. 3186, Seq. ID No. 3190, Seq. ID No. 3192, Seq. ID No. 3196, Seq. ID No. 3200, Seq. ID No. 3206, Seq. ID No. 3212, Seq. ID No. 3218, Seq. ID No. 3222, Seq. ID No. 3226, Seq. ID No. 3230, Seq. ID No. 3232, Seq. ID No. 3238, Seq. ID No. 3240, Seq. ID No. 3248, Seq. ID No. 3252, Seq. ID No. 3254, Seq. ID No. 3256, Seq. ID No. 3260, Seq. ID No. 3262, Seq. ID No. 3268, Seq. ID No. 3274, Seq. ID No. 3278, Seq. ID No. 3280, Seq. ID No. 3286, Seq. ID No. 3288, Seq. ID No. 3290, Seq. ID No. 3294, Seq. ID No. 3296, Seq. ID No. 3300, Seq. ID No. 3302, Seq. ID No. 3306, Seq. ID No. 3310, Seq. ID No. 3316, Seq. ID No. 3320, Seq. ID No. 3322, Seq. ID No. 3328, Seq. ID No. 3334, Seq. ID No. 3338, Seq. ID No. 3344, Seq. ID No. 3354, Seq. ID No. 3360, Seq. ID No. 3362, Seq. ID No. 3366, Seq. ID No. 3374, Seq. ID No. 3382, Seq. ID No. 3386, Seq. ID No. 3394, Seq. ID No. 3402, Seq. ID No. 3408, Seq. ID No. 3412, Seq. ID No. 3416, Seq. ID No. 3418, Seq. ID No. 3424, Seq. ID No. 3430, Seq. ID No. 3438, Seq. ID No. 3440, Seq. ID No. 3444, Seq. ID No. 3460, Seq. ID No. 3462, Seq. ID No. 3466, Seq. ID No. 3470, Seq. ID No. 3472, Seq. ID No. 3474, Seq. ID No. 3476, Seq. ID No. 3478, Seq. ID No. 3484, Seq. ID No. 3488, Seq. ID No. 3496, Seq. ID No. 3498, Seq. ID No. 3506, Seq. ID No. 3508, Seq. ID No. 3510, Seq. ID No. 3512, Seq. ID No. 3516, Seq. ID No. 3522, Seq. ID No. 3524, Seq. ID No. 3530, Seq. ID No. 3536, Seq. ID No. 3542, Seq. ID No. 3552, Seq. ID No. 3560, Seq. ID No. 3564, Seq. ID No. 3568, Seq. ID No. 3576, Seq. ID No. 3578, Seq. ID No. 3584, Seq. ID No. 3586, Seq. ID No. 3590, Seq. ID No. 3592, Seq. ID No. 3600, Seq. ID No. 3602, Seq. ID No. 3608, Seq. ID No. 3610, Seq. ID No. 3612, Seq. ID No. 3616, Seq. ID No. 3620, Seq. ID No. 3630, Seq. ID No. 3632, Seq. ID No. 3634, Seq. ID No. 3638, Seq. ID No. 3642, Seq. ID No. 3644, Seq. ID No. 3646, Seq. ID No. 3652, Seq. ID No. 3654, Seq. ID No. 3656, Seq. ID No. 3662, Seq. ID No. 3666, Seq. ID No. 3668, Seq. ID No. 3670, Seq. ID No. 3676, Seq. ID No. 3682, Seq. ID No. 3690, Seq. ID No. 3696, Seq. ID No. 3698, Seq. ID No. 3706, Seq. ID No. 3712, Seq. ID No. 3720, Seq. ID No. 3726, Seq. ID No. 3730, Seq. ID No. 3732, Seq. ID No. 3736, Seq. ID No. 3740, Seq. ID No. 3742, Seq. ID No. 3744, Seq. ID No. 3750, Seq. ID No. 3760, Seq. ID No. 3770, Seq. ID No. 3774, Seq. ID No. 3778, Seq. ID No. 3782, Seq. ID No. 3788, Seq. ID No. 3796, Seq. ID No. 3802, Seq. ID No. 3806, Seq. ID No. 3810, Seq. ID No. 3814, Seq. ID No. 3820, Seq. ID No. 3822, Seq. ID No. 3826, Seq. ID No. 3828, Seq. ID No. 3830, Seq. ID No. 3832, Seq. ID No. 3836, Seq. ID No. 3842, Seq. ID No. 3846, Seq. ID No. 3856, Seq. ID No. 3858, Seq. ID No. 3864, Seq. ID No. 3868, Seq. ID No. 3870, Seq. ID No. 3876, Seq. ID No. 3882, Seq. ID No. 3884, Seq. ID No. 3886, Seq. ID No. 3888, Seq. ID No. 3898, Seq. ID No. 3902, Seq. ID No. 3906, Seq. ID No. 3910, Seq. ID No. 3914, Seq. ID No. 3916, Seq. ID No. 3918, Seq. ID No. 3920, Seq. ID No. 3922, Seq. ID No. 3930, Seq. ID No. 3932, Seq. ID No. 3936, Seq. ID No. 3942, Seq. ID No. 3944, Seq. ID No. 3946, Seq. ID No. 3948, Seq. ID No. 3952, Seq. ID No. 3954, Seq. ID No. 3958, Seq. ID No. 3972, Seq. ID No. 3978, Seq. ID No. 3982, Seq. ID No. 3986, Seq. ID No. 3988, Seq. ID No. 3990, Seq. ID No. 3994, Seq. ID No. 4002, Seq. ID No. 4006, Seq. ID No. 4012, Seq. ID No. 4016, Seq. ID No. 4018, Seq. ID No. 4020, Seq. ID No. 4024, Seq. ID No. 4030, Seq. ID No. 4032, Seq. ID No. 4034, Seq. ID No. 4038, Seq. ID No. 4040, Seq. ID No. 4050, Seq. ID No. 4052, Seq. ID No. 4058, Seq. ID No. 4060, Seq. ID No. 4066, Seq. ID No. 4070, Seq. ID No. 4076, Seq. ID No. 4080, Seq. ID No. 4086, Seq. ID No. 4090, Seq. ID No. 4096, Seq. ID No. 4098, Seq. ID No. 4100, Seq. ID No. 4106, Seq. ID No. 4112, Seq. ID No. 4116, Seq. ID No. 4122, Seq. ID No. 4124, Seq. ID No. 4128, Seq. ID No. 4130, Seq. ID No. 4132, Seq. ID No. 4138, Seq. ID No. 4142, Seq. ID No. 4148, Seq. ID No. 4158, Seq. ID No. 4160, Seq. ID No. 4164, Seq. ID No. 4166, Seq. ID No. 4170, Seq. ID No. 4180, Seq. ID No. 4184, Seq. ID No. 4188, Seq. ID No. 4194, Seq. ID No. 4196, Seq. ID No. 4198, Seq. ID No. 4200, Seq. ID No. 4202, Seq. ID No. 4206, Seq. ID No. 4208, Seq. ID No. 4214, Seq. ID No. 4220, Seq. ID No. 4236, Seq. ID No. 4238, Seq. ID No. 4240, Seq. ID No. 4244, Seq. ID No. 4246, Seq. ID No. 4256, Seq. ID No. 4260, Seq. ID No. 4268, Seq. ID No. 4272, Seq. ID No. 4278, Seq. ID No. 4280, Seq. ID No. 4282, Seq. ID No. 4284, Seq. ID No. 4290, Seq. ID No. 4294, Seq. ID No. 4300, Seq. ID No. 4302, Seq. ID No. 4304, Seq. ID No. 4306, Seq. ID No. 4308, Seq. ID No. 4310, Seq. ID No. 4314, Seq. ID No. 4316, Seq. ID No. 4324, Seq. ID No. 4326, Seq. ID No. 4328, Seq. ID No. 4332, Seq. ID No. 4334, Seq. ID No. 4338, Seq. ID No. 4342, Seq. ID No. 4346, Seq. ID No. 4350, Seq. ID No. 4356, Seq. ID No. 4358, Seq. ID No. 4366, Seq. ID No. 4368, Seq. ID No. 4372, Seq. ID No. 4376, Seq. ID No. 4378, Seq. ID No. 4380, Seq. ID No. 4384, Seq. ID No. 4388, Seq. ID No. 4394, Seq. ID No. 4398, Seq. ID No. 4402, Seq. ID No. 4410, Seq. ID No. 4414, Seq. ID No. 4422, Seq. ID No. 4434, Seq. ID No. 4436, Seq. ID No. 4446, Seq. ID No. 4450, Seq. ID No. 4458, Seq. ID No. 4462, Seq. ID No. 4464, Seq. ID No. 4472, Seq. ID No. 4476, Seq. ID No. 4478, Seq. ID No. 4482, Seq. ID No. 4488, Seq. ID No. 4492, Seq. ID No. 4500, Seq. ID No. 4502, Seq. ID No. 4504, Seq. ID No. 4510, Seq. ID No. 4518, Seq. ID No. 4532, Seq. ID No. 4534, Seq. ID No. 4536, Seq. ID No. 4540, Seq. ID No. 4542, Seq. ID No. 4546, Seq. ID No. 4550, Seq. ID No. 4558, Seq. ID No. 4564, Seq. ID No. 4568, Seq. ID No. 4570, Seq. ID No. 4576, Seq. ID No. 4578, Seq. ID No. 4580, Seq. ID No. 4584, Seq. ID No. 4592, Seq. ID No. 4594, Seq. ID No. 4598, Seq. ID No. 4602, Seq. ID No. 4606, Seq. ID No. 4610, Seq. ID No. 4612, Seq. ID No. 4614, Seq. ID No. 4624, Seq. ID No. 4626, Seq. ID No. 4630, Seq. ID No. 4634, Seq. ID No. 4638, Seq. ID No. 4642, Seq. ID No. 4646, Seq. ID No. 4652, Seq. ID No. 4654, Seq. ID No. 4656, Seq. ID No. 4662, Seq. ID No. 4664, Seq. ID No. 4670, Seq. ID No. 4672, Seq. ID No. 4674, Seq. ID No. 4676, Seq. ID No. 4686, Seq. ID No. 4690, Seq. ID No. 4698, Seq. ID No. 4704, Seq. ID No. 4706, Seq. ID No. 4714, Seq. ID No. 4718, Seq. ID No. 4720, Seq. ID No. 4724, Seq. ID No. 4730, Seq. ID No. 4732, Seq. ID No. 4734, Seq. ID No. 4740, Seq. ID No. 4744, Seq. ID No. 4746, Seq. ID No. 4748, Seq. ID No. 4750, Seq. ID No. 4752, Seq. ID No. 4754, Seq. ID No. 4762, Seq. ID No. 4768, Seq. ID No. 4772, Seq. ID No. 4780, Seq. ID No. 4782, Seq. ID No. 4784, Seq. ID No. 4786, Seq. ID No. 4790, Seq. ID No. 4792, Seq. ID No. 4794, Seq. ID No. 4800, Seq. ID No. 4808, Seq. ID No. 4810, Seq. ID No. 4812, Seq. ID No. 4814, Seq. ID No. 4816, Seq. ID No. 4822, Seq. ID No. 4826, Seq. ID No. 4828, Seq. ID No. 4830, Seq. ID No. 4838, Seq. ID No. 4840, Seq. ID No. 4846, Seq. ID No. 4848, Seq. ID No. 4850, Seq. ID No. 4858, Seq. ID No. 4862, Seq. ID No. 4866, Seq. ID No. 4868, Seq. ID No. 4876, Seq. ID No. 4880, Seq. ID No. 4882, Seq. ID No. 4884, Seq. ID No. 4886, Seq. ID No. 4888, Seq. ID No. 4894, Seq. ID No. 4900, Seq. ID No. 4902, Seq. ID No. 4904, Seq. ID No. 4906, Seq. ID No. 4908, Seq. ID No. 4910, Seq. ID No. 4916, Seq. ID No. 4918, Seq. ID No. 4920, Seq. ID No. 4922, Seq. ID No. 4926, Seq. ID No. 4930, Seq. ID No. 4934, Seq. ID No. 4938, Seq. ID No. 4942, Seq. ID No. 4944, Seq. ID No. 4946, Seq. ID No. 4948, Seq. ID No. 4954, Seq. ID No. 4956, Seq. ID No. 4960, Seq. ID No. 4962, Seq. ID No. 4966, Seq. ID No. 4968, Seq. ID No. 4972, Seq. ID No. 4974, Seq. ID No. 4978, Seq. ID No. 4986, Seq. ID No. 4990, Seq. ID No. 4992, Seq. ID No. 4996, Seq. ID No. 4998, Seq. ID No. 5006, Seq. ID No. 5010, Seq. ID No. 5016, Seq. ID No. 5020, Seq. ID No. 5026, Seq. ID No. 5030, Seq. ID No. 5038, Seq. ID No. 5046, Seq. ID No. 5050, Seq. ID No. 5054, Seq. ID No. 5056, Seq. ID No. 5060, Seq. ID No. 5062, Seq. ID No. 5066, Seq. ID No. 5072, Seq. ID No. 5074, Seq. ID No. 5080, Seq. ID No. 5082, Seq. ID No. 5084, Seq. ID No. 5088, Seq. ID No. 5090, Seq. ID No. 5094, Seq. ID No. 5096, Seq. ID No. 5104, Seq. ID No. 5106, Seq. ID No. 5108, Seq. ID No. 5112, Seq. ID No. 5114, Seq. ID No. 5116, Seq. ID No. 5118, Seq. ID No. 5120, Seq. ID No. 5142, Seq. ID No. 5144, Seq. ID No. 5148, Seq. ID No. 5154, Seq. ID No. 5156, Seq. ID No. 5164, Seq. ID No. 5170, Seq. ID No. 5172, Seq. ID No. 5174, Seq. ID No. 5180, Seq. ID No. 5186, Seq. ID No. 5188, Seq. ID No. 5194, Seq. ID No. 5196, Seq. ID No. 5202, Seq. ID No. 5204, Seq. ID No. 5206, Seq. ID No. 5210, Seq. ID No. 5212, Seq. ID No. 5214, Seq. ID No. 5218, Seq. ID No. 5226, Seq. ID No. 5232, Seq. ID No. 5234, Seq. ID No. 5238, Seq. ID No. 5240, Seq. ID No. 5246, Seq. ID No. 5248, Seq. ID No. 5250, Seq. ID No. 5256, Seq. ID No. 5258, Seq. ID No. 5260, Seq. ID No. 5264, Seq. ID No. 5270, Seq. ID No. 5274, Seq. ID No. 5284, Seq. ID No. 5290, Seq. ID No. 5294, Seq. ID No. 5308, Seq. ID No. 5312, Seq. ID No. 5314, Seq. ID No. 5316, Seq. ID No. 5324, Seq. ID No. 5326, Seq. ID No. 5336, Seq. ID No. 5338, Seq. ID No. 5340, Seq. ID No. 5346, Seq. ID No. 5348, Seq. ID No. 5350, Seq. ID No. 5354, Seq. ID No. 5362, Seq. ID No. 5366, Seq. ID No. 5368, Seq. ID No. 5370, Seq. ID No. 5374, Seq. ID No. 5376, Seq. ID No. 5388, Seq. ID No. 5390, Seq. ID No. 5392, Seq. ID No. 5394, Seq. ID No. 5396, Seq. ID No. 5398, Seq. ID No. 5400, Seq. ID No. 5402, Seq. ID No. 5404, Seq. ID No. 5406, Seq. ID No. 5412, Seq. ID No. 5416, Seq. ID No. 5418, Seq. ID No. 5420, Seq. ID No. 5422, Seq. ID No. 5424, Seq. ID No. 5430, Seq. ID No. 5434, Seq. ID No. 5442, Seq. ID No. 5444, Seq. ID No. 5446, Seq. ID No. 5450, Seq. ID No. 5452, Seq. ID No. 5454, Seq. ID No. 5456, Seq. ID No. 5458, Seq. ID No. 5470, Seq. ID No. 5476, Seq. ID No. 5484, Seq. ID No. 5486, Seq. ID No. 5490, Seq. ID No. 5494, Seq. ID No. 5500, Seq. ID No. 5502, Seq. ID No. 5506, Seq. ID No. 5510, Seq. ID No. 5512, Seq. ID No. 5524, Seq. ID No. 5530, Seq. ID No. 5536, Seq. ID No. 5540, Seq. ID No. 5542, Seq. ID No. 5548, Seq. ID No. 5552, Seq. ID No. 5556, Seq. ID No. 5560, Seq. ID No. 5562, Seq. ID No. 5566, Seq. ID No. 5572, Seq. ID No. 5574, Seq. ID No. 5580, Seq. ID No. 5584, Seq. ID No. 5590, Seq. ID No. 5600, Seq. ID No. 5602, Seq. ID No. 5604, Seq. ID No. 5614, Seq. ID No. 5622, Seq. ID No. 5628, Seq. ID No. 5632, Seq. ID No. 5636, Seq. ID No. 5646, Seq. ID No. 5652, Seq. ID No. 5654, Seq. ID No. 5658, Seq. ID No. 5662, Seq. ID No. 5664, Seq. ID No. 5666, Seq. ID No. 5670, Seq. ID No. 5672, Seq. ID No. 5674, Seq. ID No. 5676, Seq. ID No. 5682, Seq. ID No. 5694, Seq. ID No. 5696, Seq. ID No. 5700, Seq. ID No. 5702, Seq. ID No. 5708, Seq. ID No. 5714, Seq. ID No. 5718, Seq. ID No. 5724, Seq. ID No. 5726, Seq. ID No. 5732, Seq. ID No. 5738, Seq. ID No. 5748, Seq. ID No. 5752, Seq. ID No. 5756, Seq. ID No. 5760, Seq. ID No. 5772, Seq. ID No. 5774, Seq. ID No. 5778, Seq. ID No. 5780, Seq. ID No. 5782, Seq. ID No. 5786, Seq. ID No. 5794, Seq. ID No. 5800, Seq. ID No. 5806, Seq. ID No. 5812, Seq. ID No. 5816, Seq. ID No. 5818, Seq. ID No. 5824, Seq. ID No. 5832, Seq. ID No. 5836, Seq. ID No. 5840, Seq. ID No. 5844, Seq. ID No. 5848, Seq. ID No. 5850, Seq. ID No. 5852, Seq. ID No. 5854, Seq. ID No. 5856, Seq. ID No. 5858, Seq. ID No. 5862, Seq. ID No. 5868, Seq. ID No. 5876, Seq. ID No. 5878, Seq. ID No. 5882, Seq. ID No. 5890, Seq. ID No. 5896, Seq. ID No. 5898, Seq. ID No. 5902, Seq. ID No. 5904, Seq. ID No. 5908, Seq. ID No. 5914, Seq. ID No. 5916, Seq. ID No. 5918, Seq. ID No. 5920, Seq. ID No. 5926, Seq. ID No. 5932, Seq. ID No. 5934, Seq. ID No. 5936, Seq. ID No. 5942, Seq. ID No. 5944, Seq. ID No. 5946, Seq. ID No. 5950, Seq. ID No. 5956, Seq. ID No. 5958, Seq. ID No. 5960, Seq. ID No. 5968, Seq. ID No. 5972, Seq. ID No. 5976, Seq. ID No. 5978, Seq. ID No. 5982, Seq. ID No. 5984, Seq. ID No. 5986, Seq. ID No. 5990, Seq. ID No. 5992, Seq. ID No. 5996, Seq. ID No. 5998, Seq. ID No. 6004, Seq. ID No. 6006, Seq. ID No. 6008, Seq. ID No. 6016, Seq. ID No. 6018, Seq. ID No. 6020, Seq. ID No. 6024, Seq. ID No. 6030, Seq. ID No. 6034, Seq. ID No. 6036, Seq. ID No. 6038, Seq. ID No. 6044, Seq. ID No. 6050, Seq. ID No. 6056, Seq. ID No. 6066, Seq. ID No. 6070, Seq. ID No. 6076, Seq. ID No. 6082, Seq. ID No. 6084, Seq. ID No. 6088, Seq. ID No. 6096, Seq. ID No. 6098, Seq. ID No. 6100, Seq. ID No. 6104, Seq. ID No. 6106, Seq. ID No. 6114, Seq. ID No. 6116, Seq. ID No. 6120, Seq. ID No. 6126, Seq. ID No. 6128, Seq. ID No. 6130, Seq. ID No. 6132, Seq. ID No. 6134, Seq. ID No. 6142, Seq. ID No. 6144, Seq. ID No. 6148, Seq. ID No. 6154, Seq. ID No. 6166, Seq. ID No. 6170, Seq. ID No. 6172, Seq. ID No. 6174, Seq. ID No. 6178, Seq. ID No. 6180, Seq. ID No. 6188, Seq. ID No. 6194, Seq. ID No. 6202, Seq. ID No. 6208, Seq. ID No. 6212, Seq. ID No. 6216, Seq. ID No. 6220, Seq. ID No. 6232, Seq. ID No. 6236, Seq. ID No. 6244, Seq. ID No. 6248, Seq. ID No. 6252, Seq. ID No. 6256, Seq. ID No. 6262, Seq. ID No. 6264, Seq. ID No. 6270, Seq. ID No. 6276, Seq. ID No. 6278, Seq. ID No. 6280, Seq. ID No. 6288, Seq. ID No. 6292, Seq. ID No. 6300, Seq. ID No. 6306, Seq. ID No. 6308, Seq. ID No. 6314, Seq. ID No. 6316, Seq. ID No. 6322, Seq. ID No. 6324, Seq. ID No. 6326, Seq. ID No. 6332, Seq. ID No. 6336, Seq. ID No. 6340, Seq. ID No. 6342, Seq. ID No. 6344, Seq. ID No. 6346, Seq. ID No. 6348, Seq. ID No. 6356, Seq. ID No. 6360, Seq. ID No. 6362, Seq. ID No. 6366, Seq. ID No. 6370, Seq. ID No. 6372, Seq. ID No. 6376, Seq. ID No. 6378, Seq. ID No. 6380, Seq. ID No. 6388, Seq. ID No. 6392, Seq. ID No. 6398, Seq. ID No. 6402, Seq. ID No. 6406, Seq. ID No. 6410, Seq. ID No. 6414, Seq. ID No. 6418, Seq. ID No. 6420, Seq. ID No. 6424, Seq. ID No. 6430, Seq. ID No. 6434, Seq. ID No. 6436, Seq. ID No. 6440, Seq. ID No. 6446, Seq. ID No. 6448, Seq. ID No. 6452, Seq. ID No. 6456, Seq. ID No. 6460, Seq. ID No. 6462, Seq. ID No. 6464, Seq. ID No. 6476, Seq. ID No. 6482, Seq. ID No. 6484, Seq. ID No. 6486, Seq. ID No. 6488, Seq. ID No. 6490, Seq. ID No. 6492, Seq. ID No. 6494, Seq. ID No. 6496, Seq. ID No. 6500, Seq. ID No. 6506, Seq. ID No. 6510, Seq. ID No. 6514, Seq. ID No. 6520, Seq. ID No. 6522, Seq. ID No. 6526, Seq. ID No. 6528, Seq. ID No. 6532, Seq. ID No. 6534, Seq. ID No. 6536, Seq. ID No. 6546, Seq. ID No. 6552, Seq. ID No. 6554, Seq. ID No. 6560, Seq. ID No. 6562, Seq. ID No. 6564, Seq. ID No. 6566, Seq. ID No. 6568, Seq. ID No. 6570, Seq. ID No. 6576, Seq. ID No. 6580, Seq. ID No. 6584, Seq. ID No. 6586, Seq. ID No. 6592, Seq. ID No. 6596, Seq. ID No. 6606, Seq. ID No. 6608, Seq. ID No. 6612, Seq. ID No. 6616, Seq. ID No. 6618, Seq. ID No. 6620, Seq. ID No. 6624, Seq. ID No. 6626, Seq. ID No. 6630, Seq. ID No. 6634, Seq. ID No. 6636, Seq. ID No. 6642, and Seq. ID No. 6648.

[0055] In yet another preferred embodiment, the polypeptide is selected from the Alloiococcus otitidis polypeptides identified by the Applicants' assignee's ORF finder program that searches for an ATG, GTG or TTG Start codon between a Stop-Stop region, and wherein the polypeptide is selected from one Seq. ID No. 2, Seq. ID No. 6, Seq. ID No. 12, Seq. ID No. 14, Seq. ID No. 16, Seq. ID No. 18, Seq. ID No. 20, Seq. ID No. 22, Seq. ID No. 24, Seq. ID No. 28, Seq. ID No. 30, Seq. ID No. 32, Seq. ID No. 36, Seq. ID No. 38, Seq. ID No. 42, Seq. ID No. 44, Seq. ID No. 46, Seq. ID No. 48, Seq. ID No. 50, Seq. ID No. 52, Seq. ID No. 54, Seq. ID No. 56, Seq. ID No. 58, Seq. ID No. 60, Seq. ID No. 66, Seq. ID No. 68, Seq. ID No. 76, Seq. ID No. 78, Seq. ID No. 80, Seq. ID No. 82, Seq. ID No. 84, Seq. ID No. 90, Seq. ID No. 92, Seq. ID No. 94, Seq. ID No. 98, Seq. ID No. 100, Seq. ID No. 104, Seq. ID No. 106, Seq. ID No. 108, Seq. ID No. 110, Seq. ID No. 112, Seq. ID No. 114, Seq. ID No. 116, Seq. ID No. 118, Seq. ID No. 120, Seq. ID No. 122, Seq. ID No. 128, Seq. ID No. 130, Seq. ID No. 132, Seq. ID No. 134, Seq. ID No. 136, Seq. ID No. 138, Seq. ID No. 140, Seq. ID No. 144, Seq. ID No. 146, Seq. ID No. 148, Seq. ID No. 150, Seq. ID No. 154, Seq. ID No. 156, Seq. ID No. 158, Seq. ID No. 160, Seq. ID No. 162, Seq. ID No. 164, Seq. ID No. 166, Seq. ID No. 168, Seq. ID No. 170, Seq. ID No. 172, Seq. ID No. 176, Seq. ID No. 178, Seq. ID No. 180, Seq. ID No. 182, Seq. ID No. 184, Seq. ID No. 188, Seq. ID No. 192, Seq. ID No. 194, Seq. ID No. 196, Seq. ID No. 202, Seq. ID No. 206, Seq. ID No. 208, Seq. ID No. 216, Seq. ID No. 220, Seq. ID No. 222, Seq. ID No. 224, Seq. ID No. 226, Seq. ID No. 228, Seq. ID No. 232, Seq. ID No. 234, Seq. ID No. 240, Seq. ID No. 244, Seq. ID No. 246, Seq. ID No. 248, Seq. ID No. 254, Seq. ID No. 258, Seq. ID No. 260, Seq. ID No. 262, Seq. ID No. 264, Seq. ID No. 266, Seq. ID No. 268, Seq. ID No. 270, Seq. ID No. 274, Seq. ID No. 278, Seq. ID No. 280, Seq. ID No. 282, Seq. ID No. 284, Seq. ID No. 292, Seq. ID No. 294, Seq. ID No. 298, Seq. ID No. 302, Seq. ID No. 306, Seq. ID No. 308, Seq. ID No. 310, Seq. ID No. 314, Seq. ID No. 318, Seq. ID No. 322, Seq. ID No. 324, Seq. ID No. 326, Seq. ID No. 332, Seq. ID No. 334, Seq. ID No. 336, Seq. ID No. 338, Seq. ID No. 340, Seq. ID No. 344, Seq. ID No. 346, Seq. ID No. 348, Seq. ID No. 350, Seq. ID No. 354, Seq. ID No. 356, Seq. ID No. 358, Seq. ID No. 360, Seq. ID No. 362, Seq. ID No. 364, Seq. ID No. 366, Seq. ID No. 368, Seq. ID No. 370, Seq. ID No. 372, Seq. ID No. 376, Seq. ID No. 378, Seq. ID No. 380, Seq. ID No. 384, Seq. ID No. 386, Seq. ID No. 388, Seq. ID No. 390, Seq. ID No. 392, Seq. ID No. 394, Seq. ID No. 398, Seq. ID No. 402, Seq. ID No. 404, Seq. ID No. 406, Seq. ID No. 408, Seq. ID No. 410, Seq. ID No. 416, Seq. ID No. 424, Seq. ID No. 426, Seq. ID No. 428, Seq. ID No. 430, Seq. ID No. 432, Seq. ID No. 434, Seq. ID No. 436, Seq. ID No. 438, Seq. ID No. 440, Seq. ID No. 442, Seq. ID No. 444, Seq. ID No. 446, Seq. ID No. 448, Seq. ID No. 452, Seq. ID No. 454, Seq. ID No. 456, Seq. ID No. 458, Seq. ID No. 462, Seq. ID No. 464, Seq. ID No. 468, Seq. ID No. 470, Seq. ID No. 472, Seq. ID No. 474, Seq. ID No. 476, Seq. ID No. 478, Seq. ID No. 480, Seq. ID No. 482, Seq. ID No. 484, Seq. ID No. 486, Seq. ID No. 490, Seq. ID No. 492, Seq. ID No. 494, Seq. ID No. 496, Seq. ID No. 502, Seq. ID No. 506, Seq. ID No. 508, Seq. ID No. 512, Seq. ID No. 516, Seq. ID No. 518, Seq. ID No. 524, Seq. ID No. 530, Seq. ID No. 532, Seq. ID No. 534, Seq. ID No. 538, Seq. ID No. 540, Seq. ID No. 544, Seq. ID No. 548, Seq. ID No. 550, Seq. ID No. 552, Seq. ID No. 554, Seq. ID No. 556, Seq. ID No. 558, Seq. ID No. 560, Seq. ID No. 562, Seq. ID No. 566, Seq. ID No. 570, Seq. ID No. 572, Seq. ID No. 574, Seq. ID No. 576, Seq. ID No. 580, Seq. ID No. 582, Seq. ID No. 586, Seq. ID No. 588, Seq. ID No. 590, Seq. ID No. 592, Seq. ID No. 594, Seq. ID No. 596, Seq. ID No. 598, Seq. ID No. 600, Seq. ID No. 602, Seq. ID No. 604, Seq. ID No. 606, Seq. ID No. 610, Seq. ID No. 614, Seq. ID No. 616, Seq. ID No. 618, Seq. ID No. 620, Seq. ID No. 622, Seq. ID No. 624, Seq. ID No. 626, Seq. ID No. 628, Seq. ID No. 636, Seq. ID No. 638, Seq. ID No. 644, Seq. ID No. 646, Seq. ID No. 648, Seq. ID No. 650, Seq. ID No. 656, Seq. ID No. 664, Seq. ID No. 666, Seq. ID No. 668, Seq. ID No. 670, Seq. ID No. 676, Seq. ID No. 682, Seq. ID No. 684, Seq. ID No. 688, Seq. ID No. 690, Seq. ID No. 692, Seq. ID No. 696, Seq. ID No. 698, Seq. ID No. 700, Seq. ID No. 702, Seq. ID No. 704, Seq. ID No. 706, Seq. ID No. 708, Seq. ID No. 710, Seq. ID No. 714, Seq. ID No. 726, Seq. ID No. 728, Seq. ID No. 730, Seq. ID No. 732, Seq. ID No. 734, Seq. ID No. 736, Seq. ID No. 740, Seq. ID No. 742, Seq. ID No. 746, Seq. ID No. 748, Seq. ID No. 750, Seq. ID No. 752, Seq. ID No. 754, Seq. ID No. 760, Seq. ID No. 764, Seq. ID No. 766, Seq. ID No. 774, Seq. ID No. 776, Seq. ID No. 782, Seq. ID No. 784, Seq. ID No. 788, Seq. ID No. 794, Seq. ID No. 796, Seq. ID No. 800, Seq. ID No. 802, Seq. ID No. 806, Seq. ID No. 808, Seq. ID No. 810, Seq. ID No. 812, Seq. ID No. 814, Seq. ID No. 816, Seq. ID No. 818, Seq. ID No. 820, Seq. ID No. 822, Seq. ID No. 824, Seq. ID No. 828, Seq. ID No. 830, Seq. ID No. 832, Seq. ID No. 836, Seq. ID No. 838, Seq. ID No. 840, Seq. ID No. 844, Seq. ID No. 846, Seq. ID No. 848, Seq. ID No. 856, Seq. ID No. 860, Seq. ID No. 862, Seq. ID No. 866, Seq. ID No. 868, Seq. ID No. 872, Seq. ID No. 874, Seq. ID No. 876, Seq. ID No. 878, Seq. ID No. 880, Seq. ID No. 882, Seq. ID No. 886, Seq. ID No. 896, Seq. ID No. 898, Seq. ID No. 900, Seq. ID No. 902, Seq. ID No. 904, Seq. ID No. 906, Seq. ID No. 908, Seq. ID No. 910, Seq. ID No. 914, Seq. ID No. 916, Seq. ID No. 922, Seq. ID No. 924, Seq. ID No. 926, Seq. ID No. 932, Seq. ID No. 934, Seq. ID No. 936, Seq. ID No. 938, Seq. ID No. 940, Seq. ID No. 942, Seq. ID No. 944, Seq. ID No. 948, Seq. ID No. 950, Seq. ID No. 952, Seq. ID No. 954, Seq. ID No. 956, Seq. ID No. 958, Seq. ID No. 962, Seq. ID No. 964, Seq. ID No. 966, Seq. ID No. 968, Seq. ID No. 970, Seq. ID No. 972, Seq. ID No. 974, Seq. ID No. 976, Seq. ID No. 982, Seq. ID No. 984, Seq. ID No. 986, Seq. ID No. 988, Seq. ID No. 990, Seq. ID No. 992, Seq. ID No. 994, Seq. ID No. 996, Seq. ID No. 998, Seq. ID No. 1002, Seq. ID No. 1004, Seq. ID No. 1006, Seq. ID No. 1008, Seq. ID No. 1010, Seq. ID No. 1018, Seq. ID No. 1020, Seq. ID No. 1024, Seq. ID No. 1026, Seq. ID No. 1028, Seq. ID No. 1040, Seq. ID No. 1042, Seq. ID No. 1044, Seq. ID No. 1046, Seq. ID No. 1048, Seq. ID No. 1050, Seq. ID No. 1052, Seq. ID No. 1058, Seq. ID No. 1060, Seq. ID No. 1062, Seq. ID No. 1066, Seq. ID No. 1070, Seq. ID No. 1076, Seq. ID No. 1078, Seq. ID No. 1080, Seq. ID No. 1082, Seq. ID No. 1084, Seq. ID No. 1086, Seq. ID No. 1088, Seq. ID No. 1092, Seq. ID No. 1094, Seq. ID No. 1096, Seq. ID No. 1098, Seq. ID No. 1100, Seq. ID No. 1102, Seq. ID No. 1104, Seq. ID No. 1108, Seq. ID No. 1110, Seq. ID No. 1112, Seq. ID No. 1114, Seq. ID No. 1116, Seq. ID No. 1120, Seq. ID No. 1122, Seq. ID No. 1124, Seq. ID No. 1126, Seq. ID No. 1128, Seq. ID No. 1130, Seq. ID No. 1132, Seq. ID No. 1138, Seq. ID No. 1140, Seq. ID No. 1142, Seq. ID No. 1144, Seq. ID No. 1146, Seq. ID No. 1148, Seq. ID No. 1150, Seq. ID No. 1152, Seq. ID No. 1154, Seq. ID No. 1156, Seq. ID No. 1158, Seq. ID No. 1160, Seq. ID No. 1162, Seq. ID No. 1164, Seq. ID No. 1172, Seq. ID No. 1176, Seq. ID No. 1178, Seq. ID No. 1180, Seq. ID No. 1182, Seq. ID No. 1188, Seq. ID No. 1192, Seq. ID No. 1194, Seq. ID No. 1196, Seq. ID No. 1198, Seq. ID No. 1202, Seq. ID No. 1204, Seq. ID No. 1206, Seq. ID No. 1208, Seq. ID No. 1212, Seq. ID No. 1214, Seq. ID No. 1216, Seq. ID No. 1218, Seq. ID No. 1222, Seq. ID No. 1224, Seq. ID No. 1226, Seq. ID No. 1232, Seq. ID No. 1234, Seq. ID No. 1238, Seq. ID No. 1240, Seq. ID No. 1242, Seq. ID No. 1246, Seq. ID No. 1248, Seq. ID No. 1250, Seq. ID No. 1252, Seq. ID No. 1254, Seq. ID No. 1256, Seq. ID No. 1258, Seq. ID No. 1260, Seq. ID No. 1262, Seq. ID No. 1264, Seq. ID No. 1272, Seq. ID No. 1274, Seq. ID No. 1276, Seq. ID No. 1278, Seq. ID No. 1280, Seq. ID No. 1286, Seq. ID No. 1290, Seq. ID No. 1292, Seq. ID No. 1294, Seq. ID No. 1296, Seq. ID No. 1298, Seq. ID No. 1300, Seq. ID No. 1302, Seq. ID No. 1304, Seq. ID No. 1306, Seq. ID No. 1308, Seq. ID No. 1310, Seq. ID No. 1312, Seq. ID No. 1314, Seq. ID No. 1318, Seq. ID No. 1320, Seq. ID No. 1322, Seq. ID No. 1332, Seq. ID No. 1334, Seq. ID No. 1336, Seq. ID No. 1338, Seq. ID No. 1340, Seq. ID No. 1344, Seq. ID No. 1346, Seq. ID No. 1348, Seq. ID No. 1350, Seq. ID No. 1352, Seq. ID No. 1360, Seq. ID No. 1362, Seq. ID No. 1364, Seq. ID No. 1366, Seq. ID No. 1370, Seq. ID No. 1372, Seq. ID No. 1376, Seq. ID No. 1378, Seq. ID No. 1382, Seq. ID No. 1384, Seq. ID No. 1386, Seq. ID No. 1388, Seq. ID No. 1390, Seq. ID No. 1392, Seq. ID No. 1394, Seq. ID No. 1402, Seq. ID No. 1404, Seq. ID No. 1408, Seq. ID No. 1410, Seq. ID No. 1412, Seq. ID No. 1414, Seq. ID No. 1416, Seq. ID No. 1420, Seq. ID No. 1422, Seq. ID No. 1424, Seq. ID No. 1426, Seq. ID No. 1428, Seq. ID No. 1430, Seq. ID No. 1434, Seq. ID No. 1438, Seq. ID No. 1442, Seq. ID No. 1444, Seq. ID No. 1448, Seq. ID No. 1450, Seq. ID No. 1452, Seq. ID No. 1456, Seq. ID No. 1460, Seq. ID No. 1464, Seq. ID No. 1466, Seq. ID No. 1468, Seq. ID No. 1470, Seq. ID No. 1472, Seq. ID No. 1474, Seq. ID No. 1476, Seq. ID No. 1478, Seq. ID No. 1480, Seq. ID No. 1484, Seq. ID No. 1486, Seq. ID No. 1488, Seq. ID No. 1492, Seq. ID No. 1494, Seq. ID No. 1496, Seq. ID No. 1498, Seq. ID No. 1500, Seq. ID No. 1502, Seq. ID No. 1506, Seq. ID No. 1508, Seq. ID No. 1512, Seq. ID No. 1518, Seq. ID No. 1520, Seq. ID No. 1524, Seq. ID No. 1526, Seq. ID No. 1528, Seq. ID No. 1532, Seq. ID No. 1540, Seq. ID No. 1544, Seq. ID No. 1550, Seq. ID No. 1552, Seq. ID No. 1554, Seq. ID No. 1556, Seq. ID No. 1558, Seq. ID No. 1562, Seq. ID No. 1564, Seq. ID No. 1566, Seq. ID No. 1568, Seq. ID No. 1572, Seq. ID No. 1574, Seq. ID No. 1576, Seq. ID No. 1578, Seq. ID No. 1580, Seq. ID No. 1582, Seq. ID No. 1590, Seq. ID No. 1594, Seq. ID No. 1596, Seq. ID No. 1598, Seq. ID No. 1600, Seq. ID No. 1602, Seq. ID No. 1608, Seq. ID No. 1612, Seq. ID No. 1614, Seq. ID No. 1616, Seq. ID No. 1618, Seq. ID No. 1620, Seq. ID No. 1624, Seq. ID No. 1626, Seq. ID No. 1628, Seq. ID No. 1634, Seq. ID No. 1638, Seq. ID No. 1640, Seq. ID No. 1642, Seq. ID No. 1644, Seq. ID No. 1648, Seq. ID No. 1652, Seq. ID No. 1654, Seq. ID No. 1656, Seq. ID No. 1658, Seq. ID No. 1662, Seq. ID No. 1664, Seq. ID No. 1666, Seq. ID No. 1670, Seq. ID No. 1676, Seq. ID No. 1680, Seq. ID No. 1682, Seq. ID No. 1686, Seq. ID No. 1688, Seq. ID No. 1690, Seq. ID No. 1692, Seq. ID No. 1694, Seq. ID No. 1696, Seq. ID No. 1698, Seq. ID No. 1700, Seq. ID No. 1704, Seq. ID No. 1706, Seq. ID No. 1708, Seq. ID No. 1712, Seq. ID No. 1714, Seq. ID No. 1716, Seq. ID No. 1718, Seq. ID No. 1720, Seq. ID No. 1722, Seq. ID No. 1724, Seq. ID No. 1728, Seq. ID No. 1730, Seq. ID No. 1736, Seq. ID No. 1738, Seq. ID No. 1740, Seq. ID No. 1742, Seq. ID No. 1748, Seq. ID No. 1750, Seq. ID No. 1752, Seq. ID No. 1756, Seq. ID No. 1758, Seq. ID No. 1760, Seq. ID No. 1764, Seq. ID No. 1770, Seq. ID No. 1772, Seq. ID No. 1776, Seq. ID No. 1778, Seq. ID No. 1780, Seq. ID No. 1782, Seq. ID No. 1784, Seq. ID No. 1786, Seq. ID No. 1790, Seq. ID No. 1792, Seq. ID No. 1794, Seq. ID No. 1796, Seq. ID No. 1798, Seq. ID No. 1806, Seq. ID No. 1810, Seq. ID No. 1812, Seq. ID No. 1814, Seq. ID No. 1816, Seq. ID No. 1818, Seq. ID No. 1820, Seq. ID No. 1822, Seq. ID No. 1824, Seq. ID No. 1826, Seq. ID No. 1830, Seq. ID No. 1834, Seq. ID No. 1842, Seq. ID No. 1844, Seq. ID No. 1846, Seq. ID No. 1848, Seq. ID No. 1850, Seq. ID No. 1854, Seq. ID No. 1856, Seq. ID No. 1858, Seq. ID No. 1860, Seq. ID No. 1862, Seq. ID No. 1864, Seq. ID No. 1866, Seq. ID No. 1868, Seq. ID No. 1872, Seq. ID No. 1874, Seq. ID No. 1876, Seq. ID No. 1878, Seq. ID No. 1882, Seq. ID No. 1884, Seq. ID No. 1886, Seq. ID No. 1888, Seq. ID No. 1890, Seq. ID No. 1896, Seq. ID No. 1904, Seq. ID No. 1906, Seq. ID No. 1908, Seq. ID No. 1912, Seq. ID No. 1914, Seq. ID No. 1916, Seq. ID No. 1920, Seq. ID No. 1924, Seq. ID No. 1926, Seq. ID No. 1928, Seq. ID No. 1930, Seq. ID No. 1932, Seq. ID No. 1936, Seq. ID No. 1942, Seq. ID No. 1944, Seq. ID No. 1946, Seq. ID No. 1948, Seq. ID No. 1950, Seq. ID No. 1952, Seq. ID No. 1954, Seq. ID No. 1960, Seq. ID No. 1962, Seq. ID No. 1964, Seq. ID No. 1966, Seq. ID No. 1968, Seq. ID No. 1970, Seq. ID No. 1972, Seq. ID No. 1980, Seq. ID No. 1984, Seq. ID No. 1986, Seq. ID No. 1988, Seq. ID No. 1990, Seq. ID No. 1992, Seq. ID No. 1996, Seq. ID No. 1998, Seq. ID No. 2000, Seq. ID No. 2002, Seq. ID No. 2004, Seq. ID No. 2006, Seq. ID No. 2008, Seq. ID No. 2016, Seq. ID No. 2020, Seq. ID No. 2022, Seq. ID No. 2026, Seq. ID No. 2028, Seq. ID No. 2030, Seq. ID No. 2032, Seq. ID No. 2036, Seq. ID No. 2038, Seq. ID No. 2042, Seq. ID No. 2044, Seq. ID No. 2046, Seq. ID No. 2048, Seq. ID No. 2054, Seq. ID No. 2056, Seq. ID No. 2060, Seq. ID No. 2064, Seq. ID No. 2066, Seq. ID No. 2068, Seq. ID No. 2070, Seq. ID No. 2072, Seq. ID No. 2074, Seq. ID No. 2076, Seq. ID No. 2078, Seq. ID No. 2080, Seq. ID No. 2082, Seq. ID No. 2084, Seq. ID No. 2086, Seq. ID No. 2090, Seq. ID No. 2092, Seq. ID No. 2094, Seq. ID No. 2098, Seq. ID No. 2100, Seq. ID No. 2102, Seq. ID No. 2104, Seq. ID No. 2108, Seq. ID No. 2110, Seq. ID No. 2112, Seq. ID No. 2116, Seq. ID No. 2118, Seq. ID No. 2120, Seq. ID No. 2126, Seq. ID No. 2128, Seq. ID No. 2130, Seq. ID No. 2132, Seq. ID No. 2134, Seq. ID No. 2136, Seq. ID No. 2138, Seq. ID No. 2142, Seq. ID No. 2144, Seq. ID No. 2146, Seq. ID No. 2150, Seq. ID No. 2152, Seq. ID No. 2154, Seq. ID No. 2156, Seq. ID No. 2158, Seq. ID No. 2160, Seq. ID No. 2162, Seq. ID No. 2166, Seq. ID No. 2168, Seq. ID No. 2170, Seq. ID No. 2180, Seq. ID No. 2182, Seq. ID No. 2184, Seq. ID No. 2190, Seq. ID No. 2192, Seq. ID No. 2196, Seq. ID No. 2198, Seq. ID No. 2200, Seq. ID No. 2202, Seq. ID No. 2204, Seq. ID No. 2206, Seq. ID No. 2208, Seq. ID No. 2210, Seq. ID No. 2212, Seq. ID No. 2214, Seq. ID No. 2216, Seq. ID No. 2218, Seq. ID No. 2222, Seq. ID No. 2224, Seq. ID No. 2228, Seq. ID No. 2230, Seq. ID No. 2236, Seq. ID No. 2242, Seq. ID No. 2246, Seq. ID No. 2248, Seq. ID No. 2252, Seq. ID No. 2254, Seq. ID No. 2258, Seq. ID No. 2260, Seq. ID No. 2262, Seq. ID No. 2264, Seq. ID No. 2266, Seq. ID No. 2268, Seq. ID No. 2270, Seq. ID No. 2276, Seq. ID No. 2278, Seq. ID No. 2280, Seq. ID No. 2286, Seq. ID No. 2288, Seq. ID No. 2298, Seq. ID No. 2300, Seq. ID No. 2302, Seq. ID No. 2310, Seq. ID No. 2312, Seq. ID No. 2316, Seq. ID No. 2328, Seq. ID No. 2330, Seq. ID No. 2334, Seq. ID No. 2344, Seq. ID No. 2346, Seq. ID No. 2350, Seq. ID No. 2352, Seq. ID No. 2358, Seq. ID No. 2364, Seq. ID No. 2366, Seq. ID No. 2368, Seq. ID No. 2370, Seq. ID No. 2372, Seq. ID No. 2374, Seq. ID No. 2376, Seq. ID No. 2380, Seq. ID No. 2382, Seq. ID No. 2386, Seq. ID No. 2388, Seq. ID No. 2392, Seq. ID No. 2394, Seq. ID No. 2396, Seq. ID No. 2398, Seq. ID No. 2400, Seq. ID No. 2402, Seq. ID No. 2406, Seq. ID No. 2410, Seq. ID No. 2414, Seq. ID No. 2416, Seq. ID No. 2418, Seq. ID No. 2422, Seq. ID No. 2424, Seq. ID No. 2426, Seq. ID No. 2428, Seq. ID No. 2430, Seq. ID No. 2436, Seq. ID No. 2438, Seq. ID No. 2446, Seq. ID No. 2448, Seq. ID No. 2450, Seq. ID No. 2452, Seq. ID No. 2454, Seq. ID No. 2456, Seq. ID No. 2458, Seq. ID No. 2460, Seq. ID No. 2462, Seq. ID No. 2464, Seq. ID No. 2466, Seq. ID No. 2470, Seq. ID No. 2472, Seq. ID No. 2476, Seq. ID No. 2482, Seq. ID No. 2484, Seq. ID No. 2486, Seq. ID No. 2492, Seq. ID No. 2494, Seq. ID No. 2496, Seq. ID No. 2500, Seq. ID No. 2502, Seq. ID No. 2504, Seq. ID No. 2506, Seq. ID No. 2508, Seq. ID No. 2512, Seq. ID No. 2514, Seq. ID No. 2518, Seq. ID No. 2520, Seq. ID No. 2522, Seq. ID No. 2526, Seq. ID No. 2530, Seq. ID No. 2534, Seq. ID No. 2536, Seq. ID No. 2538, Seq. ID No. 2540, Seq. ID No. 2548, Seq. ID No. 2550, Seq. ID No. 2552, Seq. ID No. 2554, Seq. ID No. 2560, Seq. ID No. 2562, Seq. ID No. 2564, Seq. ID No. 2566, Seq. ID No. 2574, Seq. ID No. 2576, Seq. ID No. 2578, Seq. ID No. 2580, Seq. ID No. 2582, Seq. ID No. 2588, Seq. ID No. 2590, Seq. ID No. 2592, Seq. ID No. 2594, Seq. ID No. 2596, Seq. ID No. 2600, Seq. ID No. 2604, Seq. ID No. 2606, Seq. ID No. 2608, Seq. ID No. 2610, Seq. ID No. 2612, Seq. ID No. 2614, Seq. ID No. 2618, Seq. ID No. 2620, Seq. ID No. 2624, Seq. ID No. 2626, Seq. ID No. 2628, Seq. ID No. 2630, Seq. ID No. 2632, Seq. ID No. 2634, Seq. ID No. 2636, Seq. ID No. 2638, Seq. ID No. 2640, Seq. ID No. 2642, Seq. ID No. 2644, Seq. ID No. 2646, Seq. ID No. 2648, Seq. ID No. 2650, Seq. ID No. 2652, Seq. ID No. 2654, Seq. ID No. 2656, Seq. ID No. 2660, Seq. ID No. 2664, Seq. ID No. 2668, Seq. ID No. 2670, Seq. ID No. 2672, Seq. ID No. 2676, Seq. ID No. 2678, Seq. ID No. 2684, Seq. ID No. 2686, Seq. ID No. 2688, Seq. ID No. 2690, Seq. ID No. 2692, Seq. ID No. 2694, Seq. ID No. 2696, Seq. ID No. 2698, Seq. ID No. 2700, Seq. ID No. 2704, Seq. ID No. 2710, Seq. ID No. 2712, Seq. ID No. 2716, Seq. ID No. 2718, Seq. ID No. 2720, Seq. ID No. 2724, Seq. ID No. 2726, Seq. ID No. 2728, Seq. ID No. 2730, Seq. ID No. 2732, Seq. ID No. 2736, Seq. ID No. 2738, Seq. ID No. 2740, Seq. ID No. 2750, Seq. ID No. 2752, Seq. ID No. 2754, Seq. ID No. 2756, Seq. ID No. 2760, Seq. ID No. 2766, Seq. ID No. 2768, Seq. ID No. 2770, Seq. ID No. 2772, Seq. ID No. 2774, Seq. ID No. 2776, Seq. ID No. 2780, Seq. ID No. 2782, Seq. ID No. 2784, Seq. ID No. 2788, Seq. ID No. 2790, Seq. ID No. 2792, Seq. ID No. 2794, Seq. ID No. 2796, Seq. ID No. 2798, Seq. ID No. 2800, Seq. ID No. 2802, Seq. ID No. 2804, Seq. ID No. 2808, Seq. ID No. 2810, Seq. ID No. 2814, Seq. ID No. 2816, Seq. ID No. 2822, Seq. ID No. 2824, Seq. ID No. 2828, Seq. ID No. 2830, Seq. ID No. 2832, Seq. ID No. 2834, Seq. ID No. 2840, Seq. ID No. 2842, Seq. ID No. 2844, Seq. ID No. 2846, Seq. ID No. 2848, Seq. ID No. 2856, Seq. ID No. 2862, Seq. ID No. 2864, Seq. ID No. 2866, Seq. ID No. 2868, Seq. ID No. 2870, Seq. ID No. 2872, Seq. ID No. 2878, Seq. ID No. 2882, Seq. ID No. 2884, Seq. ID No. 2886, Seq. ID No. 2888, Seq. ID No. 2892, Seq. ID No. 2894, Seq. ID No. 2896, Seq. ID No. 2900, Seq. ID No. 2902, Seq. ID No. 2908, Seq. ID No. 2916, Seq. ID No. 2918, Seq. ID No. 2920, Seq. ID No. 2922, Seq. ID No. 2924, Seq. ID No. 2928, Seq. ID No. 2932, Seq. ID No. 2934, Seq. ID No. 2936, Seq. ID No. 2944, Seq. ID No. 2946, Seq. ID No. 2952, Seq. ID No. 2954, Seq. ID No. 2958, Seq. ID No. 2960, Seq. ID No. 2962, Seq. ID No. 2964, Seq. ID No. 2966, Seq. ID No. 2968, Seq. ID No. 2972, Seq. ID No. 2974, Seq. ID No. 2976, Seq. ID No. 2978, Seq. ID No. 2980, Seq. ID No. 2984, Seq. ID No. 2986, Seq. ID No. 2988, Seq. ID No. 2992, Seq. ID No. 2994, Seq. ID No. 3000, Seq. ID No. 3002, Seq. ID No. 3006, Seq. ID No. 3010, Seq. ID No. 3012, Seq. ID No. 3016, Seq. ID No. 3018, Seq. ID No. 3020, Seq. ID No. 3022, Seq. ID No. 3028, Seq. ID No. 3034, Seq. ID No. 3036, Seq. ID No. 3038, Seq. ID No. 3040, Seq. ID No. 3044, Seq. ID No. 3046, Seq. ID No. 3048, Seq. ID No. 3050, Seq. ID No. 3052, Seq. ID No. 3054, Seq. ID No. 3056, Seq. ID No. 3058, Seq. ID No. 3060, Seq. ID No. 3068, Seq. ID No. 3070, Seq. ID No. 3072, Seq. ID No. 3080, Seq. ID No. 3084, Seq. ID No. 3086, Seq. ID No. 3088, Seq. ID No. 3092, Seq. ID No. 3094, Seq. ID No. 3100, Seq. ID No. 3102, Seq. ID No. 3104, Seq. ID No. 3110, Seq. ID No. 3112, Seq. ID No. 3116, Seq. ID No. 3118, Seq. ID No. 3120, Seq. ID No. 3122, Seq. ID No. 3124, Seq. ID No. 3126, Seq. ID No. 3130, Seq. ID No. 3132, Seq. ID No. 3134, Seq. ID No. 3136, Seq. ID No. 3138, Seq. ID No. 3140, Seq. ID No. 3142, Seq. ID No. 3144, Seq. ID No. 3148, Seq. ID No. 3150, Seq. ID No. 3152, Seq. ID No. 3154, Seq. ID No. 3156, Seq. ID No. 3158, Seq. ID No. 3160, Seq. ID No. 3162, Seq. ID No. 3166, Seq. ID No. 3168, Seq. ID No. 3170, Seq. ID No. 3172, Seq. ID No. 3174, Seq. ID No. 3180, Seq. ID No. 3182, Seq. ID No. 3184, Seq. ID No. 3186, Seq. ID No. 3188, Seq. ID No. 3190, Seq. ID No. 3192, Seq. ID No. 3194, Seq. ID No. 3196, Seq. ID No. 3198, Seq. ID No. 3204, Seq. ID No. 3206, Seq. ID No. 3208, Seq. ID No. 3210, Seq. ID No. 3212, Seq. ID No. 3218, Seq. ID No. 3224, Seq. ID No. 3226, Seq. ID No. 3228, Seq. ID No. 3230, Seq. ID No. 3236, Seq. ID No. 3250, Seq. ID No. 3252, Seq. ID No. 3254, Seq. ID No. 3256, Seq. ID No. 3258, Seq. ID No. 3260, Seq. ID No. 3264, Seq. ID No. 3266, Seq. ID No. 3270, Seq. ID No. 3272, Seq. ID No. 3274, Seq. ID No. 3278, Seq. ID No. 3282, Seq. ID No. 3284, Seq. ID No. 3286, Seq. ID No. 3290, Seq. ID No. 3292, Seq. ID No. 3294, Seq. ID No. 3300, Seq. ID No. 3302, Seq. ID No. 3304, Seq. ID No. 3306, Seq. ID No. 3308, Seq. ID No. 3310, Seq. ID No. 3312, Seq. ID No. 3314, Seq. ID No. 3316, Seq. ID No. 3320, Seq. ID No. 3322, Seq. ID No. 3324, Seq. ID No. 3326, Seq. ID No. 3332, Seq. ID No. 3336, Seq. ID No. 3338, Seq. ID No. 3340, Seq. ID No. 3342, Seq. ID No. 3346, Seq. ID No. 3348, Seq. ID No. 3350, Seq. ID No. 3354, Seq. ID No. 3356, Seq. ID No. 3360, Seq. ID No. 3362, Seq. ID No. 3364, Seq. ID No. 3366, Seq. ID No. 3368, Seq. ID No. 3370, Seq. ID No. 3372, Seq. ID No. 3374, Seq. ID No. 3376, Seq. ID No. 3378, Seq. ID No. 3380, Seq. ID No. 3382, Seq. ID No. 3384, Seq. ID No. 3398, Seq. ID No. 3400, Seq. ID No. 3402, Seq. ID No. 3408, Seq. ID No. 3410, Seq. ID No. 3414, Seq. ID No. 3416, Seq. ID No. 3420, Seq. ID No. 3426, Seq. ID No. 3428, Seq. ID No. 3432, Seq. ID No. 3434, Seq. ID No. 3436, Seq. ID No. 3440, Seq. ID No. 3442, Seq. ID No. 3444, Seq. ID No. 3446, Seq. ID No. 3448, Seq. ID No. 3456, Seq. ID No. 3458, Seq. ID No. 3460, Seq. ID No. 3462, Seq. ID No. 3466, Seq. ID No. 3468, Seq. ID No. 3472, Seq. ID No. 3474, Seq. ID No. 3476, Seq. ID No. 3480, Seq. ID No. 3484, Seq. ID No. 3486, Seq. ID No. 3488, Seq. ID No. 3490, Seq. ID No. 3496, Seq. ID No. 3498, Seq. ID No. 3500, Seq. ID No. 3502, Seq. ID No. 3506, Seq. ID No. 3508, Seq. ID No. 3510, Seq. ID No. 3512, Seq. ID No. 3514, Seq. ID No. 3518, Seq. ID No. 3520, Seq. ID No. 3522, Seq. ID No. 3526, Seq. ID No. 3530, Seq. ID No. 3532, Seq. ID No. 3534, Seq. ID No. 3536, Seq. ID No. 3538, Seq. ID No. 3540, Seq. ID No. 3542, Seq. ID No. 3544, Seq. ID No. 3546, Seq. ID No. 3548, Seq. ID No. 3550, Seq. ID No. 3552, Seq. ID No. 3554, Seq. ID No. 3556, Seq. ID No. 3558, Seq. ID No. 3560, Seq. ID No. 3562, Seq. ID No. 3564, Seq. ID No. 3566, Seq. ID No. 3568, Seq. ID No. 3570, Seq. ID No. 3572, Seq. ID No. 3574, Seq. ID No. 3576, Seq. ID No. 3580, Seq. ID No. 3582, Seq. ID No. 3584, Seq. ID No. 3588, Seq. ID No. 3590, Seq. ID No. 3596, Seq. ID No. 3598, Seq. ID No. 3600, Seq. ID No. 3604, Seq. ID No. 3606, Seq. ID No. 3608, Seq. ID No. 3610, Seq. ID No. 3612, Seq. ID No. 3614, Seq. ID No. 3616, Seq. ID No. 3618, Seq. ID No. 3620, Seq. ID No. 3622, Seq. ID No. 3624, Seq. ID No. 3628, Seq. ID No. 3630, Seq. ID No. 3636, Seq. ID No. 3638, Seq. ID No. 3640, Seq. ID No. 3642, Seq. ID No. 3646, Seq. ID No. 3648, Seq. ID No. 3650, Seq. ID No. 3652, Seq. ID No. 3654, Seq. ID No. 3658, Seq. ID No. 3660, Seq. ID No. 3664, Seq. ID No. 3666, Seq. ID No. 3668, Seq. ID No. 3672, Seq. ID No. 3674, Seq. ID No. 3676, Seq. ID No. 3678, Seq. ID No. 3680, Seq. ID No. 3682, Seq. ID No. 3684, Seq. ID No. 3686, Seq. ID No. 3688, Seq. ID No. 3690, Seq. ID No. 3692, Seq. ID No. 3694, Seq. ID No. 3696, Seq. ID No. 3700, Seq. ID No. 3702, Seq. ID No. 3704, Seq. ID No. 3706, Seq. ID No. 3708, Seq. ID No. 3710, Seq. ID No. 3714, Seq. ID No. 3716, Seq. ID No. 3718, Seq. ID No. 3728, Seq. ID No. 3730, Seq. ID No. 3734, Seq. ID No. 3738, Seq. ID No. 3740, Seq. ID No. 3742, Seq. ID No. 3746, Seq. ID No. 3748, Seq. ID No. 3760, Seq. ID No. 3768, Seq. ID No. 3770, Seq. ID No. 3772, Seq. ID No. 3780, Seq. ID No. 3784, Seq. ID No. 3786, Seq. ID No. 3790, Seq. ID No. 3792, Seq. ID No. 3796, Seq. ID No. 3798, Seq. ID No. 3804, Seq. ID No. 3806, Seq. ID No. 3808, Seq. ID No. 3810, Seq. ID No. 3812, Seq. ID No. 3814, Seq. ID No. 3816, Seq. ID No. 3818, Seq. ID No. 3820, Seq. ID No. 3824, Seq. ID No. 3826, Seq. ID No. 3832, Seq. ID No. 3834, Seq. ID No. 3836, Seq. ID No. 3842, Seq. ID No. 3844, Seq. ID No. 3848, Seq. ID No. 3856, Seq. ID No. 3858, Seq. ID No. 3864, Seq. ID No. 3868, Seq. ID No. 3872, Seq. ID No. 3874, Seq. ID No. 3876, Seq. ID No. 3878, Seq. ID No. 3882, Seq. ID No. 3884, Seq. ID No. 3886, Seq. ID No. 3894, Seq. ID No. 3896, Seq. ID No. 3900, Seq. ID No. 3902, Seq. ID No. 3906, Seq. ID No. 3908, Seq. ID No. 3912, Seq. ID No. 3914, Seq. ID No. 3916, Seq. ID No. 3920, Seq. ID No. 3922, Seq. ID No. 3924, Seq. ID No. 3926, Seq. ID No. 3928, Seq. ID No. 3930, Seq. ID No. 3932, Seq. ID No. 3934, Seq. ID No. 3936, Seq. ID No. 3940, Seq. ID No. 3942, Seq. ID No. 3944, Seq. ID No. 3946, Seq. ID No. 3948, Seq. ID No. 3950, Seq. ID No. 3952, Seq. ID No. 3954, Seq. ID No. 3956, Seq. ID No. 3958, Seq. ID No. 3960, Seq. ID No. 3962, Seq. ID No. 3966, Seq. ID No. 3968, Seq. ID No. 3970, Seq. ID No. 3972, Seq. ID No. 3976, Seq. ID No. 3980, Seq. ID No. 3982, Seq. ID No. 3984, Seq. ID No. 3986, Seq. ID No. 3988, Seq. ID No. 3992, Seq. ID No. 3996, Seq. ID No. 3998, Seq. ID No. 4000, Seq. ID No. 4004, Seq. ID No. 4008, Seq. ID No. 4010, Seq. ID No. 4016, Seq. ID No. 4018, Seq. ID No. 4022, Seq. ID No. 4024, Seq. ID No. 4030, Seq. ID No. 4036, Seq. ID No. 4038, Seq. ID No. 4040, Seq. ID No. 4050, Seq. ID No. 4052, Seq. ID No. 4054, Seq. ID No. 4056, Seq. ID No. 4058, Seq. ID No. 4062, Seq. ID No. 4076, Seq. ID No. 4080, Seq. ID No. 4086, Seq. ID No. 4088, Seq. ID No. 4090, Seq. ID No. 4092, Seq. ID No. 4094, Seq. ID No. 4096, Seq. ID No. 4100, Seq. ID No. 4106, Seq. ID No. 4108, Seq. ID No. 4110, Seq. ID No. 4112, Seq. ID No. 4114, Seq. ID No. 4118, Seq. ID No. 4120, Seq. ID No. 4122, Seq. ID No. 4124, Seq. ID No. 4126, Seq. ID No. 4128, Seq. ID No. 4130, Seq. ID No. 4132, Seq. ID No. 4134, Seq. ID No. 4136, Seq. ID No. 4138, Seq. ID No. 4140, Seq. ID No. 4142, Seq. ID No. 4144, Seq. ID No. 4146, Seq. ID No. 4150, Seq. ID No. 4154, Seq. ID No. 4156, Seq. ID No. 4158, Seq. ID No. 4162, Seq. ID No. 4164, Seq. ID No. 4168, Seq. ID No. 4172, Seq. ID No. 4174, Seq. ID No. 4176, Seq. ID No. 4178, Seq. ID No. 4180, Seq. ID No. 4182, Seq. ID No. 4186, Seq. ID No. 4188, Seq. ID No. 4190, Seq. ID No. 4192, Seq. ID No. 4194, Seq. ID No. 4196, Seq. ID No. 4198, Seq. ID No. 4200, Seq. ID No. 4204, Seq. ID No. 4206, Seq. ID No. 4208, Seq. ID No. 4210, Seq. ID No. 4212, Seq. ID No. 4220, Seq. ID No. 4230, Seq. ID No. 4234, Seq. ID No. 4236, Seq. ID No. 4238, Seq. ID No. 4240, Seq. ID No. 4244, Seq. ID No. 4250, Seq. ID No. 4252, Seq. ID No. 4254, Seq. ID No. 4256, Seq. ID No. 4260, Seq. ID No. 4264, Seq. ID No. 4266, Seq. ID No. 4268, Seq. ID No. 4270, Seq. ID No. 4272, Seq. ID No. 4274, Seq. ID No. 4276, Seq. ID No. 4282, Seq. ID No. 4284, Seq. ID No. 4286, Seq. ID No. 4288, Seq. ID No. 4290, Seq. ID No. 4292, Seq. ID No. 4294, Seq. ID No. 4296, Seq. ID No. 4298, Seq. ID No. 4300, Seq. ID No. 4302, Seq. ID No. 4304, Seq. ID No. 4308, Seq. ID No. 4310, Seq. ID No. 4314, Seq. ID No. 4316, Seq. ID No. 4318, Seq. ID No. 4320, Seq. ID No. 4322, Seq. ID No. 4324, Seq. ID No. 4326, Seq. ID No. 4330, Seq. ID No. 4332, Seq. ID No. 4334, Seq. ID No. 4336, Seq. ID No. 4338, Seq. ID No. 4340, Seq. ID No. 4344, Seq. ID No. 4346, Seq. ID No. 4348, Seq. ID No. 4352, Seq. ID No. 4354, Seq. ID No. 4356, Seq. ID No. 4360, Seq. ID No. 4362, Seq. ID No. 4364, Seq. ID No. 4366, Seq. ID No. 4368, Seq. ID No. 4370, Seq. ID No. 4376, Seq. ID No. 4378, Seq. ID No. 4380, Seq. ID No. 4384, Seq. ID No. 4390, Seq. ID No. 4392, Seq. ID No. 4394, Seq. ID No. 4396, Seq. ID No. 4398, Seq. ID No. 4400, Seq. ID No. 4402, Seq. ID No. 4404, Seq. ID No. 4406, Seq. ID No. 4408, Seq. ID No. 4410, Seq. ID No. 4412, Seq. ID No. 4414, Seq. ID No. 4416, Seq. ID No. 4418, Seq. ID No. 4420, Seq. ID No. 4422, Seq. ID No. 4424, Seq. ID No. 4426, Seq. ID No. 4428, Seq. ID No. 4430, Seq. ID No. 4432, Seq. ID No. 4436, Seq. ID No. 4438, Seq. ID No. 4440, Seq. ID No. 4442, Seq. ID No. 4450, Seq. ID No. 4452, Seq. ID No. 4454, Seq. ID No. 4456, Seq. ID No. 4458, Seq. ID No. 4460, Seq. ID No. 4462, Seq. ID No. 4466, Seq. ID No. 4468, Seq. ID No. 4472, Seq. ID No. 4476, Seq. ID No. 4478, Seq. ID No. 4480, Seq. ID No. 4482, Seq. ID No. 4486, Seq. ID No. 4488, Seq. ID No. 4490, Seq. ID No. 4492, Seq. ID No. 4494, Seq. ID No. 4496, Seq. ID No. 4498, Seq. ID No. 4502, Seq. ID No. 4504, Seq. ID No. 4506, Seq. ID No. 4508, Seq. ID No. 4510, Seq. ID No. 4512, Seq. ID No. 4514, Seq. ID No. 4516, Seq. ID No. 4520, Seq. ID No. 4522, Seq. ID No. 4524, Seq. ID No. 4526, Seq. ID No. 4528, Seq. ID No. 4530, Seq. ID No. 4532, Seq. ID No. 4534, Seq. ID No. 4538, Seq. ID No. 4542, Seq. ID No. 4546, Seq. ID No. 4548, Seq. ID No. 4550, Seq. ID No. 4552, Seq. ID No. 4554, Seq. ID No. 4556, Seq. ID No. 4560, Seq. ID No. 4562, Seq. ID No. 4566, Seq. ID No. 4568, Seq. ID No. 4572, Seq. ID No. 4574, Seq. ID No. 4576, Seq. ID No. 4578, Seq. ID No. 4582, Seq. ID No. 4586, Seq. ID No. 4590, Seq. ID No. 4592, Seq. ID No. 4598, Seq. ID No. 4600, Seq. ID No. 4602, Seq. ID No. 4604, Seq. ID No. 4606, Seq. ID No. 4608, Seq. ID No. 4610, Seq. ID No. 4612, Seq. ID No. 4614, Seq. ID No. 4616, Seq. ID No. 4618, Seq. ID No. 4620, Seq. ID No. 4622, Seq. ID No. 4624, Seq. ID No. 4628, Seq. ID No. 4632, Seq. ID No. 4638, Seq. ID No. 4642, Seq. ID No. 4644, Seq. ID No. 4646, Seq. ID No. 4648, Seq. ID No. 4650, Seq. ID No. 4654, Seq. ID No. 4660, Seq. ID No. 4662, Seq. ID No. 4664, Seq. ID No. 4666, Seq. ID No. 4668, Seq. ID No. 4670, Seq. ID No. 4672, Seq. ID No. 4674, Seq. ID No. 4676, Seq. ID No. 4678, Seq. ID No. 4680, Seq. ID No. 4684, Seq. ID No. 4686, Seq. ID No. 4688, Seq. ID No. 4692, Seq. ID No. 4694, Seq. ID No. 4696, Seq. ID No. 4700, Seq. ID No. 4702, Seq. ID No. 4704, Seq. ID No. 4706, Seq. ID No. 4714, Seq. ID No. 4718, Seq. ID No. 4720, Seq. ID No. 4722, Seq. ID No. 4728, Seq. ID No. 4730, Seq. ID No. 4734, Seq. ID No. 4736, Seq. ID No. 4738, Seq. ID No. 4740, Seq. ID No. 4742, Seq. ID No. 4744, Seq. ID No. 4748, Seq. ID No. 4750, Seq. ID No. 4752, Seq. ID No. 4756, Seq. ID No. 4758, Seq. ID No. 4764, Seq. ID No. 4766, Seq. ID No. 4768, Seq. ID No. 4770, Seq. ID No. 4774, Seq. ID No. 4776, Seq. ID No. 4778, Seq. ID No. 4780, Seq. ID No. 4782, Seq. ID No. 4788, Seq. ID No. 4790, Seq. ID No. 4792, Seq. ID No. 4794, Seq. ID No. 4796, Seq. ID No. 4798, Seq. ID No. 4802, Seq. ID No. 4804, Seq. ID No. 4806, Seq. ID No. 4810, Seq. ID No. 4812, Seq. ID No. 4814, Seq. ID No. 4816, Seq. ID No. 4818, Seq. ID No. 4820, Seq. ID No. 4826, Seq. ID No. 4828, Seq. ID No. 4830, Seq. ID No. 4832, Seq. ID No. 4834, Seq. ID No. 4838, Seq. ID No. 4840, Seq. ID No. 4842, Seq. ID No. 4844, Seq. ID No. 4846, Seq. ID No. 4850, Seq. ID No. 4852, Seq. ID No. 4854, Seq. ID No. 4856, Seq. ID No. 4862, Seq. ID No. 4864, Seq. ID No. 4868, Seq. ID No. 4876, Seq. ID No. 4878, Seq. ID No. 4880, Seq. ID No. 4882, Seq. ID No. 4884, Seq. ID No. 4890, Seq. ID No. 4892, Seq. ID No. 4894, Seq. ID No. 4896, Seq. ID No. 4898, Seq. ID No. 4900, Seq. ID No. 4902, Seq. ID No. 4904, Seq. ID No. 4906, Seq. ID No. 4908, Seq. ID No. 4910, Seq. ID No. 4912, Seq. ID No. 4914, Seq. ID No. 4916, Seq. ID No. 4918, Seq. ID No. 4920, Seq. ID No. 4922, Seq. ID No. 4924, Seq. ID No. 4928, Seq. ID No. 4932, Seq. ID No. 4936, Seq. ID No. 4938, Seq. ID No. 4940, Seq. ID No. 4942, Seq. ID No. 4944, Seq. ID No. 4946, Seq. ID No. 4948, Seq. ID No. 4950, Seq. ID No. 4952, Seq. ID No. 4954, Seq. ID No. 4958, Seq. ID No. 4960, Seq. ID No. 4962, Seq. ID No. 4964, Seq. ID No. 4974, Seq. ID No. 4976, Seq. ID No. 4978, Seq. ID No. 4980, Seq. ID No. 4982, Seq. ID No. 4984, Seq. ID No. 4986, Seq. ID No. 4988, Seq. ID No. 4990, Seq. ID No. 4992, Seq. ID No. 4994, Seq. ID No. 4996, Seq. ID No. 4998, Seq. ID No. 5000, Seq. ID No. 5004, Seq. ID No. 5006, Seq. ID No. 5008, Seq. ID No. 5010, Seq. ID No. 5012, Seq. ID No. 5014, Seq. ID No. 5018, Seq. ID No. 5020, Seq. ID No. 5022, Seq. ID No. 5024, Seq. ID No. 5026, Seq. ID No. 5030, Seq. ID No. 5032, Seq. ID No. 5034, Seq. ID No. 5036, Seq. ID No. 5042, Seq. ID No. 5044, Seq. ID No. 5046, Seq. ID No. 5048, Seq. ID No. 5058, Seq. ID No. 5060, Seq. ID No. 5064, Seq. ID No. 5066, Seq. ID No. 5068, Seq. ID No. 5070, Seq. ID No. 5076, Seq. ID No. 5078, Seq. ID No. 5080, Seq. ID No. 5082, Seq. ID No. 5084, Seq. ID No. 5086, Seq. ID No. 5088, Seq. ID No. 5092, Seq. ID No. 5100, Seq. ID No. 5102, Seq. ID No. 5104, Seq. ID No. 5110, Seq. ID No. 5112, Seq. ID No. 5114, Seq. ID No. 5116, Seq. ID No. 5118, Seq. ID No. 5122, Seq. ID No. 5126, Seq. ID No. 5128, Seq. ID No. 5134, Seq. ID No. 5140, Seq. ID No. 5142, Seq. ID No. 5146, Seq. ID No. 5148, Seq. ID No. 5150, Seq. ID No. 5152, Seq. ID No. 5156, Seq. ID No. 5158, Seq. ID No. 5160, Seq. ID No. 5162, Seq. ID No. 5166, Seq. ID No. 5168, Seq. ID No. 5170, Seq. ID No. 5178, Seq. ID No. 5182, Seq. ID No. 5184, Seq. ID No. 5186, Seq. ID No. 5188, Seq. ID No. 5190, Seq. ID No. 5192, Seq. ID No. 5194, Seq. ID No. 5196, Seq. ID No. 5198, Seq. ID No. 5200, Seq. ID No. 5202, Seq. ID No. 5204, Seq. ID No. 5206, Seq. ID No. 5210, Seq. ID No. 5212, Seq. ID No. 5216, Seq. ID No. 5220, Seq. ID No. 5222, Seq. ID No. 5230, Seq. ID No. 5232, Seq. ID No. 5240, Seq. ID No. 5242, Seq. ID No. 5244, Seq. ID No. 5246, Seq. ID No. 5252, Seq. ID No. 5254, Seq. ID No. 5256, Seq. ID No. 5262, Seq. ID No. 5264, Seq. ID No. 5266, Seq. ID No. 5268, Seq. ID No. 5278, Seq. ID No. 5280, Seq. ID No. 5282, Seq. ID No. 5286, Seq. ID No. 5288, Seq. ID No. 5292, Seq. ID No. 5296, Seq. ID No. 5298, Seq. ID No. 5300, Seq. ID No. 5302, Seq. ID No. 5304, Seq. ID No. 5306, Seq. ID No. 5308, Seq. ID No. 5310, Seq. ID No. 5312, Seq. ID No. 5314, Seq. ID No. 5318, Seq. ID No. 5320, Seq. ID No. 5322, Seq. ID No. 5324, Seq. ID No. 5328, Seq. ID No. 5330, Seq. ID No. 5332, Seq. ID No. 5334, Seq. ID No. 5336, Seq. ID No. 5338, Seq. ID No. 5344, Seq. ID No. 5346, Seq. ID No. 5350, Seq. ID No. 5352, Seq. ID No. 5358, Seq. ID No. 5360, Seq. ID No. 5366, Seq. ID No. 5368, Seq. ID No. 5374, Seq. ID No. 5378, Seq. ID No. 5380, Seq. ID No. 5382, Seq. ID No. 5384, Seq. ID No. 5388, Seq. ID No. 5390, Seq. ID No. 5392, Seq. ID No. 5394, Seq. ID No. 5398, Seq. ID No. 5400, Seq. ID No. 5402, Seq. ID No. 5404, Seq. ID No. 5406, Seq. ID No. 5408, Seq. ID No. 5410, Seq. ID No. 5412, Seq. ID No. 5416, Seq. ID No. 5418, Seq. ID No. 5420, Seq. ID No. 5422, Seq. ID No. 5424, Seq. ID No. 5426, Seq. ID No. 5428, Seq. ID No. 5432, Seq. ID No. 5434, Seq. ID No. 5436, Seq. ID No. 5438, Seq. ID No. 5440, Seq. ID No. 5442, Seq. ID No. 5444, Seq. ID No. 5448, Seq. ID No. 5450, Seq. ID No. 5452, Seq. ID No. 5454, Seq. ID No. 5456, Seq. ID No. 5458, Seq. ID No. 5468, Seq. ID No. 5472, Seq. ID No. 5474, Seq. ID No. 5478, Seq. ID No. 5480, Seq. ID No. 5482, Seq. ID No. 5492, Seq. ID No. 5494, Seq. ID No. 5496, Seq. ID No. 5500, Seq. ID No. 5504, Seq. ID No. 5510, Seq. ID No. 5514, Seq. ID No. 5516, Seq. ID No. 5518, Seq. ID No. 5520, Seq. ID No. 5522, Seq. ID No. 5528, Seq. ID No. 5530, Seq. ID No. 5532, Seq. ID No. 5534, Seq. ID No. 5538, Seq. ID No. 5540, Seq. ID No. 5542, Seq. ID No. 5544, Seq. ID No. 5546, Seq. ID No. 5548, Seq. ID No. 5550, Seq. ID No. 5552, Seq. ID No. 5554, Seq. ID No. 5558, Seq. ID No. 5560, Seq. ID No. 5564, Seq. ID No. 5568, Seq. ID No. 5570, Seq. ID No. 5576, Seq. ID No. 5578, Seq. ID No. 5582, Seq. ID No. 5584, Seq. ID No. 5586, Seq. ID No. 5590, Seq. ID No. 5592, Seq. ID No. 5594, Seq. ID No. 5596, Seq. ID No. 5600, Seq. ID No. 5602, Seq. ID No. 5608, Seq. ID No. 5614, Seq. ID No. 5616, Seq. ID No. 5618, Seq. ID No. 5620, Seq. ID No. 5622, Seq. ID No. 5626, Seq. ID No. 5628, Seq. ID No. 5630, Seq. ID No. 5632, Seq. ID No. 5638, Seq. ID No. 5640, Seq. ID No. 5642, Seq. ID No. 5646, Seq. ID No. 5648, Seq. ID No. 5650, Seq. ID No. 5652, Seq. ID No. 5656, Seq. ID No. 5658, Seq. ID No. 5662, Seq. ID No. 5666, Seq. ID No. 5668, Seq. ID No. 5670, Seq. ID No. 5678, Seq. ID No. 5680, Seq. ID No. 5684, Seq. ID No. 5686, Seq. ID No. 5688, Seq. ID No. 5690, Seq. ID No. 5692, Seq. ID No. 5694, Seq. ID No. 5698, Seq. ID No. 5700, Seq. ID No. 5702, Seq. ID No. 5704, Seq. ID No. 5706, Seq. ID No. 5708, Seq. ID No. 5712, Seq. ID No. 5714, Seq. ID No. 5716, Seq. ID No. 5718, Seq. ID No. 5720, Seq. ID No. 5722, Seq. ID No. 5724, Seq. ID No. 5726, Seq. ID No. 5728, Seq. ID No. 5736, Seq. ID No. 5740, Seq. ID No. 5742, Seq. ID No. 5744, Seq. ID No. 5746, Seq. ID No. 5748, Seq. ID No. 5750, Seq. ID No. 5752, Seq. ID No. 5754, Seq. ID No. 5756, Seq. ID No. 5758, Seq. ID No. 5760, Seq. ID No. 5762, Seq. ID No. 5770, Seq. ID No. 5772, Seq. ID No. 5778, Seq. ID No. 5780, Seq. ID No. 5784, Seq. ID No. 5788, Seq. ID No. 5792, Seq. ID No. 5796, Seq. ID No. 5800, Seq. ID No. 5802, Seq. ID No. 5808, Seq. ID No. 5810, Seq. ID No. 5814, Seq. ID No. 5816, Seq. ID No. 5820, Seq. ID No. 5822, Seq. ID No. 5824, Seq. ID No. 5826, Seq. ID No. 5828, Seq. ID No. 5830, Seq. ID No. 5832, Seq. ID No. 5834, Seq. ID No. 5836, Seq. ID No. 5838, Seq. ID No. 5840, Seq. ID No. 5842, Seq. ID No. 5846, Seq. ID No. 5848, Seq. ID No. 5850, Seq. ID No. 5852, Seq. ID No. 5856, Seq. ID No. 5858, Seq. ID No. 5860, Seq. ID No. 5862, Seq. ID No. 5864, Seq. ID No. 5866, Seq. ID No. 5870, Seq. ID No. 5872, Seq. ID No. 5874, Seq. ID No. 5876, Seq. ID No. 5880, Seq. ID No. 5882, Seq. ID No. 5884, Seq. ID No. 5890, Seq. ID No. 5896, Seq. ID No. 5898, Seq. ID No. 5902, Seq. ID No. 5904, Seq. ID No. 5912, Seq. ID No. 5914, Seq. ID No. 5916, Seq. ID No. 5918, Seq. ID No. 5920, Seq. ID No. 5928, Seq. ID No. 5930, Seq. ID No. 5934, Seq. ID No. 5936, Seq. ID No. 5938, Seq. ID No. 5942, Seq. ID No. 5946, Seq. ID No. 5948, Seq. ID No. 5952, Seq. ID No. 5960, Seq. ID No. 5962, Seq. ID No. 5964, Seq. ID No. 5966, Seq. ID No. 5968, Seq. ID No. 5970, Seq. ID No. 5972, Seq. ID No. 5974, Seq. ID No. 5978, Seq. ID No. 5980, Seq. ID No. 5982, Seq. ID No. 5986, Seq. ID No. 5988, Seq. ID No. 5990, Seq. ID No. 5992, Seq. ID No. 5994, Seq. ID No. 5996, Seq. ID No. 6000, Seq. ID No. 6002, Seq. ID No. 6004, Seq. ID No. 6010, Seq. ID No. 6012, Seq. ID No. 6014, Seq. ID No. 6016, Seq. ID No. 6018, Seq. ID No. 6026, Seq. ID No. 6028, Seq. ID No. 6030, Seq. ID No. 6032, Seq. ID No. 6034, Seq. ID No. 6036, Seq. ID No. 6040, Seq. ID No. 6042, Seq. ID No. 6044, Seq. ID No. 6046, Seq. ID No. 6050, Seq. ID No. 6052, Seq. ID No. 6054, Seq. ID No. 6056, Seq. ID No. 6058, Seq. ID No. 6062, Seq. ID No. 6064, Seq. ID No. 6066, Seq. ID No. 6070, Seq. ID No. 6072, Seq. ID No. 6074, Seq. ID No. 6078, Seq. ID No. 6080, Seq. ID No. 6086, Seq. ID No. 6088, Seq. ID No. 6090, Seq. ID No. 6094, Seq. ID No. 6096, Seq. ID No. 6102, Seq. ID No. 6104, Seq. ID No. 6110, Seq. ID No. 6112, Seq. ID No. 6118, Seq. ID No. 6122, Seq. ID No. 6124, Seq. ID No. 6130, Seq. ID No. 6132, Seq. ID No. 6134, Seq. ID No. 6136, Seq. ID No. 6138, Seq. ID No. 6140, Seq. ID No. 6142, Seq. ID No. 6146, Seq. ID No. 6152, Seq. ID No. 6156, Seq. ID No. 6158, Seq. ID No. 6160, Seq. ID No. 6166, Seq. ID No. 6168, Seq. ID No. 6170, Seq. ID No. 6172, Seq. ID No. 6176, Seq. ID No. 6178, Seq. ID No. 6182, Seq. ID No. 6188, Seq. ID No. 6194, Seq. ID No. 6196, Seq. ID No. 6198, Seq. ID No. 6200, Seq. ID No. 6202, Seq. ID No. 6210, Seq. ID No. 6214, Seq. ID No. 6216, Seq. ID No. 6218, Seq. ID No. 6220, Seq. ID No. 6232, Seq. ID No. 6234, Seq. ID No. 6236, Seq. ID No. 6240, Seq. ID No. 6242, Seq. ID No. 6244, Seq. ID No. 6250, Seq. ID No. 6258, Seq. ID No. 6260, Seq. ID No. 6262, Seq. ID No. 6264, Seq. ID No. 6268, Seq. ID No. 6270, Seq. ID No. 6272, Seq. ID No. 6276, Seq. ID No. 6278, Seq. ID No. 6280, Seq. ID No. 6282, Seq. ID No. 6284, Seq. ID No. 6286, Seq. ID No. 6288, Seq. ID No. 6294, Seq. ID No. 6296, Seq. ID No. 6298, Seq. ID No. 6300, Seq. ID No. 6306, Seq. ID No. 6310, Seq. ID No. 6312, Seq. ID No. 6316, Seq. ID No. 6318, Seq. ID No. 6320, Seq. ID No. 6322, Seq. ID No. 6324, Seq. ID No. 6326, Seq. ID No. 6328, Seq. ID No. 6330, Seq. ID No. 6332, Seq. ID No. 6336, Seq. ID No. 6338, Seq. ID No. 6342, Seq. ID No. 6346, Seq. ID No. 6350, Seq. ID No. 6352, Seq. ID No. 6354, Seq. ID No. 6360, Seq. ID No. 6362, Seq. ID No. 6368, Seq. ID No. 6370, Seq. ID No. 6372, Seq. ID No. 6374, Seq. ID No. 6376, Seq. ID No. 6378, Seq. ID No. 6380, Seq. ID No. 6382, Seq. ID No. 6386, Seq. ID No. 6390, Seq. ID No. 6394, Seq. ID No. 6396, Seq. ID No. 6400, Seq. ID No. 6410, Seq. ID No. 6412, Seq. ID No. 6414, Seq. ID No. 6418, Seq. ID No. 6422, Seq. ID No. 6424, Seq. ID No. 6426, Seq. ID No. 6428, Seq. ID No. 6430, Seq. ID No. 6432, Seq. ID No. 6442, Seq. ID No. 6444, Seq. ID No. 6446, Seq. ID No. 6452, Seq. ID No. 6454, Seq. ID No. 6460, Seq. ID No. 6462, Seq. ID No. 6464, Seq. ID No. 6466, Seq. ID No. 6468, Seq. ID No. 6470, Seq. ID No. 6472, Seq. ID No. 6474, Seq. ID No. 6480, Seq. ID No. 6484, Seq. ID No. 6494, Seq. ID No. 6496, Seq. ID No. 6498, Seq. ID No. 6502, Seq. ID No. 6504, Seq. ID No. 6506, Seq. ID No. 6508, Seq. ID No. 6512, Seq. ID No. 6518, Seq. ID No. 6524, Seq. ID No. 6526, Seq. ID No. 6536, Seq. ID No. 6538, Seq. ID No. 6540, Seq. ID No. 6542, Seq. ID No. 6544, Seq. ID No. 6546, Seq. ID No. 6548, Seq. ID No. 6550, Seq. ID No. 6552, Seq. ID No. 6554, Seq. ID No. 6556, Seq. ID No. 6558, Seq. ID No. 6560, Seq. ID No. 6564, Seq. ID No. 6574, Seq. ID No. 6576, Seq. ID No. 6578, Seq. ID No. 6580, Seq. ID No. 6584, Seq. ID No. 6586, Seq. ID No. 6588, Seq. ID No. 6592, Seq. ID No. 6598, Seq. ID No. 6602, Seq. ID No. 6604, Seq. ID No. 6606, Seq. ID No. 6610, Seq. ID No. 6612, Seq. ID No. 6614, Seq. ID No. 6616, Seq. ID No. 6618, Seq. ID No. 6620, Seq. ID No. 6622, Seq. ID No. 6624, Seq. ID No. 6628, Seq. ID No. 6630, Seq. ID No. 6632, Seq. ID No. 6634, Seq. ID No. 6638, Seq. ID No. 6640, Seq. ID No. 6644, Seq. ID No. 6646, and Seq. ID No. 6650.

[0056] In yet another preferred embodiment, the polypeptide is selected from the Alloiococcus otitidis polypeptides identified by the Applicants' assignee's ORF finder program that searches for a transmembrane domain between two Stop codons and a Start codon immediately upstream of this transmembrane region, and is selected from one of Seq. ID No. 8, Seq. ID No. 10, Seq. ID No. 34, Seq. ID No. 48, Seq. ID No. 68, Seq. ID No. 86, Seq. ID No. 88, Seq. ID No. 124, Seq. ID No. 134, Seq. ID No. 142, Seq. ID No. 160, Seq. ID No. 164, Seq. ID No. 192, Seq. ID No. 210, Seq. ID No. 212, Seq. ID No. 216, Seq. ID No. 218, Seq. ID No. 226, Seq. ID No. 236, Seq. ID No. 238, Seq. ID No. 250, Seq. ID No. 252, Seq. ID No. 256, Seq. ID No. 272, Seq. ID No. 278, Seq. ID No. 286, Seq. ID No. 288, Seq. ID No. 290, Seq. ID No. 328, Seq. ID No. 330, Seq. ID No. 374, Seq. ID No. 376, Seq. ID No. 420, Seq. ID No. 488, Seq. ID No. 498, Seq. ID No. 500, Seq. ID No. 504, Seq. ID No. 506, Seq. ID No. 510, Seq. ID No. 512, Seq. ID No. 516, Seq. ID No. 526, Seq. ID No. 528, Seq. ID No. 546, Seq. ID No. 568, Seq. ID No. 570, Seq. ID No. 576, Seq. ID No. 578, Seq. ID No. 580, Seq. ID No. 594, Seq. ID No. 618, Seq. ID No. 638, Seq. ID No. 640, Seq. ID No. 642, Seq. ID No. 646, Seq. ID No. 654, Seq. ID No. 656, Seq. ID No. 660, Seq. ID No. 670, Seq. ID No. 676, Seq. ID No. 678, Seq. ID No. 680, Seq. ID No. 716, Seq. ID No. 718, Seq. ID No. 720, Seq. ID No. 722, Seq. ID No. 724, Seq. ID No. 748, Seq. ID No. 752, Seq. ID No. 756, Seq. ID No. 758, Seq. ID No. 760, Seq. ID No. 762, Seq. ID No. 764, Seq. ID No. 770, Seq. ID No. 778, Seq. ID No. 780, Seq. ID No. 808, Seq. ID No. 810, Seq. ID No. 820, Seq. ID No. 826, Seq. ID No. 864, Seq. ID No. 894, Seq. ID No. 902, Seq. ID No. 936, Seq. ID No. 944, Seq. ID No. 956, Seq. ID No. 968, Seq. ID No. 980, Seq. ID No. 1006, Seq. ID No. 1010, Seq. ID No. 1012, Seq. ID No. 1014, Seq. ID No. 1016, Seq. ID No. 1020, Seq. ID No. 1030, Seq. ID No. 1032, Seq. ID No. 1034, Seq. ID No. 1038, Seq. ID No. 1040, Seq. ID No. 1046, Seq. ID No. 1056, Seq. ID No. 1076, Seq. ID No. 1106, Seq. ID No. 1132, Seq. ID No. 1136, Seq. ID No. 1138, Seq. ID No. 1166, Seq. ID No. 1168, Seq. ID No. 1170, Seq. ID No. 1184, Seq. ID No. 1194, Seq. ID No. 1198, Seq. ID No. 1214, Seq. ID No. 1224, Seq. ID No. 1228, Seq. ID No. 1230, Seq. ID No. 1238, Seq. ID No. 1244, Seq. ID No. 1266, Seq. ID No. 1268, Seq. ID No. 1270, Seq. ID No. 1272, Seq. ID No. 1284, Seq. ID No. 1288, Seq. ID No. 1292, Seq. ID No. 1298, Seq. ID No. 1306, Seq. ID No. 1316, Seq. ID No. 1326, Seq. ID No. 1328, Seq. ID No. 1330, Seq. ID No. 1332, Seq. ID No. 1342, Seq. ID No. 1354, Seq. ID No. 1368, Seq. ID No. 1402, Seq. ID No. 1430, Seq. ID No. 1436, Seq. ID No. 1446, Seq. ID No. 1482, Seq. ID No. 1514, Seq. ID No. 1516, Seq. ID No. 1518, Seq. ID No. 1530, Seq. ID No. 1534, Seq. ID No. 1536, Seq. ID No. 1546, Seq. ID No. 1548, Seq. ID No. 1552, Seq. ID No. 1560, Seq. ID No. 1564, Seq. ID No. 1572, Seq. ID No. 1580, Seq. ID No. 1584, Seq. ID No. 1586, Seq. ID No. 1622, Seq. ID No. 1634, Seq. ID No. 1644, Seq. ID No. 1646, Seq. ID No. 1648, Seq. ID No. 1650, Seq. ID No. 1654, Seq. ID No. 1672, Seq. ID No. 1674, Seq. ID No. 1678, Seq. ID No. 1682, Seq. ID No. 1708, Seq. ID No. 1732, Seq. ID No. 1734, Seq. ID No. 1738, Seq. ID No. 1754, Seq. ID No. 1758, Seq. ID No. 1766, Seq. ID No. 1768, Seq. ID No. 1788, Seq. ID No. 1792, Seq. ID No. 1798, Seq. ID No. 1806, Seq. ID No. 1820, Seq. ID No. 1822, Seq. ID No. 1824, Seq. ID No. 1840, Seq. ID No. 1870, Seq. ID No. 1876, Seq. ID No. 1892, Seq. ID No. 1894, Seq. ID No. 1896, Seq. ID No. 1924, Seq. ID No. 1928, Seq. ID No. 1970, Seq. ID No. 1982, Seq. ID No. 1992, Seq. ID No. 1994, Seq. ID No. 2014, Seq. ID No. 2018, Seq. ID No. 2028, Seq. ID No. 2034, Seq. ID No. 2042, Seq. ID No. 2050, Seq. ID No. 2054, Seq. ID No. 2088, Seq. ID No. 2090, Seq. ID No. 2106, Seq. ID No. 2116, Seq. ID No. 2122, Seq. ID No. 2128, Seq. ID No. 2152, Seq. ID No. 2160, Seq. ID No. 2172, Seq. ID No. 2174, Seq. ID No. 2178, Seq. ID No. 2188, Seq. ID No. 2238, Seq. ID No. 2240, Seq. ID No. 2246, Seq. ID No. 2250, Seq. ID No. 2272, Seq. ID No. 2284, Seq. ID No. 2290, Seq. ID No. 2292, Seq. ID No. 2294, Seq. ID No. 2296, Seq. ID No. 2304, Seq. ID No. 2306, Seq. ID No. 2308, Seq. ID No. 2318, Seq. ID No. 2320, Seq. ID No. 2322, Seq. ID No. 2324, Seq. ID No. 2326, Seq. ID No. 2328, Seq. ID No. 2334, Seq. ID No. 2344, Seq. ID No. 2348, Seq. ID No. 2350, Seq. ID No. 2352, Seq. ID No. 2354, Seq. ID No. 2356, Seq. ID No. 2358, Seq. ID No. 2366, Seq. ID No. 2390, Seq. ID No. 2392, Seq. ID No. 2408, Seq. ID No. 2420, Seq. ID No. 2422, Seq. ID No. 2428, Seq. ID No. 2430, Seq. ID No. 2434, Seq. ID No. 2450, Seq. ID No. 2460, Seq. ID No. 2490, Seq. ID No. 2498, Seq. ID No. 2504, Seq. ID No. 2508, Seq. ID No. 2516, Seq. ID No. 2524, Seq. ID No. 2526, Seq. ID No. 2532, Seq. ID No. 2536, Seq. ID No. 2538, Seq. ID No. 2542, Seq. ID No. 2544, Seq. ID No. 2546, Seq. ID No. 2556, Seq. ID No. 2558, Seq. ID No. 2570, Seq. ID No. 2572, Seq. ID No. 2584, Seq. ID No. 2592, Seq. ID No. 2598, Seq. ID No. 2600, Seq. ID No. 2602, Seq. ID No. 2608, Seq. ID No. 2612, Seq. ID No. 2622, Seq. ID No. 2630, Seq. ID No. 2652, Seq. ID No. 2680, Seq. ID No. 2694, Seq. ID No. 2702, Seq. ID No. 2704, Seq. ID No. 2706, Seq. ID No. 2708, Seq. ID No. 2732, Seq. ID No. 2734, Seq. ID No. 2784, Seq. ID No. 2786, Seq. ID No. 2814, Seq. ID No. 2816, Seq. ID No. 2824, Seq. ID No. 2836, Seq. ID No. 2838, Seq. ID No. 2842, Seq. ID No. 2854, Seq. ID No. 2874, Seq. ID No. 2876, Seq. ID No. 2882, Seq. ID-No. 2906, Seq. ID No. 2936, Seq. ID No. 2938, Seq. ID No. 2940, Seq. ID No. 2942, Seq. ID No. 2948, Seq. ID No. 2950, Seq. ID No. 2970, Seq. ID No. 2974, Seq. ID No. 2978, Seq. ID No. 2982, Seq. ID No. 2988, Seq. ID No. 2992, Seq. ID No. 2996, Seq. ID No. 2998, Seq. ID No. 3006, Seq. ID No. 3008, Seq. ID No. 3014, Seq. ID No. 3024, Seq. ID No. 3026, Seq. ID No. 3028, Seq. ID No. 3030, Seq. ID No. 3032, Seq. ID No. 3044, Seq. ID No. 3056, Seq. ID No. 3064, Seq. ID No. 3072, Seq. ID No. 3074, Seq. ID No. 3076, Seq. ID No. 3078, Seq. ID No. 3124, Seq. ID No. 3146, Seq. ID No. 3156, Seq. ID No. 3158, Seq. ID No. 3164, Seq. ID No. 3184, Seq. ID No. 3194, Seq. ID No. 3202, Seq. ID No. 3214, Seq. ID No. 3216, Seq. ID No. 3218, Seq. ID No. 3220, Seq. ID No. 3242, Seq. ID No. 3244, Seq. ID No. 3246, Seq. ID No. 3250, Seq. ID No. 3258, Seq. ID No. 3262, Seq. ID No. 3270, Seq. ID No. 3276, Seq. ID No. 3298, Seq. ID No. 3318, Seq. ID No. 3324, Seq. ID No. 3338, Seq. ID No. 3340, Seq. ID No. 3350, Seq. ID No. 3352, Seq. ID No. 3354, Seq. ID No. 3358, Seq. ID No. 3360, Seq. ID No. 3378, Seq. ID No. 3390, Seq. ID No. 3392, Seq. ID No. 3396, Seq. ID No. 3406, Seq. ID No. 3422, Seq. ID No. 3426, Seq. ID No. 3450, Seq. ID No. 3452, Seq. ID No. 3454, Seq. ID No. 3456, Seq. ID No. 3458, Seq. ID No. 3464, Seq. ID No. 3482, Seq. ID No. 3492, Seq. ID No. 3494, Seq. ID No. 3504, Seq. ID No. 3506, Seq. ID No. 3528, Seq. ID No. 3594, Seq. ID No. 3596, Seq. ID No. 3622, Seq. ID No. 3626, Seq. ID No. 3636, Seq. ID No. 3680, Seq. ID No. 3724, Seq. ID No. 3728, Seq. ID No. 3746, Seq. ID No. 3754, Seq. ID No. 3756, Seq. ID No. 3758, Seq. ID No. 3762, Seq. ID No. 3764, Seq. ID No. 3766, Seq. ID No. 3784, Seq. ID No. 3794, Seq. ID No. 3800, Seq. ID No. 3814, Seq. ID No. 3838, Seq. ID No. 3840, Seq. ID No. 3850, Seq. ID No. 3852, Seq. ID No. 3854, Seq. ID No. 3860, Seq. ID No. 3862, Seq. ID No. 3864, Seq. ID No. 3866, Seq. ID No. 3880, Seq. ID No. 3890, Seq. ID No. 3892, Seq. ID No. 3904, Seq. ID No. 3926, Seq. ID No. 3964, Seq. ID No. 3974, Seq. ID No. 3976, Seq. ID No. 4006, Seq. ID No. 4026, Seq. ID No. 4028, Seq. ID No. 4040, Seq. ID No. 4042, Seq. ID No. 4044, Seq. ID No. 4046, Seq. ID No. 4048, Seq. ID No. 4062, Seq. ID No. 4072, Seq. ID No. 4074, Seq. ID No. 4080, Seq. ID No. 4082, Seq. ID No. 4084, Seq. ID No. 4102, Seq. ID No. 4104, Seq. ID No. 4112, Seq. ID No. 4134, Seq. ID No. 4138, Seq. ID No. 4140, Seq. ID No. 4146, Seq. ID No. 4152, Seq. ID No. 4222, Seq. ID No. 4224, Seq. ID No. 4226, Seq. ID No. 4228, Seq. ID No. 4232, Seq. ID No. 4242, Seq. ID No. 4248, Seq. ID No. 4254, Seq. ID No. 4258, Seq. ID No. 4262, Seq. ID No. 4308, Seq. ID No. 4312, Seq. ID No. 4314, Seq. ID No. 4344, Seq. ID No. 4380, Seq. ID No. 4386, Seq. ID No. 4390, Seq. ID No. 4440, Seq. ID No. 4470, Seq. ID No. 4474, Seq. ID No. 4482, Seq. ID No. 4484, Seq. ID No. 4486, Seq. ID No. 4498, Seq. ID No. 4516, Seq. ID No. 4534, Seq. ID No. 4588, Seq. ID No. 4640, Seq. ID No. 4644, Seq. ID No. 4682, Seq. ID No. 4706, Seq. ID No. 4708, Seq. ID No. 4710, Seq. ID No. 4712, Seq. ID No. 4716, Seq. ID No. 4718, Seq. ID No. 4738, Seq. ID No. 4760, Seq. ID No. 4814, Seq. ID No. 4828, Seq. ID No. 4870, Seq. ID No. 4872, Seq. ID No. 4874, Seq. ID No. 4876, Seq. ID No. 4920, Seq. ID No. 4932, Seq. ID No. 4950, Seq. ID No. 4952, Seq. ID No. 4988, Seq. ID No. 5032, Seq. ID No. 5062, Seq. ID No. 5086, Seq. ID No. 5104, Seq. ID No. 5124, Seq. ID No. 5130, Seq. ID No. 5132, Seq. ID No. 5136, Seq. ID No. 5138, Seq. ID No. 5142, Seq. ID No. 5166, Seq. ID No. 5176, Seq. ID No. 5200, Seq. ID No. 5206, Seq. ID No. 5208, Seq. ID No. 5214, Seq. ID No. 5220, Seq. ID No. 5224, Seq. ID No. 5268, Seq. ID No. 5282, Seq. ID No. 5386, Seq. ID No. 5388, Seq. ID No. 5414, Seq. ID No. 5416, Seq. ID No. 5434, Seq. ID No. 5454, Seq. ID No. 5460, Seq. ID No. 5462, Seq. ID No. 5464, Seq. ID No. 5466, Seq. ID No. 5492, Seq. ID No. 5498, Seq. ID No. 5510, Seq. ID No. 5514, Seq. ID No. 5526, Seq. ID No. 5532, Seq. ID No. 5570, Seq. ID No. 5588, Seq. ID No. 5596, Seq. ID No. 5598, Seq. ID No. 5610, Seq. ID No. 5612, Seq. ID No. 5622, Seq. ID No. 5624, Seq. ID No. 5634, Seq. ID No. 5638, Seq. ID No. 5644, Seq. ID No. 5650, Seq. ID No. 5660, Seq. ID No. 5684, Seq. ID No. 5686, Seq. ID No. 5700, Seq. ID No. 5706, Seq. ID No. 5710, Seq. ID No. 5730, Seq. ID No. 5734, Seq. ID No. 5764, Seq. ID No. 5766, Seq. ID No. 5768, Seq. ID No. 5772, Seq. ID No. 5784, Seq. ID No. 5792, Seq. ID No. 5798, Seq. ID No. 5886, Seq. ID No. 5890, Seq. ID No. 5894, Seq. ID No. 5896, Seq. ID No. 5900, Seq. ID No. 5902, Seq. ID No. 5906, Seq. ID No. 5910, Seq. ID No. 5922, Seq. ID No. 5924, Seq. ID No. 5928, Seq. ID No. 5940, Seq. ID No. 6028, Seq. ID No. 6044, Seq. ID No. 6048, Seq. ID No. 6060, Seq. ID No. 6068, Seq. ID No. 6090, Seq. ID No. 6092, Seq. ID No. 6108, Seq. ID No. 6112, Seq. ID No. 6118, Seq. ID No. 6162, Seq. ID No. 6164, Seq. ID No. 6166, Seq. ID No. 6170, Seq. ID No. 6184, Seq. ID No. 6186, Seq. ID No. 6190, Seq. ID No. 6192, Seq. ID No. 6198, Seq. ID No. 6204, Seq. ID No. 6206, Seq. ID No. 6210, Seq. ID No. 6222, Seq. ID No. 6224, Seq. ID No. 6226, Seq. ID No. 6228, Seq. ID No. 6230, Seq. ID No. 6236, Seq. ID No. 6238, Seq. ID No. 6244, Seq. ID No. 6246, Seq. ID No. 6250, Seq. ID No. 6254, Seq. ID No. 6264, Seq. ID No. 6266, Seq. ID No. 6274, Seq. ID No. 6276, Seq. ID No. 6286, Seq. ID No. 6290, Seq. ID No. 6302, Seq. ID No. 6304, Seq. ID No. 6364, Seq. ID No. 6378, Seq. ID No. 6382, Seq. ID No. 6384, Seq. ID No. 6416, Seq. ID No. 6428, Seq. ID No. 6432, Seq. ID No. 6474, Seq. ID No. 6498, Seq. ID No. 6572, Seq. ID No. 6582, Seq. ID No. 6594, Seq. ID No. 6600, Seq. ID No. 6632, and Seq. ID No. 6640.

[0057] In another aspect of the invention, the polypeptides are expressed and purified in a recombinant expression system. Thus, in certain embodiments, the invention provides a recombinant expression vector comprising a nucleotide sequence having at least about 70% identity to a nucleotide sequence chosen from one of odd numbered sequences set out in SEQ ID NO: 1 through SEQ ID NO: 6649, a complement thereof, a degenerate variant thereof, or a fragment thereof.

[0058] In certain other embodiments, the polynucleotide is selected from the group consisting of genomic DNA, cDNA, and RNA. In another embodiment, the polynucleotide comprised within the vector further comprises heterologous nucleotide sequences.

[0059] In other embodiments, the polynucleotide is operatively linked to one or more gene expression regulatory elements. In yet other embodiments, the polynucleotide encodes a polypeptide comprising an amino acid sequence having at least about 70% identity to an amino acid sequence chosen from one of even numbered sequences set out in SEQ ID NO: 2 through SEQ ID NO: 6650, a complement thereof, a biological equivalent thereof, or a fragment thereof. In a preferred embodiment, the vector is a plasmid.

[0060] In another aspect of the invention, provided is a genetically engineered host cell, transfected, transformed or infected with a recombinant expression vector comprising a nucleotide sequence having at least about 70% identity to a nucleotide sequence chosen from one of odd numbered sequences set out in SEQ ID NO: 1 through SEQ ID NO: 6649, a complement thereof, a degenerate variant thereof, or a fragment thereof. In a preferred embodiment, the host cell is a bacterial cell. In a further embodiment, the polynucleotide is expressed to produce the encoded polypeptide, a complement thereof, a biological equivalent thereof, or a fragment thereof.

[0061] In another aspect of the invention, the polypeptides are expressed and purified in a recombinant expression system. Thus, in certain embodiments, the invention provides a recombinant expression vector comprising a nucleotide sequence having at least about 70% identity to a nucleotide sequence chosen from one of odd numbered sequences set out in SEQ ID NO: 1 through SEQ ID NO: 6649, a complement thereof, a degenerate variant thereof, or a fragment thereof. In certain other embodiments, the polynucleotide is selected from the group consisting of genomic DNA, cDNA, and RNA. In another embodiment, the polynucleotide comprised within the vector further comprises heterologous nucleotide sequences.

[0062] In other embodiments, the present invention provides an antibody specific for an Alloiococcus otitidis polynucleotide chosen from one of odd numbered sequences set out in SEQ ID NO: 1 through SEQ ID NO: 6649, a fragment thereof, a degenerate variant thereof, or an antibody specific for an Alloiococcus otitidis polypeptide chosen from one of even numbered sequences set out in SEQ ID NO: 2 through SEQ ID NO: 6650, a biological equivalent thereof, or a fragment thereof. In certain embodiments, the antibody is selected from the group consisting of monoclonal, polyclonal, chimeric, human, humanized and single chain. In a preferred embodiment, the antibody is monoclonal. In another preferred embodiment, the antibody is humanized.

[0063] The present invention further provides pharmaceutical compositions, in particular immunogenic compositions, for the prevention and/or treatment of bacterial infection. Thus, in one embodiment an immunogenic composition is provided comprising one or more polypeptides having an amino acid sequence chosen from one or more of even numbered sequences set out in SEQ ID NO: 2 through SEQ ID NO: 6650, a biological equivalent thereof, or a fragment thereof. In certain embodiments, the composition further comprises a pharmaceutically acceptable carrier. In yet other embodiments, the immunogenic composition further comprises one or more adjuvants. In preferred embodiments the polypeptide of the invention is further defined as: (a) an Alloiococcus otitidis polypeptide predicted by SignalP algorithm analysis as having met all four criteria set out in the SignalP algorithm for a polypeptide having a signal peptide and a subset of these are predicted by HMM SignalP algorithm analysis as having a signal peptide; (b) an Alloiococcus otitidis polypeptide predicted by SignalP algorithm analysis as having met three of the four criteria set out in the SignalP algorithm for a polypeptide having a signal peptide and a subset of these predicted by HMM SignalP algorithm analysis as having a signal peptide; (c) an Alloiococcus otitidis polypeptide predicted by HMM SignalP algorithm analysis as having a signal peptide; (d) an Alloiococcus otitidis polypeptide predicted by HMM SignalP algorithm analysis as being a non-secretory protein; (e) an Alloiococcus otitidis polypeptide identified by Pfam analysis; (f) an Alloiococcus otitidis polypeptide identified by BlastP analysis as being secreted, surface exposed, vaccine candidate; (g) an Alloiococcus otitidis polypeptide identified using proteomics methodology as sharing homology with surface exposed proteins of Streptococcus pneumoniae; (h) an Alloiococcus otitidis polypeptide having a LPXTG motif, wherein the polypeptide is covalently attached to the peptidoglycan layer; (i) an Alloiococcus otitidis lipoprotein; (j) an Alloiococcus otitidis polypeptide non-covalently associated with the peptidoglycan layer; (k) an Alloiococcus otitidis polypeptide having an RGDX motif wherein X is not a proline residue; (l) an Alloiococcus otitidis polypeptide predicted by BlastP as being involved in capsule biosynthesis and transport; (m) an Alloiococcus otitidis polypeptide identified by BlastP as being localized within the capsule loci of the Alloiococcus otitidis genome; (n) an Alloiococcus otitidis polypeptide predicted by BlastP as being associated with sporulation; (o) an Alloiococcus otitidis polypeptide encoded by unique ORFs identified by BlastP analysis as having a BlastP ‘E Value’ of >e⁻¹⁰; (p) an Alloiococcus otitidis polypeptide identified by Glimmer™ ORF finder program; (q) an Alloiococcus otitidis polypeptide identified by GeneMark™ ORF finder program; (r) an Alloiococcus otitidis polypeptide identified by Applicants' assignee's ORF finder program that searches for an ATG, GTG or TTG Start codon between a Stop-Stop region; and (s) an Alloiococcus otitidis polypeptide identified by Applicants' assignee's ORF finder program that searches for a transmembrane domain between two Stop codons and a Start codon immediately upstream of this transmembrane region.

[0064] In one preferred embodiment,the invention comprises an isolated polypeptide encoded by a polynucleotide contained-within the Alloiococcus otitidis genomic sequence, wherein the polynucleotide comprises a nucleotide sequence having at least about 70% identity to a nucleotide sequence contained within SEQ ID NO: 6651, a complement thereof, a degenerate variant thereof, and a fragment thereof.

[0065] In certain other embodiments, the immunogenic composition further comprises heterologous amino acids. In particular embodiments, the polypeptide is a fusion polypeptide.

[0066] In further embodiments, provided is an immunogenic composition comprising a polynucleotide having a nucleotide sequence chosen from one of odd numbered sequences listed in SEQ ID NO: 1 through SEQ ID NO: 6649, a degenerate variant thereof, or a fragment thereof and is comprised in an expression vector. In preferred embodiments, the vector is plasmid DNA. In another embodiment, the polynucleotide comprises heterologous nucleotides. In still other embodiments, the polynucleotide is operatively linked to one or more gene expression regulatory elements. In yet other embodiments, the polynucleotide directs the expression of a neutralizing epitope of Alloiococcus otitidis. In preferred embodiments, the immunogenic composition further comprises one or more adjuvants.

[0067] In yet further embodiments, provided is a pharmaceutical composition comprising a polypeptide and a pharmaceutically acceptable carrier, wherein the polypeptide comprises an amino acid chosen from one of even numbered sequence listings set out in SEQ ID NO: 2 through SEQ ID NO: 6650, a complement thereof, a biological equivalent thereof, or a fragment thereof. In preferred embodiments the polypeptide of the invention is further defined as: (a) an Alloiococcus otitidis polypeptide predicted by SignalP algorithm analysis as having met all four criteria set out in the SignalP algorithm for a polypeptide having a signal peptide and a subset of these are predicted by HMM SignalP algorithm analysis as having a signal peptide; (b) an Alloiococcus otitidis polypeptide predicted by SignalP algorithm analysis as having met three of the four criteria set out in the SignalP algorithm for a polypeptide having a signal peptide and a subset of these predicted by HMM SignalP algorithm analysis as having a signal peptide; (c) an Alloiococcus otitidis polypeptide predicted by HMM SignalP algorithm analysis as having a signal peptide; (d) an Alloiococcus otitidis polypeptide predicted by HMM SignalP algorithm analysis as being a non-secretory protein; (e) an Alloiococcus otitidis polypeptide identified by Pfam analysis; (f) an Alloiococcus otitidis polypeptide identified by BlastP analysis as being secreted, surface exposed, vaccine; (g) an Alloiococcus otitidis polypeptide identified using proteomics methodology as sharing homology with surface exposed proteins of Streptococcus pneumoniae; (h) an Alloiococcus otitidis polypeptide having a LPXTG motif, wherein the polypeptide is covalently attached to the peptidoglycan layer; (i) an Alloiococcus otitidis lipoprotein; (j) an Alloiococcus otitidis polypeptide non-covalently associated with the peptidoglycan layer; (k) an Alloiococcus otitidis polypeptide having an RGDX motif wherein X is not a proline residue; (l) an Alloiococcus otitidis polypeptide predicted by BlastP as being involved in capsule biosynthesis and transport; (m) an Alloiococcus otitidis polypeptide identified by BlastP as being localized within the capsule loci of the Alloiococcus otitidis genome; (n) an Alloiococcus otitidis polypeptide predicted by BlastP as being associated with sporulation; (o) an Alloiococcus otitidis polypeptide encoded by unique ORFs identified by BlastP analysis as having a BlastP ‘E Value’ of >e⁻¹⁰; (p) an Alloiococcus otitidis polypeptide identified by Glimmer™ ORF finder program; (q)an Alloiococcus otitidis polypeptide identified by GeneMark™ ORF finder program; (r) an Alloiococcus otitidis polypeptide identified by Applicants' assignee's ORF finder program that searches for an ATG, GTG or TTG start codon between a Stop-Stop region; and (s) an Alloiococcus otitidis polypeptide identified by Applicants' assignee's ORF finder program that searches for a transmembrane domain between two Stop codons and a Start codon immediately upstream of this transmembrane region.

[0068] In another embodiment, a method of immunizing against Alloiococcus otitidis is provided comprising administering to a host an immunizing amount of an immunogenic composition comprising a polypeptide and a pharmaceutically acceptable carrier, wherein the polypeptide comprises an amino acid sequence chosen from one of even numbered sequences set forth in SEQ ID NO: 2 through SEQ ID NO: 6650, a biological equivalent thereof, or a fragment thereof. In certain embodiments, the polypeptide is a fusion polypeptide. In other embodiments, the method further comprises administering an adjuvant.

[0069] In other embodiments the polypeptides of the invention comprise heterologous amino acids. In still other embodiments, the polypeptide in the pharmaceutical composition is a fusion polypeptide.

[0070] Other embodiments of the invention provide a DNA chip comprising an array of polynucleotides, wherein at least one of the polynucleotides comprise a nucleotide sequence chosen from one of odd numbered sequences set forth in SEQ ID NO: 1 through SEQ ID NO: 6649, a complement thereof, a degenerate variant thereof, or a fragment thereof.

[0071] Also provided is a protein chip comprising an array of polypeptides, wherein at least one of the polypeptides comprises an amino acid sequence chosen from one of even numbered sequences set forth in SEQ ID NO: 2 through SEQ ID NO: 6650, a biological equivalent thereof, or a fragment thereof.

[0072] The invention further provides methods of detecting Alloiococcus otitidis polynucleotides and polypeptides as well as kits for diagnosing Alloiococcus otitidis infection. Other embodiments provide a method for the detection and/or identification of Alloiococcus otitidis in a biological sample comprising contacting the sample with an oligonucleotide probe of a polynucleotide comprising the nucleotide sequence chosen from one of odd numbered sequences is set forth in SEQ ID NO: 1 through SEQ ID NO: 6649, a degenerate variant thereof, or a fragment thereof, under conditions permitting hybridization and detecting the presence of hybridization complexes in the sample, wherein hybridization complexes indicate the presence of Alloiococcus otitidis in the sample.

[0073] Still other embodiments provide a method for the detection and/or identification of Alloiococcus otitidis in a biological sample comprising nucleotide sequence chosen from one of odd numbered sequences set forth in SEQ ID NO: 1 through SEQ ID NO: 6649, a degenerate variant thereof, or a fragment thereof, in the presence of nucleotides and a polymerase enzyme under conditions permitting primer extension and detecting the presence of primer extension products in the sample, wherein extension products indicate the presence of Alloiococcus otitidis in the sample.

[0074] Further embodiments provide a method for the detection and/or identification of Alloiococcus otitidis in a biological sample comprising contacting the sample with an antibody specific for a polypeptide comprising an amino acid sequence chosen from one of even numbered sequences set forth in SEQ ID NO: 2 through SEQ ID NO: 6650, a biological equivalent thereof, or a fragment thereof, under conditions permitting immune complex formation and detecting the presence of immune complexes in the sample, wherein immune complexes indicate the presence of Alloiococcus otitidis in the sample.

[0075] In certain embodiments, provided is a method for the detection and/or identification of antibodies to Alloiococcus otitidis in a biological sample comprising contacting the sample with a polypeptide comprising an amino acid sequence chosen from one of even numbered sequences set forth in SEQ ID NO: 2 through SEQ ID NO: 6650, a biological equivalent thereof, or a fragment thereof, under conditions permitting immune complex formation and detecting the presence of immune complexes in the sample, wherein immune complexes indicate the presence of Alloiococcus otitidis in the sample.

[0076] Other embodiments of the invention provide a kit comprising a container containing an isolated polynucleotide comprising an nucleotide sequence chosen from one of odd numbered sequences set forth in SEQ ID NO: 1 through SEQ ID NO: 6649, a degenerate variant thereof, or a fragment thereof. In a preferred embodiment, the polynucleotide is a primer or a probe, wherein when the polynucleotide is a primer, the kit further comprises a container containing a polymerase. In another embodiment, the kit further comprises a container containing dNTP.

[0077] Provided further is a kit comprising a container containing an antibody that immunospecifically binds to a polypeptide comprising the amino acid sequence chosen from one of even numbered sequences set forth in SEQ ID NO: 2 through SEQ ID NO: 6650, a biological equivalent thereof, or a fragment thereof.

[0078] Provided also is a kit comprising a container containing an antibody that immunospecifically binds to a fusion polypeptide comprising at least the amino acid sequence chosen from one of even numbered sequences set forth in SEQ ID NO: 2 through SEQ ID NO: 6650, a biological equivalent thereof, or a fragment thereof.

[0079] In a preferred embodiment of the invention, there is provided a genetically engineered host cell, transfected, transformed or infected with a recombinant expression vector comprising a nucleotide sequence having at least about 70% identity to a nucleotide sequence chosen from one of odd numbered sequences set forth in SEQ ID NO: 1 through SEQ ID NO: 6649, a complement thereof, a degenerate variant thereof, or a fragment thereof under conditions suitable to produce one of the polypeptides of even numbered sequences set out in SEQ ID NO: 2 through SEQ ID NO: 6650; and recovering the polypeptide.

[0080] Other features and advantages of the invention will be apparent from the following detailed description, from the preferred embodiments thereof, and from the claims.

### DETAILED DESCRIPTION OF THE INVENTION

[0081] The invention described herein addresses the need for an Alloiococcus otitidis immunogenic composition that is effective in preventing most or all of the disease caused by Alloiococcus otitidis. The invention further addresses the need for methods of diagnosing Alloiococcus otitidis infection. The Applicants have identified novel Alloiococcus otitidis open reading frames (ORFs), which encode antigenic polypeptides. More particularly, the newly identified ORFs encode polypeptides that are surface localized (i.e., exposed) on Alloiococcus otitidis, and thus serve as potential antigenic polypeptides in immunogenic compositions. Thus, in certain embodiments, the invention comprises Alloiococcus otitidis polynucleotide ORFs encoding surface localized polypeptide antigens. In other embodiments, the present invention comprises surface localized antigenic polypeptides, encoded by the Alloiococcus otitidis ORFs.

[0082] In other embodiments, the invention comprises vectors comprising ORF sequences and host cells or animals transformed with these vectors. The invention also comprises transcriptional gene products of Alloiococcus otitidis ORFs, including, but not limited to mRNA, antisense RNA, antisense oligonucleotides, and ribozyme molecules, which are used to inhibit or control growth of the microorganism. The invention relates also to methods of detecting Alloiococcus otitidis nucleic acids or polypeptides and kits for diagnosing Alloiococcus otitidis infection. The invention also relates to pharmaceutical compositions, in particular immunogenic compositions, for the prevention and/or treatment of bacterial infection, in particular infection caused by or exacerbated by Alloiococcus otitidis. In particular embodiments, the immunogenic compositions are used for the treatment or prevention of non-systemic diseases, particularly of the otitis media, which are induced or exacerbated by Alloiococcus otitidis.

### A. IDENTIFYING ORFs WITHIN THE GENOMIC SEQUENCE OF ALLOIOCOCCUS OTITIDIS

[0083] The invention is directed in particular embodiments to the identification of polynucleotides, more particularly ORFs, which encode Alloiococcus otitidis polypeptides. The availability of the bacterial genomic sequences has begun to play an important role in the identification of vaccine candidates through genomics, transcriptional profiling, and proteomics, coupled with the information processing capabilities of bioinformatics (McAtee et al., 1998a; McAtee et al., 1998b; Pizza et al., 2000; Sonnenberg and Belisle, 1997; Weldingh et al., 1998; McAtee et al., 1998c). Thus, the Applicants have analyzed the Alloiococcus otitidis genomic sequences and utilized bioinformatics tools to identify the ORFs encoding polypeptides of the present invention. As described below, the ORFs were analyzed for a variety of characteristics.

[0084] Specifically, an extensive genomic analysis was performed in silico of the Alloiococcus otitidis genome using algorithms designed to identify genes that encode novel surface localized polypeptides or polypeptides with putative similarity to surface localized polypeptides in other organisms. Thus, a combined analysis of the Alloiococcus otitidis genome, using a unique set of three ORF finder algorithms (i.e., GLIMMER™, Salzberg et al., 1998, GeneMark™ (Lukashin and Borodovsky, 1998) and the Applicants' assignee's own programs), identified 3325 ORFs. The most stringent of the ORF finders; Glimmer™, identified 1529 ORFs; GeneMark™ identified 1,534 ORFs, while Applicants' assignee's ORF finders identified the most with 2706 ORFs.

[0085] For the purposes of this application, all ORFs with common stop codons are given the same ORF designation and will be treated as if they are the same ORF. In a number of instances, there are multiple start codons within a given ORF. These proteins of different length are indicated by a lower case letter suffix after the ORF number. For example, as shown in Table 2 below, ORF number 4a has a protein start beginning at nucleotide 3733, ORF number 4b has a protein start beginning at nucleotide 3049, and 4c has a protein start beginning or ending at nucleotide 2854 (these three sequences share a common ORF stop codon beginning at nucleotide 4152). As used herein, an ORF is defined as having one of three potential start site codons, ATG, GTG, TTG and one of three potential stop codons, TM, TAG, TGA. The lower limit of amino acid length used (e.g., ˜74 amino acids) may also cause the algorithms to overlook some reading frames. However, “true” reading frames become an increasingly rare as the ORFs become shorter.

[0086] The initial annotation of the Alloiococcus otitidis ORFs was performed using the Basic Local Alignment Search Tool (BLAST; version 2.0) Gapped search algorithm, BlastP, to identify homologous sequences (Altschul et al, 1997). A cutoff “E” value of anything <e⁻¹⁰ was considered significant. The non-redundant protein sequence databases used for the homology searches consisted of GenBank, SWISS-PROT, PIR, and TREMBL; these database sequences are updated daily. In the present invention, ORFs with a BlastP ‘E’ value result of >e⁻¹⁰ are considered to be unique to Alloiococcus otitidis. Alternate quantitative expression values other than BlastP “E”, e.g., percent identity, may also be used to compare database sequences with the Alloiococcus otitidis ORFs of the present invention.

[0087] A keyword search of the entire BLAST results was carried out using known or suspected target genes for immunogenic compositions, as well as using words that identified the location of a protein or function.

[0088] Several parameters were used to determine the partitioning of the predicted Alloiococcus otitidis polypeptides of the invention. For example, polypeptides destined for translocation across the cytoplasmic membrane encode a leader signal (also called signal sequence) composed of a central hydrophobic region flanked at the N-terminus by positively charged residues (Pugsley, 1993). A software program, called SignalP, which identifies signal peptides and their cleavage sites based on neural networks (Nielsen et al., 1997), was used in the present invention to analyze the amino acid sequence of an ORF for such signal peptides. The first 60 N-terminal amino acids of each ORF were analyzed by SignalP software using the Gram-positive software database. The output generated four separate values: maximum C, maximum Y, maximum S, and mean S. The S-score, or signal region, is the probability of the position belonging to the signal peptide. The C-score, or cleavage site, is the probability of the position being the first in the mature protein. The Y-score is the geometric average of the C-score and a smoothed derivative of the S-score. A conclusion of either a Yes or No is given next to each score. If all four conclusions are Yes, then a ‘YES’ is listed for that ORF (see Table 3 below); if three of the conclusions are Yes, then a ‘yes’ is listed for that ORF (see Table 4 below); if two of the conclusions are Yes, then a ‘maybe’ is listed for that ORF; for all other cases, a ‘No’ is listed for that ORF (see Table 5 below).

[0089] A software program, called HMM SignalP, which identifies signal peptides and their cleavage sites based on hidden Markov models (Nielsen et al., 1997), was used in the present invention to analyze the amino acid sequence of an ORF for such signal peptides. The first 60 N-terminal amino acids of each ORF were analyzed by HMM SignalP software using the Gram-positive software database. The output generates a value from 0.00 to 1.00, whereby any value greater than 0.5 is listed as being a ‘Signal Peptide’ (see Table 5 below) and any value less than 0.5 is listed as being a ‘Non-Secretory Protein’ (see Table 6 below).

[0090] To predict polypeptide localization in bacteria, the software program PSORT was used (Nakai, 1991). PSORT predicts localization of polypeptides to the ‘cytoplasm’, the ‘periplasm’, and/or the ‘cytoplasmic membrane’ for Gram-positive bacteria, as well as the ‘outer membrane’ for Gram-negative bacteria. Transmembrane (TM) domains of polypeptides were analyzed using the software program TopPred2 (Cserzo et al., 1997) (see Table 6 below).

[0091] The Hidden Markov Model (HMM) Pfam database (Sonnhammer, 1998) was used to identify Alloiococcus otitidis proteins that may belong to an existing protein family (see Table 7 below). Keyword searching of this output was further used to help identify additional vaccine candidates that may have been missed by the BLAST search criteria (see Table 8 below).

[0092] The Applicants also used proteomic methods that had previously been used for studying surface exposed proteins in Streptococcus pneumoniae to identify 242 ORFs of Alloiococcus otitidis that share some homology with ORFs encoding surface exposed proteins on Streptococcus pneumoniae (see Table 9).

[0093] The Applicants also developed a HMM using approximately 70 known prokaryotic proteins containing the LPXTG cell wall sorting signal, in order to predict cell wall proteins that are anchored to the peptidoglycan layer (Mazmanian et al., 1999; Navarre and Schneewind, 1999). The model used not only the LPXTG sequence, but also included two features of the downstream sequence; first the hydrophobic transmembrane domain and second, the positively charged carboxy-terminus (see Table 10).

[0094] A computer algorithm, called HMM Lipo, was developed by Applicant's assignee to predict lipoproteins using 131 biologically proven bacterial lipoproteins. The protein sequence from the start of the protein to the cysteine amino acid, plus the next two additional amino acids, were used to generate the HMM (Eddy, 1996) (see Table 11).

[0095] There are also a number of proteins that interact, non-covalently, with the peptidoglycan layer and are distinct from the LPXTG protein class described above. These proteins seem to have a consensus sequence at their carboxy terminus (Koebnik, 1995). The Applicants therefore developed and used a HMM of this region to identify any Alloiococcus otitidis genome-encoded proteins that may fall into this class of proteins (see Table 12).

[0096] Proteins that contain Arg-Gly-Asp (RGD) attachment motif, together with integrins that serve as their receptor, constitute a major recognition system for cell adhesion, and thus are putative Alloiococus otitidis cell surface antigens. RGD recognition is one mechanism used by microbes to gain entry into eukaryotic tissues (Stockbauer et al., 1999, Isberg and Nhieu, 1994). However, not all RGD-containing proteins mediate cell attachment. It has been demonstrated that RGD-containing peptides with a proline at the carboxy end (RDGP) are inactive in cell attachment assays (Pierschbacher and Rouslahti, 1987) and will be excluded from consideration. About 125 surface localized ORFs were identified that were found to contain the peptide sequence RDGX where X is not proline (see Table 13).

[0097] ORFs whose BlastP results predict for proteins that may be involved in capsule biosynthesis and transport were also identified based on BlastP analysis. In addition, three potential capsule loci within the Alloiococcus otitidis genome were also identified based BlastP analysis (see Tables 14 and 15).

[0098] BlastP analysis was also used to identify ORFs associated with sporulation in Alloiococcus otitidis (see Tables 16).

[0099] BlastP analysis of the Alloiococcus otitidis genomic sequence also resulted in the identification of 913 unique ORFs, or 653 unique Stop-Stop ORFs, that were shown to have a BlastP ‘E Value’ of >e⁻¹⁰ (see Table 17).

[0100] Three different ORF finder programs were also used to identify ORFs encoding polypeptides that could potentially be used in immunogenic compositions. Using the Glimmer™ ORF finder program 1530 ORFs were identified (see Table 18). Using the GeneMark™ ORF finder program 1536 ORFs were identified (see Table 19). The Applicants also identified 2343 ORFs using the ORF finder program of Applicant's assignee, which searches for one of the three potential Start codons between a Stop-Stop regions. It first looks for a ‘ATG’ Start codon but will accept either a ‘GTG’ or ‘TTG’ Start codon if found first (see Table 20). The Applicants' assignee's ORF finder program also detected 615 ORFs containing putative transmembrane regions The program searches for putative transmembrane regions between two Stop codons and a Start codon immediately upstream of this region (see Table 21).

[0101] The entire genomic sequence of the isolated Alloiococcus otitidis is set out in Seq. ID No. 6651. Alloiococcus otitidis ORFs encoding proteins/polypeptides that are contained within this genomic sequence can also be used in immunogenic compositions.

[0102] A complete listing of all the ORFs of Alloiococcus otitidis based on the above characteristics, and which are used in immunogenic compositions, is set out in Table 2.

[0103] In addition, Tables 3-21 represent 19 groups into which the ORFs identified according to the above characteristics of present invention have been classified. Thus, all of the groups described below are ORFs comprised within the Alloiococcus otitidis genome and identified as encoding putative surface localized polypeptides. These groups are not meant to limit the scope of the present invention, as analysis of additional ORF characteristics is contemplated. These additional characteristics, e.g., RGD sequence, may serve to further expand the total number of ORF groupings or to parse the presently identified ORFs into more defined groups, broader groups, narrower groups or group subsets. In addition, some ORFs will meet the criteria of more than one category, and will therefore appear in more than one of the following groups.

TABLE 2
ALL CLAIMED ORFs

| ORF | DNA SEQ ID | | | | Protein SEQ ID |
|---|---|---|---|---|---|
| Number | Number | ORF Start | Protein Start | ORF Stop | Number |
| 1 | Seq. ID No. 1 | 1149 | 1146 | 280 | Seq. ID No. 2 |
| 2a | Seq. ID No. 3 | 2227 | 2143 | 1271 | Seq. ID No. 4 |
| 2b | Seq. ID No. 5 | 2227 | 2203 | 1271 | Seq. ID No. 6 |
| 4a | Seq. ID No. 7 | 2827 | 3733 | 4152 | Seq. ID No. 8 |
| 4b | Seq. ID No. 9 | 2827 | 3049 | 4152 | Seq. ID No. 10 |
| 4c | Seq. ID No. 11 | 2827 | 2854 | 4152 | Seq. ID No. 12 |
| 5 | Seq. ID No. 13 | 5020 | 5011 | 4295 | Seq. ID No. 14 |
| 7 | Seq. ID No. 15 | 5792 | 5780 | 5001 | Seq. ID No. 16 |
| 10 | Seq. ID No. 17 | 7828 | 7807 | 5783 | Seq. ID No. 18 |
| 11 | Seq. ID No. 19 | 6198 | 6216 | 6449 | Seq. ID No. 20 |
| 13a | Seq. ID No. 21 | 6900 | 6879 | 6589 | Seq. ID No. 22 |
| 16 | Seq. ID No. 23 | 7100 | 7139 | 7390 | Seq. ID No. 24 |
| 17 | Seq. ID No. 25 | 8265 | 8247 | 7804 | Seq. ID No. 26 |
| 18 | Seq. ID No. 27 | 9571 | 9517 | 8210 | Seq. ID No. 28 |
| 20 | Seq. ID No. 29 | 10605 | 10605 | 9514 | Seq. ID No. 30 |
| 21b | Seq. ID No. 31 | 9485 | 9497 | 9793 | Seq. ID No. 32 |
| 23a | Seq. ID No. 33 | 11845 | 11374 | 10595 | Seq. ID No. 34 |
| 23b | Seq. ID No. 35 | 11845 | 11830 | 10595 | Seq. ID No. 36 |
| 24 | Seq. ID No. 37 | 12908 | 12905 | 11823 | Seq. ID No. 38 |
| 32 | Seq. ID No. 39 | 15875 | 15875 | 15789 | Seq. ID No. 40 |
| 36 | Seq. ID No. 41 | 19431 | 19386 | 18634 | Seq. ID No. 42 |
| 37 | Seq. ID No. 43 | 19372 | 19429 | 20076 | Seq. ID No. 44 |
| 38a | Seq. ID No. 45 | 21796 | 21769 | 20186 | Seq. ID No. 46 |
| 38b | Seq. ID No. 47 | 21796 | 21772 | 20186 | Seq. ID No. 48 |
| 39a | Seq. ID No. 49 | 22265 | 22238 | 21786 | Seq. ID No. 50 |
| 39b | Seq. ID No. 51 | 22265 | 22262 | 21786 | Seq. ID No. 52 |
| 40 | Seq. ID No. 53 | 23449 | 23437 | 22238 | Seq. ID No. 54 |
| 41a | Seq. ID No. 55 | 24645 | 24183 | 23434 | Seq. ID No. 56 |
| 41b | Seq. ID No. 57 | 24645 | 24402 | 23434 | Seq. ID No. 58 |
| 41c | Seq. ID No. 59 | 24645 | 24630 | 23434 | Seq. ID No. 60 |
| 43b | Seq. ID No. 61 | 25392 | 25353 | 24997 | Seq. ID No. 62 |
| 43c | Seq. ID No. 63 | 25392 | 25359 | 24997 | Seq. ID No. 64 |
| 44a | Seq. ID No. 65 | 25001 | 25028 | 25330 | Seq. ID No. 66 |
| 44b | Seq. ID No. 67 | 25001 | 25016 | 25330 | Seq. ID No. 68 |
| 45 | Seq. ID No. 69 | 25702 | 25654 | 25403 | Seq. ID No. 70 |
| 46a | Seq. ID No. 71 | 26225 | 26141 | 25800 | Seq. ID No. 72 |
| 46b | Seq. ID No. 73 | 26225 | 26153 | 25800 | Seq. ID No. 74 |
| 47 | Seq. ID No. 75 | 27661 | 27643 | 26195 | Seq. ID No. 76 |
| 48a | Seq. ID No. 77 | 29105 | 28781 | 27696 | Seq. ID No. 78 |
| 48b | Seq. ID No. 79 | 29105 | 28973 | 27696 | Seq. ID No. 80 |
| 48c | Seq. ID No. 81 | 29105 | 29090 | 27696 | Seq. ID No. 82 |
| 50 | Seq. ID No. 83 | 30169 | 30154 | 29102 | Seq. ID No. 84 |
| 51a | Seq. ID No. 85 | 31759 | 31072 | 30353 | Seq. ID No. 86 |
| 51b | Seq. ID No. 87 | 31759 | 31693 | 30353 | Seq. ID No. 88 |
| 51c | Seq. ID No. 89 | 31759 | 31741 | 30353 | Seq. ID No. 90 |
| 55 | Seq. ID No. 91 | 32149 | 32128 | 31895 | Seq. ID No. 92 |
| 56b | Seq. ID No. 93 | 32234 | 32231 | 31968 | Seq. ID No. 94 |
| 57a | Seq. ID No. 95 | 33738 | 33723 | 32455 | Seq. ID No. 96 |
| 57b | Seq. ID No. 97 | 33738 | 33732 | 32455 | Seq. ID No. 98 |
| 58 | Seq. ID No. 99 | 32611 | 32644 | 32934 | Seq. ID No. 100 |
| 60a | Seq. ID No. 101 | 34825 | 34786 | 33947 | Seq. ID No. 102 |
| 60b | Seq. ID No. 103 | 34825 | 34804 | 33947 | Seq. ID No. 104 |
| 61 | Seq. ID No. 105 | 34344 | 34344 | 34751 | Seq. ID No. 106 |
| 62a | Seq. ID No. 107 | 36496 | 36334 | 34877 | Seq. ID No. 108 |
| 62b | Seq. ID No. 109 | 36496 | 36415 | 34877 | Seq. ID No. 110 |
| 62c | Seq. ID No. 111 | 36496 | 36484 | 34877 | Seq. ID No. 112 |
| 63a | Seq. ID No. 113 | 35069 | 35102 | 35563 | Seq. ID No. 114 |
| 63b | Seq. ID No. 115 | 35069 | 35072 | 35563 | Seq. ID No. 116 |
| 65a | Seq. ID No. 117 | 37245 | 37158 | 36634 | Seq. ID No. 118 |
| 65b | Seq. ID No. 119 | 37245 | 37203 | 36634 | Seq. ID No. 120 |
| 65c | Seq. ID No. 121 | 37245 | 37242 | 36634 | Seq. ID No. 122 |
| 66a | Seq. ID No. 123 | 36563 | 36749 | 37030 | Seq. ID No. 124 |
| 67 | Seq. ID No. 125 | 37706 | 37694 | 37254 | Seq. ID No. 126 |
| 69 | Seq. ID No. 127 | 38141 | 38078 | 37803 | Seq. ID No. 128 |
| 71 | Seq. ID No. 129 | 37829 | 37862 | 38722 | Seq. ID No. 130 |
| 73a | Seq. ID No. 131 | 39233 | 39248 | 39472 | Seq. ID No. 132 |
| 73b | Seq. ID No. 133 | 39233 | 39245 | 39472 | Seq. ID No. 134 |
| 74 | Seq. ID No. 135 | 38701 | 38719 | 40068 | Seq. ID No. 136 |
| 77 | Seq. ID No. 137 | 40223 | 40232 | 41029 | Seq. ID No. 138 |
| 79 | Seq. ID No. 139 | 41098 | 41098 | 41607 | Seq. ID No. 140 |
| 80a | Seq. ID No. 141 | 41294 | 41375 | 41902 | Seq. ID No. 142 |
| 80b | Seq. ID No. 143 | 41294 | 41354 | 41902 | Seq. ID No. 144 |
| 80c | Seq. ID No. 145 | 41294 | 41300 | 41902 | Seq. ID No. 146 |
| 81a | Seq. ID No. 147 | 42667 | 42658 | 42107 | Seq. ID No. 148 |
| 81b | Seq. ID No. 149 | 42667 | 42664 | 42107 | Seq. ID No. 150 |
| 83 | Seq. ID No. 151 | 42875 | 42875 | 43096 | Seq. ID No. 152 |
| 85a | Seq. ID No. 153 | 43769 | 43976 | 44563 | Seq. ID No. 154 |
| 85b | Seq. ID No. 155 | 43769 | 43829 | 44563 | Seq. ID No. 156 |
| 85c | Seq. ID No. 157 | 43769 | 43811 | 44563 | Seq. ID No. 158 |
| 86 | Seq. ID No. 159 | 44846 | 44825 | 44592 | Seq. ID No. 160 |
| 87a | Seq. ID No. 161 | 45417 | 45315 | 45064 | Seq. ID No. 162 |
| 87b | Seq. ID No. 163 | 45417 | 45351 | 45064 | Seq. ID No. 164 |
| 87c | Seq. ID No. 165 | 45417 | 45402 | 45064 | Seq. ID No. 166 |
| 88 | Seq. ID No. 167 | 44548 | 44560 | 45258 | Seq. ID No. 168 |
| 89 | Seq. ID No. 169 | 45592 | 45550 | 45296 | Seq. ID No. 170 |
| 91a | Seq. ID No. 171 | 45068 | 45278 | 46252 | Seq. ID No. 172 |
| 91b | Seq. ID No. 173 | 45068 | 45194 | 46252 | Seq. ID No. 174 |
| 91c | Seq. ID No. 175 | 45068 | 45107 | 46252 | Seq. ID No. 176 |
| 91d | Seq. ID No. 177 | 45068 | 45074 | 46252 | Seq. ID No. 178 |
| 93a | Seq. ID No. 179 | 46421 | 46619 | 47563 | Seq. ID No. 180 |
| 93b | Seq. ID No. 181 | 46421 | 46454 | 47563 | Seq. ID No. 182 |
| 93c | Seq. ID No. 183 | 46421 | 46436 | 47563 | Seq. ID No. 184 |
| 94 | Seq. ID No. 185 | 47630 | 47630 | 47830 | Seq. ID No. 186 |
| 95b | Seq. ID No. 187 | 48482 | 48413 | 47895 | Seq. ID No. 188 |
| 97b | Seq. ID No. 189 | 48738 | 48723 | 48421 | Seq. ID No. 190 |
| 99 | Seq. ID No. 191 | 50295 | 50280 | 48739 | Seq. ID No. 192 |
| 101 | Seq. ID No. 193 | 49736 | 49766 | 50266 | Seq. ID No. 194 |
| 102 | Seq. ID No. 195 | 51996 | 51981 | 50311 | Seq. ID No. 196 |
| 104a | Seq. ID No. 197 | 52783 | 52738 | 52130 | Seq. ID No. 198 |
| 104b | Seq. ID No. 199 | 52783 | 52753 | 52130 | Seq. ID No. 200 |
| 104c | Seq. ID No. 201 | 52783 | 52780 | 52130 | Seq. ID No. 202 |
| 105a | Seq. ID No. 203 | 53486 | 53087 | 52710 | Seq. ID No. 204 |
| 105b | Seq. ID No. 205 | 53486 | 53375 | 52710 | Seq. ID No. 206 |
| 106 | Seq. ID No. 207 | 53716 | 53695 | 53102 | Seq. ID No. 208 |
| 109a | Seq. ID No. 209 | 54828 | 54606 | 53938 | Seq. ID No. 210 |
| 109b | Seq. ID No. 211 | 54828 | 54780 | 53938 | Seq. ID No. 212 |
| 109c | Seq. ID No. 213 | 54828 | 54807 | 53938 | Seq. ID No. 214 |
| 109d | Seq. ID No. 215 | 54828 | 54825 | 53938 | Seq. ID No. 216 |
| 111a | Seq. ID No. 217 | 55748 | 55580 | 54822 | Seq. ID No. 218 |
| 111b | Seq. ID No. 219 | 55748 | 55748 | 54822 | Seq. ID No. 220 |
| 112a | Seq. ID No. 221 | 56518 | 56494 | 55745 | Seq. ID No. 222 |
| 112b | Seq. ID No. 223 | 56518 | 56503 | 55745 | Seq. ID No. 224 |
| 114 | Seq. ID No. 225 | 57489 | 57459 | 56506 | Seq. ID No. 226 |
| 115 | Seq. ID No. 227 | 57509 | 57536 | 58264 | Seq. ID No. 228 |
| 119a | Seq. ID No. 229 | 58330 | 58573 | 59388 | Seq. ID No. 230 |
| 119b | Seq. ID No. 231 | 58330 | 58354 | 59388 | Seq. ID No. 232 |
| 121 | Seq. ID No. 233 | 59528 | 59540 | 60505 | Seq. ID No. 234 |
| 124a | Seq. ID No. 235 | 60496 | 61084 | 62028 | Seq. ID No. 236 |
| 124b | Seq. ID No. 237 | 60496 | 60913 | 62028 | Seq. ID No. 238 |
| 124c | Seq. ID No. 239 | 60496 | 60502 | 62028 | Seq. ID No. 240 |
| 125 | Seq. ID No. 241 | 62724 | 62700 | 62170 | Seq. ID No. 242 |
| 127a | Seq. ID No. 243 | 63580 | 63556 | 62900 | Seq. ID No. 244 |
| 127b | Seq. ID No. 245 | 63580 | 63559 | 62900 | Seq. ID No. 246 |
| 127c | Seq. ID No. 247 | 63580 | 63565 | 62900 | Seq. ID No. 248 |
| 129a | Seq. ID No. 249 | 65731 | 64381 | 63731 | Seq. ID No. 250 |
| 129b | Seq. ID No. 251 | 65731 | 64777 | 63731 | Seq. ID No. 252 |
| 129c | Seq. ID No. 253 | 65731 | 65728 | 63731 | Seq. ID No. 254 |
| 132a | Seq. ID No. 255 | 64857 | 64902 | 65162 | Seq. ID No. 256 |
| 132b | Seq. ID No. 257 | 64857 | 64875 | 65162 | Seq. ID No. 258 |
| 132c | Seq. ID No. 259 | 64857 | 64860 | 65162 | Seq. ID No. 260 |
| 134 | Seq. ID No. 261 | 66670 | 66667 | 65753 | Seq. ID No. 262 |
| 135a | Seq. ID No. 263 | 67444 | 67423 | 66671 | Seq. ID No. 264 |
| 135b | Seq. ID No. 265 | 67444 | 67444 | 66671 | Seq. ID No. 266 |
| 137a | Seq. ID No. 267 | 68103 | 68073 | 67597 | Seq. ID No. 268 |
| 137b | Seq. ID No. 269 | 68103 | 68100 | 67597 | Seq. ID No. 270 |
| 138a | Seq. ID No. 271 | 70062 | 69996 | 68104 | Seq. ID No. 272 |
| 138b | Seq. ID No. 273 | 70062 | 70032 | 68104 | Seq. ID No. 274 |
| 142 | Seq. ID No. 275 | 70135 | 70213 | 70539 | Seq. ID No. 276 |
| 143 | Seq. ID No. 277 | 71697 | 71697 | 70765 | Seq. ID No. 278 |
| 144a | Seq. ID No. 279 | 72593 | 72506 | 71721 | Seq. ID No. 280 |
| 144b | Seq. ID No. 281 | 72593 | 72545 | 71721 | Seq. ID No. 282 |
| 144c | Seq. ID No. 283 | 72593 | 72563 | 71721 | Seq. ID No. 284 |
| 145a | Seq. ID No. 285 | 74289 | 72996 | 72706 | Seq. ID No. 286 |
| 145b | Seq. ID No. 287 | 74289 | 73896 | 72706 | Seq. ID No. 288 |
| 145c | Seq. ID No. 289 | 74289 | 74157 | 72706 | Seq. ID No. 290 |
| 145d | Seq. ID No. 291 | 74289 | 74226 | 72706 | Seq. ID No. 292 |
| 147 | Seq. ID No. 293 | 74501 | 74504 | 75694 | Seq. ID No. 294 |
| 151a | Seq. ID No. 295 | 77145 | 77184 | 78218 | Seq. ID No. 296 |
| 151b | Seq. ID No. 297 | 77145 | 77163 | 78218 | Seq. ID No. 298 |
| 152a | Seq. ID No. 299 | 78163 | 78220 | 78813 | Seq. ID No. 300 |
| 152b | Seq. ID No. 301 | 78163 | 78166 | 78813 | Seq. ID No. 302 |
| 153a | Seq. ID No. 303 | 78814 | 79048 | 80013 | Seq. ID No. 304 |
| 153b | Seq. ID No. 305 | 78814 | 78973 | 80013 | Seq. ID No. 306 |
| 153c | Seq. ID No. 307 | 78814 | 78835 | 80013 | Seq. ID No. 308 |
| 154 | Seq. ID No. 309 | 80014 | 80020 | 80496 | Seq. ID No. 310 |
| 155a | Seq. ID No. 311 | 82026 | 81981 | 80719 | Seq. ID No. 312 |
| 155b | Seq. ID No. 313 | 82026 | 82014 | 80719 | Seq. ID No. 314 |
| 157a | Seq. ID No. 315 | 82976 | 82856 | 82566 | Seq. ID No. 316 |
| 157b | Seq. ID No. 317 | 82976 | 82958 | 82566 | Seq. ID No. 318 |
| 158a | Seq. ID No. 319 | 83433 | 83400 | 82972 | Seq. ID No. 320 |
| 158b | Seq. ID No. 321 | 83433 | 83415 | 82972 | Seq. ID No. 322 |
| 160a | Seq. ID No. 323 | 84411 | 84378 | 83584 | Seq. ID No. 324 |
| 160b | Seq. ID No. 325 | 84411 | 84408 | 83584 | Seq. ID No. 326 |
| 162a | Seq. ID No. 327 | 85333 | 84958 | 84479 | Seq. ID No. 328 |
| 162b | Seq. ID No. 329 | 85333 | 85117 | 84479 | Seq. ID No. 330 |
| 162c | Seq. ID No. 331 | 85333 | 85276 | 84479 | Seq. ID No. 332 |
| 162d | Seq. ID No. 333 | 85333 | 85285 | 84479 | Seq. ID No. 334 |
| 162e | Seq. ID No. 335 | 85333 | 85309 | 84479 | Seq. ID No. 336 |
| 163 | Seq. ID No. 337 | 84597 | 84609 | 85145 | Seq. ID No. 338 |
| 164 | Seq. ID No. 339 | 84797 | 84812 | 85264 | Seq. ID No. 340 |
| 165a | Seq. ID No. 341 | 86252 | 86144 | 85266 | Seq. ID No. 342 |
| 165b | Seq. ID No. 343 | 86252 | 86150 | 85266 | Seq. ID No. 344 |
| 167 | Seq. ID No. 345 | 86974 | 86959 | 86120 | Seq. ID No. 346 |
| 169 | Seq. ID No. 347 | 86178 | 86193 | 86720 | Seq. ID No. 348 |
| 170 | Seq. ID No. 349 | 86757 | 86790 | 87047 | Seq. ID No. 350 |
| 171a | Seq. ID No. 351 | 87777 | 87717 | 87316 | Seq. ID No. 352 |
| 171b | Seq. ID No. 353 | 87777 | 87762 | 87316 | Seq. ID No. 354 |
| 172 | Seq. ID No. 355 | 88726 | 88726 | 87785 | Seq. ID No. 356 |
| 173 | Seq. ID No. 357 | 87518 | 87560 | 87805 | Seq. ID No. 358 |
| 174 | Seq. ID No. 359 | 87942 | 87969 | 88196 | Seq. ID No. 360 |
| 175 | Seq. ID No. 361 | 89206 | 89194 | 88793 | Seq. ID No. 362 |
| 176 | Seq. ID No. 363 | 89592 | 89589 | 89224 | Seq. ID No. 364 |
| 177a | Seq. ID No. 365 | 90825 | 90801 | 90136 | Seq. ID No. 366 |
| 177b | Seq. ID No. 367 | 90825 | 90816 | 90136 | Seq. ID No. 368 |
| 179a | Seq. ID No. 369 | 90536 | 90599 | 90823 | Seq. ID No. 370 |
| 179b | Seq. ID No. 371 | 90536 | 90596 | 90823 | Seq. ID No. 372 |
| 180a | Seq. ID No. 373 | 92164 | 91072 | 90845 | Seq. ID No. 374 |
| 180b | Seq. ID No. 375 | 92164 | 92155 | 90845 | Seq. ID No. 376 |
| 183a | Seq. ID No. 377 | 91563 | 91608 | 91928 | Seq. ID No. 378 |
| 184 | Seq. ID No. 379 | 92612 | 92597 | 92160 | Seq. ID No. 380 |
| 185 | Seq. ID No. 381 | 92821 | 92821 | 92630 | Seq. ID No. 382 |
| 186 | Seq. ID No. 383 | 93331 | 93328 | 92825 | Seq. ID No. 384 |
| 187a | Seq. ID No. 385 | 92661 | 92706 | 93110 | Seq. ID No. 386 |
| 187b | Seq. ID No. 387 | 92661 | 92670 | 93110 | Seq. ID No. 388 |
| 188 | Seq. ID No. 389 | 93727 | 93718 | 93350 | Seq. ID No. 390 |
| 189b | Seq. ID No. 391 | 94349 | 94319 | 93780 | Seq. ID No. 392 |
| 191b | Seq. ID No. 393 | 93850 | 93877 | 94344 | Seq. ID No. 394 |
| 192a | Seq. ID No. 395 | 94748 | 94742 | 94350 | Seq. ID No. 396 |
| 192b | Seq. ID No. 397 | 94748 | 94748 | 94350 | Seq. ID No. 398 |
| 193 | Seq. ID No. 399 | 94912 | 94912 | 94739 | Seq. ID No. 400 |
| 194a | Seq. ID No. 401 | 94489 | 94528 | 94773 | Seq. ID No. 402 |
| 194b | Seq. ID No. 403 | 94489 | 94516 | 94773 | Seq. ID No. 404 |
| 195 | Seq. ID No. 405 | 95581 | 95527 | 94988 | Seq. ID No. 406 |
| 196 | Seq. ID No. 407 | 94854 | 94875 | 95147 | Seq. ID No. 408 |
| 197a | Seq. ID No. 409 | 95874 | 95862 | 95560 | Seq. ID No. 410 |
| 197b | Seq. ID No. 411 | 95874 | 95871 | 95560 | Seq. ID No. 412 |
| 198a | Seq. ID No. 413 | 96273 | 96237 | 95890 | Seq. ID No. 414 |
| 198b | Seq. ID No. 415 | 96273 | 96258 | 95890 | Seq. ID No. 416 |
| 200 | Seq. ID No. 417 | 96560 | 96557 | 96294 | Seq. ID No. 418 |
| 201a | Seq. ID No. 419 | 96178 | 96340 | 96564 | Seq. ID No. 420 |
| 202 | Seq. ID No. 421 | 96786 | 96786 | 96592 | Seq. ID No. 422 |
| 203 | Seq. ID No. 423 | 97210 | 97207 | 96776 | Seq. ID No. 424 |
| 204 | Seq. ID No. 425 | 97870 | 97867 | 97211 | Seq. ID No. 426 |
| 205 | Seq. ID No. 427 | 98245 | 98227 | 97871 | Seq. ID No. 428 |
| 206 | Seq. ID No. 429 | 98536 | 98524 | 98249 | Seq. ID No. 430 |
| 207 | Seq. ID No. 431 | 98031 | 98031 | 98282 | Seq. ID No. 432 |
| 208a | Seq. ID No. 433 | 99436 | 99367 | 98567 | Seq. ID No. 434 |
| 208b | Seq. ID No. 435 | 99436 | 99412 | 98567 | Seq. ID No. 436 |
| 210 | Seq. ID No. 437 | 99792 | 99738 | 99445 | Seq. ID No. 438 |
| 211 | Seq. ID No. 439 | 100364 | 100361 | 99738 | Seq. ID No. 440 |
| 213 | Seq. ID No. 441 | 101050 | 101020 | 100388 | Seq. ID No. 442 |
| 215a | Seq. ID No. 443 | 101510 | 101444 | 101058 | Seq. ID No. 444 |
| 218 | Seq. ID No. 445 | 102897 | 102885 | 102442 | Seq. ID No. 446 |
| 219 | Seq. ID No. 447 | 104259 | 104244 | 103060 | Seq. ID No. 448 |
| 220a | Seq. ID No. 449 | 106476 | 106326 | 104386 | Seq. ID No. 450 |
| 220b | Seq. ID No. 451 | 106476 | 106428 | 104386 | Seq. ID No. 452 |
| 220c | Seq. ID No. 453 | 106476 | 106476 | 104386 | Seq. ID No. 454 |
| 223a | Seq. ID No. 455 | 105032 | 105092 | 105457 | Seq. ID No. 456 |
| 223b | Seq. ID No. 457 | 105032 | 105065 | 105457 | Seq. ID No. 458 |
| 226a | Seq. ID No. 459 | 107077 | 106960 | 106580 | Seq. ID No. 460 |
| 226b | Seq. ID No. 461 | 107077 | 107050 | 106580 | Seq. ID No. 462 |
| 227 | Seq. ID No. 463 | 107524 | 107506 | 107096 | Seq. ID No. 464 |
| 228a | Seq. ID No. 465 | 111563 | 111203 | 107883 | Seq. ID No. 466 |
| 228b | Seq. ID No. 467 | 111563 | 111269 | 107883 | Seq. ID No. 468 |
| 228c | Seq. ID No. 469 | 111563 | 111461 | 107883 | Seq. ID No. 470 |
| 228d | Seq. ID No. 471 | 111563 | 111542 | 107883 | Seq. ID No. 472 |
| 232a | Seq. ID No. 473 | 108687 | 108723 | 109223 | Seq. ID No. 474 |
| 232b | Seq. ID No. 475 | 108687 | 108690 | 109223 | Seq. ID No. 476 |
| 235a | Seq. ID No. 477 | 110593 | 110707 | 111144 | Seq. ID No. 478 |
| 235b | Seq. ID No. 479 | 110593 | 110626 | 111144 | Seq. ID No. 480 |
| 236a | Seq. ID No. 481 | 115224 | 115071 | 111643 | Seq. ID No. 482 |
| 236b | Seq. ID No. 483 | 115224 | 115212 | 111643 | Seq. ID No. 484 |
| 236c | Seq. ID No. 485 | 115224 | 115221 | 111643 | Seq. ID No. 486 |
| 239a | Seq. ID No. 487 | 111971 | 112139 | 112507 | Seq. ID No. 488 |
| 239b | Seq. ID No. 489 | 111971 | 112097 | 112507 | Seq. ID No. 490 |
| 239c | Seq. ID No. 491 | 111971 | 112085 | 112507 | Seq. ID No. 492 |
| 240 | Seq. ID No. 493 | 112508 | 112601 | 112867 | Seq. ID No. 494 |
| 241 | Seq. ID No. 495 | 113123 | 113129 | 113374 | Seq. ID No. 496 |
| 245a | Seq. ID No. 497 | 116934 | 116292 | 115537 | Seq. ID No. 498 |
| 245b | Seq. ID No. 499 | 116934 | 116775 | 115537 | Seq. ID No. 500 |
| 245c | Seq. ID No. 501 | 116934 | 116895 | 115537 | Seq. ID No. 502 |
| 246a | Seq. ID No. 503 | 118257 | 118056 | 117070 | Seq. ID No. 504 |
| 246b | Seq. ID No. 505 | 118257 | 118245 | 117070 | Seq. ID No. 506 |
| 247 | Seq. ID No. 507 | 117578 | 117584 | 118102 | Seq. ID No. 508 |
| 248a | Seq. ID No. 509 | 119490 | 119358 | 118264 | Seq. ID No. 510 |
| 248b | Seq. ID No. 511 | 119490 | 119478 | 118264 | Seq. ID No. 512 |
| 249a | Seq. ID No. 513 | 121252 | 121225 | 119774 | Seq. ID No. 514 |
| 249b | Seq. ID No. 515 | 121252 | 121252 | 119774 | Seq. ID No. 516 |
| 251 | Seq. ID No. 517 | 122162 | 122150 | 121326 | Seq. ID No. 518 |
| 253a | Seq. ID No. 519 | 122435 | 122387 | 122163 | Seq. ID No. 520 |
| 253b | Seq. ID No. 521 | 122435 | 122432 | 122163 | Seq. ID No. 522 |
| 254 | Seq. ID No. 523 | 123069 | 123045 | 122416 | Seq. ID No. 524 |
| 255a | Seq. ID No. 525 | 124654 | 123817 | 123116 | Seq. ID No. 526 |
| 255b | Seq. ID No. 527 | 124654 | 124408 | 123116 | Seq. ID No. 528 |
| 255c | Seq. ID No. 529 | 124654 | 124639 | 123116 | Seq. ID No. 530 |
| 255d | Seq. ID No. 531 | 124654 | 124645 | 123116 | Seq. ID No. 532 |
| 258 | Seq. ID No. 533 | 125557 | 125539 | 124658 | Seq. ID No. 534 |
| 259a | Seq. ID No. 535 | 126322 | 126256 | 125558 | Seq. ID No. 536 |
| 259b | Seq. ID No. 537 | 126322 | 126292 | 125558 | Seq. ID No. 538 |
| 259c | Seq. ID No. 539 | 126322 | 126298 | 125558 | Seq. ID No. 540 |
| 260 | Seq. ID No. 541 | 126904 | 126901 | 126533 | Seq. ID No. 542 |
| 262 | Seq. ID No. 543 | 127474 | 127474 | 126965 | Seq. ID No. 544 |
| 263a | Seq. ID No. 545 | 126519 | 126645 | 126968 | Seq. ID No. 546 |
| 263b | Seq. ID No. 547 | 126519 | 126603 | 126968 | Seq. ID No. 548 |
| 264b | Seq. ID No. 549 | 126969 | 127005 | 127382 | Seq. ID No. 550 |
| 265 | Seq. ID No. 551 | 128443 | 128389 | 127691 | Seq. ID No. 552 |
| 267b | Seq. ID No. 553 | 129002 | 128912 | 128487 | Seq. ID No. 554 |
| 267c | Seq. ID No. 555 | 129002 | 128996 | 128487 | Seq. ID No. 556 |
| 268 | Seq. ID No. 557 | 128485 | 128500 | 128733 | Seq. ID No. 558 |
| 269a | Seq. ID No. 559 | 129717 | 129609 | 129055 | Seq. ID No. 560 |
| 269b | Seq. ID No. 561 | 129717 | 129708 | 129055 | Seq. ID No. 562 |
| 271a | Seq. ID No. 563 | 131163 | 131118 | 129856 | Seq. ID No. 564 |
| 271b | Seq. ID No. 565 | 131163 | 131151 | 129856 | Seq. ID No. 566 |
| 273a | Seq. ID No. 567 | 133346 | 132791 | 131694 | Seq. ID No. 568 |
| 273b | Seq. ID No. 569 | 133346 | 133343 | 131694 | Seq. ID No. 570 |
| 277a | Seq. ID No. 571 | 135131 | 134891 | 134046 | Seq. ID No. 572 |
| 277b | Seq. ID No. 573 | 135131 | 135077 | 134046 | Seq. ID No. 574 |
| 277c | Seq. ID No. 575 | 135131 | 135119 | 134046 | Seq. ID No. 576 |
| 279a | Seq. ID No. 577 | 135434 | 135626 | 135994 | Seq. ID No. 578 |
| 279b | Seq. ID No. 579 | 135434 | 135437 | 135994 | Seq. ID No. 580 |
| 280a | Seq. ID No. 581 | 138094 | 137200 | 136100 | Seq. ID No. 582 |
| 280b | Seq. ID No. 583 | 138094 | 137593 | 136100 | Seq. ID No. 584 |
| 280c | Seq. ID No. 585 | 138094 | 137926 | 136100 | Seq. ID No. 586 |
| 280d | Seq. ID No. 587 | 138094 | 138052 | 136100 | Seq. ID No. 588 |
| 282 | Seq. ID No. 589 | 139430 | 139388 | 139116 | Seq. ID No. 590 |
| 283a | Seq. ID No. 591 | 138704 | 138719 | 139567 | Seq. ID No. 592 |
| 283b | Seq. ID No. 593 | 138704 | 138710 | 139567 | Seq. ID No. 594 |
| 284a | Seq. ID No. 595 | 139568 | 139592 | 140257 | Seq. ID No. 596 |
| 284b | Seq. ID No. 597 | 139568 | 139574 | 140257 | Seq. ID No. 598 |
| 285b | Seq. ID No. 599 | 141025 | 141022 | 140702 | Seq. ID No. 600 |
| 286a | Seq. ID No. 601 | 140271 | 140286 | 141035 | Seq. ID No. 602 |
| 286b | Seq. ID No. 603 | 140271 | 140277 | 141035 | Seq. ID No. 604 |
| 287 | Seq. ID No. 605 | 142180 | 142153 | 141284 | Seq. ID No. 606 |
| 290a | Seq. ID No. 607 | 142653 | 142590 | 142177 | Seq. ID No. 608 |
| 290b | Seq. ID No. 609 | 142653 | 142638 | 142177 | Seq. ID No. 610 |
| 293 | Seq. ID No. 611 | 142822 | 142855 | 143292 | Seq. ID No. 612 |
| 294 | Seq. ID No. 613 | 143980 | 143974 | 143411 | Seq. ID No. 614 |
| 296 | Seq. ID No. 615 | 146154 | 146151 | 143974 | Seq. ID No. 616 |
| 297 | Seq. ID No. 617 | 144242 | 144227 | 143988 | Seq. ID No. 618 |
| 300b | Seq. ID No. 619 | 145417 | 145420 | 145899 | Seq. ID No. 620 |
| 301a | Seq. ID No. 621 | 147294 | 147237 | 146278 | Seq. ID No. 622 |
| 301b | Seq. ID No. 623 | 147294 | 147264 | 146278 | Seq. ID No. 624 |
| 304a | Seq. ID No. 625 | 149441 | 149135 | 147252 | Seq. ID No. 626 |
| 304b | Seq. ID No. 627 | 149441 | 149423 | 147252 | Seq. ID No. 628 |
| 307 | Seq. ID No. 629 | 149829 | 149781 | 149401 | Seq. ID No. 630 |
| 308 | Seq. ID No. 631 | 150040 | 150016 | 149783 | Seq. ID No. 632 |
| 309 | Seq. ID No. 633 | 149973 | 149973 | 150149 | Seq. ID No. 634 |
| 310 | Seq. ID No. 635 | 151326 | 151308 | 150298 | Seq. ID No. 636 |
| 311 | Seq. ID No. 637 | 153222 | 153168 | 151447 | Seq. ID No. 638 |
| 313a | Seq. ID No. 639 | 153970 | 153457 | 153188 | Seq. ID No. 640 |
| 313b | Seq. ID No. 641 | 153970 | 153496 | 153188 | Seq. ID No. 642 |
| 313c | Seq. ID No. 643 | 153970 | 153952 | 153188 | Seq. ID No. 644 |
| 313d | Seq. ID No. 645 | 153970 | 153955 | 153188 | Seq. ID No. 646 |
| 313e | Seq. ID No. 647 | 153970 | 153961 | 153188 | Seq. ID No. 648 |
| 315 | Seq. ID No. 649 | 154835 | 154826 | 153939 | Seq. ID No. 650 |
| 316a | Seq. ID No. 651 | 155263 | 155209 | 154826 | Seq. ID No. 652 |
| 317a | Seq. ID No. 653 | 155877 | 155646 | 155287 | Seq. ID No. 654 |
| 317b | Seq. ID No. 655 | 155877 | 155865 | 155287 | Seq. ID No. 656 |
| 318a | Seq. ID No. 657 | 157499 | 157280 | 156426 | Seq. ID No. 658 |
| 318b | Seq. ID No. 659 | 157499 | 157304 | 156426 | Seq. ID No. 660 |
| 318c | Seq. ID No. 661 | 157499 | 157367 | 156426 | Seq. ID No. 662 |
| 318d | Seq. ID No. 663 | 157499 | 157451 | 156426 | Seq. ID No. 664 |
| 318e | Seq. ID No. 665 | 157499 | 157460 | 156426 | Seq. ID No. 666 |
| 320 | Seq. ID No. 667 | 156670 | 156700 | 156975 | Seq. ID No. 668 |
| 321 | Seq. ID No. 669 | 158142 | 158139 | 157312 | Seq. ID No. 670 |
| 323a | Seq. ID No. 671 | 158413 | 158341 | 158129 | Seq. ID No. 672 |
| 323b | Seq. ID No. 673 | 158413 | 158395 | 158129 | Seq. ID No. 674 |
| 324 | Seq. ID No. 675 | 159203 | 159200 | 158373 | Seq. ID No. 676 |
| 327a | Seq. ID No. 677 | 159964 | 159682 | 159233 | Seq. ID No. 678 |
| 327b | Seq. ID No. 679 | 159964 | 159844 | 159233 | Seq. ID No. 680 |
| 327c | Seq. ID No. 681 | 159964 | 159937 | 159233 | Seq. ID No. 682 |
| 329 | Seq. ID No. 683 | 161034 | 161034 | 159934 | Seq. ID No. 684 |
| 330a | Seq. ID No. 685 | 161885 | 162272 | 163120 | Seq. ID No. 686 |
| 330b | Seq. ID No. 687 | 161885 | 161975 | 163120 | Seq. ID No. 688 |
| 330c | Seq. ID No. 689 | 161885 | 161888 | 163120 | Seq. ID No. 690 |
| 331 | Seq. ID No. 691 | 162945 | 162951 | 163187 | Seq. ID No. 692 |
| 332 | Seq. ID No. 693 | 163441 | 163441 | 163238 | Seq. ID No. 694 |
| 333 | Seq. ID No. 695 | 163242 | 163248 | 163478 | Seq. ID No. 696 |
| 334 | Seq. ID No. 697 | 163339 | 163339 | 163563 | Seq. ID No. 698 |
| 335a | Seq. ID No. 699 | 163139 | 163193 | 163786 | Seq. ID No. 700 |
| 335b | Seq. ID No. 701 | 163139 | 163178 | 163786 | Seq. ID No. 702 |
| 337 | Seq. ID No. 703 | 163774 | 163798 | 164847 | Seq. ID No. 704 |
| 338a | Seq. ID No. 705 | 164835 | 164961 | 165473 | Seq. ID No. 706 |
| 338b | Seq. ID No. 707 | 164835 | 164952 | 165473 | Seq. ID No. 708 |
| 338c | Seq. ID No. 709 | 164835 | 164889 | 165473 | Seq. ID No. 710 |
| 341a | Seq. ID No. 711 | 165550 | 165709 | 166422 | Seq. ID No. 712 |
| 341b | Seq. ID No. 713 | 165550 | 165550 | 166422 | Seq. ID No. 714 |
| 342a | Seq. ID No. 715 | 167866 | 166741 | 166517 | Seq. ID No. 716 |
| 342b | Seq. ID No. 717 | 167866 | 166810 | 166517 | Seq. ID No. 718 |
| 342c | Seq. ID No. 719 | 167866 | 166951 | 166517 | Seq. ID No. 720 |
| 342d | Seq. ID No. 721 | 167866 | 167164 | 166517 | Seq. ID No. 722 |
| 342e | Seq. ID No. 723 | 167866 | 167602 | 166517 | Seq. ID No. 724 |
| 342f | Seq. ID No. 725 | 167866 | 167791 | 166517 | Seq. ID No. 726 |
| 342g | Seq. ID No. 727 | 167866 | 167824 | 166517 | Seq. ID No. 728 |
| 342h | Seq. ID No. 729 | 167866 | 167857 | 166517 | Seq. ID No. 730 |
| 344a | Seq. ID No. 731 | 167906 | 167942 | 168580 | Seq. ID No. 732 |
| 344b | Seq. ID No. 733 | 167906 | 167918 | 168580 | Seq. ID No. 734 |
| 345 | Seq. ID No. 735 | 169267 | 169258 | 168590 | Seq. ID No. 736 |
| 346a | Seq. ID No. 737 | 169209 | 169296 | 169616 | Seq. ID No. 738 |
| 346b | Seq. ID No. 739 | 169209 | 169212 | 169616 | Seq. ID No. 740 |
| 347 | Seq. ID No. 741 | 170242 | 170227 | 169742 | Seq. ID No. 742 |
| 349a | Seq. ID No. 743 | 170547 | 170637 | 170948 | Seq. ID No. 744 |
| 349b | Seq. ID No. 745 | 170547 | 170559 | 170948 | Seq. ID No. 746 |
| 349c | Seq. ID No. 747 | 170547 | 170550 | 170948 | Seq. ID No. 748 |
| 350a | Seq. ID No. 749 | 171289 | 171334 | 172113 | Seq. ID No. 750 |
| 350b | Seq. ID No. 751 | 171289 | 171304 | 172113 | Seq. ID No. 752 |
| 351 | Seq. ID No. 753 | 172083 | 172116 | 172757 | Seq. ID No. 754 |
| 352a | Seq. ID No. 755 | 172736 | 173237 | 173545 | Seq. ID No. 756 |
| 352b | Seq. ID No. 757 | 172736 | 173222 | 173545 | Seq. ID No. 758 |
| 352c | Seq. ID No. 759 | 172736 | 172754 | 173545 | Seq. ID No. 760 |
| 354a | Seq. ID No. 761 | 173511 | 173913 | 174341 | Seq. ID No. 762 |
| 354b | Seq. ID No. 763 | 173511 | 173565 | 174341 | Seq. ID No. 764 |
| 354c | Seq. ID No. 765 | 173511 | 173535 | 174341 | Seq. ID No. 766 |
| 355 | Seq. ID No. 767 | 174702 | 174594 | 174361 | Seq. ID No. 768 |
| 356a | Seq. ID No. 769 | 174424 | 174847 | 175176 | Seq. ID No. 770 |
| 356b | Seq. ID No. 771 | 174424 | 174610 | 175176 | Seq. ID No. 772 |
| 356c | Seq. ID No. 773 | 174424 | 174538 | 175176 | Seq. ID No. 774 |
| 356d | Seq. ID No. 775 | 174424 | 174469 | 175176 | Seq. ID No. 776 |
| 358a | Seq. ID No. 777 | 175629 | 176586 | 176951 | Seq. ID No. 778 |
| 358b | Seq. ID No. 779 | 175629 | 175692 | 176951 | Seq. ID No. 780 |
| 358c | Seq. ID No. 781 | 175629 | 175653 | 176951 | Seq. ID No. 782 |
| 362 | Seq. ID No. 783 | 177179 | 177206 | 178258 | Seq. ID No. 784 |
| 365a | Seq. ID No. 785 | 178795 | 178840 | 179430 | Seq. ID No. 786 |
| 365b | Seq. ID No. 787 | 178795 | 178807 | 179430 | Seq. ID No. 788 |
| 366b | Seq. ID No. 789 | 179373 | 179436 | 180101 | Seq. ID No. 790 |
| 366c | Seq. ID No. 791 | 179373 | 179427 | 180101 | Seq. ID No. 792 |
| 367a | Seq. ID No. 793 | 181005 | 180984 | 180184 | Seq. ID No. 794 |
| 367b | Seq. ID No. 795 | 181005 | 181002 | 180184 | Seq. ID No. 796 |
| 371a | Seq. ID No. 797 | 181201 | 181216 | 181662 | Seq. ID No. 798 |
| 371b | Seq. ID No. 799 | 181201 | 181204 | 181662 | Seq. ID No. 800 |
| 372a | Seq. ID No. 801 | 184610 | 183770 | 181809 | Seq. ID No. 802 |
| 372b | Seq. ID No. 803 | 184610 | 184463 | 181809 | Seq. ID No. 804 |
| 372c | Seq. ID No. 805 | 184610 | 184562 | 181809 | Seq. ID No. 806 |
| 372d | Seq. ID No. 807 | 184610 | 184598 | 181809 | Seq. ID No. 808 |
| 374 | Seq. ID No. 809 | 182287 | 182368 | 182628 | Seq. ID No. 810 |
| 377a | Seq. ID No. 811 | 183658 | 183769 | 184497 | Seq. ID No. 812 |
| 377b | Seq. ID No. 813 | 183658 | 183682 | 184497 | Seq. ID No. 814 |
| 378a | Seq. ID No. 815 | 185701 | 185635 | 184616 | Seq. ID No. 816 |
| 378b | Seq. ID No. 817 | 185701 | 185677 | 184616 | Seq. ID No. 818 |
| 382b | Seq. ID No. 819 | 186504 | 186492 | 185782 | Seq. ID No. 820 |
| 383a | Seq. ID No. 821 | 188140 | 188092 | 187067 | Seq. ID No. 822 |
| 383b | Seq. ID No. 823 | 188140 | 188104 | 187067 | Seq. ID No. 824 |
| 384a | Seq. ID No. 825 | 189536 | 188333 | 188085 | Seq. ID No. 826 |
| 384b | Seq. ID No. 827 | 189536 | 189509 | 188085 | Seq. ID No. 828 |
| 385a | Seq. ID No. 829 | 190440 | 190362 | 189526 | Seq. ID No. 830 |
| 385b | Seq. ID No. 831 | 190440 | 190434 | 189526 | Seq. ID No. 832 |
| 386 | Seq. ID No. 833 | 190535 | 190535 | 190431 | Seq. ID No. 834 |
| 387 | Seq. ID No. 835 | 192036 | 192021 | 190792 | Seq. ID No. 836 |
| 390 | Seq. ID No. 837 | 192805 | 192781 | 192056 | Seq. ID No. 838 |
| 391 | Seq. ID No. 839 | 193828 | 193816 | 192968 | Seq. ID No. 840 |
| 393b | Seq. ID No. 841 | 193199 | 193205 | 193543 | Seq. ID No. 842 |
| 395a | Seq. ID No. 843 | 194052 | 194199 | 194792 | Seq. ID No. 844 |
| 395b | Seq. ID No. 845 | 194052 | 194088 | 194792 | Seq. ID No. 846 |
| 395c | Seq. ID No. 847 | 194052 | 194058 | 194792 | Seq. ID No. 848 |
| 396 | Seq. ID No. 849 | 194817 | 194817 | 195026 | Seq. ID No. 850 |
| 398 | Seq. ID No. 851 | 195036 | 195093 | 195338 | Seq. ID No. 852 |
| 400a | Seq. ID No. 853 | 195530 | 195740 | 196156 | Seq. ID No. 854 |
| 400b | Seq. ID No. 855 | 195530 | 195551 | 196156 | Seq. ID No. 856 |
| 401a | Seq. ID No. 857 | 197561 | 197516 | 196254 | Seq. ID No. 858 |
| 401b | Seq. ID No. 859 | 197561 | 197549 | 196254 | Seq. ID No. 860 |
| 403a | Seq. ID No. 861 | 200060 | 199496 | 198111 | Seq. ID No. 862 |
| 403b | Seq. ID No. 863 | 200060 | 199943 | 198111 | Seq. ID No. 864 |
| 403c | Seq. ID No. 865 | 200060 | 200000 | 198111 | Seq. ID No. 866 |
| 403d | Seq. ID No. 867 | 200060 | 200003 | 198111 | Seq. ID No. 868 |
| 406a | Seq. ID No. 869 | 201691 | 201646 | 200384 | Seq. ID No. 870 |
| 406b | Seq. ID No. 871 | 201691 | 201679 | 200384 | Seq. ID No. 872 |
| 409a | Seq. ID No. 873 | 203082 | 202980 | 202234 | Seq. ID No. 874 |
| 409b | Seq. ID No. 875 | 203082 | 203079 | 202234 | Seq. ID No. 876 |
| 410a | Seq. ID No. 877 | 205212 | 205185 | 203377 | Seq. ID No. 878 |
| 410b | Seq. ID No. 879 | 205212 | 205200 | 203377 | Seq. ID No. 880 |
| 410c | Seq. ID No. 881 | 205212 | 205209 | 203377 | Seq. ID No. 882 |
| 413a | Seq. ID No. 883 | 206260 | 205960 | 205544 | Seq. ID No. 884 |
| 413b | Seq. ID No. 885 | 206260 | 206224 | 205544 | Seq. ID No. 886 |
| 416a | Seq. ID No. 887 | 206529 | 206499 | 206266 | Seq. ID No. 888 |
| 416b | Seq. ID No. 889 | 206529 | 206529 | 206266 | Seq. ID No. 890 |
| 417 | Seq. ID No. 891 | 206866 | 206842 | 206519 | Seq. ID No. 892 |
| 418a | Seq. ID No. 893 | 208884 | 208674 | 206959 | Seq. ID No. 894 |
| 418b | Seq. ID No. 895 | 208884 | 208827 | 206959 | Seq. ID No. 896 |
| 419a | Seq. ID No. 897 | 210885 | 210405 | 209041 | Seq. ID No. 898 |
| 419b | Seq. ID No. 899 | 210885 | 210609 | 209041 | Seq. ID No. 900 |
| 419c | Seq. ID No. 901 | 210885 | 210864 | 209041 | Seq. ID No. 902 |
| 420a | Seq. ID No. 903 | 209648 | 209660 | 209893 | Seq. ID No. 904 |
| 420b | Seq. ID No. 905 | 209648 | 209657 | 209893 | Seq. ID No. 906 |
| 421 | Seq. ID No. 907 | 212336 | 212297 | 211083 | Seq. ID No. 908 |
| 422 | Seq. ID No. 909 | 211732 | 211765 | 211989 | Seq. ID No. 910 |
| 424a | Seq. ID No. 911 | 213555 | 213390 | 212911 | Seq. ID No. 912 |
| 424b | Seq. ID No. 913 | 213555 | 213522 | 212911 | Seq. ID No. 914 |
| 424c | Seq. ID No. 915 | 213555 | 213525 | 212911 | Seq. ID No. 916 |
| 426a | Seq. ID No. 917 | 213625 | 213637 | 213936 | Seq. ID No. 918 |
| 426b | Seq. ID No. 919 | 213625 | 213631 | 213936 | Seq. ID No. 920 |
| 427a | Seq. ID No. 921 | 214643 | 214553 | 214074 | Seq. ID No. 922 |
| 427b | Seq. ID No. 923 | 214643 | 214589 | 214074 | Seq. ID No. 924 |
| 427c | Seq. ID No. 925 | 214643 | 214625 | 214074 | Seq. ID No. 926 |
| 429a | Seq. ID No. 927 | 215579 | 215441 | 214998 | Seq. ID No. 928 |
| 429b | Seq. ID No. 929 | 215579 | 215498 | 214998 | Seq. ID No. 930 |
| 429c | Seq. ID No. 931 | 215579 | 215540 | 214998 | Seq. ID No. 932 |
| 429d | Seq. ID No. 933 | 215579 | 215546 | 214998 | Seq. ID No. 934 |
| 431 | Seq. ID No. 935 | 216192 | 216192 | 215455 | Seq. ID No. 936 |
| 434 | Seq. ID No. 937 | 215861 | 215876 | 216112 | Seq. ID No. 938 |
| 435 | Seq. ID No. 939 | 217111 | 217093 | 216281 | Seq. ID No. 940 |
| 437b | Seq. ID No. 941 | 216993 | 216987 | 216646 | Seq. ID No. 942 |
| 437c | Seq. ID No. 943 | 216993 | 216993 | 216646 | Seq. ID No. 944 |
| 438a | Seq. ID No. 945 | 218376 | 218307 | 217327 | Seq. ID No. 946 |
| 438b | Seq. ID No. 947 | 218376 | 218352 | 217327 | Seq. ID No. 948 |
| 438c | Seq. ID No. 949 | 218376 | 218376 | 217327 | Seq. ID No. 950 |
| 440 | Seq. ID No. 951 | 219614 | 219608 | 218307 | Seq. ID No. 952 |
| 441a | Seq. ID No. 953 | 221512 | 221416 | 219605 | Seq. ID No. 954 |
| 441b | Seq. ID No. 955 | 221512 | 221491 | 219605 | Seq. ID No. 956 |
| 443b | Seq. ID No. 957 | 220467 | 220509 | 220775 | Seq. ID No. 958 |
| 444a | Seq. ID No. 959 | 222225 | 222198 | 221506 | Seq. ID No. 960 |
| 444b | Seq. ID No. 961 | 222225 | 222213 | 221506 | Seq. ID No. 962 |
| 445a | Seq. ID No. 963 | 222816 | 222783 | 222292 | Seq. ID No. 964 |
| 445b | Seq. ID No. 965 | 222816 | 222801 | 222292 | Seq. ID No. 966 |
| 448 | Seq. ID No. 967 | 223126 | 223156 | 224475 | Seq. ID No. 968 |
| 450a | Seq. ID No. 969 | 224457 | 224481 | 225266 | Seq. ID No. 970 |
| 450b | Seq. ID No. 971 | 224457 | 224469 | 225266 | Seq. ID No. 972 |
| 451a | Seq. ID No. 973 | 226352 | 226328 | 226101 | Seq. ID No. 974 |
| 451b | Seq. ID No. 975 | 226352 | 226331 | 226101 | Seq. ID No. 976 |
| 452a | Seq. ID No. 977 | 225232 | 225328 | 226530 | Seq. ID No. 978 |
| 452b | Seq. ID No. 979 | 225232 | 225295 | 226530 | Seq. ID No. 980 |
| 452c | Seq. ID No. 981 | 225232 | 225256 | 226530 | Seq. ID No. 982 |
| 452d | Seq. ID No. 983 | 225232 | 225247 | 226530 | Seq. ID No. 984 |
| 452e | Seq. ID No. 985 | 225232 | 225232 | 226530 | Seq. ID No. 986 |
| 454b | Seq. ID No. 987 | 227703 | 227703 | 227224 | Seq. ID No. 988 |
| 455a | Seq. ID No. 989 | 226615 | 226738 | 227742 | Seq. ID No. 990 |
| 455b | Seq. ID No. 991 | 226615 | 226693 | 227742 | Seq. ID No. 992 |
| 455c | Seq. ID No. 993 | 226615 | 226627 | 227742 | Seq. ID No. 994 |
| 458a | Seq. ID No. 995 | 227816 | 227936 | 229081 | Seq. ID No. 996 |
| 458b | Seq. ID No. 997 | 227816 | 227840 | 229081 | Seq. ID No. 998 |
| 460a | Seq. ID No. 999 | 229035 | 229098 | 229883 | Seq. ID No. 1000 |
| 460b | Seq. ID No. 1001 | 229035 | 229062 | 229883 | Seq. ID No. 1002 |
| 460c | Seq. ID No. 1003 | 229035 | 229053 | 229883 | Seq. ID No. 1004 |
| 462 | Seq. ID No. 1005 | 230230 | 230239 | 230679 | Seq. ID No. 1006 |
| 463a | Seq. ID No. 1007 | 230696 | 230720 | 231208 | Seq. ID No. 1008 |
| 463b | Seq. ID No. 1009 | 230696 | 230711 | 231208 | Seq. ID No. 1010 |
| 464a | Seq. ID No. 1011 | 233073 | 231831 | 231601 | Seq. ID No. 1012 |
| 464b | Seq. ID No. 1013 | 233073 | 232560 | 231601 | Seq. ID No. 1014 |
| 464c | Seq. ID No. 1015 | 233073 | 232890 | 231601 | Seq. ID No. 1016 |
| 464d | Seq. ID No. 1017 | 233073 | 233052 | 231601 | Seq. ID No. 1018 |
| 465b | Seq. ID No. 1019 | 232439 | 232433 | 232119 | Seq. ID No. 1020 |
| 467a | Seq. ID No. 1021 | 234505 | 234430 | 233069 | Seq. ID No. 1022 |
| 467b | Seq. ID No. 1023 | 234505 | 234472 | 233069 | Seq. ID No. 1024 |
| 471a | Seq. ID No. 1025 | 235904 | 235874 | 235617 | Seq. ID No. 1026 |
| 471b | Seq. ID No. 1027 | 235904 | 235898 | 235617 | Seq. ID No. 1028 |
| 472a | Seq. ID No. 1029 | 234562 | 235432 | 235953 | Seq. ID No. 1030 |
| 472b | Seq. ID No. 1031 | 234562 | 235294 | 235953 | Seq. ID No. 1032 |
| 472c | Seq. ID No. 1033 | 234562 | 234958 | 235953 | Seq. ID No. 1034 |
| 472d | Seq. ID No. 1035 | 234562 | 234805 | 235953 | Seq. ID No. 1036 |
| 472e | Seq. ID No. 1037 | 234562 | 234796 | 235953 | Seq. ID No. 1038 |
| 472f | Seq. ID No. 1039 | 234562 | 234574 | 235953 | Seq. ID No. 1040 |
| 473 | Seq. ID No. 1041 | 235954 | 235963 | 236619 | Seq. ID No. 1042 |
| 474 | Seq. ID No. 1043 | 237869 | 237851 | 236748 | Seq. ID No. 1044 |
| 476 | Seq. ID No. 1045 | 238557 | 238551 | 238282 | Seq. ID No. 1046 |
| 477b | Seq. ID No. 1047 | 239139 | 239133 | 238819 | Seq. ID No. 1048 |
| 478a | Seq. ID No. 1049 | 238145 | 238253 | 239143 | Seq. ID No. 1050 |
| 478b | Seq. ID No. 1051 | 238145 | 238208 | 239143 | Seq. ID No. 1052 |
| 479 | Seq. ID No. 1053 | 239300 | 239318 | 239719 | Seq. ID No. 1054 |
| 480a | Seq. ID No. 1055 | 241246 | 241159 | 239954 | Seq. ID No. 1056 |
| 480b | Seq. ID No. 1057 | 241246 | 241213 | 239954 | Seq. ID No. 1058 |
| 481a | Seq. ID No. 1059 | 242130 | 242112 | 241498 | Seq. ID No. 1060 |
| 481b | Seq. ID No. 1061 | 242130 | 242127 | 241498 | Seq. ID No. 1062 |
| 482a | Seq. ID No. 1063 | 242585 | 242540 | 242109 | Seq. ID No. 1064 |
| 482b | Seq. ID No. 1065 | 242585 | 242576 | 242109 | Seq. ID No. 1066 |
| 483 | Seq. ID No. 1067 | 243003 | 243000 | 242668 | Seq. ID No. 1068 |
| 490 | Seq. ID No. 1069 | 243146 | 243158 | 244378 | Seq. ID No. 1070 |
| 491a | Seq. ID No. 1071 | 244796 | 244763 | 244506 | Seq. ID No. 1072 |
| 491b | Seq. ID No. 1073 | 244796 | 244781 | 244506 | Seq. ID No. 1074 |
| 492 | Seq. ID No. 1075 | 245550 | 245511 | 244786 | Seq. ID No. 1076 |
| 494a | Seq. ID No. 1077 | 245120 | 245192 | 245554 | Seq. ID No. 1078 |
| 495a | Seq. ID No. 1079 | 247355 | 247226 | 245949 | Seq. ID No. 1080 |
| 495b | Seq. ID No. 1081 | 247355 | 247235 | 245949 | Seq. ID No. 1082 |
| 495c | Seq. ID No. 1083 | 247355 | 247331 | 245949 | Seq. ID No. 1084 |
| 498a | Seq. ID No. 1085 | 247969 | 247912 | 247466 | Seq. ID No. 1086 |
| 498b | Seq. ID No. 1087 | 247969 | 247939 | 247466 | Seq. ID No. 1088 |
| 499a | Seq. ID No. 1089 | 249985 | 249943 | 247970 | Seq. ID No. 1090 |
| 499b | Seq. ID No. 1091 | 249985 | 249970 | 247970 | Seq. ID No. 1092 |
| 500 | Seq. ID No. 1093 | 250457 | 250439 | 250203 | Seq. ID No. 1094 |
| 502b | Seq. ID No. 1095 | 251041 | 250951 | 250475 | Seq. ID No. 1096 |
| 502c | Seq. ID No. 1097 | 251041 | 251026 | 250475 | Seq. ID No. 1098 |
| 504 | Seq. ID No. 1099 | 251402 | 251372 | 251070 | Seq. ID No. 1100 |
| 505a | Seq. ID No. 1101 | 254277 | 254214 | 251794 | Seq. ID No. 1102 |
| 505b | Seq. ID No. 1103 | 254277 | 254268 | 251794 | Seq. ID No. 1104 |
| 507a | Seq. ID No. 1105 | 252725 | 252782 | 253009 | Seq. ID No. 1106 |
| 507b | Seq. ID No. 1107 | 252725 | 252743 | 253009 | Seq. ID No. 1108 |
| 509 | Seq. ID No. 1109 | 256252 | 256246 | 254297 | Seq. ID No. 1110 |
| 510 | Seq. ID No. 1111 | 254739 | 254781 | 255125 | Seq. ID No. 1112 |
| 512a | Seq. ID No. 1113 | 257457 | 257433 | 256297 | Seq. ID No. 1114 |
| 512b | Seq. ID No. 1115 | 257457 | 257442 | 256297 | Seq. ID No. 1116 |
| 514 | Seq. ID No. 1117 | 257684 | 257681 | 257439 | Seq. ID No. 1118 |
| 515a | Seq. ID No. 1119 | 259131 | 258687 | 257914 | Seq. ID No. 1120 |
| 515b | Seq. ID No. 1121 | 259131 | 258987 | 257914 | Seq. ID No. 1122 |
| 515c | Seq. ID No. 1123 | 259131 | 259116 | 257914 | Seq. ID No. 1124 |
| 518a | Seq. ID No. 1125 | 260687 | 260399 | 259284 | Seq. ID No. 1126 |
| 518b | Seq. ID No. 1127 | 260687 | 260636 | 259284 | Seq. ID No. 1128 |
| 518c | Seq. ID No. 1129 | 260687 | 260663 | 259284 | Seq. ID No. 1130 |
| 521b | Seq. ID No. 1131 | 260218 | 260218 | 259886 | Seq. ID No. 1132 |
| 523 | Seq. ID No. 1133 | 261324 | 261393 | 261749 | Seq. ID No. 1134 |
| 524a | Seq. ID No. 1135 | 261758 | 262406 | 262645 | Seq. ID No. 1136 |
| 524b | Seq. ID No. 1137 | 261758 | 261779 | 262645 | Seq. ID No. 1138 |
| 525 | Seq. ID No. 1139 | 262929 | 262920 | 262696 | Seq. ID No. 1140 |
| 527a | Seq. ID No. 1141 | 262700 | 262727 | 263797 | Seq. ID No. 1142 |
| 527b | Seq. ID No. 1143 | 262700 | 262709 | 263797 | Seq. ID No. 1144 |
| 528a | Seq. ID No. 1145 | 263837 | 263867 | 265153 | Seq. ID No. 1146 |
| 528b | Seq. ID No. 1147 | 263837 | 263861 | 265153 | Seq. ID No. 1148 |
| 529 | Seq. ID No. 1149 | 266200 | 266170 | 265265 | Seq. ID No. 1150 |
| 530a | Seq. ID No. 1151 | 265689 | 265725 | 266060 | Seq. ID No. 1152 |
| 530b | Seq. ID No. 1153 | 265689 | 265701 | 266060 | Seq. ID No. 1154 |
| 533 | Seq. ID No. 1155 | 266675 | 266675 | 268132 | Seq. ID No. 1156 |
| 535 | Seq. ID No. 1157 | 268203 | 268266 | 269903 | Seq. ID No. 1158 |
| 536 | Seq. ID No. 1159 | 269936 | 269951 | 270898 | Seq. ID No. 1160 |
| 539b | Seq. ID No. 1161 | 271377 | 271527 | 272060 | Seq. ID No. 1162 |
| 539c | Seq. ID No. 1163 | 271377 | 271392 | 272060 | Seq. ID No. 1164 |
| 541a | Seq. ID No. 1165 | 272061 | 272481 | 272726 | Seq. ID No. 1166 |
| 541b | Seq. ID No. 1167 | 272061 | 272301 | 272726 | Seq. ID No. 1168 |
| 541c | Seq. ID No. 1169 | 272061 | 272100 | 272726 | Seq. ID No. 1170 |
| 541d | Seq. ID No. 1171 | 272061 | 272073 | 272726 | Seq. ID No. 1172 |
| 542 | Seq. ID No. 1173 | 273208 | 273208 | 273047 | Seq. ID No. 1174 |
| 543a | Seq. ID No. 1175 | 273962 | 273872 | 273201 | Seq. ID No. 1176 |
| 543b | Seq. ID No. 1177 | 273962 | 273914 | 273201 | Seq. ID No. 1178 |
| 543c | Seq. ID No. 1179 | 273962 | 273923 | 273201 | Seq. ID No. 1180 |
| 544 | Seq. ID No. 1181 | 275016 | 275004 | 273883 | Seq. ID No. 1182 |
| 545a | Seq. ID No. 1183 | 276076 | 275425 | 275009 | Seq. ID No. 1184 |
| 545b | Seq. ID No. 1185 | 276076 | 275956 | 275009 | Seq. ID No. 1186 |
| 545c | Seq. ID No. 1187 | 276076 | 276064 | 275009 | Seq. ID No. 1188 |
| 546a | Seq. ID No. 1189 | 277005 | 276924 | 276061 | Seq. ID No. 1190 |
| 546b | Seq. ID No. 1191 | 277005 | 276996 | 276061 | Seq. ID No. 1192 |
| 546c | Seq. ID No. 1193 | 277005 | 277005 | 276061 | Seq. ID No. 1194 |
| 547a | Seq. ID No. 1195 | 277408 | 277321 | 277067 | Seq. ID No. 1196 |
| 547b | Seq. ID No. 1197 | 277408 | 277348 | 277067 | Seq. ID No. 1198 |
| 548 | Seq. ID No. 1199 | 277734 | 277737 | 278195 | Seq. ID No. 1200 |
| 549b | Seq. ID No. 1201 | 280434 | 280410 | 279952 | Seq. ID No. 1202 |
| 550a | Seq. ID No. 1203 | 280361 | 280289 | 280002 | Seq. ID No. 1204 |
| 551 | Seq. ID No. 1205 | 278647 | 278659 | 280005 | Seq. ID No. 1206 |
| 553c | Seq. ID No. 1207 | 280944 | 280935 | 280549 | Seq. ID No. 1208 |
| 554a | Seq. ID No. 1209 | 280006 | 280024 | 281070 | Seq. ID No. 1210 |
| 554b | Seq. ID No. 1211 | 280006 | 280018 | 281070 | Seq. ID No. 1212 |
| 556 | Seq. ID No. 1213 | 282361 | 282358 | 282101 | Seq. ID No. 1214 |
| 557a | Seq. ID No. 1215 | 281066 | 281096 | 282127 | Seq. ID No. 1216 |
| 557b | Seq. ID No. 1217 | 281066 | 281078 | 282127 | Seq. ID No. 1218 |
| 560a | Seq. ID No. 1219 | 282117 | 282180 | 283415 | Seq. ID No. 1220 |
| 560b | Seq. ID No. 1221 | 282117 | 282141 | 283415 | Seq. ID No. 1222 |
| 561 | Seq. ID No. 1223 | 285333 | 285315 | 283717 | Seq. ID No. 1224 |
| 563 | Seq. ID No. 1225 | 285391 | 285409 | 286263 | Seq. ID No. 1226 |
| 564a | Seq. ID No. 1227 | 287308 | 287116 | 286733 | Seq. ID No. 1228 |
| 564b | Seq. ID No. 1229 | 287308 | 287149 | 286733 | Seq. ID No. 1230 |
| 564c | Seq. ID No. 1231 | 287308 | 287305 | 286733 | Seq. ID No. 1232 |
| 569 | Seq. ID No. 1233 | 287443 | 287461 | 288639 | Seq. ID No. 1234 |
| 570a | Seq. ID No. 1235 | 290452 | 289936 | 288827 | Seq. ID No. 1236 |
| 570b | Seq. ID No. 1237 | 290452 | 290434 | 288827 | Seq. ID No. 1238 |
| 571 | Seq. ID No. 1239 | 288840 | 288888 | 289115 | Seq. ID No. 1240 |
| 573 | Seq. ID No. 1241 | 292365 | 292332 | 290620 | Seq. ID No. 1242 |
| 576a | Seq. ID No. 1243 | 293274 | 293223 | 292969 | Seq. ID No. 1244 |
| 576b | Seq. ID No. 1245 | 293274 | 293271 | 292969 | Seq. ID No. 1246 |
| 578a | Seq. ID No. 1247 | 293907 | 293826 | 293311 | Seq. ID No. 1248 |
| 578b | Seq. ID No. 1249 | 293907 | 293859 | 293311 | Seq. ID No. 1250 |
| 580a | Seq. ID No. 1251 | 292718 | 292730 | 294118 | Seq. ID No. 1252 |
| 580b | Seq. ID No. 1253 | 292718 | 292727 | 294118 | Seq. ID No. 1254 |
| 583a | Seq. ID No. 1255 | 294365 | 294470 | 296365 | Seq. ID No. 1256 |
| 583b | Seq. ID No. 1257 | 294365 | 294467 | 296365 | Seq. ID No. 1258 |
| 585b | Seq. ID No. 1259 | 297067 | 297028 | 296621 | Seq. ID No. 1260 |
| 586a | Seq. ID No. 1261 | 296610 | 296637 | 297083 | Seq. ID No. 1262 |
| 586b | Seq. ID No. 1263 | 296610 | 296613 | 297083 | Seq. ID No. 1264 |
| 587a | Seq. ID No. 1265 | 298917 | 298014 | 297532 | Seq. ID No. 1266 |
| 587b | Seq. ID No. 1267 | 298917 | 298155 | 297532 | Seq. ID No. 1268 |
| 587c | Seq. ID No. 1269 | 298917 | 298611 | 297532 | Seq. ID No. 1270 |
| 587d | Seq. ID No. 1271 | 298917 | 298884 | 297532 | Seq. ID No. 1272 |
| 588a | Seq. ID No. 1273 | 299041 | 298978 | 298235 | Seq. ID No. 1274 |
| 588b | Seq. ID No. 1275 | 299041 | 299008 | 298235 | Seq. ID No. 1276 |
| 589a | Seq. ID No. 1277 | 298358 | 298382 | 298864 | Seq. ID No. 1278 |
| 589b | Seq. ID No. 1279 | 298358 | 298364 | 298864 | Seq. ID No. 1280 |
| 590 | Seq. ID No. 1281 | 299156 | 299141 | 298887 | Seq. ID No. 1282 |
| 595a | Seq. ID No. 1283 | 304140 | 303912 | 303337 | Seq. ID No. 1284 |
| 595b | Seq. ID No. 1285 | 304140 | 304134 | 303337 | Seq. ID No. 1286 |
| 596a | Seq. ID No. 1287 | 303419 | 303536 | 303781 | Seq. ID No. 1288 |
| 596b | Seq. ID No. 1289 | 303419 | 303440 | 303781 | Seq. ID No. 1290 |
| 596c | Seq. ID No. 1291 | 303419 | 303434 | 303781 | Seq. ID No. 1292 |
| 597 | Seq. ID No. 1293 | 304680 | 304674 | 304141 | Seq. ID No. 1294 |
| 598a | Seq. ID No. 1295 | 303848 | 303869 | 304144 | Seq. ID No. 1296 |
| 598b | Seq. ID No. 1297 | 303848 | 303863 | 304144 | Seq. ID No. 1298 |
| 599a | Seq. ID No. 1299 | 305589 | 305412 | 304867 | Seq. ID No. 1300 |
| 599b | Seq. ID No. 1301 | 305589 | 305589 | 304867 | Seq. ID No. 1302 |
| 600a | Seq. ID No. 1303 | 304997 | 305018 | 305251 | Seq. ID No. 1304 |
| 600b | Seq. ID No. 1305 | 304997 | 305012 | 305251 | Seq. ID No. 1306 |
| 603a | Seq. ID No. 1307 | 306557 | 306572 | 306961 | Seq. ID No. 1308 |
| 606 | Seq. ID No. 1309 | 309046 | 309028 | 308543 | Seq. ID No. 1310 |
| 607a | Seq. ID No. 1311 | 307964 | 308051 | 308665 | Seq. ID No. 1312 |
| 607b | Seq. ID No. 1313 | 307964 | 307979 | 308665 | Seq. ID No. 1314 |
| 609a | Seq. ID No. 1315 | 299740 | 299791 | 309309 | Seq. ID No. 1316 |
| 609b | Seq. ID No. 1317 | 299740 | 299752 | 309309 | Seq. ID No. 1318 |
| 610a | Seq. ID No. 1319 | 310481 | 310454 | 310221 | Seq. ID No. 1320 |
| 610b | Seq. ID No. 1321 | 310481 | 310472 | 310221 | Seq. ID No. 1322 |
| 611 | Seq. ID No. 1323 | 310255 | 310258 | 310515 | Seq. ID No. 1324 |
| 613a | Seq. ID No. 1325 | 310512 | 310941 | 311675 | Seq. ID No. 1326 |
| 613b | Seq. ID No. 1327 | 310512 | 310749 | 311675 | Seq. ID No. 1328 |
| 613c | Seq. ID No. 1329 | 310512 | 310584 | 311675 | Seq. ID No. 1330 |
| 613d | Seq. ID No. 1331 | 310512 | 310512 | 311675 | Seq. ID No. 1332 |
| 614a | Seq. ID No. 1333 | 311715 | 311754 | 312194 | Seq. ID No. 1334 |
| 614b | Seq. ID No. 1335 | 311715 | 311736 | 312194 | Seq. ID No. 1336 |
| 615b | Seq. ID No. 1337 | 312828 | 312807 | 312418 | Seq. ID No. 1338 |
| 618 | Seq. ID No. 1339 | 312443 | 312443 | 313573 | Seq. ID No. 1340 |
| 619a | Seq. ID No. 1341 | 314156 | 314096 | 313866 | Seq. ID No. 1342 |
| 619b | Seq. ID No. 1343 | 314156 | 314123 | 313866 | Seq. ID No. 1344 |
| 620 | Seq. ID No. 1345 | 314583 | 314571 | 313969 | Seq. ID No. 1346 |
| 623 | Seq. ID No. 1347 | 315369 | 315318 | 314881 | Seq. ID No. 1348 |
| 624a | Seq. ID No. 1349 | 315050 | 315110 | 315355 | Seq. ID No. 1350 |
| 624b | Seq. ID No. 1351 | 315050 | 315107 | 315355 | Seq. ID No. 1352 |
| 624c | Seq. ID No. 1353 | 315050 | 315098 | 315355 | Seq. ID No. 1354 |
| 625 | Seq. ID No. 1355 | 315811 | 315811 | 315677 | Seq. ID No. 1356 |
| 626a | Seq. ID No. 1357 | 315560 | 315863 | 316420 | Seq. ID No. 1358 |
| 626b | Seq. ID No. 1359 | 315560 | 315638 | 316420 | Seq. ID No. 1360 |
| 626c | Seq. ID No. 1361 | 315560 | 315626 | 316420 | Seq. ID No. 1362 |
| 631a | Seq. ID No. 1363 | 316535 | 317297 | 319288 | Seq. ID No. 1364 |
| 631b | Seq. ID No. 1365 | 316535 | 316610 | 319288 | Seq. ID No. 1366 |
| 631c | Seq. ID No. 1367 | 316535 | 316574 | 319288 | Seq. ID No. 1368 |
| 631d | Seq. ID No. 1369 | 316535 | 316562 | 319288 | Seq. ID No. 1370 |
| 632b | Seq. ID No. 1371 | 319900 | 319867 | 319622 | Seq. ID No. 1372 |
| 633a | Seq. ID No. 1373 | 319626 | 319701 | 320822 | Seq. ID No. 1374 |
| 633b | Seq. ID No. 1375 | 319626 | 319680 | 320822 | Seq. ID No. 1376 |
| 633c | Seq. ID No. 1377 | 319626 | 319656 | 320822 | Seq. ID No. 1378 |
| 634b | Seq. ID No. 1379 | 320918 | 320921 | 321223 | Seq. ID No. 1380 |
| 636 | Seq. ID No. 1381 | 323400 | 323388 | 323161 | Seq. ID No. 1382 |
| 637a | Seq. ID No. 1383 | 321686 | 321737 | 323404 | Seq. ID No. 1384 |
| 637b | Seq. ID No. 1385 | 321686 | 321731 | 323404 | Seq. ID No. 1386 |
| 637c | Seq. ID No. 1387 | 321686 | 321695 | 323404 | Seq. ID No. 1388 |
| 640 | Seq. ID No. 1389 | 324722 | 324674 | 324414 | Seq. ID No. 1390 |
| 641a | Seq. ID No. 1391 | 323549 | 323594 | 324448 | Seq. ID No. 1392 |
| 641b | Seq. ID No. 1393 | 323549 | 323549 | 324448 | Seq. ID No. 1394 |
| 643 | Seq. ID No. 1395 | 324439 | 324460 | 324894 | Seq. ID No. 1396 |
| 644a | Seq. ID No. 1397 | 324791 | 324902 | 325087 | Seq. ID No. 1398 |
| 644b | Seq. ID No. 1399 | 324791 | 324830 | 325087 | Seq. ID No. 1400 |
| 645 | Seq. ID No. 1401 | 325456 | 325453 | 325181 | Seq. ID No. 1402 |
| 650 | Seq. ID No. 1403 | 325080 | 325125 | 326261 | Seq. ID No. 1404 |
| 652 | Seq. ID No. 1405 | 326348 | 326354 | 326716 | Seq. ID No. 1406 |
| 653a | Seq. ID No. 1407 | 326913 | 327024 | 328373 | Seq. ID No. 1408 |
| 653b | Seq. ID No. 1409 | 326913 | 326943 | 328373 | Seq. ID No. 1410 |
| 653c | Seq. ID No. 1411 | 326913 | 326925 | 328373 | Seq. ID No. 1412 |
| 656 | Seq. ID No. 1413 | 328370 | 328373 | 329863 | Seq. ID No. 1414 |
| 657c | Seq. ID No. 1415 | 330464 | 330530 | 330994 | Seq. ID No. 1416 |
| 658a | Seq. ID No. 1417 | 331110 | 331140 | 331565 | Seq. ID No. 1418 |
| 658b | Seq. ID No. 1419 | 331110 | 331110 | 331565 | Seq. ID No. 1420 |
| 659a | Seq. ID No. 1421 | 332594 | 332510 | 332055 | Seq. ID No. 1422 |
| 659b | Seq. ID No. 1423 | 332594 | 332582 | 332055 | Seq. ID No. 1424 |
| 661 | Seq. ID No. 1425 | 331974 | 332040 | 332771 | Seq. ID No. 1426 |
| 663 | Seq. ID No. 1427 | 333202 | 333205 | 333858 | Seq. ID No. 1428 |
| 665 | Seq. ID No. 1429 | 334188 | 334203 | 334598 | Seq. ID No. 1430 |
| 666 | Seq. ID No. 1431 | 334592 | 334598 | 334942 | Seq. ID No. 1432 |
| 670 | Seq. ID No. 1433 | 334988 | 335009 | 336517 | Seq. ID No. 1434 |
| 674a | Seq. ID No. 1435 | 336652 | 336691 | 338523 | Seq. ID No. 1436 |
| 674b | Seq. ID No. 1437 | 336652 | 336652 | 338523 | Seq. ID No. 1438 |
| 676 | Seq. ID No. 1439 | 340581 | 340611 | 340835 | Seq. ID No. 1440 |
| 677a | Seq. ID No. 1441 | 342484 | 342442 | 340949 | Seq. ID No. 1442 |
| 677b | Seq. ID No. 1443 | 342484 | 342469 | 340949 | Seq. ID No. 1444 |
| 679a | Seq. ID No. 1445 | 343500 | 343410 | 343186 | Seq. ID No. 1446 |
| 679b | Seq. ID No. 1447 | 343500 | 343461 | 343186 | Seq. ID No. 1448 |
| 680 | Seq. ID No. 1449 | 342758 | 342758 | 343474 | Seq. ID No. 1450 |
| 681 | Seq. ID No. 1451 | 343432 | 343540 | 344313 | Seq. ID No. 1452 |
| 683a | Seq. ID No. 1453 | 344288 | 344393 | 345187 | Seq. ID No. 1454 |
| 683b | Seq. ID No. 1455 | 344288 | 344294 | 345187 | Seq. ID No. 1456 |
| 684 | Seq. ID No. 1457 | 345386 | 345395 | 345622 | Seq. ID No. 1458 |
| 687 | Seq. ID No. 1459 | 345974 | 345974 | 347074 | Seq. ID No. 1460 |
| 688a | Seq. ID No. 1461 | 347062 | 347122 | 347847 | Seq. ID No. 1462 |
| 688b | Seq. ID No. 1463 | 347062 | 347116 | 347847 | Seq. ID No. 1464 |
| 690 | Seq. ID No. 1465 | 348033 | 348051 | 349016 | Seq. ID No. 1466 |
| 691a | Seq. ID No. 1467 | 349813 | 349777 | 349262 | Seq. ID No. 1468 |
| 691b | Seq. ID No. 1469 | 349813 | 349807 | 349262 | Seq. ID No. 1470 |
| 692 | Seq. ID No. 1471 | 350818 | 350797 | 350156 | Seq. ID No. 1472 |
| 694 | Seq. ID No. 1473 | 351167 | 351206 | 351940 | Seq. ID No. 1474 |
| 696 | Seq. ID No. 1475 | 351998 | 352013 | 352717 | Seq. ID No. 1476 |
| 698 | Seq. ID No. 1477 | 352953 | 352974 | 353339 | Seq. ID No. 1478 |
| 699b | Seq. ID No. 1479 | 354064 | 354055 | 353720 | Seq. ID No. 1480 |
| 700a | Seq. ID No. 1481 | 353340 | 353775 | 354068 | Seq. ID No. 1482 |
| 700b | Seq. ID No. 1483 | 353340 | 353364 | 354068 | Seq. ID No. 1484 |
| 700c | Seq. ID No. 1485 | 353340 | 353358 | 354068 | Seq. ID No. 1486 |
| 703 | Seq. ID No. 1487 | 354843 | 354864 | 356138 | Seq. ID No. 1488 |
| 705a | Seq. ID No. 1489 | 356139 | 356178 | 357137 | Seq. ID No. 1490 |
| 705b | Seq. ID No. 1491 | 356139 | 356151 | 357137 | Seq. ID No. 1492 |
| 707 | Seq. ID No. 1493 | 358618 | 358600 | 357662 | Seq. ID No. 1494 |
| 709 | Seq. ID No. 1495 | 359170 | 359134 | 358619 | Seq. ID No. 1496 |
| 710 | Seq. ID No. 1497 | 359781 | 359781 | 359350 | Seq. ID No. 1498 |
| 712a | Seq. ID No. 1499 | 360586 | 360520 | 359801 | Seq. ID No. 1500 |
| 712b | Seq. ID No. 1501 | 360586 | 360550 | 359801 | Seq. ID No. 1502 |
| 715a | Seq. ID No. 1503 | 360752 | 360839 | 361831 | Seq. ID No. 1504 |
| 715b | Seq. ID No. 1505 | 360752 | 360818 | 361831 | Seq. ID No. 1506 |
| 717 | Seq. ID No. 1507 | 361785 | 361833 | 362309 | Seq. ID No. 1508 |
| 718a | Seq. ID No. 1509 | 362257 | 362323 | 362622 | Seq. ID No. 1510 |
| 721 | Seq. ID No. 1511 | 363839 | 363815 | 363351 | Seq. ID No. 1512 |
| 722a | Seq. ID No. 1513 | 362629 | 363682 | 364056 | Seq. ID No. 1514 |
| 722b | Seq. ID No. 1515 | 362629 | 363304 | 364056 | Seq. ID No. 1516 |
| 722c | Seq. ID No. 1517 | 362629 | 362653 | 364056 | Seq. ID No. 1518 |
| 724a | Seq. ID No. 1519 | 364323 | 364773 | 366119 | Seq. ID No. 1520 |
| 724b | Seq. ID No. 1521 | 364323 | 364470 | 366119 | Seq. ID No. 1522 |
| 724c | Seq. ID No. 1523 | 364323 | 364455 | 366119 | Seq. ID No. 1524 |
| 724d | Seq. ID No. 1525 | 364323 | 364326 | 366119 | Seq. ID No. 1526 |
| 726 | Seq. ID No. 1527 | 366101 | 366155 | 366637 | Seq. ID No. 1528 |
| 728a | Seq. ID No. 1529 | 366642 | 366774 | 367577 | Seq. ID No. 1530 |
| 728b | Seq. ID No. 1531 | 366642 | 366654 | 367577 | Seq. ID No. 1532 |
| 730a | Seq. ID No. 1533 | 367564 | 368092 | 368385 | Seq. ID No. 1534 |
| 730b | Seq. ID No. 1535 | 367564 | 367888 | 368385 | Seq. ID No. 1536 |
| 730c | Seq. ID No. 1537 | 367564 | 367723 | 368385 | Seq. ID No. 1538 |
| 730d | Seq. ID No. 1539 | 367564 | 367564 | 368385 | Seq. ID No. 1540 |
| 731b | Seq. ID No. 1541 | 368400 | 368415 | 368798 | Seq. ID No. 1542 |
| 732 | Seq. ID No. 1543 | 368838 | 368880 | 370058 | Seq. ID No. 1544 |
| 738a | Seq. ID No. 1545 | 371023 | 372094 | 372465 | Seq. ID No. 1546 |
| 738b | Seq. ID No. 1547 | 371023 | 371140 | 372465 | Seq. ID No. 1548 |
| 738c | Seq. ID No. 1549 | 371023 | 371050 | 372465 | Seq. ID No. 1550 |
| 739 | Seq. ID No. 1551 | 373440 | 373434 | 373159 | Seq. ID No. 1552 |
| 740 | Seq. ID No. 1553 | 374954 | 374927 | 374634 | Seq. ID No. 1554 |
| 741a | Seq. ID No. 1555 | 378064 | 378016 | 377489 | Seq. ID No. 1556 |
| 741b | Seq. ID No. 1557 | 378064 | 378058 | 377489 | Seq. ID No. 1558 |
| 743a | Seq. ID No. 1559 | 372934 | 373003 | 378591 | Seq. ID No. 1560 |
| 743b | Seq. ID No. 1561 | 372934 | 372937 | 378591 | Seq. ID No. 1562 |
| 744 | Seq. ID No. 1563 | 379071 | 379080 | 380426 | Seq. ID No. 1564 |
| 745a | Seq. ID No. 1565 | 380454 | 380478 | 381371 | Seq. ID No. 1566 |
| 745b | Seq. ID No. 1567 | 380454 | 380463 | 381371 | Seq. ID No. 1568 |
| 746a | Seq. ID No. 1569 | 381346 | 381391 | 382191 | Seq. ID No. 1570 |
| 746b | Seq. ID No. 1571 | 381346 | 381364 | 382191 | Seq. ID No. 1572 |
| 747 | Seq. ID No. 1573 | 382184 | 382196 | 383323 | Seq. ID No. 1574 |
| 748a | Seq. ID No. 1575 | 383287 | 383437 | 384072 | Seq. ID No. 1576 |
| 748b | Seq. ID No. 1577 | 383287 | 383326 | 384072 | Seq. ID No. 1578 |
| 749 | Seq. ID No. 1579 | 386651 | 386615 | 386352 | Seq. ID No. 1580 |
| 751 | Seq. ID No. 1581 | 384408 | 384465 | 390965 | Seq. ID No. 1582 |
| 754a | Seq. ID No. 1583 | 391275 | 392166 | 392996 | Seq. ID No. 1584 |
| 754b | Seq. ID No. 1585 | 391275 | 391416 | 392996 | Seq. ID No. 1586 |
| 754c | Seq. ID No. 1587 | 391275 | 391335 | 392996 | Seq. ID No. 1588 |
| 754d | Seq. ID No. 1589 | 391275 | 391317 | 392996 | Seq. ID No. 1590 |
| 756a | Seq. ID No. 1591 | 393013 | 393040 | 394449 | Seq. ID No. 1592 |
| 756b | Seq. ID No. 1593 | 393013 | 393025 | 394449 | Seq. ID No. 1594 |
| 758 | Seq. ID No. 1595 | 394517 | 394532 | 394849 | Seq. ID No. 1596 |
| 760 | Seq. ID No. 1597 | 395517 | 395529 | 396824 | Seq. ID No. 1598 |
| 762a | Seq. ID No. 1599 | 396888 | 396909 | 397820 | Seq. ID No. 1600 |
| 762b | Seq. ID No. 1601 | 396888 | 396906 | 397820 | Seq. ID No. 1602 |
| 762c | Seq. ID No. 1603 | 396888 | 396903 | 397820 | Seq. ID No. 1604 |
| 763a | Seq. ID No. 1605 | 397821 | 397887 | 398228 | Seq. ID No. 1606 |
| 763b | Seq. ID No. 1607 | 397821 | 397824 | 398228 | Seq. ID No. 1608 |
| 764 | Seq. ID No. 1609 | 398537 | 398537 | 398635 | Seq. ID No. 1610 |
| 766 | Seq. ID No. 1611 | 399089 | 399101 | 399967 | Seq. ID No. 1612 |
| 767 | Seq. ID No. 1613 | 399968 | 400034 | 400435 | Seq. ID No. 1614 |
| 770a | Seq. ID No. 1615 | 400630 | 400984 | 401823 | Seq. ID No. 1616 |
| 770b | Seq. ID No. 1617 | 400630 | 400894 | 401823 | Seq. ID No. 1618 |
| 770c | Seq. ID No. 1619 | 400630 | 400693 | 401823 | Seq. ID No. 1620 |
| 772a | Seq. ID No. 1621 | 401846 | 401996 | 402577 | Seq. ID No. 1622 |
| 772b | Seq. ID No. 1623 | 401846 | 401849 | 402577 | Seq. ID No. 1624 |
| 774 | Seq. ID No. 1625 | 402606 | 402699 | 402929 | Seq. ID No. 1626 |
| 775 | Seq. ID No. 1627 | 402562 | 402595 | 403254 | Seq. ID No. 1628 |
| 777a | Seq. ID No. 1629 | 404283 | 404343 | 404675 | Seq. ID No. 1630 |
| 777c | Seq. ID No. 1631 | 404283 | 404298 | 404675 | Seq. ID No. 1632 |
| 779 | Seq. ID No. 1633 | 404803 | 404809 | 405120 | Seq. ID No. 1634 |
| 780a | Seq. ID No. 1635 | 404676 | 404748 | 405221 | Seq. ID No. 1636 |
| 780b | Seq. ID No. 1637 | 404676 | 404721 | 405221 | Seq. ID No. 1638 |
| 782b | Seq. ID No. 1639 | 406015 | 405988 | 405311 | Seq. ID No. 1640 |
| 785 | Seq. ID No. 1641 | 407774 | 407762 | 406443 | Seq. ID No. 1642 |
| 786b | Seq. ID No. 1643 | 407221 | 407152 | 406865 | Seq. ID No. 1644 |
| 788a | Seq. ID No. 1645 | 408557 | 408227 | 407775 | Seq. ID No. 1646 |
| 788b | Seq. ID No. 1647 | 408557 | 408557 | 407775 | Seq. ID No. 1648 |
| 789a | Seq. ID No. 1649 | 409361 | 409145 | 408558 | Seq. ID No. 1650 |
| 789b | Seq. ID No. 1651 | 409361 | 409259 | 408558 | Seq. ID No. 1652 |
| 789c | Seq. ID No. 1653 | 409361 | 409337 | 408558 | Seq. ID No. 1654 |
| 791 | Seq. ID No. 1655 | 408880 | 408910 | 409161 | Seq. ID No. 1656 |
| 792 | Seq. ID No. 1657 | 410107 | 410107 | 409340 | Seq. ID No. 1658 |
| 794a | Seq. ID No. 1659 | 411108 | 411066 | 410167 | Seq. ID No. 1660 |
| 794b | Seq. ID No. 1661 | 411108 | 411087 | 410167 | Seq. ID No. 1662 |
| 794c | Seq. ID No. 1663 | 411108 | 411096 | 410167 | Seq. ID No. 1664 |
| 794d | Seq. ID No. 1665 | 411108 | 411105 | 410167 | Seq. ID No. 1666 |
| 795 | Seq. ID No. 1667 | 411252 | 411252 | 411422 | Seq. ID No. 1668 |
| 797 | Seq. ID No. 1669 | 411604 | 411610 | 412293 | Seq. ID No. 1670 |
| 799a | Seq. ID No. 1671 | 412586 | 413474 | 413698 | Seq. ID No. 1672 |
| 799b | Seq. ID No. 1673 | 412586 | 413210 | 413698 | Seq. ID No. 1674 |
| 799c | Seq. ID No. 1675 | 412586 | 412757 | 413698 | Seq. ID No. 1676 |
| 799d | Seq. ID No. 1677 | 412586 | 412721 | 413698 | Seq. ID No. 1678 |
| 799e | Seq. ID No. 1679 | 412586 | 412667 | 413698 | Seq. ID No. 1680 |
| 799f | Seq. ID No. 1681 | 412586 | 412664 | 413698 | Seq. ID No. 1682 |
| 803a | Seq. ID No. 1683 | 413755 | 413779 | 415128 | Seq. ID No. 1684 |
| 803b | Seq. ID No. 1685 | 413755 | 413758 | 415128 | Seq. ID No. 1686 |
| 804a | Seq. ID No. 1687 | 415466 | 415487 | 416794 | Seq. ID No. 1688 |
| 804b | Seq. ID No. 1689 | 415466 | 415478 | 416794 | Seq. ID No. 1690 |
| 807 | Seq. ID No. 1691 | 416862 | 417024 | 418199 | Seq. ID No. 1692 |
| 808 | Seq. ID No. 1693 | 418549 | 418555 | 418794 | Seq. ID No. 1694 |
| 809b | Seq. ID No. 1695 | 419662 | 419632 | 419243 | Seq. ID No. 1696 |
| 812 | Seq. ID No. 1697 | 418200 | 418200 | 421274 | Seq. ID No. 1698 |
| 813 | Seq. ID No. 1699 | 421399 | 421414 | 422034 | Seq. ID No. 1700 |
| 816 | Seq. ID No. 1701 | 422122 | 422122 | 422283 | Seq. ID No. 1702 |
| 820a | Seq. ID No. 1703 | 424733 | 424739 | 424969 | Seq. ID No. 1704 |
| 820b | Seq. ID No. 1705 | 424733 | 424733 | 424969 | Seq. ID No. 1706 |
| 826 | Seq. ID No. 1707 | 422827 | 422842 | 428625 | Seq. ID No. 1708 |
| 829a | Seq. ID No. 1709 | 429410 | 429518 | 430123 | Seq. ID No. 1710 |
| 829b | Seq. ID No. 1711 | 429410 | 429416 | 430123 | Seq. ID No. 1712 |
| 830 | Seq. ID No. 1713 | 431650 | 431614 | 430421 | Seq. ID No. 1714 |
| 834a | Seq. ID No. 1715 | 431939 | 432029 | 432535 | Seq. ID No. 1716 |
| 834b | Seq. ID No. 1717 | 431939 | 431993 | 432535 | Seq. ID No. 1718 |
| 834c | Seq. ID No. 1719 | 431939 | 431972 | 432535 | Seq. ID No. 1720 |
| 835a | Seq. ID No. 1721 | 432638 | 432680 | 433231 | Seq. ID No. 1722 |
| 835b | Seq. ID No. 1723 | 432638 | 432644 | 433231 | Seq. ID No. 1724 |
| 836a | Seq. ID No. 1725 | 434079 | 434013 | 433579 | Seq. ID No. 1726 |
| 836b | Seq. ID No. 1727 | 434079 | 434034 | 433579 | Seq. ID No. 1728 |
| 836c | Seq. ID No. 1729 | 434079 | 434070 | 433579 | Seq. ID No. 1730 |
| 837a | Seq. ID No. 1731 | 434505 | 435360 | 435590 | Seq. ID No. 1732 |
| 837b | Seq. ID No. 1733 | 434505 | 434817 | 435590 | Seq. ID No. 1734 |
| 837c | Seq. ID No. 1735 | 434505 | 434505 | 435590 | Seq. ID No. 1736 |
| 843 | Seq. ID No. 1737 | 435813 | 435840 | 436859 | Seq. ID No. 1738 |
| 847a | Seq. ID No. 1739 | 436831 | 437089 | 439215 | Seq. ID No. 1740 |
| 847b | Seq. ID No. 1741 | 436831 | 437068 | 439215 | Seq. ID No. 1742 |
| 848 | Seq. ID No. 1743 | 439411 | 439411 | 439268 | Seq. ID No. 1744 |
| 849a | Seq. ID No. 1745 | 440732 | 440618 | 439470 | Seq. ID No. 1746 |
| 849b | Seq. ID No. 1747 | 440732 | 440684 | 439470 | Seq. ID No. 1748 |
| 851a | Seq. ID No. 1749 | 440982 | 441087 | 442634 | Seq. ID No. 1750 |
| 851b | Seq. ID No. 1751 | 440982 | 441072 | 442634 | Seq. ID No. 1752 |
| 853a | Seq. ID No. 1753 | 442726 | 442870 | 443319 | Seq. ID No. 1754 |
| 853b | Seq. ID No. 1755 | 442726 | 442753 | 443319 | Seq. ID No. 1756 |
| 853c | Seq. ID No. 1757 | 442726 | 442741 | 443319 | Seq. ID No. 1758 |
| 854 | Seq. ID No. 1759 | 444233 | 444233 | 444006 | Seq. ID No. 1760 |
| 855 | Seq. ID No. 1761 | 443652 | 443679 | 444119 | Seq. ID No. 1762 |
| 857 | Seq. ID No. 1763 | 446274 | 446247 | 445903 | Seq. ID No. 1764 |
| 859a | Seq. ID No. 1765 | 444185 | 445520 | 446704 | Seq. ID No. 1766 |
| 859b | Seq. ID No. 1767 | 444185 | 444869 | 446704 | Seq. ID No. 1768 |
| 859c | Seq. ID No. 1769 | 444185 | 444221 | 446704 | Seq. ID No. 1770 |
| 859d | Seq. ID No. 1771 | 444185 | 444212 | 446704 | Seq. ID No. 1772 |
| 860 | Seq. ID No. 1773 | 446857 | 446887 | 447093 | Seq. ID No. 1774 |
| 862 | Seq. ID No. 1775 | 447165 | 447171 | 447398 | Seq. ID No. 1776 |
| 863 | Seq. ID No. 1777 | 447152 | 447161 | 448180 | Seq. ID No. 1778 |
| 864a | Seq. ID No. 1779 | 449021 | 448991 | 448518 | Seq. ID No. 1780 |
| 864b | Seq. ID No. 1781 | 449021 | 449003 | 448518 | Seq. ID No. 1782 |
| 866a | Seq. ID No. 1783 | 448612 | 448801 | 449868 | Seq. ID No. 1784 |
| 866b | Seq. ID No. 1785 | 448612 | 448612 | 449868 | Seq. ID No. 1786 |
| 868a | Seq. ID No. 1787 | 449855 | 450269 | 450718 | Seq. ID No. 1788 |
| 868b | Seq. ID No. 1789 | 449855 | 449861 | 450718 | Seq. ID No. 1790 |
| 870 | Seq. ID No. 1791 | 450768 | 450792 | 451754 | Seq. ID No. 1792 |
| 873a | Seq. ID No. 1793 | 451842 | 452103 | 452924 | Seq. ID No. 1794 |
| 873b | Seq. ID No. 1795 | 451842 | 451920 | 452924 | Seq. ID No. 1796 |
| 873c | Seq. ID No. 1797 | 451842 | 451866 | 452924 | Seq. ID No. 1798 |
| 874a | Seq. ID No. 1799 | 453019 | 453136 | 453336 | Seq. ID No. 1800 |
| 874b | Seq. ID No. 1801 | 453019 | 453043 | 453336 | Seq. ID No. 1802 |
| 875 | Seq. ID No. 1803 | 453388 | 453415 | 453651 | Seq. ID No. 1804 |
| 876 | Seq. ID No. 1805 | 453874 | 453898 | 454509 | Seq. ID No. 1806 |
| 878a | Seq. ID No. 1807 | 454510 | 454738 | 455313 | Seq. ID No. 1808 |
| 878b | Seq. ID No. 1809 | 454510 | 454588 | 455313 | Seq. ID No. 1810 |
| 878c | Seq. ID No. 1811 | 454510 | 454549 | 455313 | Seq. ID No. 1812 |
| 880a | Seq. ID No. 1813 | 455379 | 455454 | 456086 | Seq. ID No. 1814 |
| 880b | Seq. ID No. 1815 | 455379 | 455406 | 456086 | Seq. ID No. 1816 |
| 880c | Seq. ID No. 1817 | 455379 | 455397 | 456086 | Seq. ID No. 1818 |
| 885 | Seq. ID No. 1819 | 456297 | 456309 | 457472 | Seq. ID No. 1820 |
| 886 | Seq. ID No. 1821 | 457408 | 457453 | 458769 | Seq. ID No. 1822 |
| 887 | Seq. ID No. 1823 | 459402 | 459396 | 459118 | Seq. ID No. 1824 |
| 888 | Seq. ID No. 1825 | 459077 | 459080 | 460357 | Seq. ID No. 1826 |
| 890a | Seq. ID No. 1827 | 460448 | 460523 | 461002 | Seq. ID No. 1828 |
| 890b | Seq. ID No. 1829 | 460448 | 460475 | 461002 | Seq. ID No. 1830 |
| 894 | Seq. ID No. 1831 | 463346 | 463346 | 463140 | Seq. ID No. 1832 |
| 904 | Seq. ID No. 1833 | 468103 | 468097 | 467843 | Seq. ID No. 1834 |
| 907a | Seq. ID No. 1835 | 470121 | 470022 | 469240 | Seq. ID No. 1836 |
| 907b | Seq. ID No. 1837 | 470121 | 470103 | 469240 | Seq. ID No. 1838 |
| 908a | Seq. ID No. 1839 | 471898 | 471376 | 470636 | Seq. ID No. 1840 |
| 908b | Seq. ID No. 1841 | 471898 | 471886 | 470636 | Seq. ID No. 1842 |
| 908c | Seq. ID No. 1843 | 471898 | 471895 | 470636 | Seq. ID No. 1844 |
| 911 | Seq. ID No. 1845 | 472251 | 472314 | 472943 | Seq. ID No. 1846 |
| 912 | Seq. ID No. 1847 | 472944 | 472953 | 473780 | Seq. ID No. 1848 |
| 916 | Seq. ID No. 1849 | 473774 | 473798 | 476413 | Seq. ID No. 1850 |
| 917 | Seq. ID No. 1851 | 476720 | 476726 | 476983 | Seq. ID No. 1852 |
| 918b | Seq. ID No. 1853 | 476974 | 477043 | 477636 | Seq. ID No. 1854 |
| 918c | Seq. ID No. 1855 | 476974 | 476986 | 477636 | Seq. ID No. 1856 |
| 919 | Seq. ID No. 1857 | 477670 | 477709 | 478032 | Seq. ID No. 1858 |
| 923 | Seq. ID No. 1859 | 477585 | 477636 | 479852 | Seq. ID No. 1860 |
| 925a | Seq. ID No. 1861 | 479863 | 480316 | 481326 | Seq. ID No. 1862 |
| 925b | Seq. ID No. 1863 | 479863 | 479887 | 481326 | Seq. ID No. 1864 |
| 926 | Seq. ID No. 1865 | 481268 | 481319 | 482335 | Seq. ID No. 1866 |
| 927 | Seq. ID No. 1867 | 482317 | 482347 | 482928 | Seq. ID No. 1868 |
| 929a | Seq. ID No. 1869 | 482918 | 484175 | 484519 | Seq. ID No. 1870 |
| 929b | Seq. ID No. 1871 | 482918 | 482918 | 484519 | Seq. ID No. 1872 |
| 930 | Seq. ID No. 1873 | 484543 | 484543 | 485790 | Seq. ID No. 1874 |
| 931 | Seq. ID No. 1875 | 486281 | 486221 | 485898 | Seq. ID No. 1876 |
| 932 | Seq. ID No. 1877 | 485791 | 485809 | 486294 | Seq. ID No. 1878 |
| 934a | Seq. ID No. 1879 | 486257 | 486377 | 487435 | Seq. ID No. 1880 |
| 934b | Seq. ID No. 1881 | 486257 | 486353 | 487435 | Seq. ID No. 1882 |
| 934c | Seq. ID No. 1883 | 486257 | 486278 | 487435 | Seq. ID No. 1884 |
| 934d | Seq. ID No. 1885 | 486257 | 486269 | 487435 | Seq. ID No. 1886 |
| 935 | Seq. ID No. 1887 | 487436 | 487463 | 488152 | Seq. ID No. 1888 |
| 938 | Seq. ID No. 1889 | 488336 | 488399 | 489727 | Seq. ID No. 1890 |
| 939a | Seq. ID No. 1891 | 491177 | 490841 | 489834 | Seq. ID No. 1892 |
| 939b | Seq. ID No. 1893 | 491177 | 490982 | 489834 | Seq. ID No. 1894 |
| 939c | Seq. ID No. 1895 | 491177 | 491162 | 489834 | Seq. ID No. 1896 |
| 942 | Seq. ID No. 1897 | 492089 | 492065 | 491685 | Seq. ID No. 1898 |
| 943 | Seq. ID No. 1899 | 492484 | 492466 | 492164 | Seq. ID No. 1900 |
| 944a | Seq. ID No. 1901 | 493707 | 493518 | 492457 | Seq. ID No. 1902 |
| 944b | Seq. ID No. 1903 | 493707 | 493593 | 492457 | Seq. ID No. 1904 |
| 946 | Seq. ID No. 1905 | 493834 | 493834 | 494376 | Seq. ID No. 1906 |
| 949a | Seq. ID No. 1907 | 494411 | 494837 | 495802 | Seq. ID No. 1908 |
| 949b | Seq. ID No. 1909 | 494411 | 494537 | 495802 | Seq. ID No. 1910 |
| 949c | Seq. ID No. 1911 | 494411 | 494498 | 495802 | Seq. ID No. 1912 |
| 949d | Seq. ID No. 1913 | 494411 | 494435 | 495802 | Seq. ID No. 1914 |
| 950 | Seq. ID No. 1915 | 496174 | 496171 | 495929 | Seq. ID No. 1916 |
| 951a | Seq. ID No. 1917 | 495906 | 495984 | 496895 | Seq. ID No. 1918 |
| 951b | Seq. ID No. 1919 | 495906 | 495915 | 496895 | Seq. ID No. 1920 |
| 952a | Seq. ID No. 1921 | 497115 | 497547 | 498344 | Seq. ID No. 1922 |
| 952b | Seq. ID No. 1923 | 497115 | 497211 | 498344 | Seq. ID No. 1924 |
| 954 | Seq. ID No. 1925 | 498503 | 498518 | 499984 | Seq. ID No. 1926 |
| 955a | Seq. ID No. 1927 | 500596 | 500569 | 500297 | Seq. ID No. 1928 |
| 955b | Seq. ID No. 1929 | 500596 | 500575 | 500297 | Seq. ID No. 1930 |
| 956 | Seq. ID No. 1931 | 500019 | 500019 | 501308 | Seq. ID No. 1932 |
| 958a | Seq. ID No. 1933 | 501309 | 501417 | 501866 | Seq. ID No. 1934 |
| 958b | Seq. ID No. 1935 | 501309 | 501309 | 501866 | Seq. ID No. 1936 |
| 959 | Seq. ID No. 1937 | 501978 | 501993 | 502364 | Seq. ID No. 1938 |
| 961a | Seq. ID No. 1939 | 502392 | 502446 | 502943 | Seq. ID No. 1940 |
| 961b | Seq. ID No. 1941 | 502392 | 502425 | 502943 | Seq. ID No. 1942 |
| 961c | Seq. ID No. 1943 | 502392 | 502413 | 502943 | Seq. ID No. 1944 |
| 963 | Seq. ID No. 1945 | 502951 | 502978 | 503949 | Seq. ID No. 1946 |
| 965a | Seq. ID No. 1947 | 503950 | 503974 | 504930 | Seq. ID No. 1948 |
| 965b | Seq. ID No. 1949 | 503950 | 503965 | 504930 | Seq. ID No. 1950 |
| 966a | Seq. ID No. 1951 | 504879 | 504990 | 506417 | Seq. ID No. 1952 |
| 966b | Seq. ID No. 1953 | 504879 | 504975 | 506417 | Seq. ID No. 1954 |
| 967a | Seq. ID No. 1955 | 506365 | 506407 | 506805 | Seq. ID No. 1956 |
| 967b | Seq. ID No. 1957 | 506365 | 506377 | 506805 | Seq. ID No. 1958 |
| 968 | Seq. ID No. 1959 | 507166 | 507184 | 507951 | Seq. ID No. 1960 |
| 969 | Seq. ID No. 1961 | 510913 | 510913 | 508775 | Seq. ID No. 1962 |
| 972a | Seq. ID No. 1963 | 512618 | 512444 | 511044 | Seq. ID No. 1964 |
| 972b | Seq. ID No. 1965 | 512618 | 512603 | 511044 | Seq. ID No. 1966 |
| 976 | Seq. ID No. 1967 | 512815 | 512863 | 514659 | Seq. ID No. 1968 |
| 977a | Seq. ID No. 1969 | 515753 | 515654 | 514809 | Seq. ID No. 1970 |
| 977b | Seq. ID No. 1971 | 515753 | 515738 | 514809 | Seq. ID No. 1972 |
| 978a | Seq. ID No. 1973 | 516892 | 516718 | 516326 | Seq. ID No. 1974 |
| 978b | Seq. ID No. 1975 | 516892 | 516856 | 516326 | Seq. ID No. 1976 |
| 979 | Seq. ID No. 1977 | 517178 | 517178 | 517002 | Seq. ID No. 1978 |
| 980 | Seq. ID No. 1979 | 518090 | 518063 | 517239 | Seq. ID No. 1980 |
| 981a | Seq. ID No. 1981 | 517537 | 517717 | 517962 | Seq. ID No. 1982 |
| 982 | Seq. ID No. 1983 | 519084 | 519033 | 518146 | Seq. ID No. 1984 |
| 984a | Seq. ID No. 1985 | 519141 | 519309 | 519995 | Seq. ID No. 1986 |
| 984b | Seq. ID No. 1987 | 519141 | 519216 | 519995 | Seq. ID No. 1988 |
| 986 | Seq. ID No. 1989 | 520057 | 520066 | 521073 | Seq. ID No. 1990 |
| 987 | Seq. ID No. 1991 | 521626 | 521614 | 521147 | Seq. ID No. 1992 |
| 988a | Seq. ID No. 1993 | 522445 | 522070 | 521627 | Seq. ID No. 1994 |
| 988b | Seq. ID No. 1995 | 522445 | 522328 | 521627 | Seq. ID No. 1996 |
| 988c | Seq. ID No. 1997 | 522445 | 522391 | 521627 | Seq. ID No. 1998 |
| 988d | Seq. ID No. 1999 | 522445 | 522433 | 521627 | Seq. ID No. 2000 |
| 991 | Seq. ID No. 2001 | 522779 | 522782 | 523339 | Seq. ID No. 2002 |
| 992 | Seq. ID No. 2003 | 524472 | 524454 | 523420 | Seq. ID No. 2004 |
| 993 | Seq. ID No. 2005 | 523372 | 523387 | 524031 | Seq. ID No. 2006 |
| 994 | Seq. ID No. 2007 | 523709 | 523763 | 524269 | Seq. ID No. 2008 |
| 995 | Seq. ID No. 2009 | 524843 | 524789 | 524508 | Seq. ID No. 2010 |
| 997 | Seq. ID No. 2011 | 525316 | 525151 | 525044 | Seq. ID No. 2012 |
| 998a | Seq. ID No. 2013 | 524933 | 524999 | 525658 | Seq. ID No. 2014 |
| 998b | Seq. ID No. 2015 | 524933 | 524939 | 525658 | Seq. ID No. 2016 |
| 999a | Seq. ID No. 2017 | 526067 | 526016 | 525789 | Seq. ID No. 2018 |
| 999b | Seq. ID No. 2019 | 526067 | 526058 | 525789 | Seq. ID No. 2020 |
| 1000 | Seq. ID No. 2021 | 526066 | 526141 | 526833 | Seq. ID No. 2022 |
| 1001 | Seq. ID No. 2023 | 526853 | 526853 | 527035 | Seq. ID No. 2024 |
| 1003a | Seq. ID No. 2025 | 529482 | 529476 | 529228 | Seq. ID No. 2026 |
| 1003b | Seq. ID No. 2027 | 529482 | 529482 | 529228 | Seq. ID No. 2028 |
| 1004a | Seq. ID No. 2029 | 527320 | 527350 | 529245 | Seq. ID No. 2030 |
| 1004b | Seq. ID No. 2031 | 527320 | 527335 | 529245 | Seq. ID No. 2032 |
| 1006a | Seq. ID No. 2033 | 529232 | 529352 | 530305 | Seq. ID No. 2034 |
| 1006b | Seq. ID No. 2035 | 529232 | 529289 | 530305 | Seq. ID No. 2036 |
| 1007 | Seq. ID No. 2037 | 531623 | 531593 | 530370 | Seq. ID No. 2038 |
| 1012 | Seq. ID No. 2039 | 531856 | 531856 | 531972 | Seq. ID No. 2040 |
| 1013a | Seq. ID No. 2041 | 532239 | 532698 | 533411 | Seq. ID No. 2042 |
| 1013b | Seq. ID No. 2043 | 532239 | 532467 | 533411 | Seq. ID No. 2044 |
| 1013c | Seq. ID No. 2045 | 532239 | 532359 | 533411 | Seq. ID No. 2046 |
| 1016c | Seq. ID No. 2047 | 533402 | 533432 | 534148 | Seq. ID No. 2048 |
| 1017a | Seq. ID No. 2049 | 534103 | 534754 | 535266 | Seq. ID No. 2050 |
| 1017b | Seq. ID No. 2051 | 534103 | 534274 | 535266 | Seq. ID No. 2052 |
| 1017c | Seq. ID No. 2053 | 534103 | 534187 | 535266 | Seq. ID No. 2054 |
| 1017d | Seq. ID No. 2055 | 534103 | 534145 | 535266 | Seq. ID No. 2056 |
| 1018a | Seq. ID No. 2057 | 535957 | 535981 | 536787 | Seq. ID No. 2058 |
| 1018b | Seq. ID No. 2059 | 535957 | 535978 | 536787 | Seq. ID No. 2060 |
| 1021a | Seq. ID No. 2061 | 536726 | 536804 | 537688 | Seq. ID No. 2062 |
| 1021b | Seq. ID No. 2063 | 536726 | 536750 | 537688 | Seq. ID No. 2064 |
| 1021c | Seq. ID No. 2065 | 536726 | 536729 | 537688 | Seq. ID No. 2066 |
| 1024 | Seq. ID No. 2067 | 537700 | 537700 | 538749 | Seq. ID No. 2068 |
| 1025 | Seq. ID No. 2069 | 538763 | 538772 | 539779 | Seq. ID No. 2070 |
| 1026 | Seq. ID No. 2071 | 541222 | 541222 | 539954 | Seq. ID No. 2072 |
| 1029 | Seq. ID No. 2073 | 541559 | 541619 | 542479 | Seq. ID No. 2074 |
| 1033a | Seq. ID No. 2075 | 542702 | 542966 | 544783 | Seq. ID No. 2076 |
| 1033b | Seq. ID No. 2077 | 542702 | 542825 | 544783 | Seq. ID No. 2078 |
| 1033c | Seq. ID No. 2079 | 542702 | 542741 | 544783 | Seq. ID No. 2080 |
| 1035a | Seq. ID No. 2081 | 546793 | 546721 | 546416 | Seq. ID No. 2082 |
| 1035b | Seq. ID No. 2083 | 546793 | 546724 | 546416 | Seq. ID No. 2084 |
| 1035c | Seq. ID No. 2085 | 546793 | 546739 | 546416 | Seq. ID No. 2086 |
| 1036a | Seq. ID No. 2087 | 544924 | 545824 | 546423 | Seq. ID No. 2088 |
| 1036b | Seq. ID No. 2089 | 544924 | 544978 | 546423 | Seq. ID No. 2090 |
| 1036c | Seq. ID No. 2091 | 544924 | 544927 | 546423 | Seq. ID No. 2092 |
| 1037 | Seq. ID No. 2093 | 546420 | 546423 | 547151 | Seq. ID No. 2094 |
| 1039a | Seq. ID No. 2095 | 547314 | 547344 | 548114 | Seq. ID No. 2096 |
| 1039b | Seq. ID No. 2097 | 547314 | 547317 | 548114 | Seq. ID No. 2098 |
| 1041 | Seq. ID No. 2099 | 548111 | 548132 | 548725 | Seq. ID No. 2100 |
| 1042a | Seq. ID No. 2101 | 548729 | 548750 | 549646 | Seq. ID No. 2102 |
| 1042b | Seq. ID No. 2103 | 548729 | 548729 | 549646 | Seq. ID No. 2104 |
| 1044a | Seq. ID No. 2105 | 551333 | 551243 | 550767 | Seq. ID No. 2106 |
| 1044b | Seq. ID No. 2107 | 551333 | 551306 | 550767 | Seq. ID No. 2108 |
| 1044c | Seq. ID No. 2109 | 551333 | 551312 | 550767 | Seq. ID No. 2110 |
| 1044d | Seq. ID No. 2111 | 551333 | 551324 | 550767 | Seq. ID No. 2112 |
| 1047a | Seq. ID No. 2113 | 550332 | 550395 | 552098 | Seq. ID No. 2114 |
| 1047b | Seq. ID No. 2115 | 550332 | 550374 | 552098 | Seq. ID No. 2116 |
| 1049a | Seq. ID No. 2117 | 552053 | 552182 | 552889 | Seq. ID No. 2118 |
| 1049b | Seq. ID No. 2119 | 552053 | 552110 | 552889 | Seq. ID No. 2120 |
| 1050a | Seq. ID No. 2121 | 552811 | 553336 | 553635 | Seq. ID No. 2122 |
| 1050b | Seq. ID No. 2123 | 552811 | 552859 | 553635 | Seq. ID No. 2124 |
| 1050c | Seq. ID No. 2125 | 552811 | 552841 | 553635 | Seq. ID No. 2126 |
| 1050d | Seq. ID No. 2127 | 552811 | 552835 | 553635 | Seq. ID No. 2128 |
| 1055 | Seq. ID No. 2129 | 557181 | 557130 | 556642 | Seq. ID No. 2130 |
| 1056a | Seq. ID No. 2131 | 556313 | 556367 | 556645 | Seq. ID No. 2132 |
| 1056b | Seq. ID No. 2133 | 556313 | 556364 | 556645 | Seq. ID No. 2134 |
| 1057 | Seq. ID No. 2135 | 553741 | 553774 | 557208 | Seq. ID No. 2136 |
| 1058 | Seq. ID No. 2137 | 557389 | 557389 | 558231 | Seq. ID No. 2138 |
| 1060a | Seq. ID No. 2139 | 558338 | 558434 | 559720 | Seq. ID No. 2140 |
| 1060b | Seq. ID No. 2141 | 558338 | 558353 | 559720 | Seq. ID No. 2142 |
| 1062 | Seq. ID No. 2143 | 559708 | 559717 | 560406 | Seq. ID No. 2144 |
| 1063 | Seq. ID No. 2145 | 560912 | 560888 | 560631 | Seq. ID No. 2146 |
| 1064 | Seq. ID No. 2147 | 560346 | 560415 | 560714 | Seq. ID No. 2148 |
| 1065a | Seq. ID No. 2149 | 560743 | 560857 | 561312 | Seq. ID No. 2150 |
| 1065b | Seq. ID No. 2151 | 560743 | 560824 | 561312 | Seq. ID No. 2152 |
| 1065c | Seq. ID No. 2153 | 560743 | 560791 | 561312 | Seq. ID No. 2154 |
| 1066a | Seq. ID No. 2155 | 561721 | 561637 | 561359 | Seq. ID No. 2156 |
| 1066b | Seq. ID No. 2157 | 561721 | 561715 | 561359 | Seq. ID No. 2158 |
| 1067 | Seq. ID No. 2159 | 561384 | 561417 | 562028 | Seq. ID No. 2160 |
| 1069 | Seq. ID No. 2161 | 562186 | 562186 | 562629 | Seq. ID No. 2162 |
| 1070a | Seq. ID No. 2163 | 562626 | 562911 | 563282 | Seq. ID No. 2164 |
| 1070b | Seq. ID No. 2165 | 562626 | 562635 | 563282 | Seq. ID No. 2166 |
| 1076a | Seq. ID No. 2167 | 563437 | 563620 | 566925 | Seq. ID No. 2168 |
| 1076b | Seq. ID No. 2169 | 563437 | 563443 | 566925 | Seq. ID No. 2170 |
| 1077a | Seq. ID No. 2171 | 566894 | 568136 | 568525 | Seq. ID No. 2172 |
| 1077b | Seq. ID No. 2173 | 566894 | 567506 | 568525 | Seq. ID No. 2174 |
| 1077c | Seq. ID No. 2175 | 566894 | 567296 | 568525 | Seq. ID No. 2176 |
| 1077d | Seq. ID No. 2177 | 566894 | 567170 | 568525 | Seq. ID No. 2178 |
| 1077e | Seq. ID No. 2179 | 566894 | 566918 | 568525 | Seq. ID No. 2180 |
| 1079a | Seq. ID No. 2181 | 568458 | 568518 | 569591 | Seq. ID No. 2182 |
| 1079b | Seq. ID No. 2183 | 568458 | 568485 | 569591 | Seq. ID No. 2184 |
| 1080a | Seq. ID No. 2185 | 569461 | 569575 | 569865 | Seq. ID No. 2186 |
| 1081a | Seq. ID No. 2187 | 570009 | 570099 | 570491 | Seq. ID No. 2188 |
| 1081b | Seq. ID No. 2189 | 570009 | 570021 | 570491 | Seq. ID No. 2190 |
| 1082 | Seq. ID No. 2191 | 570545 | 570560 | 571390 | Seq. ID No. 2192 |
| 1085 | Seq. ID No. 2193 | 571448 | 571493 | 571930 | Seq. ID No. 2194 |
| 1086 | Seq. ID No. 2195 | 572006 | 572021 | 573433 | Seq. ID No. 2196 |
| 1087a | Seq. ID No. 2197 | 573393 | 573438 | 573983 | Seq. ID No. 2198 |
| 1087b | Seq. ID No. 2199 | 573393 | 573402 | 573983 | Seq. ID No. 2200 |
| 1091a | Seq. ID No. 2201 | 574840 | 574903 | 575133 | Seq. ID No. 2202 |
| 1091b | Seq. ID No. 2203 | 574840 | 574888 | 575133 | Seq. ID No. 2204 |
| 1094a | Seq. ID No. 2205 | 574083 | 574122 | 576380 | Seq. ID No. 2206 |
| 1094b | Seq. ID No. 2207 | 574083 | 574110 | 576380 | Seq. ID No. 2208 |
| 1095a | Seq. ID No. 2209 | 575929 | 575968 | 576420 | Seq. ID No. 2210 |
| 1095b | Seq. ID No. 2211 | 575929 | 575950 | 576420 | Seq. ID No. 2212 |
| 1096a | Seq. ID No. 2213 | 576567 | 576657 | 577469 | Seq. ID No. 2214 |
| 1096b | Seq. ID No. 2215 | 576567 | 576597 | 577469 | Seq. ID No. 2216 |
| 1096c | Seq. ID No. 2217 | 576567 | 576585 | 577469 | Seq. ID No. 2218 |
| 1097 | Seq. ID No. 2219 | 577758 | 577839 | 578270 | Seq. ID No. 2220 |
| 1098b | Seq. ID No. 2221 | 578304 | 578304 | 578753 | Seq. ID No. 2222 |
| 1100 | Seq. ID No. 2223 | 578719 | 578740 | 579318 | Seq. ID No. 2224 |
| 1101a | Seq. ID No. 2225 | 579319 | 579388 | 579663 | Seq. ID No. 2226 |
| 1101b | Seq. ID No. 2227 | 579319 | 579325 | 579663 | Seq. ID No. 2228 |
| 1104 | Seq. ID No. 2229 | 579892 | 579925 | 580959 | Seq. ID No. 2230 |
| 1106 | Seq. ID No. 2231 | 581018 | 581033 | 581344 | Seq. ID No. 2232 |
| 1108a | Seq. ID No. 2233 | 581194 | 581413 | 582546 | Seq. ID No. 2234 |
| 1108b | Seq. ID No. 2235 | 581194 | 581254 | 582546 | Seq. ID No. 2236 |
| 1111a | Seq. ID No. 2237 | 582575 | 582815 | 583843 | Seq. ID No. 2238 |
| 1111b | Seq. ID No. 2239 | 582575 | 582611 | 583843 | Seq. ID No. 2240 |
| 1111c | Seq. ID No. 2241 | 582575 | 582578 | 583843 | Seq. ID No. 2242 |
| 1112a | Seq. ID No. 2243 | 584607 | 584424 | 584239 | Seq. ID No. 2244 |
| 1125 | Seq. ID No. 2245 | 590309 | 590312 | 590752 | Seq. ID No. 2246 |
| 1126a | Seq. ID No. 2247 | 590674 | 590830 | 591966 | Seq. ID No. 2248 |
| 1126b | Seq. ID No. 2249 | 590674 | 590749 | 591966 | Seq. ID No. 2250 |
| 1126c | Seq. ID No. 2251 | 590674 | 590734 | 591966 | Seq. ID No. 2252 |
| 1127 | Seq. ID No. 2253 | 591927 | 591963 | 592610 | Seq. ID No. 2254 |
| 1128 | Seq. ID No. 2255 | 592612 | 592612 | 592767 | Seq. ID No. 2256 |
| 1131 | Seq. ID No. 2257 | 593102 | 593108 | 594118 | Seq. ID No. 2258 |
| 1132 | Seq. ID No. 2259 | 594208 | 594211 | 595179 | Seq. ID No. 2260 |
| 1135a | Seq. ID No. 2261 | 595339 | 595396 | 596805 | Seq. ID No. 2262 |
| 1135b | Seq. ID No. 2263 | 595339 | 595381 | 596805 | Seq. ID No. 2264 |
| 1136a | Seq. ID No. 2265 | 598288 | 598243 | 596903 | Seq. ID No. 2266 |
| 1136b | Seq. ID No. 2267 | 598288 | 598267 | 596903 | Seq. ID No. 2268 |
| 1138 | Seq. ID No. 2269 | 599921 | 599849 | 598668 | Seq. ID No. 2270 |
| 1140a | Seq. ID No. 2271 | 602187 | 601377 | 600247 | Seq. ID No. 2272 |
| 1140b | Seq. ID No. 2273 | 602187 | 601914 | 600247 | Seq. ID No. 2274 |
| 1140c | Seq. ID No. 2275 | 602187 | 602187 | 600247 | Seq. ID No. 2276 |
| 1141a | Seq. ID No. 2277 | 600251 | 600302 | 600556 | Seq. ID No. 2278 |
| 1141b | Seq. ID No. 2279 | 600251 | 600257 | 600556 | Seq. ID No. 2280 |
| 1142 | Seq. ID No. 2281 | 602718 | 602700 | 602377 | Seq. ID No. 2282 |
| 1144a | Seq. ID No. 2283 | 602866 | 603421 | 603672 | Seq. ID No. 2284 |
| 1144b | Seq. ID No. 2285 | 602866 | 602962 | 603672 | Seq. ID No. 2286 |
| 1144c | Seq. ID No. 2287 | 602866 | 602893 | 603672 | Seq. ID No. 2288 |
| 1146a | Seq. ID No. 2289 | 603660 | 604296 | 604598 | Seq. ID No. 2290 |
| 1146b | Seq. ID No. 2291 | 603660 | 604140 | 604598 | Seq. ID No. 2292 |
| 1146c | Seq. ID No. 2293 | 603660 | 603963 | 604598 | Seq. ID No. 2294 |
| 1146d | Seq. ID No. 2295 | 603660 | 603828 | 604598 | Seq. ID No. 2296 |
| 1146e | Seq. ID No. 2297 | 603660 | 603675 | 604598 | Seq. ID No. 2298 |
| 1148 | Seq. ID No. 2299 | 604610 | 604631 | 605278 | Seq. ID No. 2300 |
| 1149 | Seq. ID No. 2301 | 607200 | 607170 | 605347 | Seq. ID No. 2302 |
| 1152a | Seq. ID No. 2303 | 607234 | 608383 | 608667 | Seq. ID No. 2304 |
| 1152b | Seq. ID No. 2305 | 607234 | 607984 | 608667 | Seq. ID No. 2306 |
| 1152c | Seq. ID No. 2307 | 607234 | 607690 | 608667 | Seq. ID No. 2308 |
| 1152d | Seq. ID No. 2309 | 607234 | 607429 | 608667 | Seq. ID No. 2310 |
| 1152e | Seq. ID No. 2311 | 607234 | 607297 | 608667 | Seq. ID No. 2312 |
| 1152f | Seq. ID No. 2313 | 607234 | 607261 | 608667 | Seq. ID No. 2314 |
| 1152g | Seq. ID No. 2315 | 607234 | 607252 | 608667 | Seq. ID No. 2316 |
| 1155a | Seq. ID No. 2317 | 608668 | 609631 | 610128 | Seq. ID No. 2318 |
| 1155b | Seq. ID No. 2319 | 608668 | 609508 | 610128 | Seq. ID No. 2320 |
| 1155c | Seq. ID No. 2321 | 608668 | 609319 | 610128 | Seq. ID No. 2322 |
| 1155d | Seq. ID No. 2323 | 608668 | 609193 | 610128 | Seq. ID No. 2324 |
| 1155e | Seq. ID No. 2325 | 608668 | 608896 | 610128 | Seq. ID No. 2326 |
| 1155f | Seq. ID No. 2327 | 608668 | 608683 | 610128 | Seq. ID No. 2328 |
| 1155g | Seq. ID No. 2329 | 608668 | 608671 | 610128 | Seq. ID No. 2330 |
| 1158a | Seq. ID No. 2331 | 610088 | 610232 | 611965 | Seq. ID No. 2332 |
| 1158b | Seq. ID No. 2333 | 610088 | 610091 | 611965 | Seq. ID No. 2334 |
| 1160 | Seq. ID No. 2335 | 612095 | 612125 | 612553 | Seq. ID No. 2336 |
| 1161a | Seq. ID No. 2337 | 612672 | 612684 | 612935 | Seq. ID No. 2338 |
| 1161b | Seq. ID No. 2339 | 612672 | 612675 | 612935 | Seq. ID No. 2340 |
| 1162 | Seq. ID No. 2341 | 613141 | 613141 | 613064 | Seq. ID No. 2342 |
| 1165 | Seq. ID No. 2343 | 613461 | 613476 | 614456 | Seq. ID No. 2344 |
| 1166 | Seq. ID No. 2345 | 614621 | 614621 | 615358 | Seq. ID No. 2346 |
| 1167a | Seq. ID No. 2347 | 615351 | 615507 | 616433 | Seq. ID No. 2348 |
| 1167b | Seq. ID No. 2349 | 615351 | 615351 | 616433 | Seq. ID No. 2350 |
| 1168 | Seq. ID No. 2351 | 616628 | 616640 | 617020 | Seq. ID No. 2352 |
| 1169a | Seq. ID No. 2353 | 617085 | 618015 | 619262 | Seq. ID No. 2354 |
| 1169b | Seq. ID No. 2355 | 617085 | 617751 | 619262 | Seq. ID No. 2356 |
| 1169c | Seq. ID No. 2357 | 617085 | 617109 | 619262 | Seq. ID No. 2358 |
| 1170 | Seq. ID No. 2359 | 619263 | 619263 | 619499 | Seq. ID No. 2360 |
| 1171a | Seq. ID No. 2361 | 619429 | 619558 | 619929 | Seq. ID No. 2362 |
| 1171c | Seq. ID No. 2363 | 619429 | 619501 | 619929 | Seq. ID No. 2364 |
| 1172 | Seq. ID No. 2365 | 619930 | 619930 | 620520 | Seq. ID No. 2366 |
| 1173 | Seq. ID No. 2367 | 621124 | 621133 | 621411 | Seq. ID No. 2368 |
| 1174 | Seq. ID No. 2369 | 620736 | 620745 | 621947 | Seq. ID No. 2370 |
| 1175 | Seq. ID No. 2371 | 622379 | 622379 | 622125 | Seq. ID No. 2372 |
| 1177 | Seq. ID No. 2373 | 621934 | 621958 | 622941 | Seq. ID No. 2374 |
| 1178 | Seq. ID No. 2375 | 623806 | 623752 | 623462 | Seq. ID No. 2376 |
| 1179a | Seq. ID No. 2377 | 624467 | 624323 | 623553 | Seq. ID No. 2378 |
| 1179b | Seq. ID No. 2379 | 624467 | 624440 | 623553 | Seq. ID No. 2380 |
| 1179c | Seq. ID No. 2381 | 624467 | 624449 | 623553 | Seq. ID No. 2382 |
| 1180a | Seq. ID No. 2383 | 626331 | 625863 | 624772 | Seq. ID No. 2384 |
| 1180b | Seq. ID No. 2385 | 626331 | 626118 | 624772 | Seq. ID No. 2386 |
| 1180c | Seq. ID No. 2387 | 626331 | 626217 | 624772 | Seq. ID No. 2388 |
| 1180d | Seq. ID No. 2389 | 626331 | 626253 | 624772 | Seq. ID No. 2390 |
| 1180e | Seq. ID No. 2391 | 626331 | 626310 | 624772 | Seq. ID No. 2392 |
| 1182a | Seq. ID No. 2393 | 626734 | 626677 | 626441 | Seq. ID No. 2394 |
| 1182b | Seq. ID No. 2395 | 626734 | 626716 | 626441 | Seq. ID No. 2396 |
| 1183a | Seq. ID No. 2397 | 626391 | 626460 | 627632 | Seq. ID No. 2398 |
| 1183b | Seq. ID No. 2399 | 626391 | 626430 | 627632 | Seq. ID No. 2400 |
| 1184 | Seq. ID No. 2401 | 629315 | 629285 | 627993 | Seq. ID No. 2402 |
| 1185a | Seq. ID No. 2403 | 630076 | 629893 | 629300 | Seq. ID No. 2404 |
| 1185b | Seq. ID No. 2405 | 630076 | 630007 | 629300 | Seq. ID No. 2406 |
| 1186a | Seq. ID No. 2407 | 630394 | 630427 | 631026 | Seq. ID No. 2408 |
| 1186b | Seq. ID No. 2409 | 630394 | 630403 | 631026 | Seq. ID No. 2410 |
| 1188a | Seq. ID No. 2411 | 630986 | 631292 | 631714 | Seq. ID No. 2412 |
| 1188b | Seq. ID No. 2413 | 630986 | 631007 | 631714 | Seq. ID No. 2414 |
| 1188c | Seq. ID No. 2415 | 630986 | 630998 | 631714 | Seq. ID No. 2416 |
| 1191 | Seq. ID No. 2417 | 631666 | 631711 | 633153 | Seq. ID No. 2418 |
| 1192a | Seq. ID No. 2419 | 634110 | 634047 | 633199 | Seq. ID No. 2420 |
| 1192b | Seq. ID No. 2421 | 634110 | 634110 | 633199 | Seq. ID No. 2422 |
| 1194 | Seq. ID No. 2423 | 634701 | 634680 | 634123 | Seq. ID No. 2424 |
| 1196a | Seq. ID No. 2425 | 634859 | 634868 | 635863 | Seq. ID No. 2426 |
| 1196b | Seq. ID No. 2427 | 634859 | 634859 | 635863 | Seq. ID No. 2428 |
| 1197 | Seq. ID No. 2429 | 635887 | 635887 | 636759 | Seq. ID No. 2430 |
| 1198 | Seq. ID No. 2431 | 636665 | 636668 | 636898 | Seq. ID No. 2432 |
| 1199a | Seq. ID No. 2433 | 636828 | 636942 | 637436 | Seq. ID No. 2434 |
| 1199b | Seq. ID No. 2435 | 636828 | 636888 | 637436 | Seq. ID No. 2436 |
| 1200 | Seq. ID No. 2437 | 637555 | 637555 | 638352 | Seq. ID No. 2438 |
| 1201 | Seq. ID No. 2439 | 638346 | 638373 | 638648 | Seq. ID No. 2440 |
| 1202a | Seq. ID No. 2441 | 638811 | 638871 | 639152 | Seq. ID No. 2442 |
| 1202b | Seq. ID No. 2443 | 638811 | 638844 | 639152 | Seq. ID No. 2444 |
| 1205 | Seq. ID No. 2445 | 639692 | 639704 | 640546 | Seq. ID No. 2446 |
| 1206 | Seq. ID No. 2447 | 642187 | 642151 | 641477 | Seq. ID No. 2448 |
| 1207 | Seq. ID No. 2449 | 640543 | 640543 | 641538 | Seq. ID No. 2450 |
| 1208 | Seq. ID No. 2451 | 641532 | 641538 | 642890 | Seq. ID No. 2452 |
| 1209 | Seq. ID No. 2453 | 642972 | 642984 | 643718 | Seq. ID No. 2454 |
| 1210a | Seq. ID No. 2455 | 644513 | 644420 | 643800 | Seq. ID No. 2456 |
| 1210b | Seq. ID No. 2457 | 644513 | 644495 | 643800 | Seq. ID No. 2458 |
| 1212 | Seq. ID No. 2459 | 646415 | 646403 | 646137 | Seq. ID No. 2460 |
| 1213a | Seq. ID No. 2461 | 644672 | 644684 | 646174 | Seq. ID No. 2462 |
| 1213b | Seq. ID No. 2463 | 644672 | 644681 | 646174 | Seq. ID No. 2464 |
| 1214 | Seq. ID No. 2465 | 646171 | 646171 | 646944 | Seq. ID No. 2466 |
| 1215a | Seq. ID No. 2467 | 646895 | 647057 | 647500 | Seq. ID No. 2468 |
| 1215b | Seq. ID No. 2469 | 646895 | 646907 | 647500 | Seq. ID No. 2470 |
| 1217c | Seq. ID No. 2471 | 647452 | 647515 | 648060 | Seq. ID No. 2472 |
| 1218a | Seq. ID No. 2473 | 648023 | 648035 | 649042 | Seq. ID No. 2474 |
| 1218b | Seq. ID No. 2475 | 648023 | 648023 | 649042 | Seq. ID No. 2476 |
| 1219 | Seq. ID No. 2477 | 649847 | 649754 | 649371 | Seq. ID No. 2478 |
| 1220 | Seq. ID No. 2479 | 649953 | 649953 | 649813 | Seq. ID No. 2480 |
| 1221a | Seq. ID No. 2481 | 652043 | 652016 | 650058 | Seq. ID No. 2482 |
| 1221b | Seq. ID No. 2483 | 652043 | 652037 | 650058 | Seq. ID No. 2484 |
| 1223 | Seq. ID No. 2485 | 652187 | 652208 | 652873 | Seq. ID No. 2486 |
| 1224a | Seq. ID No. 2487 | 653833 | 653740 | 653129 | Seq. ID No. 2488 |
| 1224b | Seq. ID No. 2489 | 653833 | 653791 | 653129 | Seq. ID No. 2490 |
| 1224c | Seq. ID No. 2491 | 653833 | 653824 | 653129 | Seq. ID No. 2492 |
| 1225 | Seq. ID No. 2493 | 654455 | 654434 | 653970 | Seq. ID No. 2494 |
| 1226 | Seq. ID No. 2495 | 654010 | 654010 | 654294 | Seq. ID No. 2496 |
| 1228a | Seq. ID No. 2497 | 655583 | 655400 | 655020 | Seq. ID No. 2498 |
| 1228b | Seq. ID No. 2499 | 655583 | 655562 | 655020 | Seq. ID No. 2500 |
| 1229b | Seq. ID No. 2501 | 656021 | 655988 | 655689 | Seq. ID No. 2502 |
| 1229c | Seq. ID No. 2503 | 656021 | 655994 | 655689 | Seq. ID No. 2504 |
| 1230 | Seq. ID No. 2505 | 654334 | 654337 | 655968 | Seq. ID No. 2506 |
| 1231 | Seq. ID No. 2507 | 656741 | 656720 | 656064 | Seq. ID No. 2508 |
| 1233a | Seq. ID No. 2509 | 656808 | 656892 | 657533 | Seq. ID No. 2510 |
| 1233b | Seq. ID No. 2511 | 656808 | 656874 | 657533 | Seq. ID No. 2512 |
| 1233c | Seq. ID No. 2513 | 656808 | 656871 | 657533 | Seq. ID No. 2514 |
| 1234a | Seq. ID No. 2515 | 657534 | 657801 | 658301 | Seq. ID No. 2516 |
| 1234b | Seq. ID No. 2517 | 657534 | 657744 | 658301 | Seq. ID No. 2518 |
| 1234c | Seq. ID No. 2519 | 657534 | 657537 | 658301 | Seq. ID No. 2520 |
| 1235 | Seq. ID No. 2521 | 658795 | 658795 | 658484 | Seq. ID No. 2522 |
| 1236a | Seq. ID No. 2523 | 659168 | 659063 | 658815 | Seq. ID No. 2524 |
| 1237 | Seq. ID No. 2525 | 658446 | 658503 | 659438 | Seq. ID No. 2526 |
| 1239 | Seq. ID No. 2527 | 659964 | 659976 | 660188 | Seq. ID No. 2528 |
| 1240 | Seq. ID No. 2529 | 661436 | 661367 | 660249 | Seq. ID No. 2530 |
| 1241a | Seq. ID No. 2531 | 661467 | 662226 | 662597 | Seq. ID No. 2532 |
| 1241b | Seq. ID No. 2533 | 661467 | 661497 | 662597 | Seq. ID No. 2534 |
| 1241c | Seq. ID No. 2535 | 661467 | 661479 | 662597 | Seq. ID No. 2536 |
| 1243 | Seq. ID No. 2537 | 662682 | 662682 | 663986 | Seq. ID No. 2538 |
| 1244 | Seq. ID No. 2539 | 664168 | 664189 | 664956 | Seq. ID No. 2540 |
| 1245a | Seq. ID No. 2541 | 666679 | 665737 | 665099 | Seq. ID No. 2542 |
| 1245b | Seq. ID No. 2543 | 666679 | 666304 | 665099 | Seq. ID No. 2544 |
| 1245c | Seq. ID No. 2545 | 666679 | 666400 | 665099 | Seq. ID No. 2546 |
| 1245d | Seq. ID No. 2547 | 666679 | 666649 | 665099 | Seq. ID No. 2548 |
| 1245e | Seq. ID No. 2549 | 666679 | 666658 | 665099 | Seq. ID No. 2550 |
| 1246a | Seq. ID No. 2551 | 667345 | 667318 | 666701 | Seq. ID No. 2552 |
| 1246b | Seq. ID No. 2553 | 667345 | 667327 | 666701 | Seq. ID No. 2554 |
| 1250a | Seq. ID No. 2555 | 667704 | 668655 | 668966 | Seq. ID No. 2556 |
| 1250b | Seq. ID No. 2557 | 667704 | 667953 | 668966 | Seq. ID No. 2558 |
| 1250c | Seq. ID No. 2559 | 667704 | 667830 | 668966 | Seq. ID No. 2560 |
| 1250d | Seq. ID No. 2561 | 667704 | 667782 | 668966 | Seq. ID No. 2562 |
| 1250e | Seq. ID No. 2563 | 667704 | 667746 | 668966 | Seq. ID No. 2564 |
| 1251a | Seq. ID No. 2565 | 669339 | 669444 | 669770 | Seq. ID No. 2566 |
| 1251b | Seq. ID No. 2567 | 669339 | 669420 | 669770 | Seq. ID No. 2568 |
| 1253a | Seq. ID No. 2569 | 669718 | 670432 | 670668 | Seq. ID No. 2570 |
| 1253b | Seq. ID No. 2571 | 669718 | 670354 | 670668 | Seq. ID No. 2572 |
| 1253c | Seq. ID No. 2573 | 669718 | 669841 | 670668 | Seq. ID No. 2574 |
| 1253d | Seq. ID No. 2575 | 669718 | 669808 | 670668 | Seq. ID No. 2576 |
| 1256 | Seq. ID No. 2577 | 670771 | 670801 | 672036 | Seq. ID No. 2578 |
| 1257a | Seq. ID No. 2579 | 671964 | 672051 | 672518 | Seq. ID No. 2580 |
| 1257b | Seq. ID No. 2581 | 671964 | 672048 | 672518 | Seq. ID No. 2582 |
| 1258a | Seq. ID No. 2583 | 675281 | 674429 | 672591 | Seq. ID No. 2584 |
| 1258b | Seq. ID No. 2585 | 675281 | 675200 | 672591 | Seq. ID No. 2586 |
| 1258c | Seq. ID No. 2587 | 675281 | 675221 | 672591 | Seq. ID No. 2588 |
| 1258d | Seq. ID No. 2589 | 675281 | 675278 | 672591 | Seq. ID No. 2590 |
| 1260 | Seq. ID No. 2591 | 672895 | 672934 | 673179 | Seq. ID No. 2592 |
| 1263 | Seq. ID No. 2593 | 675596 | 675608 | 676525 | Seq. ID No. 2594 |
| 1265 | Seq. ID No. 2595 | 676530 | 676545 | 677219 | Seq. ID No. 2596 |
| 1266a | Seq. ID No. 2597 | 677365 | 677401 | 678045 | Seq. ID No. 2598 |
| 1266b | Seq. ID No. 2599 | 677365 | 677365 | 678045 | Seq. ID No. 2600 |
| 1267a | Seq. ID No. 2601 | 678014 | 678107 | 678361 | Seq. ID No. 2602 |
| 1267b | Seq. ID No. 2603 | 678014 | 678038 | 678361 | Seq. ID No. 2604 |
| 1268a | Seq. ID No. 2605 | 680490 | 680229 | 678862 | Seq. ID No. 2606 |
| 1268b | Seq. ID No. 2607 | 680490 | 680436 | 678862 | Seq. ID No. 2608 |
| 1269 | Seq. ID No. 2609 | 680591 | 680612 | 681463 | Seq. ID No. 2610 |
| 1270 | Seq. ID No. 2611 | 682595 | 682535 | 682245 | Seq. ID No. 2612 |
| 1271 | Seq. ID No. 2613 | 681643 | 681646 | 683115 | Seq. ID No. 2614 |
| 1272a | Seq. ID No. 2615 | 684311 | 684107 | 683223 | Seq. ID No. 2616 |
| 1272b | Seq. ID No. 2617 | 684311 | 684308 | 683223 | Seq. ID No. 2618 |
| 1273 | Seq. ID No. 2619 | 685392 | 685377 | 684289 | Seq. ID No. 2620 |
| 1275a | Seq. ID No. 2621 | 686415 | 686145 | 685393 | Seq. ID No. 2622 |
| 1275b | Seq. ID No. 2623 | 686415 | 686403 | 685393 | Seq. ID No. 2624 |
| 1277 | Seq. ID No. 2625 | 687376 | 687349 | 686396 | Seq. ID No. 2626 |
| 1278a | Seq. ID No. 2627 | 686400 | 686439 | 686732 | Seq. ID No. 2628 |
| 1278b | Seq. ID No. 2629 | 686400 | 686406 | 686732 | Seq. ID No. 2630 |
| 1279 | Seq. ID No. 2631 | 687461 | 687506 | 688435 | Seq. ID No. 2632 |
| 1281 | Seq. ID No. 2633 | 688554 | 688557 | 689963 | Seq. ID No. 2634 |
| 1283a | Seq. ID No. 2635 | 690164 | 690239 | 691681 | Seq. ID No. 2636 |
| 1283b | Seq. ID No. 2637 | 690164 | 690212 | 691681 | Seq. ID No. 2638 |
| 1283c | Seq. ID No. 2639 | 690164 | 690182 | 691681 | Seq. ID No. 2640 |
| 1284 | Seq. ID No. 2641 | 691675 | 691681 | 692520 | Seq. ID No. 2642 |
| 1285a | Seq. ID No. 2643 | 692499 | 692535 | 693674 | Seq. ID No. 2644 |
| 1285b | Seq. ID No. 2645 | 692499 | 692502 | 693674 | Seq. ID No. 2646 |
| 1287a | Seq. ID No. 2647 | 693675 | 693741 | 694412 | Seq. ID No. 2648 |
| 1287b | Seq. ID No. 2649 | 693675 | 693696 | 694412 | Seq. ID No. 2650 |
| 1288 | Seq. ID No. 2651 | 696061 | 696046 | 695036 | Seq. ID No. 2652 |
| 1289 | Seq. ID No. 2653 | 695318 | 695384 | 695629 | Seq. ID No. 2654 |
| 1290 | Seq. ID No. 2655 | 696712 | 696700 | 696062 | Seq. ID No. 2656 |
| 1293a | Seq. ID No. 2657 | 696820 | 697045 | 698178 | Seq. ID No. 2658 |
| 1293b | Seq. ID No. 2659 | 696820 | 696829 | 698178 | Seq. ID No. 2660 |
| 1294a | Seq. ID No. 2661 | 698539 | 698527 | 698231 | Seq. ID No. 2662 |
| 1295 | Seq. ID No. 2663 | 698150 | 698171 | 698863 | Seq. ID No. 2664 |
| 1297a | Seq. ID No. 2665 | 699177 | 699198 | 699776 | Seq. ID No. 2666 |
| 1297b | Seq. ID No. 2667 | 699177 | 699180 | 699776 | Seq. ID No. 2668 |
| 1300 | Seq. ID No. 2669 | 699972 | 699981 | 702449 | Seq. ID No. 2670 |
| 1302 | Seq. ID No. 2671 | 702563 | 702629 | 703615 | Seq. ID No. 2672 |
| 1305a | Seq. ID No. 2673 | 703701 | 703719 | 704396 | Seq. ID No. 2674 |
| 1305b | Seq. ID No. 2675 | 703701 | 703710 | 704396 | Seq. ID No. 2676 |
| 1305c | Seq. ID No. 2677 | 703701 | 703701 | 704396 | Seq. ID No. 2678 |
| 1308a | Seq. ID No. 2679 | 704332 | 704872 | 705273 | Seq. ID No. 2680 |
| 1308b | Seq. ID No. 2681 | 704332 | 704452 | 705273 | Seq. ID No. 2682 |
| 1308c | Seq. ID No. 2683 | 704332 | 704362 | 705273 | Seq. ID No. 2684 |
| 1308d | Seq. ID No. 2685 | 704332 | 704344 | 705273 | Seq. ID No. 2686 |
| 1308e | Seq. ID No. 2687 | 704332 | 704332 | 705273 | Seq. ID No. 2688 |
| 1311 | Seq. ID No. 2689 | 705580 | 705598 | 706314 | Seq. ID No. 2690 |
| 1314b | Seq. ID No. 2691 | 707728 | 707725 | 707432 | Seq. ID No. 2692 |
| 1315 | Seq. ID No. 2693 | 706311 | 706311 | 708119 | Seq. ID No. 2694 |
| 1316 | Seq. ID No. 2695 | 708319 | 708325 | 708573 | Seq. ID No. 2696 |
| 1317 | Seq. ID No. 2697 | 709234 | 709210 | 708947 | Seq. ID No. 2698 |
| 1318 | Seq. ID No. 2699 | 708258 | 708261 | 709274 | Seq. ID No. 2700 |
| 1319a | Seq. ID No. 2701 | 709369 | 709570 | 710250 | Seq. ID No. 2702 |
| 1319b | Seq. ID No. 2703 | 709369 | 709390 | 710250 | Seq. ID No. 2704 |
| 1320a | Seq. ID No. 2705 | 710244 | 710745 | 711068 | Seq. ID No. 2706 |
| 1320b | Seq. ID No. 2707 | 710244 | 710400 | 711068 | Seq. ID No. 2708 |
| 1320c | Seq. ID No. 2709 | 710244 | 710250 | 711068 | Seq. ID No. 2710 |
| 1321 | Seq. ID No. 2711 | 711047 | 711068 | 711586 | Seq. ID No. 2712 |
| 1322a | Seq. ID No. 2713 | 711571 | 711586 | 711831 | Seq. ID No. 2714 |
| 1322b | Seq. ID No. 2715 | 711571 | 711583 | 711831 | Seq. ID No. 2716 |
| 1323b | Seq. ID No. 2717 | 712308 | 712248 | 711997 | Seq. ID No. 2718 |
| 1324 | Seq. ID No. 2719 | 711914 | 711917 | 712600 | Seq. ID No. 2720 |
| 1326a | Seq. ID No. 2721 | 712714 | 712729 | 713361 | Seq. ID No. 2722 |
| 1326b | Seq. ID No. 2723 | 712714 | 712723 | 713361 | Seq. ID No. 2724 |
| 1326c | Seq. ID No. 2725 | 712714 | 712720 | 713361 | Seq. ID No. 2726 |
| 1333 | Seq. ID No. 2727 | 713541 | 713541 | 716393 | Seq. ID No. 2728 |
| 1334a | Seq. ID No. 2729 | 716775 | 716739 | 716479 | Seq. ID No. 2730 |
| 1334b | Seq. ID No. 2731 | 716775 | 716748 | 716479 | Seq. ID No. 2732 |
| 1335a | Seq. ID No. 2733 | 717513 | 717270 | 716776 | Seq. ID No. 2734 |
| 1335b | Seq. ID No. 2735 | 717513 | 717462 | 716776 | Seq. ID No. 2736 |
| 1337 | Seq. ID No. 2737 | 716522 | 716558 | 718135 | Seq. ID No. 2738 |
| 1338 | Seq. ID No. 2739 | 718855 | 718855 | 718586 | Seq. ID No. 2740 |
| 1340a | Seq. ID No. 2741 | 718451 | 718490 | 718822 | Seq. ID No. 2742 |
| 1340b | Seq. ID No. 2743 | 718451 | 718466 | 718822 | Seq. ID No. 2744 |
| 1341a | Seq. ID No. 2745 | 718816 | 718858 | 719163 | Seq. ID No. 2746 |
| 1341c | Seq. ID No. 2747 | 718816 | 718822 | 719163 | Seq. ID No. 2748 |
| 1344a | Seq. ID No. 2749 | 719333 | 719396 | 720334 | Seq. ID No. 2750 |
| 1344b | Seq. ID No. 2751 | 719333 | 719381 | 720334 | Seq. ID No. 2752 |
| 1348 | Seq. ID No. 2753 | 720382 | 720400 | 721263 | Seq. ID No. 2754 |
| 1349a | Seq. ID No. 2755 | 721264 | 721312 | 722295 | Seq. ID No. 2756 |
| 1349b | Seq. ID No. 2757 | 721264 | 721276 | 722295 | Seq. ID No. 2758 |
| 1349c | Seq. ID No. 2759 | 721264 | 721267 | 722295 | Seq. ID No. 2760 |
| 1350a | Seq. ID No. 2761 | 722342 | 722369 | 722797 | Seq. ID No. 2762 |
| 1350b | Seq. ID No. 2763 | 722342 | 722348 | 722797 | Seq. ID No. 2764 |
| 1353 | Seq. ID No. 2765 | 722851 | 722869 | 723843 | Seq. ID No. 2766 |
| 1355 | Seq. ID No. 2767 | 723944 | 723944 | 725668 | Seq. ID No. 2768 |
| 1358a | Seq. ID No. 2769 | 725732 | 725753 | 726643 | Seq. ID No. 2770 |
| 1358b | Seq. ID No. 2771 | 725732 | 725732 | 726643 | Seq. ID No. 2772 |
| 1359 | Seq. ID No. 2773 | 726616 | 726640 | 727635 | Seq. ID No. 2774 |
| 1361 | Seq. ID No. 2775 | 727639 | 727651 | 728580 | Seq. ID No. 2776 |
| 1364a | Seq. ID No. 2777 | 730140 | 730065 | 729379 | Seq. ID No. 2778 |
| 1364b | Seq. ID No. 2779 | 730140 | 730092 | 729379 | Seq. ID No. 2780 |
| 1364c | Seq. ID No. 2781 | 730140 | 730107 | 729379 | Seq. ID No. 2782 |
| 1365b | Seq. ID No. 2783 | 729761 | 729827 | 730129 | Seq. ID No. 2784 |
| 1366a | Seq. ID No. 2785 | 730210 | 730483 | 730836 | Seq. ID No. 2786 |
| 1366b | Seq. ID No. 2787 | 730210 | 730243 | 730836 | Seq. ID No. 2788 |
| 1367 | Seq. ID No. 2789 | 730970 | 730988 | 732001 | Seq. ID No. 2790 |
| 1368 | Seq. ID No. 2791 | 732002 | 732038 | 733033 | Seq. ID No. 2792 |
| 1371 | Seq. ID No. 2793 | 733169 | 733175 | 734359 | Seq. ID No. 2794 |
| 1373a | Seq. ID No. 2795 | 734383 | 734389 | 735144 | Seq. ID No. 2796 |
| 1373b | Seq. ID No. 2797 | 734383 | 734386 | 735144 | Seq. ID No. 2798 |
| 1374 | Seq. ID No. 2799 | 735111 | 735144 | 736679 | Seq. ID No. 2800 |
| 1375 | Seq. ID No. 2801 | 737472 | 737457 | 737191 | Seq. ID No. 2802 |
| 1377 | Seq. ID No. 2803 | 736676 | 736730 | 738028 | Seq. ID No. 2804 |
| 1378 | Seq. ID No. 2805 | 738364 | 738346 | 738119 | Seq. ID No. 2806 |
| 1379 | Seq. ID No. 2807 | 738645 | 738612 | 738340 | Seq. ID No. 2808 |
| 1380 | Seq. ID No. 2809 | 738987 | 738954 | 738646 | Seq. ID No. 2810 |
| 1381a | Seq. ID No. 2811 | 738197 | 738560 | 739288 | Seq. ID No. 2812 |
| 1381b | Seq. ID No. 2813 | 738197 | 738221 | 739288 | Seq. ID No. 2814 |
| 1382 | Seq. ID No. 2815 | 739289 | 739298 | 739879 | Seq. ID No. 2816 |
| 1383 | Seq. ID No. 2817 | 739834 | 739906 | 740064 | Seq. ID No. 2818 |
| 1384a | Seq. ID No. 2819 | 740592 | 740637 | 740843 | Seq. ID No. 2820 |
| 1384b | Seq. ID No. 2821 | 740592 | 740613 | 740843 | Seq. ID No. 2822 |
| 1384c | Seq. ID No. 2823 | 740592 | 740607 | 740843 | Seq. ID No. 2824 |
| 1386a | Seq. ID No. 2825 | 740904 | 740955 | 741692 | Seq. ID No. 2826 |
| 1386b | Seq. ID No. 2827 | 740904 | 740949 | 741692 | Seq. ID No. 2828 |
| 1387a | Seq. ID No. 2829 | 742161 | 741981 | 741694 | Seq. ID No. 2830 |
| 1388b | Seq. ID No. 2831 | 741439 | 741448 | 741723 | Seq. ID No. 2832 |
| 1389a | Seq. ID No. 2833 | 742245 | 742329 | 742586 | Seq. ID No. 2834 |
| 1393a | Seq. ID No. 2835 | 744190 | 744004 | 743774 | Seq. ID No. 2836 |
| 1393b | Seq. ID No. 2837 | 744190 | 744088 | 743774 | Seq. ID No. 2838 |
| 1393c | Seq. ID No. 2839 | 744190 | 744118 | 743774 | Seq. ID No. 2840 |
| 1393d | Seq. ID No. 2841 | 744190 | 744172 | 743774 | Seq. ID No. 2842 |
| 1394 | Seq. ID No. 2843 | 741716 | 741716 | 744145 | Seq. ID No. 2844 |
| 1395a | Seq. ID No. 2845 | 743835 | 743886 | 744179 | Seq. ID No. 2846 |
| 1396 | Seq. ID No. 2847 | 744166 | 744166 | 744624 | Seq. ID No. 2848 |
| 1397 | Seq. ID No. 2849 | 745009 | 745003 | 744779 | Seq. ID No. 2850 |
| 1398 | Seq. ID No. 2851 | 745395 | 745395 | 745583 | Seq. ID No. 2852 |
| 1399a | Seq. ID No. 2853 | 746205 | 746151 | 745810 | Seq. ID No. 2854 |
| 1399b | Seq. ID No. 2855 | 746205 | 746178 | 745810 | Seq. ID No. 2856 |
| 1400 | Seq. ID No. 2857 | 745613 | 745613 | 745813 | Seq. ID No. 2858 |
| 1401 | Seq. ID No. 2859 | 745943 | 745943 | 746104 | Seq. ID No. 2860 |
| 1402c | Seq. ID No. 2861 | 746612 | 746558 | 746190 | Seq. ID No. 2862 |
| 1405 | Seq. ID No. 2863 | 746924 | 746924 | 749635 | Seq. ID No. 2864 |
| 1407b | Seq. ID No. 2865 | 751061 | 751055 | 750588 | Seq. ID No. 2866 |
| 1408 | Seq. ID No. 2867 | 749626 | 749647 | 751767 | Seq. ID No. 2868 |
| 1409 | Seq. ID No. 2869 | 751768 | 751768 | 754359 | Seq. ID No. 2870 |
| 1410 | Seq. ID No. 2871 | 754341 | 754374 | 755108 | Seq. ID No. 2872 |
| 1411a | Seq. ID No. 2873 | 755080 | 755485 | 755841 | Seq. ID No. 2874 |
| 1411b | Seq. ID No. 2875 | 755080 | 755344 | 755841 | Seq. ID No. 2876 |
| 1411c | Seq. ID No. 2877 | 755080 | 755092 | 755841 | Seq. ID No. 2878 |
| 1412a | Seq. ID No. 2879 | 757589 | 757421 | 756222 | Seq. ID No. 2880 |
| 1412b | Seq. ID No. 2881 | 757589 | 757586 | 756222 | Seq. ID No. 2882 |
| 1414a | Seq. ID No. 2883 | 756988 | 757285 | 757674 | Seq. ID No. 2884 |
| 1414b | Seq. ID No. 2885 | 756988 | 757180 | 757674 | Seq. ID No. 2886 |
| 1414c | Seq. ID No. 2887 | 756988 | 757003 | 757674 | Seq. ID No. 2888 |
| 1415 | Seq. ID No. 2889 | 758110 | 758110 | 758241 | Seq. ID No. 2890 |
| 1416 | Seq. ID No. 2891 | 759768 | 759735 | 758569 | Seq. ID No. 2892 |
| 1418 | Seq. ID No. 2893 | 758771 | 758771 | 759010 | Seq. ID No. 2894 |
| 1419 | Seq. ID No. 2895 | 760783 | 760735 | 760511 | Seq. ID No. 2896 |
| 1420a | Seq. ID No. 2897 | 760029 | 760194 | 760772 | Seq. ID No. 2898 |
| 1420b | Seq. ID No. 2899 | 760029 | 760029 | 760772 | Seq. ID No. 2900 |
| 1422 | Seq. ID No. 2901 | 760703 | 760775 | 762157 | Seq. ID No. 2902 |
| 1423 | Seq. ID No. 2903 | 762262 | 762283 | 762516 | Seq. ID No. 2904 |
| 1426a | Seq. ID No. 2905 | 762510 | 762915 | 763571 | Seq. ID No. 2906 |
| 1426b | Seq. ID No. 2907 | 762510 | 762528 | 763571 | Seq. ID No. 2908 |
| 1427a | Seq. ID No. 2909 | 763552 | 763810 | 763941 | Seq. ID No. 2910 |
| 1427b | Seq. ID No. 2911 | 763552 | 763564 | 763941 | Seq. ID No. 2912 |
| 1428 | Seq. ID No. 2913 | 763895 | 763949 | 764311 | Seq. ID No. 2914 |
| 1429a | Seq. ID No. 2915 | 765122 | 765107 | 764379 | Seq. ID No. 2916 |
| 1429b | Seq. ID No. 2917 | 765122 | 765116 | 764379 | Seq. ID No. 2918 |
| 1431 | Seq. ID No. 2919 | 765350 | 765365 | 766138 | Seq. ID No. 2920 |
| 1432 | Seq. ID No. 2921 | 766139 | 766154 | 767452 | Seq. ID No. 2922 |
| 1433 | Seq. ID No. 2923 | 767422 | 767449 | 768687 | Seq. ID No. 2924 |
| 1434a | Seq. ID No. 2925 | 768641 | 768761 | 769153 | Seq. ID No. 2926 |
| 1434b | Seq. ID No. 2927 | 768641 | 768674 | 769153 | Seq. ID No. 2928 |
| 1437a | Seq. ID No. 2929 | 769101 | 769194 | 770588 | Seq. ID No. 2930 |
| 1437b | Seq. ID No. 2931 | 769101 | 769185 | 770588 | Seq. ID No. 2932 |
| 1437c | Seq. ID No. 2933 | 769101 | 769119 | 770588 | Seq. ID No. 2934 |
| 1438 | Seq. ID No. 2935 | 771081 | 771093 | 771485 | Seq. ID No. 2936 |
| 1439a | Seq. ID No. 2937 | 771556 | 772081 | 772368 | Seq. ID No. 2938 |
| 1439b | Seq. ID No. 2939 | 771556 | 771832 | 772368 | Seq. ID No. 2940 |
| 1439c | Seq. ID No. 2941 | 771556 | 771688 | 772368 | Seq. ID No. 2942 |
| 1439d | Seq. ID No. 2943 | 771556 | 771565 | 772368 | Seq. ID No. 2944 |
| 1439e | Seq. ID No. 2945 | 771556 | 771556 | 772368 | Seq. ID No. 2946 |
| 1440a | Seq. ID No. 2947 | 772260 | 773019 | 773900 | Seq. ID No. 2948 |
| 1440b | Seq. ID No. 2949 | 772260 | 772659 | 773900 | Seq. ID No. 2950 |
| 1440c | Seq. ID No. 2951 | 772260 | 772371 | 773900 | Seq. ID No. 2952 |
| 1440d | Seq. ID No. 2953 | 772260 | 772347 | 773900 | Seq. ID No. 2954 |
| 1442a | Seq. ID No. 2955 | 773837 | 774053 | 774535 | Seq. ID No. 2956 |
| 1442b | Seq. ID No. 2957 | 773837 | 773897 | 774535 | Seq. ID No. 2958 |
| 1445a | Seq. ID No. 2959 | 774811 | 775252 | 775797 | Seq. ID No. 2960 |
| 1445b | Seq. ID No. 2961 | 774811 | 775042 | 775797 | Seq. ID No. 2962 |
| 1445c | Seq. ID No. 2963 | 774811 | 774853 | 775797 | Seq. ID No. 2964 |
| 1446a | Seq. ID No. 2965 | 776293 | 776224 | 775967 | Seq. ID No. 2966 |
| 1446b | Seq. ID No. 2967 | 776293 | 776278 | 775967 | Seq. ID No. 2968 |
| 1447a | Seq. ID No. 2969 | 776362 | 776419 | 777786 | Seq. ID No. 2970 |
| 1447b | Seq. ID No. 2971 | 776362 | 776377 | 777786 | Seq. ID No. 2972 |
| 1448 | Seq. ID No. 2973 | 778141 | 778195 | 778794 | Seq. ID No. 2974 |
| 1449a | Seq. ID No. 2975 | 778847 | 778862 | 779716 | Seq. ID No. 2976 |
| 1449b | Seq. ID No. 2977 | 778847 | 778853 | 779716 | Seq. ID No. 2978 |
| 1451 | Seq. ID No. 2979 | 779700 | 779706 | 780320 | Seq. ID No. 2980 |
| 1452a | Seq. ID No. 2981 | 780286 | 780310 | 781452 | Seq. ID No. 2982 |
| 1452b | Seq. ID No. 2983 | 780286 | 780295 | 781452 | Seq. ID No. 2984 |
| 1453 | Seq. ID No. 2985 | 781774 | 781777 | 782313 | Seq. ID No. 2986 |
| 1454 | Seq. ID No. 2987 | 782603 | 782594 | 782319 | Seq. ID No. 2988 |
| 1455a | Seq. ID No. 2989 | 782323 | 782416 | 782772 | Seq. ID No. 2990 |
| 1455b | Seq. ID No. 2991 | 782323 | 782359 | 782772 | Seq. ID No. 2992 |
| 1456 | Seq. ID No. 2993 | 783394 | 783373 | 782858 | Seq. ID No. 2994 |
| 1457a | Seq. ID No. 2995 | 785272 | 784672 | 783587 | Seq. ID No. 2996 |
| 1457b | Seq. ID No. 2997 | 785272 | 784795 | 783587 | Seq. ID No. 2998 |
| 1457c | Seq. ID No. 2999 | 785272 | 785272 | 783587 | Seq. ID No. 3000 |
| 1459 | Seq. ID No. 3001 | 785453 | 785486 | 785917 | Seq. ID No. 3002 |
| 1462a | Seq. ID No. 3003 | 785979 | 786078 | 787760 | Seq. ID No. 3004 |
| 1462b | Seq. ID No. 3005 | 785979 | 785994 | 787760 | Seq. ID No. 3006 |
| 1463a | Seq. ID No. 3007 | 787735 | 787813 | 788136 | Seq. ID No. 3008 |
| 1463b | Seq. ID No. 3009 | 787735 | 787753 | 788136 | Seq. ID No. 3010 |
| 1463c | Seq. ID No. 3011 | 787735 | 787747 | 788136 | Seq. ID No. 3012 |
| 1466a | Seq. ID No. 3013 | 788108 | 788501 | 789526 | Seq. ID No. 3014 |
| 1466b | Seq. ID No. 3015 | 788108 | 788249 | 789526 | Seq. ID No. 3016 |
| 1466c | Seq. ID No. 3017 | 788108 | 788147 | 789526 | Seq. ID No. 3018 |
| 1466d | Seq. ID No. 3019 | 788108 | 788120 | 789526 | Seq. ID No. 3020 |
| 1467 | Seq. ID No. 3021 | 790286 | 790256 | 789855 | Seq. ID No. 3022 |
| 1469a | Seq. ID No. 3023 | 789757 | 790642 | 791115 | Seq. ID No. 3024 |
| 1469b | Seq. ID No. 3025 | 789757 | 790531 | 791115 | Seq. ID No. 3026 |
| 1469c | Seq. ID No. 3027 | 789757 | 789769 | 791115 | Seq. ID No. 3028 |
| 1470a | Seq. ID No. 3029 | 792128 | 791798 | 791205 | Seq. ID No. 3030 |
| 1470b | Seq. ID No. 3031 | 792128 | 792008 | 791205 | Seq. ID No. 3032 |
| 1470c | Seq. ID No. 3033 | 792128 | 792116 | 791205 | Seq. ID No. 3034 |
| 1471 | Seq. ID No. 3035 | 792254 | 792257 | 793039 | Seq. ID No. 3036 |
| 1472b | Seq. ID No. 3037 | 793681 | 793612 | 793046 | Seq. ID No. 3038 |
| 1472c | Seq. ID No. 3039 | 793681 | 793666 | 793046 | Seq. ID No. 3040 |
| 1474 | Seq. ID No. 3041 | 793841 | 793841 | 794050 | Seq. ID No. 3042 |
| 1475 | Seq. ID No. 3043 | 794342 | 794369 | 795070 | Seq. ID No. 3044 |
| 1476 | Seq. ID No. 3045 | 795230 | 795236 | 795805 | Seq. ID No. 3046 |
| 1477a | Seq. ID No. 3047 | 796616 | 796430 | 795831 | Seq. ID No. 3048 |
| 1477b | Seq. ID No. 3049 | 796616 | 796589 | 795831 | Seq. ID No. 3050 |
| 1479a | Seq. ID No. 3051 | 796810 | 797002 | 798135 | Seq. ID No. 3052 |
| 1479b | Seq. ID No. 3053 | 796810 | 796867 | 798135 | Seq. ID No. 3054 |
| 1479c | Seq. ID No. 3055 | 796810 | 796813 | 798135 | Seq. ID No. 3056 |
| 1482a | Seq. ID No. 3057 | 798771 | 798831 | 799577 | Seq. ID No. 3058 |
| 1482b | Seq. ID No. 3059 | 798771 | 798774 | 799577 | Seq. ID No. 3060 |
| 1483 | Seq. ID No. 3061 | 799724 | 799736 | 800257 | Seq. ID No. 3062 |
| 1484a | Seq. ID No. 3063 | 800458 | 801334 | 801843 | Seq. ID No. 3064 |
| 1484b | Seq. ID No. 3065 | 800458 | 800473 | 801843 | Seq. ID No. 3066 |
| 1484c | Seq. ID No. 3067 | 800458 | 800458 | 801843 | Seq. ID No. 3068 |
| 1486 | Seq. ID No. 3069 | 801844 | 801853 | 802452 | Seq. ID No. 3070 |
| 1487 | Seq. ID No. 3071 | 802771 | 802768 | 802532 | Seq. ID No. 3072 |
| 1488a | Seq. ID No. 3073 | 802224 | 802977 | 803219 | Seq. ID No. 3074 |
| 1488b | Seq. ID No. 3075 | 802224 | 802917 | 803219 | Seq. ID No. 3076 |
| 1488c | Seq. ID No. 3077 | 802224 | 802788 | 803219 | Seq. ID No. 3078 |
| 1488d | Seq. ID No. 3079 | 802224 | 802464 | 803219 | Seq. ID No. 3080 |
| 1488e | Seq. ID No. 3081 | 802224 | 802431 | 803219 | Seq. ID No. 3082 |
| 1488f | Seq. ID No. 3083 | 802224 | 802377 | 803219 | Seq. ID No. 3084 |
| 1488g | Seq. ID No. 3085 | 802224 | 802323 | 803219 | Seq. ID No. 3086 |
| 1489 | Seq. ID No. 3087 | 803568 | 803550 | 803326 | Seq. ID No. 3088 |
| 1490 | Seq. ID No. 3089 | 803135 | 803330 | 803674 | Seq. ID No. 3090 |
| 1494 | Seq. ID No. 3091 | 803890 | 803929 | 805041 | Seq. ID No. 3092 |
| 1497 | Seq. ID No. 3093 | 805042 | 805048 | 806508 | Seq. ID No. 3094 |
| 1498a | Seq. ID No. 3095 | 806363 | 806543 | 807457 | Seq. ID No. 3096 |
| 1498b | Seq. ID No. 3097 | 806363 | 806423 | 807457 | Seq. ID No. 3098 |
| 1498c | Seq. ID No. 3099 | 806363 | 806396 | 807457 | Seq. ID No. 3100 |
| 1498d | Seq. ID No. 3101 | 806363 | 806393 | 807457 | Seq. ID No. 3102 |
| 1499 | Seq. ID No. 3103 | 809397 | 809382 | 808153 | Seq. ID No. 3104 |
| 1502a | Seq. ID No. 3105 | 809502 | 809565 | 809828 | Seq. ID No. 3106 |
| 1502b | Seq. ID No. 3107 | 809502 | 809502 | 809828 | Seq. ID No. 3108 |
| 1503a | Seq. ID No. 3109 | 809829 | 809847 | 810431 | Seq. ID No. 3110 |
| 1503b | Seq. ID No. 3111 | 809829 | 809835 | 810431 | Seq. ID No. 3112 |
| 1506a | Seq. ID No. 3113 | 810510 | 810666 | 812906 | Seq. ID No. 3114 |
| 1506b | Seq. ID No. 3115 | 810510 | 810621 | 812906 | Seq. ID No. 3116 |
| 1506c | Seq. ID No. 3117 | 810510 | 810525 | 812906 | Seq. ID No. 3118 |
| 1507a | Seq. ID No. 3119 | 813291 | 813231 | 812944 | Seq. ID No. 3120 |
| 1507b | Seq. ID No. 3121 | 813291 | 813246 | 812944 | Seq. ID No. 3122 |
| 1507c | Seq. ID No. 3123 | 813291 | 813282 | 812944 | Seq. ID No. 3124 |
| 1508 | Seq. ID No. 3125 | 812996 | 813032 | 813340 | Seq. ID No. 3126 |
| 1510a | Seq. ID No. 3127 | 813521 | 813737 | 815023 | Seq. ID No. 3128 |
| 1510b | Seq. ID No. 3129 | 813521 | 813704 | 815023 | Seq. ID No. 3130 |
| 1510c | Seq. ID No. 3131 | 813521 | 813545 | 815023 | Seq. ID No. 3132 |
| 1510d | Seq. ID No. 3133 | 813521 | 813524 | 815023 | Seq. ID No. 3134 |
| 1511 | Seq. ID No. 3135 | 815078 | 815084 | 815920 | Seq. ID No. 3136 |
| 1512 | Seq. ID No. 3137 | 815892 | 815910 | 816524 | Seq. ID No. 3138 |
| 1513a | Seq. ID No. 3139 | 816525 | 816570 | 817034 | Seq. ID No. 3140 |
| 1513b | Seq. ID No. 3141 | 816525 | 816525 | 817034 | Seq. ID No. 3142 |
| 1516 | Seq. ID No. 3143 | 817055 | 817070 | 817537 | Seq. ID No. 3144 |
| 1517a | Seq. ID No. 3145 | 818704 | 818314 | 817709 | Seq. ID No. 3146 |
| 1517b | Seq. ID No. 3147 | 818704 | 818608 | 817709 | Seq. ID No. 3148 |
| 1517c | Seq. ID No. 3149 | 818704 | 818614 | 817709 | Seq. ID No. 3150 |
| 1518a | Seq. ID No. 3151 | 818067 | 818139 | 818636 | Seq. ID No. 3152 |
| 1518b | Seq. ID No. 3153 | 818067 | 818085 | 818636 | Seq. ID No. 3154 |
| 1520 | Seq. ID No. 3155 | 818738 | 818753 | 819112 | Seq. ID No. 3156 |
| 1522 | Seq. ID No. 3157 | 819117 | 819150 | 819596 | Seq. ID No. 3158 |
| 1523 | Seq. ID No. 3159 | 820780 | 820756 | 819647 | Seq. ID No. 3160 |
| 1528 | Seq. ID No. 3161 | 820968 | 820968 | 821969 | Seq. ID No. 3162 |
| 1530a | Seq. ID No. 3163 | 824730 | 824625 | 822091 | Seq. ID No. 3164 |
| 1530b | Seq. ID No. 3165 | 824730 | 824706 | 822091 | Seq. ID No. 3166 |
| 1533a | Seq. ID No. 3167 | 825870 | 825864 | 825565 | Seq. ID No. 3168 |
| 1534a | Seq. ID No. 3169 | 824975 | 825119 | 826375 | Seq. ID No. 3170 |
| 1534b | Seq. ID No. 3171 | 824975 | 824981 | 826375 | Seq. ID No. 3172 |
| 1535a | Seq. ID No. 3173 | 826056 | 826164 | 826391 | Seq. ID No. 3174 |
| 1536a | Seq. ID No. 3175 | 826336 | 826537 | 826698 | Seq. ID No. 3176 |
| 1536b | Seq. ID No. 3177 | 826336 | 826345 | 826698 | Seq. ID No. 3178 |
| 1537 | Seq. ID No. 3179 | 827893 | 827875 | 826907 | Seq. ID No. 3180 |
| 1542 | Seq. ID No. 3181 | 829139 | 829166 | 829660 | Seq. ID No. 3182 |
| 1543 | Seq. ID No. 3183 | 828142 | 828145 | 829974 | Seq. ID No. 3184 |
| 1544 | Seq. ID No. 3185 | 832325 | 832298 | 830493 | Seq. ID No. 3186 |
| 1547a | Seq. ID No. 3187 | 832494 | 832638 | 833225 | Seq. ID No. 3188 |
| 1547b | Seq. ID No. 3189 | 832494 | 832497 | 833225 | Seq. ID No. 3190 |
| 1548 | Seq. ID No. 3191 | 834559 | 834523 | 833408 | Seq. ID No. 3192 |
| 1552 | Seq. ID No. 3193 | 836319 | 836316 | 836029 | Seq. ID No. 3194 |
| 1553a | Seq. ID No. 3195 | 835285 | 835321 | 836385 | Seq. ID No. 3196 |
| 1553b | Seq. ID No. 3197 | 835285 | 835303 | 836385 | Seq. ID No. 3198 |
| 1554a | Seq. ID No. 3199 | 836324 | 837011 | 837400 | Seq. ID No. 3200 |
| 1554b | Seq. ID No. 3201 | 836324 | 836807 | 837400 | Seq. ID No. 3202 |
| 1554c | Seq. ID No. 3203 | 836324 | 836333 | 837400 | Seq. ID No. 3204 |
| 1555 | Seq. ID No. 3205 | 837622 | 837649 | 839016 | Seq. ID No. 3206 |
| 1556a | Seq. ID No. 3207 | 839851 | 840013 | 840648 | Seq. ID No. 3208 |
| 1556b | Seq. ID No. 3209 | 839851 | 839893 | 840648 | Seq. ID No. 3210 |
| 1556c | Seq. ID No. 3211 | 839851 | 839860 | 840648 | Seq. ID No. 3212 |
| 1557a | Seq. ID No. 3213 | 840617 | 840911 | 841375 | Seq. ID No. 3214 |
| 1557b | Seq. ID No. 3215 | 840617 | 840770 | 841375 | Seq. ID No. 3216 |
| 1557c | Seq. ID No. 3217 | 840617 | 840632 | 841375 | Seq. ID No. 3218 |
| 1559a | Seq. ID No. 3219 | 841324 | 841705 | 842100 | Seq. ID No. 3220 |
| 1559b | Seq. ID No. 3221 | 841324 | 841372 | 842100 | Seq. ID No. 3222 |
| 1563 | Seq. ID No. 3223 | 843403 | 843385 | 843149 | Seq. ID No. 3224 |
| 1564a | Seq. ID No. 3225 | 842064 | 842112 | 843983 | Seq. ID No. 3226 |
| 1564b | Seq. ID No. 3227 | 842064 | 842106 | 843983 | Seq. ID No. 3228 |
| 1565 | Seq. ID No. 3229 | 845451 | 845418 | 844252 | Seq. ID No. 3230 |
| 1567 | Seq. ID No. 3231 | 845601 | 845766 | 845942 | Seq. ID No. 3232 |
| 1568b | Seq. ID No. 3233 | 845896 | 845899 | 846222 | Seq. ID No. 3234 |
| 1569 | Seq. ID No. 3235 | 846223 | 846256 | 846519 | Seq. ID No. 3236 |
| 1570 | Seq. ID No. 3237 | 846792 | 846792 | 846953 | Seq. ID No. 3238 |
| 1571 | Seq. ID No. 3239 | 847452 | 847467 | 848087 | Seq. ID No. 3240 |
| 1572a | Seq. ID No. 3241 | 848056 | 849394 | 849630 | Seq. ID No. 3242 |
| 1572b | Seq. ID No. 3243 | 848056 | 848599 | 849630 | Seq. ID No. 3244 |
| 1572c | Seq. ID No. 3245 | 848056 | 848353 | 849630 | Seq. ID No. 3246 |
| 1572d | Seq. ID No. 3247 | 848056 | 848200 | 849630 | Seq. ID No. 3248 |
| 1572e | Seq. ID No. 3249 | 848056 | 848065 | 849630 | Seq. ID No. 3250 |
| 1573 | Seq. ID No. 3251 | 849498 | 849618 | 850292 | Seq. ID No. 3252 |
| 1576 | Seq. ID No. 3253 | 850427 | 850442 | 851671 | Seq. ID No. 3254 |
| 1577a | Seq. ID No. 3255 | 852156 | 852168 | 852893 | Seq. ID No. 3256 |
| 1577b | Seq. ID No. 3257 | 852156 | 852165 | 852893 | Seq. ID No. 3258 |
| 1578 | Seq. ID No. 3259 | 852839 | 852860 | 853744 | Seq. ID No. 3260 |
| 1580a | Seq. ID No. 3261 | 854091 | 854103 | 854405 | Seq. ID No. 3262 |
| 1580b | Seq. ID No. 3263 | 854091 | 854091 | 854405 | Seq. ID No. 3264 |
| 1581 | Seq. ID No. 3265 | 854392 | 854407 | 854871 | Seq. ID No. 3266 |
| 1582a | Seq. ID No. 3267 | 854822 | 854933 | 855163 | Seq. ID No. 3268 |
| 1582b | Seq. ID No. 3269 | 854822 | 854855 | 855163 | Seq. ID No. 3270 |
| 1582c | Seq. ID No. 3271 | 854822 | 854837 | 855163 | Seq. ID No. 3272 |
| 1584 | Seq. ID No. 3273 | 855136 | 855160 | 855618 | Seq. ID No. 3274 |
| 1585a | Seq. ID No. 3275 | 855593 | 855626 | 856216 | Seq. ID No. 3276 |
| 1585b | Seq. ID No. 3277 | 855593 | 855602 | 856216 | Seq. ID No. 3278 |
| 1587a | Seq. ID No. 3279 | 856349 | 856619 | 857485 | Seq. ID No. 3280 |
| 1587b | Seq. ID No. 3281 | 856349 | 856424 | 857485 | Seq. ID No. 3282 |
| 1587c | Seq. ID No. 3283 | 856349 | 856373 | 857485 | Seq. ID No. 3284 |
| 1588 | Seq. ID No. 3285 | 857486 | 857504 | 858061 | Seq. ID No. 3286 |
| 1590 | Seq. ID No. 3287 | 858037 | 858088 | 858495 | Seq. ID No. 3288 |
| 1591 | Seq. ID No. 3289 | 858485 | 858488 | 858988 | Seq. ID No. 3290 |
| 1592a | Seq. ID No. 3291 | 859040 | 859280 | 860416 | Seq. ID No. 3292 |
| 1592b | Seq. ID No. 3293 | 859040 | 859052 | 860416 | Seq. ID No. 3294 |
| 1593 | Seq. ID No. 3295 | 860376 | 860406 | 860675 | Seq. ID No. 3296 |
| 1594a | Seq. ID No. 3297 | 860676 | 860784 | 861578 | Seq. ID No. 3298 |
| 1594b | Seq. ID No. 3299 | 860676 | 860685 | 861578 | Seq. ID No. 3300 |
| 1595a | Seq. ID No. 3301 | 861559 | 861571 | 862377 | Seq. ID No. 3302 |
| 1595b | Seq. ID No. 3303 | 861559 | 861562 | 862377 | Seq. ID No. 3304 |
| 1598a | Seq. ID No. 3305 | 862517 | 862631 | 864310 | Seq. ID No. 3306 |
| 1598b | Seq. ID No. 3307 | 862517 | 862601 | 864310 | Seq. ID No. 3308 |
| 1600a | Seq. ID No. 3309 | 864687 | 864807 | 866219 | Seq. ID No. 3310 |
| 1600b | Seq. ID No. 3311 | 864687 | 864798 | 866219 | Seq. ID No. 3312 |
| 1600c | Seq. ID No. 3313 | 864687 | 864702 | 866219 | Seq. ID No. 3314 |
| 1602 | Seq. ID No. 3315 | 866403 | 866418 | 867107 | Seq. ID No. 3316 |
| 1606a | Seq. ID No. 3317 | 867044 | 867632 | 868624 | Seq. ID No. 3318 |
| 1606b | Seq. ID No. 3319 | 867044 | 867104 | 868624 | Seq. ID No. 3320 |
| 1607a | Seq. ID No. 3321 | 869654 | 869564 | 868668 | Seq. ID No. 3322 |
| 1607b | Seq. ID No. 3323 | 869654 | 869636 | 868668 | Seq. ID No. 3324 |
| 1608 | Seq. ID No. 3325 | 868639 | 868657 | 868893 | Seq. ID No. 3326 |
| 1610a | Seq. ID No. 3327 | 870103 | 870085 | 869714 | Seq. ID No. 3328 |
| 1610b | Seq. ID No. 3329 | 870103 | 870094 | 869714 | Seq. ID No. 3330 |
| 1612 | Seq. ID No. 3331 | 871769 | 871679 | 871356 | Seq. ID No. 3332 |
| 1616a | Seq. ID No. 3333 | 870406 | 870709 | 872826 | Seq. ID No. 3334 |
| 1616b | Seq. ID No. 3335 | 870406 | 870418 | 872826 | Seq. ID No. 3336 |
| 1619 | Seq. ID No. 3337 | 873157 | 873166 | 874266 | Seq. ID No. 3338 |
| 1621 | Seq. ID No. 3339 | 875446 | 875428 | 875066 | Seq. ID No. 3340 |
| 1622a | Seq. ID No. 3341 | 875866 | 875788 | 875537 | Seq. ID No. 3342 |
| 1623a | Seq. ID No. 3343 | 874398 | 874665 | 875993 | Seq. ID No. 3344 |
| 1623b | Seq. ID No. 3345 | 874398 | 874437 | 875993 | Seq. ID No. 3346 |
| 1623c | Seq. ID No. 3347 | 874398 | 874410 | 875993 | Seq. ID No. 3348 |
| 1624 | Seq. ID No. 3349 | 876797 | 876749 | 876447 | Seq. ID No. 3350 |
| 1625a | Seq. ID No. 3351 | 875908 | 876511 | 877038 | Seq. ID No. 3352 |
| 1625b | Seq. ID No. 3353 | 875908 | 875974 | 877038 | Seq. ID No. 3354 |
| 1625c | Seq. ID No. 3355 | 875908 | 875935 | 877038 | Seq. ID No. 3356 |
| 1626a | Seq. ID No. 3357 | 876984 | 877617 | 877994 | Seq. ID No. 3358 |
| 1626b | Seq. ID No. 3359 | 876984 | 877038 | 877994 | Seq. ID No. 3360 |
| 1628a | Seq. ID No. 3361 | 878218 | 878263 | 879225 | Seq. ID No. 3362 |
| 1628b | Seq. ID No. 3363 | 878218 | 878233 | 879225 | Seq. ID No. 3364 |
| 1632a | Seq. ID No. 3365 | 880585 | 880471 | 879908 | Seq. ID No. 3366 |
| 1632b | Seq. ID No. 3367 | 880585 | 880525 | 879908 | Seq. ID No. 3368 |
| 1633a | Seq. ID No. 3369 | 882546 | 882498 | 882007 | Seq. ID No. 3370 |
| 1633b | Seq. ID No. 3371 | 882546 | 882543 | 882007 | Seq. ID No. 3372 |
| 1634a | Seq. ID No. 3373 | 880656 | 880746 | 882020 | Seq. ID No. 3374 |
| 1634b | Seq. ID No. 3375 | 880656 | 880707 | 882020 | Seq. ID No. 3376 |
| 1634c | Seq. ID No. 3377 | 880656 | 880659 | 882020 | Seq. ID No. 3378 |
| 1639b | Seq. ID No. 3379 | 881983 | 881992 | 883659 | Seq. ID No. 3380 |
| 1642a | Seq. ID No. 3381 | 883922 | 883976 | 886069 | Seq. ID No. 3382 |
| 1642b | Seq. ID No. 3383 | 883922 | 883934 | 886069 | Seq. ID No. 3384 |
| 1643a | Seq. ID No. 3385 | 886023 | 886074 | 886400 | Seq. ID No. 3386 |
| 1643b | Seq. ID No. 3387 | 886023 | 886035 | 886400 | Seq. ID No. 3388 |
| 1646a | Seq. ID No. 3389 | 886658 | 888038 | 888331 | Seq. ID No. 3390 |
| 1646b | Seq. ID No. 3391 | 886658 | 887708 | 888331 | Seq. ID No. 3392 |
| 1646c | Seq. ID No. 3393 | 886658 | 886886 | 888331 | Seq. ID No. 3394 |
| 1646d | Seq. ID No. 3395 | 886658 | 886745 | 888331 | Seq. ID No. 3396 |
| 1646e | Seq. ID No. 3397 | 886658 | 886664 | 888331 | Seq. ID No. 3398 |
| 1646f | Seq. ID No. 3399 | 886658 | 886658 | 888331 | Seq. ID No. 3400 |
| 1647 | Seq. ID No. 3401 | 888398 | 888425 | 889144 | Seq. ID No. 3402 |
| 1648b | Seq. ID No. 3403 | 890392 | 890371 | 890099 | Seq. ID No. 3404 |
| 1649a | Seq. ID No. 3405 | 891564 | 891375 | 890626 | Seq. ID No. 3406 |
| 1649b | Seq. ID No. 3407 | 891564 | 891537 | 890626 | Seq. ID No. 3408 |
| 1649c | Seq. ID No. 3409 | 891564 | 891555 | 890626 | Seq. ID No. 3410 |
| 1652a | Seq. ID No. 3411 | 891565 | 891646 | 893049 | Seq. ID No. 3412 |
| 1652b | Seq. ID No. 3413 | 891565 | 891580 | 893049 | Seq. ID No. 3414 |
| 1654 | Seq. ID No. 3415 | 893169 | 893250 | 894092 | Seq. ID No. 3416 |
| 1656b | Seq. ID No. 3417 | 894132 | 894327 | 894650 | Seq. ID No. 3418 |
| 1657 | Seq. ID No. 3419 | 895472 | 895439 | 895203 | Seq. ID No. 3420 |
| 1659a | Seq. ID No. 3421 | 894949 | 896161 | 896691 | Seq. ID No. 3422 |
| 1659b | Seq. ID No. 3423 | 894949 | 895030 | 896691 | Seq. ID No. 3424 |
| 1659c | Seq. ID No. 3425 | 894949 | 894982 | 896691 | Seq. ID No. 3426 |
| 1660b | Seq. ID No. 3427 | 896222 | 896285 | 896725 | Seq. ID No. 3428 |
| 1662a | Seq. ID No. 3429 | 896963 | 896975 | 897847 | Seq. ID No. 3430 |
| 1662b | Seq. ID No. 3431 | 896963 | 896963 | 897847 | Seq. ID No. 3432 |
| 1663 | Seq. ID No. 3433 | 898657 | 898648 | 898361 | Seq. ID No. 3434 |
| 1664 | Seq. ID No. 3435 | 897988 | 898021 | 898602 | Seq. ID No. 3436 |
| 1665a | Seq. ID No. 3437 | 898458 | 898578 | 898913 | Seq. ID No. 3438 |
| 1668 | Seq. ID No. 3439 | 899037 | 899052 | 899945 | Seq. ID No. 3440 |
| 1669 | Seq. ID No. 3441 | 900663 | 900630 | 900307 | Seq. ID No. 3442 |
| 1670a | Seq. ID No. 3443 | 900059 | 900101 | 900757 | Seq. ID No. 3444 |
| 1670b | Seq. ID No. 3445 | 900059 | 900089 | 900757 | Seq. ID No. 3446 |
| 1670c | Seq. ID No. 3447 | 900059 | 900068 | 900757 | Seq. ID No. 3448 |
| 1673a | Seq. ID No. 3449 | 900778 | 902047 | 902286 | Seq. ID No. 3450 |
| 1673b | Seq. ID No. 3451 | 900778 | 901402 | 902286 | Seq. ID No. 3452 |
| 1673c | Seq. ID No. 3453 | 900778 | 901204 | 902286 | Seq. ID No. 3454 |
| 1673d | Seq. ID No. 3455 | 900778 | 901018 | 902286 | Seq. ID No. 3456 |
| 1673e | Seq. ID No. 3457 | 900778 | 900898 | 902286 | Seq. ID No. 3458 |
| 1673f | Seq. ID No. 3459 | 900778 | 900814 | 902286 | Seq. ID No. 3460 |
| 1674 | Seq. ID No. 3461 | 902433 | 902532 | 903383 | Seq. ID No. 3462 |
| 1675a | Seq. ID No. 3463 | 904184 | 904340 | 905383 | Seq. ID No. 3464 |
| 1675b | Seq. ID No. 3465 | 904184 | 904208 | 905383 | Seq. ID No. 3466 |
| 1675c | Seq. ID No. 3467 | 904184 | 904184 | 905383 | Seq. ID No. 3468 |
| 1676 | Seq. ID No. 3469 | 905424 | 905451 | 905852 | Seq. ID No. 3470 |
| 1677 | Seq. ID No. 3471 | 907317 | 907284 | 906022 | Seq. ID No. 3472 |
| 1679 | Seq. ID No. 3473 | 907448 | 907472 | 908014 | Seq. ID No. 3474 |
| 1680 | Seq. ID No. 3475 | 908628 | 908625 | 908176 | Seq. ID No. 3476 |
| 1682a | Seq. ID No. 3477 | 908785 | 908872 | 909591 | Seq. ID No. 3478 |
| 1682b | Seq. ID No. 3479 | 908785 | 908803 | 909591 | Seq. ID No. 3480 |
| 1683a | Seq. ID No. 3481 | 909633 | 910008 | 910523 | Seq. ID No. 3482 |
| 1683b | Seq. ID No. 3483 | 909633 | 909669 | 910523 | Seq. ID No. 3484 |
| 1684 | Seq. ID No. 3485 | 911359 | 911347 | 910640 | Seq. ID No. 3486 |
| 1685 | Seq. ID No. 3487 | 912399 | 912375 | 911350 | Seq. ID No. 3488 |
| 1687 | Seq. ID No. 3489 | 912556 | 912568 | 912813 | Seq. ID No. 3490 |
| 1688a | Seq. ID No. 3491 | 912536 | 913217 | 913645 | Seq. ID No. 3492 |
| 1688b | Seq. ID No. 3493 | 912536 | 912641 | 913645 | Seq. ID No. 3494 |
| 1688c | Seq. ID No. 3495 | 912536 | 912539 | 913645 | Seq. ID No. 3496 |
| 1689a | Seq. ID No. 3497 | 913587 | 913638 | 914393 | Seq. ID No. 3498 |
| 1689b | Seq. ID No. 3499 | 913587 | 913602 | 914393 | Seq. ID No. 3500 |
| 1689c | Seq. ID No. 3501 | 913587 | 913596 | 914393 | Seq. ID No. 3502 |
| 1690a | Seq. ID No. 3503 | 914420 | 914993 | 915481 | Seq. ID No. 3504 |
| 1690b | Seq. ID No. 3505 | 914420 | 914423 | 915481 | Seq. ID No. 3506 |
| 1691 | Seq. ID No. 3507 | 915482 | 915497 | 916570 | Seq. ID No. 3508 |
| 1692 | Seq. ID No. 3509 | 916577 | 916586 | 917389 | Seq. ID No. 3510 |
| 1693 | Seq. ID No. 3511 | 917802 | 917814 | 919235 | Seq. ID No. 3512 |
| 1694a | Seq. ID No. 3513 | 919415 | 919634 | 920410 | Seq. ID No. 3514 |
| 1694b | Seq. ID No. 3515 | 919415 | 919559 | 920410 | Seq. ID No. 3516 |
| 1694c | Seq. ID No. 3517 | 919415 | 919424 | 920410 | Seq. ID No. 3518 |
| 1694d | Seq. ID No. 3519 | 919415 | 919415 | 920410 | Seq. ID No. 3520 |
| 1696 | Seq. ID No. 3521 | 920424 | 920427 | 921608 | Seq. ID No. 3522 |
| 1697a | Seq. ID No. 3523 | 921701 | 921848 | 922666 | Seq. ID No. 3524 |
| 1697b | Seq. ID No. 3525 | 921701 | 921710 | 922666 | Seq. ID No. 3526 |
| 1699a | Seq. ID No. 3527 | 922706 | 923171 | 924190 | Seq. ID No. 3528 |
| 1699b | Seq. ID No. 3529 | 922706 | 922706 | 924190 | Seq. ID No. 3530 |
| 1700a | Seq. ID No. 3531 | 924300 | 924342 | 924713 | Seq. ID No. 3532 |
| 1700b | Seq. ID No. 3533 | 924300 | 924303 | 924713 | Seq. ID No. 3534 |
| 1701a | Seq. ID No. 3535 | 925996 | 925984 | 924812 | Seq. ID No. 3536 |
| 1701b | Seq. ID No. 3537 | 925996 | 925987 | 924812 | Seq. ID No. 3538 |
| 1703b | Seq. ID No. 3539 | 924930 | 924948 | 925280 | Seq. ID No. 3540 |
| 1704a | Seq. ID No. 3541 | 926230 | 926311 | 926853 | Seq. ID No. 3542 |
| 1704b | Seq. ID No. 3543 | 926230 | 926239 | 926853 | Seq. ID No. 3544 |
| 1705a | Seq. ID No. 3545 | 927259 | 927289 | 927513 | Seq. ID No. 3546 |
| 1705b | Seq. ID No. 3547 | 927259 | 927283 | 927513 | Seq. ID No. 3548 |
| 1706 | Seq. ID No. 3549 | 926847 | 926850 | 927800 | Seq. ID No. 3550 |
| 1707a | Seq. ID No. 3551 | 928874 | 928865 | 928023 | Seq. ID No. 3552 |
| 1707b | Seq. ID No. 3553 | 928874 | 928868 | 928023 | Seq. ID No. 3554 |
| 1708 | Seq. ID No. 3555 | 928398 | 928443 | 928799 | Seq. ID No. 3556 |
| 1709 | Seq. ID No. 3557 | 929780 | 929798 | 930049 | Seq. ID No. 3558 |
| 1710a | Seq. ID No. 3559 | 929083 | 929158 | 930066 | Seq. ID No. 3560 |
| 1710b | Seq. ID No. 3561 | 929083 | 929098 | 930066 | Seq. ID No. 3562 |
| 1712a | Seq. ID No. 3563 | 930274 | 930283 | 931269 | Seq. ID No. 3564 |
| 1712b | Seq. ID No. 3565 | 930274 | 930277 | 931269 | Seq. ID No. 3566 |
| 1715a | Seq. ID No. 3567 | 931778 | 931790 | 932497 | Seq. ID No. 3568 |
| 1715b | Seq. ID No. 3569 | 931778 | 931787 | 932497 | Seq. ID No. 3570 |
| 1718a | Seq. ID No. 3571 | 932926 | 932998 | 933222 | Seq. ID No. 3572 |
| 1718b | Seq. ID No. 3573 | 932926 | 932956 | 933222 | Seq. ID No. 3574 |
| 1722 | Seq. ID No. 3575 | 932562 | 932577 | 936251 | Seq. ID No. 3576 |
| 1723a | Seq. ID No. 3577 | 936220 | 936388 | 937206 | Seq. ID No. 3578 |
| 1723b | Seq. ID No. 3579 | 936220 | 936226 | 937206 | Seq. ID No. 3580 |
| 1724 | Seq. ID No. 3581 | 937832 | 937808 | 937542 | Seq. ID No. 3582 |
| 1727 | Seq. ID No. 3583 | 937230 | 937248 | 938735 | Seq. ID No. 3584 |
| 1728 | Seq. ID No. 3585 | 938736 | 938766 | 939101 | Seq. ID No. 3586 |
| 1731 | Seq. ID No. 3587 | 940559 | 940523 | 940092 | Seq. ID No. 3588 |
| 1733 | Seq. ID No. 3589 | 939109 | 939109 | 940608 | Seq. ID No. 3590 |
| 1734 | Seq. ID No. 3591 | 940535 | 940625 | 940846 | Seq. ID No. 3592 |
| 1735a | Seq. ID No. 3593 | 941618 | 941300 | 940989 | Seq. ID No. 3594 |
| 1735b | Seq. ID No. 3595 | 941618 | 941555 | 940989 | Seq. ID No. 3596 |
| 1737a | Seq. ID No. 3597 | 941044 | 941542 | 945477 | Seq. ID No. 3598 |
| 1737b | Seq. ID No. 3599 | 941044 | 941326 | 945477 | Seq. ID No. 3600 |
| 1738a | Seq. ID No. 3601 | 945878 | 946205 | 946741 | Seq. ID No. 3602 |
| 1738b | Seq. ID No. 3603 | 945878 | 945977 | 946741 | Seq. ID No. 3604 |
| 1738c | Seq. ID No. 3605 | 945878 | 945908 | 946741 | Seq. ID No. 3606 |
| 1739 | Seq. ID No. 3607 | 946742 | 946859 | 947188 | Seq. ID No. 3608 |
| 1741 | Seq. ID No. 3609 | 947264 | 947297 | 948463 | Seq. ID No. 3610 |
| 1743 | Seq. ID No. 3611 | 949075 | 949111 | 950652 | Seq. ID No. 3612 |
| 1744a | Seq. ID No. 3613 | 950653 | 951049 | 951951 | Seq. ID No. 3614 |
| 1744b | Seq. ID No. 3615 | 950653 | 950716 | 951951 | Seq. ID No. 3616 |
| 1745 | Seq. ID No. 3617 | 952788 | 952791 | 953084 | Seq. ID No. 3618 |
| 1747 | Seq. ID No. 3619 | 952652 | 952664 | 954949 | Seq. ID No. 3620 |
| 1749a | Seq. ID No. 3621 | 957393 | 957060 | 956695 | Seq. ID No. 3622 |
| 1749b | Seq. ID No. 3623 | 957393 | 957297 | 956695 | Seq. ID No. 3624 |
| 1750a | Seq. ID No. 3625 | 957380 | 957347 | 957060 | Seq. ID No. 3626 |
| 1752a | Seq. ID No. 3627 | 955633 | 956623 | 957144 | Seq. ID No. 3628 |
| 1752b | Seq. ID No. 3629 | 955633 | 955708 | 957144 | Seq. ID No. 3630 |
| 1753 | Seq. ID No. 3631 | 957145 | 957193 | 957429 | Seq. ID No. 3632 |
| 1756a | Seq. ID No. 3633 | 957791 | 957923 | 958780 | Seq. ID No. 3634 |
| 1756b | Seq. ID No. 3635 | 957791 | 957803 | 958780 | Seq. ID No. 3636 |
| 1757a | Seq. ID No. 3637 | 959675 | 959477 | 958860 | Seq. ID No. 3638 |
| 1757b | Seq. ID No. 3639 | 959675 | 959555 | 958860 | Seq. ID No. 3640 |
| 1759 | Seq. ID No. 3641 | 959662 | 959665 | 959976 | Seq. ID No. 3642 |
| 1760 | Seq. ID No. 3643 | 959998 | 960001 | 960330 | Seq. ID No. 3644 |
| 1762 | Seq. ID No. 3645 | 960400 | 960412 | 960936 | Seq. ID No. 3646 |
| 1764a | Seq. ID No. 3647 | 960937 | 960970 | 961668 | Seq. ID No. 3648 |
| 1764b | Seq. ID No. 3649 | 960937 | 960952 | 961668 | Seq. ID No. 3650 |
| 1764c | Seq. ID No. 3651 | 960937 | 960937 | 961668 | Seq. ID No. 3652 |
| 1765 | Seq. ID No. 3653 | 962620 | 962575 | 961790 | Seq. ID No. 3654 |
| 1766 | Seq. ID No. 3655 | 962761 | 962761 | 962645 | Seq. ID No. 3656 |
| 1767a | Seq. ID No. 3657 | 963674 | 963638 | 962793 | Seq. ID No. 3658 |
| 1767b | Seq. ID No. 3659 | 963674 | 963671 | 962793 | Seq. ID No. 3660 |
| 1769a | Seq. ID No. 3661 | 963809 | 964073 | 964522 | Seq. ID No. 3662 |
| 1769b | Seq. ID No. 3663 | 963809 | 963842 | 964522 | Seq. ID No. 3664 |
| 1771 | Seq. ID No. 3665 | 964635 | 964641 | 965921 | Seq. ID No. 3666 |
| 1773 | Seq. ID No. 3667 | 965922 | 965931 | 966497 | Seq. ID No. 3668 |
| 1774 | Seq. ID No. 3669 | 966556 | 966556 | 966882 | Seq. ID No. 3670 |
| 1775a | Seq. ID No. 3671 | 966897 | 967200 | 968219 | Seq. ID No. 3672 |
| 1775b | Seq. ID No. 3673 | 966897 | 967089 | 968219 | Seq. ID No. 3674 |
| 1775c | Seq. ID No. 3675 | 966897 | 966909 | 968219 | Seq. ID No. 3676 |
| 1778a | Seq. ID No. 3677 | 970818 | 970803 | 970543 | Seq. ID No. 3678 |
| 1778b | Seq. ID No. 3679 | 970818 | 970812 | 970543 | Seq. ID No. 3680 |
| 1780 | Seq. ID No. 3681 | 968216 | 968234 | 971017 | Seq. ID No. 3682 |
| 1783a | Seq. ID No. 3683 | 972121 | 972085 | 971618 | Seq. ID No. 3684 |
| 1783b | Seq. ID No. 3685 | 972121 | 972103 | 971618 | Seq. ID No. 3686 |
| 1784a | Seq. ID No. 3687 | 971018 | 971165 | 971623 | Seq. ID No. 3688 |
| 1784b | Seq. ID No. 3689 | 971018 | 971144 | 971623 | Seq. ID No. 3690 |
| 1788a | Seq. ID No. 3691 | 971657 | 972002 | 972955 | Seq. ID No. 3692 |
| 1788b | Seq. ID No. 3693 | 971657 | 971762 | 972955 | Seq. ID No. 3694 |
| 1788c | Seq. ID No. 3695 | 971657 | 971660 | 972955 | Seq. ID No. 3696 |
| 1789a | Seq. ID No. 3697 | 973047 | 973068 | 973802 | Seq. ID No. 3698 |
| 1789b | Seq. ID No. 3699 | 973047 | 973065 | 973802 | Seq. ID No. 3700 |
| 1790a | Seq. ID No. 3701 | 974447 | 974363 | 974136 | Seq. ID No. 3702 |
| 1790b | Seq. ID No. 3703 | 974447 | 974393 | 974136 | Seq. ID No. 3704 |
| 1792a | Seq. ID No. 3705 | 973813 | 973930 | 974529 | Seq. ID No. 3706 |
| 1792b | Seq. ID No. 3707 | 973813 | 973918 | 974529 | Seq. ID No. 3708 |
| 1792c | Seq. ID No. 3709 | 973813 | 973882 | 974529 | Seq. ID No. 3710 |
| 1793a | Seq. ID No. 3711 | 976354 | 976111 | 974645 | Seq. ID No. 3712 |
| 1793b | Seq. ID No. 3713 | 976354 | 976339 | 974645 | Seq. ID No. 3714 |
| 1793c | Seq. ID No. 3715 | 976354 | 976348 | 974645 | Seq. ID No. 3716 |
| 1794a | Seq. ID No. 3717 | 974942 | 975002 | 975253 | Seq. ID No. 3718 |
| 1797a | Seq. ID No. 3719 | 976552 | 976615 | 977007 | Seq. ID No. 3720 |
| 1797b | Seq. ID No. 3721 | 976552 | 976576 | 977007 | Seq. ID No. 3722 |
| 1798a | Seq. ID No. 3723 | 977119 | 977431 | 977703 | Seq. ID No. 3724 |
| 1798b | Seq. ID No. 3725 | 977119 | 977155 | 977703 | Seq. ID No. 3726 |
| 1798c | Seq. ID No. 3727 | 977119 | 977119 | 977703 | Seq. ID No. 3728 |
| 1800 | Seq. ID No. 3729 | 977713 | 977731 | 978411 | Seq. ID No. 3730 |
| 1802a | Seq. ID No. 3731 | 978665 | 978695 | 979249 | Seq. ID No. 3732 |
| 1802b | Seq. ID No. 3733 | 978665 | 978674 | 979249 | Seq. ID No. 3734 |
| 1803 | Seq. ID No. 3735 | 979246 | 979252 | 979512 | Seq. ID No. 3736 |
| 1804a | Seq. ID No. 3737 | 979506 | 979521 | 979817 | Seq. ID No. 3738 |
| 1804b | Seq. ID No. 3739 | 979506 | 979512 | 979817 | Seq. ID No. 3740 |
| 1805 | Seq. ID No. 3741 | 979818 | 979821 | 980378 | Seq. ID No. 3742 |
| 1806a | Seq. ID No. 3743 | 980320 | 980392 | 981078 | Seq. ID No. 3744 |
| 1806b | Seq. ID No. 3745 | 980320 | 980371 | 981078 | Seq. ID No. 3746 |
| 1806c | Seq. ID No. 3747 | 980320 | 980338 | 981078 | Seq. ID No. 3748 |
| 1807a | Seq. ID No. 3749 | 981100 | 981109 | 981456 | Seq. ID No. 3750 |
| 1807b | Seq. ID No. 3751 | 981100 | 981100 | 981456 | Seq. ID No. 3752 |
| 1808a | Seq. ID No. 3753 | 981441 | 982707 | 983054 | Seq. ID No. 3754 |
| 1808b | Seq. ID No. 3755 | 981441 | 982521 | 983054 | Seq. ID No. 3756 |
| 1808c | Seq. ID No. 3757 | 981441 | 982008 | 983054 | Seq. ID No. 3758 |
| 1808d | Seq. ID No. 3759 | 981441 | 981453 | 983054 | Seq. ID No. 3760 |
| 1809a | Seq. ID No. 3761 | 983069 | 984152 | 984700 | Seq. ID No. 3762 |
| 1809b | Seq. ID No. 3763 | 983069 | 983858 | 984700 | Seq. ID No. 3764 |
| 1809c | Seq. ID No. 3765 | 983069 | 983705 | 984700 | Seq. ID No. 3766 |
| 1809d | Seq. ID No. 3767 | 983069 | 983258 | 984700 | Seq. ID No. 3768 |
| 1809e | Seq. ID No. 3769 | 983069 | 983093 | 984700 | Seq. ID No. 3770 |
| 1809f | Seq. ID No. 3771 | 983069 | 983090 | 984700 | Seq. ID No. 3772 |
| 1810a | Seq. ID No. 3773 | 984753 | 984786 | 985220 | Seq. ID No. 3774 |
| 1810b | Seq. ID No. 3775 | 984753 | 984777 | 985220 | Seq. ID No. 3776 |
| 1811a | Seq. ID No. 3777 | 985498 | 985525 | 986454 | Seq. ID No. 3778 |
| 1811b | Seq. ID No. 3779 | 985498 | 985504 | 986454 | Seq. ID No. 3780 |
| 1812a | Seq. ID No. 3781 | 986785 | 986863 | 987144 | Seq. ID No. 3782 |
| 1812b | Seq. ID No. 3783 | 986785 | 986821 | 987144 | Seq. ID No. 3784 |
| 1813 | Seq. ID No. 3785 | 987852 | 987849 | 987478 | Seq. ID No. 3786 |
| 1815a | Seq. ID No. 3787 | 988694 | 988457 | 988041 | Seq. ID No. 3788 |
| 1815b | Seq. ID No. 3789 | 988694 | 988541 | 988041 | Seq. ID No. 3790 |
| 1815c | Seq. ID No. 3791 | 988694 | 988565 | 988041 | Seq. ID No. 3792 |
| 1816a | Seq. ID No. 3793 | 990681 | 990537 | 988399 | Seq. ID No. 3794 |
| 1816b | Seq. ID No. 3795 | 990681 | 990672 | 988399 | Seq. ID No. 3796 |
| 1816c | Seq. ID No. 3797 | 990681 | 990675 | 988399 | Seq. ID No. 3798 |
| 1817a | Seq. ID No. 3799 | 988113 | 988182 | 988472 | Seq. ID No. 3800 |
| 1819a | Seq. ID No. 3801 | 991399 | 991240 | 990737 | Seq. ID No. 3802 |
| 1819b | Seq. ID No. 3803 | 991399 | 991372 | 990737 | Seq. ID No. 3804 |
| 1821 | Seq. ID No. 3805 | 991399 | 991462 | 992019 | Seq. ID No. 3806 |
| 1822 | Seq. ID No. 3807 | 992670 | 992622 | 992392 | Seq. ID No. 3808 |
| 1823a | Seq. ID No. 3809 | 992081 | 992093 | 992791 | Seq. ID No. 3810 |
| 1823b | Seq. ID No. 3811 | 992081 | 992084 | 992791 | Seq. ID No. 3812 |
| 1825 | Seq. ID No. 3813 | 993363 | 993384 | 993830 | Seq. ID No. 3814 |
| 1826a | Seq. ID No. 3815 | 994009 | 994021 | 994287 | Seq. ID No. 3816 |
| 1826b | Seq. ID No. 3817 | 994009 | 994015 | 994287 | Seq. ID No. 3818 |
| 1828 | Seq. ID No. 3819 | 993831 | 993834 | 994970 | Seq. ID No. 3820 |
| 1830a | Seq. ID No. 3821 | 995061 | 995355 | 995987 | Seq. ID No. 3822 |
| 1830b | Seq. ID No. 3823 | 995061 | 995127 | 995987 | Seq. ID No. 3824 |
| 1833 | Seq. ID No. 3825 | 996148 | 996148 | 997719 | Seq. ID No. 3826 |
| 1834 | Seq. ID No. 3827 | 998067 | 998067 | 997864 | Seq. ID No. 3828 |
| 1835 | Seq. ID No. 3829 | 998280 | 998280 | 998462 | Seq. ID No. 3830 |
| 1836a | Seq. ID No. 3831 | 998407 | 998452 | 999252 | Seq. ID No. 3832 |
| 1836b | Seq. ID No. 3833 | 998407 | 998437 | 999252 | Seq. ID No. 3834 |
| 1837 | Seq. ID No. 3835 | 999249 | 999264 | 999962 | Seq. ID No. 3836 |
| 1838a | Seq. ID No. 3837 | 999984 | 1000437 | 1001729 | Seq. ID No. 3838 |
| 1838b | Seq. ID No. 3839 | 999984 | 1000410 | 1001729 | Seq. ID No. 3840 |
| 1838c | Seq. ID No. 3841 | 999984 | 1000026 | 1001729 | Seq. ID No. 3842 |
| 1838d | Seq. ID No. 3843 | 999984 | 999993 | 1001729 | Seq. ID No. 3844 |
| 1839a | Seq. ID No. 3845 | 1001786 | 1001882 | 1002862 | Seq. ID No. 3846 |
| 1839b | Seq. ID No. 3847 | 1001786 | 1001852 | 1002862 | Seq. ID No. 3848 |
| 1842a | Seq. ID No. 3849 | 1003007 | 1004168 | 1004401 | Seq. ID No. 3850 |
| 1842b | Seq. ID No. 3851 | 1003007 | 1003763 | 1004401 | Seq. ID No. 3852 |
| 1842c | Seq. ID No. 3853 | 1003007 | 1003511 | 1004401 | Seq. ID No. 3854 |
| 1842d | Seq. ID No. 3855 | 1003007 | 1003013 | 1004401 | Seq. ID No. 3856 |
| 1843 | Seq. ID No. 3857 | 1004418 | 1004421 | 1005749 | Seq. ID No. 3858 |
| 1845a | Seq. ID No. 3859 | 1008055 | 1007122 | 1006469 | Seq. ID No. 3860 |
| 1845b | Seq. ID No. 3861 | 1008055 | 1007620 | 1006469 | Seq. ID No. 3862 |
| 1845c | Seq. ID No. 3863 | 1008055 | 1008037 | 1006469 | Seq. ID No. 3864 |
| 1848a | Seq. ID No. 3865 | 1009315 | 1009012 | 1008188 | Seq. ID No. 3866 |
| 1848b | Seq. ID No. 3867 | 1009315 | 1009315 | 1008188 | Seq. ID No. 3868 |
| 1850a | Seq. ID No. 3869 | 1009477 | 1009501 | 1010796 | Seq. ID No. 3870 |
| 1850b | Seq. ID No. 3871 | 1009477 | 1009495 | 1010796 | Seq. ID No. 3872 |
| 1850c | Seq. ID No. 3873 | 1009477 | 1009486 | 1010796 | Seq. ID No. 3874 |
| 1853a | Seq. ID No. 3875 | 1010827 | 1010860 | 1011777 | Seq. ID No. 3876 |
| 1853b | Seq. ID No. 3877 | 1010827 | 1010830 | 1011777 | Seq. ID No. 3878 |
| 1854a | Seq. ID No. 3879 | 1011872 | 1011941 | 1012564 | Seq. ID No. 3880 |
| 1854b | Seq. ID No. 3881 | 1011872 | 1011875 | 1012564 | Seq. ID No. 3882 |
| 1855 | Seq. ID No. 3883 | 1012793 | 1012808 | 1013707 | Seq. ID No. 3884 |
| 1856 | Seq. ID No. 3885 | 1013934 | 1014024 | 1014491 | Seq. ID No. 3886 |
| 1857a | Seq. ID No. 3887 | 1016563 | 1015273 | 1014593 | Seq. ID No. 3888 |
| 1857b | Seq. ID No. 3889 | 1016563 | 1016080 | 1014593 | Seq. ID No. 3890 |
| 1857c | Seq. ID No. 3891 | 1016563 | 1016137 | 1014593 | Seq. ID No. 3892 |
| 1857d | Seq. ID No. 3893 | 1016563 | 1016536 | 1014593 | Seq. ID No. 3894 |
| 1858 | Seq. ID No. 3895 | 1015131 | 1015131 | 1014907 | Seq. ID No. 3896 |
| 1859 | Seq. ID No. 3897 | 1016974 | 1016971 | 1016564 | Seq. ID No. 3898 |
| 1861a | Seq. ID No. 3899 | 1017158 | 1017200 | 1019077 | Seq. ID No. 3900 |
| 1861b | Seq. ID No. 3901 | 1017158 | 1017173 | 1019077 | Seq. ID No. 3902 |
| 1862a | Seq. ID No. 3903 | 1019736 | 1019589 | 1019356 | Seq. ID No. 3904 |
| 1863a | Seq. ID No. 3905 | 1019023 | 1019089 | 1019583 | Seq. ID No. 3906 |
| 1863b | Seq. ID No. 3907 | 1019023 | 1019050 | 1019583 | Seq. ID No. 3908 |
| 1864a | Seq. ID No. 3909 | 1019384 | 1019564 | 1019725 | Seq. ID No. 3910 |
| 1865a | Seq. ID No. 3911 | 1020661 | 1020484 | 1019975 | Seq. ID No. 3912 |
| 1865b | Seq. ID No. 3913 | 1020661 | 1020583 | 1019975 | Seq. ID No. 3914 |
| 1868 | Seq. ID No. 3915 | 1020702 | 1020720 | 1021364 | Seq. ID No. 3916 |
| 1869 | Seq. ID No. 3917 | 1021387 | 1021423 | 1021665 | Seq. ID No. 3918 |
| 1870 | Seq. ID No. 3919 | 1021696 | 1021726 | 1022442 | Seq. ID No. 3920 |
| 1873a | Seq. ID No. 3921 | 1022670 | 1022817 | 1024157 | Seq. ID No. 3922 |
| 1873b | Seq. ID No. 3923 | 1022670 | 1022691 | 1024157 | Seq. ID No. 3924 |
| 1873c | Seq. ID No. 3925 | 1022670 | 1022685 | 1024157 | Seq. ID No. 3926 |
| 1875b | Seq. ID No. 3927 | 1024158 | 1024332 | 1024784 | Seq. ID No. 3928 |
| 1875c | Seq. ID No. 3929 | 1024158 | 1024176 | 1024784 | Seq. ID No. 3930 |
| 1877a | Seq. ID No. 3931 | 1024785 | 1024875 | 1025720 | Seq. ID No. 3932 |
| 1877b | Seq. ID No. 3933 | 1024785 | 1024839 | 1025720 | Seq. ID No. 3934 |
| 1878 | Seq. ID No. 3935 | 1025721 | 1025727 | 1026500 | Seq. ID No. 3936 |
| 1879 | Seq. ID No. 3937 | 1026737 | 1026746 | 1027618 | Seq. ID No. 3938 |
| 1882 | Seq. ID No. 3939 | 1029775 | 1029730 | 1029149 | Seq. ID No. 3940 |
| 1884 | Seq. ID No. 3941 | 1027658 | 1027664 | 1029772 | Seq. ID No. 3942 |
| 1886 | Seq. ID No. 3943 | 1030310 | 1030322 | 1031617 | Seq. ID No. 3944 |
| 1887 | Seq. ID No. 3945 | 1032244 | 1032274 | 1033614 | Seq. ID No. 3946 |
| 1888a | Seq. ID No. 3947 | 1033590 | 1033638 | 1034795 | Seq. ID No. 3948 |
| 1888b | Seq. ID No. 3949 | 1033590 | 1033605 | 1034795 | Seq. ID No. 3950 |
| 1890 | Seq. ID No. 3951 | 1035321 | 1035333 | 1036628 | Seq. ID No. 3952 |
| 1891a | Seq. ID No. 3953 | 1036778 | 1036790 | 1037686 | Seq. ID No. 3954 |
| 1891b | Seq. ID No. 3955 | 1036778 | 1036781 | 1037686 | Seq. ID No. 3956 |
| 1893 | Seq. ID No. 3957 | 1037696 | 1037708 | 1038250 | Seq. ID No. 3958 |
| 1894c | Seq. ID No. 3959 | 1039058 | 1039037 | 1038525 | Seq. ID No. 3960 |
| 1895 | Seq. ID No. 3961 | 1039206 | 1039179 | 1038955 | Seq. ID No. 3962 |
| 1896a | Seq. ID No. 3963 | 1039673 | 1039535 | 1039275 | Seq. ID No. 3964 |
| 1896b | Seq. ID No. 3965 | 1039673 | 1039670 | 1039275 | Seq. ID No. 3966 |
| 1897a | Seq. ID No. 3967 | 1038235 | 1038385 | 1039677 | Seq. ID No. 3968 |
| 1897b | Seq. ID No. 3969 | 1038235 | 1038367 | 1039677 | Seq. ID No. 3970 |
| 1897c | Seq. ID No. 3971 | 1038235 | 1038247 | 1039677 | Seq. ID No. 3972 |
| 1898a | Seq. ID No. 3973 | 1040455 | 1040092 | 1039814 | Seq. ID No. 3974 |
| 1898b | Seq. ID No. 3975 | 1040455 | 1040443 | 1039814 | Seq. ID No. 3976 |
| 1899 | Seq. ID No. 3977 | 1039856 | 1039856 | 1039984 | Seq. ID No. 3978 |
| 1900 | Seq. ID No. 3979 | 1040697 | 1040739 | 1041041 | Seq. ID No. 3980 |
| 1902a | Seq. ID No. 3981 | 1040639 | 1040720 | 1042606 | Seq. ID No. 3982 |
| 1902b | Seq. ID No. 3983 | 1040639 | 1040645 | 1042606 | Seq. ID No. 3984 |
| 1907 | Seq. ID No. 3985 | 1042729 | 1042732 | 1045191 | Seq. ID No. 3986 |
| 1912 | Seq. ID No. 3987 | 1045328 | 1045331 | 1047583 | Seq. ID No. 3988 |
| 1915a | Seq. ID No. 3989 | 1047614 | 1047626 | 1048372 | Seq. ID No. 3990 |
| 1915b | Seq. ID No. 3991 | 1047614 | 1047620 | 1048372 | Seq. ID No. 3992 |
| 1916 | Seq. ID No. 3993 | 1048741 | 1048741 | 1048932 | Seq. ID No. 3994 |
| 1917a | Seq. ID No. 3995 | 1049809 | 1049785 | 1049450 | Seq. ID No. 3996 |
| 1917b | Seq. ID No. 3997 | 1049809 | 1049806 | 1049450 | Seq. ID No. 3998 |
| 1918b | Seq. ID No. 3999 | 1049037 | 1049160 | 1049855 | Seq. ID No. 4000 |
| 1918c | Seq. ID No. 4001 | 1049037 | 1049073 | 1049855 | Seq. ID No. 4002 |
| 1918d | Seq. ID No. 4003 | 1049037 | 1049058 | 1049855 | Seq. ID No. 4004 |
| 1919a | Seq. ID No. 4005 | 1050015 | 1050093 | 1050395 | Seq. ID No. 4006 |
| 1919b | Seq. ID No. 4007 | 1050015 | 1050060 | 1050395 | Seq. ID No. 4008 |
| 1919c | Seq. ID No. 4009 | 1050015 | 1050033 | 1050395 | Seq. ID No. 4010 |
| 1923a | Seq. ID No. 4011 | 1050906 | 1050942 | 1051274 | Seq. ID No. 4012 |
| 1923b | Seq. ID No. 4013 | 1050906 | 1050921 | 1051274 | Seq. ID No. 4014 |
| 1925 | Seq. ID No. 4015 | 1051259 | 1051301 | 1053043 | Seq. ID No. 4016 |
| 1926 | Seq. ID No. 4017 | 1056054 | 1056039 | 1053739 | Seq. ID No. 4018 |
| 1927a | Seq. ID No. 4019 | 1057220 | 1056728 | 1056186 | Seq. ID No. 4020 |
| 1927b | Seq. ID No. 4021 | 1057220 | 1057217 | 1056186 | Seq. ID No. 4022 |
| 1930 | Seq. ID No. 4023 | 1057377 | 1057383 | 1058411 | Seq. ID No. 4024 |
| 1931a | Seq. ID No. 4025 | 1059508 | 1058830 | 1058501 | Seq. ID No. 4026 |
| 1931b | Seq. ID No. 4027 | 1059508 | 1058938 | 1058501 | Seq. ID No. 4028 |
| 1931c | Seq. ID No. 4029 | 1059508 | 1059370 | 1058501 | Seq. ID No. 4030 |
| 1932 | Seq. ID No. 4031 | 1059744 | 1059726 | 1059454 | Seq. ID No. 4032 |
| 1933a | Seq. ID No. 4033 | 1060398 | 1060266 | 1059748 | Seq. ID No. 4034 |
| 1933b | Seq. ID No. 4035 | 1060398 | 1060398 | 1059748 | Seq. ID No. 4036 |
| 1934 | Seq. ID No. 4037 | 1061142 | 1061124 | 1060399 | Seq. ID No. 4038 |
| 1936 | Seq. ID No. 4039 | 1062327 | 1062327 | 1061245 | Seq. ID No. 4040 |
| 1937a | Seq. ID No. 4041 | 1063629 | 1062585 | 1062328 | Seq. ID No. 4042 |
| 1937b | Seq. ID No. 4043 | 1063629 | 1062750 | 1062328 | Seq. ID No. 4044 |
| 1937c | Seq. ID No. 4045 | 1063629 | 1062804 | 1062328 | Seq. ID No. 4046 |
| 1937d | Seq. ID No. 4047 | 1063629 | 1063587 | 1062328 | Seq. ID No. 4048 |
| 1937e | Seq. ID No. 4049 | 1063629 | 1063596 | 1062328 | Seq. ID No. 4050 |
| 1939a | Seq. ID No. 4051 | 1064617 | 1064539 | 1063607 | Seq. ID No. 4052 |
| 1939b | Seq. ID No. 4053 | 1064617 | 1064596 | 1063607 | Seq. ID No. 4054 |
| 1939c | Seq. ID No. 4055 | 1064617 | 1064614 | 1063607 | Seq. ID No. 4056 |
| 1940 | Seq. ID No. 4057 | 1065300 | 1065288 | 1064641 | Seq. ID No. 4058 |
| 1941a | Seq. ID No. 4059 | 1066411 | 1066216 | 1065281 | Seq. ID No. 4060 |
| 1941b | Seq. ID No. 4061 | 1066411 | 1066393 | 1065281 | Seq. ID No. 4062 |
| 1942 | Seq. ID No. 4063 | 1067113 | 1067026 | 1066649 | Seq. ID No. 4064 |
| 1943a | Seq. ID No. 4065 | 1067802 | 1067511 | 1067122 | Seq. ID No. 4066 |
| 1943b | Seq. ID No. 4067 | 1067802 | 1067544 | 1067122 | Seq. ID No. 4068 |
| 1944 | Seq. ID No. 4069 | 1067921 | 1067873 | 1067535 | Seq. ID No. 4070 |
| 1946a | Seq. ID No. 4071 | 1069576 | 1068571 | 1068113 | Seq. ID No. 4072 |
| 1946b | Seq. ID No. 4073 | 1069576 | 1069309 | 1068113 | Seq. ID No. 4074 |
| 1946c | Seq. ID No. 4075 | 1069576 | 1069570 | 1068113 | Seq. ID No. 4076 |
| 1949 | Seq. ID No. 4077 | 1069969 | 1069969 | 1069706 | Seq. ID No. 4078 |
| 1950 | Seq. ID No. 4079 | 1070524 | 1070500 | 1069970 | Seq. ID No. 4080 |
| 1951a | Seq. ID No. 4081 | 1072333 | 1072153 | 1070546 | Seq. ID No. 4082 |
| 1951b | Seq. ID No. 4083 | 1072333 | 1072267 | 1070546 | Seq. ID No. 4084 |
| 1951c | Seq. ID No. 4085 | 1072333 | 1072279 | 1070546 | Seq. ID No. 4086 |
| 1951d | Seq. ID No. 4087 | 1072333 | 1072321 | 1070546 | Seq. ID No. 4088 |
| 1953 | Seq. ID No. 4089 | 1073298 | 1073298 | 1072453 | Seq. ID No. 4090 |
| 1954a | Seq. ID No. 4091 | 1074218 | 1074092 | 1073424 | Seq. ID No. 4092 |
| 1954b | Seq. ID No. 4093 | 1074218 | 1074155 | 1073424 | Seq. ID No. 4094 |
| 1954c | Seq. ID No. 4095 | 1074218 | 1074167 | 1073424 | Seq. ID No. 4096 |
| 1956 | Seq. ID No. 4097 | 1074927 | 1074882 | 1074442 | Seq. ID No. 4098 |
| 1957 | Seq. ID No. 4099 | 1075766 | 1075754 | 1074945 | Seq. ID No. 4100 |
| 1958a | Seq. ID No. 4101 | 1076688 | 1076142 | 1075747 | Seq. ID No. 4102 |
| 1958b | Seq. ID No. 4103 | 1076688 | 1076502 | 1075747 | Seq. ID No. 4104 |
| 1958c | Seq. ID No. 4105 | 1076688 | 1076646 | 1075747 | Seq. ID No. 4106 |
| 1960a | Seq. ID No. 4107 | 1077650 | 1077386 | 1076643 | Seq. ID No. 4108 |
| 1960b | Seq. ID No. 4109 | 1077650 | 1077530 | 1076643 | Seq. ID No. 4110 |
| 1960c | Seq. ID No. 4111 | 1077650 | 1077635 | 1076643 | Seq. ID No. 4112 |
| 1961 | Seq. ID No. 4113 | 1076360 | 1076369 | 1076734 | Seq. ID No. 4114 |
| 1962a | Seq. ID No. 4115 | 1079051 | 1079006 | 1077744 | Seq. ID No. 4116 |
| 1962b | Seq. ID No. 4117 | 1079051 | 1079039 | 1077744 | Seq. ID No. 4118 |
| 1965a | Seq. ID No. 4119 | 1080385 | 1080358 | 1079804 | Seq. ID No. 4120 |
| 1965b | Seq. ID No. 4121 | 1080385 | 1080367 | 1079804 | Seq. ID No. 4122 |
| 1966 | Seq. ID No. 4123 | 1080971 | 1080932 | 1080441 | Seq. ID No. 4124 |
| 1967 | Seq. ID No. 4125 | 1081519 | 1081510 | 1081103 | Seq. ID No. 4126 |
| 1968 | Seq. ID No. 4127 | 1082563 | 1082482 | 1081568 | Seq. ID No. 4128 |
| 1969 | Seq. ID No. 4129 | 1082949 | 1082946 | 1082479 | Seq. ID No. 4130 |
| 1970a | Seq. ID No. 4131 | 1083034 | 1083196 | 1083726 | Seq. ID No. 4132 |
| 1970b | Seq. ID No. 4133 | 1083034 | 1083067 | 1083726 | Seq. ID No. 4134 |
| 1972 | Seq. ID No. 4135 | 1084033 | 1084045 | 1084338 | Seq. ID No. 4136 |
| 1973 | Seq. ID No. 4137 | 1083717 | 1083723 | 1084562 | Seq. ID No. 4138 |
| 1976 | Seq. ID No. 4139 | 1085958 | 1085958 | 1085671 | Seq. ID No. 4140 |
| 1977a | Seq. ID No. 4141 | 1084534 | 1084552 | 1085925 | Seq. ID No. 4142 |
| 1977b | Seq. ID No. 4143 | 1084534 | 1084540 | 1085925 | Seq. ID No. 4144 |
| 1977c | Seq. ID No. 4145 | 1084534 | 1084534 | 1085925 | Seq. ID No. 4146 |
| 1979a | Seq. ID No. 4147 | 1090104 | 1089960 | 1086301 | Seq. ID No. 4148 |
| 1979b | Seq. ID No. 4149 | 1090104 | 1090077 | 1086301 | Seq. ID No. 4150 |
| 1980a | Seq. ID No. 4151 | 1088858 | 1088837 | 1088577 | Seq. ID No. 4152 |
| 1980b | Seq. ID No. 4153 | 1088858 | 1088855 | 1088577 | Seq. ID No. 4154 |
| 1981 | Seq. ID No. 4155 | 1089710 | 1089743 | 1090015 | Seq. ID No. 4156 |
| 1982 | Seq. ID No. 4157 | 1093702 | 1093678 | 1090049 | Seq. ID No. 4158 |
| 1985a | Seq. ID No. 4159 | 1095093 | 1094937 | 1093696 | Seq. ID No. 4160 |
| 1985b | Seq. ID No. 4161 | 1095093 | 1095036 | 1093696 | Seq. ID No. 4162 |
| 1986 | Seq. ID No. 4163 | 1096130 | 1096085 | 1094955 | Seq. ID No. 4164 |
| 1987a | Seq. ID No. 4165 | 1096803 | 1096599 | 1096072 | Seq. ID No. 4166 |
| 1987b | Seq. ID No. 4167 | 1096803 | 1096779 | 1096072 | Seq. ID No. 4168 |
| 1989a | Seq. ID No. 4169 | 1097597 | 1097564 | 1096920 | Seq. ID No. 4170 |
| 1989b | Seq. ID No. 4171 | 1097597 | 1097585 | 1096920 | Seq. ID No. 4172 |
| 1989c | Seq. ID No. 4173 | 1097597 | 1097588 | 1096920 | Seq. ID No. 4174 |
| 1990a | Seq. ID No. 4175 | 1098801 | 1098660 | 1097689 | Seq. ID No. 4176 |
| 1990b | Seq. ID No. 4177 | 1098801 | 1098744 | 1097689 | Seq. ID No. 4178 |
| 1990c | Seq. ID No. 4179 | 1098801 | 1098798 | 1097689 | Seq. ID No. 4180 |
| 1991 | Seq. ID No. 4181 | 1098269 | 1098332 | 1098715 | Seq. ID No. 4182 |
| 1992a | Seq. ID No. 4183 | 1100670 | 1100409 | 1098817 | Seq. ID No. 4184 |
| 1992b | Seq. ID No. 4185 | 1100670 | 1100670 | 1098817 | Seq. ID No. 4186 |
| 1993a | Seq. ID No. 4187 | 1103997 | 1103709 | 1100698 | Seq. ID No. 4188 |
| 1993b | Seq. ID No. 4189 | 1103997 | 1103943 | 1100698 | Seq. ID No. 4190 |
| 1993c | Seq. ID No. 4191 | 1103997 | 1103985 | 1100698 | Seq. ID No. 4192 |
| 1996 | Seq. ID No. 4193 | 1106269 | 1106263 | 1104185 | Seq. ID No. 4194 |
| 2000 | Seq. ID No. 4195 | 1107254 | 1107176 | 1106244 | Seq. ID No. 4196 |
| 2001 | Seq. ID No. 4197 | 1108224 | 1108203 | 1107433 | Seq. ID No. 4198 |
| 2003 | Seq. ID No. 4199 | 1109198 | 1109144 | 1108212 | Seq. ID No. 4200 |
| 2006 | Seq. ID No. 4201 | 1109556 | 1109550 | 1109131 | Seq. ID No. 4202 |
| 2008 | Seq. ID No. 4203 | 1109960 | 1109942 | 1109565 | Seq. ID No. 4204 |
| 2010 | Seq. ID No. 4205 | 1110423 | 1110420 | 1109926 | Seq. ID No. 4206 |
| 2011a | Seq. ID No. 4207 | 1111515 | 1111290 | 1110424 | Seq. ID No. 4208 |
| 2011b | Seq. ID No. 4209 | 1111515 | 1111335 | 1110424 | Seq. ID No. 4210 |
| 2011c | Seq. ID No. 4211 | 1111515 | 1111476 | 1110424 | Seq. ID No. 4212 |
| 2013a | Seq. ID No. 4213 | 1112031 | 1111983 | 1111570 | Seq. ID No. 4214 |
| 2013b | Seq. ID No. 4215 | 1112031 | 1112013 | 1111570 | Seq. ID No. 4216 |
| 2014c | Seq. ID No. 4217 | 1112923 | 1112905 | 1112459 | Seq. ID No. 4218 |
| 2015 | Seq. ID No. 4219 | 1112955 | 1112988 | 1113797 | Seq. ID No. 4220 |
| 2016a | Seq. ID No. 4221 | 1115435 | 1114151 | 1113879 | Seq. ID No. 4222 |
| 2016b | Seq. ID No. 4223 | 1115435 | 1114319 | 1113879 | Seq. ID No. 4224 |
| 2016c | Seq. ID No. 4225 | 1115435 | 1114655 | 1113879 | Seq. ID No. 4226 |
| 2016d | Seq. ID No. 4227 | 1115435 | 1115117 | 1113879 | Seq. ID No. 4228 |
| 2016e | Seq. ID No. 4229 | 1115435 | 1115213 | 1113879 | Seq. ID No. 4230 |
| 2016f | Seq. ID No. 4231 | 1115435 | 1115306 | 1113879 | Seq. ID No. 4232 |
| 2016g | Seq. ID No. 4233 | 1115435 | 1115360 | 1113879 | Seq. ID No. 4234 |
| 2016h | Seq. ID No. 4235 | 1115435 | 1115390 | 1113879 | Seq. ID No. 4236 |
| 2020 | Seq. ID No. 4237 | 1115867 | 1115864 | 1115451 | Seq. ID No. 4238 |
| 2021 | Seq. ID No. 4239 | 1116881 | 1116842 | 1115868 | Seq. ID No. 4240 |
| 2023a | Seq. ID No. 4241 | 1117636 | 1117222 | 1116860 | Seq. ID No. 4242 |
| 2023b | Seq. ID No. 4243 | 1117636 | 1117546 | 1116860 | Seq. ID No. 4244 |
| 2024a | Seq. ID No. 4245 | 1120274 | 1120019 | 1117974 | Seq. ID No. 4246 |
| 2024b | Seq. ID No. 4247 | 1120274 | 1120139 | 1117974 | Seq. ID No. 4248 |
| 2024c | Seq. ID No. 4249 | 1120274 | 1120199 | 1117974 | Seq. ID No. 4250 |
| 2024d | Seq. ID No. 4251 | 1120274 | 1120241 | 1117974 | Seq. ID No. 4252 |
| 2025 | Seq. ID No. 4253 | 1117941 | 1117962 | 1118285 | Seq. ID No. 4254 |
| 2027 | Seq. ID No. 4255 | 1120944 | 1120941 | 1120333 | Seq. ID No. 4256 |
| 2030a | Seq. ID No. 4257 | 1121092 | 1121569 | 1121886 | Seq. ID No. 4258 |
| 2030b | Seq. ID No. 4259 | 1121092 | 1121170 | 1121886 | Seq. ID No. 4260 |
| 2030c | Seq. ID No. 4261 | 1121092 | 1121146 | 1121886 | Seq. ID No. 4262 |
| 2030d | Seq. ID No. 4263 | 1121092 | 1121110 | 1121886 | Seq. ID No. 4264 |
| 2032c | Seq. ID No. 4265 | 1122301 | 1122400 | 1122681 | Seq. ID No. 4266 |
| 2033 | Seq. ID No. 4267 | 1121958 | 1121985 | 1122926 | Seq. ID No. 4268 |
| 2035b | Seq. ID No. 4269 | 1124479 | 1124464 | 1124108 | Seq. ID No. 4270 |
| 2036 | Seq. ID No. 4271 | 1123137 | 1123161 | 1124852 | Seq. ID No. 4272 |
| 2037 | Seq. ID No. 4273 | 1126339 | 1126327 | 1125326 | Seq. ID No. 4274 |
| 2038a | Seq. ID No. 4275 | 1126251 | 1126158 | 1125856 | Seq. ID No. 4276 |
| 2040a | Seq. ID No. 4277 | 1125890 | 1125932 | 1126255 | Seq. ID No. 4278 |
| 2042 | Seq. ID No. 4279 | 1126698 | 1126698 | 1127249 | Seq. ID No. 4280 |
| 2043b | Seq. ID No. 4281 | 1127254 | 1127254 | 1128054 | Seq. ID No. 4282 |
| 2044 | Seq. ID No. 4283 | 1129041 | 1129041 | 1128340 | Seq. ID No. 4284 |
| 2045a | Seq. ID No. 4285 | 1128368 | 1128383 | 1128649 | Seq. ID No. 4286 |
| 2045b | Seq. ID No. 4287 | 1128368 | 1128371 | 1128649 | Seq. ID No. 4288 |
| 2046a | Seq. ID No. 4289 | 1130349 | 1130322 | 1129096 | Seq. ID No. 4290 |
| 2046b | Seq. ID No. 4291 | 1130349 | 1130349 | 1129096 | Seq. ID No. 4292 |
| 2047a | Seq. ID No. 4293 | 1131789 | 1131750 | 1130452 | Seq. ID No. 4294 |
| 2047b | Seq. ID No. 4295 | 1131789 | 1131762 | 1130452 | Seq. ID No. 4296 |
| 2049c | Seq. ID No. 4297 | 1132248 | 1132347 | 1132628 | Seq. ID No. 4298 |
| 2050 | Seq. ID No. 4299 | 1131905 | 1131932 | 1132873 | Seq. ID No. 4300 |
| 2053 | Seq. ID No. 4301 | 1133117 | 1133117 | 1134556 | Seq. ID No. 4302 |
| 2054 | Seq. ID No. 4303 | 1135143 | 1135140 | 1134631 | Seq. ID No. 4304 |
| 2055 | Seq. ID No. 4305 | 1135139 | 1135139 | 1135279 | Seq. ID No. 4306 |
| 2056 | Seq. ID No. 4307 | 1135786 | 1135771 | 1135430 | Seq. ID No. 4308 |
| 2057 | Seq. ID No. 4309 | 1137026 | 1137020 | 1135758 | Seq. ID No. 4310 |
| 2059a | Seq. ID No. 4311 | 1137134 | 1137374 | 1138240 | Seq. ID No. 4312 |
| 2059b | Seq. ID No. 4313 | 1137134 | 1137140 | 1138240 | Seq. ID No. 4314 |
| 2060a | Seq. ID No. 4315 | 1138968 | 1138920 | 1138384 | Seq. ID No. 4316 |
| 2060b | Seq. ID No. 4317 | 1138968 | 1138962 | 1138384 | Seq. ID No. 4318 |
| 2062a | Seq. ID No. 4319 | 1140218 | 1140038 | 1139013 | Seq. ID No. 4320 |
| 2062b | Seq. ID No. 4321 | 1140218 | 1140119 | 1139013 | Seq. ID No. 4322 |
| 2062c | Seq. ID No. 4323 | 1140218 | 1140200 | 1139013 | Seq. ID No. 4324 |
| 2064 | Seq. ID No. 4325 | 1141198 | 1141186 | 1140200 | Seq. ID No. 4326 |
| 2065a | Seq. ID No. 4327 | 1142468 | 1142435 | 1141179 | Seq. ID No. 4328 |
| 2065b | Seq. ID No. 4329 | 1142468 | 1142465 | 1141179 | Seq. ID No. 4330 |
| 2066 | Seq. ID No. 4331 | 1143393 | 1143375 | 1142428 | Seq. ID No. 4332 |
| 2068 | Seq. ID No. 4333 | 1145373 | 1145277 | 1143484 | Seq. ID No. 4334 |
| 2069a | Seq. ID No. 4335 | 1146734 | 1146590 | 1145292 | Seq. ID No. 4336 |
| 2069b | Seq. ID No. 4337 | 1146734 | 1146608 | 1145292 | Seq. ID No. 4338 |
| 2069c | Seq. ID No. 4339 | 1146734 | 1146662 | 1145292 | Seq. ID No. 4340 |
| 2074a | Seq. ID No. 4341 | 1147059 | 1147179 | 1148387 | Seq. ID No. 4342 |
| 2074b | Seq. ID No. 4343 | 1147059 | 1147074 | 1148387 | Seq. ID No. 4344 |
| 2075a | Seq. ID No. 4345 | 1149029 | 1148891 | 1148439 | Seq. ID No. 4346 |
| 2075b | Seq. ID No. 4347 | 1149029 | 1148894 | 1148439 | Seq. ID No. 4348 |
| 2076a | Seq. ID No. 4349 | 1151134 | 1151065 | 1148912 | Seq. ID No. 4350 |
| 2076b | Seq. ID No. 4351 | 1151134 | 1151122 | 1148912 | Seq. ID No. 4352 |
| 2076c | Seq. ID No. 4353 | 1151134 | 1151131 | 1148912 | Seq. ID No. 4354 |
| 2078 | Seq. ID No. 4355 | 1151921 | 1151906 | 1151253 | Seq. ID No. 4356 |
| 2079a | Seq. ID No. 4357 | 1152998 | 1152887 | 1151922 | Seq. ID No. 4358 |
| 2079b | Seq. ID No. 4359 | 1152998 | 1152926 | 1151922 | Seq. ID No. 4360 |
| 2079c | Seq. ID No. 4361 | 1152998 | 1152989 | 1151922 | Seq. ID No. 4362 |
| 2081a | Seq. ID No. 4363 | 1153482 | 1153383 | 1152865 | Seq. ID No. 4364 |
| 2081b | Seq. ID No. 4365 | 1153482 | 1153419 | 1152865 | Seq. ID No. 4366 |
| 2086a | Seq. ID No. 4367 | 1153561 | 1153570 | 1154904 | Seq. ID No. 4368 |
| 2086b | Seq. ID No. 4369 | 1153561 | 1153561 | 1154904 | Seq. ID No. 4370 |
| 2087a | Seq. ID No. 4371 | 1154925 | 1154952 | 1155377 | Seq. ID No. 4372 |
| 2087b | Seq. ID No. 4373 | 1154925 | 1154934 | 1155377 | Seq. ID No. 4374 |
| 2088 | Seq. ID No. 4375 | 1156149 | 1156134 | 1155403 | Seq. ID No. 4376 |
| 2091 | Seq. ID No. 4377 | 1156470 | 1156494 | 1157174 | Seq. ID No. 4378 |
| 2092 | Seq. ID No. 4379 | 1157162 | 1157174 | 1157866 | Seq. ID No. 4380 |
| 2093a | Seq. ID No. 4381 | 1157784 | 1157838 | 1158065 | Seq. ID No. 4382 |
| 2094 | Seq. ID No. 4383 | 1158149 | 1158164 | 1158913 | Seq. ID No. 4384 |
| 2096a | Seq. ID No. 4385 | 1158888 | 1159740 | 1160903 | Seq. ID No. 4386 |
| 2096b | Seq. ID No. 4387 | 1158888 | 1159086 | 1160903 | Seq. ID No. 4388 |
| 2096c | Seq. ID No. 4389 | 1158888 | 1158915 | 1160903 | Seq. ID No. 4390 |
| 2096d | Seq. ID No. 4391 | 1158888 | 1158906 | 1160903 | Seq. ID No. 4392 |
| 2097 | Seq. ID No. 4393 | 1163111 | 1163090 | 1161267 | Seq. ID No. 4394 |
| 2098b | Seq. ID No. 4395 | 1161405 | 1161474 | 1161959 | Seq. ID No. 4396 |
| 2100 | Seq. ID No. 4397 | 1164393 | 1164378 | 1163221 | Seq. ID No. 4398 |
| 2101 | Seq. ID No. 4399 | 1164206 | 1164203 | 1163817 | Seq. ID No. 4400 |
| 2104 | Seq. ID No. 4401 | 1166334 | 1166304 | 1164466 | Seq. ID No. 4402 |
| 2105 | Seq. ID No. 4403 | 1164590 | 1164728 | 1164985 | Seq. ID No. 4404 |
| 2107a | Seq. ID No. 4405 | 1164986 | 1165082 | 1165558 | Seq. ID No. 4406 |
| 2107b | Seq. ID No. 4407 | 1164986 | 1165040 | 1165558 | Seq. ID No. 4408 |
| 2109a | Seq. ID No. 4409 | 1166983 | 1166947 | 1166375 | Seq. ID No. 4410 |
| 2109b | Seq. ID No. 4411 | 1166983 | 1166968 | 1166375 | Seq. ID No. 4412 |
| 2110a | Seq. ID No. 4413 | 1168054 | 1168024 | 1166984 | Seq. ID No. 4414 |
| 2110b | Seq. ID No. 4415 | 1168054 | 1168045 | 1166984 | Seq. ID No. 4416 |
| 2110c | Seq. ID No. 4417 | 1168054 | 1168048 | 1166984 | Seq. ID No. 4418 |
| 2112a | Seq. ID No. 4419 | 1169192 | 1168997 | 1168212 | Seq. ID No. 4420 |
| 2112b | Seq. ID No. 4421 | 1169192 | 1169051 | 1168212 | Seq. ID No. 4422 |
| 2112c | Seq. ID No. 4423 | 1169192 | 1169159 | 1168212 | Seq. ID No. 4424 |
| 2114b | Seq. ID No. 4425 | 1168308 | 1168356 | 1168880 | Seq. ID No. 4426 |
| 2115a | Seq. ID No. 4427 | 1170166 | 1170046 | 1169168 | Seq. ID No. 4428 |
| 2115b | Seq. ID No. 4429 | 1170166 | 1170091 | 1169168 | Seq. ID No. 4430 |
| 2115c | Seq. ID No. 4431 | 1170166 | 1170157 | 1169168 | Seq. ID No. 4432 |
| 2116 | Seq. ID No. 4433 | 1170571 | 1170541 | 1170185 | Seq. ID No. 4434 |
| 2117 | Seq. ID No. 4435 | 1172931 | 1172919 | 1170559 | Seq. ID No. 4436 |
| 2120a | Seq. ID No. 4437 | 1170911 | 1170998 | 1171270 | Seq. ID No. 4438 |
| 2120b | Seq. ID No. 4439 | 1170911 | 1170983 | 1171270 | Seq. ID No. 4440 |
| 2122b | Seq. ID No. 4441 | 1172314 | 1172344 | 1172679 | Seq. ID No. 4442 |
| 2123 | Seq. ID No. 4443 | 1173237 | 1173237 | 1172935 | Seq. ID No. 4444 |
| 2124a | Seq. ID No. 4445 | 1173535 | 1173502 | 1173227 | Seq. ID No. 4446 |
| 2124b | Seq. ID No. 4447 | 1173535 | 1173523 | 1173227 | Seq. ID No. 4448 |
| 2125a | Seq. ID No. 4449 | 1174978 | 1174948 | 1173578 | Seq. ID No. 4450 |
| 2125b | Seq. ID No. 4451 | 1174978 | 1174975 | 1173578 | Seq. ID No. 4452 |
| 2127a | Seq. ID No. 4453 | 1174343 | 1174370 | 1174894 | Seq. ID No. 4454 |
| 2127b | Seq. ID No. 4455 | 1174343 | 1174349 | 1174894 | Seq. ID No. 4456 |
| 2128a | Seq. ID No. 4457 | 1175492 | 1175444 | 1174965 | Seq. ID No. 4458 |
| 2128b | Seq. ID No. 4459 | 1175492 | 1175456 | 1174965 | Seq. ID No. 4460 |
| 2133 | Seq. ID No. 4461 | 1179995 | 1179938 | 1175604 | Seq. ID No. 4462 |
| 2138a | Seq. ID No. 4463 | 1181752 | 1181653 | 1180022 | Seq. ID No. 4464 |
| 2138b | Seq. ID No. 4465 | 1181752 | 1181728 | 1180022 | Seq. ID No. 4466 |
| 2138c | Seq. ID No. 4467 | 1181752 | 1181737 | 1180022 | Seq. ID No. 4468 |
| 2140a | Seq. ID No. 4469 | 1183087 | 1182526 | 1181753 | Seq. ID No. 4470 |
| 2140b | Seq. ID No. 4471 | 1183087 | 1183021 | 1181753 | Seq. ID No. 4472 |
| 2142a | Seq. ID No. 4473 | 1183896 | 1183278 | 1183039 | Seq. ID No. 4474 |
| 2142b | Seq. ID No. 4475 | 1183896 | 1183833 | 1183039 | Seq. ID No. 4476 |
| 2144a | Seq. ID No. 4477 | 1184612 | 1184585 | 1183848 | Seq. ID No. 4478 |
| 2144b | Seq. ID No. 4479 | 1184612 | 1184603 | 1183848 | Seq. ID No. 4480 |
| 2146 | Seq. ID No. 4481 | 1185730 | 1185712 | 1184780 | Seq. ID No. 4482 |
| 2147a | Seq. ID No. 4483 | 1186442 | 1185977 | 1185735 | Seq. ID No. 4484 |
| 2147b | Seq. ID No. 4485 | 1186442 | 1186334 | 1185735 | Seq. ID No. 4486 |
| 2147c | Seq. ID No. 4487 | 1186442 | 1186436 | 1185735 | Seq. ID No. 4488 |
| 2149a | Seq. ID No. 4489 | 1187547 | 1187235 | 1186429 | Seq. ID No. 4490 |
| 2149b | Seq. ID No. 4491 | 1187547 | 1187448 | 1186429 | Seq. ID No. 4492 |
| 2150a | Seq. ID No. 4493 | 1186646 | 1186742 | 1187041 | Seq. ID No. 4494 |
| 2150b | Seq. ID No. 4495 | 1186646 | 1186736 | 1187041 | Seq. ID No. 4496 |
| 2150c | Seq. ID No. 4497 | 1186646 | 1186703 | 1187041 | Seq. ID No. 4498 |
| 2152a | Seq. ID No. 4499 | 1188368 | 1188338 | 1188096 | Seq. ID No. 4500 |
| 2153 | Seq. ID No. 4501 | 1189235 | 1189223 | 1188666 | Seq. ID No. 4502 |
| 2155a | Seq. ID No. 4503 | 1189980 | 1189947 | 1189216 | Seq. ID No. 4504 |
| 2155b | Seq. ID No. 4505 | 1189980 | 1189965 | 1189216 | Seq. ID No. 4506 |
| 2156a | Seq. ID No. 4507 | 1190977 | 1190908 | 1190087 | Seq. ID No. 4508 |
| 2156b | Seq. ID No. 4509 | 1190977 | 1190941 | 1190087 | Seq. ID No. 4510 |
| 2156c | Seq. ID No. 4511 | 1190977 | 1190965 | 1190087 | Seq. ID No. 4512 |
| 2159a | Seq. ID No. 4513 | 1190613 | 1190619 | 1190945 | Seq. ID No. 4514 |
| 2159b | Seq. ID No. 4515 | 1190613 | 1190616 | 1190945 | Seq. ID No. 4516 |
| 2160a | Seq. ID No. 4517 | 1191908 | 1191713 | 1191027 | Seq. ID No. 4518 |
| 2160b | Seq. ID No. 4519 | 1191908 | 1191791 | 1191027 | Seq. ID No. 4520 |
| 2160c | Seq. ID No. 4521 | 1191908 | 1191845 | 1191027 | Seq. ID No. 4522 |
| 2160d | Seq. ID No. 4523 | 1191908 | 1191872 | 1191027 | Seq. ID No. 4524 |
| 2161a | Seq. ID No. 4525 | 1190995 | 1191142 | 1191522 | Seq. ID No. 4526 |
| 2161b | Seq. ID No. 4527 | 1190995 | 1191037 | 1191522 | Seq. ID No. 4528 |
| 2161c | Seq. ID No. 4529 | 1190995 | 1191001 | 1191522 | Seq. ID No. 4530 |
| 2164 | Seq. ID No. 4531 | 1191988 | 1192009 | 1192626 | Seq. ID No. 4532 |
| 2165 | Seq. ID No. 4533 | 1192933 | 1192903 | 1192676 | Seq. ID No. 4534 |
| 2166a | Seq. ID No. 4535 | 1194996 | 1194612 | 1193065 | Seq. ID No. 4536 |
| 2166b | Seq. ID No. 4537 | 1194996 | 1194993 | 1193065 | Seq. ID No. 4538 |
| 2169 | Seq. ID No. 4539 | 1195265 | 1195253 | 1195011 | Seq. ID No. 4540 |
| 2171 | Seq. ID No. 4541 | 1195373 | 1195388 | 1196059 | Seq. ID No. 4542 |
| 2172 | Seq. ID No. 4543 | 1196128 | 1196143 | 1196508 | Seq. ID No. 4544 |
| 2173a | Seq. ID No. 4545 | 1197663 | 1197603 | 1196563 | Seq. ID No. 4546 |
| 2173b | Seq. ID No. 4547 | 1197663 | 1197618 | 1196563 | Seq. ID No. 4548 |
| 2174 | Seq. ID No. 4549 | 1198165 | 1198165 | 1197650 | Seq. ID No. 4550 |
| 2175 | Seq. ID No. 4551 | 1197212 | 1197287 | 1197667 | Seq. ID No. 4552 |
| 2176a | Seq. ID No. 4553 | 1200498 | 1200012 | 1198177 | Seq. ID No. 4554 |
| 2176b | Seq. ID No. 4555 | 1200498 | 1200204 | 1198177 | Seq. ID No. 4556 |
| 2176c | Seq. ID No. 4557 | 1200498 | 1200297 | 1198177 | Seq. ID No. 4558 |
| 2176d | Seq. ID No. 4559 | 1200498 | 1200480 | 1198177 | Seq. ID No. 4560 |
| 2177b | Seq. ID No. 4561 | 1199045 | 1199054 | 1199458 | Seq. ID No. 4562 |
| 2179a | Seq. ID No. 4563 | 1201338 | 1201272 | 1200499 | Seq. ID No. 4564 |
| 2179b | Seq. ID No. 4565 | 1201338 | 1201329 | 1200499 | Seq. ID No. 4566 |
| 2180 | Seq. ID No. 4567 | 1202280 | 1202268 | 1201339 | Seq. ID No. 4568 |
| 2181a | Seq. ID No. 4569 | 1203606 | 1203582 | 1202281 | Seq. ID No. 4570 |
| 2181b | Seq. ID No. 4571 | 1203606 | 1203588 | 1202281 | Seq. ID No. 4572 |
| 2182 | Seq. ID No. 4573 | 1203089 | 1203110 | 1203406 | Seq. ID No. 4574 |
| 2183 | Seq. ID No. 4575 | 1204620 | 1204614 | 1203607 | Seq. ID No. 4576 |
| 2185 | Seq. ID No. 4577 | 1205219 | 1205216 | 1204611 | Seq. ID No. 4578 |
| 2186a | Seq. ID No. 4579 | 1206643 | 1206499 | 1205366 | Seq. ID No. 4580 |
| 2186b | Seq. ID No. 4581 | 1206643 | 1206634 | 1205366 | Seq. ID No. 4582 |
| 2189a | Seq. ID No. 4583 | 1208090 | 1207934 | 1206753 | Seq. ID No. 4584 |
| 2189b | Seq. ID No. 4585 | 1208090 | 1208090 | 1206753 | Seq. ID No. 4586 |
| 2190a | Seq. ID No. 4587 | 1206664 | 1206916 | 1207176 | Seq. ID No. 4588 |
| 2190b | Seq. ID No. 4589 | 1206664 | 1206700 | 1207176 | Seq. ID No. 4590 |
| 2193 | Seq. ID No. 4591 | 1209177 | 1209138 | 1208200 | Seq. ID No. 4592 |
| 2194a | Seq. ID No. 4593 | 1209651 | 1209582 | 1209211 | Seq. ID No. 4594 |
| 2194c | Seq. ID No. 4595 | 1209651 | 1209600 | 1209211 | Seq. ID No. 4596 |
| 2196 | Seq. ID No. 4597 | 1210624 | 1210606 | 1209737 | Seq. ID No. 4598 |
| 2197a | Seq. ID No. 4599 | 1213676 | 1212611 | 1210572 | Seq. ID No. 4600 |
| 2197b | Seq. ID No. 4601 | 1213676 | 1213463 | 1210572 | Seq. ID No. 4602 |
| 2197c | Seq. ID No. 4603 | 1213676 | 1213610 | 1210572 | Seq. ID No. 4604 |
| 2201a | Seq. ID No. 4605 | 1215054 | 1214976 | 1214029 | Seq. ID No. 4606 |
| 2201b | Seq. ID No. 4607 | 1215054 | 1214991 | 1214029 | Seq. ID No. 4608 |
| 2203 | Seq. ID No. 4609 | 1215377 | 1215341 | 1215063 | Seq. ID No. 4610 |
| 2204 | Seq. ID No. 4611 | 1216828 | 1216804 | 1215491 | Seq. ID No. 4612 |
| 2206a | Seq. ID No. 4613 | 1218208 | 1218172 | 1216907 | Seq. ID No. 4614 |
| 2206b | Seq. ID No. 4615 | 1218208 | 1218190 | 1216907 | Seq. ID No. 4616 |
| 2208a | Seq. ID No. 4617 | 1217688 | 1217814 | 1218146 | Seq. ID No. 4618 |
| 2208b | Seq. ID No. 4619 | 1217688 | 1217691 | 1218146 | Seq. ID No. 4620 |
| 2208c | Seq. ID No. 4621 | 1217688 | 1217688 | 1218146 | Seq. ID No. 4622 |
| 2209 | Seq. ID No. 4623 | 1218957 | 1218957 | 1218280 | Seq. ID No. 4624 |
| 2212a | Seq. ID No. 4625 | 1219686 | 1219626 | 1218958 | Seq. ID No. 4626 |
| 2212b | Seq. ID No. 4627 | 1219686 | 1219662 | 1218958 | Seq. ID No. 4628 |
| 2215a | Seq. ID No. 4629 | 1221266 | 1220597 | 1219668 | Seq. ID No. 4630 |
| 2215b | Seq. ID No. 4631 | 1221266 | 1221101 | 1219668 | Seq. ID No. 4632 |
| 2216a | Seq. ID No. 4633 | 1221658 | 1221358 | 1221098 | Seq. ID No. 4634 |
| 2216b | Seq. ID No. 4635 | 1221658 | 1221532 | 1221098 | Seq. ID No. 4636 |
| 2218 | Seq. ID No. 4637 | 1222155 | 1222137 | 1221580 | Seq. ID No. 4638 |
| 2219a | Seq. ID No. 4639 | 1222926 | 1222596 | 1222252 | Seq. ID No. 4640 |
| 2219b | Seq. ID No. 4641 | 1222926 | 1222881 | 1222252 | Seq. ID No. 4642 |
| 2219c | Seq. ID No. 4643 | 1222926 | 1222920 | 1222252 | Seq. ID No. 4644 |
| 2220a | Seq. ID No. 4645 | 1223944 | 1223878 | 1223180 | Seq. ID No. 4646 |
| 2220b | Seq. ID No. 4647 | 1223944 | 1223899 | 1223180 | Seq. ID No. 4648 |
| 2220c | Seq. ID No. 4649 | 1223944 | 1223938 | 1223180 | Seq. ID No. 4650 |
| 2221 | Seq. ID No. 4651 | 1224470 | 1224470 | 1223904 | Seq. ID No. 4652 |
| 2222 | Seq. ID No. 4653 | 1225280 | 1225268 | 1224471 | Seq. ID No. 4654 |
| 2223a | Seq. ID No. 4655 | 1225739 | 1225661 | 1225281 | Seq. ID No. 4656 |
| 2223b | Seq. ID No. 4657 | 1225739 | 1225700 | 1225281 | Seq. ID No. 4658 |
| 2225 | Seq. ID No. 4659 | 1225293 | 1225299 | 1225634 | Seq. ID No. 4660 |
| 2226 | Seq. ID No. 4661 | 1226654 | 1226639 | 1225824 | Seq. ID No. 4662 |
| 2227 | Seq. ID No. 4663 | 1227837 | 1227819 | 1226650 | Seq. ID No. 4664 |
| 2228a | Seq. ID No. 4665 | 1228938 | 1228710 | 1228009 | Seq. ID No. 4666 |
| 2228b | Seq. ID No. 4667 | 1228938 | 1228809 | 1228009 | Seq. ID No. 4668 |
| 2228c | Seq. ID No. 4669 | 1228938 | 1228920 | 1228009 | Seq. ID No. 4670 |
| 2231 | Seq. ID No. 4671 | 1229408 | 1229393 | 1228929 | Seq. ID No. 4672 |
| 2232 | Seq. ID No. 4673 | 1230413 | 1230371 | 1229511 | Seq. ID No. 4674 |
| 2234a | Seq. ID No. 4675 | 1232266 | 1232191 | 1230434 | Seq. ID No. 4676 |
| 2234b | Seq. ID No. 4677 | 1232266 | 1232194 | 1230434 | Seq. ID No. 4678 |
| 2234c | Seq. ID No. 4679 | 1232266 | 1232203 | 1230434 | Seq. ID No. 4680 |
| 2236a | Seq. ID No. 4681 | 1231236 | 1231488 | 1231871 | Seq. ID No. 4682 |
| 2236b | Seq. ID No. 4683 | 1231236 | 1231266 | 1231871 | Seq. ID No. 4684 |
| 2238 | Seq. ID No. 4685 | 1233192 | 1233186 | 1232224 | Seq. ID No. 4686 |
| 2239b | Seq. ID No. 4687 | 1232255 | 1232264 | 1232569 | Seq. ID No. 4688 |
| 2240a | Seq. ID No. 4689 | 1236616 | 1236499 | 1233293 | Seq. ID No. 4690 |
| 2240b | Seq. ID No. 4691 | 1236616 | 1236571 | 1233293 | Seq. ID No. 4692 |
| 2240c | Seq. ID No. 4693 | 1236616 | 1236607 | 1233293 | Seq. ID No. 4694 |
| 2243a | Seq. ID No. 4695 | 1234812 | 1234866 | 1235147 | Seq. ID No. 4696 |
| 2244 | Seq. ID No. 4697 | 1237063 | 1237051 | 1236710 | Seq. ID No. 4698 |
| 2245 | Seq. ID No. 4699 | 1236540 | 1236573 | 1236899 | Seq. ID No. 4700 |
| 2246 | Seq. ID No. 4701 | 1237191 | 1237188 | 1236955 | Seq. ID No. 4702 |
| 2248 | Seq. ID No. 4703 | 1237171 | 1237180 | 1237992 | Seq. ID No. 4704 |
| 2249 | Seq. ID No. 4705 | 1240000 | 1239967 | 1238063 | Seq. ID No. 4706 |
| 2253a | Seq. ID No. 4707 | 1240985 | 1240250 | 1239996 | Seq. ID No. 4708 |
| 2253b | Seq. ID No. 4709 | 1240985 | 1240487 | 1239996 | Seq. ID No. 4710 |
| 2253c | Seq. ID No. 4711 | 1240985 | 1240508 | 1239996 | Seq. ID No. 4712 |
| 2253d | Seq. ID No. 4713 | 1240985 | 1240955 | 1239996 | Seq. ID No. 4714 |
| 2255a | Seq. ID No. 4715 | 1241983 | 1241392 | 1240976 | Seq. ID No. 4716 |
| 2255b | Seq. ID No. 4717 | 1241983 | 1241938 | 1240976 | Seq. ID No. 4718 |
| 2256 | Seq. ID No. 4719 | 1242954 | 1242936 | 1241938 | Seq. ID No. 4720 |
| 2257 | Seq. ID No. 4721 | 1241664 | 1241670 | 1241996 | Seq. ID No. 4722 |
| 2259a | Seq. ID No. 4723 | 1243340 | 1243250 | 1242933 | Seq. ID No. 4724 |
| 2259b | Seq. ID No. 4725 | 1243340 | 1243280 | 1242933 | Seq. ID No. 4726 |
| 2260b | Seq. ID No. 4727 | 1243953 | 1243842 | 1243264 | Seq. ID No. 4728 |
| 2260c | Seq. ID No. 4729 | 1243953 | 1243941 | 1243264 | Seq. ID No. 4730 |
| 2262 | Seq. ID No. 4731 | 1244377 | 1244347 | 1244105 | Seq. ID No. 4732 |
| 2263 | Seq. ID No. 4733 | 1245473 | 1245458 | 1244454 | Seq. ID No. 4734 |
| 2264a | Seq. ID No. 4735 | 1244629 | 1244707 | 1244976 | Seq. ID No. 4736 |
| 2264b | Seq. ID No. 4737 | 1244629 | 1244662 | 1244976 | Seq. ID No. 4738 |
| 2267 | Seq. ID No. 4739 | 1247508 | 1247496 | 1245469 | Seq. ID No. 4740 |
| 2268 | Seq. ID No. 4741 | 1246241 | 1246247 | 1246615 | Seq. ID No. 4742 |
| 2269 | Seq. ID No. 4743 | 1249248 | 1249239 | 1247569 | Seq. ID No. 4744 |
| 2270 | Seq. ID No. 4745 | 1249629 | 1249626 | 1249264 | Seq. ID No. 4746 |
| 2272 | Seq. ID No. 4747 | 1250752 | 1250749 | 1250108 | Seq. ID No. 4748 |
| 2273 | Seq. ID No. 4749 | 1251423 | 1251405 | 1250758 | Seq. ID No. 4750 |
| 2274 | Seq. ID No. 4751 | 1252317 | 1252305 | 1251424 | Seq. ID No. 4752 |
| 2275a | Seq. ID No. 4753 | 1254354 | 1254258 | 1252318 | Seq. ID No. 4754 |
| 2275b | Seq. ID No. 4755 | 1254354 | 1254339 | 1252318 | Seq. ID No. 4756 |
| 2275c | Seq. ID No. 4757 | 1254354 | 1254354 | 1252318 | Seq. ID No. 4758 |
| 2276a | Seq. ID No. 4759 | 1255081 | 1254802 | 1254299 | Seq. ID No. 4760 |
| 2276b | Seq. ID No. 4761 | 1255081 | 1254958 | 1254299 | Seq. ID No. 4762 |
| 2276c | Seq. ID No. 4763 | 1255081 | 1255066 | 1254299 | Seq. ID No. 4764 |
| 2276d | Seq. ID No. 4765 | 1255081 | 1255075 | 1254299 | Seq. ID No. 4766 |
| 2277a | Seq. ID No. 4767 | 1256478 | 1256451 | 1255072 | Seq. ID No. 4768 |
| 2277b | Seq. ID No. 4769 | 1256478 | 1256463 | 1255072 | Seq. ID No. 4770 |
| 2278a | Seq. ID No. 4771 | 1257418 | 1256983 | 1256438 | Seq. ID No. 4772 |
| 2278b | Seq. ID No. 4773 | 1257418 | 1257376 | 1256438 | Seq. ID No. 4774 |
| 2278c | Seq. ID No. 4775 | 1257418 | 1257394 | 1256438 | Seq. ID No. 4776 |
| 2278d | Seq. ID No. 4777 | 1257418 | 1257403 | 1256438 | Seq. ID No. 4778 |
| 2280 | Seq. ID No. 4779 | 1259834 | 1259834 | 1257408 | Seq. ID No. 4780 |
| 2284 | Seq. ID No. 4781 | 1261069 | 1261063 | 1259858 | Seq. ID No. 4782 |
| 2285 | Seq. ID No. 4783 | 1261477 | 1261465 | 1261241 | Seq. ID No. 4784 |
| 2286a | Seq. ID No. 4785 | 1262148 | 1261971 | 1261465 | Seq. ID No. 4786 |
| 2286b | Seq. ID No. 4787 | 1262148 | 1262130 | 1261465 | Seq. ID No. 4788 |
| 2288 | Seq. ID No. 4789 | 1263490 | 1263487 | 1262135 | Seq. ID No. 4790 |
| 2290 | Seq. ID No. 4791 | 1264398 | 1264398 | 1263730 | Seq. ID No. 4792 |
| 2291a | Seq. ID No. 4793 | 1265817 | 1265784 | 1264405 | Seq. ID No. 4794 |
| 2291b | Seq. ID No. 4795 | 1265817 | 1265799 | 1264405 | Seq. ID No. 4796 |
| 2291c | Seq. ID No. 4797 | 1265817 | 1265811 | 1264405 | Seq. ID No. 4798 |
| 2292a | Seq. ID No. 4799 | 1267633 | 1267510 | 1265777 | Seq. ID No. 4800 |
| 2292b | Seq. ID No. 4801 | 1267633 | 1267570 | 1265777 | Seq. ID No. 4802 |
| 2292c | Seq. ID No. 4803 | 1267633 | 1267573 | 1265777 | Seq. ID No. 4804 |
| 2294 | Seq. ID No. 4805 | 1266308 | 1266353 | 1266808 | Seq. ID No. 4806 |
| 2297 | Seq. ID No. 4807 | 1267892 | 1267889 | 1267578 | Seq. ID No. 4808 |
| 2298 | Seq. ID No. 4809 | 1268895 | 1268883 | 1267879 | Seq. ID No. 4810 |
| 2299 | Seq. ID No. 4811 | 1269489 | 1269483 | 1268896 | Seq. ID No. 4812 |
| 2300 | Seq. ID No. 4813 | 1270011 | 1269993 | 1269514 | Seq. ID No. 4814 |
| 2301 | Seq. ID No. 4815 | 1271985 | 1271964 | 1270018 | Seq. ID No. 4816 |
| 2302 | Seq. ID No. 4817 | 1269785 | 1269794 | 1270087 | Seq. ID No. 4818 |
| 2303 | Seq. ID No. 4819 | 1270295 | 1270301 | 1270528 | Seq. ID No. 4820 |
| 2304 | Seq. ID No. 4821 | 1272307 | 1272277 | 1271951 | Seq. ID No. 4822 |
| 2306c | Seq. ID No. 4823 | 1272365 | 1272404 | 1272844 | Seq. ID No. 4824 |
| 2307 | Seq. ID No. 4825 | 1273700 | 1273679 | 1272978 | Seq. ID No. 4826 |
| 2308 | Seq. ID No. 4827 | 1274658 | 1274640 | 1273681 | Seq. ID No. 4828 |
| 2309a | Seq. ID No. 4829 | 1275133 | 1274938 | 1274654 | Seq. ID No. 4830 |
| 2309b | Seq. ID No. 4831 | 1275133 | 1274956 | 1274654 | Seq. ID No. 4832 |
| 2309c | Seq. ID No. 4833 | 1275133 | 1275010 | 1274654 | Seq. ID No. 4834 |
| 2310 | Seq. ID No. 4835 | 1275318 | 1275294 | 1275058 | Seq. ID No. 4836 |
| 2311 | Seq. ID No. 4837 | 1276504 | 1276489 | 1275308 | Seq. ID No. 4838 |
| 2312a | Seq. ID No. 4839 | 1278512 | 1278431 | 1276806 | Seq. ID No. 4840 |
| 2312b | Seq. ID No. 4841 | 1278512 | 1278485 | 1276806 | Seq. ID No. 4842 |
| 2312c | Seq. ID No. 4843 | 1278512 | 1278494 | 1276806 | Seq. ID No. 4844 |
| 2314 | Seq. ID No. 4845 | 1278600 | 1278633 | 1279616 | Seq. ID No. 4846 |
| 2315 | Seq. ID No. 4847 | 1279974 | 1279980 | 1280267 | Seq. ID No. 4848 |
| 2316 | Seq. ID No. 4849 | 1282453 | 1282450 | 1280330 | Seq. ID No. 4850 |
| 2317 | Seq. ID No. 4851 | 1280784 | 1280841 | 1281170 | Seq. ID No. 4852 |
| 2320 | Seq. ID No. 4853 | 1282272 | 1282278 | 1282565 | Seq. ID No. 4854 |
| 2321a | Seq. ID No. 4855 | 1282966 | 1282873 | 1282604 | Seq. ID No. 4856 |
| 2321b | Seq. ID No. 4857 | 1282966 | 1282909 | 1282604 | Seq. ID No. 4858 |
| 2321c | Seq. ID No. 4859 | 1282966 | 1282939 | 1282604 | Seq. ID No. 4860 |
| 2322 | Seq. ID No. 4861 | 1285049 | 1285034 | 1283040 | Seq. ID No. 4862 |
| 2324 | Seq. ID No. 4863 | 1283044 | 1283068 | 1283607 | Seq. ID No. 4864 |
| 2327 | Seq. ID No. 4865 | 1285600 | 1285549 | 1285298 | Seq. ID No. 4866 |
| 2328 | Seq. ID No. 4867 | 1286689 | 1286668 | 1285637 | Seq. ID No. 4868 |
| 2329a | Seq. ID No. 4869 | 1289009 | 1287596 | 1286658 | Seq. ID No. 4870 |
| 2329b | Seq. ID No. 4871 | 1289009 | 1287857 | 1286658 | Seq. ID No. 4872 |
| 2329c | Seq. ID No. 4873 | 1289009 | 1288268 | 1286658 | Seq. ID No. 4874 |
| 2329d | Seq. ID No. 4875 | 1289009 | 1288994 | 1286658 | Seq. ID No. 4876 |
| 2330 | Seq. ID No. 4877 | 1289504 | 1289489 | 1289010 | Seq. ID No. 4878 |
| 2331 | Seq. ID No. 4879 | 1290204 | 1290183 | 1289548 | Seq. ID No. 4880 |
| 2333 | Seq. ID No. 4881 | 1290847 | 1290847 | 1290371 | Seq. ID No. 4882 |
| 2335 | Seq. ID No. 4883 | 1291411 | 1291402 | 1290848 | Seq. ID No. 4884 |
| 2336 | Seq. ID No. 4885 | 1291822 | 1291732 | 1291412 | Seq. ID No. 4886 |
| 2337b | Seq. ID No. 4887 | 1292097 | 1292079 | 1291810 | Seq. ID No. 4888 |
| 2338a | Seq. ID No. 4889 | 1293987 | 1293840 | 1292143 | Seq. ID No. 4890 |
| 2338b | Seq. ID No. 4891 | 1293987 | 1293891 | 1292143 | Seq. ID No. 4892 |
| 2338c | Seq. ID No. 4893 | 1293987 | 1293972 | 1292143 | Seq. ID No. 4894 |
| 2342a | Seq. ID No. 4895 | 1294892 | 1294544 | 1294074 | Seq. ID No. 4896 |
| 2342b | Seq. ID No. 4897 | 1294892 | 1294781 | 1294074 | Seq. ID No. 4898 |
| 2342c | Seq. ID No. 4899 | 1294892 | 1294856 | 1294074 | Seq. ID No. 4900 |
| 2344 | Seq. ID No. 4901 | 1296464 | 1296425 | 1295013 | Seq. ID No. 4902 |
| 2345 | Seq. ID No. 4903 | 1297883 | 1297877 | 1296513 | Seq. ID No. 4904 |
| 2347 | Seq. ID No. 4905 | 1298903 | 1298897 | 1297914 | Seq. ID No. 4906 |
| 2348 | Seq. ID No. 4907 | 1300105 | 1300084 | 1298900 | Seq. ID No. 4908 |
| 2349a | Seq. ID No. 4909 | 1300346 | 1300391 | 1300954 | Seq. ID No. 4910 |
| 2349b | Seq. ID No. 4911 | 1300346 | 1300373 | 1300954 | Seq. ID No. 4912 |
| 2350a | Seq. ID No. 4913 | 1302119 | 1302026 | 1301769 | Seq. ID No. 4914 |
| 2353 | Seq. ID No. 4915 | 1301242 | 1301248 | 1302921 | Seq. ID No. 4916 |
| 2354 | Seq. ID No. 4917 | 1303618 | 1303603 | 1302971 | Seq. ID No. 4918 |
| 2357 | Seq. ID No. 4919 | 1304669 | 1304657 | 1303596 | Seq. ID No. 4920 |
| 2358 | Seq. ID No. 4921 | 1305415 | 1305397 | 1304654 | Seq. ID No. 4922 |
| 2360 | Seq. ID No. 4923 | 1306366 | 1306351 | 1306055 | Seq. ID No. 4924 |
| 2361a | Seq. ID No. 4925 | 1306811 | 1306532 | 1306110 | Seq. ID No. 4926 |
| 2361b | Seq. ID No. 4927 | 1306811 | 1306745 | 1306110 | Seq. ID No. 4928 |
| 2363a | Seq. ID No. 4929 | 1307978 | 1307936 | 1306833 | Seq. ID No. 4930 |
| 2363b | Seq. ID No. 4931 | 1307978 | 1307975 | 1306833 | Seq. ID No. 4932 |
| 2365a | Seq. ID No. 4933 | 1308165 | 1308219 | 1309355 | Seq. ID No. 4934 |
| 2365b | Seq. ID No. 4935 | 1308165 | 1308189 | 1309355 | Seq. ID No. 4936 |
| 2366a | Seq. ID No. 4937 | 1310189 | 1310135 | 1309491 | Seq. ID No. 4938 |
| 2366b | Seq. ID No. 4939 | 1310189 | 1310138 | 1309491 | Seq. ID No. 4940 |
| 2367 | Seq. ID No. 4941 | 1310796 | 1310793 | 1310128 | Seq. ID No. 4942 |
| 2368 | Seq. ID No. 4943 | 1311881 | 1311860 | 1310793 | Seq. ID No. 4944 |
| 2369 | Seq. ID No. 4945 | 1313031 | 1313028 | 1311862 | Seq. ID No. 4946 |
| 2370 | Seq. ID No. 4947 | 1313797 | 1313788 | 1313054 | Seq. ID No. 4948 |
| 2371a | Seq. ID No. 4949 | 1312950 | 1313103 | 1313339 | Seq. ID No. 4950 |
| 2372 | Seq. ID No. 4951 | 1313340 | 1313382 | 1313705 | Seq. ID No. 4952 |
| 2373 | Seq. ID No. 4953 | 1314523 | 1314511 | 1313798 | Seq. ID No. 4954 |
| 2374a | Seq. ID No. 4955 | 1315386 | 1315314 | 1314508 | Seq. ID No. 4956 |
| 2374b | Seq. ID No. 4957 | 1315386 | 1315377 | 1314508 | Seq. ID No. 4958 |
| 2376 | Seq. ID No. 4959 | 1316374 | 1316374 | 1315394 | Seq. ID No. 4960 |
| 2377a | Seq. ID No. 4961 | 1317653 | 1317590 | 1316367 | Seq. ID No. 4962 |
| 2377b | Seq. ID No. 4963 | 1317653 | 1317650 | 1316367 | Seq. ID No. 4964 |
| 2378 | Seq. ID No. 4965 | 1318340 | 1318334 | 1318038 | Seq. ID No. 4966 |
| 2379a | Seq. ID No. 4967 | 1318807 | 1318741 | 1318331 | Seq. ID No. 4968 |
| 2379b | Seq. ID No. 4969 | 1318807 | 1318750 | 1318331 | Seq. ID No. 4970 |
| 2380 | Seq. ID No. 4971 | 1319037 | 1319019 | 1318747 | Seq. ID No. 4972 |
| 2381 | Seq. ID No. 4973 | 1320232 | 1320205 | 1319264 | Seq. ID No. 4974 |
| 2382c | Seq. ID No. 4975 | 1319889 | 1319790 | 1319509 | Seq. ID No. 4976 |
| 2384a | Seq. ID No. 4977 | 1322997 | 1322961 | 1320310 | Seq. ID No. 4978 |
| 2384b | Seq. ID No. 4979 | 1322997 | 1322982 | 1320310 | Seq. ID No. 4980 |
| 2386b | Seq. ID No. 4981 | 1322660 | 1322696 | 1323103 | Seq. ID No. 4982 |
| 2386c | Seq. ID No. 4983 | 1322660 | 1322675 | 1323103 | Seq. ID No. 4984 |
| 2387 | Seq. ID No. 4985 | 1324321 | 1324225 | 1323305 | Seq. ID No. 4986 |
| 2390 | Seq. ID No. 4987 | 1324802 | 1324754 | 1324458 | Seq. ID No. 4988 |
| 2391 | Seq. ID No. 4989 | 1324273 | 1324294 | 1325208 | Seq. ID No. 4990 |
| 2392 | Seq. ID No. 4991 | 1327683 | 1327665 | 1325251 | Seq. ID No. 4992 |
| 2394 | Seq. ID No. 4993 | 1325873 | 1325882 | 1326148 | Seq. ID No. 4994 |
| 2395 | Seq. ID No. 4995 | 1328666 | 1328639 | 1327779 | Seq. ID No. 4996 |
| 2396 | Seq. ID No. 4997 | 1329927 | 1329906 | 1328779 | Seq. ID No. 4998 |
| 2397 | Seq. ID No. 4999 | 1328731 | 1328752 | 1329045 | Seq. ID No. 5000 |
| 2398 | Seq. ID No. 5001 | 1330390 | 1330381 | 1330037 | Seq. ID No. 5002 |
| 2399a | Seq. ID No. 5003 | 1331563 | 1331224 | 1330391 | Seq. ID No. 5004 |
| 2399b | Seq. ID No. 5005 | 1331563 | 1331488 | 1330391 | Seq. ID No. 5006 |
| 2399c | Seq. ID No. 5007 | 1331563 | 1331542 | 1330391 | Seq. ID No. 5008 |
| 2401 | Seq. ID No. 5009 | 1333918 | 1333894 | 1331564 | Seq. ID No. 5010 |
| 2402a | Seq. ID No. 5011 | 1334374 | 1334266 | 1334003 | Seq. ID No. 5012 |
| 2402b | Seq. ID No. 5013 | 1334374 | 1334305 | 1334003 | Seq. ID No. 5014 |
| 2403a | Seq. ID No. 5015 | 1333974 | 1334010 | 1335254 | Seq. ID No. 5016 |
| 2403b | Seq. ID No. 5017 | 1333974 | 1333986 | 1335254 | Seq. ID No. 5018 |
| 2404a | Seq. ID No. 5019 | 1337114 | 1336970 | 1335393 | Seq. ID No. 5020 |
| 2404b | Seq. ID No. 5021 | 1337114 | 1337108 | 1335393 | Seq. ID No. 5022 |
| 2407a | Seq. ID No. 5023 | 1336219 | 1336225 | 1336524 | Seq. ID No. 5024 |
| 2409a | Seq. ID No. 5025 | 1337582 | 1337615 | 1338046 | Seq. ID No. 5026 |
| 2409b | Seq. ID No. 5027 | 1337582 | 1337606 | 1338046 | Seq. ID No. 5028 |
| 2410 | Seq. ID No. 5029 | 1339429 | 1339369 | 1338176 | Seq. ID No. 5030 |
| 2412 | Seq. ID No. 5031 | 1339044 | 1339017 | 1338787 | Seq. ID No. 5032 |
| 2413a | Seq. ID No. 5033 | 1338351 | 1338411 | 1338818 | Seq. ID No. 5034 |
| 2413b | Seq. ID No. 5035 | 1338351 | 1338357 | 1338818 | Seq. ID No. 5036 |
| 2415a | Seq. ID No. 5037 | 1339712 | 1339586 | 1339392 | Seq. ID No. 5038 |
| 2415b | Seq. ID No. 5039 | 1339712 | 1339688 | 1339392 | Seq. ID No. 5040 |
| 2416b | Seq. ID No. 5041 | 1338897 | 1338969 | 1339433 | Seq. ID No. 5042 |
| 2416c | Seq. ID No. 5043 | 1338897 | 1338915 | 1339433 | Seq. ID No. 5044 |
| 2417a | Seq. ID No. 5045 | 1340413 | 1340371 | 1339583 | Seq. ID No. 5046 |
| 2417b | Seq. ID No. 5047 | 1340413 | 1340398 | 1339583 | Seq. ID No. 5048 |
| 2418a | Seq. ID No. 5049 | 1340847 | 1340808 | 1340524 | Seq. ID No. 5050 |
| 2418b | Seq. ID No. 5051 | 1340847 | 1340817 | 1340524 | Seq. ID No. 5052 |
| 2420 | Seq. ID No. 5053 | 1341166 | 1341157 | 1340795 | Seq. ID No. 5054 |
| 2421 | Seq. ID No. 5055 | 1341520 | 1341478 | 1341170 | Seq. ID No. 5056 |
| 2422b | Seq. ID No. 5057 | 1342395 | 1342347 | 1341700 | Seq. ID No. 5058 |
| 2422c | Seq. ID No. 5059 | 1342395 | 1342395 | 1341700 | Seq. ID No. 5060 |
| 2423a | Seq. ID No. 5061 | 1343009 | 1342928 | 1342413 | Seq. ID No. 5062 |
| 2423b | Seq. ID No. 5063 | 1343009 | 1342994 | 1342413 | Seq. ID No. 5064 |
| 2424a | Seq. ID No. 5065 | 1343829 | 1343793 | 1342930 | Seq. ID No. 5066 |
| 2424b | Seq. ID No. 5067 | 1343829 | 1343799 | 1342930 | Seq. ID No. 5068 |
| 2424c | Seq. ID No. 5069 | 1343829 | 1343817 | 1342930 | Seq. ID No. 5070 |
| 2426 | Seq. ID No. 5071 | 1344336 | 1344336 | 1344130 | Seq. ID No. 5072 |
| 2428a | Seq. ID No. 5073 | 1344573 | 1344774 | 1345985 | Seq. ID No. 5074 |
| 2428b | Seq. ID No. 5075 | 1344573 | 1344648 | 1345985 | Seq. ID No. 5076 |
| 2428c | Seq. ID No. 5077 | 1344573 | 1344579 | 1345985 | Seq. ID No. 5078 |
| 2429 | Seq. ID No. 5079 | 1346793 | 1346718 | 1346035 | Seq. ID No. 5080 |
| 2432 | Seq. ID No. 5081 | 1347442 | 1347430 | 1346780 | Seq. ID No. 5082 |
| 2433 | Seq. ID No. 5083 | 1350107 | 1350095 | 1347432 | Seq. ID No. 5084 |
| 2434 | Seq. ID No. 5085 | 1347436 | 1347457 | 1347729 | Seq. ID No. 5086 |
| 2440 | Seq. ID No. 5087 | 1351640 | 1351607 | 1350387 | Seq. ID No. 5088 |
| 2442a | Seq. ID No. 5089 | 1352776 | 1352596 | 1351619 | Seq. ID No. 5090 |
| 2442b | Seq. ID No. 5091 | 1352776 | 1352761 | 1351619 | Seq. ID No. 5092 |
| 2443 | Seq. ID No. 5093 | 1353214 | 1353199 | 1352876 | Seq. ID No. 5094 |
| 2444a | Seq. ID No. 5095 | 1354016 | 1353962 | 1353192 | Seq. ID No. 5096 |
| 2444b | Seq. ID No. 5097 | 1354016 | 1353977 | 1353192 | Seq. ID No. 5098 |
| 2444c | Seq. ID No. 5099 | 1354016 | 1354001 | 1353192 | Seq. ID No. 5100 |
| 2444d | Seq. ID No. 5101 | 1354016 | 1354007 | 1353192 | Seq. ID No. 5102 |
| 2445 | Seq. ID No. 5103 | 1354599 | 1354581 | 1353931 | Seq. ID No. 5104 |
| 2448b | Seq. ID No. 5105 | 1354686 | 1354710 | 1355162 | Seq. ID No. 5106 |
| 2449a | Seq. ID No. 5107 | 1355925 | 1355691 | 1355272 | Seq. ID No. 5108 |
| 2449b | Seq. ID No. 5109 | 1355925 | 1355877 | 1355272 | Seq. ID No. 5110 |
| 2451 | Seq. ID No. 5111 | 1356746 | 1356734 | 1356105 | Seq. ID No. 5112 |
| 2452 | Seq. ID No. 5113 | 1356996 | 1357029 | 1358138 | Seq. ID No. 5114 |
| 2453 | Seq. ID No. 5115 | 1359295 | 1359286 | 1358234 | Seq. ID No. 5116 |
| 2455 | Seq. ID No. 5117 | 1360072 | 1360054 | 1359296 | Seq. ID No. 5118 |
| 2456a | Seq. ID No. 5119 | 1361028 | 1360605 | 1360051 | Seq. ID No. 5120 |
| 2456b | Seq. ID No. 5121 | 1361028 | 1360677 | 1360051 | Seq. ID No. 5122 |
| 2456c | Seq. ID No. 5123 | 1361028 | 1360941 | 1360051 | Seq. ID No. 5124 |
| 2456d | Seq. ID No. 5125 | 1361028 | 1361013 | 1360051 | Seq. ID No. 5126 |
| 2456e | Seq. ID No. 5127 | 1361028 | 1361025 | 1360051 | Seq. ID No. 5128 |
| 2458a | Seq. ID No. 5129 | 1362001 | 1361608 | 1361003 | Seq. ID No. 5130 |
| 2458b | Seq. ID No. 5131 | 1362001 | 1361680 | 1361003 | Seq. ID No. 5132 |
| 2458c | Seq. ID No. 5133 | 1362001 | 1361764 | 1361003 | Seq. ID No. 5134 |
| 2458d | Seq. ID No. 5135 | 1362001 | 1361767 | 1361003 | Seq. ID No. 5136 |
| 2458e | Seq. ID No. 5137 | 1362001 | 1361854 | 1361003 | Seq. ID No. 5138 |
| 2458f | Seq. ID No. 5139 | 1362001 | 1361983 | 1361003 | Seq. ID No. 5140 |
| 2458g | Seq. ID No. 5141 | 1362001 | 1361986 | 1361003 | Seq. ID No. 5142 |
| 2461a | Seq. ID No. 5143 | 1363565 | 1363550 | 1362201 | Seq. ID No. 5144 |
| 2461b | Seq. ID No. 5145 | 1363565 | 1363556 | 1362201 | Seq. ID No. 5146 |
| 2462a | Seq. ID No. 5147 | 1364408 | 1364270 | 1363584 | Seq. ID No. 5148 |
| 2462b | Seq. ID No. 5149 | 1364408 | 1364294 | 1363584 | Seq. ID No. 5150 |
| 2463a | Seq. ID No. 5151 | 1363279 | 1363366 | 1363731 | Seq. ID No. 5152 |
| 2464 | Seq. ID No. 5153 | 1364536 | 1364536 | 1364309 | Seq. ID No. 5154 |
| 2465a | Seq. ID No. 5155 | 1365094 | 1365082 | 1364537 | Seq. ID No. 5156 |
| 2465b | Seq. ID No. 5157 | 1365094 | 1365094 | 1364537 | Seq. ID No. 5158 |
| 2468a | Seq. ID No. 5159 | 1365781 | 1365751 | 1365422 | Seq. ID No. 5160 |
| 2468b | Seq. ID No. 5161 | 1365781 | 1365775 | 1365422 | Seq. ID No. 5162 |
| 2469a | Seq. ID No. 5163 | 1365183 | 1365474 | 1365908 | Seq. ID No. 5164 |
| 2469b | Seq. ID No. 5165 | 1365183 | 1365204 | 1365908 | Seq. ID No. 5166 |
| 2470 | Seq. ID No. 5167 | 1367011 | 1367011 | 1366664 | Seq. ID No. 5168 |
| 2471 | Seq. ID No. 5169 | 1365926 | 1365932 | 1366858 | Seq. ID No. 5170 |
| 2473 | Seq. ID No. 5171 | 1366716 | 1366872 | 1367141 | Seq. ID No. 5172 |
| 2474a | Seq. ID No. 5173 | 1367135 | 1367240 | 1367476 | Seq. ID No. 5174 |
| 2474b | Seq. ID No. 5175 | 1367135 | 1367189 | 1367476 | Seq. ID No. 5176 |
| 2474c | Seq. ID No. 5177 | 1367135 | 1367135 | 1367476 | Seq. ID No. 5178 |
| 2475a | Seq. ID No. 5179 | 1370572 | 1370467 | 1367687 | Seq. ID No. 5180 |
| 2475b | Seq. ID No. 5181 | 1370572 | 1370503 | 1367687 | Seq. ID No. 5182 |
| 2475c | Seq. ID No. 5183 | 1370572 | 1370509 | 1367687 | Seq. ID No. 5184 |
| 2477 | Seq. ID No. 5185 | 1371542 | 1371515 | 1370790 | Seq. ID No. 5186 |
| 2480 | Seq. ID No. 5187 | 1372374 | 1372365 | 1371577 | Seq. ID No. 5188 |
| 2481a | Seq. ID No. 5189 | 1371566 | 1371596 | 1372078 | Seq. ID No. 5190 |
| 2481b | Seq. ID No. 5191 | 1371566 | 1371569 | 1372078 | Seq. ID No. 5192 |
| 2482 | Seq. ID No. 5193 | 1372662 | 1372662 | 1372375 | Seq. ID No. 5194 |
| 2483 | Seq. ID No. 5195 | 1373156 | 1373144 | 1372683 | Seq. ID No. 5196 |
| 2484a | Seq. ID No. 5197 | 1373586 | 1373568 | 1373149 | Seq. ID No. 5198 |
| 2484b | Seq. ID No. 5199 | 1373586 | 1373580 | 1373149 | Seq. ID No. 5200 |
| 2485 | Seq. ID No. 5201 | 1374427 | 1374400 | 1373168 | Seq. ID No. 5202 |
| 2489 | Seq. ID No. 5203 | 1375804 | 1375792 | 1374428 | Seq. ID No. 5204 |
| 2490 | Seq. ID No. 5205 | 1376880 | 1376880 | 1375942 | Seq. ID No. 5206 |
| 2492a | Seq. ID No. 5207 | 1378075 | 1377256 | 1376897 | Seq. ID No. 5208 |
| 2492b | Seq. ID No. 5209 | 1378075 | 1378060 | 1376897 | Seq. ID No. 5210 |
| 2494 | Seq. ID No. 5211 | 1379477 | 1379453 | 1378050 | Seq. ID No. 5212 |
| 2495a | Seq. ID No. 5213 | 1380488 | 1380320 | 1379526 | Seq. ID No. 5214 |
| 2495b | Seq. ID No. 5215 | 1380488 | 1380479 | 1379526 | Seq. ID No. 5216 |
| 2497a | Seq. ID No. 5217 | 1382929 | 1382839 | 1380632 | Seq. ID No. 5218 |
| 2497b | Seq. ID No. 5219 | 1382929 | 1382926 | 1380632 | Seq. ID No. 5220 |
| 2498b | Seq. ID No. 5221 | 1380214 | 1380247 | 1380741 | Seq. ID No. 5222 |
| 2500a | Seq. ID No. 5223 | 1383330 | 1383216 | 1382926 | Seq. ID No. 5224 |
| 2500b | Seq. ID No. 5225 | 1383330 | 1383318 | 1382926 | Seq. ID No. 5226 |
| 2500c | Seq. ID No. 5227 | 1383330 | 1383327 | 1382926 | Seq. ID No. 5228 |
| 2501a | Seq. ID No. 5229 | 1384292 | 1384196 | 1383324 | Seq. ID No. 5230 |
| 2501b | Seq. ID No. 5231 | 1384292 | 1384280 | 1383324 | Seq. ID No. 5232 |
| 2504a | Seq. ID No. 5233 | 1384748 | 1384718 | 1384293 | Seq. ID No. 5234 |
| 2504b | Seq. ID No. 5235 | 1384748 | 1384724 | 1384293 | Seq. ID No. 5236 |
| 2505 | Seq. ID No. 5237 | 1385365 | 1385353 | 1384976 | Seq. ID No. 5238 |
| 2506 | Seq. ID No. 5239 | 1386567 | 1386534 | 1385977 | Seq. ID No. 5240 |
| 2507b | Seq. ID No. 5241 | 1387792 | 1387783 | 1386590 | Seq. ID No. 5242 |
| 2507c | Seq. ID No. 5243 | 1387792 | 1387792 | 1386590 | Seq. ID No. 5244 |
| 2510 | Seq. ID No. 5245 | 1388536 | 1388533 | 1387814 | Seq. ID No. 5246 |
| 2512c | Seq. ID No. 5247 | 1388904 | 1388901 | 1388533 | Seq. ID No. 5248 |
| 2513a | Seq. ID No. 5249 | 1389534 | 1389486 | 1388905 | Seq. ID No. 5250 |
| 2513b | Seq. ID No. 5251 | 1389534 | 1389516 | 1388905 | Seq. ID No. 5252 |
| 2513c | Seq. ID No. 5253 | 1389534 | 1389525 | 1388905 | Seq. ID No. 5254 |
| 2514 | Seq. ID No. 5255 | 1390141 | 1390135 | 1389491 | Seq. ID No. 5256 |
| 2515 | Seq. ID No. 5257 | 1390451 | 1390451 | 1390137 | Seq. ID No. 5258 |
| 2516a | Seq. ID No. 5259 | 1391642 | 1391396 | 1390482 | Seq. ID No. 5260 |
| 2516b | Seq. ID No. 5261 | 1391642 | 1391627 | 1390482 | Seq. ID No. 5262 |
| 2517a | Seq. ID No. 5263 | 1392251 | 1392185 | 1391643 | Seq. ID No. 5264 |
| 2517b | Seq. ID No. 5265 | 1392251 | 1392248 | 1391643 | Seq. ID No. 5266 |
| 2518a | Seq. ID No. 5267 | 1391575 | 1391770 | 1392045 | Seq. ID No. 5268 |
| 2519a | Seq. ID No. 5269 | 1392498 | 1392462 | 1392199 | Seq. ID No. 5270 |
| 2519b | Seq. ID No. 5271 | 1392498 | 1392492 | 1392199 | Seq. ID No. 5272 |
| 2520a | Seq. ID No. 5273 | 1394487 | 1394379 | 1392658 | Seq. ID No. 5274 |
| 2520b | Seq. ID No. 5275 | 1394487 | 1394400 | 1392658 | Seq. ID No. 5276 |
| 2520c | Seq. ID No. 5277 | 1394487 | 1394469 | 1392658 | Seq. ID No. 5278 |
| 2520d | Seq. ID No. 5279 | 1394487 | 1394487 | 1392658 | Seq. ID No. 5280 |
| 2521 | Seq. ID No. 5281 | 1393493 | 1393499 | 1393756 | Seq. ID No. 5282 |
| 2523 | Seq. ID No. 5283 | 1394650 | 1394647 | 1394381 | Seq. ID No. 5284 |
| 2525a | Seq. ID No. 5285 | 1396526 | 1396475 | 1396092 | Seq. ID No. 5286 |
| 2525b | Seq. ID No. 5287 | 1396526 | 1396490 | 1396092 | Seq. ID No. 5288 |
| 2527a | Seq. ID No. 5289 | 1394878 | 1395148 | 1397184 | Seq. ID No. 5290 |
| 2527b | Seq. ID No. 5291 | 1394878 | 1394953 | 1397184 | Seq. ID No. 5292 |
| 2528a | Seq. ID No. 5293 | 1399138 | 1398754 | 1397267 | Seq. ID No. 5294 |
| 2528b | Seq. ID No. 5295 | 1399138 | 1398850 | 1397267 | Seq. ID No. 5296 |
| 2528c | Seq. ID No. 5297 | 1399138 | 1398922 | 1397267 | Seq. ID No. 5298 |
| 2528d | Seq. ID No. 5299 | 1399138 | 1398961 | 1397267 | Seq. ID No. 5300 |
| 2532b | Seq. ID No. 5301 | 1397745 | 1397808 | 1398275 | Seq. ID No. 5302 |
| 2532c | Seq. ID No. 5303 | 1397745 | 1397772 | 1398275 | Seq. ID No. 5304 |
| 2534 | Seq. ID No. 5305 | 1399875 | 1399866 | 1398979 | Seq. ID No. 5306 |
| 2535a | Seq. ID No. 5307 | 1400680 | 1400668 | 1399847 | Seq. ID No. 5308 |
| 2535b | Seq. ID No. 5309 | 1400680 | 1400674 | 1399847 | Seq. ID No. 5310 |
| 2538 | Seq. ID No. 5311 | 1401349 | 1401310 | 1400681 | Seq. ID No. 5312 |
| 2541 | Seq. ID No. 5313 | 1401366 | 1401387 | 1401971 | Seq. ID No. 5314 |
| 2542a | Seq. ID No. 5315 | 1402014 | 1402296 | 1402676 | Seq. ID No. 5316 |
| 2542b | Seq. ID No. 5317 | 1402014 | 1402077 | 1402676 | Seq. ID No. 5318 |
| 2542c | Seq. ID No. 5319 | 1402014 | 1402062 | 1402676 | Seq. ID No. 5320 |
| 2543 | Seq. ID No. 5321 | 1403760 | 1403730 | 1403266 | Seq. ID No. 5322 |
| 2544 | Seq. ID No. 5323 | 1403203 | 1403254 | 1404255 | Seq. ID No. 5324 |
| 2545 | Seq. ID No. 5325 | 1404256 | 1404304 | 1404855 | Seq. ID No. 5326 |
| 2546 | Seq. ID No. 5327 | 1405305 | 1405302 | 1405021 | Seq. ID No. 5328 |
| 2547b | Seq. ID No. 5329 | 1406040 | 1406031 | 1405459 | Seq. ID No. 5330 |
| 2547c | Seq. ID No. 5331 | 1406040 | 1406037 | 1405459 | Seq. ID No. 5332 |
| 2548a | Seq. ID No. 5333 | 1404971 | 1405037 | 1405978 | Seq. ID No. 5334 |
| 2548b | Seq. ID No. 5335 | 1404971 | 1404995 | 1405978 | Seq. ID No. 5336 |
| 2549 | Seq. ID No. 5337 | 1405979 | 1405988 | 1406572 | Seq. ID No. 5338 |
| 2550b | Seq. ID No. 5339 | 1406454 | 1406559 | 1406936 | Seq. ID No. 5340 |
| 2550c | Seq. ID No. 5341 | 1406454 | 1406538 | 1406936 | Seq. ID No. 5342 |
| 2550e | Seq. ID No. 5343 | 1406454 | 1406469 | 1406936 | Seq. ID No. 5344 |
| 2552 | Seq. ID No. 5345 | 1407012 | 1407042 | 1408169 | Seq. ID No. 5346 |
| 2553 | Seq. ID No. 5347 | 1408922 | 1408922 | 1408764 | Seq. ID No. 5348 |
| 2554a | Seq. ID No. 5349 | 1410070 | 1410022 | 1409012 | Seq. ID No. 5350 |
| 2554b | Seq. ID No. 5351 | 1410070 | 1410031 | 1409012 | Seq. ID No. 5352 |
| 2555a | Seq. ID No. 5353 | 1410981 | 1410666 | 1410037 | Seq. ID No. 5354 |
| 2555b | Seq. ID No. 5355 | 1410981 | 1410930 | 1410037 | Seq. ID No. 5356 |
| 2555c | Seq. ID No. 5357 | 1410981 | 1410954 | 1410037 | Seq. ID No. 5358 |
| 2555d | Seq. ID No. 5359 | 1410981 | 1410960 | 1410037 | Seq. ID No. 5360 |
| 2558a | Seq. ID No. 5361 | 1411225 | 1411165 | 1410899 | Seq. ID No. 5362 |
| 2558b | Seq. ID No. 5363 | 1411225 | 1411183 | 1410899 | Seq. ID No. 5364 |
| 2559 | Seq. ID No. 5365 | 1411808 | 1411841 | 1413085 | Seq. ID No. 5366 |
| 2561 | Seq. ID No. 5367 | 1413552 | 1413567 | 1414415 | Seq. ID No. 5368 |
| 2562a | Seq. ID No. 5369 | 1414348 | 1414450 | 1414695 | Seq. ID No. 5370 |
| 2562c | Seq. ID No. 5371 | 1414348 | 1414396 | 1414695 | Seq. ID No. 5372 |
| 2563 | Seq. ID No. 5373 | 1416663 | 1416645 | 1414831 | Seq. ID No. 5374 |
| 2564a | Seq. ID No. 5375 | 1417575 | 1417422 | 1416748 | Seq. ID No. 5376 |
| 2564b | Seq. ID No. 5377 | 1417575 | 1417524 | 1416748 | Seq. ID No. 5378 |
| 2564c | Seq. ID No. 5379 | 1417575 | 1417533 | 1416748 | Seq. ID No. 5380 |
| 2564d | Seq. ID No. 5381 | 1417575 | 1417569 | 1416748 | Seq. ID No. 5382 |
| 2566 | Seq. ID No. 5383 | 1418729 | 1418708 | 1417590 | Seq. ID No. 5384 |
| 2567a | Seq. ID No. 5385 | 1419622 | 1419307 | 1418843 | Seq. ID No. 5386 |
| 2567b | Seq. ID No. 5387 | 1419622 | 1419610 | 1418843 | Seq. ID No. 5388 |
| 2568 | Seq. ID No. 5389 | 1420782 | 1420740 | 1419607 | Seq. ID No. 5390 |
| 2572 | Seq. ID No. 5391 | 1421908 | 1421875 | 1420760 | Seq. ID No. 5392 |
| 2573 | Seq. ID No. 5393 | 1422663 | 1422660 | 1421995 | Seq. ID No. 5394 |
| 2575 | Seq. ID No. 5395 | 1423311 | 1423263 | 1422889 | Seq. ID No. 5396 |
| 2576 | Seq. ID No. 5397 | 1424366 | 1424318 | 1423299 | Seq. ID No. 5398 |
| 2578 | Seq. ID No. 5399 | 1424941 | 1424926 | 1424564 | Seq. ID No. 5400 |
| 2579b | Seq. ID No. 5401 | 1425765 | 1425729 | 1425178 | Seq. ID No. 5402 |
| 2581 | Seq. ID No. 5403 | 1426786 | 1426756 | 1425986 | Seq. ID No. 5404 |
| 2582a | Seq. ID No. 5405 | 1427718 | 1427607 | 1426879 | Seq. ID No. 5406 |
| 2582b | Seq. ID No. 5407 | 1427718 | 1427694 | 1426879 | Seq. ID No. 5408 |
| 2582c | Seq. ID No. 5409 | 1427718 | 1427712 | 1426879 | Seq. ID No. 5410 |
| 2585 | Seq. ID No. 5411 | 1429438 | 1429423 | 1427699 | Seq. ID No. 5412 |
| 2587a | Seq. ID No. 5413 | 1429982 | 1429652 | 1429425 | Seq. ID No. 5414 |
| 2587b | Seq. ID No. 5415 | 1429982 | 1429982 | 1429425 | Seq. ID No. 5416 |
| 2588 | Seq. ID No. 5417 | 1430858 | 1430852 | 1429983 | Seq. ID No. 5418 |
| 2589 | Seq. ID No. 5419 | 1433411 | 1433399 | 1431450 | Seq. ID No. 5420 |
| 2591 | Seq. ID No. 5421 | 1434679 | 1434667 | 1433714 | Seq. ID No. 5422 |
| 2592 | Seq. ID No. 5423 | 1435611 | 1435470 | 1434667 | Seq. ID No. 5424 |
| 2593a | Seq. ID No. 5425 | 1436075 | 1435949 | 1435482 | Seq. ID No. 5426 |
| 2593b | Seq. ID No. 5427 | 1436075 | 1436042 | 1435482 | Seq. ID No. 5428 |
| 2594a | Seq. ID No. 5429 | 1436529 | 1436517 | 1436059 | Seq. ID No. 5430 |
| 2594b | Seq. ID No. 5431 | 1436529 | 1436526 | 1436059 | Seq. ID No. 5432 |
| 2596 | Seq. ID No. 5433 | 1437374 | 1437374 | 1436709 | Seq. ID No. 5434 |
| 2597a | Seq. ID No. 5435 | 1438188 | 1437930 | 1437334 | Seq. ID No. 5436 |
| 2597b | Seq. ID No. 5437 | 1438188 | 1438107 | 1437334 | Seq. ID No. 5438 |
| 2597c | Seq. ID No. 5439 | 1438188 | 1438158 | 1437334 | Seq. ID No. 5440 |
| 2598 | Seq. ID No. 5441 | 1440874 | 1440859 | 1438196 | Seq. ID No. 5442 |
| 2602 | Seq. ID No. 5443 | 1442399 | 1442396 | 1441065 | Seq. ID No. 5444 |
| 2605a | Seq. ID No. 5445 | 1442989 | 1442629 | 1442468 | Seq. ID No. 5446 |
| 2605b | Seq. ID No. 5447 | 1442989 | 1442968 | 1442468 | Seq. ID No. 5448 |
| 2606 | Seq. ID No. 5449 | 1443636 | 1443591 | 1442983 | Seq. ID No. 5450 |
| 2608 | Seq. ID No. 5451 | 1444685 | 1444676 | 1443603 | Seq. ID No. 5452 |
| 2610 | Seq. ID No. 5453 | 1444840 | 1444840 | 1445172 | Seq. ID No. 5454 |
| 2611 | Seq. ID No. 5455 | 1445942 | 1445927 | 1445280 | Seq. ID No. 5456 |
| 2613 | Seq. ID No. 5457 | 1446810 | 1446789 | 1445992 | Seq. ID No. 5458 |
| 2616a | Seq. ID No. 5459 | 1448123 | 1447217 | 1446882 | Seq. ID No. 5460 |
| 2616b | Seq. ID No. 5461 | 1448123 | 1447583 | 1446882 | Seq. ID No. 5462 |
| 2616c | Seq. ID No. 5463 | 1448123 | 1447613 | 1446882 | Seq. ID No. 5464 |
| 2616d | Seq. ID No. 5465 | 1448123 | 1447805 | 1446882 | Seq. ID No. 5466 |
| 2616e | Seq. ID No. 5467 | 1448123 | 1447850 | 1446882 | Seq. ID No. 5468 |
| 2616f | Seq. ID No. 5469 | 1448123 | 1447976 | 1446882 | Seq. ID No. 5470 |
| 2616g | Seq. ID No. 5471 | 1448123 | 1448084 | 1446882 | Seq. ID No. 5472 |
| 2616h | Seq. ID No. 5473 | 1448123 | 1448093 | 1446882 | Seq. ID No. 5474 |
| 2617a | Seq. ID No. 5475 | 1448922 | 1448838 | 1448077 | Seq. ID No. 5476 |
| 2617b | Seq. ID No. 5477 | 1448922 | 1448922 | 1448077 | Seq. ID No. 5478 |
| 2618a | Seq. ID No. 5479 | 1448201 | 1448282 | 1448533 | Seq. ID No. 5480 |
| 2618b | Seq. ID No. 5481 | 1448201 | 1448249 | 1448533 | Seq. ID No. 5482 |
| 2619 | Seq. ID No. 5483 | 1448954 | 1448987 | 1449424 | Seq. ID No. 5484 |
| 2620 | Seq. ID No. 5485 | 1449683 | 1449668 | 1449456 | Seq. ID No. 5486 |
| 2621a | Seq. ID No. 5487 | 1449261 | 1449426 | 1449758 | Seq. ID No. 5488 |
| 2623a | Seq. ID No. 5489 | 1451028 | 1450824 | 1449895 | Seq. ID No. 5490 |
| 2623b | Seq. ID No. 5491 | 1451028 | 1451010 | 1449895 | Seq. ID No. 5492 |
| 2624a | Seq. ID No. 5493 | 1452149 | 1452101 | 1451130 | Seq. ID No. 5494 |
| 2624b | Seq. ID No. 5495 | 1452149 | 1452110 | 1451130 | Seq. ID No. 5496 |
| 2625a | Seq. ID No. 5497 | 1454863 | 1453486 | 1452116 | Seq. ID No. 5498 |
| 2625b | Seq. ID No. 5499 | 1454863 | 1454809 | 1452116 | Seq. ID No. 5500 |
| 2626a | Seq. ID No. 5501 | 1456055 | 1455935 | 1454820 | Seq. ID No. 5502 |
| 2626b | Seq. ID No. 5503 | 1456055 | 1455998 | 1454820 | Seq. ID No. 5504 |
| 2627a | Seq. ID No. 5505 | 1456504 | 1456453 | 1456079 | Seq. ID No. 5506 |
| 2627b | Seq. ID No. 5507 | 1456504 | 1456465 | 1456079 | Seq. ID No. 5508 |
| 2628 | Seq. ID No. 5509 | 1457511 | 1457484 | 1456576 | Seq. ID No. 5510 |
| 2629a | Seq. ID No. 5511 | 1459560 | 1459494 | 1457665 | Seq. ID No. 5512 |
| 2629b | Seq. ID No. 5513 | 1459560 | 1459539 | 1457665 | Seq. ID No. 5514 |
| 2631 | Seq. ID No. 5515 | 1458482 | 1458482 | 1458249 | Seq. ID No. 5516 |
| 2632 | Seq. ID No. 5517 | 1459307 | 1459322 | 1459567 | Seq. ID No. 5518 |
| 2633a | Seq. ID No. 5519 | 1461946 | 1461220 | 1459916 | Seq. ID No. 5520 |
| 2633b | Seq. ID No. 5521 | 1461946 | 1461544 | 1459916 | Seq. ID No. 5522 |
| 2633c | Seq. ID No. 5523 | 1461946 | 1461727 | 1459916 | Seq. ID No. 5524 |
| 2633d | Seq. ID No. 5525 | 1461946 | 1461778 | 1459916 | Seq. ID No. 5526 |
| 2633e | Seq. ID No. 5527 | 1461946 | 1461904 | 1459916 | Seq. ID No. 5528 |
| 2637a | Seq. ID No. 5529 | 1463997 | 1463967 | 1462111 | Seq. ID No. 5530 |
| 2637b | Seq. ID No. 5531 | 1463997 | 1463991 | 1462111 | Seq. ID No. 5532 |
| 2642 | Seq. ID No. 5533 | 1463789 | 1463825 | 1464121 | Seq. ID No. 5534 |
| 2643a | Seq. ID No. 5535 | 1466534 | 1466318 | 1464372 | Seq. ID No. 5536 |
| 2643b | Seq. ID No. 5537 | 1466534 | 1466522 | 1464372 | Seq. ID No. 5538 |
| 2645 | Seq. ID No. 5539 | 1467800 | 1467782 | 1466751 | Seq. ID No. 5540 |
| 2647 | Seq. ID No. 5541 | 1468855 | 1468774 | 1467806 | Seq. ID No. 5542 |
| 2648a | Seq. ID No. 5543 | 1468422 | 1468452 | 1468748 | Seq. ID No. 5544 |
| 2648b | Seq. ID No. 5545 | 1468422 | 1468449 | 1468748 | Seq. ID No. 5546 |
| 2649 | Seq. ID No. 5547 | 1470087 | 1470087 | 1468786 | Seq. ID No. 5548 |
| 2650 | Seq. ID No. 5549 | 1468988 | 1468994 | 1469452 | Seq. ID No. 5550 |
| 2652a | Seq. ID No. 5551 | 1471356 | 1471212 | 1470088 | Seq. ID No. 5552 |
| 2652b | Seq. ID No. 5553 | 1471356 | 1471272 | 1470088 | Seq. ID No. 5554 |
| 2655a | Seq. ID No. 5555 | 1471693 | 1471618 | 1471307 | Seq. ID No. 5556 |
| 2655b | Seq. ID No. 5557 | 1471693 | 1471666 | 1471307 | Seq. ID No. 5558 |
| 2656 | Seq. ID No. 5559 | 1472777 | 1472771 | 1471758 | Seq. ID No. 5560 |
| 2658a | Seq. ID No. 5561 | 1473451 | 1473403 | 1472798 | Seq. ID No. 5562 |
| 2658b | Seq. ID No. 5563 | 1473451 | 1473430 | 1472798 | Seq. ID No. 5564 |
| 2659a | Seq. ID No. 5565 | 1474937 | 1474799 | 1473552 | Seq. ID No. 5566 |
| 2659b | Seq. ID No. 5567 | 1474937 | 1474931 | 1473552 | Seq. ID No. 5568 |
| 2660 | Seq. ID No. 5569 | 1474156 | 1474156 | 1474392 | Seq. ID No. 5570 |
| 2662 | Seq. ID No. 5571 | 1475396 | 1475390 | 1474959 | Seq. ID No. 5572 |
| 2664a | Seq. ID No. 5573 | 1477384 | 1477357 | 1475402 | Seq. ID No. 5574 |
| 2664b | Seq. ID No. 5575 | 1477384 | 1477375 | 1475402 | Seq. ID No. 5576 |
| 2665 | Seq. ID No. 5577 | 1476161 | 1476173 | 1476403 | Seq. ID No. 5578 |
| 2666a | Seq. ID No. 5579 | 1479987 | 1479798 | 1477390 | Seq. ID No. 5580 |
| 2666b | Seq. ID No. 5581 | 1479987 | 1479987 | 1477390 | Seq. ID No. 5582 |
| 2667a | Seq. ID No. 5583 | 1480983 | 1480833 | 1480003 | Seq. ID No. 5584 |
| 2667b | Seq. ID No. 5585 | 1480983 | 1480860 | 1480003 | Seq. ID No. 5586 |
| 2669a | Seq. ID No. 5587 | 1482332 | 1482248 | 1480950 | Seq. ID No. 5588 |
| 2669b | Seq. ID No. 5589 | 1482332 | 1482296 | 1480950 | Seq. ID No. 5590 |
| 2669c | Seq. ID No. 5591 | 1482332 | 1482305 | 1480950 | Seq. ID No. 5592 |
| 2672 | Seq. ID No. 5593 | 1481077 | 1481095 | 1481394 | Seq. ID No. 5594 |
| 2673 | Seq. ID No. 5595 | 1481941 | 1481944 | 1482171 | Seq. ID No. 5596 |
| 2674a | Seq. ID No. 5597 | 1484170 | 1483174 | 1482620 | Seq. ID No. 5598 |
| 2674b | Seq. ID No. 5599 | 1484170 | 1484128 | 1482620 | Seq. ID No. 5600 |
| 2676 | Seq. ID No. 5601 | 1485021 | 1485003 | 1484260 | Seq. ID No. 5602 |
| 2677a | Seq. ID No. 5603 | 1486187 | 1486013 | 1485009 | Seq. ID No. 5604 |
| 2677b | Seq. ID No. 5605 | 1486187 | 1486094 | 1485009 | Seq. ID No. 5606 |
| 2677c | Seq. ID No. 5607 | 1486187 | 1486172 | 1485009 | Seq. ID No. 5608 |
| 2679a | Seq. ID No. 5609 | 1486773 | 1486521 | 1486042 | Seq. ID No. 5610 |
| 2679b | Seq. ID No. 5611 | 1486773 | 1486701 | 1486042 | Seq. ID No. 5612 |
| 2679c | Seq. ID No. 5613 | 1486773 | 1486764 | 1486042 | Seq. ID No. 5614 |
| 2679d | Seq. ID No. 5615 | 1486773 | 1486773 | 1486042 | Seq. ID No. 5616 |
| 2680a | Seq. ID No. 5617 | 1488572 | 1488065 | 1487013 | Seq. ID No. 5618 |
| 2680b | Seq. ID No. 5619 | 1488572 | 1488401 | 1487013 | Seq. ID No. 5620 |
| 2680c | Seq. ID No. 5621 | 1488572 | 1488572 | 1487013 | Seq. ID No. 5622 |
| 2683a | Seq. ID No. 5623 | 1487806 | 1487878 | 1488216 | Seq. ID No. 5624 |
| 2683b | Seq. ID No. 5625 | 1487806 | 1487839 | 1488216 | Seq. ID No. 5626 |
| 2684a | Seq. ID No. 5627 | 1489943 | 1489898 | 1488828 | Seq. ID No. 5628 |
| 2684b | Seq. ID No. 5629 | 1489943 | 1489913 | 1488828 | Seq. ID No. 5630 |
| 2686 | Seq. ID No. 5631 | 1491201 | 1491189 | 1489990 | Seq. ID No. 5632 |
| 2688a | Seq. ID No. 5633 | 1491962 | 1491728 | 1491381 | Seq. ID No. 5634 |
| 2688b | Seq. ID No. 5635 | 1491962 | 1491923 | 1491381 | Seq. ID No. 5636 |
| 2688c | Seq. ID No. 5637 | 1491962 | 1491962 | 1491381 | Seq. ID No. 5638 |
| 2689a | Seq. ID No. 5639 | 1491463 | 1491526 | 1491783 | Seq. ID No. 5640 |
| 2689b | Seq. ID No. 5641 | 1491463 | 1491508 | 1491783 | Seq. ID No. 5642 |
| 2690a | Seq. ID No. 5643 | 1492662 | 1492314 | 1492012 | Seq. ID No. 5644 |
| 2690b | Seq. ID No. 5645 | 1492662 | 1492623 | 1492012 | Seq. ID No. 5646 |
| 2690c | Seq. ID No. 5647 | 1492662 | 1492656 | 1492012 | Seq. ID No. 5648 |
| 2692b | Seq. ID No. 5649 | 1492270 | 1492330 | 1492617 | Seq. ID No. 5650 |
| 2693 | Seq. ID No. 5651 | 1494018 | 1493982 | 1492696 | Seq. ID No. 5652 |
| 2694a | Seq. ID No. 5653 | 1495259 | 1494968 | 1493979 | Seq. ID No. 5654 |
| 2694b | Seq. ID No. 5655 | 1495259 | 1495259 | 1493979 | Seq. ID No. 5656 |
| 2695 | Seq. ID No. 5657 | 1496442 | 1496442 | 1495243 | Seq. ID No. 5658 |
| 2696a | Seq. ID No. 5659 | 1496578 | 1496656 | 1497375 | Seq. ID No. 5660 |
| 2696b | Seq. ID No. 5661 | 1496578 | 1496623 | 1497375 | Seq. ID No. 5662 |
| 2705 | Seq. ID No. 5663 | 1501429 | 1501429 | 1501343 | Seq. ID No. 5664 |
| 2709 | Seq. ID No. 5665 | 1505327 | 1505300 | 1504359 | Seq. ID No. 5666 |
| 2710c | Seq. ID No. 5667 | 1504984 | 1504885 | 1504604 | Seq. ID No. 5668 |
| 2712 | Seq. ID No. 5669 | 1506916 | 1506898 | 1505546 | Seq. ID No. 5670 |
| 2713 | Seq. ID No. 5671 | 1507318 | 1507309 | 1506926 | Seq. ID No. 5672 |
| 2714 | Seq. ID No. 5673 | 1507705 | 1507696 | 1507319 | Seq. ID No. 5674 |
| 2716a | Seq. ID No. 5675 | 1508501 | 1508477 | 1507878 | Seq. ID No. 5676 |
| 2716b | Seq. ID No. 5677 | 1508501 | 1508486 | 1507878 | Seq. ID No. 5678 |
| 2716c | Seq. ID No. 5679 | 1508501 | 1508501 | 1507878 | Seq. ID No. 5680 |
| 2718a | Seq. ID No. 5681 | 1508621 | 1508753 | 1509109 | Seq. ID No. 5682 |
| 2718b | Seq. ID No. 5683 | 1508621 | 1508702 | 1509109 | Seq. ID No. 5684 |
| 2718c | Seq. ID No. 5685 | 1508621 | 1508624 | 1509109 | Seq. ID No. 5686 |
| 2719a | Seq. ID No. 5687 | 1509372 | 1509399 | 1509650 | Seq. ID No. 5688 |
| 2719b | Seq. ID No. 5689 | 1509372 | 1509378 | 1509650 | Seq. ID No. 5690 |
| 2721a | Seq. ID No. 5691 | 1509110 | 1509434 | 1510138 | Seq. ID No. 5692 |
| 2721b | Seq. ID No. 5693 | 1509110 | 1509143 | 1510138 | Seq. ID No. 5694 |
| 2722a | Seq. ID No. 5695 | 1510153 | 1510180 | 1510692 | Seq. ID No. 5696 |
| 2722b | Seq. ID No. 5697 | 1510153 | 1510162 | 1510692 | Seq. ID No. 5698 |
| 2723 | Seq. ID No. 5699 | 1511400 | 1511397 | 1510747 | Seq. ID No. 5700 |
| 2724 | Seq. ID No. 5701 | 1512181 | 1512169 | 1511390 | Seq. ID No. 5702 |
| 2725a | Seq. ID No. 5703 | 1511541 | 1511553 | 1511786 | Seq. ID No. 5704 |
| 2725b | Seq. ID No. 5705 | 1511541 | 1511541 | 1511786 | Seq. ID No. 5706 |
| 2726 | Seq. ID No. 5707 | 1512847 | 1512844 | 1512182 | Seq. ID No. 5708 |
| 2728a | Seq. ID No. 5709 | 1512137 | 1512284 | 1512532 | Seq. ID No. 5710 |
| 2728b | Seq. ID No. 5711 | 1512137 | 1512275 | 1512532 | Seq. ID No. 5712 |
| 2731a | Seq. ID No. 5713 | 1512977 | 1513013 | 1513606 | Seq. ID No. 5714 |
| 2731b | Seq. ID No. 5715 | 1512977 | 1512980 | 1513606 | Seq. ID No. 5716 |
| 2732 | Seq. ID No. 5717 | 1514469 | 1514454 | 1513648 | Seq. ID No. 5718 |
| 2734a | Seq. ID No. 5719 | 1514794 | 1515100 | 1515729 | Seq. ID No. 5720 |
| 2734b | Seq. ID No. 5721 | 1514794 | 1514950 | 1515729 | Seq. ID No. 5722 |
| 2734c | Seq. ID No. 5723 | 1514794 | 1514827 | 1515729 | Seq. ID No. 5724 |
| 2735a | Seq. ID No. 5725 | 1516826 | 1516781 | 1515786 | Seq. ID No. 5726 |
| 2735b | Seq. ID No. 5727 | 1516826 | 1516790 | 1515786 | Seq. ID No. 5728 |
| 2738a | Seq. ID No. 5729 | 1518180 | 1517928 | 1516897 | Seq. ID No. 5730 |
| 2738b | Seq. ID No. 5731 | 1518180 | 1518084 | 1516897 | Seq. ID No. 5732 |
| 2738c | Seq. ID No. 5733 | 1518180 | 1518165 | 1516897 | Seq. ID No. 5734 |
| 2738d | Seq. ID No. 5735 | 1518180 | 1518177 | 1516897 | Seq. ID No. 5736 |
| 2742a | Seq. ID No. 5737 | 1518180 | 1518327 | 1518965 | Seq. ID No. 5738 |
| 2742b | Seq. ID No. 5739 | 1518180 | 1518195 | 1518965 | Seq. ID No. 5740 |
| 2743a | Seq. ID No. 5741 | 1520031 | 1520013 | 1519519 | Seq. ID No. 5742 |
| 2743b | Seq. ID No. 5743 | 1520031 | 1520022 | 1519519 | Seq. ID No. 5744 |
| 2744 | Seq. ID No. 5745 | 1520872 | 1520860 | 1520513 | Seq. ID No. 5746 |
| 2745a | Seq. ID No. 5747 | 1519154 | 1519358 | 1520725 | Seq. ID No. 5748 |
| 2745b | Seq. ID No. 5749 | 1519154 | 1519169 | 1520725 | Seq. ID No. 5750 |
| 2746 | Seq. ID No. 5751 | 1520820 | 1520832 | 1521431 | Seq. ID No. 5752 |
| 2747a | Seq. ID No. 5753 | 1522209 | 1522173 | 1521472 | Seq. ID No. 5754 |
| 2747b | Seq. ID No. 5755 | 1522209 | 1522209 | 1521472 | Seq. ID No. 5756 |
| 2748a | Seq. ID No. 5757 | 1523583 | 1523526 | 1522213 | Seq. ID No. 5758 |
| 2748b | Seq. ID No. 5759 | 1523583 | 1523568 | 1522213 | Seq. ID No. 5760 |
| 2748c | Seq. ID No. 5761 | 1523583 | 1523571 | 1522213 | Seq. ID No. 5762 |
| 2749a | Seq. ID No. 5763 | 1524727 | 1523995 | 1523705 | Seq. ID No. 5764 |
| 2749b | Seq. ID No. 5765 | 1524727 | 1524178 | 1523705 | Seq. ID No. 5766 |
| 2749c | Seq. ID No. 5767 | 1524727 | 1524541 | 1523705 | Seq. ID No. 5768 |
| 2749d | Seq. ID No. 5769 | 1524727 | 1524631 | 1523705 | Seq. ID No. 5770 |
| 2749e | Seq. ID No. 5771 | 1524727 | 1524721 | 1523705 | Seq. ID No. 5772 |
| 2750a | Seq. ID No. 5773 | 1525364 | 1525289 | 1524954 | Seq. ID No. 5774 |
| 2750b | Seq. ID No. 5775 | 1525364 | 1525319 | 1524954 | Seq. ID No. 5776 |
| 2752 | Seq. ID No. 5777 | 1525678 | 1525690 | 1527060 | Seq. ID No. 5778 |
| 2753 | Seq. ID No. 5779 | 1528083 | 1528029 | 1527202 | Seq. ID No. 5780 |
| 2757a | Seq. ID No. 5781 | 1528638 | 1528524 | 1528156 | Seq. ID No. 5782 |
| 2757b | Seq. ID No. 5783 | 1528638 | 1528623 | 1528156 | Seq. ID No. 5784 |
| 2758a | Seq. ID No. 5785 | 1529611 | 1529440 | 1528613 | Seq. ID No. 5786 |
| 2758b | Seq. ID No. 5787 | 1529611 | 1529485 | 1528613 | Seq. ID No. 5788 |
| 2758c | Seq. ID No. 5789 | 1529611 | 1529497 | 1528613 | Seq. ID No. 5790 |
| 2758d | Seq. ID No. 5791 | 1529611 | 1529581 | 1528613 | Seq. ID No. 5792 |
| 2759a | Seq. ID No. 5793 | 1530134 | 1530053 | 1529427 | Seq. ID No. 5794 |
| 2759b | Seq. ID No. 5795 | 1530134 | 1530134 | 1529427 | Seq. ID No. 5796 |
| 2760a | Seq. ID No. 5797 | 1530993 | 1530369 | 1530127 | Seq. ID No. 5798 |
| 2760b | Seq. ID No. 5799 | 1530993 | 1530963 | 1530127 | Seq. ID No. 5800 |
| 2760c | Seq. ID No. 5801 | 1530993 | 1530987 | 1530127 | Seq. ID No. 5802 |
| 2762 | Seq. ID No. 5803 | 1531820 | 1531820 | 1531293 | Seq. ID No. 5804 |
| 2763a | Seq. ID No. 5805 | 1532723 | 1532576 | 1531821 | Seq. ID No. 5806 |
| 2763b | Seq. ID No. 5807 | 1532723 | 1532588 | 1531821 | Seq. ID No. 5808 |
| 2763c | Seq. ID No. 5809 | 1532723 | 1532666 | 1531821 | Seq. ID No. 5810 |
| 2764 | Seq. ID No. 5811 | 1533169 | 1533145 | 1532774 | Seq. ID No. 5812 |
| 2765b | Seq. ID No. 5813 | 1533695 | 1533587 | 1533045 | Seq. ID No. 5814 |
| 2765c | Seq. ID No. 5815 | 1533695 | 1533623 | 1533045 | Seq. ID No. 5816 |
| 2766a | Seq. ID No. 5817 | 1535067 | 1535031 | 1533682 | Seq. ID No. 5818 |
| 2766b | Seq. ID No. 5819 | 1535067 | 1535061 | 1533682 | Seq. ID No. 5820 |
| 2768a | Seq. ID No. 5821 | 1536982 | 1536859 | 1535072 | Seq. ID No. 5822 |
| 2768b | Seq. ID No. 5823 | 1536982 | 1536934 | 1535072 | Seq. ID No. 5824 |
| 2768c | Seq. ID No. 5825 | 1536982 | 1536958 | 1535072 | Seq. ID No. 5826 |
| 2769a | Seq. ID No. 5827 | 1535138 | 1535258 | 1535506 | Seq. ID No. 5828 |
| 2770 | Seq. ID No. 5829 | 1536567 | 1536576 | 1536812 | Seq. ID No. 5830 |
| 2771a | Seq. ID No. 5831 | 1537982 | 1537820 | 1536999 | Seq. ID No. 5832 |
| 2771b | Seq. ID No. 5833 | 1537982 | 1537907 | 1536999 | Seq. ID No. 5834 |
| 2773 | Seq. ID No. 5835 | 1539371 | 1539353 | 1538247 | Seq. ID No. 5836 |
| 2774a | Seq. ID No. 5837 | 1540719 | 1540500 | 1539532 | Seq. ID No. 5838 |
| 2774b | Seq. ID No. 5839 | 1540719 | 1540638 | 1539532 | Seq. ID No. 5840 |
| 2774c | Seq. ID No. 5841 | 1540719 | 1540674 | 1539532 | Seq. ID No. 5842 |
| 2776a | Seq. ID No. 5843 | 1541302 | 1541248 | 1540820 | Seq. ID No. 5844 |
| 2776b | Seq. ID No. 5845 | 1541302 | 1541293 | 1540820 | Seq. ID No. 5846 |
| 2777 | Seq. ID No. 5847 | 1542467 | 1542467 | 1541280 | Seq. ID No. 5848 |
| 2778 | Seq. ID No. 5849 | 1543318 | 1543297 | 1542479 | Seq. ID No. 5850 |
| 2779 | Seq. ID No. 5851 | 1544480 | 1544465 | 1543347 | Seq. ID No. 5852 |
| 2780 | Seq. ID No. 5853 | 1545002 | 1545002 | 1544664 | Seq. ID No. 5854 |
| 2784 | Seq. ID No. 5855 | 1545859 | 1545892 | 1547058 | Seq. ID No. 5856 |
| 2785a | Seq. ID No. 5857 | 1548736 | 1548439 | 1547480 | Seq. ID No. 5858 |
| 2785b | Seq. ID No. 5859 | 1548736 | 1548700 | 1547480 | Seq. ID No. 5860 |
| 2786a | Seq. ID No. 5861 | 1549210 | 1549273 | 1549941 | Seq. ID No. 5862 |
| 2786b | Seq. ID No. 5863 | 1549210 | 1549219 | 1549941 | Seq. ID No. 5864 |
| 2786c | Seq. ID No. 5865 | 1549210 | 1549210 | 1549941 | Seq. ID No. 5866 |
| 2787a | Seq. ID No. 5867 | 1550972 | 1550930 | 1550007 | Seq. ID No. 5868 |
| 2787b | Seq. ID No. 5869 | 1550972 | 1550948 | 1550007 | Seq. ID No. 5870 |
| 2787c | Seq. ID No. 5871 | 1550972 | 1550969 | 1550007 | Seq. ID No. 5872 |
| 2788b | Seq. ID No. 5873 | 1550131 | 1550137 | 1550595 | Seq. ID No. 5874 |
| 2789 | Seq. ID No. 5875 | 1552131 | 1552116 | 1550923 | Seq. ID No. 5876 |
| 2790 | Seq. ID No. 5877 | 1552550 | 1552550 | 1552113 | Seq. ID No. 5878 |
| 2791 | Seq. ID No. 5879 | 1552345 | 1552345 | 1552118 | Seq. ID No. 5880 |
| 2793 | Seq. ID No. 5881 | 1553495 | 1553474 | 1552551 | Seq. ID No. 5882 |
| 2794 | Seq. ID No. 5883 | 1553299 | 1553296 | 1553060 | Seq. ID No. 5884 |
| 2796a | Seq. ID No. 5885 | 1554180 | 1554075 | 1553785 | Seq. ID No. 5886 |
| 2798 | Seq. ID No. 5887 | 1554325 | 1554301 | 1553969 | Seq. ID No. 5888 |
| 2799a | Seq. ID No. 5889 | 1553810 | 1553918 | 1554184 | Seq. ID No. 5890 |
| 2799b | Seq. ID No. 5891 | 1553810 | 1553822 | 1554184 | Seq. ID No. 5892 |
| 2801a | Seq. ID No. 5893 | 1556543 | 1556078 | 1555158 | Seq. ID No. 5894 |
| 2801b | Seq. ID No. 5895 | 1556543 | 1556471 | 1555158 | Seq. ID No. 5896 |
| 2804 | Seq. ID No. 5897 | 1557136 | 1557124 | 1556468 | Seq. ID No. 5898 |
| 2805a | Seq. ID No. 5899 | 1558765 | 1557724 | 1557347 | Seq. ID No. 5900 |
| 2805b | Seq. ID No. 5901 | 1558765 | 1558723 | 1557347 | Seq. ID No. 5902 |
| 2809 | Seq. ID No. 5903 | 1559388 | 1559373 | 1558726 | Seq. ID No. 5904 |
| 2810a | Seq. ID No. 5905 | 1560847 | 1559776 | 1559384 | Seq. ID No. 5906 |
| 2810b | Seq. ID No. 5907 | 1560847 | 1560571 | 1559384 | Seq. ID No. 5908 |
| 2810c | Seq. ID No. 5909 | 1560847 | 1560772 | 1559384 | Seq. ID No. 5910 |
| 2810d | Seq. ID No. 5911 | 1560847 | 1560826 | 1559384 | Seq. ID No. 5912 |
| 2812 | Seq. ID No. 5913 | 1562885 | 1562828 | 1561227 | Seq. ID No. 5914 |
| 2814 | Seq. ID No. 5915 | 1563915 | 1563912 | 1563031 | Seq. ID No. 5916 |
| 2815 | Seq. ID No. 5917 | 1564857 | 1564806 | 1563925 | Seq. ID No. 5918 |
| 2816 | Seq. ID No. 5919 | 1565582 | 1565555 | 1564821 | Seq. ID No. 5920 |
| 2818a | Seq. ID No. 5921 | 1567335 | 1565871 | 1565566 | Seq. ID No. 5922 |
| 2818b | Seq. ID No. 5923 | 1567335 | 1566276 | 1565566 | Seq. ID No. 5924 |
| 2818c | Seq. ID No. 5925 | 1567335 | 1567161 | 1565566 | Seq. ID No. 5926 |
| 2818d | Seq. ID No. 5927 | 1567335 | 1567281 | 1565566 | Seq. ID No. 5928 |
| 2818e | Seq. ID No. 5929 | 1567335 | 1567335 | 1565566 | Seq. ID No. 5930 |
| 2819 | Seq. ID No. 5931 | 1568219 | 1568195 | 1567689 | Seq. ID No. 5932 |
| 2820 | Seq. ID No. 5933 | 1569072 | 1569063 | 1568275 | Seq. ID No. 5934 |
| 2821a | Seq. ID No. 5935 | 1570005 | 1569981 | 1569271 | Seq. ID No. 5936 |
| 2821b | Seq. ID No. 5937 | 1570005 | 1570002 | 1569271 | Seq. ID No. 5938 |
| 2822a | Seq. ID No. 5939 | 1571393 | 1570382 | 1570002 | Seq. ID No. 5940 |
| 2822b | Seq. ID No. 5941 | 1571393 | 1571372 | 1570002 | Seq. ID No. 5942 |
| 2823 | Seq. ID No. 5943 | 1571696 | 1571675 | 1571394 | Seq. ID No. 5944 |
| 2824a | Seq. ID No. 5945 | 1573753 | 1573744 | 1571678 | Seq. ID No. 5946 |
| 2824b | Seq. ID No. 5947 | 1573753 | 1573753 | 1571678 | Seq. ID No. 5948 |
| 2829a | Seq. ID No. 5949 | 1574248 | 1574341 | 1574763 | Seq. ID No. 5950 |
| 2829b | Seq. ID No. 5951 | 1574248 | 1574260 | 1574763 | Seq. ID No. 5952 |
| 2831b | Seq. ID No. 5953 | 1574873 | 1574897 | 1575280 | Seq. ID No. 5954 |
| 2832 | Seq. ID No. 5955 | 1575871 | 1575832 | 1575464 | Seq. ID No. 5956 |
| 2833 | Seq. ID No. 5957 | 1576608 | 1576584 | 1576153 | Seq. ID No. 5958 |
| 2834a | Seq. ID No. 5959 | 1580917 | 1580884 | 1576613 | Seq. ID No. 5960 |
| 2834b | Seq. ID No. 5961 | 1580917 | 1580917 | 1576613 | Seq. ID No. 5962 |
| 2837a | Seq. ID No. 5963 | 1578356 | 1578371 | 1578688 | Seq. ID No. 5964 |
| 2837b | Seq. ID No. 5965 | 1578356 | 1578356 | 1578688 | Seq. ID No. 5966 |
| 2842a | Seq. ID No. 5967 | 1581713 | 1581578 | 1580898 | Seq. ID No. 5968 |
| 2842b | Seq. ID No. 5969 | 1581713 | 1581665 | 1580898 | Seq. ID No. 5970 |
| 2843a | Seq. ID No. 5971 | 1583065 | 1583050 | 1581806 | Seq. ID No. 5972 |
| 2843b | Seq. ID No. 5973 | 1583065 | 1583062 | 1581806 | Seq. ID No. 5974 |
| 2845 | Seq. ID No. 5975 | 1583130 | 1583130 | 1583053 | Seq. ID No. 5976 |
| 2846a | Seq. ID No. 5977 | 1584739 | 1584682 | 1583180 | Seq. ID No. 5978 |
| 2846b | Seq. ID No. 5979 | 1584739 | 1584736 | 1583180 | Seq. ID No. 5980 |
| 2848 | Seq. ID No. 5981 | 1585873 | 1585864 | 1585124 | Seq. ID No. 5982 |
| 2850 | Seq. ID No. 5983 | 1586969 | 1586951 | 1586739 | Seq. ID No. 5984 |
| 2851 | Seq. ID No. 5985 | 1588973 | 1588943 | 1587099 | Seq. ID No. 5986 |
| 2852 | Seq. ID No. 5987 | 1587816 | 1587849 | 1588103 | Seq. ID No. 5988 |
| 2853 | Seq. ID No. 5989 | 1589963 | 1589963 | 1588974 | Seq. ID No. 5990 |
| 2854a | Seq. ID No. 5991 | 1590804 | 1590726 | 1590217 | Seq. ID No. 5992 |
| 2854b | Seq. ID No. 5993 | 1590804 | 1590798 | 1590217 | Seq. ID No. 5994 |
| 2855 | Seq. ID No. 5995 | 1591410 | 1591476 | 1591931 | Seq. ID No. 5996 |
| 2856a | Seq. ID No. 5997 | 1591867 | 1591996 | 1594047 | Seq. ID No. 5998 |
| 2856b | Seq. ID No. 5999 | 1591867 | 1591945 | 1594047 | Seq. ID No. 6000 |
| 2856c | Seq. ID No. 6001 | 1591867 | 1591900 | 1594047 | Seq. ID No. 6002 |
| 2857 | Seq. ID No. 6003 | 1595645 | 1595627 | 1594251 | Seq. ID No. 6004 |
| 2859 | Seq. ID No. 6005 | 1595626 | 1595626 | 1595733 | Seq. ID No. 6006 |
| 2860a | Seq. ID No. 6007 | 1597299 | 1597131 | 1596229 | Seq. ID No. 6008 |
| 2860b | Seq. ID No. 6009 | 1597299 | 1597275 | 1596229 | Seq. ID No. 6010 |
| 2860c | Seq. ID No. 6011 | 1597299 | 1597293 | 1596229 | Seq. ID No. 6012 |
| 2862 | Seq. ID No. 6013 | 1596809 | 1596821 | 1597177 | Seq. ID No. 6014 |
| 2863 | Seq. ID No. 6015 | 1598748 | 1598733 | 1597300 | Seq. ID No. 6016 |
| 2864 | Seq. ID No. 6017 | 1600262 | 1600202 | 1598736 | Seq. ID No. 6018 |
| 2868a | Seq. ID No. 6019 | 1600543 | 1600507 | 1600202 | Seq. ID No. 6020 |
| 2868b | Seq. ID No. 6021 | 1600543 | 1600525 | 1600202 | Seq. ID No. 6022 |
| 2869a | Seq. ID No. 6023 | 1601667 | 1601622 | 1600540 | Seq. ID No. 6024 |
| 2869b | Seq. ID No. 6025 | 1601667 | 1601646 | 1600540 | Seq. ID No. 6026 |
| 2869c | Seq. ID No. 6027 | 1601667 | 1601658 | 1600540 | Seq. ID No. 6028 |
| 2871 | Seq. ID No. 6029 | 1603689 | 1603686 | 1601668 | Seq. ID No. 6030 |
| 2872 | Seq. ID No. 6031 | 1601990 | 1602041 | 1602271 | Seq. ID No. 6032 |
| 2875 | Seq. ID No. 6033 | 1605944 | 1605923 | 1603701 | Seq. ID No. 6034 |
| 2877 | Seq. ID No. 6035 | 1606804 | 1606738 | 1606094 | Seq. ID No. 6036 |
| 2879a | Seq. ID No. 6037 | 1607607 | 1607562 | 1606828 | Seq. ID No. 6038 |
| 2879b | Seq. ID No. 6039 | 1607607 | 1607583 | 1606828 | Seq. ID No. 6040 |
| 2879c | Seq. ID No. 6041 | 1607607 | 1607607 | 1606828 | Seq. ID No. 6042 |
| 2881 | Seq. ID No. 6043 | 1608286 | 1608187 | 1607564 | Seq. ID No. 6044 |
| 2882 | Seq. ID No. 6045 | 1607771 | 1607807 | 1608046 | Seq. ID No. 6046 |
| 2883a | Seq. ID No. 6047 | 1611163 | 1609828 | 1608341 | Seq. ID No. 6048 |
| 2883b | Seq. ID No. 6049 | 1611163 | 1611025 | 1608341 | Seq. ID No. 6050 |
| 2883c | Seq. ID No. 6051 | 1611163 | 1611046 | 1608341 | Seq. ID No. 6052 |
| 2883d | Seq. ID No. 6053 | 1611163 | 1611157 | 1608341 | Seq. ID No. 6054 |
| 2886a | Seq. ID No. 6055 | 1611898 | 1611889 | 1611185 | Seq. ID No. 6056 |
| 2886b | Seq. ID No. 6057 | 1611898 | 1611898 | 1611185 | Seq. ID No. 6058 |
| 2887a | Seq. ID No. 6059 | 1611006 | 1611216 | 1611500 | Seq. ID No. 6060 |
| 2887b | Seq. ID No. 6061 | 1611006 | 1611024 | 1611500 | Seq. ID No. 6062 |
| 2888 | Seq. ID No. 6063 | 1611669 | 1611672 | 1611914 | Seq. ID No. 6064 |
| 2890 | Seq. ID No. 6065 | 1612042 | 1612057 | 1612656 | Seq. ID No. 6066 |
| 2891a | Seq. ID No. 6067 | 1613956 | 1613311 | 1612760 | Seq. ID No. 6068 |
| 2891b | Seq. ID No. 6069 | 1613956 | 1613935 | 1612760 | Seq. ID No. 6070 |
| 2891c | Seq. ID No. 6071 | 1613956 | 1613944 | 1612760 | Seq. ID No. 6072 |
| 2893b | Seq. ID No. 6073 | 1613327 | 1613333 | 1613815 | Seq. ID No. 6074 |
| 2894a | Seq. ID No. 6075 | 1614952 | 1614535 | 1613957 | Seq. ID No. 6076 |
| 2894b | Seq. ID No. 6077 | 1614952 | 1614928 | 1613957 | Seq. ID No. 6078 |
| 2894c | Seq. ID No. 6079 | 1614952 | 1614931 | 1613957 | Seq. ID No. 6080 |
| 2895 | Seq. ID No. 6081 | 1614554 | 1614620 | 1614847 | Seq. ID No. 6082 |
| 2897a | Seq. ID No. 6083 | 1616609 | 1616564 | 1615302 | Seq. ID No. 6084 |
| 2897b | Seq. ID No. 6085 | 1616609 | 1616597 | 1615302 | Seq. ID No. 6086 |
| 2900a | Seq. ID No. 6087 | 1618165 | 1618144 | 1617167 | Seq. ID No. 6088 |
| 2900b | Seq. ID No. 6089 | 1618165 | 1618150 | 1617167 | Seq. ID No. 6090 |
| 2901a | Seq. ID No. 6091 | 1617668 | 1617746 | 1618075 | Seq. ID No. 6092 |
| 2901b | Seq. ID No. 6093 | 1617668 | 1617680 | 1618075 | Seq. ID No. 6094 |
| 2902 | Seq. ID No. 6095 | 1619717 | 1619714 | 1618173 | Seq. ID No. 6096 |
| 2904 | Seq. ID No. 6097 | 1620381 | 1620264 | 1619935 | Seq. ID No. 6098 |
| 2905a | Seq. ID No. 6099 | 1621305 | 1620918 | 1620382 | Seq. ID No. 6100 |
| 2905b | Seq. ID No. 6101 | 1621305 | 1621284 | 1620382 | Seq. ID No. 6102 |
| 2906 | Seq. ID No. 6103 | 1623352 | 1623340 | 1621463 | Seq. ID No. 6104 |
| 2909a | Seq. ID No. 6105 | 1625836 | 1625236 | 1623602 | Seq. ID No. 6106 |
| 2909b | Seq. ID No. 6107 | 1625836 | 1625401 | 1623602 | Seq. ID No. 6108 |
| 2909c | Seq. ID No. 6109 | 1625836 | 1625821 | 1623602 | Seq. ID No. 6110 |
| 2909d | Seq. ID No. 6111 | 1625836 | 1625827 | 1623602 | Seq. ID No. 6112 |
| 2912 | Seq. ID No. 6113 | 1626173 | 1626179 | 1626469 | Seq. ID No. 6114 |
| 2913a | Seq. ID No. 6115 | 1628027 | 1627994 | 1626564 | Seq. ID No. 6116 |
| 2913b | Seq. ID No. 6117 | 1628027 | 1628021 | 1626564 | Seq. ID No. 6118 |
| 2915a | Seq. ID No. 6119 | 1628740 | 1628713 | 1628024 | Seq. ID No. 6120 |
| 2915b | Seq. ID No. 6121 | 1628740 | 1628725 | 1628024 | Seq. ID No. 6122 |
| 2915c | Seq. ID No. 6123 | 1628740 | 1628740 | 1628024 | Seq. ID No. 6124 |
| 2916 | Seq. ID No. 6125 | 1629233 | 1629218 | 1628859 | Seq. ID No. 6126 |
| 2917 | Seq. ID No. 6127 | 1629566 | 1629566 | 1629375 | Seq. ID No. 6128 |
| 2918 | Seq. ID No. 6129 | 1631092 | 1631089 | 1629779 | Seq. ID No. 6130 |
| 2920 | Seq. ID No. 6131 | 1631506 | 1631473 | 1631243 | Seq. ID No. 6132 |
| 2921 | Seq. ID No. 6133 | 1632233 | 1632218 | 1631589 | Seq. ID No. 6134 |
| 2922b | Seq. ID No. 6135 | 1631644 | 1631647 | 1631913 | Seq. ID No. 6136 |
| 2923a | Seq. ID No. 6137 | 1633273 | 1632916 | 1632269 | Seq. ID No. 6138 |
| 2923b | Seq. ID No. 6139 | 1633273 | 1633258 | 1632269 | Seq. ID No. 6140 |
| 2923c | Seq. ID No. 6141 | 1633273 | 1633267 | 1632269 | Seq. ID No. 6142 |
| 2925a | Seq. ID No. 6143 | 1634281 | 1634122 | 1633424 | Seq. ID No. 6144 |
| 2925b | Seq. ID No. 6145 | 1634281 | 1634278 | 1633424 | Seq. ID No. 6146 |
| 2926a | Seq. ID No. 6147 | 1635443 | 1635365 | 1634265 | Seq. ID No. 6148 |
| 2926b | Seq. ID No. 6149 | 1635443 | 1635383 | 1634265 | Seq. ID No. 6150 |
| 2926c | Seq. ID No. 6151 | 1635443 | 1635437 | 1634265 | Seq. ID No. 6152 |
| 2928a | Seq. ID No. 6153 | 1635990 | 1635924 | 1635358 | Seq. ID No. 6154 |
| 2928b | Seq. ID No. 6155 | 1635990 | 1635954 | 1635358 | Seq. ID No. 6156 |
| 2928c | Seq. ID No. 6157 | 1635990 | 1635963 | 1635358 | Seq. ID No. 6158 |
| 2929b | Seq. ID No. 6159 | 1635214 | 1635241 | 1635663 | Seq. ID No. 6160 |
| 2931a | Seq. ID No. 6161 | 1637677 | 1636687 | 1636097 | Seq. ID No. 6162 |
| 2931b | Seq. ID No. 6163 | 1637677 | 1636831 | 1636097 | Seq. ID No. 6164 |
| 2931c | Seq. ID No. 6165 | 1637677 | 1637605 | 1636097 | Seq. ID No. 6166 |
| 2933a | Seq. ID No. 6167 | 1639308 | 1639119 | 1637683 | Seq. ID No. 6168 |
| 2933b | Seq. ID No. 6169 | 1639308 | 1639299 | 1637683 | Seq. ID No. 6170 |
| 2934 | Seq. ID No. 6171 | 1640421 | 1640421 | 1639309 | Seq. ID No. 6172 |
| 2935a | Seq. ID No. 6173 | 1641368 | 1641266 | 1640808 | Seq. ID No. 6174 |
| 2935b | Seq. ID No. 6175 | 1641368 | 1641365 | 1640808 | Seq. ID No. 6176 |
| 2936 | Seq. ID No. 6177 | 1642293 | 1642278 | 1641352 | Seq. ID No. 6178 |
| 2939a | Seq. ID No. 6179 | 1642920 | 1642842 | 1642435 | Seq. ID No. 6180 |
| 2939b | Seq. ID No. 6181 | 1642920 | 1642902 | 1642435 | Seq. ID No. 6182 |
| 2941a | Seq. ID No. 6183 | 1645387 | 1644805 | 1643459 | Seq. ID No. 6184 |
| 2941b | Seq. ID No. 6185 | 1645387 | 1645246 | 1643459 | Seq. ID No. 6186 |
| 2941c | Seq. ID No. 6187 | 1645387 | 1645318 | 1643459 | Seq. ID No. 6188 |
| 2943a | Seq. ID No. 6189 | 1647063 | 1646619 | 1645318 | Seq. ID No. 6190 |
| 2943b | Seq. ID No. 6191 | 1647063 | 1646910 | 1645318 | Seq. ID No. 6192 |
| 2943c | Seq. ID No. 6193 | 1647063 | 1647036 | 1645318 | Seq. ID No. 6194 |
| 2943d | Seq. ID No. 6195 | 1647063 | 1647042 | 1645318 | Seq. ID No. 6196 |
| 2944b | Seq. ID No. 6197 | 1645364 | 1645379 | 1645759 | Seq. ID No. 6198 |
| 2945b | Seq. ID No. 6199 | 1646411 | 1646414 | 1646893 | Seq. ID No. 6200 |
| 2947 | Seq. ID No. 6201 | 1647671 | 1647659 | 1647036 | Seq. ID No. 6202 |
| 2948a | Seq. ID No. 6203 | 1648994 | 1648082 | 1647831 | Seq. ID No. 6204 |
| 2948b | Seq. ID No. 6205 | 1648994 | 1648781 | 1647831 | Seq. ID No. 6206 |
| 2948c | Seq. ID No. 6207 | 1648994 | 1648886 | 1647831 | Seq. ID No. 6208 |
| 2948d | Seq. ID No. 6209 | 1648994 | 1648985 | 1647831 | Seq. ID No. 6210 |
| 2950a | Seq. ID No. 6211 | 1649095 | 1649113 | 1650147 | Seq. ID No. 6212 |
| 2950b | Seq. ID No. 6213 | 1649095 | 1649095 | 1650147 | Seq. ID No. 6214 |
| 2951 | Seq. ID No. 6215 | 1650757 | 1650751 | 1650221 | Seq. ID No. 6216 |
| 2952 | Seq. ID No. 6217 | 1650135 | 1650153 | 1650560 | Seq. ID No. 6218 |
| 2954 | Seq. ID No. 6219 | 1650935 | 1650944 | 1651768 | Seq. ID No. 6220 |
| 2955a | Seq. ID No. 6221 | 1653168 | 1652175 | 1651840 | Seq. ID No. 6222 |
| 2955b | Seq. ID No. 6223 | 1653168 | 1652187 | 1651840 | Seq. ID No. 6224 |
| 2955c | Seq. ID No. 6225 | 1653168 | 1652409 | 1651840 | Seq. ID No. 6226 |
| 2955d | Seq. ID No. 6227 | 1653168 | 1652565 | 1651840 | Seq. ID No. 6228 |
| 2955e | Seq. ID No. 6229 | 1653168 | 1652973 | 1651840 | Seq. ID No. 6230 |
| 2955f | Seq. ID No. 6231 | 1653168 | 1653084 | 1651840 | Seq. ID No. 6232 |
| 2955g | Seq. ID No. 6233 | 1653168 | 1653168 | 1651840 | Seq. ID No. 6234 |
| 2957 | Seq. ID No. 6235 | 1653355 | 1653376 | 1653993 | Seq. ID No. 6236 |
| 2958a | Seq. ID No. 6237 | 1654895 | 1654766 | 1654368 | Seq. ID No. 6238 |
| 2958b | Seq. ID No. 6239 | 1654895 | 1654856 | 1654368 | Seq. ID No. 6240 |
| 2958c | Seq. ID No. 6241 | 1654895 | 1654880 | 1654368 | Seq. ID No. 6242 |
| 2959 | Seq. ID No. 6243 | 1653994 | 1653997 | 1654986 | Seq. ID No. 6244 |
| 2960a | Seq. ID No. 6245 | 1655465 | 1655390 | 1655130 | Seq. ID No. 6246 |
| 2962a | Seq. ID No. 6247 | 1654995 | 1655103 | 1655627 | Seq. ID No. 6248 |
| 2962b | Seq. ID No. 6249 | 1654995 | 1654995 | 1655627 | Seq. ID No. 6250 |
| 2963 | Seq. ID No. 6251 | 1655942 | 1655954 | 1656421 | Seq. ID No. 6252 |
| 2965a | Seq. ID No. 6253 | 1658340 | 1657503 | 1657087 | Seq. ID No. 6254 |
| 2965b | Seq. ID No. 6255 | 1658340 | 1658307 | 1657087 | Seq. ID No. 6256 |
| 2965c | Seq. ID No. 6257 | 1658340 | 1658325 | 1657087 | Seq. ID No. 6258 |
| 2966 | Seq. ID No. 6259 | 1658084 | 1658096 | 1658344 | Seq. ID No. 6260 |
| 2967 | Seq. ID No. 6261 | 1660896 | 1660872 | 1658707 | Seq. ID No. 6262 |
| 2969 | Seq. ID No. 6263 | 1661016 | 1661061 | 1661981 | Seq. ID No. 6264 |
| 2970a | Seq. ID No. 6265 | 1663149 | 1662966 | 1662703 | Seq. ID No. 6266 |
| 2970b | Seq. ID No. 6267 | 1663149 | 1662999 | 1662703 | Seq. ID No. 6268 |
| 2971a | Seq. ID No. 6269 | 1661991 | 1662033 | 1662746 | Seq. ID No. 6270 |
| 2971b | Seq. ID No. 6271 | 1661991 | 1661991 | 1662746 | Seq. ID No. 6272 |
| 2974a | Seq. ID No. 6273 | 1662698 | 1663724 | 1663963 | Seq. ID No. 6274 |
| 2974b | Seq. ID No. 6275 | 1662698 | 1662743 | 1663963 | Seq. ID No. 6276 |
| 2975 | Seq. ID No. 6277 | 1665419 | 1665395 | 1664037 | Seq. ID No. 6278 |
| 2977a | Seq. ID No. 6279 | 1665491 | 1665566 | 1666129 | Seq. ID No. 6280 |
| 2977b | Seq. ID No. 6281 | 1665491 | 1665506 | 1666129 | Seq. ID No. 6282 |
| 2978a | Seq. ID No. 6283 | 1666409 | 1666355 | 1666131 | Seq. ID No. 6284 |
| 2978b | Seq. ID No. 6285 | 1666409 | 1666364 | 1666131 | Seq. ID No. 6286 |
| 2979 | Seq. ID No. 6287 | 1666051 | 1666126 | 1666689 | Seq. ID No. 6288 |
| 2980a | Seq. ID No. 6289 | 1668091 | 1667302 | 1666901 | Seq. ID No. 6290 |
| 2980b | Seq. ID No. 6291 | 1668091 | 1667875 | 1666901 | Seq. ID No. 6292 |
| 2980c | Seq. ID No. 6293 | 1668091 | 1667995 | 1666901 | Seq. ID No. 6294 |
| 2980d | Seq. ID No. 6295 | 1668091 | 1668028 | 1666901 | Seq. ID No. 6296 |
| 2980e | Seq. ID No. 6297 | 1668091 | 1668070 | 1666901 | Seq. ID No. 6298 |
| 2984 | Seq. ID No. 6299 | 1669334 | 1669304 | 1667970 | Seq. ID No. 6300 |
| 2986a | Seq. ID No. 6301 | 1670826 | 1670514 | 1669684 | Seq. ID No. 6302 |
| 2986b | Seq. ID No. 6303 | 1670826 | 1670706 | 1669684 | Seq. ID No. 6304 |
| 2986c | Seq. ID No. 6305 | 1670826 | 1670790 | 1669684 | Seq. ID No. 6306 |
| 2988a | Seq. ID No. 6307 | 1672193 | 1672121 | 1670793 | Seq. ID No. 6308 |
| 2988b | Seq. ID No. 6309 | 1672193 | 1672148 | 1670793 | Seq. ID No. 6310 |
| 2988c | Seq. ID No. 6311 | 1672193 | 1672154 | 1670793 | Seq. ID No. 6312 |
| 2989 | Seq. ID No. 6313 | 1672635 | 1672536 | 1672342 | Seq. ID No. 6314 |
| 2990 | Seq. ID No. 6315 | 1674173 | 1674143 | 1672551 | Seq. ID No. 6316 |
| 2991a | Seq. ID No. 6317 | 1675155 | 1674828 | 1674154 | Seq. ID No. 6318 |
| 2991b | Seq. ID No. 6319 | 1675155 | 1675080 | 1674154 | Seq. ID No. 6320 |
| 2991c | Seq. ID No. 6321 | 1675155 | 1675140 | 1674154 | Seq. ID No. 6322 |
| 2992 | Seq. ID No. 6323 | 1675279 | 1675294 | 1675782 | Seq. ID No. 6324 |
| 2993a | Seq. ID No. 6325 | 1676636 | 1676624 | 1675920 | Seq. ID No. 6326 |
| 2993b | Seq. ID No. 6327 | 1676636 | 1676627 | 1675920 | Seq. ID No. 6328 |
| 2995a | Seq. ID No. 6329 | 1677557 | 1677437 | 1676643 | Seq. ID No. 6330 |
| 2995b | Seq. ID No. 6331 | 1677557 | 1677554 | 1676643 | Seq. ID No. 6332 |
| 2997 | Seq. ID No. 6333 | 1677875 | 1677869 | 1677558 | Seq. ID No. 6334 |
| 2998a | Seq. ID No. 6335 | 1678755 | 1678617 | 1677862 | Seq. ID No. 6336 |
| 2998b | Seq. ID No. 6337 | 1678755 | 1678701 | 1677862 | Seq. ID No. 6338 |
| 2999 | Seq. ID No. 6339 | 1679123 | 1679120 | 1678734 | Seq. ID No. 6340 |
| 3001 | Seq. ID No. 6341 | 1680254 | 1680221 | 1679229 | Seq. ID No. 6342 |
| 3003 | Seq. ID No. 6343 | 1680586 | 1680574 | 1680245 | Seq. ID No. 6344 |
| 3005 | Seq. ID No. 6345 | 1681275 | 1681266 | 1680622 | Seq. ID No. 6346 |
| 3008a | Seq. ID No. 6347 | 1681972 | 1681849 | 1681283 | Seq. ID No. 6348 |
| 3008b | Seq. ID No. 6349 | 1681972 | 1681879 | 1681283 | Seq. ID No. 6350 |
| 3008c | Seq. ID No. 6351 | 1681972 | 1681882 | 1681283 | Seq. ID No. 6352 |
| 3008d | Seq. ID No. 6353 | 1681972 | 1681936 | 1681283 | Seq. ID No. 6354 |
| 3010a | Seq. ID No. 6355 | 1682354 | 1682306 | 1681995 | Seq. ID No. 6356 |
| 3010b | Seq. ID No. 6357 | 1682354 | 1682315 | 1681995 | Seq. ID No. 6358 |
| 3012 | Seq. ID No. 6359 | 1684114 | 1684102 | 1682330 | Seq. ID No. 6360 |
| 3015 | Seq. ID No. 6361 | 1684647 | 1684692 | 1685450 | Seq. ID No. 6362 |
| 3016a | Seq. ID No. 6363 | 1686951 | 1686111 | 1685629 | Seq. ID No. 6364 |
| 3016b | Seq. ID No. 6365 | 1686951 | 1686861 | 1685629 | Seq. ID No. 6366 |
| 3016c | Seq. ID No. 6367 | 1686951 | 1686930 | 1685629 | Seq. ID No. 6368 |
| 3017 | Seq. ID No. 6369 | 1687931 | 1687823 | 1686927 | Seq. ID No. 6370 |
| 3018a | Seq. ID No. 6371 | 1688418 | 1688376 | 1687897 | Seq. ID No. 6372 |
| 3018b | Seq. ID No. 6373 | 1688418 | 1688379 | 1687897 | Seq. ID No. 6374 |
| 3020 | Seq. ID No. 6375 | 1689300 | 1689261 | 1688419 | Seq. ID No. 6376 |
| 3021 | Seq. ID No. 6377 | 1689758 | 1689743 | 1689423 | Seq. ID No. 6378 |
| 3022 | Seq. ID No. 6379 | 1692324 | 1692324 | 1689814 | Seq. ID No. 6380 |
| 3023 | Seq. ID No. 6381 | 1689787 | 1689787 | 1690059 | Seq. ID No. 6382 |
| 3024a | Seq. ID No. 6383 | 1691465 | 1691537 | 1691806 | Seq. ID No. 6384 |
| 3024b | Seq. ID No. 6385 | 1691465 | 1691474 | 1691806 | Seq. ID No. 6386 |
| 3026a | Seq. ID No. 6387 | 1692828 | 1692804 | 1692346 | Seq. ID No. 6388 |
| 3026b | Seq. ID No. 6389 | 1692828 | 1692819 | 1692346 | Seq. ID No. 6390 |
| 3028a | Seq. ID No. 6391 | 1693823 | 1693703 | 1693047 | Seq. ID No. 6392 |
| 3028b | Seq. ID No. 6393 | 1693823 | 1693709 | 1693047 | Seq. ID No. 6394 |
| 3028c | Seq. ID No. 6395 | 1693823 | 1693763 | 1693047 | Seq. ID No. 6396 |
| 3029a | Seq. ID No. 6397 | 1694761 | 1694746 | 1693703 | Seq. ID No. 6398 |
| 3029b | Seq. ID No. 6399 | 1694761 | 1694758 | 1693703 | Seq. ID No. 6400 |
| 3031a | Seq. ID No. 6401 | 1695379 | 1695412 | 1695777 | Seq. ID No. 6402 |
| 3031b | Seq. ID No. 6403 | 1695379 | 1695394 | 1695777 | Seq. ID No. 6404 |
| 3032a | Seq. ID No. 6405 | 1696446 | 1696257 | 1696033 | Seq. ID No. 6406 |
| 3032b | Seq. ID No. 6407 | 1696446 | 1696299 | 1696033 | Seq. ID No. 6408 |
| 3033a | Seq. ID No. 6409 | 1697227 | 1697194 | 1696382 | Seq. ID No. 6410 |
| 3033b | Seq. ID No. 6411 | 1697227 | 1697197 | 1696382 | Seq. ID No. 6412 |
| 3035 | Seq. ID No. 6413 | 1697987 | 1697987 | 1697232 | Seq. ID No. 6414 |
| 3037a | Seq. ID No. 6415 | 1698709 | 1698781 | 1699263 | Seq. ID No. 6416 |
| 3037b | Seq. ID No. 6417 | 1698709 | 1698739 | 1699263 | Seq. ID No. 6418 |
| 3038 | Seq. ID No. 6419 | 1699841 | 1699841 | 1700038 | Seq. ID No. 6420 |
| 3040a | Seq. ID No. 6421 | 1701079 | 1700950 | 1700138 | Seq. ID No. 6422 |
| 3040b | Seq. ID No. 6423 | 1701079 | 1701079 | 1700138 | Seq. ID No. 6424 |
| 3042a | Seq. ID No. 6425 | 1700433 | 1700445 | 1700675 | Seq. ID No. 6426 |
| 3042b | Seq. ID No. 6427 | 1700433 | 1700433 | 1700675 | Seq. ID No. 6428 |
| 3043a | Seq. ID No. 6429 | 1701375 | 1701306 | 1701073 | Seq. ID No. 6430 |
| 3043b | Seq. ID No. 6431 | 1701375 | 1701324 | 1701073 | Seq. ID No. 6432 |
| 3044 | Seq. ID No. 6433 | 1701638 | 1701617 | 1701321 | Seq. ID No. 6434 |
| 3045a | Seq. ID No. 6435 | 1702055 | 1702040 | 1701639 | Seq. ID No. 6436 |
| 3045b | Seq. ID No. 6437 | 1702055 | 1702043 | 1701639 | Seq. ID No. 6438 |
| 3048a | Seq. ID No. 6439 | 1702494 | 1702383 | 1702033 | Seq. ID No. 6440 |
| 3049a | Seq. ID No. 6441 | 1704304 | 1703878 | 1702388 | Seq. ID No. 6442 |
| 3049b | Seq. ID No. 6443 | 1704304 | 1704055 | 1702388 | Seq. ID No. 6444 |
| 3049c | Seq. ID No. 6445 | 1704304 | 1704289 | 1702388 | Seq. ID No. 6446 |
| 3051a | Seq. ID No. 6447 | 1704655 | 1704649 | 1704305 | Seq. ID No. 6448 |
| 3051b | Seq. ID No. 6449 | 1704655 | 1704655 | 1704305 | Seq. ID No. 6450 |
| 3052 | Seq. ID No. 6451 | 1706095 | 1706095 | 1704656 | Seq. ID No. 6452 |
| 3054 | Seq. ID No. 6453 | 1705443 | 1705446 | 1705685 | Seq. ID No. 6454 |
| 3055a | Seq. ID No. 6455 | 1706386 | 1706362 | 1706096 | Seq. ID No. 6456 |
| 3055b | Seq. ID No. 6457 | 1706386 | 1706383 | 1706096 | Seq. ID No. 6458 |
| 3057 | Seq. ID No. 6459 | 1708245 | 1708242 | 1706380 | Seq. ID No. 6460 |
| 3059 | Seq. ID No. 6461 | 1709019 | 1709007 | 1708246 | Seq. ID No. 6462 |
| 3060 | Seq. ID No. 6463 | 1711662 | 1711659 | 1709020 | Seq. ID No. 6464 |
| 3061 | Seq. ID No. 6465 | 1709528 | 1709528 | 1709259 | Seq. ID No. 6466 |
| 3062 | Seq. ID No. 6467 | 1709324 | 1709330 | 1710160 | Seq. ID No. 6468 |
| 3063a | Seq. ID No. 6469 | 1710350 | 1710368 | 1710655 | Seq. ID No. 6470 |
| 3063b | Seq. ID No. 6471 | 1710350 | 1710365 | 1710655 | Seq. ID No. 6472 |
| 3064b | Seq. ID No. 6473 | 1710920 | 1710938 | 1711330 | Seq. ID No. 6474 |
| 3065a | Seq. ID No. 6475 | 1712082 | 1711980 | 1711663 | Seq. ID No. 6476 |
| 3065b | Seq. ID No. 6477 | 1712082 | 1711983 | 1711663 | Seq. ID No. 6478 |
| 3066 | Seq. ID No. 6479 | 1711331 | 1711412 | 1711774 | Seq. ID No. 6480 |
| 3067 | Seq. ID No. 6481 | 1712393 | 1712384 | 1712001 | Seq. ID No. 6482 |
| 3068 | Seq. ID No. 6483 | 1713000 | 1712988 | 1712401 | Seq. ID No. 6484 |
| 3069 | Seq. ID No. 6485 | 1713434 | 1713380 | 1712991 | Seq. ID No. 6486 |
| 3071 | Seq. ID No. 6487 | 1714045 | 1714003 | 1713764 | Seq. ID No. 6488 |
| 3072a | Seq. ID No. 6489 | 1714353 | 1714293 | 1714000 | Seq. ID No. 6490 |
| 3073 | Seq. ID No. 6491 | 1714645 | 1714639 | 1714304 | Seq. ID No. 6492 |
| 3074 | Seq. ID No. 6493 | 1715783 | 1715780 | 1714785 | Seq. ID No. 6494 |
| 3075 | Seq. ID No. 6495 | 1716350 | 1716335 | 1715784 | Seq. ID No. 6496 |
| 3076 | Seq. ID No. 6497 | 1715964 | 1716024 | 1716341 | Seq. ID No. 6498 |
| 3077a | Seq. ID No. 6499 | 1717443 | 1717344 | 1716424 | Seq. ID No. 6500 |
| 3077b | Seq. ID No. 6501 | 1717443 | 1717425 | 1716424 | Seq. ID No. 6502 |
| 3077c | Seq. ID No. 6503 | 1717443 | 1717443 | 1716424 | Seq. ID No. 6504 |
| 3078 | Seq. ID No. 6505 | 1718902 | 1718866 | 1717376 | Seq. ID No. 6506 |
| 3079 | Seq. ID No. 6507 | 1717769 | 1717769 | 1718020 | Seq. ID No. 6508 |
| 3081a | Seq. ID No. 6509 | 1720200 | 1720161 | 1718881 | Seq. ID No. 6510 |
| 3081b | Seq. ID No. 6511 | 1720200 | 1720179 | 1718881 | Seq. ID No. 6512 |
| 3083c | Seq. ID No. 6513 | 1720609 | 1720570 | 1720154 | Seq. ID No. 6514 |
| 3083d | Seq. ID No. 6515 | 1720609 | 1720588 | 1720154 | Seq. ID No. 6516 |
| 3085 | Seq. ID No. 6517 | 1720239 | 1720287 | 1720517 | Seq. ID No. 6518 |
| 3086 | Seq. ID No. 6519 | 1721223 | 1721223 | 1720798 | Seq. ID No. 6520 |
| 3087a | Seq. ID No. 6521 | 1721741 | 1721516 | 1721220 | Seq. ID No. 6522 |
| 3087c | Seq. ID No. 6523 | 1721741 | 1721729 | 1721220 | Seq. ID No. 6524 |
| 3088 | Seq. ID No. 6525 | 1722323 | 1722311 | 1721742 | Seq. ID No. 6526 |
| 3089a | Seq. ID No. 6527 | 1722579 | 1722534 | 1722301 | Seq. ID No. 6528 |
| 3089b | Seq. ID No. 6529 | 1722579 | 1722540 | 1722301 | Seq. ID No. 6530 |
| 3090 | Seq. ID No. 6531 | 1723087 | 1723024 | 1722710 | Seq. ID No. 6532 |
| 3091 | Seq. ID No. 6533 | 1723434 | 1723377 | 1723024 | Seq. ID No. 6534 |
| 3092a | Seq. ID No. 6535 | 1726056 | 1726017 | 1723726 | Seq. ID No. 6536 |
| 3092b | Seq. ID No. 6537 | 1726056 | 1726023 | 1723726 | Seq. ID No. 6538 |
| 3095 | Seq. ID No. 6539 | 1725374 | 1725374 | 1724937 | Seq. ID No. 6540 |
| 3096a | Seq. ID No. 6541 | 1724735 | 1724747 | 1724995 | Seq. ID No. 6542 |
| 3096b | Seq. ID No. 6543 | 1724735 | 1724738 | 1724995 | Seq. ID No. 6544 |
| 3097 | Seq. ID No. 6545 | 1726568 | 1726568 | 1726035 | Seq. ID No. 6546 |
| 3098a | Seq. ID No. 6547 | 1728002 | 1727765 | 1726569 | Seq. ID No. 6548 |
| 3098b | Seq. ID No. 6549 | 1728002 | 1727993 | 1726569 | Seq. ID No. 6550 |
| 3098c | Seq. ID No. 6551 | 1728002 | 1728002 | 1726569 | Seq. ID No. 6552 |
| 3099 | Seq. ID No. 6553 | 1728681 | 1728669 | 1727986 | Seq. ID No. 6554 |
| 3100a | Seq. ID No. 6555 | 1727960 | 1728044 | 1728307 | Seq. ID No. 6556 |
| 3100b | Seq. ID No. 6557 | 1727960 | 1728017 | 1728307 | Seq. ID No. 6558 |
| 3101 | Seq. ID No. 6559 | 1729161 | 1729158 | 1728682 | Seq. ID No. 6560 |
| 3102 | Seq. ID No. 6561 | 1729471 | 1729429 | 1729220 | Seq. ID No. 6562 |
| 3103b | Seq. ID No. 6563 | 1729917 | 1729917 | 1729426 | Seq. ID No. 6564 |
| 3104 | Seq. ID No. 6565 | 1730101 | 1730101 | 1729931 | Seq. ID No. 6566 |
| 3105 | Seq. ID No. 6567 | 1730458 | 1730434 | 1730144 | Seq. ID No. 6568 |
| 3106 | Seq. ID No. 6569 | 1730695 | 1730668 | 1730465 | Seq. ID No. 6570 |
| 3107a | Seq. ID No. 6571 | 1731400 | 1731364 | 1731125 | Seq. ID No. 6572 |
| 3107b | Seq. ID No. 6573 | 1731400 | 1731385 | 1731125 | Seq. ID No. 6574 |
| 3108a | Seq. ID No. 6575 | 1730751 | 1730838 | 1731467 | Seq. ID No. 6576 |
| 3108b | Seq. ID No. 6577 | 1730751 | 1730778 | 1731467 | Seq. ID No. 6578 |
| 3109 | Seq. ID No. 6579 | 1731554 | 1731557 | 1732228 | Seq. ID No. 6580 |
| 3110a | Seq. ID No. 6581 | 1732232 | 1732322 | 1732933 | Seq. ID No. 6582 |
| 3110b | Seq. ID No. 6583 | 1732232 | 1732244 | 1732933 | Seq. ID No. 6584 |
| 3113 | Seq. ID No. 6585 | 1733078 | 1733090 | 1734292 | Seq. ID No. 6586 |
| 3116 | Seq. ID No. 6587 | 1734912 | 1734921 | 1735769 | Seq. ID No. 6588 |
| 3118a | Seq. ID No. 6589 | 1735601 | 1735763 | 1736248 | Seq. ID No. 6590 |
| 3118b | Seq. ID No. 6591 | 1735601 | 1735673 | 1736248 | Seq. ID No. 6592 |
| 3119a | Seq. ID No. 6593 | 1736902 | 1736743 | 1736339 | Seq. ID No. 6594 |
| 3119b | Seq. ID No. 6595 | 1736902 | 1736782 | 1736339 | Seq. ID No. 6596 |
| 3119c | Seq. ID No. 6597 | 1736902 | 1736809 | 1736339 | Seq. ID No. 6598 |
| 3119d | Seq. ID No. 6599 | 1736902 | 1736848 | 1736339 | Seq. ID No. 6600 |
| 3119e | Seq. ID No. 6601 | 1736902 | 1736863 | 1736339 | Seq. ID No. 6602 |
| 3119f | Seq. ID No. 6603 | 1736902 | 1736872 | 1736339 | Seq. ID No. 6604 |
| 3121 | Seq. ID No. 6605 | 1736957 | 1736978 | 1737658 | Seq. ID No. 6606 |
| 3122a | Seq. ID No. 6607 | 1739218 | 1739212 | 1738022 | Seq. ID No. 6608 |
| 3122b | Seq. ID No. 6609 | 1739218 | 1739218 | 1738022 | Seq. ID No. 6610 |
| 3123a | Seq. ID No. 6611 | 1741016 | 1740947 | 1739265 | Seq. ID No. 6612 |
| 3123b | Seq. ID No. 6613 | 1741016 | 1741007 | 1739265 | Seq. ID No. 6614 |
| 3124 | Seq. ID No. 6615 | 1741584 | 1741551 | 1740970 | Seq. ID No. 6616 |
| 3126 | Seq. ID No. 6617 | 1742270 | 1742243 | 1741596 | Seq. ID No. 6618 |
| 3129a | Seq. ID No. 6619 | 1742959 | 1742902 | 1742246 | Seq. ID No. 6620 |
| 3129b | Seq. ID No. 6621 | 1742959 | 1742932 | 1742246 | Seq. ID No. 6622 |
| 3131 | Seq. ID No. 6623 | 1745173 | 1745167 | 1743977 | Seq. ID No. 6624 |
| 3134a | Seq. ID No. 6625 | 1747570 | 1747468 | 1745222 | Seq. ID No. 6626 |
| 3134b | Seq. ID No. 6627 | 1747570 | 1747507 | 1745222 | Seq. ID No. 6628 |
| 3138 | Seq. ID No. 6629 | 1748892 | 1748832 | 1747537 | Seq. ID No. 6630 |
| 3140 | Seq. ID No. 6631 | 1748324 | 1748327 | 1748560 | Seq. ID No. 6632 |
| 3141 | Seq. ID No. 6633 | 1750186 | 1750177 | 1748972 | Seq. ID No. 6634 |
| 3145a | Seq. ID No. 6635 | 1752277 | 1752205 | 1750973 | Seq. ID No. 6636 |
| 3145b | Seq. ID No. 6637 | 1752277 | 1752259 | 1750973 | Seq. ID No. 6638 |
| 3145c | Seq. ID No. 6639 | 1752277 | 1752274 | 1750973 | Seq. ID No. 6640 |
| 3147a | Seq. ID No. 6641 | 125 | 1754054 | 1752510 | Seq. ID No. 6642 |
| 3147b | Seq. ID No. 6643 | 125 | 122 | 1752510 | Seq. ID No. 6644 |
| 3147c | Seq. ID No. 6645 | 125 | 83 | 1752510 | Seq. ID No. 6646 |
| 3149a | Seq. ID No. 6647 | 7 | 1754326 | 1754123 | Seq. ID No. 6648 |
| 3150a | Seq. ID No. 6649 | 1753936 | 1754086 | 1754331 | Seq. ID No. 6650 |
| 3099 | Seq. ID No. 6553 | 1728681 | 1728669 | 1727986 | Seq. ID No. 6554 |
| 3100a | Seq. ID No. 6555 | 1727960 | 1728044 | 1728307 | Seq. ID No. 6556 |
| 3100b | Seq. ID No. 6557 | 1727960 | 1728017 | 1728307 | Seq. ID No. 6558 |
| 3101 | Seq. ID No. 6559 | 1729161 | 1729158 | 1728682 | Seq. ID No. 6560 |
| 3102 | Seq. ID No. 6561 | 1729471 | 1729429 | 1729220 | Seq. ID No. 6562 |
| 3103b | Seq. ID No. 6563 | 1729917 | 1729917 | 1729426 | Seq. ID No. 6564 |
| 3104 | Seq. ID No. 6565 | 1730101 | 1730101 | 1729931 | Seq. ID No. 6566 |
| 3105 | Seq. ID No. 6567 | 1730458 | 1730434 | 1730144 | Seq. ID No. 6568 |
| 3106 | Seq. ID No. 6569 | 1730695 | 1730668 | 1730465 | Seq. ID No. 6570 |
| 3107a | Seq. ID No. 6571 | 1731400 | 1731364 | 1731125 | Seq. ID No. 6572 |
| 3107b | Seq. ID No. 6573 | 1731400 | 1731385 | 1731125 | Seq. ID No. 6574 |
| 3108a | Seq. ID No. 6575 | 1730751 | 1730838 | 1731467 | Seq. ID No. 6576 |
| 3108b | Seq. ID No. 6577 | 1730751 | 1730778 | 1731467 | Seq. ID No. 6578 |
| 3109 | Seq. ID No. 6579 | 1731554 | 1731557 | 1732228 | Seq. ID No. 6580 |
| 3110a | Seq. ID No. 6581 | 1732232 | 1732322 | 1732933 | Seq. ID No. 6582 |
| 3110b | Seq. ID No. 6583 | 1732232 | 1732244 | 1732933 | Seq. ID No. 6584 |
| 3113 | Seq. ID No. 6585 | 1733078 | 1733090 | 1734292 | Seq. ID No. 6586 |
| 3116 | Seq. ID No. 6587 | 1734912 | 1734921 | 1735769 | Seq. ID No. 6588 |
| 3118a | Seq. ID No. 6589 | 1735601 | 1735763 | 1736248 | Seq. ID No. 6590 |
| 3118b | Seq. ID No. 6591 | 1735601 | 1735673 | 1736248 | Seq. ID No. 6592 |
| 3119a | Seq. ID No. 6593 | 1736902 | 1736743 | 1736339 | Seq. ID No. 6594 |
| 3119b | Seq. ID No. 6595 | 1736902 | 1736782 | 1736339 | Seq. ID No. 6596 |
| 3119c | Seq. ID No. 6597 | 1736902 | 1736809 | 1736339 | Seq. ID No. 6598 |
| 3119d | Seq. ID No. 6599 | 1736902 | 1736848 | 1736339 | Seq. ID No. 6600 |
| 3119e | Seq. ID No. 6601 | 1736902 | 1736863 | 1736339 | Seq. ID No. 6602 |
| 3119f | Seq. ID No. 6603 | 1736902 | 1736872 | 1736339 | Seq. ID No. 6604 |
| 3121 | Seq. ID No. 6605 | 1736957 | 1736978 | 1737658 | Seq. ID No. 6606 |
| 3122a | Seq. ID No. 6607 | 1739218 | 1739212 | 1738022 | Seq. ID No. 6608 |
| 3122b | Seq. ID No. 6609 | 1739218 | 1739218 | 1738022 | Seq. ID No. 6610 |
| 3123a | Seq. ID No. 6611 | 1741016 | 1740947 | 1739265 | Seq. ID No. 6612 |
| 3123b | Seq. ID No. 6613 | 1741016 | 1741007 | 1739265 | Seq. ID No. 6614 |
| 3124 | Seq. ID No. 6615 | 1741584 | 1741551 | 1740970 | Seq. ID No. 6616 |
| 3126 | Seq. ID No. 6617 | 1742270 | 1742243 | 1741596 | Seq. ID No. 6618 |
| 3129a | Seq. ID No. 6619 | 1742959 | 1742902 | 1742246 | Seq. ID No. 6620 |
| 3129b | Seq. ID No. 6621 | 1742959 | 1742932 | 1742246 | Seq. ID No. 6622 |
| 3131 | Seq. ID No. 6623 | 1745173 | 1745167 | 1743977 | Seq. ID No. 6624 |
| 3134a | Seq. ID No. 6625 | 1747570 | 1747468 | 1745222 | Seq. ID No. 6626 |
| 3134b | Seq. ID No. 6627 | 1747570 | 1747507 | 1745222 | Seq. ID No. 6628 |
| 3138 | Seq. ID No. 6629 | 1748892 | 1748832 | 1747537 | Seq. ID No. 6630 |
| 3140 | Seq. ID No. 6631 | 1748324 | 1748327 | 1748560 | Seq. ID No. 6632 |
| 3141 | Seq. ID No. 6633 | 1750186 | 1750177 | 1748972 | Seq. ID No. 6634 |
| 3145a | Seq. ID No. 6635 | 1752277 | 1752205 | 1750973 | Seq. ID No. 6636 |
| 3145b | Seq. ID No. 6637 | 1752277 | 1752259 | 1750973 | Seq. ID No. 6638 |
| 3145c | Seq. ID No. 6639 | 1752277 | 1752274 | 1750973 | Seq. ID No. 6640 |
| 3147a | Seq. ID No. 6641 | 125 | 1754054 | 1752510 | Seq. ID No. 6642 |
| 3147b | Seq. ID No. 6643 | 125 | 122 | 1752510 | Seq. ID No. 6644 |
| 3147c | Seq. ID No. 6645 | 125 | 83 | 1752510 | Seq. ID No. 6646 |
| 3149a | Seq. ID No. 6647 | 7 | 1754326 | 1754123 | Seq. ID No. 6648 |
| 3150a | Seq. ID No. 6649 | 1753936 | 1754086 | 1754331 | Seq. ID No. 6650 |

[0104] Listed in Table 3 are ORFs that have been identified using Signal P algorithm (i.e. Signal P value of “YES”) were considered to be surface exposed. 250 ORFs met all four of the criteria of the SignalP program for having a signal peptide (listed as a ‘YES’ in the SignalP column). A subset of 208 of these ORFs was also predicted by the HMM SignalP software to contain a signal peptide (Signal peptide). Of these 208 ORFs, the PSORT program predicted 21 ORFs to be localized to the periplasm (Peri); 29 ORFs to be localized to the outer membrane (OM); 153 ORFs to be localized to the cytoplasmic inner membrane (IM); and 5 ORFs to be localized to the cytoplasm. Of the 42 ORFs predicted by HMM SignalP to be non-secretory proteins (Non-secretory protein), 6 ORFs were predicted by PSORT to be localized to the periplasm and 7 ORFs were predicted by PSORT to be localized to the cytoplasm, 180 ORFs were predicted to be localized to the IM and 31 ORFs were predicted to be localized to the OM.

TABLE 3
SIGNALP: YES

| | DNA SEQ ID | Protein SEQ ID | | |
|---|---|---|---|---|
| ORF Number | Number | Number | HMMSignalP | PSORT |
| 51c | Seq. ID No. 89 | Seq. ID No. 90 | Non-secretory protein | IM |
| 69 | Seq. ID No. 127 | Seq. ID No. 128 | Non-secretory protein | Cyto |
| 73a | Seq. ID No. 131 | Seq. ID No. 132 | Signal peptide | Cyto |
| 73b | Seq. ID No. 133 | Seq. ID No. 134 | Signal peptide | Cyto |
| 87a | Seq. ID No. 161 | Seq. ID No. 162 | Signal peptide | OM |
| 87b | Seq. ID No. 163 | Seq. ID No. 164 | Signal peptide | IM |
| 109c | Seq. ID No. 213 | Seq. ID No. 214 | Signal peptide | IM |
| 109d | Seq. ID No. 215 | Seq. ID No. 216 | Signal peptide | IM |
| 114 | Seq. ID No. 225 | Seq. ID No. 226 | Signal peptide | OM |
| 129a | Seq. ID No. 249 | Seq. ID No. 250 | Signal peptide | IM |
| 129b | Seq. ID No. 251 | Seq. ID No. 252 | Signal peptide | IM |
| 145b | Seq. ID No. 287 | Seq. ID No. 288 | Signal peptide | IM |
| 145c | Seq. ID No. 289 | Seq. ID No. 290 | Signal peptide | IM |
| 179a | Seq. ID No. 369 | Seq. ID No. 370 | Non-secretory protein | IM |
| 179b | Seq. ID No. 371 | Seq. ID No. 372 | Non-secretory protein | IM |
| 180b | Seq. ID No. 375 | Seq. ID No. 376 | Signal peptide | IM |
| 183a | Seq. ID No. 377 | Seq. ID No. 378 | Non-secretory protein | IM |
| 245a | Seq. ID No. 497 | Seq. ID No. 498 | Signal peptide | IM |
| 246a | Seq. ID No. 503 | Seq. ID No. 504 | Signal peptide | IM |
| 246b | Seq. ID No. 505 | Seq. ID No. 506 | Signal peptide | IM |
| 255b | Seq. ID No. 527 | Seq. ID No. 528 | Signal peptide | IM |
| 264b | Seq. ID No. 549 | Seq. ID No. 550 | Signal peptide | IM |
| 277c | Seq. ID No. 575 | Seq. ID No. 576 | Signal peptide | OM |
| 297 | Seq. ID No. 617 | Seq. ID No. 618 | Signal peptide | Peri |
| 318a | Seq. ID No. 657 | Seq. ID No. 658 | Signal peptide | OM |
| 318b | Seq. ID No. 659 | Seq. ID No. 660 | Signal peptide | OM |
| 318c | Seq. ID No. 661 | Seq. ID No. 662 | Signal peptide | IM |
| 324 | Seq. ID No. 675 | Seq. ID No. 676 | Signal peptide | OM |
| 342a | Seq. ID No. 715 | Seq. ID No. 716 | Signal peptide | IM |
| 342b | Seq. ID No. 717 | Seq. ID No. 718 | Signal peptide | IM |
| 349b | Seq. ID No. 745 | Seq. ID No. 746 | Signal peptide | OM |
| 349c | Seq. ID No. 747 | Seq. ID No. 748 | Signal peptide | OM |
| 352a | Seq. ID No. 755 | Seq. ID No. 756 | Signal peptide | IM |
| 352b | Seq. ID No. 757 | Seq. ID No. 758 | Signal peptide | IM |
| 352c | Seq. ID No. 759 | Seq. ID No. 760 | Signal peptide | IM |
| 354a | Seq. ID No. 761 | Seq. ID No. 762 | Signal peptide | IM |
| 356c | Seq. ID No. 773 | Seq. ID No. 774 | Non-secretory protein | IM |
| 372d | Seq. ID No. 807 | Seq. ID No. 808 | Signal peptide | OM |
| 448 | Seq. ID No. 967 | Seq. ID No. 968 | Signal peptide | IM |
| 451a | Seq. ID No. 973 | Seq. ID No. 974 | Non-secretory protein | Peri |
| 451b | Seq. ID No. 975 | Seq. ID No. 976 | Non-secretory protein | Peri |
| 464b | Seq. ID No. 1013 | Seq. ID No. 1014 | Signal peptide | IM |
| 471a | Seq. ID No. 1025 | Seq. ID No. 1026 | Non-secretory protein | Cyto |
| 471b | Seq. ID No. 1027 | Seq. ID No. 1028 | Non-secretory protein | Cyto |
| 472f | Seq. ID No. 1039 | Seq. ID No. 1040 | Signal peptide | IM |
| 492 | Seq. ID No. 1075 | Seq. ID No. 1076 | Signal peptide | OM |
| 499a | Seq. ID No. 1089 | Seq. ID No. 1090 | Non-secretory protein | IM |
| 547a | Seq. ID No. 1195 | Seq. ID No. 1196 | Signal peptide | OM |
| 547b | Seq. ID No. 1197 | Seq. ID No. 1198 | Signal peptide | IM |
| 553c | Seq. ID No. 1207 | Seq. ID No. 1208 | Non-secretory protein | IM |
| 571 | Seq. ID No. 1239 | Seq. ID No. 1240 | Non-secretory protein | Peri |
| 576a | Seq. ID No. 1243 | Seq. ID No. 1244 | Signal peptide | Peri |
| 576b | Seq. ID No. 1245 | Seq. ID No. 1246 | Signal peptide | IM |
| 587c | Seq. ID No. 1269 | Seq. ID No. 1270 | Signal peptide | IM |
| 609a | Seq. ID No. 1315 | Seq. ID No. 1316 | Signal peptide | IM |
| 609b | Seq. ID No. 1317 | Seq. ID No. 1318 | Signal peptide | IM |
| 613d | Seq. ID No. 1331 | Seq. ID No. 1332 | Signal peptide | IM |
| 631b | Seq. ID No. 1365 | Seq. ID No. 1366 | Signal peptide | IM |
| 631c | Seq. ID No. 1367 | Seq. ID No. 1368 | Signal peptide | IM |
| 631d | Seq. ID No. 1369 | Seq. ID No. 1370 | Signal peptide | IM |
| 679a | Seq. ID No. 1445 | Seq. ID No. 1446 | Signal peptide | Cyto |
| 679b | Seq. ID No. 1447 | Seq. ID No. 1448 | Signal peptide | IM |
| 722a | Seq. ID No. 1513 | Seq. ID No. 1514 | Signal peptide | IM |
| 722c | Seq. ID No. 1517 | Seq. ID No. 1518 | Signal peptide | IM |
| 738a | Seq. ID No. 1545 | Seq. ID No. 1546 | Signal peptide | IM |
| 738c | Seq. ID No. 1549 | Seq. ID No. 1550 | Non-secretory protein | IM |
| 743b | Seq. ID No. 1561 | Seq. ID No. 1562 | Signal peptide | IM |
| 746a | Seq. ID No. 1569 | Seq. ID No. 1570 | Non-secretory protein | IM |
| 746b | Seq. ID No. 1571 | Seq. ID No. 1572 | Signal peptide | IM |
| 754b | Seq. ID No. 1585 | Seq. ID No. 1586 | Signal peptide | IM |
| 786b | Seq. ID No. 1643 | Seq. ID No. 1644 | Signal peptide | Peri |
| 789c | Seq. ID No. 1653 | Seq. ID No. 1654 | Signal peptide | IM |
| 794b | Seq. ID No. 1661 | Seq. ID No. 1662 | Signal peptide | OM |
| 794c | Seq. ID No. 1663 | Seq. ID No. 1664 | Signal peptide | OM |
| 826 | Seq. ID No. 1707 | Seq. ID No. 1708 | Signal peptide | IM |
| 837b | Seq. ID No. 1733 | Seq. ID No. 1734 | Signal peptide | IM |
| 843 | Seq. ID No. 1737 | Seq. ID No. 1738 | Signal peptide | IM |
| 853b | Seq. ID No. 1755 | Seq. ID No. 1756 | Signal peptide | IM |
| 859a | Seq. ID No. 1765 | Seq. ID No. 1766 | Signal peptide | IM |
| 859b | Seq. ID No. 1767 | Seq. ID No. 1768 | Signal peptide | IM |
| 862 | Seq. ID No. 1775 | Seq. ID No. 1776 | Non-secretory protein | Peri |
| 870 | Seq. ID No. 1791 | Seq. ID No. 1792 | Signal peptide | OM |
| 876 | Seq. ID No. 1805 | Seq. ID No. 1806 | Signal peptide | Peri |
| 931 | Seq. ID No. 1875 | Seq. ID No. 1876 | Signal peptide | IM |
| 977a | Seq. ID No. 1969 | Seq. ID No. 1970 | Signal peptide | OM |
| 981a | Seq. ID No. 1981 | Seq. ID No. 1982 | Signal peptide | IM |
| 1017c | Seq. ID No. 2053 | Seq. ID No. 2054 | Signal peptide | IM |
| 1017d | Seq. ID No. 2055 | Seq. ID No. 2056 | Signal peptide | IM |
| 1036a | Seq. ID No. 2087 | Seq. ID No. 2088 | Signal peptide | IM |
| 1036b | Seq. ID No. 2089 | Seq. ID No. 2090 | Signal peptide | IM |
| 1036c | Seq. ID No. 2091 | Seq. ID No. 2092 | Signal peptide | IM |
| 1044a | Seq. ID No. 2105 | Seq. ID No. 2106 | Signal peptide | IM |
| 1047b | Seq. ID No. 2115 | Seq. ID No. 2116 | Signal peptide | OM |
| 1065a | Seq. ID No. 2149 | Seq. ID No. 2150 | Signal peptide | Peri |
| 1065b | Seq. ID No. 2151 | Seq. ID No. 2152 | Signal peptide | Peri |
| 1067 | Seq. ID No. 2159 | Seq. ID No. 2160 | Signal peptide | OM |
| 1077d | Seq. ID No. 2177 | Seq. ID No. 2178 | Signal peptide | IM |
| 1141a | Seq. ID No. 2277 | Seq. ID No. 2278 | Non-secretory protein | Cyto |
| 1146c | Seq. ID No. 2293 | Seq. ID No. 2294 | Signal peptide | IM |
| 1155c | Seq. ID No. 2321 | Seq. ID No. 2322 | Signal peptide | IM |
| 1167a | Seq. ID No. 2347 | Seq. ID No. 2348 | Signal peptide | Peri |
| 1168 | Seq. ID No. 2351 | Seq. ID No. 2352 | Signal peptide | Peri |
| 1169a | Seq. ID No. 2353 | Seq. ID No. 2354 | Signal peptide | IM |
| 1172 | Seq. ID No. 2365 | Seq. ID No. 2366 | Signal peptide | IM |
| 1182b | Seq. ID No. 2395 | Seq. ID No. 2396 | Non-secretory protein | IM |
| 1192b | Seq. ID No. 2421 | Seq. ID No. 2422 | Signal peptide | IM |
| 1196a | Seq. ID No. 2425 | Seq. ID No. 2426 | Signal peptide | Peri |
| 1196b | Seq. ID No. 2427 | Seq. ID No. 2428 | Signal peptide | Peri |
| 1197 | Seq. ID No. 2429 | Seq. ID No. 2430 | Signal peptide | IM |
| 1207 | Seq. ID No. 2449 | Seq. ID No. 2450 | Signal peptide | OM |
| 1212 | Seq. ID No. 2459 | Seq. ID No. 2460 | Signal peptide | IM |
| 1237 | Seq. ID No. 2525 | Seq. ID No. 2526 | Signal peptide | OM |
| 1241a | Seq. ID No. 2531 | Seq. ID No. 2532 | Signal peptide | IM |
| 1268b | Seq. ID No. 2607 | Seq. ID No. 2608 | Signal peptide | IM |
| 1288 | Seq. ID No. 2651 | Seq. ID No. 2652 | Signal peptide | IM |
| 1308a | Seq. ID No. 2679 | Seq. ID No. 2680 | Signal peptide | IM |
| 1315 | Seq. ID No. 2693 | Seq. ID No. 2694 | Signal peptide | IM |
| 1318 | Seq. ID No. 2699 | Seq. ID No. 2700 | Signal peptide | IM |
| 1319b | Seq. ID No. 2703 | Seq. ID No. 2704 | Signal peptide | IM |
| 1348 | Seq. ID No. 2753 | Seq. ID No. 2754 | Non-secretory protein | IM |
| 1366a | Seq. ID No. 2785 | Seq. ID No. 2786 | Signal peptide | Peri |
| 1381b | Seq. ID No. 2813 | Seq. ID No. 2814 | Signal peptide | IM |
| 1387a | Seq. ID No. 2829 | Seq. ID No. 2830 | Non-secretory protein | OM |
| 1393a | Seq. ID No. 2835 | Seq. ID No. 2836 | Signal peptide | Peri |
| 1393d | Seq. ID No. 2841 | Seq. ID No. 2842 | Signal peptide | IM |
| 1412a | Seq. ID No. 2879 | Seq. ID No. 2880 | Non-secretory protein | IM |
| 1412b | Seq. ID No. 2881 | Seq. ID No. 2882 | Signal peptide | IM |
| 1438 | Seq. ID No. 2935 | Seq. ID No. 2936 | Signal peptide | OM |
| 1439a | Seq. ID No. 2937 | Seq. ID No. 2938 | Signal peptide | IM |
| 1440b | Seq. ID No. 2949 | Seq. ID No. 2950 | Signal peptide | IM |
| 1446a | Seq. ID No. 2965 | Seq. ID No. 2966 | Non-secretory protein | IM |
| 1446b | Seq. ID No. 2967 | Seq. ID No. 2968 | Non-secretory protein | IM |
| 1448 | Seq. ID No. 2973 | Seq. ID No. 2974 | Signal peptide | IM |
| 1463a | Seq. ID No. 3007 | Seq. ID No. 3008 | Signal peptide | IM |
| 1463b | Seq. ID No. 3009 | Seq. ID No. 3010 | Signal peptide | IM |
| 1463c | Seq. ID No. 3011 | Seq. ID No. 3012 | Signal peptide | IM |
| 1470a | Seq. ID No. 3029 | Seq. ID No. 3030 | Signal peptide | IM |
| 1470b | Seq. ID No. 3031 | Seq. ID No. 3032 | Signal peptide | IM |
| 1503a | Seq. ID No. 3109 | Seq. ID No. 3110 | Non-secretory protein | IM |
| 1503b | Seq. ID No. 3111 | Seq. ID No. 3112 | Non-secretory protein | IM |
| 1559a | Seq. ID No. 3219 | Seq. ID No. 3220 | Signal peptide | IM |
| 1563 | Seq. ID No. 3223 | Seq. ID No. 3224 | Non-secretory protein | Cyto |
| 1584 | Seq. ID No. 3273 | Seq. ID No. 3274 | Non-secretory protein | Peri |
| 1594a | Seq. ID No. 3297 | Seq. ID No. 3298 | Signal peptide | IM |
| 1612 | Seq. ID No. 3331 | Seq. ID No. 3332 | Signal peptide | IM |
| 1616b | Seq. ID No. 3335 | Seq. ID No. 3336 | Signal peptide | IM |
| 1622a | Seq. ID No. 3341 | Seq. ID No. 3342 | Non-secretory protein | Cyto |
| 1624 | Seq. ID No. 3349 | Seq. ID No. 3350 | Signal peptide | Peri |
| 1625b | Seq. ID No. 3353 | Seq. ID No. 3354 | Signal peptide | IM |
| 1625c | Seq. ID No. 3355 | Seq. ID No. 3356 | Signal peptide | IM |
| 1634c | Seq. ID No. 3377 | Seq. ID No. 3378 | Signal peptide | IM |
| 1646b | Seq. ID No. 3391 | Seq. ID No. 3392 | Signal peptide | IM |
| 1659c | Seq. ID No. 3425 | Seq. ID No. 3426 | Signal peptide | IM |
| 1673a | Seq. ID No. 3449 | Seq. ID No. 3450 | Signal peptide | IM |
| 1688b | Seq. ID No. 3493 | Seq. ID No. 3494 | Signal peptide | IM |
| 1718b | Seq. ID No. 3573 | Seq. ID No. 3574 | Signal peptide | Cyto |
| 1743 | Seq. ID No. 3611 | Seq. ID No. 3612 | Signal peptide | IM |
| 1747 | Seq. ID No. 3619 | Seq. ID No. 3620 | Signal peptide | IM |
| 1784b | Seq. ID No. 3689 | Seq. ID No. 3690 | Signal peptide | IM |
| 1808a | Seq. ID No. 3753 | Seq. ID No. 3754 | Signal peptide | IM |
| 1808b | Seq. ID No. 3755 | Seq. ID No. 3756 | Signal peptide | IM |
| 1809c | Seq. ID No. 3765 | Seq. ID No. 3766 | Signal peptide | IM |
| 1812a | Seq. ID No. 3781 | Seq. ID No. 3782 | Signal peptide | IM |
| 1812b | Seq. ID No. 3783 | Seq. ID No. 3784 | Signal peptide | IM |
| 1842b | Seq. ID No. 3851 | Seq. ID No. 3852 | Signal peptide | IM |
| 1862a | Seq. ID No. 3903 | Seq. ID No. 3904 | Signal peptide | IM |
| 1919a | Seq. ID No. 4005 | Seq. ID No. 4006 | Signal peptide | Peri |
| 1919b | Seq. ID No. 4007 | Seq. ID No. 4008 | Signal peptide | IM |
| 1931b | Seq. ID No. 4027 | Seq. ID No. 4028 | Signal peptide | IM |
| 1946b | Seq. ID No. 4073 | Seq. ID No. 4074 | Signal peptide | IM |
| 1973 | Seq. ID No. 4137 | Seq. ID No. 4138 | Signal peptide | OM |
| 1977a | Seq. ID No. 4141 | Seq. ID No. 4142 | Signal peptide | OM |
| 1977b | Seq. ID No. 4143 | Seq. ID No. 4144 | Signal peptide | OM |
| 1977c | Seq. ID No. 4145 | Seq. ID No. 4146 | Signal peptide | OM |
| 2016c | Seq. ID No. 4225 | Seq. ID No. 4226 | Signal peptide | IM |
| 2074b | Seq. ID No. 4343 | Seq. ID No. 4344 | Signal peptide | OM |
| 2096a | Seq. ID No. 4385 | Seq. ID No. 4386 | Signal peptide | IM |
| 2101 | Seq. ID No. 4399 | Seq. ID No. 4400 | Signal peptide | Peri |
| 2140a | Seq. ID No. 4469 | Seq. ID No. 4470 | Signal peptide | IM |
| 2147a | Seq. ID No. 4483 | Seq. ID No. 4484 | Signal peptide | IM |
| 2150a | Seq. ID No. 4493 | Seq. ID No. 4494 | Signal peptide | IM |
| 2150b | Seq. ID No. 4495 | Seq. ID No. 4496 | Signal peptide | IM |
| 2165 | Seq. ID No. 4533 | Seq. ID No. 4534 | Signal peptide | IM |
| 2245 | Seq. ID No. 4699 | Seq. ID No. 4700 | Non-secretory protein | OM |
| 2253b | Seq. ID No. 4709 | Seq. ID No. 4710 | Signal peptide | IM |
| 2253c | Seq. ID No. 4711 | Seq. ID No. 4712 | Signal peptide | IM |
| 2264a | Seq. ID No. 4735 | Seq. ID No. 4736 | Non-secretory protein | Peri |
| 2308 | Seq. ID No. 4827 | Seq. ID No. 4828 | Signal peptide | OM |
| 2329b | Seq. ID No. 4871 | Seq. ID No. 4872 | Signal peptide | IM |
| 2329c | Seq. ID No. 4873 | Seq. ID No. 4874 | Signal peptide | IM |
| 2331 | Seq. ID No. 4879 | Seq. ID No. 4880 | Non-secretory protein | IM |
| 2358 | Seq. ID No. 4921 | Seq. ID No. 4922 | Signal peptide | IM |
| 2386b | Seq. ID No. 4981 | Seq. ID No. 4982 | Non-secretory protein | IM |
| 2453 | Seq. ID No. 5115 | Seq. ID No. 5116 | Signal peptide | OM |
| 2518a | Seq. ID No. 5267 | Seq. ID No. 5268 | Signal peptide | Cyto |
| 2550c | Seq. ID No. 5341 | Seq. ID No. 5342 | Signal peptide | IM |
| 2567b | Seq. ID No. 5387 | Seq. ID No. 5388 | Signal peptide | IM |
| 2616d | Seq. ID No. 5465 | Seq. ID No. 5466 | Signal peptide | IM |
| 2616e | Seq. ID No. 5467 | Seq. ID No. 5468 | Non-secretory protein | IM |
| 2618a | Seq. ID No. 5479 | Seq. ID No. 5480 | Non-secretory protein | IM |
| 2625a | Seq. ID No. 5497 | Seq. ID No. 5498 | Signal peptide | Peri |
| 2629b | Seq. ID No. 5513 | Seq. ID No. 5514 | Signal peptide | OM |
| 2648a | Seq. ID No. 5543 | Seq. ID No. 5544 | Signal peptide | IM |
| 2648b | Seq. ID No. 5545 | Seq. ID No. 5546 | Signal peptide | IM |
| 2659b | Seq. ID No. 5567 | Seq. ID No. 5568 | Non-secretory protein | IM |
| 2669a | Seq. ID No. 5587 | Seq. ID No. 5588 | Signal peptide | Peri |
| 2669b | Seq. ID No. 5589 | Seq. ID No. 5590 | Signal peptide | IM |
| 2669c | Seq. ID No. 5591 | Seq. ID No. 5592 | Signal peptide | IM |
| 2679b | Seq. ID No. 5611 | Seq. ID No. 5612 | Signal peptide | IM |
| 2680c | Seq. ID No. 5621 | Seq. ID No. 5622 | Signal peptide | IM |
| 2689b | Seq. ID No. 5641 | Seq. ID No. 5642 | Signal peptide | Peri |
| 2718a | Seq. ID No. 5681 | Seq. ID No. 5682 | Signal peptide | IM |
| 2734a | Seq. ID No. 5719 | Seq. ID No. 5720 | Signal peptide | IM |
| 2749e | Seq. ID No. 5771 | Seq. ID No. 5772 | Signal peptide | IM |
| 2757b | Seq. ID No. 5783 | Seq. ID No. 5784 | Signal peptide | IM |
| 2801b | Seq. ID No. 5895 | Seq. ID No. 5896 | Signal peptide | IM |
| 2805a | Seq. ID No. 5899 | Seq. ID No. 5900 | Signal peptide | IM |
| 2805b | Seq. ID No. 5901 | Seq. ID No. 5902 | Signal peptide | IM |
| 2818d | Seq. ID No. 5927 | Seq. ID No. 5928 | Signal peptide | IM |
| 2818e | Seq. ID No. 5929 | Seq. ID No. 5930 | Signal peptide | IM |
| 2822a | Seq. ID No. 5939 | Seq. ID No. 5940 | Signal peptide | IM |
| 2852 | Seq. ID No. 5987 | Seq. ID No. 5988 | Non-secretory protein | IM |
| 2862 | Seq. ID No. 6013 | Seq. ID No. 6014 | Non-secretory protein | Cyto |
| 2900a | Seq. ID No. 6087 | Seq. ID No. 6088 | Signal peptide | Peri |
| 2900b | Seq. ID No. 6089 | Seq. ID No. 6090 | Signal peptide | Peri |
| 2901a | Seq. ID No. 6091 | Seq. ID No. 6092 | Signal peptide | IM |
| 2901b | Seq. ID No. 6093 | Seq. ID No. 6094 | Non-secretory protein | IM |
| 2902 | Seq. ID No. 6095 | Seq. ID No. 6096 | Signal peptide | IM |
| 2906 | Seq. ID No. 6103 | Seq. ID No. 6104 | Signal peptide | IM |
| 2933b | Seq. ID No. 6169 | Seq. ID No. 6170 | Signal peptide | IM |
| 2941b | Seq. ID No. 6185 | Seq. ID No. 6186 | Signal peptide | IM |
| 2941c | Seq. ID No. 6187 | Seq. ID No. 6188 | Signal peptide | IM |
| 2943d | Seq. ID No. 6195 | Seq. ID No. 6196 | Non-secretory protein | IM |
| 2944b | Seq. ID No. 6197 | Seq. ID No. 6198 | Signal peptide | IM |
| 2948a | Seq. ID No. 6203 | Seq. ID No. 6204 | Signal peptide | IM |
| 2948b | Seq. ID No. 6205 | Seq. ID No. 6206 | Signal peptide | IM |
| 2955a | Seq. ID No. 6221 | Seq. ID No. 6222 | Signal peptide | IM |
| 2955b | Seq. ID No. 6223 | Seq. ID No. 6224 | Signal peptide | IM |
| 2955e | Seq. ID No. 6229 | Seq. ID No. 6230 | Signal peptide | IM |
| 2980b | Seq. ID No. 6291 | Seq. ID No. 6292 | Non-secretory protein | IM |
| 3037a | Seq. ID No. 6415 | Seq. ID No. 6416 | Signal peptide | OM |
| 3037b | Seq. ID No. 6417 | Seq. ID No. 6418 | Non-secretory protein | IM |
| 3064b | Seq. ID No. 6473 | Seq. ID No. 6474 | Signal peptide | Peri |
| 3079 | Seq. ID No. 6507 | Seq. ID No. 6508 | Non-secretory protein | IM |
| 3096b | Seq. ID No. 6543 | Seq. ID No. 6544 | Signal peptide | IM |
| 3119b | Seq. ID No. 6595 | Seq. ID No. 6596 | Signal peptide | IM |
| 3119c | Seq. ID No. 6597 | Seq. ID No. 6598 | Signal peptide | IM |
| 3119d | Seq. ID No. 6599 | Seq. ID No. 6600 | Signal peptide | IM |
| 3119e | Seq. ID No. 6601 | Seq. ID No. 6602 | Signal peptide | IM |
| 3119f | Seq. ID No. 6603 | Seq. ID No. 6604 | Signal peptide | IM |

[0105] Listed in Table 4 are all 526 ORFs of the SignalP program that met only three of the criteria of having a signal peptide (listed as a ‘yes’ in the SignalP column). A subset of 359 of these ORFs was also predicted by the HMM SignalP software to contain a signal peptide. Of these 359 ORFs, the PSORT program predicted 24 ORFs to be localized to the periplasm (Peri); 44 ORFs to be localized to the outer membrane (OM); 267 ORFs to be localized to the cytoplasmic membrane (IM); and 24 ORFs to be localized to the cytoplasm. Of the 167 ORFs predicted by HMM SignalP to be Non-secretory proteins, PSORT predicted 6 ORFs to be localized to the periplasm; 1 ORF to be localized to the outer membrane; 122 ORFs to be localized to the cytoplasmic membrane; and 38 ORFs to be localized to the cytoplasm. Also listed for all ORFs is the predicted number of transmembrane, a-helical hydrophobic domains predicted by the TopPred2 software (listed in the MSD column). If no value is listed, none has yet been determined. (The same is also the case for Tables 5 and 6).

TABLE 4
SIGNALP: YES

| ORF | DNA SEQ ID | Protein SEQ ID | | | |
|---|---|---|---|---|---|
| Number | Number | Number | HMMSignalP | PSORT | MSD |
| 4a | Seq. ID No. 7 | Seq. ID No. 8 | Signal peptide | IM | 4 |
| 4c | Seq. ID No. 11 | Seq. ID No. 12 | Non-secretory protein | IM | 12 |
| 16 | Seq. ID No. 23 | Seq. ID No. 24 | Non-secretory protein | IM | 0 |
| 38a | Seq. ID No. 45 | Seq. ID No. 46 | Signal peptide | OM | 1 |
| 38b | Seq. ID No. 47 | Seq. ID No. 48 | Signal peptide | OM | 1 |
| 40 | Seq. ID No. 53 | Seq. ID No. 54 | Signal peptide | IM | 1 |
| 41c | Seq. ID No. 59 | Seq. ID No. 60 | Non-secretory protein | IM | 1 |
| 44a | Seq. ID No. 65 | Seq. ID No. 66 | Signal peptide | IM | 2 |
| 44b | Seq. ID No. 67 | Seq. ID No. 68 | Signal peptide | IM | 2 |
| 51b | Seq. ID No. 87 | Seq. ID No. 88 | Signal peptide | IM | 9 |
| 55 | Seq. ID No. 91 | Seq. ID No. 92 | Non-secretory protein | IM | 1 |
| 79 | Seq. ID No. 139 | Seq. ID No. 140 | Non-secretory protein | IM | 2 |
| 83 | Seq. ID No. 151 | Seq. ID No. 152 | Non-secretory protein | IM | 2 |
| 86 | Seq. ID No. 159 | Seq. ID No. 160 | Signal peptide | Peri | 1 |
| 87c | Seq. ID No. 165 | Seq. ID No. 166 | Non-secretory protein | IM | 2 |
| 89 | Seq. ID No. 169 | Seq. ID No. 170 | Non-secretory protein | IM | 2 |
| 94 | Seq. ID No. 185 | Seq. ID No. 186 | Non-secretory protein | IM | 2 |
| 109b | Seq. ID No. 211 | Seq. ID No. 212 | Signal peptide | IM | 7 |
| 111a | Seq. ID No. 217 | Seq. ID No. 218 | Signal peptide | IM | 6 |
| 124a | Seq. ID No. 235 | Seq. ID No. 236 | Signal peptide | IM | 1 |
| 124b | Seq. ID No. 237 | Seq. ID No. 238 | Signal peptide | IM | 3 |
| 124c | Seq. ID No. 239 | Seq. ID No. 240 | Non-secretory protein | IM | 5 |
| 138a | Seq. ID No. 271 | Seq. ID No. 272 | Signal peptide | IM | 6 |
| 145a | Seq. ID No. 285 | Seq. ID No. 286 | Signal peptide | IM | 3 |
| 145d | Seq. ID No. 291 | Seq. ID No. 292 | Non-secretory protein | IM | 12 |
| 162a | Seq. ID No. 327 | Seq. ID No. 328 | Signal peptide | IM | 2 |
| 170 | Seq. ID No. 349 | Seq. ID No. 350 | Non-secretory protein | IM | 1 |
| 187a | Seq. ID No. 385 | Seq. ID No. 386 | Non-secretory protein | IM | 1 |
| 187b | Seq. ID No. 387 | Seq. ID No. 388 | Non-secretory protein | IM | 1 |
| 196 | Seq. ID No. 407 | Seq. ID No. 408 | Non-secretory protein | Cyto | 1 |
| 205 | Seq. ID No. 427 | Seq. ID No. 428 | Non-secretory protein | Cyto | |
| 207 | Seq. ID No. 431 | Seq. ID No. 432 | Non-secretory protein | IM | 0 |
| 223a | Seq. ID No. 455 | Seq. ID No. 456 | Signal peptide | Cyto | 1 |
| 223b | Seq. ID No. 457 | Seq. ID No. 458 | Signal peptide | Cyto | 1 |
| 241 | Seq. ID No. 495 | Seq. ID No. 496 | Signal peptide | IM | 1 |
| 245b | Seq. ID No. 499 | Seq. ID No. 500 | Signal peptide | IM | 10 |
| 248b | Seq. ID No. 511 | Seq. ID No. 512 | Signal peptide | IM | 9 |
| 249a | Seq. ID No. 513 | Seq. ID No. 514 | Signal peptide | OM | 1 |
| 249b | Seq. ID No. 515 | Seq. ID No. 516 | Signal peptide | IM | 1 |
| 255a | Seq. ID No. 525 | Seq. ID No. 526 | Signal peptide | IM | 6 |
| 263a | Seq. ID No. 545 | Seq. ID No. 546 | Signal peptide | OM | 1 |
| 263b | Seq. ID No. 547 | Seq. ID No. 548 | Signal peptide | IM | 1 |
| 268 | Seq. ID No. 557 | Seq. ID No. 558 | Signal peptide | Cyto | 1 |
| 273b | Seq. ID No. 569 | Seq. ID No. 570 | Signal peptide | IM | 12 |
| 282 | Seq. ID No. 589 | Seq. ID No. 590 | Non-secretory protein | Cyto | |
| 283a | Seq. ID No. 591 | Seq. ID No. 592 | Signal peptide | OM | 1 |
| 283b | Seq. ID No. 593 | Seq. ID No. 594 | Signal peptide | OM | 1 |
| 284a | Seq. ID No. 595 | Seq. ID No. 596 | Non-secretory protein | IM | 5 |
| 290b | Seq. ID No. 609 | Seq. ID No. 610 | Non-secretory protein | IM | |
| 311 | Seq. ID No. 637 | Seq. ID No. 638 | Signal peptide | IM | 6 |
| 313a | Seq. ID No. 639 | Seq. ID No. 640 | Signal peptide | IM | 2 |
| 313b | Seq. ID No. 641 | Seq. ID No. 642 | Signal peptide | IM | 3 |
| 317a | Seq. ID No. 653 | Seq. ID No. 654 | Signal peptide | IM | 2 |
| 321 | Seq. ID No. 669 | Seq. ID No. 670 | Signal peptide | OM | 1 |
| 327b | Seq. ID No. 679 | Seq. ID No. 680 | Signal peptide | IM | 5 |
| 342c | Seq. ID No. 719 | Seq. ID No. 720 | Signal peptide | IM | 4 |
| 342e | Seq. ID No. 723 | Seq. ID No. 724 | Signal peptide | IM | 10 |
| 346b | Seq. ID No. 739 | Seq. ID No. 740 | Non-secretory protein | Cyto | 0 |
| 350a | Seq. ID No. 749 | Seq. ID No. 750 | Signal peptide | IM | 6 |
| 350b | Seq. ID No. 751 | Seq. ID No. 752 | Signal peptide | IM | 6 |
| 354b | Seq. ID No. 763 | Seq. ID No. 764 | Signal peptide | IM | 6 |
| 354c | Seq. ID No. 765 | Seq. ID No. 766 | Signal peptide | IM | 6 |
| 356a | Seq. ID No. 769 | Seq. ID No. 770 | Signal peptide | IM | 3 |
| 358a | Seq. ID No. 777 | Seq. ID No. 778 | Signal peptide | IM | 3 |
| 358b | Seq. ID No. 779 | Seq. ID No. 780 | Signal peptide | IM | 10 |
| 358c | Seq. ID No. 781 | Seq. ID No. 782 | Signal peptide | IM | 10 |
| 382b | Seq. ID No. 819 | Seq. ID No. 820 | Signal peptide | OM | 1 |
| 418b | Seq. ID No. 895 | Seq. ID No. 896 | Non-secretory protein | IM | 7 |
| 420a | Seq. ID No. 903 | Seq. ID No. 904 | Non-secretory protein | IM | 1 |
| 420b | Seq. ID No. 905 | Seq. ID No. 906 | Non-secretory protein | IM | 1 |
| 422 | Seq. ID No. 909 | Seq. ID No. 910 | Non-secretory protein | Cyto | |
| 431 | Seq. ID No. 935 | Seq. ID No. 936 | Signal peptide | OM | 1 |
| 434 | Seq. ID No. 937 | Seq. ID No. 938 | Signal peptide | IM | 2 |
| 440 | Seq. ID No. 951 | Seq. ID No. 952 | Non-secretory protein | IM | 2 |
| 441b | Seq. ID No. 955 | Seq. ID No. 956 | Signal peptide | IM | 2 |
| 452b | Seq. ID No. 979 | Seq. ID No. 980 | Signal peptide | IM | 4 |
| 452c | Seq. ID No. 981 | Seq. ID No. 982 | Signal peptide | IM | 4 |
| 452d | Seq. ID No. 983 | Seq. ID No. 984 | Signal peptide | IM | 4 |
| 452e | Seq. ID No. 985 | Seq. ID No. 986 | Signal peptide | IM | 4 |
| 462 | Seq. ID No. 1005 | Seq. ID No. 1006 | Signal peptide | Peri | 1 |
| 463a | Seq. ID No. 1007 | Seq. ID No. 1008 | Signal peptide | Peri | 1 |
| 463b | Seq. ID No. 1009 | Seq. ID No. 1010 | Signal peptide | Peri | 1 |
| 464c | Seq. ID No. 1015 | Seq. ID No. 1016 | Signal peptide | IM | 11 |
| 465b | Seq. ID No. 1019 | Seq. ID No. 1020 | Signal peptide | OM | 3 |
| 472a | Seq. ID No. 1029 | Seq. ID No. 1030 | Signal peptide | IM | 4 |
| 472b | Seq. ID No. 1031 | Seq. ID No. 1032 | Signal peptide | IM | 5 |
| 477b | Seq. ID No. 1047 | Seq. ID No. 1048 | Non-secretory protein | Cyto | 0 |
| 499b | Seq. ID No. 1091 | Seq. ID No. 1092 | Non-secretory protein | IM | 2 |
| 510 | Seq. ID No. 1111 | Seq. ID No. 1112 | Non-secretory protein | Cyto | |
| 524b | Seq. ID No. 1137 | Seq. ID No. 1138 | Signal peptide | IM | 6 |
| 530a | Seq. ID No. 1151 | Seq. ID No. 1152 | Signal peptide | IM | |
| 530b | Seq. ID No. 1153 | Seq. ID No. 1154 | Non-secretory protein | Peri | |
| 541c | Seq. ID No. 1169 | Seq. ID No. 1170 | Signal peptide | IM | 5 |
| 542 | Seq. ID No. 1173 | Seq. ID No. 1174 | Signal peptide | IM | 1 |
| 545a | Seq. ID No. 1183 | Seq. ID No. 1184 | Signal peptide | IM | 3 |
| 546b | Seq. ID No. 1191 | Seq. ID No. 1192 | Non-secretory protein | IM | 1 |
| 546c | Seq. ID No. 1193 | Seq. ID No. 1194 | Non-secretory protein | IM | 1 |
| 556 | Seq. ID No. 1213 | Seq. ID No. 1214 | Signal peptide | IM | 2 |
| 561 | Seq. ID No. 1223 | Seq. ID No. 1224 | Signal peptide | IM | 5 |
| 564b | Seq. ID No. 1229 | Seq. ID No. 1230 | Signal peptide | IM | 4 |
| 578a | Seq. ID No. 1247 | Seq. ID No. 1248 | Non-secretory protein | Cyto | 0 |
| 585b | Seq. ID No. 1259 | Seq. ID No. 1260 | Signal peptide | Cyto | 0 |
| 595a | Seq. ID No. 1283 | Seq. ID No. 1284 | Signal peptide | IM | 2 |
| 603a | Seq. ID No. 1307 | Seq. ID No. 1308 | Non-secretory protein | Cyto | 1 |
| 610a | Seq. ID No. 1319 | Seq. ID No. 1320 | Signal peptide | IM | 1 |
| 610b | Seq. ID No. 1321 | Seq. ID No. 1322 | Non-secretory protein | IM | 1 |
| 613b | Seq. ID No. 1327 | Seq. ID No. 1328 | Signal peptide | IM | 7 |
| 619a | Seq. ID No. 1341 | Seq. ID No. 1342 | Signal peptide | Cyto | 1 |
| 619b | Seq. ID No. 1343 | Seq. ID No. 1344 | Signal peptide | Cyto | 1 |
| 623 | Seq. ID No. 1347 | Seq. ID No. 1348 | Signal peptide | Peri | 1 |
| 640 | Seq. ID No. 1389 | Seq. ID No. 1390 | Non-secretory protein | Cyto | 0 |
| 645 | Seq. ID No. 1401 | Seq. ID No. 1402 | Signal peptide | Peri | 1 |
| 665 | Seq. ID No. 1429 | Seq. ID No. 1430 | Signal peptide | IM | 3 |
| 699b | Seq. ID No. 1479 | Seq. ID No. 1480 | Non-secretory protein | IM | 1 |
| 739 | Seq. ID No. 1551 | Seq. ID No. 1552 | Signal peptide | IM | 2 |
| 743a | Seq. ID No. 1559 | Seq. ID No. 1560 | Signal peptide | IM | 2 |
| 749 | Seq. ID No. 1579 | Seq. ID No. 1580 | Signal peptide | IM | 1 |
| 754c | Seq. ID No. 1587 | Seq. ID No. 1588 | Non-secretory protein | IM | 9 |
| 772a | Seq. ID No. 1621 | Seq. ID No. 1622 | Signal peptide | IM | 5 |
| 775 | Seq. ID No. 1627 | Seq. ID No. 1628 | Non-secretory protein | IM | 7 |
| 779 | Seq. ID No. 1633 | Seq. ID No. 1634 | Signal peptide | Peri | 2 |
| 788a | Seq. ID No. 1645 | Seq. ID No. 1646 | Signal peptide | IM | 4 |
| 788b | Seq. ID No. 1647 | Seq. ID No. 1648 | Signal peptide | IM | 6 |
| 789a | Seq. ID No. 1649 | Seq. ID No. 1650 | Signal peptide | IM | 4 |
| 791 | Seq. ID No. 1655 | Seq. ID No. 1656 | Non-secretory protein | Cyto | |
| 794d | Seq. ID No. 1665 | Seq. ID No. 1666 | Signal peptide | OM | 0 |
| 795 | Seq. ID No. 1667 | Seq. ID No. 1668 | Non-secretory protein | Cyto | |
| 799a | Seq. ID No. 1671 | Seq. ID No. 1672 | Signal peptide | IM | 2 |
| 799d | Seq. ID No. 1677 | Seq. ID No. 1678 | Signal peptide | IM | 9 |
| 799e | Seq. ID No. 1679 | Seq. ID No. 1680 | Signal peptide | IM | 10 |
| 799f | Seq. ID No. 1681 | Seq. ID No. 1682 | Signal peptide | IM | 10 |
| 809b | Seq. ID No. 1695 | Seq. ID No. 1696 | Non-secretory protein | IM | 4 |
| 820a | Seq. ID No. 1703 | Seq. ID No. 1704 | Non-secretory protein | IM | 0 |
| 820b | Seq. ID No. 1705 | Seq. ID No. 1706 | Non-secretory protein | IM | 0 |
| 837a | Seq. ID No. 1731 | Seq. ID No. 1732 | Signal peptide | IM | 2 |
| 853a | Seq. ID No. 1753 | Seq. ID No. 1754 | Signal peptide | IM | 3 |
| 854 | Seq. ID No. 1759 | Seq. ID No. 1760 | Non-secretory protein | IM | 2 |
| 857 | Seq. ID No. 1763 | Seq. ID No. 1764 | Non-secretory protein | Peri | 1 |
| 868a | Seq. ID No. 1787 | Seq. ID No. 1788 | Signal peptide | IM | 3 |
| 873c | Seq. ID No. 1797 | Seq. ID No. 1798 | Signal peptide | OM | 1 |
| 886 | Seq. ID No. 1821 | Seq. ID No. 1822 | Signal peptide | OM | 1 |
| 887 | Seq. ID No. 1823 | Seq. ID No. 1824 | Signal peptide | IM | 1 |
| 904 | Seq. ID No. 1833 | Seq. ID No. 1834 | Non-secretory protein | Peri | |
| 908a | Seq. ID No. 1839 | Seq. ID No. 1840 | Signal peptide | IM | 6 |
| 908b | Seq. ID No. 1841 | Seq. ID No. 1842 | Non-secretory protein | IM | 9 |
| 908c | Seq. ID No. 1843 | Seq. ID No. 1844 | Non-secretory protein | IM | 9 |
| 939b | Seq. ID No. 1893 | Seq. ID No. 1894 | Signal peptide | IM | 10 |
| 951a | Seq. ID No. 1917 | Seq. ID No. 1918 | Signal peptide | OM | 0 |
| 951b | Seq. ID No. 1919 | Seq. ID No. 1920 | Signal peptide | IM | 0 |
| 977b | Seq. ID No. 1971 | Seq. ID No. 1972 | Non-secretory protein | Cyto | 1 |
| 987 | Seq. ID No. 1991 | Seq. ID No. 1992 | Signal peptide | IM | 5 |
| 998a | Seq. ID No. 2013 | Seq. ID No. 2014 | Signal peptide | IM | 5 |
| 998b | Seq. ID No. 2015 | Seq. ID No. 2016 | Non-secretory protein | IM | 5 |
| 999a | Seq. ID No. 2017 | Seq. ID No. 2018 | Signal peptide | IM | 2 |
| 999b | Seq. ID No. 2019 | Seq. ID No. 2020 | Signal peptide | IM | 2 |
| 1006a | Seq. ID No. 2033 | Seq. ID No. 2034 | Signal peptide | Peri | 1 |
| 1006b | Seq. ID No. 2035 | Seq. ID No. 2036 | Signal peptide | Cyto | 1 |
| 1017a | Seq. ID No. 2049 | Seq. ID No. 2050 | Signal peptide | IM | 4 |
| 1035a | Seq. ID No. 2081 | Seq. ID No. 2082 | Non-secretory protein | IM | 1 |
| 1035b | Seq. ID No. 2083 | Seq. ID No. 2084 | Non-secretory protein | IM | 1 |
| 1035c | Seq. ID No. 2085 | Seq. ID No. 2086 | Non-secretory protein | IM | 1 |
| 1044d | Seq. ID No. 2111 | Seq. ID No. 2112 | Non-secretory protein | IM | 3 |
| 1047a | Seq. ID No. 2113 | Seq. ID No. 2114 | Signal peptide | OM | 1 |
| 1050b | Seq. ID No. 2123 | Seq. ID No. 2124 | Signal peptide | IM | 7 |
| 1050c | Seq. ID No. 2125 | Seq. ID No. 2126 | Signal peptide | IM | 7 |
| 1050d | Seq. ID No. 2127 | Seq. ID No. 2128 | Signal peptide | IM | 7 |
| 1056a | Seq. ID No. 2131 | Seq. ID No. 2132 | Non-secretory protein | Cyto | |
| 1056b | Seq. ID No. 2133 | Seq. ID No. 2134 | Non-secretory protein | Cyto | |
| 1065c | Seq. ID No. 2153 | Seq. ID No. 2154 | Non-secretory protein | IM | 1 |
| 1069 | Seq. ID No. 2161 | Seq. ID No. 2162 | Non-secretory protein | IM | 1 |
| 1077a | Seq. ID No. 2171 | Seq. ID No. 2172 | Signal peptide | IM | 3 |
| 1077c | Seq. ID No. 2175 | Seq. ID No. 2176 | Non-secretory protein | IM | 12 |
| 1077e | Seq. ID No. 2179 | Seq. ID No. 2180 | Non-secretory protein | IM | 15 |
| 1081a | Seq. ID No. 2187 | Seq. ID No. 2188 | Signal peptide | Peri | 1 |
| 1091a | Seq. ID No. 2201 | Seq. ID No. 2202 | Non-secretory protein | Cyto | |
| 1091b | Seq. ID No. 2203 | Seq. ID No. 2204 | Non-secretory protein | Peri | |
| 1098b | Seq. ID No. 2221 | Seq. ID No. 2222 | Non-secretory protein | IM | 2 |
| 1111a | Seq. ID No. 2237 | Seq. ID No. 2238 | Signal peptide | IM | 6 |
| 1126b | Seq. ID No. 2249 | Seq. ID No. 2250 | Signal peptide | IM | 4 |
| 1126c | Seq. ID No. 2251 | Seq. ID No. 2252 | Signal peptide | IM | 4 |
| 1128 | Seq. ID No. 2255 | Seq. ID No. 2256 | Signal peptide | IM | 2 |
| 1135a | Seq. ID No. 2261 | Seq. ID No. 2262 | Non-secretory protein | IM | 1 |
| 1135b | Seq. ID No. 2263 | Seq. ID No. 2264 | Non-secretory protein | IM | 1 |
| 1140a | Seq. ID No. 2271 | Seq. ID No. 2272 | Signal peptide | IM | 2 |
| 1141b | Seq. ID No. 2279 | Seq. ID No. 2280 | Non-secretory protein | Cyto | 1 |
| 1144a | Seq. ID No. 2283 | Seq. ID No. 2284 | Signal peptide | IM | 2 |
| 1144b | Seq. ID No. 2285 | Seq. ID No. 2286 | Non-secretory protein | IM | 4 |
| 1146a | Seq. ID No. 2289 | Seq. ID No. 2290 | Signal peptide | IM | 3 |
| 1146d | Seq. ID No. 2295 | Seq. ID No. 2296 | Signal peptide | IM | 8 |
| 1152b | Seq. ID No. 2305 | Seq. ID No. 2306 | Signal peptide | IM | 5 |
| 1152c | Seq. ID No. 2307 | Seq. ID No. 2308 | Signal peptide | IM | 6 |
| 1155a | Seq. ID No. 2317 | Seq. ID No. 2318 | Signal peptide | IM | 3 |
| 1155b | Seq. ID No. 2319 | Seq. ID No. 2320 | Signal peptide | IM | 4 |
| 1155d | Seq. ID No. 2323 | Seq. ID No. 2324 | Signal peptide | IM | 6 |
| 1155e | Seq. ID No. 2325 | Seq. ID No. 2326 | Signal peptide | IM | 9 |
| 1165 | Seq. ID No. 2343 | Seq. ID No. 2344 | Signal peptide | OM | 1 |
| 1167b | Seq. ID No. 2349 | Seq. ID No. 2350 | Signal peptide | IM | 2 |
| 1180b | Seq. ID No. 2385 | Seq. ID No. 2386 | Non-secretory protein | IM | 2 |
| 1182a | Seq. ID No. 2393 | Seq. ID No. 2394 | Signal peptide | IM | 1 |
| 1194 | Seq. ID No. 2423 | Seq. ID No. 2424 | Non-secretory protein | IM | 1 |
| 1209 | Seq. ID No. 2453 | Seq. ID No. 2454 | Non-secretory protein | IM | 4 |
| 1224c | Seq. ID No. 2491 | Seq. ID No. 2492 | Signal peptide | IM | 6 |
| 1228a | Seq. ID No. 2497 | Seq. ID No. 2498 | Signal peptide | IM | 1 |
| 1228b | Seq. ID No. 2499 | Seq. ID No. 2500 | Signal peptide | IM | 2 |
| 1231 | Seq. ID No. 2507 | Seq. ID No. 2508 | Signal peptide | OM | 1 |
| 1234a | Seq. ID No. 2515 | Seq. ID No. 2516 | Signal peptide | IM | 4 |
| 1234b | Seq. ID No. 2517 | Seq. ID No. 2518 | Signal peptide | IM | 4 |
| 1235 | Seq. ID No. 2521 | Seq. ID No. 2522 | Non-secretory protein | Cyto | 1 |
| 1236a | Seq. ID No. 2523 | Seq. ID No. 2524 | Signal peptide | IM | 2 |
| 1239 | Seq. ID No. 2527 | Seq. ID No. 2528 | Signal peptide | OM | 1 |
| 1241b | Seq. ID No. 2533 | Seq. ID No. 2534 | Signal peptide | IM | 7 |
| 1241c | Seq. ID No. 2535 | Seq. ID No. 2536 | Signal peptide | IM | 7 |
| 1245a | Seq. ID No. 2541 | Seq. ID No. 2542 | Signal peptide | IM | 6 |
| 1245b | Seq. ID No. 2543 | Seq. ID No. 2544 | Signal peptide | IM | 10 |
| 1245d | Seq. ID No. 2547 | Seq. ID No. 2548 | Non-secretory protein | IM | 12 |
| 1245e | Seq. ID No. 2549 | Seq. ID No. 2550 | Non-secretory protein | IM | 12 |
| 1250b | Seq. ID No. 2557 | Seq. ID No. 2558 | Signal peptide | IM | 8 |
| 1253c | Seq. ID No. 2573 | Seq. ID No. 2574 | Non-secretory protein | IM | 7 |
| 1258a | Seq. ID No. 2583 | Seq. ID No. 2584 | Signal peptide | IM | 5 |
| 1267a | Seq. ID No. 2601 | Seq. ID No. 2602 | Signal peptide | IM | 2 |
| 1267b | Seq. ID No. 2603 | Seq. ID No. 2604 | Non-secretory protein | IM | 3 |
| 1275a | Seq. ID No. 2621 | Seq. ID No. 2622 | Signal peptide | Cyto | 1 |
| 1289 | Seq. ID No. 2653 | Seq. ID No. 2654 | Non-secretory protein | IM | 1 |
| 1308b | Seq. ID No. 2681 | Seq. ID No. 2682 | Signal peptide | IM | 4 |
| 1314b | Seq. ID No. 2691 | Seq. ID No. 2692 | Signal peptide | IM | 1 |
| 1319a | Seq. ID No. 2701 | Seq. ID No. 2702 | Signal peptide | IM | 4 |
| 1335a | Seq. ID No. 2733 | Seq. ID No. 2734 | Signal peptide | OM | 2 |
| 1338 | Seq. ID No. 2739 | Seq. ID No. 2740 | Non-secretory protein | IM | 1 |
| 1375 | Seq. ID No. 2801 | Seq. ID No. 2802 | Signal peptide | Cyto | 0 |
| 1379 | Seq. ID No. 2807 | Seq. ID No. 2808 | Non-secretory protein | IM | 1 |
| 1382 | Seq. ID No. 2815 | Seq. ID No. 2816 | Signal peptide | OM | 1 |
| 1384a | Seq. ID No. 2819 | Seq. ID No. 2820 | Signal peptide | IM | 2 |
| 1384b | Seq. ID No. 2821 | Seq. ID No. 2822 | Signal peptide | IM | 2 |
| 1384c | Seq. ID No. 2823 | Seq. ID No. 2824 | Signal peptide | IM | 2 |
| 1389a | Seq. ID No. 2833 | Seq. ID No. 2834 | Signal peptide | Cyto | 0 |
| 1393b | Seq. ID No. 2837 | Seq. ID No. 2838 | Signal peptide | IM | 2 |
| 1393c | Seq. ID No. 2839 | Seq. ID No. 2840 | Signal peptide | IM | 3 |
| 1395a | Seq. ID No. 2845 | Seq. ID No. 2846 | Signal peptide | Cyto | |
| 1399a | Seq. ID No. 2853 | Seq. ID No. 2854 | Signal peptide | IM | 2 |
| 1402c | Seq. ID No. 2861 | Seq. ID No. 2862 | Signal peptide | IM | 2 |
| 1407b | Seq. ID No. 2865 | Seq. ID No. 2866 | Non-secretory protein | IM | 1 |
| 1411a | Seq. ID No. 2873 | Seq. ID No. 2874 | Signal peptide | IM | 3 |
| 1411b | Seq. ID No. 2875 | Seq. ID No. 2876 | Non-secretory protein | IM | 4 |
| 1411c | Seq. ID No. 2877 | Seq. ID No. 2878 | Non-secretory protein | IM | 6 |
| 1414a | Seq. ID No. 2883 | Seq. ID No. 2884 | Non-secretory protein | IM | 0 |
| 1419 | Seq. ID No. 2895 | Seq. ID No. 2896 | Non-secretory protein | IM | |
| 1426a | Seq. ID No. 2905 | Seq. ID No. 2906 | Signal peptide | IM | 4 |
| 1439b | Seq. ID No. 2939 | Seq. ID No. 2940 | Signal peptide | IM | 5 |
| 1439c | Seq. ID No. 2941 | Seq. ID No. 2942 | Signal peptide | IM | 6 |
| 1440a | Seq. ID No. 2947 | Seq. ID No. 2948 | Signal peptide | IM | 6 |
| 1452a | Seq. ID No. 2981 | Seq. ID No. 2982 | Signal peptide | IM | 4 |
| 1452b | Seq. ID No. 2983 | Seq. ID No. 2984 | Signal peptide | IM | 4 |
| 1454 | Seq. ID No. 2987 | Seq. ID No. 2988 | Signal peptide | Cyto | 1 |
| 1455b | Seq. ID No. 2991 | Seq. ID No. 2992 | Signal peptide | OM | 1 |
| 1457a | Seq. ID No. 2995 | Seq. ID No. 2996 | Signal peptide | IM | 3 |
| 1459 | Seq. ID No. 3001 | Seq. ID No. 3002 | Non-secretory protein | IM | 1 |
| 1462b | Seq. ID No. 3005 | Seq. ID No. 3006 | Signal peptide | IM | 6 |
| 1467 | Seq. ID No. 3021 | Seq. ID No. 3022 | Non-secretory protein | Cyto | 2 |
| 1469b | Seq. ID No. 3025 | Seq. ID No. 3026 | Signal peptide | IM | 5 |
| 1475 | Seq. ID No. 3043 | Seq. ID No. 3044 | Signal peptide | OM | 1 |
| 1476 | Seq. ID No. 3045 | Seq. ID No. 3046 | Non-secretory protein | IM | 5 |
| 1488a | Seq. ID No. 3073 | Seq. ID No. 3074 | Signal peptide | IM | 1 |
| 1488b | Seq. ID No. 3075 | Seq. ID No. 3076 | Signal peptide | IM | 2 |
| 1520 | Seq. ID No. 3155 | Seq. ID No. 3156 | Signal peptide | Peri | 1 |
| 1530a | Seq. ID No. 3163 | Seq. ID No. 3164 | Signal peptide | OM | 1 |
| 1530b | Seq. ID No. 3165 | Seq. ID No. 3166 | Signal peptide | IM | 1 |
| 1533a | Seq. ID No. 3167 | Seq. ID No. 3168 | Non-secretory protein | IM | 0 |
| 1543 | Seq. ID No. 3183 | Seq. ID No. 3184 | Signal peptide | OM | 1 |
| 1557a | Seq. ID No. 3213 | Seq. ID No. 3214 | Signal peptide | IM | 4 |
| 1557b | Seq. ID No. 3215 | Seq. ID No. 3216 | Signal peptide | IM | 5 |
| 1569 | Seq. ID No. 3235 | Seq. ID No. 3236 | Non-secretory protein | IM | 2 |
| 1572c | Seq. ID No. 3245 | Seq. ID No. 3246 | Signal peptide | IM | 10 |
| 1580a | Seq. ID No. 3261 | Seq. ID No. 3262 | Signal peptide | IM | 1 |
| 1580b | Seq. ID No. 3263 | Seq. ID No. 3264 | Signal peptide | IM | 1 |
| 1581 | Seq. ID No. 3265 | Seq. ID No. 3266 | Non-secretory protein | IM | 1 |
| 1582b | Seq. ID No. 3269 | Seq. ID No. 3270 | Signal peptide | IM | 1 |
| 1582c | Seq. ID No. 3271 | Seq. ID No. 3272 | Non-secretory protein | IM | 1 |
| 1585a | Seq. ID No. 3275 | Seq. ID No. 3276 | Signal peptide | IM | 1 |
| 1585b | Seq. ID No. 3277 | Seq. ID No. 3278 | Signal peptide | IM | 1 |
| 1606a | Seq. ID No. 3317 | Seq. ID No. 3318 | Signal peptide | IM | 1 |
| 1608 | Seq. ID No. 3325 | Seq. ID No. 3326 | Signal peptide | Cyto | 1 |
| 1619 | Seq. ID No. 3337 | Seq. ID No. 3338 | Signal peptide | OM | 1 |
| 1625a | Seq. ID No. 3351 | Seq. ID No. 3352 | Signal peptide | IM | 4 |
| 1646a | Seq. ID No. 3389 | Seq. ID No. 3390 | Signal peptide | IM | 2 |
| 1649a | Seq. ID No. 3405 | Seq. ID No. 3406 | Signal peptide | Peri | 2 |
| 1657 | Seq. ID No. 3419 | Seq. ID No. 3420 | Non-secretory protein | Cyto | |
| 1659a | Seq. ID No. 3421 | Seq. ID No. 3422 | Signal peptide | OM | 1 |
| 1659b | Seq. ID No. 3423 | Seq. ID No. 3424 | Non-secretory protein | IM | 9 |
| 1673b | Seq. ID No. 3451 | Seq. ID No. 3452 | Signal peptide | IM | 8 |
| 1673c | Seq. ID No. 3453 | Seq. ID No. 3454 | Signal peptide | IM | 10 |
| 1673d | Seq. ID No. 3455 | Seq. ID No. 3456 | Signal peptide | IM | 12 |
| 1688a | Seq. ID No. 3491 | Seq. ID No. 3492 | Signal peptide | IM | 3 |
| 1688c | Seq. ID No. 3495 | Seq. ID No. 3496 | Non-secretory protein | IM | 11 |
| 1690a | Seq. ID No. 3503 | Seq. ID No. 3504 | Signal peptide | IM | 1 |
| 1690b | Seq. ID No. 3505 | Seq. ID No. 3506 | Signal peptide | IM | 2 |
| 1694c | Seq. ID No. 3517 | Seq. ID No. 3518 | Signal peptide | IM | 1 |
| 1694d | Seq. ID No. 3519 | Seq. ID No. 3520 | Signal peptide | IM | 1 |
| 1705a | Seq. ID No. 3545 | Seq. ID No. 3546 | Non-secretory protein | Cyto | |
| 1705b | Seq. ID No. 3547 | Seq. ID No. 3548 | Non-secretory protein | Cyto | |
| 1718a | Seq. ID No. 3571 | Seq. ID No. 3572 | Non-secretory protein | Cyto | |
| 1735a | Seq. ID No. 3593 | Seq. ID No. 3594 | Signal peptide | OM | 1 |
| 1745 | Seq. ID No. 3617 | Seq. ID No. 3618 | Signal peptide | Peri | 0 |
| 1749a | Seq. ID No. 3621 | Seq. ID No. 3622 | Signal peptide | IM | 3 |
| 1752b | Seq. ID No. 3629 | Seq. ID No. 3630 | Signal peptide | Peri | 1 |
| 1769b | Seq. ID No. 3663 | Seq. ID No. 3664 | Non-secretory protein | IM | 7 |
| 1790a | Seq. ID No. 3701 | Seq. ID No. 3702 | Non-secretory protein | Cyto | 2 |
| 1790b | Seq. ID No. 3703 | Seq. ID No. 3704 | Non-secretory protein | Cyto | 3 |
| 1798a | Seq. ID No. 3723 | Seq. ID No. 3724 | Signal peptide | IM | 2 |
| 1804a | Seq. ID No. 3737 | Seq. ID No. 3738 | Non-secretory protein | IM | 2 |
| 1805 | Seq. ID No. 3741 | Seq. ID No. 3742 | Signal peptide | IM | 3 |
| 1806b | Seq. ID No. 3745 | Seq. ID No. 3746 | Signal peptide | IM | 5 |
| 1806c | Seq. ID No. 3747 | Seq. ID No. 3748 | Non-secretory protein | IM | 5 |
| 1808d | Seq. ID No. 3759 | Seq. ID No. 3760 | Non-secretory protein | IM | 15 |
| 1809b | Seq. ID No. 3763 | Seq. ID No. 3764 | Signal peptide | IM | 7 |
| 1809d | Seq. ID No. 3767 | Seq. ID No. 3768 | Non-secretory protein | IM | 12 |
| 1809e | Seq. ID No. 3769 | Seq. ID No. 3770 | Non-secretory protein | IM | 14 |
| 1809f | Seq. ID No. 3771 | Seq. ID No. 3772 | Non-secretory protein | IM | 14 |
| 1813 | Seq. ID No. 3785 | Seq. ID No. 3786 | Non-secretory protein | IM | 1 |
| 1816a | Seq. ID No. 3793 | Seq. ID No. 3794 | Signal peptide | Peri | 1 |
| 1825 | Seq. ID No. 3813 | Seq. ID No. 3814 | Signal peptide | IM | 2 |
| 1838a | Seq. ID No. 3837 | Seq. ID No. 3838 | Signal peptide | IM | 3 |
| 1838b | Seq. ID No. 3839 | Seq. ID No. 3840 | Signal peptide | IM | 4 |
| 1845b | Seq. ID No. 3861 | Seq. ID No. 3862 | Signal peptide | IM | 8 |
| 1848a | Seq. ID No. 3865 | Seq. ID No. 3866 | Signal peptide | IM | 7 |
| 1857b | Seq. ID No. 3889 | Seq. ID No. 3890 | Signal peptide | IM | 5 |
| 1857c | Seq. ID No. 3891 | Seq. ID No. 3892 | Signal peptide | IM | 6 |
| 1858 | Seq. ID No. 3895 | Seq. ID No. 3896 | Signal peptide | Cyto | 0 |
| 1868 | Seq. ID No. 3915 | Seq. ID No. 3916 | Signal peptide | IM | 1 |
| 1873b | Seq. ID No. 3923 | Seq. ID No. 3924 | Signal peptide | Peri | 1 |
| 1873c | Seq. ID No. 3925 | Seq. ID No. 3926 | Signal peptide | Peri | 1 |
| 1875c | Seq. ID No. 3929 | Seq. ID No. 3930 | Non-secretory protein | IM | 1 |
| 1896b | Seq. ID No. 3965 | Seq. ID No. 3966 | Non-secretory protein | IM | 2 |
| 1898b | Seq. ID No. 3975 | Seq. ID No. 3976 | Signal peptide | IM | 4 |
| 1900 | Seq. ID No. 3979 | Seq. ID No. 3980 | Non-secretory protein | Cyto | 1 |
| 1917a | Seq. ID No. 3995 | Seq. ID No. 3996 | Signal peptide | IM | 0 |
| 1917b | Seq. ID No. 3997 | Seq. ID No. 3998 | Signal peptide | IM | 0 |
| 1919c | Seq. ID No. 4009 | Seq. ID No. 4010 | Signal peptide | IM | 1 |
| 1936 | Seq. ID No. 4039 | Seq. ID No. 4040 | Signal peptide | IM | 6 |
| 1937a | Seq. ID No. 4041 | Seq. ID No. 4042 | Signal peptide | IM | 2 |
| 1941b | Seq. ID No. 4061 | Seq. ID No. 4062 | Signal peptide | IM | 4 |
| 1950 | Seq. ID No. 4079 | Seq. ID No. 4080 | Signal peptide | OM | 1 |
| 1951a | Seq. ID No. 4081 | Seq. ID No. 4082 | Signal peptide | IM | 3 |
| 1960c | Seq. ID No. 4111 | Seq. ID No. 4112 | Signal peptide | IM | 1 |
| 1961 | Seq. ID No. 4113 | Seq. ID No. 4114 | Non-secretory protein | IM | 1 |
| 1972 | Seq. ID No. 4135 | Seq. ID No. 4136 | Signal peptide | Cyto | 1 |
| 1976 | Seq. ID No. 4139 | Seq. ID No. 4140 | Signal peptide | IM | 1 |
| 1981 | Seq. ID No. 4155 | Seq. ID No. 4156 | Non-secretory protein | Cyto | 1 |
| 1991 | Seq. ID No. 4181 | Seq. ID No. 4182 | Signal peptide | Cyto | 1 |
| 2008 | Seq. ID No. 4203 | Seq. ID No. 4204 | Non-secretory protein | IM | 2 |
| 2016a | Seq. ID No. 4221 | Seq. ID No. 4222 | Signal peptide | IM | 2 |
| 2024b | Seq. ID No. 4247 | Seq. ID No. 4248 | Signal peptide | IM | 2 |
| 2025 | Seq. ID No. 4253 | Seq. ID No. 4254 | Signal peptide | OM | 1 |
| 2030a | Seq. ID No. 4257 | Seq. ID No. 4258 | Signal peptide | IM | 4 |
| 2030b | Seq. ID No. 4259 | Seq. ID No. 4260 | Signal peptide | IM | 5 |
| 2030c | Seq. ID No. 4261 | Seq. ID No. 4262 | Signal peptide | IM | 5 |
| 2030d | Seq. ID No. 4263 | Seq. ID No. 4264 | Signal peptide | IM | 5 |
| 2035b | Seq. ID No. 4269 | Seq. ID No. 4270 | Signal peptide | Cyto | 0 |
| 2059a | Seq. ID No. 4311 | Seq. ID No. 4312 | Signal peptide | IM | 2 |
| 2092 | Seq. ID No. 4379 | Seq. ID No. 4380 | Signal peptide | IM | 2 |
| 2096c | Seq. ID No. 4389 | Seq. ID No. 4390 | Signal peptide | IM | 10 |
| 2096d | Seq. ID No. 4391 | Seq. ID No. 4392 | Signal peptide | IM | 10 |
| 2140b | Seq. ID No. 4471 | Seq. ID No. 4472 | Non-secretory protein | IM | 5 |
| 2142a | Seq. ID No. 4473 | Seq. ID No. 4474 | Signal peptide | IM | 1 |
| 2146 | Seq. ID No. 4481 | Seq. ID No. 4482 | Signal peptide | OM | 1 |
| 2161a | Seq. ID No. 4525 | Seq. ID No. 4526 | Non-secretory protein | Cyto | 1 |
| 2175 | Seq. ID No. 4551 | Seq. ID No. 4552 | Non-secretory protein | IM | 2 |
| 2177b | Seq. ID No. 4561 | Seq. ID No. 4562 | Non-secretory protein | IM | 1 |
| 2182 | Seq. ID No. 4573 | Seq. ID No. 4574 | Non-secretory protein | IM | 1 |
| 2208a | Seq. ID No. 4617 | Seq. ID No. 4618 | Non-secretory protein | Cyto | 0 |
| 2219a | Seq. ID No. 4639 | Seq. ID No. 4640 | Signal peptide | IM | 1 |
| 2225 | Seq. ID No. 4659 | Seq. ID No. 4660 | Signal peptide | OM | 0 |
| 2236a | Seq. ID No. 4681 | Seq. ID No. 4682 | Signal peptide | IM | 2 |
| 2246 | Seq. ID No. 4701 | Seq. ID No. 4702 | Non-secretory protein | IM | |
| 2249 | Seq. ID No. 4705 | Seq. ID No. 4706 | Signal peptide | OM | 1 |
| 2253d | Seq. ID No. 4713 | Seq. ID No. 4714 | Non-secretory protein | IM | 7 |
| 2255b | Seq. ID No. 4717 | Seq. ID No. 4718 | Signal peptide | IM | 6 |
| 2257 | Seq. ID No. 4721 | Seq. ID No. 4722 | Non-secretory protein | IM | 0 |
| 2264b | Seq. ID No. 4737 | Seq. ID No. 4738 | Signal peptide | IM | 1 |
| 2268 | Seq. ID No. 4741 | Seq. ID No. 4742 | Non-secretory protein | Cyto | 0 |
| 2300 | Seq. ID No. 4813 | Seq. ID No. 4814 | Signal peptide | IM | 4 |
| 2302 | Seq. ID No. 4817 | Seq. ID No. 4818 | Non-secretory protein | IM | 1 |
| 2303 | Seq. ID No. 4819 | Seq. ID No. 4820 | Non-secretory protein | IM | 1 |
| 2309a | Seq. ID No. 4829 | Seq. ID No. 4830 | Non-secretory protein | IM | 2 |
| 2309b | Seq. ID No. 4831 | Seq. ID No. 4832 | Non-secretory protein | IM | 2 |
| 2317 | Seq. ID No. 4851 | Seq. ID No. 4852 | Non-secretory protein | IM | 2 |
| 2329a | Seq. ID No. 4869 | Seq. ID No. 4870 | Signal peptide | IM | 1 |
| 2329d | Seq. ID No. 4875 | Seq. ID No. 4876 | Signal peptide | IM | 7 |
| 2350a | Seq. ID No. 4913 | Seq. ID No. 4914 | Non-secretory protein | Cyto | |
| 2357 | Seq. ID No. 4919 | Seq. ID No. 4920 | Signal peptide | IM | 2 |
| 2363a | Seq. ID No. 4929 | Seq. ID No. 4930 | Signal peptide | IM | 1 |
| 2363b | Seq. ID No. 4931 | Seq. ID No. 4932 | Signal peptide | IM | 1 |
| 2386c | Seq. ID No. 4983 | Seq. ID No. 4984 | Non-secretory protein | IM | 0 |
| 2394 | Seq. ID No. 4993 | Seq. ID No. 4994 | Non-secretory protein | IM | 1 |
| 2402a | Seq. ID No. 5011 | Seq. ID No. 5012 | Non-secretory protein | IM | 1 |
| 2407a | Seq. ID No. 5023 | Seq. ID No. 5024 | Non-secretory protein | IM | 0 |
| 2412 | Seq. ID No. 5031 | Seq. ID No. 5032 | Signal peptide | IM | 2 |
| 2413a | Seq. ID No. 5033 | Seq. ID No. 5034 | Non-secretory protein | Cyto | 0 |
| 2413b | Seq. ID No. 5035 | Seq. ID No. 5036 | Non-secretory protein | Peri | 0 |
| 2416c | Seq. ID No. 5043 | Seq. ID No. 5044 | Non-secretory protein | IM | 1 |
| 2423a | Seq. ID No. 5061 | Seq. ID No. 5062 | Signal peptide | IM | 5 |
| 2423b | Seq. ID No. 5063 | Seq. ID No. 5064 | Signal peptide | IM | 5 |
| 2424c | Seq. ID No. 5069 | Seq. ID No. 5070 | Signal peptide | IM | 1 |
| 2445 | Seq. ID No. 5103 | Seq. ID No. 5104 | Signal peptide | IM | 1 |
| 2456b | Seq. ID No. 5121 | Seq. ID No. 5122 | Non-secretory protein | IM | 5 |
| 2456c | Seq. ID No. 5123 | Seq. ID No. 5124 | Signal peptide | IM | 8 |
| 2458b | Seq. ID No. 5131 | Seq. ID No. 5132 | Signal peptide | IM | 6 |
| 2458c | Seq. ID No. 5133 | Seq. ID No. 5134 | Signal peptide | IM | 7 |
| 2458d | Seq. ID No. 5135 | Seq. ID No. 5136 | Signal peptide | IM | 7 |
| 2458e | Seq. ID No. 5137 | Seq. ID No. 5138 | Signal peptide | IM | 8 |
| 2458f | Seq. ID No. 5139 | Seq. ID No. 5140 | Signal peptide | IM | 9 |
| 2458g | Seq. ID No. 5141 | Seq. ID No. 5142 | Signal peptide | IM | 9 |
| 2463a | Seq. ID No. 5151 | Seq. ID No. 5152 | Non-secretory protein | IM | 1 |
| 2468a | Seq. ID No. 5159 | Seq. ID No. 5160 | Signal peptide | IM | 1 |
| 2468b | Seq. ID No. 5161 | Seq. ID No. 5162 | Non-secretory protein | IM | 1 |
| 2469b | Seq. ID No. 5165 | Seq. ID No. 5166 | Signal peptide | IM | 2 |
| 2470 | Seq. ID No. 5167 | Seq. ID No. 5168 | Non-secretory protein | Cyto | 0 |
| 2474b | Seq. ID No. 5175 | Seq. ID No. 5176 | Signal peptide | IM | 3 |
| 2474c | Seq. ID No. 5177 | Seq. ID No. 5178 | Non-secretory protein | IM | 3 |
| 2490 | Seq. ID No. 5205 | Seq. ID No. 5206 | Signal peptide | IM | 1 |
| 2492a | Seq. ID No. 5207 | Seq. ID No. 5208 | Signal peptide | IM | 1 |
| 2494 | Seq. ID No. 5211 | Seq. ID No. 5212 | Non-secretory protein | IM | 0 |
| 2495b | Seq. ID No. 5215 | Seq. ID No. 5216 | Non-secretory protein | IM | 10 |
| 2497b | Seq. ID No. 5219 | Seq. ID No. 5220 | Signal peptide | Peri | 2 |
| 2500a | Seq. ID No. 5223 | Seq. ID No. 5224 | Signal peptide | OM | 1 |
| 2525a | Seq. ID No. 5285 | Seq. ID No. 5286 | Signal peptide | IM | 1 |
| 2525b | Seq. ID No. 5287 | Seq. ID No. 5288 | Non-secretory protein | IM | 1 |
| 2547b | Seq. ID No. 5329 | Seq. ID No. 5330 | Signal peptide | IM | 1 |
| 2547c | Seq. ID No. 5331 | Seq. ID No. 5332 | Signal peptide | IM | 1 |
| 2564b | Seq. ID No. 5377 | Seq. ID No. 5378 | Signal peptide | OM | 1 |
| 2564c | Seq. ID No. 5379 | Seq. ID No. 5380 | Signal peptide | OM | 1 |
| 2564d | Seq. ID No. 5381 | Seq. ID No. 5382 | Non-secretory protein | IM | 1 |
| 2567a | Seq. ID No. 5385 | Seq. ID No. 5386 | Signal peptide | IM | 4 |
| 2582a | Seq. ID No. 5405 | Seq. ID No. 5406 | Signal peptide | IM | 4 |
| 2582b | Seq. ID No. 5407 | Seq. ID No. 5408 | Non-secretory protein | IM | 4 |
| 2610 | Seq. ID No. 5453 | Seq. ID No. 5454 | Signal peptide | IM | 1 |
| 2616a | Seq. ID No. 5459 | Seq. ID No. 5460 | Signal peptide | IM | 2 |
| 2616b | Seq. ID No. 5461 | Seq. ID No. 5462 | Signal peptide | IM | 3 |
| 2616c | Seq. ID No. 5463 | Seq. ID No. 5464 | Signal peptide | IM | 4 |
| 2618b | Seq. ID No. 5481 | Seq. ID No. 5482 | Non-secretory protein | IM | |
| 2628 | Seq. ID No. 5509 | Seq. ID No. 5510 | Signal peptide | IM | 1 |
| 2637a | Seq. ID No. 5529 | Seq. ID No. 5530 | Signal peptide | OM | 1 |
| 2637b | Seq. ID No. 5531 | Seq. ID No. 5532 | Signal peptide | IM | 1 |
| 2655b | Seq. ID No. 5557 | Seq. ID No. 5558 | Non-secretory protein | IM | 1 |
| 2660 | Seq. ID No. 5569 | Seq. ID No. 5570 | Signal peptide | Peri | 1 |
| 2665 | Seq. ID No. 5577 | Seq. ID No. 5578 | Non-secretory protein | IM | 1 |
| 2683a | Seq. ID No. 5623 | Seq. ID No. 5624 | Signal peptide | IM | 1 |
| 2683b | Seq. ID No. 5625 | Seq. ID No. 5626 | Signal peptide | IM | 1 |
| 2690a | Seq. ID No. 5643 | Seq. ID No. 5644 | Signal peptide | Peri | 1 |
| 2696a | Seq. ID No. 5659 | Seq. ID No. 5660 | Signal peptide | IM | 8 |
| 2696b | Seq. ID No. 5661 | Seq. ID No. 5662 | Non-secretory protein | IM | 8 |
| 2718b | Seq. ID No. 5683 | Seq. ID No. 5684 | Signal peptide | IM | 3 |
| 2718c | Seq. ID No. 5685 | Seq. ID No. 5686 | Signal peptide | IM | 4 |
| 2728a | Seq. ID No. 5709 | Seq. ID No. 5710 | Signal peptide | IM | 1 |
| 2728b | Seq. ID No. 5711 | Seq. ID No. 5712 | Signal peptide | IM | 1 |
| 2738c | Seq. ID No. 5733 | Seq. ID No. 5734 | Signal peptide | IM | 12 |
| 2742b | Seq. ID No. 5739 | Seq. ID No. 5740 | Signal peptide | Peri | |
| 2749b | Seq. ID No. 5765 | Seq. ID No. 5766 | Signal peptide | IM | 4 |
| 2760a | Seq. ID No. 5797 | Seq. ID No. 5798 | Signal peptide | Peri | 1 |
| 2769a | Seq. ID No. 5827 | Seq. ID No. 5828 | Non-secretory protein | IM | 0 |
| 2799a | Seq. ID No. 5889 | Seq. ID No. 5890 | Signal peptide | OM | 1 |
| 2801a | Seq. ID No. 5893 | Seq. ID No. 5894 | Signal peptide | IM | 1 |
| 2810a | Seq. ID No. 5905 | Seq. ID No. 5906 | Signal peptide | IM | 3 |
| 2810c | Seq. ID No. 5909 | Seq. ID No. 5910 | Signal peptide | IM | 4 |
| 2810d | Seq. ID No. 5911 | Seq. ID No. 5912 | Non-secretory protein | IM | 4 |
| 2818b | Seq. ID No. 5923 | Seq. ID No. 5924 | Signal peptide | IM | 5 |
| 2837a | Seq. ID No. 5963 | Seq. ID No. 5964 | Non-secretory protein | IM | 2 |
| 2837b | Seq. ID No. 5965 | Seq. ID No. 5966 | Non-secretory protein | IM | 3 |
| 2869b | Seq. ID No. 6025 | Seq. ID No. 6026 | Signal peptide | OM | 1 |
| 2869c | Seq. ID No. 6027 | Seq. ID No. 6028 | Signal peptide | IM | 1 |
| 2872 | Seq. ID No. 6031 | Seq. ID No. 6032 | Non-secretory protein | Cyto | |
| 2881 | Seq. ID No. 6043 | Seq. ID No. 6044 | Signal peptide | IM | 1 |
| 2882 | Seq. ID No. 6045 | Seq. ID No. 6046 | Non-secretory protein | IM | 2 |
| 2883a | Seq. ID No. 6047 | Seq. ID No. 6048 | Signal peptide | IM | 6 |
| 2883d | Seq. ID No. 6053 | Seq. ID No. 6054 | Signal peptide | IM | 8 |
| 2887a | Seq. ID No. 6059 | Seq. ID No. 6060 | Signal peptide | Peri | 1 |
| 2909c | Seq. ID No. 6109 | Seq. ID No. 6110 | Signal peptide | IM | 4 |
| 2909d | Seq. ID No. 6111 | Seq. ID No. 6112 | Signal peptide | IM | 4 |
| 2913a | Seq. ID No. 6115 | Seq. ID No. 6116 | Signal peptide | IM | 2 |
| 2913b | Seq. ID No. 6117 | Seq. ID No. 6118 | Signal peptide | IM | 2 |
| 2917 | Seq. ID No. 6127 | Seq. ID No. 6128 | Non-secretory protein | OM | 1 |
| 2920 | Seq. ID No. 6131 | Seq. ID No. 6132 | Non-secretory protein | IM | 2 |
| 2922b | Seq. ID No. 6135 | Seq. ID No. 6136 | Signal peptide | Cyto | 0 |
| 2923a | Seq. ID No. 6137 | Seq. ID No. 6138 | Signal peptide | Cyto | |
| 2931a | Seq. ID No. 6161 | Seq. ID No. 6162 | Signal peptide | IM | 5 |
| 2931c | Seq. ID No. 6165 | Seq. ID No. 6166 | Signal peptide | IM | 13 |
| 2941a | Seq. ID No. 6183 | Seq. ID No. 6184 | Signal peptide | IM | 2 |
| 2943a | Seq. ID No. 6189 | Seq. ID No. 6190 | Signal peptide | IM | 3 |
| 2943b | Seq. ID No. 6191 | Seq. ID No. 6192 | Signal peptide | IM | 5 |
| 2943c | Seq. ID No. 6193 | Seq. ID No. 6194 | Non-secretory protein | IM | 6 |
| 2948c | Seq. ID No. 6207 | Seq. ID No. 6208 | Non-secretory protein | IM | 6 |
| 2948d | Seq. ID No. 6209 | Seq. ID No. 6210 | Signal peptide | IM | 7 |
| 2952 | Seq. ID No. 6217 | Seq. ID No. 6218 | Signal peptide | Cyto | 1 |
| 2955c | Seq. ID No. 6225 | Seq. ID No. 6226 | Signal peptide | IM | 6 |
| 2957 | Seq. ID No. 6235 | Seq. ID No. 6236 | Signal peptide | IM | 4 |
| 2959 | Seq. ID No. 6243 | Seq. ID No. 6244 | Signal peptide | IM | 2 |
| 2962b | Seq. ID No. 6249 | Seq. ID No. 6250 | Signal peptide | IM | 1 |
| 2965a | Seq. ID No. 6253 | Seq. ID No. 6254 | Signal peptide | Cyto | 1 |
| 2966 | Seq. ID No. 6259 | Seq. ID No. 6260 | Signal peptide | IM | 1 |
| 2970a | Seq. ID No. 6265 | Seq. ID No. 6266 | Signal peptide | IM | 1 |
| 2970b | Seq. ID No. 6267 | Seq. ID No. 6268 | Signal peptide | IM | 1 |
| 2974b | Seq. ID No. 6275 | Seq. ID No. 6276 | Signal peptide | IM | 4 |
| 2978a | Seq. ID No. 6283 | Seq. ID No. 6284 | Signal peptide | Peri | 1 |
| 2978b | Seq. ID No. 6285 | Seq. ID No. 6286 | Signal peptide | Peri | 1 |
| 2986b | Seq. ID No. 6303 | Seq. ID No. 6304 | Signal peptide | IM | 7 |
| 2993a | Seq. ID No. 6325 | Seq. ID No. 6326 | Signal peptide | OM | 0 |
| 2993b | Seq. ID No. 6327 | Seq. ID No. 6328 | Signal peptide | OM | 0 |
| 3016a | Seq. ID No. 6363 | Seq. ID No. 6364 | Signal peptide | IM | 4 |
| 3016b | Seq. ID No. 6365 | Seq. ID No. 6366 | Signal peptide | IM | 7 |
| 3016c | Seq. ID No. 6367 | Seq. ID No. 6368 | Non-secretory protein | IM | 7 |
| 3024b | Seq. ID No. 6385 | Seq. ID No. 6386 | Non-secretory protein | Cyto | 1 |
| 3042a | Seq. ID No. 6425 | Seq. ID No. 6426 | Signal peptide | Cyto | 1 |
| 3042b | Seq. ID No. 6427 | Seq. ID No. 6428 | Signal peptide | Cyto | 1 |
| 3043a | Seq. ID No. 6429 | Seq. ID No. 6430 | Signal peptide | IM | 2 |
| 3043b | Seq. ID No. 6431 | Seq. ID No. 6432 | Signal peptide | IM | 2 |
| 3054 | Seq. ID No. 6453 | Seq. ID No. 6454 | Non-secretory protein | Cyto | |
| 3061 | Seq. ID No. 6465 | Seq. ID No. 6466 | Non-secretory protein | Peri | 1 |
| 3063a | Seq. ID No. 6469 | Seq. ID No. 6470 | Non-secretory protein | Cyto | 0 |
| 3063b | Seq. ID No. 6471 | Seq. ID No. 6472 | Non-secretory protein | Cyto | 0 |
| 3066 | Seq. ID No. 6479 | Seq. ID No. 6480 | Signal peptide | Cyto | 0 |
| 3095 | Seq. ID No. 6539 | Seq. ID No. 6540 | Non-secretory protein | IM | 1 |
| 3096a | Seq. ID No. 6541 | Seq. ID No. 6542 | Signal peptide | IM | 1 |
| 3107a | Seq. ID No. 6571 | Seq. ID No. 6572 | Signal peptide | OM | 1 |
| 3107b | Seq. ID No. 6573 | Seq. ID No. 6574 | Signal peptide | OM | 2 |
| 3145c | Seq. ID No. 6639 | Seq. ID No. 6640 | Signal peptide | OM | 1 |
| 3147b | Seq. ID No. 6643 | Seq. ID No. 6644 | Signal peptide | IM | 0 |
| 3147c | Seq. ID No. 6645 | Seq. ID No. 6646 | Signal peptide | OM | 0 |

[0106] Listed in Table 5 are 936 ORFs that meet the criteria of having a signal peptide based on the HMM SignalP program. Of these ORFs, the PSORT program predicted 71 ORFs to be localized to the periplasm (Peri); 93 ORFs to be localized to the outer membrane (OM); 663 ORFs to be localized to the cytoplasmic inner membrane (IM); and 109 ORFs to be localized to the cytoplasm. Shown for all ORFs is the predicted number of transmembrane domains predicted by the TopPred2 software (listed in the MSD column).

TABLE 5
SIGNALP: SIGNAL PEPTIDE

| ORF | DNA SEQ ID | Protein SEQ ID | | | |
|---|---|---|---|---|---|
| Number | Number | Number | SignalP | PSORT | MSD |
| 2a | Seq. ID No. 3 | Seq. ID No. 4 | NO | IM | 3 |
| 4a | Seq. ID No. 7 | Seq. ID No. 8 | Yes | IM | 4 |
| 4b | Seq. ID No. 9 | Seq. ID No. 10 | Maybe | IM | 10 |
| 11 | Seq. ID No. 19 | Seq. ID No. 20 | maybe | Cyto | 0 |
| 13a | Seq. ID No. 21 | Seq. ID No. 22 | NO | Cyto | 0 |
| 21b | Seq. ID No. 31 | Seq. ID No. 32 | maybe | Cyto | 1 |
| 23a | Seq. ID No. 33 | Seq. ID No. 34 | maybe | IM | 1 |
| 38a | Seq. ID No. 45 | Seq. ID No. 46 | yes | OM | 1 |
| 38b | Seq. ID No. 47 | Seq. ID No. 48 | yes | OM | 1 |
| 39a | Seq. ID No. 49 | Seq. ID No. 50 | maybe | IM | 4 |
| 40 | Seq. ID No. 53 | Seq. ID No. 54 | yes | IM | 1 |
| 44a | Seq. ID No. 65 | Seq. ID No. 66 | yes | IM | 2 |
| 44b | Seq. ID No. 67 | Seq. ID No. 68 | yes | IM | 2 |
| 51a | Seq. ID No. 85 | Seq. ID No. 86 | maybe | IM | 5 |
| 51b | Seq. ID No. 87 | Seq. ID No. 88 | yes | IM | 9 |
| 61 | Seq. ID No. 105 | Seq. ID No. 106 | NO | Cyto | 2 |
| 62c | Seq. ID No. 111 | Seq. ID No. 112 | NO | IM | 1 |
| 66a | Seq. ID No. 123 | Seq. ID No. 124 | NO | OM | 1 |
| 73a | Seq. ID No. 131 | Seq. ID No. 132 | YES | Cyto | 1 |
| 73b | Seq. ID No. 133 | Seq. ID No. 134 | YES | Cyto | 1 |
| 80a | Seq. ID No. 141 | Seq. ID No. 142 | maybe | IM | 4 |
| 86 | Seq. ID No. 159 | Seq. ID No. 160 | yes | Peri | 1 |
| 87a | Seq. ID No. 161 | Seq. ID No. 162 | YES | OM | 1 |
| 87b | Seq. ID No. 163 | Seq. ID No. 164 | YES | IM | 1 |
| 91a | Seq. ID No. 171 | Seq. ID No. 172 | maybe | OM | 0 |
| 99 | Seq. ID No. 191 | Seq. ID No. 192 | maybe | IM | 10 |
| 109a | Seq. ID No. 209 | Seq. ID No. 210 | maybe | IM | 5 |
| 109b | Seq. ID No. 211 | Seq. ID No. 212 | yes | IM | 7 |
| 109c | Seq. ID No. 213 | Seq. ID No. 214 | YES | IM | 8 |
| 109d | Seq. ID No. 215 | Seq. ID No. 216 | YES | IM | 8 |
| 111a | Seq. ID No. 217 | Seq. ID No. 218 | yes | IM | 6 |
| 114 | Seq. ID No. 225 | Seq. ID No. 226 | YES | OM | 1 |
| 124a | Seq. ID No. 235 | Seq. ID No. 236 | yes | IM | 1 |
| 124b | Seq. ID No. 237 | Seq. ID No. 238 | yes | IM | 3 |
| 129a | Seq. ID No. 249 | Seq. ID No. 250 | YES | IM | 6 |
| 129b | Seq. ID No. 251 | Seq. ID No. 252 | YES | IM | 9 |
| 132a | Seq. ID No. 255 | Seq. ID No. 256 | maybe | IM | 2 |
| 132b | Seq. ID No. 257 | Seq. ID No. 258 | maybe | IM | 2 |
| 132c | Seq. ID No. 259 | Seq. ID No. 260 | maybe | IM | 2 |
| 138a | Seq. ID No. 271 | Seq. ID No. 272 | yes | IM | 6 |
| 138b | Seq. ID No. 273 | Seq. ID No. 274 | maybe | IM | 6 |
| 143 | Seq. ID No. 277 | Seq. ID No. 278 | maybe | IM | 2 |
| 145a | Seq. ID No. 285 | Seq. ID No. 286 | yes | IM | 3 |
| 145b | Seq. ID No. 287 | Seq. ID No. 288 | YES | IM | 10 |
| 145c | Seq. ID No. 289 | Seq. ID No. 290 | YES | IM | 12 |
| 162a | Seq. ID No. 327 | Seq. ID No. 328 | yes | IM | 2 |
| 162b | Seq. ID No. 329 | Seq. ID No. 330 | maybe | IM | 3 |
| 173 | Seq. ID No. 357 | Seq. ID No. 358 | maybe | IM | 1 |
| 174 | Seq. ID No. 359 | Seq. ID No. 360 | maybe | Peri | 1 |
| 180a | Seq. ID No. 373 | Seq. ID No. 374 | maybe | IM | 2 |
| 180b | Seq. ID No. 375 | Seq. ID No. 376 | YES | IM | 10 |
| 191b | Seq. ID No. 393 | Seq. ID No. 394 | maybe | IM | 1 |
| 194a | Seq. ID No. 401 | Seq. ID No. 402 | maybe | Cyto | 1 |
| 194b | Seq. ID No. 403 | Seq. ID No. 404 | maybe | Cyto | 1 |
| 223a | Seq. ID No. 455 | Seq. ID No. 456 | yes | Cyto | 1 |
| 223b | Seq. ID No. 457 | Seq. ID No. 458 | yes | Cyto | 1 |
| 235a | Seq. ID No. 477 | Seq. ID No. 478 | maybe | Cyto | 0 |
| 239a | Seq. ID No. 487 | Seq. ID No. 488 | NO | Cyto | 2 |
| 239b | Seq. ID No. 489 | Seq. ID No. 490 | NO | Cyto | 2 |
| 239c | Seq. ID No. 491 | Seq. ID No. 492 | NO | Cyto | 2 |
| 240 | Seq. ID No. 493 | Seq. ID No. 494 | maybe | Cyto | |
| 241 | Seq. ID No. 495 | Seq. ID No. 496 | yes | IM | 1 |
| 245a | Seq. ID No. 497 | Seq. ID No. 498 | YES | IM | 5 |
| 245b | Seq. ID No. 499 | Seq. ID No. 500 | yes | IM | 10 |
| 246a | Seq. ID No. 503 | Seq. ID No. 504 | YES | IM | 7 |
| 246b | Seq. ID No. 505 | Seq. ID No. 506 | YES | IM | 9 |
| 248a | Seq. ID No. 509 | Seq. ID No. 510 | maybe | IM | 8 |
| 248b | Seq. ID No. 511 | Seq. ID No. 512 | yes | IM | 9 |
| 249a | Seq. ID No. 513 | Seq. ID No. 514 | yes | OM | 1 |
| 249b | Seq. ID No. 515 | Seq. ID No. 516 | yes | IM | 1 |
| 255a | Seq. ID No. 525 | Seq. ID No. 526 | yes | IM | 6 |
| 255b | Seq. ID No. 527 | Seq. ID No. 528 | YES | IM | 10 |
| 263a | Seq. ID No. 545 | Seq. ID No. 546 | yes | OM | 1 |
| 263b | Seq. ID No. 547 | Seq. ID No. 548 | yes | IM | 1 |
| 264b | Seq. ID No. 549 | Seq. ID No. 550 | YES | IM | 1 |
| 268 | Seq. ID No. 557 | Seq. ID No. 558 | yes | Cyto | 1 |
| 273a | Seq. ID No. 567 | Seq. ID No. 568 | maybe | IM | 8 |
| 273b | Seq. ID No. 569 | Seq. ID No. 570 | yes | IM | 12 |
| 277c | Seq. ID No. 575 | Seq. ID No. 576 | YES | OM | 1 |
| 279a | Seq. ID No. 577 | Seq. ID No. 578 | maybe | IM | 3 |
| 279b | Seq. ID No. 579 | Seq. ID No. 580 | maybe | IM | 5 |
| 283a | Seq. ID No. 591 | Seq. ID No. 592 | yes | OM | 1 |
| 283b | Seq. ID No. 593 | Seq. ID No. 594 | yes | OM | 1 |
| 285b | Seq. ID No. 599 | Seq. ID No. 600 | maybe | Cyto | |
| 297 | Seq. ID No. 617 | Seq. ID No. 618 | YES | Peri | 1 |
| 311 | Seq. ID No. 637 | Seq. ID No. 638 | yes | IM | 6 |
| 313a | Seq. ID No. 639 | Seq. ID No. 640 | yes | IM | 2 |
| 313b | Seq. ID No. 641 | Seq. ID No. 642 | yes | IM | 3 |
| 313c | Seq. ID No. 643 | Seq. ID No. 644 | maybe | IM | 6 |
| 313d | Seq. ID No. 645 | Seq. ID No. 646 | maybe | IM | 6 |
| 313e | Seq. ID No. 647 | Seq. ID No. 648 | maybe | IM | 6 |
| 317a | Seq. ID No. 653 | Seq. ID No. 654 | yes | IM | 2 |
| 317b | Seq. ID No. 655 | Seq. ID No. 656 | maybe | IM | 4 |
| 318a | Seq. ID No. 657 | Seq. ID No. 658 | YES | OM | 2 |
| 318b | Seq. ID No. 659 | Seq. ID No. 660 | YES | OM | 2 |
| 318c | Seq. ID No. 661 | Seq. ID No. 662 | YES | IM | 2 |
| 320 | Seq. ID No. 667 | Seq. ID No. 668 | maybe | Cyto | 1 |
| 321 | Seq. ID No. 669 | Seq. ID No. 670 | yes | OM | 1 |
| 324 | Seq. ID No. 675 | Seq. ID No. 676 | YES | OM | 1 |
| 327a | Seq. ID No. 677 | Seq. ID No. 678 | maybe | IM | 3 |
| 327b | Seq. ID No. 679 | Seq. ID No. 680 | yes | IM | 5 |
| 342a | Seq. ID No. 715 | Seq. ID No. 716 | YES | IM | 2 |
| 342b | Seq. ID No. 717 | Seq. ID No. 718 | YES | IM | 3 |
| 342c | Seq. ID No. 719 | Seq. ID No. 720 | yes | IM | 4 |
| 342d | Seq. ID No. 721 | Seq. ID No. 722 | NO | IM | 6 |
| 342e | Seq. ID No. 723 | Seq. ID No. 724 | yes | IM | 10 |
| 342f | Seq. ID No. 725 | Seq. ID No. 726 | NO | IM | 12 |
| 349b | Seq. ID No. 745 | Seq. ID No. 746 | YES | OM | 1 |
| 349c | Seq. ID No. 747 | Seq. ID No. 748 | YES | OM | 1 |
| 350a | Seq. ID No. 749 | Seq. ID No. 750 | yes | IM | 6 |
| 350b | Seq. ID No. 751 | Seq. ID No. 752 | yes | IM | 6 |
| 352a | Seq. ID No. 755 | Seq. ID No. 756 | YES | IM | 3 |
| 352b | Seq. ID No. 757 | Seq. ID No. 758 | YES | IM | 3 |
| 352c | Seq. ID No. 759 | Seq. ID No. 760 | YES | IM | 6 |
| 354a | Seq. ID No. 761 | Seq. ID No. 762 | YES | IM | 4 |
| 354b | Seq. ID No. 763 | Seq. ID No. 764 | yes | IM | 6 |
| 354c | Seq. ID No. 765 | Seq. ID No. 766 | yes | IM | 6 |
| 356a | Seq. ID No. 769 | Seq. ID No. 770 | yes | IM | 3 |
| 358a | Seq. ID No. 777 | Seq. ID No. 778 | yes | IM | 3 |
| 358b | Seq. ID No. 779 | Seq. ID No. 780 | yes | IM | 10 |
| 358c | Seq. ID No. 781 | Seq. ID No. 782 | yes | IM | 10 |
| 372d | Seq. ID No. 807 | Seq. ID No. 808 | YES | OM | 1 |
| 374 | Seq. ID No. 809 | Seq. ID No. 810 | NO | IM | 1 |
| 382b | Seq. ID No. 819 | Seq. ID No. 820 | yes | OM | 1 |
| 384a | Seq. ID No. 825 | Seq. ID No. 826 | maybe | IM | 2 |
| 403b | Seq. ID No. 863 | Seq. ID No. 864 | NO | Peri | 2 |
| 418a | Seq. ID No. 893 | Seq. ID No. 894 | NO | IM | 5 |
| 419c | Seq. ID No. 901 | Seq. ID No. 902 | NO | IM | 2 |
| 431 | Seq. ID No. 935 | Seq. ID No. 936 | yes | OM | 1 |
| 434 | Seq. ID No. 937 | Seq. ID No. 938 | yes | IM | 2 |
| 437b | Seq. ID No. 941 | Seq. ID No. 942 | maybe | Cyto | 1 |
| 437c | Seq. ID No. 943 | Seq. ID No. 944 | maybe | Cyto | 1 |
| 441b | Seq. ID No. 955 | Seq. ID No. 956 | yes | IM | 2 |
| 443b | Seq. ID No. 957 | Seq. ID No. 958 | maybe | Cyto | |
| 448 | Seq. ID No. 967 | Seq. ID No. 968 | YES | IM | 1 |
| 452b | Seq. ID No. 979 | Seq. ID No. 980 | yes | IM | 4 |
| 452c | Seq. ID No. 981 | Seq. ID No. 982 | yes | IM | 4 |
| 452d | Seq. ID No. 983 | Seq. ID No. 984 | yes | IM | 4 |
| 452e | Seq. ID No. 985 | Seq. ID No. 986 | yes | IM | 4 |
| 460b | Seq. ID No. 1001 | Seq. ID No. 1002 | maybe | Cyto | 1 |
| 460c | Seq. ID No. 1003 | Seq. ID No. 1004 | maybe | Cyto | 1 |
| 462 | Seq. ID No. 1005 | Seq. ID No. 1006 | yes | Peri | 1 |
| 463a | Seq. ID No. 1007 | Seq. ID No. 1008 | yes | Peri | 1 |
| 463b | Seq. ID No. 1009 | Seq. ID No. 1010 | yes | Peri | 1 |
| 464a | Seq. ID No. 1011 | Seq. ID No. 1012 | maybe | IM | 2 |
| 464b | Seq. ID No. 1013 | Seq. ID No. 1014 | YES | IM | 9 |
| 464c | Seq. ID No. 1015 | Seq. ID No. 1016 | yes | IM | 11 |
| 465b | Seq. ID No. 1019 | Seq. ID No. 1020 | yes | OM | 3 |
| 472a | Seq. ID No. 1029 | Seq. ID No. 1030 | yes | IM | 4 |
| 472b | Seq. ID No. 1031 | Seq. ID No. 1032 | yes | IM | 5 |
| 472c | Seq. ID No. 1033 | Seq. ID No. 1034 | maybe | IM | 7 |
| 472d | Seq. ID No. 1035 | Seq. ID No. 1036 | maybe | IM | 8 |
| 472e | Seq. ID No. 1037 | Seq. ID No. 1038 | maybe | IM | 8 |
| 472f | Seq. ID No. 1039 | Seq. ID No. 1040 | YES | IM | 10 |
| 476 | Seq. ID No. 1045 | Seq. ID No. 1046 | maybe | Peri | 1 |
| 480a | Seq. ID No. 1055 | Seq. ID No. 1056 | NO | IM | 1 |
| 492 | Seq. ID No. 1075 | Seq. ID No. 1076 | YES | OM | 1 |
| 494a | Seq. ID No. 1077 | Seq. ID No. 1078 | NO | Cyto | 1 |
| 507a | Seq. ID No. 1105 | Seq. ID No. 1106 | maybe | IM | 1 |
| 507b | Seq. ID No. 1107 | Seq. ID No. 1108 | maybe | IM | 1 |
| 521b | Seq. ID No. 1131 | Seq. ID No. 1132 | maybe | Cyto | 2 |
| 524a | Seq. ID No. 1135 | Seq. ID No. 1136 | maybe | IM | 1 |
| 524b | Seq. ID No. 1137 | Seq. ID No. 1138 | yes | IM | 6 |
| 525 | Seq. ID No. 1139 | Seq. ID No. 1140 | maybe | Cyto | 1 |
| 530a | Seq. ID No. 1151 | Seq. ID No. 1152 | yes | IM | |
| 541a | Seq. ID No. 1165 | Seq. ID No. 1166 | maybe | IM | 2 |
| 541b | Seq. ID No. 1167 | Seq. ID No. 1168 | maybe | IM | 4 |
| 541c | Seq. ID No. 1169 | Seq. ID No. 1170 | yes | IM | 5 |
| 542 | Seq. ID No. 1173 | Seq. ID No. 1174 | yes | IM | 1 |
| 545a | Seq. ID No. 1183 | Seq. ID No. 1184 | yes | IM | 3 |
| 547a | Seq. ID No. 1195 | Seq. ID No. 1196 | YES | OM | 1 |
| 547b | Seq. ID No. 1197 | Seq. ID No. 1198 | YES | IM | 1 |
| 550a | Seq. ID No. 1203 | Seq. ID No. 1204 | maybe | IM | 1 |
| 556 | Seq. ID No. 1213 | Seq. ID No. 1214 | yes | IM | 2 |
| 561 | Seq. ID No. 1223 | Seq. ID No. 1224 | yes | IM | 5 |
| 564a | Seq. ID No. 1227 | Seq. ID No. 1228 | NO | IM | 4 |
| 564b | Seq. ID No. 1229 | Seq. ID No. 1230 | yes | IM | 4 |
| 570b | Seq. ID No. 1237 | Seq. ID No. 1238 | NO | IM | 5 |
| 576a | Seq. ID No. 1243 | Seq. ID No. 1244 | YES | Peri | 1 |
| 576b | Seq. ID No. 1245 | Seq. ID No. 1246 | YES | IM | 1 |
| 585b | Seq. ID No. 1259 | Seq. ID No. 1260 | yes | Cyto | 0 |
| 587a | Seq. ID No. 1265 | Seq. ID No. 1266 | maybe | IM | 4 |
| 587b | Seq. ID No. 1267 | Seq. ID No. 1268 | NO | IM | 5 |
| 587c | Seq. ID No. 1269 | Seq. ID No. 1270 | YES | IM | 9 |
| 587d | Seq. ID No. 1271 | Seq. ID No. 1272 | NO | IM | 12 |
| 595a | Seq. ID No. 1283 | Seq. ID No. 1284 | yes | IM | 2 |
| 596a | Seq. ID No. 1287 | Seq. ID No. 1288 | maybe | IM | 1 |
| 596b | Seq. ID No. 1289 | Seq. ID No. 1290 | maybe | IM | 2 |
| 596c | Seq. ID No. 1291 | Seq. ID No. 1292 | maybe | IM | 2 |
| 598a | Seq. ID No. 1295 | Seq. ID No. 1296 | maybe | IM | 2 |
| 598b | Seq. ID No. 1297 | Seq. ID No. 1298 | maybe | IM | 2 |
| 600a | Seq. ID No. 1303 | Seq. ID No. 1304 | maybe | Peri | 1 |
| 600b | Seq. ID No. 1305 | Seq. ID No. 1306 | maybe | Peri | 1 |
| 609a | Seq. ID No. 1315 | Seq. ID No. 1316 | YES | IM | 2 |
| 609b | Seq. ID No. 1317 | Seq. ID No. 1318 | YES | IM | 2 |
| 610a | Seq. ID No. 1319 | Seq. ID No. 1320 | yes | IM | 1 |
| 613a | Seq. ID No. 1325 | Seq. ID No. 1326 | maybe | IM | 6 |
| 613b | Seq. ID No. 1327 | Seq. ID No. 1328 | yes | IM | 7 |
| 613c | Seq. ID No. 1329 | Seq. ID No. 1330 | NO | IM | 9 |
| 613d | Seq. ID No. 1331 | Seq. ID No. 1332 | YES | IM | 10 |
| 615b | Seq. ID No. 1337 | Seq. ID No. 1338 | maybe | IM | 2 |
| 619a | Seq. ID No. 1341 | Seq. ID No. 1342 | yes | Cyto | 1 |
| 619b | Seq. ID No. 1343 | Seq. ID No. 1344 | yes | Cyto | 1 |
| 623 | Seq. ID No. 1347 | Seq. ID No. 1348 | yes | Peri | 1 |
| 624a | Seq. ID No. 1349 | Seq. ID No. 1350 | NO | IM | 1 |
| 624b | Seq. ID No. 1351 | Seq. ID No. 1352 | maybe | IM | 1 |
| 624c | Seq. ID No. 1353 | Seq. ID No. 1354 | maybe | IM | 1 |
| 631b | Seq. ID No. 1365 | Seq. ID No. 1366 | YES | IM | 2 |
| 631c | Seq. ID No. 1367 | Seq. ID No. 1368 | YES | IM | 2 |
| 631d | Seq. ID No. 1369 | Seq. ID No. 1370 | YES | IM | 2 |
| 632b | Seq. ID No. 1371 | Seq. ID No. 1372 | maybe | IM | 1 |
| 636 | Seq. ID No. 1381 | Seq. ID No. 1382 | maybe | Cyto | |
| 645 | Seq. ID No. 1401 | Seq. ID No. 1402 | yes | Peri | 1 |
| 665 | Seq. ID No. 1429 | Seq. ID No. 1430 | yes | IM | 3 |
| 674a | Seq. ID No. 1435 | Seq. ID No. 1436 | NO | IM | 1 |
| 679a | Seq. ID No. 1445 | Seq. ID No. 1446 | YES | Cyto | 1 |
| 679b | Seq. ID No. 1447 | Seq. ID No. 1448 | YES | IM | 1 |
| 700a | Seq. ID No. 1481 | Seq. ID No. 1482 | NO | IM | 2 |
| 722a | Seq. ID No. 1513 | Seq. ID No. 1514 | YES | IM | 3 |
| 722b | Seq. ID No. 1515 | Seq. ID No. 1516 | maybe | IM | 7 |
| 722c | Seq. ID No. 1517 | Seq. ID No. 1518 | YES | IM | 11 |
| 728a | Seq. ID No. 1529 | Seq. ID No. 1530 | NO | IM | 6 |
| 730a | Seq. ID No. 1533 | Seq. ID No. 1534 | NO | IM | 3 |
| 730b | Seq. ID No. 1535 | Seq. ID No. 1536 | maybe | IM | 5 |
| 738a | Seq. ID No. 1545 | Seq. ID No. 1546 | YES | IM | 2 |
| 738b | Seq. ID No. 1547 | Seq. ID No. 1548 | NO | IM | 9 |
| 739 | Seq. ID No. 1551 | Seq. ID No. 1552 | yes | IM | 2 |
| 740 | Seq. ID No. 1553 | Seq. ID No. 1554 | NO | OM | 0 |
| 743a | Seq. ID No. 1559 | Seq. ID No. 1560 | yes | IM | 2 |
| 743b | Seq. ID No. 1561 | Seq. ID No. 1562 | YES | IM | 2 |
| 744 | Seq. ID No. 1563 | Seq. ID No. 1564 | maybe | OM | 1 |
| 746b | Seq. ID No. 1571 | Seq. ID No. 1572 | YES | IM | 6 |
| 749 | Seq. ID No. 1579 | Seq. ID No. 1580 | yes | IM | 1 |
| 754a | Seq. ID No. 1583 | Seq. ID No. 1584 | NO | IM | 3 |
| 754b | Seq. ID No. 1585 | Seq. ID No. 1586 | YES | IM | 9 |
| 772a | Seq. ID No. 1621 | Seq. ID No. 1622 | yes | IM | 5 |
| 779 | Seq. ID No. 1633 | Seq. ID No. 1634 | yes | Peri | 2 |
| 782b | Seq. ID No. 1639 | Seq. ID No. 1640 | NO | IM | 5 |
| 786b | Seq. ID No. 1643 | Seq. ID No. 1644 | YES | Peri | 1 |
| 788a | Seq. ID No. 1645 | Seq. ID No. 1646 | yes | IM | 4 |
| 788b | Seq. ID No. 1647 | Seq. ID No. 1648 | yes | IM | 6 |
| 789a | Seq. ID No. 1649 | Seq. ID No. 1650 | yes | IM | 4 |
| 789c | Seq. ID No. 1653 | Seq. ID No. 1654 | YES | IM | 5 |
| 794b | Seq. ID No. 1661 | Seq. ID No. 1662 | YES | OM | 0 |
| 794c | Seq. ID No. 1663 | Seq. ID No. 1664 | YES | OM | 0 |
| 794d | Seq. ID No. 1665 | Seq. ID No. 1666 | yes | OM | 0 |
| 799a | Seq. ID No. 1671 | Seq. ID No. 1672 | yes | IM | 2 |
| 799b | Seq. ID No. 1673 | Seq. ID No. 1674 | maybe | IM | 4 |
| 799d | Seq. ID No. 1677 | Seq. ID No. 1678 | yes | IM | 9 |
| 799e | Seq. ID No. 1679 | Seq. ID No. 1680 | yes | IM | 10 |
| 799f | Seq. ID No. 1681 | Seq. ID No. 1682 | yes | IM | 10 |
| 808 | Seq. ID No. 1693 | Seq. ID No. 1694 | NO | Cyto | |
| 826 | Seq. ID No. 1707 | Seq. ID No. 1708 | YES | IM | 3 |
| 829b | Seq. ID No. 1711 | Seq. ID No. 1712 | NO | Peri | |
| 837a | Seq. ID No. 1731 | Seq. ID No. 1732 | yes | IM | 2 |
| 837b | Seq. ID No. 1733 | Seq. ID No. 1734 | YES | IM | 8 |
| 843 | Seq. ID No. 1737 | Seq. ID No. 1738 | YES | IM | 1 |
| 853a | Seq. ID No. 1753 | Seq. ID No. 1754 | yes | IM | 3 |
| 853b | Seq. ID No. 1755 | Seq. ID No. 1756 | YES | IM | 5 |
| 853c | Seq. ID No. 1757 | Seq. ID No. 1758 | maybe | IM | 5 |
| 859a | Seq. ID No. 1765 | Seq. ID No. 1766 | YES | IM | 2 |
| 859b | Seq. ID No. 1767 | Seq. ID No. 1768 | YES | IM | 4 |
| 859d | Seq. ID No. 1771 | Seq. ID No. 1772 | NO | IM | 6 |
| 864b | Seq. ID No. 1781 | Seq. ID No. 1782 | maybe | Cyto | 1 |
| 868a | Seq. ID No. 1787 | Seq. ID No. 1788 | yes | IM | 3 |
| 870 | Seq. ID No. 1791 | Seq. ID No. 1792 | YES | OM | 1 |
| 873c | Seq. ID No. 1797 | Seq. ID No. 1798 | yes | OM | 1 |
| 876 | Seq. ID No. 1805 | Seq. ID No. 1806 | YES | Peri | 1 |
| 885 | Seq. ID No. 1819 | Seq. ID No. 1820 | NO | IM | 2 |
| 886 | Seq. ID No. 1821 | Seq. ID No. 1822 | yes | OM | 1 |
| 887 | Seq. ID No. 1823 | Seq. ID No. 1824 | yes | IM | 1 |
| 908a | Seq. ID No. 1839 | Seq. ID No. 1840 | yes | IM | 6 |
| 919 | Seq. ID No. 1857 | Seq. ID No. 1858 | maybe | Cyto | |
| 929a | Seq. ID No. 1869 | Seq. ID No. 1870 | maybe | Cyto | 1 |
| 931 | Seq. ID No. 1875 | Seq. ID No. 1876 | YES | IM | 2 |
| 939a | Seq. ID No. 1891 | Seq. ID No. 1892 | maybe | IM | 9 |
| 939b | Seq. ID No. 1893 | Seq. ID No. 1894 | yes | IM | 10 |
| 939c | Seq. ID No. 1895 | Seq. ID No. 1896 | NO | IM | 12 |
| 950 | Seq. ID NO. 1915 | Seq. ID No. 1916 | NO | IM | 1 |
| 951a | Seq. ID No. 1917 | Seq. ID No. 1918 | yes | OM | 0 |
| 951b | Seq. ID No. 1919 | Seq. ID No. 1920 | yes | IM | 0 |
| 952b | Seq. ID No. 1923 | Seq. ID No. 1924 | maybe | IM | 4 |
| 955a | Seq. ID No. 1927 | Seq. ID No. 1928 | maybe | IM | 1 |
| 955b | Seq. ID No. 1929 | Seq. ID No. 1930 | maybe | IM | 1 |
| 977a | Seq. ID No. 1969 | Seq. ID No. 1970 | YES | OM | 1 |
| 981a | Seq. ID No. 1981 | Seq. ID No. 1982 | YES | IM | 1 |
| 987 | Seq. ID No. 1991 | Seq. ID No. 1992 | yes | IM | 5 |
| 988a | Seq. ID No. 1993 | Seq. ID No. 1994 | NO | IM | 5 |
| 993 | Seq. ID No. 2005 | Seq. ID No. 2006 | maybe | IM | 0 |
| 998a | Seq. ID No. 2013 | Seq. ID No. 2014 | yes | IM | 5 |
| 999a | Seq. ID No. 2017 | Seq. ID No. 2018 | yes | IM | 2 |
| 999b | Seq. ID No. 2019 | Seq. ID No. 2020 | yes | IM | 2 |
| 1003a | Seq. ID No. 2025 | Seq. ID No. 2026 | maybe | IM | 2 |
| 1003b | Seq. ID No. 2027 | Seq. ID No. 2028 | maybe | IM | 2 |
| 1006a | Seq. ID No. 2033 | Seq. ID No. 2034 | yes | Peri | 1 |
| 1006b | Seq. ID No. 2035 | Seq. ID No. 2036 | yes | Cyto | 1 |
| 1013a | Seq. ID No. 2041 | Seq. ID No. 2042 | maybe | IM | 5 |
| 1017a | Seq. ID No. 2049 | Seq. ID No. 2050 | yes | IM | 4 |
| 1017c | Seq. ID No. 2053 | Seq. ID No. 2054 | YES | IM | 6 |
| 1017d | Seq. ID No. 2055 | Seq. ID No. 2056 | YES | IM | 6 |
| 1036a | Seq. ID No. 2087 | Seq. ID No. 2088 | YES | IM | 3 |
| 1036b | Seq. ID No. 2089 | Seq. ID No. 2090 | YES | IM | 4 |
| 1036c | Seq. ID No. 2091 | Seq. ID No. 2092 | YES | IM | 4 |
| 1044a | Seq. ID No. 2105 | Seq. ID No. 2106 | YES | IM | 2 |
| 1044b | Seq. ID No. 2107 | Seq. ID No. 2108 | maybe | IM | 3 |
| 1044c | Seq. ID No. 2109 | Seq. ID No. 2110 | maybe | IM | 3 |
| 1047a | Seq. ID No. 2113 | Seq. ID No. 2114 | yes | OM | 1 |
| 1047b | Seq. ID No. 2115 | Seq. ID No. 2116 | YES | OM | 1 |
| 1050a | Seq. ID No. 2121 | Seq. ID No. 2122 | maybe | IM | 3 |
| 1050b | Seq. ID No. 2123 | Seq. ID No. 2124 | yes | IM | 7 |
| 1050c | Seq. ID No. 2125 | Seq. ID No. 2126 | yes | IM | 7 |
| 1050d | Seq. ID No. 2127 | Seq. ID No. 2128 | yes | IM | 7 |
| 1065a | Seq. ID No. 2149 | Seq. ID No. 2150 | YES | Peri | 1 |
| 1065b | Seq. ID No. 2151 | Seq. ID No. 2152 | YES | Peri | 1 |
| 1066a | Seq. ID No. 2155 | Seq. ID No. 2156 | NO | IM | 1 |
| 1066b | Seq. ID No. 2157 | Seq. ID No. 2158 | NO | IM | 1 |
| 1067 | Seq. ID No. 2159 | Seq. ID No. 2160 | YES | OM | 1 |
| 1077a | Seq. ID No. 2171 | Seq. ID No. 2172 | yes | IM | 3 |
| 1077b | Seq. ID No. 2173 | Seq. ID No. 2174 | maybe | IM | 10 |
| 1077d | Seq. ID No. 2177 | Seq. ID No. 2178 | YES | IM | 13 |
| 1081a | Seq. ID No. 2187 | Seq. ID No. 2188 | yes | Peri | 1 |
| 1082 | Seq. ID No. 2191 | Seq. ID No. 2192 | maybe | Peri | 0 |
| 1094a | Seq. ID No. 2205 | Seq. ID No. 2206 | maybe | IM | 2 |
| 1111a | Seq. ID No. 2237 | Seq. ID No. 2238 | yes | IM | 6 |
| 1111b | Seq. ID No. 2239 | Seq. ID No. 2240 | maybe | IM | 8 |
| 1125 | Seq. ID No. 2245 | Seq. ID No. 2246 | NO | IM | 4 |
| 1126b | Seq. ID No. 2249 | Seq. ID No. 2250 | yes | IM | 4 |
| 1126c | Seq. ID No. 2251 | Seq. ID No. 2252 | yes | IM | 4 |
| 1128 | Seq. ID No. 2255 | Seq. ID No. 2256 | yes | IM | 2 |
| 1132 | Seq. ID No. 2259 | Seq. ID No. 2260 | NO | Cyto | |
| 1140a | Seq. ID No. 2271 | Seq. ID No. 2272 | yes | IM | 2 |
| 1144a | Seq. ID No. 2283 | Seq. ID No. 2284 | yes | IM | 2 |
| 1146a | Seq. ID No. 2289 | Seq. ID No. 2290 | yes | IM | 3 |
| 1146b | Seq. ID No. 2291 | Seq. ID No. 2292 | NO | IM | 5 |
| 1146c | Seq. ID No. 2293 | Seq. ID No. 2294 | YES | IM | 7 |
| 1146d | Seq. ID No. 2295 | Seq. ID No. 2296 | yes | IM | 8 |
| 1152a | Seq. ID No. 2303 | Seq. ID No. 2304 | maybe | IM | 2 |
| 1152b | Seq. ID No. 2305 | Seq. ID No. 2306 | yes | IM | 5 |
| 1152c | Seq. ID No. 2307 | Seq. ID No. 2308 | yes | IM | 6 |
| 1155a | Seq. ID No. 2317 | Seq. ID No. 2318 | yes | IM | 3 |
| 1155b | Seq. ID No. 2319 | Seq. ID No. 2320 | yes | IM | 4 |
| 1155c | Seq. ID No. 2321 | Seq. ID No. 2322 | YES | IM | 5 |
| 1155d | Seq. ID No. 2323 | Seq. ID No. 2324 | yes | IM | 6 |
| 1155e | Seq. ID No. 2325 | Seq. ID No. 2326 | yes | IM | 9 |
| 1155f | Seq. ID No. 2327 | Seq. ID No. 2328 | maybe | IM | 11 |
| 1155g | Seq. ID No. 2329 | Seq. ID No. 2330 | maybe | IM | 11 |
| 1158b | Seq. ID No. 2333 | Seq. ID No. 2334 | maybe | Cyto | 1 |
| 1165 | Seq. ID No. 2343 | Seq. ID No. 2344 | yes | OM | 1 |
| 1167a | Seq. ID No. 2347 | Seq. ID No. 2348 | YES | Peri | 1 |
| 1167b | Seq. ID No. 2349 | Seq. ID No. 2350 | yes | IM | 2 |
| 1168 | Seq. ID No. 2351 | Seq. ID No. 2352 | YES | Peri | 1 |
| 1169a | Seq. ID No. 2353 | Seq. ID No. 2354 | YES | IM | 4 |
| 1169b | Seq. ID No. 2355 | Seq. ID No. 2356 | maybe | IM | 6 |
| 1169c | Seq. ID No. 2357 | Seq. ID No. 2358 | maybe | IM | 8 |
| 1172 | Seq. ID No. 2365 | Seq. ID No. 2366 | YES | IM | 1 |
| 1173 | Seq. ID No. 2367 | Seq. ID No. 2368 | maybe | IM | 2 |
| 1175 | Seq. ID No. 2371 | Seq. ID No. 2372 | maybe | Cyto | 0 |
| 1178 | Seq. ID No. 2375 | Seq. ID No. 2376 | maybe | Cyto | 1 |
| 1180c | Seq. ID No. 2387 | Seq. ID No. 2388 | maybe | IM | 3 |
| 1180d | Seq. ID No. 2389 | Seq. ID No. 2390 | maybe | IM | 3 |
| 1180e | Seq. ID No. 2391 | Seq. ID No. 2392 | maybe | IM | 4 |
| 1182a | Seq. ID No. 2393 | Seq. ID No. 2394 | yes | IM | 1 |
| 1186a | Seq. ID No. 2407 | Seq. ID No. 2408 | maybe | IM | 5 |
| 1192a | Seq. ID No. 2419 | Seq. ID No. 2420 | maybe | IM | 3 |
| 1192b | Seq. ID No. 2421 | Seq. ID No. 2422 | YES | IM | 4 |
| 1196a | Seq. ID No. 2425 | Seq. ID No. 2426 | YES | Peri | 1 |
| 1196b | Seq. ID No. 2427 | Seq. ID No. 2428 | YES | Peri | 1 |
| 1197 | Seq. ID No. 2429 | Seq. ID No. 2430 | YES | IM | 2 |
| 1199a | Seq. ID No. 2433 | Seq. ID No. 2434 | maybe | IM | 3 |
| 1207 | Seq. ID No. 2449 | Seq. ID No. 2450 | YES | OM | 1 |
| 1212 | Seq. ID No. 2459 | Seq. ID No. 2460 | YES | IM | 2 |
| 1224a | Seq. ID No. 2487 | Seq. ID No. 2488 | maybe | IM | 6 |
| 1224b | Seq. ID No. 2489 | Seq. ID No. 2490 | maybe | IM | 6 |
| 1224c | Seq. ID No. 2491 | Seq. ID No. 2492 | yes | IM | 6 |
| 1225 | Seq. ID No. 2493 | Seq. ID No. 2494 | NO | Cyto | 1 |
| 1228a | Seq. ID No. 2497 | Seq. ID No. 2498 | yes | IM | 1 |
| 1228b | Seq. ID No. 2499 | Seq. ID No. 2500 | yes | IM | 2 |
| 1229b | Seq. ID No. 2501 | Seq. ID No. 2502 | NO | Cyto | 2 |
| 1229c | Seq. ID No. 2503 | Seq. ID No. 2504 | NO | Cyto | 2 |
| 1231 | Seq. ID No. 2507 | Seq. ID No. 2508 | yes | OM | 1 |
| 1234a | Seq. ID No. 2515 | Seq. ID No. 2516 | yes | IM | 4 |
| 1234b | Seq. ID No. 2517 | Seq. ID No. 2518 | yes | IM | 4 |
| 1236a | Seq. ID No. 2523 | Seq. ID No. 2524 | yes | IM | 2 |
| 1237 | Seq. ID No. 2525 | Seq. ID No. 2526 | YES | OM | 1 |
| 1239 | Seq. ID No. 2527 | Seq. ID No. 2528 | yes | OM | 1 |
| 1241a | Seq. ID No. 2531 | Seq. ID No. 2532 | YES | IM | 2 |
| 1241b | Seq. ID No. 2533 | Seq. ID No. 2534 | yes | IM | 7 |
| 1241c | Seq. ID No. 2535 | Seq. ID No. 2536 | yes | IM | 7 |
| 1243 | Seq. ID No. 2537 | Seq. ID No. 2538 | maybe | IM | 4 |
| 1245a | Seq. ID No. 2541 | Seq. ID No. 2542 | yes | IM | 6 |
| 1245b | Seq. ID No. 2543 | Seq. ID No. 2544 | yes | IM | 10 |
| 1245c | Seq. ID No. 2545 | Seq. ID No. 2546 | maybe | IM | 11 |
| 1250a | Seq. ID No. 2555 | Seq. ID No. 2556 | maybe | IM | 2 |
| 1250b | Seq. ID No. 2557 | Seq. ID No. 2558 | yes | IM | 8 |
| 1251a | Seq. ID No. 2565 | Seq. ID No. 2566 | maybe | IM | 3 |
| 1253a | Seq. ID No. 2569 | Seq. ID No. 2570 | maybe | OM | 1 |
| 1253b | Seq. ID No. 2571 | Seq. ID No. 2572 | maybe | OM | 2 |
| 1258a | Seq. ID No. 2583 | Seq. ID No. 2584 | yes | IM | 5 |
| 1260 | Seq. ID No. 2591 | Seq. ID No. 2592 | maybe | Cyto | 1 |
| 1266a | Seq. ID No. 2597 | Seq. ID No. 2598 | NO | IM | 6 |
| 1266b | Seq. ID No. 2599 | Seq. ID No. 2600 | maybe | IM | 7 |
| 1267a | Seq. ID No. 2601 | Seq. ID No. 2602 | yes | IM | 2 |
| 1268b | Seq. ID No. 2607 | Seq. ID No. 2608 | YES | IM | 5 |
| 1270 | Seq. ID No. 2611 | Seq. ID No. 2612 | maybe | IM | 2 |
| 1275a | Seq. ID No. 2621 | Seq. ID No. 2622 | yes | Cyto | 1 |
| 1278a | Seq. ID No. 2627 | Seq. ID No. 2628 | NO | IM | 1 |
| 1278b | Seq. ID No. 2629 | Seq. ID No. 2630 | NO | IM | 2 |
| 1288 | Seq. ID No. 2651 | Seq. ID No. 2652 | YES | IM | 1 |
| 1308a | Seq. ID No. 2679 | Seq. ID No. 2680 | YES | IM | 3 |
| 1308b | Seq. ID No. 2681 | Seq. ID No. 2682 | yes | IM | 4 |
| 1308c | Seq. ID No. 2683 | Seq. ID No. 2684 | maybe | IM | 4 |
| 1314b | Seq. ID No. 2691 | Seq. ID No. 2692 | yes | IM | 1 |
| 1315 | Seq. ID No. 2693 | Seq. ID No. 2694 | YES | IM | 2 |
| 1316 | Seq. ID No. 2695 | Seq. ID No. 2696 | maybe | IM | |
| 1317 | Seq. ID No. 2697 | Seq. ID No. 2698 | NO | Cyto | 1 |
| 1318 | Seq. ID No. 2699 | Seq. ID No. 2700 | YES | IM | 0 |
| 1319a | Seq. ID No. 2701 | Seq. ID No. 2702 | yes | IM | 4 |
| 1319b | Seq. ID No. 2703 | Seq. ID No. 2704 | YES | IM | 5 |
| 1320a | Seq. ID No. 2705 | Seq. ID No. 2706 | maybe | IM | 2 |
| 1320b | Seq. ID No. 2707 | Seq. ID No. 2708 | NO | IM | 4 |
| 1323b | Seq. ID No. 2717 | Seq. ID No. 2718 | maybe | OM | 1 |
| 1334a | Seq. ID No. 2729 | Seq. ID No. 2730 | maybe | IM | 2 |
| 1334b | Seq. ID No. 2731 | Seq. ID No. 2732 | maybe | OM | 2 |
| 1335a | Seq. ID No. 2733 | Seq. ID No. 2734 | yes | OM | 2 |
| 1365b | Seq. ID No. 2783 | Seq. ID No. 2784 | maybe | IM | 2 |
| 1366a | Seq. ID No. 2785 | Seq. ID No. 2786 | YES | Peri | 1 |
| 1375 | Seq. ID No. 2801 | Seq. ID No. 2802 | yes | Cyto | 0 |
| 1380 | Seq. ID No. 2809 | Seq. ID No. 2810 | NO | IM | 2 |
| 1381b | Seq. ID No. 2813 | Seq. ID No. 2814 | YES | IM | 2 |
| 1382 | Seq. ID No. 2815 | Seq. ID No. 2816 | yes | OM | 1 |
| 1384a | Seq. ID No. 2819 | Seq. ID No. 2820 | yes | IM | 2 |
| 1384b | Seq. ID No. 2821 | Seq. ID No. 2822 | yes | IM | 2 |
| 1384c | Seq. ID No. 2823 | Seq. ID No. 2824 | yes | IM | 2 |
| 1388b | Seq. ID No. 2831 | Seq. ID No. 2832 | maybe | Cyto | |
| 1389a | Seq. ID No. 2833 | Seq. ID No. 2834 | yes | Cyto | 0 |
| 1393a | Seq. ID No. 2835 | Seq. ID No. 2836 | YES | Peri | 1 |
| 1393b | Seq. ID No. 2837 | Seq. ID No. 2838 | yes | IM | 2 |
| 1393c | Seq. ID No. 2839 | Seq. ID No. 2840 | yes | IM | 3 |
| 1393d | Seq. ID No. 2841 | Seq. ID No. 2842 | YES | IM | 3 |
| 1395a | Seq. ID No. 2845 | Seq. ID No. 2846 | yes | Cyto | |
| 1399a | Seq. ID No. 2853 | Seq. ID No. 2854 | yes | IM | 2 |
| 1399b | Seq. ID No. 2855 | Seq. ID No. 2856 | maybe | IM | 2 |
| 1401 | Seq. ID No. 2859 | Seq. ID No. 2860 | NO | IM | 1 |
| 1402c | Seq. ID No. 2861 | Seq. ID No. 2862 | yes | IM | 2 |
| 1411a | Seq. ID No. 2873 | Seq. ID No. 2874 | yes | IM | 3 |
| 1412b | Seq. ID No. 2881 | Seq. ID No. 2882 | YES | IM | 9 |
| 1418 | Seq. ID No. 2893 | Seq. ID No. 2894 | maybe | Cyto | |
| 1426a | Seq. ID No. 2905 | Seq. ID No. 2906 | yes | IM | 4 |
| 1438 | Seq. ID No. 2935 | Seq. ID No. 2936 | YES | OM | 1 |
| 1439a | Seq. ID No. 2937 | Seq. ID No. 2938 | YES | IM | 3 |
| 1439b | Seq. ID No. 2939 | Seq. ID No. 2940 | yes | IM | 5 |
| 1439c | Seq. ID No. 2941 | Seq. ID No. 2942 | yes | IM | 6 |
| 1440a | Seq. ID No. 2947 | Seq. ID No. 2948 | yes | IM | 6 |
| 1440b | Seq. ID No. 2949 | Seq. ID No. 2950 | YES | IM | 10 |
| 1440c | Seq. ID No. 2951 | Seq. ID No. 2952 | maybe | IM | 12 |
| 1447a | Seq. ID No. 2969 | Seq. ID No. 2970 | NO | IM | 10 |
| 1448 | Seq. ID No. 2973 | Seq. ID No. 2974 | YES | IM | 1 |
| 1449a | Seq. ID No. 2975 | Seq. ID No. 2976 | maybe | OM | 1 |
| 1449b | Seq. ID No. 2977 | Seq. ID No. 2978 | maybe | OM | 1 |
| 1452a | Seq. ID No. 2981 | Seq. ID No. 2982 | yes | IM | 4 |
| 1452b | Seq. ID No. 2983 | Seq. ID No. 2984 | yes | IM | 4 |
| 1454 | Seq. ID No. 2987 | Seq. ID No. 2988 | yes | Cyto | 1 |
| 1455b | Seq. ID No. 2991 | Seq. ID No. 2992 | yes | OM | 1 |
| 1457a | Seq. ID No. 2995 | Seq. ID No. 2996 | yes | IM | 3 |
| 1457b | Seq. ID No. 2997 | Seq. ID No. 2998 | maybe | IM | 4 |
| 1462b | Seq. ID No. 3005 | Seq. ID No. 3006 | yes | IM | 6 |
| 1463a | Seq. ID No. 3007 | Seq. ID No. 3008 | YES | IM | 2 |
| 1463b | Seq. ID No. 3009 | Seq. ID No. 3010 | YES | IM | 2 |
| 14630 | Seq. ID No. 3011 | Seq. ID No. 3012 | YES | IM | 2 |
| 1466a | Seq. ID No. 3013 | Seq. ID No. 3014 | maybe | IM | 1 |
| 1469a | Seq. ID No. 3023 | Seq. ID No. 3024 | NO | IM | 4 |
| 1469b | Seq. ID No. 3025 | Seq. ID No. 3026 | yes | IM | 5 |
| 1469c | Seq. ID No. 3027 | Seq. ID No. 3028 | maybe | IM | 11 |
| 1470a | Seq. ID No. 3029 | Seq. ID No. 3030 | YES | IM | 5 |
| 1470b | Seq. ID No. 3031 | Seq. ID No. 3032 | YES | IM | 7 |
| 1475 | Seq. ID No. 3043 | Seq. ID No. 3044 | yes | OM | 1 |
| 1479c | Seq. ID No. 3055 | Seq. ID No. 3056 | NO | Peri | 1 |
| 1484a | Seq. ID No. 3063 | Seq. ID No. 3064 | maybe | IM | 4 |
| 1487 | Seq. ID No. 3071 | Seq. ID No. 3072 | maybe | OM | 2 |
| 1488a | Seq. ID No. 3073 | Seq. ID No. 3074 | yes | IM | 1 |
| 1488b | Seq. ID No. 3075 | Seq. ID No. 3076 | yes | IM | 2 |
| 1488c | Seq. ID No. 3077 | Seq. ID No. 3078 | maybe | IM | 3 |
| 1507a | Seq. ID No. 3119 | Seq. ID No. 3120 | NO | IM | 2 |
| 1507b | Seq. ID No. 3121 | Seq. ID No. 3122 | NO | IM | 2 |
| 1507c | Seq. ID No. 3123 | Seq. ID No. 3124 | maybe | IM | 2 |
| 1517a | Seq. ID No. 3145 | Seq. ID No. 3146 | NO | Peri | 1 |
| 1520 | Seq. ID No. 3155 | Seq. ID No. 3156 | yes | Peri | 1 |
| 1522 | Seq. ID No. 3157 | Seq. ID No. 3158 | NO | Peri | 1 |
| 1530a | Seq. ID No. 3163 | Seq. ID No. 3164 | yes | OM | 1 |
| 1530b | Seq. ID No. 3165 | Seq. ID No. 3166 | yes | IM | 1 |
| 1535a | Seq. ID No. 3173 | Seq. ID No. 3174 | maybe | Cyto | 1 |
| 1543 | Seq. ID No. 3183 | Seq. ID No. 3184 | yes | OM | 1 |
| 1552 | Seq. ID No. 3193 | Seq. ID No. 3194 | maybe | IM | 2 |
| 1554b | Seq. ID No. 3201 | Seq. ID No. 3202 | maybe | IM | 2 |
| 1557a | Seq. ID No. 3213 | Seq. ID No. 3214 | yes | IM | 4 |
| 1557b | Seq. ID No. 3215 | Seq. ID No. 3216 | yes | IM | 5 |
| 1557c | Seq. ID No. 3217 | Seq. ID No. 3218 | maybe | IM | 6 |
| 1559a | Seq. ID No. 3219 | Seq. ID No. 3220 | YES | IM | 4 |
| 1572a | Seq. ID No. 3241 | Seq. ID No. 3242 | maybe | IM | 2 |
| 1572b | Seq. ID No. 3243 | Seq. ID No. 3244 | NO | IM | 8 |
| 1572c | Seq. ID No. 3245 | Seq. ID No. 3246 | yes | IM | 10 |
| 1572e | Seq. ID No. 3249 | Seq. ID No. 3250 | NO | IM | 12 |
| 1577a | Seq. ID No. 3255 | Seq. ID No. 3256 | maybe | IM | 4 |
| 1577b | Seq. ID No. 3257 | Seq. ID No. 3258 | maybe | IM | 4 |
| 1580a | Seq. ID No. 3261 | Seq. ID No. 3262 | yes | IM | 1 |
| 1580b | Seq. ID No. 3263 | Seq. ID No. 3264 | yes | IM | 1 |
| 1582b | Seq. ID No. 3269 | Seq. ID No. 3270 | yes | IM | 1 |
| 1585a | Seq. ID No. 3275 | Seq. ID No. 3276 | yes | IM | 1 |
| 1585b | Seq. ID No. 3277 | Seq. ID No. 3278 | yes | IM | 1 |
| 1594a | Seq. ID No. 3297 | Seq. ID No. 3298 | YES | IM | 1 |
| 1606a | Seq. ID No. 3317 | Seq. ID No. 3318 | yes | IM | 1 |
| 1607b | Seq. ID No. 3323 | Seq. ID No. 3324 | maybe | IM | 6 |
| 1608 | Seq. ID No. 3325 | Seq. ID No. 3326 | yes | Cyto | 1 |
| 1612 | Seq. ID No. 3331 | Seq. ID No. 3332 | YES | IM | 3 |
| 1616b | Seq. ID No. 3335 | Seq. ID No. 3336 | YES | IM | 4 |
| 1619 | Seq. ID No. 3337 | Seq. ID No. 3338 | yes | OM | 1 |
| 1621 | Seq. ID No. 3339 | Seq. ID No. 3340 | maybe | IM | 1 |
| 1624 | Seq. ID No. 3349 | Seq. ID No. 3350 | YES | Peri | 1 |
| 1625a | Seq. ID No. 3351 | Seq. ID No. 3352 | yes | IM | 4 |
| 1625b | Seq. ID No. 3353 | Seq. ID No. 3354 | YES | IM | 8 |
| 1625c | Seq. ID No. 3355 | Seq. ID No. 3356 | YES | IM | 8 |
| 1626a | Seq. ID No. 3357 | Seq. ID No. 3358 | maybe | IM | 4 |
| 1626b | Seq. ID No. 3359 | Seq. ID No. 3360 | maybe | IM | 9 |
| 1634b | Seq. ID No. 3375 | Seq. ID No. 3376 | maybe | OM | 0 |
| 1634c | Seq. ID No. 3377 | Seq. ID No. 3378 | YES | IM | 1 |
| 1646a | Seq. ID No. 3389 | Seq. ID No. 3390 | yes | IM | 2 |
| 1646b | Seq. ID No. 3391 | Seq. ID No. 3392 | YES | IM | 6 |
| 1646d | Seq. ID No. 3395 | Seq. ID No. 3396 | maybe | IM | 13 |
| 1649a | Seq. ID No. 3405 | Seq. ID No. 3406 | yes | Peri | 2 |
| 1654 | Seq. ID No. 3415 | Seq. ID No. 3416 | maybe | Peri | 0 |
| 1659a | Seq. ID No. 3421 | Seq. ID No. 3422 | yes | OM | 1 |
| 1659c | Seq. ID No. 3425 | Seq. ID No. 3426 | YES | IM | 10 |
| 1660b | Seq. ID No. 3427 | Seq. ID No. 3428 | maybe | IM | 4 |
| 1663 | Seq. ID No. 3433 | Seq. ID No. 3434 | maybe | Cyto | 0 |
| 1669 | Seq. ID No. 3441 | Seq. ID No. 3442 | maybe | Cyto | 1 |
| 1673a | Seq. ID No. 3449 | Seq. ID No. 3450 | YES | IM | 2 |
| 1673b | Seq. ID No. 3451 | Seq. ID No. 3452 | yes | IM | 8 |
| 1673c | Seq. ID No. 3453 | Seq. ID No. 3454 | yes | IM | 10 |
| 1673d | Seq. ID No. 3455 | Seq. ID No. 3456 | yes | IM | 12 |
| 1673e | Seq. ID No. 3457 | Seq. ID No. 3458 | maybe | IM | 13 |
| 1675a | Seq. ID No. 3463 | Seq. ID No. 3464 | maybe | IM | 1 |
| 1683a | Seq. ID No. 3481 | Seq. ID No. 3482 | maybe | IM | 4 |
| 1688a | Seq. ID No. 3491 | Seq. ID No. 3492 | yes | IM | 3 |
| 1688b | Seq. ID No. 3493 | Seq. ID No. 3494 | YES | IM | 10 |
| 1690a | Seq. ID No. 3503 | Seq. ID No. 3504 | yes | IM | 1 |
| 1690b | Seq. ID No. 3505 | Seq. ID No. 3506 | yes | IM | 2 |
| 1694c | Seq. ID No. 3517 | Seq. ID No. 3518 | yes | IM | 1 |
| 1694d | Seq. ID No. 3519 | Seq. ID No. 3520 | yes | IM | 1 |
| 1699a | Seq. ID No. 3527 | Seq. ID No. 3528 | maybe | IM | 7 |
| 1700a | Seq. ID No. 3531 | Seq. ID No. 3532 | maybe | IM | 4 |
| 1703b | Seq. ID No. 3539 | Seq. ID No. 3540 | NO | Cyto | 0 |
| 1710b | Seq. ID No. 3561 | Seq. ID No. 3562 | NO | Cyto | |
| 1718b | Seq. ID No. 3573 | Seq. ID No. 3574 | YES | Cyto | |
| 1724 | Seq. ID No. 3581 | Seq. ID No. 3582 | maybe | IM | 2 |
| 1731 | Seq. ID No. 3587 | Seq. ID No. 3588 | NO | IM | 2 |
| 1735a | Seq. ID No. 3593 | Seq. ID No. 3594 | yes | OM | 1 |
| 1735b | Seq. ID No. 3595 | Seq. ID No. 3596 | maybe | OM | 3 |
| 1743 | Seq. ID No. 3611 | Seq. ID No. 3612 | YES | IM | 1 |
| 1745 | Seq. ID No. 3617 | Seq. ID No. 3618 | yes | Peri | 0 |
| 1747 | Seq. ID No. 3619 | Seq. ID No. 3620 | YES | IM | 2 |
| 1749a | Seq. ID No. 3621 | Seq. ID No. 3622 | yes | IM | 3 |
| 1750a | Seq. ID No. 3625 | Seq. ID No. 3626 | maybe | IM | 2 |
| 1752b | Seq. ID No. 3629 | Seq. ID No. 3630 | yes | Peri | 1 |
| 1756b | Seq. ID No. 3635 | Seq. ID No. 3636 | maybe | OM | 1 |
| 1778a | Seq. ID No. 3677 | Seq. ID No. 3678 | maybe | IM | 1 |
| 1778b | Seq. ID No. 3679 | Seq. ID No. 3680 | maybe | Cyto | 1 |
| 1784b | Seq. ID No. 3689 | Seq. ID No. 3690 | YES | IM | 1 |
| 1794a | Seq. ID No. 3717 | Seq. ID No. 3718 | maybe | OM | 1 |
| 1798a | Seq. ID No. 3723 | Seq. ID No. 3724 | yes | IM | 2 |
| 1798c | Seq. ID No. 3727 | Seq. ID No. 3728 | maybe | IM | 4 |
| 1805 | Seq. ID No. 3741 | Seq. ID No. 3742 | yes | IM | 3 |
| 1806b | Seq. ID No. 3745 | Seq. ID No. 3746 | yes | IM | 5 |
| 1808a | Seq. ID No. 3753 | Seq. ID No. 3754 | YES | IM | 3 |
| 1808b | Seq. ID No. 3755 | Seq. ID No. 3756 | YES | IM | 5 |
| 1808c | Seq. ID No. 3757 | Seq. ID No. 3758 | maybe | IM | 9 |
| 1809a | Seq. ID No. 3761 | Seq. ID No. 3762 | maybe | IM | 5 |
| 1809b | Seq. ID No. 3763 | Seq. ID No. 3764 | yes | IM | 7 |
| 1809c | Seq. ID No. 3765 | Seq. ID No. 3766 | YES | IM | 8 |
| 1812a | Seq. ID No. 3781 | Seq. ID No. 3782 | YES | IM | 1 |
| 1812b | Seq. ID No. 3783 | Seq. ID No. 3784 | YES | IM | 2 |
| 1816a | Seq. ID No. 3793 | Seq. ID No. 3794 | yes | Peri | 1 |
| 1817a | Seq. ID No. 3799 | Seq. ID No. 3800 | maybe | IM | 3 |
| 1822 | Seq. ID No. 3807 | Seq. ID No. 3808 | maybe | Cyto | 1 |
| 1825 | Seq. ID No. 3813 | Seq. ID No. 3814 | yes | IM | 2 |
| 1826a | Seq. ID No. 3815 | Seq. ID No. 3816 | NO | Cyto | 0 |
| 1826b | Seq. ID No. 3817 | Seq. ID No. 3818 | NO | Cyto | 0 |
| 1838a | Seq. ID No. 3837 | Seq. ID No. 3838 | yes | IM | 3 |
| 1838b | Seq. ID No. 3839 | Seq. ID No. 3840 | yes | IM | 4 |
| 1842a | Seq. ID No. 3849 | Seq. ID No. 3850 | maybe | IM | 2 |
| 1842b | Seq. ID No. 3851 | Seq. ID No. 3852 | YES | IM | 6 |
| 1842c | Seq. ID No. 3853 | Seq. ID No. 3854 | maybe | IM | 8 |
| 1845a | Seq. ID No. 3859 | Seq. ID No. 3860 | maybe | IM | 3 |
| 1845b | Seq. ID No. 3861 | Seq. ID No. 3862 | yes | IM | 8 |
| 1845c | Seq. ID No. 3863 | Seq. ID No. 3864 | maybe | IM | 10 |
| 1848a | Seq. ID No. 3865 | Seq. ID No. 3866 | yes | IM | 7 |
| 1854a | Seq. ID No. 3879 | Seq. ID No. 3880 | NO | IM | 3 |
| 1857b | Seq. ID No. 3889 | Seq. ID No. 3890 | yes | IM | 5 |
| 1857c | Seq. ID No. 3891 | Seq. ID No. 3892 | yes | IM | 6 |
| 1858 | Seq. ID No. 3895 | Seq. ID No. 3896 | yes | Cyto | 0 |
| 1862a | Seq. ID No. 3903 | Seq. ID No. 3904 | YES | IM | 1 |
| 1868 | Seq. ID No. 3915 | Seq. ID No. 3916 | yes | IM | 1 |
| 1873b | Seq. ID No. 3923 | Seq. ID No. 3924 | yes | Peri | 1 |
| 1873c | Seq. ID No. 3925 | Seq. ID No. 3926 | yes | Peri | 1 |
| 1894c | Seq. ID No. 3959 | Seq. ID No. 3960 | maybe | IM | 1 |
| 1896a | Seq. ID No. 3963 | Seq. ID No. 3964 | maybe | Peri | 1 |
| 1898a | Seq. ID No. 3973 | Seq. ID No. 3974 | maybe | IM | 2 |
| 1898b | Seq. ID No. 3975 | Seq. ID No. 3976 | yes | IM | 4 |
| 1916 | Seq. ID No. 3993 | Seq. ID No. 3994 | maybe | IM | 1 |
| 1917a | Seq. ID No. 3995 | Seq. ID No. 3996 | yes | IM | 0 |
| 1917b | Seq. ID No. 3997 | Seq. ID No. 3998 | yes | IM | 0 |
| 1919a | Seq. ID No. 4005 | Seq. ID No. 4006 | YES | Peri | 1 |
| 1919b | Seq. ID No. 4007 | Seq. ID No. 4008 | YES | IM | 1 |
| 1919c | Seq. ID No. 4009 | Seq. ID No. 4010 | yes | IM | 1 |
| 1931a | Seq. ID No. 4025 | Seq. ID No. 4026 | NO | IM | 2 |
| 1931b | Seq. ID No. 4027 | Seq. ID No. 4028 | YES | IM | 3 |
| 1936 | Seq. ID No. 4039 | Seq. ID No. 4040 | yes | IM | 6 |
| 1937a | Seq. ID No. 4041 | Seq. ID No. 4042 | yes | IM | 2 |
| 1937b | Seq. ID No. 4043 | Seq. ID No. 4044 | maybe | IM | 3 |
| 1937c | Seq. ID No. 4045 | Seq. ID No. 4046 | maybe | IM | 4 |
| 1937d | Seq. ID No. 4047 | Seq. ID No. 4048 | maybe | IM | 7 |
| 1937e | Seq. ID No. 4049 | Seq. ID No. 4050 | maybe | IM | 7 |
| 1941b | Seq. ID No. 4061 | Seq. ID No. 4062 | yes | IM | 4 |
| 1946a | Seq. ID No. 4071 | Seq. ID No. 4072 | NO | IM | 4 |
| 1946b | Seq. ID No. 4073 | Seq. ID No. 4074 | YES | IM | 8 |
| 1950 | Seq. ID No. 4079 | Seq. ID No. 4080 | yes | OM | 1 |
| 1951a | Seq. ID No. 4081 | Seq. ID No. 4082 | yes | IM | 3 |
| 1951b | Seq. ID No. 4083 | Seq. ID No. 4084 | maybe | IM | 4 |
| 1958a | Seq. ID No. 4101 | Seq. ID No. 4102 | maybe | IM | 4 |
| 1958b | Seq. ID No. 4103 | Seq. ID No. 4104 | maybe | IM | 7 |
| 1960c | Seq. ID No. 4111 | Seq. ID No. 4112 | yes | IM | 1 |
| 1970b | Seq. ID No. 4133 | Seq. ID No. 4134 | maybe | OM | 1 |
| 1972 | Seq. ID No. 4135 | Seq. ID No. 4136 | yes | Cyto | 1 |
| 1973 | Seq. ID No. 4137 | Seq. ID No. 4138 | YES | OM | 1 |
| 1976 | Seq. ID No. 4139 | Seq. ID No. 4140 | yes | IM | 1 |
| 1977a | Seq. ID No. 4141 | Seq. ID No. 4142 | YES | OM | 1 |
| 1977b | Seq. ID No. 4143 | Seq. ID No. 4144 | YES | OM | 1 |
| 1977c | Seq. ID No. 4145 | Seq. ID No. 4146 | YES | OM | 1 |
| 1980a | Seq. ID No. 4151 | Seq. ID No. 4152 | NO | Cyto | 1 |
| 1980b | Seq. ID No. 4153 | Seq. ID No. 4154 | maybe | Cyto | 1 |
| 1991 | Seq. ID No. 4181 | Seq. ID No. 4182 | yes | Cyto | 1 |
| 2016a | Seq. ID No. 4221 | Seq. ID No. 4222 | yes | IM | 2 |
| 2016b | Seq. ID No. 4223 | Seq. ID No. 4224 | maybe | IM | 4 |
| 2016c | Seq. ID No. 4225 | Seq. ID No. 4226 | YES | IM | 7 |
| 2016d | Seq. ID No. 4227 | Seq. ID No. 4228 | maybe | IM | 11 |
| 2016f | Seq. ID No. 4231 | Seq. ID No. 4232 | maybe | IM | 13 |
| 2016g | Seq. ID No. 4233 | Seq. ID No. 4234 | NO | IM | 13 |
| 2023a | Seq. ID No. 4241 | Seq. ID No. 4242 | maybe | IM | 4 |
| 2024b | Seq. ID No. 4247 | Seq. ID No. 4248 | yes | IM | 2 |
| 2025 | Seq. ID No. 4253 | Seq. ID No. 4254 | yes | OM | 1 |
| 2030a | Seq. ID No. 4257 | Seq. ID No. 4258 | yes | IM | 4 |
| 2030b | Seq. ID No. 4259 | Seq. ID No. 4260 | yes | IM | 5 |
| 2030c | Seq. ID No. 4261 | Seq. ID No. 4262 | yes | IM | 5 |
| 2030d | Seq. ID No. 4263 | Seq. ID No. 4264 | yes | IM | 5 |
| 2032c | Seq. ID No. 4265 | Seq. ID No. 4266 | maybe | Cyto | |
| 2035b | Seq. ID No. 4269 | Seq. ID No. 4270 | yes | Cyto | 0 |
| 2038a | Seq. ID No. 4275 | Seq. ID No. 4276 | NO | Cyto | 0 |
| 2045a | Seq. ID No. 4285 | Seq. ID No. 4286 | maybe | Cyto | 1 |
| 2045b | Seq. ID No. 4287 | Seq. ID No. 4288 | maybe | Cyto | 1 |
| 2049c | Seq. ID No. 4297 | Seq. ID No. 4298 | maybe | Cyto | |
| 2056 | Seq. ID No. 4307 | Seq. ID No. 4308 | maybe | Peri | 1 |
| 2059a | Seq. ID No. 4311 | Seq. ID No. 4312 | yes | IM | 2 |
| 2059b | Seq. ID No. 4313 | Seq. ID No. 4314 | maybe | IM | 4 |
| 2074b | Seq. ID No. 4343 | Seq. ID No. 4344 | YES | OM | 1 |
| 2092 | Seq. ID No. 4379 | Seq. ID No. 4380 | yes | IM | 2 |
| 2096a | Seq. ID No. 4385 | Seq. ID No. 4386 | YES | IM | 4 |
| 2096c | Seq. ID No. 4389 | Seq. ID No. 4390 | yes | IM | 10 |
| 2096d | Seq. ID No. 4391 | Seq. ID No. 4392 | yes | IM | 10 |
| 2101 | Seq. ID No. 4399 | Seq. ID No. 4400 | YES | Peri | 1 |
| 2105 | Seq. ID No. 4403 | Seq. ID No. 4404 | maybe | Cyto | 1 |
| 2120a | Seq. ID No. 4437 | Seq. ID No. 4438 | NO | IM | 1 |
| 2120b | Seq. ID No. 4439 | Seq. ID No. 4440 | NO | IM | 1 |
| 2122b | Seq. ID No. 4441 | Seq. ID No. 4442 | maybe | IM | 4 |
| 2140a | Seq. ID No. 4469 | Seq. ID No. 4470 | YES | IM | 4 |
| 2142a | Seq. ID No. 4473 | Seq. ID No. 4474 | yes | IM | 1 |
| 2146 | Seq. ID No. 4481 | Seq. ID No. 4482 | yes | OM | 1 |
| 2147a | Seq. ID No. 4483 | Seq. ID No. 4484 | YES | IM | 2 |
| 2147b | Seq. ID No. 4485 | Seq. ID No. 4486 | maybe | IM | 5 |
| 2150a | Seq. ID No. 4493 | Seq. ID No. 4494 | YES | IM | 1 |
| 2150b | Seq. ID No. 4495 | Seq. ID No. 4496 | YES | IM | 2 |
| 2150c | Seq. ID No. 4497 | Seq. ID No. 4498 | maybe | IM | 2 |
| 2159a | Seq. ID No. 4513 | Seq. ID No. 4514 | maybe | IM | 2 |
| 2159b | Seq. ID No. 4515 | Seq. ID No. 4516 | maybe | IM | 2 |
| 2161b | Seq. ID No. 4527 | Seq. ID No. 4528 | maybe | Cyto | 1 |
| 2161c | Seq. ID No. 4529 | Seq. ID No. 4530 | maybe | Cyto | 1 |
| 2165 | Seq. ID No. 4533 | Seq. ID No. 4534 | YES | IM | 1 |
| 2190a | Seq. ID No. 4587 | Seq. ID No. 4588 | maybe | IM | 1 |
| 2190b | Seq. ID No. 4589 | Seq. ID No. 4590 | NO | Peri | 1 |
| 2219a | Seq. ID No. 4639 | Seq. ID No. 4640 | yes | IM | 1 |
| 2219b | Seq. ID No. 4641 | Seq. ID No. 4642 | maybe | IM | 4 |
| 2219c | Seq. ID No. 4643 | Seq. ID No. 4644 | maybe | IM | 4 |
| 2225 | Seq. ID No. 4659 | Seq. ID No. 4660 | yes | OM | 0 |
| 2236a | Seq. ID No. 4681 | Seq. ID No. 4682 | yes | IM | 2 |
| 2239b | Seq. ID No. 4687 | Seq. ID No. 4688 | maybe | Cyto | 0 |
| 2243a | Seq. ID No. 4695 | Seq. ID No. 4696 | maybe | IM | 2 |
| 2249 | Seq. ID No. 4705 | Seq. ID No. 4706 | yes | OM | 1 |
| 2253a | Seq. ID No. 4707 | Seq. ID No. 4708 | NO | IM | 2 |
| 2253b | Seq. ID No. 4709 | Seq. ID No. 4710 | YES | IM | 4 |
| 2253c | Seq. ID No. 4711 | Seq. ID No. 4712 | YES | IM | 5 |
| 2255a | Seq. ID No. 4715 | Seq. ID No. 4716 | NO | IM | 3 |
| 2255b | Seq. ID No. 4717 | Seq. ID No. 4718 | yes | IM | 6 |
| 2264b | Seq. ID No. 4737 | Seq. ID No. 4738 | yes | IM | 1 |
| 2276a | Seq. ID No. 4759 | Seq. ID No. 4760 | NO | IM | 1 |
| 2300 | Seq. ID No. 4813 | Seq. ID No. 4814 | yes | IM | 4 |
| 2308 | Seq. ID No. 4827 | Seq. ID No. 4828 | YES | OM | 1 |
| 2320 | Seq. ID No. 4853 | Seq. ID No. 4854 | maybe | IM | 1 |
| 2324 | Seq. ID No. 4863 | Seq. ID No. 4864 | maybe | IM | 2 |
| 2329a | Seq. ID No. 4869 | Seq. ID No. 4870 | yes | IM | 1 |
| 2329b | Seq. ID No. 4871 | Seq. ID No. 4872 | YES | IM | 3 |
| 2329c | Seq. ID No. 4873 | Seq. ID No. 4874 | YES | IM | 6 |
| 2329d | Seq. ID No. 4875 | Seq. ID No. 4876 | yes | IM | 7 |
| 2357 | Seq. ID No. 4919 | Seq. ID No. 4920 | yes | IM | 2 |
| 2358 | Seq. ID No. 4921 | Seq. ID No. 4922 | YES | IM | 2 |
| 2360 | Seq. ID No. 4923 | Seq. ID No. 4924 | NO | Cyto | 1 |
| 2363a | Seq. ID No. 4929 | Seq. ID No. 4930 | yes | IM | 1 |
| 2363b | Seq. ID No. 4931 | Seq. ID No. 4932 | yes | IM | 1 |
| 2371a | Seq. ID No. 4949 | Seq. ID No. 4950 | NO | IM | 1 |
| 2372 | Seq. ID No. 4951 | Seq. ID No. 4952 | maybe | Peri | 1 |
| 2382c | Seq. ID No. 4975 | Seq. ID No. 4976 | maybe | Cyto | |
| 2390 | Seq. ID No. 4987 | Seq. ID No. 4988 | NO | Peri | 1 |
| 2397 | Seq. ID No. 4999 | Seq. ID No. 5000 | maybe | Peri | 0 |
| 2402b | Seq. ID No. 5013 | Seq. ID No. 5014 | maybe | IM | 1 |
| 2412 | Seq. ID No. 5031 | Seq. ID No. 5032 | yes | IM | 2 |
| 2423a | Seq. ID No. 5061 | Seq. ID No. 5062 | yes | IM | 5 |
| 2423b | Seq. ID No. 5063 | Seq. ID No. 5064 | yes | IM | 5 |
| 2424c | Seq. ID No. 5069 | Seq. ID No. 5070 | yes | IM | 1 |
| 2434 | Seq. ID No. 5085 | Seq. ID No. 5086 | maybe | Cyto | 1 |
| 2445 | Seq. ID No. 5103 | Seq. ID No. 5104 | yes | IM | 1 |
| 2453 | Seq. ID No. 5115 | Seq. ID No. 5116 | YES | OM | 0 |
| 2456c | Seq. ID No. 5123 | Seq. ID No. 5124 | yes | IM | 8 |
| 2456d | Seq. ID No. 5125 | Seq. ID No. 5126 | maybe | IM | 9 |
| 2458a | Seq. ID No. 5129 | Seq. ID No. 5130 | maybe | IM | 5 |
| 2458b | Seq. ID No. 5131 | Seq. ID No. 5132 | yes | IM | 6 |
| 2458c | Seq. ID No. 5133 | Seq. ID No. 5134 | yes | IM | 7 |
| 2458d | Seq. ID No. 5135 | Seq. ID No. 5136 | yes | IM | 7 |
| 2458e | Seq. ID No. 5137 | Seq. ID No. 5138 | yes | IM | 8 |
| 2458f | Seq. ID No. 5139 | Seq. ID No. 5140 | yes | IM | 9 |
| 2458g | Seq. ID No. 5141 | Seq. ID No. 5142 | yes | IM | 9 |
| 2468a | Seq. ID No. 5159 | Seq. ID No. 5160 | yes | IM | 1 |
| 2469b | Seq. ID No. 5165 | Seq. ID No. 5166 | yes | IM | 2 |
| 2474b | Seq. ID No. 5175 | Seq. ID No. 5176 | yes | IM | 3 |
| 2484a | Seq. ID No. 5197 | Seq. ID No. 5198 | maybe | Peri | 1 |
| 2484b | Seq. ID No. 5199 | Seq. ID No. 5200 | maybe | Peri | 1 |
| 2490 | Seq. ID No. 5205 | Seq. ID No. 5206 | yes | IM | 1 |
| 2492a | Seq. ID No. 5207 | Seq. ID No. 5208 | yes | IM | 1 |
| 2495a | Seq. ID No. 5213 | Seq. ID No. 5214 | maybe | IM | 9 |
| 2497b | Seq. ID No. 5219 | Seq. ID No. 5220 | yes | Peri | 2 |
| 2500a | Seq. ID No. 5223 | Seq. ID No. 5224 | yes | OM | 1 |
| 2518a | Seq. ID No. 5267 | Seq. ID No. 5268 | YES | Cyto | 1 |
| 2520a | Seq. ID No. 5273 | Seq. ID No. 5274 | NO | Cyto | 0 |
| 2520b | Seq. ID No. 5275 | Seq. ID No. 5276 | NO | Cyto | 0 |
| 2520c | Seq. ID No. 5277 | Seq. ID No. 5278 | NO | Cyto | 0 |
| 2520d | Seq. ID No. 5279 | Seq. ID No. 5280 | NO | Cyto | 0 |
| 2521 | Seq. ID No. 5281 | Seq. ID No. 5282 | maybe | IM | 3 |
| 2525a | Seq. ID No. 5285 | Seq. ID No. 5286 | yes | IM | 1 |
| 2546 | Seq. ID No. 5327 | Seq. ID No. 5328 | NO | Cyto | 1 |
| 2547b | Seq. ID No. 5329 | Seq. ID No. 5330 | yes | IM | 1 |
| 2547c | Seq. ID No. 5331 | Seq. ID No. 5332 | yes | IM | 1 |
| 2550c | Seq. ID No. 5341 | Seq. ID No. 5342 | YES | IM | |
| 2564b | Seq. ID No. 5377 | Seq. ID No. 5378 | yes | OM | 1 |
| 2564c | Seq. ID No. 5379 | Seq. ID No. 5380 | yes | OM | 1 |
| 2567a | Seq. ID No. 5385 | Seq. ID No. 5386 | yes | IM | 4 |
| 2567b | Seq. ID No. 5387 | Seq. ID No. 5388 | YES | IM | 5 |
| 2582a | Seq. ID No. 5405 | Seq. ID No. 5406 | yes | IM | 4 |
| 2587a | Seq. ID No. 5413 | Seq. ID No. 5414 | NO | Peri | 2 |
| 2587b | Seq. ID No. 5415 | Seq. ID No. 5416 | maybe | IM | 5 |
| 2596 | Seq. ID No. 5433 | Seq. ID No. 5434 | NO | IM | 1 |
| 2610 | Seq. ID No. 5453 | Seq. ID No. 5454 | yes | IM | 1 |
| 2616a | Seq. ID No. 5459 | Seq. ID No. 5460 | yes | IM | 2 |
| 2616b | Seq. ID No. 5461 | Seq. ID No. 5462 | yes | IM | 3 |
| 2616c | Seq. ID No. 5463 | Seq. ID No. 5464 | yes | IM | 4 |
| 2616d | Seq. ID No. 5465 | Seq. ID No. 5466 | YES | IM | 5 |
| 2623b | Seq. ID No. 5491 | Seq. ID No. 5492 | maybe | OM | 1 |
| 2625a | Seq. ID No. 5497 | Seq. ID No. 5498 | YES | Peri | 1 |
| 2628 | Seq. ID No. 5509 | Seq. ID No. 5510 | yes | IM | 1 |
| 2629b | Seq. ID No. 5513 | Seq. ID No. 5514 | YES | OM | 1 |
| 2631 | Seq. ID No. 5515 | Seq. ID No. 5516 | NO | Cyto | 1 |
| 2632 | Seq. ID No. 5517 | Seq. ID No. 5518 | NO | Cyto | 1 |
| 2633d | Seq. ID No. 5525 | Seq. ID No. 5526 | maybe | OM | 1 |
| 2637a | Seq. ID No. 5529 | Seq. ID No. 5530 | yes | OM | 1 |
| 2637b | Seq. ID No. 5531 | Seq. ID No. 5532 | yes | IM | 1 |
| 2642 | Seq. ID No. 5533 | Seq. ID No. 5534 | NO | IM | 2 |
| 2648a | Seq. ID No. 5543 | Seq. ID No. 5544 | YES | IM | 0 |
| 2648b | Seq. ID No. 5545 | Seq. ID No. 5546 | YES | IM | 0 |
| 2660 | Seq. ID No. 5569 | Seq. ID No. 5570 | yes | Peri | 1 |
| 2669a | Seq. ID No. 5587 | Seq. ID No. 5588 | YES | Peri | 2 |
| 2669b | Seq. ID No. 5589 | Seq. ID No. 5590 | YES | IM | 2 |
| 2669c | Seq. ID No. 5591 | Seq. ID No. 5592 | YES | IM | 2 |
| 2672 | Seq. ID No. 5593 | Seq. ID No. 5594 | NO | IM | 3 |
| 2673 | Seq. ID No. 5595 | Seq. ID No. 5596 | maybe | IM | 2 |
| 2674a | Seq. ID No. 5597 | Seq. ID No. 5598 | maybe | IM | 4 |
| 2679a | Seq. ID No. 5609 | Seq. ID No. 5610 | NO | IM | 4 |
| 2679b | Seq. ID No. 5611 | Seq. ID No. 5612 | YES | IM | 5 |
| 2680c | Seq. ID No. 5621 | Seq. ID No. 5622 | YES | IM | 1 |
| 2683a | Seq. ID No. 5623 | Seq. ID No. 5624 | yes | IM | 1 |
| 2683b | Seq. ID No. 5625 | Seq. ID No. 5626 | yes | IM | 1 |
| 2688a | Seq. ID No. 5633 | Seq. ID No. 5634 | maybe | IM | 2 |
| 2688c | Seq. ID No. 5637 | Seq. ID No. 5638 | maybe | IM | 4 |
| 2689a | Seq. ID No. 5639 | Seq. ID No. 5640 | maybe | Peri | 0 |
| 2689b | Seq. ID No. 5641 | Seq. ID No. 5642 | YES | Peri | 0 |
| 2690a | Seq. ID No. 5643 | Seq. ID No. 5644 | yes | Peri | 1 |
| 2692b | Seq. ID No. 5649 | Seq. ID No. 5650 | maybe | IM | 1 |
| 2696a | Seq. ID No. 5659 | Seq. ID No. 5660 | yes | IM | 8 |
| 2710c | Seq. ID No. 5667 | Seq. ID No. 5668 | maybe | Cyto | |
| 2718a | Seq. ID No. 5681 | Seq. ID No. 5682 | YES | IM | 3 |
| 2718b | Seq. ID No. 5683 | Seq. ID No. 5684 | yes | IM | 3 |
| 2718c | Seq. ID No. 5685 | Seq. ID No. 5686 | yes | IM | 4 |
| 2719a | Seq. ID No. 5687 | Seq. ID No. 5688 | maybe | Cyto | 0 |
| 2719b | Seq. ID No. 5689 | Seq. ID No. 5690 | maybe | Cyto | 0 |
| 2723 | Seq. ID No. 5699 | Seq. ID No. 5700 | maybe | IM | 4 |
| 2725a | Seq. ID No. 5703 | Seq. ID No. 5704 | maybe | Peri | 2 |
| 2725b | Seq. ID No. 5705 | Seq. ID No. 5706 | maybe | Cyto | 2 |
| 2728a | Seq. ID No. 5709 | Seq. ID No. 5710 | yes | IM | 1 |
| 2728b | Seq. ID No. 5711 | Seq. ID No. 5712 | yes | IM | 1 |
| 2734a | Seq. ID No. 5719 | Seq. ID No. 5720 | YES | IM | 3 |
| 2738a | Seq. ID No. 5729 | Seq. ID No. 5730 | maybe | IM | 10 |
| 2738c | Seq. ID No. 5733 | Seq. ID No. 5734 | yes | IM | 12 |
| 2738d | Seq. ID No. 5735 | Seq. ID No. 5736 | maybe | IM | 12 |
| 2742b | Seq. ID No. 5739 | Seq. ID No. 5740 | yes | Peri | |
| 2749a | Seq. ID No. 5763 | Seq. ID No. 5764 | NO | IM | 3 |
| 2749b | Seq. ID No. 5765 | Seq. ID No. 5766 | yes | IM | 4 |
| 2749c | Seq. ID No. 5767 | Seq. ID No. 5768 | NO | IM | 8 |
| 2749e | Seq. ID No. 5771 | Seq. ID No. 5772 | YES | IM | 10 |
| 2757b | Seq. ID No. 5783 | Seq. ID No. 5784 | YES | IM | 5 |
| 2758a | Seq. ID No. 5785 | Seq. ID No. 5786 | NO | Cyto | 0 |
| 2758d | Seq. ID No. 5791 | Seq. ID No. 5792 | maybe | Cyto | 1 |
| 2760a | Seq. ID No. 5797 | Seq. ID No. 5798 | yes | Peri | 1 |
| 2770 | Seq. ID No. 5829 | Seq. ID No. 5830 | maybe | IM | 1 |
| 2791 | Seq. ID No. 5879 | Seq. ID No. 5880 | maybe | IM | 1 |
| 2794 | Seq. ID No. 5883 | Seq. ID No. 5884 | NO | IM | 2 |
| 2796a | Seq. ID No. 5885 | Seq. ID No. 5886 | maybe | IM | 2 |
| 2799a | Seq. ID No. 5889 | Seq. ID No. 5890 | yes | OM | 1 |
| 2801a | Seq. ID No. 5893 | Seq. ID No. 5894 | yes | IM | 1 |
| 2801b | Seq. ID No. 5895 | Seq. ID No. 5896 | YES | IM | 2 |
| 2805a | Seq. ID No. 5899 | Seq. ID No. 5900 | YES | IM | 2 |
| 2805b | Seq. ID No. 5901 | Seq. ID No. 5902 | YES | IM | 4 |
| 2810a | Seq. ID No. 5905 | Seq. ID No. 5906 | yes | IM | 3 |
| 2810c | Seq. ID No. 5909 | Seq. ID No. 5910 | yes | IM | 4 |
| 2818a | Seq. ID No. 5921 | Seq. ID No. 5922 | maybe | IM | 2 |
| 2818b | Seq. ID No. 5923 | Seq. ID No. 5924 | yes | IM | 5 |
| 2818d | Seq. ID No. 5927 | Seq. ID No. 5928 | YES | IM | 6 |
| 2818e | Seq. ID No. 5929 | Seq. ID No. 5930 | YES | IM | 6 |
| 2822a | Seq. ID No. 5939 | Seq. ID No. 5940 | YES | IM | 3 |
| 2869a | Seq. ID No. 6023 | Seq. ID No. 6024 | maybe | OM | 1 |
| 2869b | Seq. ID No. 6025 | Seq. ID No. 6026 | yes | OM | 1 |
| 2869c | Seq. ID No. 6027 | Seq. ID No. 6028 | yes | IM | 1 |
| 2881 | Seq. ID No. 6043 | Seq. ID No. 6044 | yes | IM | 1 |
| 2883a | Seq. ID No. 6047 | Seq. ID No. 6048 | yes | IM | 6 |
| 2883d | Seq. ID No. 6053 | Seq. ID No. 6054 | yes | IM | 8 |
| 2887a | Seq. ID No. 6059 | Seq. ID No. 6060 | yes | Peri | 1 |
| 2888 | Seq. ID No. 6063 | Seq. ID No. 6064 | maybe | Cyto | 1 |
| 2891a | Seq. ID No. 6067 | Seq. ID No. 6068 | NO | Peri | 1 |
| 2900a | Seq. ID No. 6087 | Seq. ID No. 6088 | YES | Peri | 1 |
| 2900b | Seq. ID No. 6089 | Seq. ID No. 6090 | YES | Peri | 1 |
| 2901a | Seq. ID No. 6091 | Seq. ID No. 6092 | YES | IM | 1 |
| 2902 | Seq. ID No. 6095 | Seq. ID No. 6096 | YES | IM | 0 |
| 2906 | Seq. ID No. 6103 | Seq. ID No. 6104 | YES | IM | 2 |
| 2909b | Seq. ID No. 6107 | Seq. ID No. 6108 | maybe | Cyto | 1 |
| 2909c | Seq. ID No. 6109 | Seq. ID No. 6110 | yes | IM | 4 |
| 2909d | Seq. ID No. 6111 | Seq. ID No. 6112 | yes | IM | 4 |
| 2913a | Seq. ID No. 6115 | Seq. ID No. 6116 | yes | IM | 2 |
| 2913b | Seq. ID No. 6117 | Seq. ID No. 6118 | yes | IM | 2 |
| 2922b | Seq. ID No. 6135 | Seq. ID No. 6136 | yes | Cyto | 0 |
| 2923a | Seq. ID No. 6137 | Seq. ID No. 6138 | yes | Cyto | |
| 2929b | Seq. ID No. 6159 | Seq. ID No. 6160 | maybe | Cyto | |
| 2931a | Seq. ID No. 6161 | Seq. ID No. 6162 | yes | IM | 5 |
| 2931b | Seq. ID No. 6163 | Seq. ID No. 6164 | NO | IM | 6 |
| 2931c | Seq. ID No. 6165 | Seq. ID No. 6166 | yes | IM | 13 |
| 2933b | Seq. ID No. 6169 | Seq. ID No. 6170 | YES | IM | 1 |
| 2941a | Seq. ID No. 6183 | Seq. ID No. 6184 | yes | IM | 2 |
| 2941b | Seq. ID No. 6185 | Seq. ID No. 6186 | YES | IM | 5 |
| 2941c | Seq. ID No. 6187 | Seq. ID No. 6188 | YES | IM | 5 |
| 2943a | Seq. ID No. 6189 | Seq. ID No. 6190 | yes | IM | 3 |
| 2943b | Seq. ID No. 6191 | Seq. ID No. 6192 | yes | IM | 5 |
| 2944b | Seq. ID No. 6197 | Seq. ID No. 6198 | YES | IM | 1 |
| 2948a | Seq. ID No. 6203 | Seq. ID No. 6204 | YES | IM | 1 |
| 2948b | Seq. ID No. 6205 | Seq. ID No. 6206 | YES | IM | 5 |
| 2948d | Seq. ID No. 6209 | Seq. ID No. 6210 | yes | IM | 7 |
| 2952 | Seq. ID No. 6217 | Seq. ID No. 6218 | yes | Cyto | 1 |
| 2955a | Seq. ID No. 6221 | Seq. ID No. 6222 | YES | IM | 4 |
| 2955b | Seq. ID No. 6223 | Seq. ID No. 6224 | YES | IM | 4 |
| 2955c | Seq. ID No. 6225 | Seq. ID No. 6226 | yes | IM | 6 |
| 2955d | Seq. ID No. 6227 | Seq. ID No. 6228 | maybe | IM | 7 |
| 2955e | Seq. ID No. 6229 | Seq. ID No. 6230 | YES | IM | 11 |
| 2957 | Seq. ID No. 6235 | Seq. ID No. 6236 | yes | IM | 4 |
| 2958a | Seq. ID No. 6237 | Seq. ID No. 6238 | maybe | IM | 2 |
| 2958c | Seq. ID No. 6241 | Seq. ID No. 6242 | maybe | IM | 2 |
| 2959 | Seq. ID No. 6243 | Seq. ID No. 6244 | yes | IM | 2 |
| 2960a | Seq. ID No. 6245 | Seq. ID No. 6246 | maybe | IM | 2 |
| 2962b | Seq. ID No. 6249 | Seq. ID No. 6250 | yes | IM | 1 |
| 2965a | Seq. ID No. 6253 | Seq. ID No. 6254 | yes | Cyto | 1 |
| 2966 | Seq. ID No. 6259 | Seq. ID No. 6260 | yes | IM | 1 |
| 2969 | Seq. ID No. 6263 | Seq. ID No. 6264 | maybe | IM | 1 |
| 2970a | Seq. ID No. 6265 | Seq. ID No. 6266 | yes | IM | 1 |
| 2970b | Seq. ID No. 6267 | Seq. ID No. 6268 | yes | IM | 1 |
| 2974a | Seq. ID No. 6273 | Seq. ID No. 6274 | maybe | Peri | 2 |
| 2974b | Seq. ID No. 6275 | Seq. ID No. 6276 | yes | IM | 4 |
| 2978a | Seq. ID No. 6283 | Seq. ID No. 6284 | yes | Peri | 1 |
| 2978b | Seq. ID No. 6285 | Seq. ID No. 6286 | yes | Peri | 1 |
| 2980a | Seq. ID No. 6289 | Seq. ID No. 6290 | maybe | IM | 3 |
| 2986a | Seq. ID No. 6301 | Seq. ID No. 6302 | maybe | IM | 6 |
| 2986b | Seq. ID No. 6303 | Seq. ID No. 6304 | yes | IM | 7 |
| 2993a | Seq. ID No. 6325 | Seq. ID No. 6326 | yes | OM | 0 |
| 2993b | Seq. ID No. 6327 | Seq. ID No. 6328 | yes | OM | 0 |
| 3016a | Seq. ID No. 6363 | Seq. ID No. 6364 | yes | IM | 4 |
| 3016b | Seq. ID No. 6365 | Seq. ID No. 6366 | yes | IM | 7 |
| 3021 | Seq. ID No. 6377 | Seq. ID No. 6378 | NO | Peri | 1 |
| 3023 | Seq. ID No. 6381 | Seq. ID No. 6382 | maybe | IM | 1 |
| 3024a | Seq. ID No. 6383 | Seq. ID No. 6384 | maybe | Peri | 1 |
| 3037a | Seq. ID No. 6415 | Seq. ID No. 6416 | YES | OM | 1 |
| 3042a | Seq. ID No. 6425 | Seq. ID No. 6426 | yes | Cyto | 1 |
| 3042b | Seq. ID No. 6427 | Seq. ID No. 6428 | yes | Cyto | 1 |
| 3043a | Seq. ID No. 6429 | Seq. ID No. 6430 | yes | IM | 2 |
| 3043b | Seq. ID No. 6431 | Seq. ID No. 6432 | yes | IM | 2 |
| 3064b | Seq. ID No. 6473 | Seq. ID No. 6474 | YES | Peri | 1 |
| 3066 | Seq. ID No. 6479 | Seq. ID No. 6480 | yes | Cyto | 0 |
| 3076 | Seq. ID No. 6497 | Seq. ID No. 6498 | maybe | IM | 3 |
| 3085 | Seq. ID No. 6517 | Seq. ID No. 6518 | maybe | Cyto | 0 |
| 3096a | Seq. ID No. 6541 | Seq. ID No. 6542 | yes | IM | 1 |
| 3096b | Seq. ID No. 6543 | Seq. ID No. 6544 | YES | IM | 1 |
| 3100a | Seq. ID No. 6555 | Seq. ID No. 6556 | maybe | Cyto | 0 |
| 3100b | Seq. ID No. 6557 | Seq. ID No. 6558 | maybe | Cyto | 0 |
| 3107a | Seq. ID No. 6571 | Seq. ID No. 6572 | yes | OM | 1 |
| 3107b | Seq. ID No. 6573 | Seq. ID No. 6574 | yes | OM | 2 |
| 3110a | Seq. ID No. 6581 | Seq. ID No. 6582 | NO | IM | 1 |
| 3119a | Seq. ID No. 6593 | Seq. ID No. 6594 | NO | IM | 3 |
| 3119b | Seq. ID No. 6595 | Seq. ID No. 6596 | YES | IM | 4 |
| 3119c | Seq. ID No. 6597 | Seq. ID No. 6598 | YES | IM | 4 |
| 3119d | Seq. ID No. 6599 | Seq. ID No. 6600 | YES | IM | 4 |
| 3119e | Seq. ID No. 6601 | Seq. ID No. 6602 | YES | IM | 4 |
| 3119f | Seq. ID No. 6603 | Seq. ID No. 6604 | YES | IM | 4 |
| 3140 | Seq. ID No. 6631 | Seq. ID No. 6632 | maybe | IM | 2 |
| 3145b | Seq. ID No. 6637 | Seq. ID No. 6638 | maybe | OM | 1 |
| 3145c | Seq. ID No. 6639 | Seq. ID No. 6640 | yes | OM | 1 |
| 3147b | Seq. ID No. 6643 | Seq. ID No. 6644 | yes | IM | 0 |
| 3147c | Seq. ID No. 6645 | Seq. ID No. 6646 | yes | OM | 0 |
| 3150a | Seq. ID No. 6649 | Seq. ID No. 6650 | NO | Cyto | 0 |

[0107] Listed in Table 6 are 2388 ORFs that meet the criteria of being a non-secretory protein, based on the HMM SignalP program. Of these ORFs, the PSORT program predicted 756 ORFs to be localized to the cytoplasmic inner membrane (IM); 35 ORFs to be localized to the periplasm (Peri); 10 ORFs to be localized to the outer membrane (OM); and 1586 ORFs localized to the cytoplasm. Shown for all ORFs is the number of transmembrane domains predicted by the TopPred2 software (listed in the MSD column).

TABLE 6
SIGNALP: NON-SECRETORY

| ORF | DNA SEQ | Protein SEQ | | |
|---|---|---|---|---|
| Number | ID Number | ID Number | PSORT | MSD |
| 1 | Seq. ID No. 1 | Seq. ID No. 2 | Cyto | 2 |
| 2b | Seq. ID No. 5 | Seq. ID No. 6 | Cyto | 3 |
| 4c | Seq. ID No. 11 | Seq. ID No. 12 | IM | 12 |
| 5 | Seq. ID No. 13 | Seq. ID No. 14 | Cyto | 0 |
| 7 | Seq. ID No. 15 | Seq. ID No. 16 | Cyto | |
| 10 | Seq. ID No. 17 | Seq. ID No. 18 | Cyto | |
| 16 | Seq. ID No. 23 | Seq. ID No. 24 | IM | 0 |
| 17 | Seq. ID No. 25 | Seq. ID No. 26 | Cyto | |
| 18 | Seq. ID No. 27 | Seq. ID No. 28 | Cyto | 1 |
| 20 | Seq. ID No. 29 | Seq. ID No. 30 | IM | 1 |
| 23b | Seq. ID No. 35 | Seq. ID No. 36 | IM | 1 |
| 24 | Seq. ID No. 37 | Seq. ID No. 38 | IM | 1 |
| 32 | Seq. ID No. 39 | Seq. ID No. 40 | Cyto | |
| 36 | Seq. ID No. 41 | Seq. ID No. 42 | IM | 0 |
| 37 | Seq. ID No. 43 | Seq. ID No. 44 | Cyto | |
| 39b | Seq. ID No. 51 | Seq. ID No. 52 | IM | 5 |
| 41a | Seq. ID No. 55 | Seq. ID No. 56 | Cyto | |
| 41b | Seq. ID No. 57 | Seq. ID No. 58 | Cyto | |
| 41c | Seq. ID No. 59 | Seq. ID No. 60 | IM | 1 |
| 43b | Seq. ID No. 61 | Seq. ID No. 62 | Cyto | |
| 43c | Seq. ID No. 63 | Seq. ID No. 64 | Cyto | |
| 45 | Seq. ID No. 69 | Seq. ID No. 70 | Cyto | |
| 46a | Seq. ID No. 71 | Seq. ID No. 72 | Cyto | |
| 46b | Seq. ID No. 73 | Seq. ID No. 74 | Cyto | |
| 47 | Seq. ID No. 75 | Seq. ID No. 76 | Cyto | |
| 48a | Seq. ID No. 77 | Seq. ID No. 78 | IM | 0 |
| 48b | Seq. ID No. 79 | Seq. ID No. 80 | IM | 0 |
| 48c | Seq. ID No. 81 | Seq. ID No. 82 | IM | 0 |
| 50 | Seq. ID No. 83 | Seq. ID No. 84 | Cyto | 0 |
| 51c | Seq. ID No. 89 | Seq. ID No. 90 | IM | 10 |
| 55 | Seq. ID No. 91 | Seq. ID No. 92 | IM | 1 |
| 56b | Seq. ID No. 93 | Seq. ID No. 94 | Cyto | |
| 57a | Seq. ID No. 95 | Seq. ID No. 96 | IM | 0 |
| 57b | Seq. ID No. 97 | Seq. ID No. 98 | IM | 0 |
| 58 | Seq. ID No. 99 | Seq. ID No. 100 | Cyto | |
| 60a | Seq. ID No. 101 | Seq. ID No. 102 | Cyto | |
| 60b | Seq. ID No. 103 | Seq. ID No. 104 | Cyto | |
| 62a | Seq. ID No. 107 | Seq. ID No. 108 | Cyto | 0 |
| 62b | Seq. ID No. 109 | Seq. ID No. 110 | Cyto | 0 |
| 63a | Seq. ID No. 113 | Seq. ID No. 114 | OM | 0 |
| 63b | Seq. ID No. 115 | Seq. ID No. 116 | OM | 1 |
| 65a | Seq. ID No. 117 | Seq. ID No. 118 | Cyto | |
| 65b | Seq. ID No. 119 | Seq. ID No. 120 | Cyto | |
| 65c | Seq. ID No. 121 | Seq. ID No. 122 | Cyto | |
| 67 | Seq. ID No. 125 | Seq. ID No. 126 | Cyto | |
| 69 | Seq. ID No. 127 | Seq. ID No. 128 | Cyto | 0 |
| 71 | Seq. ID No. 129 | Seq. ID No. 130 | Cyto | 0 |
| 74 | Seq. ID No. 135 | Seq. ID No. 136 | Cyto | |
| 77 | Seq. ID No. 137 | Seq. ID No. 138 | Cyto | |
| 79 | Seq. ID No. 139 | Seq. ID No. 140 | IM | 2 |
| 80b | Seq. ID No. 143 | Seq. ID No. 144 | IM | 4 |
| 80c | Seq. ID No. 145 | Seq. ID No. 146 | IM | 5 |
| 81a | Seq. ID No. 147 | Seq. ID No. 148 | Cyto | |
| 81b | Seq. ID No. 149 | Seq. ID No. 150 | Cyto | |
| 83 | Seq. ID No. 151 | Seq. ID No. 152 | IM | 2 |
| 85a | Seq. ID No. 153 | Seq. ID No. 154 | Cyto | |
| 85b | Seq. ID No. 155 | Seq. ID No. 156 | Cyto | |
| 85c | Seq. ID No. 157 | Seq. ID No. 158 | Cyto | |
| 87c | Seq. ID No. 165 | Seq. ID No. 166 | IM | 2 |
| 88 | Seq. ID No. 167 | Seq. ID No. 168 | IM | 5 |
| 89 | Seq. ID No. 169 | Seq. ID No. 170 | IM | 2 |
| 91b | Seq. ID No. 173 | Seq. ID No. 174 | IM | 0 |
| 91c | Seq. ID No. 175 | Seq. ID No. 176 | IM | 0 |
| 91d | Seq. ID No. 177 | Seq. ID No. 178 | IM | 0 |
| 93a | Seq. ID No. 179 | Seq. ID No. 180 | Cyto | 1 |
| 93b | Seq. ID No. 181 | Seq. ID No. 182 | Peri | 1 |
| 93c | Seq. ID No. 183 | Seq. ID No. 184 | Peri | 2 |
| 94 | Seq. ID No. 185 | Seq. ID No. 186 | IM | 2 |
| 95b | Seq. ID No. 187 | Seq. ID No. 188 | Cyto | |
| 97b | Seq. ID No. 189 | Seq. ID No. 190 | Cyto | |
| 101 | Seq. ID No. 193 | Seq. ID No. 194 | IM | 1 |
| 102 | Seq. ID No. 195 | Seq. ID No. 196 | Cyto | 0 |
| 104a | Seq. ID No. 197 | Seq. ID No. 198 | Cyto | |
| 104b | Seq. ID No. 199 | Seq. ID No. 200 | Cyto | |
| 104c | Seq. ID No. 201 | Seq. ID No. 202 | Peri | 1 |
| 105a | Seq. ID No. 203 | Seq. ID No. 204 | IM | |
| 105b | Seq. ID No. 205 | Seq. ID No. 206 | IM | |
| 106 | Seq. ID No. 207 | Seq. ID No. 208 | Cyto | 0 |
| 111b | Seq. ID No. 219 | Seq. ID No. 220 | IM | 8 |
| 112a | Seq. ID No. 221 | Seq. ID No. 222 | Cyto | 0 |
| 112b | Seq. ID No. 223 | Seq. ID No. 224 | Cyto | 0 |
| 115 | Seq. ID No. 227 | Seq. ID No. 228 | Cyto | |
| 119a | Seq. ID No. 229 | Seq. ID No. 230 | IM | 2 |
| 119b | Seq. ID No. 231 | Seq. ID No. 232 | IM | 3 |
| 121 | Seq. ID No. 233 | Seq. ID No. 234 | Cyto | 0 |
| 124c | Seq. ID No. 239 | Seq. ID No. 240 | IM | 5 |
| 125 | Seq. ID No. 241 | Seq. ID No. 242 | Cyto | |
| 127a | Seq. ID No. 243 | Seq. ID No. 244 | Cyto | |
| 127b | Seq. ID No. 245 | Seq. ID No. 246 | Cyto | |
| 127c | Seq. ID No. 247 | Seq. ID No. 248 | IM | |
| 129c | Seq. ID No. 253 | Seq. ID No. 254 | IM | 10 |
| 134 | Seq. ID No. 261 | Seq. ID No. 262 | Cyto | 1 |
| 135a | Seq. ID No. 263 | Seq. ID No. 264 | Cyto | |
| 135b | Seq. ID No. 265 | Seq. ID No. 266 | Cyto | |
| 137a | Seq. ID No. 267 | Seq. ID No. 268 | Cyto | |
| 137b | Seq. ID No. 269 | Seq. ID No. 270 | Cyto | |
| 142 | Seq. ID No. 275 | Seq. ID No. 276 | Cyto | |
| 144a | Seq. ID No. 279 | Seq. ID No. 280 | Peri | 0 |
| 144b | Seq. ID No. 281 | Seq. ID No. 282 | Peri | 0 |
| 144c | Seq. ID No. 283 | Seq. ID No. 284 | Cyto | 0 |
| 145d | Seq. ID No. 291 | Seq. ID No. 292 | IM | 12 |
| 147 | Seq. ID No. 293 | Seq. ID No. 294 | Cyto | |
| 151a | Seq. ID No. 295 | Seq. ID No. 296 | IM | 1 |
| 151b | Seq. ID No. 297 | Seq. ID No. 298 | IM | 1 |
| 152a | Seq. ID No. 299 | Seq. ID No. 300 | Cyto | 0 |
| 152b | Seq. ID No. 301 | Seq. ID No. 302 | Cyto | 0 |
| 153a | Seq. ID No. 303 | Seq. ID No. 304 | Cyto | |
| 153b | Seq. ID No. 305 | Seq. ID No. 306 | Cyto | |
| 153c | Seq. ID No. 307 | Seq. ID No. 308 | Cyto | |
| 154 | Seq. ID No. 309 | Seq. ID No. 310 | Cyto | 0 |
| 155a | Seq. ID No. 311 | Seq. ID No. 312 | Cyto | |
| 155b | Seq. ID No. 313 | Seq. ID No. 314 | Cyto | |
| 157a | Seq. ID No. 315 | Seq. ID No. 316 | Cyto | |
| 157b | Seq. ID No. 317 | Seq. ID No. 318 | Cyto | |
| 158a | Seq. ID No. 319 | Seq. ID No. 320 | Cyto | |
| 158b | Seq. ID No. 321 | Seq. ID No. 322 | Cyto | |
| 160a | Seq. ID No. 323 | Seq. ID No. 324 | Cyto | |
| 160b | Seq. ID No. 325 | Seq. ID No. 326 | Cyto | |
| 162c | Seq. ID No. 331 | Seq. ID No. 332 | IM | 5 |
| 162d | Seq. ID No. 333 | Seq. ID No. 334 | IM | 5 |
| 162e | Seq. ID No. 335 | Seq. ID No. 336 | IM | 5 |
| 163 | Seq. ID No. 337 | Seq. ID No. 338 | Cyto | 0 |
| 164 | Seq. ID No. 339 | Seq. ID No. 340 | Cyto | |
| 165a | Seq. ID No. 341 | Seq. ID No. 342 | IM | |
| 165b | Seq. ID No. 343 | Seq. ID No. 344 | IM | |
| 167 | Seq. ID No. 345 | Seq. ID No. 346 | IM | |
| 169 | Seq. ID No. 347 | Seq. ID No. 348 | IM | 2 |
| 170 | Seq. ID No. 349 | Seq. ID No. 350 | IM | 1 |
| 171a | Seq. ID No. 351 | Seq. ID No. 352 | Cyto | |
| 171b | Seq. ID No. 353 | Seq. ID No. 354 | Cyto | |
| 172 | Seq. ID No. 355 | Seq. ID No. 356 | Cyto | |
| 175 | Seq. ID No. 361 | Seq. ID No. 362 | Cyto | |
| 176 | Seq. ID No. 363 | Seq. ID No. 364 | Cyto | |
| 177a | Seq. ID No. 365 | Seq. ID No. 366 | IM | |
| 177b | Seq. ID No. 367 | Seq. ID No. 368 | IM | |
| 179a | Seq. ID No. 369 | Seq. ID No. 370 | IM | 2 |
| 179b | Seq. ID No. 371 | Seq. ID No. 372 | IM | 2 |
| 183a | Seq. ID No. 377 | Seq. ID No. 378 | IM | 1 |
| 184 | Seq. ID No. 379 | Seq. ID No. 380 | Cyto | |
| 185 | Seq. ID No. 381 | Seq. ID No. 382 | Cyto | |
| 186 | Seq. ID No. 383 | Seq. ID No. 384 | Cyto | |
| 187a | Seq. ID No. 385 | Seq. ID No. 386 | IM | 1 |
| 187b | Seq. ID No. 387 | Seq. ID No. 388 | IM | 1 |
| 188 | Seq. ID No. 389 | Seq. ID No. 390 | Cyto | |
| 189b | Seq. ID No. 391 | Seq. ID No. 392 | Cyto | |
| 192a | Seq. ID No. 395 | Seq. ID No. 396 | Cyto | 0 |
| 192b | Seq. ID No. 397 | Seq. ID No. 398 | Cyto | 0 |
| 193 | Seq. ID No. 399 | Seq. ID No. 400 | Cyto | |
| 195 | Seq. ID No. 405 | Seq. ID No. 406 | Cyto | |
| 196 | Seq. ID No. 407 | Seq. ID No. 408 | Cyto | 1 |
| 197a | Seq. ID No. 409 | Seq. ID No. 410 | Cyto | |
| 197b | Seq. ID No. 411 | Seq. ID No. 412 | Cyto | |
| 198a | Seq. ID No. 413 | Seq. ID No. 414 | Peri | |
| 198b | Seq. ID No. 415 | Seq. ID No. 416 | Peri | |
| 200 | Seq. ID No. 417 | Seq. ID No. 418 | Cyto | |
| 201a | Seq. ID No. 419 | Seq. ID No. 420 | IM | 2 |
| 202 | Seq. ID No. 421 | Seq. ID No. 422 | Cyto | |
| 203 | Seq. ID No. 423 | Seq. ID No. 424 | Cyto | |
| 204 | Seq. ID No. 425 | Seq. ID No. 426 | Cyto | |
| 205 | Seq. ID No. 427 | Seq. ID No. 428 | Cyto | |
| 206 | Seq. ID No. 429 | Seq. ID No. 430 | Cyto | |
| 207 | Seq. ID No. 431 | Seq. ID No. 432 | IM | 0 |
| 208a | Seq. ID No. 433 | Seq. ID No. 434 | Cyto | |
| 208b | Seq. ID No. 435 | Seq. ID No. 436 | Cyto | |
| 210 | Seq. ID No. 437 | Seq. ID No. 438 | Cyto | |
| 211 | Seq. ID No. 439 | Seq. ID No. 440 | Cyto | |
| 213 | Seq. ID No. 441 | Seq. ID No. 442 | Cyto | |
| 215a | Seq. ID No. 443 | Seq. ID No. 444 | Cyto | |
| 218 | Seq. ID No. 445 | Seq. ID No. 446 | Cyto | |
| 219 | Seq. ID No. 447 | Seq. ID No. 448 | Cyto | 0 |
| 220a | Seq. ID No. 449 | Seq. ID No. 450 | Cyto | 0 |
| 220b | Seq. ID No. 451 | Seq. ID No. 452 | Cyto | 0 |
| 220c | Seq. ID No. 453 | Seq. ID No. 454 | Cyto | 0 |
| 226a | Seq. ID No. 459 | Seq. ID No. 460 | Cyto | |
| 226b | Seq. ID No. 461 | Seq. ID No. 462 | Cyto | |
| 227 | Seq. ID No. 463 | Seq. ID No. 464 | Cyto | |
| 228a | Seq. ID No. 465 | Seq. ID No. 466 | Cyto | |
| 228b | Seq. ID No. 467 | Seq. ID No. 468 | Cyto | |
| 228c | Seq. ID No. 469 | Seq. ID No. 470 | Cyto | |
| 228d | Seq. ID No. 471 | Seq. ID No. 472 | Cyto | |
| 232a | Seq. ID No. 473 | Seq. ID No. 474 | IM | 0 |
| 232b | Seq. ID No. 475 | Seq. ID No. 476 | IM | 0 |
| 235b | Seq. ID No. 479 | Seq. ID No. 480 | Cyto | 1 |
| 236a | Seq. ID No. 481 | Seq. ID No. 482 | Cyto | |
| 236b | Seq. ID No. 483 | Seq. ID No. 484 | Cyto | |
| 236c | Seq. ID No. 485 | Seq. ID No. 486 | Cyto | |
| 245c | Seq. ID No. 501 | Seq. ID No. 502 | IM | 10 |
| 247 | Seq. ID No. 507 | Seq. ID No. 508 | IM | 3 |
| 251 | Seq. ID No. 517 | Seq. ID No. 518 | IM | 1 |
| 253a | Seq. ID No. 519 | Seq. ID No. 520 | IM | |
| 253b | Seq. ID No. 521 | Seq. ID No. 522 | Cyto | |
| 254 | Seq. ID No. 523 | Seq. ID No. 524 | IM | 1 |
| 255c | Seq. ID No. 529 | Seq. ID No. 530 | IM | 12 |
| 255d | Seq. ID No. 531 | Seq. ID No. 532 | IM | 12 |
| 258 | Seq. ID No. 533 | Seq. ID No. 534 | Cyto | |
| 259a | Seq. ID No. 535 | Seq. ID No. 536 | Cyto | |
| 259b | Seq. ID No. 537 | Seq. ID No. 538 | Cyto | |
| 259c | Seq. ID No. 539 | Seq. ID No. 540 | Cyto | |
| 260 | Seq. ID No. 541 | Seq. ID No. 542 | Cyto | |
| 262 | Seq. ID No. 543 | Seq. ID No. 544 | Cyto | |
| 265 | Seq. ID No. 551 | Seq. ID No. 552 | Cyto | |
| 267b | Seq. ID No. 553 | Seq. ID No. 554 | Cyto | 0 |
| 267c | Seq. ID No. 555 | Seq. ID No. 556 | Cyto | 0 |
| 269a | Seq. ID No. 559 | Seq. ID No. 560 | Cyto | |
| 269b | Seq. ID No. 561 | Seq. ID No. 562 | IM | 0 |
| 271a | Seq. ID No. 563 | Seq. ID No. 564 | Cyto | |
| 271b | Seq. ID No. 565 | Seq. ID No. 566 | Cyto | |
| 277a | Seq. ID No. 571 | Seq. ID No. 572 | Cyto | |
| 277b | Seq. ID No. 573 | Seq. ID No. 574 | IM | |
| 280a | Seq. ID No. 581 | Seq. ID No. 582 | Cyto | 1 |
| 280b | Seq. ID No. 583 | Seq. ID No. 584 | Cyto | 1 |
| 280c | Seq. ID No. 585 | Seq. ID No. 586 | Cyto | 1 |
| 280d | Seq. ID No. 587 | Seq. ID No. 588 | Cyto | 1 |
| 282 | Seq. ID No. 589 | Seq. ID No. 590 | Cyto | |
| 284a | Seq. ID No. 595 | Seq. ID No. 596 | IM | 5 |
| 284b | Seq. ID No. 597 | Seq. ID No. 598 | IM | 5 |
| 286a | Seq. ID No. 601 | Seq. ID No. 602 | Cyto | |
| 286b | Seq. ID No. 603 | Seq. ID No. 604 | Cyto | |
| 287 | Seq. ID No. 605 | Seq. ID No. 606 | Cyto | |
| 290a | Seq. ID No. 607 | Seq. ID No. 608 | Cyto | |
| 290b | Seq. ID No. 609 | Seq. ID No. 610 | IM | |
| 293 | Seq. ID No. 611 | Seq. ID No. 612 | Cyto | |
| 294 | Seq. ID No. 613 | Seq. ID No. 614 | Cyto | 0 |
| 296 | Seq. ID No. 615 | Seq. ID No. 616 | Cyto | 0 |
| 300b | Seq. ID No. 619 | Seq. ID No. 620 | IM | 0 |
| 301a | Seq. ID No. 621 | Seq. ID No. 622 | Cyto | 1 |
| 301b | Seq. ID No. 623 | Seq. ID No. 624 | Cyto | 1 |
| 304a | Seq. ID No. 625 | Seq. ID No. 626 | Cyto | 1 |
| 304b | Seq. ID No. 627 | Seq. ID No. 628 | Cyto | 1 |
| 307 | Seq. ID No. 629 | Seq. ID No. 630 | Cyto | |
| 308 | Seq. ID No. 631 | Seq. ID No. 632 | Cyto | 0 |
| 309 | Seq. ID No. 633 | Seq. ID No. 634 | IM | 0 |
| 310 | Seq. ID No. 635 | Seq. ID No. 636 | Cyto | 0 |
| 315 | Seq. ID No. 649 | Seq. ID No. 650 | Cyto | |
| 316a | Seq. ID No. 651 | Seq. ID No. 652 | IM | 3 |
| 318d | Seq. ID No. 663 | Seq. ID No. 664 | IM | 2 |
| 318e | Seq. ID No. 665 | Seq. ID No. 666 | IM | 2 |
| 323a | Seq. ID No. 671 | Seq. ID No. 672 | Cyto | |
| 323b | Seq. ID No. 673 | Seq. ID No. 674 | Cyto | |
| 327c | Seq. ID No. 681 | Seq. ID No. 682 | IM | 5 |
| 329 | Seq. ID No. 683 | Seq. ID No. 684 | Cyto | |
| 330a | Seq. ID No. 685 | Seq. ID No. 686 | Cyto | 0 |
| 330b | Seq. ID No. 687 | Seq. ID No. 688 | Cyto | 0 |
| 330c | Seq. ID No. 689 | Seq. ID No. 690 | Cyto | 0 |
| 331 | Seq. ID No. 691 | Seq. ID No. 692 | Cyto | |
| 332 | Seq. ID No. 693 | Seq. ID No. 694 | Cyto | |
| 333 | Seq. ID No. 695 | Seq. ID No. 696 | Cyto | 1 |
| 334 | Seq. ID No. 697 | Seq. ID No. 698 | Cyto | |
| 335a | Seq. ID No. 699 | Seq. ID No. 700 | IM | 5 |
| 335b | Seq. ID No. 701 | Seq. ID No. 702 | IM | 5 |
| 337 | Seq. ID No. 703 | Seq. ID No. 704 | Cyto | |
| 338a | Seq. ID No. 705 | Seq. ID No. 706 | Cyto | |
| 338b | Seq. ID No. 707 | Seq. ID No. 708 | Cyto | |
| 338c | Seq. ID No. 709 | Seq. ID No. 710 | Cyto | |
| 341a | Seq. ID No. 711 | Seq. ID No. 712 | Cyto | 0 |
| 341b | Seq. ID No. 713 | Seq. ID No. 714 | Cyto | 0 |
| 342g | Seq. ID No. 727 | Seq. ID No. 728 | IM | 12 |
| 342h | Seq. ID No. 729 | Seq. ID No. 730 | IM | 12 |
| 344a | Seq. ID No. 731 | Seq. ID No. 732 | IM | 1 |
| 344b | Seq. ID No. 733 | Seq. ID No. 734 | IM | 1 |
| 345 | Seq. ID No. 735 | Seq. ID No. 736 | Cyto | |
| 346a | Seq. ID No. 737 | Seq. ID No. 738 | Cyto | |
| 346b | Seq. ID No. 739 | Seq. ID No. 740 | Cyto | 0 |
| 347 | Seq. ID No. 741 | Seq. ID No. 742 | Cyto | |
| 349a | Seq. ID No. 743 | Seq. ID No. 744 | Cyto | |
| 351 | Seq. ID No. 753 | Seq. ID No. 754 | Cyto | 1 |
| 355 | Seq. ID No. 767 | Seq. ID No. 768 | Cyto | 0 |
| 356b | Seq. ID No. 771 | Seq. ID No. 772 | IM | 4 |
| 356c | Seq. ID No. 773 | Seq. ID No. 774 | IM | 4 |
| 356d | Seq. ID No. 775 | Seq. ID No. 776 | IM | 5 |
| 362 | Seq. ID No. 783 | Seq. ID No. 784 | IM | 2 |
| 365a | Seq. ID No. 785 | Seq. ID No. 786 | Cyto | |
| 365b | Seq. ID No. 787 | Seq. ID No. 788 | Cyto | |
| 366b | Seq. ID No. 789 | Seq. ID No. 790 | Cyto | |
| 366c | Seq. ID No. 791 | Seq. ID No. 792 | Cyto | |
| 367a | Seq. ID No. 793 | Seq. ID No. 794 | Cyto | 1 |
| 367b | Seq. ID No. 795 | Seq. ID No. 796 | Cyto | 1 |
| 371a | Seq. ID No. 797 | Seq. ID No. 798 | Cyto | |
| 371b | Seq. ID No. 799 | Seq. ID No. 800 | Cyto | |
| 372a | Seq. ID No. 801 | Seq. ID No. 802 | Cyto | |
| 372b | Seq. ID No. 803 | Seq. ID No. 804 | Cyto | |
| 372c | Seq. ID No. 805 | Seq. ID No. 806 | OM | |
| 377a | Seq. ID No. 811 | Seq. ID No. 812 | Cyto | 1 |
| 377b | Seq. ID No. 813 | Seq. ID No. 814 | Cyto | 1 |
| 378a | Seq. ID No. 815 | Seq. ID No. 816 | IM | 1 |
| 378b | Seq. ID No. 817 | Seq. ID No. 818 | IM | 1 |
| 383a | Seq. ID No. 821 | Seq. ID No. 822 | Cyto | |
| 383b | Seq. ID No. 823 | Seq. ID No. 824 | Cyto | 1 |
| 384b | Seq. ID No. 827 | Seq. ID No. 828 | IM | 10 |
| 385a | Seq. ID No. 829 | Seq. ID No. 830 | IM | 0 |
| 385b | Seq. ID No. 831 | Seq. ID No. 832 | IM | 0 |
| 386 | Seq. ID No. 833 | Seq. ID No. 834 | Cyto | |
| 387 | Seq. ID No. 835 | Seq. ID No. 836 | Cyto | |
| 390 | Seq. ID No. 837 | Seq. ID No. 838 | IM | |
| 391 | Seq. ID No. 839 | Seq. ID No. 840 | Peri | |
| 393b | Seq. ID No. 841 | Seq. ID No. 842 | Cyto | |
| 395a | Seq. ID No. 843 | Seq. ID No. 844 | IM | 6 |
| 395b | Seq. ID No. 845 | Seq. ID No. 846 | IM | 6 |
| 395c | Seq. ID No. 847 | Seq. ID No. 848 | IM | 6 |
| 396 | Seq. ID No. 849 | Seq. ID No. 850 | Peri | 2 |
| 398 | Seq. ID No. 851 | Seq. ID No. 852 | IM | 2 |
| 400a | Seq. ID No. 853 | Seq. ID No. 854 | IM | 0 |
| 400b | Seq. ID No. 855 | Seq. ID No. 856 | IM | 0 |
| 401a | Seq. ID No. 857 | Seq. ID No. 858 | Cyto | |
| 401b | Seq. ID No. 859 | Seq. ID No. 860 | Cyto | |
| 403a | Seq. ID No. 861 | Seq. ID No. 862 | Cyto | 1 |
| 403c | Seq. ID No. 865 | Seq. ID No. 866 | Cyto | 2 |
| 403d | Seq. ID No. 867 | Seq. ID No. 868 | Cyto | 2 |
| 406a | Seq. ID No. 869 | Seq. ID No. 870 | Cyto | |
| 406b | Seq. ID No. 871 | Seq. ID No. 872 | Cyto | |
| 409a | Seq. ID No. 873 | Seq. ID No. 874 | Cyto | 0 |
| 409b | Seq. ID No. 875 | Seq. ID No. 876 | Cyto | 0 |
| 410a | Seq. ID No. 877 | Seq. ID No. 878 | Cyto | 0 |
| 410b | Seq. ID No. 879 | Seq. ID No. 880 | IM | 1 |
| 410c | Seq. ID No. 881 | Seq. ID No. 882 | IM | 1 |
| 413a | Seq. ID No. 883 | Seq. ID No. 884 | Cyto | |
| 413b | Seq. ID No. 885 | Seq. ID No. 886 | Cyto | |
| 416a | Seq. ID No. 887 | Seq. ID No. 888 | Cyto | |
| 416b | Seq. ID No. 889 | Seq. ID No. 890 | Cyto | |
| 417 | Seq. ID No. 891 | Seq. ID No. 892 | Cyto | |
| 418b | Seq. ID No. 895 | Seq. ID No. 896 | IM | 7 |
| 419a | Seq. ID No. 897 | Seq. ID No. 898 | IM | 1 |
| 419b | Seq. ID No. 899 | Seq. ID No. 900 | IM | 1 |
| 420a | Seq. ID No. 903 | Seq. ID No. 904 | IM | 1 |
| 420b | Seq. ID No. 905 | Seq. ID No. 906 | IM | 1 |
| 421 | Seq. ID No. 907 | Seq. ID No. 908 | IM | 1 |
| 422 | Seq. ID No. 909 | Seq. ID No. 910 | Cyto | |
| 424a | Seq. ID No. 911 | Seq. ID No. 912 | Cyto | 0 |
| 424b | Seq. ID No. 913 | Seq. ID No. 914 | IM | 1 |
| 424c | Seq. ID No. 915 | Seq. ID No. 916 | IM | 1 |
| 426a | Seq. ID No. 917 | Seq. ID No. 918 | Cyto | |
| 426b | Seq. ID No. 919 | Seq. ID No. 920 | Cyto | |
| 427a | Seq. ID No. 921 | Seq. ID No. 922 | Cyto | |
| 427b | Seq. ID No. 923 | Seq. ID No. 924 | Cyto | |
| 427c | Seq. ID No. 925 | Seq. ID No. 926 | Cyto | |
| 429a | Seq. ID No. 927 | Seq. ID No. 928 | Cyto | |
| 429b | Seq. ID No. 929 | Seq. ID No. 930 | OM | 0 |
| 429c | Seq. ID No. 931 | Seq. ID No. 932 | Cyto | 0 |
| 429d | Seq. ID No. 933 | Seq. ID No. 934 | Cyto | 0 |
| 435 | Seq. ID No. 939 | Seq. ID No. 940 | Cyto | |
| 438a | Seq. ID No. 945 | Seq. ID No. 946 | IM | 1 |
| 438b | Seq. ID No. 947 | Seq. ID No. 948 | IM | 1 |
| 438c | Seq. ID No. 949 | Seq. ID No. 950 | IM | 1 |
| 440 | Seq. ID No. 951 | Seq. ID No. 952 | IM | 2 |
| 441a | Seq. ID No. 953 | Seq. ID No. 954 | IM | 1 |
| 444a | Seq. ID No. 959 | Seq. ID No. 960 | Cyto | |
| 444b | Seq. ID No. 961 | Seq. ID No. 962 | Cyto | |
| 445a | Seq. ID No. 963 | Seq. ID No. 964 | Cyto | 0 |
| 445b | Seq. ID No. 965 | Seq. ID No. 966 | Cyto | 0 |
| 450a | Seq. ID No. 969 | Seq. ID No. 970 | Cyto | 0 |
| 450b | Seq. ID No. 971 | Seq. ID No. 972 | Cyto | 0 |
| 451a | Seq. ID No. 973 | Seq. ID No. 974 | Peri | |
| 451b | Seq. ID No. 975 | Seq. ID No. 976 | Peri | |
| 452a | Seq. ID No. 977 | Seq. ID No. 978 | IM | 4 |
| 454b | Seq. ID No. 987 | Seq. ID No. 988 | Cyto | |
| 455a | Seq. ID No. 989 | Seq. ID No. 990 | IM | 0 |
| 455b | Seq. ID No. 991 | Seq. ID No. 992 | IM | 0 |
| 455c | Seq. ID No. 993 | Seq. ID No. 994 | IM | 0 |
| 458a | Seq. ID No. 995 | Seq. ID No. 996 | Cyto | |
| 458b | Seq. ID No. 997 | Seq. ID No. 998 | Cyto | |
| 460a | Seq. ID No. 999 | Seq. ID No. 1000 | Cyto | 1 |
| 464d | Seq. ID No. 1017 | Seq. ID No. 1018 | IM | 13 |
| 467a | Seq. ID No. 1021 | Seq. ID No. 1022 | Cyto | 0 |
| 467b | Seq. ID No. 1023 | Seq. ID No. 1024 | Cyto | 0 |
| 471a | Seq. ID No. 1025 | Seq. ID No. 1026 | Cyto | 1 |
| 471b | Seq. ID No. 1027 | Seq. ID No. 1028 | Cyto | 1 |
| 473 | Seq. ID No. 1041 | Seq. ID No. 1042 | IM | 2 |
| 474 | Seq. ID No. 1043 | Seq. ID No. 1044 | Cyto | 0 |
| 477b | Seq. ID No. 1047 | Seq. ID No. 1048 | Cyto | 0 |
| 478a | Seq. ID No. 1049 | Seq. ID No. 1050 | IM | 1 |
| 478b | Seq. ID No. 1051 | Seq. ID No. 1052 | IM | 1 |
| 479 | Seq. ID No. 1053 | Seq. ID No. 1054 | Cyto | |
| 480b | Seq. ID No. 1057 | Seq. ID No. 1058 | Cyto | 1 |
| 481a | Seq. ID No. 1059 | Seq. ID No. 1060 | Cyto | |
| 481b | Seq. ID No. 1061 | Seq. ID No. 1062 | Cyto | |
| 482a | Seq. ID No. 1063 | Seq. ID No. 1064 | Cyto | |
| 482b | Seq. ID No. 1065 | Seq. ID No. 1066 | Cyto | |
| 483 | Seq. ID No. 1067 | Seq. ID No. 1068 | Cyto | |
| 490 | Seq. ID No. 1069 | Seq. ID No. 1070 | Cyto | |
| 491a | Seq. ID No. 1071 | Seq. ID No. 1072 | Cyto | |
| 491b | Seq. ID No. 1073 | Seq. ID No. 1074 | Cyto | |
| 495a | Seq. ID No. 1079 | Seq. ID No. 1080 | Cyto | 0 |
| 495b | Seq. ID No. 1081 | Seq. ID No. 1082 | Cyto | 0 |
| 495c | Seq. ID No. 1083 | Seq. ID No. 1084 | IM | 0 |
| 498a | Seq. ID No. 1085 | Seq. ID No. 1086 | Cyto | |
| 498b | Seq. ID No. 1087 | Seq. ID No. 1088 | Cyto | |
| 499a | Seq. ID No. 1089 | Seq. ID No. 1090 | IM | 2 |
| 499b | Seq. ID No. 1091 | Seq. ID No. 1092 | IM | 2 |
| 500 | Seq. ID No. 1093 | Seq. ID No. 1094 | Cyto | |
| 502b | Seq. ID No. 1095 | Seq. ID No. 1096 | Cyto | |
| 502c | Seq. ID No. 1097 | Seq. ID No. 1098 | Cyto | |
| 504 | Seq. ID No. 1099 | Seq. ID No. 1100 | Cyto | |
| 505a | Seq. ID No. 1101 | Seq. ID No. 1102 | Cyto | 1 |
| 505b | Seq. ID No. 1103 | Seq. ID No. 1104 | Cyto | 1 |
| 509 | Seq. ID No. 1109 | Seq. ID No. 1110 | Cyto | |
| 510 | Seq. ID No. 1111 | Seq. ID No. 1112 | Cyto | |
| 512a | Seq. ID No. 1113 | Seq. ID No. 1114 | Cyto | |
| 512b | Seq. ID No. 1115 | Seq. ID No. 1116 | Cyto | |
| 514 | Seq. ID No. 1117 | Seq. ID No. 1118 | Cyto | |
| 515a | Seq. ID No. 1119 | Seq. ID No. 1120 | Cyto | |
| 515b | Seq. ID No. 1121 | Seq. ID No. 1122 | IM | |
| 515c | Seq. ID No. 1123 | Seq. ID No. 1124 | Cyto | |
| 518a | Seq. ID No. 1125 | Seq. ID No. 1126 | Cyto | 0 |
| 518b | Seq. ID No. 1127 | Seq. ID No. 1128 | Cyto | 0 |
| 518c | Seq. ID No. 1129 | Seq. ID No. 1130 | Cyto | 0 |
| 523 | Seq. ID No. 1133 | Seq. ID No. 1134 | Cyto | |
| 527a | Seq. ID No. 1141 | Seq. ID No. 1142 | Cyto | |
| 527b | Seq. ID No. 1143 | Seq. ID No. 1144 | Cyto | |
| 528a | Seq. ID No. 1145 | Seq. ID No. 1146 | IM | 1 |
| 528b | Seq. ID No. 1147 | Seq. ID No. 1148 | IM | 1 |
| 529 | Seq. ID No. 1149 | Seq. ID No. 1150 | Cyto | 0 |
| 530b | Seq. ID No. 1153 | Seq. ID No. 1154 | Peri | |
| 533 | Seq. ID No. 1155 | Seq. ID No. 1156 | IM | 9 |
| 535 | Seq. ID No. 1157 | Seq. ID No. 1158 | Cyto | |
| 536 | Seq. ID No. 1159 | Seq. ID No. 1160 | Cyto | 1 |
| 539b | Seq. ID No. 1161 | Seq. ID No. 1162 | Cyto | |
| 539c | Seq. ID No. 1163 | Seq. ID No. 1164 | Cyto | |
| 541d | Seq. ID No. 1171 | Seq. ID No. 1172 | IM | 5 |
| 543a | Seq. ID No. 1175 | Seq. ID No. 1176 | Cyto | |
| 543b | Seq. ID No. 1177 | Seq. ID No. 1178 | Cyto | |
| 543c | Seq. ID No. 1179 | Seq. ID No. 1180 | Cyto | |
| 544 | Seq. ID No. 1181 | Seq. ID No. 1182 | IM | 4 |
| 545b | Seq. ID No. 1185 | Seq. ID No. 1186 | IM | 3 |
| 545c | Seq. ID No. 1187 | Seq. ID No. 1188 | IM | 4 |
| 546a | Seq. ID No. 1189 | Seq. ID No. 1190 | Cyto | |
| 546b | Seq. ID No. 1191 | Seq. ID No. 1192 | IM | 1 |
| 546c | Seq. ID No. 1193 | Seq. ID No. 1194 | IM | 1 |
| 548 | Seq. ID No. 1199 | Seq. ID No. 1200 | IM | 2 |
| 549b | Seq. ID No. 1201 | Seq. ID No. 1202 | IM | 2 |
| 551 | Seq. ID No. 1205 | Seq. ID No. 1206 | IM | 1 |
| 553c | Seq. ID No. 1207 | Seq. ID No. 1208 | IM | 1 |
| 554a | Seq. ID No. 1209 | Seq. ID No. 1210 | Cyto | 1 |
| 554b | Seq. ID No. 1211 | Seq. ID No. 1212 | Cyto | 1 |
| 557a | Seq. ID No. 1215 | Seq. ID No. 1216 | Cyto | 0 |
| 557b | Seq. ID No. 1217 | Seq. ID No. 1218 | Cyto | 0 |
| 560a | Seq. ID No. 1219 | Seq. ID No. 1220 | IM | 0 |
| 560b | Seq. ID No. 1221 | Seq. ID No. 1222 | IM | 0 |
| 563 | Seq. ID No. 1225 | Seq. ID No. 1226 | IM | 0 |
| 564c | Seq. ID No. 1231 | Seq. ID No. 1232 | IM | 5 |
| 569 | Seq. ID No. 1233 | Seq. ID No. 1234 | Cyto | |
| 570a | Seq. ID No. 1235 | Seq. ID No. 1236 | IM | 1 |
| 571 | Seq. ID No. 1239 | Seq. ID No. 1240 | Peri | 0 |
| 573 | Seq. ID No. 1241 | Seq. ID No. 1242 | IM | 5 |
| 578a | Seq. ID No. 1247 | Seq. ID No. 1248 | Cyto | 0 |
| 578b | Seq. ID No. 1249 | Seq. ID No. 1250 | Cyto | 0 |
| 580a | Seq. ID No. 1251 | Seq. ID No. 1252 | Cyto | |
| 580b | Seq. ID No. 1253 | Seq. ID No. 1254 | Cyto | |
| 583a | Seq. ID No. 1255 | Seq. ID No. 1256 | IM | 0 |
| 583b | Seq. ID No. 1257 | Seq. ID No. 1258 | IM | 0 |
| 586a | Seq. ID No. 1261 | Seq. ID No. 1262 | IM | 2 |
| 586b | Seq. ID No. 1263 | Seq. ID No. 1264 | IM | 2 |
| 588a | Seq. ID No. 1273 | Seq. ID No. 1274 | Cyto | 1 |
| 588b | Seq. ID No. 1275 | Seq. ID No. 1276 | Cyto | 1 |
| 589a | Seq. ID No. 1277 | Seq. ID No. 1278 | Cyto | 1 |
| 589b | Seq. ID No. 1279 | Seq. ID No. 1280 | Cyto | 1 |
| 590 | Seq. ID No. 1281 | Seq. ID No. 1282 | IM | 2 |
| 595b | Seq. ID No. 1285 | Seq. ID No. 1286 | IM | 2 |
| 597 | Seq. ID No. 1293 | Seq. ID No. 1294 | IM | 3 |
| 599a | Seq. ID No. 1299 | Seq. ID No. 1300 | IM | 2 |
| 599b | Seq. ID No. 1301 | Seq. ID No. 1302 | IM | 2 |
| 603a | Seq. ID No. 1307 | Seq. ID No. 1308 | Cyto | 1 |
| 606 | Seq. ID No. 1309 | Seq. ID No. 1310 | Cyto | |
| 607a | Seq. ID No. 1311 | Seq. ID No. 1312 | IM | 0 |
| 607b | Seq. ID No. 1313 | Seq. ID No. 1314 | IM | 0 |
| 610b | Seq. ID No. 1321 | Seq. ID No. 1322 | IM | 1 |
| 611 | Seq. ID No. 1323 | Seq. ID No. 1324 | Peri | 0 |
| 614a | Seq. ID No. 1333 | Seq. ID No. 1334 | Cyto | |
| 614b | Seq. ID No. 1335 | Seq. ID No. 1336 | Cyto | |
| 618 | Seq. ID No. 1339 | Seq. ID No. 1340 | IM | 4 |
| 620 | Seq. ID No. 1345 | Seq. ID No. 1346 | Cyto | |
| 625 | Seq. ID No. 1355 | Seq. ID No. 1356 | Cyto | |
| 626a | Seq. ID No. 1357 | Seq. ID No. 1358 | Cyto | 0 |
| 626b | Seq. ID No. 1359 | Seq. ID No. 1360 | Cyto | 0 |
| 626c | Seq. ID No. 1361 | Seq. ID No. 1362 | Cyto | 0 |
| 631a | Seq. ID No. 1363 | Seq. ID No. 1364 | IM | 1 |
| 633a | Seq. ID No. 1373 | Seq. ID No. 1374 | IM | 0 |
| 633b | Seq. ID No. 1375 | Seq. ID No. 1376 | IM | 0 |
| 633c | Seq. ID No. 1377 | Seq. ID No. 1378 | Cyto | 0 |
| 634b | Seq. ID No. 1379 | Seq. ID No. 1380 | Cyto | |
| 637a | Seq. ID No. 1383 | Seq. ID No. 1384 | IM | 0 |
| 637b | Seq. ID No. 1385 | Seq. ID No. 1386 | IM | 0 |
| 637c | Seq. ID No. 1387 | Seq. ID No. 1388 | IM | 0 |
| 640 | Seq. ID No. 1389 | Seq. ID No. 1390 | Cyto | 0 |
| 641a | Seq. ID No. 1391 | Seq. ID No. 1392 | IM | 1 |
| 641b | Seq. ID No. 1393 | Seq. ID No. 1394 | IM | 1 |
| 643 | Seq. ID No. 1395 | Seq. ID No. 1396 | IM | 1 |
| 644a | Seq. ID No. 1397 | Seq. ID No. 1398 | Cyto | |
| 644b | Seq. ID No. 1399 | Seq. ID No. 1400 | Cyto | |
| 650 | Seq. ID No. 1403 | Seq. ID No. 1404 | Cyto | |
| 652 | Seq. ID No. 1405 | Seq. ID No. 1406 | Cyto | |
| 653a | Seq. ID No. 1407 | Seq. ID No. 1408 | Cyto | 1 |
| 653b | Seq. ID No. 1409 | Seq. ID No. 1410 | Cyto | 1 |
| 653c | Seq. ID No. 1411 | Seq. ID No. 1412 | Cyto | 1 |
| 656 | Seq. ID No. 1413 | Seq. ID No. 1414 | Cyto | 0 |
| 657c | Seq. ID No. 1415 | Seq. ID No. 1416 | Cyto | |
| 658a | Seq. ID No. 1417 | Seq. ID No. 1418 | IM | 4 |
| 658b | Seq. ID No. 1419 | Seq. ID No. 1420 | IM | 4 |
| 659a | Seq. ID No. 1421 | Seq. ID No. 1422 | Cyto | |
| 659b | Seq. ID No. 1423 | Seq. ID No. 1424 | Cyto | |
| 661 | Seq. ID No. 1425 | Seq. ID No. 1426 | Cyto | |
| 663 | Seq. ID No. 1427 | Seq. ID No. 1428 | Cyto | 0 |
| 666 | Seq. ID No. 1431 | Seq. ID No. 1432 | IM | 4 |
| 670 | Seq. ID No. 1433 | Seq. ID No. 1434 | Cyto | 1 |
| 674b | Seq. ID No. 1437 | Seq. ID No. 1438 | IM | 1 |
| 676 | Seq. ID No. 1439 | Seq. ID No. 1440 | Cyto | |
| 677a | Seq. ID No. 1441 | Seq. ID No. 1442 | Cyto | 0 |
| 677b | Seq. ID No. 1443 | Seq. ID No. 1444 | Cyto | 0 |
| 680 | Seq. ID No. 1449 | Seq. ID No. 1450 | Cyto | 0 |
| 681 | Seq. ID No. 1451 | Seq. ID No. 1452 | Cyto | 0 |
| 683a | Seq. ID No. 1453 | Seq. ID No. 1454 | Cyto | |
| 683b | Seq. ID No. 1455 | Seq. ID No. 1456 | Cyto | |
| 684 | Seq. ID No. 1457 | Seq. ID No. 1458 | Cyto | |
| 687 | Seq. ID No. 1459 | Seq. ID No. 1460 | Peri | |
| 688a | Seq. ID No. 1461 | Seq. ID No. 1462 | IM | 4 |
| 688b | Seq. ID No. 1463 | Seq. ID No. 1464 | IM | 4 |
| 690 | Seq. ID No. 1465 | Seq. ID No. 1466 | Cyto | |
| 691a | Seq. ID No. 1467 | Seq. ID No. 1468 | Cyto | |
| 691b | Seq. ID No. 1469 | Seq. ID No. 1470 | Cyto | |
| 692 | Seq. ID No. 1471 | Seq. ID No. 1472 | IM | 0 |
| 694 | Seq. ID No. 1473 | Seq. ID No. 1474 | Cyto | |
| 696 | Seq. ID No. 1475 | Seq. ID No. 1476 | Cyto | |
| 698 | Seq. ID No. 1477 | Seq. ID No. 1478 | IM | 4 |
| 699b | Seq. ID No. 1479 | Seq. ID No. 1480 | IM | 1 |
| 700b | Seq. ID No. 1483 | Seq. ID No. 1484 | IM | 7 |
| 700c | Seq. ID No. 1485 | Seq. ID No. 1486 | IM | 7 |
| 703 | Seq. ID No. 1487 | Seq. ID No. 1488 | IM | 0 |
| 705a | Seq. ID No. 1489 | Seq. ID No. 1490 | Cyto | 0 |
| 705b | Seq. ID No. 1491 | Seq. ID No. 1492 | Cyto | 0 |
| 707 | Seq. ID No. 1493 | Seq. ID No. 1494 | Cyto | |
| 709 | Seq. ID No. 1495 | Seq. ID No. 1496 | Cyto | |
| 710 | Seq. ID No. 1497 | Seq. ID No. 1498 | Cyto | |
| 712a | Seq. ID No. 1499 | Seq. ID No. 1500 | Cyto | |
| 712b | Seq. ID No. 1501 | Seq. ID No. 1502 | Cyto | |
| 715a | Seq. ID No. 1503 | Seq. ID No. 1504 | Cyto | 0 |
| 715b | Seq. ID No. 1505 | Seq. ID No. 1506 | Cyto | 0 |
| 717 | Seq. ID No. 1507 | Seq. ID No. 1508 | Cyto | |
| 718a | Seq. ID No. 1509 | Seq. ID No. 1510 | Cyto | |
| 721 | Seq. ID No. 1511 | Seq. ID No. 1512 | Cyto | |
| 724a | Seq. ID No. 1519 | Seq. ID No. 1520 | Cyto | 0 |
| 724b | Seq. ID No. 1521 | Seq. ID No. 1522 | Cyto | 0 |
| 724c | Seq. ID No. 1523 | Seq. ID No. 1524 | Cyto | 0 |
| 724d | Seq. ID No. 1525 | Seq. ID No. 1526 | Cyto | 0 |
| 726 | Seq. ID No. 1527 | Seq. ID No. 1528 | Cyto | |
| 728b | Seq. ID No. 1531 | Seq. ID No. 1532 | IM | 8 |
| 730c | Seq. ID No. 1537 | Seq. ID No. 1538 | IM | 5 |
| 730d | Seq. ID No. 1539 | Seq. ID No. 1540 | IM | 5 |
| 731b | Seq. ID No. 1541 | Seq. ID No. 1542 | Cyto | 1 |
| 732 | Seq. ID No. 1543 | Seq. ID No. 1544 | Cyto | 2 |
| 738c | Seq. ID No. 1549 | Seq. ID No. 1550 | IM | 10 |
| 741a | Seq. ID No. 1555 | Seq. ID No. 1556 | Cyto | |
| 741b | Seq. ID No. 1557 | Seq. ID No. 1558 | Cyto | |
| 745a | Seq. ID No. 1565 | Seq. ID No. 1566 | IM | 6 |
| 745b | Seq. ID No. 1567 | Seq. ID No. 1568 | IM | 6 |
| 746a | Seq. ID No. 1569 | Seq. ID No. 1570 | IM | 6 |
| 747 | Seq. ID No. 1573 | Seq. ID No. 1574 | Cyto | |
| 748a | Seq. ID No. 1575 | Seq. ID No. 1576 | Cyto | |
| 748b | Seq. ID No. 1577 | Seq. ID No. 1578 | Cyto | |
| 751 | Seq. ID No. 1581 | Seq. ID No. 1582 | IM | 1 |
| 754c | Seq. ID No. 1587 | Seq. ID No. 1588 | IM | 9 |
| 754d | Seq. ID No. 1589 | Seq. ID No. 1590 | IM | 9 |
| 756a | Seq. ID No. 1591 | Seq. ID No. 1592 | Cyto | 1 |
| 756b | Seq. ID No. 1593 | Seq. ID No. 1594 | Cyto | 1 |
| 758 | Seq. ID No. 1595 | Seq. ID No. 1596 | Cyto | |
| 760 | Seq. ID No. 1597 | Seq. ID No. 1598 | Cyto | |
| 762b | Seq. ID No. 1601 | Seq. ID No. 1602 | Cyto | 0 |
| 762c | Seq. ID No. 1603 | Seq. ID No. 1604 | Cyto | 0 |
| 763a | Seq. ID No. 1605 | Seq. ID No. 1606 | Cyto | |
| 763b | Seq. ID No. 1607 | Seq. ID No. 1608 | Cyto | |
| 764 | Seq. ID No. 1609 | Seq. ID No. 1610 | Cyto | |
| 766 | Seq. ID No. 1611 | Seq. ID No. 1612 | Cyto | 0 |
| 767 | Seq. ID No. 1613 | Seq. ID No. 1614 | Cyto | |
| 770a | Seq. ID No. 1615 | Seq. ID No. 1616 | IM | |
| 770b | Seq. ID No. 1617 | Seq. ID No. 1618 | Cyto | |
| 770c | Seq. ID No. 1619 | Seq. ID No. 1620 | Cyto | |
| 772b | Seq. ID No. 1623 | Seq. ID No. 1624 | IM | 6 |
| 774 | Seq. ID No. 1625 | Seq. ID No. 1626 | Cyto | 0 |
| 775 | Seq. ID No. 1627 | Seq. ID No. 1628 | IM | 7 |
| 777a | Seq. ID No. 1629 | Seq. ID No. 1630 | Cyto | |
| 777c | Seq. ID No. 1631 | Seq. ID No. 1632 | OM | |
| 780a | Seq. ID No. 1635 | Seq. ID No. 1636 | Cyto | |
| 780b | Seq. ID No. 1637 | Seq. ID No. 1638 | Cyto | |
| 785 | Seq. ID No. 1641 | Seq. ID No. 1642 | Cyto | 0 |
| 789b | Seq. ID No. 1651 | Seq. ID No. 1652 | IM | 4 |
| 791 | Seq. ID No. 1655 | Seq. ID No. 1656 | Cyto | |
| 792 | Seq. ID No. 1657 | Seq. ID No. 1658 | Cyto | |
| 794a | Seq. ID No. 1659 | Seq. ID No. 1660 | Peri | 0 |
| 795 | Seq. ID No. 1667 | Seq. ID No. 1668 | Cyto | |
| 797 | Seq. ID No. 1669 | Seq. ID No. 1670 | Cyto | |
| 799c | Seq. ID No. 1675 | Seq. ID No. 1676 | IM | 9 |
| 803a | Seq. ID No. 1683 | Seq. ID No. 1684 | Cyto | 3 |
| 803b | Seq. ID No. 1685 | Seq. ID No. 1686 | Cyto | 3 |
| 804a | Seq. ID No. 1687 | Seq. ID No. 1688 | Cyto | |
| 804b | Seq. ID No. 1689 | Seq. ID No. 1690 | Cyto | |
| 807 | Seq. ID No. 1691 | Seq. ID No. 1692 | Cyto | |
| 809b | Seq. ID No. 1695 | Seq. ID No. 1696 | IM | 4 |
| 812 | Seq. ID No. 1697 | Seq. ID No. 1698 | Cyto | 0 |
| 813 | Seq. ID No. 1699 | Seq. ID No. 1700 | IM | 5 |
| 816 | Seq. ID No. 1701 | Seq. ID No. 1702 | IM | 0 |
| 820a | Seq. ID No. 1703 | Seq. ID No. 1704 | IM | 0 |
| 820b | Seq. ID No. 1705 | Seq. ID No. 1706 | IM | 0 |
| 829a | Seq. ID No. 1709 | Seq. ID No. 1710 | Peri | |
| 830 | Seq. ID No. 1713 | Seq. ID No. 1714 | Cyto | |
| 834a | Seq. ID No. 1715 | Seq. ID No. 1716 | Cyto | |
| 834b | Seq. ID No. 1717 | Seq. ID No. 1718 | Cyto | |
| 834c | Seq. ID No. 1719 | Seq. ID No. 1720 | Cyto | |
| 835a | Seq. ID No. 1721 | Seq. ID No. 1722 | Cyto | |
| 835b | Seq. ID No. 1723 | Seq. ID No. 1724 | Cyto | |
| 836a | Seq. ID No. 1725 | Seq. ID No. 1726 | Cyto | |
| 836b | Seq. ID No. 1727 | Seq. ID No. 1728 | Cyto | |
| 836c | Seq. ID No. 1729 | Seq. ID No. 1730 | Cyto | |
| 837c | Seq. ID No. 1735 | Seq. ID No. 1736 | IM | 8 |
| 847a | Seq. ID No. 1739 | Seq. ID No. 1740 | IM | 1 |
| 847b | Seq. ID No. 1741 | Seq. ID No. 1742 | IM | 1 |
| 848 | Seq. ID No. 1743 | Seq. ID No. 1744 | Cyto | |
| 849a | Seq. ID No. 1745 | Seq. ID No. 1746 | Cyto | |
| 849b | Seq. ID No. 1747 | Seq. ID No. 1748 | IM | 0 |
| 851a | Seq. ID No. 1749 | Seq. ID No. 1750 | Cyto | |
| 851b | Seq. ID No. 1751 | Seq. ID No. 1752 | Cyto | |
| 854 | Seq. ID No. 1759 | Seq. ID No. 1760 | IM | 2 |
| 855 | Seq. ID No. 1761 | Seq. ID No. 1762 | Cyto | |
| 857 | Seq. ID No. 1763 | Seq. ID No. 1764 | Peri | 1 |
| 859c | Seq. ID No. 1769 | Seq. ID No. 1770 | IM | 6 |
| 860 | Seq. ID No. 1773 | Seq. ID No. 1774 | Cyto | |
| 862 | Seq. ID No. 1775 | Seq. ID No. 1776 | Peri | 0 |
| 863 | Seq. ID No. 1777 | Seq. ID No. 1778 | Cyto | |
| 864a | Seq. ID No. 1779 | Seq. ID No. 1780 | Cyto | 1 |
| 866a | Seq. ID No. 1783 | Seq. ID No. 1784 | Cyto | |
| 866b | Seq. ID No. 1785 | Seq. ID No. 1786 | Cyto | 0 |
| 868b | Seq. ID No. 1789 | Seq. ID No. 1790 | IM | 6 |
| 873a | Seq. ID No. 1793 | Seq. ID No. 1794 | Cyto | |
| 873b | Seq. ID No. 1795 | Seq. ID No. 1796 | Cyto | |
| 874a | Seq. ID No. 1799 | Seq. ID No. 1800 | Cyto | |
| 874b | Seq. ID No. 1801 | Seq. ID No. 1802 | Cyto | |
| 875 | Seq. ID No. 1803 | Seq. ID No. 1804 | Cyto | |
| 878a | Seq. ID No. 1807 | Seq. ID No. 1808 | Cyto | |
| 878b | Seq. ID No. 1809 | Seq. ID No. 1810 | Cyto | |
| 878c | Seq. ID No. 1811 | Seq. ID No. 1812 | Cyto | 0 |
| 880a | Seq. ID No. 1813 | Seq. ID No. 1814 | IM | 0 |
| 880b | Seq. ID No. 1815 | Seq. ID No. 1816 | IM | 0 |
| 880c | Seq. ID No. 1817 | Seq. ID No. 1818 | IM | 0 |
| 888 | Seq. ID No. 1825 | Seq. ID No. 1826 | Cyto | |
| 890a | Seq. ID No. 1827 | Seq. ID No. 1828 | Cyto | |
| 890b | Seq. ID No. 1829 | Seq. ID No. 1830 | Cyto | |
| 894 | Seq. ID No. 1831 | Seq. ID No. 1832 | Cyto | |
| 904 | Seq. ID No. 1833 | Seq. ID No. 1834 | Peri | |
| 907a | Seq. ID No. 1835 | Seq. ID No. 1836 | Cyto | 1 |
| 907b | Seq. ID No. 1837 | Seq. ID No. 1838 | Cyto | 1 |
| 908b | Seq. ID No. 1841 | Seq. ID No. 1842 | IM | 9 |
| 908c | Seq. ID No. 1843 | Seq. ID No. 1844 | IM | 9 |
| 911 | Seq. ID No. 1845 | Seq. ID No. 1846 | Cyto | |
| 912 | Seq. ID No. 1847 | Seq. ID No. 1848 | Cyto | |
| 916 | Seq. ID No. 1849 | Seq. ID No. 1850 | Cyto | 1 |
| 917 | Seq. ID No. 1851 | Seq. ID No. 1852 | Cyto | |
| 918b | Seq. ID No. 1853 | Seq. ID No. 1854 | Cyto | |
| 918c | Seq. ID No. 1855 | Seq. ID No. 1856 | Cyto | |
| 923 | Seq. ID No. 1859 | Seq. ID No. 1860 | Cyto | 0 |
| 925a | Seq. ID No. 1861 | Seq. ID No. 1862 | Cyto | 0 |
| 925b | Seq. ID No. 1863 | Seq. ID No. 1864 | Cyto | 0 |
| 926 | Seq. ID No. 1865 | Seq. ID No. 1866 | Cyto | 0 |
| 927 | Seq. ID No. 1867 | Seq. ID No. 1868 | Cyto | |
| 929b | Seq. ID No. 1871 | Seq. ID No. 1872 | Cyto | 1 |
| 930 | Seq. ID No. 1873 | Seq. ID No. 1874 | Cyto | 1 |
| 932 | Seq. ID No. 1877 | Seq. ID No. 1878 | Cyto | 1 |
| 934a | Seq. ID No. 1879 | Seq. ID No. 1880 | Cyto | |
| 934b | Seq. ID No. 1881 | Seq. ID No. 1882 | Cyto | |
| 934c | Seq. ID No. 1883 | Seq. ID No. 1884 | Cyto | 0 |
| 934d | Seq. ID No. 1885 | Seq. ID No. 1886 | Cyto | 0 |
| 935 | Seq. ID No. 1887 | Seq. ID No. 1888 | Cyto | 0 |
| 938 | Seq. ID No. 1889 | Seq. ID No. 1890 | Cyto | 1 |
| 942 | Seq. ID No. 1897 | Seq. ID No. 1898 | IM | |
| 943 | Seq. ID No. 1899 | Seq. ID No. 1900 | Cyto | |
| 944a | Seq. ID No. 1901 | Seq. ID No. 1902 | Cyto | 0 |
| 944b | Seq. ID No. 1903 | Seq. ID No. 1904 | Cyto | 0 |
| 946 | Seq. ID No. 1905 | Seq. ID No. 1906 | Cyto | 0 |
| 949a | Seq. ID No. 1907 | Seq. ID No. 1908 | Cyto | |
| 949b | Seq. ID No. 1909 | Seq. ID No. 1910 | IM | 1 |
| 949c | Seq. ID No. 1911 | Seq. ID No. 1912 | IM | 1 |
| 949d | Seq. ID No. 1913 | Seq. ID No. 1914 | IM | 1 |
| 952a | Seq. ID No. 1921 | Seq. ID No. 1922 | IM | 1 |
| 954 | Seq. ID No. 1925 | Seq. ID No. 1926 | Cyto | 0 |
| 956 | Seq. ID No. 1931 | Seq. ID No. 1932 | IM | 0 |
| 958a | Seq. ID No. 1933 | Seq. ID No. 1934 | Cyto | |
| 958b | Seq. ID No. 1935 | Seq. ID No. 1936 | Cyto | |
| 959 | Seq. ID No. 1937 | Seq. ID No. 1938 | Cyto | |
| 961a | Seq. ID No. 1939 | Seq. ID No. 1940 | Cyto | |
| 961b | Seq. ID No. 1941 | Seq. ID No. 1942 | Cyto | |
| 961c | Seq. ID No. 1943 | Seq. ID No. 1944 | Cyto | |
| 963 | Seq. ID No. 1945 | Seq. ID No. 1946 | Cyto | 0 |
| 965a | Seq. ID No. 1947 | Seq. ID No. 1948 | Cyto | |
| 965b | Seq. ID No. 1949 | Seq. ID No. 1950 | Cyto | |
| 966a | Seq. ID No. 1951 | Seq. ID No. 1952 | Cyto | |
| 966b | Seq. ID No. 1953 | Seq. ID No. 1954 | Cyto | |
| 967a | Seq. ID No. 1955 | Seq. ID No. 1956 | IM | |
| 967b | Seq. ID No. 1957 | Seq. ID No. 1958 | Cyto | |
| 968 | Seq. ID No. 1959 | Seq. ID No. 1960 | Cyto | 0 |
| 969 | Seq. ID No. 1961 | Seq. ID No. 1962 | IM | |
| 972a | Seq. ID No. 1963 | Seq. ID No. 1964 | IM | |
| 972b | Seq. ID No. 1965 | Seq. ID No. 1966 | IM | |
| 976 | Seq. ID No. 1967 | Seq. ID No. 1968 | Cyto | |
| 977b | Seq. ID No. 1971 | Seq. ID No. 1972 | Cyto | 1 |
| 978a | Seq. ID No. 1973 | Seq. ID No. 1974 | Cyto | |
| 978b | Seq. ID No. 1975 | Seq. ID No. 1976 | Cyto | |
| 979 | Seq. ID No. 1977 | Seq. ID No. 1978 | IM | 1 |
| 980 | Seq. ID No. 1979 | Seq. ID No. 1980 | Cyto | 0 |
| 982 | Seq. ID No. 1983 | Seq. ID No. 1984 | Cyto | |
| 984a | Seq. ID No. 1985 | Seq. ID No. 1986 | Cyto | |
| 984b | Seq. ID No. 1987 | Seq. ID No. 1988 | Cyto | |
| 986 | Seq. ID No. 1989 | Seq. ID No. 1990 | Cyto | |
| 988b | Seq. ID No. 1995 | Seq. ID No. 1996 | IM | 6 |
| 988c | Seq. ID No. 1997 | Seq. ID No. 1998 | IM | 6 |
| 988d | Seq. ID No. 1999 | Seq. ID No. 2000 | IM | 6 |
| 991 | Seq. ID No. 2001 | Seq. ID No. 2002 | IM | |
| 992 | Seq. ID No. 2003 | Seq. ID No. 2004 | Cyto | 0 |
| 994 | Seq. ID No. 2007 | Seq. ID No. 2008 | Cyto | 2 |
| 995 | Seq. ID No. 2009 | Seq. ID No. 2010 | IM | 1 |
| 997 | Seq. ID No. 2011 | Seq. ID No. 2012 | IM | |
| 998b | Seq. ID No. 2015 | Seq. ID No. 2016 | IM | 5 |
| 1000 | Seq. ID No. 2021 | Seq. ID No. 2022 | Cyto | 1 |
| 1001 | Seq. ID No. 2023 | Seq. ID No. 2024 | Cyto | |
| 1004a | Seq. ID No. 2029 | Seq. ID No. 2030 | IM | 1 |
| 1004b | Seq. ID No. 2031 | Seq. ID No. 2032 | IM | 1 |
| 1007 | Seq. ID No. 2037 | Seq. ID No. 2038 | Cyto | |
| 1012 | Seq. ID No. 2039 | Seq. ID No. 2040 | IM | 1 |
| 1013b | Seq. ID No. 2043 | Seq. ID No. 2044 | IM | 6 |
| 1013c | Seq. ID No. 2045 | Seq. ID No. 2046 | IM | 6 |
| 1016c | Seq. ID No. 2047 | Seq. ID No. 2048 | Cyto | |
| 1017b | Seq. ID No. 2051 | Seq. ID No. 2052 | IM | 5 |
| 1018a | Seq. ID No. 2057 | Seq. ID No. 2058 | Cyto | |
| 1018b | Seq. ID No. 2059 | Seq. ID No. 2060 | Cyto | |
| 1021a | Seq. ID No. 2061 | Seq. ID No. 2062 | Cyto | 1 |
| 1021b | Seq. ID No. 2063 | Seq. ID No. 2064 | Cyto | 1 |
| 1021c | Seq. ID No. 2065 | Seq. ID No. 2066 | Cyto | 1 |
| 1024 | Seq. ID No. 2067 | Seq. ID No. 2068 | Cyto | |
| 1025 | Seq. ID No. 2069 | Seq. ID No. 2070 | Cyto | |
| 1026 | Seq. ID No. 2071 | Seq. ID No. 2072 | Cyto | |
| 1029 | Seq. ID No. 2073 | Seq. ID No. 2074 | Cyto | |
| 1033a | Seq. ID No. 2075 | Seq. ID No. 2076 | IM | 0 |
| 1033b | Seq. ID No. 2077 | Seq. ID No. 2078 | IM | 0 |
| 1033c | Seq. ID No. 2079 | Seq. ID No. 2080 | IM | 0 |
| 1035a | Seq. ID No. 2081 | Seq. ID No. 2082 | IM | 1 |
| 1035b | Seq. ID No. 2083 | Seq. ID No. 2084 | IM | 1 |
| 1035c | Seq. ID No. 2085 | Seq. ID No. 2086 | IM | 1 |
| 1037 | Seq. ID No. 2093 | Seq. ID No. 2094 | Cyto | |
| 1039a | Seq. ID No. 2095 | Seq. ID No. 2096 | Cyto | 0 |
| 1039b | Seq. ID No. 2097 | Seq. ID No. 2098 | Cyto | 0 |
| 1041 | Seq. ID No. 2099 | Seq. ID No. 2100 | Cyto | |
| 1042a | Seq. ID No. 2101 | Seq. ID No. 2102 | Cyto | 1 |
| 1042b | Seq. ID No. 2103 | Seq. ID No. 2104 | Cyto | 1 |
| 1044d | Seq. ID No. 2111 | Seq. ID No. 2112 | IM | 3 |
| 1049a | Seq. ID No. 2117 | Seq. ID No. 2118 | Cyto | 0 |
| 1049b | Seq. ID No. 2119 | Seq. ID No. 2120 | Cyto | 0 |
| 1055 | Seq. ID No. 2129 | Seq. ID No. 2130 | Cyto | |
| 1056a | Seq. ID No. 2131 | Seq. ID No. 2132 | Cyto | |
| 1056b | Seq. ID No. 2133 | Seq. ID No. 2134 | Cyto | |
| 1057 | Seq. ID No. 2135 | Seq. ID No. 2136 | Cyto | 0 |
| 1058 | Seq. ID No. 2137 | Seq. ID No. 2138 | Cyto | 1 |
| 1060a | Seq. ID No. 2139 | Seq. ID No. 2140 | IM | 1 |
| 1060b | Seq. ID No. 2141 | Seq. ID No. 2142 | IM | 1 |
| 1062 | Seq. ID No. 2143 | Seq. ID No. 2144 | Cyto | |
| 1063 | Seq. ID No. 2145 | Seq. ID No. 2146 | Cyto | 1 |
| 1064 | Seq. ID No. 2147 | Seq. ID No. 2148 | Cyto | |
| 1065c | Seq. ID No. 2153 | Seq. ID No. 2154 | IM | 1 |
| 1069 | Seq. ID No. 2161 | Seq. ID No. 2162 | IM | 1 |
| 1070a | Seq. ID No. 2163 | Seq. ID No. 2164 | Cyto | |
| 1070b | Seq. ID No. 2165 | Seq. ID No. 2166 | Cyto | |
| 1076a | Seq. ID No. 2167 | Seq. ID No. 2168 | IM | 2 |
| 1076b | Seq. ID No. 2169 | Seq. ID No. 2170 | IM | 2 |
| 1077c | Seq. ID No. 2175 | Seq. ID No. 2176 | IM | 12 |
| 1077e | Seq. ID No. 2179 | Seq. ID No. 2180 | IM | 15 |
| 1079a | Seq. ID No. 2181 | Seq. ID No. 2182 | Cyto | |
| 1079b | Seq. ID No. 2183 | Seq. ID No. 2184 | Cyto | |
| 1080a | Seq. ID No. 2185 | Seq. ID No. 2186 | Cyto | |
| 1081b | Seq. ID No. 2189 | Seq. ID No. 2190 | IM | 1 |
| 1085 | Seq. ID No. 2193 | Seq. ID No. 2194 | Cyto | |
| 1086 | Seq. ID No. 2195 | Seq. ID No. 2196 | IM | 1 |
| 1087a | Seq. ID No. 2197 | Seq. ID No. 2198 | IM | 0 |
| 1087b | Seq. ID No. 2199 | Seq. ID No. 2200 | IM | 0 |
| 1091a | Seq. ID No. 2201 | Seq. ID No. 2202 | Cyto | |
| 1091b | Seq. ID No. 2203 | Seq. ID No. 2204 | Peri | |
| 1094b | Seq. ID No. 2207 | Seq. ID No. 2208 | IM | 2 |
| 1095a | Seq. ID No. 2209 | Seq. ID No. 2210 | Cyto | |
| 1095b | Seq. ID No. 2211 | Seq. ID No. 2212 | Cyto | |
| 1096a | Seq. ID No. 2213 | Seq. ID No. 2214 | Cyto | 0 |
| 1096b | Seq. ID No. 2215 | Seq. ID No. 2216 | Cyto | 0 |
| 1096c | Seq. ID No. 2217 | Seq. ID No. 2218 | Cyto | 0 |
| 1097 | Seq. ID No. 2219 | Seq. ID No. 2220 | IM | 2 |
| 1098b | Seq. ID No. 2221 | Seq. ID No. 2222 | IM | 2 |
| 1100 | Seq. ID No. 2223 | Seq. ID No. 2224 | Cyto | |
| 1101a | Seq. ID No. 2225 | Seq. ID No. 2226 | Cyto | |
| 1101b | Seq. ID No. 2227 | Seq. ID No. 2228 | Cyto | |
| 1104 | Seq. ID No. 2229 | Seq. ID No. 2230 | Cyto | |
| 1106 | Seq. ID No. 2231 | Seq. ID No. 2232 | Cyto | |
| 1108a | Seq. ID No. 2233 | Seq. ID No. 2234 | Cyto | |
| 1108b | Seq. ID No. 2235 | Seq. ID No. 2236 | Cyto | |
| 1111c | Seq. ID No. 2241 | Seq. ID No. 2242 | IM | 8 |
| 1112a | Seq. ID No. 2243 | Seq. ID No. 2244 | IM | 1 |
| 1126a | Seq. ID No. 2247 | Seq. ID No. 2248 | IM | 3 |
| 1127 | Seq. ID No. 2253 | Seq. ID No. 2254 | Cyto | |
| 1131 | Seq. ID No. 2257 | Seq. ID No. 2258 | Cyto | 1 |
| 1135a | Seq. ID No. 2261 | Seq. ID No. 2262 | IM | 1 |
| 1135b | Seq. ID No. 2263 | Seq. ID No. 2264 | IM | 1 |
| 1136a | Seq. ID No. 2265 | Seq. ID No. 2266 | IM | |
| 1136b | Seq. ID No. 2267 | Seq. ID No. 2268 | IM | |
| 1138 | Seq. ID No. 2269 | Seq. ID No. 2270 | Cyto | |
| 1140b | Seq. ID No. 2273 | Seq. ID No. 2274 | IM | 3 |
| 1140c | Seq. ID No. 2275 | Seq. ID No. 2276 | IM | 6 |
| 1141a | Seq. ID No. 2277 | Seq. ID No. 2278 | Cyto | 1 |
| 1141b | Seq. ID No. 2279 | Seq. ID No. 2280 | Cyto | 1 |
| 1142 | Seq. ID No. 2281 | Seq. ID No. 2282 | Cyto | |
| 1144b | Seq. ID No. 2285 | Seq. ID No. 2286 | IM | 4 |
| 1144c | Seq. ID No. 2287 | Seq. ID No. 2288 | IM | 5 |
| 1146e | Seq. ID No. 2297 | Seq. ID No. 2298 | IM | 10 |
| 1148 | Seq. ID No. 2299 | Seq. ID No. 2300 | Cyto | 0 |
| 1149 | Seq. ID No. 2301 | Seq. ID No. 2302 | IM | 0 |
| 1152d | Seq. ID No. 2309 | Seq. ID No. 2310 | IM | 7 |
| 1152e | Seq. ID No. 2311 | Seq. ID No. 2312 | IM | 8 |
| 1152f | Seq. ID No. 2313 | Seq. ID No. 2314 | IM | 8 |
| 1152g | Seq. ID No. 2315 | Seq. ID No. 2316 | IM | 8 |
| 1158a | Seq. ID No. 2331 | Seq. ID No. 2332 | Cyto | |
| 1160 | Seq. ID No. 2335 | Seq. ID No. 2336 | Cyto | |
| 1161a | Seq. ID No. 2337 | Seq. ID No. 2338 | Cyto | |
| 1161b | Seq. ID No. 2339 | Seq. ID No. 2340 | Cyto | |
| 1162 | Seq. ID No. 2341 | Seq. ID No. 2342 | Cyto | |
| 1166 | Seq. ID No. 2345 | Seq. ID No. 2346 | Cyto | |
| 1170 | Seq. ID No. 2359 | Seq. ID No. 2360 | Cyto | 0 |
| 1171a | Seq. ID No. 2361 | Seq. ID No. 2362 | Cyto | |
| 1171c | Seq. ID No. 2363 | Seq. ID No. 2364 | Cyto | |
| 1174 | Seq. ID No. 2369 | Seq. ID No. 2370 | Cyto | 2 |
| 1177 | Seq. ID No. 2373 | Seq. ID No. 2374 | Cyto | 1 |
| 1179a | Seq. ID No. 2377 | Seq. ID No. 2378 | Cyto | 0 |
| 1179b | Seq. ID No. 2379 | Seq. ID No. 2380 | Cyto | 0 |
| 1179c | Seq. ID No. 2381 | Seq. ID No. 2382 | Cyto | 0 |
| 1180a | Seq. ID No. 2383 | Seq. ID No. 2384 | Cyto | 1 |
| 1180b | Seq. ID No. 2385 | Seq. ID No. 2386 | IM | 2 |
| 1182b | Seq. ID No. 2395 | Seq. ID No. 2396 | IM | 2 |
| 1183a | Seq. ID No. 2397 | Seq. ID No. 2398 | IM | 0 |
| 1183b | Seq. ID No. 2399 | Seq. ID No. 2400 | IM | 0 |
| 1184 | Seq. ID No. 2401 | Seq. ID No. 2402 | Cyto | 1 |
| 1185a | Seq. ID No. 2403 | Seq. ID No. 2404 | Cyto | 0 |
| 1185b | Seq. ID No. 2405 | Seq. ID No. 2406 | Cyto | 0 |
| 1186b | Seq. ID No. 2409 | Seq. ID No. 2410 | IM | 5 |
| 1188a | Seq. ID No. 2411 | Seq. ID No. 2412 | IM | 2 |
| 1188b | Seq. ID No. 2413 | Seq. ID No. 2414 | IM | 4 |
| 1188c | Seq. ID No. 2415 | Seq. ID No. 2416 | IM | 4 |
| 1191 | Seq. ID No. 2417 | Seq. ID No. 2418 | IM | 0 |
| 1194 | Seq. ID No. 2423 | Seq. ID No. 2424 | IM | 1 |
| 1198 | Seq. ID No. 2431 | Seq. ID No. 2432 | Cyto | |
| 1199b | Seq. ID No. 2435 | Seq. ID No. 2436 | IM | 3 |
| 1200 | Seq. ID No. 2437 | Seq. ID No. 2438 | Cyto | 0 |
| 1201 | Seq. ID No. 2439 | Seq. ID No. 2440 | Cyto | |
| 1202a | Seq. ID No. 2441 | Seq. ID No. 2442 | IM | 3 |
| 1202b | Seq. ID No. 2443 | Seq. ID No. 2444 | IM | 3 |
| 1205 | Seq. ID No. 2445 | Seq. ID No. 2446 | IM | 3 |
| 1206 | Seq. ID No. 2447 | Seq. ID No. 2448 | Cyto | 0 |
| 1208 | Seq. ID No. 2451 | Seq. ID No. 2452 | Cyto | |
| 1209 | Seq. ID No. 2453 | Seq. ID No. 2454 | IM | 4 |
| 1210a | Seq. ID No. 2455 | Seq. ID No. 2456 | IM | 3 |
| 1210b | Seq. ID No. 2457 | Seq. ID No. 2458 | IM | 4 |
| 1213a | Seq. ID No. 2461 | Seq. ID No. 2462 | Cyto | 1 |
| 1213b | Seq. ID No. 2463 | Seq. ID No. 2464 | Cyto | 1 |
| 1214 | Seq. ID No. 2465 | Seq. ID No. 2466 | IM | |
| 1215a | Seq. ID No. 2467 | Seq. ID No. 2468 | Cyto | 0 |
| 1215b | Seq. ID No. 2469 | Seq. ID No. 2470 | Cyto | 0 |
| 1217c | Seq. ID No. 2471 | Seq. ID No. 2472 | Cyto | |
| 1218a | Seq. ID No. 2473 | Seq. ID No. 2474 | IM | 2 |
| 1218b | Seq. ID No. 2475 | Seq. ID No. 2476 | IM | 2 |
| 1219 | Seq. ID No. 2477 | Seq. ID No. 2478 | Cyto | |
| 1220 | Seq. ID No. 2479 | Seq. ID No. 2480 | Cyto | |
| 1221a | Seq. ID No. 2481 | Seq. ID No. 2482 | IM | |
| 1221b | Seq. ID No. 2483 | Seq. ID No. 2484 | IM | |
| 1223 | Seq. ID No. 2485 | Seq. ID No. 2486 | Cyto | |
| 1226 | Seq. ID No. 2495 | Seq. ID No. 2496 | Cyto | |
| 1230 | Seq. ID No. 2505 | Seq. ID No. 2506 | Cyto | 0 |
| 1233a | Seq. ID No. 2509 | Seq. ID No. 2510 | IM | |
| 1233b | Seq. ID No. 2511 | Seq. ID No. 2512 | IM | |
| 1233c | Seq. ID No. 2513 | Seq. ID No. 2514 | IM | |
| 1234c | Seq. ID No. 2519 | Seq. ID No. 2520 | IM | 6 |
| 1235 | Seq. ID No. 2521 | Seq. ID No. 2522 | Cyto | 1 |
| 1240 | Seq. ID No. 2529 | Seq. ID No. 2530 | Cyto | |
| 1244 | Seq. ID No. 2539 | Seq. ID No. 2540 | Cyto | 0 |
| 1245d | Seq. ID No. 2547 | Seq. ID No. 2548 | IM | 12 |
| 1245e | Seq. ID No. 2549 | Seq. ID No. 2550 | IM | 12 |
| 1246a | Seq. ID No. 2551 | Seq. ID No. 2552 | Cyto | |
| 1246b | Seq. ID No. 2553 | Seq. ID No. 2554 | Cyto | |
| 1250c | Seq. ID No. 2559 | Seq. ID No. 2560 | IM | 9 |
| 1250d | Seq. ID No. 2561 | Seq. ID No. 2562 | IM | 10 |
| 1250e | Seq. ID No. 2563 | Seq. ID No. 2564 | IM | 10 |
| 1251b | Seq. ID No. 2567 | Seq. ID No. 2568 | IM | 3 |
| 1253c | Seq. ID No. 2573 | Seq. ID No. 2574 | IM | 7 |
| 1253d | Seq. ID No. 2575 | Seq. ID No. 2576 | IM | 7 |
| 1256 | Seq. ID No. 2577 | Seq. ID No. 2578 | Cyto | 1 |
| 1257a | Seq. ID No. 2579 | Seq. ID No. 2580 | Cyto | |
| 1257b | Seq. ID No. 2581 | Seq. ID No. 2582 | Cyto | |
| 1258b | Seq. ID No. 2585 | Seq. ID No. 2586 | IM | 7 |
| 1258c | Seq. ID No. 2587 | Seq. ID No. 2588 | IM | 7 |
| 1258d | Seq. ID No. 2589 | Seq. ID No. 2590 | IM | 7 |
| 1263 | Seq. ID No. 2593 | Seq. ID No. 2594 | Cyto | 0 |
| 1265 | Seq. ID No. 2595 | Seq. ID No. 2596 | Cyto | 1 |
| 1267b | Seq. ID No. 2603 | Seq. ID No. 2604 | IM | 3 |
| 1268a | Seq. ID No. 2605 | Seq. ID No. 2606 | IM | 3 |
| 1269 | Seq. ID No. 2609 | Seq. ID No. 2610 | Cyto | |
| 1271 | Seq. ID No. 2613 | Seq. ID No. 2614 | Cyto | |
| 1272a | Seq. ID No. 2615 | Seq. ID No. 2616 | Cyto | |
| 1272b | Seq. ID No. 2617 | Seq. ID No. 2618 | Cyto | 0 |
| 1273 | Seq. ID No. 2619 | Seq. ID No. 2620 | Cyto | 0 |
| 1275b | Seq. ID No. 2623 | Seq. ID No. 2624 | Cyto | 1 |
| 1277 | Seq. ID No. 2625 | Seq. ID No. 2626 | Cyto | 1 |
| 1279 | Seq. ID No. 2631 | Seq. ID No. 2632 | Cyto | 0 |
| 1281 | Seq. ID No. 2633 | Seq. ID No. 2634 | Cyto | 0 |
| 1283a | Seq. ID No. 2635 | Seq. ID No. 2636 | Cyto | |
| 1283b | Seq. ID No. 2637 | Seq. ID No. 2638 | Cyto | |
| 1283c | Seq. ID No. 2639 | Seq. ID No. 2640 | Cyto | |
| 1284 | Seq. ID No. 2641 | Seq. ID No. 2642 | Cyto | |
| 1285a | Seq. ID No. 2643 | Seq. ID No. 2644 | Cyto | 0 |
| 1285b | Seq. ID No. 2645 | Seq. ID No. 2646 | Cyto | 0 |
| 1287a | Seq. ID No. 2647 | Seq. ID No. 2648 | Cyto | |
| 1287b | Seq. ID No. 2649 | Seq. ID No. 2650 | Cyto | |
| 1289 | Seq. ID No. 2653 | Seq. ID No. 2654 | IM | 1 |
| 1290 | Seq. ID No. 2655 | Seq. ID No. 2656 | Cyto | |
| 1293a | Seq. ID No. 2657 | Seq. ID No. 2658 | Cyto | |
| 1293b | Seq. ID No. 2659 | Seq. ID No. 2660 | Cyto | |
| 1294a | Seq. ID No. 2661 | Seq. ID No. 2662 | Cyto | |
| 1295 | Seq. ID No. 2663 | Seq. ID No. 2664 | Cyto | |
| 1297a | Seq. ID No. 2665 | Seq. ID No. 2666 | Cyto | |
| 1297b | Seq. ID No. 2667 | Seq. ID No. 2668 | Cyto | |
| 1300 | Seq. ID No. 2669 | Seq. ID No. 2670 | Cyto | |
| 1302 | Seq. ID No. 2671 | Seq. ID No. 2672 | Cyto | |
| 1305a | Seq. ID No. 2673 | Seq. ID No. 2674 | Cyto | |
| 1305b | Seq. ID No. 2675 | Seq. ID No. 2676 | Cyto | |
| 1305c | Seq. ID No. 2677 | Seq. ID No. 2678 | Cyto | |
| 1308d | Seq. ID No. 2685 | Seq. ID No. 2686 | IM | 4 |
| 1308e | Seq. ID No. 2687 | Seq. ID No. 2688 | IM | 4 |
| 1311 | Seq. ID No. 2689 | Seq. ID No. 2690 | Cyto | |
| 1320c | Seq. ID No. 2709 | Seq. ID No. 2710 | IM | 5 |
| 1321 | Seq. ID No. 2711 | Seq. ID No. 2712 | Cyto | |
| 1322a | Seq. ID No. 2713 | Seq. ID No. 2714 | Cyto | |
| 1322b | Seq. ID No. 2715 | Seq. ID No. 2716 | Cyto | |
| 1324 | Seq. ID No. 2719 | Seq. ID No. 2720 | Cyto | |
| 1326a | Seq. ID No. 2721 | Seq. ID No. 2722 | Cyto | |
| 1326b | Seq. ID No. 2723 | Seq. ID No. 2724 | Cyto | |
| 1326c | Seq. ID No. 2725 | Seq. ID No. 2726 | Cyto | |
| 1333 | Seq. ID No. 2727 | Seq. ID No. 2728 | Cyto | 0 |
| 1335b | Seq. ID No. 2735 | Seq. ID No. 2736 | IM | 3 |
| 1337 | Seq. ID No. 2737 | Seq. ID No. 2738 | Cyto | |
| 1338 | Seq. ID No. 2739 | Seq. ID No. 2740 | IM | 1 |
| 1340a | Seq. ID No. 2741 | Seq. ID No. 2742 | IM | 1 |
| 1340b | Seq. ID No. 2743 | Seq. ID No. 2744 | IM | 1 |
| 1341a | Seq. ID No. 2745 | Seq. ID No. 2746 | IM | 3 |
| 1341c | Seq. ID No. 2747 | Seq. ID No. 2748 | IM | 4 |
| 1344a | Seq. ID No. 2749 | Seq. ID No. 2750 | Cyto | 0 |
| 1344b | Seq. ID No. 2751 | Seq. ID No. 2752 | Cyto | 0 |
| 1348 | Seq. ID No. 2753 | Seq. ID No. 2754 | IM | 5 |
| 1349a | Seq. ID No. 2755 | Seq. ID No. 2756 | IM | 1 |
| 1349b | Seq. ID No. 2757 | Seq. ID No. 2758 | IM | 1 |
| 1349c | Seq. ID No. 2759 | Seq. ID No. 2760 | IM | 1 |
| 1350a | Seq. ID No. 2761 | Seq. ID No. 2762 | Cyto | |
| 1350b | Seq. ID No. 2763 | Seq. ID No. 2764 | Cyto | |
| 1353 | Seq. ID No. 2765 | Seq. ID No. 2766 | Cyto | 2 |
| 1355 | Seq. ID No. 2767 | Seq. ID No. 2768 | Cyto | |
| 1358a | Seq. ID No. 2769 | Seq. ID No. 2770 | Cyto | 0 |
| 1358b | Seq. ID No. 2771 | Seq. ID No. 2772 | Cyto | 0 |
| 1359 | Seq. ID No. 2773 | Seq. ID No. 2774 | Cyto | 1 |
| 1361 | Seq. ID No. 2775 | Seq. ID No. 2776 | Cyto | |
| 1364a | Seq. ID No. 2777 | Seq. ID No. 2778 | Cyto | |
| 1364b | Seq. ID No. 2779 | Seq. ID No. 2780 | Cyto | |
| 1364c | Seq. ID No. 2781 | Seq. ID No. 2782 | Cyto | |
| 1366b | Seq. ID No. 2787 | Seq. ID No. 2788 | IM | 1 |
| 1367 | Seq. ID No. 2789 | Seq. ID No. 2790 | Cyto | 1 |
| 1368 | Seq. ID No. 2791 | Seq. ID No. 2792 | Cyto | 0 |
| 1371 | Seq. ID No. 2793 | Seq. ID No. 2794 | Cyto | |
| 1373a | Seq. ID No. 2795 | Seq. ID No. 2796 | Cyto | |
| 1373b | Seq. ID No. 2797 | Seq. ID No. 2798 | Cyto | |
| 1374 | Seq. ID No. 2799 | Seq. ID No. 2800 | IM | |
| 1377 | Seq. ID No. 2803 | Seq. ID No. 2804 | IM | 0 |
| 1378 | Seq. ID No. 2805 | Seq. ID No. 2806 | IM | 0 |
| 1379 | Seq. ID No. 2807 | Seq. ID No. 2808 | IM | 1 |
| 1381a | Seq. ID No. 2811 | Seq. ID No. 2812 | IM | 1 |
| 1383 | Seq. ID No. 2817 | Seq. ID No. 2818 | Cyto | |
| 1386a | Seq. ID No. 2825 | Seq. ID No. 2826 | IM | 1 |
| 1386b | Seq. ID No. 2827 | Seq. ID No. 2828 | IM | 1 |
| 1387a | Seq. ID No. 2829 | Seq. ID No. 2830 | OM | 1 |
| 1394 | Seq. ID No. 2843 | Seq. ID No. 2844 | Cyto | 1 |
| 1396 | Seq. ID No. 2847 | Seq. ID No. 2848 | Cyto | |
| 1397 | Seq. ID No. 2849 | Seq. ID No. 2850 | Peri | |
| 1398 | Seq. ID No. 2851 | Seq. ID No. 2852 | Cyto | |
| 1400 | Seq. ID No. 2857 | Seq. ID No. 2858 | IM | 1 |
| 1405 | Seq. ID No. 2863 | Seq. ID No. 2864 | IM | 2 |
| 1407b | Seq. ID No. 2865 | Seq. ID No. 2866 | IM | 1 |
| 1408 | Seq. ID No. 2867 | Seq. ID No. 2868 | IM | 5 |
| 1409 | Seq. ID No. 2869 | Seq. ID No. 2870 | IM | 1 |
| 1410 | Seq. ID No. 2871 | Seq. ID No. 2872 | Cyto | |
| 1411b | Seq. ID No. 2875 | Seq. ID No. 2876 | IM | 4 |
| 1411c | Seq. ID No. 2877 | Seq. ID No. 2878 | IM | 6 |
| 1412a | Seq. ID No. 2879 | Seq. ID No. 2880 | IM | 8 |
| 1414a | Seq. ID No. 2883 | Seq. ID No. 2884 | IM | 0 |
| 1414b | Seq. ID No. 2885 | Seq. ID No. 2886 | IM | 0 |
| 1414c | Seq. ID No. 2887 | Seq. ID No. 2888 | IM | 0 |
| 1415 | Seq. ID No. 2889 | Seq. ID No. 2890 | Cyto | |
| 1416 | Seq. ID No. 2891 | Seq. ID No. 2892 | Cyto | |
| 1419 | Seq. ID No. 2895 | Seq. ID No. 2896 | IM | |
| 1420a | Seq. ID No. 2897 | Seq. ID No. 2898 | IM | 0 |
| 1420b | Seq. ID No. 2899 | Seq. ID No. 2900 | IM | 0 |
| 1422 | Seq. ID No. 2901 | Seq. ID No. 2902 | Cyto | 0 |
| 1423 | Seq. ID No. 2903 | Seq. ID No. 2904 | Cyto | |
| 1426b | Seq. ID No. 2907 | Seq. ID No. 2908 | IM | 6 |
| 1427a | Seq. ID No. 2909 | Seq. ID No. 2910 | Cyto | |
| 1427b | Seq. ID No. 2911 | Seq. ID No. 2912 | Cyto | |
| 1428 | Seq. ID No. 2913 | Seq. ID No. 2914 | Cyto | |
| 1429a | Seq. ID No. 2915 | Seq. ID No. 2916 | Cyto | |
| 1429b | Seq. ID No. 2917 | Seq. ID No. 2918 | IM | |
| 1431 | Seq. ID No. 2919 | Seq. ID No. 2920 | Cyto | 0 |
| 1432 | Seq. ID No. 2921 | Seq. ID No. 2922 | Cyto | 0 |
| 1433 | Seq. ID No. 2923 | Seq. ID No. 2924 | Cyto | 0 |
| 1434a | Seq. ID No. 2925 | Seq. ID No. 2926 | Cyto | 1 |
| 1434b | Seq. ID No. 2927 | Seq. ID No. 2928 | Cyto | 1 |
| 1437a | Seq. ID No. 2929 | Seq. ID No. 2930 | Cyto | 0 |
| 1437b | Seq. ID No. 2931 | Seq. ID No. 2932 | Cyto | 0 |
| 1437c | Seq. ID No. 2933 | Seq. ID No. 2934 | Cyto | 0 |
| 1439d | Seq. ID No. 2943 | Seq. ID No. 2944 | IM | 7 |
| 1439e | Seq. ID No. 2945 | Seq. ID No. 2946 | IM | 7 |
| 1440d | Seq. ID No. 2953 | Seq. ID No. 2954 | IM | 12 |
| 1442a | Seq. ID No. 2955 | Seq. ID No. 2956 | Cyto | |
| 1442b | Seq. ID No. 2957 | Seq. ID No. 2958 | Cyto | |
| 1445a | Seq. ID No. 2959 | Seq. ID No. 2960 | Cyto | |
| 1445b | Seq. ID No. 2961 | Seq. ID No. 2962 | Cyto | |
| 1445c | Seq. ID No. 2963 | Seq. ID No. 2964 | Cyto | |
| 1446a | Seq. ID No. 2965 | Seq. ID No. 2966 | IM | 2 |
| 1446b | Seq. ID No. 2967 | Seq. ID No. 2968 | IM | 2 |
| 1447b | Seq. ID No. 2971 | Seq. ID No. 2972 | IM | 11 |
| 1451 | Seq. ID No. 2979 | Seq. ID No. 2980 | Cyto | |
| 1453 | Seq. ID No. 2985 | Seq. ID No. 2986 | IM | 5 |
| 1455a | Seq. ID No. 2989 | Seq. ID No. 2990 | Cyto | |
| 1456 | Seq. ID No. 2993 | Seq. ID No. 2994 | Cyto | |
| 1457c | Seq. ID No. 2999 | Seq. ID No. 3000 | IM | 8 |
| 1459 | Seq. ID No. 3001 | Seq. ID No. 3002 | IM | 1 |
| 1462a | Seq. ID No. 3003 | Seq. ID No. 3004 | IM | 5 |
| 1466b | Seq. ID No. 3015 | Seq. ID No. 3016 | IM | 2 |
| 1466c | Seq. ID No. 3017 | Seq. ID No. 3018 | IM | 2 |
| 1466d | Seq. ID No. 3019 | Seq. ID No. 3020 | IM | 2 |
| 1467 | Seq. ID No. 3021 | Seq. ID No. 3022 | Cyto | 2 |
| 1470c | Seq. ID No. 3033 | Seq. ID No. 3034 | IM | 8 |
| 1471 | Seq. ID No. 3035 | Seq. ID No. 3036 | IM | 6 |
| 1472b | Seq. ID No. 3037 | Seq. ID No. 3038 | IM | |
| 1472c | Seq. ID No. 3039 | Seq. ID No. 3040 | Cyto | |
| 1474 | Seq. ID No. 3041 | Seq. ID No. 3042 | Cyto | |
| 1476 | Seq. ID No. 3045 | Seq. ID No. 3046 | IM | 5 |
| 1477a | Seq. ID No. 3047 | Seq. ID No. 3048 | Cyto | 0 |
| 1477b | Seq. ID No. 3049 | Seq. ID No. 3050 | Cyto | 0 |
| 1479a | Seq. ID No. 3051 | Seq. ID No. 3052 | Cyto | |
| 1479b | Seq. ID No. 3053 | Seq. ID No. 3054 | Cyto | |
| 1482a | Seq. ID No. 3057 | Seq. ID No. 3058 | Cyto | 0 |
| 1482b | Seq. ID No. 3059 | Seq. ID No. 3060 | Cyto | 0 |
| 1483 | Seq. ID No. 3061 | Seq. ID No. 3062 | Cyto | |
| 1484b | Seq. ID No. 3065 | Seq. ID No. 3066 | IM | 4 |
| 1484c | Seq. ID No. 3067 | Seq. ID No. 3068 | IM | 4 |
| 1486 | Seq. ID No. 3069 | Seq. ID No. 3070 | Cyto | |
| 1488d | Seq. ID No. 3079 | Seq. ID No. 3080 | IM | 4 |
| 1488e | Seq. ID No. 3081 | Seq. ID No. 3082 | IM | 4 |
| 1488f | Seq. ID No. 3083 | Seq. ID No. 3084 | IM | 4 |
| 1488g | Seq. ID No. 3085 | Seq. ID No. 3086 | IM | 4 |
| 1489 | Seq. ID No. 3087 | Seq. ID No. 3088 | Cyto | |
| 1490 | Seq. ID No. 3089 | Seq. ID No. 3090 | Cyto | |
| 1494 | Seq. ID No. 3091 | Seq. ID No. 3092 | Cyto | |
| 1497 | Seq. ID No. 3093 | Seq. ID No. 3094 | Cyto | 0 |
| 1498a | Seq. ID No. 3095 | Seq. ID No. 3096 | Cyto | |
| 1498b | Seq. ID No. 3097 | Seq. ID No. 3098 | Cyto | |
| 1498c | Seq. ID No. 3099 | Seq. ID No. 3100 | Cyto | |
| 1498d | Seq. ID No. 3101 | Seq. ID No. 3102 | Cyto | |
| 1499 | Seq. ID No. 3103 | Seq. ID No. 3104 | Cyto | |
| 1502a | Seq. ID No. 3105 | Seq. ID No. 3106 | Cyto | |
| 1502b | Seq. ID No. 3107 | Seq. ID No. 3108 | Cyto | |
| 1503a | Seq. ID No. 3109 | Seq. ID No. 3110 | IM | 4 |
| 1503b | Seq. ID No. 3111 | Seq. ID No. 3112 | IM | 4 |
| 1506a | Seq. ID No. 3113 | Seq. ID No. 3114 | Cyto | 0 |
| 1506b | Seq. ID No. 3115 | Seq. ID No. 3116 | Cyto | 0 |
| 1506c | Seq. ID No. 3117 | Seq. ID No. 3118 | Cyto | 0 |
| 1508 | Seq. ID No. 3125 | Seq. ID No. 3126 | Cyto | 0 |
| 1510a | Seq. ID No. 3127 | Seq. ID No. 3128 | IM | 0 |
| 1510b | Seq. ID No. 3129 | Seq. ID No. 3130 | IM | 0 |
| 1510c | Seq. ID No. 3131 | Seq. ID No. 3132 | IM | 0 |
| 1510d | Seq. ID No. 3133 | Seq. ID No. 3134 | IM | 0 |
| 1511 | Seq. ID No. 3135 | Seq. ID No. 3136 | IM | 0 |
| 1512 | Seq. ID No. 3137 | Seq. ID No. 3138 | Cyto | |
| 1513a | Seq. ID No. 3139 | Seq. ID No. 3140 | Cyto | |
| 1513b | Seq. ID No. 3141 | Seq. ID No. 3142 | Cyto | |
| 1516 | Seq. ID No. 3143 | Seq. ID No. 3144 | Cyto | |
| 1517b | Seq. ID No. 3147 | Seq. ID No. 3148 | IM | 3 |
| 1517c | Seq. ID No. 3149 | Seq. ID No. 3150 | IM | 3 |
| 1518a | Seq. ID No. 3151 | Seq. ID No. 3152 | Cyto | 0 |
| 1518b | Seq. ID No. 3153 | Seq. ID No. 3154 | Cyto | 0 |
| 1523 | Seq. ID No. 3159 | Seq. ID No. 3160 | Cyto | 0 |
| 1528 | Seq. ID No. 3161 | Seq. ID No. 3162 | Cyto | |
| 1533a | Seq. ID No. 3167 | Seq. ID No. 3168 | IM | 0 |
| 1534a | Seq. ID No. 3169 | Seq. ID No. 3170 | Cyto | 0 |
| 1534b | Seq. ID No. 3171 | Seq. ID No. 3172 | Cyto | 0 |
| 1536a | Seq. ID No. 3175 | Seq. ID No. 3176 | Cyto | |
| 1536b | Seq. ID No. 3177 | Seq. ID No. 3178 | Cyto | 0 |
| 1537 | Seq. ID No. 3179 | Seq. ID No. 3180 | Cyto | |
| 1542 | Seq. ID No. 3181 | Seq. ID No. 3182 | IM | 0 |
| 1544 | Seq. ID No. 3185 | Seq. ID No. 3186 | Cyto | 1 |
| 1547a | Seq. ID No. 3187 | Seq. ID No. 3188 | Cyto | |
| 1547b | Seq. ID No. 3189 | Seq. ID No. 3190 | Cyto | |
| 1548 | Seq. ID No. 3191 | Seq. ID No. 3192 | Cyto | |
| 1553a | Seq. ID No. 3195 | Seq. ID No. 3196 | Cyto | |
| 1553b | Seq. ID No. 3197 | Seq. ID No. 3198 | Cyto | |
| 1554a | Seq. ID No. 3199 | Seq. ID No. 3200 | IM | 1 |
| 1554c | Seq. ID No. 3203 | Seq. ID No. 3204 | IM | 3 |
| 1555 | Seq. ID No. 3205 | Seq. ID No. 3206 | IM | 1 |
| 1556a | Seq. ID No. 3207 | Seq. ID No. 3208 | Cyto | |
| 1556b | Seq. ID No. 3209 | Seq. ID No. 3210 | Cyto | |
| 1556c | Seq. ID No. 3211 | Seq. ID No. 3212 | Cyto | |
| 1559b | Seq. ID No. 3221 | Seq. ID No. 3222 | IM | 7 |
| 1563 | Seq. ID No. 3223 | Seq. ID No. 3224 | Cyto | |
| 1564a | Seq. ID No. 3225 | Seq. ID No. 3226 | Cyto | 1 |
| 1564b | Seq. ID No. 3227 | Seq. ID No. 3228 | Cyto | 1 |
| 1565 | Seq. ID No. 3229 | Seq. ID No. 3230 | Cyto | |
| 1567 | Seq. ID No. 3231 | Seq. ID No. 3232 | Cyto | |
| 1568b | Seq. ID No. 3233 | Seq. ID No. 3234 | IM | 1 |
| 1569 | Seq. ID No. 3235 | Seq. ID No. 3236 | IM | 2 |
| 1570 | Seq. ID No. 3237 | Seq. ID No. 3238 | Peri | 2 |
| 1571 | Seq. ID No. 3239 | Seq. ID No. 3240 | IM | 5 |
| 1572d | Seq. ID No. 3247 | Seq. ID No. 3248 | IM | 11 |
| 1573 | Seq. ID No. 3251 | Seq. ID No. 3252 | Cyto | |
| 1576 | Seq. ID No. 3253 | Seq. ID No. 3254 | Cyto | |
| 1578 | Seq. ID No. 3259 | Seq. ID No. 3260 | IM | 2 |
| 1581 | Seq. ID No. 3265 | Seq. ID No. 3266 | IM | 1 |
| 1582a | Seq. ID No. 3267 | Seq. ID No. 3268 | IM | |
| 1582c | Seq. ID No. 3271 | Seq. ID No. 3272 | IM | 1 |
| 1584 | Seq. ID No. 3273 | Seq. ID No. 3274 | Peri | 1 |
| 1587a | Seq. ID No. 3279 | Seq. ID No. 3280 | Cyto | |
| 1587b | Seq. ID No. 3281 | Seq. ID No. 3282 | Cyto | |
| 1587c | Seq. ID No. 3283 | Seq. ID No. 3284 | Cyto | |
| 1588 | Seq. ID No. 3285 | Seq. ID No. 3286 | IM | 0 |
| 1590 | Seq. ID No. 3287 | Seq. ID No. 3288 | Cyto | |
| 1591 | Seq. ID No. 3289 | Seq. ID No. 3290 | Cyto | |
| 1592a | Seq. ID No. 3291 | Seq. ID No. 3292 | Cyto | |
| 1592b | Seq. ID No. 3293 | Seq. ID No. 3294 | Cyto | |
| 1593 | Seq. ID No. 3295 | Seq. ID No. 3296 | Cyto | |
| 1594b | Seq. ID No. 3299 | Seq. ID No. 3300 | IM | 1 |
| 1595a | Seq. ID No. 3301 | Seq. ID No. 3302 | Cyto | 0 |
| 1595b | Seq. ID No. 3303 | Seq. ID No. 3304 | Cyto | 0 |
| 1598a | Seq. ID No. 3305 | Seq. ID No. 3306 | Cyto | 0 |
| 1598b | Seq. ID No. 3307 | Seq. ID No. 3308 | Cyto | 0 |
| 1600a | Seq. ID No. 3309 | Seq. ID No. 3310 | Cyto | 1 |
| 1600b | Seq. ID No. 3311 | Seq. ID No. 3312 | Cyto | 1 |
| 1600c | Seq. ID No. 3313 | Seq. ID No. 3314 | Cyto | 1 |
| 1602 | Seq. ID No. 3315 | Seq. ID No. 3316 | Cyto | |
| 1606b | Seq. ID No. 3319 | Seq. ID No. 3320 | IM | 2 |
| 1607a | Seq. ID No. 3321 | Seq. ID No. 3322 | IM | 5 |
| 1610a | Seq. ID No. 3327 | Seq. ID No. 3328 | Cyto | |
| 1610b | Seq. ID No. 3329 | Seq. ID No. 3330 | Cyto | |
| 1616a | Seq. ID No. 3333 | Seq. ID No. 3334 | IM | 1 |
| 1622a | Seq. ID No. 3341 | Seq. ID No. 3342 | Cyto | 0 |
| 1623a | Seq. ID No. 3343 | Seq. ID No. 3344 | Cyto | |
| 1623b | Seq. ID No. 3345 | Seq. ID No. 3346 | Cyto | |
| 1623c | Seq. ID No. 3347 | Seq. ID No. 3348 | Cyto | |
| 1628a | Seq. ID No. 3361 | Seq. ID No. 3362 | Cyto | |
| 1628b | Seq. ID No. 3363 | Seq. ID No. 3364 | Cyto | |
| 1632a | Seq. ID No. 3365 | Seq. ID No. 3366 | Cyto | 0 |
| 1632b | Seq. ID No. 3367 | Seq. ID No. 3368 | Cyto | 0 |
| 1633a | Seq. ID No. 3369 | Seq. ID No. 3370 | IM | 2 |
| 1633b | Seq. ID No. 3371 | Seq. ID No. 3372 | IM | 2 |
| 1634a | Seq. ID No. 3373 | Seq. ID No. 3374 | Cyto | |
| 1639b | Seq. ID No. 3379 | Seq. ID No. 3380 | Cyto | |
| 1642a | Seq. ID No. 3381 | Seq. ID No. 3382 | Cyto | 1 |
| 1642b | Seq. ID No. 3383 | Seq. ID No. 3384 | Cyto | 1 |
| 1643a | Seq. ID No. 3385 | Seq. ID No. 3386 | Cyto | |
| 1643b | Seq. ID No. 3387 | Seq. ID No. 3388 | Cyto | |
| 1646c | Seq. ID No. 3393 | Seq. ID No. 3394 | IM | 11 |
| 1646e | Seq. ID No. 3397 | Seq. ID No. 3398 | IM | 13 |
| 1646f | Seq. ID No. 3399 | Seq. ID No. 3400 | IM | 13 |
| 1647 | Seq. ID No. 3401 | Seq. ID No. 3402 | Cyto | |
| 1648b | Seq. ID No. 3403 | Seq. ID No. 3404 | IM | 3 |
| 1649b | Seq. ID No. 3407 | Seq. ID No. 3408 | Cyto | 2 |
| 1649c | Seq. ID No. 3409 | Seq. ID No. 3410 | Cyto | 2 |
| 1652a | Seq. ID No. 3411 | Seq. ID No. 3412 | Cyto | |
| 1652b | Seq. ID No. 3413 | Seq. ID No. 3414 | Cyto | |
| 1656b | Seq. ID No. 3417 | Seq. ID No. 3418 | Cyto | |
| 1657 | Seq. ID No. 3419 | Seq. ID No. 3420 | Cyto | |
| 1659b | Seq. ID No. 3423 | Seq. ID No. 3424 | IM | 9 |
| 1662a | Seq. ID No. 3429 | Seq. ID No. 3430 | Cyto | 1 |
| 1662b | Seq. ID No. 3431 | Seq. ID No. 3432 | Cyto | 1 |
| 1664 | Seq. ID No. 3435 | Seq. ID No. 3436 | IM | 0 |
| 1665a | Seq. ID No. 3437 | Seq. ID No. 3438 | Cyto | 1 |
| 1668 | Seq. ID No. 3439 | Seq. ID No. 3440 | IM | 1 |
| 1670a | Seq. ID No. 3443 | Seq. ID No. 3444 | Cyto | |
| 1670b | Seq. ID No. 3445 | Seq. ID No. 3446 | Cyto | |
| 1670c | Seq. ID No. 3447 | Seq. ID No. 3448 | IM | |
| 1673f | Seq. ID No. 3459 | Seq. ID No. 3460 | IM | 14 |
| 1674 | Seq. ID No. 3461 | Seq. ID No. 3462 | OM | 1 |
| 1675b | Seq. ID No. 3465 | Seq. ID No. 3466 | Cyto | 1 |
| 1675c | Seq. ID No. 3467 | Seq. ID No. 3468 | Cyto | 1 |
| 1676 | Seq. ID No. 3469 | Seq. ID No. 3470 | Cyto | 1 |
| 1677 | Seq. ID No. 3471 | Seq. ID No. 3472 | Cyto | 0 |
| 1679 | Seq. ID No. 3473 | Seq. ID No. 3474 | IM | 1 |
| 1680 | Seq. ID No. 3475 | Seq. ID No. 3476 | IM | |
| 1682a | Seq. ID No. 3477 | Seq. ID No. 3478 | Cyto | |
| 1682b | Seq. ID No. 3479 | Seq. ID No. 3480 | Cyto | |
| 1683b | Seq. ID No. 3483 | Seq. ID No. 3484 | IM | 6 |
| 1684 | Seq. ID No. 3485 | Seq. ID No. 3486 | Cyto | |
| 1685 | Seq. ID No. 3487 | Seq. ID No. 3488 | Cyto | 0 |
| 1687 | Seq. ID No. 3489 | Seq. ID No. 3490 | Cyto | 0 |
| 1688c | Seq. ID No. 3495 | Seq. ID No. 3496 | IM | 11 |
| 1689a | Seq. ID No. 3497 | Seq. ID No. 3498 | IM | |
| 1689b | Seq. ID No. 3499 | Seq. ID No. 3500 | IM | |
| 1689c | Seq. ID No. 3501 | Seq. ID No. 3502 | Cyto | |
| 1691 | Seq. ID No. 3507 | Seq. ID No. 3508 | IM | 9 |
| 1692 | Seq. ID No. 3509 | Seq. ID No. 3510 | Cyto | |
| 1693 | Seq. ID No. 3511 | Seq. ID No. 3512 | IM | |
| 1694a | Seq. ID No. 3513 | Seq. ID No. 3514 | Cyto | |
| 1694b | Seq. ID No. 3515 | Seq. ID No. 3516 | Cyto | |
| 1696 | Seq. ID No. 3521 | Seq. ID No. 3522 | Peri | 1 |
| 1697a | Seq. ID No. 3523 | Seq. ID No. 3524 | IM | 7 |
| 1697b | Seq. ID No. 3525 | Seq. ID No. 3526 | IM | 9 |
| 1699b | Seq. ID No. 3529 | Seq. ID No. 3530 | IM | 10 |
| 1700b | Seq. ID No. 3533 | Seq. ID No. 3534 | IM | 4 |
| 1701a | Seq. ID No. 3535 | Seq. ID No. 3536 | Cyto | 0 |
| 1701b | Seq. ID No. 3537 | Seq. ID No. 3538 | Cyto | 0 |
| 1704a | Seq. ID No. 3541 | Seq. ID No. 3542 | IM | 0 |
| 1704b | Seq. ID No. 3543 | Seq. ID No. 3544 | Cyto | 0 |
| 1705a | Seq. ID No. 3545 | Seq. ID No. 3546 | Cyto | |
| 1705b | Seq. ID No. 3547 | Seq. ID No. 3548 | Cyto | |
| 1706 | Seq. ID No. 3549 | Seq. ID No. 3550 | Cyto | |
| 1707a | Seq. ID No. 3551 | Seq. ID No. 3552 | Cyto | |
| 1707b | Seq. ID No. 3553 | Seq. ID No. 3554 | Cyto | |
| 1708 | Seq. ID No. 3555 | Seq. ID No. 3556 | Cyto | 0 |
| 1709 | Seq. ID No. 3557 | Seq. ID No. 3558 | Cyto | |
| 1710a | Seq. ID No. 3559 | Seq. ID No. 3560 | Peri | |
| 1712a | Seq. ID No. 3563 | Seq. ID No. 3564 | Cyto | |
| 1712b | Seq. ID No. 3565 | Seq. ID No. 3566 | Cyto | |
| 1715a | Seq. ID No. 3567 | Seq. ID No. 3568 | Cyto | |
| 1715b | Seq. ID No. 3569 | Seq. ID No. 3570 | Cyto | |
| 1718a | Seq. ID No. 3571 | Seq. ID No. 3572 | Cyto | |
| 1722 | Seq. ID No. 3575 | Seq. ID No. 3576 | IM | 1 |
| 1723a | Seq. ID No. 3577 | Seq. ID No. 3578 | Cyto | 0 |
| 1723b | Seq. ID No. 3579 | Seq. ID No. 3580 | Cyto | 0 |
| 1727 | Seq. ID No. 3583 | Seq. ID No. 3584 | Cyto | 0 |
| 1728 | Seq. ID No. 3585 | Seq. ID No. 3586 | Cyto | |
| 1733 | Seq. ID No. 3589 | Seq. ID No. 3590 | Cyto | |
| 1734 | Seq. ID No. 3591 | Seq. ID No. 3592 | Cyto | |
| 1737a | Seq. ID No. 3597 | Seq. ID No. 3598 | Cyto | |
| 1737b | Seq. ID No. 3599 | Seq. ID No. 3600 | Cyto | |
| 1738a | Seq. ID No. 3601 | Seq. ID No. 3602 | Cyto | |
| 1738b | Seq. ID No. 3603 | Seq. ID No. 3604 | Cyto | 0 |
| 1738c | Seq. ID No. 3605 | Seq. ID No. 3606 | Cyto | 0 |
| 1739 | Seq. ID No. 3607 | Seq. ID No. 3608 | Cyto | |
| 1741 | Seq. ID No. 3609 | Seq. ID No. 3610 | Cyto | |
| 1744a | Seq. ID No. 3613 | Seq. ID No. 3614 | Cyto | |
| 1744b | Seq. ID No. 3615 | Seq. ID No. 3616 | Cyto | |
| 1749b | Seq. ID No. 3623 | Seq. ID No. 3624 | IM | 4 |
| 1752a | Seq. ID No. 3627 | Seq. ID No. 3628 | Cyto | |
| 1753 | Seq. ID No. 3631 | Seq. ID No. 3632 | Cyto | |
| 1756a | Seq. ID No. 3633 | Seq. ID No. 3634 | Cyto | |
| 1757a | Seq. ID No. 3637 | Seq. ID No. 3638 | IM | 2 |
| 1757b | Seq. ID No. 3639 | Seq. ID No. 3640 | IM | 2 |
| 1759 | Seq. ID No. 3641 | Seq. ID No. 3642 | Cyto | |
| 1760 | Seq. ID No. 3643 | Seq. ID No. 3644 | Cyto | |
| 1762 | Seq. ID No. 3645 | Seq. ID No. 3646 | Cyto | |
| 1764a | Seq. ID No. 3647 | Seq. ID No. 3648 | IM | |
| 1764b | Seq. ID No. 3649 | Seq. ID No. 3650 | IM | |
| 1764c | Seq. ID No. 3651 | Seq. ID No. 3652 | IM | |
| 1765 | Seq. ID No. 3653 | Seq. ID No. 3654 | Cyto | |
| 1766 | Seq. ID No. 3655 | Seq. ID No. 3656 | IM | 0 |
| 1767a | Seq. ID No. 3657 | Seq. ID No. 3658 | Cyto | |
| 1767b | Seq. ID No. 3659 | Seq. ID No. 3660 | Cyto | |
| 1769a | Seq. ID No. 3661 | Seq. ID No. 3662 | IM | 5 |
| 1769b | Seq. ID No. 3663 | Seq. ID No. 3664 | IM | 7 |
| 1771 | Seq. ID No. 3665 | Seq. ID No. 3666 | Cyto | |
| 1773 | Seq. ID No. 3667 | Seq. ID No. 3668 | Cyto | |
| 1774 | Seq. ID No. 3669 | Seq. ID No. 3670 | IM | |
| 1775a | Seq. ID No. 3671 | Seq. ID No. 3672 | Cyto | |
| 1775b | Seq. ID No. 3673 | Seq. ID No. 3674 | Cyto | |
| 1775c | Seq. ID No. 3675 | Seq. ID No. 3676 | Cyto | |
| 1780 | Seq. ID No. 3681 | Seq. ID No. 3682 | IM | 0 |
| 1783a | Seq. ID No. 3683 | Seq. ID No. 3684 | IM | 1 |
| 1783b | Seq. ID No. 3685 | Seq. ID No. 3686 | IM | 1 |
| 1784a | Seq. ID No. 3687 | Seq. ID No. 3688 | IM | |
| 1788a | Seq. ID No. 3691 | Seq. ID No. 3692 | Cyto | |
| 1788b | Seq. ID No. 3693 | Seq. ID No. 3694 | IM | |
| 1788c | Seq. ID No. 3695 | Seq. ID No. 3696 | Cyto | |
| 1789a | Seq. ID No. 3697 | Seq. ID No. 3698 | Cyto | |
| 1789b | Seq. ID No. 3699 | Seq. ID No. 3700 | Cyto | |
| 1790a | Seq. ID No. 3701 | Seq. ID No. 3702 | Cyto | 2 |
| 1790b | Seq. ID No. 3703 | Seq. ID No. 3704 | Cyto | 3 |
| 1792a | Seq. ID No. 3705 | Seq. ID No. 3706 | Peri | 0 |
| 1792b | Seq. ID No. 3707 | Seq. ID No. 3708 | Cyto | 0 |
| 1792c | Seq. ID No. 3709 | Seq. ID No. 3710 | Cyto | 0 |
| 1793a | Seq. ID No. 3711 | Seq. ID No. 3712 | IM | |
| 1793b | Seq. ID No. 3713 | Seq. ID No. 3714 | IM | |
| 1793c | Seq. ID No. 3715 | Seq. ID No. 3716 | IM | |
| 1797a | Seq. ID No. 3719 | Seq. ID No. 3720 | Cyto | |
| 1797b | Seq. ID No. 3721 | Seq. ID No. 3722 | Cyto | |
| 1798b | Seq. ID No. 3725 | Seq. ID No. 3726 | IM | 4 |
| 1800 | Seq. ID No. 3729 | Seq. ID No. 3730 | IM | 1 |
| 1802a | Seq. ID No. 3731 | Seq. ID No. 3732 | IM | 2 |
| 1802b | Seq. ID No. 3733 | Seq. ID No. 3734 | IM | 2 |
| 1803 | Seq. ID No. 3735 | Seq. ID No. 3736 | IM | 3 |
| 1804a | Seq. ID No. 3737 | Seq. ID No. 3738 | IM | 2 |
| 1804b | Seq. ID No. 3739 | Seq. ID No. 3740 | IM | 2 |
| 1806a | Seq. ID No. 3743 | Seq. ID No. 3744 | IM | 5 |
| 1806c | Seq. ID No. 3747 | Seq. ID No. 3748 | IM | 5 |
| 1807a | Seq. ID No. 3749 | Seq. ID No. 3750 | IM | 2 |
| 1807b | Seq. ID No. 3751 | Seq. ID No. 3752 | IM | 2 |
| 1808d | Seq. ID No. 3759 | Seq. ID No. 3760 | IM | 15 |
| 1809d | Seq. ID No. 3767 | Seq. ID No. 3768 | IM | 12 |
| 1809e | Seq. ID No. 3769 | Seq. ID No. 3770 | IM | 14 |
| 1809f | Seq. ID No. 3771 | Seq. ID No. 3772 | IM | 14 |
| 1810a | Seq. ID No. 3773 | Seq. ID No. 3774 | Cyto | |
| 1810b | Seq. ID No. 3775 | Seq. ID No. 3776 | Cyto | |
| 1811a | Seq. ID No. 3777 | Seq. ID No. 3778 | Cyto | |
| 1811b | Seq. ID No. 3779 | Seq. ID No. 3780 | Cyto | |
| 1813 | Seq. ID No. 3785 | Seq. ID No. 3786 | IM | 1 |
| 1815a | Seq. ID No. 3787 | Seq. ID No. 3788 | Cyto | |
| 1815b | Seq. ID No. 3789 | Seq. ID No. 3790 | Cyto | |
| 1815c | Seq. ID No. 3791 | Seq. ID No. 3792 | Cyto | |
| 1816b | Seq. ID No. 3795 | Seq. ID No. 3796 | IM | 1 |
| 1816c | Seq. ID No. 3797 | Seq. ID No. 3798 | IM | 1 |
| 1819a | Seq. ID No. 3801 | Seq. ID No. 3802 | IM | 0 |
| 1819b | Seq. ID No. 3803 | Seq. ID No. 3804 | IM | 0 |
| 1821 | Seq. ID No. 3805 | Seq. ID No. 3806 | Cyto | 0 |
| 1823a | Seq. ID No. 3809 | Seq. ID No. 3810 | Cyto | |
| 1823b | Seq. ID No. 3811 | Seq. ID No. 3812 | Cyto | |
| 1828 | Seq. ID No. 3819 | Seq. ID No. 3820 | Cyto | |
| 1830a | Seq. ID No. 3821 | Seq. ID No. 3822 | IM | 6 |
| 1830b | Seq. ID No. 3823 | Seq. ID No. 3824 | IM | 7 |
| 1833 | Seq. ID No. 3825 | Seq. ID No. 3826 | Cyto | |
| 1834 | Seq. ID No. 3827 | Seq. ID No. 3828 | Cyto | |
| 1835 | Seq. ID No. 3829 | Seq. ID No. 3830 | Cyto | |
| 1836a | Seq. ID No. 3831 | Seq. ID No. 3832 | IM | 1 |
| 1836b | Seq. ID No. 3833 | Seq. ID No. 3834 | IM | 1 |
| 1837 | Seq. ID No. 3835 | Seq. ID No. 3836 | IM | |
| 1838c | Seq. ID No. 3841 | Seq. ID No. 3842 | IM | 6 |
| 1838d | Seq. ID No. 3843 | Seq. ID No. 3844 | IM | 6 |
| 1839a | Seq. ID No. 3845 | Seq. ID No. 3846 | Cyto | 0 |
| 1839b | Seq. ID No. 3847 | Seq. ID No. 3848 | Cyto | 0 |
| 1842d | Seq. ID No. 3855 | Seq. ID No. 3856 | IM | 10 |
| 1843 | Seq. ID No. 3857 | Seq. ID No. 3858 | Cyto | |
| 1848b | Seq. ID No. 3867 | Seq. ID No. 3868 | IM | 10 |
| 1850a | Seq. ID No. 3869 | Seq. ID No. 3870 | IM | 1 |
| 1850b | Seq. ID No. 3871 | Seq. ID No. 3872 | IM | 1 |
| 1850c | Seq. ID No. 3873 | Seq. ID No. 3874 | IM | 1 |
| 1853a | Seq. ID No. 3875 | Seq. ID No. 3876 | IM | 0 |
| 1853b | Seq. ID No. 3877 | Seq. ID No. 3878 | IM | 0 |
| 1854b | Seq. ID No. 3881 | Seq. ID No. 3882 | IM | 4 |
| 1855 | Seq. ID No. 3883 | Seq. ID No. 3884 | IM | 1 |
| 1856 | Seq. ID No. 3885 | Seq. ID No. 3886 | Cyto | |
| 1857a | Seq. ID No. 3887 | Seq. ID No. 3888 | Cyto | 0 |
| 1857d | Seq. ID No. 3893 | Seq. ID No. 3894 | IM | 8 |
| 1859 | Seq. ID No. 3897 | Seq. ID No. 3898 | Cyto | |
| 1861a | Seq. ID No. 3899 | Seq. ID No. 3900 | Cyto | |
| 1861b | Seq. ID No. 3901 | Seq. ID No. 3902 | Cyto | |
| 1863a | Seq. ID No. 3905 | Seq. ID No. 3906 | Cyto | |
| 1863b | Seq. ID No. 3907 | Seq. ID No. 3908 | Cyto | 0 |
| 1864a | Seq. ID No. 3909 | Seq. ID No. 3910 | Cyto | 0 |
| 1865a | Seq. ID No. 3911 | Seq. ID No. 3912 | IM | 6 |
| 1865b | Seq. ID No. 3913 | Seq. ID No. 3914 | IM | 7 |
| 1869 | Seq. ID No. 3917 | Seq. ID No. 3918 | Cyto | |
| 1870 | Seq. ID No. 3919 | Seq. ID No. 3920 | Cyto | 0 |
| 1873a | Seq. ID No. 3921 | Seq. ID No. 3922 | Cyto | |
| 1875b | Seq. ID No. 3927 | Seq. ID No. 3928 | Cyto | |
| 1875c | Seq. ID No. 3929 | Seq. ID No. 3930 | IM | 1 |
| 1877a | Seq. ID No. 3931 | Seq. ID No. 3932 | Cyto | |
| 1877b | Seq. ID No. 3933 | Seq. ID No. 3934 | Cyto | |
| 1878 | Seq. ID No. 3935 | Seq. ID No. 3936 | IM | |
| 1879 | Seq. ID No. 3937 | Seq. ID No. 3938 | Cyto | 1 |
| 1882 | Seq. ID No. 3939 | Seq. ID No. 3940 | IM | 2 |
| 1884 | Seq. ID No. 3941 | Seq. ID No. 3942 | Cyto | |
| 1886 | Seq. ID No. 3943 | Seq. ID No. 3944 | Cyto | |
| 1887 | Seq. ID No. 3945 | Seq. ID No. 3946 | Cyto | 0 |
| 1888a | Seq. ID No. 3947 | Seq. ID No. 3948 | IM | 10 |
| 1888b | Seq. ID No. 3949 | Seq. ID No. 3950 | IM | 10 |
| 1890 | Seq. ID No. 3951 | Seq. ID No. 3952 | Cyto | |
| 1891a | Seq. ID No. 3953 | Seq. ID No. 3954 | Cyto | |
| 1891b | Seq. ID No. 3955 | Seq. ID No. 3956 | Cyto | |
| 1893 | Seq. ID No. 3957 | Seq. ID No. 3958 | Cyto | 0 |
| 1895 | Seq. ID No. 3961 | Seq. ID No. 3962 | IM | 0 |
| 1896b | Seq. ID No. 3965 | Seq. ID No. 3966 | IM | 2 |
| 1897a | Seq. ID No. 3967 | Seq. ID No. 3968 | Cyto | |
| 1897b | Seq. ID No. 3969 | Seq. ID No. 3970 | Cyto | |
| 1897c | Seq. ID No. 3971 | Seq. ID No. 3972 | Cyto | |
| 1899 | Seq. ID No. 3977 | Seq. ID No. 3978 | Cyto | |
| 1900 | Seq. ID No. 3979 | Seq. ID No. 3980 | Cyto | 1 |
| 1902a | Seq. ID No. 3981 | Seq. ID No. 3982 | Cyto | 0 |
| 1902b | Seq. ID No. 3983 | Seq. ID No. 3984 | Cyto | 0 |
| 1907 | Seq. ID No. 3985 | Seq. ID No. 3986 | Cyto | |
| 1912 | Seq. ID No. 3987 | Seq. ID No. 3988 | Cyto | 0 |
| 1915a | Seq. ID No. 3989 | Seq. ID No. 3990 | Cyto | |
| 1915b | Seq. ID No. 3991 | Seq. ID No. 3992 | Cyto | |
| 1918b | Seq. ID No. 3999 | Seq. ID No. 4000 | IM | 0 |
| 1918c | Seq. ID No. 4001 | Seq. ID No. 4002 | IM | 0 |
| 1918d | Seq. ID No. 4003 | Seq. ID No. 4004 | IM | 0 |
| 1923a | Seq. ID No. 4011 | Seq. ID No. 4012 | Cyto | 0 |
| 1923b | Seq. ID No. 4013 | Seq. ID No. 4014 | Cyto | 0 |
| 1925 | Seq. ID No. 4015 | Seq. ID No. 4016 | Cyto | |
| 1926 | Seq. ID No. 4017 | Seq. ID No. 4018 | Cyto | 1 |
| 1927a | Seq. ID No. 4019 | Seq. ID No. 4020 | Cyto | |
| 1927b | Seq. ID No. 4021 | Seq. ID No. 4022 | Cyto | 0 |
| 1930 | Seq. ID No. 4023 | Seq. ID No. 4024 | Cyto | |
| 1931c | Seq. ID No. 4029 | Seq. ID No. 4030 | IM | 7 |
| 1932 | Seq. ID No. 4031 | Seq. ID No. 4032 | IM | 3 |
| 1933a | Seq. ID No. 4033 | Seq. ID No. 4034 | Cyto | 1 |
| 1933b | Seq. ID No. 4035 | Seq. ID No. 4036 | Cyto | 1 |
| 1934 | Seq. ID No. 4037 | Seq. ID No. 4038 | Cyto | |
| 1939a | Seq. ID No. 4051 | Seq. ID No. 4052 | Cyto | 0 |
| 1939b | Seq. ID No. 4053 | Seq. ID No. 4054 | Cyto | 0 |
| 1939c | Seq. ID No. 4055 | Seq. ID No. 4056 | IM | 0 |
| 1940 | Seq. ID No. 4057 | Seq. ID No. 4058 | Cyto | |
| 1941a | Seq. ID No. 4059 | Seq. ID No. 4060 | IM | 2 |
| 1942 | Seq. ID No. 4063 | Seq. ID No. 4064 | Cyto | |
| 1943a | Seq. ID No. 4065 | Seq. ID No. 4066 | Cyto | 0 |
| 1943b | Seq. ID No. 4067 | Seq. ID No. 4068 | Cyto | 0 |
| 1944 | Seq. ID No. 4069 | Seq. ID No. 4070 | IM | 1 |
| 1946c | Seq. ID No. 4075 | Seq. ID No. 4076 | IM | 10 |
| 1949 | Seq. ID No. 4077 | Seq. ID No. 4078 | Cyto | |
| 1951c | Seq. ID No. 4085 | Seq. ID No. 4086 | IM | 4 |
| 1951d | Seq. ID No. 4087 | Seq. ID No. 4088 | IM | 4 |
| 1953 | Seq. ID No. 4089 | Seq. ID No. 4090 | IM | 1 |
| 1954a | Seq. ID No. 4091 | Seq. ID No. 4092 | IM | 0 |
| 1954b | Seq. ID No. 4093 | Seq. ID No. 4094 | IM | 0 |
| 1954c | Seq. ID No. 4095 | Seq. ID No. 4096 | IM | 0 |
| 1956 | Seq. ID No. 4097 | Seq. ID No. 4098 | Cyto | |
| 1957 | Seq. ID No. 4099 | Seq. ID No. 4100 | Cyto | |
| 1958c | Seq. ID No. 4105 | Seq. ID No. 4106 | IM | 9 |
| 1960a | Seq. ID No. 4107 | Seq. ID No. 4108 | Cyto | 0 |
| 1960b | Seq. ID No. 4109 | Seq. ID No. 4110 | Cyto | 0 |
| 1961 | Seq. ID No. 4113 | Seq. ID No. 4114 | IM | 1 |
| 1962a | Seq. ID No. 4115 | Seq. ID No. 4116 | Cyto | |
| 1962b | Seq. ID No. 4117 | Seq. ID No. 4118 | Cyto | |
| 1965a | Seq. ID No. 4119 | Seq. ID No. 4120 | Cyto | 0 |
| 1965b | Seq. ID No. 4121 | Seq. ID No. 4122 | Cyto | 0 |
| 1966 | Seq. ID No. 4123 | Seq. ID No. 4124 | Cyto | |
| 1967 | Seq. ID No. 4125 | Seq. ID No. 4126 | Cyto | |
| 1968 | Seq. ID No. 4127 | Seq. ID No. 4128 | Cyto | |
| 1969 | Seq. ID No. 4129 | Seq. ID No. 4130 | IM | 3 |
| 1970a | Seq. ID No. 4131 | Seq. ID No. 4132 | Cyto | |
| 1979a | Seq. ID No. 4147 | Seq. ID No. 4148 | Cyto | |
| 1979b | Seq. ID No. 4149 | Seq. ID No. 4150 | Cyto | |
| 1981 | Seq. ID No. 4155 | Seq. ID No. 4156 | Cyto | 1 |
| 1982 | Seq. ID No. 4157 | Seq. ID No. 4158 | IM | |
| 1985a | Seq. ID No. 4159 | Seq. ID No. 4160 | Cyto | |
| 1985b | Seq. ID No. 4161 | Seq. ID No. 4162 | Cyto | |
| 1986 | Seq. ID No. 4163 | Seq. ID No. 4164 | Cyto | |
| 1987a | Seq. ID No. 4165 | Seq. ID No. 4166 | Cyto | |
| 1987b | Seq. ID No. 4167 | Seq. ID No. 4168 | Cyto | |
| 1989a | Seq. ID No. 4169 | Seq. ID No. 4170 | Cyto | |
| 1989b | Seq. ID No. 4171 | Seq. ID No. 4172 | Cyto | |
| 1989c | Seq. ID No. 4173 | Seq. ID No. 4174 | Cyto | |
| 1990a | Seq. ID No. 4175 | Seq. ID No. 4176 | Cyto | |
| 1990b | Seq. ID No. 4177 | Seq. ID No. 4178 | Cyto | |
| 1990c | Seq. ID No. 4179 | Seq. ID No. 4180 | Cyto | |
| 1992a | Seq. ID No. 4183 | Seq. ID No. 4184 | Cyto | |
| 1992b | Seq. ID No. 4185 | Seq. ID No. 4186 | Cyto | |
| 1993a | Seq. ID No. 4187 | Seq. ID No. 4188 | Cyto | |
| 1993b | Seq. ID No. 4189 | Seq. ID No. 4190 | Cyto | |
| 1993c | Seq. ID No. 4191 | Seq. ID No. 4192 | Cyto | |
| 1996 | Seq. ID No. 4193 | Seq. ID No. 4194 | Cyto | 0 |
| 2000 | Seq. ID No. 4195 | Seq. ID No. 4196 | IM | |
| 2001 | Seq. ID No. 4197 | Seq. ID No. 4198 | IM | 0 |
| 2003 | Seq. ID No. 4199 | Seq. ID No. 4200 | Cyto | |
| 2006 | Seq. ID No. 4201 | Seq. ID No. 4202 | Cyto | |
| 2008 | Seq. ID No. 4203 | Seq. ID No. 4204 | IM | 2 |
| 2010 | Seq. ID No. 4205 | Seq. ID No. 4206 | Cyto | |
| 2011a | Seq. ID No. 4207 | Seq. ID No. 4208 | Cyto | 1 |
| 2011b | Seq. ID No. 4209 | Seq. ID No. 4210 | Cyto | 1 |
| 2011c | Seq. ID No. 4211 | Seq. ID No. 4212 | Cyto | 1 |
| 2013a | Seq. ID No. 4213 | Seq. ID No. 4214 | Cyto | |
| 2013b | Seq. ID No. 4215 | Seq. ID No. 4216 | Cyto | |
| 2014c | Seq. ID No. 4217 | Seq. ID No. 4218 | Cyto | |
| 2015 | Seq. ID No. 4219 | Seq. ID No. 4220 | Cyto | |
| 2016e | Seq. ID No. 4229 | Seq. ID No. 4230 | IM | 12 |
| 2016h | Seq. ID No. 4235 | Seq. ID No. 4236 | IM | 13 |
| 2020 | Seq. ID No. 4237 | Seq. ID No. 4238 | IM | 1 |
| 2021 | Seq. ID No. 4239 | Seq. ID No. 4240 | IM | 2 |
| 2023b | Seq. ID No. 4243 | Seq. ID No. 4244 | IM | 7 |
| 2024a | Seq. ID No. 4245 | Seq. ID No. 4246 | Cyto | 1 |
| 2024c | Seq. ID No. 4249 | Seq. ID No. 4250 | IM | 2 |
| 2024d | Seq. ID No. 4251 | Seq. ID No. 4252 | IM | 2 |
| 2027 | Seq. ID No. 4255 | Seq. ID No. 4256 | Cyto | 0 |
| 2033 | Seq. ID No. 4267 | Seq. ID No. 4268 | Cyto | |
| 2036 | Seq. ID No. 4271 | Seq. ID No. 4272 | Cyto | |
| 2037 | Seq. ID No. 4273 | Seq. ID No. 4274 | Cyto | |
| 2040a | Seq. ID No. 4277 | Seq. ID No. 4278 | IM | 3 |
| 2042 | Seq. ID No. 4279 | Seq. ID No. 4280 | IM | 2 |
| 2043b | Seq. ID No. 4281 | Seq. ID No. 4282 | Cyto | |
| 2044 | Seq. ID No. 4283 | Seq. ID No. 4284 | Cyto | 0 |
| 2046a | Seq. ID No. 4289 | Seq. ID No. 4290 | Cyto | |
| 2046b | Seq. ID No. 4291 | Seq. ID No. 4292 | Cyto | |
| 2047a | Seq. ID No. 4293 | Seq. ID No. 4294 | IM | 0 |
| 2047b | Seq. ID No. 4295 | Seq. ID No. 4296 | IM | 0 |
| 2050 | Seq. ID No. 4299 | Seq. ID No. 4300 | Cyto | |
| 2053 | Seq. ID No. 4301 | Seq. ID No. 4302 | Peri | |
| 2054 | Seq. ID No. 4303 | Seq. ID No. 4304 | Cyto | |
| 2055 | Seq. ID No. 4305 | Seq. ID No. 4306 | Cyto | |
| 2057 | Seq. ID No. 4309 | Seq. ID No. 4310 | IM | 0 |
| 2060a | Seq. ID No. 4315 | Seq. ID No. 4316 | Cyto | |
| 2060b | Seq. ID No. 4317 | Seq. ID No. 4318 | Cyto | |
| 2062a | Seq. ID No. 4319 | Seq. ID No. 4320 | Cyto | 0 |
| 2062b | Seq. ID No. 4321 | Seq. ID No. 4322 | Cyto | 0 |
| 2062c | Seq. ID No. 4323 | Seq. ID No. 4324 | Cyto | 0 |
| 2064 | Seq. ID No. 4325 | Seq. ID No. 4326 | Cyto | |
| 2065a | Seq. ID No. 4327 | Seq. ID No. 4328 | Cyto | |
| 2065b | Seq. ID No. 4329 | Seq. ID No. 4330 | Cyto | |
| 2066 | Seq. ID No. 4331 | Seq. ID No. 4332 | IM | |
| 2068 | Seq. ID No. 4333 | Seq. ID No. 4334 | Cyto | |
| 2069a | Seq. ID No. 4335 | Seq. ID No. 4336 | Cyto | |
| 2069b | Seq. ID No. 4337 | Seq. ID No. 4338 | Cyto | |
| 2069c | Seq. ID No. 4339 | Seq. ID No. 4340 | Cyto | |
| 2074a | Seq. ID No. 4341 | Seq. ID No. 4342 | Cyto | |
| 2075a | Seq. ID No. 4345 | Seq. ID No. 4346 | Cyto | |
| 2075b | Seq. ID No. 4347 | Seq. ID No. 4348 | Cyto | |
| 2076a | Seq. ID No. 4349 | Seq. ID No. 4350 | Cyto | |
| 2076b | Seq. ID No. 4351 | Seq. ID No. 4352 | IM | |
| 2076c | Seq. ID No. 4353 | Seq. ID No. 4354 | IM | |
| 2078 | Seq. ID No. 4355 | Seq. ID No. 4356 | IM | 1 |
| 2079a | Seq. ID No. 4357 | Seq. ID No. 4358 | IM | 1 |
| 2079b | Seq. ID No. 4359 | Seq. ID No. 4360 | IM | 1 |
| 2079c | Seq. ID No. 4361 | Seq. ID No. 4362 | IM | 1 |
| 2081a | Seq. ID No. 4363 | Seq. ID No. 4364 | Cyto | |
| 2081b | Seq. ID No. 4365 | Seq. ID No. 4366 | Cyto | |
| 2086a | Seq. ID No. 4367 | Seq. ID No. 4368 | Cyto | |
| 2086b | Seq. ID No. 4369 | Seq. ID No. 4370 | Cyto | |
| 2087a | Seq. ID No. 4371 | Seq. ID No. 4372 | Cyto | |
| 2087b | Seq. ID No. 4373 | Seq. ID No. 4374 | Cyto | |
| 2088 | Seq. ID No. 4375 | Seq. ID No. 4376 | IM | 1 |
| 2091 | Seq. ID No. 4377 | Seq. ID No. 4378 | Cyto | |
| 2093a | Seq. ID No. 4381 | Seq. ID No. 4382 | Cyto | |
| 2094 | Seq. ID No. 4383 | Seq. ID No. 4384 | Cyto | |
| 2096b | Seq. ID No. 4387 | Seq. ID No. 4388 | IM | 9 |
| 2097 | Seq. ID No. 4393 | Seq. ID No. 4394 | Cyto | 0 |
| 2098b | Seq. ID No. 4395 | Seq. ID No. 4396 | IM | 1 |
| 2100 | Seq. ID No. 4397 | Seq. ID No. 4398 | Cyto | 1 |
| 2104 | Seq. ID No. 4401 | Seq. ID No. 4402 | IM | 1 |
| 2107a | Seq. ID No. 4405 | Seq. ID No. 4406 | Cyto | 0 |
| 2107b | Seq. ID No. 4407 | Seq. ID No. 4408 | Cyto | 0 |
| 2109a | Seq. ID No. 4409 | Seq. ID No. 4410 | Cyto | |
| 2109b | Seq. ID No. 4411 | Seq. ID No. 4412 | Cyto | |
| 2110a | Seq. ID No. 4413 | Seq. ID No. 4414 | Cyto | 1 |
| 2110b | Seq. ID No. 4415 | Seq. ID No. 4416 | Cyto | 1 |
| 2110c | Seq. ID No. 4417 | Seq. ID No. 4418 | Cyto | 1 |
| 2112a | Seq. ID No. 4419 | Seq. ID No. 4420 | Cyto | 1 |
| 2112b | Seq. ID No. 4421 | Seq. ID No. 4422 | Cyto | 1 |
| 2112c | Seq. ID No. 4423 | Seq. ID No. 4424 | IM | 1 |
| 2114b | Seq. ID No. 4425 | Seq. ID No. 4426 | IM | 1 |
| 2115a | Seq. ID No. 4427 | Seq. ID No. 4428 | Cyto | |
| 2115b | Seq. ID No. 4429 | Seq. ID No. 4430 | Cyto | |
| 2115c | Seq. ID No. 4431 | Seq. ID No. 4432 | IM | |
| 2116 | Seq. ID No. 4433 | Seq. ID No. 4434 | Cyto | |
| 2117 | Seq. ID No. 4435 | Seq. ID No. 4436 | Cyto | 0 |
| 2123 | Seq. ID No. 4443 | Seq. ID No. 4444 | Cyto | |
| 2124a | Seq. ID No. 4445 | Seq. ID No. 4446 | Cyto | |
| 2124b | Seq. ID No. 4447 | Seq. ID No. 4448 | Cyto | |
| 2125a | Seq. ID No. 4449 | Seq. ID No. 4450 | Cyto | |
| 2125b | Seq. ID No. 4451 | Seq. ID No. 4452 | Cyto | |
| 2127a | Seq. ID No. 4453 | Seq. ID No. 4454 | IM | 1 |
| 2127b | Seq. ID No. 4455 | Seq. ID No. 4456 | IM | 1 |
| 2128a | Seq. ID No. 4457 | Seq. ID No. 4458 | Cyto | |
| 2128b | Seq. ID No. 4459 | Seq. ID No. 4460 | Cyto | |
| 2133 | Seq. ID No. 4461 | Seq. ID No. 4462 | Cyto | 0 |
| 2138a | Seq. ID No. 4463 | Seq. ID No. 4464 | Cyto | 0 |
| 2138b | Seq. ID No. 4465 | Seq. ID No. 4466 | Cyto | 0 |
| 2138c | Seq. ID No. 4467 | Seq. ID No. 4468 | Cyto | 0 |
| 2140b | Seq. ID No. 4471 | Seq. ID No. 4472 | IM | 5 |
| 2142b | Seq. ID No. 4475 | Seq. ID No. 4476 | IM | 7 |
| 2144a | Seq. ID No. 4477 | Seq. ID No. 4478 | Cyto | |
| 2144b | Seq. ID No. 4479 | Seq. ID No. 4480 | Cyto | |
| 2147c | Seq. ID No. 4487 | Seq. ID No. 4488 | IM | 5 |
| 2149a | Seq. ID No. 4489 | Seq. ID No. 4490 | Cyto | |
| 2149b | Seq. ID No. 4491 | Seq. ID No. 4492 | Cyto | |
| 2152a | Seq. ID No. 4499 | Seq. ID No. 4500 | Cyto | |
| 2153 | Seq. ID No. 4501 | Seq. ID No. 4502 | Cyto | |
| 2155a | Seq. ID No. 4503 | Seq. ID No. 4504 | Cyto | 0 |
| 2155b | Seq. ID No. 4505 | Seq. ID No. 4506 | Cyto | 0 |
| 2156a | Seq. ID No. 4507 | Seq. ID No. 4508 | Cyto | |
| 2156b | Seq. ID No. 4509 | Seq. ID No. 4510 | Cyto | |
| 2156c | Seq. ID No. 4511 | Seq. ID No. 4512 | Cyto | |
| 2160a | Seq. ID No. 4517 | Seq. ID No. 4518 | Cyto | |
| 2160b | Seq. ID No. 4519 | Seq. ID No. 4520 | Cyto | |
| 2160c | Seq. ID No. 4521 | Seq. ID No. 4522 | Cyto | |
| 2160d | Seq. ID No. 4523 | Seq. ID No. 4524 | Cyto | |
| 2161a | Seq. ID No. 4525 | Seq. ID No. 4526 | Cyto | 1 |
| 2164 | Seq. ID No. 4531 | Seq. ID No. 4532 | IM | 0 |
| 2166a | Seq. ID No. 4535 | Seq. ID No. 4536 | Cyto | 1 |
| 2166b | Seq. ID No. 4537 | Seq. ID No. 4538 | Cyto | 2 |
| 2169 | Seq. ID No. 4539 | Seq. ID No. 4540 | Cyto | |
| 2171 | Seq. ID No. 4541 | Seq. ID No. 4542 | Cyto | 0 |
| 2172 | Seq. ID No. 4543 | Seq. ID No. 4544 | Cyto | |
| 2173a | Seq. ID No. 4545 | Seq. ID No. 4546 | Cyto | 0 |
| 2173b | Seq. ID No. 4547 | Seq. ID No. 4548 | Cyto | 0 |
| 2174 | Seq. ID No. 4549 | Seq. ID No. 4550 | IM | 0 |
| 2175 | Seq. ID No. 4551 | Seq. ID No. 4552 | IM | 2 |
| 2176a | Seq. ID No. 4553 | Seq. ID No. 4554 | Cyto | 0 |
| 2176b | Seq. ID No. 4555 | Seq. ID No. 4556 | IM | 1 |
| 2176c | Seq. ID No. 4557 | Seq. ID No. 4558 | Cyto | 1 |
| 2176d | Seq. ID No. 4559 | Seq. ID No. 4560 | Cyto | 1 |
| 2177b | Seq. ID No. 4561 | Seq. ID No. 4562 | IM | 1 |
| 2179a | Seq. ID No. 4563 | Seq. ID No. 4564 | Cyto | 0 |
| 2179b | Seq. ID No. 4565 | Seq. ID No. 4566 | Cyto | 0 |
| 2180 | Seq. ID No. 4567 | Seq. ID No. 4568 | Cyto | 0 |
| 2181a | Seq. ID No. 4569 | Seq. ID No. 4570 | Cyto | 0 |
| 2181b | Seq. ID No. 4571 | Seq. ID No. 4572 | Cyto | 0 |
| 2182 | Seq. ID No. 4573 | Seq. ID No. 4574 | IM | 1 |
| 2183 | Seq. ID No. 4575 | Seq. ID No. 4576 | Cyto | |
| 2185 | Seq. ID No. 4577 | Seq. ID No. 4578 | Cyto | |
| 2186a | Seq. ID No. 4579 | Seq. ID No. 4580 | Cyto | |
| 2186b | Seq. ID No. 4581 | Seq. ID No. 4582 | Cyto | |
| 2189a | Seq. ID No. 4583 | Seq. ID No. 4584 | Cyto | |
| 2189b | Seq. ID No. 4585 | Seq. ID No. 4586 | Cyto | |
| 2193 | Seq. ID No. 4591 | Seq. ID No. 4592 | Cyto | |
| 2194a | Seq. ID No. 4593 | Seq. ID No. 4594 | Cyto | |
| 2194c | Seq. ID No. 4595 | Seq. ID No. 4596 | Cyto | |
| 2196 | Seq. ID No. 4597 | Seq. ID No. 4598 | Cyto | |
| 2197a | Seq. ID No. 4599 | Seq. ID No. 4600 | Cyto | |
| 2197b | Seq. ID No. 4601 | Seq. ID No. 4602 | Cyto | |
| 2197c | Seq. ID No. 4603 | Seq. ID No. 4604 | Cyto | |
| 2201a | Seq. ID No. 4605 | Seq. ID No. 4606 | Cyto | 0 |
| 2201b | Seq. ID No. 4607 | Seq. ID No. 4608 | Cyto | 0 |
| 2203 | Seq. ID No. 4609 | Seq. ID No. 4610 | Cyto | |
| 2204 | Seq. ID No. 4611 | Seq. ID No. 4612 | Cyto | 0 |
| 2206a | Seq. ID No. 4613 | Seq. ID No. 4614 | Cyto | |
| 2206b | Seq. ID No. 4615 | Seq. ID No. 4616 | Cyto | |
| 2208a | Seq. ID No. 4617 | Seq. ID No. 4618 | Cyto | 0 |
| 2208b | Seq. ID No. 4619 | Seq. ID No. 4620 | Cyto | 0 |
| 2208c | Seq. ID No. 4621 | Seq. ID No. 4622 | Cyto | 0 |
| 2209 | Seq. ID No. 4623 | Seq. ID No. 4624 | Cyto | |
| 2212a | Seq. ID No. 4625 | Seq. ID No. 4626 | IM | 1 |
| 2212b | Seq. ID No. 4627 | Seq. ID No. 4628 | IM | 1 |
| 2215a | Seq. ID No. 4629 | Seq. ID No. 4630 | Cyto | 0 |
| 2215b | Seq. ID No. 4631 | Seq. ID No. 4632 | Cyto | 0 |
| 2216a | Seq. ID No. 4633 | Seq. ID No. 4634 | Cyto | |
| 2216b | Seq. ID No. 4635 | Seq. ID No. 4636 | Cyto | |
| 2218 | Seq. ID No. 4637 | Seq. ID No. 4638 | Cyto | 1 |
| 2220a | Seq. ID No. 4645 | Seq. ID No. 4646 | Cyto | |
| 2220b | Seq. ID No. 4647 | Seq. ID No. 4648 | Cyto | |
| 2220c | Seq. ID No. 4649 | Seq. ID No. 4650 | Cyto | |
| 2221 | Seq. ID No. 4651 | Seq. ID No. 4652 | Cyto | |
| 2222 | Seq. ID No. 4653 | Seq. ID No. 4654 | Cyto | 0 |
| 2223a | Seq. ID No. 4655 | Seq. ID No. 4656 | Cyto | |
| 2223b | Seq. ID No. 4657 | Seq. ID No. 4658 | Cyto | |
| 2226 | Seq. ID No. 4661 | Seq. ID No. 4662 | Cyto | 0 |
| 2227 | Seq. ID No. 4663 | Seq. ID No. 4664 | Cyto | |
| 2228a | Seq. ID No. 4665 | Seq. ID No. 4666 | Cyto | |
| 2228b | Seq. ID No. 4667 | Seq. ID No. 4668 | Cyto | |
| 2228c | Seq. ID No. 4669 | Seq. ID No. 4670 | Cyto | |
| 2231 | Seq. ID No. 4671 | Seq. ID No. 4672 | Cyto | |
| 2232 | Seq. ID No. 4673 | Seq. ID No. 4674 | Cyto | |
| 2234a | Seq. ID No. 4675 | Seq. ID No. 4676 | IM | 1 |
| 2234b | Seq. ID No. 4677 | Seq. ID No. 4678 | IM | 1 |
| 2234c | Seq. ID No. 4679 | Seq. ID No. 4680 | IM | 1 |
| 2236b | Seq. ID No. 4683 | Seq. ID No. 4684 | IM | 4 |
| 2238 | Seq. ID No. 4685 | Seq. ID No. 4686 | Cyto | |
| 2240a | Seq. ID No. 4689 | Seq. ID No. 4690 | Cyto | 0 |
| 2240b | Seq. ID No. 4691 | Seq. ID No. 4692 | Cyto | 1 |
| 2240c | Seq. ID No. 4693 | Seq. ID No. 4694 | Cyto | 1 |
| 2244 | Seq. ID No. 4697 | Seq. ID No. 4698 | Cyto | |
| 2245 | Seq. ID No. 4699 | Seq. ID No. 4700 | OM | 1 |
| 2246 | Seq. ID No. 4701 | Seq. ID No. 4702 | IM | |
| 2248 | Seq. ID No. 4703 | Seq. ID No. 4704 | Cyto | |
| 2253d | Seq. ID No. 4713 | Seq. ID No. 4714 | IM | 7 |
| 2256 | Seq. ID No. 4719 | Seq. ID No. 4720 | Cyto | |
| 2257 | Seq. ID No. 4721 | Seq. ID No. 4722 | IM | 0 |
| 2259a | Seq. ID No. 4723 | Seq. ID No. 4724 | Cyto | |
| 2259b | Seq. ID No. 4725 | Seq. ID No. 4726 | Cyto | |
| 2260b | Seq. ID No. 4727 | Seq. ID No. 4728 | IM | |
| 2260c | Seq. ID No. 4729 | Seq. ID No. 4730 | IM | |
| 2262 | Seq. ID No. 4731 | Seq. ID No. 4732 | Cyto | |
| 2263 | Seq. ID No. 4733 | Seq. ID No. 4734 | Cyto | 1 |
| 2264a | Seq. ID No. 4735 | Seq. ID No. 4736 | Peri | 1 |
| 2267 | Seq. ID No. 4739 | Seq. ID No. 4740 | Cyto | 0 |
| 2268 | Seq. ID No. 4741 | Seq. ID No. 4742 | Cyto | 0 |
| 2269 | Seq. ID No. 4743 | Seq. ID No. 4744 | Cyto | |
| 2270 | Seq. ID No. 4745 | Seq. ID No. 4746 | IM | 1 |
| 2272 | Seq. ID No. 4747 | Seq. ID No. 4748 | Cyto | 1 |
| 2273 | Seq. ID No. 4749 | Seq. ID No. 4750 | Cyto | |
| 2274 | Seq. ID No. 4751 | Seq. ID No. 4752 | Cyto | |
| 2275a | Seq. ID No. 4753 | Seq. ID No. 4754 | IM | 1 |
| 2275b | Seq. ID No. 4755 | Seq. ID No. 4756 | IM | 1 |
| 2275c | Seq. ID No. 4757 | Seq. ID No. 4758 | IM | 1 |
| 2276b | Seq. ID No. 4761 | Seq. ID No. 4762 | Cyto | 1 |
| 2276c | Seq. ID No. 4763 | Seq. ID No. 4764 | Cyto | 1 |
| 2276d | Seq. ID No. 4765 | Seq. ID No. 4766 | Cyto | 1 |
| 2277a | Seq. ID No. 4767 | Seq. ID No. 4768 | Cyto | 1 |
| 2277b | Seq. ID No. 4769 | Seq. ID No. 4770 | Cyto | 1 |
| 2278a | Seq. ID No. 4771 | Seq. ID No. 4772 | Cyto | |
| 2278b | Seq. ID No. 4773 | Seq. ID No. 4774 | Cyto | |
| 2278c | Seq. ID No. 4775 | Seq. ID No. 4776 | Cyto | 0 |
| 2278d | Seq. ID No. 4777 | Seq. ID No. 4778 | Cyto | 0 |
| 2280 | Seq. ID No. 4779 | Seq. ID No. 4780 | Cyto | |
| 2284 | Seq. ID No. 4781 | Seq. ID No. 4782 | Cyto | 0 |
| 2285 | Seq. ID No. 4783 | Seq. ID No. 4784 | Cyto | |
| 2286a | Seq. ID No. 4785 | Seq. ID No. 4786 | Cyto | |
| 2286b | Seq. ID No. 4787 | Seq. ID No. 4788 | Cyto | |
| 2288 | Seq. ID No. 4789 | Seq. ID No. 4790 | Peri | 1 |
| 2290 | Seq. ID No. 4791 | Seq. ID No. 4792 | Cyto | |
| 2291a | Seq. ID No. 4793 | Seq. ID No. 4794 | Cyto | |
| 2291b | Seq. ID No. 4795 | Seq. ID No. 4796 | Cyto | |
| 2291c | Seq. ID No. 4797 | Seq. ID No. 4798 | Cyto | |
| 2292a | Seq. ID No. 4799 | Seq. ID No. 4800 | Cyto | 0 |
| 2292b | Seq. ID No. 4801 | Seq. ID No. 4802 | Cyto | 0 |
| 2292c | Seq. ID No. 4803 | Seq. ID No. 4804 | Cyto | 0 |
| 2294 | Seq. ID No. 4805 | Seq. ID No. 4806 | Cyto | |
| 2297 | Seq. ID No. 4807 | Seq. ID No. 4808 | Cyto | |
| 2298 | Seq. ID No. 4809 | Seq. ID No. 4810 | Cyto | |
| 2299 | Seq. ID No. 4811 | Seq. ID No. 4812 | Cyto | |
| 2301 | Seq. ID No. 4815 | Seq. ID No. 4816 | IM | 7 |
| 2302 | Seq. ID No. 4817 | Seq. ID No. 4818 | IM | 1 |
| 2303 | Seq. ID No. 4819 | Seq. ID No. 4820 | IM | 1 |
| 2304 | Seq. ID No. 4821 | Seq. ID No. 4822 | Cyto | |
| 2306c | Seq. ID No. 4823 | Seq. ID No. 4824 | Cyto | |
| 2307 | Seq. ID No. 4825 | Seq. ID No. 4826 | IM | 4 |
| 2309a | Seq. ID No. 4829 | Seq. ID No. 4830 | IM | 2 |
| 2309b | Seq. ID No. 4831 | Seq. ID No. 4832 | IM | 2 |
| 2309c | Seq. ID No. 4833 | Seq. ID No. 4834 | IM | 2 |
| 2310 | Seq. ID No. 4835 | Seq. ID No. 4836 | IM | 2 |
| 2311 | Seq. ID No. 4837 | Seq. ID No. 4838 | Cyto | |
| 2312a | Seq. ID No. 4839 | Seq. ID No. 4840 | Cyto | |
| 2312b | Seq. ID No. 4841 | Seq. ID No. 4842 | Cyto | |
| 2312c | Seq. ID No. 4843 | Seq. ID No. 4844 | Cyto | |
| 2314 | Seq. ID No. 4845 | Seq. ID No. 4846 | Cyto | 0 |
| 2315 | Seq. ID No. 4847 | Seq. ID No. 4848 | Cyto | |
| 2316 | Seq. ID No. 4849 | Seq. ID No. 4850 | Cyto | 1 |
| 2317 | Seq. ID No. 4851 | Seq. ID No. 4852 | IM | 2 |
| 2321a | Seq. ID No. 4855 | Seq. ID No. 4856 | Cyto | |
| 2321b | Seq. ID No. 4857 | Seq. ID No. 4858 | Cyto | |
| 2321c | Seq. ID No. 4859 | Seq. ID No. 4860 | Cyto | |
| 2322 | Seq. ID No. 4861 | Seq. ID No. 4862 | IM | 0 |
| 2327 | Seq. ID No. 4865 | Seq. ID No. 4866 | Cyto | |
| 2328 | Seq. ID No. 4867 | Seq. ID No. 4868 | Cyto | |
| 2330 | Seq. ID No. 4877 | Seq. ID No. 4878 | Cyto | |
| 2331 | Seq. ID No. 4879 | Seq. ID No. 4880 | IM | 1 |
| 2333 | Seq. ID No. 4881 | Seq. ID No. 4882 | Cyto | |
| 2335 | Seq. ID No. 4883 | Seq. ID No. 4884 | Cyto | |
| 2336 | Seq. ID No. 4885 | Seq. ID No. 4886 | Cyto | |
| 2337b | Seq. ID No. 4887 | Seq. ID No. 4888 | Cyto | |
| 2338a | Seq. ID No. 4889 | Seq. ID No. 4890 | Cyto | |
| 2338b | Seq. ID No. 4891 | Seq. ID No. 4892 | Cyto | |
| 2338c | Seq. ID No. 4893 | Seq. ID No. 4894 | Cyto | |
| 2342a | Seq. ID No. 4895 | Seq. ID No. 4896 | Cyto | |
| 2342b | Seq. ID No. 4897 | Seq. ID No. 4898 | Cyto | |
| 2342c | Seq. ID No. 4899 | Seq. ID No. 4900 | Cyto | |
| 2344 | Seq. ID No. 4901 | Seq. ID No. 4902 | IM | 0 |
| 2345 | Seq. ID No. 4903 | Seq. ID No. 4904 | Cyto | 0 |
| 2347 | Seq. ID No. 4905 | Seq. ID No. 4906 | Cyto | 1 |
| 2348 | Seq. ID No. 4907 | Seq. ID No. 4908 | Cyto | 0 |
| 2349a | Seq. ID No. 4909 | Seq. ID No. 4910 | Cyto | |
| 2349b | Seq. ID No. 4911 | Seq. ID No. 4912 | Cyto | |
| 2350a | Seq. ID No. 4913 | Seq. ID No. 4914 | Cyto | |
| 2353 | Seq. ID No. 4915 | Seq. ID No. 4916 | Cyto | |
| 2354 | Seq. ID No. 4917 | Seq. ID No. 4918 | Cyto | |
| 2361a | Seq. ID No. 4925 | Seq. ID No. 4926 | Cyto | |
| 2361b | Seq. ID No. 4927 | Seq. ID No. 4928 | Cyto | |
| 2365a | Seq. ID No. 4933 | Seq. ID No. 4934 | Cyto | 0 |
| 2365b | Seq. ID No. 4935 | Seq. ID No. 4936 | Cyto | 0 |
| 2366a | Seq. ID No. 4937 | Seq. ID No. 4938 | Cyto | |
| 2366b | Seq. ID No. 4939 | Seq. ID No. 4940 | Cyto | |
| 2367 | Seq. ID No. 4941 | Seq. ID No. 4942 | Cyto | |
| 2368 | Seq. ID No. 4943 | Seq. ID No. 4944 | Cyto | |
| 2369 | Seq. ID No. 4945 | Seq. ID No. 4946 | Cyto | |
| 2370 | Seq. ID No. 4947 | Seq. ID No. 4948 | IM | 1 |
| 2373 | Seq. ID No. 4953 | Seq. ID No. 4954 | Cyto | |
| 2374a | Seq. ID No. 4955 | Seq. ID No. 4956 | Cyto | 0 |
| 2374b | Seq. ID No. 4957 | Seq. ID No. 4958 | Cyto | 0 |
| 2376 | Seq. ID No. 4959 | Seq. ID No. 4960 | IM | |
| 2377a | Seq. ID No. 4961 | Seq. ID No. 4962 | Cyto | |
| 2377b | Seq. ID No. 4963 | Seq. ID No. 4964 | IM | 1 |
| 2378 | Seq. ID No. 4965 | Seq. ID No. 4966 | Cyto | |
| 2379a | Seq. ID No. 4967 | Seq. ID No. 4968 | Cyto | |
| 2379b | Seq. ID No. 4969 | Seq. ID No. 4970 | Cyto | |
| 2380 | Seq. ID No. 4971 | Seq. ID No. 4972 | Cyto | |
| 2381 | Seq. ID No. 4973 | Seq. ID No. 4974 | Cyto | |
| 2384a | Seq. ID No. 4977 | Seq. ID No. 4978 | Cyto | 0 |
| 2384b | Seq. ID No. 4979 | Seq. ID No. 4980 | Cyto | 0 |
| 2386b | Seq. ID No. 4981 | Seq. ID No. 4982 | IM | 0 |
| 2386c | Seq. ID No. 4983 | Seq. ID No. 4984 | IM | 0 |
| 2387 | Seq. ID No. 4985 | Seq. ID No. 4986 | IM | 5 |
| 2391 | Seq. ID No. 4989 | Seq. ID No. 4990 | IM | 0 |
| 2392 | Seq. ID No. 4991 | Seq. ID No. 4992 | Cyto | 1 |
| 2394 | Seq. ID No. 4993 | Seq. ID No. 4994 | IM | 1 |
| 2395 | Seq. ID No. 4995 | Seq. ID No. 4996 | IM | |
| 2396 | Seq. ID No. 4997 | Seq. ID No. 4998 | Cyto | 0 |
| 2398 | Seq. ID No. 5001 | Seq. ID No. 5002 | Cyto | |
| 2399a | Seq. ID No. 5003 | Seq. ID No. 5004 | Cyto | |
| 2399b | Seq. ID No. 5005 | Seq. ID No. 5006 | Cyto | |
| 2399c | Seq. ID No. 5007 | Seq. ID No. 5008 | Cyto | |
| 2401 | Seq. ID No. 5009 | Seq. ID No. 5010 | Cyto | |
| 2402a | Seq. ID No. 5011 | Seq. ID No. 5012 | IM | 1 |
| 2403a | Seq. ID No. 5015 | Seq. ID No. 5016 | Cyto | 0 |
| 2403b | Seq. ID No. 5017 | Seq. ID No. 5018 | Cyto | 0 |
| 2404a | Seq. ID No. 5019 | Seq. ID No. 5020 | Cyto | 0 |
| 2404b | Seq. ID No. 5021 | Seq. ID No. 5022 | Cyto | 0 |
| 2407a | Seq. ID No. 5023 | Seq. ID No. 5024 | IM | 0 |
| 2409a | Seq. ID No. 5025 | Seq. ID No. 5026 | Cyto | |
| 2409b | Seq. ID No. 5027 | Seq. ID No. 5028 | Cyto | |
| 2410 | Seq. ID No. 5029 | Seq. ID No. 5030 | Cyto | 0 |
| 2413a | Seq. ID No. 5033 | Seq. ID No. 5034 | Cyto | 0 |
| 2413b | Seq. ID No. 5035 | Seq. ID No. 5036 | Peri | 0 |
| 2415a | Seq. ID No. 5037 | Seq. ID No. 5038 | Cyto | |
| 2415b | Seq. ID No. 5039 | Seq. ID No. 5040 | IM | |
| 2416b | Seq. ID No. 5041 | Seq. ID No. 5042 | OM | 1 |
| 2416c | Seq. ID No. 5043 | Seq. ID No. 5044 | IM | 1 |
| 2417a | Seq. ID No. 5045 | Seq. ID No. 5046 | Cyto | 1 |
| 2417b | Seq. ID No. 5047 | Seq. ID No. 5048 | Cyto | 1 |
| 2418a | Seq. ID No. 5049 | Seq. ID No. 5050 | Cyto | |
| 2418b | Seq. ID No. 5051 | Seq. ID No. 5052 | Cyto | |
| 2420 | Seq. ID No. 5053 | Seq. ID No. 5054 | Cyto | 0 |
| 2421 | Seq. ID No. 5055 | Seq. ID No. 5056 | Cyto | |
| 2422b | Seq. ID No. 5057 | Seq. ID No. 5058 | Cyto | |
| 2422c | Seq. ID No. 5059 | Seq. ID No. 5060 | Cyto | |
| 2424a | Seq. ID No. 5065 | Seq. ID No. 5066 | Cyto | 1 |
| 2424b | Seq. ID No. 5067 | Seq. ID No. 5068 | Cyto | 1 |
| 2426 | Seq. ID No. 5071 | Seq. ID No. 5072 | Cyto | |
| 2428a | Seq. ID No. 5073 | Seq. ID No. 5074 | IM | 3 |
| 2428b | Seq. ID No. 5075 | Seq. ID No. 5076 | IM | 3 |
| 2428c | Seq. ID No. 5077 | Seq. ID No. 5078 | IM | 3 |
| 2429 | Seq. ID No. 5079 | Seq. ID No. 5080 | Cyto | |
| 2432 | Seq. ID No. 5081 | Seq. ID No. 5082 | Cyto | 0 |
| 2433 | Seq. ID No. 5083 | Seq. ID No. 5084 | IM | 1 |
| 2440 | Seq. ID No. 5087 | Seq. ID No. 5088 | Cyto | 0 |
| 2442a | Seq. ID No. 5089 | Seq. ID No. 5090 | Cyto | |
| 2442b | Seq. ID No. 5091 | Seq. ID No. 5092 | Cyto | |
| 2443 | Seq. ID No. 5093 | Seq. ID No. 5094 | Cyto | |
| 2444a | Seq. ID No. 5095 | Seq. ID No. 5096 | Cyto | |
| 2444b | Seq. ID No. 5097 | Seq. ID No. 5098 | Cyto | |
| 2444c | Seq. ID No. 5099 | Seq. ID No. 5100 | Cyto | |
| 2444d | Seq. ID No. 5101 | Seq. ID No. 5102 | Cyto | |
| 2448b | Seq. ID No. 5105 | Seq. ID No. 5106 | Cyto | |
| 2449a | Seq. ID No. 5107 | Seq. ID No. 5108 | Cyto | |
| 2449b | Seq. ID No. 5109 | Seq. ID No. 5110 | Cyto | |
| 2451 | Seq. ID No. 5111 | Seq. ID No. 5112 | Cyto | |
| 2452 | Seq. ID No. 5113 | Seq. ID No. 5114 | IM | 0 |
| 2455 | Seq. ID No. 5117 | Seq. ID No. 5118 | Cyto | |
| 2456a | Seq. ID No. 5119 | Seq. ID No. 5120 | IM | 4 |
| 2456b | Seq. ID No. 5121 | Seq. ID No. 5122 | IM | 5 |
| 2456e | Seq. ID No. 5127 | Seq. ID No. 5128 | IM | 9 |
| 2461a | Seq. ID No. 5143 | Seq. ID No. 5144 | Cyto | |
| 2461b | Seq. ID No. 5145 | Seq. ID No. 5146 | Cyto | |
| 2462a | Seq. ID No. 5147 | Seq. ID No. 5148 | Cyto | 0 |
| 2462b | Seq. ID No. 5149 | Seq. ID No. 5150 | Cyto | 0 |
| 2463a | Seq. ID No. 5151 | Seq. ID No. 5152 | IM | 1 |
| 2464 | Seq. ID No. 5153 | Seq. ID No. 5154 | IM | 1 |
| 2465a | Seq. ID No. 5155 | Seq. ID No. 5156 | Cyto | |
| 2465b | Seq. ID No. 5157 | Seq. ID No. 5158 | Cyto | |
| 2468b | Seq. ID No. 5161 | Seq. ID No. 5162 | IM | 1 |
| 2469a | Seq. ID No. 5163 | Seq. ID No. 5164 | Cyto | |
| 2470 | Seq. ID No. 5167 | Seq. ID No. 5168 | Cyto | 0 |
| 2471 | Seq. ID No. 5169 | Seq. ID No. 5170 | Cyto | |
| 2473 | Seq. ID No. 5171 | Seq. ID No. 5172 | Cyto | |
| 2474a | Seq. ID No. 5173 | Seq. ID No. 5174 | IM | 3 |
| 2474c | Seq. ID No. 5177 | Seq. ID No. 5178 | IM | 3 |
| 2475a | Seq. ID No. 5179 | Seq. ID No. 5180 | IM | 1 |
| 2475b | Seq. ID No. 5181 | Seq. ID No. 5182 | IM | 1 |
| 2475c | Seq. ID No. 5183 | Seq. ID No. 5184 | IM | 1 |
| 2477 | Seq. ID No. 5185 | Seq. ID No. 5186 | Cyto | |
| 2480 | Seq. ID No. 5187 | Seq. ID No. 5188 | Cyto | |
| 2481a | Seq. ID No. 5189 | Seq. ID No. 5190 | IM | 0 |
| 2481b | Seq. ID No. 5191 | Seq. ID No. 5192 | IM | 1 |
| 2482 | Seq. ID No. 5193 | Seq. ID No. 5194 | IM | 2 |
| 2483 | Seq. ID No. 5195 | Seq. ID No. 5196 | Cyto | |
| 2485 | Seq. ID No. 5201 | Seq. ID No. 5202 | Cyto | 1 |
| 2489 | Seq. ID No. 5203 | Seq. ID No. 5204 | Cyto | 1 |
| 2492b | Seq. ID No. 5209 | Seq. ID No. 5210 | IM | 1 |
| 2494 | Seq. ID No. 5211 | Seq. ID No. 5212 | IM | 0 |
| 2495b | Seq. ID No. 5215 | Seq. ID No. 5216 | IM | 10 |
| 2497a | Seq. ID No. 5217 | Seq. ID No. 5218 | IM | 1 |
| 2498b | Seq. ID No. 5221 | Seq. ID No. 5222 | IM | 1 |
| 2500b | Seq. ID No. 5225 | Seq. ID No. 5226 | IM | 1 |
| 2500c | Seq. ID No. 5227 | Seq. ID No. 5228 | IM | 1 |
| 2501a | Seq. ID No. 5229 | Seq. ID No. 5230 | Cyto | |
| 2501b | Seq. ID No. 5231 | Seq. ID No. 5232 | Cyto | |
| 2504a | Seq. ID No. 5233 | Seq. ID No. 5234 | Cyto | |
| 2504b | Seq. ID No. 5235 | Seq. ID No. 5236 | Cyto | |
| 2505 | Seq. ID No. 5237 | Seq. ID No. 5238 | IM | 3 |
| 2506 | Seq. ID No. 5239 | Seq. ID No. 5240 | Cyto | |
| 2507b | Seq. ID No. 5241 | Seq. ID No. 5242 | Cyto | |
| 2507c | Seq. ID No. 5243 | Seq. ID No. 5244 | Cyto | |
| 2510 | Seq. ID No. 5245 | Seq. ID No. 5246 | Cyto | |
| 2512c | Seq. ID No. 5247 | Seq. ID No. 5248 | IM | |
| 2513a | Seq. ID No. 5249 | Seq. ID No. 5250 | Cyto | |
| 2513b | Seq. ID No. 5251 | Seq. ID No. 5252 | Cyto | |
| 2513c | Seq. ID No. 5253 | Seq. ID No. 5254 | Cyto | |
| 2514 | Seq. ID No. 5255 | Seq. ID No. 5256 | Cyto | |
| 2515 | Seq. ID No. 5257 | Seq. ID No. 5258 | Cyto | |
| 2516a | Seq. ID No. 5259 | Seq. ID No. 5260 | Cyto | |
| 2516b | Seq. ID No. 5261 | Seq. ID No. 5262 | Cyto | |
| 2517a | Seq. ID No. 5263 | Seq. ID No. 5264 | Cyto | |
| 2517b | Seq. ID No. 5265 | Seq. ID No. 5266 | Cyto | |
| 2519a | Seq. ID No. 5269 | Seq. ID No. 5270 | Cyto | |
| 2519b | Seq. ID No. 5271 | Seq. ID No. 5272 | Cyto | 0 |
| 2523 | Seq. ID No. 5283 | Seq. ID No. 5284 | Cyto | 0 |
| 2525b | Seq. ID No. 5287 | Seq. ID No. 5288 | IM | 1 |
| 2527a | Seq. ID No. 5289 | Seq. ID No. 5290 | Cyto | |
| 2527b | Seq. ID No. 5291 | Seq. ID No. 5292 | Cyto | |
| 2528a | Seq. ID No. 5293 | Seq. ID No. 5294 | Cyto | 0 |
| 2528b | Seq. ID No. 5295 | Seq. ID No. 5296 | Cyto | 0 |
| 2528c | Seq. ID No. 5297 | Seq. ID No. 5298 | Cyto | 0 |
| 2528d | Seq. ID No. 5299 | Seq. ID No. 5300 | Cyto | 0 |
| 2532b | Seq. ID No. 5301 | Seq. ID No. 5302 | Cyto | 1 |
| 2532c | Seq. ID No. 5303 | Seq. ID No. 5304 | Cyto | 1 |
| 2534 | Seq. ID No. 5305 | Seq. ID No. 5306 | Cyto | |
| 2535a | Seq. ID No. 5307 | Seq. ID No. 5308 | Cyto | |
| 2535b | Seq. ID No. 5309 | Seq. ID No. 5310 | Cyto | |
| 2538 | Seq. ID No. 5311 | Seq. ID No. 5312 | Cyto | |
| 2541 | Seq. ID No. 5313 | Seq. ID No. 5314 | Cyto | |
| 2542a | Seq. ID No. 5315 | Seq. ID No. 5316 | Cyto | |
| 2542b | Seq. ID No. 5317 | Seq. ID No. 5318 | Cyto | 0 |
| 2542c | Seq. ID No. 5319 | Seq. ID No. 5320 | Cyto | 0 |
| 2543 | Seq. ID No. 5321 | Seq. ID No. 5322 | Cyto | 0 |
| 2544 | Seq. ID No. 5323 | Seq. ID No. 5324 | Cyto | 0 |
| 2545 | Seq. ID No. 5325 | Seq. ID No. 5326 | Cyto | |
| 2548a | Seq. ID No. 5333 | Seq. ID No. 5334 | Cyto | 0 |
| 2548b | Seq. ID No. 5335 | Seq. ID No. 5336 | Cyto | 0 |
| 2549 | Seq. ID No. 5337 | Seq. ID No. 5338 | Cyto | 0 |
| 2550b | Seq. ID No. 5339 | Seq. ID No. 5340 | Cyto | |
| 2550e | Seq. ID No. 5343 | Seq. ID No. 5344 | IM | |
| 2552 | Seq. ID No. 5345 | Seq. ID No. 5346 | Cyto | 0 |
| 2553 | Seq. ID No. 5347 | Seq. ID No. 5348 | Cyto | |
| 2554a | Seq. ID No. 5349 | Seq. ID No. 5350 | Cyto | |
| 2554b | Seq. ID No. 5351 | Seq. ID No. 5352 | Cyto | |
| 2555a | Seq. ID No. 5353 | Seq. ID No. 5354 | Cyto | |
| 2555b | Seq. ID No. 5355 | Seq. ID No. 5356 | Cyto | 0 |
| 2555c | Seq. ID No. 5357 | Seq. ID No. 5358 | Cyto | 0 |
| 2555d | Seq. ID No. 5359 | Seq. ID No. 5360 | Cyto | 0 |
| 2558a | Seq. ID No. 5361 | Seq. ID No. 5362 | Cyto | |
| 2558b | Seq. ID No. 5363 | Seq. ID No. 5364 | Cyto | |
| 2559 | Seq. ID No. 5365 | Seq. ID No. 5366 | Cyto | |
| 2561 | Seq. ID No. 5367 | Seq. ID No. 5368 | Cyto | 1 |
| 2562a | Seq. ID No. 5369 | Seq. ID No. 5370 | Cyto | |
| 2562c | Seq. ID No. 5371 | Seq. ID No. 5372 | Cyto | |
| 2563 | Seq. ID No. 5373 | Seq. ID No. 5374 | Cyto | |
| 2564a | Seq. ID No. 5375 | Seq. ID No. 5376 | Cyto | |
| 2564d | Seq. ID No. 5381 | Seq. ID No. 5382 | IM | 1 |
| 2566 | Seq. ID No. 5383 | Seq. ID No. 5384 | IM | |
| 2568 | Seq. ID No. 5389 | Seq. ID No. 5390 | IM | 2 |
| 2572 | Seq. ID No. 5391 | Seq. ID No. 5392 | IM | 0 |
| 2573 | Seq. ID No. 5393 | Seq. ID No. 5394 | Cyto | |
| 2575 | Seq. ID No. 5395 | Seq. ID No. 5396 | Cyto | |
| 2576 | Seq. ID No. 5397 | Seq. ID No. 5398 | Cyto | |
| 2578 | Seq. ID No. 5399 | Seq. ID No. 5400 | Cyto | |
| 2579b | Seq. ID No. 5401 | Seq. ID No. 5402 | IM | |
| 2581 | Seq. ID No. 5403 | Seq. ID No. 5404 | IM | 1 |
| 2582b | Seq. ID No. 5407 | Seq. ID No. 5408 | IM | 4 |
| 2582c | Seq. ID No. 5409 | Seq. ID No. 5410 | IM | 4 |
| 2585 | Seq. ID No. 5411 | Seq. ID No. 5412 | IM | |
| 2588 | Seq. ID No. 5417 | Seq. ID No. 5418 | Cyto | 0 |
| 2589 | Seq. ID No. 5419 | Seq. ID No. 5420 | Cyto | 1 |
| 2591 | Seq. ID No. 5421 | Seq. ID No. 5422 | Cyto | 0 |
| 2592 | Seq. ID No. 5423 | Seq. ID No. 5424 | Cyto | |
| 2593a | Seq. ID No. 5425 | Seq. ID No. 5426 | Cyto | 0 |
| 2593b | Seq. ID No. 5427 | Seq. ID No. 5428 | Cyto | 0 |
| 2594a | Seq. ID No. 5429 | Seq. ID No. 5430 | Cyto | |
| 2594b | Seq. ID No. 5431 | Seq. ID No. 5432 | Cyto | |
| 2597a | Seq. ID No. 5435 | Seq. ID No. 5436 | Cyto | |
| 2597b | Seq. ID No. 5437 | Seq. ID No. 5438 | Cyto | |
| 2597c | Seq. ID No. 5439 | Seq. ID No. 5440 | Cyto | |
| 2598 | Seq. ID No. 5441 | Seq. ID No. 5442 | Cyto | 0 |
| 2602 | Seq. ID No. 5443 | Seq. ID No. 5444 | Cyto | 0 |
| 2605a | Seq. ID No. 5445 | Seq. ID No. 5446 | Cyto | |
| 2605b | Seq. ID No. 5447 | Seq. ID No. 5448 | Cyto | |
| 2606 | Seq. ID No. 5449 | Seq. ID No. 5450 | Cyto | |
| 2608 | Seq. ID No. 5451 | Seq. ID No. 5452 | Cyto | |
| 2611 | Seq. ID No. 5455 | Seq. ID No. 5456 | Cyto | |
| 2613 | Seq. ID No. 5457 | Seq. ID No. 5458 | Cyto | 0 |
| 2616e | Seq. ID No. 5467 | Seq. ID No. 5468 | IM | 5 |
| 2616f | Seq. ID No. 5469 | Seq. ID No. 5470 | IM | 6 |
| 2616g | Seq. ID No. 5471 | Seq. ID No. 5472 | IM | 7 |
| 2616h | Seq. ID No. 5473 | Seq. ID No. 5474 | IM | 7 |
| 2617a | Seq. ID No. 5475 | Seq. ID No. 5476 | IM | |
| 2617b | Seq. ID No. 5477 | Seq. ID No. 5478 | IM | |
| 2618a | Seq. ID No. 5479 | Seq. ID No. 5480 | IM | |
| 2618b | Seq. ID No. 5481 | Seq. ID No. 5482 | IM | |
| 2619 | Seq. ID No. 5483 | Seq. ID No. 5484 | Cyto | |
| 2620 | Seq. ID No. 5485 | Seq. ID No. 5486 | IM | 0 |
| 2621a | Seq. ID No. 5487 | Seq. ID No. 5488 | IM | 1 |
| 2623a | Seq. ID No. 5489 | Seq. ID No. 5490 | Cyto | |
| 2624a | Seq. ID No. 5493 | Seq. ID No. 5494 | Cyto | 0 |
| 2624b | Seq. ID No. 5495 | Seq. ID No. 5496 | Cyto | 0 |
| 2625b | Seq. ID No. 5499 | Seq. ID No. 5500 | IM | 3 |
| 2626a | Seq. ID No. 5501 | Seq. ID No. 5502 | Cyto | |
| 2626b | Seq. ID No. 5503 | Seq. ID No. 5504 | Cyto | |
| 2627a | Seq. ID No. 5505 | Seq. ID No. 5506 | Cyto | |
| 2627b | Seq. ID No. 5507 | Seq. ID No. 5508 | Cyto | |
| 2629a | Seq. ID No. 5511 | Seq. ID No. 5512 | Cyto | |
| 2633a | Seq. ID No. 5519 | Seq. ID No. 5520 | Cyto | |
| 2633b | Seq. ID No. 5521 | Seq. ID No. 5522 | Cyto | |
| 2633c | Seq. ID No. 5523 | Seq. ID No. 5524 | Cyto | |
| 2633e | Seq. ID No. 5527 | Seq. ID No. 5528 | IM | 1 |
| 2643a | Seq. ID No. 5535 | Seq. ID No. 5536 | Cyto | 1 |
| 2643b | Seq. ID No. 5537 | Seq. ID No. 5538 | IM | 2 |
| 2645 | Seq. ID No. 5539 | Seq. ID No. 5540 | Cyto | |
| 2647 | Seq. ID No. 5541 | Seq. ID No. 5542 | Cyto | |
| 2649 | Seq. ID No. 5547 | Seq. ID No. 5548 | IM | 1 |
| 2650 | Seq. ID No. 5549 | Seq. ID No. 5550 | IM | 3 |
| 2652a | Seq. ID No. 5551 | Seq. ID No. 5552 | Cyto | |
| 2652b | Seq. ID No. 5553 | Seq. ID No. 5554 | Cyto | |
| 2655a | Seq. ID No. 5555 | Seq. ID No. 5556 | Cyto | |
| 2655b | Seq. ID No. 5557 | Seq. ID No. 5558 | IM | 1 |
| 2656 | Seq. ID No. 5559 | Seq. ID No. 5560 | Cyto | 0 |
| 2658a | Seq. ID No. 5561 | Seq. ID No. 5562 | Cyto | 0 |
| 2658b | Seq. ID No. 5563 | Seq. ID No. 5564 | Cyto | 0 |
| 2659a | Seq. ID No. 5565 | Seq. ID No. 5566 | IM | 3 |
| 2659b | Seq. ID No. 5567 | Seq. ID No. 5568 | IM | 4 |
| 2662 | Seq. ID No. 5571 | Seq. ID No. 5572 | Cyto | |
| 2664a | Seq. ID No. 5573 | Seq. ID No. 5574 | Cyto | |
| 2664b | Seq. ID No. 5575 | Seq. ID No. 5576 | Cyto | |
| 2665 | Seq. ID No. 5577 | Seq. ID No. 5578 | IM | 1 |
| 2666a | Seq. ID No. 5579 | Seq. ID No. 5580 | Cyto | 0 |
| 2666b | Seq. ID No. 5581 | Seq. ID No. 5582 | Cyto | 0 |
| 2667a | Seq. ID No. 5583 | Seq. ID No. 5584 | IM | |
| 2667b | Seq. ID No. 5585 | Seq. ID No. 5586 | IM | |
| 2674b | Seq. ID No. 5599 | Seq. ID No. 5600 | IM | 11 |
| 2676 | Seq. ID No. 5601 | Seq. ID No. 5602 | Cyto | 0 |
| 2677a | Seq. ID No. 5603 | Seq. ID No. 5604 | IM | 1 |
| 2677b | Seq. ID No. 5605 | Seq. ID No. 5606 | IM | 1 |
| 2677c | Seq. ID No. 5607 | Seq. ID No. 5608 | IM | 1 |
| 2679c | Seq. ID No. 5613 | Seq. ID No. 5614 | IM | 5 |
| 2679d | Seq. ID No. 5615 | Seq. ID No. 5616 | IM | 5 |
| 2680a | Seq. ID No. 5617 | Seq. ID No. 5618 | Cyto | |
| 2680b | Seq. ID No. 5619 | Seq. ID No. 5620 | Cyto | |
| 2684a | Seq. ID No. 5627 | Seq. ID No. 5628 | IM | 0 |
| 2684b | Seq. ID No. 5629 | Seq. ID No. 5630 | IM | 0 |
| 2686 | Seq. ID No. 5631 | Seq. ID No. 5632 | Cyto | 0 |
| 2688b | Seq. ID No. 5635 | Seq. ID No. 5636 | IM | 4 |
| 2690b | Seq. ID No. 5645 | Seq. ID No. 5646 | IM | 1 |
| 2690c | Seq. ID No. 5647 | Seq. ID No. 5648 | IM | 1 |
| 2693 | Seq. ID No. 5651 | Seq. ID No. 5652 | Cyto | |
| 2694a | Seq. ID No. 5653 | Seq. ID No. 5654 | Cyto | 0 |
| 2694b | Seq. ID No. 5655 | Seq. ID No. 5656 | Cyto | 0 |
| 2695 | Seq. ID No. 5657 | Seq. ID No. 5658 | Cyto | 0 |
| 2696b | Seq. ID No. 5661 | Seq. ID No. 5662 | IM | 8 |
| 2705 | Seq. ID No. 5663 | Seq. ID No. 5664 | Cyto | |
| 2709 | Seq. ID No. 5665 | Seq. ID No. 5666 | Cyto | |
| 2712 | Seq. ID No. 5669 | Seq. ID No. 5670 | IM | 1 |
| 2713 | Seq. ID No. 5671 | Seq. ID No. 5672 | Cyto | |
| 2714 | Seq. ID No. 5673 | Seq. ID No. 5674 | Cyto | |
| 2716a | Seq. ID No. 5675 | Seq. ID No. 5676 | Cyto | |
| 2716b | Seq. ID No. 5677 | Seq. ID No. 5678 | Cyto | |
| 2716c | Seq. ID No. 5679 | Seq. ID No. 5680 | Cyto | |
| 2721a | Seq. ID No. 5691 | Seq. ID No. 5692 | Cyto | |
| 2721b | Seq. ID No. 5693 | Seq. ID No. 5694 | IM | 1 |
| 2722a | Seq. ID No. 5695 | Seq. ID No. 5696 | Cyto | 1 |
| 2722b | Seq. ID No. 5697 | Seq. ID No. 5698 | Cyto | 1 |
| 2724 | Seq. ID No. 5701 | Seq. ID No. 5702 | Cyto | |
| 2726 | Seq. ID No. 5707 | Seq. ID No. 5708 | Cyto | |
| 2731a | Seq. ID No. 5713 | Seq. ID No. 5714 | Cyto | |
| 2731b | Seq. ID No. 5715 | Seq. ID No. 5716 | Cyto | |
| 2732 | Seq. ID No. 5717 | Seq. ID No. 5718 | Cyto | |
| 2734b | Seq. ID No. 5721 | Seq. ID No. 5722 | IM | 4 |
| 2734c | Seq. ID No. 5723 | Seq. ID No. 5724 | IM | 5 |
| 2735a | Seq. ID No. 5725 | Seq. ID No. 5726 | Cyto | 2 |
| 2735b | Seq. ID No. 5727 | Seq. ID No. 5728 | Cyto | 2 |
| 2738b | Seq. ID No. 5731 | Seq. ID No. 5732 | IM | 11 |
| 2742a | Seq. ID No. 5737 | Seq. ID No. 5738 | Cyto | |
| 2743a | Seq. ID No. 5741 | Seq. ID No. 5742 | Cyto | 1 |
| 2743b | Seq. ID No. 5743 | Seq. ID No. 5744 | Cyto | 1 |
| 2744 | Seq. ID No. 5745 | Seq. ID No. 5746 | IM | |
| 2745a | Seq. ID No. 5747 | Seq. ID No. 5748 | Cyto | 1 |
| 2745b | Seq. ID No. 5749 | Seq. ID No. 5750 | Cyto | 1 |
| 2746 | Seq. ID No. 5751 | Seq. ID No. 5752 | Cyto | |
| 2747a | Seq. ID No. 5753 | Seq. ID No. 5754 | Cyto | 0 |
| 2747b | Seq. ID No. 5755 | Seq. ID No. 5756 | Cyto | 0 |
| 2748a | Seq. ID No. 5757 | Seq. ID No. 5758 | IM | 10 |
| 2748b | Seq. ID No. 5759 | Seq. ID No. 5760 | IM | 10 |
| 2748c | Seq. ID No. 5761 | Seq. ID No. 5762 | IM | 10 |
| 2749d | Seq. ID No. 5769 | Seq. ID No. 5770 | IM | 9 |
| 2750a | Seq. ID No. 5773 | Seq. ID No. 5774 | Cyto | |
| 2750b | Seq. ID No. 5775 | Seq. ID No. 5776 | Cyto | |
| 2752 | Seq. ID No. 5777 | Seq. ID No. 5778 | Cyto | 0 |
| 2753 | Seq. ID No. 5779 | Seq. ID No. 5780 | Cyto | |
| 2757a | Seq. ID No. 5781 | Seq. ID No. 5782 | IM | 4 |
| 2758b | Seq. ID No. 5787 | Seq. ID No. 5788 | Cyto | 0 |
| 2758c | Seq. ID No. 5789 | Seq. ID No. 5790 | Cyto | 0 |
| 2759a | Seq. ID No. 5793 | Seq. ID No. 5794 | Cyto | 0 |
| 2759b | Seq. ID No. 5795 | Seq. ID No. 5796 | Cyto | 0 |
| 2760b | Seq. ID No. 5799 | Seq. ID No. 5800 | IM | 1 |
| 2760c | Seq. ID No. 5801 | Seq. ID No. 5802 | IM | 1 |
| 2762 | Seq. ID No. 5803 | Seq. ID No. 5804 | Cyto | 0 |
| 2763a | Seq. ID No. 5805 | Seq. ID No. 5806 | IM | 2 |
| 2763b | Seq. ID No. 5807 | Seq. ID No. 5808 | IM | 2 |
| 2763c | Seq. ID No. 5809 | Seq. ID No. 5810 | IM | 2 |
| 2764 | Seq. ID No. 5811 | Seq. ID No. 5812 | IM | |
| 2765b | Seq. ID No. 5813 | Seq. ID No. 5814 | Cyto | 1 |
| 2765c | Seq. ID No. 5815 | Seq. ID No. 5816 | Cyto | 1 |
| 2766a | Seq. ID No. 5817 | Seq. ID No. 5818 | IM | 0 |
| 2766b | Seq. ID No. 5819 | Seq. ID No. 5820 | IM | 0 |
| 2768a | Seq. ID No. 5821 | Seq. ID No. 5822 | IM | 0 |
| 2768b | Seq. ID No. 5823 | Seq. ID No. 5824 | IM | 0 |
| 2768c | Seq. ID No. 5825 | Seq. ID No. 5826 | IM | 0 |
| 2769a | Seq. ID No. 5827 | Seq. ID No. 5828 | IM | 0 |
| 2771a | Seq. ID No. 5831 | Seq. ID No. 5832 | Cyto | |
| 2771b | Seq. ID No. 5833 | Seq. ID No. 5834 | Cyto | |
| 2773 | Seq. ID No. 5835 | Seq. ID No. 5836 | IM | 1 |
| 2774a | Seq. ID No. 5837 | Seq. ID No. 5838 | IM | 2 |
| 2774b | Seq. ID No. 5839 | Seq. ID No. 5840 | IM | 2 |
| 2774c | Seq. ID No. 5841 | Seq. ID No. 5842 | IM | 2 |
| 2776a | Seq. ID No. 5843 | Seq. ID No. 5844 | Cyto | 1 |
| 2776b | Seq. ID No. 5845 | Seq. ID No. 5846 | Cyto | 1 |
| 2777 | Seq. ID No. 5847 | Seq. ID No. 5848 | Cyto | |
| 2778 | Seq. ID No. 5849 | Seq. ID No. 5850 | Cyto | |
| 2779 | Seq. ID No. 5851 | Seq. ID No. 5852 | IM | 1 |
| 2780 | Seq. ID No. 5853 | Seq. ID No. 5854 | Cyto | |
| 2784 | Seq. ID No. 5855 | Seq. ID No. 5856 | Cyto | |
| 2785a | Seq. ID No. 5857 | Seq. ID No. 5858 | Cyto | 1 |
| 2785b | Seq. ID No. 5859 | Seq. ID No. 5860 | Cyto | 1 |
| 2786a | Seq. ID No. 5861 | Seq. ID No. 5862 | IM | 1 |
| 2786b | Seq. ID No. 5863 | Seq. ID No. 5864 | IM | 1 |
| 2786c | Seq. ID No. 5865 | Seq. ID No. 5866 | IM | 1 |
| 2787a | Seq. ID No. 5867 | Seq. ID No. 5868 | Cyto | 1 |
| 2787b | Seq. ID No. 5869 | Seq. ID No. 5870 | Cyto | 1 |
| 2787c | Seq. ID No. 5871 | Seq. ID No. 5872 | Cyto | 1 |
| 2788b | Seq. ID No. 5873 | Seq. ID No. 5874 | Cyto | 1 |
| 2789 | Seq. ID No. 5875 | Seq. ID No. 5876 | Cyto | 0 |
| 2790 | Seq. ID No. 5877 | Seq. ID No. 5878 | Cyto | |
| 2793 | Seq. ID No. 5881 | Seq. ID No. 5882 | Cyto | |
| 2798 | Seq. ID No. 5887 | Seq. ID No. 5888 | IM | 2 |
| 2799b | Seq. ID No. 5891 | Seq. ID No. 5892 | IM | 1 |
| 2804 | Seq. ID No. 5897 | Seq. ID No. 5898 | IM | 0 |
| 2809 | Seq. ID No. 5903 | Seq. ID No. 5904 | Cyto | |
| 2810b | Seq. ID No. 5907 | Seq. ID No. 5908 | IM | 3 |
| 2810d | Seq. ID No. 5911 | Seq. ID No. 5912 | IM | 4 |
| 2812 | Seq. ID No. 5913 | Seq. ID No. 5914 | Cyto | |
| 2814 | Seq. ID No. 5915 | Seq. ID No. 5916 | IM | 1 |
| 2815 | Seq. ID No. 5917 | Seq. ID No. 5918 | Cyto | |
| 2816 | Seq. ID No. 5919 | Seq. ID No. 5920 | Cyto | |
| 2818c | Seq. ID No. 5925 | Seq. ID No. 5926 | IM | 5 |
| 2819 | Seq. ID No. 5931 | Seq. ID No. 5932 | Cyto | |
| 2820 | Seq. ID No. 5933 | Seq. ID No. 5934 | Cyto | |
| 2821a | Seq. ID No. 5935 | Seq. ID No. 5936 | Cyto | |
| 2821b | Seq. ID No. 5937 | Seq. ID No. 5938 | Cyto | |
| 2822b | Seq. ID No. 5941 | Seq. ID No. 5942 | IM | 11 |
| 2823 | Seq. ID No. 5943 | Seq. ID No. 5944 | Cyto | 0 |
| 2824a | Seq. ID No. 5945 | Seq. ID No. 5946 | Cyto | 1 |
| 2824b | Seq. ID No. 5947 | Seq. ID No. 5948 | Cyto | 1 |
| 2829a | Seq. ID No. 5949 | Seq. ID No. 5950 | Cyto | |
| 2829b | Seq. ID No. 5951 | Seq. ID No. 5952 | Cyto | |
| 2831b | Seq. ID No. 5953 | Seq. ID No. 5954 | Cyto | |
| 2832 | Seq. ID No. 5955 | Seq. ID No. 5956 | Cyto | |
| 2833 | Seq. ID No. 5957 | Seq. ID No. 5958 | Cyto | |
| 2834a | Seq. ID No. 5959 | Seq. ID No. 5960 | Cyto | 0 |
| 2834b | Seq. ID No. 5961 | Seq. ID No. 5962 | Cyto | 0 |
| 2837a | Seq. ID No. 5963 | Seq. ID No. 5964 | IM | 2 |
| 2837b | Seq. ID No. 5965 | Seq. ID No. 5966 | IM | 3 |
| 2842a | Seq. ID No. 5967 | Seq. ID No. 5968 | Cyto | |
| 2842b | Seq. ID No. 5969 | Seq. ID No. 5970 | Cyto | |
| 2843a | Seq. ID No. 5971 | Seq. ID No. 5972 | Cyto | |
| 2843b | Seq. ID No. 5973 | Seq. ID No. 5974 | Cyto | |
| 2845 | Seq. ID No. 5975 | Seq. ID No. 5976 | Cyto | |
| 2846a | Seq. ID No. 5977 | Seq. ID No. 5978 | Cyto | |
| 2846b | Seq. ID No. 5979 | Seq. ID No. 5980 | Peri | |
| 2848 | Seq. ID No. 5981 | Seq. ID No. 5982 | Cyto | |
| 2850 | Seq. ID No. 5983 | Seq. ID No. 5984 | Cyto | |
| 2851 | Seq. ID No. 5985 | Seq. ID No. 5986 | Cyto | 0 |
| 2852 | Seq. ID No. 5987 | Seq. ID No. 5988 | IM | 1 |
| 2853 | Seq. ID No. 5989 | Seq. ID No. 5990 | Cyto | |
| 2854a | Seq. ID No. 5991 | Seq. ID No. 5992 | IM | |
| 2854b | Seq. ID No. 5993 | Seq. ID No. 5994 | IM | |
| 2855 | Seq. ID No. 5995 | Seq. ID No. 5996 | Cyto | |
| 2856a | Seq. ID No. 5997 | Seq. ID No. 5998 | IM | 8 |
| 2856b | Seq. ID No. 5999 | Seq. ID No. 6000 | IM | 8 |
| 2856c | Seq. ID No. 6001 | Seq. ID No. 6002 | IM | 8 |
| 2857 | Seq. ID No. 6003 | Seq. ID No. 6004 | Cyto | |
| 2859 | Seq. ID No. 6005 | Seq. ID No. 6006 | Cyto | |
| 2860a | Seq. ID No. 6007 | Seq. ID No. 6008 | Cyto | 0 |
| 2860b | Seq. ID No. 6009 | Seq. ID No. 6010 | Cyto | 0 |
| 2860c | Seq. ID No. 6011 | Seq. ID No. 6012 | Cyto | 0 |
| 2862 | Seq. ID No. 6013 | Seq. ID No. 6014 | Cyto | 2 |
| 2863 | Seq. ID No. 6015 | Seq. ID No. 6016 | Cyto | |
| 2864 | Seq. ID No. 6017 | Seq. ID No. 6018 | Cyto | 2 |
| 2868a | Seq. ID No. 6019 | Seq. ID No. 6020 | Cyto | |
| 2868b | Seq. ID No. 6021 | Seq. ID No. 6022 | IM | |
| 2871 | Seq. ID No. 6029 | Seq. ID No. 6030 | Cyto | |
| 2872 | Seq. ID No. 6031 | Seq. ID No. 6032 | Cyto | |
| 2875 | Seq. ID No. 6033 | Seq. ID No. 6034 | Cyto | 0 |
| 2877 | Seq. ID No. 6035 | Seq. ID No. 6036 | Cyto | |
| 2879a | Seq. ID No. 6037 | Seq. ID No. 6038 | Cyto | 0 |
| 2879b | Seq. ID No. 6039 | Seq. ID No. 6040 | Cyto | 0 |
| 2879c | Seq. ID No. 6041 | Seq. ID No. 6042 | Cyto | 0 |
| 2882 | Seq. ID No. 6045 | Seq. ID No. 6046 | IM | 2 |
| 2883b | Seq. ID No. 6049 | Seq. ID No. 6050 | IM | 7 |
| 2883c | Seq. ID No. 6051 | Seq. ID No. 6052 | IM | 7 |
| 2886a | Seq. ID No. 6055 | Seq. ID No. 6056 | Cyto | 0 |
| 2886b | Seq. ID No. 6057 | Seq. ID No. 6058 | Cyto | 0 |
| 2887b | Seq. ID No. 6061 | Seq. ID No. 6062 | IM | 2 |
| 2890 | Seq. ID No. 6065 | Seq. ID No. 6066 | IM | 1 |
| 2891b | Seq. ID No. 6069 | Seq. ID No. 6070 | Cyto | 1 |
| 2891c | Seq. ID No. 6071 | Seq. ID No. 6072 | Cyto | 1 |
| 2893b | Seq. ID No. 6073 | Seq. ID No. 6074 | IM | 1 |
| 2894a | Seq. ID No. 6075 | Seq. ID No. 6076 | Cyto | |
| 2894b | Seq. ID No. 6077 | Seq. ID No. 6078 | Cyto | |
| 2894c | Seq. ID No. 6079 | Seq. ID No. 6080 | Cyto | |
| 2895 | Seq. ID No. 6081 | Seq. ID No. 6082 | IM | |
| 2897a | Seq. ID No. 6083 | Seq. ID No. 6084 | Cyto | |
| 2897b | Seq. ID No. 6085 | Seq. ID No. 6086 | Cyto | |
| 2901b | Seq. ID No. 6093 | Seq. ID No. 6094 | IM | 2 |
| 2904 | Seq. ID No. 6097 | Seq. ID No. 6098 | Cyto | |
| 2905a | Seq. ID No. 6099 | Seq. ID No. 6100 | Cyto | |
| 2905b | Seq. ID No. 6101 | Seq. ID No. 6102 | Cyto | 0 |
| 2909a | Seq. ID No. 6105 | Seq. ID No. 6106 | Cyto | |
| 2912 | Seq. ID No. 6113 | Seq. ID No. 6114 | Cyto | |
| 2915a | Seq. ID No. 6119 | Seq. ID No. 6120 | Cyto | |
| 2915b | Seq. ID No. 6121 | Seq. ID No. 6122 | Cyto | |
| 2915c | Seq. ID No. 6123 | Seq. ID No. 6124 | Cyto | |
| 2916 | Seq. ID No. 6125 | Seq. ID No. 6126 | Cyto | |
| 2917 | Seq. ID No. 6127 | Seq. ID No. 6128 | OM | 1 |
| 2918 | Seq. ID No. 6129 | Seq. ID No. 6130 | Cyto | 0 |
| 2920 | Seq. ID No. 6131 | Seq. ID No. 6132 | IM | 2 |
| 2921 | Seq. ID No. 6133 | Seq. ID No. 6134 | IM | 0 |
| 2923b | Seq. ID No. 6139 | Seq. ID No. 6140 | Cyto | |
| 2923c | Seq. ID No. 6141 | Seq. ID No. 6142 | Cyto | |
| 2925a | Seq. ID No. 6143 | Seq. ID No. 6144 | Cyto | |
| 2925b | Seq. ID No. 6145 | Seq. ID No. 6146 | Cyto | |
| 2926a | Seq. ID No. 6147 | Seq. ID No. 6148 | Cyto | |
| 2926b | Seq. ID No. 6149 | Seq. ID No. 6150 | Cyto | |
| 2926c | Seq. ID No. 6151 | Seq. ID No. 6152 | Cyto | |
| 2928a | Seq. ID No. 6153 | Seq. ID No. 6154 | Cyto | |
| 2928b | Seq. ID No. 6155 | Seq. ID No. 6156 | Cyto | |
| 2928c | Seq. ID No. 6157 | Seq. ID No. 6158 | Cyto | |
| 2933a | Seq. ID No. 6167 | Seq. ID No. 6168 | Cyto | |
| 2934 | Seq. ID No. 6171 | Seq. ID No. 6172 | Cyto | 1 |
| 2935a | Seq. ID No. 6173 | Seq. ID No. 6174 | Cyto | |
| 2935b | Seq. ID No. 6175 | Seq. ID No. 6176 | Cyto | 0 |
| 2936 | Seq. ID No. 6177 | Seq. ID No. 6178 | IM | 2 |
| 2939a | Seq. ID No. 6179 | Seq. ID No. 6180 | Cyto | |
| 2939b | Seq. ID No. 6181 | Seq. ID No. 6182 | Cyto | |
| 2943c | Seq. ID No. 6193 | Seq. ID No. 6194 | IM | 6 |
| 2943d | Seq. ID No. 6195 | Seq. ID No. 6196 | IM | 6 |
| 2945b | Seq. ID No. 6199 | Seq. ID No. 6200 | IM | 0 |
| 2947 | Seq. ID No. 6201 | Seq. ID No. 6202 | Cyto | |
| 2948c | Seq. ID No. 6207 | Seq. ID No. 6208 | IM | 6 |
| 2950a | Seq. ID No. 6211 | Seq. ID No. 6212 | Cyto | |
| 2950b | Seq. ID No. 6213 | Seq. ID No. 6214 | Cyto | |
| 2951 | Seq. ID No. 6215 | Seq. ID No. 6216 | Cyto | |
| 2954 | Seq. ID No. 6219 | Seq. ID No. 6220 | IM | 7 |
| 2955f | Seq. ID No. 6231 | Seq. ID No. 6232 | IM | 12 |
| 2955g | Seq. ID No. 6233 | Seq. ID No. 6234 | IM | 12 |
| 2958b | Seq. ID No. 6239 | Seq. ID No. 6240 | IM | 2 |
| 2962a | Seq. ID No. 6247 | Seq. ID No. 6248 | Cyto | |
| 2963 | Seq. ID No. 6251 | Seq. ID No. 6252 | Cyto | |
| 2965b | Seq. ID No. 6255 | Seq. ID No. 6256 | IM | 2 |
| 2965c | Seq. ID No. 6257 | Seq. ID No. 6258 | IM | 2 |
| 2967 | Seq. ID No. 6261 | Seq. ID No. 6262 | Cyto | |
| 2971a | Seq. ID No. 6269 | Seq. ID No. 6270 | Cyto | 0 |
| 2971b | Seq. ID No. 6271 | Seq. ID No. 6272 | Cyto | 0 |
| 2975 | Seq. ID No. 6277 | Seq. ID No. 6278 | Cyto | 1 |
| 2977a | Seq. ID No. 6279 | Seq. ID No. 6280 | IM | 4 |
| 2977b | Seq. ID No. 6281 | Seq. ID No. 6282 | IM | 4 |
| 2979 | Seq. ID No. 6287 | Seq. ID No. 6288 | IM | 4 |
| 2980b | Seq. ID No. 6291 | Seq. ID No. 6292 | IM | 5 |
| 2980c | Seq. ID No. 6293 | Seq. ID No. 6294 | IM | 5 |
| 2980d | Seq. ID No. 6295 | Seq. ID No. 6296 | IM | 5 |
| 2980e | Seq. ID No. 6297 | Seq. ID No. 6298 | IM | 5 |
| 2984 | Seq. ID No. 6299 | Seq. ID No. 6300 | Cyto | 0 |
| 2986c | Seq. ID No. 6305 | Seq. ID No. 6306 | IM | 7 |
| 2988a | Seq. ID No. 6307 | Seq. ID No. 6308 | Cyto | 1 |
| 2988b | Seq. ID No. 6309 | Seq. ID No. 6310 | Cyto | 1 |
| 2988c | Seq. ID No. 6311 | Seq. ID No. 6312 | Cyto | 1 |
| 2989 | Seq. ID No. 6313 | Seq. ID No. 6314 | Cyto | |
| 2990 | Seq. ID No. 6315 | Seq. ID No. 6316 | Cyto | 0 |
| 2991a | Seq. ID No. 6317 | Seq. ID No. 6318 | IM | |
| 2991b | Seq. ID No. 6319 | Seq. ID No. 6320 | Cyto | 0 |
| 2991c | Seq. ID No. 6321 | Seq. ID No. 6322 | Cyto | 0 |
| 2992 | Seq. ID No. 6323 | Seq. ID No. 6324 | IM | 4 |
| 2995a | Seq. ID No. 6329 | Seq. ID No. 6330 | Cyto | 1 |
| 2995b | Seq. ID No. 6331 | Seq. ID No. 6332 | Cyto | 1 |
| 2997 | Seq. ID No. 6333 | Seq. ID No. 6334 | Cyto | |
| 2998a | Seq. ID No. 6335 | Seq. ID No. 6336 | Cyto | |
| 2998b | Seq. ID No. 6337 | Seq. ID No. 6338 | Cyto | |
| 2999 | Seq. ID No. 6339 | Seq. ID No. 6340 | Cyto | |
| 3001 | Seq. ID No. 6341 | Seq. ID No. 6342 | Cyto | |
| 3003 | Seq. ID No. 6343 | Seq. ID No. 6344 | Cyto | |
| 3005 | Seq. ID No. 6345 | Seq. ID No. 6346 | Cyto | |
| 3008a | Seq. ID No. 6347 | Seq. ID No. 6348 | Cyto | |
| 3008b | Seq. ID No. 6349 | Seq. ID No. 6350 | Cyto | |
| 3008c | Seq. ID No. 6351 | Seq. ID No. 6352 | Cyto | |
| 3008d | Seq. ID No. 6353 | Seq. ID No. 6354 | Cyto | |
| 3010a | Seq. ID No. 6355 | Seq. ID No. 6356 | Cyto | |
| 3010b | Seq. ID No. 6357 | Seq. ID No. 6358 | Cyto | |
| 3012 | Seq. ID No. 6359 | Seq. ID No. 6360 | Cyto | |
| 3015 | Seq. ID No. 6361 | Seq. ID No. 6362 | IM | 7 |
| 3016c | Seq. ID No. 6367 | Seq. ID No. 6368 | IM | 7 |
| 3017 | Seq. ID No. 6369 | Seq. ID No. 6370 | Cyto | |
| 3018a | Seq. ID No. 6371 | Seq. ID No. 6372 | Cyto | |
| 3018b | Seq. ID No. 6373 | Seq. ID No. 6374 | Cyto | |
| 3020 | Seq. ID No. 6375 | Seq. ID No. 6376 | IM | |
| 3022 | Seq. ID No. 6379 | Seq. ID No. 6380 | Cyto | |
| 3024b | Seq. ID No. 6385 | Seq. ID No. 6386 | Cyto | 1 |
| 3026a | Seq. ID No. 6387 | Seq. ID No. 6388 | Cyto | |
| 3026b | Seq. ID No. 6389 | Seq. ID No. 6390 | Cyto | |
| 3028a | Seq. ID No. 6391 | Seq. ID No. 6392 | Cyto | |
| 3028b | Seq. ID No. 6393 | Seq. ID No. 6394 | Cyto | |
| 3028c | Seq. ID No. 6395 | Seq. ID No. 6396 | Cyto | |
| 3029a | Seq. ID No. 6397 | Seq. ID No. 6398 | Cyto | |
| 3029b | Seq. ID No. 6399 | Seq. ID No. 6400 | Cyto | |
| 3031a | Seq. ID No. 6401 | Seq. ID No. 6402 | Cyto | |
| 3031b | Seq. ID No. 6403 | Seq. ID No. 6404 | Cyto | |
| 3032a | Seq. ID No. 6405 | Seq. ID No. 6406 | Cyto | |
| 3032b | Seq. ID No. 6407 | Seq. ID No. 6408 | Cyto | |
| 3033a | Seq. ID No. 6409 | Seq. ID No. 6410 | Cyto | |
| 3033b | Seq. ID No. 6411 | Seq. ID No. 6412 | Cyto | |
| 3035 | Seq. ID No. 6413 | Seq. ID No. 6414 | Cyto | 1 |
| 3037b | Seq. ID No. 6417 | Seq. ID No. 6418 | IM | 1 |
| 3038 | Seq. ID No. 6419 | Seq. ID No. 6420 | Cyto | |
| 3040a | Seq. ID No. 6421 | Seq. ID No. 6422 | Cyto | |
| 3040b | Seq. ID No. 6423 | Seq. ID No. 6424 | Cyto | |
| 3044 | Seq. ID No. 6433 | Seq. ID No. 6434 | IM | 1 |
| 3045a | Seq. ID No. 6435 | Seq. ID No. 6436 | Cyto | |
| 3045b | Seq. ID No. 6437 | Seq. ID No. 6438 | Cyto | |
| 3048a | Seq. ID No. 6439 | Seq. ID No. 6440 | Cyto | |
| 3049a | Seq. ID No. 6441 | Seq. ID No. 6442 | Cyto | |
| 3049b | Seq. ID No. 6443 | Seq. ID No. 6444 | Cyto | |
| 3049c | Seq. ID No. 6445 | Seq. ID No. 6446 | Cyto | |
| 3051a | Seq. ID No. 6447 | Seq. ID No. 6448 | Cyto | |
| 3051b | Seq. ID No. 6449 | Seq. ID No. 6450 | Cyto | |
| 3052 | Seq. ID No. 6451 | Seq. ID No. 6452 | Cyto | |
| 3054 | Seq. ID No. 6453 | Seq. ID No. 6454 | Cyto | |
| 3055a | Seq. ID No. 6455 | Seq. ID No. 6456 | Cyto | |
| 3055b | Seq. ID No. 6457 | Seq. ID No. 6458 | Cyto | |
| 3057 | Seq. ID No. 6459 | Seq. ID No. 6460 | Cyto | |
| 3059 | Seq. ID No. 6461 | Seq. ID No. 6462 | Cyto | |
| 3060 | Seq. ID No. 6463 | Seq. ID No. 6464 | IM | 5 |
| 3061 | Seq. ID No. 6465 | Seq. ID No. 6466 | Peri | 1 |
| 3062 | Seq. ID No. 6467 | Seq. ID No. 6468 | IM | 5 |
| 3063a | Seq. ID No. 6469 | Seq. ID No. 6470 | Cyto | 0 |
| 3063b | Seq. ID No. 6471 | Seq. ID No. 6472 | Cyto | 0 |
| 3065a | Seq. ID No. 6475 | Seq. ID No. 6476 | Cyto | |
| 3065b | Seq. ID No. 6477 | Seq. ID No. 6478 | Cyto | |
| 3067 | Seq. ID No. 6481 | Seq. ID No. 6482 | Cyto | |
| 3068 | Seq. ID No. 6483 | Seq. ID No. 6484 | Cyto | |
| 3069 | Seq. ID No. 6485 | Seq. ID No. 6486 | Cyto | |
| 3071 | Seq. ID No. 6487 | Seq. ID No. 6488 | Cyto | |
| 3072a | Seq. ID No. 6489 | Seq. ID No. 6490 | Cyto | |
| 3073 | Seq. ID No. 6491 | Seq. ID No. 6492 | Cyto | |
| 3074 | Seq. ID No. 6493 | Seq. ID No. 6494 | Cyto | |
| 3075 | Seq. ID No. 6495 | Seq. ID No. 6496 | Cyto | |
| 3077a | Seq. ID No. 6499 | Seq. ID No. 6500 | Cyto | |
| 3077b | Seq. ID No. 6501 | Seq. ID No. 6502 | Cyto | |
| 3077c | Seq. ID No. 6503 | Seq. ID No. 6504 | Cyto | |
| 3078 | Seq. ID No. 6505 | Seq. ID No. 6506 | Cyto | 1 |
| 3079 | Seq. ID No. 6507 | Seq. ID No. 6508 | IM | 1 |
| 3081a | Seq. ID No. 6509 | Seq. ID No. 6510 | Cyto | |
| 3081b | Seq. ID No. 6511 | Seq. ID No. 6512 | Cyto | |
| 3083c | Seq. ID No. 6513 | Seq. ID No. 6514 | Cyto | |
| 3083d | Seq. ID No. 6515 | Seq. ID No. 6516 | Cyto | |
| 3086 | Seq. ID No. 6519 | Seq. ID No. 6520 | Cyto | |
| 3087a | Seq. ID No. 6521 | Seq. ID No. 6522 | Cyto | |
| 3087c | Seq. ID No. 6523 | Seq. ID No. 6524 | Cyto | |
| 3088 | Seq. ID No. 6525 | Seq. ID No. 6526 | Cyto | |
| 3089a | Seq. ID No. 6527 | Seq. ID No. 6528 | Cyto | |
| 3089b | Seq. ID No. 6529 | Seq. ID No. 6530 | Cyto | |
| 3090 | Seq. ID No. 6531 | Seq. ID No. 6532 | Cyto | |
| 3091 | Seq. ID No. 6533 | Seq. ID No. 6534 | Cyto | |
| 3092a | Seq. ID No. 6535 | Seq. ID No. 6536 | Cyto | |
| 3092b | Seq. ID No. 6537 | Seq. ID No. 6538 | Cyto | |
| 3095 | Seq. ID No. 6539 | Seq. ID No. 6540 | IM | 1 |
| 3097 | Seq. ID No. 6545 | Seq. ID No. 6546 | Cyto | |
| 3098a | Seq. ID No. 6547 | Seq. ID No. 6548 | Cyto | 0 |
| 3098b | Seq. ID No. 6549 | Seq. ID No. 6550 | Cyto | 0 |
| 3098c | Seq. ID No. 6551 | Seq. ID No. 6552 | Cyto | 0 |
| 3099 | Seq. ID No. 6553 | Seq. ID No. 6554 | Cyto | |
| 3101 | Seq. ID No. 6559 | Seq. ID No. 6560 | Cyto | |
| 3102 | Seq. ID No. 6561 | Seq. ID No. 6562 | Peri | 2 |
| 3103b | Seq. ID No. 6563 | Seq. ID No. 6564 | Cyto | |
| 3104 | Seq. ID No. 6565 | Seq. ID No. 6566 | Cyto | |
| 3105 | Seq. ID No. 6567 | Seq. ID No. 6568 | Cyto | |
| 3106 | Seq. ID No. 6569 | Seq. ID No. 6570 | Cyto | |
| 3108a | Seq. ID No. 6575 | Seq. ID No. 6576 | Cyto | |
| 3108b | Seq. ID No. 6577 | Seq. ID No. 6578 | Peri | |
| 3109 | Seq. ID No. 6579 | Seq. ID No. 6580 | Cyto | |
| 3110b | Seq. ID No. 6583 | Seq. ID No. 6584 | IM | 2 |
| 3113 | Seq. ID No. 6585 | Seq. ID No. 6586 | IM | 1 |
| 3116 | Seq. ID No. 6587 | Seq. ID No. 6588 | Cyto | 1 |
| 3118a | Seq. ID No. 6589 | Seq. ID No. 6590 | Cyto | |
| 3118b | Seq. ID No. 6591 | Seq. ID No. 6592 | Cyto | |
| 3121 | Seq. ID No. 6605 | Seq. ID No. 6606 | Cyto | |
| 3122a | Seq. ID No. 6607 | Seq. ID No. 6608 | Cyto | 2 |
| 3122b | Seq. ID No. 6609 | Seq. ID No. 6610 | Cyto | 2 |
| 3123a | Seq. ID No. 6611 | Seq. ID No. 6612 | IM | 0 |
| 3123b | Seq. ID No. 6613 | Seq. ID No. 6614 | IM | 0 |
| 3124 | Seq. ID No. 6615 | Seq. ID No. 6616 | IM | 1 |
| 3126 | Seq. ID No. 6617 | Seq. ID No. 6618 | Cyto | 0 |
| 3129a | Seq. ID No. 6619 | Seq. ID No. 6620 | Cyto | 2 |
| 3129b | Seq. ID No. 6621 | Seq. ID No. 6622 | Cyto | 2 |
| 3131 | Seq. ID No. 6623 | Seq. ID No. 6624 | IM | 2 |
| 3134a | Seq. ID No. 6625 | Seq. ID No. 6626 | Cyto | 0 |
| 3134b | Seq. ID No. 6627 | Seq. ID No. 6628 | IM | 0 |
| 3138 | Seq. ID No. 6629 | Seq. ID No. 6630 | IM | 0 |
| 3141 | Seq. ID No. 6633 | Seq. ID No. 6634 | Cyto | 2 |
| 3145a | Seq. ID No. 6635 | Seq. ID No. 6636 | Cyto | 0 |
| 3147a | Seq. ID No. 6641 | Seq. ID No. 6642 | Cyto | |
| 3149a | Seq. ID No. 6647 | Seq. ID No. 6648 | Cyto | |

[0108] Listed in Table 7 are 287 ORFs whose Pfam results predict possible secreted, surface or membrane localization of proteins encoded by the ORFs.

TABLE 7
PFAM

| ORF | DNA SEQ ID | Protein SEQ ID | |
|---|---|---|---|
| Number | Number | Number | Pfam |
| 51c | Seq. ID No. 89 | Seq. ID No. 90 | Sodium: dicarboxylate symporter family |
| 80c | Seq. ID No. 145 | Seq. ID No. 146 | Formate/nitrite transporter |
| 85b | Seq. ID No. 155 | Seq. ID No. 156 | ABC transporter |
| 88 | Seq. ID No. 167 | Seq. ID No. 168 | Binding-protein-dependent transport s |
| 91b | Seq. ID No. 173 | Seq. ID No. 174 | NLPA lipoprotein |
| 99 | Seq. ID No. 191 | Seq. ID No. 192 | Phosphotransferase system, EIIC |
| 109d | Seq. ID No. 215 | Seq. ID No. 216 | ABC 3 transport family |
| 111b | Seq. ID No. 219 | Seq. ID No. 220 | ABC 3 transport family |
| 112a | Seq. ID No. 221 | Seq. ID No. 222 | ABC transporter |
| 112b | Seq. ID No. 223 | Seq. ID No. 224 | ABC transporter |
| 114 | Seq. ID No. 225 | Seq. ID No. 226 | Periplasmic solute binding protein fa |
| 121 | Seq. ID No. 233 | Seq. ID No. 234 | ABC transporter |
| 124c | Seq. ID No. 239 | Seq. ID No. 240 | Binding-protein-dependent transport s |
| 129b | Seq. ID No. 251 | Seq. ID No. 252 | Phosphotransferase system, EIIC |
| 129c | Seq. ID No. 253 | Seq. ID No. 254 | PTS system, Fructose specific IIB sub |
| 138a | Seq. ID No. 271 | Seq. ID No. 272 | E1-E2 ATPase |
| 145d | Seq. ID No. 291 | Seq. ID No. 292 | AbgT putative transporter family |
| 162c | Seq. ID No. 331 | Seq. ID No. 332 | Cobalt transport protein |
| 165a | Seq. ID No. 341 | Seq. ID No. 342 | ABC transporter |
| 167 | Seq. ID No. 345 | Seq. ID No. 346 | ABC transporter |
| 180b | Seq. ID No. 375 | Seq. ID No. 376 | eubacterial secY protein |
| 245c | Seq. ID No. 501 | Seq. ID No. 502 | Permease family |
| 246b | Seq. ID No. 505 | Seq. ID No. 506 | Cell cycle protein |
| 248b | Seq. ID No. 511 | Seq. ID No. 512 | Cell cycle protein |
| 255c | Seq. ID No. 529 | Seq. ID No. 530 | Sodium: solute symporter family |
| 273a | Seq. ID No. 567 | Seq. ID No. 568 | phosphotransferase system, EIIB |
| 273b | Seq. ID No. 569 | Seq. ID No. 570 | Phosphotransferase system, EIIC |
| 277c | Seq. ID No. 575 | Seq. ID No. 576 | ApbE family |
| 283b | Seq. ID No. 593 | Seq. ID No. 594 | Bacterial extracellular solute-bindin |
| 284a | Seq. ID No. 595 | Seq. ID No. 596 | Binding-protein-dependent transport s |
| 286a | Seq. ID No. 601 | Seq. ID No. 602 | ABC transporter |
| 311 | Seq. ID No. 637 | Seq. ID No. 638 | ABC transporter |
| 315 | Seq. ID No. 649 | Seq. ID No. 650 | ABC transporter |
| 318c | Seq. ID No. 661 | Seq. ID No. 662 | NLPA lipoprotein |
| 321 | Seq. ID No. 669 | Seq. ID No. 670 | NLPA lipoprotein |
| 324 | Seq. ID No. 675 | Seq. ID No. 676 | NLPA lipoprotein |
| 327c | Seq. ID No. 681 | Seq. ID No. 682 | Binding-protein-dependent transport s |
| 329 | Seq. ID No. 683 | Seq. ID No. 684 | ABC transporter |
| 342h | Seq. ID No. 729 | Seq. ID No. 730 | Uncharacterized membrane protein fami |
| 351 | Seq. ID No. 753 | Seq. ID No. 754 | ABC transporter |
| 358b | Seq. ID No. 779 | Seq. ID No. 780 | Na+/H+ antiporter family |
| 384b | Seq. ID No. 827 | Seq. ID No. 828 | Phosphotransferase system, EIIC |
| 391 | Seq. ID No. 839 | Seq. ID No. 840 | Glycosyl transferase family 8 |
| 418b | Seq. ID No. 895 | Seq. ID No. 896 | E1-E2 ATPase |
| 435 | Seq. ID No. 939 | Seq. ID No. 940 | Metallo-beta-lactamase superfamily |
| 450a | Seq. ID No. 969 | Seq. ID No. 970 | ABC transporter |
| 452e | Seq. ID No. 985 | Seq. ID No. 986 | Predicted permease |
| 464c | Seq. ID No. 1015 | Seq. ID No. 1016 | Cation transport protein |
| 472f | Seq. ID No. 1039 | Seq. ID No. 1040 | Cation transport protein |
| 492 | Seq. ID No. 1075 | Seq. ID No. 1076 | NLPA lipoprotein |
| 524b | Seq. ID No. 1137 | Seq. ID No. 1138 | 60 Kd inner membrane protein |
| 533 | Seq. ID No. 1155 | Seq. ID No. 1156 | Phosphotransferase system, EIIC |
| 539c | Seq. ID No. 1163 | Seq. ID No. 1164 | ABC transporter |
| 543a | Seq. ID No. 1175 | Seq. ID No. 1176 | ABC transporter |
| 561 | Seq. ID No. 1223 | Seq. ID No. 1224 | ABC transporter |
| 564c | Seq. ID No. 1231 | Seq. ID No. 1232 | BioY family |
| 570b | Seq. ID No. 1237 | Seq. ID No. 1238 | ABC transporter |
| 573 | Seq. ID No. 1241 | Seq. ID No. 1242 | ABC transporter |
| 586a | Seq. ID No. 1261 | Seq. ID No. 1262 | Large-conductance mechanosensitive ch |
| 613d | Seq. ID No. 1331 | Seq. ID No. 1332 | Sodium/hydrogen exchanger family |
| 618 | Seq. ID No. 1339 | Seq. ID No. 1340 | Mechanosensitive ion channel |
| 631d | Seq. ID No. 1369 | Seq. ID No. 1370 | 5′-nucleotidase, C-terminal domain |
| 698 | Seq. ID No. 1477 | Seq. ID No. 1478 | LrgA family |
| 722c | Seq. ID No. 1517 | Seq. ID No. 1518 | PTS system Galactitol-specific IIC co |
| 728b | Seq. ID No. 1531 | Seq. ID No. 1532 | PTS system sorbose-specific iic compo |
| 730d | Seq. ID No. 1539 | Seq. ID No. 1540 | PTS system mannose/fructose/sorbose f |
| 738c | Seq. ID No. 1549 | Seq. ID No. 1550 | PTS system Galactitol-specific IIC co |
| 744 | Seq. ID No. 1563 | Seq. ID No. 1564 | Bacterial extracellular solute-bindin |
| 745b | Seq. ID No. 1567 | Seq. ID No. 1568 | Binding-protein-dependent transport s |
| 746b | Seq. ID No. 1571 | Seq. ID No. 1572 | Binding-protein-dependent transport s |
| 747 | Seq. ID No. 1573 | Seq. ID No. 1574 | ABC transporter |
| 754d | Seq. ID No. 1589 | Seq. ID No. 1590 | PTS system, Lactose/Cellobiose specif |
| 758 | Seq. ID No. 1595 | Seq. ID No. 1596 | PTS system, Lactose/Cellobiose specif |
| 788b | Seq. ID No. 1647 | Seq. ID No. 1648 | Binding-protein-dependent transport s |
| 792 | Seq. ID No. 1657 | Seq. ID No. 1658 | ABC transporter |
| 859d | Seq. ID No. 1771 | Seq. ID No. 1772 | E1-E2 ATPase |
| 866b | Seq. ID No. 1785 | Seq. ID No. 1786 | ABC transporter |
| 868b | Seq. ID No. 1789 | Seq. ID No. 1790 | Binding-protein-dependent transport s |
| 885 | Seq. ID No. 1819 | Seq. ID No. 1820 | Histidine kinase-, DNA gyrase B-, and |
| 886 | Seq. ID No. 1821 | Seq. ID No. 1822 | D-alanyl-D-alanine carboxypeptidase |
| 977a | Seq. ID No. 1969 | Seq. ID No. 1970 | NLPA lipoprotein |
| 998b | Seq. ID No. 2015 | Seq. ID No. 2016 | PAP2 superfamily |
| 1016c | Seq. ID No. 2047 | Seq. ID No. 2048 | ABC transporter |
| 1036a | Seq. ID No. 2087 | Seq. ID No. 2088 | Binding-protein-dependent transport s |
| 1036b | Seq. ID No. 2089 | Seq. ID No. 2090 | Bacterial extracellular solute-bindin |
| 1037 | Seq. ID No. 2093 | Seq. ID No. 2094 | ABC transporter |
| 1047b | Seq. ID No. 2115 | Seq. ID No. 2116 | Periplasmic solute binding protein fa |
| 1049a | Seq. ID No. 2117 | Seq. ID No. 2118 | ABC transporter |
| 1050d | Seq. ID No. 2127 | Seq. ID No. 2128 | ABC 3 transport family |
| 1060b | Seq. ID No. 2141 | Seq. ID No. 2142 | Bacterial transferase hexapeptide (fo |
| 1077e | Seq. ID No. 2179 | Seq. ID No. 2180 | Polysaccharide biosynthesis protein |
| 1094b | Seq. ID No. 2207 | Seq. ID No. 2208 | Peptidase family M41 |
| 1100 | Seq. ID No. 2223 | Seq. ID No. 2224 | ABC transporter |
| 1127 | Seq. ID No. 2253 | Seq. ID No. 2254 | ABC transporter |
| 1140c | Seq. ID No. 2275 | Seq. ID No. 2276 | E1-E2 ATPase |
| 1149 | Seq. ID No. 2301 | Seq. ID No. 2302 | ABC transporter |
| 1152g | Seq. ID No. 2315 | Seq. ID No. 2316 | Binding-protein-dependent transport s |
| 1155g | Seq. ID No. 2329 | Seq. ID No. 2330 | Binding-protein-dependent transport s |
| 1165 | Seq. ID No. 2343 | Seq. ID No. 2344 | NLP/P60 family |
| 1167b | Seq. ID No. 2349 | Seq. ID No. 2350 | His Kinase A (phosphoacceptor) domain |
| 1171c | Seq. ID No. 2363 | Seq. ID No. 2364 | ABC transporter |
| 1179c | Seq. ID No. 2381 | Seq. ID No. 2382 | Metallo-beta-lactamase superfamily |
| 1180e | Seq. ID No. 2391 | Seq. ID No. 2392 | Phospholipase D. Active site motif |
| 1191 | Seq. ID No. 2417 | Seq. ID No. 2418 | ABC transporter |
| 1192b | Seq. ID No. 2421 | Seq. ID No. 2422 | Peptidase family M48 |
| 1194 | Seq. ID No. 2423 | Seq. ID No. 2424 | LemA family |
| 1197 | Seq. ID No. 2429 | Seq. ID No. 2430 | Peptidase family U7 |
| 1221a | Seq. ID No. 2481 | Seq. ID No. 2482 | ABC transporter |
| 1224a | Seq. ID No. 2487 | Seq. ID No. 2488 | CAAX amino terminal protease family |
| 1224b | Seq. ID No. 2489 | Seq. ID No. 2490 | CAAX amino terminal protease family |
| 1224c | Seq. ID No. 2491 | Seq. ID No. 2492 | CAAX amino terminal protease family |
| 1233a | Seq. ID No. 2509 | Seq. ID No. 2510 | ABC transporter |
| 1234c | Seq. ID No. 2519 | Seq. ID No. 2520 | Uncharacterised protein family (UPF00 |
| 1237 | Seq. ID No. 2525 | Seq. ID No. 2526 | LysM domain |
| 1245d | Seq. ID No. 2547 | Seq. ID No. 2548 | AbgT putative transporter family |
| 1246b | Seq. ID No. 2553 | Seq. ID No. 2554 | Metallo-beta-lactamase superfamily |
| 1250e | Seq. ID No. 2563 | Seq. ID No. 2564 | Sodium:dicarboxylate symporter family |
| 1258c | Seq. ID No. 2587 | Seq. ID No. 2588 | E1-E2 ATPase |
| 1266b | Seq. ID No. 2599 | Seq. ID No. 2600 | AzIC protein |
| 1268b | Seq. ID No. 2607 | Seq. ID No. 2608 | ABC transporter |
| 1271 | Seq. ID No. 2613 | Seq. ID No. 2614 | ABC transporter |
| 1288 | Seq. ID No. 2651 | Seq. ID No. 2652 | Cell envelope-related transcriptional |
| 1305b | Seq. ID No. 2675 | Seq. ID No. 2676 | ABC transporter |
| 1308b | Seq. ID No. 2681 | Seq. ID No. 2682 | Predicted permease |
| 1308e | Seq. ID No. 2687 | Seq. ID No. 2688 | Predicted permease |
| 1315 | Seq. ID No. 2693 | Seq. ID No. 2694 | Histidine kinase-, DNA gyrase B-, and |
| 1318 | Seq. ID No. 2699 | Seq. ID No. 2700 | Phosphate-binding protein |
| 1319b | Seq. ID No. 2703 | Seq. ID No. 2704 | Binding-protein-dependent transport s |
| 1320c | Seq. ID No. 2709 | Seq. ID No. 2710 | Binding-protein-dependent transport s |
| 1321 | Seq. ID No. 2711 | Seq. ID No. 2712 | ABC transporter |
| 1333 | Seq. ID No. 2727 | Seq. ID No. 2728 | ABC transporter |
| 1348 | Seq. ID No. 2753 | Seq. ID No. 2754 | Prolipoprotein diacylglyceryl transfe |
| 1384a | Seq. ID No. 2819 | Seq. ID No. 2820 | Preprotein translocase SecG subunit |
| 1384b | Seq. ID No. 2821 | Seq. ID No. 2822 | Preprotein translocase SecG subunit |
| 1384c | Seq. ID No. 2823 | Seq. ID No. 2824 | Preprotein translocase SecG subunit |
| 1408 | Seq. ID No. 2867 | Seq. ID No. 2868 | ABC transporter |
| 1410 | Seq. ID No. 2871 | Seq. ID No. 2872 | ABC transporter |
| 1426b | Seq. ID No. 2907 | Seq. ID No. 2908 | Ribonuclease BN-like family |
| 1431 | Seq. ID No. 2919 | Seq. ID No. 2920 | ABC transporter |
| 1442b | Seq. ID No. 2957 | Seq. ID No. 2958 | ABC transporter |
| 1447b | Seq. ID No. 2971 | Seq. ID No. 2972 | Sodium/glutamate symporter |
| 1451 | Seq. ID No. 2979 | Seq. ID No. 2980 | ABC transporter |
| 1457c | Seq. ID No. 2999 | Seq. ID No. 3000 | Na+/Pi-cotransporter |
| 1462b | Seq. ID No. 3005 | Seq. ID No. 3006 | ABC transporter |
| 1466d | Seq. ID No. 3019 | Seq. ID No. 3020 | ABC transporter |
| 1471 | Seq. ID No. 3035 | Seq. ID No. 3036 | Ion transport protein |
| 1484b | Seq. ID No. 3065 | Seq. ID No. 3066 | Divalent cation transporter |
| 1488g | Seq. ID No. 3085 | Seq. ID No. 3086 | Divalent cation transporter |
| 1517c | Seq. ID No. 3149 | Seq. ID No. 3150 | Mechanosensitive ion channel |
| 1530b | Seq. ID No. 3165 | Seq. ID No. 3166 | Transglycosylase |
| 1543 | Seq. ID No. 3183 | Seq. ID No. 3184 | NLP/P60 family |
| 1554c | Seq. ID No. 3203 | Seq. ID No. 3204 | Bacterial type II secretion system pr |
| 1556c | Seq. ID No. 3211 | Seq. ID No. 3212 | ABC transporter |
| 1573 | Seq. ID No. 3251 | Seq. ID No. 3252 | ABC transporter |
| 1578 | Seq. ID No. 3259 | Seq. ID No. 3260 | ABC transporter |
| 1606b | Seq. ID No. 3319 | Seq. ID No. 3320 | Histidine kinase-, DNA gyrase B-, and |
| 1607b | Seq. ID No. 3323 | Seq. ID No. 3324 | 60 Kd inner membrane protein |
| 1616b | Seq. ID No. 3335 | Seq. ID No. 3336 | FtsK/SpoIIIE family |
| 1619 | Seq. ID No. 3337 | Seq. ID No. 3338 | Basic membrane protein |
| 1623c | Seq. ID No. 3347 | Seq. ID No. 3348 | ABC transporter |
| 1626b | Seq. ID No. 3359 | Seq. ID No. 3360 | Branched-chain amino acid transport s |
| 1634c | Seq. ID No. 3377 | Seq. ID No. 3378 | Mannosyl-glycoprotein endo-beta-N-ace |
| 1639b | Seq. ID No. 3379 | Seq. ID No. 3380 | LysM domain |
| 1646f | Seq. ID No. 3399 | Seq. ID No. 3400 | Polysaccharide biosynthesis protein |
| 1659c | Seq. ID No. 3425 | Seq. ID No. 3426 | Na+/H+ antiporter family |
| 1683b | Seq. ID No. 3483 | Seq. ID No. 3484 | Ribonuclease BN-like family |
| 1688c | Seq. ID No. 3495 | Seq. ID No. 3496 | Glycosyl transferase |
| 1689a | Seq. ID No. 3497 | Seq. ID No. 3498 | Glycosyl transferase |
| 1694d | Seq. ID No. 3519 | Seq. ID No. 3520 | Cell envelope-related transcriptional |
| 1699b | Seq. ID No. 3529 | Seq. ID No. 3530 | Polysaccharide biosynthesis protein |
| 1737b | Seq. ID No. 3599 | Seq. ID No. 3600 | GA module |
| 1743 | Seq. ID No. 3611 | Seq. ID No. 3612 | GA module |
| 1744b | Seq. ID No. 3615 | Seq. ID No. 3616 | GA module |
| 1747 | Seq. ID No. 3619 | Seq. ID No. 3620 | GA module |
| 1769b | Seq. ID No. 3663 | Seq. ID No. 3664 | Type IV leader peptidase family |
| 1804b | Seq. ID No. 3739 | Seq. ID No. 3740 | Na+/H+ antiporter subunit |
| 1808d | Seq. ID No. 3759 | Seq. ID No. 3760 | NADH-Ubiquinone/plastoquinone (comple |
| 1809f | Seq. ID No. 3771 | Seq. ID No. 3772 | NADH-Ubiquinone/plastoquinone (comple |
| 1816c | Seq. ID No. 3797 | Seq. ID No. 3798 | Transglycosylase |
| 1833 | Seq. ID No. 3825 | Seq. ID No. 3826 | 5′-nucleotidase, C-terminal domain |
| 1838c | Seq. ID No. 3841 | Seq. ID No. 3842 | ABC transporter |
| 1842d | Seq. ID No. 3855 | Seq. ID No. 3856 | Phosphotransferase system, EIIC |
| 1845c | Seq. ID No. 3863 | Seq. ID No. 3864 | Voltage gated chloride channel |
| 1861b | Seq. ID No. 3901 | Seq. ID No. 3902 | ABC transporter |
| 1875c | Seq. ID No. 3929 | Seq. ID No. 3930 | Signal peptidase I |
| 1925 | Seq. ID No. 4015 | Seq. ID No. 4016 | Anion-transporting ATPase |
| 1926 | Seq. ID No. 4017 | Seq. ID No. 4018 | ABC transporter |
| 1939c | Seq. ID No. 4055 | Seq. ID No. 4056 | ABC transporter |
| 1946c | Seq. ID No. 4075 | Seq. ID No. 4076 | Sodium: alanine symporter family |
| 1951c | Seq. ID No. 4085 | Seq. ID No. 4086 | ABC transporter |
| 1953 | Seq. ID No. 4089 | Seq. ID No. 4090 | Patatin-like phospholipase |
| 1957 | Seq. ID No. 4099 | Seq. ID No. 4100 | ABC transporter |
| 1958c | Seq. ID No. 4105 | Seq. ID No. 4106 | Branched-chain amino acid transport s |
| 1969 | Seq. ID No. 4129 | Seq. ID No. 4130 | Signal peptidase (SPase) II |
| 2008 | Seq. ID No. 4203 | Seq. ID No. 4204 | Prokaryotic diacylglycerol kinase |
| 2023b | Seq. ID No. 4243 | Seq. ID No. 4244 | Rhomboid family |
| 2024d | Seq. ID No. 4251 | Seq. ID No. 4252 | Penicillin binding protein transpepti |
| 2074b | Seq. ID No. 4343 | Seq. ID No. 4344 | N-acetylmuramoyl-L-alanine amidase |
| 2094 | Seq. ID No. 4383 | Seq. ID No. 4384 | ABC transporter |
| 2142b | Seq. ID No. 4475 | Seq. ID No. 4476 | Phosphatidate cytidylyltransferase |
| 2146 | Seq. ID No. 4481 | Seq. ID No. 4482 | NLPA lipoprotein |
| 2147c | Seq. ID No. 4487 | Seq. ID No. 4488 | Binding-protein-dependent transport s |
| 2149b | Seq. ID No. 4491 | Seq. ID No. 4492 | ABC transporter |
| 2165 | Seq. ID No. 4533 | Seq. ID No. 4534 | Uncharacterised protein family (UPF01 |
| 2212b | Seq. ID No. 4627 | Seq. ID No. 4628 | LysM domain |
| 2249 | Seq. ID No. 4705 | Seq. ID No. 4706 | Bacterial extracellular solute-bindin |
| 2253d | Seq. ID No. 4713 | Seq. ID No. 4714 | Binding-protein-dependent transport s |
| 2255b | Seq. ID No. 4717 | Seq. ID No. 4718 | Binding-protein-dependent transport s |
| 2256 | Seq. ID No. 4719 | Seq. ID No. 4720 | ABC transporter |
| 2260c | Seq. ID No. 4729 | Seq. ID No. 4730 | ABC transporter |
| 2288 | Seq. ID No. 4789 | Seq. ID No. 4790 | Patatin-like phospholipase |
| 2290 | Seq. ID No. 4791 | Seq. ID No. 4792 | ATP synthase subunit D |
| 2291a | Seq. ID No. 4793 | Seq. ID No. 4794 | ATP synthase alpha/beta family, nucle |
| 2292c | Seq. ID No. 4803 | Seq. ID No. 4804 | ATP synthase alpha/beta family, nucle |
| 2300 | Seq. ID No. 4813 | Seq. ID No. 4814 | ATP synthase subunit C |
| 2301 | Seq. ID No. 4815 | Seq. ID No. 4816 | V-type ATPase 116 kDa subunit family |
| 2307 | Seq. ID No. 4825 | Seq. ID No. 4826 | Binding-protein-dependent transport s |
| 2309c | Seq. ID No. 4833 | Seq. ID No. 4834 | Binding-protein-dependent transport s |
| 2311 | Seq. ID No. 4837 | Seq. ID No. 4838 | ABC transporter |
| 2329d | Seq. ID No. 4875 | Seq. ID No. 4876 | Competence protein |
| 2331 | Seq. ID No. 4879 | Seq. ID No. 4880 | Helix-hairpin-helix motif |
| 2357 | Seq. ID No. 4919 | Seq. ID No. 4920 | Histidine kinase-, DNA gyrase B-, and |
| 2363b | Seq. ID No. 4931 | Seq. ID No. 4932 | Uncharacterized BCR, YceG family COG1 |
| 2370 | Seq. ID No. 4947 | Seq. ID No. 4948 | Bacterial transferase hexapeptide (fo |
| 2387 | Seq. ID No. 4985 | Seq. ID No. 4986 | Uncharacterized BCR, YitT family COG1 |
| 2428c | Seq. ID No. 5077 | Seq. ID No. 5078 | Pyridoxal-phosphate dependent enzyme |
| 2453 | Seq. ID No. 5115 | Seq. ID No. 5116 | Periplasmic binding protein |
| 2455 | Seq. ID No. 5117 | Seq. ID No. 5118 | ABC transporter |
| 2456e | Seq. ID No. 5127 | Seq. ID No. 5128 | FecCD transport family |
| 2458g | Seq. ID No. 5141 | Seq. ID No. 5142 | FecCD transport family |
| 2482 | Seq. ID No. 5193 | Seq. ID No. 5194 | YGGT family |
| 2495b | Seq. ID No. 5215 | Seq. ID No. 5216 | Glycosyl transferase |
| 2497b | Seq. ID No. 5219 | Seq. ID No. 5220 | Penicillin binding protein transpepti |
| 2520b | Seq. ID No. 5275 | Seq. ID No. 5276 | PEP-utilizing enzyme, TIM barrel doma |
| 2564d | Seq. ID No. 5381 | Seq. ID No. 5382 | D-alanyl-D-alanine carboxypeptidase |
| 2568 | Seq. ID No. 5389 | Seq. ID No. 5390 | ABC transporter |
| 2582c | Seq. ID No. 5409 | Seq. ID No. 5410 | Cobalt transport protein |
| 2585 | Seq. ID No. 5411 | Seq. ID No. 5412 | ABC transporter |
| 2617a | Seq. ID No. 5475 | Seq. ID No. 5476 | ABC transporter |
| 2623b | Seq. ID No. 5491 | Seq. ID No. 5492 | PPIC-type PPIASE domain |
| 2629b | Seq. ID No. 5513 | Seq. ID No. 5514 | Bacterial extracellular solute-bindin |
| 2633a | Seq. ID No. 5519 | Seq. ID No. 5520 | Bacterial extracellular solute-bindin |
| 2633d | Seq. ID No. 5525 | Seq. ID No. 5526 | Bacterial extracellular solute-bindin |
| 2637a | Seq. ID No. 5529 | Seq. ID No. 5530 | Bacterial extracellular solute-bindin |
| 2643b | Seq. ID No. 5537 | Seq. ID No. 5538 | Transglycosylase |
| 2655b | Seq. ID No. 5557 | Seq. ID No. 5558 | Uncharacterized secreted proteins, Ya |
| 2666b | Seq. ID No. 5581 | Seq. ID No. 5582 | MutS family, N-terminal putative DNA |
| 2674b | Seq. ID No. 5599 | Seq. ID No. 5600 | Carbon starvation protein CstA |
| 2688c | Seq. ID No. 5637 | Seq. ID No. 5638 | CDP-alcohol phosphatidyltransferase |
| 2718c | Seq. ID No. 5685 | Seq. ID No. 5686 | Uncharacterized BCR, COG1963 |
| 2734c | Seq. ID No. 5723 | Seq. ID No. 5724 | Cation efflux family |
| 2747b | Seq. ID No. 5755 | Seq. ID No. 5756 | Metallo-beta-lactamase superfamily |
| 2748c | Seq. ID No. 5761 | Seq. ID No. 5762 | Uncharacterized membrane protein fami |
| 2801b | Seq. ID No. 5895 | Seq. ID No. 5896 | HAMP domain |
| 2805b | Seq. ID No. 5901 | Seq. ID No. 5902 | Predicted permease |
| 2809 | Seq. ID No. 5903 | Seq. ID No. 5904 | ABC transporter |
| 2810d | Seq. ID No. 5911 | Seq. ID No. 5912 | Predicted permease |
| 2812 | Seq. ID No. 5913 | Seq. ID No. 5914 | ABC transporter |
| 2816 | Seq. ID No. 5919 | Seq. ID No. 5920 | ABC transporter |
| 2818b | Seq. ID No. 5923 | Seq. ID No. 5924 | Binding-protein-dependent transport s |
| 2818e | Seq. ID No. 5929 | Seq. ID No. 5930 | Bacterial extracellular solute-bindin |
| 2856c | Seq. ID No. 6001 | Seq. ID No. 6002 | E1-E2 ATPase |
| 2881 | Seq. ID No. 6043 | Seq. ID No. 6044 | Mannosyl-glycoprotein endo-beta-N-ace |
| 2883d | Seq. ID No. 6053 | Seq. ID No. 6054 | Predicted permease |
| 2886a | Seq. ID No. 6055 | Seq. ID No. 6056 | ABC transporter |
| 2900b | Seq. ID No. 6089 | Seq. ID No. 6090 | LysM domain |
| 2902 | Seq. ID No. 6095 | Seq. ID No. 6096 | LysM domain |
| 2909d | Seq. ID No. 6111 | Seq. ID No. 6112 | Sulfatase |
| 2913b | Seq. ID No. 6117 | Seq. ID No. 6118 | Histidine kinase-, DNA gyrase B-, and |
| 2931c | Seq. ID No. 6165 | Seq. ID No. 6166 | Sodium: solute symporter family |
| 2933b | Seq. ID No. 6169 | Seq. ID No. 6170 | BNR/Asp-box repeat |
| 2941c | Seq. ID No. 6187 | Seq. ID No. 6188 | ABC transporter |
| 2943d | Seq. ID No. 6195 | Seq. ID No. 6196 | ABC transporter |
| 2954 | Seq. ID No. 6219 | Seq. ID No. 6220 | Bacitracin resistance protein BacA |
| 2955g | Seq. ID No. 6233 | Seq. ID No. 6234 | Permease family |
| 2971a | Seq. ID No. 6269 | Seq. ID No. 6270 | ABC transporter |
| 2974b | Seq. ID No. 6275 | Seq. ID No. 6276 | Predicted permease |
| 2977a | Seq. ID No. 6279 | Seq. ID No. 6280 | Chromate transporter |
| 2979 | Seq. ID No. 6287 | Seq. ID No. 6288 | Chromate transporter |
| 2980e | Seq. ID No. 6297 | Seq. ID No. 6298 | NQR2, RnfD, RnfE family |
| 2984 | Seq. ID No. 6299 | Seq. ID No. 6300 | Respiratory-chain NADH dehydrogenase |
| 2986c | Seq. ID No. 6305 | Seq. ID No. 6306 | NQR2, RnfD, RnfE family |
| 2988c | Seq. ID No. 6311 | Seq. ID No. 6312 | Respiratory-chain NADH dehydrogenase |
| 3017 | Seq. ID No. 6369 | Seq. ID No. 6370 | ABC transporter |
| 3022 | Seq. ID No. 6379 | Seq. ID No. 6380 | Clp amino terminal domain |
| 3116 | Seq. ID No. 6587 | Seq. ID No. 6588 | Peptidase C1-like family |
| 3118b | Seq. ID No. 6591 | Seq. ID No. 6592 | Peptidase C1-like family |

[0109] Listed in Table 8 are ORFs whose BlastP results predict for possible secreted, surface or membrane localization. Keywords used in the search are: MHC, murein, mycolic, NisP, penicillin, peptidoglycan, periplasmic, phosphatidate, pilus, protease, receptor, response regulator, sacculus, secreted protein, sensor protein, signal, surface, teichoic, toxin, transferring, transmembrane, virulence, vitronectin, wall, spor, sporulatio, immunoglobulin, IgG, IgE, IgM, IgD, cueat, teichoic, serum, transport, transporter, channel, porin, hemolysin, phosphatase, vaccine, polysaccharide, rhamnose, dexB, aliA, cap, cps, wze, wzh. A total of 319 ORFs whose BlastP results predict for a possible secreted, surface or membrane localization for the polypeptides encoded by the ORFs are listed in Table 8.

TABLE 8
_BLASTP

| | DNA | Protein | | | |
|---|---|---|---|---|---|
| ORF | SEQ ID | SEQ ID | | | Blast ‘e’ |
| Number | Number | Number | Keyword | Description | Value |
| 4b | Seq. ID No. | Seq. ID No. | transport | transporter, Bacillus | 4.00E−15 |
| | 9 | 10 | | halodurans Bacteria; | |
| | | | | Firmicu . . . | |
| 10 | Seq. ID No. | Seq. ID No. | virulence | Neisseria | 5.00E−35 |
| | 17 | 18 | | meningitidis | |
| | | | | virulence pro . . . | |
| | | | | Aau72997 . . . | |
| 38a | Seq. ID No. | Seq. ID No. | porin | Cephalosporin C | 6.00E−30 |
| | 45 | 46 | | amidase enzyme. | |
| | | | | 3/1991 Aar10055 . . . | |
| 39a | Seq. ID No. | Seq. ID No. | capsular | PgsC, Bacillus | 1.00E−18 |
| | 49 | 50 | | subtilis Bacteria; | |
| | | | | Firmicutes; Baci . . . | |
| 40 | Seq. ID No. | Seq. ID No. | capB | CapB, Bacillus | 9.00E−95 |
| | 53 | 54 | | subtilis Bacteria; | |
| | | | | Firmicutes; Baci . . . | |
| 41c | Seq. ID No. | Seq. ID No. | capA | PgsA, Bacillus | 2.00E−44 |
| | 59 | 60 | | subtilis Bacteria; | |
| | | | | Firmicutes; Baci . . . | |
| 51c | Seq. ID No. | Seq. ID No. | membrane | putative | 2.00E−44 |
| | 89 | 90 | | transmembrane | |
| | | | | symporter, | |
| | | | | Campylobacter je . . . | |
| 80c | Seq. ID No. | Seq. ID No. | transport | Listeria | 6.00E−32 |
| | 145 | 146 | | monocytogenes | |
| | | | | Bacteria; Firmicutes; | |
| | | | | Bacil . . . | |
| 85c | Seq. ID No. | Seq. ID No. | envelop | H. pylori cell | 2.00E−50 |
| | 157 | 158 | | envelope transporter | |
| | | | | . . . Aaw20861 . . . | |
| 88 | Seq. ID No. | Seq. ID No. | TRANSMEMBRANE | PROBABLE | 2.00E−24 |
| | 167 | 168 | | TRANSMEMBRANE | |
| | | | | ABC | |
| | | | | TRANSPORTER | |
| | | | | PROTEIN, Ra . . . | |
| 91a | Seq. ID No. | Seq. ID No. | membrane | outer membrane | 5.00E−25 |
| | 171 | 172 | | protein, Xylella | |
| | | | | fastidiosa 9a5c Ba . . . | |
| 99 | Seq. ID No. | Seq. ID No. | membrane | putative PTS | 8.00E−38 |
| | 191 | 192 | | transmembrane | |
| | | | | compon . . . | |
| | | | | AL096852 . . . | |
| 109d | Seq. ID No. | Seq. ID No. | membrane | High-affinity zinc | 2.00E−60 |
| | 215 | 216 | | uptake system | |
| | | | | membran, | |
| | | | | Fusobact . . . | |
| 111a | Seq. ID No. | Seq. ID No. | transporter | YtgC, Bacillus | 7.00E−34 |
| | 217 | 218 | | subtilis Bacteria; | |
| | | | | Firmicutes; Baci . . . | |
| 114 | Seq. ID No. | Seq. ID No. | adhesin | surface adhesin A | 6.00E−42 |
| | 225 | 226 | | precursor, Bacillus | |
| | | | | halodurans B . . . | |
| 124c | Seq. ID No. | Seq. ID No. | membrane | ABC transporter | 1.00E−105 |
| | 239 | 240 | | membrane-spanning | |
| | | | | permease, Strep . . . | |
| 129c | Seq. ID No. | Seq. ID No. | immunogenic | Propionibacterium | 5.00E−77 |
| | 253 | 254 | | acnes immunogenic | |
| | | | | . . . Aau44300 . . . | |
| 138b | Seq. ID No. | Seq. ID No. | transport | cadmium- | 1.00E−114 |
| | 273 | 274 | | transporting | |
| | | | | ATPase, Bacillus | |
| | | | | halodurans B . . . | |
| 143 | Seq. ID No. | Seq. ID No. | immunogenic | Propionibacterium | 1.00E−14 |
| | 277 | 278 | | acnes immunogenic | |
| | | | | . . . Aau4245 . . . | |
| 145c | Seq. ID No. | Seq. ID No. | membrane | hypothetical integral | 1.00E−92 |
| | 289 | 290 | | membrane protein, | |
| | | | | Neisseria . . . | |
| 162b | Seq. ID No. | Seq. ID No. | membrane | putative ABC | 2.00E−58 |
| | 329 | 330 | | transporter | |
| | | | | membrane-spannin, | |
| | | | | Strepto . . . | |
| 165b | Seq. ID No. | Seq. ID No. | transport | ABC transporter | 7.00E−90 |
| | 343 | 344 | | ATP-binding protein, | |
| | | | | Lactococcus l . . . | |
| 167 | Seq. ID No. | Seq. ID No. | transport | putative ABC | 5.00E−99 |
| | 345 | 346 | | transporter, | |
| | | | | Enterococcus | |
| | | | | faecium Bac . . . | |
| 180b | Seq. ID No. | Seq. ID No. | membrane | preprotein | 1.00E−101 |
| | 375 | 376 | | translocase, SecY | |
| | | | | subunit, | |
| | | | | Streptococcu . . . | |
| 245c | Seq. ID No. | Seq. ID No. | transporter | uracil permease, | 2.00E−80 |
| | 501 | 502 | | Bacillus caldolyticus | |
| | | | | Bacteria; F . . . | |
| 246b | Seq. ID No. | Seq. ID No. | sporulation | stage V sporulation | 3.00E−46 |
| | 505 | 506 | | protein E, Bacillus | |
| | | | | halodurans . . . | |
| 248b | Seq. ID No. | Seq. ID No. | sporulation | stage V sporulation | 3.00E−46 |
| | 511 | 512 | | protein E, Bacillus | |
| | | | | halodurans . . . | |
| 249b | Seq. ID No. | Seq. ID No. | peptidoglycan | putative | 4.00E−47 |
| | 515 | 516 | | peptidoglycan | |
| | | | | GlcNAc deacetylase, | |
| | | | | Strepto . . . | |
| 255c | Seq. ID No. | Seq. ID No. | transporter | putative | 1.00E−52 |
| | 529 | 530 | | sodium/glucose | |
| | | | | cotransporter, | |
| | | | | Salmonella . . . | |
| 273b | Seq. ID No. | Seq. ID No. | immunogenic | Propionibacterium | 5.00E−56 |
| | 569 | 570 | | acnes immunogenic | |
| | | | | . . . Aau41330 . . . | |
| 277c | Seq. ID No. | Seq. ID No. | lipoprotein | Listeria | 4.00E−91 |
| | 575 | 576 | | monocytogenes | |
| | | | | Bacteria; Firmicutes; | |
| | | | | Bacil . . . | |
| 283b | Seq. ID No. | Seq. ID No. | transport | probable amino acid | 3.00E−19 |
| | 593 | 594 | | ABC transporter, | |
| | | | | Clostridium p . . . | |
| 284a | Seq. ID No. | Seq. ID No. | membrane | membrane protein, | 5.00E−39 |
| | 595 | 596 | | Vibrio harveyi | |
| | | | | Bacteria; Proteob . . . | |
| 311 | Seq. ID No. | Seq. ID No. | transporter | ABC transporter | 5.00E−58 |
| | 637 | 638 | | (ATP-binding | |
| | | | | protein), Bacillus | |
| | | | | ha . . . | |
| 318b | Seq. ID No. | Seq. ID No. | lipoprotein | PUTATIVE OUTER | 4.00E−34 |
| | 659 | 660 | | MEMBRANE | |
| | | | | LIPOPROTEIN, | |
| | | | | Sinorhizobium . . . | |
| 321 | Seq. ID No. | Seq. ID No. | lipoprotein | Staphylococcus | 1.00E−54 |
| | 669 | 670 | | aureus subsp. | |
| | | | | aureus MW2 | |
| | | | | Bacteria; . . . | |
| 324 | Seq. ID No. | Seq. ID No. | lipoprotein | Staphylococcus | 1.00E−55 |
| | 675 | 676 | | aureus subsp. | |
| | | | | aureus MW2 | |
| | | | | Bacteria; . . . | |
| 327c | Seq. ID No. | Seq. ID No. | transport | ABC transporter, | 9.00E−36 |
| | 681 | 682 | | permease protein, | |
| | | | | putative, Strep . . . | |
| 342h | Seq. ID No. | Seq. ID No. | transmembrane | putative | 1.00E−33 |
| | 729 | 730 | | transmembrane | |
| | | | | efflux protein, | |
| | | | | Methanosarc . . . | |
| 358b | Seq. ID No. | Seq. ID No. | transport | transport protein, | 1.00E−119 |
| | 779 | 780 | | Fusobacterium | |
| | | | | nucleatum subsp. . . . | |
| 382b | Seq. ID No. | Seq. ID No. | secreted protein | putative secreted | 2.00E−37 |
| | 819 | 820 | | protein, Listeria | |
| | | | | innocua Bacter . . . | |
| 418b | Seq. ID No. | Seq. ID No. | transport | metal transporting | 1.00E−138 |
| | 895 | 896 | | ATPase, | |
| | | | | Lactococcus lactis | |
| | | | | subs . . . | |
| 427a | Seq. ID No. | Seq. ID No. | capsular | unknown, | 1.00E−46 |
| | 921 | 922 | | Staphylococcus | |
| | | | | aureus Bacteria; | |
| | | | | Firmicute . . . | |
| 431 | Seq. ID No. | Seq. ID No. | protease | Listeria innocua | 2.00E−41 |
| | 935 | 936 | | Bacteria; Firmicutes; | |
| | | | | Bacillus/Cl . . . | |
| 441b | Seq. ID No. | Seq. ID No. | response regulator | histidine kinase | 1.00E−135 |
| | 955 | 956 | | YycG, | |
| | | | | Staphylococcus | |
| | | | | aureus Bacte . . . | |
| 448 | Seq. ID No. | Seq. ID No. | transporter | accessory protein, | 1.00E−17 |
| | 967 | 968 | | Enterococcus | |
| | | | | faecalis subsp. li . . . | |
| 452e | Seq. ID No. | Seq. ID No. | transporter | membrane subunit, | 8.00E−55 |
| | 985 | 986 | | Enterococcus | |
| | | | | faecalis subsp. liq . . . | |
| 464d | Seq. ID No. | Seq. ID No. | membrane | Trk transporter | 4.00E−82 |
| | 1017 | 1018 | | membrane-spanning | |
| | | | | protein - K, Str . . . | |
| 472f | Seq. ID No. | Seq. ID No. | membrane | potassium uptake | 1.00E−73 |
| | 1039 | 1040 | | protein, Trk family, | |
| | | | | Streptococcu . . . | |
| 492 | Seq. ID No. | Seq. ID No. | lipoprotein | putative outer | 4.00E−28 |
| | 1075 | 1076 | | membrane | |
| | | | | lipoprotein, | |
| | | | | Salmonella ty . . . | |
| 499a | Seq. ID No. | Seq. ID No. | phosphatase | Exopolyphosphatase- | 1.00E−110 |
| | 1089 | 1090 | | related proteins, | |
| | | | | Thermoanaerob . . . | |
| 524b | Seq. ID No. | Seq. ID No. | sporulation | stage III sporulation, | 4.00E−38 |
| | 1137 | 1138 | | Bacillus subtilis | |
| | | | | Bacteria; . . . | |
| 561 | Seq. ID No. | Seq. ID No. | membrane | ABC transporter | 2.00E−63 |
| | 1223 | 1224 | | ATP- | |
| | | | | binding/membrane | |
| | | | | spannin, Stre . . . | |
| 573 | Seq. ID No. | Seq. ID No. | transport | ABC-type | 2.00E−61 |
| | 1241 | 1242 | | multidrug/protein/lipid | |
| | | | | transpor, | |
| | | | | Thermoa . . . | |
| 609a | Seq. ID No. | Seq. ID No. | spore | spore wall protein 2 | 6.00E−23 |
| | 1315 | 1316 | | precursor, | |
| | | | | Encephalitozoon | |
| | | | | in . . . | |
| 613d | Seq. ID No. | Seq. ID No. | TRANSMEMBRANE | HYPOTHETICAL | 5.00E−13 |
| | 1331 | 1332 | | TRANSMEMBRANE | |
| | | | | PROTEIN, | |
| | | | | Ralstonia sola . . . | |
| 631d | Seq. ID No. | Seq. ID No. | Signal | PROBABLE 5′- | 4.00E−60 |
| | 1369 | 1370 | | NUCLEOTIDASE | |
| | | | | PRECURSOR | |
| | | | | (SIGNAL, Sinorhi . . . | |
| 687 | Seq. ID No. | Seq. ID No. | transmembrane | Chlamydia | 6.00E−45 |
| | 1459 | 1460 | | pneumoniae | |
| | | | | transmembrane p . . . | |
| | | | | Aay34923 . . . | |
| 722c | Seq. ID No. | Seq. ID No. | immunogenic | Propionibacterium | 3.00E−16 |
| | 1517 | 1518 | | acnes immunogenic | |
| | | | | . . . Aau6647 . . . | |
| 743b | Seq. ID No. | Seq. ID No. | transport | putative alpha- | 2.00E−27 |
| | 1561 | 1562 | | glucosidase, | |
| | | | | Alicyclobacillus | |
| | | | | acido . . . | |
| 744 | Seq. ID No. | Seq. ID No. | transport | Glicerol-3-phosphate | 1.00E−93 |
| | 1563 | 1564 | | ABC-transporter, | |
| | | | | Clostridium . . . | |
| 745b | Seq. ID No. | Seq. ID No. | transport | Glycerol-3- | 2.00E−49 |
| | 1567 | 1568 | | phosphate ABC- | |
| | | | | transporter, | |
| | | | | permeas, Clo . . . | |
| 746b | Seq. ID No. | Seq. ID No. | transport | glycerol-3-phosphate | 1.00E−51 |
| | 1571 | 1572 | | ABC transporter | |
| | | | | (permease), B . . . | |
| 747 | Seq. ID No. | Seq. ID No. | transport | Multiple sugar- | 2.00E−95 |
| | 1573 | 1574 | | binding ABC- | |
| | | | | transporter, MSM, | |
| | | | | Clost . . . | |
| 762b | Seq. ID No. | Seq. ID No. | cpsL | transposase, | 5.00E−44 |
| | 1601 | 1602 | | Streptococcus | |
| | | | | pneumoniae | |
| | | | | Bacteria; Fi . . . | |
| 763b | Seq. ID No. | Seq. ID No. | capsular | transposase, | 4.00E−16 |
| | 1607 | 1608 | | Staphylococcus | |
| | | | | aureus Bacteria; | |
| | | | | Firmi . . . | |
| 767 | Seq. ID No. | Seq. ID No. | capsular | transposase, | 4.00E−14 |
| | 1613 | 1614 | | Staphylococcus | |
| | | | | aureus Bacteria; | |
| | | | | Firmi . . . | |
| 770c | Seq. ID No. | Seq. ID No. | transport | acetylornitine | 2.00E−32 |
| | 1619 | 1620 | | deacetylase, Bacillus | |
| | | | | subtilis Bact . . . | |
| 785 | Seq. ID No. | Seq. ID No. | phosphatase | phosphatase, | 9.00E−29 |
| | 1641 | 1642 | | Lactococcus lactis | |
| | | | | subsp. lactis Bact . . . | |
| 788b | Seq. ID No. | Seq. ID No. | transport | Staphylococcus | 1.00E−19 |
| | 1647 | 1648 | | aureus subsp. | |
| | | | | aureus MW2 | |
| | | | | Bacteria; . . . | |
| 789c | Seq. ID No. | Seq. ID No. | transport | Staphylococcus | 3.00E−31 |
| | 1653 | 1654 | | aureus subsp. | |
| | | | | aureus MW2 | |
| | | | | Bacteria; . . . | |
| 792 | Seq. ID No. | Seq. ID No. | transport | Staphylococcus | 2.00E−87 |
| | 1657 | 1658 | | aureus subsp. | |
| | | | | aureus N315 | |
| | | | | Bacteria; . . . | |
| 794d | Seq. ID No. | Seq. ID No. | transporter | alkylphosphonate | 4.00E−26 |
| | 1665 | 1666 | | ABC tranporte, | |
| | | | | Bacillus haloduran . . . | |
| 813 | Seq. ID No. | Seq. ID No. | transporter | cadmium resistance | 3.00E−57 |
| | 1699 | 1700 | | transporter, putative, | |
| | | | | Streptoc . . . | |
| 830 | Seq. ID No. | Seq. ID No. | cpsA | Thermostable | 1.00E−50 |
| | 1713 | 1714 | | carboxypeptidase | |
| | | | | (cpsA-2), | |
| | | | | Sulfolobus . . . | |
| 851b | Seq. ID No. | Seq. ID No. | penicillin | B. lactofermentum | 3.00E−23 |
| | 1751 | 1752 | | penicillin binding . . . | |
| | | | | Aay33117 . . . | |
| 859d | Seq. ID No. | Seq. ID No. | transport | putative cation | 1.00E−146 |
| | 1771 | 1772 | | transporting P-ty . . . | |
| | | | | AF067954 . . . | |
| 866b | Seq. ID No. | Seq. ID No. | membrane | ATPase, Bacillus | 1.00E−124 |
| | 1785 | 1786 | | subtilis Bacteria; | |
| | | | | Firmicutes; GE . . . | |
| 868b | Seq. ID No. | Seq. ID No. | transporter | betaine ABC | 1.00E−71 |
| | 1789 | 1790 | | transporter | |
| | | | | permease and | |
| | | | | substrat, Lac . . . | |
| 870 | Seq. ID No. | Seq. ID No. | transporter | Pseudogene, similar | 1.00E−80 |
| | 1791 | 1792 | | to glycine-betaine | |
| | | | | bindin, Lis . . . | |
| 873c | Seq. ID No. | Seq. ID No. | transporter | Pseudogene, similar | 2.00E−73 |
| | 1797 | 1798 | | to glycine-betaine | |
| | | | | bindin, Lis . . . | |
| 878c | Seq. ID No. | Seq. ID No. | hemolysin | Alpha-hemolysin, | 1.00E−20 |
| | 1811 | 1812 | | Fusobacterium | |
| | | | | nucleatum subsp. | |
| | | | | nu . . . | |
| 880c | Seq. ID No. | Seq. ID No. | response regulator | putative response | 5.00E−76 |
| | 1817 | 1818 | | regulator, | |
| | | | | Lactobacillus sakei | |
| | | | | B . . . | |
| 885 | Seq. ID No. | Seq. ID No. | response regulator | putative histidine | 1.00E−82 |
| | 1819 | 1820 | | kinase, Lactobacillus | |
| | | | | sakei Bac . . . | |
| 886 | Seq. ID No. | Seq. ID No. | penicillin | D-alanine | 4.00E−55 |
| | 1821 | 1822 | | carboxypeptidase | |
| | | | | (PBP-5), Bacillus | |
| | | | | subti . . . | |
| 929b | Seq. ID No. | Seq. ID No. | membrane | PROBABLE | 1.00E−117 |
| | 1871 | 1872 | | BIFUNCTIONAL, | |
| | | | | Ralstonia | |
| | | | | solanacearum Bac . . . | |
| 939c | Seq. ID No. | Seq. ID No. | transporter | branch-chain amino | 3.00E−64 |
| | 1895 | 1896 | | acid transporter, | |
| | | | | Bacillus subt . . . | |
| 946 | Seq. ID No. | Seq. ID No. | phosphatase | deoxyuridine 5′- | 3.00E−30 |
| | 1905 | 1906 | | triphosphate | |
| | | | | nucleotidhydrolase, | |
| | | | | L . . . | |
| 949d | Seq. ID No. | Seq. ID No. | PROTEASE | PROBABLE ATP- | 1.00E−101 |
| | 1913 | 1914 | | DEPENDENT | |
| | | | | PROTEASE, . . . | |
| | | | | AL646064 . . . | |
| 951b | Seq. ID No. | Seq. ID No. | transporter | Pseudogene, similar | 4.00E−76 |
| | 1919 | 1920 | | to glycine-betaine | |
| | | | | bindin, Lis . . . | |
| 952b | Seq. ID No. | Seq. ID No. | Membrane | Membrane- | 3.00E−68 |
| | 1923 | 1924 | | associated protein | |
| | | | | containing a homolo, | |
| | | | | C . . . | |
| 972b | Seq. ID No. | Seq. ID No. | phosphatase | exopolyphosphatase, | 3.00E−60 |
| | 1965 | 1966 | | Bacillus halodurans | |
| | | | | Bacteria; . . . | |
| 977b | Seq. ID No. | Seq. ID No. | lipoprotein | PUTATIVE OUTER | 1.00E−50 |
| | 1971 | 1972 | | MEMBRANE | |
| | | | | LIPOPROTEIN, | |
| | | | | Sinorhizobium . . . | |
| 988d | Seq. ID No. | Seq. ID No. | membrane | putative conserved | 3.00E−35 |
| | 1999 | 2000 | | membrane protein, | |
| | | | | Listeria mono . . . | |
| 1016c | Seq. ID No. | Seq. ID No. | transporter | Na+ ABC transporter | 1.00E−41 |
| | 2047 | 2048 | | (ATP-binding | |
| | | | | protein), NATA, C . . . | |
| 1017d | Seq. ID No. | Seq. ID No. | transporter | Na+ ABC | 2.00E−17 |
| | 2055 | 2056 | | transporter, NATB, | |
| | | | | Clostridium | |
| | | | | acetobutyli . . . | |
| 1036c | Seq. ID No. | Seq. ID No. | transporter | Listeria | 1.00E−126 |
| | 2091 | 2092 | | monocytogenes | |
| | | | | Bacteria; Firmicutes; | |
| | | | | Bacil . . . | |
| 1037 | Seq. ID No. | Seq. ID No. | transporter | Glutamine ABC | 1.00E−93 |
| | 2093 | 2094 | | transporter (ATP- | |
| | | | | binding protein), C . . . | |
| 1047b | Seq. ID No. | Seq. ID No. | adhesion | YcdH, Bacillus | 3.00E−35 |
| | 2115 | 2116 | | subtilis Bacteria; | |
| | | | | Firmicutes; Baci . . . | |
| 1049b | Seq. ID No. | Seq. ID No. | transporter | Listeria innocua | 8.00E−92 |
| | 2119 | 2120 | | Bacteria; Firmicutes; | |
| | | | | Bacillus/Cl . . . | |
| 1050d | Seq. ID No. | Seq. ID No. | membrane | Listeria innocua | 4.00E−71 |
| | 2127 | 2128 | | Bacteria; Firmicutes; | |
| | | | | Bacillus/Cl . . . | |
| 1070b | Seq. ID No. | Seq. ID No. | sporulation | stage V sporulation | 3.00E−47 |
| | 2165 | 2166 | | protein C (peptidyl- | |
| | | | | tRN, Bacil . . . | |
| 1077e | Seq. ID No. | Seq. ID No. | membrane | Listeria innocua | 3.00E−53 |
| | 2179 | 2180 | | Bacteria; Firmicutes; | |
| | | | | Bacillus/Cl . . . | |
| 1094b | Seq. ID No. | Seq. ID No. | membrane | S. pneumoniae | 0 |
| | 2207 | 2208 | | putative ATPase | |
| | | | | involved in | |
| | | | | membrane . . . | |
| 1100 | Seq. ID No. | Seq. ID No. | transporter | probable ABC | 9.00E−27 |
| | 2223 | 2224 | | transporter, | |
| | | | | Clostridium | |
| | | | | perfringens . . . | |
| 1101b | Seq. ID No. | Seq. ID No. | transporter | ABC transporter | 2.00E−15 |
| | 2227 | 2228 | | ATP-binding protein, | |
| | | | | Xanthomonas a . . . | |
| 1111c | Seq. ID No. | Seq. ID No. | membrane | Listeria innocua | 2.00E−49 |
| | 2241 | 2242 | | Bacteria; Firmicutes; | |
| | | | | Bacillus/Cl . . . | |
| 1127 | Seq. ID No. | Seq. ID No. | transporter | ABC transporter | 7.00E−35 |
| | 2253 | 2254 | | ATP-binding protein, | |
| | | | | Clostridium a . . . | |
| 1135b | Seq. ID No. | Seq. ID No. | lipoprotein | putative lipoprotein, | 5.00E−29 |
| | 2263 | 2264 | | Streptomyces | |
| | | | | coelicolor A3(2 . . . | |
| 1138 | Seq. ID No. | Seq. ID No. | capsular | unknown, | 9.00E−60 |
| | 2269 | 2270 | | Staphylococcus | |
| | | | | aureus Bacteria; | |
| | | | | Firmicute . . . | |
| 1140c | Seq. ID No. | Seq. ID No. | transport | Listeria innocua | 2.00E−85 |
| | 2275 | 2276 | | Bacteria; Firmicutes; | |
| | | | | Bacillus/Cl . . . | |
| 1149 | Seq. ID No. | Seq. ID No. | transporter | putative ABC- | 1.00E−106 |
| | 2301 | 2302 | | transporter ATP- | |
| | | | | bind . . . AL627273 . . . | |
| 1152g | Seq. ID No. | Seq. ID No. | transporter | dipeptide ABC | 1.00E−49 |
| | 2315 | 2316 | | transporter, | |
| | | | | permease protei, | |
| | | | | Helico . . . | |
| 1155g | Seq. ID No. | Seq. ID No. | transporter | Staphylococcus | 3.00E−80 |
| | 2329 | 2330 | | aureus subsp. | |
| | | | | aureus MW2 | |
| | | | | Bacteria; . . . | |
| 1158b | Seq. ID No. | Seq. ID No. | lipoprotein | RGD-containing | 2.00E−94 |
| | 2333 | 2334 | | lipoprotein, | |
| | | | | Staphylococcus | |
| | | | | aureus . . . | |
| 1165 | Seq. ID No. | Seq. ID No. | peptidoglycan | peptidoglycan lytic | 1.00E−29 |
| | 2343 | 2344 | | protein P45, Listeria | |
| | | | | innocua . . . | |
| 1166 | Seq. ID No. | Seq. ID No. | Response regulator | Response regulator | 1.00E−42 |
| | 2345 | 2346 | | (CheY-like domain, | |
| | | | | HT, Clostrid . . . | |
| 1171c | Seq. ID No. | Seq. ID No. | membrane | ABC-type | 1.00E−20 |
| | 2363 | 2364 | | transmembrane | |
| | | | | transport protein, | |
| | | | | Campylob . . . | |
| 1177 | Seq. ID No. | Seq. ID No. | capsular | capsular | 3.00E−11 |
| | 2373 | 2374 | | polysaccharide | |
| | | | | biosynthesi . . . | |
| | | | | U67548 . . . | |
| 1180e | Seq. ID No. | Seq. ID No. | wall | unknown protein, | 3.00E−66 |
| | 2391 | 2392 | | Streptococcus | |
| | | | | mutans Bacteria; | |
| | | | | Fi . . . | |
| 1191 | Seq. ID No. | Seq. ID No. | transporter | putative ABC | 3.00E−70 |
| | 2417 | 2418 | | transporter (ATP- | |
| | | | | binding protein), | |
| | | | | St . . . | |
| 1197 | Seq. ID No. | Seq. ID No. | Periplasmic | Periplasmic serine | 2.00E−37 |
| | 2429 | 2430 | | proteases (ClpP | |
| | | | | class), Thermoa . . . | |
| 1214 | Seq. ID No. | Seq. ID No. | protease | Listeria innocua | 4.00E−35 |
| | 2465 | 2466 | | Bacteria; Firmicutes; | |
| | | | | Bacillus/Cl . . . | |
| 1218b | Seq. ID No. | Seq. ID No. | protease | glycoprotease family | 1.00E−115 |
| | 2475 | 2476 | | protein, | |
| | | | | Streptococcus | |
| | | | | pneumo . . . | |
| 1221b | Seq. ID No. | Seq. ID No. | transporter | hypothetical ABC | 1.00E−155 |
| | 2483 | 2484 | | transporter ATP- | |
| | | | | bindin, Staphyloc . . . | |
| 1233c | Seq. ID No. | Seq. ID No. | transporter | putative ATP-binding | 6.00E−26 |
| | 2513 | 2514 | | component of a | |
| | | | | transpor, Esch . . . | |
| 1237 | Seq. ID No. | Seq. ID No. | wall | YocH, Bacillus | 4.00E−14 |
| | 2525 | 2526 | | subtilis Bacteria; | |
| | | | | Firmicutes; Baci . . . | |
| 1258d | Seq. ID No. | Seq. ID No. | transporter | P-type ATPase - | 1.00E−159 |
| | 2589 | 2590 | | calcium transporter, | |
| | | | | Streptococcus . . . | |
| 1271 | Seq. ID No. | Seq. ID No. | transporter | Met, Streptococcus | 4.00E−99 |
| | 2613 | 2614 | | pneumoniae | |
| | | | | Bacteria; | |
| | | | | Firmicutes . . . | |
| 1288 | Seq. ID No. | Seq. ID No. | membrane | membrane bound | 3.00E−42 |
| | 2651 | 2652 | | protein, Bacillus | |
| | | | | subtilis Bacteria . . . | |
| 1300 | Seq. ID No. | Seq. ID No. | transport | secretory protein for | 1.00E−121 |
| | 2669 | 2670 | | transport of . . . | |
| | | | | X65961 . . . | |
| 1305c | Seq. ID No. | Seq. ID No. | transporter | cell division ABC | 7.00E−81 |
| | 2677 | 2678 | | transporter, ATP- | |
| | | | | bindin, Strepto . . . | |
| 1308e | Seq. ID No. | Seq. ID No. | transporter | cell division ABC | 4.00E−47 |
| | 2687 | 2688 | | transporter, | |
| | | | | permease protei, | |
| | | | | St . . . | |
| 1311 | Seq. ID No. | Seq. ID No. | response regulator | two-component | 3.00E−79 |
| | 2689 | 2690 | | response regulator | |
| | | | | involved i, Bacil . . . | |
| 1315 | Seq. ID No. | Seq. ID No. | Membrane | Membrane- | 1.00E−36 |
| | 2693 | 2694 | | associated sensory | |
| | | | | histi . . . AE007774 . . . | |
| 1319b | Seq. ID No. | Seq. ID No. | membrane | ABC transporter | 7.00E−90 |
| | 2703 | 2704 | | membrane-spanning | |
| | | | | permease , Strep . . . | |
| 1320c | Seq. ID No. | Seq. ID No. | transmembrane | phosphate ABC | 1.00E−78 |
| | 2709 | 2710 | | transporter, | |
| | | | | permease protein, | |
| | | | | Strep . . . | |
| 1322b | Seq. ID No. | Seq. ID No. | transport | Listeria | 1.00E−29 |
| | 2715 | 2716 | | monocytogenes | |
| | | | | Bacteria; Firmicutes; | |
| | | | | Bacil . . . | |
| 1344b | Seq. ID No. | Seq. ID No. | lipoprotein | putative HPr(ser) | 8.00E−79 |
| | 2751 | 2752 | | kinase, | |
| | | | | Streptococcus | |
| | | | | mutans Bac . . . | |
| 1348 | Seq. ID No. | Seq. ID No. | lipoprotein | Listeria | 2.00E−66 |
| | 2753 | 2754 | | monocytogenes | |
| | | | | Bacteria; Firmicutes; | |
| | | | | Bacil . . . | |
| 1355 | Seq. ID No. | Seq. ID No. | Capsular | Capsular | 1.00E−103 |
| | 2767 | 2768 | | polysaccharide of | |
| | | | | Streptoco . . . | |
| | | | | Aar83041 . . . | |
| 1366b | Seq. ID No. | Seq. ID No. | protease | protease ClpP, | 1.00E−81 |
| | 2787 | 2788 | | Listeria | |
| | | | | monocytogenes | |
| | | | | Bacteria; Fi . . . | |
| 1368 | Seq. ID No. | Seq. ID No. | receptor | plasmin receptor, | 1.00E−100 |
| | 2791 | 2792 | | Streptococcus | |
| | | | | pyogenes | |
| | | | | Bacteria; . . . | |
| 1377 | Seq. ID No. | Seq. ID No. | iron | enolase, | 2.00E−66 |
| | 2803 | 2804 | | Spironucleus vortens | |
| | | | | Euk . . . AF159517 . . . | |
| 1408 | Seq. ID No. | Seq. ID No. | transporter | ABC transporter, | 1.00E−116 |
| | 2867 | 2868 | | Lactobacillus | |
| | | | | plantarum | |
| | | | | Bacteria; . . . | |
| 1410 | Seq. ID No. | Seq. ID No. | transport | bacillus subtilis. | 1.00E−39 |
| | 2871 | 2872 | | hypothetical abc | |
| | | | | transporter at . . . | |
| 1426b | Seq. ID No. | Seq. ID No. | polysaccharide | Orfde2, | 3.00E−24 |
| | 2907 | 2908 | | Enterococcus | |
| | | | | faecalis Bacteria; | |
| | | | | Firmicutes . . . | |
| 1431 | Seq. ID No. | Seq. ID No. | transporter | Bacillus subtilis | 1.00E−100 |
| | 2919 | 2920 | | Bacteria; Firmicutes; | |
| | | | | Bacillus/C . . . | |
| 1432 | Seq. ID No. | Seq. ID No. | transporter | predicted membrane | 3.00E−38 |
| | 2921 | 2922 | | components of a, | |
| | | | | Thermoanaeroba . . . | |
| 1433 | Seq. ID No. | Seq. ID No. | immunogenic | Propionibacterium | 1.00E−111 |
| | 2923 | 2924 | | acnes immunogenic | |
| | | | | . . . Aau55208 . . . | |
| 1434b | Seq. ID No. | Seq. ID No. | iron | Bacillus subtilis | 8.00E−37 |
| | 2927 | 2928 | | Bacteria; Firmicutes; | |
| | | | | Bacillus/C . . . | |
| 1437c | Seq. ID No. | Seq. ID No. | transporter | ABC transporter | 1.00E−102 |
| | 2933 | 2934 | | subunit, | |
| | | | | Synechocys . . . | |
| | | | | D64004 . . . | |
| 1442b | Seq. ID No. | Seq. ID No. | transporter | ABC transporter | 2.00E−47 |
| | 2957 | 2958 | | (ATP-binding | |
| | | | | protein), Bacillus | |
| | | | | ha . . . | |
| 1451 | Seq. ID No. | Seq. ID No. | transporter | ABC transporter, | 1.00E−23 |
| | 2979 | 2980 | | ATP-binding protein, | |
| | | | | Streptococcu . . . | |
| 1457c | Seq. ID No. | Seq. ID No. | transporter | Na/Pi cotransporter | 1.00E−118 |
| | 2999 | 3000 | | II-related protein, | |
| | | | | Streptococ . . . | |
| 1462b | Seq. ID No. | Seq. ID No. | transporter | probable ABC | 1.00E−111 |
| | 3005 | 3006 | | transporter (ATP- | |
| | | | | binding protein), | |
| | | | | Ye . . . | |
| 1466d | Seq. ID No. | Seq. ID No. | membrane | ABC transporter | 1.00E−115 |
| | 3019 | 3020 | | ATP- | |
| | | | | binding/membrane | |
| | | | | spannin, Stre . . . | |
| 1470b | Seq. ID No. | Seq. ID No. | membrane | Integral membrane | 2.00E−11 |
| | 3031 | 3032 | | protein, | |
| | | | | Fusobacterium | |
| | | | | nucleatum . . . | |
| 1471 | Seq. ID No. | Seq. ID No. | channel | potassium channel | 6.00E−20 |
| | 3035 | 3036 | | protein, | |
| | | | | Methanosarcina | |
| | | | | acetivor . . . | |
| 1479c | Seq. ID No. | Seq. ID No. | wall | Listeria | 2.00E−15 |
| | 3055 | 3056 | | monocytogenes | |
| | | | | Bacteria; Firmicutes; | |
| | | | | Bacil . . . | |
| 1484c | Seq. ID No. | Seq. ID No. | transporter | magnesium (Mg2+) | 2.00E−65 |
| | 3067 | 3068 | | transporter, Bacillus | |
| | | | | halodurans . . . | |
| 1488g | Seq. ID No. | Seq. ID No. | transporter | Staphylococcus | 2.00E−55 |
| | 3085 | 3086 | | aureus subsp. | |
| | | | | aureus N315 | |
| | | | | Bacteria; . . . | |
| 1530b | Seq. ID No. | Seq. ID No. | peptidoglycan | Penicillin-binding | 1.00E−120 |
| | 3165 | 3166 | | protein 1b, | |
| | | | | Streptococcus | |
| | | | | pneum . . . | |
| 1543 | Seq. ID No. | Seq. ID No. | invasion | extracellular protein, | 2.00E−26 |
| | 3183 | 3184 | | Listeria welshimeri | |
| | | | | Bacteri . . . | |
| 1547b | Seq. ID No. | Seq. ID No. | spore | Bacillus subtilis | 2.00E−71 |
| | 3189 | 3190 | | Bacteria; Firmicutes; | |
| | | | | Bacillus/C . . . | |
| 1553b | Seq. ID No. | Seq. ID No. | transporter | putative ABC | 3.00E−55 |
| | 3197 | 3198 | | transporter subunit | |
| | | | | ComYA, | |
| | | | | Streptococ . . . | |
| 1556c | Seq. ID No. | Seq. ID No. | transporter | Na+ ABC transporter | 1.00E−36 |
| | 3211 | 3212 | | (ATP-binding | |
| | | | | protein), NATA, C . . . | |
| 1573 | Seq. ID No. | Seq. ID No. | transporter | ABC transporter, | 2.00E−42 |
| | 3251 | 3252 | | ATP-binding protein, | |
| | | | | Streptococcu . . . | |
| 1577b | Seq. ID No. | Seq. ID No. | transport | drug efflux ABC | 7.00E−12 |
| | 3257 | 3258 | | transporter, | |
| | | | | Streptococcus | |
| | | | | pneumon . . . | |
| 1578 | Seq. ID No. | Seq. ID No. | transport | ABC transporter, | 7.00E−34 |
| | 3259 | 3260 | | Lactobacillus | |
| | | | | helveticus | |
| | | | | Bacteria . . . | |
| 1594a | Seq. ID No. | Seq. ID No. | transmembrane | Chlamydia | 9.00E−22 |
| | 3297 | 3298 | | pneumoniae | |
| | | | | transmembrane p . . . | |
| | | | | Aay35379 . . . | |
| 1606b | Seq. ID No. | Seq. ID No. | response regulator | putative histidine | 4.00E−69 |
| | 3319 | 3320 | | protein kinase, | |
| | | | | Lactococcus lac . . . | |
| 1607b | Seq. ID No. | Seq. ID No. | lipoprotein | YqjG, Bacillus | 7.00E−30 |
| | 3323 | 3324 | | subtilis Bacteria; | |
| | | | | Firmicutes; Baci . . . | |
| 1616b | Seq. ID No. | Seq. ID No. | sporulation | Staphylococcus | 1.00E−156 |
| | 3335 | 3336 | | aureus subsp. | |
| | | | | aureus MW2 | |
| | | | | Bacteria; . . . | |
| 1619 | Seq. ID No. | Seq. ID No. | lipoprotein | CD4+ T cell- | 4.00E−81 |
| | 3337 | 3338 | | stimulating antigen, | |
| | | | | lipoprotein, List . . . | |
| 1625c | Seq. ID No. | Seq. ID No. | transport | putative sugar ABC | 3.00E−76 |
| | 3355 | 3356 | | transporter | |
| | | | | (permeas, | |
| | | | | Streptoco . . . | |
| 1626b | Seq. ID No. | Seq. ID No. | membrane | sugar ABC | 7.00E−97 |
| | 3359 | 3360 | | transporter, | |
| | | | | permease protein, | |
| | | | | Streptoco . . . | |
| 1634c | Seq. ID No. | Seq. ID No. | peptidoglycan | beta-1,4-N- | 4.00E−34 |
| | 3377 | 3378 | | acetylmuramoylhydro- | |
| | | | | lase, Enterococcus | |
| | | | | h . . . | |
| 1646e | Seq. ID No. | Seq. ID No. | polysaccharide | putative | 3.00E−78 |
| | 3397 | 3398 | | polysaccharide | |
| | | | | biosynthesis protein, | |
| | | | | Stre . . . | |
| 1649a | Seq. ID No. | Seq. ID No. | penicillin | Streptococcus | 7.00E−35 |
| | 3405 | 3406 | | thermophilus | |
| | | | | Bacteria; Firmicutes; | |
| | | | | G . . . | |
| 1654 | Seq. ID No. | Seq. ID No. | immunogenic | Propionibacterium | 8.00E−24 |
| | 3415 | 3416 | | acnes immunogenic | |
| | | | | . . . Aau49489 . . . | |
| 1659c | Seq. ID No. | Seq. ID No. | membrane | putative integral | 2.00E−93 |
| | 3425 | 3426 | | membrane protein, | |
| | | | | Campylobacter . . . | |
| 1660b | Seq. ID No. | Seq. ID No. | membrane | putative integral | 1.00E−24 |
| | 3427 | 3428 | | membrane protein, | |
| | | | | Campylobacter . . . | |
| 1674 | Seq. ID No. | Seq. ID No. | membrane | putative integral | 9.00E−15 |
| | 3461 | 3462 | | membrane protein, | |
| | | | | Campylobacter . . . | |
| 1675a | Seq. ID No. | Seq. ID No. | immunogenic | Propionibacterium | 3.00E−24 |
| | 3463 | 3464 | | acnes immunogenic | |
| | | | | . . . Aau47623 . . . | |
| 1685 | Seq. ID No. | Seq. ID No. | immunogenic | Propionibacterium | 2.00E−50 |
| | 3487 | 3488 | | acnes immunogenic | |
| | | | | . . . Aau58232 . . . | |
| 1688b | Seq. ID No. | Seq. ID No. | polysaccharide | Orfde3, | 5.00E−87 |
| | 3493 | 3494 | | Enterococcus | |
| | | | | faecalis Bacteria; | |
| | | | | Firmicutes . . . | |
| 1689a | Seq. ID No. | Seq. ID No. | cps7H | putative | 5.00E−38 |
| | 3497 | 3498 | | glycosyltransferase | |
| | | | | Cps7H, | |
| | | | | Streptococcus . . . | |
| 1691 | Seq. ID No. | Seq. ID No. | membrane | Hypothetical | 6.00E−12 |
| | 3507 | 3508 | | membrane-spanning | |
| | | | | protein, | |
| | | | | Fusobacter . . . | |
| 1694d | Seq. ID No. | Seq. ID No. | membrane | membrane bound | 1.00E−68 |
| | 3519 | 3520 | | protein, Bacillus | |
| | | | | subtilis Bacteria . . . | |
| 1696 | Seq. ID No. | Seq. ID No. | transport | UDP-Glc-6- | 1.00E−155 |
| | 3521 | 3522 | | dehydrogenase Ugd, | |
| | | | | Escherichia coli | |
| | | | | Bact . . . | |
| 1699b | Seq. ID No. | Seq. ID No. | transport | probable export | 4.00E−28 |
| | 3529 | 3530 | | protein, Escherichia | |
| | | | | coli K12 Bact . . . | |
| 1701a | Seq. ID No. | Seq. ID No. | immunogenic | Propionibacterium | 4.00E−34 |
| | 3535 | 3536 | | acnes immunogenic | |
| | | | | . . . Aau67497 . . . | |
| 1752b | Seq. ID No. | Seq. ID No. | surface | streptococcal | 7.00E−14 |
| | 3629 | 3630 | | surface protein, | |
| | | | | Streptococcus | |
| | | | | dysga . . . | |
| 1756b | Seq. ID No. | Seq. ID No. | membrane | hypothetical | 1.00E−31 |
| | 3635 | 3636 | | membrane protein | |
| | | | | LaaO, Lactobacillus | |
| | | | | . . . | |
| 1798c | Seq. ID No. | Seq. ID No. | membrane | Uncharacterized | 1.00E−13 |
| | 3727 | 3728 | | membrane protein, | |
| | | | | homolog o, Clost . . . | |
| 1808d | Seq. ID No. | Seq. ID No. | membrane | mbh8 NADH | 7.00E−43 |
| | 3759 | 3760 | | dehydrogenase | |
| | | | | subunit - integra, | |
| | | | | Pyrococ . . . | |
| 1809f | Seq. ID No. | Seq. ID No. | membrane | mbh8 NADH | 2.00E−48 |
| | 3771 | 3772 | | dehydrogenase | |
| | | | | subunit - integra, | |
| | | | | Pyrococ . . . | |
| 1816a | Seq. ID No. | Seq. ID No. | peptidoglycan | Penicillin-binding | 1.00E−124 |
| | 3793 | 3794 | | protein 1A, | |
| | | | | Streptococcus | |
| | | | | pneum . . . | |
| 1838b | Seq. ID No. | Seq. ID No. | transport | ABC-type | 6.00E−57 |
| | 3839 | 3840 | | multidrug/protein/lipid | |
| | | | | transpor, | |
| | | | | Thermoa . . . | |
| 1842b | Seq. ID No. | Seq. ID No. | protease | sac operon related | 1.00E−22 |
| | 3851 | 3852 | | regulation protein, | |
| | | | | Bacillus sp . . . | |
| 1845c | Seq. ID No. | Seq. ID No. | channel | voltage-gated | 4.00E−63 |
| | 3863 | 3864 | | chloride channel | |
| | | | | family protein, Str . . . | |
| 1848a | Seq. ID No. | Seq. ID No. | membrane | Integral membrane | 6.00E−24 |
| | 3865 | 3866 | | protein, | |
| | | | | Fusobacterium | |
| | | | | nucleatum . . . | |
| 1855 | Seq. ID No. | Seq. ID No. | capsule | Regulatory function | 1.00E−13 |
| | 3883 | 3884 | | on capsule ex . . . | |
| | | | | AE008458 . . . | |
| 1857c | Seq. ID No. | Seq. ID No. | polysaccharide | Staphylococcus | 7.00E−15 |
| | 3891 | 3892 | | aureus subsp. | |
| | | | | aureus N315 | |
| | | | | Bacteria; . . . | |
| 1865b | Seq. ID No. | Seq. ID No. | membrane | Listeria innocua | 2.00E−40 |
| | 3913 | 3914 | | Bacteria; Firmicutes; | |
| | | | | Bacillus/Cl . . . | |
| 1873c | Seq. ID No. | Seq. ID No. | protease | OrfRM1, Bacillus | 8.00E−91 |
| | 3925 | 3926 | | subtilis Bacteria; | |
| | | | | Firmicutes; GE . . . | |
| 1875c | Seq. ID No. | Seq. ID No. | Signal | ref\|NP_655047.1\| | 1.00E−32 |
| | 3929 | 3930 | | (NC_003995) | |
| | | | | Peptidase_S26, | |
| | | | | Signal . . . | |
| 1898b | Seq. ID No. | Seq. ID No. | membrane | Hypothetical | 6.00E−32 |
| | 3975 | 3976 | | membrane-spanning | |
| | | | | protein, | |
| | | | | Fusobacter . . . | |
| 1902a | Seq. ID No. | Seq. ID No. | capsular | DNA topoisomerase | 0 |
| | 3981 | 3982 | | IV subunit B, | |
| | | | | Streptococcus | |
| | | | | agal . . . | |
| 1931b | Seq. ID No. | Seq. ID No. | transport | transporter protein, | 3.00E−22 |
| | 4027 | 4028 | | Haemophilus | |
| | | | | influenzae Rd Bac . . . | |
| 1936 | Seq. ID No. | Seq. ID No. | transport | Bacillus subtilis | 2.00E−18 |
| | 4039 | 4040 | | Bacteria; Firmicutes; | |
| | | | | Bacillus/C . . . | |
| 1941b | Seq. ID No. | Seq. ID No. | Membrane | Membrane | 6.00E−18 |
| | 4061 | 4062 | | associated histidine | |
| | | | | kinase-lik, Clostrid . . . | |
| 1946b | Seq. ID No. | Seq. ID No. | transport | probable amino acid | 2.00E−56 |
| | 4073 | 4074 | | transport protein, | |
| | | | | Clostridium . . . | |
| 1951a | Seq. ID No. | Seq. ID No. | membrane | ABC-type | 1.00E−137 |
| | 4081 | 4082 | | multidrug/protein/lipid | |
| | | | | transpor, Clostri . . . | |
| 1958b | Seq. ID No. | Seq. ID No. | membrane | ABC transporter | 8.00E−44 |
| | 4103 | 4104 | | membrane-spanning | |
| | | | | permease, Strep . . . | |
| 1960c | Seq. ID No. | Seq. ID No. | transport | ABC transporter | 3.00E−68 |
| | 4111 | 4112 | | substrate-binding | |
| | | | | protein, Strept . . . | |
| 1973 | Seq. ID No. | Seq. ID No. | peptidoglycan | peptidoglycan N- | 1.00E−15 |
| | 4137 | 4138 | | acetylglucosamine | |
| | | | | deacetylase A, S . . . | |
| 2016c | Seq. ID No. | Seq. ID No. | transport | Listeria | 2.00E−20 |
| | 4225 | 4226 | | monocytogenes | |
| | | | | Bacteria; Firmicutes; | |
| | | | | Bacil . . . | |
| 2024b | Seq. ID No. | Seq. ID No. | penicillin | Listeria | 1.00E−132 |
| | 4247 | 4248 | | monocytogenes | |
| | | | | Bacteria; Firmicutes; | |
| | | | | Bacil . . . | |
| 2074b | Seq. ID No. | Seq. ID No. | wall | Bacillus subtilis | 2.00E−26 |
| | 4343 | 4344 | | Bacteria; Firmicutes; | |
| | | | | Bacillus/C . . . | |
| 2092 | Seq. ID No. | Seq. ID No. | response regulator | Hpk1, Streptococcus | 2.00E−22 |
| | 4379 | 4380 | | thermophilus | |
| | | | | Bacteria; Firmicu . . . | |
| 2096c | Seq. ID No. | Seq. ID No. | transport | Staphylococcus | 1.00E−61 |
| | 4389 | 4390 | | aureus subsp. | |
| | | | | aureus MW2 | |
| | | | | Bacteria; . . . | |
| 2140a | Seq. ID No. | Seq. ID No. | protease | Listeria innocua | 6.00E−55 |
| | 4469 | 4470 | | Bacteria; Firmicutes; | |
| | | | | Bacillus/Cl . . . | |
| 2142a | Seq. ID No. | Seq. ID No. | phosphatidate | putative | 1.00E−11 |
| | 4473 | 4474 | | phosphatidate | |
| | | | | cytidylyltransferas, | |
| | | | | Strept . . . | |
| 2146 | Seq. ID No. | Seq. ID No. | lipoprotein | Listeria innocua | 1.00E−68 |
| | 4481 | 4482 | | Bacteria; Firmicutes; | |
| | | | | Bacillus/Cl . . . | |
| 2147b | Seq. ID No. | Seq. ID No. | transport | Listeria | 5.00E−41 |
| | 4485 | 4486 | | monocytogenes | |
| | | | | Bacteria; Firmicutes; | |
| | | | | Bacil . . . | |
| 2150a | Seq. ID No. | Seq. ID No. | immunogenic | Propionibacterium | 9.00E−15 |
| | 4493 | 4494 | | acnes immunogenic | |
| | | | | protein #18988 . . . | |
| 2161c | Seq. ID No. | Seq. ID No. | immunogenic | Propionibacterium | 5.00E−12 |
| | 4529 | 4530 | | acnes immunogenic | |
| | | | | protein #20073 . . . | |
| 2219c | Seq. ID No. | Seq. ID No. | membrane | Conserved | 4.00E−20 |
| | 4643 | 4644 | | membrane protein, | |
| | | | | probabl, Clostridium | |
| | | | | a . . . | |
| 2249 | Seq. ID No. | Seq. ID No. | transport | oligopeptide ABC | 1.00E−148 |
| | 4705 | 4706 | | transporte, Bacillus | |
| | | | | halodurans B . . . | |
| 2253d | Seq. ID No. | Seq. ID No. | transport | oligopeptide ABC | 1.00E−60 |
| | 4713 | 4714 | | transporter | |
| | | | | (permease), Bacillus . . . | |
| 2255b | Seq. ID No. | Seq. ID No. | transport | oligopeptide ABC | 8.00E−93 |
| | 4717 | 4718 | | transporter | |
| | | | | (permease), Bacillus . . . | |
| 2300 | Seq. ID No. | Seq. ID No. | transport | H+-transporting ATP | 2.00E−18 |
| | 4813 | 4814 | | synthase, subunit K | |
| | | | | (atpK), Me . . . | |
| 2301 | Seq. ID No. | Seq. ID No. | transport | H+-transporting ATP | 3.00E−43 |
| | 4815 | 4816 | | synthase, subunit I | |
| | | | | (atpI), Py . . . | |
| 2307 | Seq. ID No. | Seq. ID No. | membrane | membrane | 1.00E−55 |
| | 4825 | 4826 | | permease OpuCD, | |
| | | | | Listeria | |
| | | | | monocytogenes | |
| | | | | Ba . . . | |
| 2308 | Seq. ID No. | Seq. ID No. | transport | Listeria innocua | 5.00E−81 |
| | 4827 | 4828 | | Bacteria; Firmicutes; | |
| | | | | Bacillus/Cl . . . | |
| 2309c | Seq. ID No. | Seq. ID No. | transport | membrane | 9.00E−33 |
| | 4833 | 4834 | | permease OpuCB, | |
| | | | | Listeria | |
| | | | | monocytogenes | |
| | | | | Ba . . . | |
| 2311 | Seq. ID No. | Seq. ID No. | transport | glycine | 1.00E−109 |
| | 4837 | 4838 | | betaine/carnitine/ | |
| | | | | choline AB, | |
| | | | | Staphylococc . . . | |
| 2317 | Seq. ID No. | Seq. ID No. | immunogenic | Propionibacterium | 9.00E−17 |
| | 4851 | 4852 | | acnes immunogenic | |
| | | | | protein #7465 . . . . | |
| 2324 | Seq. ID No. | Seq. ID No. | immunogenic | Propionibacterium | 5.00E−18 |
| | 4863 | 4864 | | acnes immunogenic | |
| | | | | protein #5020 . . . . | |
| 2329d | Seq. ID No. | Seq. ID No. | membrane | Listeria innocua | 2.00E−72 |
| | 4875 | 4876 | | Bacteria; Firmicutes; | |
| | | | | Bacillus/Cl . . . | |
| 2331 | Seq. ID No. | Seq. ID No. | membrane | Listeria | 1.00E−28 |
| | 4879 | 4880 | | monocytogenes | |
| | | | | Bacteria; Firmicutes; | |
| | | | | Bacil . . . | |
| 2338c | Seq. ID No. | Seq. ID No. | membrane | predicted membrane | 1.00E−178 |
| | 4893 | 4894 | | GTPase involved in | |
| | | | | stres, Therm . . . | |
| 2344 | Seq. ID No. | Seq. ID No. | membrane | dihydrolipoamide | 1.00E−167 |
| | 4901 | 4902 | | dehydrogenase | |
| | | | | component o, | |
| | | | | Staphy . . . | |
| 2357 | Seq. ID No. | Seq. ID No. | sensor protein | sensor protein | 1.00E−47 |
| | 4919 | 4920 | | kinase, Lactococcus | |
| | | | | lactis subsp. l . . . | |
| 2363b | Seq. ID No. | Seq. ID No. | periplasmic | predicted | 4.00E−45 |
| | 4931 | 4932 | | periplasmic solute- | |
| | | | | binding protein, | |
| | | | | Ther . . . | |
| 2376 | Seq. ID No. | Seq. ID No. | virulence | aspartate | 1.00E−117 |
| | 4959 | 4960 | | semialdehyde | |
| | | | | dehydrogenase, | |
| | | | | Staphylococc . . . | |
| 2377b | Seq. ID No. | Seq. ID No. | virulence | Staphylococcus | 2.00E−87 |
| | 4963 | 4964 | | aureus mutant | |
| | | | | P14C15 virulence | |
| | | | | gene . . . | |
| 2387 | Seq. ID No. | Seq. ID No. | Transport | Transporter, | 9.00E−40 |
| | 4985 | 4986 | | Fusobacterium | |
| | | | | nucleatum subsp. | |
| | | | | nuclea . . . | |
| 2452 | Seq. ID No. | Seq. ID No. | sporulation | alanine | 1.00E−118 |
| | 5113 | 5114 | | dehydrogenase, | |
| | | | | Bacillus subtilis | |
| | | | | Bacteria; . . . | |
| 2453 | Seq. ID No. | Seq. ID No. | ferric | Bacillus subtilis | 5.00E−48 |
| | 5115 | 5116 | | Bacteria; Firmicutes; | |
| | | | | Bacillus/C . . . | |
| 2455 | Seq. ID No. | Seq. ID No. | ferric | Bacillus subtilis | 2.00E−76 |
| | 5117 | 5118 | | Bacteria; Firmicutes; | |
| | | | | Bacillus/C . . . | |
| 2456d | Seq. ID No. | Seq. ID No. | transport | Bacillus subtilis | 2.00E−54 |
| | 5125 | 5126 | | Bacteria; Firmicutes; | |
| | | | | Bacillus/C . . . | |
| 2458g | Seq. ID No. | Seq. ID No. | transporter | ferrichrome ABC | 2.00E−65 |
| | 5141 | 5142 | | transporter | |
| | | | | (permease), Bacillus | |
| | | | | h . . . | |
| 2475c | Seq. ID No. | Seq. ID No. | secreted protein | Human secreted | 1.00E−109 |
| | 5183 | 5184 | | protein sequence | |
| | | | | enco . . . | |
| | | | | Aab34842 . . . | |
| 2485 | Seq. ID No. | Seq. ID No. | wall | cell division protein, | 1.00E−114 |
| | 5201 | 5202 | | Enterococcus | |
| | | | | faecalis Bacte . . . | |
| 2490 | Seq. ID No. | Seq. ID No. | wall | cell division protein, | 5.00E−22 |
| | 5205 | 5206 | | Enterococcus | |
| | | | | faecalis Bacte . . . | |
| 2495a | Seq. ID No. | Seq. ID No. | penicillin | MRAY, | 6.00E−64 |
| | 5213 | 5214 | | Staphylococcus | |
| | | | | aureus Bacteria; | |
| | | | | Firmicutes; . . . | |
| 2497b | Seq. ID No. | Seq. ID No. | wall | penicillin-binding | 1.00E−116 |
| | 5219 | 5220 | | protein, | |
| | | | | Enterococcus | |
| | | | | faecalis . . . | |
| 2520d | Seq. ID No. | Seq. ID No. | phosphatase | phosphoenolpyruvate- | 0 |
| | 5279 | 5280 | | protein | |
| | | | | phosphatase, | |
| | | | | Staphyloc . . . | |
| 2525a | Seq. ID No. | Seq. ID No. | virulence | Amino acid | 3.00E−11 |
| | 5285 | 5286 | | sequence of a | |
| | | | | virulence factor | |
| | | | | encoded . . . | |
| 2547c | Seq. ID No. | Seq. ID No. | immunogenic | Propionibacterium | 2.00E−14 |
| | 5331 | 5332 | | acnes immunogenic | |
| | | | | protein #22248 . . . | |
| 2564d | Seq. ID No. | Seq. ID No. | transport | carboxypeptidase, | 1.00E−42 |
| | 5381 | 5382 | | Bacillus subtilis | |
| | | | | Bacteria; Firm . . . | |
| 2568 | Seq. ID No. | Seq. ID No. | transport | ABC-type multidrug | 2.00E−47 |
| | 5389 | 5390 | | transport system, | |
| | | | | ATPas, Thermo . . . | |
| 2582a | Seq. ID No. | Seq. ID No. | membrane | ABC transporter | 9.00E−66 |
| | 5405 | 5406 | | membrane-spanning | |
| | | | | permease, Strep . . . | |
| 2585 | Seq. ID No. | Seq. ID No. | transport | ABC transporter | 1.00E−148 |
| | 5411 | 5412 | | ATP-binding protein - | |
| | | | | cobal, Strep . . . | |
| 2589 | Seq. ID No. | Seq. ID No. | lipoprotein | Chlamydia | 1.00E−120 |
| | 5419 | 5420 | | trachomatis | |
| | | | | lipoprotein se . . . | |
| | | | | Aay37627 . . . | |
| 2596 | Seq. ID No. | Seq. ID No. | immunogenic | Propionibacterium | 2.00E−27 |
| | 5433 | 5434 | | acnes immunogenic | |
| | | | | protein #4493 . . . . | |
| 2616c | Seq. ID No. | Seq. ID No. | membrane | Listeria innocua | 1.00E−10 |
| | 5463 | 5464 | | Bacteria; Firmicutes; | |
| | | | | Bacillus/Cl . . . | |
| 2617b | Seq. ID No. | Seq. ID No. | transport | putative ABC | 9.00E−69 |
| | 5477 | 5478 | | transporter (ATP- | |
| | | | | binding protein), | |
| | | | | St . . . | |
| 2623b | Seq. ID No. | Seq. ID No. | wall | Lactococcus lactis | 2.00E−23 |
| | 5491 | 5492 | | subsp. cremoris | |
| | | | | Bacteria; Firmi . . . | |
| 2628 | Seq. ID No. | Seq. ID No. | transport | Pseudogene, similar | 2.00E−77 |
| | 5509 | 5510 | | to glycine-betaine | |
| | | | | bindin, Lis . . . | |
| 2629b | Seq. ID No. | Seq. ID No. | transport | oligopeptide ABC | 1.00E−149 |
| | 5513 | 5514 | | transporte, Bacillus | |
| | | | | halodurans B . . . | |
| 2633d | Seq. ID No. | Seq. ID No. | transport | oligopeptide ABC | 1.00E−149 |
| | 5525 | 5526 | | transporte, Bacillus | |
| | | | | halodurans B . . . | |
| 2637a | Seq. ID No. | Seq. ID No. | transport | oligopeptide ABC | 1.00E−140 |
| | 5529 | 5530 | | transporte, Bacillus | |
| | | | | halodurans B . . . | |
| 2643b | Seq. ID No. | Seq. ID No. | peptidoglycan | Penicillin-binding | 1.00E−143 |
| | 5537 | 5538 | | protein 2a, | |
| | | | | Streptococcus | |
| | | | | pneum . . . | |
| 2659b | Seq. ID No. | Seq. ID No. | hemolysin | putative hemolysin, | 5.00E−71 |
| | 5567 | 5568 | | Streptococcus | |
| | | | | pyogenes | |
| | | | | MGAS823 . . . | |
| 2674b | Seq. ID No. | Seq. ID No. | membrane | putative integral | 5.00E−21 |
| | 5599 | 5600 | | membrane protei . . . | |
| | | | | AL162756 . . . | |
| 2680c | Seq. ID No. | Seq. ID No. | virulence | Staphylococcus | 1.00E−160 |
| | 5621 | 5622 | | aureus mutant | |
| | | | | P11C12 virulence | |
| | | | | gene . . . | |
| 2688c | Seq. ID No. | Seq. ID No. | transport | phosphotidylglycero | 4.00E−43 |
| | 5637 | 5638 | | phosphate synthase, | |
| | | | | Streptococc . . . | |
| 2723 | Seq. ID No. | Seq. ID No. | membrane | Uncharacterized | 1.00E−13 |
| | 5699 | 5700 | | membrane protein, | |
| | | | | homolog o, Clost . . . | |
| 2734c | Seq. ID No. | Seq. ID No. | transport | cation transporter, | 9.00E−62 |
| | 5723 | 5724 | | Lactococcus lactis | |
| | | | | subsp. lact . . . | |
| 2738c | Seq. ID No. | Seq. ID No. | transport | transporter, Bacillus | 3.00E−21 |
| | 5733 | 5734 | | halodurans Bacteria; | |
| | | | | Firmicu . . . | |
| 2748c | Seq. ID No. | Seq. ID No. | transport | conserved | 5.00E−34 |
| | 5761 | 5762 | | hypothetical protein, | |
| | | | | Thermotoga | |
| | | | | maritim . . . | |
| 2758d | Seq. ID No. | Seq. ID No. | immunogenic | Propionibacterium | 3.00E−36 |
| | 5791 | 5792 | | acnes immunogenic | |
| | | | | . . . Aau49434 . . . | |
| 2801b | Seq. ID No. | Seq. ID No. | response regulator | VanSB, | 1.00E−21 |
| | 5895 | 5896 | | Enterococcus | |
| | | | | faecalis Bacteria; | |
| | | | | Firmicutes; . . . | |
| 2805b | Seq. ID No. | Seq. ID No. | transmembrane | transmembrane | 1.00E−130 |
| | 5901 | 5902 | | protein Vexp3, | |
| | | | | Streptococcus | |
| | | | | pneumon . . . | |
| 2809 | Seq. ID No. | Seq. ID No. | transport | ABC transporter, | 1.00E−63 |
| | 5903 | 5904 | | ATP-binding protein | |
| | | | | Vexp2, Strept . . . | |
| 2810c | Seq. ID No. | Seq. ID No. | membrane | ABG transporter | 1.00E−59 |
| | 5909 | 5910 | | membrane-spanning | |
| | | | | permease - Pe, S . . . | |
| 2812 | Seq. ID No. | Seq. ID No. | transport | probable ABC | 1.00E−102 |
| | 5913 | 5914 | | transporter, | |
| | | | | Clostridium | |
| | | | | perfringens . . . | |
| 2816 | Seq. ID No. | Seq. ID No. | transport | Listeria innocua | 5.00E−59 |
| | 5919 | 5920 | | Bacteria; Firmicutes; | |
| | | | | Bacillus/Cl . . . | |
| 2818e | Seq. ID No. | Seq. ID No. | transport | amino acid ABC | 2.00E−58 |
| | 5929 | 5930 | | transporter | |
| | | | | permease protein, | |
| | | | | Lacto . . . | |
| 2822a | Seq. ID No. | Seq. ID No. | membrane | putative membrane | 7.00E−27 |
| | 5939 | 5940 | | protein, Salmonella | |
| | | | | enterica sub . . . | |
| 2856c | Seq. ID No. | Seq. ID No. | transport | heavy-metal | 1.00E−131 |
| | 6001 | 6002 | | transporting CPx- | |
| | | | | type ATPase, | |
| | | | | Methanot . . . | |
| 2881 | Seq. ID No. | Seq. ID No. | surface | surface protein (GW | 4.00E−23 |
| | 6043 | 6044 | | repeat) similar t, | |
| | | | | Listeria in . . . | |
| 2883d | Seq. ID No. | Seq. ID No. | transport | ABC transporter | 1.00E−107 |
| | 6053 | 6054 | | permease protein, | |
| | | | | Lactococcus lact . . . | |
| 2886b | Seq. ID No. | Seq. ID No. | transport | Listeria | 5.00E−69 |
| | 6057 | 6058 | | monocytogenes | |
| | | | | Bacteria; Firmicutes; | |
| | | | | Bacil . . . | |
| 2900b | Seq. ID No. | Seq. ID No. | wall | YojL, Bacillus subtilis | 2.00E−15 |
| | 6089 | 6090 | | Bacteria; Firmicutes; | |
| | | | | Baci . . . | |
| 2902 | Seq. ID No. | Seq. ID No. | peptidoglycan | beta-1,4-N- | 2.00E−32 |
| | 6095 | 6096 | | acetylmuramoylhydro- | |
| | | | | lase, Enterococcus | |
| | | | | h . . . | |
| 2906 | Seq. ID No. | Seq. ID No. | immunoglobulin | Streptococcus sp. | 2.00E−17 |
| | 6103 | 6104 | | G148 Bacteria; | |
| | | | | Firmicutes; Bacil . . . | |
| 2909d | Seq. ID No. | Seq. ID No. | transmembrane | Listeria innocua | 1.00E−144 |
| | 6111 | 6112 | | Bacteria; Firmicutes; | |
| | | | | Bacillus/Cl . . . | |
| 2913b | Seq. ID No. | Seq. ID No. | response regulator | putative histidine | 1.00E−92 |
| | 6117 | 6118 | | kinase, Lactobacillus | |
| | | | | sakei Bac . . . | |
| 2931c | Seq. ID No. | Seq. ID No. | transport | putative | 8.00E−96 |
| | 6165 | 6166 | | sodium/glucose | |
| | | | | cotransporter, | |
| | | | | Salmonella . . . | |
| 2933b | Seq. ID No. | Seq. ID No. | immunogenic | Propionibacterium | 1.00E−19 |
| | 6169 | 6170 | | acnes immunogenic | |
| | | | | protein #6411 . . . . | |
| 2941b | Seq. ID No. | Seq. ID No. | transport | probable ABC | 1.00E−145 |
| | 6185 | 6186 | | transporter, | |
| | | | | Clostridium | |
| | | | | perfringens . . . | |
| 2943b | Seq. ID No. | Seq. ID No. | transport | ABC transporter | 1.00E−114 |
| | 6191 | 6192 | | ATP binding protein, | |
| | | | | Lactococcus l . . . | |
| 2948d | Seq. ID No. | Seq. ID No. | membrane | Listeria innocua | 4.00E−56 |
| | 6209 | 6210 | | Bacteria; Firmicutes; | |
| | | | | Bacillus/Cl . . . | |
| 2955e | Seq. ID No. | Seq. ID No. | membrane | putative integral | 4.00E−35 |
| | 6229 | 6230 | | membrane | |
| | | | | transporter protein, | |
| | | | | Si . . . | |
| 2965c | Seq. ID No. | Seq. ID No. | hemolysin | hemolysin, | 1E−55 |
| | 6257 | 6258 | | Treponema | |
| | | | | denticola Bact . . . | |
| | | | | U30249 . . . | |
| 2969 | Seq. ID No. | Seq. ID No. | Membrane | Membrane-fusion | 5.00E−23 |
| | 6263 | 6264 | | protein, | |
| | | | | Thermoanaerobacter | |
| | | | | tengco . . . | |
| 2971b | Seq. ID No. | Seq. ID No. | lipoprotein | ABC-type transport | 5.00E−72 |
| | 6271 | 6272 | | systems, involved i, | |
| | | | | Thermoanae . . . | |
| 2974b | Seq. ID No. | Seq. ID No. | lipoprotein | ABC-type transport | 4.00E−61 |
| | 6275 | 6276 | | systems, involved i, | |
| | | | | Thermoanae . . . | |
| 2980a | Seq. ID No. | Seq. ID No. | transport | unknown, | 5.00E−13 |
| | 6289 | 6290 | | Pasteurella | |
| | | | | multocida Bacteria; | |
| | | | | Proteobac . . . | |
| 2986b | Seq. ID No. | Seq. ID No. | transport | rnfD protein, | 3.00E−28 |
| | 6303 | 6304 | | Pseudomonas | |
| | | | | stutzeri A15 | |
| | | | | Bacteria; P . . . | |
| 3016b | Seq. ID No. | Seq. ID No. | membrane | ABC transporter | 3.00E−27 |
| | 6365 | 6366 | | membrane-spanning | |
| | | | | permease - Na, S . . . | |
| 3017 | Seq. ID No. | Seq. ID No. | transporter | ABC transporter | 6.00E−82 |
| | 6369 | 6370 | | ATP binding protein, | |
| | | | | Lactococcus l . . . | |
| 3024a | Seq. ID No. | Seq. ID No. | virulence | Amino acid | 2.00E−13 |
| | 6383 | 6384 | | sequence of a | |
| | | | | virulence factor | |
| | | | | encoded . . . | |
| 3037a | Seq. ID No. | Seq. ID No. | lipoprotein | putative host cell | 8.00E−13 |
| | 6415 | 6416 | | surface-exposed | |
| | | | | lipoprotein, St . . . | |

[0110] Listed in Table 9 are 242 ORFs that share some homology with the ORFs predicted by proteomic methods used for studying surface exposed proteins of Streptococcus pneumoniae.

TABLE 9
PROTEOMICS

| ORF Number | DNA SEQ ID Number | Protein SEQ ID Number |
|---|---|---|
| 1 | Seq. ID No. 1 | Seq. ID No. 2 |
| 2b | Seq. ID No. 5 | Seq. ID No. 6 |
| 56b | Seq. ID No. 93 | Seq. ID No. 94 |
| 57a | Seq. ID No. 95 | Seq. ID No. 96 |
| 60b | Seq. ID No. 103 | Seq. ID No. 104 |
| 62a | Seq. ID No. 107 | Seq. ID No. 108 |
| 85c | Seq. ID No. 157 | Seq. ID No. 158 |
| 112b | Seq. ID No. 223 | Seq. ID No. 224 |
| 114 | Seq. ID No. 225 | Seq. ID No. 226 |
| 121 | Seq. ID No. 233 | Seq. ID No. 234 |
| 124c | Seq. ID No. 239 | Seq. ID No. 240 |
| 129c | Seq. ID No. 253 | Seq. ID No. 254 |
| 157b | Seq. ID No. 317 | Seq. ID No. 318 |
| 158b | Seq. ID No. 321 | Seq. ID No. 322 |
| 165a | Seq. ID No. 341 | Seq. ID No. 342 |
| 167 | Seq. ID No. 345 | Seq. ID No. 346 |
| 171b | Seq. ID No. 353 | Seq. ID No. 354 |
| 175 | Seq. ID No. 361 | Seq. ID No. 362 |
| 176 | Seq. ID No. 363 | Seq. ID No. 364 |
| 177a | Seq. ID No. 365 | Seq. ID No. 366 |
| 180b | Seq. ID No. 375 | Seq. ID No. 376 |
| 184 | Seq. ID No. 379 | Seq. ID No. 380 |
| 186 | Seq. ID No. 383 | Seq. ID No. 384 |
| 188 | Seq. ID No. 389 | Seq. ID No. 390 |
| 189b | Seq. ID No. 391 | Seq. ID No. 392 |
| 192b | Seq. ID No. 397 | Seq. ID No. 398 |
| 195 | Seq. ID No. 405 | Seq. ID No. 406 |
| 197a | Seq. ID No. 409 | Seq. ID No. 410 |
| 198b | Seq. ID No. 415 | Seq. ID No. 416 |
| 203 | Seq. ID No. 423 | Seq. ID No. 424 |
| 204 | Seq. ID No. 425 | Seq. ID No. 426 |
| 205 | Seq. ID No. 427 | Seq. ID No. 428 |
| 206 | Seq. ID No. 429 | Seq. ID No. 430 |
| 208b | Seq. ID No. 435 | Seq. ID No. 436 |
| 210 | Seq. ID No. 437 | Seq. ID No. 438 |
| 211 | Seq. ID No. 439 | Seq. ID No. 440 |
| 213 | Seq. ID No. 441 | Seq. ID No. 442 |
| 215a | Seq. ID No. 443 | Seq. ID No. 444 |
| 218 | Seq. ID No. 445 | Seq. ID No. 446 |
| 219 | Seq. ID No. 447 | Seq. ID No. 448 |
| 220a | Seq. ID No. 449 | Seq. ID No. 450 |
| 226b | Seq. ID No. 461 | Seq. ID No. 462 |
| 227 | Seq. ID No. 463 | Seq. ID No. 464 |
| 228a | Seq. ID No. 465 | Seq. ID No. 466 |
| 249a | Seq. ID No. 513 | Seq. ID No. 514 |
| 262 | Seq. ID No. 543 | Seq. ID No. 544 |
| 265 | Seq. ID No. 551 | Seq. ID No. 552 |
| 267b | Seq. ID No. 553 | Seq. ID No. 554 |
| 269a | Seq. ID No. 559 | Seq. ID No. 560 |
| 284a | Seq. ID No. 595 | Seq. ID No. 596 |
| 286a | Seq. ID No. 601 | Seq. ID No. 602 |
| 311 | Seq. ID No. 637 | Seq. ID No. 638 |
| 315 | Seq. ID No. 649 | Seq. ID No. 650 |
| 318a | Seq. ID No. 657 | Seq. ID No. 658 |
| 321 | Seq. ID No. 669 | Seq. ID No. 670 |
| 324 | Seq. ID No. 675 | Seq. ID No. 676 |
| 329 | Seq. ID No. 683 | Seq. ID No. 684 |
| 351 | Seq. ID No. 753 | Seq. ID No. 754 |
| 429b | Seq. ID No. 929 | Seq. ID No. 930 |
| 450a | Seq. ID No. 969 | Seq. ID No. 970 |
| 473 | Seq. ID No. 1041 | Seq. ID No. 1042 |
| 474 | Seq. ID No. 1043 | Seq. ID No. 1044 |
| 498a | Seq. ID No. 1085 | Seq. ID No. 1086 |
| 499a | Seq. ID No. 1089 | Seq. ID No. 1090 |
| 500 | Seq. ID No. 1093 | Seq. ID No. 1094 |
| 502c | Seq. ID No. 1097 | Seq. ID No. 1098 |
| 504 | Seq. ID No. 1099 | Seq. ID No. 1100 |
| 505a | Seq. ID No. 1101 | Seq. ID No. 1102 |
| 543a | Seq. ID No. 1175 | Seq. ID No. 1176 |
| 551 | Seq. ID No. 1205 | Seq. ID No. 1206 |
| 570b | Seq. ID No. 1237 | Seq. ID No. 1238 |
| 687 | Seq. ID No. 1459 | Seq. ID No. 1460 |
| 709 | Seq. ID No. 1495 | Seq. ID No. 1496 |
| 710 | Seq. ID No. 1497 | Seq. ID No. 1498 |
| 715a | Seq. ID No. 1503 | Seq. ID No. 1504 |
| 722c | Seq. ID No. 1517 | Seq. ID No. 1518 |
| 726 | Seq. ID No. 1527 | Seq. ID No. 1528 |
| 728b | Seq. ID No. 1531 | Seq. ID No. 1532 |
| 730d | Seq. ID No. 1539 | Seq. ID No. 1540 |
| 732 | Seq. ID No. 1543 | Seq. ID No. 1544 |
| 738c | Seq. ID No. 1549 | Seq. ID No. 1550 |
| 747 | Seq. ID No. 1573 | Seq. ID No. 1574 |
| 792 | Seq. ID No. 1657 | Seq. ID No. 1658 |
| 829a | Seq. ID No. 1709 | Seq. ID No. 1710 |
| 859b | Seq. ID No. 1767 | Seq. ID No. 1768 |
| 866b | Seq. ID No. 1785 | Seq. ID No. 1786 |
| 886 | Seq. ID No. 1821 | Seq. ID No. 1822 |
| 938 | Seq. ID No. 1889 | Seq. ID No. 1890 |
| 954 | Seq. ID No. 1925 | Seq. ID No. 1926 |
| 977a | Seq. ID No. 1969 | Seq. ID No. 1970 |
| 992 | Seq. ID No. 2003 | Seq. ID No. 2004 |
| 1016c | Seq. ID No. 2047 | Seq. ID No. 2048 |
| 1033a | Seq. ID No. 2075 | Seq. ID No. 2076 |
| 1036b | Seq. ID No. 2089 | Seq. ID No. 2090 |
| 1037 | Seq. ID No. 2093 | Seq. ID No. 2094 |
| 1049a | Seq. ID No. 2117 | Seq. ID No. 2118 |
| 1058 | Seq. ID No. 2137 | Seq. ID No. 2138 |
| 1062 | Seq. ID No. 2143 | Seq. ID No. 2144 |
| 1094a | Seq. ID No. 2205 | Seq. ID No. 2206 |
| 1108b | Seq. ID No. 2235 | Seq. ID No. 2236 |
| 1131 | Seq. ID No. 2257 | Seq. ID No. 2258 |
| 1149 | Seq. ID No. 2301 | Seq. ID No. 2302 |
| 1171c | Seq. ID No. 2363 | Seq. ID No. 2364 |
| 1194 | Seq. ID No. 2423 | Seq. ID No. 2424 |
| 1205 | Seq. ID No. 2445 | Seq. ID No. 2446 |
| 1208 | Seq. ID No. 2451 | Seq. ID No. 2452 |
| 1221a | Seq. ID No. 2481 | Seq. ID No. 2482 |
| 1226 | Seq. ID No. 2495 | Seq. ID No. 2496 |
| 1230 | Seq. ID No. 2505 | Seq. ID No. 2506 |
| 1256 | Seq. ID No. 2577 | Seq. ID No. 2578 |
| 1258c | Seq. ID No. 2587 | Seq. ID No. 2588 |
| 1271 | Seq. ID No. 2613 | Seq. ID No. 2614 |
| 1281 | Seq. ID No. 2633 | Seq. ID No. 2634 |
| 1288 | Seq. ID No. 2651 | Seq. ID No. 2652 |
| 1297a | Seq. ID No. 2665 | Seq. ID No. 2666 |
| 1300 | Seq. ID No. 2669 | Seq. ID No. 2670 |
| 1305c | Seq. ID No. 2677 | Seq. ID No. 2678 |
| 1308e | Seq. ID No. 2687 | Seq. ID No. 2688 |
| 1315 | Seq. ID No. 2693 | Seq. ID No. 2694 |
| 1318 | Seq. ID No. 2699 | Seq. ID No. 2700 |
| 1321 | Seq. ID No. 2711 | Seq. ID No. 2712 |
| 1322b | Seq. ID No. 2715 | Seq. ID No. 2716 |
| 1349b | Seq. ID No. 2757 | Seq. ID No. 2758 |
| 1368 | Seq. ID No. 2791 | Seq. ID No. 2792 |
| 1371 | Seq. ID No. 2793 | Seq. ID No. 2794 |
| 1377 | Seq. ID No. 2803 | Seq. ID No. 2804 |
| 1408 | Seq. ID No. 2867 | Seq. ID No. 2868 |
| 1431 | Seq. ID No. 2919 | Seq. ID No. 2920 |
| 1437a | Seq. ID No. 2929 | Seq. ID No. 2930 |
| 1462b | Seq. ID No. 3005 | Seq. ID No. 3006 |
| 1466d | Seq. ID No. 3019 | Seq. ID No. 3020 |
| 1508 | Seq. ID No. 3125 | Seq. ID No. 3126 |
| 1512 | Seq. ID No. 3137 | Seq. ID No. 3138 |
| 1528 | Seq. ID No. 3161 | Seq. ID No. 3162 |
| 1537 | Seq. ID No. 3179 | Seq. ID No. 3180 |
| 1573 | Seq. ID No. 3251 | Seq. ID No. 3252 |
| 1578 | Seq. ID No. 3259 | Seq. ID No. 3260 |
| 1588 | Seq. ID No. 3285 | Seq. ID No. 3286 |
| 1600a | Seq. ID No. 3309 | Seq. ID No. 3310 |
| 1606a | Seq. ID No. 3317 | Seq. ID No. 3318 |
| 1619 | Seq. ID No. 3337 | Seq. ID No. 3338 |
| 1623b | Seq. ID No. 3345 | Seq. ID No. 3346 |
| 1626b | Seq. ID No. 3359 | Seq. ID No. 3360 |
| 1680 | Seq. ID No. 3475 | Seq. ID No. 3476 |
| 1694b | Seq. ID No. 3515 | Seq. ID No. 3516 |
| 1696 | Seq. ID No. 3521 | Seq. ID No. 3522 |
| 1759 | Seq. ID No. 3641 | Seq. ID No. 3642 |
| 1788c | Seq. ID No. 3695 | Seq. ID No. 3696 |
| 1816a | Seq. ID No. 3793 | Seq. ID No. 3794 |
| 1861b | Seq. ID No. 3901 | Seq. ID No. 3902 |
| 1875b | Seq. ID No. 3927 | Seq. ID No. 3928 |
| 1912 | Seq. ID No. 3987 | Seq. ID No. 3988 |
| 1918c | Seq. ID No. 4001 | Seq. ID No. 4002 |
| 1940 | Seq. ID No. 4057 | Seq. ID No. 4058 |
| 1951a | Seq. ID No. 4081 | Seq. ID No. 4082 |
| 1960c | Seq. ID No. 4111 | Seq. ID No. 4112 |
| 1967 | Seq. ID No. 4125 | Seq. ID No. 4126 |
| 1996 | Seq. ID No. 4193 | Seq. ID No. 4194 |
| 2000 | Seq. ID No. 4195 | Seq. ID No. 4196 |
| 2020 | Seq. ID No. 4237 | Seq. ID No. 4238 |
| 2024b | Seq. ID No. 4247 | Seq. ID No. 4248 |
| 2094 | Seq. ID No. 4383 | Seq. ID No. 4384 |
| 2097 | Seq. ID No. 4393 | Seq. ID No. 4394 |
| 2100 | Seq. ID No. 4397 | Seq. ID No. 4398 |
| 2104 | Seq. ID No. 4401 | Seq. ID No. 4402 |
| 2117 | Seq. ID No. 4435 | Seq. ID No. 4436 |
| 2125a | Seq. ID No. 4449 | Seq. ID No. 4450 |
| 2140b | Seq. ID No. 4471 | Seq. ID No. 4472 |
| 2149b | Seq. ID No. 4491 | Seq. ID No. 4492 |
| 2156c | Seq. ID No. 4511 | Seq. ID No. 4512 |
| 2160b | Seq. ID No. 4519 | Seq. ID No. 4520 |
| 2164 | Seq. ID No. 4531 | Seq. ID No. 4532 |
| 2174 | Seq. ID No. 4549 | Seq. ID No. 4550 |
| 2185 | Seq. ID No. 4577 | Seq. ID No. 4578 |
| 2186b | Seq. ID No. 4581 | Seq. ID No. 4582 |
| 2189b | Seq. ID No. 4585 | Seq. ID No. 4586 |
| 2203 | Seq. ID No. 4609 | Seq. ID No. 4610 |
| 2204 | Seq. ID No. 4611 | Seq. ID No. 4612 |
| 2206a | Seq. ID No. 4613 | Seq. ID No. 4614 |
| 2234a | Seq. ID No. 4675 | Seq. ID No. 4676 |
| 2238 | Seq. ID No. 4685 | Seq. ID No. 4686 |
| 2256 | Seq. ID No. 4719 | Seq. ID No. 4720 |
| 2260c | Seq. ID No. 4729 | Seq. ID No. 4730 |
| 2269 | Seq. ID No. 4743 | Seq. ID No. 4744 |
| 2275b | Seq. ID No. 4755 | Seq. ID No. 4756 |
| 2284 | Seq. ID No. 4781 | Seq. ID No. 4782 |
| 2286b | Seq. ID No, 4787 | Seq. ID No. 4788 |
| 2311 | Seq. ID No. 4837 | Seq. ID No. 4838 |
| 2312b | Seq. ID No. 4841 | Seq. ID No. 4842 |
| 2316 | Seq. ID No. 4849 | Seq. ID No. 4850 |
| 2321a | Seq. ID No. 4855 | Seq. ID No. 4856 |
| 2338a | Seq. ID No. 4889 | Seq. ID No. 4890 |
| 2344 | Seq. ID No. 4901 | Seq. ID No. 4902 |
| 2353 | Seq. ID No. 4915 | Seq. ID No. 4916 |
| 2354 | Seq. ID No. 4917 | Seq. ID No. 4918 |
| 2363b | Seq. ID No. 4931 | Seq. ID No. 4932 |
| 2365b | Seq. ID No. 4935 | Seq. ID No. 4936 |
| 2384a | Seq. ID No. 4977 | Seq. ID No. 4978 |
| 2409a | Seq. ID No. 5025 | Seq. ID No. 5026 |
| 2410 | Seq. ID No. 5029 | Seq. ID No. 5030 |
| 2449b | Seq. ID No. 5109 | Seq. ID No. 5110 |
| 2453 | Seq. ID No. 5115 | Seq. ID No. 5116 |
| 2455 | Seq. ID No. 5117 | Seq. ID No. 5118 |
| 2465a | Seq. ID No. 5155 | Seq. ID No. 5156 |
| 2477 | Seq. ID No. 5185 | Seq. ID No. 5186 |
| 2485 | Seq. ID No. 5201 | Seq. ID No. 5202 |
| 2489 | Seq. ID No. 5203 | Seq. ID No. 5204 |
| 2497b | Seq. ID No. 5219 | Seq. ID No. 5220 |
| 2516b | Seq. ID No. 5261 | Seq. ID No. 5262 |
| 2527a | Seq. ID No. 5289 | Seq. ID No. 5290 |
| 2528b | Seq. ID No. 5295 | Seq. ID No. 5296 |
| 2564b | Seq. ID No. 5377 | Seq. ID No. 5378 |
| 2568 | Seq. ID No. 5389 | Seq. ID No. 5390 |
| 2578 | Seq. ID No. 5399 | Seq. ID No. 5400 |
| 2585 | Seq. ID No. 5411 | Seq. ID No. 5412 |
| 2643b | Seq. ID No. 5537 | Seq. ID No. 5538 |
| 2680c | Seq. ID No. 5621 | Seq. ID No. 5622 |
| 2684a | Seq. ID No. 5627 | Seq. ID No. 5628 |
| 2695 | Seq. ID No. 5657 | Seq. ID No. 5658 |
| 2716a | Seq. ID No. 5675 | Seq. ID No. 5676 |
| 2732 | Seq. ID No. 5717 | Seq. ID No. 5718 |
| 2752 | Seq. ID No. 5777 | Seq. ID No. 5778 |
| 2785b | Seq. ID No. 5859 | Seq. ID No. 5860 |
| 2805b | Seq. ID No. 5901 | Seq. ID No. 5902 |
| 2812 | Seq. ID No. 5913 | Seq. ID No. 5914 |
| 2816 | Seq. ID No. 5919 | Seq. ID No. 5920 |
| 2818c | Seq. ID No. 5925 | Seq. ID No. 5926 |
| 2820 | Seq. ID No. 5933 | Seq. ID No. 5934 |
| 2886a | Seq. ID No. 6055 | Seq. ID No. 6056 |
| 2918 | Seq. ID No. 6129 | Seq. ID No. 6130 |
| 2921 | Seq. ID No. 6133 | Seq. ID No. 6134 |
| 2941c | Seq. ID No. 6187 | Seq. ID No. 6188 |
| 2943c | Seq. ID No. 6193 | Seq. ID No. 6194 |
| 2954 | Seq. ID No. 6219 | Seq. ID No. 6220 |
| 2971b | Seq. ID No. 6271 | Seq. ID No. 6272 |
| 2975 | Seq. ID No. 6277 | Seq. ID No. 6278 |
| 3017 | Seq. ID No. 6369 | Seq. ID No. 6370 |
| 3020 | Seq. ID No. 6375 | Seq. ID No. 6376 |
| 3022 | Seq. ID No. 6379 | Seq. ID No. 6380 |
| 3026b | Seq. ID No. 6389 | Seq. ID No. 6390 |
| 3118b | Seq. ID No. 6591 | Seq. ID No. 6592 |
| 3121 | Seq. ID No. 6605 | Seq. ID No. 6606 |

[0111] Listed in Table 10 are 22 ORFs predicted to be covalently bound to the peptidoglycan region via the ‘LPXTG’ motif. These ORFs were found using the HMM LPXTG motif finder and are classified as proteins that might be targeted by sortase. The Applicants developed a HMM using approximately 70 known prokaryotic polypeptides containing the LPXTG cell wall sorting signal. This HMM was used to predict cell wall polypeptides that are anchored to the peptidoglycan layer.

TABLE 10
LPXTG MOTIF

| ORF Number | DNA SEQ ID Number | Protein SEQ ID Number |
|---|---|---|
| 246a | Seq. ID No. 503 | Seq. ID No. 504 |
| 246b | Seq. ID No. 505 | Seq. ID No. 506 |
| 609a | Seq. ID No. 1315 | Seq. ID No. 1316 |
| 609b | Seq. ID No. 1317 | Seq. ID No. 1318 |
| 631a | Seq. ID No. 1363 | Seq. ID No. 1364 |
| 631b | Seq. ID No. 1365 | Seq. ID No. 1366 |
| 631c | Seq. ID No. 1367 | Seq. ID No. 1368 |
| 631d | Seq. ID No. 1369 | Seq. ID No. 1370 |
| 743a | Seq. ID No. 1559 | Seq. ID No. 1560 |
| 743b | Seq. ID No. 1561 | Seq. ID No. 1562 |
| 751 | Seq. ID No. 1581 | Seq. ID No. 1582 |
| 847a | Seq. ID No. 1739 | Seq. ID No. 1740 |
| 847b | Seq. ID No. 1741 | Seq. ID No. 1742 |
| 1381a | Seq. ID No. 2811 | Seq. ID No. 2812 |
| 1381b | Seq. ID No. 2813 | Seq. ID No. 2814 |
| 1747 | Seq. ID No. 3619 | Seq. ID No. 3620 |
| 2669a | Seq. ID No. 5587 | Seq. ID No. 5588 |
| 2669b | Seq. ID No. 5589 | Seq. ID No. 5590 |
| 2669c | Seq. ID No. 5591 | Seq. ID No. 5592 |
| 2757a | Seq. ID No. 5781 | Seq. ID No. 5782 |
| 2757b | Seq. ID No. 5783 | Seq. ID No. 5784 |
| 2906 | Seq. ID No. 6103 | Seq. ID No. 6104 |

[0112] Listed in Table 11 are 71 ORFs predicted to be lipoproteins based on the HMM Lipo program.

TABLE 11
LIPOPROTEIN

| ORF Number | DNA SEQ ID Number | Protein SEQ ID Number |
|---|---|---|
| 38a | Seq. ID No. 45 | Seq. ID No. 46 |
| 38b | Seq. ID No. 47 | Seq. ID No. 48 |
| 91a | Seq. ID No. 171 | Seq. ID No. 172 |
| 114 | Seq. ID No. 225 | Seq. ID No. 226 |
| 201a | Seq. ID No. 419 | Seq. ID No. 420 |
| 249a | Seq. ID No. 513 | Seq. ID No. 514 |
| 277c | Seq. ID No. 575 | Seq. ID No. 576 |
| 283a | Seq. ID No. 591 | Seq. ID No. 592 |
| 283b | Seq. ID No. 593 | Seq. ID No. 594 |
| 318a | Seq. ID No. 657 | Seq. ID No. 658 |
| 318b | Seq. ID No. 659 | Seq. ID No. 660 |
| 321 | Seq. ID No. 669 | Seq. ID No. 670 |
| 324 | Seq. ID No. 675 | Seq. ID No. 676 |
| 349b | Seq. ID No. 745 | Seq. ID No. 746 |
| 349c | Seq. ID No. 747 | Seq. ID No. 748 |
| 431 | Seq. ID No. 935 | Seq. ID No. 936 |
| 476 | Seq. ID No. 1045 | Seq. ID No. 1046 |
| 492 | Seq. ID No. 1075 | Seq. ID No. 1076 |
| 524b | Seq. ID No. 1137 | Seq. ID No. 1138 |
| 542 | Seq. ID No. 1173 | Seq. ID No. 1174 |
| 546b | Seq. ID No. 1191 | Seq. ID No. 1192 |
| 546c | Seq. ID No. 1193 | Seq. ID No. 1194 |
| 547a | Seq. ID No. 1195 | Seq. ID No. 1196 |
| 744 | Seq. ID No. 1563 | Seq. ID No. 1564 |
| 794b | Seq. ID No. 1661 | Seq. ID No. 1662 |
| 794c | Seq. ID No. 1663 | Seq. ID No. 1664 |
| 794d | Seq. ID No. 1665 | Seq. ID No. 1666 |
| 870 | Seq. ID No. 1791 | Seq. ID No. 1792 |
| 873c | Seq. ID No. 1797 | Seq. ID No. 1798 |
| 951a | Seq. ID No. 1917 | Seq. ID No. 1918 |
| 977a | Seq. ID No. 1969 | Seq. ID No. 1970 |
| 1047b | Seq. ID No. 2115 | Seq. ID No. 2116 |
| 1067 | Seq. ID No. 2159 | Seq. ID No. 2160 |
| 1197 | Seq. ID No. 2429 | Seq. ID No. 2430 |
| 1239 | Seq. ID No. 2527 | Seq. ID No. 2528 |
| 1318 | Seq. ID No. 2699 | Seq. ID No. 2700 |
| 1382 | Seq. ID No. 2815 | Seq. ID No. 2816 |
| 1411b | Seq. ID No. 2875 | Seq. ID No. 2876 |
| 1449a | Seq. ID No. 2975 | Seq. ID No. 2976 |
| 1449b | Seq. ID No. 2977 | Seq. ID No. 2978 |
| 1455b | Seq. ID No. 2991 | Seq. ID No. 2992 |
| 1475 | Seq. ID No. 3043 | Seq. ID No. 3044 |
| 1607b | Seq. ID No. 3323 | Seq. ID No. 3324 |
| 1619 | Seq. ID No. 3337 | Seq. ID No. 3338 |
| 1970b | Seq. ID No. 4133 | Seq. ID No. 4134 |
| 1973 | Seq. ID No. 4137 | Seq. ID No. 4138 |
| 2146 | Seq. ID No. 4481 | Seq. ID No. 4482 |
| 2249 | Seq. ID No. 4705 | Seq. ID No. 4706 |
| 2308 | Seq. ID No. 4827 | Seq. ID No. 4828 |
| 2329a | Seq. ID No. 4869 | Seq. ID No. 4870 |
| 2453 | Seq. ID No. 5115 | Seq. ID No. 5116 |
| 2564b | Seq. ID No. 5377 | Seq. ID No. 5378 |
| 2564c | Seq. ID No. 5379 | Seq. ID No. 5380 |
| 2623b | Seq. ID No. 5491 | Seq. ID No. 5492 |
| 2628 | Seq. ID No. 5509 | Seq. ID No. 5510 |
| 2629b | Seq. ID No. 5513 | Seq. ID No. 5514 |
| 2633d | Seq. ID No. 5525 | Seq. ID No. 5526 |
| 2637a | Seq. ID No. 5529 | Seq. ID No. 5530 |
| 2637b | Seq. ID No. 5531 | Seq. ID No. 5532 |
| 2799a | Seq. ID No. 5889 | Seq. ID No. 5890 |
| 2810c | Seq. ID No. 5909 | Seq. ID No. 5910 |
| 2869b | Seq. ID No. 6025 | Seq. ID No. 6026 |
| 2869c | Seq. ID No. 6027 | Seq. ID No. 6028 |
| 2900a | Seq. ID No. 6087 | Seq. ID No. 6088 |
| 2900b | Seq. ID No. 6089 | Seq. ID No. 6090 |
| 2993a | Seq. ID No. 6325 | Seq. ID No. 6326 |
| 2993b | Seq. ID No. 6327 | Seq. ID No. 6328 |
| 3037a | Seq. ID No. 6415 | Seq. ID No. 6416 |
| 3145b | Seq. ID No. 6637 | Seq. ID No. 6638 |
| 3145c | Seq. ID No. 6639 | Seq. ID No. 6640 |
| 3147c | Seq. ID No. 6645 | Seq. ID No. 6646 |

[0113] Listed in Table 12 are ORFs encoding polypeptides predicted to be noncovalently bound to the peptidoglycan layer based on the HMM program. Four ORFs were identified that were predicted to encode proteins that bound peptidoglycans noncovalently.

TABLE 12
PEPTIDOGLYCAN BINDING

| ORF Number | DNA SEQ ID Number | Protein SEQ ID Number |
|---|---|---|
| 1733 | Seq. ID No. 3589 | Seq. ID No. 3590 |
| 1912 | Seq. ID No. 3987 | Seq. ID No. 3988 |
| 2497b | Seq. ID No. 5219 | Seq. ID No. 5220 |
| 2549 | Seq. ID No. 5337 | Seq. ID No. 5338 |

[0114] Also contemplated in the present invention are other important characteristics of Alloiococcus otitidis ORFs. For example, the Alloiococcus otitidis ORFs were searched to identify any that encode polypeptides with RGD motifs. Proteins that contain the Arg-Gly-Asp (RGD) attachment motif, together with integrins that serve as their receptor, constitute a major recognition system for cell adhesion, and thus are putative Alloiococcus otitidis polypeptide antigens. RGD recognition is one mechanism used by microbes to gain entry into eukaryotic tissues (Stockbauer et al., 1999; Isberg and Nhieu, 1994). However, not all RGD-containing proteins mediate cell attachment. It has been shown that RGD-containing peptides with a proline at the carboxy end (RGDP) are inactive in cell attachment assays (Pierschbacher and Rouslahti, 1987) and were excluded from consideration.

[0115] Listed in Table 13 are 125 ORFs found to contain the peptide sequence ‘RGDX’ where X is not proline. These ORFs are predicted to be surface localized and may interact with eukaryotic extracellular proteins.

TABLE 13
RGD MOTIF

| ORF Number | DNA SEQ ID Number | Protein SEQ ID Number |
|---|---|---|
| 24 | Seq. ID No. 37 | Seq. ID No. 38 |
| 58 | Seq. ID No. 99 | Seq. ID No. 100 |
| 62a | Seq. ID No. 107 | Seq. ID No. 108 |
| 62b | Seq. ID No. 109 | Seq. ID No. 110 |
| 62c | Seq. ID No. 111 | Seq. ID No. 112 |
| 171a | Seq. ID No. 351 | Seq. ID No. 352 |
| 171b | Seq. ID No. 353 | Seq. ID No. 354 |
| 228a | Seq. ID No. 465 | Seq. ID No. 466 |
| 228b | Seq. ID No. 467 | Seq. ID No. 468 |
| 228c | Seq. ID No. 469 | Seq. ID No. 470 |
| 228d | Seq. ID No. 471 | Seq. ID No. 472 |
| 329 | Seq. ID No. 683 | Seq. ID No. 684 |
| 383a | Seq. ID No. 821 | Seq. ID No. 822 |
| 383b | Seq. ID No. 823 | Seq. ID No. 824 |
| 467a | Seq. ID No. 1021 | Seq. ID No. 1022 |
| 467b | Seq. ID No. 1023 | Seq. ID No. 1024 |
| 535 | Seq. ID No. 1157 | Seq. ID No. 1158 |
| 536 | Seq. ID No. 1159 | Seq. ID No. 1160 |
| 569 | Seq. ID No. 1233 | Seq. ID No. 1234 |
| 614a | Seq. ID No: 1333 | Seq. ID No. 1334 |
| 614b | Seq. ID No. 1335 | Seq. ID No. 1336 |
| 680 | Seq. ID No. 1449 | Seq. ID No. 1450 |
| 743a | Seq. ID No. 1559 | Seq. ID No. 1560 |
| 743b | Seq. ID No. 1561 | Seq. ID No. 1562 |
| 744 | Seq. ID No. 1563 | Seq. ID No. 1564 |
| 774 | Seq. ID No. 1625 | Seq. ID No. 1626 |
| 863 | Seq. ID No. 1777 | Seq. ID No. 1778 |
| 890a | Seq. ID No. 1827 | Seq. ID No. 1828 |
| 890b | Seq. ID No. 1829 | Seq. ID No. 1830 |
| 929b | Seq. ID No. 1871 | Seq. ID No. 1872 |
| 954 | Seq. ID No. 1925 | Seq. ID No. 1926 |
| 1057 | Seq. ID No. 2135 | Seq. ID No. 2136 |
| 1063 | Seq. ID No. 2145 | Seq. ID No. 2146 |
| 1077b | Seq. ID No. 2173 | Seq. ID No. 2174 |
| 1077c | Seq. ID No. 2175 | Seq. ID No. 2176 |
| 1077d | Seq. ID No. 2177 | Seq. ID No. 2178 |
| 1077e | Seq. ID No. 2179 | Seq. ID No. 2180 |
| 1132 | Seq. ID No. 2259 | Seq. ID No. 2260 |
| 1155a | Seq. ID No. 2317 | Seq. ID No. 2318 |
| 1155b | Seq. ID No. 2319 | Seq. ID No. 2320 |
| 1155c | Seq. ID No. 2321 | Seq. ID No. 2322 |
| 1155d | Seq. ID No. 2323 | Seq. ID No. 2324 |
| 1155e | Seq. ID No. 2325 | Seq. ID No. 2326 |
| 1155f | Seq. ID No. 2327 | Seq. ID No. 2328 |
| 1155g | Seq. ID No. 2329 | Seq. ID No. 2330 |
| 1184 | Seq. ID No. 2401 | Seq. ID No. 2402 |
| 1302 | Seq. ID No. 2671 | Seq. ID No. 2672 |
| 1405 | Seq. ID No. 2863 | Seq. ID No. 2864 |
| 1409 | Seq. ID No. 2869 | Seq. ID No. 2870 |
| 1431 | Seq. ID No. 2919 | Seq. ID No. 2920 |
| 1432 | Seq. ID No. 2921 | Seq. ID No. 2922 |
| 1456 | Seq. ID No. 2993 | Seq. ID No. 2994 |
| 1489 | Seq. ID No. 3087 | Seq. ID No. 3088 |
| 1512 | Seq. ID No. 3137 | Seq. ID No. 3138 |
| 1587a | Seq. ID No. 3279 | Seq. ID No. 3280 |
| 1587b | Seq. ID No. 3281 | Seq. ID No. 3282 |
| 1587c | Seq. ID No. 3283 | Seq. ID No. 3284 |
| 1616a | Seq. ID No. 3333 | Seq. ID No. 3334 |
| 1616b | Seq. ID No. 3335 | Seq. ID No. 3336 |
| 1689a | Seq. ID No. 3497 | Seq. ID No. 3498 |
| 1689b | Seq. ID No. 3499 | Seq. ID No. 3500 |
| 1689c | Seq. ID No. 3501 | Seq. ID No. 3502 |
| 1700b | Seq. ID No. 3533 | Seq. ID No. 3534 |
| 1775a | Seq. ID No. 3671 | Seq. ID No. 3672 |
| 1775b | Seq. ID No. 3673 | Seq. ID No. 3674 |
| 1775c | Seq. ID No. 3675 | Seq. ID No. 3676 |
| 1838a | Seq. ID No. 3837 | Seq. ID No. 3838 |
| 1838b | Seq. ID No. 3839 | Seq. ID No. 3840 |
| 1838c | Seq. ID No. 3841 | Seq. ID No. 3842 |
| 1838d | Seq. ID No. 3843 | Seq. ID No. 3844 |
| 1875c | Seq. ID No. 3929 | Seq. ID No. 3930 |
| 1895 | Seq. ID No. 3961 | Seq. ID No. 3962 |
| 1934 | Seq. ID No. 4037 | Seq. ID No. 4038 |
| 1996 | Seq. ID No. 4193 | Seq. ID No. 4194 |
| 2021 | Seq. ID No. 4239 | Seq. ID No. 4240 |
| 2065a | Seq. ID No. 4327 | Seq. ID No. 4328 |
| 2065b | Seq. ID No. 4329 | Seq. ID No. 4330 |
| 2068 | Seq. ID No. 4333 | Seq. ID No. 4334 |
| 2097 | Seq. ID No. 4393 | Seq. ID No. 4394 |
| 2138a | Seq. ID No. 4463 | Seq. ID No. 4464 |
| 2138b | Seq. ID No. 4465 | Seq. ID No. 4466 |
| 2138c | Seq. ID No. 4467 | Seq. ID No. 4468 |
| 2196 | Seq. ID No. 4597 | Seq. ID No. 4598 |
| 2215a | Seq. ID No. 4629 | Seq. ID No. 4630 |
| 2215b | Seq. ID No. 4631 | Seq. ID No. 4632 |
| 2234a | Seq. ID No. 4675 | Seq. ID No. 4676 |
| 2234b | Seq. ID No. 4677 | Seq. ID No. 4678 |
| 2234c | Seq. ID No. 4679 | Seq. ID No. 4680 |
| 2240a | Seq. ID No. 4689 | Seq. ID No. 4690 |
| 2240b | Seq. ID No. 4691 | Seq. ID No. 4692 |
| 2240c | Seq. ID No. 4693 | Seq. ID No. 4694 |
| 2284 | Seq. ID No. 4781 | Seq. ID No. 4782 |
| 2292a | Seq. ID No. 4799 | Seq. ID No. 4800 |
| 2292b | Seq. ID No. 4801 | Seq. ID No. 4802 |
| 2292c | Seq. ID No. 4803 | Seq. ID No. 4804 |
| 2322 | Seq. ID No. 4861 | Seq. ID No. 4862 |
| 2401 | Seq. ID No. 5009 | Seq. ID No. 5010 |
| 2461a | Seq. ID No. 5143 | Seq. ID No. 5144 |
| 2461b | Seq. ID No. 5145 | Seq. ID No. 5146 |
| 2475a | Seq. ID No. 5179 | Seq. ID No. 5180 |
| 2475b | Seq. ID No. 5181 | Seq. ID No. 5182 |
| 2475c | Seq. ID No. 5183 | Seq. ID No. 5184 |
| 2513a | Seq. ID No. 5249 | Seq. ID No. 5250 |
| 2513b | Seq. ID No. 5251 | Seq. ID No. 5252 |
| 2513c | Seq. ID No. 5253 | Seq. ID No. 5254 |
| 2516a | Seq. ID No. 5259 | Seq. ID No. 5260 |
| 2516b | Seq. ID No. 5261 | Seq. ID No. 5262 |
| 2528a | Seq. ID No. 5293 | Seq. ID No. 5294 |
| 2528b | Seq. ID No. 5295 | Seq. ID No. 5296 |
| 2528c | Seq. ID No. 5297 | Seq. ID No. 5298 |
| 2528d | Seq. ID No. 5299 | Seq. ID No. 5300 |
| 2535a | Seq. ID No. 5307 | Seq. ID No. 5308 |
| 2535b | Seq. ID No. 5309 | Seq. ID No. 5310 |
| 2585 | Seq. ID No. 5411 | Seq. ID No. 5412 |
| 2643a | Seq. ID No. 5535 | Seq. ID No. 5536 |
| 2643b | Seq. ID No. 5537 | Seq. ID No. 5538 |
| 2744 | Seq. ID No. 5745 | Seq. ID No. 5746 |
| 2768a | Seq. ID No. 5821 | Seq. ID No. 5822 |
| 2768b | Seq. ID No. 5823 | Seq. ID No. 5824 |
| 2768c | Seq. ID No. 5825 | Seq. ID No. 5826 |
| 2871 | Seq. ID No. 6029 | Seq. ID No. 6030 |
| 2934 | Seq. ID No. 6171 | Seq. ID No. 6172 |
| 2988a | Seq. ID No. 6307 | Seq. ID No. 6308 |
| 2988b | Seq. ID No. 6309 | Seq. ID No. 6310 |
| 2988c | Seq. ID No. 6311 | Seq. ID No. 6312 |

[0116] Listed in Table 14 are the 39 ORFs whose BlastP results predict for possible capsule biosynthesis and transport. Keywords used in the search are: polysaccharide, saccharide, rhamnos, dexB, aliA, cap[A-Z], cps[A-Z], wze[A-Z], wzh[A-Z], teichu, tuaG, manB, pyrophosphorylase, glucose, eps[ABE], glucosyl, xylos, encapsula, pgs[ABC], exopolysacch, galactos, epimerase, lytR, lytABC, lysR, Transferase, GalNAc, GlcNAc, Spore, LPS, Peptidoglycan, Glutamate, Mannos, Oligosaccharide, Outer core, Arabinose, Teichoic, Teicho, Lipoteichoic, Glycerol, spo[A-Z], capsule, capsular.

TABLE 14
CAPSULE RELATED PROTEINS

| ORF | DNA SEQ ID | Protein SEQ ID | | | Blast ‘e’ |
|---|---|---|---|---|---|
| Number | Number | Number | Keyword | Description | Value |
| 39a | Seq. ID No. 49 | Seq. ID No. 50 | capC | capsule biosynthesis | 6.00E−19 |
| | | | | protein CapC, (pXO2- | |
| | | | | 57), Baci . . . | |
| 39b | Seq. ID No. 51 | Seq. ID No. 52 | capC | capsule biosynthesis | 7.00E−19 |
| | | | | protein CapC, (pXO2- | |
| | | | | 57), Baci . . . | |
| 40 | Seq. ID No. 53 | Seq. ID No. 54 | capB | CapB, Bacillus subtilis | 9.00E−95 |
| | | | | Bacteria; Firmicutes; | |
| | | | | Baci . . . | |
| 41c | Seq. ID No. 59 | Seq. ID No. 60 | capA | PgsA, Bacillus subtilis | 9.00E−95 |
| | | | | Bacteria; Firmicutes; | |
| | | | | Baci . . . | |
| 102 | Seq. ID No. 195 | Seq. ID No. 196 | saccharide | Bacillus cereus | 1.00E−168 |
| | | | | Bacteria; Firmicutes; | |
| | | | | Bacillus/Clo . . . | |
| 330c | Seq. ID No. 689 | Seq. ID No. 690 | transferase | Glycosyltransferase, | 5.00E−79 |
| | | | | Clostridium | |
| | | | | acetobutylicum Ba . . . | |
| 337 | Seq. ID No. 703 | Seq. ID No. 704 | transferase | glycosyltransferase, | 2.00E−58 |
| | | | | Lactococcus lactis | |
| | | | | subsp. lac . . . | |
| 427c | Seq. ID No. 925 | Seq. ID No. 926 | capsular | unknown, | 2.00E−46 |
| | | | | Staphylococcus aureus | |
| | | | | Bacteria; Firmicute . . . | |
| 760 | Seq. ID No. | Seq. ID No. 1598 | dexB | maturase-related | 6.00E−78 |
| | 1597 | | | protein, Streptococcus | |
| | | | | pneumoniae . . . | |
| 762b | Seq. ID No. | Seq. ID No. 1602 | cpsL | transposase, | 1.00E−46 |
| | 1601 | | | Streptococcus | |
| | | | | pneumoniae Bacteria; | |
| | | | | Fi . . . | |
| 763b | Seq. ID No. | Seq. ID No. 1608 | capsular | transposase, | 5.00E−44 |
| | 1607 | | | Staphylococcus aureus | |
| | | | | Bacteria; Firmi . . . | |
| 766 | Seq. ID No. | Seq. ID No. 1612 | cpsL | transposase, | 6.00E−44 |
| | 1611 | | | Streptococcus | |
| | | | | pneumoniae Bacteria; | |
| | | | | Fi . . . | |
| 767 | Seq. ID No. | Seq. ID No. 1614 | capsular | transposase, | 4.00E−16 |
| | 1613 | | | Staphylococcus aureus | |
| | | | | Bacteria; Firmi . . . | |
| 830 | Seq. ID No. | Seq. ID No. 1714 | cpsA | Thermostable | 4.00E−14 |
| | 1713 | | | carboxypeptidase | |
| | | | | (cpsA-2), Sulfolobus . . . | |
| 1004a | Seq. ID No. | Seq ID No. 2030 | EpsE | unknown, Lactobacillus | 1.00E−168 |
| | 2029 | | | rhamnosus Bacteria; | |
| | | | | Firmicu . . . | |
| 1135b | Seq. ID No. | Seq. ID No. 2264 | capA | Bacillus anthracis | 3.00E−25 |
| | 2263 | | | Bacteria; Firmicutes; | |
| | | | | Bacillus/ . . . | |
| 1138 | Seq. ID No. | Seq. ID No. 2270 | saccharide | unknown, | 9.00E−60 |
| | 2269 | | | Staphylococcus aureus | |
| | | | | Bacteria; Firmicute . . . | |
| 1177 | Seq. ID No. | Seq. ID No. 2374 | capsular | capsular | 9.00E−60 |
| | 2373 | | | polysaccharide | |
| | | | | biosynthesi . . . | |
| | | | | U67548 . . . | |
| 1200 | Seq. ID No. | Seq. ID No. 2438 | xylos | acetylxylosidase, | 9.00E−36 |
| | 2437 | | | Caldicellulosiruptor | |
| | | | | saccharolyt . . . | |
| 1288 | Seq. ID No. | Seq. ID No. 2652 | lytR | membrane bound | 3.00E−42 |
| | 2651 | | | protein, Bacillus subtilis | |
| | | | | Bacteria . . . | |
| 1355 | Seq. ID No. | Seq. ID No. 2768 | manB | probable | 1.00E−136 |
| | 2767 | | | phosphomannomutase, | |
| | | | | Clostridium | |
| | | | | perfringe . . . | |
| 1426b | Seq. ID No. | Seq. ID No. 2908 | polysaccharide | Orfde2, Enterococcus | 1.00E−103 |
| | 2907 | | | faecalis Bacteria; | |
| | | | | Firmicutes . . . | |
| 1646e | Seq. ID No. | Seq. ID No. 3398 | polysaccharide | putative polysaccharide | 3.00E−24 |
| | 3397 | | | biosynthesis protein, | |
| | | | | Stre . . . | |
| 1646f | Seq. ID No. | Seq. ID No. 3400 | polysaccharide | putative polysaccharide | 3.00E−78 |
| | 3399 | | | biosynthesis protein, | |
| | | | | Stre . . . | |
| 1682b | Seq. ID No. | Seq. ID No. 3480 | polysaccharide | methionine | 2.00E−68 |
| | 3479 | | | aminopeptidase A, | |
| | | | | Enterococcus | |
| | | | | faecalis . . . | |
| 1685 | Seq. ID No. | Seq. ID No. 3488 | glucose | UDP-glucose 4- | 1.00E−111 |
| | 3487 | | | epimerase, | |
| | | | | Streptococcus | |
| | | | | pneumoniae . . . | |
| 1688a | Seq. ID No. | Seq. ID No. 3492 | polysaccharide | Orfde3, Enterococcus | 3.00E−78 |
| | 3491 | | | faecalis Bacteria; | |
| | | | | Firmicutes . . . | |
| 1688b | Seq. ID No. | Seq. ID No. 3494 | polysaccharide | Orfde3, Enterococcus | 9.00E−34 |
| | 3493 | | | faecalis Bacteria; | |
| | | | | Firmicutes . . . | |
| 1688c | Seq. ID No. | Seq. ID No. 3496 | transferase | RgpG, Lactobacillus | 4.00E−99 |
| | 3495 | | | delbrueckii Bacteria; | |
| | | | | Firmicut . . . | |
| 1689a | Seq. ID No. | Seq. ID No. 3498 | tuaG | teichuronic acid | 9.00E−53 |
| | 3497 | | | biosynthesis, Bacillus | |
| | | | | halodurans . . . | |
| 1094d | Seq. ID No. | Seq. ID No. 3520 | lytR | attenuator for lytABC | 6.00E−69 |
| | 3519 | | | and lytR expression, | |
| | | | | Bacillu . . . | |
| 1696 | Seq. ID No. | Seq. ID No. 3522 | glucose | putative UDP-glucose | 1.00E−157 |
| | 3521 | | | dehydrogenase, | |
| | | | | Escherichia co . . . | |
| 1699b | Seq. ID No. | Seq. ID No. 3530 | teichu | unknown, Bacillus | 8.00E−30 |
| | 3529 | | | subtilis Bacteria; | |
| | | | | Firmicutes; G . . . | |
| 1701a | Seq. ID No. | Seq. ID No. 3536 | mannos | alpha-D-mannose- | 1.00E−84 |
| | 3535 | | | alpha(1-6)phospha . . . | |
| | | | | AP001516 . . . | |
| 1710b | Seq. ID No. | Seq. ID No. 3562 | LPS | LPS biosynthesis | 4.00E−12 |
| | 3561 | | | protein RfaE, Ps . . . | |
| | | | | AE004912 . . . | |
| 1855 | Seq. ID No. | Seq. ID No. 3884 | capsule | Regulatory function on | 5.00E−38 |
| | 3883 | | | capsule ex . . . | |
| | | | | AE008458 . . . | |
| 1857c | Seq. ID No. | Seq. ID No. 3892 | polysaccharide | Staphylococcus aureus | 1.00E−13 |
| | 3891 | | | subsp. aureus N315 | |
| | | | | Bacteria; . . . | |
| 1902a | Seq. ID No. | Seq. ID No. 3982 | capsular | DNA topoisomerase IV | 7.00E−15 |
| | 3981 | | | subunit B, | |
| | | | | Streptococcus agal . . . | |
| 1951d | Seq. ID No. | Seq. ID No. 4088 | saccharide | Phospholipid- | 7.00E−84 |
| | 4087 | | | lipopolysaccharide A . . . | |
| | | | | AE010571 . . . | |

[0117] Three potential capsule loci have been identified based on BlastP analysis listed in Table 14: poly-gamma-glutamate from base 20186 to 24645, sugar transport from base 159934 to 172757, and teichuronic from base 886658 to 930066. Table 15 lists the ORFs found within these regions.

TABLE 15
CAPSULE LOCI

| ORF | DNA SEQ ID | Protein SEQ | |
|---|---|---|---|
| Number | Number | ID Number | Locus |
| 38a | Seq. ID No. 45 | Seq. ID No. 46 | Poly-gamma-glutamate |
| 38b | Seq. ID No. 47 | Seq. ID No. 48 | Poly-gamma-glutamate |
| 39b | Seq. ID No. 51 | Seq. ID No. 52 | Poly-gamma-glutamate |
| 40 | Seq. ID No. 53 | Seq. ID No. 54 | Poly-gamma-glutamate |
| 41a | Seq. ID No. 55 | Seq. ID No. 56 | Poly-gamma-glutamate |
| 41b | Seq. ID No. 57 | Seq. ID No. 58 | Poly-gamma-glutamate |
| 41c | Seq. ID No. 59 | Seq. ID No. 60 | Poly-gamma-glutamate |
| 329 | Seq. ID No. 683 | Seq. ID No. 684 | sugar transport |
| 330a | Seq. ID No. 685 | Seq. ID No. 686 | sugar transport |
| 330b | Seq. ID No. 687 | Seq. ID No. 688 | sugar transport |
| 330c | Seq. ID No. 689 | Seq. ID No. 690 | sugar transport |
| 331 | Seq. ID No. 691 | Seq. ID No. 670 | sugar transport |
| 332 | Seq. ID No. 693 | Seq. ID No. 694 | sugar transport |
| 333 | Seq. ID No. 695 | Seq. ID No. 696 | sugar transport |
| 334 | Seq. ID No. 687 | Seq. ID No. 698 | sugar transport |
| 335a | Seq. ID No. 699 | Seq. ID No. 670 | sugar transport |
| 335b | Seq. ID No. 701 | Seq. ID No. 702 | sugar transport |
| 337 | Seq. ID No. 703 | Seq. ID No. 704 | sugar transport |
| 338a | Seq. ID No. 705 | Seq. ID No. 706 | sugar transport |
| 338b | Seq. ID No. 707 | Seq. ID No. 708 | sugar transport |
| 338c | Seq. ID No. 709 | Seq. ID No. 710 | sugar transport |
| 341a | Seq. ID No. 711 | Seq. ID No. 712 | sugar transport |
| 341b | Seq. ID No. 713 | Seq. ID No. 714 | sugar transport |
| 342a | Seq. ID No. 715 | Seq. ID No. 716 | sugar transport |
| 342b | Seq. ID No. 717 | Seq. ID No. 718 | sugar transport |
| 342c | Seq. ID No. 719 | Seq. ID No. 720 | sugar transport |
| 342d | Seq. ID No. 721 | Seq. ID No. 722 | sugar transport |
| 342e | Seq. ID No. 723 | Seq. ID No. 724 | sugar transport |
| 342f | Seq. ID No. 725 | Seq. ID No. 726 | sugar transport |
| 342g | Seq. ID No. 727 | Seq. ID No. 728 | sugar transport |
| 342h | Seq. ID No. 729 | Seq. ID No. 730 | sugar transport |
| 344a | Seq. ID No. 731 | Seq. ID No. 732 | sugar transport |
| 344b | Seq. ID No. 733 | Seq. ID No. 734 | sugar transport |
| 345 | Seq. ID No. 735 | Seq. ID No. 736 | sugar transport |
| 346a | Seq. ID No. 737 | Seq. ID No. 738 | sugar transport |
| 346b | Seq. ID No. 739 | Seq. ID No. 740 | sugar transport |
| 347 | Seq. ID No. 741 | Seq. ID No. 742 | sugar transport |
| 349a | Seq. ID No. 743 | Seq. ID No. 744 | sugar transport |
| 349b | Seq. ID No. 745 | Seq. ID No. 746 | sugar transport |
| 349c | Seq. ID No. 747 | Seq. ID No. 748 | sugar transport |
| 350a | Seq. ID No. 749 | Seq. ID No. 750 | sugar transport |
| 350b | Seq. ID No. 751 | Seq. ID No. 752 | sugar transport |
| 351 | Seq. ID No. 753 | Seq. ID No. 754 | sugar transport |
| 1646a | Seq. ID No. 3389 | Seq. ID No. 3390 | Teichuronic |
| 1646b | Seq. ID No. 3391 | Seq. ID No. 3392 | Teichuronic |
| 1646c | Seq. ID No. 3393 | Seq. ID No. 3394 | Teichuronic |
| 1646d | Seq. ID No. 3395 | Seq. ID No. 3396 | Teichuronic |
| 1646e | Seq. ID No. 3397 | Seq. ID No. 3398 | Teichuronic |
| 1646f | Seq. ID No. 3399 | Seq. ID No. 3400 | Teichuronic |
| 1647 | Seq. ID No. 3401 | Seq. ID No. 3402 | Teichuronic |
| 1648b | Seq. ID No. 3403 | Seq. ID No. 3404 | Teichuronic |
| 1649a | Seq. ID No. 3405 | Seq. ID No. 3406 | Teichuronic |
| 1649b | Seq. ID No. 3407 | Seq. ID No. 3408 | Teichuronic |
| 1649c | Seq. ID No. 3409 | Seq. ID No. 3410 | Teichuronic |
| 1652a | Seq. ID No. 3411 | Seq. ID No. 3412 | Teichuronic |
| 1652b | Seq. ID No. 3413 | Seq. ID No. 3414 | Teichuronic |
| 1654 | Seq. ID No. 3415 | Seq. ID No. 3416 | Teichuronic |
| 1656b | Seq. ID No. 3417 | Seq. ID No. 3418 | Teichuronic |
| 1657 | Seq. ID No. 3419 | Seq. ID No. 3420 | Teichuronic |
| 1659a | Seq. ID No. 3421 | Seq. ID No. 3422 | Teichuronic |
| 1659b | Seq. ID No. 3423 | Seq. ID No. 3424 | Teichuronic |
| 1659c | Seq. ID No. 3425 | Seq. ID No. 3426 | Teichuronic |
| 1660b | Seq. ID No. 3427 | Seq. ID No. 3428 | Teichuronic |
| 1662a | Seq. ID No. 3429 | Seq. ID No. 3430 | Teichuronic |
| 1662b | Seq. ID No. 3431 | Seq. ID No. 3432 | Teichuronic |
| 1663 | Seq. ID No. 3433 | Seq. ID No. 3434 | Teichuronic |
| 1664 | Seq. ID No. 3435 | Seq. ID No. 3436 | Teichuronic |
| 1665a | Seq. ID No. 3437 | Seq. ID No. 3438 | Teichuronic |
| 1668 | Seq. ID No. 3439 | Seq. ID No. 3440 | Teichuronic |
| 1669 | Seq. ID No. 3441 | Seq. ID No. 3442 | Teichuronic |
| 1670a | Seq. ID No. 3443 | Seq. ID No. 3444 | Teichuronic |
| 1670b | Seq. ID No. 3445 | Seq. ID No. 3446 | Teichuronic |
| 1670c | Seq. ID No. 3447 | Seq. ID No. 3448 | Teichuronic |
| 1673a | Seq. ID No. 3449 | Seq. ID No. 3450 | Teichuronic |
| 1673b | Seq. ID No. 3451 | Seq. ID No. 3452 | Teichuronic |
| 1673c | Seq. ID No. 3453 | Seq. ID No. 3454 | Teichuronic |
| 1673d | Seq. ID No. 3455 | Seq. ID No. 3456 | Teichuronic |
| 1673e | Seq. ID No. 3457 | Seq. ID No. 3458 | Teichuronic |
| 1673f | Seq. ID No. 3459 | Seq. ID No. 3460 | Teichuronic |
| 1674 | Seq. ID No. 3461 | Seq. ID No. 3462 | Teichuronic |
| 1675a | Seq. ID No. 3463 | Seq. ID No. 3464 | Teichuronic |
| 1675b | Seq. ID No. 3465 | Seq. ID No. 3466 | Teichuronic |
| 1675c | Seq. ID No. 3467 | Seq. ID No. 3468 | Teichuronic |
| 1676 | Seq. ID No. 3469 | Seq. ID No. 3470 | Teichuronic |
| 1677 | Seq. ID No. 3471 | Seq. ID No. 3472 | Teichuronic |
| 1679 | Seq. ID No. 3473 | Seq. ID No. 3474 | Teichuronic |
| 1680 | Seq. ID No. 3475 | Seq. ID No. 3476 | Teichuronic |
| 1682a | Seq. ID No. 3477 | Seq. ID No. 3478 | Teichuronic |
| 1682b | Seq. ID No. 3479 | Seq. ID No. 3480 | Teichuronic |
| 1683a | Seq. ID No. 3481 | Seq. ID No. 3482 | Teichuronic |
| 1683b | Seq. ID No. 3483 | Seq. ID No. 3484 | Teichuronic |
| 1684 | Seq. ID No. 3485 | Seq. ID No. 3486 | Teichuronic |
| 1685 | Seq. ID No. 3487 | Seq. ID No. 3488 | Teichuronic |
| 1687 | Seq. ID No. 3489 | Seq. ID No. 3490 | Teichuronic |
| 1688a | Seq. ID No. 3491 | Seq. ID No. 3492 | Teichuronic |
| 1688b | Seq. ID No. 3493 | Seq. ID No. 3494 | Teichuronic |
| 1688c | Seq. ID No. 3495 | Seq. ID No. 3496 | Teichuronic |
| 1689a | Seq. ID No. 3497 | Seq. ID No. 3498 | Teichuronic |
| 1689b | Seq. ID No. 3499 | Seq. ID No. 3500 | Teichuronic |
| 1689c | Seq. ID No. 3501 | Seq. ID No. 3502 | Teichuronic |
| 1690a | Seq. ID No. 3503 | Seq. ID No. 3504 | Teichuronic |
| 1690b | Seq. ID No. 3505 | Seq. ID No. 3506 | Teichuronic |
| 1691 | Seq. ID No. 3507 | Seq. ID No. 3508 | Teichuronic |
| 1692 | Seq. ID No. 3509 | Seq. ID No. 3510 | Teichuronic |
| 1693 | Seq. ID No. 3511 | Seq. ID No. 3512 | Teichuronic |
| 1694a | Seq. ID No. 3513 | Seq. ID No. 3514 | Teichuronic |
| 1694b | Seq. ID No. 3515 | Seq. ID No. 3516 | Teichuronic |
| 1694c | Seq. ID No. 3517 | Seq. ID No. 3518 | Teichuronic |
| 1694d | Seq. ID No. 3519 | Seq. ID No. 3520 | Teichuronic |
| 1696 | Seq. ID No. 3521 | Seq. ID No. 3522 | Teichuronic |
| 1697a | Seq. ID No. 3523 | Seq. ID No. 3524 | Teichuronic |
| 1697b | Seq. ID No. 3525 | Seq. ID No. 3526 | Teichuronic |
| 1699a | Seq. ID No. 3527 | Seq. ID No. 3528 | Teichuronic |
| 1699b | Seq. ID No. 3529 | Seq. ID No. 3530 | Teichuronic |
| 1700a | Seq. ID No. 3531 | Seq. ID No. 3532 | Teichuronic |
| 1700b | Seq. ID No. 3533 | Seq. ID No. 3534 | Teichuronic |
| 1701a | Seq. ID No. 3535 | Seq. ID No. 3536 | Teichuronic |
| 1701b | Seq. ID No. 3537 | Seq. ID No. 3538 | Teichuronic |
| 1703b | Seq. ID No. 3539 | Seq. ID No. 3540 | Teichuronic |
| 1704a | Seq. ID No. 3541 | Seq. ID No. 3542 | Teichuronic |
| 1704b | Seq. ID No. 3543 | Seq. ID No. 3544 | Teichuronic |
| 1705a | Seq. ID No. 3545 | Seq. ID No. 3546 | Teichuronic |
| 1705b | Seq. ID No. 3547 | Seq. ID No. 3548 | Teichuronic |
| 1706 | Seq. ID No. 3549 | Seq. ID No. 3550 | Teichuronic |
| 1707a | Seq. ID No. 3551 | Seq. ID No. 3552 | Teichuronic |
| 1707b | Seq. ID No. 3553 | Seq. ID No. 3554 | Teichuronic |
| 1708 | Seq. ID No. 3555 | Seq. ID No. 3556 | Teichuronic |
| 1709 | Seq. ID No. 3557 | Seq. ID No. 3558 | Teichuronic |
| 1710a | Seq. ID No. 3559 | Seq. ID No. 3560 | Teichuronic |
| 1710b | Seq. ID No. 3561 | Seq. ID No. 3562 | Teichuronic |

[0118] Listed in Table 16 are 14 ORFs determined by keyword search of the BlastP associated with sporulation.

TABLE 16
SPORULATION RELATED PROTEINS

| ORF Number | DNA SEQ ID Number | Protein SEQ ID Number |
|---|---|---|
| 524b | Seq. ID No. 1137 | Seq. ID No. 1138 |
| 683b | Seq. ID No. 1455 | Seq. ID No. 1456 |
| 1058 | Seq. ID No. 2137 | Seq. ID No. 2138 |
| 1060b | Seq. ID No. 2141 | Seq. ID No. 2142 |
| 1070b | Seq. ID No. 2165 | Seq. ID No. 2166 |
| 1077e | Seq. ID No. 2179 | Seq. ID No. 2180 |
| 1149 | Seq. ID No. 2301 | Seq. ID No. 2302 |
| 1348 | Seq. ID No. 2753 | Seq. ID No. 2754 |
| 2011c | Seq. ID No. 4211 | Seq. ID No. 4212 |
| 2024d | Seq. ID No. 4251 | Seq. ID No. 4252 |
| 2065a | Seq. ID No. 4327 | Seq. ID No. 4328 |
| 2181a | Seq. ID No. 4569 | Seq. ID No. 4570 |
| 2256 | Seq. ID No. 4719 | Seq. ID No. 4720 |
| 2260c | Seq. ID No. 4729 | Seq. ID No. 4730 |

[0119] Listed in Table 17 are the 913 start to stop ORFs which are unique to Alloiococcus otitidis, or 653 unique Stop-Stop ORFs identified as having a BlastP ‘E Value’ of >e⁻¹⁰ (not identified separately in Table 17).

TABLE 17
UNIQUE ORFs

| ORF Number | DNA SEQ ID Number | Protein SEQ ID Number |
|---|---|---|
| 4a | Seq. ID No. 7 | Seq. ID No. 8 |
| 11 | Seq. ID No. 19 | Seq. ID No. 20 |
| 13a | Seq. ID No. 21 | Seq. ID No. 22 |
| 16 | Seq. ID No. 23 | Seq. ID No. 24 |
| 21b | Seq. ID No. 31 | Seq. ID No. 32 |
| 32 | Seq. ID No. 39 | Seq. ID No. 40 |
| 44a | Seq. ID No. 65 | Seq. ID No. 66 |
| 44b | Seq. ID No. 67 | Seq. ID No. 68 |
| 45 | Seq. ID No. 69 | Seq. ID No. 70 |
| 55 | Seq. ID No. 91 | Seq. ID No. 92 |
| 58 | Seq. ID No. 99 | Seq. ID No. 100 |
| 61 | Seq. ID No. 105 | Seq. ID No. 106 |
| 63a | Seq. ID No. 113 | Seq. ID No. 114 |
| 63b | Seq. ID No. 115 | Seq. ID No. 116 |
| 66a | Seq. ID No. 123 | Seq. ID No. 124 |
| 67 | Seq. ID No. 125 | Seq. ID No. 126 |
| 69 | Seq. ID No. 127 | Seq. ID No. 128 |
| 73a | Seq. ID No. 131 | Seq. ID No. 132 |
| 73b | Seq. ID No. 133 | Seq. ID No. 134 |
| 79 | Seq. ID No. 139 | Seq. ID No. 140 |
| 83 | Seq. ID No. 151 | Seq. ID No. 152 |
| 86 | Seq. ID No. 159 | Seq. ID No. 160 |
| 87a | Seq. ID No. 161 | Seq. ID No. 162 |
| 87b | Seq. ID No. 163 | Seq. ID No. 164 |
| 87c | Seq. ID No. 165 | Seq. ID No. 166 |
| 89 | Seq. ID No. 169 | Seq. ID No. 170 |
| 94 | Seq. ID No. 185 | Seq. ID No. 186 |
| 97b | Seq. ID No. 189 | Seq. ID No. 190 |
| 101 | Seq. ID No. 193 | Seq. ID No. 194 |
| 119a | Seq. ID No. 229 | Seq. ID No. 230 |
| 119b | Seq. ID No. 231 | Seq. ID No. 232 |
| 132a | Seq. ID No. 255 | Seq. ID No. 256 |
| 132b | Seq. ID No. 257 | Seq. ID No. 258 |
| 132c | Seq. ID No. 259 | Seq. ID No. 260 |
| 142 | Seq. ID No. 275 | Seq. ID No. 276 |
| 163 | Seq. ID No. 337 | Seq. ID No. 338 |
| 164 | Seq. ID No. 339 | Seq. ID No. 340 |
| 169 | Seq. ID No. 347 | Seq. ID No. 348 |
| 170 | Seq. ID No. 349 | Seq. ID No. 350 |
| 173 | Seq. ID No. 357 | Seq. ID No. 358 |
| 174 | Seq. ID No. 359 | Seq. ID No. 360 |
| 179a | Seq. ID No. 369 | Seq. ID No. 370 |
| 179b | Seq. ID No. 371 | Seq. ID No. 372 |
| 183a | Seq. ID No. 377 | Seq. ID No. 378 |
| 187a | Seq. ID No. 385 | Seq. ID No. 386 |
| 187b | Seq. ID No. 387 | Seq. ID No. 388 |
| 191b | Seq. ID No. 393 | Seq. ID No. 394 |
| 193 | Seq. ID No. 399 | Seq. ID No. 400 |
| 194a | Seq. ID No. 401 | Seq. ID No. 402 |
| 194b | Seq. ID No. 403 | Seq. ID No. 404 |
| 196 | Seq. ID No. 407 | Seq. ID No. 408 |
| 201a | Seq. ID No. 419 | Seq. ID No. 420 |
| 207 | Seq. ID No. 431 | Seq. ID No. 432 |
| 235a | Seq. ID No. 477 | Seq. ID No. 478 |
| 241 | Seq. ID No. 495 | Seq. ID No. 496 |
| 247 | Seq. ID No. 507 | Seq. ID No. 508 |
| 253a | Seq. ID No. 519 | Seq. ID No. 520 |
| 260 | Seq. ID No. 541 | Seq. ID No. 542 |
| 263a | Seq. ID No. 545 | Seq. ID No. 546 |
| 263b | Seq. ID No. 547 | Seq. ID No. 548 |
| 264b | Seq. ID No. 549 | Seq. ID No. 550 |
| 268 | Seq. ID No. 557 | Seq. ID No. 558 |
| 282 | Seq. ID No. 589 | Seq. ID No. 590 |
| 297 | Seq. ID No. 617 | Seq. ID No. 618 |
| 300b | Seq. ID No. 619 | Seq. ID No. 620 |
| 309 | Seq. ID No. 633 | Seq. ID No. 634 |
| 313a | Seq. ID No. 639 | Seq. ID No. 640 |
| 313b | Seq. ID No. 641 | Seq. ID No. 642 |
| 313c | Seq. ID No. 643 | Seq. ID No. 644 |
| 313d | Seq. ID No. 645 | Seq. ID No. 646 |
| 313e | Seq. ID No. 647 | Seq. ID No. 648 |
| 316a | Seq. ID No. 651 | Seq. ID No. 652 |
| 317a | Seq. ID No. 653 | Seq. ID No. 654 |
| 317b | Seq. ID No. 655 | Seq. ID No. 656 |
| 320 | Seq. ID No. 667 | Seq. ID No. 668 |
| 331 | Seq. ID No. 691 | Seq. ID No. 692 |
| 332 | Seq. ID No. 693 | Seq. ID No. 694 |
| 333 | Seq. ID No. 695 | Seq. ID No. 696 |
| 334 | Seq. ID No. 697 | Seq. ID No. 698 |
| 342a | Seq. ID No. 715 | Seq. ID No. 716 |
| 342b | Seq. ID No. 717 | Seq. ID No. 718 |
| 342c | Seq. ID No. 719 | Seq. ID No. 720 |
| 344a | Seq. ID No. 731 | Seq. ID No. 732 |
| 344b | Seq. ID No. 733 | Seq. ID No. 734 |
| 347 | Seq. ID No. 741 | Seq. ID No. 742 |
| 349a | Seq. ID No. 743 | Seq. ID No. 744 |
| 349b | Seq. ID No. 745 | Seq. ID No. 746 |
| 349c | Seq. ID No. 747 | Seq. ID No. 748 |
| 350a | Seq. ID No. 749 | Seq. ID No. 750 |
| 350b | Seq. ID No. 751 | Seq. ID No. 752 |
| 352a | Seq. ID No. 755 | Seq. ID No. 756 |
| 352b | Seq. ID No. 757 | Seq. ID No. 758 |
| 352c | Seq. ID No. 759 | Seq. ID No. 760 |
| 354a | Seq. ID No. 761 | Seq. ID No. 762 |
| 354b | Seq. ID No. 763 | Seq. ID No. 764 |
| 354c | Seq. ID No. 765 | Seq. ID No. 766 |
| 355 | Seq. ID No. 767 | Seq. ID No. 768 |
| 372a | Seq. ID No. 801 | Seq. ID No. 802 |
| 372b | Seq. ID No. 803 | Seq. ID No. 804 |
| 372c | Seq. ID No. 805 | Seq. ID No. 806 |
| 372d | Seq. ID No. 807 | Seq. ID No. 808 |
| 374 | Seq. ID No. 809 | Seq. ID No. 810 |
| 377a | Seq. ID No. 811 | Seq. ID No. 812 |
| 377b | Seq. ID No. 813 | Seq. ID No. 814 |
| 386 | Seq. ID No. 833 | Seq. ID No. 834 |
| 393b | Seq. ID No. 841 | Seq. ID No. 842 |
| 396 | Seq. ID No. 849 | Seq. ID No. 850 |
| 398 | Seq. ID No. 851 | Seq. ID No. 852 |
| 400a | Seq. ID No. 853 | Seq. ID No. 854 |
| 400b | Seq. ID No. 855 | Seq. ID No. 856 |
| 416a | Seq. ID No. 887 | Seq. ID No. 888 |
| 416b | Seq. ID No. 889 | Seq. ID No. 890 |
| 417 | Seq. ID No. 891 | Seq. ID No. 892 |
| 420a | Seq. ID No. 903 | Seq. ID No. 904 |
| 420b | Seq. ID No. 905 | Seq. ID No. 906 |
| 422 | Seq. ID No. 909 | Seq. ID No. 910 |
| 434 | Seq. ID No. 937 | Seq. ID No. 938 |
| 437b | Seq. ID No. 941 | Seq. ID No. 942 |
| 437c | Seq. ID No. 943 | Seq. ID No. 944 |
| 440 | Seq. ID No. 951 | Seq. ID No. 952 |
| 443b | Seq. ID No. 957 | Seq. ID No. 958 |
| 451a | Seq. ID No. 973 | Seq. ID No. 974 |
| 451b | Seq. ID No. 975 | Seq. ID No. 976 |
| 454b | Seq. ID No. 987 | Seq. ID No. 988 |
| 462 | Seq. ID No. 1005 | Seq. ID No. 1006 |
| 463a | Seq. ID No. 1007 | Seq. ID No. 1008 |
| 463b | Seq. ID No. 1009 | Seq. ID No. 1010 |
| 464a | Seq. ID No. 1011 | Seq. ID No. 1012 |
| 465b | Seq. ID No. 1019 | Seq. ID No. 1020 |
| 471a | Seq. ID No. 1025 | Seq. ID No. 1026 |
| 471b | Seq. ID No. 1027 | Seq. ID No. 1028 |
| 476 | Seq. ID No. 1045 | Seq. ID No. 1046 |
| 477b | Seq. ID No. 1047 | Seq. ID No. 1048 |
| 491a | Seq. ID No. 1071 | Seq. ID No. 1072 |
| 491b | Seq. ID No. 1073 | Seq. ID No. 1074 |
| 494a | Seq. ID No. 1077 | Seq. ID No. 1078 |
| 507a | Seq. ID No. 1105 | Seq. ID No. 1106 |
| 507b | Seq. ID No. 1107 | Seq. ID No. 1108 |
| 510 | Seq. ID No. 1111 | Seq. ID No. 1112 |
| 521b | Seq. ID No. 1131 | Seq. ID No. 1132 |
| 524a | Seq. ID No. 1135 | Seq. ID No. 1136 |
| 525 | Seq. ID No. 1139 | Seq. ID No. 1140 |
| 530a | Seq. ID No. 1151 | Seq. ID No. 1152 |
| 530b | Seq. ID No. 1153 | Seq. ID No. 1154 |
| 541a | Seq. ID No. 1165 | Seq. ID No. 1166 |
| 541b | Seq. ID No. 1167 | Seq. ID No. 1168 |
| 541c | Seq. ID No. 1169 | Seq. ID No. 1170 |
| 541d | Seq. ID No. 1171 | Seq. ID No. 1172 |
| 542 | Seq. ID No. 1173 | Seq. ID No. 1174 |
| 544 | Seq. ID No. 1181 | Seq. ID No. 1182 |
| 545a | Seq. ID No. 1183 | Seq. ID No. 1184 |
| 545b | Seq. ID No. 1185 | Seq. ID No. 1186 |
| 545c | Seq. ID No. 1187 | Seq. ID No. 1188 |
| 546a | Seq. ID No. 1189 | Seq. ID No. 1190 |
| 546b | Seq. ID No. 1191 | Seq. ID No. 1192 |
| 546c | Seq. ID No. 1193 | Seq. ID No. 1194 |
| 547a | Seq. ID No. 1195 | Seq. ID No. 1196 |
| 547b | Seq. ID No. 1197 | Seq. ID No. 1198 |
| 548 | Seq. ID No. 1199 | Seq. ID No. 1200 |
| 549b | Seq. ID No. 1201 | Seq. ID No. 1202 |
| 550a | Seq. ID No. 1203 | Seq. ID No. 1204 |
| 553c | Seq. ID No. 1207 | Seq. ID No. 1208 |
| 556 | Seq. ID No. 1213 | Seq. ID No. 1214 |
| 564a | Seq. ID No. 1227 | Seq. ID No. 1228 |
| 564b | Seq. ID No. 1229 | Seq. ID No. 1230 |
| 571 | Seq. ID No. 1239 | Seq. ID No. 1240 |
| 576a | Seq. ID No. 1243 | Seq. ID No. 1244 |
| 576b | Seq. ID No. 1245 | Seq. ID No. 1246 |
| 578a | Seq. ID No. 1247 | Seq. ID No. 1248 |
| 578b | Seq. ID No. 1249 | Seq. ID No. 1250 |
| 585b | Seq. ID No. 1259 | Seq. ID No. 1260 |
| 587a | Seq. ID No. 1265 | Seq. ID No. 1266 |
| 587b | Seq. ID No. 1267 | Seq. ID No. 1268 |
| 587c | Seq. ID No. 1269 | Seq. ID No. 1270 |
| 587d | Seq. ID No. 1271 | Seq. ID No. 1272 |
| 588a | Seq. ID No. 1273 | Seq. ID No. 1274 |
| 588b | Seq. ID No. 1275 | Seq. ID No. 1276 |
| 589a | Seq. ID No. 1277 | Seq. ID No. 1278 |
| 589b | Seq. ID No. 1279 | Seq. ID No. 1280 |
| 590 | Seq. ID No. 1281 | Seq. ID No. 1282 |
| 595a | Seq. ID No. 1283 | Seq. ID No. 1284 |
| 595b | Seq. ID No. 1285 | Seq. ID No. 1286 |
| 596a | Seq. ID No. 1287 | Seq. ID No. 1288 |
| 596b | Seq. ID No. 1289 | Seq. ID No. 1290 |
| 596c | Seq. ID No. 1291 | Seq. ID No. 1292 |
| 597 | Seq. ID No. 1293 | Seq. ID No. 1294 |
| 598a | Seq. ID No. 1295 | Seq. ID No. 1296 |
| 598b | Seq. ID No. 1297 | Seq. ID No. 1298 |
| 599a | Seq. ID No. 1299 | Seq. ID No. 1300 |
| 599b | Seq. ID No. 1301 | Seq. ID No. 1302 |
| 600a | Seq. ID No. 1303 | Seq. ID No. 1304 |
| 600b | Seq. ID No. 1305 | Seq. ID No. 1306 |
| 603a | Seq. ID No. 1307 | Seq. ID No. 1308 |
| 606 | Seq. ID No. 1309 | Seq. ID No. 1310 |
| 607a | Seq. ID No. 1311 | Seq. ID No. 1312 |
| 607b | Seq. ID No. 1313 | Seq. ID No. 1314 |
| 610a | Seq. ID No. 1319 | Seq. ID No. 1320 |
| 610b | Seq. ID No. 1321 | Seq. ID No. 1322 |
| 611 | Seq. ID No. 1323 | Seq. ID No. 1324 |
| 613a | Seq. ID No. 1325 | Seq. ID No. 1326 |
| 613b | Seq. ID No. 1327 | Seq. ID No. 1328 |
| 615b | Seq. ID No. 1337 | Seq. ID No. 1338 |
| 619a | Seq. ID No. 1341 | Seq. ID No. 1342 |
| 619b | Seq. ID No. 1343 | Seq. ID No. 1344 |
| 623 | Seq. ID No. 1347 | Seq. ID No. 1348 |
| 624a | Seq. ID No. 1349 | Seq. ID No. 1350 |
| 624b | Seq. ID No. 1351 | Seq. ID No. 1352 |
| 624c | Seq. ID No. 1353 | Seq. ID No. 1354 |
| 625 | Seq. ID No. 1355 | Seq. ID No. 1356 |
| 632b | Seq. ID No. 1371 | Seq. ID No. 1372 |
| 634b | Seq. ID No. 1379 | Seq. ID No. 1380 |
| 636 | Seq. ID No. 1381 | Seq. ID No. 1382 |
| 640 | Seq. ID No. 1389 | Seq. ID No. 1390 |
| 644a | Seq. ID No. 1397 | Seq. ID No. 1398 |
| 644b | Seq. ID No. 1399 | Seq. ID No. 1400 |
| 645 | Seq. ID No. 1401 | Seq. ID No. 1402 |
| 658a | Seq. ID No. 1417 | Seq. ID No. 1418 |
| 658b | Seq. ID No. 1419 | Seq. ID No. 1420 |
| 659a | Seq. ID No. 1421 | Seq. ID No. 1422 |
| 659b | Seq. ID No. 1423 | Seq. ID No. 1424 |
| 676 | Seq. ID No. 1439 | Seq. ID No. 1440 |
| 679a | Seq. ID No. 1445 | Seq. ID No. 1446 |
| 679b | Seq. ID No. 1447 | Seq. ID No. 1448 |
| 684 | Seq. ID No. 1457 | Seq. ID No. 1458 |
| 690 | Seq. ID No. 1465 | Seq. ID No. 1466 |
| 699b | Seq. ID No. 1479 | Seq. ID No. 1480 |
| 721 | Seq. ID No. 1511 | Seq. ID No. 1512 |
| 739 | Seq. ID No. 1551 | Seq. ID No. 1552 |
| 740 | Seq. ID No. 1553 | Seq. ID No. 1554 |
| 741a | Seq. ID No. 1555 | Seq. ID No. 1556 |
| 741b | Seq. ID No. 1557 | Seq. ID No. 1558 |
| 749 | Seq. ID No. 1579 | Seq. ID No. 1580 |
| 764 | Seq. ID No. 1609 | Seq. ID No. 1610 |
| 772a | Seq. ID No. 1621 | Seq. ID No. 1622 |
| 772b | Seq. ID No. 1623 | Seq. ID No. 1624 |
| 774 | Seq. ID No. 1625 | Seq. ID No. 1626 |
| 775 | Seq. ID No. 1627 | Seq. ID No. 1628 |
| 777a | Seq. ID No. 1629 | Seq. ID No. 1630 |
| 777c | Seq. ID No. 1631 | Seq. ID No. 1632 |
| 779 | Seq. ID No. 1633 | Seq. ID No. 1634 |
| 782b | Seq. ID No. 1639 | Seq. ID No. 1640 |
| 786b | Seq. ID No. 1643 | Seq. ID No. 1644 |
| 791 | Seq. ID No. 1655 | Seq. ID No. 1656 |
| 795 | Seq. ID No. 1667 | Seq. ID No. 1668 |
| 799a | Seq. ID No. 1671 | Seq. ID No. 1672 |
| 808 | Seq. ID No. 1693 | Seq. ID No. 1694 |
| 809b | Seq. ID No. 1695 | Seq. ID No. 1696 |
| 816 | Seq. ID No. 1701 | Seq. ID No. 1702 |
| 820a | Seq. ID No. 1703 | Seq. ID No. 1704 |
| 820b | Seq. ID No. 1705 | Seq. ID No. 1706 |
| 835a | Seq. ID No. 1721 | Seq. ID No. 1722 |
| 835b | Seq. ID No. 1723 | Seq. ID No. 1724 |
| 837a | Seq. ID No. 1731 | Seq. ID No. 1732 |
| 843 | Seq. ID No. 1737 | Seq. ID No. 1738 |
| 848 | Seq. ID No. 1743 | Seq. ID No. 1744 |
| 854 | Seq. ID No. 1759 | Seq. ID No. 1760 |
| 857 | Seq. ID No. 1763 | Seq. ID No. 1764 |
| 860 | Seq. ID No. 1773 | Seq. ID No. 1774 |
| 862 | Seq. ID No. 1775 | Seq. ID No. 1776 |
| 863 | Seq. ID No. 1777 | Seq. ID No. 1778 |
| 864a | Seq. ID No. 1779 | Seq. ID No. 1780 |
| 864b | Seq. ID No. 1781 | Seq. ID No. 1782 |
| 874a | Seq. ID No. 1799 | Seq. ID No. 1800 |
| 874b | Seq. ID No. 1801 | Seq. ID No. 1802 |
| 875 | Seq. ID No. 1803 | Seq. ID No. 1804 |
| 878a | Seq. ID No. 1807 | Seq. ID No. 1808 |
| 887 | Seq. ID No. 1823 | Seq. ID No. 1824 |
| 894 | Seq. ID No. 1831 | Seq. ID No. 1832 |
| 917 | Seq. ID No. 1851 | Seq. ID No. 1852 |
| 919 | Seq. ID No. 1857 | Seq. ID No. 1858 |
| 931 | Seq. ID No. 1875 | Seq. ID No. 1876 |
| 943 | Seq. ID No. 1899 | Seq. ID No. 1900 |
| 950 | Seq. ID No. 1915 | Seq. ID No. 1916 |
| 955a | Seq. ID No. 1927 | Seq. ID No. 1928 |
| 955b | Seq. ID No. 1929 | Seq. ID No. 1930 |
| 978a | Seq. ID No. 1973 | Seq. ID No. 1974 |
| 979 | Seq. ID No. 1977 | Seq. ID No. 1978 |
| 981a | Seq. ID No. 1981 | Seq. ID No. 1982 |
| 993 | Seq. ID No. 2005 | Seq. ID No. 2006 |
| 994 | Seq. ID No. 2007 | Seq. ID No. 2008 |
| 995 | Seq. ID No. 2009 | Seq. ID No. 2010 |
| 997 | Seq. ID No. 2011 | Seq. ID No. 2012 |
| 999a | Seq. ID No. 2017 | Seq. ID No. 2018 |
| 999b | Seq. ID No. 2019 | Seq. ID No. 2020 |
| 1001 | Seq. ID No. 2023 | Seq. ID No. 2024 |
| 1003a | Seq. ID No. 2025 | Seq. ID No. 2026 |
| 1003b | Seq. ID No. 2027 | Seq. ID No. 2028 |
| 1012 | Seq. ID No. 2039 | Seq. ID No. 2040 |
| 1013a | Seq. ID No. 2041 | Seq. ID No. 2042 |
| 1013b | Seq. ID No. 2043 | Seq. ID No. 2044 |
| 1013c | Seq. ID No. 2045 | Seq. ID No. 2046 |
| 1017a | Seq. ID No. 2049 | Seq. ID No. 2050 |
| 1035a | Seq. ID No. 2081 | Seq. ID No. 2082 |
| 1035b | Seq. ID No. 2083 | Seq. ID No. 2084 |
| 1035c | Seq. ID No. 2085 | Seq. ID No. 2086 |
| 1044a | Seq. ID No. 2105 | Seq. ID No. 2106 |
| 1044b | Seq. ID No. 2107 | Seq. ID No. 2108 |
| 1044c | Seq. ID No. 2109 | Seq. ID No. 2110 |
| 1044d | Seq. ID No. 2111 | Seq. ID No. 2112 |
| 1055 | Seq. ID No. 2129 | Seq. ID No. 2130 |
| 1056a | Seq. ID No. 2131 | Seq. ID No. 2132 |
| 1056b | Seq. ID No. 2133 | Seq. ID No. 2134 |
| 1063 | Seq. ID No. 2145 | Seq. ID No. 2146 |
| 1066a | Seq. ID No. 2155 | Seq. ID No. 2156 |
| 1066b | Seq. ID No. 2157 | Seq. ID No. 2158 |
| 1067 | Seq. ID No. 2159 | Seq. ID No. 2160 |
| 1069 | Seq. ID No. 2161 | Seq. ID No. 2162 |
| 1077a | Seq. ID No. 2171 | Seq. ID No. 2172 |
| 1081a | Seq. ID No. 2187 | Seq. ID No. 2188 |
| 1081b | Seq. ID No. 2189 | Seq. ID No. 2190 |
| 1091a | Seq. ID No. 2201 | Seq. ID No. 2202 |
| 1091b | Seq. ID No. 2203 | Seq. ID No. 2204 |
| 1095a | Seq. ID No. 2209 | Seq. ID No. 2210 |
| 1095b | Seq. ID No. 2211 | Seq. ID No. 2212 |
| 1097 | Seq. ID No. 2219 | Seq. ID No. 2220 |
| 1101a | Seq. ID No. 2225 | Seq. ID No. 2226 |
| 1112a | Seq. ID No. 2243 | Seq. ID No. 2244 |
| 1125 | Seq. ID No. 2245 | Seq. ID No. 2246 |
| 1126a | Seq. ID No. 2247 | Seq. ID No. 2248 |
| 1126b | Seq. ID No. 2249 | Seq. ID No. 2250 |
| 1126c | Seq. ID No. 2251 | Seq. ID No. 2252 |
| 1128 | Seq. ID No. 2255 | Seq. ID No. 2256 |
| 1141a | Seq. ID No. 2277 | Seq. ID No. 2278 |
| 1141b | Seq. ID No. 2279 | Seq. ID No. 2280 |
| 1162 | Seq. ID No. 2341 | Seq. ID No. 2342 |
| 1168 | Seq. ID No. 2351 | Seq. ID No. 2352 |
| 1169a | Seq. ID No. 2353 | Seq. ID No. 2354 |
| 1169b | Seq. ID No. 2355 | Seq. ID No. 2356 |
| 1169c | Seq. ID No. 2357 | Seq. ID No. 2358 |
| 1170 | Seq. ID No. 2359 | Seq. ID No. 2360 |
| 1172 | Seq. ID No. 2365 | Seq. ID No. 2366 |
| 1173 | Seq. ID No. 2367 | Seq. ID No. 2368 |
| 1175 | Seq. ID No. 2371 | Seq. ID No. 2372 |
| 1178 | Seq. ID No. 2375 | Seq. ID No. 2376 |
| 1182a | Seq. ID No. 2393 | Seq. ID No. 2394 |
| 1182b | Seq. ID No. 2395 | Seq. ID No. 2396 |
| 1196a | Seq. ID No. 2425 | Seq. ID No. 2426 |
| 1196b | Seq. ID No. 2427 | Seq. ID No. 2428 |
| 1198 | Seq. ID No. 2431 | Seq. ID No. 2432 |
| 1201 | Seq. ID No. 2439 | Seq. ID No. 2440 |
| 1202a | Seq. ID No. 2441 | Seq. ID No. 2442 |
| 1202b | Seq. ID No. 2443 | Seq. ID No. 2444 |
| 1206 | Seq. ID No. 2447 | Seq. ID No. 2448 |
| 1212 | Seq. ID No. 2459 | Seq. ID No. 2460 |
| 1220 | Seq. ID No. 2479 | Seq. ID No. 2480 |
| 1225 | Seq. ID No. 2493 | Seq. ID No. 2494 |
| 1229b | Seq. ID No. 2501 | Seq. ID No. 2502 |
| 1229c | Seq. ID No. 2503 | Seq. ID No. 2504 |
| 1235 | Seq. ID No. 2521 | Seq. ID No. 2522 |
| 1236a | Seq. ID No. 2523 | Seq. ID No. 2524 |
| 1239 | Seq. ID No. 2527 | Seq. ID No. 2528 |
| 1260 | Seq. ID No. 2591 | Seq. ID No. 2592 |
| 1267a | Seq. ID No. 2601 | Seq. ID No. 2602 |
| 1267b | Seq. ID No. 2603 | Seq. ID No. 2604 |
| 1270 | Seq. ID No. 2611 | Seq. ID No. 2612 |
| 1278a | Seq. ID No. 2627 | Seq. ID No. 2628 |
| 1278b | Seq. ID No. 2629 | Seq. ID No. 2630 |
| 1289 | Seq. ID No. 2653 | Seq. ID No. 2654 |
| 1294a | Seq. ID No. 2661 | Seq. ID No. 2662 |
| 1314b | Seq. ID No. 2691 | Seq. ID No. 2692 |
| 1316 | Seq. ID No. 2695 | Seq. ID No. 2696 |
| 1317 | Seq. ID No. 2697 | Seq. ID No. 2698 |
| 1323b | Seq. ID No. 2717 | Seq. ID No. 2718 |
| 1334a | Seq. ID No. 2729 | Seq. ID No. 2730 |
| 1334b | Seq. ID No. 2731 | Seq. ID No. 2732 |
| 1335a | Seq. ID No. 2733 | Seq. ID No. 2734 |
| 1335b | Seq. ID No. 2735 | Seq. ID No. 2736 |
| 1338 | Seq. ID No. 2739 | Seq. ID No. 2740 |
| 1340a | Seq. ID No. 2741 | Seq. ID No. 2742 |
| 1340b | Seq. ID No. 2743 | Seq. ID No. 2744 |
| 1364a | Seq. ID No. 2777 | Seq. ID No. 2778 |
| 1364b | Seq. ID No. 2779 | Seq. ID No. 2780 |
| 1364c | Seq. ID No. 2781 | Seq. ID No. 2782 |
| 1365b | Seq. ID No. 2783 | Seq. ID No. 2784 |
| 1375 | Seq. ID No. 2801 | Seq. ID No. 2802 |
| 1378 | Seq. ID No. 2805 | Seq. ID No. 2806 |
| 1379 | Seq. ID No. 2807 | Seq. ID No. 2808 |
| 1380 | Seq. ID No. 2809 | Seq. ID No. 2810 |
| 1381a | Seq. ID No. 2811 | Seq. ID No. 2812 |
| 1381b | Seq. ID No. 2813 | Seq. ID No. 2814 |
| 1382 | Seq. ID No. 2815 | Seq. ID No. 2816 |
| 1383 | Seq. ID No. 2817 | Seq. ID No. 2818 |
| 1384a | Seq. ID No. 2819 | Seq. ID No. 2820 |
| 1387a | Seq. ID No. 2829 | Seq. ID No. 2830 |
| 1388b | Seq. ID No. 2831 | Seq. ID No. 2832 |
| 1389a | Seq. ID No. 2833 | Seq. ID No. 2834 |
| 1393a | Seq. ID No. 2835 | Seq. ID No. 2836 |
| 1393b | Seq. ID No. 2837 | Seq. ID No. 2838 |
| 1393c | Seq. ID No. 2839 | Seq. ID No. 2840 |
| 1393d | Seq. ID No. 2841 | Seq. ID No. 2842 |
| 1395a | Seq. ID No. 2845 | Seq. ID No. 2846 |
| 1397 | Seq. ID No. 2849 | Seq. ID No. 2850 |
| 1398 | Seq. ID No. 2851 | Seq. ID No. 2852 |
| 1399a | Seq. ID No. 2853 | Seq. ID No. 2854 |
| 1399b | Seq. ID No. 2855 | Seq. ID No. 2856 |
| 1400 | Seq. ID No. 2857 | Seq. ID No. 2858 |
| 1401 | Seq. ID No. 2859 | Seq. ID No. 2860 |
| 1402c | Seq. ID No. 2861 | Seq. ID No. 2862 |
| 1407b | Seq. ID No. 2865 | Seq. ID No. 2866 |
| 1411a | Seq. ID No. 2873 | Seq. ID No. 2874 |
| 1411b | Seq. ID No. 2875 | Seq. ID No. 2876 |
| 1411c | Seq. ID No. 2877 | Seq. ID No. 2878 |
| 1414a | Seq. ID No. 2883 | Seq. ID No. 2884 |
| 1414b | Seq. ID No. 2885 | Seq. ID No. 2886 |
| 1414c | Seq. ID No. 2887 | Seq. ID No. 2888 |
| 1415 | Seq. ID No. 2889 | Seq. ID No. 2890 |
| 1418 | Seq. ID No. 2893 | Seq. ID No. 2894 |
| 1419 | Seq. ID No. 2895 | Seq. ID No. 2896 |
| 1423 | Seq. ID No. 2903 | Seq. ID No. 2904 |
| 1427a | Seq. ID No. 2909 | Seq. ID No. 2910 |
| 1438 | Seq. ID No. 2935 | Seq. ID No. 2936 |
| 1439a | Seq. ID No. 2937 | Seq. ID No. 2938 |
| 1439b | Seq. ID No. 2939 | Seq. ID No. 2940 |
| 1439c | Seq. ID No. 2941 | Seq. ID No. 2942 |
| 1439d | Seq. ID No. 2943 | Seq. ID No. 2944 |
| 1439e | Seq. ID No. 2945 | Seq. ID No. 2946 |
| 1440a | Seq. ID No. 2947 | Seq. ID No. 2948 |
| 1440b | Seq. ID No. 2949 | Seq. ID No. 2950 |
| 1440c | Seq. ID No. 2951 | Seq. ID No. 2952 |
| 1440d | Seq. ID No. 2953 | Seq. ID No. 2954 |
| 1446a | Seq. ID No. 2965 | Seq. ID No. 2966 |
| 1446b | Seq. ID No. 2967 | Seq. ID No. 2968 |
| 1448 | Seq. ID No. 2973 | Seq. ID No. 2974 |
| 1449a | Seq. ID No. 2975 | Seq. ID No. 2976 |
| 1449b | Seq. ID No. 2977 | Seq. ID No. 2978 |
| 1452a | Seq. ID No. 2981 | Seq. ID No. 2982 |
| 1452b | Seq. ID No. 2983 | Seq. ID No. 2984 |
| 1453 | Seq. ID No. 2985 | Seq. ID No. 2986 |
| 1454 | Seq. ID No. 2987 | Seq. ID No. 2988 |
| 1455a | Seq. ID No. 2989 | Seq. ID No. 2990 |
| 1455b | Seq. ID No. 2991 | Seq. ID No. 2992 |
| 1459 | Seq. ID No. 3001 | Seq. ID No. 3002 |
| 1463a | Seq. ID No. 3007 | Seq. ID No. 3008 |
| 1463b | Seq. ID No. 3009 | Seq. ID No. 3010 |
| 1463c | Seq. ID No. 3011 | Seq. ID No. 3012 |
| 1467 | Seq. ID No. 3021 | Seq. ID No. 3022 |
| 1469a | Seq. ID No. 3023 | Seq. ID No. 3024 |
| 1474 | Seq. ID No. 3041 | Seq. ID No. 3042 |
| 1476 | Seq. ID No. 3045 | Seq. ID No. 3046 |
| 1487 | Seq. ID No. 3071 | Seq. ID No. 3072 |
| 1489 | Seq. ID No. 3087 | Seq. ID No. 3088 |
| 1502a | Seq. ID No. 3105 | Seq. ID No. 3106 |
| 1502b | Seq. ID No. 3107 | Seq. ID No. 3108 |
| 1507a | Seq. ID No. 3119 | Seq. ID No. 3120 |
| 1507b | Seq. ID No. 3121 | Seq. ID No. 3122 |
| 1507c | Seq. ID No. 3123 | Seq. ID No. 3124 |
| 1518a | Seq. ID No. 3151 | Seq. ID No. 3152 |
| 1518b | Seq. ID No. 3153 | Seq. ID No. 3154 |
| 1533a | Seq. ID No. 3167 | Seq. ID No. 3168 |
| 1535a | Seq. ID No. 3173 | Seq. ID No. 3174 |
| 1536a | Seq. ID No. 3175 | Seq. ID No. 3176 |
| 1536b | Seq. ID No. 3177 | Seq. ID No. 3178 |
| 1542 | Seq. ID No. 3181 | Seq. ID No. 3182 |
| 1552 | Seq. ID No. 3193 | Seq. ID No. 3194 |
| 1557a | Seq. ID No. 3213 | Seq. ID No. 3214 |
| 1557b | Seq. ID No. 3215 | Seq. ID No. 3216 |
| 1557c | Seq. ID No. 3217 | Seq. ID No. 3218 |
| 1559a | Seq. ID No. 3219 | Seq. ID No. 3220 |
| 1559b | Seq. ID No. 3221 | Seq. ID No. 3222 |
| 1563 | Seq. ID No. 3223 | Seq. ID No. 3224 |
| 1567 | Seq. ID No. 3231 | Seq. ID No. 3232 |
| 1568b | Seq. ID No. 3233 | Seq. ID No. 3234 |
| 1569 | Seq. ID No. 3235 | Seq. ID No. 3236 |
| 1570 | Seq. ID No. 3237 | Seq. ID No. 3238 |
| 1571 | Seq. ID No. 3239 | Seq. ID No. 3240 |
| 1572a | Seq. ID No. 3241 | Seq. ID No. 3242 |
| 1572b | Seq. ID No. 3243 | Seq. ID No. 3244 |
| 1572c | Seq. ID No. 3245 | Seq. ID No. 3246 |
| 1572d | Seq. ID No. 3247 | Seq. ID No. 3248 |
| 1572e | Seq. ID No. 3249 | Seq. ID No. 3250 |
| 1580a | Seq. ID No. 3261 | Seq. ID No. 3262 |
| 1580b | Seq. ID No. 3263 | Seq. ID No. 3264 |
| 1581 | Seq. ID No. 3265 | Seq. ID No. 3266 |
| 1582a | Seq. ID No. 3267 | Seq. ID No. 3268 |
| 1582b | Seq. ID No. 3269 | Seq. ID No. 3270 |
| 1582c | Seq. ID No. 3271 | Seq. ID No. 3272 |
| 1584 | Seq. ID No. 3273 | Seq. ID No. 3274 |
| 1585a | Seq. ID No. 3275 | Seq. ID No. 3276 |
| 1585b | Seq. ID No. 3277 | Seq. ID No. 3278 |
| 1608 | Seq. ID No. 3325 | Seq. ID No. 3326 |
| 1612 | Seq. ID No. 3331 | Seq. ID No. 3332 |
| 1621 | Seq. ID No. 3339 | Seq. ID No. 3340 |
| 1622a | Seq. ID No. 3341 | Seq. ID No. 3342 |
| 1624 | Seq. ID No. 3349 | Seq. ID No. 3350 |
| 1628a | Seq. ID No. 3361 | Seq. ID No. 3362 |
| 1628b | Seq. ID No. 3363 | Seq. ID No. 3364 |
| 1633a | Seq. ID No. 3369 | Seq. ID No. 3370 |
| 1633b | Seq. ID No. 3371 | Seq. ID No. 3372 |
| 1646a | Seq. ID No. 3389 | Seq. ID No. 3390 |
| 1648b | Seq. ID No. 3403 | Seq. ID No. 3404 |
| 1656b | Seq. ID No. 3417 | Seq. ID No. 3418 |
| 1657 | Seq. ID No. 3419 | Seq. ID No. 3420 |
| 1659a | Seq. ID No. 3421 | Seq. ID No. 3422 |
| 1663 | Seq. ID No. 3433 | Seq. ID No. 3434 |
| 1665a | Seq. ID No. 3437 | Seq. ID No. 3438 |
| 1669 | Seq. ID No. 3441 | Seq. ID No. 3442 |
| 1670a | Seq. ID No. 3443 | Seq. ID No. 3444 |
| 1670b | Seq. ID No. 3445 | Seq. ID No. 3446 |
| 1670c | Seq. ID No. 3447 | Seq. ID No. 3448 |
| 1679 | Seq. ID No. 3473 | Seq. ID No. 3474 |
| 1683a | Seq. ID No. 3481 | Seq. ID No. 3482 |
| 1683b | Seq. ID No. 3483 | Seq. ID No. 3484 |
| 1687 | Seq. ID No. 3489 | Seq. ID No. 3490 |
| 1690a | Seq. ID No. 3503 | Seq. ID No. 3504 |
| 1690b | Seq. ID No. 3505 | Seq. ID No. 3506 |
| 1692 | Seq. ID No. 3509 | Seq. ID No. 3510 |
| 1693 | Seq. ID No. 3511 | Seq. ID No. 3512 |
| 1697a | Seq. ID No. 3523 | Seq. ID No. 3524 |
| 1697b | Seq. ID No. 3525 | Seq. ID No. 3526 |
| 1700a | Seq. ID No. 3531 | Seq. ID No. 3532 |
| 1700b | Seq. ID No. 3533 | Seq. ID No. 3534 |
| 1703b | Seq. ID No. 3539 | Seq. ID No. 3540 |
| 1704a | Seq. ID No. 3541 | Seq. ID No. 3542 |
| 1704b | Seq. ID No. 3543 | Seq. ID No. 3544 |
| 1705a | Seq. ID No. 3545 | Seq. ID No. 3546 |
| 1705b | Seq. ID No. 3547 | Seq. ID No. 3548 |
| 1708 | Seq. ID No. 3555 | Seq. ID No. 3556 |
| 1709 | Seq. ID No. 3557 | Seq. ID No. 3558 |
| 1712a | Seq. ID No. 3563 | Seq. ID No. 3564 |
| 1712b | Seq. ID No. 3565 | Seq. ID No. 3566 |
| 1718a | Seq. ID No. 3571 | Seq. ID No. 3572 |
| 1718b | Seq. ID No. 3573 | Seq. ID No. 3574 |
| 1724 | Seq. ID No. 3581 | Seq. ID No. 3582 |
| 1731 | Seq. ID No. 3587 | Seq. ID No. 3588 |
| 1734 | Seq. ID No. 3591 | Seq. ID No. 3592 |
| 1735a | Seq. ID No. 3593 | Seq. ID No. 3594 |
| 1735b | Seq. ID No. 3595 | Seq. ID No. 3596 |
| 1743 | Seq. ID No. 3611 | Seq. ID No. 3612 |
| 1744a | Seq. ID No. 3613 | Seq. ID No. 3614 |
| 1745 | Seq. ID No. 3617 | Seq. ID No. 3618 |
| 1747 | Seq. ID No. 3619 | Seq. ID No. 3620 |
| 1749a | Seq. ID No. 3621 | Seq. ID No. 3622 |
| 1749b | Seq. ID No. 3623 | Seq. ID No. 3624 |
| 1750a | Seq. ID No. 3625 | Seq. ID No. 3626 |
| 1753 | Seq. ID No. 3631 | Seq. ID No. 3632 |
| 1757a | Seq. ID No. 3637 | Seq. ID No. 3638 |
| 1757b | Seq. ID No. 3639 | Seq. ID No. 3640 |
| 1766 | Seq. ID No. 3655 | Seq. ID No. 3656 |
| 1767a | Seq. ID No. 3657 | Seq. ID No. 3658 |
| 1767b | Seq. ID No. 3659 | Seq. ID No. 3660 |
| 1769a | Seq. ID No. 3661 | Seq. ID No. 3662 |
| 1778a | Seq. ID No. 3677 | Seq. ID No. 3678 |
| 1778b | Seq. ID No. 3679 | Seq. ID No. 3680 |
| 1783a | Seq. ID No. 3683 | Seq. ID No. 3684 |
| 1783b | Seq. ID No. 3685 | Seq. ID No. 3686 |
| 1790a | Seq. ID No. 3701 | Seq. ID No. 3702 |
| 1790b | Seq. ID No. 3703 | Seq. ID No. 3704 |
| 1794a | Seq. ID No. 3717 | Seq. ID No. 3718 |
| 1797a | Seq. ID No. 3719 | Seq. ID No. 3720 |
| 1797b | Seq. ID No. 3721 | Seq. ID No. 3722 |
| 1798a | Seq. ID No. 3723 | Seq. ID No. 3724 |
| 1800 | Seq. ID No. 3729 | Seq. ID No. 3730 |
| 1802a | Seq. ID No. 3731 | Seq. ID No. 3732 |
| 1802b | Seq. ID No. 3733 | Seq. ID No. 3734 |
| 1803 | Seq. ID No. 3735 | Seq. ID No. 3736 |
| 1804a | Seq. ID No. 3737 | Seq. ID No. 3738 |
| 1804b | Seq. ID No. 3739 | Seq. ID No. 3740 |
| 1805 | Seq. ID No. 3741 | Seq. ID No. 3742 |
| 1807a | Seq. ID No. 3749 | Seq. ID No. 3750 |
| 1807b | Seq. ID No. 3751 | Seq. ID No. 3752 |
| 1808a | Seq. ID No. 3753 | Seq. ID No. 3754 |
| 1808b | Seq. ID No. 3755 | Seq. ID No. 3756 |
| 1809a | Seq. ID No. 3761 | Seq. ID No. 3762 |
| 1812a | Seq. ID No. 3781 | Seq. ID No. 3782 |
| 1812b | Seq. ID No. 3783 | Seq. ID No. 3784 |
| 1813 | Seq. ID No. 3785 | Seq. ID No. 3786 |
| 1815a | Seq. ID No. 3787 | Seq. ID No. 3788 |
| 1815b | Seq. ID No. 3789 | Seq. ID No. 3790 |
| 1815c | Seq. ID No. 3791 | Seq. ID No. 3792 |
| 1817a | Seq. ID No. 3799 | Seq. ID No. 3800 |
| 1822 | Seq. ID No. 3807 | Seq. ID No. 3808 |
| 1823a | Seq. ID No. 3809 | Seq. ID No. 3810 |
| 1823b | Seq. ID No. 3811 | Seq. ID No. 3812 |
| 1825 | Seq. ID No. 3813 | Seq. ID No. 3814 |
| 1826a | Seq. ID No. 3815 | Seq. ID No. 3816 |
| 1826b | Seq. ID No. 3817 | Seq. ID No. 3818 |
| 1834 | Seq. ID No. 3827 | Seq. ID No. 3828 |
| 1835 | Seq. ID No. 3829 | Seq. ID No. 3830 |
| 1836a | Seq. ID No. 3831 | Seq. ID No. 3832 |
| 1836b | Seq. ID No. 3833 | Seq. ID No. 3834 |
| 1837 | Seq. ID No. 3835 | Seq. ID No. 3836 |
| 1842a | Seq. ID No. 3849 | Seq. ID No. 3850 |
| 1854a | Seq. ID No. 3879 | Seq. ID No. 3880 |
| 1854b | Seq. ID No. 3881 | Seq. ID No. 3882 |
| 1858 | Seq. ID No. 3895 | Seq. ID No. 3896 |
| 1862a | Seq. ID No. 3903 | Seq. ID No. 3904 |
| 1864a | Seq. ID No. 3909 | Seq. ID No. 3910 |
| 1868 | Seq. ID No. 3915 | Seq. ID No. 3916 |
| 1882 | Seq. ID No. 3939 | Seq. ID No. 3940 |
| 1894c | Seq. ID No. 3959 | Seq. ID No. 3960 |
| 1895 | Seq. ID No. 3961 | Seq. ID No. 3962 |
| 1896a | Seq. ID No. 3963 | Seq. ID No. 3964 |
| 1896b | Seq. ID No. 3965 | Seq. ID No. 3966 |
| 1898a | Seq. ID No. 3973 | Seq. ID No. 3974 |
| 1899 | Seq. ID No. 3977 | Seq. ID No. 3978 |
| 1900 | Seq. ID No. 3979 | Seq. ID No. 3980 |
| 1916 | Seq. ID No. 3993 | Seq. ID No. 3994 |
| 1917a | Seq. ID No. 3995 | Seq. ID No. 3996 |
| 1917b | Seq. ID No. 3997 | Seq. ID No. 3998 |
| 1919a | Seq. ID No. 4005 | Seq. ID No. 4006 |
| 1919b | Seq. ID No. 4007 | Seq. ID No. 4008 |
| 1919c | Seq. ID No. 4009 | Seq. ID No. 4010 |
| 1937a | Seq. ID No. 4041 | Seq. ID No. 4042 |
| 1937b | Seq. ID No. 4043 | Seq. ID No. 4044 |
| 1937c | Seq. ID No. 4045 | Seq. ID No. 4046 |
| 1944 | Seq. ID No. 4069 | Seq. ID No. 4070 |
| 1949 | Seq. ID No. 4077 | Seq. ID No. 4078 |
| 1956 | Seq. ID No. 4097 | Seq. ID No. 4098 |
| 1961 | Seq. ID No. 4113 | Seq. ID No. 4114 |
| 1966 | Seq. ID No. 4123 | Seq. ID No. 4124 |
| 1970a | Seq. ID No. 4131 | Seq. ID No. 4132 |
| 1970b | Seq. ID No. 4133 | Seq. ID No. 4134 |
| 1972 | Seq. ID No. 4135 | Seq. ID No. 4136 |
| 1976 | Seq. ID No. 4139 | Seq. ID No. 4140 |
| 1980a | Seq. ID No. 4151 | Seq. ID No. 4152 |
| 1980b | Seq. ID No. 4153 | Seq. ID No. 4154 |
| 1981 | Seq. ID No. 4155 | Seq. ID No. 4156 |
| 1991 | Seq. ID No. 4181 | Seq. ID No. 4182 |
| 2016a | Seq. ID No. 4221 | Seq. ID No. 4222 |
| 2023a | Seq. ID No. 4241 | Seq. ID No. 4242 |
| 2025 | Seq. ID No. 4253 | Seq. ID No. 4254 |
| 2030a | Seq. ID No. 4257 | Seq. ID No. 4258 |
| 2030b | Seq. ID No. 4259 | Seq. ID No. 4260 |
| 2030c | Seq. ID No. 4261 | Seq. ID No. 4262 |
| 2030d | Seq. ID No. 4263 | Seq. ID No. 4264 |
| 2032c | Seq. ID No. 4265 | Seq. ID No. 4266 |
| 2035b | Seq. ID No. 4269 | Seq. ID No. 4270 |
| 2038a | Seq. ID No. 4275 | Seq. ID No. 4276 |
| 2040a | Seq. ID No. 4277 | Seq. ID No. 4278 |
| 2042 | Seq. ID No. 4279 | Seq. ID No. 4280 |
| 2043b | Seq. ID No. 4281 | Seq. ID No. 4282 |
| 2045a | Seq. ID No. 4285 | Seq. ID No. 4286 |
| 2045b | Seq. ID No. 4287 | Seq. ID No. 4288 |
| 2049c | Seq. ID No. 4297 | Seq. ID No. 4298 |
| 2055 | Seq. ID No. 4305 | Seq. ID No. 4306 |
| 2056 | Seq. ID No. 4307 | Seq. ID No. 4308 |
| 2081a | Seq. ID No. 4363 | Seq. ID No. 4364 |
| 2081b | Seq. ID No. 4365 | Seq. ID No. 4366 |
| 2087a | Seq. ID No. 4371 | Seq. ID No. 4372 |
| 2087b | Seq. ID No. 4373 | Seq. ID No. 4374 |
| 2098b | Seq. ID No. 4395 | Seq. ID No. 4396 |
| 2101 | Seq. ID No. 4399 | Seq. ID No. 4400 |
| 2105 | Seq. ID No. 4403 | Seq. ID No. 4404 |
| 2114b | Seq. ID No. 4425 | Seq. ID No. 4426 |
| 2120a | Seq. ID No. 4437 | Seq. ID No. 4438 |
| 2120b | Seq. ID No. 4439 | Seq. ID No. 4440 |
| 2122b | Seq. ID No. 4441 | Seq. ID No. 4442 |
| 2127a | Seq. ID No. 4453 | Seq. ID No. 4454 |
| 2127b | Seq. ID No. 4455 | Seq. ID No. 4456 |
| 2159a | Seq. ID No. 4513 | Seq. ID No. 4514 |
| 2159b | Seq. ID No. 4515 | Seq. ID No. 4516 |
| 2175 | Seq. ID No. 4551 | Seq. ID No. 4552 |
| 2177b | Seq. ID No. 4561 | Seq. ID No. 4562 |
| 2182 | Seq. ID No. 4573 | Seq. ID No. 4574 |
| 2183 | Seq. ID No. 4575 | Seq. ID No. 4576 |
| 2190a | Seq. ID No. 4587 | Seq. ID No. 4588 |
| 2190b | Seq. ID No. 4589 | Seq. ID No. 4590 |
| 2193 | Seq. ID No. 4591 | Seq. ID No. 4592 |
| 2194a | Seq. ID No. 4593 | Seq. ID No. 4594 |
| 2194c | Seq. ID No. 4595 | Seq. ID No. 4596 |
| 2208a | Seq. ID No. 4617 | Seq. ID No. 4618 |
| 2208b | Seq. ID No. 4619 | Seq. ID No. 4620 |
| 2208c | Seq. ID No. 4621 | Seq. ID No. 4622 |
| 2212a | Seq. ID No. 4625 | Seq. ID No. 4626 |
| 2212b | Seq. ID No. 4627 | Seq. ID No. 4628 |
| 2216a | Seq. ID No. 4633 | Seq. ID No. 4634 |
| 2216b | Seq. ID No. 4635 | Seq. ID No. 4636 |
| 2218 | Seq. ID No. 4637 | Seq. ID No. 4638 |
| 2219a | Seq. ID No. 4639 | Seq. ID No. 4640 |
| 2225 | Seq. ID No. 4659 | Seq. ID No. 4660 |
| 2236a | Seq. ID No. 4681 | Seq. ID No. 4682 |
| 2239b | Seq. ID No. 4687 | Seq. ID No. 4688 |
| 2243a | Seq. ID No. 4695 | Seq. ID No. 4696 |
| 2245 | Seq. ID No. 4699 | Seq. ID No. 4700 |
| 2246 | Seq. ID No. 4701 | Seq. ID No. 4702 |
| 2257 | Seq. ID No. 4721 | Seq. ID No. 4722 |
| 2264a | Seq. ID No. 4735 | Seq. ID No. 4736 |
| 2264b | Seq. ID No. 4737 | Seq. ID No. 4738 |
| 2268 | Seq. ID No. 4741 | Seq. ID No. 4742 |
| 2285 | Seq. ID No. 4783 | Seq. ID No. 4784 |
| 2288 | Seq. ID No. 4789 | Seq. ID No. 4790 |
| 2294 | Seq. ID No. 4805 | Seq. ID No. 4806 |
| 2299 | Seq. ID No. 4811 | Seq. ID No. 4812 |
| 2302 | Seq. ID No. 4817 | Seq. ID No. 4818 |
| 2303 | Seq. ID No. 4819 | Seq. ID No. 4820 |
| 2304 | Seq. ID No. 4821 | Seq. ID No. 4822 |
| 2306c | Seq. ID No. 4823 | Seq. ID No. 4824 |
| 2310 | Seq. ID No. 4835 | Seq. ID No. 4836 |
| 2320 | Seq. ID No. 4853 | Seq. ID No. 4854 |
| 2336 | Seq. ID No. 4885 | Seq. ID No. 4886 |
| 2350a | Seq. ID No. 4913 | Seq. ID No. 4914 |
| 2360 | Seq. ID No. 4923 | Seq. ID No. 4924 |
| 2371a | Seq. ID No. 4949 | Seq. ID No. 4950 |
| 2372 | Seq. ID No. 4951 | Seq. ID No. 4952 |
| 2382c | Seq. ID No. 4975 | Seq. ID No. 4976 |
| 2386b | Seq. ID No. 4981 | Seq. ID No. 4982 |
| 2386c | Seq. ID No. 4983 | Seq. ID No. 4984 |
| 2390 | Seq. ID No. 4987 | Seq. ID No. 4988 |
| 2394 | Seq. ID No. 4993 | Seq. ID No. 4994 |
| 2397 | Seq. ID No. 4999 | Seq. ID No. 5000 |
| 2398 | Seq. ID No. 5001 | Seq. ID No. 5002 |
| 2402a | Seq. ID No. 5011 | Seq. ID No. 5012 |
| 2402b | Seq. ID No. 5013 | Seq. ID No. 5014 |
| 2407a | Seq. ID No. 5023 | Seq. ID No. 5024 |
| 2412 | Seq. ID No. 5031 | Seq. ID No. 5032 |
| 2413a | Seq. ID No. 5033 | Seq. ID No. 5034 |
| 2413b | Seq. ID No. 5035 | Seq. ID No. 5036 |
| 2415a | Seq. ID No. 5037 | Seq. ID No. 5038 |
| 2416b | Seq. ID No. 5041 | Seq. ID No. 5042 |
| 2416c | Seq. ID No. 5043 | Seq. ID No. 5044 |
| 2420 | Seq. ID No. 5053 | Seq. ID No. 5054 |
| 2423a | Seq. ID No. 5061 | Seq. ID No. 5062 |
| 2423b | Seq. ID No. 5063 | Seq. ID No. 5064 |
| 2434 | Seq. ID No. 5085 | Seq. ID No. 5086 |
| 2443 | Seq. ID No. 5093 | Seq. ID No. 5094 |
| 2463a | Seq. ID No. 5151 | Seq. ID No. 5152 |
| 2464 | Seq. ID No. 5153 | Seq. ID No. 5154 |
| 2468a | Seq. ID No. 5159 | Seq. ID No. 5160 |
| 2468b | Seq. ID No. 5161 | Seq. ID No. 5162 |
| 2470 | Seq. ID No. 5167 | Seq. ID No. 5168 |
| 2474a | Seq. ID No. 5173 | Seq. ID No. 5174 |
| 2474b | Seq. ID No. 5175 | Seq. ID No. 5176 |
| 2474c | Seq. ID No. 5177 | Seq. ID No. 5178 |
| 2481a | Seq. ID No. 5189 | Seq. ID No. 5190 |
| 2481b | Seq. ID No. 5191 | Seq. ID No. 5192 |
| 2482 | Seq. ID No. 5193 | Seq. ID No. 5194 |
| 2484a | Seq. ID No. 5197 | Seq. ID No. 5198 |
| 2484b | Seq. ID No. 5199 | Seq. ID No. 5200 |
| 2498b | Seq. ID No. 5221 | Seq. ID No. 5222 |
| 2500a | Seq. ID No. 5223 | Seq. ID No. 5224 |
| 2500b | Seq. ID No. 5225 | Seq. ID No. 5226 |
| 2500c | Seq. ID No. 5227 | Seq. ID No. 5228 |
| 2505 | Seq. ID No. 5237 | Seq. ID No. 5238 |
| 2518a | Seq. ID No. 5267 | Seq. ID No. 5268 |
| 2519a | Seq. ID No. 5269 | Seq. ID No. 5270 |
| 2519b | Seq. ID No. 5271 | Seq. ID No. 5272 |
| 2521 | Seq. ID No. 5281 | Seq. ID No. 5282 |
| 2532b | Seq. ID No. 5301 | Seq. ID No. 5302 |
| 2532c | Seq. ID No. 5303 | Seq. ID No. 5304 |
| 2542a | Seq. ID No. 5315 | Seq. ID No. 5316 |
| 2543 | Seq. ID No. 5321 | Seq. ID No. 5322 |
| 2546 | Seq. ID No. 5327 | Seq. ID No. 5328 |
| 2553 | Seq. ID No. 5347 | Seq. ID No. 5348 |
| 2567a | Seq. ID No. 5385 | Seq. ID No. 5386 |
| 2605a | Seq. ID No. 5445 | Seq. ID No. 5446 |
| 2605b | Seq. ID No. 5447 | Seq. ID No. 5448 |
| 2616a | Seq. ID No. 5459 | Seq. ID No. 5460 |
| 2616d | Seq. ID No. 5465 | Seq. ID No. 5466 |
| 2616e | Seq. ID No. 5467 | Seq. ID No. 5468 |
| 2618a | Seq. ID No. 5479 | Seq. ID No. 5480 |
| 2618b | Seq. ID No. 5481 | Seq. ID No. 5482 |
| 2620 | Seq. ID No. 5485 | Seq. ID No. 5486 |
| 2621a | Seq. ID No. 5487 | Seq. ID No. 5488 |
| 2631 | Seq. ID No. 5515 | Seq. ID No. 5516 |
| 2632 | Seq. ID No. 5517 | Seq. ID No. 5518 |
| 2642 | Seq. ID No. 5533 | Seq. ID No. 5534 |
| 2648a | Seq. ID No. 5543 | Seq. ID No. 5544 |
| 2648b | Seq. ID No. 5545 | Seq. ID No. 5546 |
| 2650 | Seq. ID No. 5549 | Seq. ID No. 5550 |
| 2660 | Seq. ID No. 5569 | Seq. ID No. 5570 |
| 2665 | Seq. ID No. 5577 | Seq. ID No. 5578 |
| 2672 | Seq. ID No. 5593 | Seq. ID No. 5594 |
| 2673 | Seq. ID No. 5595 | Seq. ID No. 5596 |
| 2679a | Seq. ID No. 5609 | Seq. ID No. 5610 |
| 2683a | Seq. ID No. 5623 | Seq. ID No. 5624 |
| 2683b | Seq. ID No. 5625 | Seq. ID No. 5626 |
| 2689a | Seq. ID No. 5639 | Seq. ID No. 5640 |
| 2689b | Seq. ID No. 5641 | Seq. ID No. 5642 |
| 2690a | Seq. ID No. 5643 | Seq. ID No. 5644 |
| 2692b | Seq. ID No. 5649 | Seq. ID No. 5650 |
| 2696a | Seq. ID No. 5659 | Seq. ID No. 5660 |
| 2696b | Seq. ID No. 5661 | Seq. ID No. 5662 |
| 2705 | Seq. ID No. 5663 | Seq. ID No. 5664 |
| 2710c | Seq. ID No. 5667 | Seq. ID No. 5668 |
| 2713 | Seq. ID No. 5671 | Seq. ID No. 5672 |
| 2719a | Seq. ID No. 5687 | Seq. ID No. 5688 |
| 2719b | Seq. ID No. 5689 | Seq. ID No. 5690 |
| 2725a | Seq. ID No. 5703 | Seq. ID No. 5704 |
| 2725b | Seq. ID No. 5705 | Seq. ID No. 5706 |
| 2728a | Seq. ID No. 5709 | Seq. ID No. 5710 |
| 2728b | Seq. ID No. 5711 | Seq. ID No. 5712 |
| 2742a | Seq. ID No. 5737 | Seq. ID No. 5738 |
| 2742b | Seq. ID No. 5739 | Seq. ID No. 5740 |
| 2744 | Seq. ID No. 5745 | Seq. ID No. 5746 |
| 2746 | Seq. ID No. 5751 | Seq. ID No. 5752 |
| 2749a | Seq. ID No. 5763 | Seq. ID No. 5764 |
| 2760a | Seq. ID No. 5797 | Seq. ID No. 5798 |
| 2764 | Seq. ID No. 5811 | Seq. ID No. 5812 |
| 2765b | Seq. ID No. 5813 | Seq. ID No. 5814 |
| 2765c | Seq. ID No. 5815 | Seq. ID No. 5816 |
| 2769a | Seq. ID No. 5827 | Seq. ID No. 5828 |
| 2770 | Seq. ID No. 5829 | Seq. ID No. 5830 |
| 2776a | Seq. ID No. 5843 | Seq. ID No. 5844 |
| 2776b | Seq. ID No. 5845 | Seq. ID No. 5846 |
| 2788b | Seq. ID No. 5873 | Seq. ID No. 5874 |
| 2791 | Seq. ID No. 5879 | Seq. ID No. 5880 |
| 2794 | Seq. ID No. 5883 | Seq. ID No. 5884 |
| 2796a | Seq. ID No. 5885 | Seq. ID No. 5886 |
| 2798 | Seq. ID No. 5887 | Seq. ID No. 5888 |
| 2799a | Seq. ID No. 5889 | Seq. ID No. 5890 |
| 2799b | Seq. ID No. 5891 | Seq. ID No. 5892 |
| 2819 | Seq. ID No. 5931 | Seq. ID No. 5932 |
| 2832 | Seq. ID No. 5955 | Seq. ID No. 5956 |
| 2837a | Seq. ID No. 5963 | Seq. ID No. 5964 |
| 2837b | Seq. ID No. 5965 | Seq. ID No. 5966 |
| 2845 | Seq. ID No. 5975 | Seq. ID No. 5976 |
| 2850 | Seq. ID No. 5983 | Seq. ID No. 5984 |
| 2851 | Seq. ID No. 5985 | Seq. ID No. 5986 |
| 2852 | Seq. ID No. 5987 | Seq. ID No. 5988 |
| 2853 | Seq. ID No. 5989 | Seq. ID No. 5990 |
| 2859 | Seq. ID No. 6005 | Seq. ID No. 6006 |
| 2862 | Seq. ID No. 6013 | Seq. ID No. 6014 |
| 2872 | Seq. ID No. 6031 | Seq. ID No. 6032 |
| 2877 | Seq. ID No. 6035 | Seq. ID No. 6036 |
| 2882 | Seq. ID No. 6045 | Seq. ID No. 6046 |
| 2887a | Seq. ID No. 6059 | Seq. ID No. 6060 |
| 2887b | Seq. ID No. 6061 | Seq. ID No. 6062 |
| 2888 | Seq. ID No. 6063 | Seq. ID No. 6064 |
| 2893b | Seq. ID No. 6073 | Seq. ID No. 6074 |
| 2895 | Seq. ID No. 6081 | Seq. ID No. 6082 |
| 2901a | Seq. ID No. 6091 | Seq. ID No. 6092 |
| 2901b | Seq. ID No. 6093 | Seq. ID No. 6094 |
| 2917 | Seq. ID No. 6127 | Seq. ID No. 6128 |
| 2929b | Seq. ID No. 6159 | Seq. ID No. 6160 |
| 2944b | Seq. ID No. 6197 | Seq. ID No. 6198 |
| 2945b | Seq. ID No. 6199 | Seq. ID No. 6200 |
| 2948a | Seq. ID No. 6203 | Seq. ID No. 6204 |
| 2952 | Seq. ID No. 6217 | Seq. ID No. 6218 |
| 2955a | Seq. ID No. 6221 | Seq. ID No. 6222 |
| 2955b | Seq. ID No. 6223 | Seq. ID No. 6224 |
| 2958a | Seq. ID No. 6237 | Seq. ID No. 6238 |
| 2958b | Seq. ID No. 6239 | Seq. ID No. 6240 |
| 2958c | Seq. ID No. 6241 | Seq. ID No. 6242 |
| 2960a | Seq. ID No. 6245 | Seq. ID No. 6246 |
| 2962a | Seq. ID No. 6247 | Seq. ID No. 6248 |
| 2962b | Seq. ID No. 6249 | Seq. ID No. 6250 |
| 2966 | Seq. ID No. 6259 | Seq. ID No. 6260 |
| 2970a | Seq. ID No. 6265 | Seq. ID No. 6266 |
| 2970b | Seq. ID No. 6267 | Seq. ID No. 6268 |
| 2974a | Seq. ID No. 6273 | Seq. ID No. 6274 |
| 2978a | Seq. ID No. 6283 | Seq. ID No. 6284 |
| 2978b | Seq. ID No. 6285 | Seq. ID No. 6286 |
| 2992 | Seq. ID No. 6323 | Seq. ID No. 6324 |
| 2993a | Seq. ID No. 6325 | Seq. ID No. 6326 |
| 2993b | Seq. ID No. 6327 | Seq. ID No. 6328 |
| 3015 | Seq. ID No. 6361 | Seq. ID No. 6362 |
| 3016a | Seq. ID No. 6363 | Seq. ID No. 6364 |
| 3021 | Seq. ID No. 6377 | Seq. ID No. 6378 |
| 3023 | Seq. ID No. 6381 | Seq. ID No. 6382 |
| 3031a | Seq. ID No. 6401 | Seq. ID No. 6402 |
| 3031b | Seq. ID No. 6403 | Seq. ID No. 6404 |
| 3038 | Seq. ID No. 6419 | Seq. ID No. 6420 |
| 3042a | Seq. ID No. 6425 | Seq. ID No. 6426 |
| 3042b | Seq. ID No. 6427 | Seq. ID No. 6428 |
| 3043a | Seq. ID No. 6429 | Seq. ID No. 6430 |
| 3043b | Seq. ID No. 6431 | Seq. ID No. 6432 |
| 3044 | Seq. ID No. 6433 | Seq. ID No. 6434 |
| 3045a | Seq. ID No. 6435 | Seq. ID No. 6436 |
| 3045b | Seq. ID No. 6437 | Seq. ID No. 6438 |
| 3048a | Seq. ID No. 6439 | Seq. ID No. 6440 |
| 3051a | Seq. ID No. 6447 | Seq. ID No. 6448 |
| 3051b | Seq. ID No. 6449 | Seq. ID No. 6450 |
| 3052 | Seq. ID No. 6451 | Seq. ID No. 6452 |
| 3054 | Seq. ID No. 6453 | Seq. ID No. 6454 |
| 3055a | Seq. ID No. 6455 | Seq. ID No. 6456 |
| 3055b | Seq. ID No. 6457 | Seq. ID No. 6458 |
| 3061 | Seq. ID No. 6465 | Seq. ID No. 6466 |
| 3062 | Seq. ID No. 6467 | Seq. ID No. 6468 |
| 3063a | Seq. ID No. 6469 | Seq. ID No. 6470 |
| 3063b | Seq. ID No. 6471 | Seq. ID No. 6472 |
| 3064b | Seq. ID No. 6473 | Seq. ID No. 6474 |
| 3065a | Seq. ID No. 6475 | Seq. ID No. 6476 |
| 3065b | Seq. ID No. 6477 | Seq. ID No. 6478 |
| 3066 | Seq. ID No. 6479 | Seq. ID No. 6480 |
| 3067 | Seq. ID No. 6481 | Seq. ID No. 6482 |
| 3068 | Seq. ID No. 6483 | Seq. ID No. 6484 |
| 3069 | Seq. ID No. 6485 | Seq. ID No. 6486 |
| 3071 | Seq. ID No. 6487 | Seq. ID No. 6488 |
| 3072a | Seq. ID No. 6489 | Seq. ID No. 6490 |
| 3073 | Seq. ID No. 6491 | Seq. ID No. 6492 |
| 3075 | Seq. ID No. 6495 | Seq. ID No. 6496 |
| 3076 | Seq. ID No. 6497 | Seq. ID No. 6498 |
| 3079 | Seq. ID No. 6507 | Seq. ID No. 6508 |
| 3085 | Seq. ID No. 6517 | Seq. ID No. 6518 |
| 3086 | Seq. ID No. 6519 | Seq. ID No. 6520 |
| 3087a | Seq. ID No. 6521 | Seq. ID No. 6522 |
| 3087c | Seq. ID No. 6523 | Seq. ID No. 6524 |
| 3088 | Seq. ID No. 6525 | Seq. ID No. 6526 |
| 3089a | Seq. ID No. 6527 | Seq. ID No. 6528 |
| 3089b | Seq. ID No. 6529 | Seq. ID No. 6530 |
| 3091 | Seq. ID No. 6533 | Seq. ID No. 6534 |
| 3095 | Seq. ID No. 6539 | Seq. ID No. 6540 |
| 3096a | Seq. ID No. 6541 | Seq. ID No. 6542 |
| 3096b | Seq. ID No. 6543 | Seq. ID No. 6544 |
| 3100a | Seq. ID No. 6555 | Seq. ID No. 6556 |
| 3100b | Seq. ID No. 6557 | Seq. ID No. 6558 |
| 3102 | Seq. ID No. 6561 | Seq. ID No. 6562 |
| 3103b | Seq. ID No. 6563 | Seq. ID No. 6564 |
| 3104 | Seq. ID No. 6565 | Seq. ID No. 6566 |
| 3105 | Seq. ID No. 6567 | Seq. ID No. 6568 |
| 3106 | Seq. ID No. 6569 | Seq. ID No. 6570 |
| 3107a | Seq. ID No. 6571 | Seq. ID No. 6572 |
| 3107b | Seq. ID No. 6573 | Seq. ID No. 6574 |
| 3110a | Seq. ID No. 6581 | Seq. ID No. 6582 |
| 3110b | Seq. ID No. 6583 | Seq. ID No. 6584 |
| 3140 | Seq. ID No. 6631 | Seq. ID No. 6632 |
| 3145a | Seq. ID No. 6635 | Seq. ID No. 6636 |
| 3145b | Seq. ID No. 6637 | Seq. ID No. 6638 |
| 3145c | Seq. ID No. 6639 | Seq. ID No. 6640 |
| 3147b | Seq. ID No. 6643 | Seq. ID No. 6644 |
| 3147c | Seq. ID No. 6645 | Seq. ID No. 6646 |
| 3149a | Seq. ID No. 6647 | Seq. ID No. 6648 |
| 3150a | Seq. ID No. 6649 | Seq. ID No. 6650 |

[0120] Listed in Table 18 are 1529 ORFs detected by the Glimmer™ ORF finder program.

TABLE 18
GLIMMER ™ ORFs

| ORF Number | DNA SEQ ID Number | Protein SEQ ID Number |
|---|---|---|
| 1 | Seq. ID No. 1 | Seq. ID No. 2 |
| 2b | Seq. ID No. 5 | Seq. ID No. 6 |
| 4c | Seq. ID No. 11 | Seq. ID No. 12 |
| 5 | Seq. ID No. 13 | Seq. ID No. 14 |
| 7 | Seq. ID No. 15 | Seq. ID No. 16 |
| 10 | Seq. ID No. 17 | Seq. ID No. 18 |
| 17 | Seq. ID No. 25 | Seq. ID No. 26 |
| 18 | Seq. ID No. 27 | Seq. ID No. 28 |
| 20 | Seq. ID No. 29 | Seq. ID No. 30 |
| 23b | Seq. ID No. 35 | Seq. ID No. 36 |
| 24 | Seq. ID No. 37 | Seq. ID No. 38 |
| 36 | Seq. ID No. 41 | Seq. ID No. 42 |
| 37 | Seq. ID No. 43 | Seq. ID No. 44 |
| 38b | Seq. ID No. 47 | Seq. ID No. 48 |
| 39b | Seq. ID No. 51 | Seq. ID No. 52 |
| 40 | Seq. ID No. 53 | Seq. ID No. 54 |
| 41c | Seq. ID No. 59 | Seq. ID No. 60 |
| 43c | Seq. ID No. 63 | Seq. ID No. 64 |
| 45 | Seq. ID No. 69 | Seq. ID No. 70 |
| 46b | Seq. ID No. 73 | Seq. ID No. 74 |
| 47 | Seq. ID No. 75 | Seq. ID No. 76 |
| 48c | Seq. ID No. 81 | Seq. ID No. 82 |
| 50 | Seq. ID No. 83 | Seq. ID No. 84 |
| 51c | Seq. ID No. 89 | Seq. ID No. 90 |
| 56b | Seq. ID No. 93 | Seq. ID No. 94 |
| 57b | Seq. ID No. 97 | Seq. ID No. 98 |
| 60b | Seq. ID No. 103 | Seq. ID No. 104 |
| 62c | Seq. ID No. 111 | Seq. ID No. 112 |
| 65c | Seq. ID No. 121 | Seq. ID No. 122 |
| 67 | Seq. ID No. 125 | Seq. ID No. 126 |
| 71 | Seq. ID No. 129 | Seq. ID No. 130 |
| 74 | Seq. ID No. 135 | Seq. ID No. 136 |
| 77 | Seq. ID No. 137 | Seq. ID No. 138 |
| 80c | Seq. ID No. 145 | Seq. ID No. 146 |
| 81b | Seq. ID No. 149 | Seq. ID No. 150 |
| 85c | Seq. ID No. 157 | Seq. ID No. 158 |
| 88 | Seq. ID No. 167 | Seq. ID No. 168 |
| 91b | Seq. ID No. 173 | Seq. ID No. 174 |
| 93c | Seq. ID No. 183 | Seq. ID No. 184 |
| 95b | Seq. ID No. 187 | Seq. ID No. 188 |
| 97b | Seq. ID No. 189 | Seq. ID No. 190 |
| 99 | Seq. ID No. 191 | Seq. ID No. 192 |
| 102 | Seq. ID No. 195 | Seq. ID No. 196 |
| 104a | Seq. ID No. 197 | Seq. ID No. 198 |
| 105a | Seq. ID No. 203 | Seq. ID No. 204 |
| 106 | Seq. ID No. 207 | Seq. ID No. 208 |
| 109d | Seq. ID No. 215 | Seq. ID No. 216 |
| 111b | Seq. ID No. 219 | Seq. ID No. 220 |
| 112b | Seq. ID No. 223 | Seq. ID No. 224 |
| 114 | Seq. ID No. 225 | Seq. ID No. 226 |
| 115 | Seq. ID No. 227 | Seq. ID No. 228 |
| 119b | Seq. ID No. 231 | Seq. ID No. 232 |
| 121 | Seq. ID No. 233 | Seq. ID No. 234 |
| 124c | Seq. ID No. 239 | Seq. ID No. 240 |
| 125 | Seq. ID No. 241 | Seq. ID No. 242 |
| 127c | Seq. ID No. 247 | Seq. ID No. 248 |
| 129c | Seq. ID No. 253 | Seq. ID No. 254 |
| 134 | Seq. ID No. 261 | Seq. ID No. 262 |
| 135b | Seq. ID No. 265 | Seq. ID No. 266 |
| 137b | Seq. ID No. 269 | Seq. ID No. 270 |
| 138b | Seq. ID No. 273 | Seq. ID No. 274 |
| 142 | Seq. ID No. 275 | Seq. ID No. 276 |
| 143 | Seq. ID No. 277 | Seq. ID No. 278 |
| 144c | Seq. ID No. 283 | Seq. ID No. 284 |
| 145d | Seq. ID No. 291 | Seq. ID No. 292 |
| 147 | Seq. ID No. 293 | Seq. ID No. 294 |
| 151b | Seq. ID No. 297 | Seq. ID No. 298 |
| 152b | Seq. ID No. 301 | Seq. ID No. 302 |
| 153c | Seq. ID No. 307 | Seq. ID No. 308 |
| 154 | Seq. ID No. 309 | Seq. ID No. 310 |
| 155b | Seq. ID No. 313 | Seq. ID No. 314 |
| 157b | Seq. ID No. 317 | Seq. ID No. 318 |
| 158b | Seq. ID No. 321 | Seq. ID No. 322 |
| 160b | Seq. ID No. 325 | Seq. ID No. 326 |
| 162e | Seq. ID No. 335 | Seq. ID No. 336 |
| 165b | Seq. ID No. 343 | Seq. ID No. 344 |
| 167 | Seq. ID No. 345 | Seq. ID No. 346 |
| 171b | Seq. ID No. 353 | Seq. ID No. 354 |
| 172 | Seq. ID No. 355 | Seq. ID No. 356 |
| 175 | Seq. ID No. 361 | Seq. ID No. 362 |
| 176 | Seq. ID No. 363 | Seq. ID No. 364 |
| 177b | Seq. ID No. 367 | Seq. ID No. 368 |
| 180b | Seq. ID No. 375 | Seq. ID No. 376 |
| 184 | Seq. ID No. 379 | Seq. ID No. 380 |
| 186 | Seq. ID No. 383 | Seq. ID No. 384 |
| 188 | Seq. ID No. 389 | Seq. ID No. 390 |
| 189b | Seq. ID No. 391 | Seq. ID No. 392 |
| 192b | Seq. ID No. 397 | Seq. ID No. 398 |
| 195 | Seq. ID No. 405 | Seq. ID No. 406 |
| 197b | Seq. ID No. 411 | Seq. ID No. 412 |
| 198b | Seq. ID No. 415 | Seq. ID No. 416 |
| 200 | Seq. ID No. 417 | Seq. ID No. 418 |
| 203 | Seq. ID No. 423 | Seq. ID No. 424 |
| 204 | Seq. ID No. 425 | Seq. ID No. 426 |
| 205 | Seq. ID No. 427 | Seq. ID No. 428 |
| 206 | Seq. ID No. 429 | Seq. ID No. 430 |
| 208b | Seq. ID No. 435 | Seq. ID No. 436 |
| 210 | Seq. ID No. 437 | Seq. ID No. 438 |
| 211 | Seq. ID No. 439 | Seq. ID No. 440 |
| 213 | Seq. ID No. 441 | Seq. ID No. 442 |
| 218 | Seq. ID No. 445 | Seq. ID No. 446 |
| 219 | Seq. ID No. 447 | Seq. ID No. 448 |
| 220c | Seq. ID No. 453 | Seq. ID No. 454 |
| 226b | Seq. ID No. 461 | Seq. ID No. 462 |
| 227 | Seq. ID No. 463 | Seq. ID No. 464 |
| 228d | Seq. ID No. 471 | Seq. ID No. 472 |
| 236c | Seq. ID No. 485 | Seq. ID No. 486 |
| 245c | Seq. ID No. 501 | Seq. ID No. 502 |
| 246b | Seq. ID No. 505 | Seq. ID No. 506 |
| 248b | Seq. ID No. 511 | Seq. ID No. 512 |
| 249b | Seq. ID No. 515 | Seq. ID No. 516 |
| 251 | Seq. ID No. 517 | Seq. ID No. 518 |
| 253b | Seq. ID No. 521 | Seq. ID No. 522 |
| 254 | Seq. ID No. 523 | Seq. ID No. 524 |
| 255d | Seq. ID No. 531 | Seq. ID No. 532 |
| 258 | Seq. ID No. 533 | Seq. ID No. 534 |
| 259c | Seq. ID No. 539 | Seq. ID No. 540 |
| 260 | Seq. ID No. 541 | Seq. ID No. 542 |
| 262 | Seq. ID No. 543 | Seq. ID No. 544 |
| 265 | Seq. ID No. 551 | Seq. ID No. 552 |
| 267c | Seq. ID No. 555 | Seq. ID No. 556 |
| 269b | Seq. ID No. 561 | Seq. ID No. 562 |
| 271b | Seq. ID No. 565 | Seq. ID No. 566 |
| 273b | Seq. ID No. 569 | Seq. ID No. 570 |
| 277c | Seq. ID No. 575 | Seq. ID No. 576 |
| 279b | Seq. ID No. 579 | Seq. ID No. 580 |
| 280d | Seq. ID No. 587 | Seq. ID No. 588 |
| 283b | Seq. ID No. 593 | Seq. ID No. 594 |
| 284b | Seq. ID No. 597 | Seq. ID No. 598 |
| 286b | Seq. ID No. 603 | Seq. ID No. 604 |
| 287 | Seq. ID No. 605 | Seq. ID No. 606 |
| 290b | Seq. ID No. 609 | Seq. ID No. 610 |
| 293 | Seq. ID No. 611 | Seq. ID No. 612 |
| 294 | Seq. ID No. 613 | Seq. ID No. 614 |
| 296 | Seq. ID No. 615 | Seq. ID No. 616 |
| 301b | Seq. ID No. 623 | Seq. ID No. 624 |
| 304b | Seq. ID No. 627 | Seq. ID No. 628 |
| 307 | Seq. ID No. 629 | Seq. ID No. 630 |
| 308 | Seq. ID No. 631 | Seq. ID No. 632 |
| 310 | Seq. ID No. 635 | Seq. ID No. 636 |
| 311 | Seq. ID No. 637 | Seq. ID No. 638 |
| 313e | Seq. ID No. 647 | Seq. ID No. 648 |
| 315 | Seq. ID No. 649 | Seq. ID No. 650 |
| 318c | Seq. ID No. 661 | Seq. ID No. 662 |
| 321 | Seq. ID No. 669 | Seq. ID No. 670 |
| 323b | Seq. ID No. 673 | Seq. ID No. 674 |
| 324 | Seq. ID No. 675 | Seq. ID No. 676 |
| 327c | Seq. ID No. 681 | Seq. ID No. 682 |
| 329 | Seq. ID No. 683 | Seq. ID No. 684 |
| 330c | Seq. ID No. 689 | Seq. ID No. 690 |
| 335b | Seq. ID No. 701 | Seq. ID No. 702 |
| 337 | Seq. ID No. 703 | Seq. ID No. 704 |
| 338c | Seq. ID No. 709 | Seq. ID No. 710 |
| 341b | Seq. ID No. 713 | Seq. ID No. 714 |
| 342h | Seq. ID No. 729 | Seq. ID No. 730 |
| 344b | Seq. ID No. 733 | Seq. ID No. 734 |
| 345 | Seq. ID No. 735 | Seq. ID No. 736 |
| 346a | Seq. ID No. 737 | Seq. ID No. 738 |
| 347 | Seq. ID No. 741 | Seq. ID No. 742 |
| 349c | Seq. ID No. 747 | Seq. ID No. 748 |
| 350b | Seq. ID No. 751 | Seq. ID No. 752 |
| 351 | Seq. ID No. 753 | Seq. ID No. 754 |
| 352c | Seq. ID No. 759 | Seq. ID No. 760 |
| 354c | Seq. ID No. 765 | Seq. ID No. 766 |
| 355 | Seq. ID No. 767 | Seq. ID No. 768 |
| 356b | Seq. ID No. 771 | Seq. ID No. 772 |
| 358c | Seq. ID No. 781 | Seq. ID No. 782 |
| 362 | Seq. ID No. 783 | Seq. ID No. 784 |
| 365b | Seq. ID No. 787 | Seq. ID No. 788 |
| 366c | Seq. ID No. 791 | Seq. ID No. 792 |
| 367b | Seq. ID No. 795 | Seq. ID No. 796 |
| 371b | Seq. ID No. 799 | Seq. ID No. 800 |
| 372d | Seq. ID No. 807 | Seq. ID No. 808 |
| 378b | Seq. ID No. 817 | Seq. ID No. 818 |
| 382b | Seq. ID No. 819 | Seq. ID No. 820 |
| 383b | Seq. ID No. 823 | Seq. ID No. 824 |
| 384b | Seq. ID No. 827 | Seq. ID No. 828 |
| 385b | Seq. ID No. 831 | Seq. ID No. 832 |
| 387 | Seq. ID No. 835 | Seq. ID No. 836 |
| 390 | Seq. ID No. 837 | Seq. ID No. 838 |
| 391 | Seq. ID No. 839 | Seq. ID No. 840 |
| 395c | Seq. ID No. 847 | Seq. ID No. 848 |
| 398 | Seq. ID No. 851 | Seq. ID No. 852 |
| 400b | Seq. ID No. 855 | Seq. ID No. 856 |
| 401b | Seq. ID No. 859 | Seq. ID No. 860 |
| 403d | Seq. ID No. 867 | Seq. ID No. 868 |
| 406b | Seq. ID No. 871 | Seq. ID No. 872 |
| 409b | Seq. ID No. 875 | Seq. ID No. 876 |
| 410c | Seq. ID No. 881 | Seq. ID No. 882 |
| 413b | Seq. ID No. 885 | Seq. ID No. 886 |
| 416b | Seq. ID No. 889 | Seq. ID No. 890 |
| 417 | Seq. ID No. 891 | Seq. ID No. 892 |
| 418b | Seq. ID No. 895 | Seq. ID No. 896 |
| 419c | Seq. ID No. 901 | Seq. ID No. 902 |
| 421 | Seq. ID No. 907 | Seq. ID No. 908 |
| 424c | Seq. ID No. 915 | Seq. ID No. 916 |
| 426b | Seq. ID No. 919 | Seq. ID No. 920 |
| 427c | Seq. ID No. 925 | Seq. ID No. 926 |
| 429b | Seq. ID No. 929 | Seq. ID No. 930 |
| 431 | Seq. ID No. 935 | Seq. ID No. 936 |
| 435 | Seq. ID No. 939 | Seq. ID No. 940 |
| 438c | Seq. ID No. 949 | Seq. ID No. 950 |
| 440 | Seq. ID No. 951 | Seq. ID No. 952 |
| 441b | Seq. ID No. 955 | Seq. ID No. 956 |
| 444b | Seq. ID No. 961 | Seq. ID No. 962 |
| 445b | Seq. ID No. 965 | Seq. ID No. 966 |
| 448 | Seq. ID No. 967 | Seq. ID No. 968 |
| 450b | Seq. ID No. 971 | Seq. ID No. 972 |
| 452e | Seq. ID No. 985 | Seq. ID No. 986 |
| 455c | Seq. ID No. 993 | Seq. ID No. 994 |
| 458b | Seq. ID No. 997 | Seq. ID No. 998 |
| 460c | Seq. ID No. 1003 | Seq. ID No. 1004 |
| 462 | Seq. ID No. 1005 | Seq. ID No. 1006 |
| 463b | Seq. ID No. 1009 | Seq. ID No. 1010 |
| 464d | Seq. ID No. 1017 | Seq. ID No. 1018 |
| 467b | Seq. ID No. 1023 | Seq. ID No. 1024 |
| 472f | Seq. ID No. 1039 | Seq. ID No. 1040 |
| 473 | Seq. ID No. 1041 | Seq. ID No. 1042 |
| 474 | Seq. ID No. 1043 | Seq. ID No. 1044 |
| 478b | Seq. ID No. 1051 | Seq. ID No. 1052 |
| 479 | Seq. ID No. 1053 | Seq. ID No. 1054 |
| 480b | Seq. ID No. 1057 | Seq. ID No. 1058 |
| 481b | Seq. ID No. 1061 | Seq. ID No. 1062 |
| 482b | Seq. ID No. 1065 | Seq. ID No. 1066 |
| 483 | Seq. ID No. 1067 | Seq. ID No. 1068 |
| 490 | Seq. ID No. 1069 | Seq. ID No. 1070 |
| 491b | Seq. ID No. 1073 | Seq. ID No. 1074 |
| 492 | Seq. ID No. 1075 | Seq. ID No. 1076 |
| 495c | Seq. ID No. 1083 | Seq. ID No. 1084 |
| 498b | Seq. ID No. 1087 | Seq. ID No. 1088 |
| 499b | Seq. ID No. 1091 | Seq. ID No. 1092 |
| 500 | Seq. ID No. 1093 | Seq. ID No. 1094 |
| 502c | Seq. ID No. 1097 | Seq. ID No. 1098 |
| 504 | Seq. ID No. 1099 | Seq. ID No. 1100 |
| 505b | Seq. ID No. 1103 | Seq. ID No. 1104 |
| 509 | Seq. ID No. 1109 | Seq. ID No. 1110 |
| 512b | Seq. ID No. 1115 | Seq. ID No. 1116 |
| 514 | Seq. ID No. 1117 | Seq. ID No. 1118 |
| 515c | Seq. ID No. 1123 | Seq. ID No. 1124 |
| 518c | Seq. ID No. 1129 | Seq. ID No. 1130 |
| 523 | Seq. ID No. 1133 | Seq. ID No. 1134 |
| 524b | Seq. ID No. 1137 | Seq. ID No. 1138 |
| 527b | Seq. ID No. 1143 | Seq. ID No. 1144 |
| 528b | Seq. ID No. 1147 | Seq. ID No. 1148 |
| 529 | Seq. ID No. 1149 | Seq. ID No. 1150 |
| 533 | Seq. ID No. 1155 | Seq. ID No. 1156 |
| 535 | Seq. ID No. 1157 | Seq. ID No. 1158 |
| 536 | Seq. ID No. 1159 | Seq. ID No. 1160 |
| 539c | Seq. ID No. 1163 | Seq. ID No. 1164 |
| 541d | Seq. ID No. 1171 | Seq. ID No. 1172 |
| 543c | Seq. ID No. 1179 | Seq. ID No. 1180 |
| 544 | Seq. ID No. 1181 | Seq. ID No. 1182 |
| 545c | Seq. ID No. 1187 | Seq. ID No. 1188 |
| 546c | Seq. ID No. 1193 | Seq. ID No. 1194 |
| 548 | Seq. ID No. 1199 | Seq. ID No. 1200 |
| 551 | Seq. ID No. 1205 | Seq. ID No. 1206 |
| 554b | Seq. ID No. 1211 | Seq. ID No. 1212 |
| 557b | Seq. ID No. 1217 | Seq. ID No. 1218 |
| 560b | Seq. ID No. 1221 | Seq. ID No. 1222 |
| 561 | Seq. ID No. 1223 | Seq. ID No. 1224 |
| 563 | Seq. ID No. 1225 | Seq. ID No. 1226 |
| 564c | Seq. ID No. 1231 | Seq. ID No. 1232 |
| 569 | Seq. ID No. 1233 | Seq. ID No. 1234 |
| 570b | Seq. ID No. 1237 | Seq. ID No. 1238 |
| 573 | Seq. ID No. 1241 | Seq. ID No. 1242 |
| 580b | Seq. ID No. 1253 | Seq. ID No. 1254 |
| 583b | Seq. ID No. 1257 | Seq. ID No. 1258 |
| 586b | Seq. ID No. 1263 | Seq. ID No. 1264 |
| 587d | Seq. ID No. 1271 | Seq. ID No. 1272 |
| 590 | Seq. ID No. 1281 | Seq. ID No. 1282 |
| 609b | Seq. ID No. 1317 | Seq. ID No. 1318 |
| 611 | Seq. ID No. 1323 | Seq. ID No. 1324 |
| 613d | Seq. ID No. 1331 | Seq. ID No. 1332 |
| 614b | Seq. ID No. 1335 | Seq. ID No. 1336 |
| 618 | Seq. ID No. 1339 | Seq. ID No. 1340 |
| 620 | Seq. ID No. 1345 | Seq. ID No. 1346 |
| 623 | Seq. ID No. 1347 | Seq. ID No. 1348 |
| 626c | Seq. ID No. 1361 | Seq. ID No. 1362 |
| 631d | Seq. ID No. 1369 | Seq. ID No. 1370 |
| 633c | Seq. ID No. 1377 | Seq. ID No. 1378 |
| 634b | Seq. ID No. 1379 | Seq. ID No. 1380 |
| 637c | Seq. ID No. 1387 | Seq. ID No. 1388 |
| 641b | Seq. ID No. 1393 | Seq. ID No. 1394 |
| 643 | Seq. ID No. 1395 | Seq. ID No. 1396 |
| 644b | Seq. ID No. 1399 | Seq. ID No. 1400 |
| 650 | Seq. ID No. 1403 | Seq. ID No. 1404 |
| 652 | Seq. ID No. 1405 | Seq. ID No. 1406 |
| 653c | Seq. ID No. 1411 | Seq. ID No. 1412 |
| 656 | Seq. ID No. 1413 | Seq. ID No. 1414 |
| 657c | Seq. ID No. 1415 | Seq. ID No. 1416 |
| 658b | Seq. ID No. 1419 | Seq. ID No. 1420 |
| 661 | Seq. ID No. 1425 | Seq. ID No. 1426 |
| 663 | Seq. ID No. 1427 | Seq. ID No. 1428 |
| 665 | Seq. ID No. 1429 | Seq. ID No. 1430 |
| 666 | Seq. ID No. 1431 | Seq. ID No. 1432 |
| 670 | Seq. ID No. 1433 | Seq. ID No. 1434 |
| 674b | Seq. ID No. 1437 | Seq. ID No. 1438 |
| 677b | Seq. ID No. 1443 | Seq. ID No. 1444 |
| 680 | Seq. ID No. 1449 | Seq. ID No. 1450 |
| 681 | Seq. ID No. 1451 | Seq. ID No. 1452 |
| 683b | Seq. ID No. 1455 | Seq. ID No. 1456 |
| 684 | Seq. ID No. 1457 | Seq. ID No. 1458 |
| 687 | Seq. ID No. 1459 | Seq. ID No. 1460 |
| 688b | Seq. ID No. 1463 | Seq. ID No. 1464 |
| 690 | Seq. ID No. 1465 | Seq. ID No. 1466 |
| 691b | Seq. ID No. 1469 | Seq. ID No. 1470 |
| 692 | Seq. ID No. 1471 | Seq. ID No. 1472 |
| 694 | Seq. ID No. 1473 | Seq. ID No. 1474 |
| 696 | Seq. ID No. 1475 | Seq. ID No. 1476 |
| 698 | Seq. ID No. 1477 | Seq. ID No. 1478 |
| 700c | Seq. ID No. 1485 | Seq. ID No. 1486 |
| 703 | Seq. ID No. 1487 | Seq. ID No. 1488 |
| 705b | Seq. ID No. 1491 | Seq. ID No. 1492 |
| 707 | Seq. ID No. 1493 | Seq. ID No. 1494 |
| 709 | Seq. ID No. 1495 | Seq. ID No. 1496 |
| 710 | Seq. ID No. 1497 | Seq. ID No. 1498 |
| 712b | Seq. ID No. 1501 | Seq. ID No. 1502 |
| 715b | Seq. ID No. 1505 | Seq. ID No. 1506 |
| 717 | Seq. ID No. 1507 | Seq. ID No. 1508 |
| 718a | Seq. ID No. 1509 | Seq. ID No. 1510 |
| 722c | Seq. ID No. 1517 | Seq. ID No. 1518 |
| 724d | Seq. ID No. 1525 | Seq. ID No. 1526 |
| 726 | Seq. ID No. 1527 | Seq. ID No. 1528 |
| 728b | Seq. ID No. 1531 | Seq. ID No. 1532 |
| 730d | Seq. ID No. 1539 | Seq. ID No. 1540 |
| 731b | Seq. ID No. 1541 | Seq. ID No. 1542 |
| 732 | Seq. ID No. 1543 | Seq. ID No. 1544 |
| 738c | Seq. ID No. 1549 | Seq. ID No. 1550 |
| 743b | Seq. ID No. 1561 | Seq. ID No. 1562 |
| 744 | Seq. ID No. 1563 | Seq. ID No. 1564 |
| 745b | Seq. ID No. 1567 | Seq. ID No. 1568 |
| 746b | Seq. ID No. 1571 | Seq. ID No. 1572 |
| 747 | Seq. ID No. 1573 | Seq. ID No. 1574 |
| 748b | Seq. ID No. 1577 | Seq. ID No. 1578 |
| 751 | Seq. ID No. 1581 | Seq. ID No. 1582 |
| 754d | Seq. ID No. 1589 | Seq. ID No. 1590 |
| 756b | Seq. ID No. 1593 | Seq. ID No. 1594 |
| 758 | Seq. ID No. 1595 | Seq. ID No. 1596 |
| 760 | Seq. ID No. 1597 | Seq. ID No. 1598 |
| 762c | Seq. ID No. 1603 | Seq. ID No. 1604 |
| 763b | Seq. ID No. 1607 | Seq. ID No. 1608 |
| 766 | Seq. ID No. 1611 | Seq. ID No. 1612 |
| 767 | Seq. ID No. 1613 | Seq. ID No. 1614 |
| 770c | Seq. ID No. 1619 | Seq. ID No. 1620 |
| 772b | Seq. ID No. 1623 | Seq. ID No. 1624 |
| 775 | Seq. ID No. 1627 | Seq. ID No. 1628 |
| 777c | Seq. ID No. 1631 | Seq. ID No. 1632 |
| 780b | Seq. ID No. 1637 | Seq. ID No. 1638 |
| 782b | Seq. ID No. 1639 | Seq. ID No. 1640 |
| 785 | Seq. ID No. 1641 | Seq. ID No. 1642 |
| 788b | Seq. ID No. 1647 | Seq. ID No. 1648 |
| 789c | Seq. ID No. 1653 | Seq. ID No. 1654 |
| 792 | Seq. ID No. 1657 | Seq. ID No. 1658 |
| 794d | Seq. ID No. 1665 | Seq. ID No. 1666 |
| 797 | Seq. ID No. 1669 | Seq. ID No. 1670 |
| 799f | Seq. ID No. 1681 | Seq. ID No. 1682 |
| 803b | Seq. ID No. 1685 | Seq. ID No. 1686 |
| 804b | Seq. ID No. 1689 | Seq. ID No. 1690 |
| 807 | Seq. ID No. 1691 | Seq. ID No. 1692 |
| 812 | Seq. ID No. 1697 | Seq. ID No. 1698 |
| 813 | Seq. ID No. 1699 | Seq. ID No. 1700 |
| 826 | Seq. ID No. 1707 | Seq. ID No. 1708 |
| 829b | Seq. ID No. 1711 | Seq. ID No. 1712 |
| 830 | Seq. ID No. 1713 | Seq. ID No. 1714 |
| 834c | Seq. ID No. 1719 | Seq. ID No. 1720 |
| 835b | Seq. ID No. 1723 | Seq. ID No. 1724 |
| 836c | Seq. ID No. 1729 | Seq. ID No. 1730 |
| 837c | Seq. ID No. 1735 | Seq. ID No. 1736 |
| 843 | Seq. ID No. 1737 | Seq. ID No. 1738 |
| 847b | Seq. ID No. 1741 | Seq. ID No. 1742 |
| 849b | Seq. ID No. 1747 | Seq. ID No. 1748 |
| 851b | Seq. ID No. 1751 | Seq. ID No. 1752 |
| 853c | Seq. ID No. 1757 | Seq. ID No. 1758 |
| 854 | Seq. ID No. 1759 | Seq. ID No. 1760 |
| 855 | Seq. ID No. 1761 | Seq. ID No. 1762 |
| 859d | Seq. ID No. 1771 | Seq. ID No. 1772 |
| 863 | Seq. ID No. 1777 | Seq. ID No. 1778 |
| 866b | Seq. ID No. 1785 | Seq. ID No. 1786 |
| 868b | Seq. ID No. 1789 | Seq. ID No. 1790 |
| 870 | Seq. ID No. 1791 | Seq. ID No. 1792 |
| 873c | Seq. ID No. 1797 | Seq. ID No. 1798 |
| 874b | Seq. ID No. 1801 | Seq. ID No. 1802 |
| 875 | Seq. ID No. 1803 | Seq. ID No. 1804 |
| 876 | Seq. ID No. 1805 | Seq. ID No. 1806 |
| 878c | Seq. ID No. 1811 | Seq. ID No. 1812 |
| 880c | Seq. ID No. 1817 | Seq. ID No. 1818 |
| 885 | Seq. ID No. 1819 | Seq. ID No. 1820 |
| 886 | Seq. ID No. 1821 | Seq. ID No. 1822 |
| 888 | Seq. ID No. 1825 | Seq. ID No. 1826 |
| 890b | Seq. ID No. 1829 | Seq. ID No. 1830 |
| 907b | Seq. ID No. 1837 | Seq. ID No. 1838 |
| 908c | Seq. ID No. 1843 | Seq. ID No. 1844 |
| 911 | Seq. ID No. 1845 | Seq. ID No. 1846 |
| 912 | Seq. ID No. 1847 | Seq. ID No. 1848 |
| 916 | Seq. ID No. 1849 | Seq. ID No. 1850 |
| 917 | Seq. ID No. 1851 | Seq. ID No. 1852 |
| 918c | Seq. ID No. 1855 | Seq. ID No. 1856 |
| 923 | Seq. ID No. 1859 | Seq. ID No. 1860 |
| 925b | Seq. ID No. 1863 | Seq. ID No. 1864 |
| 926 | Seq. ID No. 1865 | Seq. ID No. 1866 |
| 927 | Seq. ID No. 1867 | Seq. ID No. 1868 |
| 929b | Seq. ID No. 1871 | Seq. ID No. 1872 |
| 930 | Seq. ID No. 1873 | Seq. ID No. 1874 |
| 932 | Seq. ID No. 1877 | Seq. ID No. 1878 |
| 934d | Seq. ID No. 1885 | Seq. ID No. 1886 |
| 935 | Seq. ID No. 1887 | Seq. ID No. 1888 |
| 938 | Seq. ID No. 1889 | Seq. ID No. 1890 |
| 939c | Seq. ID No. 1895 | Seq. ID No. 1896 |
| 942 | Seq. ID No. 1897 | Seq. ID No. 1898 |
| 943 | Seq. ID No. 1899 | Seq. ID No. 1900 |
| 944b | Seq. ID No. 1903 | Seq. ID No. 1904 |
| 946 | Seq. ID No. 1905 | Seq. ID No. 1906 |
| 949d | Seq. ID No. 1913 | Seq. ID No. 1914 |
| 951b | Seq. ID No. 1919 | Seq. ID No. 1920 |
| 952b | Seq. ID No. 1923 | Seq. ID No. 1924 |
| 954 | Seq. ID No. 1925 | Seq. ID No. 1926 |
| 956 | Seq. ID No. 1931 | Seq. ID No. 1932 |
| 958b | Seq. ID No. 1935 | Seq. ID No. 1936 |
| 959 | Seq. ID No. 1937 | Seq. ID No. 1938 |
| 961c | Seq. ID No. 1943 | Seq. ID No. 1944 |
| 963 | Seq. ID No. 1945 | Seq. ID No. 1946 |
| 965b | Seq. ID No. 1949 | Seq. ID No. 1950 |
| 966b | Seq. ID No. 1953 | Seq. ID No. 1954 |
| 967b | Seq. ID No. 1957 | Seq. ID No. 1958 |
| 968 | Seq. ID No. 1959 | Seq. ID No. 1960 |
| 969 | Seq. ID No. 1961 | Seq. ID No. 1962 |
| 972b | Seq. ID No. 1965 | Seq. ID No. 1966 |
| 976 | Seq. ID No. 1967 | Seq. ID No. 1968 |
| 977b | Seq. ID No. 1971 | Seq. ID No. 1972 |
| 978b | Seq. ID No. 1975 | Seq. ID No. 1976 |
| 980 | Seq. ID No. 1979 | Seq. ID No. 1980 |
| 982 | Seq. ID No. 1983 | Seq. ID No. 1984 |
| 984b | Seq. ID No. 1987 | Seq. ID No. 1988 |
| 986 | Seq. ID No. 1989 | Seq. ID No. 1990 |
| 987 | Seq. ID No. 1991 | Seq. ID No. 1992 |
| 988d | Seq. ID No. 1999 | Seq. ID No. 2000 |
| 991 | Seq. ID No. 2001 | Seq. ID No. 2002 |
| 992 | Seq. ID No. 2003 | Seq. ID No. 2004 |
| 995 | Seq. ID No. 2009 | Seq. ID No. 2010 |
| 998b | Seq. ID No. 2015 | Seq. ID No. 2016 |
| 999b | Seq. ID No. 2019 | Seq. ID No. 2020 |
| 1000 | Seq. ID No. 2021 | Seq. ID No. 2022 |
| 1004b | Seq. ID No. 2031 | Seq. ID No. 2032 |
| 1006b | Seq. ID No. 2035 | Seq. ID No. 2036 |
| 1007 | Seq. ID No. 2037 | Seq. ID No. 2038 |
| 1013c | Seq. ID No. 2045 | Seq. ID No. 2046 |
| 1016c | Seq. ID No. 2047 | Seq. ID No. 2048 |
| 1017d | Seq. ID No. 2055 | Seq. ID No. 2056 |
| 1018b | Seq. ID No. 2059 | Seq. ID No. 2060 |
| 1021c | Seq. ID No. 2065 | Seq. ID No. 2066 |
| 1024 | Seq. ID No. 2067 | Seq. ID No. 2068 |
| 1025 | Seq. ID No. 2069 | Seq. ID No. 2070 |
| 1026 | Seq. ID No. 2071 | Seq. ID No. 2072 |
| 1029 | Seq. ID No. 2073 | Seq. ID No. 2074 |
| 1033c | Seq. ID No. 2079 | Seq. ID No. 2080 |
| 1036c | Seq. ID No. 2091 | Seq. ID No. 2092 |
| 1037 | Seq. ID No. 2093 | Seq. ID No. 2094 |
| 1039b | Seq. ID No. 2097 | Seq. ID No. 2098 |
| 1041 | Seq. ID No. 2099 | Seq. ID No. 2100 |
| 1042b | Seq. ID No. 2103 | Seq. ID No. 2104 |
| 1047b | Seq. ID No. 2115 | Seq. ID No. 2116 |
| 1049b | Seq. ID No. 2119 | Seq. ID No. 2120 |
| 1050d | Seq. ID No. 2127 | Seq. ID No. 2128 |
| 1057 | Seq. ID No. 2135 | Seq. ID No. 2136 |
| 1058 | Seq. ID No. 2137 | Seq. ID No. 2138 |
| 1060b | Seq. ID No. 2141 | Seq. ID No. 2142 |
| 1062 | Seq. ID No. 2143 | Seq. ID No. 2144 |
| 1064 | Seq. ID No. 2147 | Seq. ID No. 2148 |
| 1065c | Seq. ID No. 2153 | Seq. ID No. 2154 |
| 1067 | Seq. ID No. 2159 | Seq. ID No. 2160 |
| 1069 | Seq. ID No. 2161 | Seq. ID No. 2162 |
| 1070b | Seq. ID No. 2165 | Seq. ID No. 2166 |
| 1076b | Seq. ID No. 2169 | Seq. ID No. 2170 |
| 1077e | Seq. ID No. 2179 | Seq. ID No. 2180 |
| 1079b | Seq. ID No. 2183 | Seq. ID No. 2184 |
| 1080a | Seq. ID No. 2185 | Seq. ID No. 2186 |
| 1081b | Seq. ID No. 2189 | Seq. ID No. 2190 |
| 1082 | Seq. ID No. 2191 | Seq. ID No. 2192 |
| 1085 | Seq. ID No. 2193 | Seq. ID No. 2194 |
| 1086 | Seq. ID No. 2195 | Seq. ID No. 2196 |
| 1087b | Seq. ID No. 2199 | Seq. ID No. 2200 |
| 1094b | Seq. ID No. 2207 | Seq. ID No. 2208 |
| 1096c | Seq. ID No. 2217 | Seq. ID No. 2218 |
| 1097 | Seq. ID No. 2219 | Seq. ID No. 2220 |
| 1098b | Seq. ID No. 2221 | Seq. ID No. 2222 |
| 1100 | Seq. ID No. 2223 | Seq. ID No. 2224 |
| 1101b | Seq. ID No. 2227 | Seq. ID No. 2228 |
| 1104 | Seq. ID No. 2229 | Seq. ID No. 2230 |
| 1106 | Seq. ID No. 2231 | Seq. ID No. 2232 |
| 1108a | Seq. ID No. 2233 | Seq. ID No. 2234 |
| 1111c | Seq. ID No. 2241 | Seq. ID No. 2242 |
| 1125 | Seq. ID No. 2245 | Seq. ID No. 2246 |
| 1126c | Seq. ID No. 2251 | Seq. ID No. 2252 |
| 1127 | Seq. ID No. 2253 | Seq. ID No. 2254 |
| 1131 | Seq. ID No. 2257 | Seq. ID No. 2258 |
| 1132 | Seq. ID No. 2259 | Seq. ID No. 2260 |
| 1135b | Seq. ID No. 2263 | Seq. ID No. 2264 |
| 1136b | Seq. ID No. 2267 | Seq. ID No. 2268 |
| 1138 | Seq. ID No. 2269 | Seq. ID No. 2270 |
| 1140c | Seq. ID No. 2275 | Seq. ID No. 2276 |
| 1142 | Seq. ID No. 2281 | Seq. ID No. 2282 |
| 1144c | Seq. ID No. 2287 | Seq. ID No. 2288 |
| 1146e | Seq. ID No. 2297 | Seq. ID No. 2298 |
| 1148 | Seq. ID No. 2299 | Seq. ID No. 2300 |
| 1149 | Seq. ID No. 2301 | Seq. ID No. 2302 |
| 1152g | Seq. ID No. 2315 | Seq. ID No. 2316 |
| 1155g | Seq. ID No. 2329 | Seq. ID No. 2330 |
| 1158b | Seq. ID No. 2333 | Seq. ID No. 2334 |
| 1160 | Seq. ID No. 2335 | Seq. ID No. 2336 |
| 1161b | Seq. ID No. 2339 | Seq. ID No. 2340 |
| 1165 | Seq. ID No. 2343 | Seq. ID No. 2344 |
| 1166 | Seq. ID No. 2345 | Seq. ID No. 2346 |
| 1167b | Seq. ID No. 2349 | Seq. ID No. 2350 |
| 1168 | Seq. ID No. 2351 | Seq. ID No. 2352 |
| 1169c | Seq. ID No. 2357 | Seq. ID No. 2358 |
| 1170 | Seq. ID No. 2359 | Seq. ID No. 2360 |
| 1171c | Seq. ID No. 2363 | Seq. ID No. 2364 |
| 1172 | Seq. ID No. 2365 | Seq. ID No. 2366 |
| 1174 | Seq. ID No. 2369 | Seq. ID No. 2370 |
| 1177 | Seq. ID No. 2373 | Seq. ID No. 2374 |
| 1179c | Seq. ID No. 2381 | Seq. ID No. 2382 |
| 1180e | Seq. ID No. 2391 | Seq. ID No. 2392 |
| 1183b | Seq. ID No. 2399 | Seq. ID No. 2400 |
| 1184 | Seq. ID No. 2401 | Seq. ID No. 2402 |
| 1185b | Seq. ID No. 2405 | Seq. ID No. 2406 |
| 1186b | Seq. ID No. 2409 | Seq. ID No. 2410 |
| 1188c | Seq. ID No. 2415 | Seq. ID No. 2416 |
| 1191 | Seq. ID No. 2417 | Seq. ID No. 2418 |
| 1192b | Seq. ID No. 2421 | Seq. ID No. 2422 |
| 1194 | Seq. ID No. 2423 | Seq. ID No. 2424 |
| 1196b | Seq. ID No. 2427 | Seq. ID No. 2428 |
| 1197 | Seq. ID No. 2429 | Seq. ID No. 2430 |
| 1198 | Seq. ID No. 2431 | Seq. ID No. 2432 |
| 1199b | Seq. ID No. 2435 | Seq. ID No. 2436 |
| 1200 | Seq. ID No. 2437 | Seq. ID No. 2438 |
| 1201 | Seq. ID No. 2439 | Seq. ID No. 2440 |
| 1202b | Seq. ID No. 2443 | Seq. ID No. 2444 |
| 1205 | Seq. ID No. 2445 | Seq. ID No. 2446 |
| 1207 | Seq. ID No. 2449 | Seq. ID No. 2450 |
| 1208 | Seq. ID No. 2451 | Seq. ID No. 2452 |
| 1209 | Seq. ID No. 2453 | Seq. ID No. 2454 |
| 1210b | Seq. ID No. 2457 | Seq. ID No. 2458 |
| 1213b | Seq. ID No. 2463 | Seq. ID No. 2464 |
| 1214 | Seq. ID No. 2465 | Seq. ID No. 2466 |
| 1215b | Seq. ID No. 2469 | Seq. ID No. 2470 |
| 1217c | Seq. ID No. 2471 | Seq. ID No. 2472 |
| 1218b | Seq. ID No. 2475 | Seq. ID No. 2476 |
| 1219 | Seq. ID No. 2477 | Seq. ID No. 2478 |
| 1221b | Seq. ID No. 2483 | Seq. ID No. 2484 |
| 1223 | Seq. ID No. 2485 | Seq. ID No. 2486 |
| 1224c | Seq. ID No. 2491 | Seq. ID No. 2492 |
| 1226 | Seq. ID No. 2495 | Seq. ID No. 2496 |
| 1230 | Seq. ID No. 2505 | Seq. ID No. 2506 |
| 1231 | Seq. ID No. 2507 | Seq. ID No. 2508 |
| 1233c | Seq. ID No. 2513 | Seq. ID No. 2514 |
| 1234c | Seq. ID No. 2519 | Seq. ID No. 2520 |
| 1237 | Seq. ID No. 2525 | Seq. ID No. 2526 |
| 1240 | Seq. ID No. 2529 | Seq. ID No. 2530 |
| 1241c | Seq. ID No. 2535 | Seq. ID No. 2536 |
| 1243 | Seq. ID No. 2537 | Seq. ID No. 2538 |
| 1244 | Seq. ID No. 2539 | Seq. ID No. 2540 |
| 1245e | Seq. ID No. 2549 | Seq. ID No. 2550 |
| 1246b | Seq. ID No. 2553 | Seq. ID No. 2554 |
| 1250e | Seq. ID No. 2563 | Seq. ID No. 2564 |
| 1251b | Seq. ID No. 2567 | Seq. ID No. 2568 |
| 1253d | Seq. ID No. 2575 | Seq. ID No. 2576 |
| 1256 | Seq. ID No. 2577 | Seq. ID No. 2578 |
| 1257b | Seq. ID No. 2581 | Seq. ID No. 2582 |
| 1258d | Seq. ID No. 2589 | Seq. ID No. 2590 |
| 1263 | Seq. ID No. 2593 | Seq. ID No. 2594 |
| 1265 | Seq. ID No. 2595 | Seq. ID No. 2596 |
| 1266b | Seq. ID No. 2599 | Seq. ID No. 2600 |
| 1267b | Seq. ID No. 2603 | Seq. ID No. 2604 |
| 1268b | Seq. ID No. 2607 | Seq. ID No. 2608 |
| 1269 | Seq. ID No. 2609 | Seq. ID No. 2610 |
| 1271 | Seq. ID No. 2613 | Seq. ID No. 2614 |
| 1272b | Seq. ID No. 2617 | Seq. ID No. 2618 |
| 1273 | Seq. ID No. 2619 | Seq. ID No. 2620 |
| 1275b | Seq. ID No. 2623 | Seq. ID No. 2624 |
| 1277 | Seq. ID No. 2625 | Seq. ID No. 2626 |
| 1279 | Seq. ID No. 2631 | Seq. ID No. 2632 |
| 1281 | Seq. ID No. 2633 | Seq. ID No. 2634 |
| 1283c | Seq. ID No. 2639 | Seq. ID No. 2640 |
| 1284 | Seq. ID No. 2641 | Seq. ID No. 2642 |
| 1285b | Seq. ID No. 2645 | Seq. ID No. 2646 |
| 1287b | Seq. ID No. 2649 | Seq. ID No. 2650 |
| 1288 | Seq. ID No. 2651 | Seq. ID No. 2652 |
| 1290 | Seq. ID No. 2655 | Seq. ID No. 2656 |
| 1293b | Seq. ID No. 2659 | Seq. ID No. 2660 |
| 1295 | Seq. ID No. 2663 | Seq. ID No. 2664 |
| 1297b | Seq. ID No. 2667 | Seq. ID No. 2668 |
| 1300 | Seq. ID No. 2669 | Seq. ID No. 2670 |
| 1302 | Seq. ID No. 2671 | Seq. ID No. 2672 |
| 1305c | Seq. ID No. 2677 | Seq. ID No. 2678 |
| 1308e | Seq. ID No. 2687 | Seq. ID No. 2688 |
| 1311 | Seq. ID No. 2689 | Seq. ID No. 2690 |
| 1315 | Seq. ID No. 2693 | Seq. ID No. 2694 |
| 1318 | Seq. ID No. 2699 | Seq. ID No. 2700 |
| 1319b | Seq. ID No. 2703 | Seq. ID No. 2704 |
| 1320c | Seq. ID No. 2709 | Seq. ID No. 2710 |
| 1321 | Seq. ID No. 2711 | Seq. ID No. 2712 |
| 1322b | Seq. ID No. 2715 | Seq. ID No. 2716 |
| 1324 | Seq. ID No. 2719 | Seq. ID No. 2720 |
| 1326c | Seq. ID No. 2725 | Seq. ID No. 2726 |
| 1333 | Seq. ID No. 2727 | Seq. ID No. 2728 |
| 1337 | Seq. ID No. 2737 | Seq. ID No. 2738 |
| 1340b | Seq. ID No. 2743 | Seq. ID No. 2744 |
| 1341c | Seq. ID No. 2747 | Seq. ID No. 2748 |
| 1344b | Seq. ID No. 2751 | Seq. ID No. 2752 |
| 1348 | Seq. ID No. 2753 | Seq. ID No. 2754 |
| 1349c | Seq. ID No. 2759 | Seq. ID No. 2760 |
| 1350b | Seq. ID No. 2763 | Seq. ID No. 2764 |
| 1353 | Seq. ID No. 2765 | Seq. ID No. 2766 |
| 1355 | Seq. ID No. 2767 | Seq. ID No. 2768 |
| 1358b | Seq. ID No. 2771 | Seq. ID No. 2772 |
| 1359 | Seq. ID No. 2773 | Seq. ID No. 2774 |
| 1361 | Seq. ID No. 2775 | Seq. ID No. 2776 |
| 1364c | Seq. ID No. 2781 | Seq. ID No. 2782 |
| 1366b | Seq. ID No. 2787 | Seq. ID No. 2788 |
| 1367 | Seq. ID No. 2789 | Seq. ID No. 2790 |
| 1368 | Seq. ID No. 2791 | Seq. ID No. 2792 |
| 1371 | Seq. ID No. 2793 | Seq. ID No. 2794 |
| 1373b | Seq. ID No. 2797 | Seq. ID No. 2798 |
| 1374 | Seq. ID No. 2799 | Seq. ID No. 2800 |
| 1377 | Seq. ID No. 2803 | Seq. ID No. 2804 |
| 1378 | Seq. ID No. 2805 | Seq. ID No. 2806 |
| 1381a | Seq. ID No. 2811 | Seq. ID No. 2812 |
| 1382 | Seq. ID No. 2815 | Seq. ID No. 2816 |
| 1384c | Seq. ID No. 2823 | Seq. ID No. 2824 |
| 1386b | Seq. ID No. 2827 | Seq. ID No. 2828 |
| 1394 | Seq. ID No. 2843 | Seq. ID No. 2844 |
| 1396 | Seq. ID No. 2847 | Seq. ID No. 2848 |
| 1405 | Seq. ID No. 2863 | Seq. ID No. 2864 |
| 1408 | Seq. ID No. 2867 | Seq. ID No. 2868 |
| 1409 | Seq. ID No. 2869 | Seq. ID No. 2870 |
| 1410 | Seq. ID No. 2871 | Seq. ID No. 2872 |
| 1411c | Seq. ID No. 2877 | Seq. ID No. 2878 |
| 1412b | Seq. ID No. 2881 | Seq. ID No. 2882 |
| 1416 | Seq. ID No. 2891 | Seq. ID No. 2892 |
| 1420b | Seq. ID No. 2899 | Seq. ID No. 2900 |
| 1422 | Seq. ID No. 2901 | Seq. ID No. 2902 |
| 1423 | Seq. ID No. 2903 | Seq. ID No. 2904 |
| 1426b | Seq. ID No. 2907 | Seq. ID No. 2908 |
| 1427b | Seq. ID No. 2911 | Seq. ID No. 2912 |
| 1428 | Seq. ID No. 2913 | Seq. ID No. 2914 |
| 1429b | Seq. ID No. 2917 | Seq. ID No. 2918 |
| 1431 | Seq. ID No. 2919 | Seq. ID No. 2920 |
| 1432 | Seq. ID No. 2921 | Seq. ID No. 2922 |
| 1433 | Seq. ID No. 2923 | Seq. ID No. 2924 |
| 1434b | Seq. ID No. 2927 | Seq. ID No. 2928 |
| 1437c | Seq. ID No. 2933 | Seq. ID No. 2934 |
| 1439e | Seq. ID No. 2945 | Seq. ID No. 2946 |
| 1440d | Seq. ID No. 2953 | Seq. ID No. 2954 |
| 1442b | Seq. ID No. 2957 | Seq. ID No. 2958 |
| 1445c | Seq. ID No. 2963 | Seq. ID No. 2964 |
| 1447b | Seq. ID No. 2971 | Seq. ID No. 2972 |
| 1448 | Seq. ID No. 2973 | Seq. ID No. 2974 |
| 1449b | Seq. ID No. 2977 | Seq. ID No. 2978 |
| 1451 | Seq. ID No. 2979 | Seq. ID No. 2980 |
| 1452b | Seq. ID No. 2983 | Seq. ID No. 2984 |
| 1453 | Seq. ID No. 2985 | Seq. ID No. 2986 |
| 1455b | Seq. ID No. 2991 | Seq. ID No. 2992 |
| 1456 | Seq. ID No. 2993 | Seq. ID No. 2994 |
| 1457c | Seq. ID No. 2999 | Seq. ID No. 3000 |
| 1459 | Seq. ID No. 3001 | Seq. ID No. 3002 |
| 1462b | Seq. ID No. 3005 | Seq. ID No. 3006 |
| 1463c | Seq. ID No. 3011 | Seq. ID No. 3012 |
| 1466d | Seq. ID No. 3019 | Seq. ID No. 3020 |
| 1469c | Seq. ID No. 3027 | Seq. ID No. 3028 |
| 1470c | Seq. ID No. 3033 | Seq. ID No. 3034 |
| 1471 | Seq. ID No. 3035 | Seq. ID No. 3036 |
| 1472c | Seq. ID No. 3039 | Seq. ID No. 3040 |
| 1475 | Seq. ID No. 3043 | Seq. ID No. 3044 |
| 1476 | Seq. ID No. 3045 | Seq. ID No. 3046 |
| 1477b | Seq. ID No. 3049 | Seq. ID No. 3050 |
| 1479c | Seq. ID No. 3055 | Seq. ID No. 3056 |
| 1482b | Seq. ID No. 3059 | Seq. ID No. 3060 |
| 1483 | Seq. ID No. 3061 | Seq. ID No. 3062 |
| 1484c | Seq. ID No. 3067 | Seq. ID No. 3068 |
| 1486 | Seq. ID No. 3069 | Seq. ID No. 3070 |
| 1488e | Seq. ID No. 3081 | Seq. ID No. 3082 |
| 1490 | Seq. ID No. 3089 | Seq. ID No. 3090 |
| 1494 | Seq. ID No. 3091 | Seq. ID No. 3092 |
| 1497 | Seq. ID No. 3093 | Seq. ID No. 3094 |
| 1498b | Seq. ID No. 3097 | Seq. ID No. 3098 |
| 1499 | Seq. ID No. 3103 | Seq. ID No. 3104 |
| 1502b | Seq. ID No. 3107 | Seq. ID No. 3108 |
| 1503b | Seq. ID No. 3111 | Seq. ID No. 3112 |
| 1506c | Seq. ID No. 3117 | Seq. ID No. 3118 |
| 1508 | Seq. ID No. 3125 | Seq. ID No. 3126 |
| 1510d | Seq. ID No. 3133 | Seq. ID No. 3134 |
| 1511 | Seq. ID No. 3135 | Seq. ID No. 3136 |
| 1512 | Seq. ID No. 3137 | Seq. ID No. 3138 |
| 1513b | Seq. ID No. 3141 | Seq. ID No. 3142 |
| 1516 | Seq. ID No. 3143 | Seq. ID No. 3144 |
| 1517c | Seq. ID No. 3149 | Seq. ID No. 3150 |
| 1520 | Seq. ID No. 3155 | Seq. ID No. 3156 |
| 1522 | Seq. ID No. 3157 | Seq. ID No. 3158 |
| 1523 | Seq. ID No. 3159 | Seq. ID No. 3160 |
| 1528 | Seq. ID No. 3161 | Seq. ID No. 3162 |
| 1530b | Seq. ID No. 3165 | Seq. ID No. 3166 |
| 1534b | Seq. ID No. 3171 | Seq. ID No. 3172 |
| 1536b | Seq. ID No. 3177 | Seq. ID No. 3178 |
| 1537 | Seq. ID No. 3179 | Seq. ID No. 3180 |
| 1543 | Seq. ID No. 3183 | Seq. ID No. 3184 |
| 1544 | Seq. ID No. 3185 | Seq. ID No. 3186 |
| 1547b | Seq. ID No. 3189 | Seq. ID No. 3190 |
| 1548 | Seq. ID No. 3191 | Seq. ID No. 3192 |
| 1553b | Seq. ID No. 3197 | Seq. ID No. 3198 |
| 1554c | Seq. ID No. 3203 | Seq. ID No. 3204 |
| 1555 | Seq. ID No. 3205 | Seq. ID No. 3206 |
| 1556c | Seq. ID No. 3211 | Seq. ID No. 3212 |
| 1557c | Seq. ID No. 3217 | Seq. ID No. 3218 |
| 1559b | Seq. ID No. 3221 | Seq. ID No. 3222 |
| 1564b | Seq. ID No. 3227 | Seq. ID No. 3228 |
| 1565 | Seq. ID No. 3229 | Seq. ID No. 3230 |
| 1568b | Seq. ID No. 3233 | Seq. ID No. 3234 |
| 1569 | Seq. ID No. 3235 | Seq. ID No. 3236 |
| 1571 | Seq. ID No. 3239 | Seq. ID No. 3240 |
| 1572e | Seq. ID No. 3249 | Seq. ID No. 3250 |
| 1573 | Seq. ID No. 3251 | Seq. ID No. 3252 |
| 1576 | Seq. ID No. 3253 | Seq. ID No. 3254 |
| 1577b | Seq. ID No. 3257 | Seq. ID No. 3258 |
| 1578 | Seq. ID No. 3259 | Seq. ID No. 3260 |
| 1580b | Seq. ID No. 3263 | Seq. ID No. 3264 |
| 1581 | Seq. ID No. 3265 | Seq. ID No. 3266 |
| 1582c | Seq. ID No. 3271 | Seq. ID No. 3272 |
| 1584 | Seq. ID No. 3273 | Seq. ID No. 3274 |
| 1585b | Seq. ID No. 3277 | Seq. ID No. 3278 |
| 1587c | Seq. ID No. 3283 | Seq. ID No. 3284 |
| 1588 | Seq. ID No. 3285 | Seq. ID No. 3286 |
| 1590 | Seq. ID No. 3287 | Seq. ID No. 3288 |
| 1591 | Seq. ID No. 3289 | Seq. ID No. 3290 |
| 1592b | Seq. ID No. 3293 | Seq. ID No. 3294 |
| 1593 | Seq. ID No. 3295 | Seq. ID No. 3296 |
| 1594b | Seq. ID No. 3299 | Seq. ID No. 3300 |
| 1595b | Seq. ID No. 3303 | Seq. ID No. 3304 |
| 1598b | Seq. ID No. 3307 | Seq. ID No. 3308 |
| 1600c | Seq. ID No. 3313 | Seq. ID No. 3314 |
| 1602 | Seq. ID No. 3315 | Seq. ID No. 3316 |
| 1606b | Seq. ID No. 3319 | Seq. ID No. 3320 |
| 1607b | Seq. ID No. 3323 | Seq. ID No. 3324 |
| 1610b | Seq. ID No. 3329 | Seq. ID No. 3330 |
| 1616b | Seq. ID No. 3335 | Seq. ID No. 3336 |
| 1619 | Seq. ID No. 3337 | Seq. ID No. 3338 |
| 1623c | Seq. ID No. 3347 | Seq. ID No. 3348 |
| 1625c | Seq. ID No. 3355 | Seq. ID No. 3356 |
| 1626b | Seq. ID No. 3359 | Seq. ID No. 3360 |
| 1628b | Seq. ID No. 3363 | Seq. ID No. 3364 |
| 1632b | Seq. ID No. 3367 | Seq. ID No. 3368 |
| 1634c | Seq. ID No. 3377 | Seq. ID No. 3378 |
| 1639b | Seq. ID No. 3379 | Seq. ID No. 3380 |
| 1642b | Seq. ID No. 3383 | Seq. ID No. 3384 |
| 1643b | Seq. ID No. 3387 | Seq. ID No. 3388 |
| 1646f | Seq. ID No. 3399 | Seq. ID No. 3400 |
| 1647 | Seq. ID No. 3401 | Seq. ID No. 3402 |
| 1648b | Seq. ID No. 3403 | Seq. ID No. 3404 |
| 1649c | Seq. ID No. 3409 | Seq. ID No. 3410 |
| 1652b | Seq. ID No. 3413 | Seq. ID No. 3414 |
| 1654 | Seq. ID No. 3415 | Seq. ID No. 3416 |
| 1656b | Seq. ID No. 3417 | Seq. ID No. 3418 |
| 1659c | Seq. ID No. 3425 | Seq. ID No. 3426 |
| 1660b | Seq. ID No. 3427 | Seq. ID No. 3428 |
| 1662b | Seq. ID No. 3431 | Seq. ID No. 3432 |
| 1664 | Seq. ID No. 3435 | Seq. ID No. 3436 |
| 1665a | Seq. ID No. 3437 | Seq. ID No. 3438 |
| 1668 | Seq. ID No. 3439 | Seq. ID No. 3440 |
| 1670c | Seq. ID No. 3447 | Seq. ID No. 3448 |
| 1673f | Seq. ID No. 3459 | Seq. ID No. 3460 |
| 1674 | Seq. ID No. 3461 | Seq. ID No. 3462 |
| 1675c | Seq. ID No. 3467 | Seq. ID No. 3468 |
| 1676 | Seq. ID No. 3469 | Seq. ID No. 3470 |
| 1677 | Seq. ID No. 3471 | Seq. ID No. 3472 |
| 1679 | Seq. ID No. 3473 | Seq. ID No. 3474 |
| 1680 | Seq. ID No. 3475 | Seq. ID No. 3476 |
| 1682b | Seq. ID No. 3479 | Seq. ID No. 3480 |
| 1683b | Seq. ID No. 3483 | Seq. ID No. 3484 |
| 1684 | Seq. ID No. 3485 | Seq. ID No. 3486 |
| 1685 | Seq. ID No. 3487 | Seq. ID No. 3488 |
| 1688c | Seq. ID No. 3495 | Seq. ID No. 3496 |
| 1689c | Seq. ID No. 3501 | Seq. ID No. 3502 |
| 1690b | Seq. ID No. 3505 | Seq. ID No. 3506 |
| 1691 | Seq. ID No. 3507 | Seq. ID No. 3508 |
| 1692 | Seq. ID No. 3509 | Seq. ID No. 3510 |
| 1693 | Seq. ID No. 3511 | Seq. ID No. 3512 |
| 1694d | Seq. ID No. 3519 | Seq. ID No. 3520 |
| 1696 | Seq. ID No. 3521 | Seq. ID No. 3522 |
| 1697b | Seq. ID No. 3525 | Seq. ID No. 3526 |
| 1699b | Seq. ID No. 3529 | Seq. ID No. 3530 |
| 1700b | Seq. ID No. 3533 | Seq. ID No. 3534 |
| 1701b | Seq. ID No. 3537 | Seq. ID No. 3538 |
| 1704b | Seq. ID No. 3543 | Seq. ID No. 3544 |
| 1706 | Seq. ID No. 3549 | Seq. ID No. 3550 |
| 1707b | Seq. ID No. 3553 | Seq. ID No. 3554 |
| 1710b | Seq. ID No. 3561 | Seq. ID No. 3562 |
| 1712b | Seq. ID No. 3565 | Seq. ID No. 3566 |
| 1715b | Seq. ID No. 3569 | Seq. ID No. 3570 |
| 1722 | Seq. ID No. 3575 | Seq. ID No. 3576 |
| 1723b | Seq. ID No. 3579 | Seq. ID No. 3580 |
| 1727 | Seq. ID No. 3583 | Seq. ID No. 3584 |
| 1728 | Seq. ID No. 3585 | Seq. ID No. 3586 |
| 1733 | Seq. ID No. 3589 | Seq. ID No. 3590 |
| 1737b | Seq. ID No. 3599 | Seq. ID No. 3600 |
| 1738c | Seq. ID No. 3605 | Seq. ID No. 3606 |
| 1739 | Seq. ID No. 3607 | Seq. ID No. 3608 |
| 1741 | Seq. ID No. 3609 | Seq. ID No. 3610 |
| 1743 | Seq. ID No. 3611 | Seq. ID No. 3612 |
| 1744b | Seq. ID No. 3615 | Seq. ID No. 3616 |
| 1747 | Seq. ID No. 3619 | Seq. ID No. 3620 |
| 1752b | Seq. ID No. 3629 | Seq. ID No. 3630 |
| 1756b | Seq. ID No. 3635 | Seq. ID No. 3636 |
| 1757b | Seq. ID No. 3639 | Seq. ID No. 3640 |
| 1759 | Seq. ID No. 3641 | Seq. ID No. 3642 |
| 1760 | Seq. ID No. 3643 | Seq. ID No. 3644 |
| 1762 | Seq. ID No. 3645 | Seq. ID No. 3646 |
| 1764c | Seq. ID No. 3651 | Seq. ID No. 3652 |
| 1765 | Seq. ID No. 3653 | Seq. ID No. 3654 |
| 1767b | Seq. ID No. 3659 | Seq. ID No. 3660 |
| 1769b | Seq. ID No. 3663 | Seq. ID No. 3664 |
| 1771 | Seq. ID No. 3665 | Seq. ID No. 3666 |
| 1773 | Seq. ID No. 3667 | Seq. ID No. 3668 |
| 1774 | Seq. ID No. 3669 | Seq. ID No. 3670 |
| 1775c | Seq. ID No. 3675 | Seq. ID No. 3676 |
| 1780 | Seq. ID No. 3681 | Seq. ID No. 3682 |
| 1784b | Seq. ID No. 3689 | Seq. ID No. 3690 |
| 1788c | Seq. ID No. 3695 | Seq. ID No. 3696 |
| 1789b | Seq. ID No. 3699 | Seq. ID No. 3700 |
| 1792c | Seq. ID No. 3709 | Seq. ID No. 3710 |
| 1793c | Seq. ID No. 3715 | Seq. ID No. 3716 |
| 1797b | Seq. ID No. 3721 | Seq. ID No. 3722 |
| 1798c | Seq. ID No. 3727 | Seq. ID No. 3728 |
| 1800 | Seq. ID No. 3729 | Seq. ID No. 3730 |
| 1802b | Seq. ID No. 3733 | Seq. ID No. 3734 |
| 1803 | Seq. ID No. 3735 | Seq. ID No. 3736 |
| 1804b | Seq. ID No. 3739 | Seq. ID No. 3740 |
| 1805 | Seq. ID No. 3741 | Seq. ID No. 3742 |
| 1806c | Seq. ID No. 3747 | Seq. ID No. 3748 |
| 1807b | Seq. ID No. 3751 | Seq. ID No. 3752 |
| 1808d | Seq. ID No. 3759 | Seq. ID No. 3760 |
| 1809f | Seq. ID No. 3771 | Seq. ID No. 3772 |
| 1810b | Seq. ID No. 3775 | Seq. ID No. 3776 |
| 1811b | Seq. ID No. 3779 | Seq. ID No. 3780 |
| 1812b | Seq. ID No. 3783 | Seq. ID No. 3784 |
| 1815c | Seq. ID No. 3791 | Seq. ID No. 3792 |
| 1816c | Seq. ID No. 3797 | Seq. ID No. 3798 |
| 1819b | Seq. ID No. 3803 | Seq. ID No. 3804 |
| 1821 | Seq. ID No. 3805 | Seq. ID No. 3806 |
| 1823b | Seq. ID No. 3811 | Seq. ID No. 3812 |
| 1825 | Seq. ID No. 3813 | Seq. ID No. 3814 |
| 1828 | Seq. ID No. 3819 | Seq. ID No. 3820 |
| 1830b | Seq. ID No. 3823 | Seq. ID No. 3824 |
| 1833 | Seq. ID No. 3825 | Seq. ID No. 3826 |
| 1836b | Seq. ID No. 3833 | Seq. ID No. 3834 |
| 1837 | Seq. ID No. 3835 | Seq. ID No. 3836 |
| 1838d | Seq. ID No. 3843 | Seq. ID No. 3844 |
| 1839b | Seq. ID No. 3847 | Seq. ID No. 3848 |
| 1842d | Seq. ID No. 3855 | Seq. ID No. 3856 |
| 1843 | Seq. ID No. 3857 | Seq. ID No. 3858 |
| 1845c | Seq. ID No. 3863 | Seq. ID No. 3864 |
| 1848b | Seq. ID No. 3867 | Seq. ID No. 3868 |
| 1850c | Seq. ID No. 3873 | Seq. ID No. 3874 |
| 1853b | Seq. ID No. 3877 | Seq. ID No. 3878 |
| 1854b | Seq. ID No. 3881 | Seq. ID No. 3882 |
| 1855 | Seq. ID No. 3883 | Seq. ID No. 3884 |
| 1856 | Seq. ID No. 3885 | Seq. ID No. 3886 |
| 1857d | Seq. ID No. 3893 | Seq. ID No. 3894 |
| 1859 | Seq. ID No. 3897 | Seq. ID No. 3898 |
| 1861b | Seq. ID No. 3901 | Seq. ID No. 3902 |
| 1863b | Seq. ID No. 3907 | Seq. ID No. 3908 |
| 1865b | Seq. ID No. 3913 | Seq. ID No. 3914 |
| 1868 | Seq. ID No. 3915 | Seq. ID No. 3916 |
| 1869 | Seq. ID No. 3917 | Seq. ID No. 3918 |
| 1870 | Seq. ID No. 3919 | Seq. ID No. 3920 |
| 1873c | Seq. ID No. 3925 | Seq. ID No. 3926 |
| 1875c | Seq. ID No. 3929 | Seq. ID No. 3930 |
| 1877b | Seq. ID No. 3933 | Seq. ID No. 3934 |
| 1878 | Seq. ID No. 3935 | Seq. ID No. 3936 |
| 1879 | Seq. ID No. 3937 | Seq. ID No. 3938 |
| 1884 | Seq. ID No. 3941 | Seq. ID No. 3942 |
| 1886 | Seq. ID No. 3943 | Seq. ID No. 3944 |
| 1887 | Seq. ID No. 3945 | Seq. ID No. 3946 |
| 1888b | Seq. ID No. 3949 | Seq. ID No. 3950 |
| 1890 | Seq. ID No. 3951 | Seq. ID No. 3952 |
| 1891b | Seq. ID No. 3955 | Seq. ID No. 3956 |
| 1893 | Seq. ID No. 3957 | Seq. ID No. 3958 |
| 1897c | Seq. ID No. 3971 | Seq. ID No. 3972 |
| 1898b | Seq. ID No. 3975 | Seq. ID No. 3976 |
| 1902b | Seq. ID No. 3983 | Seq. ID No. 3984 |
| 1907 | Seq. ID No. 3985 | Seq. ID No. 3986 |
| 1912 | Seq. ID No. 3987 | Seq. ID No. 3988 |
| 1915b | Seq. ID No. 3991 | Seq. ID No. 3992 |
| 1918d | Seq. ID No. 4003 | Seq. ID No. 4004 |
| 1919c | Seq. ID No. 4009 | Seq. ID No. 4010 |
| 1923b | Seq. ID No. 4013 | Seq. ID No. 4014 |
| 1925 | Seq. ID No. 4015 | Seq. ID No. 4016 |
| 1926 | Seq. ID No. 4017 | Seq. ID No. 4018 |
| 1927b | Seq. ID No. 4021 | Seq. ID No. 4022 |
| 1930 | Seq. ID No. 4023 | Seq. ID No. 4024 |
| 1931c | Seq. ID No. 4029 | Seq. ID No. 4030 |
| 1932 | Seq. ID No. 4031 | Seq. ID No. 4032 |
| 1933b | Seq. ID No. 4035 | Seq. ID No. 4036 |
| 1934 | Seq. ID No. 4037 | Seq. ID No. 4038 |
| 1936 | Seq. ID No. 4039 | Seq. ID No. 4040 |
| 1937e | Seq. ID No. 4049 | Seq. ID No. 4050 |
| 1939c | Seq. ID No. 4055 | Seq. ID No. 4056 |
| 1940 | Seq. ID No. 4057 | Seq. ID No. 4058 |
| 1941b | Seq. ID No. 4061 | Seq. ID No. 4062 |
| 1942 | Seq. ID No. 4063 | Seq. ID No. 4064 |
| 1943b | Seq. ID No. 4067 | Seq. ID No. 4068 |
| 1944 | Seq. ID No. 4069 | Seq. ID No. 4070 |
| 1946c | Seq. ID No. 4075 | Seq. ID No. 4076 |
| 1949 | Seq. ID No. 4077 | Seq. ID No. 4078 |
| 1950 | Seq. ID No. 4079 | Seq. ID No. 4080 |
| 1951d | Seq. ID No. 4087 | Seq. ID No. 4088 |
| 1953 | Seq. ID No. 4089 | Seq. ID No. 4090 |
| 1954c | Seq. ID No. 4095 | Seq. ID No. 4096 |
| 1956 | Seq. ID No. 4097 | Seq. ID No. 4098 |
| 1957 | Seq. ID No. 4099 | Seq. ID No. 4100 |
| 1958c | Seq. ID No. 4105 | Seq. ID No. 4106 |
| 1960c | Seq. ID No. 4111 | Seq. ID No. 4112 |
| 1962b | Seq. ID No. 4117 | Seq. ID No. 4118 |
| 1965b | Seq. ID No. 4121 | Seq. ID No. 4122 |
| 1966 | Seq. ID No. 4123 | Seq. ID No. 4124 |
| 1968 | Seq. ID No. 4127 | Seq. ID No. 4128 |
| 1969 | Seq. ID No. 4129 | Seq. ID No. 4130 |
| 1970b | Seq. ID No. 4133 | Seq. ID No. 4134 |
| 1973 | Seq. ID No. 4137 | Seq. ID No. 4138 |
| 1977c | Seq. ID No. 4145 | Seq. ID No. 4146 |
| 1979b | Seq. ID No. 4149 | Seq. ID No. 4150 |
| 1982 | Seq. ID No. 4157 | Seq. ID No. 4158 |
| 1985b | Seq. ID No. 4161 | Seq. ID No. 4162 |
| 1986 | Seq. ID No. 4163 | Seq. ID No. 4164 |
| 1987b | Seq. ID No. 4167 | Seq. ID No. 4168 |
| 1989c | Seq. ID No. 4173 | Seq. ID No. 4174 |
| 1990c | Seq. ID No. 4179 | Seq. ID No. 4180 |
| 1992b | Seq. ID No. 4185 | Seq. ID No. 4186 |
| 1993c | Seq. ID No. 4191 | Seq. ID No. 4192 |
| 1996 | Seq. ID No. 4193 | Seq. ID No. 4194 |
| 2000 | Seq. ID No. 4195 | Seq. ID No. 4196 |
| 2001 | Seq. ID No. 4197 | Seq. ID No. 4198 |
| 2003 | Seq. ID No. 4199 | Seq. ID No. 4200 |
| 2006 | Seq. ID No. 4201 | Seq. ID No. 4202 |
| 2008 | Seq. ID No. 4203 | Seq. ID No. 4204 |
| 2010 | Seq. ID No. 4205 | Seq. ID No. 4206 |
| 2011c | Seq. ID No. 4211 | Seq. ID No. 4212 |
| 2013b | Seq. ID No. 4215 | Seq. ID No. 4216 |
| 2014c | Seq. ID No. 4217 | Seq. ID No. 4218 |
| 2015 | Seq. ID No. 4219 | Seq. ID No. 4220 |
| 2016h | Seq. ID No. 4235 | Seq. ID No. 4236 |
| 2020 | Seq. ID No. 4237 | Seq. ID No. 4238 |
| 2021 | Seq. ID No. 4239 | Seq. ID No. 4240 |
| 2023b | Seq. ID No. 4243 | Seq. ID No. 4244 |
| 2024d | Seq. ID No. 4251 | Seq. ID No. 4252 |
| 2027 | Seq. ID No. 4255 | Seq. ID No. 4256 |
| 2030d | Seq. ID No. 4263 | Seq. ID No. 4264 |
| 2033 | Seq. ID No. 4267 | Seq. ID No. 4268 |
| 2036 | Seq. ID No. 4271 | Seq. ID No. 4272 |
| 2037 | Seq. ID No. 4273 | Seq. ID No. 4274 |
| 2042 | Seq. ID No. 4279 | Seq. ID No. 4280 |
| 2043b | Seq. ID No. 4281 | Seq. ID No. 4282 |
| 2044 | Seq. ID No. 4283 | Seq. ID No. 4284 |
| 2046b | Seq. ID No. 4291 | Seq. ID No. 4292 |
| 2047b | Seq. ID No. 4295 | Seq. ID No. 4296 |
| 2050 | Seq. ID No. 4299 | Seq. ID No. 4300 |
| 2053 | Seq. ID No. 4301 | Seq. ID No. 4302 |
| 2054 | Seq. ID No. 4303 | Seq. ID No. 4304 |
| 2056 | Seq. ID No. 4307 | Seq. ID No. 4308 |
| 2057 | Seq. ID No. 4309 | Seq. ID No. 4310 |
| 2059b | Seq. ID No. 4313 | Seq. ID No. 4314 |
| 2060b | Seq. ID No. 4317 | Seq. ID No. 4318 |
| 2062c | Seq. ID No. 4323 | Seq. ID No. 4324 |
| 2064 | Seq. ID No. 4325 | Seq. ID No. 4326 |
| 2065b | Seq. ID No. 4329 | Seq. ID No. 4330 |
| 2066 | Seq. ID No. 4331 | Seq. ID No. 4332 |
| 2068 | Seq. ID No. 4333 | Seq. ID No. 4334 |
| 2069c | Seq. ID No. 4339 | Seq. ID No. 4340 |
| 2074b | Seq. ID No. 4343 | Seq. ID No. 4344 |
| 2075b | Seq. ID No. 4347 | Seq. ID No. 4348 |
| 2076c | Seq. ID No. 4353 | Seq. ID No. 4354 |
| 2078 | Seq. ID No. 4355 | Seq. ID No. 4356 |
| 2079a | Seq. ID No. 4357 | Seq. ID No. 4358 |
| 2081b | Seq. ID No. 4365 | Seq. ID No. 4366 |
| 2086b | Seq. ID No. 4369 | Seq. ID No. 4370 |
| 2087b | Seq. ID No. 4373 | Seq. ID No. 4374 |
| 2088 | Seq. ID No. 4375 | Seq. ID No. 4376 |
| 2091 | Seq. ID No. 4377 | Seq. ID No. 4378 |
| 2092 | Seq. ID No. 4379 | Seq. ID No. 4380 |
| 2093a | Seq. ID No. 4381 | Seq. ID No. 4382 |
| 2094 | Seq. ID No. 4383 | Seq. ID No. 4384 |
| 2096d | Seq. ID No. 4391 | Seq. ID No. 4392 |
| 2097 | Seq. ID No. 4393 | Seq. ID No. 4394 |
| 2100 | Seq. ID No. 4397 | Seq. ID No. 4398 |
| 2104 | Seq. ID No. 4401 | Seq. ID No. 4402 |
| 2109b | Seq. ID No. 4411 | Seq. ID No. 4412 |
| 2110c | Seq. ID No. 4417 | Seq. ID No. 4418 |
| 2112c | Seq. ID No. 4423 | Seq. ID No. 4424 |
| 2115c | Seq. ID No. 4431 | Seq. ID No. 4432 |
| 2116 | Seq. ID No. 4433 | Seq. ID No. 4434 |
| 2117 | Seq. ID No. 4435 | Seq. ID No. 4436 |
| 2123 | Seq. ID No. 4443 | Seq. ID No. 4444 |
| 2124b | Seq. ID No. 4447 | Seq. ID No. 4448 |
| 2125b | Seq. ID No. 4451 | Seq. ID No. 4452 |
| 2128b | Seq. ID No. 4459 | Seq. ID No. 4460 |
| 2133 | Seq. ID No. 4461 | Seq. ID No. 4462 |
| 2138c | Seq. ID No. 4467 | Seq. ID No. 4468 |
| 2140b | Seq. ID No. 4471 | Seq. ID No. 4472 |
| 2142b | Seq. ID No. 4475 | Seq. ID No. 4476 |
| 2144b | Seq. ID No. 4479 | Seq. ID No. 4480 |
| 2146 | Seq. ID No. 4481 | Seq. ID No. 4482 |
| 2147c | Seq. ID No. 4487 | Seq. ID No. 4488 |
| 2149b | Seq. ID No. 4491 | Seq. ID No. 4492 |
| 2153 | Seq. ID No. 4501 | Seq. ID No. 4502 |
| 2155b | Seq. ID No. 4505 | Seq. ID No. 4506 |
| 2156c | Seq. ID No. 4511 | Seq. ID No. 4512 |
| 2160d | Seq. ID No. 4523 | Seq. ID No. 4524 |
| 2164 | Seq. ID No. 4531 | Seq. ID No. 4532 |
| 2165 | Seq. ID No. 4533 | Seq. ID No. 4534 |
| 2166b | Seq. ID No. 4537 | Seq. ID No. 4538 |
| 2169 | Seq. ID No. 4539 | Seq. ID No. 4540 |
| 2171 | Seq. ID No. 4541 | Seq. ID No. 4542 |
| 2172 | Seq. ID No. 4543 | Seq. ID No. 4544 |
| 2173b | Seq. ID No. 4547 | Seq. ID No. 4548 |
| 2174 | Seq. ID No. 4549 | Seq. ID No. 4550 |
| 2176d | Seq. ID No. 4559 | Seq. ID No. 4560 |
| 2179b | Seq. ID No. 4565 | Seq. ID No. 4566 |
| 2180 | Seq. ID No. 4567 | Seq. ID No. 4568 |
| 2181b | Seq. ID No. 4571 | Seq. ID No. 4572 |
| 2183 | Seq. ID No. 4575 | Seq. ID No. 4576 |
| 2185 | Seq. ID No. 4577 | Seq. ID No. 4578 |
| 2186b | Seq. ID No. 4581 | Seq. ID No. 4582 |
| 2189b | Seq. ID No. 4585 | Seq. ID No. 4586 |
| 2193 | Seq. ID No. 4591 | Seq. ID No. 4592 |
| 2194c | Seq. ID No. 4595 | Seq. ID No. 4596 |
| 2196 | Seq. ID No. 4597 | Seq. ID No. 4598 |
| 2197c | Seq. ID No. 4603 | Seq. ID No. 4604 |
| 2201b | Seq. ID No. 4607 | Seq. ID No. 4608 |
| 2203 | Seq. ID No. 4609 | Seq. ID No. 4610 |
| 2204 | Seq. ID No. 4611 | Seq. ID No. 4612 |
| 2206b | Seq. ID No. 4615 | Seq. ID No. 4616 |
| 2209 | Seq. ID No. 4623 | Seq. ID No. 4624 |
| 2212b | Seq. ID No. 4627 | Seq. ID No. 4628 |
| 2215b | Seq. ID No. 4631 | Seq. ID No. 4632 |
| 2216b | Seq. ID No. 4635 | Seq. ID No. 4636 |
| 2218 | Seq. ID No. 4637 | Seq. ID No. 4638 |
| 2219c | Seq. ID No. 4643 | Seq. ID No. 4644 |
| 2220c | Seq. ID No. 4649 | Seq. ID No. 4650 |
| 2221 | Seq. ID No. 4651 | Seq. ID No. 4652 |
| 2222 | Seq. ID No. 4653 | Seq. ID No. 4654 |
| 2223b | Seq. ID No. 4657 | Seq. ID No. 4658 |
| 2226 | Seq. ID No. 4661 | Seq. ID No. 4662 |
| 2227 | Seq. ID No. 4663 | Seq. ID No. 4664 |
| 2228c | Seq. ID No. 4669 | Seq. ID No. 4670 |
| 2231 | Seq. ID No. 4671 | Seq. ID No. 4672 |
| 2232 | Seq. ID No. 4673 | Seq. ID No. 4674 |
| 2234c | Seq. ID No. 4679 | Seq. ID No. 4680 |
| 2238 | Seq. ID No. 4685 | Seq. ID No. 4686 |
| 2240c | Seq. ID No. 4693 | Seq. ID No. 4694 |
| 2244 | Seq. ID No. 4697 | Seq. ID No. 4698 |
| 2248 | Seq. ID No. 4703 | Seq. ID No. 4704 |
| 2249 | Seq. ID No. 4705 | Seq. ID No. 4706 |
| 2253d | Seq. ID No. 4713 | Seq. ID No. 4714 |
| 2255b | Seq. ID No. 4717 | Seq. ID No. 4718 |
| 2256 | Seq. ID No. 4719 | Seq. ID No. 4720 |
| 2259b | Seq. ID No. 4725 | Seq. ID No. 4726 |
| 2260c | Seq. ID No. 4729 | Seq. ID No. 4730 |
| 2262 | Seq. ID No. 4731 | Seq. ID No. 4732 |
| 2263 | Seq. ID No. 4733 | Seq. ID No. 4734 |
| 2267 | Seq. ID No. 4739 | Seq. ID No. 4740 |
| 2269 | Seq. ID No. 4743 | Seq. ID No. 4744 |
| 2270 | Seq. ID No. 4745 | Seq. ID No. 4746 |
| 2272 | Seq. ID No. 4747 | Seq. ID No. 4748 |
| 2273 | Seq. ID No. 4749 | Seq. ID No. 4750 |
| 2274 | Seq. ID No. 4751 | Seq. ID No. 4752 |
| 2275c | Seq. ID No. 4757 | Seq. ID No. 4758 |
| 2276d | Seq. ID No. 4765 | Seq. ID No. 4766 |
| 2277b | Seq. ID No. 4769 | Seq. ID No. 4770 |
| 2278d | Seq. ID No. 4777 | Seq. ID No. 4778 |
| 2280 | Seq. ID No. 4779 | Seq. ID No. 4780 |
| 2284 | Seq. ID No. 4781 | Seq. ID No. 4782 |
| 2286b | Seq. ID No. 4787 | Seq. ID No. 4788 |
| 2288 | Seq. ID No. 4789 | Seq. ID No. 4790 |
| 2290 | Seq. ID No. 4791 | Seq. ID No. 4792 |
| 2291c | Seq. ID No. 4797 | Seq. ID No. 4798 |
| 2292c | Seq. ID No. 4803 | Seq. ID No. 4804 |
| 2297 | Seq. ID No. 4807 | Seq. ID No. 4808 |
| 2298 | Seq. ID No. 4809 | Seq. ID No. 4810 |
| 2299 | Seq. ID No. 4811 | Seq. ID No. 4812 |
| 2300 | Seq. ID No. 4813 | Seq. ID No. 4814 |
| 2301 | Seq. ID No. 4815 | Seq. ID No. 4816 |
| 2304 | Seq. ID No. 4821 | Seq. ID No. 4822 |
| 2306c | Seq. ID No. 4823 | Seq. ID No. 4824 |
| 2307 | Seq. ID No. 4825 | Seq. ID No. 4826 |
| 2308 | Seq. ID No. 4827 | Seq. ID No. 4828 |
| 2309c | Seq. ID No. 4833 | Seq. ID No. 4834 |
| 2310 | Seq. ID No. 4835 | Seq. ID No. 4836 |
| 2311 | Seq. ID No. 4837 | Seq. ID No. 4838 |
| 2312c | Seq. ID No. 4843 | Seq. ID No. 4844 |
| 2314 | Seq. ID No. 4845 | Seq. ID No. 4846 |
| 2315 | Seq. ID No. 4847 | Seq. ID No. 4848 |
| 2316 | Seq. ID No. 4849 | Seq. ID No. 4850 |
| 2321c | Seq. ID No. 4859 | Seq. ID No. 4860 |
| 2322 | Seq. ID No. 4861 | Seq. ID No. 4862 |
| 2327 | Seq. ID No. 4865 | Seq. ID No. 4866 |
| 2328 | Seq. ID No. 4867 | Seq. ID No. 4868 |
| 2329d | Seq. ID No. 4875 | Seq. ID No. 4876 |
| 2330 | Seq. ID No. 4877 | Seq. ID No. 4878 |
| 2331 | Seq. ID No. 4879 | Seq. ID No. 4880 |
| 2333 | Seq. ID No. 4881 | Seq. ID No. 4882 |
| 2335 | Seq. ID No. 4883 | Seq. ID No. 4884 |
| 2336 | Seq. ID No. 4885 | Seq. ID No. 4886 |
| 2337b | Seq. ID No. 4887 | Seq. ID No. 4888 |
| 2338c | Seq. ID No. 4893 | Seq. ID No. 4894 |
| 2342c | Seq. ID No. 4899 | Seq. ID No. 4900 |
| 2344 | Seq. ID No. 4901 | Seq. ID No. 4902 |
| 2345 | Seq. ID No. 4903 | Seq. ID No. 4904 |
| 2347 | Seq. ID No. 4905 | Seq. ID No. 4906 |
| 2348 | Seq. ID No. 4907 | Seq. ID No. 4908 |
| 2349b | Seq. ID No. 4911 | Seq. ID No. 4912 |
| 2353 | Seq. ID No. 4915 | Seq. ID No. 4916 |
| 2354 | Seq. ID No. 4917 | Seq. ID No. 4918 |
| 2357 | Seq. ID No. 4919 | Seq. ID No. 4920 |
| 2358 | Seq. ID No. 4921 | Seq. ID No. 4922 |
| 2361b | Seq. ID No. 4927 | Seq. ID No. 4928 |
| 2363b | Seq. ID No. 4931 | Seq. ID No. 4932 |
| 2365b | Seq. ID No. 4935 | Seq. ID No. 4936 |
| 2366b | Seq. ID No. 4939 | Seq. ID No. 4940 |
| 2367 | Seq. ID No. 4941 | Seq. ID No. 4942 |
| 2368 | Seq. ID No. 4943 | Seq. ID No. 4944 |
| 2369 | Seq. ID No. 4945 | Seq. ID No. 4946 |
| 2370 | Seq. ID No. 4947 | Seq. ID No. 4948 |
| 2373 | Seq. ID No. 4953 | Seq. ID No. 4954 |
| 2374b | Seq. ID No. 4957 | Seq. ID No. 4958 |
| 2376 | Seq. ID No. 4959 | Seq. ID No. 4960 |
| 2377b | Seq. ID No. 4963 | Seq. ID No. 4964 |
| 2378 | Seq. ID No. 4965 | Seq. ID No. 4966 |
| 2379b | Seq. ID No. 4969 | Seq. ID No. 4970 |
| 2380 | Seq. ID No. 4971 | Seq. ID No. 4972 |
| 2381 | Seq. ID No. 4973 | Seq. ID No. 4974 |
| 2384b | Seq. ID No. 4979 | Seq. ID No. 4980 |
| 2387 | Seq. ID No. 4985 | Seq. ID No. 4986 |
| 2391 | Seq. ID No. 4989 | Seq. ID No. 4990 |
| 2392 | Seq. ID No. 4991 | Seq. ID No. 4992 |
| 2395 | Seq. ID No. 4995 | Seq. ID No. 4996 |
| 2396 | Seq. ID No. 4997 | Seq. ID No. 4998 |
| 2398 | Seq. ID No. 5001 | Seq. ID No. 5002 |
| 2399c | Seq. ID No. 5007 | Seq. ID No. 5008 |
| 2401 | Seq. ID No. 5009 | Seq. ID No. 5010 |
| 2403b | Seq. ID No. 5017 | Seq. ID No. 5018 |
| 2404b | Seq. ID No. 5021 | Seq. ID No. 5022 |
| 2409b | Seq. ID No. 5027 | Seq. ID No. 5028 |
| 2410 | Seq. ID No. 5029 | Seq. ID No. 5030 |
| 2415b | Seq. ID No. 5039 | Seq. ID No. 5040 |
| 2417b | Seq. ID No. 5047 | Seq. ID No. 5048 |
| 2418b | Seq. ID No. 5051 | Seq. ID No. 5052 |
| 2420 | Seq. ID No. 5053 | Seq. ID No. 5054 |
| 2421 | Seq. ID No. 5055 | Seq. ID No. 5056 |
| 2422c | Seq. ID No. 5059 | Seq. ID No. 5060 |
| 2423a | Seq. ID No. 5061 | Seq. ID No. 5062 |
| 2424c | Seq. ID No. 5069 | Seq. ID No. 5070 |
| 2428c | Seq. ID No. 5077 | Seq. ID No. 5078 |
| 2429 | Seq. ID No. 5079 | Seq. ID No. 5080 |
| 2432 | Seq. ID No. 5081 | Seq. ID No. 5082 |
| 2433 | Seq. ID No. 5083 | Seq. ID No. 5084 |
| 2440 | Seq. ID No. 5087 | Seq. ID No. 5088 |
| 2442b | Seq. ID No. 5091 | Seq. ID No. 5092 |
| 2443 | Seq. ID No. 5093 | Seq. ID No. 5094 |
| 2444b | Seq. ID No. 5097 | Seq. ID No. 5098 |
| 2445 | Seq. ID No. 5103 | Seq. ID No. 5104 |
| 2448b | Seq. ID No. 5105 | Seq. ID No. 5106 |
| 2449b | Seq. ID No. 5109 | Seq. ID No. 5110 |
| 2451 | Seq. ID No. 5111 | Seq. ID No. 5112 |
| 2452 | Seq. ID No. 5113 | Seq. ID No. 5114 |
| 2453 | Seq. ID No. 5115 | Seq. ID No. 5116 |
| 2455 | Seq. ID No. 5117 | Seq. ID No. 5118 |
| 2456e | Seq. ID No. 5127 | Seq. ID No. 5128 |
| 2458g | Seq. ID No. 5141 | Seq. ID No. 5142 |
| 2461b | Seq. ID No. 5145 | Seq. ID No. 5146 |
| 2462b | Seq. ID No. 5149 | Seq. ID No. 5150 |
| 2464 | Seq. ID No. 5153 | Seq. ID No. 5154 |
| 2465b | Seq. ID No. 5157 | Seq. ID No. 5158 |
| 2469b | Seq. ID No. 5165 | Seq. ID No. 5166 |
| 2471 | Seq. ID No. 5169 | Seq. ID No. 5170 |
| 2473 | Seq. ID No. 5171 | Seq. ID No. 5172 |
| 2474c | Seq. ID No. 5177 | Seq. ID No. 5178 |
| 2475c | Seq. ID No. 5183 | Seq. ID No. 5184 |
| 2477 | Seq. ID No. 5185 | Seq. ID No. 5186 |
| 2480 | Seq. ID No. 5187 | Seq. ID No. 5188 |
| 2482 | Seq. ID No. 5193 | Seq. ID No. 5194 |
| 2483 | Seq. ID No. 5195 | Seq. ID No. 5196 |
| 2485 | Seq. ID No. 5201 | Seq. ID No. 5202 |
| 2489 | Seq. ID No. 5203 | Seq. ID No. 5204 |
| 2490 | Seq. ID No. 5205 | Seq. ID No. 5206 |
| 2492b | Seq. ID No. 5209 | Seq. ID No. 5210 |
| 2494 | Seq. ID No. 5211 | Seq. ID No. 5212 |
| 2495b | Seq. ID No. 5215 | Seq. ID No. 5216 |
| 2497b | Seq. ID No. 5219 | Seq. ID No. 5220 |
| 2500c | Seq. ID No. 5227 | Seq. ID No. 5228 |
| 2501b | Seq. ID No. 5231 | Seq. ID No. 5232 |
| 2504b | Seq. ID No. 5235 | Seq. ID No. 5236 |
| 2505 | Seq. ID No. 5237 | Seq. ID No. 5238 |
| 2506 | Seq. ID No. 5239 | Seq. ID No. 5240 |
| 2507c | Seq. ID No. 5243 | Seq. ID No. 5244 |
| 2510 | Seq. ID No. 5245 | Seq. ID No. 5246 |
| 2512c | Seq. ID No. 5247 | Seq. ID No. 5248 |
| 2513c | Seq. ID No. 5253 | Seq. ID No. 5254 |
| 2514 | Seq. ID No. 5255 | Seq. ID No. 5256 |
| 2515 | Seq. ID No. 5257 | Seq. ID No. 5258 |
| 2516b | Seq. ID No. 5261 | Seq. ID No. 5262 |
| 2517a | Seq. ID No. 5263 | Seq. ID No. 5264 |
| 2519b | Seq. ID No. 5271 | Seq. ID No. 5272 |
| 2520b | Seq. ID No. 5275 | Seq. ID No. 5276 |
| 2523 | Seq. ID No. 5283 | Seq. ID No. 5284 |
| 2527b | Seq. ID No. 5291 | Seq. ID No. 5292 |
| 2528d | Seq. ID No. 5299 | Seq. ID No. 5300 |
| 2534 | Seq. ID No. 5305 | Seq. ID No. 5306 |
| 2535b | Seq. ID No. 5309 | Seq. ID No. 5310 |
| 2538 | Seq. ID No. 5311 | Seq. ID No. 5312 |
| 2541 | Seq. ID No. 5313 | Seq. ID No. 5314 |
| 2542c | Seq. ID No. 5319 | Seq. ID No. 5320 |
| 2544 | Seq. ID No. 5323 | Seq. ID No. 5324 |
| 2545 | Seq. ID No. 5325 | Seq. ID No. 5326 |
| 2548b | Seq. ID No. 5335 | Seq. ID No. 5336 |
| 2549 | Seq. ID No. 5337 | Seq. ID No. 5338 |
| 2550c | Seq. ID No. 5341 | Seq. ID No. 5342 |
| 2552 | Seq. ID No. 5345 | Seq. ID No. 5346 |
| 2554b | Seq. ID No. 5351 | Seq. ID No. 5352 |
| 2555b | Seq. ID No. 5355 | Seq. ID No. 5356 |
| 2558b | Seq. ID No. 5363 | Seq. ID No. 5364 |
| 2559 | Seq. ID No. 5365 | Seq. ID No. 5366 |
| 2561 | Seq. ID No. 5367 | Seq. ID No. 5368 |
| 2562c | Seq. ID No. 5371 | Seq. ID No. 5372 |
| 2563 | Seq. ID No. 5373 | Seq. ID No. 5374 |
| 2564d | Seq. ID No. 5381 | Seq. ID No. 5382 |
| 2566 | Seq. ID No. 5383 | Seq. ID No. 5384 |
| 2567b | Seq. ID No. 5387 | Seq. ID No. 5388 |
| 2568 | Seq. ID No. 5389 | Seq. ID No. 5390 |
| 2572 | Seq. ID No. 5391 | Seq. ID No. 5392 |
| 2573 | Seq. ID No. 5393 | Seq. ID No. 5394 |
| 2575 | Seq. ID No. 5395 | Seq. ID No. 5396 |
| 2576 | Seq. ID No. 5397 | Seq. ID No. 5398 |
| 2578 | Seq. ID No. 5399 | Seq. ID No. 5400 |
| 2579b | Seq. ID No. 5401 | Seq. ID No. 5402 |
| 2581 | Seq. ID No. 5403 | Seq. ID No. 5404 |
| 2582c | Seq. ID No. 5409 | Seq. ID No. 5410 |
| 2585 | Seq. ID No. 5411 | Seq. ID No. 5412 |
| 2587b | Seq. ID No. 5415 | Seq. ID No. 5416 |
| 2588 | Seq. ID No. 5417 | Seq. ID No. 5418 |
| 2589 | Seq. ID No. 5419 | Seq. ID No. 5420 |
| 2591 | Seq. ID No. 5421 | Seq. ID No. 5422 |
| 2592 | Seq. ID No. 5423 | Seq. ID No. 5424 |
| 2593b | Seq. ID No. 5427 | Seq. ID No. 5428 |
| 2594b | Seq. ID No. 5431 | Seq. ID No. 5432 |
| 2596 | Seq. ID No. 5433 | Seq. ID No. 5434 |
| 2597c | Seq. ID No. 5439 | Seq. ID No. 5440 |
| 2598 | Seq. ID No. 5441 | Seq. ID No. 5442 |
| 2602 | Seq. ID No. 5443 | Seq. ID No. 5444 |
| 2605b | Seq. ID No. 5447 | Seq. ID No. 5448 |
| 2606 | Seq. ID No. 5449 | Seq. ID No. 5450 |
| 2608 | Seq. ID No. 5451 | Seq. ID No. 5452 |
| 2610 | Seq. ID No. 5453 | Seq. ID No. 5454 |
| 2611 | Seq. ID No. 5455 | Seq. ID No. 5456 |
| 2613 | Seq. ID No. 5457 | Seq. ID No. 5458 |
| 2616h | Seq. ID No. 5473 | Seq. ID No. 5474 |
| 2617b | Seq. ID No. 5477 | Seq. ID No. 5478 |
| 2619 | Seq. ID No. 5483 | Seq. ID No. 5484 |
| 2621a | Seq. ID No. 5487 | Seq. ID No. 5488 |
| 2623b | Seq. ID No. 5491 | Seq. ID No. 5492 |
| 2624b | Seq. ID No. 5495 | Seq. ID No. 5496 |
| 2625b | Seq. ID No. 5499 | Seq. ID No. 5500 |
| 2626b | Seq. ID No. 5503 | Seq. ID No. 5504 |
| 2627b | Seq. ID No. 5507 | Seq. ID No. 5508 |
| 2628 | Seq. ID No. 5509 | Seq. ID No. 5510 |
| 2629b | Seq. ID No. 5513 | Seq. ID No. 5514 |
| 2633e | Seq. ID No. 5527 | Seq. ID No. 5528 |
| 2637b | Seq. ID No. 5531 | Seq. ID No. 5532 |
| 2643b | Seq. ID No. 5537 | Seq. ID No. 5538 |
| 2645 | Seq. ID No. 5539 | Seq. ID No. 5540 |
| 2647 | Seq. ID No. 5541 | Seq. ID No. 5542 |
| 2649 | Seq. ID No. 5547 | Seq. ID No. 5548 |
| 2652b | Seq. ID No. 5553 | Seq. ID No. 5554 |
| 2655b | Seq. ID No. 5557 | Seq. ID No. 5558 |
| 2656 | Seq. ID No. 5559 | Seq. ID No. 5560 |
| 2658b | Seq. ID No. 5563 | Seq. ID No. 5564 |
| 2659b | Seq. ID No. 5567 | Seq. ID No. 5568 |
| 2662 | Seq. ID No. 5571 | Seq. ID No. 5572 |
| 2664b | Seq. ID No. 5575 | Seq. ID No. 5576 |
| 2666b | Seq. ID No. 5581 | Seq. ID No. 5582 |
| 2667b | Seq. ID No. 5585 | Seq. ID No. 5586 |
| 2669c | Seq. ID No. 5591 | Seq. ID No. 5592 |
| 2674b | Seq. ID No. 5599 | Seq. ID No. 5600 |
| 2676 | Seq. ID No. 5601 | Seq. ID No. 5602 |
| 2677b | Seq. ID No. 5605 | Seq. ID No. 5606 |
| 2679d | Seq. ID No. 5615 | Seq. ID No. 5616 |
| 2680c | Seq. ID No. 5621 | Seq. ID No. 5622 |
| 2684b | Seq. ID No. 5629 | Seq. ID No. 5630 |
| 2686 | Seq. ID No. 5631 | Seq. ID No. 5632 |
| 2688c | Seq. ID No. 5637 | Seq. ID No. 5638 |
| 2690c | Seq. ID No. 5647 | Seq. ID No. 5648 |
| 2693 | Seq. ID No. 5651 | Seq. ID No. 5652 |
| 2694b | Seq. ID No. 5655 | Seq. ID No. 5656 |
| 2695 | Seq. ID No. 5657 | Seq. ID No. 5658 |
| 2696b | Seq. ID No. 5661 | Seq. ID No. 5662 |
| 2709 | Seq. ID No. 5665 | Seq. ID No. 5666 |
| 2712 | Seq. ID No. 5669 | Seq. ID No. 5670 |
| 2713 | Seq. ID No. 5671 | Seq. ID No. 5672 |
| 2714 | Seq. ID No. 5673 | Seq. ID No. 5674 |
| 2716c | Seq. ID No. 5679 | Seq. ID No. 5680 |
| 2718c | Seq. ID No. 5685 | Seq. ID No. 5686 |
| 2721b | Seq. ID No. 5693 | Seq. ID No. 5694 |
| 2722b | Seq. ID No. 5697 | Seq. ID No. 5698 |
| 2723 | Seq. ID No. 5699 | Seq. ID No. 5700 |
| 2724 | Seq. ID No. 5701 | Seq. ID No. 5702 |
| 2726 | Seq. ID No. 5707 | Seq. ID No. 5708 |
| 2731b | Seq. ID No. 5715 | Seq. ID No. 5716 |
| 2732 | Seq. ID No. 5717 | Seq. ID No. 5718 |
| 2734c | Seq. ID No. 5723 | Seq. ID No. 5724 |
| 2735b | Seq. ID No. 5727 | Seq. ID No. 5728 |
| 2738d | Seq. ID No. 5735 | Seq. ID No. 5736 |
| 2742b | Seq. ID No. 5739 | Seq. ID No. 5740 |
| 2745b | Seq. ID No. 5749 | Seq. ID No. 5750 |
| 2746 | Seq. ID No. 5751 | Seq. ID No. 5752 |
| 2747b | Seq. ID No. 5755 | Seq. ID No. 5756 |
| 2748c | Seq. ID No. 5761 | Seq. ID No. 5762 |
| 2749e | Seq. ID No. 5771 | Seq. ID No. 5772 |
| 2750b | Seq. ID No. 5775 | Seq. ID No. 5776 |
| 2752 | Seq. ID No. 5777 | Seq. ID No. 5778 |
| 2753 | Seq. ID No. 5779 | Seq. ID No. 5780 |
| 2757b | Seq. ID No. 5783 | Seq. ID No. 5784 |
| 2758c | Seq. ID No. 5789 | Seq. ID No. 5790 |
| 2759b | Seq. ID No. 5795 | Seq. ID No. 5796 |
| 2760c | Seq. ID No. 5801 | Seq. ID No. 5802 |
| 2762 | Seq. ID No. 5803 | Seq. ID No. 5804 |
| 2763c | Seq. ID No. 5809 | Seq. ID No. 5810 |
| 2765c | Seq. ID No. 5815 | Seq. ID No. 5816 |
| 2766b | Seq. ID No. 5819 | Seq. ID No. 5820 |
| 2768c | Seq. ID No. 5825 | Seq. ID No. 5826 |
| 2771b | Seq. ID No. 5833 | Seq. ID No. 5834 |
| 2773 | Seq. ID No. 5835 | Seq. ID No. 5836 |
| 2774c | Seq. ID No. 5841 | Seq. ID No. 5842 |
| 2776b | Seq. ID No. 5845 | Seq. ID No. 5846 |
| 2777 | Seq. ID No. 5847 | Seq. ID No. 5848 |
| 2778 | Seq. ID No. 5849 | Seq. ID No. 5850 |
| 2779 | Seq. ID No. 5851 | Seq. ID No. 5852 |
| 2780 | Seq. ID No. 5853 | Seq. ID No. 5854 |
| 2784 | Seq. ID No. 5855 | Seq. ID No. 5856 |
| 2785b | Seq. ID No. 5859 | Seq. ID No. 5860 |
| 2786c | Seq. ID No. 5865 | Seq. ID No. 5866 |
| 2787c | Seq. ID No. 5871 | Seq. ID No. 5872 |
| 2789 | Seq. ID No. 5875 | Seq. ID No. 5876 |
| 2790 | Seq. ID No. 5877 | Seq. ID No. 5878 |
| 2793 | Seq. ID No. 5881 | Seq. ID No. 5882 |
| 2798 | Seq. ID No. 5887 | Seq. ID No. 5888 |
| 2799b | Seq. ID No. 5891 | Seq. ID No. 5892 |
| 2801b | Seq. ID No. 5895 | Seq. ID No. 5896 |
| 2804 | Seq. ID No. 5897 | Seq. ID No. 5898 |
| 2805b | Seq. ID No. 5901 | Seq. ID No. 5902 |
| 2809 | Seq. ID No. 5903 | Seq. ID No. 5904 |
| 2810d | Seq. ID No. 5911 | Seq. ID No. 5912 |
| 2812 | Seq. ID No. 5913 | Seq. ID No. 5914 |
| 2814 | Seq. ID No. 5915 | Seq. ID No. 5916 |
| 2815 | Seq. ID No. 5917 | Seq. ID No. 5918 |
| 2816 | Seq. ID No. 5919 | Seq. ID No. 5920 |
| 2818e | Seq. ID No. 5929 | Seq. ID No. 5930 |
| 2819 | Seq. ID No. 5931 | Seq. ID No. 5932 |
| 2820 | Seq. ID No. 5933 | Seq. ID No. 5934 |
| 2821b | Seq. ID No. 5937 | Seq. ID No. 5938 |
| 2822b | Seq. ID No. 5941 | Seq. ID No. 5942 |
| 2823 | Seq. ID No. 5943 | Seq. ID No. 5944 |
| 2824b | Seq. ID No. 5947 | Seq. ID No. 5948 |
| 2829b | Seq. ID No. 5951 | Seq. ID No. 5952 |
| 2831b | Seq. ID No. 5953 | Seq. ID No. 5954 |
| 2832 | Seq. ID No. 5955 | Seq. ID No. 5956 |
| 2833 | Seq. ID No. 5957 | Seq. ID No. 5958 |
| 2834b | Seq. ID No. 5961 | Seq. ID No. 5962 |
| 2842b | Seq. ID No. 5969 | Seq. ID No. 5970 |
| 2843b | Seq. ID No. 5973 | Seq. ID No. 5974 |
| 2846b | Seq. ID No. 5979 | Seq. ID No. 5980 |
| 2848 | Seq. ID No. 5981 | Seq. ID No. 5982 |
| 2851 | Seq. ID No. 5985 | Seq. ID No. 5986 |
| 2853 | Seq. ID No. 5989 | Seq. ID No. 5990 |
| 2854b | Seq. ID No. 5993 | Seq. ID No. 5994 |
| 2856c | Seq. ID No. 6001 | Seq. ID No. 6002 |
| 2857 | Seq. ID No. 6003 | Seq. ID No. 6004 |
| 2860c | Seq. ID No. 6011 | Seq. ID No. 6012 |
| 2863 | Seq. ID No. 6015 | Seq. ID No. 6016 |
| 2864 | Seq. ID No. 6017 | Seq. ID No. 6018 |
| 2868b | Seq. ID No. 6021 | Seq. ID No. 6022 |
| 2869c | Seq. ID No. 6027 | Seq. ID No. 6028 |
| 2871 | Seq. ID No. 6029 | Seq. ID No. 6030 |
| 2875 | Seq. ID No. 6033 | Seq. ID No. 6034 |
| 2877 | Seq. ID No. 6035 | Seq. ID No. 6036 |
| 2879c | Seq. ID No. 6041 | Seq. ID No. 6042 |
| 2881 | Seq. ID No. 6043 | Seq. ID No. 6044 |
| 2883d | Seq. ID No. 6053 | Seq. ID No. 6054 |
| 2886b | Seq. ID No. 6057 | Seq. ID No. 6058 |
| 2890 | Seq. ID No. 6065 | Seq. ID No. 6066 |
| 2891c | Seq. ID No. 6071 | Seq. ID No. 6072 |
| 2894c | Seq. ID No. 6079 | Seq. ID No. 6080 |
| 2897b | Seq. ID No. 6085 | Seq. ID No. 6086 |
| 2900b | Seq. ID No. 6089 | Seq. ID No. 6090 |
| 2902 | Seq. ID No. 6095 | Seq. ID No. 6096 |
| 2904 | Seq. ID No. 6097 | Seq. ID No. 6098 |
| 2905b | Seq. ID No. 6101 | Seq. ID No. 6102 |
| 2906 | Seq. ID No. 6103 | Seq. ID No. 6104 |
| 2909d | Seq. ID No. 6111 | Seq. ID No. 6112 |
| 2912 | Seq. ID No. 6113 | Seq. ID No. 6114 |
| 2913b | Seq. ID No. 6117 | Seq. ID No. 6118 |
| 2915c | Seq. ID No. 6123 | Seq. ID No. 6124 |
| 2916 | Seq. ID No. 6125 | Seq. ID No. 6126 |
| 2918 | Seq. ID No. 6129 | Seq. ID No. 6130 |
| 2920 | Seq. ID No. 6131 | Seq. ID No. 6132 |
| 2921 | Seq. ID No. 6133 | Seq. ID No. 6134 |
| 2923c | Seq. ID No. 6141 | Seq. ID No. 6142 |
| 2925b | Seq. ID No. 6145 | Seq. ID No. 6146 |
| 2926b | Seq. ID No. 6149 | Seq. ID No. 6150 |
| 2928c | Seq. ID No. 6157 | Seq. ID No. 6158 |
| 2931c | Seq. ID No. 6165 | Seq. ID No. 6166 |
| 2933b | Seq. ID No. 6169 | Seq. ID No. 6170 |
| 2934 | Seq. ID No. 6171 | Seq. ID No. 6172 |
| 2935b | Seq. ID No. 6175 | Seq. ID No. 6176 |
| 2936 | Seq. ID No. 6177 | Seq. ID No. 6178 |
| 2939b | Seq. ID No. 6181 | Seq. ID No. 6182 |
| 2941c | Seq. ID No. 6187 | Seq. ID No. 6188 |
| 2943d | Seq. ID No. 6195 | Seq. ID No. 6196 |
| 2947 | Seq. ID No. 6201 | Seq. ID No. 6202 |
| 2948d | Seq. ID No. 6209 | Seq. ID No. 6210 |
| 2950b | Seq. ID No. 6213 | Seq. ID No. 6214 |
| 2951 | Seq. ID No. 6215 | Seq. ID No. 6216 |
| 2954 | Seq. ID No. 6219 | Seq. ID No. 6220 |
| 2955g | Seq. ID No. 6233 | Seq. ID No. 6234 |
| 2957 | Seq. ID No. 6235 | Seq. ID No. 6236 |
| 2959 | Seq. ID No. 6243 | Seq. ID No. 6244 |
| 2962b | Seq. ID No. 6249 | Seq. ID No. 6250 |
| 2963 | Seq. ID No. 6251 | Seq. ID No. 6252 |
| 2965c | Seq. ID No. 6257 | Seq. ID No. 6258 |
| 2967 | Seq. ID No. 6261 | Seq. ID No. 6262 |
| 2969 | Seq. ID No. 6263 | Seq. ID No. 6264 |
| 2971b | Seq. ID No. 6271 | Seq. ID No. 6272 |
| 2974b | Seq. ID No. 6275 | Seq. ID No. 6276 |
| 2975 | Seq. ID No. 6277 | Seq. ID No. 6278 |
| 2977b | Seq. ID No. 6281 | Seq. ID No. 6282 |
| 2979 | Seq. ID No. 6287 | Seq. ID No. 6288 |
| 2980e | Seq. ID No. 6297 | Seq. ID No. 6298 |
| 2984 | Seq. ID No. 6299 | Seq. ID No. 6300 |
| 2986c | Seq. ID No. 6305 | Seq. ID No. 6306 |
| 2988c | Seq. ID No. 6311 | Seq. ID No. 6312 |
| 2990 | Seq. ID No. 6315 | Seq. ID No. 6316 |
| 2991c | Seq. ID No. 6321 | Seq. ID No. 6322 |
| 2992 | Seq. ID No. 6323 | Seq. ID No. 6324 |
| 2993b | Seq. ID No. 6327 | Seq. ID No. 6328 |
| 2995b | Seq. ID No. 6331 | Seq. ID No. 6332 |
| 2997 | Seq. ID No. 6333 | Seq. ID No. 6334 |
| 2998b | Seq. ID No. 6337 | Seq. ID No. 6338 |
| 2999 | Seq. ID No. 6339 | Seq. ID No. 6340 |
| 3001 | Seq. ID No. 6341 | Seq. ID No. 6342 |
| 3003 | Seq. ID No. 6343 | Seq. ID No. 6344 |
| 3005 | Seq. ID No. 6345 | Seq. ID No. 6346 |
| 3008d | Seq. ID No. 6353 | Seq. ID No. 6354 |
| 3010b | Seq. ID No. 6357 | Seq. ID No. 6358 |
| 3012 | Seq. ID No. 6359 | Seq. ID No. 6360 |
| 3015 | Seq. ID No. 6361 | Seq. ID No. 6362 |
| 3016c | Seq. ID No. 6367 | Seq. ID No. 6368 |
| 3017 | Seq. ID No. 6369 | Seq. ID No. 6370 |
| 3018b | Seq. ID No. 6373 | Seq. ID No. 6374 |
| 3020 | Seq. ID No. 6375 | Seq. ID No. 6376 |
| 3021 | Seq. ID No. 6377 | Seq. ID No. 6378 |
| 3022 | Seq. ID No. 6379 | Seq. ID No. 6380 |
| 3026b | Seq. ID No. 6389 | Seq. ID No. 6390 |
| 3028c | Seq. ID No. 6395 | Seq. ID No. 6396 |
| 3029b | Seq. ID No. 6399 | Seq. ID No. 6400 |
| 3031b | Seq. ID No. 6403 | Seq. ID No. 6404 |
| 3032b | Seq. ID No. 6407 | Seq. ID No. 6408 |
| 3033b | Seq. ID No. 6411 | Seq. ID No. 6412 |
| 3035 | Seq. ID No. 6413 | Seq. ID No. 6414 |
| 3037b | Seq. ID No. 6417 | Seq. ID No. 6418 |
| 3040b | Seq. ID No. 6423 | Seq. ID No. 6424 |
| 3044 | Seq. ID No. 6433 | Seq. ID No. 6434 |
| 3045b | Seq. ID No. 6437 | Seq. ID No. 6438 |
| 3048a | Seq. ID No. 6439 | Seq. ID No. 6440 |
| 3049c | Seq. ID No. 6445 | Seq. ID No. 6446 |
| 3051b | Seq. ID No. 6449 | Seq. ID No. 6450 |
| 3052 | Seq. ID No. 6451 | Seq. ID No. 6452 |
| 3055b | Seq. ID No. 6457 | Seq. ID No. 6458 |
| 3057 | Seq. ID No. 6459 | Seq. ID No. 6460 |
| 3059 | Seq. ID No. 6461 | Seq. ID No. 6462 |
| 3060 | Seq. ID No. 6463 | Seq. ID No. 6464 |
| 3065b | Seq. ID No. 6477 | Seq. ID No. 6478 |
| 3067 | Seq. ID No. 6481 | Seq. ID No. 6482 |
| 3068 | Seq. ID No. 6483 | Seq. ID No. 6484 |
| 3071 | Seq. ID No. 6487 | Seq. ID No. 6488 |
| 3072a | Seq. ID No. 6489 | Seq. ID No. 6490 |
| 3073 | Seq. ID No. 6491 | Seq. ID No. 6492 |
| 3074 | Seq. ID No. 6493 | Seq. ID No. 6494 |
| 3075 | Seq. ID No. 6495 | Seq. ID No. 6496 |
| 3077c | Seq. ID No. 6503 | Seq. ID No. 6504 |
| 3078 | Seq. ID No. 6505 | Seq. ID No. 6506 |
| 3081b | Seq. ID No. 6511 | Seq. ID No. 6512 |
| 3083d | Seq. ID No. 6515 | Seq. ID No. 6516 |
| 3086 | Seq. ID No. 6519 | Seq. ID No. 6520 |
| 3087c | Seq. ID No. 6523 | Seq. ID No. 6524 |
| 3088 | Seq. ID No. 6525 | Seq. ID No. 6526 |
| 3089b | Seq. ID No. 6529 | Seq. ID No. 6530 |
| 3090 | Seq. ID No. 6531 | Seq. ID No. 6532 |
| 3091 | Seq. ID No. 6533 | Seq. ID No. 6534 |
| 3092b | Seq. ID No. 6537 | Seq. ID No. 6538 |
| 3097 | Seq. ID No. 6545 | Seq. ID No. 6546 |
| 3098c | Seq. ID No. 6551 | Seq. ID No. 6552 |
| 3099 | Seq. ID No. 6553 | Seq. ID No. 6554 |
| 3101 | Seq. ID No. 6559 | Seq. ID No. 6560 |
| 3103b | Seq. ID No. 6563 | Seq. ID No. 6564 |
| 3105 | Seq. ID No. 6567 | Seq. ID No. 6568 |
| 3108b | Seq. ID No. 6577 | Seq. ID No. 6578 |
| 3109 | Seq. ID No. 6579 | Seq. ID No. 6580 |
| 3110b | Seq. ID No. 6583 | Seq. ID No. 6584 |
| 3113 | Seq. ID No. 6585 | Seq. ID No. 6586 |
| 3116 | Seq. ID No. 6587 | Seq. ID No. 6588 |
| 3118a | Seq. ID No. 6589 | Seq. ID No. 6590 |
| 3119f | Seq. ID No. 6603 | Seq. ID No. 6604 |
| 3121 | Seq. ID No. 6605 | Seq. ID No. 6606 |
| 3122b | Seq. ID No. 6609 | Seq. ID No. 6610 |
| 3123b | Seq. ID No. 6613 | Seq. ID No. 6614 |
| 3124 | Seq. ID No. 6615 | Seq. ID No. 6616 |
| 3126 | Seq. ID No. 6617 | Seq. ID No. 6618 |
| 3129b | Seq. ID No. 6621 | Seq. ID No. 6622 |
| 3131 | Seq. ID No. 6623 | Seq. ID No. 6624 |
| 3134b | Seq. ID No. 6627 | Seq. ID No. 6628 |
| 3138 | Seq. ID No. 6629 | Seq. ID No. 6630 |
| 3141 | Seq. ID No. 6633 | Seq. ID No. 6634 |
| 3145c | Seq. ID No. 6639 | Seq. ID No. 6640 |

[0121] Listed in Table 19 are the 1534 ORFs detected by the GeneMark™ ORF finder program trained on Bacillus subtilis published ORFs.

TABLE 19
GENEMARK ™ ORFs

| ORF Number | DNA SEQ ID Number | Protein SEQ ID Number |
|---|---|---|
| 1 | Seq. ID No. 1 | Seq. ID No. 2 |
| 2a | Seq. ID No. 3 | Seq. ID No. 4 |
| 4c | Seq. ID No. 11 | Seq. ID No. 12 |
| 5 | Seq. ID No. 13 | Seq. ID No. 14 |
| 7 | Seq. ID No. 15 | Seq. ID No. 16 |
| 10 | Seq. ID No. 17 | Seq. ID No. 18 |
| 17 | Seq. ID No. 25 | Seq. ID No. 26 |
| 18 | Seq. ID No. 27 | Seq. ID No. 28 |
| 20 | Seq. ID No. 29 | Seq. ID No. 30 |
| 23b | Seq. ID No. 35 | Seq. ID No. 36 |
| 24 | Seq. ID No. 37 | Seq. ID No. 38 |
| 32 | Seq. ID No. 39 | Seq. ID No. 40 |
| 36 | Seq. ID No. 41 | Seq. ID No. 42 |
| 37 | Seq. ID No. 43 | Seq. ID No. 44 |
| 38a | Seq. ID No. 45 | Seq. ID No. 46 |
| 39a | Seq. ID No. 49 | Seq. ID No. 50 |
| 40 | Seq. ID No. 53 | Seq. ID No. 54 |
| 41b | Seq. ID No. 57 | Seq. ID No. 58 |
| 43b | Seq. ID No. 61 | Seq. ID No. 62 |
| 45 | Seq. ID No. 69 | Seq. ID No. 70 |
| 46a | Seq. ID No. 71 | Seq. ID No. 72 |
| 47 | Seq. ID No. 75 | Seq. ID No. 76 |
| 48c | Seq. ID No. 81 | Seq. ID No. 82 |
| 50 | Seq. ID No. 83 | Seq. ID No. 84 |
| 51c | Seq. ID No. 89 | Seq. ID No. 90 |
| 57a | Seq. ID No. 95 | Seq. ID No. 96 |
| 60a | Seq. ID No. 101 | Seq. ID No. 102 |
| 62c | Seq. ID No. 111 | Seq. ID No. 112 |
| 65b | Seq. ID No. 119 | Seq. ID No. 120 |
| 67 | Seq. ID No. 125 | Seq. ID No. 126 |
| 71 | Seq. ID No. 129 | Seq. ID No. 130 |
| 74 | Seq. ID No. 135 | Seq. ID No. 136 |
| 77 | Seq. ID No. 137 | Seq. ID No. 138 |
| 80a | Seq. ID No. 141 | Seq. ID No. 142 |
| 81a | Seq. ID No. 147 | Seq. ID No. 148 |
| 83 | Seq. ID No. 151 | Seq. ID No. 152 |
| 85b | Seq. ID No. 155 | Seq. ID No. 156 |
| 88 | Seq. ID No. 167 | Seq. ID No. 168 |
| 91a | Seq. ID No. 171 | Seq. ID No. 172 |
| 93b | Seq. ID No. 181 | Seq. ID No. 182 |
| 94 | Seq. ID No. 185 | Seq. ID No. 186 |
| 95b | Seq. ID No. 187 | Seq. ID No. 188 |
| 97b | Seq. ID No. 189 | Seq. ID No. 190 |
| 99 | Seq. ID No. 191 | Seq. ID No. 192 |
| 102 | Seq. ID No. 195 | Seq. ID No. 196 |
| 104b | Seq. ID No. 199 | Seq. ID No. 200 |
| 106 | Seq. ID No. 207 | Seq. ID No. 208 |
| 109c | Seq. ID No. 213 | Seq. ID No. 214 |
| 111b | Seq. ID No. 219 | Seq. ID No. 220 |
| 112a | Seq. ID No. 221 | Seq. ID No. 222 |
| 114 | Seq. ID No. 225 | Seq. ID No. 226 |
| 115 | Seq. ID No. 227 | Seq. ID No. 228 |
| 119a | Seq. ID No. 229 | Seq. ID No. 230 |
| 121 | Seq. ID No. 233 | Seq. ID No. 234 |
| 124c | Seq. ID No. 239 | Seq. ID No. 240 |
| 125 | Seq. ID No. 241 | Seq. ID No. 242 |
| 127a | Seq. ID No. 243 | Seq. ID No. 244 |
| 129c | Seq. ID No. 253 | Seq. ID No. 254 |
| 134 | Seq. ID No. 261 | Seq. ID No. 262 |
| 135a | Seq. ID No. 263 | Seq. ID No. 264 |
| 137a | Seq. ID No. 267 | Seq. ID No. 268 |
| 138b | Seq. ID No. 273 | Seq. ID No. 274 |
| 142 | Seq. ID No. 275 | Seq. ID No. 276 |
| 143 | Seq. ID No. 277 | Seq. ID No. 278 |
| 144a | Seq. ID No. 279 | Seq. ID No. 280 |
| 145d | Seq. ID No. 291 | Seq. ID No. 292 |
| 147 | Seq. ID No. 293 | Seq. ID No. 294 |
| 151a | Seq. ID No. 295 | Seq. ID No. 296 |
| 152a | Seq. ID No. 299 | Seq. ID No. 300 |
| 153a | Seq. ID No. 303 | Seq. ID No. 304 |
| 154 | Seq. ID No. 309 | Seq. ID No. 310 |
| 155a | Seq. ID No. 311 | Seq. ID No. 312 |
| 157a | Seq. ID No. 315 | Seq. ID No. 316 |
| 158a | Seq. ID No. 319 | Seq. ID No. 320 |
| 160a | Seq. ID No. 323 | Seq. ID No. 324 |
| 162c | Seq. ID No. 331 | Seq. ID No. 332 |
| 165a | Seq. ID No. 341 | Seq. ID No. 342 |
| 167 | Seq. ID No. 345 | Seq. ID No. 346 |
| 171a | Seq. ID No. 351 | Seq. ID No. 352 |
| 172 | Seq. ID No. 355 | Seq. ID No. 356 |
| 175 | Seq. ID No. 361 | Seq. ID No. 362 |
| 176 | Seq. ID No. 363 | Seq. ID No. 364 |
| 177a | Seq. ID No. 365 | Seq. ID No. 366 |
| 180b | Seq. ID No. 375 | Seq. ID No. 376 |
| 184 | Seq. ID No. 379 | Seq. ID No. 380 |
| 185 | Seq. ID No. 381 | Seq. ID No. 382 |
| 186 | Seq. ID No. 383 | Seq. ID No. 384 |
| 188 | Seq. ID No. 389 | Seq. ID No. 390 |
| 189b | Seq. ID No. 391 | Seq. ID No. 392 |
| 192a | Seq. ID No. 395 | Seq. ID No. 396 |
| 193 | Seq. ID No. 399 | Seq. ID No. 400 |
| 195 | Seq. ID No. 405 | Seq. ID No. 406 |
| 197a | Seq. ID No. 409 | Seq. ID No. 410 |
| 198a | Seq. ID No. 413 | Seq. ID No. 414 |
| 200 | Seq. ID No. 417 | Seq. ID No. 418 |
| 202 | Seq. ID No. 421 | Seq. ID No. 422 |
| 203 | Seq. ID No. 423 | Seq. ID No. 424 |
| 204 | Seq. ID No. 425 | Seq. ID No. 426 |
| 205 | Seq. ID No. 427 | Seq. ID No. 428 |
| 206 | Seq. ID No. 429 | Seq. ID No. 430 |
| 208b | Seq. ID No. 435 | Seq. ID No. 436 |
| 210 | Seq. ID No. 437 | Seq. ID No. 438 |
| 211 | Seq. ID No. 439 | Seq. ID No. 440 |
| 213 | Seq. ID No. 441 | Seq. ID No. 442 |
| 215a | Seq. ID No. 443 | Seq. ID No. 444 |
| 218 | Seq. ID No. 445 | Seq. ID No. 446 |
| 219 | Seq. ID No. 447 | Seq. ID No. 448 |
| 220a | Seq. ID No. 449 | Seq. ID No. 450 |
| 226a | Seq. ID No. 459 | Seq. ID No. 460 |
| 228a | Seq. ID No. 465 | Seq. ID No. 466 |
| 236c | Seq. ID No. 485 | Seq. ID No. 486 |
| 245c | Seq. ID No. 501 | Seq. ID No. 502 |
| 246b | Seq. ID No. 505 | Seq. ID No. 506 |
| 248b | Seq. ID No. 511 | Seq. ID No. 512 |
| 249a | Seq. ID No. 513 | Seq. ID No. 514 |
| 251 | Seq. ID No. 517 | Seq. ID No. 518 |
| 253a | Seq. ID No. 519 | Seq. ID No. 520 |
| 254 | Seq. ID No. 523 | Seq. ID No. 524 |
| 255c | Seq. ID No. 529 | Seq. ID No. 530 |
| 258 | Seq. ID No. 533 | Seq. ID No. 534 |
| 259a | Seq. ID No. 535 | Seq. ID No. 536 |
| 260 | Seq. ID No. 541 | Seq. ID No. 542 |
| 262 | Seq. ID No. 543 | Seq. ID No. 544 |
| 265 | Seq. ID No. 551 | Seq. ID No. 552 |
| 267b | Seq. ID No. 553 | Seq. ID No. 554 |
| 269a | Seq. ID No. 559 | Seq. ID No. 560 |
| 271a | Seq. ID No. 563 | Seq. ID No. 564 |
| 273b | Seq. ID No. 569 | Seq. ID No. 570 |
| 277c | Seq. ID No. 575 | Seq. ID No. 576 |
| 279b | Seq. ID No. 579 | Seq. ID No. 580 |
| 280b | Seq. ID No. 583 | Seq. ID No. 584 |
| 283a | Seq. ID No. 591 | Seq. ID No. 592 |
| 284a | Seq. ID No. 595 | Seq. ID No. 596 |
| 286a | Seq. ID No. 601 | Seq. ID No. 602 |
| 287 | Seq. ID No. 605 | Seq. ID No. 606 |
| 290a | Seq. ID No. 607 | Seq. ID No. 608 |
| 293 | Seq. ID No. 611 | Seq. ID No. 612 |
| 294 | Seq. ID No. 613 | Seq. ID No. 614 |
| 296 | Seq. ID No. 615 | Seq. ID No. 616 |
| 301a | Seq. ID No. 621 | Seq. ID No. 622 |
| 304b | Seq. ID No. 627 | Seq. ID No. 628 |
| 307 | Seq. ID No. 629 | Seq. ID No. 630 |
| 309 | Seq. ID No. 633 | Seq. ID No. 634 |
| 310 | Seq. ID No. 635 | Seq. ID No. 636 |
| 311 | Seq. ID No. 637 | Seq. ID No. 638 |
| 313c | Seq. ID No. 643 | Seq. ID No. 644 |
| 315 | Seq. ID No. 649 | Seq. ID No. 650 |
| 316a | Seq. ID No. 651 | Seq. ID No. 652 |
| 317b | Seq. ID No. 655 | Seq. ID No. 656 |
| 318a | Seq. ID No. 657 | Seq. ID No. 658 |
| 321 | Seq. ID No. 669 | Seq. ID No. 670 |
| 323a | Seq. ID No. 671 | Seq. ID No. 672 |
| 324 | Seq. ID No. 675 | Seq. ID No. 676 |
| 327c | Seq. ID No. 681 | Seq. ID No. 682 |
| 329 | Seq. ID No. 683 | Seq. ID No. 684 |
| 330a | Seq. ID No. 685 | Seq. ID No. 686 |
| 332 | Seq. ID No. 693 | Seq. ID No. 694 |
| 337 | Seq. ID No. 703 | Seq. ID No. 704 |
| 338a | Seq. ID No. 705 | Seq. ID No. 706 |
| 341a | Seq. ID No. 711 | Seq. ID No. 712 |
| 342f | Seq. ID No. 725 | Seq. ID No. 726 |
| 344a | Seq. ID No. 731 | Seq. ID No. 732 |
| 345 | Seq. ID No. 735 | Seq. ID No. 736 |
| 346a | Seq. ID No. 737 | Seq. ID No. 738 |
| 347 | Seq. ID No. 741 | Seq. ID No. 742 |
| 349a | Seq. ID No. 743 | Seq. ID No. 744 |
| 350a | Seq. ID No. 749 | Seq. ID No. 750 |
| 351 | Seq. ID No. 753 | Seq. ID No. 754 |
| 352c | Seq. ID No. 759 | Seq. ID No. 760 |
| 356c | Seq. ID No. 773 | Seq. ID No. 774 |
| 358c | Seq. ID No. 781 | Seq. ID No. 782 |
| 362 | Seq. ID No. 783 | Seq. ID No. 784 |
| 365a | Seq. ID No. 785 | Seq. ID No. 786 |
| 366b | Seq. ID No. 789 | Seq. ID No. 790 |
| 367a | Seq. ID No. 793 | Seq. ID No. 794 |
| 371a | Seq. ID No. 797 | Seq. ID NO. 798 |
| 372b | Seq. ID No. 803 | Seq. ID No. 804 |
| 378a | Seq. ID No. 815 | Seq. ID No. 816 |
| 382b | Seq. ID No. 819 | Seq. ID No. 820 |
| 383a | Seq. ID No. 821 | Seq. ID No. 822 |
| 384b | Seq. ID No. 827 | Seq. ID No. 828 |
| 385b | Seq. ID No. 831 | Seq. ID No. 832 |
| 386 | Seq. ID No. 833 | Seq. ID No. 834 |
| 387 | Seq. ID No. 835 | Seq. ID No. 836 |
| 390 | Seq. ID No. 837 | Seq. ID No. 838 |
| 393b | Seq. ID No. 841 | Seq. ID No. 842 |
| 395a | Seq. ID No. 843 | Seq. ID No. 844 |
| 396 | Seq. ID No. 849 | Seq. ID No. 850 |
| 398 | Seq. ID No. 851 | Seq. ID No. 852 |
| 400a | Seq. ID No. 853 | Seq. ID No. 854 |
| 401a | Seq. ID No. 857 | Seq. ID No. 858 |
| 403c | Seq. ID No. 865 | Seq. ID No. 866 |
| 406a | Seq. ID No. 869 | Seq. ID No. 870 |
| 409a | Seq. ID No. 873 | Seq. ID No. 874 |
| 410a | Seq. ID No. 877 | Seq. ID No. 878 |
| 413a | Seq. ID No. 883 | Seq. ID No. 884 |
| 416a | Seq. ID No. 887 | Seq. ID No. 888 |
| 417 | Seq. ID No. 891 | Seq. ID No. 892 |
| 418b | Seq. ID No. 895 | Seq. ID No. 896 |
| 419c | Seq. ID No. 901 | Seq. ID No. 902 |
| 421 | Seq. ID No. 907 | Seq. ID No. 908 |
| 424a | Seq. ID No. 911 | Seq. ID No. 912 |
| 426a | Seq. ID No. 917 | Seq. ID No. 918 |
| 427a | Seq. ID No. 921 | Seq. ID No. 922 |
| 429a | Seq. ID No. 927 | Seq. ID No. 928 |
| 431 | Seq. ID No. 935 | Seq. ID No. 936 |
| 435 | Seq. ID No. 939 | Seq. ID No. 940 |
| 438a | Seq. ID No. 945 | Seq. ID No. 946 |
| 440 | Seq. ID No. 951 | Seq. ID No. 952 |
| 441a | Seq. ID No. 953 | Seq. ID No. 954 |
| 444a | Seq. ID No. 959 | Seq. ID No. 960 |
| 445a | Seq. ID No. 963 | Seq. ID No. 964 |
| 448 | Seq. ID No. 967 | Seq. ID No. 968 |
| 450a | Seq. ID No. 969 | Seq. ID No. 970 |
| 452a | Seq. ID No. 977 | Seq. ID No. 978 |
| 455a | Seq. ID No. 989 | Seq. ID No. 990 |
| 458a | Seq. ID No. 995 | Seq. ID No. 996 |
| 460a | Seq. ID No. 999 | Seq. ID No. 1000 |
| 462 | Seq. ID No. 1005 | Seq. ID No. 1006 |
| 463a | Seq. ID No. 1007 | Seq. ID No. 1008 |
| 464c | Seq. ID No. 1015 | Seq. ID No. 1016 |
| 467a | Seq. ID No. 1021 | Seq. ID No. 1022 |
| 472d | Seq. ID No. 1035 | Seq. ID No. 1036 |
| 473 | Seq. ID No. 1041 | Seq. ID No. 1042 |
| 474 | Seq. ID No. 1043 | Seq. ID No. 1044 |
| 478a | Seq. ID No. 1049 | Seq. ID No. 1050 |
| 479 | Seq. ID No. 1053 | Seq. ID No. 1054 |
| 480b | Seq. ID No. 1057 | Seq. ID No. 1058 |
| 481a | Seq. ID No. 1059 | Seq. ID No. 1060 |
| 482a | Seq. ID No. 1063 | Seq. ID No. 1064 |
| 483 | Seq. ID No. 1067 | Seq. ID No. 1068 |
| 490 | Seq. ID No. 1069 | Seq. ID No. 1070 |
| 491a | Seq. ID No. 1071 | Seq. ID No. 1072 |
| 492 | Seq. ID No. 1075 | Seq. ID No. 1076 |
| 495c | Seq. ID No. 1083 | Seq. ID No. 1084 |
| 498a | Seq. ID No. 1085 | Seq. ID No. 1086 |
| 499a | Seq. ID No. 1089 | Seq. ID No. 1090 |
| 500 | Seq. ID No. 1093 | Seq. ID No. 1094 |
| 502c | Seq. ID No. 1097 | Seq. ID No. 1098 |
| 504 | Seq. ID No. 1099 | Seq. ID No. 1100 |
| 505a | Seq. ID No. 1101 | Seq. ID No. 1102 |
| 509 | Seq. ID No. 1109 | Seq. ID No. 1110 |
| 512a | Seq. ID No. 1113 | Seq. ID No. 1114 |
| 514 | Seq. ID No. 1117 | Seq. ID No. 1118 |
| 515b | Seq. ID No. 1121 | Seq. ID No. 1122 |
| 518c | Seq. ID No. 1129 | Seq. ID No. 1130 |
| 523 | Seq. ID No. 1133 | Seq. ID No. 1134 |
| 524b | Seq. ID No. 1137 | Seq. ID No. 1138 |
| 527a | Seq. ID No. 1141 | Seq. ID No. 1142 |
| 528a | Seq. ID No. 1145 | Seq. ID No. 1146 |
| 529 | Seq. ID No. 1149 | Seq. ID No. 1150 |
| 533 | Seq. ID No. 1155 | Seq. ID No. 1156 |
| 535 | Seq. ID No. 1157 | Seq. ID No. 1158 |
| 536 | Seq. ID No. 1159 | Seq. ID No. 1160 |
| 539c | Seq. ID No. 1163 | Seq. ID No. 1164 |
| 541d | Seq. ID No. 1171 | Seq. ID No. 1172 |
| 542 | Seq. ID No. 1173 | Seq. ID No. 1174 |
| 543a | Seq. ID No. 1175 | Seq. ID No. 1176 |
| 544 | Seq. ID No. 1181 | Seq. ID No. 1182 |
| 545b | Seq. ID No. 1185 | Seq. ID No. 1186 |
| 546a | Seq. ID No. 1189 | Seq. ID No. 1190 |
| 548 | Seq. ID No. 1199 | Seq. ID No. 1200 |
| 551 | Seq. ID No. 1205 | Seq. ID No. 1206 |
| 554a | Seq. ID No. 1209 | Seq. ID No. 1210 |
| 557a | Seq. ID No. 1215 | Seq. ID No. 1216 |
| 560a | Seq. ID No. 1219 | Seq. ID No. 1220 |
| 561 | Seq. ID No. 1223 | Seq. ID No. 1224 |
| 563 | Seq. ID No. 1225 | Seq. ID No. 1226 |
| 569 | Seq. ID No. 1233 | Seq. ID No. 1234 |
| 570a | Seq. ID No. 1235 | Seq. ID No. 1236 |
| 573 | Seq. ID No. 1241 | Seq. ID No. 1242 |
| 580a | Seq. ID No. 1251 | Seq. ID No. 1252 |
| 583a | Seq. ID No. 1255 | Seq. ID No. 1256 |
| 586a | Seq. ID No. 1261 | Seq. ID No. 1262 |
| 587d | Seq. ID No. 1271 | Seq. ID No. 1272 |
| 590 | Seq. ID No. 1281 | Seq. ID No. 1282 |
| 609a | Seq. ID No. 1315 | Seq. ID No. 1316 |
| 611 | Seq. ID No. 1323 | Seq. ID No. 1324 |
| 613d | Seq. ID No. 1331 | Seq. ID No. 1332 |
| 614a | Seq. ID No. 1333 | Seq. ID No. 1334 |
| 618 | Seq. ID No. 1339 | Seq. ID No. 1340 |
| 620 | Seq. ID No. 1345 | Seq. ID No. 1346 |
| 623 | Seq. ID No. 1347 | Seq. ID No. 1348 |
| 625 | Seq. ID No. 1355 | Seq. ID No. 1356 |
| 626a | Seq. ID No. 1357 | Seq. ID No. 1358 |
| 631d | Seq. ID No. 1369 | Seq. ID No. 1370 |
| 633a | Seq. ID No. 1373 | Seq. ID No. 1374 |
| 637c | Seq. ID No. 1387 | Seq. ID No. 1388 |
| 641a | Seq. ID No. 1391 | Seq. ID No. 1392 |
| 643 | Seq. ID No. 1395 | Seq. ID No. 1396 |
| 644a | Seq. ID No. 1397 | Seq. ID No. 1398 |
| 650 | Seq. ID No. 1403 | Seq. ID No. 1404 |
| 652 | Seq. ID No. 1405 | Seq. ID No. 1406 |
| 653a | Seq. ID No. 1407 | Seq. ID No. 1408 |
| 656 | Seq. ID No. 1413 | Seq. ID No. 1414 |
| 657c | Seq. ID No. 1415 | Seq. ID No. 1416 |
| 658a | Seq. ID No. 1417 | Seq. ID No. 1418 |
| 661 | Seq. ID No. 1425 | Seq. ID No. 1426 |
| 663 | Seq. ID No. 1427 | Seq. ID No. 1428 |
| 665 | Seq. ID No. 1429 | Seq. ID No. 1430 |
| 666 | Seq. ID No. 1431 | Seq. ID No. 1432 |
| 670 | Seq. ID No. 1433 | Seq. ID No. 1434 |
| 674a | Seq. ID No. 1435 | Seq. ID No. 1436 |
| 676 | Seq. ID No. 1439 | Seq. ID No. 1440 |
| 677a | Seq. ID No. 1441 | Seq. ID No. 1442 |
| 681 | Seq. ID No. 1451 | Seq. ID No. 1452 |
| 683a | Seq. ID No. 1453 | Seq. ID No. 1454 |
| 687 | Seq. ID No. 1459 | Seq. ID No. 1460 |
| 688a | Seq. ID No. 1461 | Seq. ID No. 1462 |
| 691b | Seq. ID No. 1469 | Seq. ID No. 1470 |
| 692 | Seq. ID No. 1471 | Seq. ID No. 1472 |
| 694 | Seq. ID No. 1473 | Seq. ID No. 1474 |
| 696 | Seq. ID No. 1475 | Seq. ID No. 1476 |
| 698 | Seq. ID No. 1477 | Seq. ID No. 1478 |
| 700b | Seq. ID No. 1483 | Seq. ID No. 1484 |
| 703 | Seq. ID No. 1487 | Seq. ID No. 1488 |
| 705a | Seq. ID No. 1489 | Seq. ID No. 1490 |
| 707 | Seq. ID No. 1493 | Seq. ID No. 1494 |
| 709 | Seq. ID No. 1495 | Seq. ID No. 1496 |
| 710 | Seq. ID No. 1497 | Seq. ID No. 1498 |
| 712b | Seq. ID No. 1501 | Seq. ID No. 1502 |
| 715a | Seq. ID No. 1503 | Seq. ID No. 1504 |
| 717 | Seq. ID No. 1507 | Seq. ID No. 1508 |
| 718a | Seq. ID No. 1509 | Seq. ID No. 1510 |
| 722c | Seq. ID No. 1517 | Seq. ID No. 1518 |
| 724b | Seq. ID No. 1521 | Seq. ID No. 1522 |
| 726 | Seq. ID No. 1527 | Seq. ID No. 1528 |
| 728b | Seq. ID No. 1531 | Seq. ID No. 1532 |
| 730c | Seq. ID No. 1537 | Seq. ID No. 1538 |
| 731b | Seq. ID No. 1541 | Seq. ID No. 1542 |
| 732 | Seq. ID No. 1543 | Seq. ID No. 1544 |
| 738c | Seq. ID No. 1549 | Seq. ID No. 1550 |
| 743b | Seq. ID No. 1561 | Seq. ID No. 1562 |
| 744 | Seq. ID No. 1563 | Seq. ID No. 1564 |
| 745a | Seq. ID No. 1565 | Seq. ID No. 1566 |
| 746a | Seq. ID No. 1569 | Seq. ID No. 1570 |
| 747 | Seq. ID No. 1573 | Seq. ID No. 1574 |
| 748a | Seq. ID No. 1575 | Seq. ID No. 1576 |
| 751 | Seq. ID No. 1581 | Seq. ID No. 1582 |
| 754c | Seq. ID No. 1587 | Seq. ID No. 1588 |
| 756a | Seq. ID No. 1591 | Seq. ID No. 1592 |
| 758 | Seq. ID No. 1595 | Seq. ID No. 1596 |
| 760 | Seq. ID No. 1597 | Seq. ID No. 1598 |
| 763a | Seq. ID No. 1605 | Seq. ID No. 1606 |
| 764 | Seq. ID No. 1609 | Seq. ID No. 1610 |
| 767 | Seq. ID No. 1613 | Seq. ID No. 1614 |
| 770c | Seq. ID No. 1619 | Seq. ID No. 1620 |
| 772b | Seq. ID No. 1623 | Seq. ID No. 1624 |
| 775 | Seq. ID No. 1627 | Seq. ID No. 1628 |
| 777a | Seq. ID No. 1629 | Seq. ID No. 1630 |
| 780a | Seq. ID No. 1635 | Seq. ID No. 1636 |
| 785 | Seq. ID No. 1641 | Seq. ID No. 1642 |
| 788b | Seq. ID No. 1647 | Seq. ID No. 1648 |
| 789b | Seq. ID No. 1651 | Seq. ID No. 1652 |
| 792 | Seq. ID No. 1657 | Seq. ID No. 1658 |
| 794a | Seq. ID No. 1659 | Seq. ID No. 1660 |
| 795 | Seq. ID No. 1667 | Seq. ID No. 1668 |
| 797 | Seq. ID No. 1669 | Seq. ID No. 1670 |
| 799e | Seq. ID No. 1679 | Seq. ID No. 1680 |
| 803a | Seq. ID No. 1683 | Seq. ID No. 1684 |
| 804a | Seq. ID No. 1687 | Seq. ID No. 1688 |
| 807 | Seq. ID No. 1691 | Seq. ID No. 1692 |
| 812 | Seq. ID No. 1697 | Seq. ID No. 1698 |
| 813 | Seq. ID No. 1699 | Seq. ID No. 1700 |
| 816 | Seq. ID No. 1701 | Seq. ID No. 1702 |
| 826 | Seq. ID No. 1707 | Seq. ID No. 1708 |
| 829a | Seq. ID No. 1709 | Seq. ID No. 1710 |
| 830 | Seq. ID No. 1713 | Seq. ID No. 1714 |
| 834b | Seq. ID No. 1717 | Seq. ID No. 1718 |
| 835a | Seq. ID No. 1721 | Seq. ID No. 1722 |
| 836a | Seq. ID No. 1725 | Seq. ID No. 1726 |
| 837c | Seq. ID No. 1735 | Seq. ID No. 1736 |
| 843 | Seq. ID No. 1737 | Seq. ID No. 1738 |
| 847a | Seq. ID No. 1739 | Seq. ID No. 1740 |
| 848 | Seq. ID No. 1743 | Seq. ID No. 1744 |
| 849a | Seq. ID No. 1745 | Seq. ID No. 1746 |
| 851a | Seq. ID No. 1749 | Seq. ID No. 1750 |
| 853b | Seq. ID No. 1755 | Seq. ID No. 1756 |
| 859c | Seq. ID No. 1769 | Seq. ID No. 1770 |
| 860 | Seq. ID No. 1773 | Seq. ID No. 1774 |
| 863 | Seq. ID No. 1777 | Seq. ID No. 1778 |
| 866b | Seq. ID No. 1785 | Seq. ID No. 1786 |
| 868b | Seq. ID No. 1789 | Seq. ID No. 1790 |
| 870 | Seq. ID No. 1791 | Seq. ID No. 1792 |
| 873c | Seq. ID No. 1797 | Seq. ID No. 1798 |
| 874a | Seq. ID No. 1799 | Seq. ID No. 1800 |
| 875 | Seq. ID No. 1803 | Seq. ID No. 1804 |
| 876 | Seq. ID No. 1805 | Seq. ID No. 1806 |
| 878a | Seq. ID No. 1807 | Seq. ID No. 1808 |
| 880c | Seq. ID No. 1817 | Seq. ID No. 1818 |
| 885 | Seq. ID No. 1819 | Seq. ID No. 1820 |
| 886 | Seq. ID No. 1821 | Seq. ID No. 1822 |
| 888 | Seq. ID No. 1825 | Seq. ID No. 1826 |
| 890a | Seq. ID No. 1827 | Seq. ID No. 1828 |
| 894 | Seq. ID No. 1831 | Seq. ID No. 1832 |
| 907a | Seq. ID No. 1835 | Seq. ID No. 1836 |
| 908b | Seq. ID No. 1841 | Seq. ID No. 1842 |
| 911 | Seq. ID No. 1845 | Seq. ID No. 1846 |
| 912 | Seq. ID No. 1847 | Seq. ID No. 1848 |
| 916 | Seq. ID No. 1849 | Seq. ID No. 1850 |
| 917 | Seq. ID No. 1851 | Seq. ID No. 1852 |
| 918c | Seq. ID No. 1855 | Seq. ID No. 1856 |
| 923 | Seq. ID No. 1859 | Seq. ID No. 1860 |
| 925a | Seq. ID No. 1861 | Seq. ID No. 1862 |
| 926 | Seq. ID No. 1865 | Seq. ID No. 1866 |
| 927 | Seq. ID No. 1867 | Seq. ID No. 1868 |
| 929b | Seq. ID No. 1871 | Seq. ID No. 1872 |
| 930 | Seq. ID No. 1873 | Seq. ID No. 1874 |
| 932 | Seq. ID No. 1877 | Seq. ID No. 1878 |
| 934a | Seq. ID No. 1879 | Seq. ID No. 1880 |
| 935 | Seq. ID No. 1887 | Seq. ID No. 1888 |
| 938 | Seq. ID No. 1889 | Seq. ID No. 1890 |
| 939c | Seq. ID No. 1895 | Seq. ID No. 1896 |
| 942 | Seq. ID No. 1897 | Seq. ID No. 1898 |
| 943 | Seq. ID No. 1899 | Seq. ID No. 1900 |
| 944a | Seq. ID No. 1901 | Seq. ID No. 1902 |
| 946 | Seq. ID No. 1905 | Seq. ID No. 1906 |
| 949b | Seq. ID No. 1909 | Seq. ID No. 1910 |
| 951a | Seq. ID No. 1917 | Seq. ID No. 1918 |
| 952a | Seq. ID No. 1921 | Seq. ID No. 1922 |
| 954 | Seq. ID No. 1925 | Seq. ID No. 1926 |
| 956 | Seq. ID No. 1931 | Seq. ID No. 1932 |
| 958a | Seq. ID No. 1933 | Seq. ID No. 1934 |
| 959 | Seq. ID No. 1937 | Seq. ID No. 1938 |
| 961a | Seq. ID No. 1939 | Seq. ID No. 1940 |
| 963 | Seq. ID No. 1945 | Seq. ID No. 1946 |
| 965a | Seq. ID No. 1947 | Seq. ID No. 1948 |
| 966a | Seq. ID No. 1951 | Seq. ID No. 1952 |
| 967a | Seq. ID No. 1955 | Seq. ID No. 1956 |
| 968 | Seq. ID No. 1959 | Seq. ID No. 1960 |
| 969 | Seq. ID No. 1961 | Seq. ID No. 1962 |
| 972b | Seq. ID No. 1965 | Seq. ID No. 1966 |
| 976 | Seq. ID No. 1967 | Seq. ID No. 1968 |
| 977a | Seq. ID No. 1969 | Seq. ID No. 1970 |
| 978a | Seq. ID No. 1973 | Seq. ID No. 1974 |
| 979 | Seq. ID No. 1977 | Seq. ID No. 1978 |
| 980 | Seq. ID No. 1979 | Seq. ID No. 1980 |
| 982 | Seq. ID No. 1983 | Seq. ID No. 1984 |
| 986 | Seq. ID No. 1989 | Seq. ID No. 1990 |
| 987 | Seq. ID No. 1991 | Seq. ID No. 1992 |
| 988c | Seq. ID No. 1997 | Seq. ID No. 1998 |
| 991 | Seq. ID No. 2001 | Seq. ID No. 2002 |
| 992 | Seq. ID No. 2003 | Seq. ID No. 2004 |
| 997 | Seq. ID No. 2011 | Seq. ID No. 2012 |
| 1000 | Seq. ID No. 2021 | Seq. ID No. 2022 |
| 1001 | Seq. ID No. 2023 | Seq. ID No. 2024 |
| 1004a | Seq. ID No. 2029 | Seq. ID No. 2030 |
| 1006a | Seq. ID No. 2033 | Seq. ID No. 2034 |
| 1007 | Seq. ID No. 2037 | Seq. ID No. 2038 |
| 1012 | Seq. ID No. 2039 | Seq. ID No. 2040 |
| 1013c | Seq. ID No. 2045 | Seq. ID No. 2046 |
| 1016c | Seq. ID No. 2047 | Seq. ID No. 2048 |
| 1017b | Seq. ID No. 2051 | Seq. ID No. 2052 |
| 1018a | Seq. ID No. 2057 | Seq. ID No. 2058 |
| 1021a | Seq. ID No. 2061 | Seq. ID No. 2062 |
| 1024 | Seq. ID No. 2067 | Seq. ID No. 2068 |
| 1025 | Seq. ID No. 2069 | Seq. ID No. 2070 |
| 1026 | Seq. ID No. 2071 | Seq. ID No. 2072 |
| 1029 | Seq. ID No. 2073 | Seq. ID No. 2074 |
| 1033b | Seq. ID No. 2077 | Seq. ID No. 2078 |
| 1036b | Seq. ID No. 2089 | Seq. ID No. 2090 |
| 1037 | Seq. ID No. 2093 | Seq. ID No. 2094 |
| 1039a | Seq. ID No. 2095 | Seq. ID No. 2096 |
| 1041 | Seq. ID No. 2099 | Seq. ID No. 2100 |
| 1042a | Seq. ID No. 2101 | Seq. ID No. 2102 |
| 1047a | Seq. ID No. 2113 | Seq. ID No. 2114 |
| 1049a | Seq. ID No. 2117 | Seq. ID No. 2118 |
| 1050b | Seq. ID No. 2123 | Seq. ID No. 2124 |
| 1057 | Seq. ID No. 2135 | Seq. ID No. 2136 |
| 1058 | Seq. ID No. 2137 | Seq. ID No. 2138 |
| 1060a | Seq. ID No. 2139 | Seq. ID No. 2140 |
| 1062 | Seq. ID No. 2143 | Seq. ID No. 2144 |
| 1064 | Seq. ID No. 2147 | Seq. ID No. 2148 |
| 1065c | Seq. ID No. 2153 | Seq. ID No. 2154 |
| 1067 | Seq. ID No. 2159 | Seq. ID No. 2160 |
| 1070a | Seq. ID No. 2163 | Seq. ID No. 2164 |
| 1076a | Seq. ID No. 2167 | Seq. ID No. 2168 |
| 1077c | Seq. ID No. 2175 | Seq. ID No. 2176 |
| 1079a | Seq. ID No. 2181 | Seq. ID No. 2182 |
| 1080a | Seq. ID No. 2185 | Seq. ID No. 2186 |
| 1081b | Seq. ID No. 2189 | Seq. ID No. 2190 |
| 1085 | Seq. ID No. 2193 | Seq. ID No. 2194 |
| 1086 | Seq. ID No. 2195 | Seq. ID No. 2196 |
| 1087a | Seq. ID No. 2197 | Seq. ID No. 2198 |
| 1094a | Seq. ID No. 2205 | Seq. ID No. 2206 |
| 1096c | Seq. ID No. 2217 | Seq. ID No. 2218 |
| 1097 | Seq. ID No. 2219 | Seq. ID No. 2220 |
| 1100 | Seq. ID No. 2223 | Seq. ID No. 2224 |
| 1101a | Seq. ID No. 2225 | Seq. ID No. 2226 |
| 1104 | Seq. ID No. 2229 | Seq. ID No. 2230 |
| 1108b | Seq. ID No. 2235 | Seq. ID No. 2236 |
| 1111b | Seq. ID No. 2239 | Seq. ID No. 2240 |
| 1112a | Seq. ID No. 2243 | Seq. ID No. 2244 |
| 1125 | Seq. ID No. 2245 | Seq. ID No. 2246 |
| 1126a | Seq. ID No. 2247 | Seq. ID No. 2248 |
| 1127 | Seq. ID No. 2253 | Seq. ID No. 2254 |
| 1128 | Seq. ID No. 2255 | Seq. ID No. 2256 |
| 1131 | Seq. ID No. 2257 | Seq. ID No. 2258 |
| 1132 | Seq. ID No. 2259 | Seq. ID No. 2260 |
| 1135a | Seq. ID No. 2261 | Seq. ID No. 2262 |
| 1136a | Seq. ID No. 2265 | Seq. ID No. 2266 |
| 1138 | Seq. ID No. 2269 | Seq. ID No. 2270 |
| 1140b | Seq. ID No. 2273 | Seq. ID No. 2274 |
| 1144b | Seq. ID No. 2285 | Seq. ID No. 2286 |
| 1146e | Seq. ID No. 2297 | Seq. ID No. 2298 |
| 1148 | Seq. ID No. 2299 | Seq. ID No. 2300 |
| 1149 | Seq. ID No. 2301 | Seq. ID No. 2302 |
| 1152f | Seq. ID No. 2313 | Seq. ID No. 2314 |
| 1155f | Seq. ID No. 2327 | Seq. ID No. 2328 |
| 1158a | Seq. ID No. 2331 | Seq. ID No. 2332 |
| 1160 | Seq. ID No. 2335 | Seq. ID No. 2336 |
| 1161a | Seq. ID No. 2337 | Seq. ID No. 2338 |
| 1162 | Seq. ID No. 2341 | Seq. ID No. 2342 |
| 1165 | Seq. ID No. 2343 | Seq. ID No. 2344 |
| 1166 | Seq. ID No. 2345 | Seq. ID No. 2346 |
| 1167b | Seq. ID No. 2349 | Seq. ID No. 2350 |
| 1168 | Seq. ID No. 2351 | Seq. ID No. 2352 |
| 1169c | Seq. ID No. 2357 | Seq. ID No. 2358 |
| 1170 | Seq. ID No. 2359 | Seq. ID No. 2360 |
| 1171a | Seq. ID No. 2361 | Seq. ID No. 2362 |
| 1172 | Seq. ID No. 2365 | Seq. ID No. 2366 |
| 1174 | Seq. ID No. 2369 | Seq. ID No. 2370 |
| 1177 | Seq. ID No. 2373 | Seq. ID No. 2374 |
| 1179a | Seq. ID No. 2377 | Seq. ID No. 2378 |
| 1180a | Seq. ID No. 2383 | Seq. ID No. 2384 |
| 1183a | Seq. ID No. 2397 | Seq. ID No. 2398 |
| 1184 | Seq. ID No. 2401 | Seq. ID No. 2402 |
| 1185a | Seq. ID No. 2403 | Seq. ID No. 2404 |
| 1186b | Seq. ID No. 2409 | Seq. ID No. 2410 |
| 1188a | Seq. ID No. 2411 | Seq. ID No. 2412 |
| 1191 | Seq. ID No. 2417 | Seq. ID No. 2418 |
| 1192b | Seq. ID No. 2421 | Seq. ID No. 2422 |
| 1194 | Seq. ID No. 2423 | Seq. ID No. 2424 |
| 1196a | Seq. ID No. 2425 | Seq. ID No. 2426 |
| 1197 | Seq. ID No. 2429 | Seq. ID No. 2430 |
| 1199b | Seq. ID No. 2435 | Seq. ID No. 2436 |
| 1200 | Seq. ID No. 2437 | Seq. ID No. 2438 |
| 1201 | Seq. ID No. 2439 | Seq. ID No. 2440 |
| 1202a | Seq. ID No. 2441 | Seq. ID No. 2442 |
| 1205 | Seq. ID No. 2445 | Seq. ID No. 2446 |
| 1207 | Seq. ID No. 2449 | Seq. ID No. 2450 |
| 1208 | Seq. ID No. 2451 | Seq. ID No. 2452 |
| 1209 | Seq. ID No. 2453 | Seq. ID No. 2454 |
| 1213a | Seq. ID No. 2461 | Seq. ID No. 2462 |
| 1214 | Seq. ID No. 2465 | Seq. ID No. 2466 |
| 1215a | Seq. ID No. 2467 | Seq. ID No. 2468 |
| 1217c | Seq. ID No. 2471 | Seq. ID No. 2472 |
| 1218a | Seq. ID No. 2473 | Seq. ID No. 2474 |
| 1219 | Seq. ID No. 2477 | Seq. ID No. 2478 |
| 1220 | Seq. ID No. 2479 | Seq. ID No. 2480 |
| 1221a | Seq. ID No. 2481 | Seq. ID No. 2482 |
| 1223 | Seq. ID No. 2485 | Seq. ID No. 2486 |
| 1224a | Seq. ID No. 2487 | Seq. ID No. 2488 |
| 1226 | Seq. ID No. 2495 | Seq. ID No. 2496 |
| 1230 | Seq. ID No. 2505 | Seq. ID No. 2506 |
| 1231 | Seq. ID No. 2507 | Seq. ID No. 2508 |
| 1233a | Seq. ID No. 2509 | Seq. ID No. 2510 |
| 1234c | Seq. ID No. 2519 | Seq. ID No. 2520 |
| 1237 | Seq. ID No. 2525 | Seq. ID No. 2526 |
| 1239 | Seq. ID No. 2527 | Seq. ID No. 2528 |
| 1240 | Seq. ID No. 2529 | Seq. ID No. 2530 |
| 1241c | Seq. ID No. 2535 | Seq. ID No. 2536 |
| 1243 | Seq. ID No. 2537 | Seq. ID No. 2538 |
| 1244 | Seq. ID No. 2539 | Seq. ID No. 2540 |
| 1245d | Seq. ID No. 2547 | Seq. ID No. 2548 |
| 1246a | Seq. ID No. 2551 | Seq. ID No. 2552 |
| 1250e | Seq. ID No. 2563 | Seq. ID No. 2564 |
| 1251a | Seq. ID No. 2565 | Seq. ID No. 2566 |
| 1253c | Seq. ID No. 2573 | Seq. ID No. 2574 |
| 1256 | Seq. ID No. 2577 | Seq. ID No. 2578 |
| 1257a | Seq. ID No. 2579 | Seq. ID No. 2580 |
| 1258b | Seq. ID No. 2585 | Seq. ID No. 2586 |
| 1263 | Seq. ID No. 2593 | Seq. ID No. 2594 |
| 1265 | Seq. ID No. 2595 | Seq. ID No. 2596 |
| 1266b | Seq. ID No. 2599 | Seq. ID No. 2600 |
| 1268b | Seq. ID No. 2607 | Seq. ID No. 2608 |
| 1269 | Seq. ID No. 2609 | Seq. ID No. 2610 |
| 1271 | Seq. ID No. 2613 | Seq. ID No. 2614 |
| 1272a | Seq. ID No. 2615 | Seq. ID No. 2616 |
| 1273 | Seq. ID No. 2619 | Seq. ID No. 2620 |
| 1275b | Seq. ID No. 2623 | Seq. ID No. 2624 |
| 1277 | Seq. ID No. 2625 | Seq. ID No. 2626 |
| 1279 | Seq. ID No. 2631 | Seq. ID No. 2632 |
| 1281 | Seq. ID No. 2633 | Seq. ID No. 2634 |
| 1283c | Seq. ID No. 2639 | Seq. ID No. 2640 |
| 1284 | Seq. ID No. 2641 | Seq. ID No. 2642 |
| 1285a | Seq. ID No. 2643 | Seq. ID No. 2644 |
| 1287a | Seq. ID No. 2647 | Seq. ID No. 2648 |
| 1288 | Seq. ID No. 2651 | Seq. ID No. 2652 |
| 1290 | Seq. ID No. 2655 | Seq. ID No. 2656 |
| 1293a | Seq. ID No. 2657 | Seq. ID No. 2658 |
| 1294a | Seq. ID No. 2661 | Seq. ID No. 2662 |
| 1297a | Seq. ID No. 2665 | Seq. ID No. 2666 |
| 1300 | Seq. ID No. 2669 | Seq. ID No. 2670 |
| 1302 | Seq. ID No. 2671 | Seq. ID No. 2672 |
| 1305a | Seq. ID No. 2673 | Seq. ID No. 2674 |
| 1308b | Seq. ID No. 2681 | Seq. ID No. 2682 |
| 1311 | Seq. ID No. 2689 | Seq. ID No. 2690 |
| 1315 | Seq. ID No. 2693 | Seq. ID No. 2694 |
| 1318 | Seq. ID No. 2699 | Seq. ID No. 2700 |
| 1319b | Seq. ID No. 2703 | Seq. ID No. 2704 |
| 1320c | Seq. ID No. 2709 | Seq. ID No. 2710 |
| 1321 | Seq. ID No. 2711 | Seq. ID No. 2712 |
| 1322a | Seq. ID No. 2713 | Seq. ID No. 2714 |
| 1324 | Seq. ID No. 2719 | Seq. ID No. 2720 |
| 1326a | Seq. ID No. 2721 | Seq. ID No. 2722 |
| 1333 | Seq. ID No. 2727 | Seq. ID No. 2728 |
| 1337 | Seq. ID No. 2737 | Seq. ID No. 2738 |
| 1340a | Seq. ID No. 2741 | Seq. ID No. 2742 |
| 1341a | Seq. ID No. 2745 | Seq. ID No. 2746 |
| 1344a | Seq. ID No. 2749 | Seq. ID No. 2750 |
| 1348 | Seq. ID No. 2753 | Seq. ID No. 2754 |
| 1349b | Seq. ID No. 2757 | Seq. ID No. 2758 |
| 1350a | Seq. ID No. 2761 | Seq. ID No. 2762 |
| 1353 | Seq. ID No. 2765 | Seq. ID No. 2766 |
| 1355 | Seq. ID No. 2767 | Seq. ID No. 2768 |
| 1358a | Seq. ID No. 2769 | Seq. ID No. 2770 |
| 1359 | Seq. ID No. 2773 | Seq. ID No. 2774 |
| 1361 | Seq. ID No. 2775 | Seq. ID No. 2776 |
| 1364a | Seq. ID No. 2777 | Seq. ID No. 2778 |
| 1366b | Seq. ID No. 2787 | Seq. ID No. 2788 |
| 1367 | Seq. ID No. 2789 | Seq. ID No. 2790 |
| 1368 | Seq. ID No. 2791 | Seq. ID No. 2792 |
| 1371 | Seq. ID No. 2793 | Seq. ID No. 2794 |
| 1373a | Seq. ID No. 2795 | Seq. ID No. 2796 |
| 1374 | Seq. ID No. 2799 | Seq. ID No. 2800 |
| 1377 | Seq. ID No. 2803 | Seq. ID No. 2804 |
| 1382 | Seq. ID No. 2815 | Seq. ID No. 2816 |
| 1383 | Seq. ID No. 2817 | Seq. ID No. 2818 |
| 1384a | Seq. ID No. 2819 | Seq. ID No. 2820 |
| 1386a | Seq. ID No. 2825 | Seq. ID No. 2826 |
| 1394 | Seq. ID No. 2843 | Seq. ID No. 2844 |
| 1396 | Seq. ID No. 2847 | Seq. ID No. 2848 |
| 1397 | Seq. ID No. 2849 | Seq. ID No. 2850 |
| 1398 | Seq. ID No. 2851 | Seq. ID No. 2852 |
| 1400 | Seq. ID No. 2857 | Seq. ID No. 2858 |
| 1401 | Seq. ID No. 2859 | Seq. ID No. 2860 |
| 1405 | Seq. ID No. 2863 | Seq. ID No. 2864 |
| 1408 | Seq. ID No. 2867 | Seq. ID No. 2868 |
| 1409 | Seq. ID No. 2869 | Seq. ID No. 2870 |
| 1410 | Seq. ID No. 2871 | Seq. ID No. 2872 |
| 1411c | Seq. ID No. 2877 | Seq. ID No. 2878 |
| 1412a | Seq. ID No. 2879 | Seq. ID No. 2880 |
| 1415 | Seq. ID No. 2889 | Seq. ID No. 2890 |
| 1416 | Seq. ID No. 2891 | Seq. ID No. 2892 |
| 1420a | Seq. ID No. 2897 | Seq. ID No. 2898 |
| 1422 | Seq. ID No. 2901 | Seq. ID No. 2902 |
| 1423 | Seq. ID No. 2903 | Seq. ID No. 2904 |
| 1426b | Seq. ID No. 2907 | Seq. ID No. 2908 |
| 1427a | Seq. ID No. 2909 | Seq. ID No. 2910 |
| 1428 | Seq. ID No. 2913 | Seq. ID No. 2914 |
| 1429a | Seq. ID No. 2915 | Seq. ID No. 2916 |
| 1431 | Seq. ID No. 2919 | Seq. ID No. 2920 |
| 1432 | Seq. ID No. 2921 | Seq. ID No. 2922 |
| 1433 | Seq. ID No. 2923 | Seq. ID No. 2924 |
| 1434a | Seq. ID No. 2925 | Seq. ID No. 2926 |
| 1437a | Seq. ID No. 2929 | Seq. ID No. 2930 |
| 1438 | Seq. ID No. 2935 | Seq. ID No. 2936 |
| 1439d | Seq. ID No. 2943 | Seq. ID No. 2944 |
| 1440c | Seq. ID No. 2951 | Seq. ID No. 2952 |
| 1442a | Seq. ID No. 2955 | Seq. ID No. 2956 |
| 1445c | Seq. ID No. 2963 | Seq. ID No. 2964 |
| 1446a | Seq. ID No. 2965 | Seq. ID No. 2966 |
| 1447b | Seq. ID No. 2971 | Seq. ID No. 2972 |
| 1448 | Seq. ID No. 2973 | Seq. ID No. 2974 |
| 1449a | Seq. ID No. 2975 | Seq. ID No. 2976 |
| 1451 | Seq. ID No. 2979 | Seq. ID No. 2980 |
| 1452a | Seq. ID No. 2981 | Seq. ID No. 2982 |
| 1453 | Seq. ID No. 2985 | Seq. ID No. 2986 |
| 1455a | Seq. ID No. 2989 | Seq. ID No. 2990 |
| 1456 | Seq. ID No. 2993 | Seq. ID No. 2994 |
| 1457c | Seq. ID No. 2999 | Seq. ID No. 3000 |
| 1459 | Seq. ID No. 3001 | Seq. ID No. 3002 |
| 1462a | Seq. ID No. 3003 | Seq. ID No. 3004 |
| 1466c | Seq. ID No. 3017 | Seq. ID No. 3018 |
| 1469c | Seq. ID No. 3027 | Seq. ID No. 3028 |
| 1470c | Seq. ID No. 3033 | Seq. ID No. 3034 |
| 1471 | Seq. ID No. 3035 | Seq. ID No. 3036 |
| 1472c | Seq. ID No. 3039 | Seq. ID No. 3040 |
| 1474 | Seq. ID No. 3041 | Seq. ID No. 3042 |
| 1475 | Seq. ID No. 3043 | Seq. ID No. 3044 |
| 1476 | Seq. ID No. 3045 | Seq. ID No. 3046 |
| 1477a | Seq. ID No. 3047 | Seq. ID No. 3048 |
| 1479c | Seq. ID No. 3055 | Seq. ID No. 3056 |
| 1482a | Seq. ID No. 3057 | Seq. ID No. 3058 |
| 1483 | Seq. ID No. 3061 | Seq. ID No. 3062 |
| 1484b | Seq. ID No. 3065 | Seq. ID No. 3066 |
| 1486 | Seq. ID No. 3069 | Seq. ID No. 3070 |
| 1488d | Seq. ID No. 3079 | Seq. ID No. 3080 |
| 1490 | Seq. ID No. 3089 | Seq. ID No. 3090 |
| 1494 | Seq. ID No. 3091 | Seq. ID No. 3092 |
| 1497 | Seq. ID No. 3093 | Seq. ID No. 3094 |
| 1498a | Seq. ID No. 3095 | Seq. ID No. 3096 |
| 1499 | Seq. ID No. 3103 | Seq. ID No. 3104 |
| 1502a | Seq. ID No. 3105 | Seq. ID No. 3106 |
| 1503a | Seq. ID No. 3109 | Seq. ID No. 3110 |
| 1506a | Seq. ID No. 3113 | Seq. ID No. 3114 |
| 1508 | Seq. ID No. 3125 | Seq. ID No. 3126 |
| 1510a | Seq. ID No. 3127 | Seq. ID No. 3128 |
| 1511 | Seq. ID No. 3135 | Seq. ID No. 3136 |
| 1512 | Seq. ID No. 3137 | Seq. ID No. 3138 |
| 1513b | Seq. ID No. 3141 | Seq. ID No. 3142 |
| 1516 | Seq. ID No. 3143 | Seq. ID No. 3144 |
| 1517b | Seq. ID No. 3147 | Seq. ID No. 3148 |
| 1520 | Seq. ID No. 3155 | Seq. ID No. 3156 |
| 1522 | Seq. ID No. 3157 | Seq. ID No. 3158 |
| 1523 | Seq. ID No. 3159 | Seq. ID No. 3160 |
| 1528 | Seq. ID No. 3161 | Seq. ID No. 3162 |
| 1530b | Seq. ID No. 3165 | Seq. ID No. 3166 |
| 1534a | Seq. ID No. 3169 | Seq. ID No. 3170 |
| 1536a | Seq. ID No. 3175 | Seq. ID No. 3176 |
| 1537 | Seq. ID No. 3179 | Seq. ID No. 3180 |
| 1543 | Seq. ID No. 3183 | Seq. ID No. 3184 |
| 1544 | Seq. ID No. 3185 | Seq. ID No. 3186 |
| 1547b | Seq. ID No. 3189 | Seq. ID No. 3190 |
| 1548 | Seq. ID No. 3191 | Seq. ID No. 3192 |
| 1553a | Seq. ID No. 3195 | Seq. ID No. 3196 |
| 1554a | Seq. ID No. 3199 | Seq. ID No. 3200 |
| 1555 | Seq. ID No. 3205 | Seq. ID No. 3206 |
| 1556c | Seq. ID No. 3211 | Seq. ID No. 3212 |
| 1557c | Seq. ID No. 3217 | Seq. ID No. 3218 |
| 1559b | Seq. ID No. 3221 | Seq. ID No. 3222 |
| 1564a | Seq. ID No. 3225 | Seq. ID No. 3226 |
| 1565 | Seq. ID No. 3229 | Seq. ID No. 3230 |
| 1567 | Seq. ID No. 3231 | Seq. ID No. 3232 |
| 1570 | Seq. ID No. 3237 | Seq. ID No. 3238 |
| 1571 | Seq. ID No. 3239 | Seq. ID No. 3240 |
| 1572d | Seq. ID No. 3247 | Seq. ID No. 3248 |
| 1573 | Seq. ID No. 3251 | Seq. ID No. 3252 |
| 1576 | Seq. ID No. 3253 | Seq. ID No. 3254 |
| 1577a | Seq. ID No. 3255 | Seq. ID No. 3256 |
| 1578 | Seq. ID No. 3259 | Seq. ID No. 3260 |
| 1580a | Seq. ID No. 3261 | Seq. ID No. 3262 |
| 1582a | Seq. ID No. 3267 | Seq. ID No. 3268 |
| 1584 | Seq. ID No. 3273 | Seq. ID No. 3274 |
| 1585b | Seq. ID No. 3277 | Seq. ID No. 3278 |
| 1587a | Seq. ID No. 3279 | Seq. ID No. 3280 |
| 1588 | Seq. ID No. 3285 | Seq. ID No. 3286 |
| 1590 | Seq. ID No. 3287 | Seq. ID No. 3288 |
| 1591 | Seq. ID No. 3289 | Seq. ID No. 3290 |
| 1592b | Seq. ID No. 3293 | Seq. ID No. 3294 |
| 1593 | Seq. ID No. 3295 | Seq. ID No. 3296 |
| 1594b | Seq. ID No. 3299 | Seq. ID No. 3300 |
| 1595a | Seq. ID No. 3301 | Seq. ID No. 3302 |
| 1598a | Seq. ID No. 3305 | Seq. ID No. 3306 |
| 1600a | Seq. ID No. 3309 | Seq. ID No. 3310 |
| 1602 | Seq. ID No. 3315 | Seq. ID No. 3316 |
| 1606b | Seq. ID No. 3319 | Seq. ID No. 3320 |
| 1607a | Seq. ID No. 3321 | Seq. ID No. 3322 |
| 1610a | Seq. ID No. 3327 | Seq. ID No. 3328 |
| 1616a | Seq. ID No. 3333 | Seq. ID No. 3334 |
| 1619 | Seq. ID No. 3337 | Seq. ID No. 3338 |
| 1623a | Seq. ID No. 3343 | Seq. ID No. 3344 |
| 1625b | Seq. ID No. 3353 | Seq. ID No. 3354 |
| 1626b | Seq. ID No. 3359 | Seq. ID No. 3360 |
| 1628a | Seq. ID No. 3361 | Seq. ID No. 3362 |
| 1632a | Seq. ID No. 3365 | Seq. ID No. 3366 |
| 1634a | Seq. ID No. 3373 | Seq. ID No. 3374 |
| 1642a | Seq. ID No. 3381 | Seq. ID No. 3382 |
| 1643a | Seq. ID No. 3385 | Seq. ID No. 3386 |
| 1646c | Seq. ID No. 3393 | Seq. ID No. 3394 |
| 1647 | Seq. ID No. 3401 | Seq. ID No. 3402 |
| 1649b | Seq. ID No. 3407 | Seq. ID No. 3408 |
| 1652a | Seq. ID No. 3411 | Seq. ID No. 3412 |
| 1654 | Seq. ID No. 3415 | Seq. ID No. 3416 |
| 1656b | Seq. ID No. 3417 | Seq. ID No. 3418 |
| 1659b | Seq. ID No. 3423 | Seq. ID No. 3424 |
| 1662a | Seq. ID No. 3429 | Seq. ID No. 3430 |
| 1665a | Seq. ID No. 3437 | Seq. ID No. 3438 |
| 1668 | Seq. ID No. 3439 | Seq. ID No. 3440 |
| 1670a | Seq. ID No. 3443 | Seq. ID No. 3444 |
| 1673f | Seq. ID No. 3459 | Seq. ID No. 3460 |
| 1674 | Seq. ID No. 346 | Seq. ID No. 3462 |
| 1675b | Seq. ID No. 3465 | Seq. ID No. 3466 |
| 1676 | Seq. ID No. 3469 | Seq. ID No. 3470 |
| 1677 | Seq. ID No. 3471 | Seq. ID No. 3472 |
| 1679 | Seq. ID No. 3473 | Seq. ID No. 3474 |
| 1680 | Seq. ID No. 3475 | Seq. ID No. 3476 |
| 1682a | Seq. ID No. 3477 | Seq. ID No. 3478 |
| 1683b | Seq. ID No. 3483 | Seq. ID No. 3484 |
| 1685 | Seq. ID No. 3487 | Seq. ID No. 3488 |
| 1688c | Seq. ID No. 3495 | Seq. ID No. 3496 |
| 1689a | Seq. ID No. 3497 | Seq. ID No. 3498 |
| 1690b | Seq. ID No. 3505 | Seq. ID No. 3506 |
| 1691 | Seq. ID No. 3507 | Seq. ID No. 3508 |
| 1692 | Seq. ID No. 3509 | Seq. ID No. 3510 |
| 1693 | Seq. ID No. 3511 | Seq. ID No. 3512 |
| 1694b | Seq. ID No. 3515 | Seq. ID No. 3516 |
| 1696 | Seq. ID No. 3521 | Seq. ID No. 3522 |
| 1697a | Seq. ID No. 3523 | Seq. ID No. 3524 |
| 1699b | Seq. ID No. 3529 | Seq. ID No. 3530 |
| 1701a | Seq. ID No. 3535 | Seq. ID No. 3536 |
| 1704a | Seq. ID No. 3541 | Seq. ID No. 3542 |
| 1707a | Seq. ID No. 3551 | Seq. ID No. 3552 |
| 1710a | Seq. ID No. 3559 | Seq. ID No. 3560 |
| 1712a | Seq. ID No. 3563 | Seq. ID No. 3564 |
| 1715a | Seq. ID No. 3567 | Seq. ID No. 3568 |
| 1722 | Seq. ID No. 3575 | Seq. ID No. 3576 |
| 1723a | Seq. ID No. 3577 | Seq. ID No. 3578 |
| 1727 | Seq. ID No. 3583 | Seq. ID No. 3584 |
| 1728 | Seq. ID No. 3585 | Seq. ID No. 3586 |
| 1733 | Seq. ID No. 3589 | Seq. ID No. 3590 |
| 1734 | Seq. ID No. 3591 | Seq. ID No. 3592 |
| 1737b | Seq. ID No. 3599 | Seq. ID No. 3600 |
| 1738a | Seq. ID No. 3601 | Seq. ID No. 3602 |
| 1739 | Seq. ID No. 3607 | Seq. ID No. 3608 |
| 1741 | Seq. ID No. 3609 | Seq. ID No. 3610 |
| 1743 | Seq. ID No. 3611 | Seq. ID No. 3612 |
| 1744b | Seq. ID No. 3615 | Seq. ID No. 3616 |
| 1747 | Seq. ID No. 3619 | Seq. ID No. 3620 |
| 1752b | Seq. ID No. 3629 | Seq. ID No. 3630 |
| 1753 | Seq. ID No. 3631 | Seq. ID No. 3632 |
| 1756a | Seq. ID No. 3633 | Seq. ID No. 3634 |
| 1757a | Seq. ID No. 3637 | Seq. ID No. 3638 |
| 1759 | Seq. ID No. 3641 | Seq. ID No. 3642 |
| 1760 | Seq. ID No. 3643 | Seq. ID No. 3644 |
| 1762 | Seq. ID No. 3645 | Seq. ID No. 3646 |
| 1764c | Seq. ID No. 3651 | Seq. ID No. 3652 |
| 1765 | Seq. ID No. 3653 | Seq. ID No. 3654 |
| 1766 | Seq. ID No. 3655 | Seq. ID No. 3656 |
| 1769a | Seq. ID No. 3661 | Seq. ID No. 3662 |
| 1771 | Seq. ID No. 3665 | Seq. ID No. 3666 |
| 1773 | Seq. ID No. 3667 | Seq. ID No. 3668 |
| 1774 | Seq. ID No. 3669 | Seq. ID No. 3670 |
| 1775c | Seq. ID No. 3675 | Seq. ID No. 3676 |
| 1780 | Seq. ID No. 3681 | Seq. ID No. 3682 |
| 1784b | Seq. ID No. 3689 | Seq. ID No. 3690 |
| 1788c | Seq. ID No. 3695 | Seq. ID No. 3696 |
| 1789a | Seq. ID No. 3697 | Seq. ID No. 3698 |
| 1792a | Seq. ID No. 3705 | Seq. ID No. 3706 |
| 1793a | Seq. ID No. 3711 | Seq. ID No. 3712 |
| 1797a | Seq. ID No. 3719 | Seq. ID No. 3720 |
| 1798b | Seq. ID No. 3725 | Seq. ID No. 3726 |
| 1800 | Seq. ID No. 3729 | Seq. ID No. 3730 |
| 1802a | Seq. ID No. 3731 | Seq. ID No. 3732 |
| 1803 | Seq. ID No. 3735 | Seq. ID No. 3736 |
| 1804b | Seq. ID No. 3739 | Seq. ID No. 3740 |
| 1805 | Seq. ID No. 3741 | Seq. ID No. 3742 |
| 1806a | Seq. ID No. 3743 | Seq. ID No. 3744 |
| 1807a | Seq. ID No. 3749 | Seq. ID No. 3750 |
| 1808d | Seq. ID No. 3759 | Seq. ID No. 3760 |
| 1809e | Seq. ID No. 3769 | Seq. ID No. 3770 |
| 1810a | Seq. ID No. 3773 | Seq. ID No. 3774 |
| 1811a | Seq. ID No. 3777 | Seq. ID No. 3778 |
| 1812a | Seq. ID No. 3781 | Seq. ID No. 3782 |
| 1815a | Seq. ID No. 3787 | Seq. ID No. 3788 |
| 1816b | Seq. ID No. 3795 | Seq. ID No. 3796 |
| 1819a | Seq. ID No. 3801 | Seq. ID No. 3802 |
| 1821 | Seq. ID No. 3805 | Seq. ID No. 3806 |
| 1823a | Seq. ID No. 3809 | Seq. ID No. 3810 |
| 1825 | Seq. ID No. 3813 | Seq. ID No. 3814 |
| 1828 | Seq. ID No. 3819 | Seq. ID No. 3820 |
| 1830a | Seq. ID No. 3821 | Seq. ID No. 3822 |
| 1833 | Seq. ID No. 3825 | Seq. ID No. 3826 |
| 1834 | Seq. ID No. 3827 | Seq. ID No. 3828 |
| 1835 | Seq. ID No. 3829 | Seq. ID No. 3830 |
| 1836a | Seq. ID No. 3831 | Seq. ID No. 3832 |
| 1837 | Seq. ID No. 3835 | Seq. ID No. 3836 |
| 1838c | Seq. ID No. 3841 | Seq. ID No. 3842 |
| 1839a | Seq. ID No. 3845 | Seq. ID No. 3846 |
| 1842d | Seq. ID No. 3855 | Seq. ID No. 3856 |
| 1843 | Seq. ID No. 3857 | Seq. ID No. 3858 |
| 1845c | Seq. ID No. 3863 | Seq. ID No. 3864 |
| 1848b | Seq. ID No. 3867 | Seq. ID No. 3868 |
| 1850a | Seq. ID No. 3869 | Seq. ID No. 3870 |
| 1853a | Seq. ID No. 3875 | Seq. ID No. 3876 |
| 1854b | Seq. ID No. 3881 | Seq. ID No. 3882 |
| 1855 | Seq. ID No. 3883 | Seq. ID No. 3884 |
| 1856 | Seq. ID No. 3885 | Seq. ID No. 3886 |
| 1857a | Seq. ID No. 3887 | Seq. ID No. 3888 |
| 1859 | Seq. ID No. 3897 | Seq. ID No. 3898 |
| 1861b | Seq. ID No. 3901 | Seq. ID No. 3902 |
| 1863a | Seq. ID No. 3905 | Seq. ID No. 3906 |
| 1864a | Seq. ID No. 3909 | Seq. ID No. 3910 |
| 1865b | Seq. ID No. 3913 | Seq. ID No. 3914 |
| 1868 | Seq. ID No. 3915 | Seq. ID No. 3916 |
| 1869 | Seq. ID No. 3917 | Seq. ID No. 3918 |
| 1870 | Seq. ID No. 3919 | Seq. ID No. 3920 |
| 1873a | Seq. ID No. 3921 | Seq. ID No. 3922 |
| 1875c | Seq. ID No. 3929 | Seq. ID No. 3930 |
| 1877a | Seq. ID No. 3931 | Seq. ID No. 3932 |
| 1878 | Seq. ID No. 3935 | Seq. ID No. 3936 |
| 1884 | Seq. ID No. 3941 | Seq. ID No. 3942 |
| 1886 | Seq. ID No. 3943 | Seq. ID No. 3944 |
| 1887 | Seq. ID No. 3945 | Seq. ID No. 3946 |
| 1888a | Seq. ID No. 3947 | Seq. ID No. 3948 |
| 1890 | Seq. ID No. 3951 | Seq. ID No. 3952 |
| 1891a | Seq. ID No. 3953 | Seq. ID No. 3954 |
| 1893 | Seq. ID No. 3957 | Seq. ID No. 3958 |
| 1897c | Seq. ID No. 3971 | Seq. ID No. 3972 |
| 1899 | Seq. ID No. 3977 | Seq. ID No. 3978 |
| 1902a | Seq. ID No. 3981 | Seq. ID No. 3982 |
| 1907 | Seq. ID No. 3985 | Seq. ID No. 3986 |
| 1912 | Seq. ID No. 3987 | Seq. ID No. 3988 |
| 1915a | Seq. ID No. 3989 | Seq. ID No. 3990 |
| 1916 | Seq. ID No. 3993 | Seq. ID No. 3994 |
| 1918c | Seq. ID No. 4001 | Seq. ID No. 4002 |
| 1919a | Seq. ID No. 4005 | Seq. ID No. 4006 |
| 1923a | Seq. ID No. 4011 | Seq. ID No. 4012 |
| 1925 | Seq. ID No. 4015 | Seq. ID No. 4016 |
| 1926 | Seq. ID No. 4017 | Seq. ID No. 4018 |
| 1927a | Seq. ID No. 4019 | Seq. ID No. 4020 |
| 1930 | Seq. ID No. 4023 | Seq. ID No. 4024 |
| 1931c | Seq. ID No. 4029 | Seq. ID No. 4030 |
| 1932 | Seq. ID No. 4031 | Seq. ID No. 4032 |
| 1933a | Seq. ID No. 4033 | Seq. ID No. 4034 |
| 1934 | Seq. ID No. 4037 | Seq. ID No. 4038 |
| 1936 | Seq. ID No. 4039 | Seq. ID No. 4040 |
| 1937e | Seq. ID No. 4049 | Seq. ID No. 4050 |
| 1939a | Seq. ID No. 4051 | Seq. ID No. 4052 |
| 1940 | Seq. ID No. 4057 | Seq. ID No. 4058 |
| 1941a | Seq. ID No. 4059 | Seq. ID No. 4060 |
| 1943a | Seq. ID No. 4065 | Seq. ID No. 4066 |
| 1944 | Seq. ID No. 4069 | Seq. ID No. 4070 |
| 1946c | Seq. ID No. 4075 | Seq. ID No. 4076 |
| 1950 | Seq. ID No. 4079 | Seq. ID No. 4080 |
| 1951c | Seq. ID No. 4085 | Seq. ID No. 4086 |
| 1953 | Seq. ID No. 4089 | Seq. ID No. 4090 |
| 1954c | Seq. ID No. 4095 | Seq. ID No. 4096 |
| 1956 | Seq. ID No. 4097 | Seq. ID No. 4098 |
| 1957 | Seq. ID No. 4099 | Seq. ID No. 4100 |
| 1958c | Seq. ID No. 4105 | Seq. ID No. 4106 |
| 1960c | Seq. ID No. 4111 | Seq. ID No. 4112 |
| 1962a | Seq. ID No. 4115 | Seq. ID No. 4116 |
| 1965b | Seq. ID No. 4121 | Seq. ID No. 4122 |
| 1966 | Seq. ID No. 4123 | Seq. ID No. 4124 |
| 1968 | Seq. ID No. 4127 | Seq. ID No. 4128 |
| 1969 | Seq. ID No. 4129 | Seq. ID No. 4130 |
| 1970a | Seq. ID No. 4131 | Seq. ID No. 4132 |
| 1973 | Seq. ID No. 4137 | Seq. ID No. 4138 |
| 1977a | Seq. ID No. 4141 | Seq. ID No. 4142 |
| 1979a | Seq. ID No. 4147 | Seq. ID No. 4148 |
| 1982 | Seq. ID No. 4157 | Seq. ID No. 4158 |
| 1985a | Seq. ID No. 4159 | Seq. ID No. 4160 |
| 1986 | Seq. ID No. 4163 | Seq. ID No. 4164 |
| 1987a | Seq. ID No. 4165 | Seq. ID No. 4166 |
| 1989a | Seq. ID No. 4169 | Seq. ID No. 4170 |
| 1990c | Seq. ID No. 4179 | Seq. ID No. 4180 |
| 1992a | Seq. ID No. 4183 | Seq. ID No. 4184 |
| 1993a | Seq. ID No. 4187 | Seq. ID No. 4188 |
| 1996 | Seq. ID No. 4193 | Seq. ID No. 4194 |
| 2000 | Seq. ID No. 4195 | Seq. ID No. 4196 |
| 2001 | Seq. ID No. 4197 | Seq. ID No. 4198 |
| 2003 | Seq. ID No. 4199 | Seq. ID No. 4200 |
| 2006 | Seq. ID No. 4201 | Seq. ID No. 4202 |
| 2010 | Seq. ID No. 4205 | Seq. ID No. 4206 |
| 2011a | Seq. ID No. 4207 | Seq. ID No. 4208 |
| 2013a | Seq. ID No. 4213 | Seq. ID No. 4214 |
| 2015 | Seq. ID No. 4219 | Seq. ID No. 4220 |
| 2016h | Seq. ID No. 4235 | Seq. ID No. 4236 |
| 2020 | Seq. ID No. 4237 | Seq. ID No. 4238 |
| 2021 | Seq. ID No. 4239 | Seq. ID No. 4240 |
| 2023b | Seq. ID No. 4243 | Seq. ID No. 4244 |
| 2024a | Seq. ID No. 4245 | Seq. ID No. 4246 |
| 2027 | Seq. ID No. 4255 | Seq. ID No. 4256 |
| 2030b | Seq. ID No. 4259 | Seq. ID No. 4260 |
| 2033 | Seq. ID No. 4267 | Seq. ID No. 4268 |
| 2036 | Seq. ID No. 4271 | Seq. ID No. 4272 |
| 2040a | Seq. ID No. 4277 | Seq. ID No. 4278 |
| 2042 | Seq. ID No. 4279 | Seq. ID No. 4280 |
| 2043b | Seq. ID No. 4281 | Seq. ID No. 4282 |
| 2044 | Seq. ID No. 4283 | Seq. ID No. 4284 |
| 2046a | Seq. ID No. 4289 | Seq. ID No. 4290 |
| 2047a | Seq. ID No. 4293 | Seq. ID No. 4294 |
| 2050 | Seq. ID No. 4299 | Seq. ID No. 4300 |
| 2053 | Seq. ID No. 4301 | Seq. ID No. 4302 |
| 2054 | Seq. ID No. 4303 | Seq. ID No. 4304 |
| 2055 | Seq. ID No. 4305 | Seq. ID No. 4306 |
| 2056 | Seq. ID No. 4307 | Seq. ID No. 4308 |
| 2057 | Seq. ID No. 4309 | Seq. ID No. 4310 |
| 2059b | Seq. ID No. 4313 | Seq. ID No. 4314 |
| 2060a | Seq. ID No. 4315 | Seq. ID No. 4316 |
| 2062c | Seq. ID No. 4323 | Seq. ID No. 4324 |
| 2064 | Seq. ID No. 4325 | Seq. ID No. 4326 |
| 2065a | Seq. ID No. 4327 | Seq. ID No. 4328 |
| 2066 | Seq. ID No. 4331 | Seq. ID No. 4332 |
| 2068 | Seq. ID No. 4333 | Seq. ID No. 4334 |
| 2069b | Seq. ID No. 4337 | Seq. ID No. 4338 |
| 2074a | Seq. ID No. 4341 | Seq. ID No. 4342 |
| 2075a | Seq. ID No. 4345 | Seq. ID No. 4346 |
| 2076a | Seq. ID No. 4349 | Seq. ID No. 4350 |
| 2078 | Seq. ID No. 4355 | Seq. ID No. 4356 |
| 2079a | Seq. ID No. 4357 | Seq. ID No. 4358 |
| 2081b | Seq. ID No. 4365 | Seq. ID No. 4366 |
| 2086a | Seq. ID No. 4367 | Seq. ID No. 4368 |
| 2087a | Seq. ID No. 4371 | Seq. ID No. 4372 |
| 2088 | Seq. ID No. 4375 | Seq. ID No. 4376 |
| 2091 | Seq. ID No. 4377 | Seq. ID No. 4378 |
| 2092 | Seq. ID No. 4379 | Seq. ID No. 4380 |
| 2094 | Seq. ID No. 4383 | Seq. ID No. 4384 |
| 2096b | Seq. ID No. 4387 | Seq. ID No. 4388 |
| 2097 | Seq. ID No. 4393 | Seq. ID No. 4394 |
| 2100 | Seq. ID No. 4397 | Seq. ID No. 4398 |
| 2104 | Seq. ID No. 4401 | Seq. ID No. 4402 |
| 2109a | Seq. ID No. 4409 | Seq. ID No. 4410 |
| 2110a | Seq. ID No. 4413 | Seq. ID No. 4414 |
| 2112b | Seq. ID No. 4421 | Seq. ID No. 4422 |
| 2116 | Seq. ID No. 4433 | Seq. ID No. 4434 |
| 2117 | Seq. ID No. 4435 | Seq. ID No. 4436 |
| 2124a | Seq. ID No. 4445 | Seq. ID No. 4446 |
| 2125a | Seq. ID No. 4449 | Seq. ID No. 4450 |
| 2128a | Seq. ID No. 4457 | Seq. ID No. 4458 |
| 2133 | Seq. ID No. 4461 | Seq. ID No. 4462 |
| 2138a | Seq. ID No. 4463 | Seq. ID No. 4464 |
| 2140b | Seq. ID No. 4471 | Seq. ID No. 4472 |
| 2142b | Seq. ID No. 4475 | Seq. ID No. 4476 |
| 2144a | Seq. ID No. 4477 | Seq. ID No. 4478 |
| 2146 | Seq. ID No. 4481 | Seq. ID No. 4482 |
| 2147c | Seq. ID No. 4487 | Seq. ID No. 4488 |
| 2149b | Seq. ID No. 4491 | Seq. ID No. 4492 |
| 2152a | Seq. ID No. 4499 | Seq. ID No. 4500 |
| 2153 | Seq. ID No. 4501 | Seq. ID No. 4502 |
| 2155a | Seq. ID No. 4503 | Seq. ID No. 4504 |
| 2156b | Seq. ID No. 4509 | Seq. ID No. 4510 |
| 2160a | Seq. ID No. 4517 | Seq. ID No. 4518 |
| 2164 | Seq. ID No. 4531 | Seq. ID No. 4532 |
| 2165 | Seq. ID No. 4533 | Seq. ID No. 4534 |
| 2166a | Seq. ID No. 4535 | Seq. ID No. 4536 |
| 2169 | Seq. ID No. 4539 | Seq. ID No. 4540 |
| 2171 | Seq. ID No. 4541 | Seq. ID No. 4542 |
| 2173a | Seq. ID No. 4545 | Seq. ID No. 4546 |
| 2174 | Seq. ID No. 4549 | Seq. ID No. 4550 |
| 2176c | Seq. ID No. 4557 | Seq. ID No. 4558 |
| 2179a | Seq. ID No. 4563 | Seq. ID No. 4564 |
| 2180 | Seq. ID No. 4567 | Seq. ID No. 4568 |
| 2181a | Seq. ID No. 4569 | Seq. ID No. 4570 |
| 2183 | Seq. ID No. 4575 | Seq. ID No. 4576 |
| 2185 | Seq. ID No. 4577 | Seq. ID No. 4578 |
| 2186a | Seq. ID No. 4579 | Seq. ID No. 4580 |
| 2189a | Seq. ID No. 4583 | Seq. ID No. 4584 |
| 2193 | Seq. ID No. 4591 | Seq. ID No. 4592 |
| 2194a | Seq. ID No. 4593 | Seq. ID No. 4594 |
| 2196 | Seq. ID No. 4597 | Seq. ID No. 4598 |
| 2197b | Seq. ID No. 4601 | Seq. ID No. 4602 |
| 2201a | Seq. ID No. 4605 | Seq. ID No. 4606 |
| 2203 | Seq. ID No. 4609 | Seq. ID No. 4610 |
| 2204 | Seq. ID No. 4611 | Seq. ID No. 4612 |
| 2206a | Seq. ID No. 4613 | Seq. ID No. 4614 |
| 2209 | Seq. ID No. 4623 | Seq. ID No. 4624 |
| 2212a | Seq. ID No. 4625 | Seq. ID No. 4626 |
| 2215a | Seq. ID No. 4629 | Seq. ID No. 4630 |
| 2216a | Seq. ID No. 4633 | Seq. ID No. 4634 |
| 2218 | Seq. ID No. 4637 | Seq. ID No. 4638 |
| 2219b | Seq. ID No. 4641 | Seq. ID No. 4642 |
| 2220a | Seq. ID No. 4645 | Seq. ID No. 4646 |
| 2221 | Seq. ID No. 4651 | Seq. ID No. 4652 |
| 2222 | Seq. ID No. 4653 | Seq. ID No. 4654 |
| 2223a | Seq. ID No. 4655 | Seq. ID No. 4656 |
| 2226 | Seq. ID No. 4661 | Seq. ID No. 4662 |
| 2227 | Seq. ID No. 4663 | Seq. ID No. 4664 |
| 2228c | Seq. ID No. 4669 | Seq. ID No. 4670 |
| 2231 | Seq. ID No. 4671 | Seq. ID No. 4672 |
| 2232 | Seq. ID No. 4673 | Seq. ID No. 4674 |
| 2234a | Seq. ID No. 4675 | Seq. ID No. 4676 |
| 2238 | Seq. ID No. 4685 | Seq. ID No. 4686 |
| 2240a | Seq. ID No. 4689 | Seq. ID No. 4690 |
| 2244 | Seq. ID No. 4697 | Seq. ID No. 4698 |
| 2248 | Seq. ID No. 4703 | Seq. ID No. 4704 |
| 2249 | Seq. ID No. 4705 | Seq. ID No. 4706 |
| 2253d | Seq. ID No. 4713 | Seq. ID No. 4714 |
| 2255b | Seq. ID No. 4717 | Seq. ID No. 4718 |
| 2256 | Seq. ID No. 4719 | Seq. ID No. 4720 |
| 2259a | Seq. ID No. 4723 | Seq. ID No. 4724 |
| 2260c | Seq. ID No. 4729 | Seq. ID No. 4730 |
| 2262 | Seq. ID No. 4731 | Seq. ID No. 4732 |
| 2263 | Seq. ID No. 4733 | Seq. ID No. 4734 |
| 2267 | Seq. ID No. 4739 | Seq. ID No. 4740 |
| 2269 | Seq. ID No. 4743 | Seq. ID No. 4744 |
| 2270 | Seq. ID No. 4745 | Seq. ID No. 4746 |
| 2272 | Seq. ID No. 4747 | Seq. ID No. 4748 |
| 2273 | Seq. ID No. 4749 | Seq. ID No. 4750 |
| 2274 | Seq. ID No. 4751 | Seq. ID No. 4752 |
| 2275a | Seq. ID No. 4753 | Seq. ID No. 4754 |
| 2276b | Seq. ID No. 4761 | Seq. ID No. 4762 |
| 2277a | Seq. ID No. 4767 | Seq. ID No. 4768 |
| 2278a | Seq. ID No. 4771 | Seq. ID No. 4772 |
| 2280 | Seq. ID No. 4779 | Seq. ID No. 4780 |
| 2284 | Seq. ID No. 4781 | Seq. ID No. 4782 |
| 2285 | Seq. ID No. 4783 | Seq. ID No. 4784 |
| 2286a | Seq. ID No. 4785 | Seq. ID No. 4786 |
| 2288 | Seq. ID No. 4789 | Seq. ID No. 4790 |
| 2290 | Seq. ID No. 4791 | Seq. ID No. 4792 |
| 2291a | Seq. ID No. 4793 | Seq. ID No. 4794 |
| 2292a | Seq. ID No. 4799 | Seq. ID No. 4800 |
| 2297 | Seq. ID No. 4807 | Seq. ID No. 4808 |
| 2298 | Seq. ID No. 4809 | Seq. ID No. 4810 |
| 2299 | Seq. ID No. 4811 | Seq. ID No. 4812 |
| 2300 | Seq. ID No. 4813 | Seq. ID No. 4814 |
| 2301 | Seq. ID No. 4815 | Seq. ID No. 4816 |
| 2304 | Seq. ID No. 4821 | Seq. ID No. 4822 |
| 2307 | Seq. ID No. 4825 | Seq. ID No. 4826 |
| 2308 | Seq. ID No. 4827 | Seq. ID No. 4828 |
| 2309a | Seq. ID No. 4829 | Seq. ID No. 4830 |
| 2311 | Seq. ID No. 4837 | Seq. ID No. 4838 |
| 2312a | Seq. ID No. 4839 | Seq. ID No. 4840 |
| 2314 | Seq. ID No. 4845 | Seq. ID No. 4846 |
| 2315 | Seq. ID No. 4847 | Seq. ID No. 4848 |
| 2316 | Seq. ID No. 4849 | Seq. ID No. 4850 |
| 2321b | Seq. ID No. 4857 | Seq. ID No. 4858 |
| 2322 | Seq. ID No. 4861 | Seq. ID No. 4862 |
| 2327 | Seq. ID No. 4865 | Seq. ID No. 4866 |
| 2328 | Seq. ID No. 4867 | Seq. ID No. 4868 |
| 2329d | Seq. ID No. 4875 | Seq. ID No. 4876 |
| 2331 | Seq. ID No. 4879 | Seq. ID No. 4880 |
| 2333 | Seq. ID No. 4881 | Seq. ID No. 4882 |
| 2335 | Seq. ID No. 4883 | Seq. ID No. 4884 |
| 2336 | Seq. ID No. 4885 | Seq. ID No. 4886 |
| 2337b | Seq. ID No. 4887 | Seq. ID No. 4888 |
| 2338c | Seq. ID No. 4893 | Seq. ID No. 4894 |
| 2342c | Seq. ID No. 4899 | Seq. ID No. 4900 |
| 2344 | Seq. ID No. 4901 | Seq. ID No. 4902 |
| 2345 | Seq. ID No. 4903 | Seq. ID No. 4904 |
| 2347 | Seq. ID No. 4905 | Seq. ID No. 4906 |
| 2348 | Seq. ID No. 4907 | Seq. ID No. 4908 |
| 2349a | Seq. ID No. 4909 | Seq. ID No. 4910 |
| 2353 | Seq. ID No. 4915 | Seq. ID No. 4916 |
| 2354 | Seq. ID No. 4917 | Seq. ID No. 4918 |
| 2357 | Seq. ID No. 4919 | Seq. ID No. 4920 |
| 2358 | Seq. ID No. 4921 | Seq. ID No. 4922 |
| 2361a | Seq. ID No. 4925 | Seq. ID No. 4926 |
| 2363a | Seq. ID No. 4929 | Seq. ID No. 4930 |
| 2365a | Seq. ID No. 4933 | Seq. ID No. 4934 |
| 2366a | Seq. ID No. 4937 | Seq. ID No. 4938 |
| 2367 | Seq. ID No. 4941 | Seq. ID No. 4942 |
| 2368 | Seq. ID No. 4943 | Seq. ID No. 4944 |
| 2369 | Seq. ID No. 4945 | Seq. ID No. 4946 |
| 2370 | Seq. ID No. 4947 | Seq. ID No. 4948 |
| 2373 | Seq. ID No. 4953 | Seq. ID No. 4954 |
| 2374a | Seq. ID No. 4955 | Seq. ID No. 4956 |
| 2376 | Seq. ID No. 4959 | Seq. ID No. 4960 |
| 2377a | Seq. ID No. 4961 | Seq. ID No. 4962 |
| 2378 | Seq. ID No. 4965 | Seq. ID No. 4966 |
| 2379a | Seq. ID No. 4967 | Seq. ID No. 4968 |
| 2380 | Seq. ID No. 4971 | Seq. ID No. 4972 |
| 2381 | Seq. ID No. 4973 | Seq. ID No. 4974 |
| 2384a | Seq. ID No. 4977 | Seq. ID No. 4978 |
| 2387 | Seq. ID No. 4985 | Seq. ID No. 4986 |
| 2391 | Seq. ID No. 4989 | Seq. ID No. 4990 |
| 2392 | Seq. ID No. 4991 | Seq. ID No. 4992 |
| 2395 | Seq. ID No. 4995 | Seq. ID No. 4996 |
| 2396 | Seq. ID No. 4997 | Seq. ID No. 4998 |
| 2399b | Seq. ID No. 5005 | Seq. ID No. 5006 |
| 2401 | Seq. ID No. 5009 | Seq. ID No. 5010 |
| 2403a | Seq. ID No. 5015 | Seq. ID No. 5016 |
| 2404a | Seq. ID No. 5019 | Seq. ID No. 5020 |
| 2409a | Seq. ID No. 5025 | Seq. ID No. 5026 |
| 2410 | Seq. ID No. 5029 | Seq. ID No. 5030 |
| 2415a | Seq. ID No. 5037 | Seq. ID No. 5038 |
| 2417a | Seq. ID No. 5045 | Seq. ID No. 5046 |
| 2418a | Seq. ID No. 5049 | Seq. ID No. 5050 |
| 2420 | Seq. ID No. 5053 | Seq. ID No. 5054 |
| 2421 | Seq. ID No. 5055 | Seq. ID No. 5056 |
| 2422c | Seq. ID No. 5059 | Seq. ID No. 5060 |
| 2423a | Seq. ID No. 5061 | Seq. ID No. 5062 |
| 2424a | Seq. ID No. 5065 | Seq. ID No. 5066 |
| 2426 | Seq. ID No. 5071 | Seq. ID No. 5072 |
| 2428a | Seq. ID No. 5073 | Seq. ID No. 5074 |
| 2429 | Seq. ID No. 5079 | Seq. ID No. 5080 |
| 2432 | Seq. ID No. 5081 | Seq. ID No. 5082 |
| 2433 | Seq. ID No. 5083 | Seq. ID No. 5084 |
| 2440 | Seq. ID No. 5087 | Seq. ID No. 5088 |
| 2442a | Seq. ID No. 5089 | Seq. ID No. 5090 |
| 2443 | Seq. ID No. 5093 | Seq. ID No. 5094 |
| 2444a | Seq. ID No. 5095 | Seq. ID No. 5096 |
| 2445 | Seq. ID No. 5103 | Seq. ID No. 5104 |
| 2448b | Seq. ID No. 5105 | Seq. ID No. 5106 |
| 2449a | Seq. ID No. 5107 | Seq. ID No. 5108 |
| 2451 | Seq. ID No. 5111 | Seq. ID No. 5112 |
| 2452 | Seq. ID No. 5113 | Seq. ID No. 5114 |
| 2453 | Seq. ID No. 5115 | Seq. ID No. 5116 |
| 2455 | Seq. ID No. 5117 | Seq. ID No. 5118 |
| 2456a | Seq. ID No. 5119 | Seq. ID No. 5120 |
| 2458g | Seq. ID No. 5141 | Seq. ID No. 5142 |
| 2461a | Seq. ID No. 5143 | Seq. ID No. 5144 |
| 2462a | Seq. ID No. 5147 | Seq. ID No. 5148 |
| 2464 | Seq. ID No. 5153 | Seq. ID No. 5154 |
| 2465a | Seq. ID No. 5155 | Seq. ID No. 5156 |
| 2469a | Seq. ID No. 5163 | Seq. ID No. 5164 |
| 2471 | Seq. ID No. 5169 | Seq. ID No. 5170 |
| 2473 | Seq. ID No. 5171 | Seq. ID No. 5172 |
| 2474a | Seq. ID No. 5173 | Seq. ID No. 5174 |
| 2475a | Seq. ID No. 5179 | Seq. ID No. 5180 |
| 2477 | Seq. ID No. 5185 | Seq. ID No. 5186 |
| 2480 | Seq. ID No. 5187 | Seq. ID No. 5188 |
| 2482 | Seq. ID No. 5193 | Seq. ID No. 5194 |
| 2483 | Seq. ID No. 5195 | Seq. ID No. 5196 |
| 2485 | Seq. ID No. 5201 | Seq. ID No. 5202 |
| 2489 | Seq. ID No. 5203 | Seq. ID No. 5204 |
| 2490 | Seq. ID No. 5205 | Seq. ID No. 5206 |
| 2492b | Seq. ID No. 5209 | Seq. ID No. 5210 |
| 2494 | Seq. ID No. 5211 | Seq. ID No. 5212 |
| 2495a | Seq. ID No. 5213 | Seq. ID No. 5214 |
| 2497a | Seq. ID No. 5217 | Seq. ID No. 5218 |
| 2500b | Seq. ID No. 5225 | Seq. ID No. 5226 |
| 2501b | Seq. ID No. 5231 | Seq. ID No. 5232 |
| 2504a | Seq. ID No. 5233 | Seq. ID No. 5234 |
| 2505 | Seq. ID No. 5237 | Seq. ID No. 5238 |
| 2506 | Seq. ID No. 5239 | Seq. ID No. 5240 |
| 2510 | Seq. ID No. 5245 | Seq. ID No. 5246 |
| 2512c | Seq. ID No. 5247 | Seq. ID No. 5248 |
| 2513a | Seq. ID No. 5249 | Seq. ID No. 5250 |
| 2514 | Seq. ID No. 5255 | Seq. ID No. 5256 |
| 2515 | Seq. ID No. 5257 | Seq. ID No. 5258 |
| 2516a | Seq. ID No. 5259 | Seq. ID No. 5260 |
| 2517a | Seq. ID No. 5263 | Seq. ID No. 5264 |
| 2519a | Seq. ID No. 5269 | Seq. ID No. 5270 |
| 2520a | Seq. ID No. 5273 | Seq. ID No. 5274 |
| 2523 | Seq. ID No. 5283 | Seq. ID No. 5284 |
| 2527a | Seq. ID No. 5289 | Seq. ID No. 5290 |
| 2528a | Seq. ID No. 5293 | Seq. ID No. 5294 |
| 2535a | Seq. ID No. 5307 | Seq. ID No. 5308 |
| 2538 | Seq. ID No. 5311 | Seq. ID No. 5312 |
| 2541 | Seq. ID No. 5313 | Seq. ID No. 5314 |
| 2542a | Seq. ID No. 5315 | Seq. ID No. 5316 |
| 2544 | Seq. ID No. 5323 | Seq. ID No. 5324 |
| 2545 | Seq. ID No. 5325 | Seq. ID No. 5326 |
| 2548b | Seq. ID No. 5335 | Seq. ID No. 5336 |
| 2549 | Seq. ID No. 5337 | Seq. ID No. 5338 |
| 2550b | Seq. ID No. 5339 | Seq. ID No. 5340 |
| 2552 | Seq. ID No. 5345 | Seq. ID No. 5346 |
| 2553 | Seq. ID No. 5347 | Seq. ID No. 5348 |
| 2554a | Seq. ID No. 5349 | Seq. ID No. 5350 |
| 2555a | Seq. ID No. 5353 | Seq. ID No. 5354 |
| 2558a | Seq. ID No. 5361 | Seq. ID No. 5362 |
| 2559 | Seq. ID No. 5365 | Seq. ID No. 5366 |
| 2561 | Seq. ID No. 5367 | Seq. ID No. 5368 |
| 2562a | Seq. ID No. 5369 | Seq. ID No. 5370 |
| 2563 | Seq. ID No. 5373 | Seq. ID No. 5374 |
| 2564a | Seq. ID No. 5375 | Seq. ID No. 5376 |
| 2567b | Seq. ID No. 5387 | Seq. ID No. 5388 |
| 2568 | Seq. ID No. 5389 | Seq. ID No. 5390 |
| 2572 | Seq. ID No. 5391 | Seq. ID No. 5392 |
| 2573 | Seq. ID No. 5393 | Seq. ID No. 5394 |
| 2575 | Seq. ID No. 5395 | Seq. ID No. 5396 |
| 2576 | Seq. ID No. 5397 | Seq. ID No. 5398 |
| 2578 | Seq. ID No. 5399 | Seq. ID No. 5400 |
| 2579b | Seq. ID No. 5401 | Seq. ID No. 5402 |
| 2581 | Seq. ID No. 5403 | Seq. ID No. 5404 |
| 2582a | Seq. ID No. 5405 | Seq. ID No. 5406 |
| 2585 | Seq. ID No. 5411 | Seq. ID No. 5412 |
| 2587b | Seq. ID No. 5415 | Seq. ID No. 5416 |
| 2588 | Seq. ID No. 5417 | Seq. ID No. 5418 |
| 2589 | Seq. ID No. 5419 | Seq. ID No. 5420 |
| 2591 | Seq. ID No. 5421 | Seq. ID No. 5422 |
| 2592 | Seq. ID No. 5423 | Seq. ID No. 5424 |
| 2594a | Seq. ID No. 5429 | Seq. ID No. 5430 |
| 2596 | Seq. ID No. 5433 | Seq. ID No. 5434 |
| 2598 | Seq. ID No. 5441 | Seq. ID No. 5442 |
| 2602 | Seq. ID No. 5443 | Seq. ID No. 5444 |
| 2605a | Seq. ID No. 5445 | Seq. ID No. 5446 |
| 2606 | Seq. ID No. 5449 | Seq. ID No. 5450 |
| 2608 | Seq. ID No. 5451 | Seq. ID No. 5452 |
| 2610 | Seq. ID No. 5453 | Seq. ID No. 5454 |
| 2611 | Seq. ID No. 5455 | Seq. ID No. 5456 |
| 2613 | Seq. ID No. 5457 | Seq. ID No. 5458 |
| 2616f | Seq. ID No. 5469 | Seq. ID No. 5470 |
| 2617a | Seq. ID No. 5475 | Seq. ID No. 5476 |
| 2619 | Seq. ID No. 5483 | Seq. ID No. 5484 |
| 2620 | Seq. ID No. 5485 | Seq. ID No. 5486 |
| 2623a | Seq. ID No. 5489 | Seq. ID No. 5490 |
| 2624a | Seq. ID No. 5493 | Seq. ID No. 5494 |
| 2625b | Seq. ID No. 5499 | Seq. ID No. 5500 |
| 2626a | Seq. ID No. 5501 | Seq. ID No. 5502 |
| 2627a | Seq. ID No. 5505 | Seq. ID No. 5506 |
| 2628 | Seq. ID No. 5509 | Seq. ID No. 5510 |
| 2629a | Seq. ID No. 5511 | Seq. ID No. 5512 |
| 2633c | Seq. ID No. 5523 | Seq. ID No. 5524 |
| 2637a | Seq. ID No. 5529 | Seq. ID No. 5530 |
| 2643a | Seq. ID No. 5535 | Seq. ID No. 5536 |
| 2645 | Seq. ID No. 5539 | Seq. ID No. 5540 |
| 2647 | Seq. ID No. 5541 | Seq. ID No. 5542 |
| 2649 | Seq. ID No. 5547 | Seq. ID No. 5548 |
| 2652a | Seq. ID No. 5551 | Seq. ID No. 5552 |
| 2655a | Seq. ID No. 5555 | Seq. ID No. 5556 |
| 2656 | Seq. ID No. 5559 | Seq. ID No. 5560 |
| 2658a | Seq. ID No. 5561 | Seq. ID No. 5562 |
| 2659a | Seq. ID No. 5565 | Seq. ID No. 5566 |
| 2662 | Seq. ID No. 5571 | Seq. ID No. 5572 |
| 2664a | Seq. ID No. 5573 | Seq. ID No. 5574 |
| 2666a | Seq. ID No. 5579 | Seq. ID No. 5580 |
| 2667a | Seq. ID No. 5583 | Seq. ID No. 5584 |
| 2669b | Seq. ID No. 5589 | Seq. ID No. 5590 |
| 2674b | Seq. ID No. 5599 | Seq. ID No. 5600 |
| 2676 | Seq. ID No. 5601 | Seq. ID No. 5602 |
| 2677a | Seq. ID No. 5603 | Seq. ID No. 5604 |
| 2679c | Seq. ID No. 5613 | Seq. ID No. 5614 |
| 2680c | Seq. ID No. 5621 | Seq. ID No. 5622 |
| 2684a | Seq. ID No. 5627 | Seq. ID No. 5628 |
| 2686 | Seq. ID No. 5631 | Seq. ID No. 5632 |
| 2688b | Seq. ID No. 5635 | Seq. ID No. 5636 |
| 2690b | Seq. ID No. 5645 | Seq. ID No. 5646 |
| 2693 | Seq. ID No. 5651 | Seq. ID No. 5652 |
| 2694a | Seq. ID No. 5653 | Seq. ID No. 5654 |
| 2695 | Seq. ID No. 5657 | Seq. ID No. 5658 |
| 2696b | Seq. ID No. 5661 | Seq. ID No. 5662 |
| 2705 | Seq. ID No. 5663 | Seq. ID No. 5664 |
| 2709 | Seq. ID No. 5665 | Seq. ID No. 5666 |
| 2712 | Seq. ID No. 5669 | Seq. ID No. 5670 |
| 2713 | Seq. ID No. 5671 | Seq. ID No. 5672 |
| 2714 | Seq. ID No. 5673 | Seq. ID No. 5674 |
| 2716a | Seq. ID No. 5675 | Seq. ID No. 5676 |
| 2718a | Seq. ID No. 5681 | Seq. ID No. 5682 |
| 2721b | Seq. ID No. 5693 | Seq. ID No. 5694 |
| 2722a | Seq. ID No. 5695 | Seq. ID No. 5696 |
| 2723 | Seq. ID No. 5699 | Seq. ID No. 5700 |
| 2724 | Seq. ID No. 5701 | Seq. ID No. 5702 |
| 2726 | Seq. ID No. 5707 | Seq. ID No. 5708 |
| 2731a | Seq. ID No. 5713 | Seq. ID No. 5714 |
| 2732 | Seq. ID No. 5717 | Seq. ID No. 5718 |
| 2734c | Seq. ID No. 5723 | Seq. ID No. 5724 |
| 2735a | Seq. ID No. 5725 | Seq. ID No. 5726 |
| 2738b | Seq. ID No. 5731 | Seq. ID No. 5732 |
| 2742a | Seq. ID No. 5737 | Seq. ID No. 5738 |
| 2745a | Seq. ID No. 5747 | Seq. ID No. 5748 |
| 2746 | Seq. ID No. 5751 | Seq. ID No. 5752 |
| 2747b | Seq. ID No. 5755 | Seq. ID No. 5756 |
| 2748b | Seq. ID No. 5759 | Seq. ID No. 5760 |
| 2749e | Seq. ID No. 5771 | Seq. ID No. 5772 |
| 2750a | Seq. ID No. 5773 | Seq. ID No. 5774 |
| 2752 | Seq. ID No. 5777 | Seq. ID No. 5778 |
| 2753 | Seq. ID No. 5779 | Seq. ID No. 5780 |
| 2757a | Seq. ID No. 5781 | Seq. ID No. 5782 |
| 2758a | Seq. ID No. 5785 | Seq. ID No. 5786 |
| 2759a | Seq. ID No. 5793 | Seq. ID No. 5794 |
| 2760b | Seq. ID No. 5799 | Seq. ID No. 5800 |
| 2763a | Seq. ID No. 5805 | Seq. ID No. 5806 |
| 2764 | Seq. ID No. 5811 | Seq. ID No. 5812 |
| 2765c | Seq. ID No. 5815 | Seq. ID No. 5816 |
| 2766a | Seq. ID No. 5817 | Seq. ID No. 5818 |
| 2768b | Seq. ID No. 5823 | Seq. ID No. 5824 |
| 2771a | Seq. ID No. 5831 | Seq. ID No. 5832 |
| 2773 | Seq. ID No. 5835 | Seq. ID No. 5836 |
| 2774b | Seq. ID No. 5839 | Seq. ID No. 5840 |
| 2776a | Seq. ID No. 5843 | Seq. ID No. 5844 |
| 2777 | Seq. ID No. 5847 | Seq. ID No. 5848 |
| 2778 | Seq. ID No. 5849 | Seq. ID No. 5850 |
| 2779 | Seq. ID No. 5851 | Seq. ID No. 5852 |
| 2780 | Seq. ID No. 5853 | Seq. ID No. 5854 |
| 2784 | Seq. ID No. 5855 | Seq. ID No. 5856 |
| 2785a | Seq. ID No. 5857 | Seq. ID No. 5858 |
| 2786a | Seq. ID No. 5861 | Seq. ID No. 5862 |
| 2787a | Seq. ID No. 5867 | Seq. ID No. 5868 |
| 2789 | Seq. ID No. 5875 | Seq. ID No. 5876 |
| 2790 | Seq. ID No. 5877 | Seq. ID No. 5878 |
| 2793 | Seq. ID No. 5881 | Seq. ID No. 5882 |
| 2799a | Seq. ID No. 5889 | Seq. ID No. 5890 |
| 2801b | Seq. ID No. 5895 | Seq. ID No. 5896 |
| 2804 | Seq. ID No. 5897 | Seq. ID No. 5898 |
| 2805b | Seq. ID No. 5901 | Seq. ID No. 5902 |
| 2809 | Seq. ID No. 5903 | Seq. ID No. 5904 |
| 2810b | Seq. ID No. 5907 | Seq. ID No. 5908 |
| 2812 | Seq. ID No. 5913 | Seq. ID No. 5914 |
| 2814 | Seq. ID No. 5915 | Seq. ID No. 5916 |
| 2815 | Seq. ID No. 5917 | Seq. ID No. 5918 |
| 2816 | Seq. ID No. 5919 | Seq. ID No. 5920 |
| 2818c | Seq. ID No. 5925 | Seq. ID No. 5926 |
| 2819 | Seq. ID No. 5931 | Seq. ID No. 5932 |
| 2820 | Seq. ID No. 5933 | Seq. ID No. 5934 |
| 2821a | Seq. ID No. 5935 | Seq. ID No. 5936 |
| 2822b | Seq. ID No. 5941 | Seq. ID No. 5942 |
| 2823 | Seq. ID No. 5943 | Seq. ID No. 5944 |
| 2824a | Seq. ID No. 5945 | Seq. ID No. 5946 |
| 2829a | Seq. ID No. 5949 | Seq. ID No. 5950 |
| 2832 | Seq. ID No. 5955 | Seq. ID No. 5956 |
| 2833 | Seq. ID No. 5957 | Seq. ID No. 5958 |
| 2834a | Seq. ID No. 5959 | Seq. ID No. 5960 |
| 2842a | Seq. ID No. 5967 | Seq. ID No. 5968 |
| 2843a | Seq. ID No. 5971 | Seq. ID No. 5972 |
| 2845 | Seq. ID No. 5975 | Seq. ID No. 5976 |
| 2846a | Seq. ID No. 5977 | Seq. ID No. 5978 |
| 2848 | Seq. ID No. 5981 | Seq. ID No. 5982 |
| 2850 | Seq. ID No. 5983 | Seq. ID No. 5984 |
| 2851 | Seq. ID No. 5985 | Seq. ID No. 5986 |
| 2853 | Seq. ID No. 5989 | Seq. ID No. 5990 |
| 2854a | Seq. ID No. 5991 | Seq. ID No. 5992 |
| 2855 | Seq. ID No. 5995 | Seq. ID No. 5996 |
| 2856a | Seq. ID No. 5997 | Seq. ID No. 5998 |
| 2857 | Seq. ID No. 6003 | Seq. ID No. 6004 |
| 2859 | Seq. ID No. 6005 | Seq. ID No. 6006 |
| 2860a | Seq. ID No. 6007 | Seq. ID No. 6008 |
| 2863 | Seq. ID No. 6015 | Seq. ID No. 6016 |
| 2864 | Seq. ID No. 6017 | Seq. ID No. 6018 |
| 2868a | Seq. ID No. 6019 | Seq. ID No. 6020 |
| 2869a | Seq. ID No. 6023 | Seq. ID No. 6024 |
| 2871 | Seq. ID No. 6029 | Seq. ID No. 6030 |
| 2875 | Seq. ID No. 6033 | Seq. ID No. 6034 |
| 2877 | Seq. ID No. 6035 | Seq. ID No. 6036 |
| 2879a | Seq. ID No. 6037 | Seq. ID No. 6038 |
| 2881 | Seq. ID No. 6043 | Seq. ID No. 6044 |
| 2883b | Seq. ID No. 6049 | Seq. ID No. 6050 |
| 2886a | Seq. ID No. 6055 | Seq. ID No. 6056 |
| 2890 | Seq. ID No. 6065 | Seq. ID No. 6066 |
| 2891b | Seq. ID No. 6069 | Seq. ID No. 6070 |
| 2894a | Seq. ID No. 6075 | Seq. ID No. 6076 |
| 2895 | Seq. ID No. 6081 | Seq. ID No. 6082 |
| 2897a | Seq. ID No. 6083 | Seq. ID No. 6084 |
| 2900a | Seq. ID No. 6087 | Seq. ID No. 6088 |
| 2902 | Seq. ID No. 6095 | Seq. ID No. 6096 |
| 2904 | Seq. ID No. 6097 | Seq. ID No. 6098 |
| 2905a | Seq. ID No. 6099 | Seq. ID No. 6100 |
| 2906 | Seq. ID No. 6103 | Seq. ID No. 6104 |
| 2909a | Seq. ID No. 6105 | Seq. ID No. 6106 |
| 2912 | Seq. ID No. 6113 | Seq. ID No. 6114 |
| 2913a | Seq. ID No. 6115 | Seq. ID No. 6116 |
| 2915a | Seq. ID No. 6119 | Seq. ID No. 6120 |
| 2916 | Seq. ID No. 6125 | Seq. ID No. 6126 |
| 2917 | Seq. ID No. 6127 | Seq. ID No. 6128 |
| 2918 | Seq. ID No. 6129 | Seq. ID No. 6130 |
| 2920 | Seq. ID No. 6131 | Seq. ID No. 6132 |
| 2921 | Seq. ID No. 6133 | Seq. ID No. 6134 |
| 2923c | Seq. ID No. 6141 | Seq. ID No. 6142 |
| 2925a | Seq. ID No. 6143 | Seq. ID No. 6144 |
| 2926a | Seq. ID No. 6147 | Seq. ID No. 6148 |
| 2928a | Seq. ID No. 6153 | Seq. ID No. 6154 |
| 2931c | Seq. ID No. 6165 | Seq. ID No. 6166 |
| 2933b | Seq. ID No. 6169 | Seq. ID No. 6170 |
| 2934 | Seq. ID No. 6171 | Seq. ID No. 6172 |
| 2935a | Seq. ID No. 6173 | Seq. ID No. 6174 |
| 2936 | Seq. ID No. 6177 | Seq. ID No. 6178 |
| 2939a | Seq. ID No. 6179 | Seq. ID No. 6180 |
| 2941c | Seq. ID No. 6187 | Seq. ID No. 6188 |
| 2943c | Seq. ID No. 6193 | Seq. ID No. 6194 |
| 2947 | Seq. ID No. 6201 | Seq. ID No. 6202 |
| 2948c | Seq. ID No. 6207 | Seq. ID No. 6208 |
| 2950a | Seq. ID No. 6211 | Seq. ID No. 6212 |
| 2951 | Seq. ID No. 6215 | Seq. ID No. 6216 |
| 2954 | Seq. ID No. 6219 | Seq. ID No. 6220 |
| 2955f | Seq. ID No. 6231 | Seq. ID No. 6232 |
| 2957 | Seq. ID No. 6235 | Seq. ID No. 6236 |
| 2959 | Seq. ID No. 6243 | Seq. ID No. 6244 |
| 2962a | Seq. ID No. 6247 | Seq. ID No. 6248 |
| 2963 | Seq. ID No. 6251 | Seq. ID No. 6252 |
| 2965b | Seq. ID No. 6255 | Seq. ID No. 6256 |
| 2967 | Seq. ID No. 6261 | Seq. ID No. 6262 |
| 2969 | Seq. ID No. 6263 | Seq. ID No. 6264 |
| 2971a | Seq. ID No. 6269 | Seq. ID No. 6270 |
| 2974b | Seq. ID No. 6275 | Seq. ID No. 6276 |
| 2975 | Seq. ID No. 6277 | Seq. ID No. 6278 |
| 2977a | Seq. ID No. 6279 | Seq. ID No. 6280 |
| 2979 | Seq. ID No. 6287 | Seq. ID No. 6288 |
| 2980b | Seq. ID No. 6291 | Seq. ID No. 6292 |
| 2984 | Seq. ID No. 6299 | Seq. ID No. 6300 |
| 2986c | Seq. ID No. 6305 | Seq. ID No. 6306 |
| 2988a | Seq. ID No. 6307 | Seq. ID No. 6308 |
| 2989 | Seq. ID No. 6313 | Seq. ID No. 6314 |
| 2990 | Seq. ID No. 6315 | Seq. ID No. 6316 |
| 2991c | Seq. ID No. 6321 | Seq. ID No. 6322 |
| 2992 | Seq. ID No. 6323 | Seq. ID No. 6324 |
| 2993a | Seq. ID No. 6325 | Seq. ID No. 6326 |
| 2995b | Seq. ID No. 6331 | Seq. ID No. 6332 |
| 2998a | Seq. ID No. 6335 | Seq. ID No. 6336 |
| 2999 | Seq. ID No. 6339 | Seq. ID No. 6340 |
| 3001 | Seq. ID No. 6341 | Seq. ID No. 6342 |
| 3003 | Seq. ID No. 6343 | Seq. ID No. 6344 |
| 3005 | Seq. ID No. 6345 | Seq. ID No. 6346 |
| 3008a | Seq. ID No. 6347 | Seq. ID No. 6348 |
| 3010a | Seq. ID No. 6355 | Seq. ID No. 6356 |
| 3012 | Seq. ID No. 6359 | Seq. ID No. 6360 |
| 3015 | Seq. ID No. 6361 | Seq. ID No. 6362 |
| 3016b | Seq. ID No. 6365 | Seq. ID No. 6366 |
| 3017 | Seq. ID No. 6369 | Seq. ID No. 6370 |
| 3018a | Seq. ID No. 6371 | Seq. ID No. 6372 |
| 3020 | Seq. ID No. 6375 | Seq. ID No. 6376 |
| 3021 | Seq. ID No. 6377 | Seq. ID No. 6378 |
| 3022 | Seq. ID No. 6379 | Seq. ID No. 6380 |
| 3026a | Seq. ID No. 6387 | Seq. ID No. 6388 |
| 3028a | Seq. ID No. 6391 | Seq. ID No. 6392 |
| 3029a | Seq. ID No. 6397 | Seq. ID No. 6398 |
| 3031a | Seq. ID No. 6401 | Seq. ID No. 6402 |
| 3032a | Seq. ID No. 6405 | Seq. ID No. 6406 |
| 3033a | Seq. ID No. 6409 | Seq. ID No. 6410 |
| 3035 | Seq. ID No. 6413 | Seq. ID No. 6414 |
| 3037b | Seq. ID No. 6417 | Seq. ID No. 6418 |
| 3038 | Seq. ID No. 6419 | Seq. ID No. 6420 |
| 3040b | Seq. ID No. 6423 | Seq. ID No. 6424 |
| 3043a | Seq. ID No. 6429 | Seq. ID No. 6430 |
| 3044 | Seq. ID No. 6433 | Seq. ID No. 6434 |
| 3045a | Seq. ID No. 6435 | Seq. ID No. 6436 |
| 3048a | Seq. ID No. 6439 | Seq. ID No. 6440 |
| 3049c | Seq. ID No. 6445 | Seq. ID No. 6446 |
| 3051a | Seq. ID No. 6447 | Seq. ID No. 6448 |
| 3052 | Seq. ID No. 6451 | Seq. ID No. 6452 |
| 3055a | Seq. ID No. 6455 | Seq. ID No. 6456 |
| 3057 | Seq. ID No. 6459 | Seq. ID No. 6460 |
| 3059 | Seq. ID No. 6461 | Seq. ID No. 6462 |
| 3060 | Seq. ID No. 6463 | Seq. ID No. 6464 |
| 3065a | Seq. ID No. 6475 | Seq. ID No. 6476 |
| 3067 | Seq. ID No. 6481 | Seq. ID No. 6482 |
| 3068 | Seq. ID No. 6483 | Seq. ID No. 6484 |
| 3069 | Seq. ID No. 6485 | Seq. ID No. 6486 |
| 3071 | Seq. ID No. 6487 | Seq. ID No. 6488 |
| 3072a | Seq. ID No. 6489 | Seq. ID No. 6490 |
| 3073 | Seq. ID No. 6491 | Seq. ID No. 6492 |
| 3074 | Seq. ID No. 6493 | Seq. ID No. 6494 |
| 3075 | Seq. ID No. 6495 | Seq. ID No. 6496 |
| 3077a | Seq. ID No. 6499 | Seq. ID No. 6500 |
| 3078 | Seq. ID No. 6505 | Seq. ID No. 6506 |
| 3081a | Seq. ID No. 6509 | Seq. ID No. 6510 |
| 3083c | Seq. ID No. 6513 | Seq. ID No. 6514 |
| 3086 | Seq. ID No. 6519 | Seq. ID No. 6520 |
| 3087a | Seq. ID No. 6521 | Seq. ID No. 6522 |
| 3088 | Seq. ID No. 6525 | Seq. ID No. 6526 |
| 3089a | Seq. ID No. 6527 | Seq. ID No. 6528 |
| 3090 | Seq. ID No. 6531 | Seq. ID No. 6532 |
| 3091 | Seq. ID No. 6533 | Seq. ID No. 6534 |
| 3092a | Seq. ID No. 6535 | Seq. ID No. 6536 |
| 3097 | Seq. ID No. 6545 | Seq. ID No. 6546 |
| 3098c | Seq. ID No. 6551 | Seq. ID No. 6552 |
| 3099 | Seq. ID No. 6553 | Seq. ID No. 6554 |
| 3101 | Seq. ID No. 6559 | Seq. ID No. 6560 |
| 3102 | Seq. ID No. 6561 | Seq. ID No. 6562 |
| 3103b | Seq. ID No. 6563 | Seq. ID No. 6564 |
| 3104 | Seq. ID No. 6565 | Seq. ID No. 6566 |
| 3105 | Seq. ID No. 6567 | Seq. ID No. 6568 |
| 3106 | Seq. ID No. 6569 | Seq. ID No. 6570 |
| 3108a | Seq. ID No. 6575 | Seq. ID No. 6576 |
| 3109 | Seq. ID No. 6579 | Seq. ID No. 6580 |
| 3110b | Seq. ID No. 6583 | Seq. ID No. 6584 |
| 3113 | Seq. ID No. 6585 | Seq. ID No. 6586 |
| 3118b | Seq. ID No. 6591 | Seq. ID No. 6592 |
| 3119b | Seq. ID No. 6595 | Seq. ID No. 6596 |
| 3121 | Seq. ID No. 6605 | Seq. ID No. 6606 |
| 3122a | Seq. ID No. 6607 | Seq. ID No. 6608 |
| 3123a | Seq. ID No. 6611 | Seq. ID No. 6612 |
| 3124 | Seq. ID No. 6615 | Seq. ID No. 6616 |
| 3126 | Seq. ID No. 6617 | Seq. ID No. 6618 |
| 3129a | Seq. ID No. 6619 | Seq. ID No. 6620 |
| 3131 | Seq. ID No. 6623 | Seq. ID No. 6624 |
| 3134a | Seq. ID No. 6625 | Seq. ID No. 6626 |
| 3138 | Seq. ID No. 6629 | Seq. ID No. 6630 |
| 3141 | Seq. ID No. 6633 | Seq. ID No. 6634 |
| 3145a | Seq. ID No. 6635 | Seq. ID No. 6636 |
| 3147a | Seq. ID No. 6641 | Seq. ID No. 6642 |
| 3149a | Seq. ID No. 6647 | Seq. ID No. 6648 |

[0122] Listed in Table 20 are 2343 ORFs detected by the ORF finder program of Applicant's assignee that searches for one of the three potential Start codons between a Stop-Stop region. It first looks for a ‘ATG’ Start codon but will accept either a ‘GTG’ or ‘TTG’ Start codon if found first.

TABLE 20
WYETH ORFs

| ORF Number | DNA SEQ ID Number | Protein SEQ ID Number |
|---|---|---|
| 1 | Seq. ID No. 1 | Seq. ID No. 2 |
| 2b | Seq. ID No. 5 | Seq. ID No. 6 |
| 4c | Seq. ID No. 11 | Seq. ID No. 12 |
| 5 | Seq. ID No. 13 | Seq. ID No. 14 |
| 7 | Seq. ID No. 15 | Seq. ID No. 16 |
| 10 | Seq. ID No. 17 | Seq. ID No. 18 |
| 11 | Seq. ID No. 19 | Seq. ID No. 20 |
| 13a | Seq. ID No. 21 | Seq. ID No. 22 |
| 16 | Seq. ID No. 23 | Seq. ID No. 24 |
| 18 | Seq. ID No. 27 | Seq. ID No. 28 |
| 20 | Seq. ID No. 29 | Seq. ID No. 30 |
| 21b | Seq. ID No. 31 | Seq. ID No. 32 |
| 23b | Seq. ID No. 35 | Seq. ID No. 36 |
| 24 | Seq. ID No. 37 | Seq. ID No. 38 |
| 36 | Seq. ID No. 41 | Seq. ID No. 42 |
| 37 | Seq. ID No. 43 | Seq. ID No. 44 |
| 38a | Seq. ID No. 45 | Seq. ID No. 46 |
| 38b | Seq. ID No. 47 | Seq. ID No. 48 |
| 39a | Seq. ID No. 49 | Seq. ID No. 50 |
| 39b | Seq. ID No. 51 | Seq. ID No. 52 |
| 40 | Seq. ID No. 53 | Seq. ID No. 54 |
| 41a | Seq. ID No. 55 | Seq. ID No. 56 |
| 41b | Seq. ID No. 57 | Seq. ID No. 58 |
| 41c | Seq. ID No. 59 | Seq. ID No. 60 |
| 44a | Seq. ID No. 65 | Seq. ID No. 66 |
| 44b | Seq. ID No. 67 | Seq. ID No. 68 |
| 47 | Seq. ID No. 75 | Seq. ID No. 76 |
| 48a | Seq. ID No. 77 | Seq. ID No. 78 |
| 48b | Seq. ID No. 79 | Seq. ID No. 80 |
| 48c | Seq. ID No. 81 | Seq. ID No. 82 |
| 50 | Seq. ID No. 83 | Seq. ID No. 84 |
| 51c | Seq. ID No. 89 | Seq. ID No. 90 |
| 55 | Seq. ID No. 91 | Seq. ID No. 92 |
| 56b | Seq. ID No. 93 | Seq. ID No. 94 |
| 57b | Seq. ID No. 97 | Seq. ID No. 98 |
| 58 | Seq. ID No. 99 | Seq. ID No. 100 |
| 60b | Seq. ID No. 103 | Seq. ID No. 104 |
| 61 | Seq. ID No. 105 | Seq. ID No. 106 |
| 62a | Seq. ID No. 107 | Seq. ID No. 108 |
| 62b | Seq. ID No. 109 | Seq. ID No. 110 |
| 62c | Seq. ID No. 111 | Seq. ID No. 112 |
| 63a | Seq. ID No. 113 | Seq. ID No. 114 |
| 63b | Seq. ID No. 115 | Seq. ID No. 116 |
| 65a | Seq. ID No. 117 | Seq. ID No. 118 |
| 65b | Seq. ID No. 119 | Seq. ID No. 120 |
| 65c | Seq. ID No. 121 | Seq. ID No. 122 |
| 69 | Seq. ID No. 127 | Seq. ID No. 128 |
| 71 | Seq. ID No. 129 | Seq. ID No. 130 |
| 73a | Seq. ID No. 131 | Seq. ID No. 132 |
| 73b | Seq. ID No. 133 | Seq. ID No. 134 |
| 74 | Seq. ID No. 135 | Seq. ID No. 136 |
| 77 | Seq. ID No. 137 | Seq. ID No. 138 |
| 79 | Seq. ID No. 139 | Seq. ID No. 140 |
| 80b | Seq. ID No. 143 | Seq. ID No. 144 |
| 80c | Seq. ID No. 145 | Seq. ID No. 146 |
| 81a | Seq. ID No. 147 | Seq. ID No. 148 |
| 81b | Seq. ID No. 149 | Seq. ID No. 150 |
| 85a | Seq. ID No. 153 | Seq. ID No. 154 |
| 85b | Seq. ID No. 155 | Seq. ID No. 156 |
| 85c | Seq. ID No. 157 | Seq. ID No. 158 |
| 86 | Seq. ID No. 159 | Seq. ID No. 160 |
| 87a | Seq. ID No. 161 | Seq. ID No. 162 |
| 87b | Seq. ID No. 163 | Seq. ID No. 164 |
| 87c | Seq. ID No. 165 | Seq. ID No. 166 |
| 88 | Seq. ID No. 167 | Seq. ID No. 168 |
| 89 | Seq. ID No. 169 | Seq. ID No. 170 |
| 91a | Seq. ID No. 171 | Seq. ID No. 172 |
| 91c | Seq. ID No. 175 | Seq. ID No. 176 |
| 91d | Seq. ID No. 177 | Seq. ID No. 178 |
| 93a | Seq. ID No. 179 | Seq. ID No. 180 |
| 93b | Seq. ID No. 181 | Seq. ID No. 182 |
| 93c | Seq. ID No. 183 | Seq. ID No. 184 |
| 95b | Seq. ID No. 187 | Seq. ID No. 188 |
| 99 | Seq. ID No. 191 | Seq. ID No. 192 |
| 101 | Seq. ID No. 193 | Seq. ID No. 194 |
| 102 | Seq. ID No. 195 | Seq. ID No. 196 |
| 104c | Seq. ID No. 201 | Seq. ID No. 202 |
| 105b | Seq. ID No. 205 | Seq. ID No. 206 |
| 106 | Seq. ID No. 207 | Seq. ID No. 208 |
| 109d | Seq. ID No. 215 | Seq. ID No. 216 |
| 111b | Seq. ID No. 219 | Seq. ID No. 220 |
| 112a | Seq. ID No. 221 | Seq. ID No. 222 |
| 112b | Seq. ID No. 223 | Seq. ID No. 224 |
| 114 | Seq. ID No. 225 | Seq. ID No. 226 |
| 115 | Seq. ID No. 227 | Seq. ID No. 228 |
| 119b | Seq. ID No. 231 | Seq. ID No. 232 |
| 121 | Seq. ID No. 233 | Seq. ID No. 234 |
| 124c | Seq. ID No. 239 | Seq. ID No. 240 |
| 127a | Seq. ID No. 243 | Seq. ID No. 244 |
| 127b | Seq. ID No. 245 | Seq. ID No. 246 |
| 127c | Seq. ID No. 247 | Seq. ID No. 248 |
| 129c | Seq. ID No. 253 | Seq. ID No. 254 |
| 132b | Seq. ID No. 257 | Seq. ID No. 258 |
| 132c | Seq. ID No. 259 | Seq. ID No. 260 |
| 134 | Seq. ID No. 261 | Seq. ID No. 262 |
| 135a | Seq. ID No. 263 | Seq. ID No. 264 |
| 135b | Seq. ID No. 265 | Seq. ID No. 266 |
| 137a | Seq. ID No. 267 | Seq. ID No. 268 |
| 137b | Seq. ID No. 269 | Seq. ID No. 270 |
| 138b | Seq. ID No. 273 | Seq. ID No. 274 |
| 143 | Seq. ID No. 277 | Seq. ID No. 278 |
| 144a | Seq. ID No. 279 | Seq. ID No. 280 |
| 144b | Seq. ID No. 281 | Seq. ID No. 282 |
| 144c | Seq. ID No. 283 | Seq. ID No. 284 |
| 145d | Seq. ID No. 291 | Seq. ID No. 292 |
| 147 | Seq. ID No. 293 | Seq. ID No. 294 |
| 151b | Seq. ID No. 297 | Seq. ID No. 298 |
| 152b | Seq. ID No. 301 | Seq. ID No. 302 |
| 153b | Seq. ID No. 305 | Seq. ID No. 306 |
| 153c | Seq. ID No. 307 | Seq. ID No. 308 |
| 154 | Seq. ID No. 309 | Seq. ID No. 310 |
| 155b | Seq. ID No. 313 | Seq. ID No. 314 |
| 157b | Seq. ID No. 317 | Seq. ID No. 318 |
| 158b | Seq. ID No. 321 | Seq. ID No. 322 |
| 160a | Seq. ID No. 323 | Seq. ID No. 324 |
| 160b | Seq. ID No. 325 | Seq. ID No. 326 |
| 162c | Seq. ID No. 331 | Seq. ID No. 332 |
| 162d | Seq. ID No. 333 | Seq. ID No. 334 |
| 162e | Seq. ID No. 335 | Seq. ID No. 336 |
| 163 | Seq. ID No. 337 | Seq. ID No. 338 |
| 164 | Seq. ID No. 339 | Seq. ID No. 340 |
| 165b | Seq. ID No. 343 | Seq. ID No. 344 |
| 167 | Seq. ID No. 345 | Seq. ID No. 346 |
| 169 | Seq. ID No. 347 | Seq. ID No. 348 |
| 170 | Seq. ID No. 349 | Seq. ID No. 350 |
| 171b | Seq. ID No. 353 | Seq. ID No. 354 |
| 172 | Seq. ID No. 355 | Seq. ID No. 356 |
| 173 | Seq. ID No. 357 | Seq. ID No. 358 |
| 174 | Seq. ID No. 359 | Seq. ID No. 360 |
| 175 | Seq. ID No. 361 | Seq. ID No. 362 |
| 176 | Seq. ID No. 363 | Seq. ID No. 364 |
| 177a | Seq. ID No. 365 | Seq. ID No. 366 |
| 177b | Seq. ID No. 367 | Seq. ID No. 368 |
| 179a | Seq. ID No. 369 | Seq. ID No. 370 |
| 179b | Seq. ID No. 371 | Seq. ID No. 372 |
| 180b | Seq. ID No. 375 | Seq. ID No. 376 |
| 183a | Seq. ID No. 377 | Seq. ID No. 378 |
| 184 | Seq. ID No. 379 | Seq. ID No. 380 |
| 186 | Seq. ID No. 383 | Seq. ID No. 384 |
| 187a | Seq. ID No. 385 | Seq. ID No. 386 |
| 187b | Seq. ID No. 387 | Seq. ID No. 388 |
| 188 | Seq. ID No. 389 | Seq. ID No. 390 |
| 189b | Seq. ID No. 391 | Seq. ID No. 392 |
| 191b | Seq. ID No. 393 | Seq. ID No. 394 |
| 192b | Seq. ID No. 397 | Seq. ID No. 398 |
| 194a | Seq. ID No. 401 | Seq. ID No. 402 |
| 194b | Seq. ID No. 403 | Seq. ID No. 404 |
| 195 | Seq. ID No. 405 | Seq. ID No. 406 |
| 196 | Seq. ID No. 407 | Seq. ID No. 408 |
| 197a | Seq. ID No. 409 | Seq. ID No. 410 |
| 198b | Seq. ID No. 415 | Seq. ID No. 416 |
| 203 | Seq. ID No. 423 | Seq. ID No. 424 |
| 204 | Seq. ID No. 425 | Seq. ID No. 426 |
| 205 | Seq. ID No. 427 | Seq. ID No. 428 |
| 206 | Seq. ID No. 429 | Seq. ID No. 430 |
| 207 | Seq. ID No. 431 | Seq. ID No. 432 |
| 208a | Seq. ID No. 433 | Seq. ID No. 434 |
| 208b | Seq. ID No. 435 | Seq. ID No. 436 |
| 210 | Seq. ID No. 437 | Seq. ID No. 438 |
| 211 | Seq. ID No. 439 | Seq. ID No. 440 |
| 213 | Seq. ID No. 441 | Seq. ID No. 442 |
| 215a | Seq. ID No. 443 | Seq. ID No. 444 |
| 218 | Seq. ID No. 445 | Seq. ID No. 446 |
| 219 | Seq. ID No. 447 | Seq. ID No. 448 |
| 220b | Seq. ID No. 451 | Seq. ID No. 452 |
| 220c | Seq. ID No. 453 | Seq. ID No. 454 |
| 223a | Seq. ID No. 455 | Seq. ID No. 456 |
| 223b | Seq. ID No. 457 | Seq. ID No. 458 |
| 226b | Seq. ID No. 461 | Seq. ID No. 462 |
| 227 | Seq. ID No. 463 | Seq. ID No. 464 |
| 228b | Seq. ID No. 467 | Seq. ID No. 468 |
| 228c | Seq. ID No. 469 | Seq. ID No. 470 |
| 228d | Seq. ID No. 471 | Seq. ID No. 472 |
| 232a | Seq. ID No. 473 | Seq. ID No. 474 |
| 232b | Seq. ID No. 475 | Seq. ID No. 476 |
| 235a | Seq. ID No. 477 | Seq. ID No. 478 |
| 235b | Seq. ID No. 479 | Seq. ID No. 480 |
| 236a | Seq. ID No. 481 | Seq. ID No. 482 |
| 236b | Seq. ID No. 483 | Seq. ID No. 484 |
| 236c | Seq. ID No. 485 | Seq. ID No. 486 |
| 239b | Seq. ID No. 489 | Seq. ID No. 490 |
| 239c | Seq. ID No. 491 | Seq. ID No. 492 |
| 240 | Seq. ID No. 493 | Seq. ID No. 494 |
| 241 | Seq. ID No. 495 | Seq. ID No. 496 |
| 245c | Seq. ID No. 501 | Seq. ID No. 502 |
| 246b | Seq. ID No. 505 | Seq. ID No. 506 |
| 247 | Seq. ID No. 507 | Seq. ID No. 508 |
| 248b | Seq. ID No. 511 | Seq. ID No. 512 |
| 249b | Seq. ID No. 515 | Seq. ID No. 516 |
| 251 | Seq. ID No. 517 | Seq. ID No. 518 |
| 254 | Seq. ID No. 523 | Seq. ID No. 524 |
| 255c | Seq. ID No. 529 | Seq. ID No. 530 |
| 255d | Seq. ID No. 531 | Seq. ID No. 532 |
| 258 | Seq. ID No. 533 | Seq. ID No. 534 |
| 259b | Seq. ID No. 537 | Seq. ID No. 538 |
| 259c | Seq. ID No. 539 | Seq. ID No. 540 |
| 262 | Seq. ID No. 543 | Seq. ID No. 544 |
| 263b | Seq. ID No. 547 | Seq. ID No. 548 |
| 264b | Seq. ID No. 549 | Seq. ID No. 550 |
| 265 | Seq. ID No. 551 | Seq. ID No. 552 |
| 267b | Seq. ID No. 553 | Seq. ID No. 554 |
| 267c | Seq. ID No. 555 | Seq. ID No. 556 |
| 268 | Seq. ID No. 557 | Seq. ID No. 558 |
| 269a | Seq. ID No. 559 | Seq. ID No. 560 |
| 269b | Seq. ID No. 561 | Seq. ID No. 562 |
| 271b | Seq. ID No. 565 | Seq. ID No. 566 |
| 273b | Seq. ID No. 569 | Seq. ID No. 570 |
| 277a | Seq. ID No. 571 | Seq. ID No. 572 |
| 277b | Seq. ID No. 573 | Seq. ID No. 574 |
| 277c | Seq. ID No. 575 | Seq. ID No. 576 |
| 279b | Seq. ID No. 579 | Seq. ID No. 580 |
| 280a | Seq. ID No. 581 | Seq. ID No. 582 |
| 280c | Seq. ID No. 585 | Seq. ID No. 586 |
| 280d | Seq. ID No. 587 | Seq. ID No. 588 |
| 282 | Seq. ID No. 589 | Seq. ID No. 590 |
| 283a | Seq. ID No. 591 | Seq. ID No. 592 |
| 283b | Seq. ID No. 593 | Seq. ID No. 594 |
| 284a | Seq. ID No. 595 | Seq. ID No. 596 |
| 284b | Seq. ID No. 597 | Seq. ID No. 598 |
| 285b | Seq. ID No. 599 | Seq. ID No. 600 |
| 286a | Seq. ID No. 601 | Seq. ID No. 602 |
| 286b | Seq. ID No. 603 | Seq. ID No. 604 |
| 287 | Seq. ID No. 605 | Seq. ID No. 606 |
| 290b | Seq. ID No. 609 | Seq. ID No. 610 |
| 294 | Seq. ID No. 613 | Seq. ID No. 614 |
| 296 | Seq. ID No. 615 | Seq. ID No. 616 |
| 297 | Seq. ID No. 617 | Seq. ID No. 618 |
| 300b | Seq. ID No. 619 | Seq. ID No. 620 |
| 301a | Seq. ID No. 621 | Seq. ID No. 622 |
| 301b | Seq. ID No. 623 | Seq. ID No. 624 |
| 304a | Seq. ID No. 625 | Seq. ID No. 626 |
| 304b | Seq. ID No. 627 | Seq. ID No. 628 |
| 310 | Seq. ID No. 635 | Seq. ID No. 636 |
| 311 | Seq. ID No. 637 | Seq. ID No. 638 |
| 313c | Seq. ID No. 643 | Seq. ID No. 644 |
| 313d | Seq. ID No. 645 | Seq. ID No. 646 |
| 313e | Seq. ID No. 647 | Seq. ID No. 648 |
| 315 | Seq. ID No. 649 | Seq. ID No. 650 |
| 317b | Seq. ID No. 655 | Seq. ID No. 656 |
| 318d | Seq. ID No. 663 | Seq. ID No. 664 |
| 318e | Seq. ID No. 665 | Seq. ID No. 666 |
| 320 | Seq. ID No. 667 | Seq. ID No. 668 |
| 321 | Seq. ID No. 669 | Seq. ID No. 670 |
| 324 | Seq. ID No. 675 | Seq. ID No. 676 |
| 327c | Seq. ID No. 681 | Seq. ID No. 682 |
| 329 | Seq. ID No. 683 | Seq. ID No. 684 |
| 330b | Seq. ID No. 687 | Seq. ID No. 688 |
| 330c | Seq. ID No. 689 | Seq. ID No. 690 |
| 331 | Seq. ID No. 691 | Seq. ID No. 692 |
| 333 | Seq. ID No. 695 | Seq. ID No. 696 |
| 334 | Seq. ID No. 697 | Seq. ID No. 698 |
| 335a | Seq. ID No. 699 | Seq. ID No. 700 |
| 335b | Seq. ID No. 701 | Seq. ID No. 702 |
| 337 | Seq. ID No. 703 | Seq. ID No. 704 |
| 338a | Seq. ID No. 705 | Seq. ID No. 706 |
| 338b | Seq. ID No. 707 | Seq. ID No. 708 |
| 338c | Seq. ID No. 709 | Seq. ID No. 710 |
| 341b | Seq. ID No. 713 | Seq. ID No. 714 |
| 342f | Seq. ID No. 725 | Seq. ID No. 726 |
| 342g | Seq. ID No. 727 | Seq. ID No. 728 |
| 342h | Seq. ID No. 729 | Seq. ID No. 730 |
| 344a | Seq. ID No. 731 | Seq. ID No. 732 |
| 344b | Seq. ID No. 733 | Seq. ID No. 734 |
| 345 | Seq. ID No. 735 | Seq. ID No. 736 |
| 346b | Seq. ID No. 739 | Seq. ID No. 740 |
| 347 | Seq. ID No. 741 | Seq. ID No. 742 |
| 349b | Seq. ID No. 745 | Seq. ID No. 746 |
| 349c | Seq. ID No. 747 | Seq. ID No. 748 |
| 350a | Seq. ID No. 749 | Seq. ID No. 750 |
| 350b | Seq. ID No. 751 | Seq. ID No. 752 |
| 351 | Seq. ID No. 753 | Seq. ID No. 754 |
| 352c | Seq. ID No. 759 | Seq. ID No. 760 |
| 354b | Seq. ID No. 763 | Seq. ID No. 764 |
| 354c | Seq. ID No. 765 | Seq. ID No. 766 |
| 356c | Seq. ID No. 773 | Seq. ID No. 774 |
| 356d | Seq. ID No. 775 | Seq. ID No. 776 |
| 358c | Seq. ID No. 781 | Seq. ID No. 782 |
| 362 | Seq. ID No. 783 | Seq. ID No. 784 |
| 365b | Seq. ID No. 787 | Seq. ID No. 788 |
| 367a | Seq. ID No. 793 | Seq. ID No. 794 |
| 367b | Seq. ID No. 795 | Seq. ID No. 796 |
| 371b | Seq. ID No. 799 | Seq. ID No. 800 |
| 372a | Seq. ID No. 801 | Seq. ID No. 802 |
| 372c | Seq. ID No. 805 | Seq. ID No. 806 |
| 372d | Seq. ID No. 807 | Seq. ID No. 808 |
| 374 | Seq. ID No. 809 | Seq. ID No. 810 |
| 377a | Seq. ID No. 811 | Seq. ID No. 812 |
| 377b | Seq. ID No. 813 | Seq. ID No. 814 |
| 378a | Seq. ID No. 815 | Seq. ID No. 816 |
| 378b | Seq. ID No. 817 | Seq. ID No. 818 |
| 382b | Seq. ID No. 819 | Seq. ID No. 820 |
| 383a | Seq. ID No. 821 | Seq. ID No. 822 |
| 383b | Seq. ID No. 823 | Seq. ID No. 824 |
| 384b | Seq. ID No. 827 | Seq. ID No. 828 |
| 385a | Seq. ID No. 829 | Seq. ID No. 830 |
| 385b | Seq. ID No. 831 | Seq. ID No. 832 |
| 387 | Seq. ID No. 835 | Seq. ID No. 836 |
| 390 | Seq. ID No. 837 | Seq. ID No. 838 |
| 391 | Seq. ID No. 839 | Seq. ID No. 840 |
| 395a | Seq. ID No. 843 | Seq. ID No. 844 |
| 395b | Seq. ID No. 845 | Seq. ID No. 846 |
| 395c | Seq. ID No. 847 | Seq. ID No. 848 |
| 400b | Seq. ID No. 855 | Seq. ID No. 856 |
| 401b | Seq. ID No. 859 | Seq. ID No. 860 |
| 403a | Seq. ID No. 861 | Seq. ID No. 862 |
| 403c | Seq. ID No. 865 | Seq. ID No. 866 |
| 403d | Seq. ID No. 867 | Seq. ID No. 868 |
| 406b | Seq. ID No. 871 | Seq. ID No. 872 |
| 409a | Seq. ID No. 873 | Seq. ID No. 874 |
| 409b | Seq. ID No. 875 | Seq. ID No. 876 |
| 410a | Seq. ID No. 877 | Seq. ID No. 878 |
| 410b | Seq. ID No. 879 | Seq. ID No. 880 |
| 410c | Seq. ID No. 881 | Seq. ID No. 882 |
| 413b | Seq. ID No. 885 | Seq. ID No. 886 |
| 418b | Seq. ID No. 895 | Seq. ID No. 896 |
| 419a | Seq. ID No. 897 | Seq. ID No. 898 |
| 419b | Seq. ID No. 899 | Seq. ID No. 900 |
| 419c | Seq. ID No. 901 | Seq. ID No. 902 |
| 420a | Seq. ID No. 903 | Seq. ID No. 904 |
| 420b | Seq. ID No. 905 | Seq. ID No. 906 |
| 421 | Seq. ID No. 907 | Seq. ID No. 908 |
| 422 | Seq. ID No. 909 | Seq. ID No. 910 |
| 424b | Seq. ID No. 913 | Seq. ID No. 914 |
| 424c | Seq. ID No. 915 | Seq. ID No. 916 |
| 427a | Seq. ID No. 921 | Seq. ID No. 922 |
| 427b | Seq. ID No. 923 | Seq. ID No. 924 |
| 427c | Seq. ID No. 925 | Seq. ID No. 926 |
| 429c | Seq. ID No. 931 | Seq. ID No. 932 |
| 429d | Seq. ID No. 933 | Seq. ID No. 934 |
| 431 | Seq. ID No. 935 | Seq. ID No. 936 |
| 434 | Seq. ID No. 937 | Seq. ID No. 938 |
| 435 | Seq. ID No. 939 | Seq. ID No. 940 |
| 437b | Seq. ID No. 941 | Seq. ID No. 942 |
| 437c | Seq. ID No. 943 | Seq. ID No. 944 |
| 438b | Seq. ID No. 947 | Seq. ID No. 948 |
| 438c | Seq. ID No. 949 | Seq. ID No. 950 |
| 440 | Seq. ID No. 951 | Seq. ID No. 952 |
| 441a | Seq. ID No. 953 | Seq. ID No. 954 |
| 441b | Seq. ID No. 955 | Seq. ID No. 956 |
| 443b | Seq. ID No. 957 | Seq. ID No. 958 |
| 444b | Seq. ID No. 961 | Seq. ID No. 962 |
| 445a | Seq. ID No. 963 | Seq. ID No. 964 |
| 445b | Seq. ID No. 965 | Seq. ID No. 966 |
| 448 | Seq. ID No. 967 | Seq. ID No. 968 |
| 450a | Seq. ID No. 969 | Seq. ID No. 970 |
| 450b | Seq. ID No. 971 | Seq. ID No. 972 |
| 451a | Seq. ID No. 973 | Seq. ID No. 974 |
| 451b | Seq. ID No. 975 | Seq. ID No. 976 |
| 452c | Seq. ID No. 981 | Seq. ID No. 982 |
| 452d | Seq. ID No. 983 | Seq. ID No. 984 |
| 452e | Seq. ID No. 985 | Seq. ID No. 986 |
| 454b | Seq. ID No. 987 | Seq. ID No. 988 |
| 455a | Seq. ID No. 989 | Seq. ID No. 990 |
| 455b | Seq. ID No. 991 | Seq. ID No. 992 |
| 455c | Seq. ID No. 993 | Seq. ID No. 994 |
| 458a | Seq. ID No. 995 | Seq. ID No. 996 |
| 458b | Seq. ID No. 997 | Seq. ID No. 998 |
| 460b | Seq. ID No. 1001 | Seq. ID No. 1002 |
| 460c | Seq. ID No. 1003 | Seq. ID No. 1004 |
| 462 | Seq. ID No. 1005 | Seq. ID No. 1006 |
| 463a | Seq. ID No. 1007 | Seq. ID No. 1008 |
| 463b | Seq. ID No. 1009 | Seq. ID No. 1010 |
| 464d | Seq. ID No. 1017 | Seq. ID No. 1018 |
| 465b | Seq. ID No. 1019 | Seq. ID No. 1020 |
| 467b | Seq. ID No. 1023 | Seq. ID No. 1024 |
| 471a | Seq. ID No. 1025 | Seq. ID No. 1026 |
| 471b | Seq. ID No. 1027 | Seq. ID No. 1028 |
| 472f | Seq. ID No. 1039 | Seq. ID No. 1040 |
| 473 | Seq. ID No. 1041 | Seq. ID No. 1042 |
| 474 | Seq. ID No. 1043 | Seq. ID No. 1044 |
| 476 | Seq. ID No. 1045 | Seq. ID No. 1046 |
| 477b | Seq. ID No. 1047 | Seq. ID No. 1048 |
| 478a | Seq. ID No. 1049 | Seq. ID No. 1050 |
| 478b | Seq. ID No. 1051 | Seq. ID No. 1052 |
| 480b | Seq. ID No. 1057 | Seq. ID No. 1058 |
| 481a | Seq. ID No. 1059 | Seq. ID No. 1060 |
| 481b | Seq. ID No. 1061 | Seq. ID No. 1062 |
| 482b | Seq. ID No. 1065 | Seq. ID No. 1066 |
| 490 | Seq. ID No. 1069 | Seq. ID No. 1070 |
| 492 | Seq. ID No. 1075 | Seq. ID No. 1076 |
| 494a | Seq. ID No. 1077 | Seq. ID No. 1078 |
| 495a | Seq. ID No. 1079 | Seq. ID No. 1080 |
| 495b | Seq. ID No. 1081 | Seq. ID No. 1082 |
| 495c | Seq. ID No. 1083 | Seq. ID No. 1084 |
| 498a | Seq. ID No. 1085 | Seq. ID No. 1086 |
| 498b | Seq. ID No. 1087 | Seq. ID No. 1088 |
| 499b | Seq. ID No. 1091 | Seq. ID No. 1092 |
| 500 | Seq. ID No. 1093 | Seq. ID No. 1094 |
| 502b | Seq. ID No. 1095 | Seq. ID No. 1096 |
| 502c | Seq. ID No. 1097 | Seq. ID No. 1098 |
| 504 | Seq. ID No. 1099 | Seq. ID No. 1100 |
| 505a | Seq. ID No. 1101 | Seq. ID No. 1102 |
| 505b | Seq. ID No. 1103 | Seq. ID No. 1104 |
| 507b | Seq. ID No. 1107 | Seq. ID No. 1108 |
| 509 | Seq. ID No. 1109 | Seq. ID No. 1110 |
| 510 | Seq. ID No. 1111 | Seq. ID No. 1112 |
| 512a | Seq. ID No. 1113 | Seq. ID No. 1114 |
| 512b | Seq. ID No. 1115 | Seq. ID No. 1116 |
| 515a | Seq. ID No. 1119 | Seq. ID No. 1120 |
| 515b | Seq. ID No. 1121 | Seq. ID No. 1122 |
| 515c | Seq. ID No. 1123 | Seq. ID No. 1124 |
| 518a | Seq. ID No. 1125 | Seq. ID No. 1126 |
| 518b | Seq. ID No. 1127 | Seq. ID No. 1128 |
| 518c | Seq. ID No. 1129 | Seq. ID No. 1130 |
| 521b | Seq. ID No. 1131 | Seq. ID No. 1132 |
| 524b | Seq. ID No. 1137 | Seq. ID No. 1138 |
| 525 | Seq. ID No. 1139 | Seq. ID No. 1140 |
| 527a | Seq. ID No. 1141 | Seq. ID No. 1142 |
| 527b | Seq. ID No. 1143 | Seq. ID No. 1144 |
| 528a | Seq. ID No. 1145 | Seq. ID No. 1146 |
| 528b | Seq. ID No. 1147 | Seq. ID No. 1148 |
| 529 | Seq. ID No. 1149 | Seq. ID No. 1150 |
| 530a | Seq. ID No. 1151 | Seq. ID No. 1152 |
| 530b | Seq. ID No. 1153 | Seq. ID No. 1154 |
| 533 | Seq. ID No. 1155 | Seq. ID No. 1156 |
| 535 | Seq. ID No. 1157 | Seq. ID No. 1158 |
| 536 | Seq. ID No. 1159 | Seq. ID No. 1160 |
| 539b | Seq. ID No. 1161 | Seq. ID No. 1162 |
| 539c | Seq. ID No. 1163 | Seq. ID No. 1164 |
| 541d | Seq. ID No. 1171 | Seq. ID No. 1172 |
| 543a | Seq. ID No. 1175 | Seq. ID No. 1176 |
| 543b | Seq. ID No. 1177 | Seq. ID No. 1178 |
| 543c | Seq. ID No. 1179 | Seq. ID No. 1180 |
| 544 | Seq. ID No. 1181 | Seq. ID No. 1182 |
| 545c | Seq. ID No. 1187 | Seq. ID No. 1188 |
| 546b | Seq. ID No. 1191 | Seq. ID No. 1192 |
| 546c | Seq. ID No. 1193 | Seq. ID No. 1194 |
| 547a | Seq. ID No. 1195 | Seq. ID No. 1196 |
| 547b | Seq. ID No. 1197 | Seq. ID No. 1198 |
| 549b | Seq. ID No. 1201 | Seq. ID No. 1202 |
| 550a | Seq. ID No. 1203 | Seq. ID No. 1204 |
| 551 | Seq. ID No. 1205 | Seq. ID No. 1206 |
| 553c | Seq. ID No. 1207 | Seq. ID No. 1208 |
| 554b | Seq. ID No. 1211 | Seq. ID No. 1212 |
| 556 | Seq. ID No. 1213 | Seq. ID No. 1214 |
| 557a | Seq. ID No. 1215 | Seq. ID No. 1216 |
| 557b | Seq. ID No. 1217 | Seq. ID No. 1218 |
| 560b | Seq. ID No. 1221 | Seq. ID No. 1222 |
| 561 | Seq. ID No. 1223 | Seq. ID No. 1224 |
| 563 | Seq. ID No. 1225 | Seq. ID No. 1226 |
| 564c | Seq. ID No. 1231 | Seq. ID No. 1232 |
| 569 | Seq. ID No. 1233 | Seq. ID No. 1234 |
| 570b | Seq. ID No. 1237 | Seq. ID No. 1238 |
| 571 | Seq. ID No. 1239 | Seq. ID No. 1240 |
| 573 | Seq. ID No. 1241 | Seq. ID No. 1242 |
| 576b | Seq. ID No. 1245 | Seq. ID No. 1246 |
| 578a | Seq. ID No. 1247 | Seq. ID No. 1248 |
| 578b | Seq. ID No. 1249 | Seq. ID No. 1250 |
| 580a | Seq. ID No. 1251 | Seq. ID No. 1252 |
| 580b | Seq. ID No. 1253 | Seq. ID No. 1254 |
| 583a | Seq. ID No. 1255 | Seq. ID No. 1256 |
| 583b | Seq. ID No. 1257 | Seq. ID No. 1258 |
| 585b | Seq. ID No. 1259 | Seq. ID No. 1260 |
| 586a | Seq. ID No. 1261 | Seq. ID No. 1262 |
| 586b | Seq. ID No. 1263 | Seq. ID No. 1264 |
| 587d | Seq. ID No. 1271 | Seq. ID No. 1272 |
| 588a | Seq. ID No. 1273 | Seq. ID No. 1274 |
| 588b | Seq. ID No. 1275 | Seq. ID No. 1276 |
| 589a | Seq. ID No. 1277 | Seq. ID No. 1278 |
| 589b | Seq. ID No. 1279 | Seq. ID No. 1280 |
| 595b | Seq. ID No. 1285 | Seq. ID No. 1286 |
| 596b | Seq. ID No. 1289 | Seq. ID No. 1290 |
| 596c | Seq. ID No. 1291 | Seq. ID No. 1292 |
| 597 | Seq. ID No. 1293 | Seq. ID No. 1294 |
| 598a | Seq. ID No. 1295 | Seq. ID No. 1296 |
| 598b | Seq. ID No. 1297 | Seq. ID No. 1298 |
| 599a | Seq. ID No. 1299 | Seq. ID No. 1300 |
| 599b | Seq. ID No. 1301 | Seq. ID No. 1302 |
| 600a | Seq. ID No. 1303 | Seq. ID No. 1304 |
| 600b | Seq. ID No. 1305 | Seq. ID No. 1306 |
| 603a | Seq. ID No. 1307 | Seq. ID No. 1308 |
| 606 | Seq. ID No. 1309 | Seq. ID No. 1310 |
| 607a | Seq. ID No. 1311 | Seq. ID No. 1312 |
| 607b | Seq. ID No. 1313 | Seq. ID No. 1314 |
| 609b | Seq. ID No. 1317 | Seq. ID No. 1318 |
| 610a | Seq. ID No. 1319 | Seq. ID No. 1320 |
| 610b | Seq. ID No. 1321 | Seq. ID No. 1322 |
| 613d | Seq. ID No. 1331 | Seq. ID No. 1332 |
| 614a | Seq. ID No. 1333 | Seq. ID No. 1334 |
| 614b | Seq. ID No. 1335 | Seq. ID No. 1336 |
| 615b | Seq. ID No. 1337 | Seq. ID No. 1338 |
| 618 | Seq. ID No. 1339 | Seq. ID No. 1340 |
| 619b | Seq. ID No. 1343 | Seq. ID No. 1344 |
| 620 | Seq. ID No. 1345 | Seq. ID No. 1346 |
| 623 | Seq. ID No. 1347 | Seq. ID No. 1348 |
| 624a | Seq. ID No. 1349 | Seq. ID No. 1350 |
| 624b | Seq. ID No. 1351 | Seq. ID No. 1352 |
| 626b | Seq. ID No. 1359 | Seq. ID No. 1360 |
| 626c | Seq. ID No. 1361 | Seq. ID No. 1362 |
| 631a | Seq. ID No. 1363 | Seq. ID No. 1364 |
| 631b | Seq. ID No. 1365 | Seq. ID No. 1366 |
| 631d | Seq. ID No. 1369 | Seq. ID No. 1370 |
| 632b | Seq. ID No. 1371 | Seq. ID No. 1372 |
| 633b | Seq. ID No. 1375 | Seq. ID No. 1376 |
| 633c | Seq. ID No. 1377 | Seq. ID No. 1378 |
| 636 | Seq. ID No. 1381 | Seq. ID No. 1382 |
| 637a | Seq. ID No. 1383 | Seq. ID No. 1384 |
| 637b | Seq. ID No. 1385 | Seq. ID No. 1386 |
| 637c | Seq. ID No. 1387 | Seq. ID No. 1388 |
| 640 | Seq. ID No. 1389 | Seq. ID No. 1390 |
| 641a | Seq. ID No. 1391 | Seq. ID No. 1392 |
| 641b | Seq. ID No. 1393 | Seq. ID No. 1394 |
| 645 | Seq. ID No. 1401 | Seq. ID No. 1402 |
| 650 | Seq. ID No. 1403 | Seq. ID No. 1404 |
| 653a | Seq. ID No. 1407 | Seq. ID No. 1408 |
| 653b | Seq. ID No. 1409 | Seq. ID No. 1410 |
| 653c | Seq. ID No. 1411 | Seq. ID No. 1412 |
| 656 | Seq. ID No. 1413 | Seq. ID No. 1414 |
| 657c | Seq. ID No. 1415 | Seq. ID No. 1416 |
| 658b | Seq. ID No. 1419 | Seq. ID No. 1420 |
| 659a | Seq. ID No. 1421 | Seq. ID No. 1422 |
| 659b | Seq. ID No. 1423 | Seq. ID No. 1424 |
| 661 | Seq. ID No. 1425 | Seq. ID No. 1426 |
| 663 | Seq. ID No. 1427 | Seq. ID No. 1428 |
| 665 | Seq. ID No. 1429 | Seq. ID No. 1430 |
| 670 | Seq. ID No. 1433 | Seq. ID No. 1434 |
| 674b | Seq. ID No. 1437 | Seq. ID No. 1438 |
| 677a | Seq. ID No. 1441 | Seq. ID No. 1442 |
| 677b | Seq. ID No. 1443 | Seq. ID No. 1444 |
| 679b | Seq. ID No. 1447 | Seq. ID No. 1448 |
| 680 | Seq. ID No. 1449 | Seq. ID No. 1450 |
| 681 | Seq. ID No. 1451 | Seq. ID No. 1452 |
| 683b | Seq. ID No. 1455 | Seq. ID No. 1456 |
| 687 | Seq. ID No. 1459 | Seq. ID No. 1460 |
| 688b | Seq. ID No. 1463 | Seq. ID No. 1464 |
| 690 | Seq. ID No. 1465 | Seq. ID No. 1466 |
| 691a | Seq. ID No. 1467 | Seq. ID No. 1468 |
| 691b | Seq. ID No. 1469 | Seq. ID No. 1470 |
| 692 | Seq. ID No. 1471 | Seq. ID No. 1472 |
| 694 | Seq. ID No. 1473 | Seq. ID No. 1474 |
| 696 | Seq. ID No. 1475 | Seq. ID No. 1476 |
| 698 | Seq. ID No. 1477 | Seq. ID No. 1478 |
| 699b | Seq. ID No. 1479 | Seq. ID No. 1480 |
| 700b | Seq. ID No. 1483 | Seq. ID No. 1484 |
| 700c | Seq. ID No. 1485 | Seq. ID No. 1486 |
| 703 | Seq. ID No. 1487 | Seq. ID No. 1488 |
| 705b | Seq. ID No. 1491 | Seq. ID No. 1492 |
| 707 | Seq. ID No. 1493 | Seq. ID No. 1494 |
| 709 | Seq. ID No. 1495 | Seq. ID No. 1496 |
| 710 | Seq. ID No. 1497 | Seq. ID No. 1498 |
| 712a | Seq. ID No. 1499 | Seq. ID No. 1500 |
| 712b | Seq. ID No. 1501 | Seq. ID No. 1502 |
| 715b | Seq. ID No. 1505 | Seq. ID No. 1506 |
| 717 | Seq. ID No. 1507 | Seq. ID No. 1508 |
| 721 | Seq. ID No. 1511 | Seq. ID No. 1512 |
| 722c | Seq. ID No. 1517 | Seq. ID No. 1518 |
| 724a | Seq. ID No. 1519 | Seq. ID No. 1520 |
| 724c | Seq. ID No. 1523 | Seq. ID No. 1524 |
| 724d | Seq. ID No. 1525 | Seq. ID No. 1526 |
| 726 | Seq. ID No. 1527 | Seq. ID No. 1528 |
| 728b | Seq. ID No. 1531 | Seq. ID No. 1532 |
| 730d | Seq. ID No. 1539 | Seq. ID No. 1540 |
| 732 | Seq. ID No. 1543 | Seq. ID No. 1544 |
| 738c | Seq. ID No. 1549 | Seq. ID No. 1550 |
| 739 | Seq. ID No. 1551 | Seq. ID No. 1552 |
| 740 | Seq. ID No. 1553 | Seq. ID No. 1554 |
| 741a | Seq. ID No. 1555 | Seq. ID No. 1556 |
| 741b | Seq. ID No. 1557 | Seq. ID No. 1558 |
| 743b | Seq. ID No. 1561 | Seq. ID No. 1562 |
| 744 | Seq. ID No. 1563 | Seq. ID No. 1564 |
| 745a | Seq. ID No. 1565 | Seq. ID No. 1566 |
| 745b | Seq. ID No. 1567 | Seq. ID No. 1568 |
| 746b | Seq. ID No. 1571 | Seq. ID No. 1572 |
| 747 | Seq. ID No. 1573 | Seq. ID No. 1574 |
| 748a | Seq. ID No. 1575 | Seq. ID No. 1576 |
| 748b | Seq. ID No. 1577 | Seq. ID No. 1578 |
| 749 | Seq. ID No. 1579 | Seq. ID No. 1580 |
| 751 | Seq. ID No. 1581 | Seq. ID No. 1582 |
| 754d | Seq. ID No. 1589 | Seq. ID No. 1590 |
| 756b | Seq. ID No. 1593 | Seq. ID No. 1594 |
| 758 | Seq. ID No. 1595 | Seq. ID No. 1596 |
| 760 | Seq. ID No. 1597 | Seq. ID No. 1598 |
| 762a | Seq. ID No. 1599 | Seq. ID No. 1600 |
| 762b | Seq. ID No. 1601 | Seq. ID No. 1602 |
| 763b | Seq. ID No. 1607 | Seq. ID No. 1608 |
| 766 | Seq. ID No. 1611 | Seq. ID No. 1612 |
| 767 | Seq. ID No. 1613 | Seq. ID No. 1614 |
| 770a | Seq. ID No. 1615 | Seq. ID No. 1616 |
| 770b | Seq. ID No. 1617 | Seq. ID No. 1618 |
| 770c | Seq. ID No. 1619 | Seq. ID No. 1620 |
| 772b | Seq. ID No. 1623 | Seq. ID No. 1624 |
| 774 | Seq. ID No. 1625 | Seq. ID No. 1626 |
| 775 | Seq. ID No. 1627 | Seq. ID No. 1628 |
| 779 | Seq. ID No. 1633 | Seq. ID No. 1634 |
| 780b | Seq. ID No. 1637 | Seq. ID No. 1638 |
| 782b | Seq. ID No. 1639 | Seq. ID No. 1640 |
| 785 | Seq. ID No. 1641 | Seq. ID No. 1642 |
| 786b | Seq. ID No. 1643 | Seq. ID No. 1644 |
| 788b | Seq. ID No. 1647 | Seq. ID No. 1648 |
| 789b | Seq. ID No. 1651 | Seq. ID No. 1652 |
| 789c | Seq. ID No. 1653 | Seq. ID No. 1654 |
| 791 | Seq. ID No. 1655 | Seq. ID No. 1656 |
| 792 | Seq. ID No. 1657 | Seq. ID No. 1658 |
| 794b | Seq. ID No. 1661 | Seq. ID No. 1662 |
| 794c | Seq. ID No. 1663 | Seq. ID No. 1664 |
| 794d | Seq. ID No. 1665 | Seq. ID No. 1666 |
| 797 | Seq. ID No. 1669 | Seq. ID No. 1670 |
| 799c | Seq. ID No. 1675 | Seq. ID No. 1676 |
| 799e | Seq. ID No. 1679 | Seq. ID No. 1680 |
| 799f | Seq. ID No. 1681 | Seq. ID No. 1682 |
| 803b | Seq. ID No. 1685 | Seq. ID No. 1686 |
| 804a | Seq. ID No. 1687 | Seq. ID No. 1688 |
| 804b | Seq. ID No. 1689 | Seq. ID No. 1690 |
| 807 | Seq. ID No. 1691 | Seq. ID No. 1692 |
| 808 | Seq. ID No. 1693 | Seq. ID No. 1694 |
| 809b | Seq. ID No. 1695 | Seq. ID No. 1696 |
| 812 | Seq. ID No. 1697 | Seq. ID No. 1698 |
| 813 | Seq. ID No. 1699 | Seq. ID No. 1700 |
| 820a | Seq. ID No. 1703 | Seq. ID No. 1704 |
| 820b | Seq. ID No. 1705 | Seq. ID No. 1706 |
| 826 | Seq. ID No. 1707 | Seq. ID No. 1708 |
| 829b | Seq. ID No. 1711 | Seq. ID No. 1712 |
| 830 | Seq. ID No. 1713 | Seq. ID No. 1714 |
| 834a | Seq. ID No. 1715 | Seq. ID No. 1716 |
| 834b | Seq. ID No. 1717 | Seq. ID No. 1718 |
| 834c | Seq. ID No. 1719 | Seq. ID No. 1720 |
| 835a | Seq. ID No. 1721 | Seq. ID No. 1722 |
| 835b | Seq. ID No. 1723 | Seq. ID No. 1724 |
| 836b | Seq. ID No. 1727 | Seq. ID No. 1728 |
| 836c | Seq. ID No. 1729 | Seq. ID No. 1730 |
| 837c | Seq. ID No. 1735 | Seq. ID No. 1736 |
| 843 | Seq. ID No. 1737 | Seq. ID No. 1738 |
| 847a | Seq. ID No. 1739 | Seq. ID No. 1740 |
| 847b | Seq. ID No. 1741 | Seq. ID No. 1742 |
| 849b | Seq. ID No. 1747 | Seq. ID No. 1748 |
| 851a | Seq. ID No. 1749 | Seq. ID No. 1750 |
| 851b | Seq. ID No. 1751 | Seq. ID No. 1752 |
| 853b | Seq. ID No. 1755 | Seq. ID No. 1756 |
| 853c | Seq. ID No. 1757 | Seq. ID No. 1758 |
| 854 | Seq. ID No. 1759 | Seq. ID No. 1760 |
| 857 | Seq. ID No. 1763 | Seq. ID No. 1764 |
| 859c | Seq. ID No. 1769 | Seq. ID No. 1770 |
| 859d | Seq. ID No. 1771 | Seq. ID No. 1772 |
| 862 | Seq. ID No. 1775 | Seq. ID No. 1776 |
| 863 | Seq. ID No. 1777 | Seq. ID No. 1778 |
| 864a | Seq. ID No. 1779 | Seq. ID No. 1780 |
| 864b | Seq. ID No. 1781 | Seq. ID No. 1782 |
| 866a | Seq. ID No. 1783 | Seq. ID No. 1784 |
| 866b | Seq. ID No. 1785 | Seq. ID No. 1786 |
| 868b | Seq. ID No. 1789 | Seq. ID No. 1790 |
| 870 | Seq. ID No. 1791 | Seq. ID No. 1792 |
| 873a | Seq. ID No. 1793 | Seq. ID No. 1794 |
| 873b | Seq. ID No. 1795 | Seq. ID No. 1796 |
| 873c | Seq. ID No. 1797 | Seq. ID No. 1798 |
| 876 | Seq. ID No. 1805 | Seq. ID No. 1806 |
| 878b | Seq. ID No. 1809 | Seq. ID No. 1810 |
| 878c | Seq. ID No. 1811 | Seq. ID No. 1812 |
| 880a | Seq. ID No. 1813 | Seq. ID No. 1814 |
| 880b | Seq. ID No. 1815 | Seq. ID No. 1816 |
| 880c | Seq. ID No. 1817 | Seq. ID No. 1818 |
| 885 | Seq. ID No. 1819 | Seq. ID No. 1820 |
| 886 | Seq. ID No. 1821 | Seq. ID No. 1822 |
| 887 | Seq. ID No. 1823 | Seq. ID No. 1824 |
| 888 | Seq. ID No. 1825 | Seq. ID No. 1826 |
| 890b | Seq. ID No. 1829 | Seq. ID No. 1830 |
| 904 | Seq. ID No. 1833 | Seq. ID No. 1834 |
| 908b | Seq. ID No. 1841 | Seq. ID No. 1842 |
| 908c | Seq. ID No. 1843 | Seq. ID No. 1844 |
| 911 | Seq. ID No. 1845 | Seq. ID No. 1846 |
| 912 | Seq. ID No. 1847 | Seq. ID No. 1848 |
| 916 | Seq. ID No. 1849 | Seq. ID No. 1850 |
| 918b | Seq. ID No. 1853 | Seq. ID No. 1854 |
| 918c | Seq. ID No. 1855 | Seq. ID No. 1856 |
| 919 | Seq. ID No. 1857 | Seq. ID No. 1858 |
| 923 | Seq. ID No. 1859 | Seq. ID No. 1860 |
| 925a | Seq. ID No. 1861 | Seq. ID No. 1862 |
| 925b | Seq. ID No. 1863 | Seq. ID No. 1864 |
| 926 | Seq. ID No. 1865 | Seq. ID No. 1866 |
| 927 | Seq. ID No. 1867 | Seq. ID No. 1868 |
| 929b | Seq. ID No. 1871 | Seq. ID No. 1872 |
| 930 | Seq. ID No. 1873 | Seq. ID No. 1874 |
| 931 | Seq. ID No. 1875 | Seq. ID No. 1876 |
| 932 | Seq. ID No. 1877 | Seq. ID No. 1878 |
| 934b | Seq. ID No. 1881 | Seq. ID No. 1882 |
| 934c | Seq. ID No. 1883 | Seq. ID No. 1884 |
| 934d | Seq. ID No. 1885 | Seq. ID No. 1886 |
| 935 | Seq. ID No. 1887 | Seq. ID No. 1888 |
| 938 | Seq. ID No. 1889 | Seq. ID No. 1890 |
| 939c | Seq. ID No. 1895 | Seq. ID No. 1896 |
| 944b | Seq. ID No. 1903 | Seq. ID No. 1904 |
| 946 | Seq. ID No. 1905 | Seq. ID No. 1906 |
| 949a | Seq. ID No. 1907 | Seq. ID No. 1908 |
| 949c | Seq. ID No. 1911 | Seq. ID No. 1912 |
| 949d | Seq. ID No. 1913 | Seq. ID No. 1914 |
| 950 | Seq. ID No. 1915 | Seq. ID No. 1916 |
| 951b | Seq. ID No. 1919 | Seq. ID No. 1920 |
| 952b | Seq. ID No. 1923 | Seq. ID No. 1924 |
| 954 | Seq. ID No. 1925 | Seq. ID No. 1926 |
| 955a | Seq. ID No. 1927 | Seq. ID No. 1928 |
| 955b | Seq. ID No. 1929 | Seq. ID No. 1930 |
| 956 | Seq. ID No. 1931 | Seq. ID No. 1932 |
| 958b | Seq. ID No. 1935 | Seq. ID No. 1936 |
| 961b | Seq. ID No. 1941 | Seq. ID No. 1942 |
| 961c | Seq. ID No. 1943 | Seq. ID No. 1944 |
| 963 | Seq. ID No. 1945 | Seq. ID No. 1946 |
| 965a | Seq. ID No. 1947 | Seq. ID No. 1948 |
| 965b | Seq. ID No. 1949 | Seq. ID No. 1950 |
| 966a | Seq. ID No. 1951 | Seq. ID No. 1952 |
| 966b | Seq. ID No. 1953 | Seq. ID No. 1954 |
| 968 | Seq. ID No. 1959 | Seq. ID No. 1960 |
| 969 | Seq. ID No. 1961 | Seq. ID No. 1962 |
| 972a | Seq. ID No. 1963 | Seq. ID No. 1964 |
| 972b | Seq. ID No. 1965 | Seq. ID No. 1966 |
| 976 | Seq. ID No. 1967 | Seq. ID No. 1968 |
| 977a | Seq. ID No. 1969 | Seq. ID No. 1970 |
| 977b | Seq. ID No. 1971 | Seq. ID No. 1972 |
| 980 | Seq. ID No. 1979 | Seq. ID No. 1980 |
| 982 | Seq. ID No. 1983 | Seq. ID No. 1984 |
| 984a | Seq. ID No. 1985 | Seq. ID No. 1986 |
| 984b | Seq. ID No. 1987 | Seq. ID No. 1988 |
| 986 | Seq. ID No. 1989 | Seq. ID No. 1990 |
| 987 | Seq. ID No. 1991 | Seq. ID No. 1992 |
| 988b | Seq. ID No. 1995 | Seq. ID No. 1996 |
| 988c | Seq. ID No. 1997 | Seq. ID No. 1998 |
| 988d | Seq. ID No. 1999 | Seq. ID No. 2000 |
| 991 | Seq. ID No. 2001 | Seq. ID No. 2002 |
| 992 | Seq. ID No. 2003 | Seq. ID No. 2004 |
| 993 | Seq. ID No. 2005 | Seq. ID No. 2006 |
| 994 | Seq. ID No. 2007 | Seq. ID No. 2008 |
| 998b | Seq. ID No. 2015 | Seq. ID No. 2016 |
| 999b | Seq. ID No. 2019 | Seq. ID No. 2020 |
| 1000 | Seq. ID No. 2021 | Seq. ID No. 2022 |
| 1003a | Seq. ID No. 2025 | Seq. ID No. 2026 |
| 1003b | Seq. ID No. 2027 | Seq. ID No. 2028 |
| 1004a | Seq. ID No. 2029 | Seq. ID No. 2030 |
| 1004b | Seq. ID No. 2031 | Seq. ID No. 2032 |
| 1006b | Seq. ID No. 2035 | Seq. ID No. 2036 |
| 1007 | Seq. ID No. 2037 | Seq. ID No. 2038 |
| 1013a | Seq. ID No. 2041 | Seq. ID No. 2042 |
| 1013b | Seq. ID No. 2043 | Seq. ID No. 2044 |
| 1013c | Seq. ID No. 2045 | Seq. ID No. 2046 |
| 1016c | Seq. ID No. 2047 | Seq. ID No. 2048 |
| 1017c | Seq. ID No. 2053 | Seq. ID No. 2054 |
| 1017d | Seq. ID No. 2055 | Seq. ID No. 2056 |
| 1018b | Seq. ID No. 2059 | Seq. ID No. 2060 |
| 1021b | Seq. ID No. 2063 | Seq. ID No. 2064 |
| 1021c | Seq. ID No. 2065 | Seq. ID No. 2066 |
| 1024 | Seq. ID No. 2067 | Seq. ID No. 2068 |
| 1025 | Seq. ID No. 2069 | Seq. ID No. 2070 |
| 1026 | Seq. ID No. 2071 | Seq. ID No. 2072 |
| 1029 | Seq. ID No. 2073 | Seq. ID No. 2074 |
| 1033a | Seq. ID No. 2075 | Seq. ID No. 2076 |
| 1033b | Seq. ID No. 2077 | Seq. ID No. 2078 |
| 1033c | Seq. ID No. 2079 | Seq. ID No. 2080 |
| 1035a | Seq. ID No. 2081 | Seq. ID No. 2082 |
| 1035b | Seq. ID No. 2083 | Seq. ID No. 2084 |
| 1035c | Seq. ID No. 2085 | Seq. ID No. 2086 |
| 1036b | Seq. ID No. 2089 | Seq. ID No. 2090 |
| 1036c | Seq. ID No. 2091 | Seq. ID No. 2092 |
| 1037 | Seq. ID No. 2093 | Seq. ID No. 2094 |
| 1039b | Seq. ID No. 2097 | Seq. ID No. 2098 |
| 1041 | Seq. ID No. 2099 | Seq. ID No. 2100 |
| 1042a | Seq. ID No. 2101 | Seq. ID No. 2102 |
| 1042b | Seq. ID No. 2103 | Seq. ID No. 2104 |
| 1044b | Seq. ID No. 2107 | Seq. ID No. 2108 |
| 1044c | Seq. ID No. 2109 | Seq. ID No. 2110 |
| 1044d | Seq. ID No. 2111 | Seq. ID No. 2112 |
| 1047b | Seq. ID No. 2115 | Seq. ID No. 2116 |
| 1049a | Seq. ID No. 2117 | Seq. ID No. 2118 |
| 1049b | Seq. ID No. 2119 | Seq. ID No. 2120 |
| 1050c | Seq. ID No. 2125 | Seq. ID No. 2126 |
| 1050d | Seq. ID No. 2127 | Seq. ID No. 2128 |
| 1055 | Seq. ID No. 2129 | Seq. ID No. 2130 |
| 1056a | Seq. ID No. 2131 | Seq. ID No. 2132 |
| 1056b | Seq. ID No. 2133 | Seq. ID No. 2134 |
| 1057 | Seq. ID No. 2135 | Seq. ID No. 2136 |
| 1058 | Seq. ID No. 2137 | Seq. ID No. 2138 |
| 1060b | Seq. ID No. 2141 | Seq. ID No. 2142 |
| 1062 | Seq. ID No. 2143 | Seq. ID No. 2144 |
| 1063 | Seq. ID No. 2145 | Seq. ID No. 2146 |
| 1065a | Seq. ID No. 2149 | Seq. ID No. 2150 |
| 1065b | Seq. ID No. 2151 | Seq. ID No. 2152 |
| 1065c | Seq. ID No. 2153 | Seq. ID No. 2154 |
| 1066a | Seq. ID No. 2155 | Seq. ID No. 2156 |
| 1066b | Seq. ID No. 2157 | Seq. ID No. 2158 |
| 1067 | Seq. ID No. 2159 | Seq. ID No. 2160 |
| 1069 | Seq. ID No. 2161 | Seq. ID No. 2162 |
| 1070b | Seq. ID No. 2165 | Seq. ID No. 2166 |
| 1076a | Seq. ID No. 2167 | Seq. ID No. 2168 |
| 1076b | Seq. ID No. 2169 | Seq. ID No. 2170 |
| 1077e | Seq. ID No. 2179 | Seq. ID No. 2180 |
| 1079a | Seq. ID No. 2181 | Seq. ID No. 2182 |
| 1079b | Seq. ID No. 2183 | Seq. ID No. 2184 |
| 1081b | Seq. ID No. 2189 | Seq. ID No. 2190 |
| 1082 | Seq. ID No. 2191 | Seq. ID No. 2192 |
| 1086 | Seq. ID No. 2195 | Seq. ID No. 2196 |
| 1087a | Seq. ID No. 2197 | Seq. ID No. 2198 |
| 1087b | Seq. ID No. 2199 | Seq. ID No. 2200 |
| 1091a | Seq. ID No. 2201 | Seq. ID No. 2202 |
| 1091b | Seq. ID No. 2203 | Seq. ID No. 2204 |
| 1094a | Seq. ID No. 2205 | Seq. ID No. 2206 |
| 1094b | Seq. ID No. 2207 | Seq. ID No. 2208 |
| 1095a | Seq. ID No. 2209 | Seq. ID No. 2210 |
| 1095b | Seq. ID No. 2211 | Seq. ID No. 2212 |
| 1096a | Seq. ID No. 2213 | Seq. ID No. 2214 |
| 1096b | Seq. ID No. 2215 | Seq. ID No. 2216 |
| 1096c | Seq. ID No. 2217 | Seq. ID No. 2218 |
| 1098b | Seq. ID No. 2221 | Seq. ID No. 2222 |
| 1100 | Seq. ID No. 2223 | Seq. ID No. 2224 |
| 1101b | Seq. ID No. 2227 | Seq. ID No. 2228 |
| 1104 | Seq. ID No. 2229 | Seq. ID No. 2230 |
| 1108b | Seq. ID No. 2235 | Seq. ID No. 2236 |
| 1111c | Seq. ID No. 2241 | Seq. ID No. 2242 |
| 1125 | Seq. ID No. 2245 | Seq. ID No. 2246 |
| 1126a | Seq. ID No. 2247 | Seq. ID No. 2248 |
| 1126c | Seq. ID No. 2251 | Seq. ID No. 2252 |
| 1127 | Seq. ID No. 2253 | Seq. ID No. 2254 |
| 1131 | Seq. ID No. 2257 | Seq. ID No. 2258 |
| 1132 | Seq. ID No. 2259 | Seq. ID No. 2260 |
| 1135a | Seq. ID No. 2261 | Seq. ID No. 2262 |
| 1135b | Seq. ID No. 2263 | Seq. ID No. 2264 |
| 1136a | Seq. ID No. 2265 | Seq. ID No. 2266 |
| 1136b | Seq. ID No. 2267 | Seq. ID No. 2268 |
| 1138 | Seq. ID No. 2269 | Seq. ID No. 2270 |
| 1140c | Seq. ID No. 2275 | Seq. ID No. 2276 |
| 1141a | Seq. ID No. 2277 | Seq. ID No. 2278 |
| 1141b | Seq. ID No. 2279 | Seq. ID No. 2280 |
| 1144b | Seq. ID No. 2285 | Seq. ID No. 2286 |
| 1144c | Seq. ID No. 2287 | Seq. ID No. 2288 |
| 1146e | Seq. ID No. 2297 | Seq. ID No. 2298 |
| 1148 | Seq. ID No. 2299 | Seq. ID No. 2300 |
| 1149 | Seq. ID No. 2301 | Seq. ID No. 2302 |
| 1152d | Seq. ID No. 2309 | Seq. ID No. 2310 |
| 1152e | Seq. ID No. 2311 | Seq. ID No. 2312 |
| 1152g | Seq. ID No. 2315 | Seq. ID No. 2316 |
| 1155f | Seq. ID No. 2327 | Seq. ID No. 2328 |
| 1155g | Seq. ID No. 2329 | Seq. ID No. 2330 |
| 1158b | Seq. ID No. 2333 | Seq. ID No. 2334 |
| 1165 | Seq. ID No. 2343 | Seq. ID No. 2344 |
| 1166 | Seq. ID No. 2345 | Seq. ID No. 2346 |
| 1167b | Seq. ID No. 2349 | Seq. ID No. 2350 |
| 1168 | Seq. ID No. 2351 | Seq. ID No. 2352 |
| 1169c | Seq. ID No. 2357 | Seq. ID No. 2358 |
| 1171c | Seq. ID No. 2363 | Seq. ID No. 2364 |
| 1172 | Seq. ID No. 2365 | Seq. ID No. 2366 |
| 1173 | Seq. ID No. 2367 | Seq. ID No. 2368 |
| 1174 | Seq. ID No. 2369 | Seq. ID No. 2370 |
| 1175 | Seq. ID No. 2371 | Seq. ID No. 2372 |
| 1177 | Seq. ID No. 2373 | Seq. ID No. 2374 |
| 1178 | Seq. ID No. 2375 | Seq. ID No. 2376 |
| 1179b | Seq. ID No. 2379 | Seq. ID No. 2380 |
| 1179c | Seq. ID No. 2381 | Seq. ID No. 2382 |
| 1180b | Seq. ID No. 2385 | Seq. ID No. 2386 |
| 1180c | Seq. ID No. 2387 | Seq. ID No. 2388 |
| 1180e | Seq. ID No. 2391 | Seq. ID No. 2392 |
| 1182a | Seq. ID No. 2393 | Seq. ID No. 2394 |
| 1182b | Seq. ID No. 2395 | Seq. ID No. 2396 |
| 1183a | Seq. ID No. 2397 | Seq. ID No. 2398 |
| 1183b | Seq. ID No. 2399 | Seq. ID No. 2400 |
| 1184 | Seq. ID No. 2401 | Seq. ID No. 2402 |
| 1185b | Seq. ID No. 2405 | Seq. ID No. 2406 |
| 1186b | Seq. ID No. 2409 | Seq. ID No. 2410 |
| 1188b | Seq. ID No. 2413 | Seq. ID No. 2414 |
| 1188c | Seq. ID No. 2415 | Seq. ID No. 2416 |
| 1191 | Seq. ID No. 2417 | Seq. ID No. 2418 |
| 1192b | Seq. ID No. 2421 | Seq. ID No. 2422 |
| 1194 | Seq. ID No. 2423 | Seq. ID No. 2424 |
| 1196a | Seq. ID No. 2425 | Seq. ID No. 2426 |
| 1196b | Seq. ID No. 2427 | Seq. ID No. 2428 |
| 1197 | Seq. ID No. 2429 | Seq. ID No. 2430 |
| 1199b | Seq. ID No. 2435 | Seq. ID No. 2436 |
| 1200 | Seq. ID No. 2437 | Seq. ID No. 2438 |
| 1205 | Seq. ID No. 2445 | Seq. ID No. 2446 |
| 1206 | Seq. ID No. 2447 | Seq. ID No. 2448 |
| 1207 | Seq. ID No. 2449 | Seq. ID No. 2450 |
| 1208 | Seq. ID No. 2451 | Seq. ID No. 2452 |
| 1209 | Seq. ID No. 2453 | Seq. ID No. 2454 |
| 1210a | Seq. ID No. 2455 | Seq. ID No. 2456 |
| 1210b | Seq. ID No. 2457 | Seq. ID No. 2458 |
| 1212 | Seq. ID No. 2459 | Seq. ID No. 2460 |
| 1213a | Seq. ID No. 2461 | Seq. ID No. 2462 |
| 1213b | Seq. ID No. 2463 | Seq. ID No. 2464 |
| 1214 | Seq. ID No. 2465 | Seq. ID No. 2466 |
| 1215b | Seq. ID No. 2469 | Seq. ID No. 2470 |
| 1217c | Seq. ID No. 2471 | Seq. ID No. 2472 |
| 1218b | Seq. ID No. 2475 | Seq. ID No. 2476 |
| 1221a | Seq. ID No. 2481 | Seq. ID No. 2482 |
| 1221b | Seq. ID No. 2483 | Seq. ID No. 2484 |
| 1223 | Seq. ID No. 2485 | Seq. ID No. 2486 |
| 1224c | Seq. ID No. 2491 | Seq. ID No. 2492 |
| 1225 | Seq. ID No. 2493 | Seq. ID No. 2494 |
| 1226 | Seq. ID No. 2495 | Seq. ID No. 2496 |
| 1228b | Seq. ID No. 2499 | Seq. ID No. 2500 |
| 1229b | Seq. ID No. 2501 | Seq. ID No. 2502 |
| 1229c | Seq. ID No. 2503 | Seq. ID No. 2504 |
| 1230 | Seq. ID No. 2505 | Seq. ID No. 2506 |
| 1231 | Seq. ID No. 2507 | Seq. ID No. 2508 |
| 1233b | Seq. ID No. 2511 | Seq. ID No. 2512 |
| 1233c | Seq. ID No. 2513 | Seq. ID No. 2514 |
| 1234b | Seq. ID No. 2517 | Seq. ID No. 2518 |
| 1234c | Seq. ID No. 2519 | Seq. ID No. 2520 |
| 1235 | Seq. ID No. 2521 | Seq. ID No. 2522 |
| 1237 | Seq. ID No. 2525 | Seq. ID No. 2526 |
| 1240 | Seq. ID No. 2529 | Seq. ID No. 2530 |
| 1241b | Seq. ID No. 2533 | Seq. ID No. 2534 |
| 1241c | Seq. ID No. 2535 | Seq. ID No. 2536 |
| 1243 | Seq. ID No. 2537 | Seq. ID No. 2538 |
| 1244 | Seq. ID No. 2539 | Seq. ID No. 2540 |
| 1245d | Seq. ID No. 2547 | Seq. ID No. 2548 |
| 1245e | Seq. ID No. 2549 | Seq. ID No. 2550 |
| 1246a | Seq. ID No. 2551 | Seq. ID No. 2552 |
| 1246b | Seq. ID No. 2553 | Seq. ID No. 2554 |
| 1250c | Seq. ID No. 2559 | Seq. ID No. 2560 |
| 1250d | Seq. ID No. 2561 | Seq. ID No. 2562 |
| 1250e | Seq. ID No. 2563 | Seq. ID No. 2564 |
| 1251a | Seq. ID No. 2565 | Seq. ID No. 2566 |
| 1253c | Seq. ID No. 2573 | Seq. ID No. 2574 |
| 1253d | Seq. ID No. 2575 | Seq. ID No. 2576 |
| 1256 | Seq. ID No. 2577 | Seq. ID No. 2578 |
| 1257a | Seq. ID No. 2579 | Seq. ID No. 2580 |
| 1257b | Seq. ID No. 2581 | Seq. ID No. 2582 |
| 1258c | Seq. ID No. 2587 | Seq. ID No. 2588 |
| 1258d | Seq. ID No. 2589 | Seq. ID No. 2590 |
| 1260 | Seq. ID No. 2591 | Seq. ID No. 2592 |
| 1263 | Seq. ID No. 2593 | Seq. ID No. 2594 |
| 1265 | Seq. ID No. 2595 | Seq. ID No. 2596 |
| 1266b | Seq. ID No. 2599 | Seq. ID No. 2600 |
| 1267b | Seq. ID No. 2603 | Seq. ID No. 2604 |
| 1268a | Seq. ID No. 2605 | Seq. ID No. 2606 |
| 1268b | Seq. ID No. 2607 | Seq. ID No. 2608 |
| 1269 | Seq. ID No. 2609 | Seq. ID No. 2610 |
| 1270 | Seq. ID No. 2611 | Seq. ID No. 2612 |
| 1271 | Seq. ID No. 2613 | Seq. ID No. 2614 |
| 1272b | Seq. ID No. 2617 | Seq. ID No. 2618 |
| 1273 | Seq. ID No. 2619 | Seq. ID No. 2620 |
| 1275b | Seq. ID No. 2623 | Seq. ID No. 2624 |
| 1277 | Seq. ID No. 2625 | Seq. ID No. 2626 |
| 1278a | Seq. ID No. 2627 | Seq. ID No. 2628 |
| 1278b | Seq. ID No. 2629 | Seq. ID No. 2630 |
| 1279 | Seq. ID No. 2631 | Seq. ID No. 2632 |
| 1281 | Seq. ID No. 2633 | Seq. ID No. 2634 |
| 1283a | Seq. ID No. 2635 | Seq. ID No. 2636 |
| 1283b | Seq. ID No. 2637 | Seq. ID No. 2638 |
| 1283c | Seq. ID No. 2639 | Seq. ID No. 2640 |
| 1284 | Seq. ID No. 2641 | Seq. ID No. 2642 |
| 1285a | Seq. ID No. 2643 | Seq. ID No. 2644 |
| 1285b | Seq. ID No. 2645 | Seq. ID No. 2646 |
| 1287a | Seq. ID No. 2647 | Seq. ID No. 2648 |
| 1287b | Seq. ID No. 2649 | Seq. ID No. 2650 |
| 1288 | Seq. ID No. 2651 | Seq. ID No. 2652 |
| 1289 | Seq. ID No. 2653 | Seq. ID No. 2654 |
| 1290 | Seq. ID No. 2655 | Seq. ID No. 2656 |
| 1293b | Seq. ID No. 2659 | Seq. ID No. 2660 |
| 1295 | Seq. ID No. 2663 | Seq. ID No. 2664 |
| 1297b | Seq. ID No. 2667 | Seq. ID No. 2668 |
| 1300 | Seq. ID No. 2669 | Seq. ID No. 2670 |
| 1302 | Seq. ID No. 2671 | Seq. ID No. 2672 |
| 1305b | Seq. ID No. 2675 | Seq. ID No. 2676 |
| 1305c | Seq. ID No. 2677 | Seq. ID No. 2678 |
| 1308c | Seq. ID No. 2683 | Seq. ID No. 2684 |
| 1308d | Seq. ID No. 2685 | Seq. ID No. 2686 |
| 1308e | Seq. ID No. 2687 | Seq. ID No. 2688 |
| 1311 | Seq. ID No. 2689 | Seq. ID No. 2690 |
| 1314b | Seq. ID No. 2691 | Seq. ID No. 2692 |
| 1315 | Seq. ID No. 2693 | Seq. ID No. 2694 |
| 1316 | Seq. ID No. 2695 | Seq. ID No. 2696 |
| 1317 | Seq. ID No. 2697 | Seq. ID No. 2698 |
| 1318 | Seq. ID No. 2699 | Seq. ID No. 2700 |
| 1319b | Seq. ID No. 2703 | Seq. ID No. 2704 |
| 1320c | Seq. ID No. 2709 | Seq. ID No. 2710 |
| 1321 | Seq. ID No. 2711 | Seq. ID No. 2712 |
| 1322b | Seq. ID No. 2715 | Seq. ID No. 2716 |
| 1323b | Seq. ID No. 2717 | Seq. ID No. 2718 |
| 1324 | Seq. ID No. 2719 | Seq. ID No. 2720 |
| 1326b | Seq. ID No. 2723 | Seq. ID No. 2724 |
| 1326c | Seq. ID No. 2725 | Seq. ID No. 2726 |
| 1333 | Seq. ID No. 2727 | Seq. ID No. 2728 |
| 1334a | Seq. ID No. 2729 | Seq. ID No. 2730 |
| 1334b | Seq. ID No. 2731 | Seq. ID No. 2732 |
| 1335b | Seq. ID No. 2735 | Seq. ID No. 2736 |
| 1337 | Seq. ID No. 2737 | Seq. ID No. 2738 |
| 1338 | Seq. ID No. 2739 | Seq. ID No. 2740 |
| 1344a | Seq. ID No. 2749 | Seq. ID No. 2750 |
| 1344b | Seq. ID No. 2751 | Seq. ID No. 2752 |
| 1348 | Seq. ID No. 2753 | Seq. ID No. 2754 |
| 1349a | Seq. ID No. 2755 | Seq. ID No. 2756 |
| 1349c | Seq. ID No. 2759 | Seq. ID No. 2760 |
| 1353 | Seq. ID No. 2765 | Seq. ID No. 2766 |
| 1355 | Seq. ID No. 2767 | Seq. ID No. 2768 |
| 1358a | Seq. ID No. 2769 | Seq. ID No. 2770 |
| 1358b | Seq. ID No. 2771 | Seq. ID No. 2772 |
| 1359 | Seq. ID No. 2773 | Seq. ID No. 2774 |
| 1361 | Seq. ID No. 2775 | Seq. ID No. 2776 |
| 1364b | Seq. ID No. 2779 | Seq. ID No. 2780 |
| 1364c | Seq. ID No. 2781 | Seq. ID No. 2782 |
| 1365b | Seq. ID No. 2783 | Seq. ID No. 2784 |
| 1366b | Seq. ID No. 2787 | Seq. ID No. 2788 |
| 1367 | Seq. ID No. 2789 | Seq. ID No. 2790 |
| 1368 | Seq. ID No. 2791 | Seq. ID No. 2792 |
| 1371 | Seq. ID No. 2793 | Seq. ID No. 2794 |
| 1373a | Seq. ID No. 2795 | Seq. ID No. 2796 |
| 1373b | Seq. ID No. 2797 | Seq. ID No. 2798 |
| 1374 | Seq. ID No. 2799 | Seq. ID No. 2800 |
| 1375 | Seq. ID No. 2801 | Seq. ID No. 2802 |
| 1377 | Seq. ID No. 2803 | Seq. ID No. 2804 |
| 1379 | Seq. ID No. 2807 | Seq. ID No. 2808 |
| 1380 | Seq. ID No. 2809 | Seq. ID No. 2810 |
| 1381b | Seq. ID No. 2813 | Seq. ID No. 2814 |
| 1382 | Seq. ID No. 2815 | Seq. ID No. 2816 |
| 1384b | Seq. ID No. 2821 | Seq. ID No. 2822 |
| 1384c | Seq. ID No. 2823 | Seq. ID No. 2824 |
| 1386b | Seq. ID No. 2827 | Seq. ID No. 2828 |
| 1387a | Seq. ID No. 2829 | Seq. ID No. 2830 |
| 1388b | Seq. ID No. 2831 | Seq. ID No. 2832 |
| 1389a | Seq. ID No. 2833 | Seq. ID No. 2834 |
| 1393c | Seq. ID No. 2839 | Seq. ID No. 2840 |
| 1393d | Seq. ID No. 2841 | Seq. ID No. 2842 |
| 1394 | Seq. ID No. 2843 | Seq. ID No. 2844 |
| 1395a | Seq. ID No. 2845 | Seq. ID No. 2846 |
| 1396 | Seq. ID No. 2847 | Seq. ID No. 2848 |
| 1399b | Seq. ID No. 2855 | Seq. ID No. 2856 |
| 1402c | Seq. ID No. 2861 | Seq. ID No. 2862 |
| 1405 | Seq. ID No. 2863 | Seq. ID No. 2864 |
| 1407b | Seq. ID No. 2865 | Seq. ID No. 2866 |
| 1408 | Seq. ID No. 2867 | Seq. ID No. 2868 |
| 1409 | Seq. ID No. 2869 | Seq. ID No. 2870 |
| 1410 | Seq. ID No. 2871 | Seq. ID No. 2872 |
| 1411c | Seq. ID No. 2877 | Seq. ID No. 2878 |
| 1412b | Seq. ID No. 2881 | Seq. ID No. 2882 |
| 1414a | Seq. ID No. 2883 | Seq. ID No. 2884 |
| 1414b | Seq. ID No. 2885 | Seq. ID No. 2886 |
| 1414c | Seq. ID No. 2887 | Seq. ID No. 2888 |
| 1416 | Seq. ID No. 2891 | Seq. ID No. 2892 |
| 1418 | Seq. ID No. 2893 | Seq. ID No. 2894 |
| 1419 | Seq. ID No. 2895 | Seq. ID No. 2896 |
| 1420b | Seq. ID No. 2899 | Seq. ID No. 2900 |
| 1422 | Seq. ID No. 2901 | Seq. ID No. 2902 |
| 1426b | Seq. ID No. 2907 | Seq. ID No. 2908 |
| 1429a | Seq. ID No. 2915 | Seq. ID No. 2916 |
| 1429b | Seq. ID No. 2917 | Seq. ID No. 2918 |
| 1431 | Seq. ID No. 2919 | Seq. ID No. 2920 |
| 1432 | Seq. ID No. 2921 | Seq. ID No. 2922 |
| 1433 | Seq. ID No. 2923 | Seq. ID No. 2924 |
| 1434b | Seq. ID No. 2927 | Seq. ID No. 2928 |
| 1437b | Seq. ID No. 2931 | Seq. ID No. 2932 |
| 1437c | Seq. ID No. 2933 | Seq. ID No. 2934 |
| 1438 | Seq. ID No. 2935 | Seq. ID No. 2936 |
| 1439d | Seq. ID No. 2943 | Seq. ID No. 2944 |
| 1439e | Seq. ID No. 2945 | Seq. ID No. 2946 |
| 1440c | Seq. ID No. 2951 | Seq. ID No. 2952 |
| 1440d | Seq. ID No. 2953 | Seq. ID No. 2954 |
| 1442b | Seq. ID No. 2957 | Seq. ID No. 2958 |
| 1445a | Seq. ID No. 2959 | Seq. ID No. 2960 |
| 1445b | Seq. ID No. 2961 | Seq. ID No. 2962 |
| 1445c | Seq. ID No. 2963 | Seq. ID No. 2964 |
| 1446a | Seq. ID No. 2965 | Seq. ID No. 2966 |
| 1446b | Seq. ID No. 2967 | Seq. ID No. 2968 |
| 1447b | Seq. ID No. 2971 | Seq. ID No. 2972 |
| 1448 | Seq. ID No. 2973 | Seq. ID No. 2974 |
| 1449a | Seq. ID No. 2975 | Seq. ID No. 2976 |
| 1449b | Seq. ID No. 2977 | Seq. ID No. 2978 |
| 1451 | Seq. ID No. 2979 | Seq. ID No. 2980 |
| 1452b | Seq. ID No. 2983 | Seq. ID No. 2984 |
| 1453 | Seq. ID No. 2985 | Seq. ID No. 2986 |
| 1454 | Seq. ID No. 2987 | Seq. ID No. 2988 |
| 1455b | Seq. ID No. 2991 | Seq. ID No. 2992 |
| 1456 | Seq. ID No. 2993 | Seq. ID No. 2994 |
| 1457c | Seq. ID No. 2999 | Seq. ID No. 3000 |
| 1459 | Seq. ID No. 3001 | Seq. ID No. 3002 |
| 1462b | Seq. ID No. 3005 | Seq. ID No. 3006 |
| 1463b | Seq. ID No. 3009 | Seq. ID No. 3010 |
| 1463c | Seq. ID No. 3011 | Seq. ID No. 3012 |
| 1466b | Seq. ID No. 3015 | Seq. ID No. 3016 |
| 1466c | Seq. ID No. 3017 | Seq. ID No. 3018 |
| 1466d | Seq. ID No. 3019 | Seq. ID No. 3020 |
| 1467 | Seq. ID No. 3021 | Seq. ID No. 3022 |
| 1469c | Seq. ID No. 3027 | Seq. ID No. 3028 |
| 1470c | Seq. ID No. 3033 | Seq. ID No. 3034 |
| 1471 | Seq. ID No. 3035 | Seq. ID No. 3036 |
| 1472b | Seq. ID No. 3037 | Seq. ID No. 3038 |
| 1472c | Seq. ID No. 3039 | Seq. ID No. 3040 |
| 1475 | Seq. ID No. 3043 | Seq. ID No. 3044 |
| 1476 | Seq. ID No. 3045 | Seq. ID No. 3046 |
| 1477a | Seq. ID No. 3047 | Seq. ID No. 3048 |
| 1477b | Seq. ID No. 3049 | Seq. ID No. 3050 |
| 1479a | Seq. ID No. 3051 | Seq. ID No. 3052 |
| 1479b | Seq. ID No. 3053 | Seq. ID No. 3054 |
| 1479c | Seq. ID No. 3055 | Seq. ID No. 3056 |
| 1482a | Seq. ID No. 3057 | Seq. ID No. 3058 |
| 1482b | Seq. ID No. 3059 | Seq. ID No. 3060 |
| 1484c | Seq. ID No. 3067 | Seq. ID No. 3068 |
| 1486 | Seq. ID No. 3069 | Seq. ID No. 3070 |
| 1487 | Seq. ID No. 3071 | Seq. ID No. 3072 |
| 1488d | Seq. ID No. 3079 | Seq. ID No. 3080 |
| 1488f | Seq. ID No. 3083 | Seq. ID No. 3084 |
| 1488g | Seq. ID No. 3085 | Seq. ID No. 3086 |
| 1489 | Seq. ID No. 3087 | Seq. ID No. 3088 |
| 1494 | Seq. ID No. 3091 | Seq. ID No. 3092 |
| 1497 | Seq. ID No. 3093 | Seq. ID No. 3094 |
| 1498c | Seq. ID No. 3099 | Seq. ID No. 3100 |
| 1498d | Seq. ID No. 3101 | Seq. ID No. 3102 |
| 1499 | Seq. ID No. 3103 | Seq. ID No. 3104 |
| 1503a | Seq. ID No. 3109 | Seq. ID No. 3110 |
| 1503b | Seq. ID No. 3111 | Seq. ID No. 3112 |
| 1506b | Seq. ID No. 3115 | Seq. ID No. 3116 |
| 1506c | Seq. ID No. 3117 | Seq. ID No. 3118 |
| 1507a | Seq. ID No. 3119 | Seq. ID No. 3120 |
| 1507b | Seq. ID No. 3121 | Seq. ID No. 3122 |
| 1507c | Seq. ID No. 3123 | Seq. ID No. 3124 |
| 1508 | Seq. ID No. 3125 | Seq. ID No. 3126 |
| 1510b | Seq. ID No. 3129 | Seq. ID No. 3130 |
| 1510c | Seq. ID No. 3131 | Seq. ID No. 3132 |
| 1510d | Seq. ID No. 3133 | Seq. ID No. 3134 |
| 1511 | Seq. ID No. 3135 | Seq. ID No. 3136 |
| 1512 | Seq. ID No. 3137 | Seq. ID No. 3138 |
| 1513a | Seq. ID No. 3139 | Seq. ID No. 3140 |
| 1513b | Seq. ID No. 3141 | Seq. ID No. 3142 |
| 1516 | Seq. ID No. 3143 | Seq. ID No. 3144 |
| 1517b | Seq. ID No. 3147 | Seq. ID No. 3148 |
| 1517c | Seq. ID No. 3149 | Seq. ID No. 3150 |
| 1518a | Seq. ID No. 3151 | Seq. ID No. 3152 |
| 1518b | Seq. ID No. 3153 | Seq. ID No. 3154 |
| 1520 | Seq. ID No. 3155 | Seq. ID No. 3156 |
| 1522 | Seq. ID No. 3157 | Seq. ID No. 3158 |
| 1523 | Seq. ID No. 3159 | Seq. ID No. 3160 |
| 1528 | Seq. ID No. 3161 | Seq. ID No. 3162 |
| 1530b | Seq. ID No. 3165 | Seq. ID No. 3166 |
| 1533a | Seq. ID No. 3167 | Seq. ID No. 3168 |
| 1534a | Seq. ID No. 3169 | Seq. ID No. 3170 |
| 1534b | Seq. ID No. 3171 | Seq. ID No. 3172 |
| 1535a | Seq. ID No. 3173 | Seq. ID No. 3174 |
| 1537 | Seq. ID No. 3179 | Seq. ID No. 3180 |
| 1542 | Seq. ID No. 3181 | Seq. ID No. 3182 |
| 1543 | Seq. ID No. 3183 | Seq. ID No. 3184 |
| 1544 | Seq. ID No. 3185 | Seq. ID No. 3186 |
| 1547a | Seq. ID No. 3187 | Seq. ID No. 3188 |
| 1547b | Seq. ID No. 3189 | Seq. ID No. 3190 |
| 1548 | Seq. ID No. 3191 | Seq. ID No. 3192 |
| 1552 | Seq. ID No. 3193 | Seq. ID No. 3194 |
| 1553a | Seq. ID No. 3195 | Seq. ID No. 3196 |
| 1553b | Seq. ID No. 3197 | Seq. ID No. 3198 |
| 1554c | Seq. ID No. 3203 | Seq. ID No. 3204 |
| 1555 | Seq. ID No. 3205 | Seq. ID No. 3206 |
| 1556a | Seq. ID No. 3207 | Seq. ID No. 3208 |
| 1556b | Seq. ID No. 3209 | Seq. ID No. 3210 |
| 1556c | Seq. ID No. 3211 | Seq. ID No. 3212 |
| 1557c | Seq. ID No. 3217 | Seq. ID No. 3218 |
| 1563 | Seq. ID No. 3223 | Seq. ID No. 3224 |
| 1564a | Seq. ID No. 3225 | Seq. ID No. 3226 |
| 1564b | Seq. ID No. 3227 | Seq. ID No. 3228 |
| 1565 | Seq. ID No. 3229 | Seq. ID No. 3230 |
| 1569 | Seq. ID No. 3235 | Seq. ID No. 3236 |
| 1572e | Seq. ID No. 3249 | Seq. ID No. 3250 |
| 1573 | Seq. ID No. 3251 | Seq. ID No. 3252 |
| 1576 | Seq. ID No. 3253 | Seq. ID No. 3254 |
| 1577a | Seq. ID No. 3255 | Seq. ID No. 3256 |
| 1577b | Seq. ID No. 3257 | Seq. ID No. 3258 |
| 1578 | Seq. ID No. 3259 | Seq. ID No. 3260 |
| 1580b | Seq. ID No. 3263 | Seq. ID No. 3264 |
| 1581 | Seq. ID No. 3265 | Seq. ID No. 3266 |
| 1582b | Seq. ID No. 3269 | Seq. ID No. 3270 |
| 1582c | Seq. ID No. 3271 | Seq. ID No. 3272 |
| 1584 | Seq. ID No. 3273 | Seq. ID No. 3274 |
| 1585b | Seq. ID No. 3277 | Seq. ID No. 3278 |
| 1587b | Seq. ID No. 3281 | Seq. ID No. 3282 |
| 1587c | Seq. ID No. 3283 | Seq. ID No. 3284 |
| 1588 | Seq. ID No. 3285 | Seq. ID No. 3286 |
| 1591 | Seq. ID No. 3289 | Seq. ID No. 3290 |
| 1592a | Seq. ID No. 3291 | Seq. ID No. 3292 |
| 159 b | Seq. ID No. 3293 | Seq. ID No. 3294 |
| 1594b | Seq. ID No. 3299 | Seq. ID No. 3300 |
| 1595a | Seq. ID No. 3301 | Seq. ID No. 3302 |
| 1595b | Seq. ID No. 3303 | Seq. ID No. 3304 |
| 1598a | Seq. ID No. 3305 | Seq. ID No. 3306 |
| 1598b | Seq. ID No. 3307 | Seq. ID No. 3308 |
| 1600a | Seq. ID No. 3309 | Seq. ID No. 3310 |
| 1600b | Seq. ID No. 3311 | Seq. ID No. 3312 |
| 1600c | Seq. ID No. 3313 | Seq. ID No. 3314 |
| 1602 | Seq. ID No. 3315 | Seq. ID No. 3316 |
| 1606b | Seq. ID No. 3319 | Seq. ID No. 3320 |
| 1607a | Seq. ID No. 3321 | Seq. ID No. 3322 |
| 1607b | Seq. ID No. 3323 | Seq. ID No. 3324 |
| 1608 | Seq. ID No. 3325 | Seq. ID No. 3326 |
| 1612 | Seq. ID No. 3331 | Seq. ID No. 3332 |
| 1616b | Seq. ID No. 3335 | Seq. ID No. 3336 |
| 1619 | Seq. ID No. 3337 | Seq. ID No. 3338 |
| 1621 | Seq. ID No. 3339 | Seq. ID No. 3340 |
| 1622a | Seq. ID No. 3341 | Seq. ID No. 3342 |
| 1623b | Seq. ID No. 3345 | Seq. ID No. 3346 |
| 1623c | Seq. ID No. 3347 | Seq. ID No. 3348 |
| 1624 | Seq. ID No. 3349 | Seq. ID No. 3350 |
| 1625b | Seq. ID No. 3353 | Seq. ID No. 3354 |
| 1625c | Seq. ID No. 3355 | Seq. ID No. 3356 |
| 1626b | Seq. ID No. 3359 | Seq. ID No. 3360 |
| 1628a | Seq. ID No. 3361 | Seq. ID No. 3362 |
| 1628b | Seq. ID No. 3363 | Seq. ID No. 3364 |
| 1632a | Seq. ID No. 3365 | Seq. ID No. 3366 |
| 1632b | Seq. ID No. 3367 | Seq. ID No. 3368 |
| 1633a | Seq. ID No. 3369 | Seq. ID No. 3370 |
| 1633b | Seq. ID No. 3371 | Seq. ID No. 3372 |
| 1634a | Seq. ID No. 3373 | Seq. ID No. 3374 |
| 1634b | Seq. ID No. 3375 | Seq. ID No. 3376 |
| 1634c | Seq. ID No. 3377 | Seq. ID No. 3378 |
| 1639b | Seq. ID No. 3379 | Seq. ID No. 3380 |
| 1642a | Seq. ID No. 3381 | Seq. ID No. 3382 |
| 1642b | Seq. ID No. 3383 | Seq. ID No. 3384 |
| 1646e | Seq. ID No. 3397 | Seq. ID No. 3398 |
| 1646f | Seq. ID No. 3399 | Seq. ID No. 3400 |
| 1647 | Seq. ID No. 3401 | Seq. ID No. 3402 |
| 1649b | Seq. ID No. 3407 | Seq. ID No. 3408 |
| 1649c | Seq. ID No. 3409 | Seq. ID No. 3410 |
| 1652b | Seq. ID No. 3413 | Seq. ID No. 3414 |
| 1654 | Seq. ID No. 3415 | Seq. ID No. 3416 |
| 1657 | Seq. ID No. 3419 | Seq. ID No. 3420 |
| 1659c | Seq. ID No. 3425 | Seq. ID No. 3426 |
| 1660b | Seq. ID No. 3427 | Seq. ID No. 3428 |
| 1662b | Seq. ID No. 3431 | Seq. ID No. 3432 |
| 1663 | Seq. ID No. 3433 | Seq. ID No. 3434 |
| 1664 | Seq. ID No. 3435 | Seq. ID No. 3436 |
| 1668 | Seq. ID No. 3439 | Seq. ID No. 3440 |
| 1669 | Seq. ID No. 3441 | Seq. ID No. 3442 |
| 1670a | Seq. ID No. 3443 | Seq. ID No. 3444 |
| 1670b | Seq. ID No. 3445 | Seq. ID No. 3446 |
| 1670c | Seq. ID No. 3447 | Seq. ID No. 3448 |
| 1673d | Seq. ID No. 3455 | Seq. ID No. 3456 |
| 1673e | Seq. ID No. 3457 | Seq. ID No. 3458 |
| 1673f | Seq. ID No. 3459 | Seq. ID No. 3460 |
| 1674 | Seq. ID No. 3461 | Seq. ID No. 3462 |
| 1675b | Seq. ID No. 3465 | Seq. ID No. 3466 |
| 1675c | Seq. ID No. 3467 | Seq. ID No. 3468 |
| 1677 | Seq. ID No. 3471 | Seq. ID No. 3472 |
| 1679 | Seq. ID No. 3473 | Seq. ID No. 3474 |
| 1680 | Seq. ID No. 3475 | Seq. ID No. 3476 |
| 1682b | Seq. ID No. 3479 | Seq. ID No. 3480 |
| 1683b | Seq. ID No. 3483 | Seq. ID No. 3484 |
| 1684 | Seq. ID No. 3485 | Seq. ID No. 3486 |
| 1685 | Seq. ID No. 3487 | Seq. ID No. 3488 |
| 1687 | Seq. ID No. 3489 | Seq. ID No. 3490 |
| 1688c | Seq. ID No. 3495 | Seq. ID No. 3496 |
| 1689a | Seq. ID No. 3497 | Seq. ID No. 3498 |
| 1689b | Seq. ID No. 3499 | Seq. ID No. 3500 |
| 1689c | Seq. ID No. 3501 | Seq. ID No. 3502 |
| 1690b | Seq. ID No. 3505 | Seq. ID No. 3506 |
| 1691 | Seq. ID No. 3507 | Seq. ID No. 3508 |
| 1692 | Seq. ID No. 3509 | Seq. ID No. 3510 |
| 1693 | Seq. ID No. 3511 | Seq. ID No. 3512 |
| 1694a | Seq. ID No. 3513 | Seq. ID No. 3514 |
| 1694c | Seq. ID No. 3517 | Seq. ID No. 3518 |
| 1694d | Seq. ID No. 3519 | Seq. ID No. 3520 |
| 1696 | Seq. ID No. 3521 | Seq. ID No. 3522 |
| 1697b | Seq. ID No. 3525 | Seq. ID No. 3526 |
| 1699b | Seq. ID No. 3529 | Seq. ID No. 3530 |
| 1700a | Seq. ID No. 3531 | Seq. ID No. 3532 |
| 1700b | Seq. ID No. 3533 | Seq. ID No. 3534 |
| 1701a | Seq. ID No. 3535 | Seq. ID No. 3536 |
| 1701b | Seq. ID No. 3537 | Seq. ID No. 3538 |
| 1703b | Seq. ID No. 3539 | Seq. ID No. 3540 |
| 1704a | Seq. ID No. 3541 | Seq. ID No. 3542 |
| 1704b | Seq. ID No. 3543 | Seq. ID No. 3544 |
| 1705a | Seq. ID No. 3545 | Seq. ID No. 3546 |
| 1705b | Seq. ID No. 3547 | Seq. ID No. 3548 |
| 1706 | Seq. ID No. 3549 | Seq. ID No. 3550 |
| 1707a | Seq. ID No. 3551 | Seq. ID No. 3552 |
| 1707b | Seq. ID No. 3553 | Seq. ID No. 3554 |
| 1708 | Seq. ID No. 3555 | Seq. ID No. 3556 |
| 1709 | Seq. ID No. 3557 | Seq. ID No. 3558 |
| 1710a | Seq. ID No. 3559 | Seq. ID No. 3560 |
| 1710b | Seq. ID No. 3561 | Seq. ID No. 3562 |
| 1712a | Seq. ID No. 3563 | Seq. ID No. 3564 |
| 1712b | Seq. ID No. 3565 | Seq. ID No. 3566 |
| 1715a | Seq. ID No. 3567 | Seq. ID No. 3568 |
| 1715b | Seq. ID No. 3569 | Seq. ID No. 3570 |
| 1718a | Seq. ID No. 3571 | Seq. ID No. 3572 |
| 1718b | Seq. ID No. 3573 | Seq. ID No. 3574 |
| 1722 | Seq. ID No. 3575 | Seq. ID No. 3576 |
| 1723b | Seq. ID No. 3579 | Seq. ID No. 3580 |
| 1724 | Seq. ID No. 3581 | Seq. ID No. 3582 |
| 1727 | Seq. ID No. 3583 | Seq. ID No. 3584 |
| 1731 | Seq. ID No. 3587 | Seq. ID No. 3588 |
| 1733 | Seq. ID No. 3589 | Seq. ID No. 3590 |
| 1735b | Seq. ID No. 3595 | Seq. ID No. 3596 |
| 1 737a | Seq. ID No. 3597 | Seq. ID No. 3598 |
| 1737b | Seq. ID No. 3599 | Seq. ID No. 3600 |
| 1738b | Seq. ID No. 3603 | Seq. ID No. 3604 |
| 1738c | Seq. ID No. 3605 | Seq. ID No. 3606 |
| 1739 | Seq. ID No. 3607 | Seq. ID No. 3608 |
| 1741 | Seq. ID No. 3609 | Seq. ID No. 3610 |
| 1743 | Seq. ID No. 3611 | Seq. ID No. 3612 |
| 1744a | Seq. ID No. 3613 | Seq. ID No. 3614 |
| 1744b | Seq. ID No. 3615 | Seq. ID No. 3616 |
| 1745 | Seq. ID No. 3617 | Seq. ID No. 3618 |
| 1747 | Seq. ID No. 3619 | Seq. ID No. 3620 |
| 1749a | Seq. ID No. 3621 | Seq. ID No. 3622 |
| 1749b | Seq. ID No. 3623 | Seq. ID No. 3624 |
| 1752a | Seq. ID No. 3627 | Seq. ID No. 3628 |
| 1752b | Seq. ID No. 3629 | Seq. ID No. 3630 |
| 1756b | Seq. ID No. 3635 | Seq. ID No. 3636 |
| 1757a | Seq. ID No. 3637 | Seq. ID No. 3638 |
| 1757b | Seq. ID No. 3639 | Seq. ID No. 3640 |
| 1759 | Seq. ID No. 3641 | Seq. ID No. 3642 |
| 1762 | Seq. ID No. 3645 | Seq. ID No. 3646 |
| 1764a | Seq. ID No. 3647 | Seq. ID No. 3648 |
| 1764b | Seq. ID No. 3649 | Seq. ID No. 3650 |
| 1764c | Seq. ID No. 3651 | Seq. ID No. 3652 |
| 1765 | Seq. ID No. 3653 | Seq. ID No. 3654 |
| 1767a | Seq. ID No. 3657 | Seq. ID No. 3658 |
| 1767b | Seq. ID No. 3659 | Seq. ID No. 3660 |
| 1769b | Seq. ID No. 3663 | Seq. ID No. 3664 |
| 1771 | Seq. ID No. 3665 | Seq. ID No. 3666 |
| 1773 | Seq. ID No. 3667 | Seq. ID No. 3668 |
| 1775a | Seq. ID No. 3671 | Seq. ID No. 3672 |
| 1775b | Seq. ID No. 3673 | Seq. ID No. 3674 |
| 1775c | Seq. ID No. 3675 | Seq. ID No. 3676 |
| 1778a | Seq. ID No. 3677 | Seq. ID No. 3678 |
| 1778b | Seq. ID No. 3679 | Seq. ID No. 3680 |
| 1780 | Seq. ID No. 3681 | Seq. ID No. 3682 |
| 1783a | Seq. ID No. 3683 | Seq. ID No. 3684 |
| 1783b | Seq. ID No. 3685 | Seq. ID No. 3686 |
| 1784a | Seq. ID No. 3687 | Seq. ID No. 3688 |
| 1784b | Seq. ID No. 3689 | Seq. ID No. 3690 |
| 1788a | Seq. ID No. 3691 | Seq. ID No. 3692 |
| 1788b | Seq. ID No. 3693 | Seq. ID No. 3694 |
| 1788c | Seq. ID No. 3695 | Seq. ID No. 3696 |
| 1789b | Seq. ID No. 3699 | Seq. ID No. 3700 |
| 1790a | Seq. ID No. 3701 | Seq. ID No. 3702 |
| 1790b | Seq. ID No. 3703 | Seq. ID No. 3704 |
| 1792a | Seq. ID No. 3705 | Seq. ID No. 3706 |
| 1792b | Seq. ID No. 3707 | Seq. ID No. 3708 |
| 1792c | Seq. ID No. 3709 | Seq. ID No. 3710 |
| 1793b | Seq. ID No. 3713 | Seq. ID No. 3714 |
| 1793c | Seq. ID No. 3715 | Seq. ID No. 3716 |
| 1794a | Seq. ID No. 3717 | Seq. ID No. 3718 |
| 1798c | Seq. ID No. 3727 | Seq. ID No. 3728 |
| 1800 | Seq. ID No. 3729 | Seq. ID No. 3730 |
| 1802b | Seq. ID No. 3733 | Seq. ID No. 3734 |
| 1804a | Seq. ID No. 3737 | Seq. ID No. 3738 |
| 1804b | Seq. ID No. 3739 | Seq. ID No. 3740 |
| 1805 | Seq. ID No. 3741 | Seq. ID No. 3742 |
| 1806b | Seq. ID No. 3745 | Seq. ID No. 3746 |
| 1806c | Seq. ID No. 3747 | Seq. ID No. 3748 |
| 1808d | Seq. ID No. 3759 | Seq. ID No. 3760 |
| 1809d | Seq. ID No. 3767 | Seq. ID No. 3768 |
| 1809e | Seq. ID No. 3769 | Seq. ID No. 3770 |
| 1809f | Seq. ID No. 3771 | Seq. ID No. 3772 |
| 1811b | Seq. ID No. 3779 | Seq. ID No. 3780 |
| 1812b | Seq. ID No. 3783 | Seq. ID No. 3784 |
| 1813 | Seq. ID No. 3785 | Seq. ID No. 3786 |
| 1815b | Seq. ID No. 3789 | Seq. ID No. 3790 |
| 1815c | Seq. ID No. 3791 | Seq. ID No. 3792 |
| 1816b | Seq. ID No. 3795 | Seq. ID No. 3796 |
| 1816c | Seq. ID No. 3797 | Seq. ID No. 3798 |
| 1819b | Seq. ID No. 3803 | Seq. ID No. 3804 |
| 1821 | Seq. ID No. 3805 | Seq. ID No. 3806 |
| 1822 | Seq. ID No. 3807 | Seq. ID No. 3808 |
| 1823a | Seq. ID No. 3809 | Seq. ID No. 3810 |
| 1823b | Seq. ID No. 3811 | Seq. ID No. 3812 |
| 1825 | Seq. ID No. 3813 | Seq. ID No. 3814 |
| 1826a | Seq. ID No. 3815 | Seq. ID No. 3816 |
| 1826b | Seq. ID No. 3817 | Seq. ID No. 3818 |
| 1828 | Seq. ID No. 3819 | Seq. ID No. 3820 |
| 1830b | Seq. ID No. 3823 | Seq. ID No. 3824 |
| 1833 | Seq. ID No. 3825 | Seq. ID No. 3826 |
| 1836a | Seq. ID No. 3831 | Seq. ID No. 3832 |
| 1836b | Seq. ID No. 3833 | Seq. ID No. 3834 |
| 1837 | Seq. ID No. 3835 | Seq. ID No. 3836 |
| 1838c | Seq. ID No. 3841 | Seq. ID No. 3842 |
| 1838d | Seq. ID No. 3843 | Seq. ID No. 3844 |
| 1839b | Seq. ID No. 3847 | Seq. ID No. 3848 |
| 1842d | Seq. ID No. 3855 | Seq. ID No. 3856 |
| 1843 | Seq. ID No. 3857 | Seq. ID No. 3858 |
| 1845c | Seq. ID No. 3863 | Seq. ID No. 3864 |
| 1848b | Seq. ID No. 3867 | Seq. ID No. 3868 |
| 1850b | Seq. ID No. 3871 | Seq. ID No. 3872 |
| 1850c | Seq. ID No. 3873 | Seq. ID No. 3874 |
| 1853a | Seq. ID No. 3875 | Seq. ID No. 3876 |
| 1853b | Seq. ID No. 3877 | Seq. ID No. 3878 |
| 1854b | Seq. ID No. 3881 | Seq. ID No. 3882 |
| 1855 | Seq. ID No. 3883 | Seq. ID No. 3884 |
| 1856 | Seq. ID No. 3885 | Seq. ID No. 3886 |
| 1857d | Seq. ID No. 3893 | Seq. ID No. 3894 |
| 1858 | Seq. ID No. 3895 | Seq. ID No. 3896 |
| 1861a | Seq. ID No. 3899 | Seq. ID No. 3900 |
| 1861b | Seq. ID No. 3901 | Seq. ID No. 3902 |
| 1863a | Seq. ID No. 3905 | Seq. ID No. 3906 |
| 1863b | Seq. ID No. 3907 | Seq. ID No. 3908 |
| 1865a | Seq. ID No. 3911 | Seq. ID No. 3912 |
| 1865b | Seq. ID No. 3913 | Seq. ID No. 3914 |
| 1868 | Seq. ID No. 3915 | Seq. ID No. 3916 |
| 1870 | Seq. ID No. 3919 | Seq. ID No. 3920 |
| 1873a | Seq. ID No. 3921 | Seq. ID No. 3922 |
| 1873b | Seq. ID No. 3923 | Seq. ID No. 3924 |
| 1873c | Seq. ID No. 3925 | Seq. ID No. 3926 |
| 1875b | Seq. ID No. 3927 | Seq. ID No. 3928 |
| 1875c | Seq. ID No. 3929 | Seq. ID No. 3930 |
| 1877a | Seq. ID No. 3931 | Seq. ID No. 3932 |
| 1877b | Seq. ID No. 3933 | Seq. ID No. 3934 |
| 1878 | Seq. ID No. 3935 | Seq. ID No. 3936 |
| 1882 | Seq. ID No. 3939 | Seq. ID No. 3940 |
| 1884 | Seq. ID No. 3941 | Seq. ID No. 3942 |
| 1886 | Seq. ID No. 3943 | Seq. ID No. 3944 |
| 1887 | Seq. ID No. 3945 | Seq. ID No. 3946 |
| 1888a | Seq. ID No. 3947 | Seq. ID No. 3948 |
| 1888b | Seq. ID No. 3949 | Seq. ID No. 3950 |
| 1890 | Seq. ID No. 3951 | Seq. ID No. 3952 |
| 1891a | Seq. ID No. 3953 | Seq. ID No. 3954 |
| 1891b | Seq. ID No. 3955 | Seq. ID No. 3956 |
| 1893 | Seq. ID No. 3957 | Seq. ID No. 3958 |
| 1894c | Seq. ID No. 3959 | Seq. ID No. 3960 |
| 1895 | Seq. ID No. 3961 | Seq. ID No. 3962 |
| 1896b | Seq. ID No. 3965 | Seq. ID No. 3966 |
| 1897a | Seq. ID No. 3967 | Seq. ID No. 3968 |
| 1897b | Seq. ID No. 3969 | Seq. ID No. 3970 |
| 1897c | Seq. ID No. 3971 | Seq. ID No. 3972 |
| 1898b | Seq. ID No. 3975 | Seq. ID No. 3976 |
| 1900 | Seq. ID No. 3979 | Seq. ID No. 3980 |
| 1902a | Seq. ID No. 3981 | Seq. ID No. 3982 |
| 1902b | Seq. ID No. 3983 | Seq. ID No. 3984 |
| 1907 | Seq. ID No. 3985 | Seq. ID No. 3986 |
| 1912 | Seq. ID No. 3987 | Seq. ID No. 3988 |
| 1915b | Seq. ID No. 3991 | Seq. ID No. 3992 |
| 1917a | Seq. ID No. 3995 | Seq. ID No. 3996 |
| 1917b | Seq. ID No. 3997 | Seq. ID No. 3998 |
| 1918b | Seq. ID No. 3999 | Seq. ID No. 4000 |
| 1918d | Seq. ID No. 4003 | Seq. ID No. 4004 |
| 1919b | Seq. ID No. 4007 | Seq. ID No. 4008 |
| 1919c | Seq. ID No. 4009 | Seq. ID No. 4010 |
| 1925 | Seq. ID No. 4015 | Seq. ID No. 4016 |
| 1926 | Seq. ID No. 4017 | Seq. ID No. 4018 |
| 1927b | Seq. ID No. 4021 | Seq. ID No. 4022 |
| 1930 | Seq. ID No. 4023 | Seq. ID No. 4024 |
| 1931c | Seq. ID No. 4029 | Seq. ID No. 4030 |
| 1933b | Seq. ID No. 4035 | Seq. ID No. 4036 |
| 1934 | Seq. ID No. 4037 | Seq. ID No. 4038 |
| 1936 | Seq. ID No. 4039 | Seq. ID No. 4040 |
| 1937e | Seq. ID No. 4049 | Seq. ID No. 4050 |
| 1939a | Seq. ID No. 4051 | Seq. ID No. 4052 |
| 1939b | Seq. ID No. 4053 | Seq. ID No. 4054 |
| 1939c | Seq. ID No. 4055 | Seq. ID No. 4056 |
| 1940 | Seq. ID No. 4057 | Seq. ID No. 4058 |
| 1941b | Seq. ID No. 4061 | Seq. ID No. 4062 |
| 1946c | Seq. ID No. 4075 | Seq. ID No. 4076 |
| 1950 | Seq. ID No. 4079 | Seq. ID No. 4080 |
| 1951c | Seq. ID No. 4085 | Seq. ID No. 4086 |
| 1951d | Seq. ID No. 4087 | Seq. ID No. 4088 |
| 1953 | Seq. ID No. 4089 | Seq. ID No. 4090 |
| 1954a | Seq. ID No. 4091 | Seq. ID No. 4092 |
| 1954b | Seq. ID No. 4093 | Seq. ID No. 4094 |
| 1954c | Seq. ID No. 4095 | Seq. ID No. 4096 |
| 1957 | Seq. ID No. 4099 | Seq. ID No. 4100 |
| 1958c | Seq. ID No. 4105 | Seq. ID No. 4106 |
| 1960a | Seq. ID No. 4107 | Seq. ID No. 4108 |
| 1960b | Seq. ID No. 4109 | Seq. ID No. 4110 |
| 1960c | Seq. ID No. 4111 | Seq. ID No. 4112 |
| 1961 | Seq. ID No. 4113 | Seq. ID No. 4114 |
| 1962b | Seq. ID No. 4117 | Seq. ID No. 4118 |
| 1965a | Seq. ID No. 4119 | Seq. ID No. 4120 |
| 1965b | Seq. ID No. 4121 | Seq. ID No. 4122 |
| 1966 | Seq. ID No. 4123 | Seq. ID No. 4124 |
| 1967 | Seq. ID No. 4125 | Seq. ID No. 4126 |
| 1968 | Seq. ID No. 4127 | Seq. ID No. 4128 |
| 1969 | Seq. ID No. 4129 | Seq. ID No. 4130 |
| 1970a | Seq. ID No. 4131 | Seq. ID No. 4132 |
| 1970b | Seq. ID No. 4133 | Seq. ID No. 4134 |
| 1972 | Seq. ID No. 4135 | Seq. ID No. 4136 |
| 1973 | Seq. ID No. 4137 | Seq. ID No. 4138 |
| 1976 | Seq. ID No. 4139 | Seq. ID No. 4140 |
| 1977a | Seq. ID No. 4141 | Seq. ID No. 4142 |
| 1977b | Seq. ID No. 4143 | Seq. ID No. 4144 |
| 1977c | Seq. ID No. 4145 | Seq. ID No. 4146 |
| 1979b | Seq. ID No. 4149 | Seq. ID No. 4150 |
| 1980b | Seq. ID No. 4153 | Seq. ID No. 4154 |
| 1981 | Seq. ID No. 4155 | Seq. ID No. 4156 |
| 1982 | Seq. ID No. 4157 | Seq. ID No. 4158 |
| 1985b | Seq. ID No. 4161 | Seq. ID No. 4162 |
| 1986 | Seq. ID No. 4163 | Seq. ID No. 4164 |
| 1987b | Seq. ID No. 4167 | Seq. ID No. 4168 |
| 1989b | Seq. ID No. 4171 | Seq. ID No. 4172 |
| 1989c | Seq. ID No. 4173 | Seq. ID No. 4174 |
| 1990a | Seq. ID No. 4175 | Seq. ID No. 4176 |
| 1990b | Seq. ID No. 4177 | Seq. ID No. 4178 |
| 1990c | Seq. ID No. 4179 | Seq. ID No. 4180 |
| 1991 | Seq. ID No. 4181 | Seq. ID No. 4182 |
| 1992b | Seq. ID No. 4185 | Seq. ID No. 4186 |
| 1993a | Seq. ID No. 4187 | Seq. ID No. 4188 |
| 1993b | Seq. ID No. 4189 | Seq. ID No. 4190 |
| 1993c | Seq. ID No. 4191 | Seq. ID No. 4192 |
| 1996 | Seq. ID No. 4193 | Seq. ID No. 4194 |
| 2000 | Seq. ID No. 4195 | Seq. ID No. 4196 |
| 2001 | Seq. ID No. 4197 | Seq. ID No. 4198 |
| 2003 | Seq. ID No. 4199 | Seq. ID No. 4200 |
| 2008 | Seq. ID No. 4203 | Seq. ID No. 4204 |
| 2010 | Seq. ID No. 4205 | Seq. ID No. 4206 |
| 2011a | Seq. ID No. 4207 | Seq. ID No. 4208 |
| 2011b | Seq. ID No. 4209 | Seq. ID No. 4210 |
| 2011c | Seq. ID No. 4211 | Seq. ID No. 4212 |
| 2015 | Seq. ID No. 4219 | Seq. ID No. 4220 |
| 2016e | Seq. ID No. 4229 | Seq. ID No. 4230 |
| 2016g | Seq. ID No. 4233 | Seq. ID No. 4234 |
| 2016h | Seq. ID No. 4235 | Seq. ID No. 4236 |
| 2020 | Seq. ID No. 4237 | Seq. ID No. 4238 |
| 2021 | Seq. ID No. 4239 | Seq. ID No. 4240 |
| 2023b | Seq. ID No. 4243 | Seq. ID No. 4244 |
| 2024c | Seq. ID No. 4249 | Seq. ID No. 4250 |
| 2024d | Seq. ID No. 4251 | Seq. ID No. 4252 |
| 2025 | Seq. ID No. 4253 | Seq. ID No. 4254 |
| 2027 | Seq. ID No. 4255 | Seq. ID No. 4256 |
| 2030b | Seq. ID No. 4259 | Seq. ID No. 4260 |
| 2030d | Seq. ID No. 4263 | Seq. ID No. 4264 |
| 2032c | Seq. ID No. 4265 | Seq. ID No. 4266 |
| 2033 | Seq. ID No. 4267 | Seq. ID No. 4268 |
| 2035b | Seq. ID No. 4269 | Seq. ID No. 4270 |
| 2036 | Seq. ID No. 4271 | Seq. ID No. 4272 |
| 2037 | Seq. ID No. 4273 | Seq. ID No. 4274 |
| 2038a | Seq. ID No. 4275 | Seq. ID No. 4276 |
| 2043b | Seq. ID No. 4281 | Seq. ID No. 4282 |
| 2044 | Seq. ID No. 4283 | Seq. ID No. 4284 |
| 2045a | Seq. ID No. 4285 | Seq. ID No. 4286 |
| 2045b | Seq. ID No. 4287 | Seq. ID No. 4288 |
| 2046a | Seq. ID No. 4289 | Seq. ID No. 4290 |
| 2046b | Seq. ID No. 4291 | Seq. ID No. 4292 |
| 2047a | Seq. ID No. 4293 | Seq. ID No. 4294 |
| 2047b | Seq. ID No. 4295 | Seq. ID No. 4296 |
| 2049c | Seq. ID No. 4297 | Seq. ID No. 4298 |
| 2050 | Seq. ID No. 4299 | Seq. ID No. 4300 |
| 2053 | Seq. ID No. 4301 | Seq. ID No. 4302 |
| 2054 | Seq. ID No. 4303 | Seq. ID No. 4304 |
| 2056 | Seq. ID No. 4307 | Seq. ID No. 4308 |
| 2057 | Seq. ID No. 4309 | Seq. ID No. 4310 |
| 2059b | Seq. ID No. 4313 | Seq. ID No. 4314 |
| 2060a | Seq. ID No. 4315 | Seq. ID No. 4316 |
| 2060b | Seq. ID No. 4317 | Seq. ID No. 4318 |
| 2062a | Seq. ID No. 4319 | Seq. ID No. 4320 |
| 2062b | Seq. ID No. 4321 | Seq. ID No. 4322 |
| 2062c | Seq. ID No. 4323 | Seq. ID No. 4324 |
| 2064 | Seq. ID No. 4325 | Seq. ID No. 4326 |
| 2065b | Seq. ID No. 4329 | Seq. ID No. 4330 |
| 2066 | Seq. ID No. 4331 | Seq. ID No. 4332 |
| 2068 | Seq. ID No. 4333 | Seq. ID No. 4334 |
| 2069a | Seq. ID No. 4335 | Seq. ID No. 4336 |
| 2069b | Seq. ID No. 4337 | Seq. ID No. 4338 |
| 2069c | Seq. ID No. 4339 | Seq. ID No. 4340 |
| 2074b | Seq. ID No. 4343 | Seq. ID No. 4344 |
| 2075a | Seq. ID No. 4345 | Seq. ID No. 4346 |
| 2075b | Seq. ID No. 4347 | Seq. ID No. 4348 |
| 2076b | Seq. ID No. 4351 | Seq. ID No. 4352 |
| 2076c | Seq. ID No. 4353 | Seq. ID No. 4354 |
| 2078 | Seq. ID No. 4355 | Seq. ID No. 4356 |
| 2079b | Seq. ID No. 4359 | Seq. ID No. 4360 |
| 2079c | Seq. ID No. 4361 | Seq. ID No. 4362 |
| 2081a | Seq. ID No. 4363 | Seq. ID No. 4364 |
| 2081b | Seq. ID No. 4365 | Seq. ID No. 4366 |
| 2086a | Seq. ID No. 4367 | Seq. ID No. 4368 |
| 2086b | Seq. ID No. 4369 | Seq. ID No. 4370 |
| 2088 | Seq. ID No. 4375 | Seq. ID No. 4376 |
| 2091 | Seq. ID No. 4377 | Seq. ID No. 4378 |
| 2092 | Seq. ID No. 4379 | Seq. ID No. 4380 |
| 2094 | Seq. ID No. 4383 | Seq. ID No. 4384 |
| 2096c | Seq. ID No. 4389 | Seq. ID No. 4390 |
| 2096d | Seq. ID No. 4391 | Seq. ID No. 4392 |
| 2097 | Seq. ID No. 4393 | Seq. ID No. 4394 |
| 2098b | Seq. ID No. 4395 | Seq. ID No. 4396 |
| 2100 | Seq. ID No. 4397 | Seq. ID No. 4398 |
| 2101 | Seq. ID No. 4399 | Seq. ID No. 4400 |
| 2104 | Seq. ID No. 4401 | Seq. ID No. 4402 |
| 2105 | Seq. ID No. 4403 | Seq. ID No. 4404 |
| 2107a | Seq. ID No. 4405 | Seq. ID No. 4406 |
| 2107b | Seq. ID No. 4407 | Seq. ID No. 4408 |
| 2109a | Seq. ID No. 4409 | Seq. ID No. 4410 |
| 2109b | Seq. ID No. 4411 | Seq. ID No. 4412 |
| 2110a | Seq. ID No. 4413 | Seq. ID No. 4414 |
| 2110b | Seq. ID No. 4415 | Seq. ID No. 4416 |
| 2110c | Seq. ID No. 4417 | Seq. ID No. 4418 |
| 2112a | Seq. ID No. 4419 | Seq. ID No. 4420 |
| 2112b | Seq. ID No. 4421 | Seq. ID No. 4422 |
| 2112c | Seq. ID No. 4423 | Seq. ID No. 4424 |
| 2114b | Seq. ID No. 4425 | Seq. ID No. 4426 |
| 2115a | Seq. ID No. 4427 | Seq. ID No. 4428 |
| 2115b | Seq. ID No. 4429 | Seq. ID No. 4430 |
| 2115c | Seq. ID No. 4431 | Seq. ID No. 4432 |
| 2117 | Seq. ID No. 4435 | Seq. ID No. 4436 |
| 2120a | Seq. ID No. 4437 | Seq. ID No. 4438 |
| 2120b | Seq. ID No. 4439 | Seq. ID No. 4440 |
| 2122b | Seq. ID No. 4441 | Seq. ID No. 4442 |
| 2125a | Seq. ID No. 4449 | Seq. ID No. 4450 |
| 2125b | Seq. ID No. 4451 | Seq. ID No. 4452 |
| 2127a | Seq. ID No. 4453 | Seq. ID No. 4454 |
| 2127b | Seq. ID No. 4455 | Seq. ID No. 4456 |
| 2128a | Seq. ID No. 4457 | Seq. ID No. 4458 |
| 2128b | Seq. ID No. 4459 | Seq. ID No. 4460 |
| 2129a | #N/A | #N/A |
| 2129b | #N/A | #N/A |
| 2133 | Seq. ID No. 4461 | Seq. ID No. 4462 |
| 2138b | Seq. ID No. 4465 | Seq. ID No. 4466 |
| 2138c | Seq. ID No. 4467 | Seq. ID No. 4468 |
| 2140b | Seq. ID No. 4471 | Seq. ID No. 4472 |
| 2142b | Seq. ID No. 4475 | Seq. ID No. 4476 |
| 2144a | Seq. ID No. 4477 | Seq. ID No. 4478 |
| 2144b | Seq. ID No. 4479 | Seq. ID No. 4480 |
| 2146 | Seq. ID No. 4481 | Seq. ID No. 4482 |
| 2147b | Seq. ID No. 4485 | Seq. ID No. 4486 |
| 2147c | Seq. ID No. 4487 | Seq. ID No. 4488 |
| 2149a | Seq. ID No. 4489 | Seq. ID No. 4490 |
| 2149b | Seq. ID No. 4491 | Seq. ID No. 4492 |
| 2150a | Seq. ID No. 4493 | Seq. ID No. 4494 |
| 2150b | Seq. ID No. 4495 | Seq. ID No. 4496 |
| 2150c | Seq. ID No. 4497 | Seq. ID No. 4498 |
| 2153 | Seq. ID No. 4501 | Seq. ID No. 4502 |
| 2155a | Seq. ID No. 4503 | Seq. ID No. 4504 |
| 2155b | Seq. ID No. 4505 | Seq. ID No. 4506 |
| 2156a | Seq. ID No. 4507 | Seq. ID No. 4508 |
| 2156b | Seq. ID No. 4509 | Seq. ID No. 4510 |
| 2156c | Seq. ID No. 4511 | Seq. ID No. 4512 |
| 2159a | Seq. ID No. 4513 | Seq. ID No. 4514 |
| 2159b | Seq. ID No. 4515 | Seq. ID No. 4516 |
| 2160b | Seq. ID No. 4519 | Seq. ID No. 4520 |
| 2160c | Seq. ID No. 4521 | Seq. ID No. 4522 |
| 2160d | Seq. ID No. 4523 | Seq. ID No. 4524 |
| 2161a | Seq. ID No. 4525 | Seq. ID No. 4526 |
| 2161b | Seq. ID No. 4527 | Seq. ID No. 4528 |
| 2161c | Seq. ID No. 4529 | Seq. ID No. 4530 |
| 2164 | Seq. ID No. 4531 | Seq. ID No. 4532 |
| 2165 | Seq. ID No. 4533 | Seq. ID No. 4534 |
| 2166b | Seq. ID No. 4537 | Seq. ID No. 4538 |
| 2171 | Seq. ID No. 4541 | Seq. ID No. 4542 |
| 2173a | Seq. ID No. 4545 | Seq. ID No. 4546 |
| 2173b | Seq. ID No. 4547 | Seq. ID No. 4548 |
| 2174 | Seq. ID No. 4549 | Seq. ID No. 4550 |
| 2175 | Seq. ID No. 4551 | Seq. ID No. 4552 |
| 2176a | Seq. ID No. 4553 | Seq. ID No. 4554 |
| 2176b | Seq. ID No. 4555 | Seq. ID No. 4556 |
| 2176d | Seq. ID No. 4559 | Seq. ID No. 4560 |
| 2177b | Seq. ID No. 4561 | Seq. ID No. 4562 |
| 2179b | Seq. ID No. 4565 | Seq. ID No. 4566 |
| 2180 | Seq. ID No. 4567 | Seq. ID No. 4568 |
| 2181b | Seq. ID No. 4571 | Seq. ID No. 4572 |
| 2182 | Seq. ID No. 4573 | Seq. ID No. 4574 |
| 2183 | Seq. ID No. 4575 | Seq. ID No. 4576 |
| 2185 | Seq. ID No. 4577 | Seq. ID No. 4578 |
| 2186 | Seq. ID No. 4581 | Seq. ID No. 4582 |
| 2189b | Seq. ID No. 4585 | Seq. ID No. 4586 |
| 2190b | Seq. ID No. 4589 | Seq. ID No. 4590 |
| 2193 | Seq. ID No. 4591 | Seq. ID No. 4592 |
| 2196 | Seq. ID No. 4597 | Seq. ID No. 4598 |
| 2197a | Seq. ID No. 4599 | Seq. ID No. 4600 |
| 2197b | Seq. ID No. 4601 | Seq. ID No. 4602 |
| 2197c | Seq. ID No. 4603 | Seq. ID No. 4604 |
| 2201a | Seq. ID No. 4605 | Seq. ID No. 4606 |
| 2201b | Seq. ID No. 4607 | Seq. ID No. 4608 |
| 2203 | Seq. ID No. 4609 | Seq. ID No. 4610 |
| 2204 | Seq. ID No. 4611 | Seq. ID No. 4612 |
| 2206a | Seq. ID No. 4613 | Seq. ID No. 4614 |
| 2206b | Seq. ID No. 4615 | Seq. ID No. 4616 |
| 2208a | Seq. ID No. 4617 | Seq. ID No. 4618 |
| 2208b | Seq. ID No. 4619 | Seq. ID No. 4620 |
| 2208c | Seq. ID No. 4621 | Seq. ID No. 4622 |
| 2209 | Seq. ID No. 4623 | Seq. ID No. 4624 |
| 2212b | Seq. ID No. 4627 | Seq. ID No. 4628 |
| 2215b | Seq. ID No. 4631 | Seq. ID No. 4632 |
| 2218 | Seq. ID No. 4637 | Seq. ID No. 4638 |
| 2219b | Seq. ID No. 4641 | Seq. ID No. 4642 |
| 2219c | Seq. ID No. 4643 | Seq. ID No. 4644 |
| 2220a | Seq. ID No. 4645 | Seq. ID No. 4646 |
| 2220b | Seq. ID No. 4647 | Seq. ID No. 4648 |
| 2220c | Seq. ID No. 4649 | Seq. ID No. 4650 |
| 2222 | Seq. ID No. 4653 | Seq. ID No. 4654 |
| 2225 | Seq. ID No. 4659 | Seq. ID No. 4660 |
| 2226 | Seq. ID No. 4661 | Seq. ID No. 4662 |
| 2227 | Seq. ID No. 4663 | Seq. ID No. 4664 |
| 2228a | Seq. ID No. 4665 | Seq. ID No. 4666 |
| 2228b | Seq. ID No. 4667 | Seq. ID No. 4668 |
| 2228c | Seq. ID No. 4669 | Seq. ID No. 4670 |
| 2231 | Seq. ID No. 4671 | Seq. ID No. 4672 |
| 2232 | Seq. ID No. 4673 | Seq. ID No. 4674 |
| 2234a | Seq. ID No. 4675 | Seq. ID No. 4676 |
| 2234b | Seq. ID No. 4677 | Seq. ID No. 4678 |
| 2234c | Seq. ID No. 4679 | Seq. ID No. 4680 |
| 2236b | Seq. ID No. 4683 | Seq. ID No. 4684 |
| 2238 | Seq. ID No. 4685 | Seq. ID No. 4686 |
| 2239b | Seq. ID No. 4687 | Seq. ID No. 4688 |
| 2240b | Seq. ID No. 4691 | Seq. ID No. 4692 |
| 2240c | Seq. ID No. 4693 | Seq. ID No. 4694 |
| 2243a | Seq. ID No. 4695 | Seq. ID No. 4696 |
| 2245 | Seq. ID No. 4699 | Seq. ID No. 4700 |
| 2246 | Seq. ID No. 4701 | Seq. ID No. 4702 |
| 2248 | Seq. ID No. 4703 | Seq. ID No. 4704 |
| 2249 | Seq. ID No. 4705 | Seq. ID No. 4706 |
| 2253d | Seq. ID No. 4713 | Seq. ID No. 4714 |
| 2255b | Seq. ID No. 4717 | Seq. ID No. 4718 |
| 2256 | Seq. ID No. 4719 | Seq. ID No. 4720 |
| 2257 | Seq. ID No. 4721 | Seq. ID No. 4722 |
| 2260b | Seq. ID No. 4727 | Seq. ID No. 4728 |
| 2260c | Seq. ID No. 4729 | Seq. ID No. 4730 |
| 2263 | Seq. ID No. 4733 | Seq. ID No. 4734 |
| 2264a | Seq. ID No. 4735 | Seq. ID No. 4736 |
| 2264b | Seq. ID No. 4737 | Seq. ID No. 4738 |
| 2267 | Seq. ID No. 4739 | Seq. ID No. 4740 |
| 2268 | Seq. ID No. 4741 | Seq. ID No. 4742 |
| 2269 | Seq. ID No. 4743 | Seq. ID No. 4744 |
| 2272 | Seq. ID No. 4747 | Seq. ID No. 4748 |
| 2273 | Seq. ID No. 4749 | Seq. ID No. 4750 |
| 2274 | Seq. ID No. 4751 | Seq. ID No. 4752 |
| 2275b | Seq. ID No. 4755 | Seq. ID No. 4756 |
| 2275c | Seq. ID No. 4757 | Seq. ID No. 4758 |
| 2276c | Seq. ID No. 4763 | Seq. ID No. 4764 |
| 2276d | Seq. ID No. 4765 | Seq. ID No. 4766 |
| 2277a | Seq. ID No. 4767 | Seq. ID No. 4768 |
| 2277b | Seq. ID No. 4769 | Seq. ID No. 4770 |
| 2278b | Seq. ID No. 4773 | Seq. ID No. 4774 |
| 2278c | Seq. ID No. 4775 | Seq. ID No. 4776 |
| 2278d | Seq. ID No. 4777 | Seq. ID No. 4778 |
| 2280 | Seq. ID No. 4779 | Seq. ID No. 4780 |
| 2284 | Seq. ID No. 4781 | Seq. ID No. 4782 |
| 2286b | Seq. ID No. 4787 | Seq. ID No. 4788 |
| 2288 | Seq. ID No. 4789 | Seq. ID No. 4790 |
| 2290 | Seq. ID No. 4791 | Seq. ID No. 4792 |
| 2291a | Seq. ID No. 4793 | Seq. ID No. 4794 |
| 2291b | Seq. ID No. 4795 | Seq. ID No. 4796 |
| 2291c | Seq. ID No. 4797 | Seq. ID No. 4798 |
| 2292b | Seq. ID No. 4801 | Seq. ID No. 4802 |
| 2292c | Seq. ID No. 4803 | Seq. ID No. 4804 |
| 2294 | Seq. ID No. 4805 | Seq. ID No. 4806 |
| 2298 | Seq. ID No. 4809 | Seq. ID No. 4810 |
| 2299 | Seq. ID No. 4811 | Seq. ID No. 4812 |
| 2300 | Seq. ID No. 4813 | Seq. ID No. 4814 |
| 2301 | Seq. ID No. 4815 | Seq. ID No. 4816 |
| 2302 | Seq. ID No. 4817 | Seq. ID No. 4818 |
| 2303 | Seq. ID No. 4819 | Seq. ID No. 4820 |
| 2307 | Seq. ID No. 4825 | Seq. ID No. 4826 |
| 2308 | Seq. ID No. 4827 | Seq. ID No. 4828 |
| 2309a | Seq. ID No. 4829 | Seq. ID No. 4830 |
| 2309b | Seq. ID No. 4831 | Seq. ID No. 4832 |
| 2309c | Seq. ID No. 4833 | Seq. ID No. 4834 |
| 2311 | Seq. ID No. 4837 | Seq. ID No. 4838 |
| 2312a | Seq. ID No. 4839 | Seq. ID No. 4840 |
| 2312b | Seq. ID No. 4841 | Seq. ID No. 4842 |
| 2312c | Seq. ID No. 4843 | Seq. ID No. 4844 |
| 2314 | Seq. ID No. 4845 | Seq. ID No. 4846 |
| 2316 | Seq. ID No. 4849 | Seq. ID No. 4850 |
| 2317 | Seq. ID No. 4851 | Seq. ID No. 4852 |
| 2320 | Seq. ID No. 4853 | Seq. ID No. 4854 |
| 2321a | Seq. ID No. 4855 | Seq. ID No. 4856 |
| 2322 | Seq. ID No. 4861 | Seq. ID No. 4862 |
| 2324 | Seq. ID No. 4863 | Seq. ID No. 4864 |
| 2328 | Seq. ID No. 4867 | Seq. ID No. 4868 |
| 2329d | Seq. ID No. 4875 | Seq. ID No. 4876 |
| 2330 | Seq. ID No. 4877 | Seq. ID No. 4878 |
| 2331 | Seq. ID No. 4879 | Seq. ID No. 4880 |
| 2333 | Seq. ID No. 4881 | Seq. ID No. 4882 |
| 2335 | Seq. ID No. 4883 | Seq. ID No. 4884 |
| 2338a | Seq. ID No. 4889 | Seq. ID No. 4890 |
| 2338b | Seq. ID No. 4891 | Seq. ID No. 4892 |
| 2338c | Seq. ID No. 4893 | Seq. ID No. 4894 |
| 2342a | Seq. ID No. 4895 | Seq. ID No. 4896 |
| 2342b | Seq. ID No. 4897 | Seq. ID No. 4898 |
| 2342c | Seq. ID No. 4899 | Seq. ID No. 4900 |
| 2344 | Seq. ID No. 4901 | Seq. ID No. 4902 |
| 2345 | Seq. ID No. 4903 | Seq. ID No. 4904 |
| 2347 | Seq. ID No. 4905 | Seq. ID No. 4906 |
| 2348 | Seq. ID No. 4907 | Seq. ID No. 4908 |
| 2349a | Seq. ID No. 4909 | Seq. ID No. 4910 |
| 2349b | Seq. ID No. 4911 | Seq. ID No. 4912 |
| 2350a | Seq. ID No. 4913 | Seq. ID No. 4914 |
| 2353 | Seq. ID No. 4915 | Seq. ID No. 4916 |
| 2354 | Seq. ID No. 4917 | Seq. ID No. 4918 |
| 2357 | Seq. ID No. 4919 | Seq. ID No. 4920 |
| 2358 | Seq. ID No. 4921 | Seq. ID No. 4922 |
| 2360 | Seq. ID No. 4923 | Seq. ID No. 4924 |
| 2361b | Seq. ID No. 4927 | Seq. ID No. 4928 |
| 2363b | Seq. ID No. 4931 | Seq. ID No. 4932 |
| 2365b | Seq. ID No. 4935 | Seq. ID No. 4936 |
| 2366a | Seq. ID No. 4937 | Seq. ID No. 4938 |
| 2366b | Seq. ID No. 4939 | Seq. ID No. 4940 |
| 2367 | Seq. ID No. 4941 | Seq. ID No. 4942 |
| 2368 | Seq. ID No. 4943 | Seq. ID No. 4944 |
| 2369 | Seq. ID No. 4945 | Seq. ID No. 4946 |
| 2370 | Seq. ID No. 4947 | Seq. ID No. 4948 |
| 2371a | Seq. ID No. 4949 | Seq. ID No. 4950 |
| 2372 | Seq. ID No. 4951 | Seq. ID No. 4952 |
| 2373 | Seq. ID No. 4953 | Seq. ID No. 4954 |
| 2374b | Seq. ID No. 4957 | Seq. ID No. 4958 |
| 2376 | Seq. ID No. 4959 | Seq. ID No. 4960 |
| 2377a | Seq. ID No. 4961 | Seq. ID No. 4962 |
| 2377b | Seq. ID No. 4963 | Seq. ID No. 4964 |
| 2381 | Seq. ID No. 4973 | Seq. ID No. 4974 |
| 2382c | Seq. ID No. 4975 | Seq. ID No. 4976 |
| 2384a | Seq. ID No. 4977 | Seq. ID No. 4978 |
| 2384b | Seq. ID No. 4979 | Seq. ID No. 4980 |
| 2386b | Seq. ID No. 4981 | Seq. ID No. 4982 |
| 2386c | Seq. ID No. 4983 | Seq. ID No. 4984 |
| 2387 | Seq. ID No. 4985 | Seq. ID No. 4986 |
| 2390 | Seq. ID No. 4987 | Seq. ID No. 4988 |
| 2391 | Seq. ID No. 4989 | Seq. ID No. 4990 |
| 2392 | Seq. ID No. 4991 | Seq. ID No. 4992 |
| 2394 | Seq. ID No. 4993 | Seq. ID No. 4994 |
| 2395 | Seq. ID No. 4995 | Seq. ID No. 4996 |
| 2396 | Seq. ID No. 4997 | Seq. ID No. 4998 |
| 2397 | Seq. ID No. 4999 | Seq. ID No. 5000 |
| 2399a | Seq. ID No. 5003 | Seq. ID No. 5004 |
| 2399b | Seq. ID No. 5005 | Seq. ID No. 5006 |
| 2399c | Seq. ID No. 5007 | Seq. ID No. 5008 |
| 2401 | Seq. ID No. 5009 | Seq. ID No. 5010 |
| 2402a | Seq. ID No. 5011 | Seq. ID No. 5012 |
| 2402b | Seq. ID No. 5013 | Seq. ID No. 5014 |
| 2403b | Seq. ID No. 5017 | Seq. ID No. 5018 |
| 2404a | Seq. ID No. 5019 | Seq. ID No. 5020 |
| 2404b | Seq. ID No. 5021 | Seq. ID No. 5022 |
| 2407a | Seq. ID No. 5023 | Seq. ID No. 5024 |
| 2409a | Seq. ID No. 5025 | Seq. ID No. 5026 |
| 2410 | Seq. ID No. 5029 | Seq. ID No. 5030 |
| 2412 | Seq. ID No. 5031 | Seq. ID No. 5032 |
| 2413a | Seq. ID No. 5033 | Seq. ID No. 5034 |
| 2413b | Seq. ID No. 5035 | Seq. ID No. 5036 |
| 2416b | Seq. ID No. 5041 | Seq. ID No. 5042 |
| 2416c | Seq. ID No. 5043 | Seq. ID No. 5044 |
| 2417a | Seq. ID No. 5045 | Seq. ID No. 5046 |
| 2417b | Seq. ID No. 5047 | Seq. ID No. 5048 |
| 2422b | Seq. ID No. 5057 | Seq. ID No. 5058 |
| 2422c | Seq. ID No. 5059 | Seq. ID No. 5060 |
| 2423b | Seq. ID No. 5063 | Seq. ID No. 5064 |
| 2424a | Seq. ID No. 5065 | Seq. ID No. 5066 |
| 2424b | Seq. ID No. 5067 | Seq. ID No. 5068 |
| 2424c | Seq. ID No. 5069 | Seq. ID No. 5070 |
| 2428b | Seq. ID No. 5075 | Seq. ID No. 5076 |
| 2428c | Seq. ID No. 5077 | Seq. ID No. 5078 |
| 2429 | Seq. ID No. 5079 | Seq. ID No. 5080 |
| 2432 | Seq. ID No. 5081 | Seq. ID No. 5082 |
| 2433 | Seq. ID No. 5083 | Seq. ID No. 5084 |
| 2434 | Seq. ID No. 5085 | Seq. ID No. 5086 |
| 2440 | Seq. ID No. 5087 | Seq. ID No. 5088 |
| 2442b | Seq. ID No. 5091 | Seq. ID No. 5092 |
| 2444c | Seq. ID No. 5099 | Seq. ID No. 5100 |
| 2444d | Seq. ID No. 5101 | Seq. ID No. 5102 |
| 2445 | Seq. ID No. 5103 | Seq. ID No. 5104 |
| 2449b | Seq. ID No. 5109 | Seq. ID No. 5110 |
| 2451 | Seq. ID No. 5111 | Seq. ID No. 5112 |
| 2452 | Seq. ID No. 5113 | Seq. ID No. 5114 |
| 2453 | Seq. ID No. 5115 | Seq. ID No. 5116 |
| 2455 | Seq. ID No. 5117 | Seq. ID No. 5118 |
| 2456b | Seq. ID No. 5121 | Seq. ID No. 5122 |
| 2456d | Seq. ID No. 5125 | Seq. ID No. 5126 |
| 2456e | Seq. ID No. 5127 | Seq. ID No. 5128 |
| 2458c | Seq. ID No. 5133 | Seq. ID No. 5134 |
| 2458f | Seq. ID No. 5139 | Seq. ID No. 5140 |
| 2458g | Seq. ID No. 5141 | Seq. ID No. 5142 |
| 2461b | Seq. ID No. 5145 | Seq. ID No. 5146 |
| 2462a | Seq. ID No. 5147 | Seq. ID No. 5148 |
| 2462b | Seq. ID No. 5149 | Seq. ID No. 5150 |
| 2463a | Seq. ID No. 5151 | Seq. ID No. 5152 |
| 2465a | Seq. ID No. 5155 | Seq. ID No. 5156 |
| 2465b | Seq. ID No. 5157 | Seq. ID No. 5158 |
| 2468a | Seq. ID No. 5159 | Seq. ID No. 5160 |
| 2468b | Seq. ID No. 5161 | Seq. ID No. 5162 |
| 2469b | Seq. ID No. 5165 | Seq. ID No. 5166 |
| 2470 | Seq. ID No. 5167 | Seq. ID No. 5168 |
| 2471 | Seq. ID No. 5169 | Seq. ID No. 5170 |
| 2474c | Seq. ID No. 5177 | Seq. ID No. 5178 |
| 2475b | Seq. ID No. 5181 | Seq. ID No. 5182 |
| 2475c | Seq. ID No. 5183 | Seq. ID No. 5184 |
| 2477 | Seq. ID No. 5185 | Seq. ID No. 5186 |
| 2480 | Seq. ID No. 5187 | Seq. ID No. 5188 |
| 2481a | Seq. ID No. 5189 | Seq. ID No. 5190 |
| 2481b | Seq. ID No. 5191 | Seq. ID No. 5192 |
| 2482 | Seq. ID No. 5193 | Seq. ID No. 5194 |
| 2483 | Seq. ID No. 5195 | Seq. ID No. 5196 |
| 2484a | Seq. ID No. 5197 | Seq. ID No. 5198 |
| 2484b | Seq. ID No. 5199 | Seq. ID No. 5200 |
| 2485 | Seq. ID No. 5201 | Seq. ID No. 5202 |
| 2489 | Seq. ID No. 5203 | Seq. ID No. 5204 |
| 2490 | Seq. ID No. 5205 | Seq. ID No. 5206 |
| 2492b | Seq. ID No. 5209 | Seq. ID No. 5210 |
| 2494 | Seq. ID No. 5211 | Seq. ID No. 5212 |
| 2495b | Seq. ID No. 5215 | Seq. ID No. 5216 |
| 2497b | Seq. ID No. 5219 | Seq. ID No. 5220 |
| 2498b | Seq. ID No. 5221 | Seq. ID No. 5222 |
| 2501a | Seq. ID No. 5229 | Seq. ID No. 5230 |
| 2501b | Seq. ID No. 5231 | Seq. ID No. 5232 |
| 2506 | Seq. ID No. 5239 | Seq. ID No. 5240 |
| 2507b | Seq. ID No. 5241 | Seq. ID No. 5242 |
| 2507c | Seq. ID No. 5243 | Seq. ID No. 5244 |
| 2510 | Seq. ID No. 5245 | Seq. ID No. 5246 |
| 2513b | Seq. ID No. 5251 | Seq. ID No. 5252 |
| 2513c | Seq. ID No. 5253 | Seq. ID No. 5254 |
| 2514 | Seq. ID No. 5255 | Seq. ID No. 5256 |
| 2516b | Seq. ID No. 5261 | Seq. ID No. 5262 |
| 2517a | Seq. ID No. 5263 | Seq. ID No. 5264 |
| 2517b | Seq. ID No. 5265 | Seq. ID No. 5266 |
| 2518a | Seq. ID No. 5267 | Seq. ID No. 5268 |
| 2520c | Seq. ID No. 5277 | Seq. ID No. 5278 |
| 2520d | Seq. ID No. 5279 | Seq. ID No. 5280 |
| 2521 | Seq. ID No. 5281 | Seq. ID No. 5282 |
| 2525a | Seq. ID No. 5285 | Seq. ID No. 5286 |
| 2525b | Seq. ID No. 5287 | Seq. ID No. 5288 |
| 2527b | Seq. ID No. 5291 | Seq. ID No. 5292 |
| 2528b | Seq. ID No. 5295 | Seq. ID No. 5296 |
| 2528c | Seq. ID No. 5297 | Seq. ID No. 5298 |
| 2528d | Seq. ID No. 5299 | Seq. ID No. 5300 |
| 2532b | Seq. ID No. 5301 | Seq. ID No. 5302 |
| 2532c | Seq. ID No. 5303 | Seq. ID No. 5304 |
| 2534 | Seq. ID No. 5305 | Seq. ID No. 5306 |
| 2535a | Seq. ID No. 5307 | Seq. ID No. 5308 |
| 2535b | Seq. ID No. 5309 | Seq. ID No. 5310 |
| 2538 | Seq. ID No. 5311 | Seq. ID No. 5312 |
| 2541 | Seq. ID No. 5313 | Seq. ID No. 5314 |
| 2542b | Seq. ID No. 5317 | Seq. ID No. 5318 |
| 2542c | Seq. ID No. 5319 | Seq. ID No. 5320 |
| 2543 | Seq. ID No. 5321 | Seq. ID No. 5322 |
| 2544 | Seq. ID No. 5323 | Seq. ID No. 5324 |
| 2546 | Seq. ID No. 5327 | Seq. ID No. 5328 |
| 2547b | Seq. ID No. 5329 | Seq. ID No. 5330 |
| 2547c | Seq. ID No. 5331 | Seq. ID No. 5332 |
| 2548a | Seq. ID No. 5333 | Seq. ID No. 5334 |
| 2548b | Seq. ID No. 5335 | Seq. ID No. 5336 |
| 2549 | Seq. ID No. 5337 | Seq. ID No. 5338 |
| 2550e | Seq. ID No. 5343 | Seq. ID No. 5344 |
| 2552 | Seq. ID No. 5345 | Seq. ID No. 5346 |
| 2554a | Seq. ID No. 5349 | Seq. ID No. 5350 |
| 2554b | Seq. ID No. 5351 | Seq. ID No. 5352 |
| 2555c | Seq. ID No. 5357 | Seq. ID No. 5358 |
| 2555d | Seq. ID No. 5359 | Seq. ID No. 5360 |
| 2559 | Seq. ID No. 5365 | Seq. ID No. 5366 |
| 2561 | Seq. ID No. 5367 | Seq. ID No. 5368 |
| 2563 | Seq. ID No. 5373 | Seq. ID No. 5374 |
| 2564b | Seq. ID No. 5377 | Seq. ID No. 5378 |
| 2564c | Seq. ID No. 5379 | Seq. ID No. 5380 |
| 2564d | Seq. ID No. 5381 | Seq. ID No. 5382 |
| 2566 | Seq. ID No. 5383 | Seq. ID No. 5384 |
| 2567b | Seq. ID No. 5387 | Seq. ID No. 5388 |
| 2568 | Seq. ID No. 5389 | Seq. ID No. 5390 |
| 2572 | Seq. ID No. 5391 | Seq. ID No. 5392 |
| 2573 | Seq. ID No. 5393 | Seq. ID No. 5394 |
| 2576 | Seq. ID No. 5397 | Seq. ID No. 5398 |
| 2578 | Seq. ID No. 5399 | Seq. ID No. 5400 |
| 2579b | Seq. ID No. 5401 | Seq. ID No. 5402 |
| 2581 | Seq. ID No. 5403 | Seq. ID No. 5404 |
| 2582a | Seq. ID No. 5405 | Seq. ID No. 5406 |
| 2582b | Seq. ID No. 5407 | Seq. ID No. 5408 |
| 2582c | Seq. ID No. 5409 | Seq. ID No. 5410 |
| 2585 | Seq. ID No. 5411 | Seq. ID No. 5412 |
| 2587b | Seq. ID No. 5415 | Seq. ID No. 5416 |
| 2588 | Seq. ID No. 5417 | Seq. ID No. 5418 |
| 2589 | Seq. ID No. 5419 | Seq. ID No. 5420 |
| 2591 | Seq. ID No. 5421 | Seq. ID No. 5422 |
| 2592 | Seq. ID No. 5423 | Seq. ID No. 5424 |
| 2593a | Seq. ID No. 5425 | Seq. ID No. 5426 |
| 2593b | Seq. ID No. 5427 | Seq. ID No. 5428 |
| 2594b | Seq. ID No. 5431 | Seq. ID No. 5432 |
| 2596 | Seq. ID No. 5433 | Seq. ID No. 5434 |
| 2597a | Seq. ID No. 5435 | Seq. ID No. 5436 |
| 2597b | Seq. ID No. 5437 | Seq. ID No. 5438 |
| 2597c | Seq. ID No. 5439 | Seq. ID No. 5440 |
| 2598 | Seq. ID No. 5441 | Seq. ID No. 5442 |
| 2602 | Seq. ID No. 5443 | Seq. ID No. 5444 |
| 2605b | Seq. ID No. 5447 | Seq. ID No. 5448 |
| 2606 | Seq. ID No. 5449 | Seq. ID No. 5450 |
| 2608 | Seq. ID No. 5451 | Seq. ID No. 5452 |
| 2610 | Seq. ID No. 5453 | Seq. ID No. 5454 |
| 2611 | Seq. ID No. 5455 | Seq. ID No. 5456 |
| 2613 | Seq. ID No. 5457 | Seq. ID No. 5458 |
| 2616e | Seq. ID No. 5467 | Seq. ID No. 5468 |
| 2616g | Seq. ID No. 5471 | Seq. ID No. 5472 |
| 2616h | Seq. ID No. 5473 | Seq. ID No. 5474 |
| 2617b | Seq. ID No. 5477 | Seq. ID No. 5478 |
| 2618a | Seq. ID No. 5479 | Seq. ID No. 5480 |
| 2618b | Seq. ID No. 5481 | Seq. ID No. 5482 |
| 2623b | Seq. ID No. 5491 | Seq. ID No. 5492 |
| 2624a | Seq. ID No. 5493 | Seq. ID No. 5494 |
| 2624b | Seq. ID No. 5495 | Seq. ID No. 5496 |
| 2625b | Seq. ID No. 5499 | Seq. ID No. 5500 |
| 2626b | Seq. ID No. 5503 | Seq. ID No. 5504 |
| 2628 | Seq. ID No. 5509 | Seq. ID No. 5510 |
| 2629b | Seq. ID No. 5513 | Seq. ID No. 5514 |
| 2631 | Seq. ID No. 5515 | Seq. ID No. 5516 |
| 2632 | Seq. ID No. 5517 | Seq. ID No. 5518 |
| 2633a | Seq. ID No. 5519 | Seq. ID No. 5520 |
| 2633b | Seq. ID No. 5521 | Seq. ID No. 5522 |
| 2633e | Seq. ID No. 5527 | Seq. ID No. 5528 |
| 2637a | Seq. ID No. 5529 | Seq. ID No. 5530 |
| 2637b | Seq. ID No. 5531 | Seq. ID No. 5532 |
| 2642 | Seq. ID No. 5533 | Seq. ID No. 5534 |
| 2643b | Seq. ID No. 5537 | Seq. ID No. 5538 |
| 2645 | Seq. ID No. 5539 | Seq. ID No. 5540 |
| 2647 | Seq. ID No. 5541 | Seq. ID No. 5542 |
| 2648a | Seq. ID No. 5543 | Seq. ID No. 5544 |
| 2648b | Seq. ID No. 5545 | Seq. ID No. 5546 |
| 2649 | Seq. ID No. 5547 | Seq. ID No. 5548 |
| 2650 | Seq. ID No. 5549 | Seq. ID No. 5550 |
| 2652a | Seq. ID No. 5551 | Seq. ID No. 5552 |
| 2652b | Seq. ID No. 5553 | Seq. ID No. 5554 |
| 2655b | Seq. ID No. 5557 | Seq. ID No. 5558 |
| 2656 | Seq. ID No. 5559 | Seq. ID No. 5560 |
| 2658b | Seq. ID No. 5563 | Seq. ID No. 5564 |
| 2659b | Seq. ID No. 5567 | Seq. ID No. 5568 |
| 2660 | Seq. ID No. 5569 | Seq. ID No. 5570 |
| 2664b | Seq. ID No. 5575 | Seq. ID No. 5576 |
| 2665 | Seq. ID No. 5577 | Seq. ID No. 5578 |
| 2666b | Seq. ID No. 5581 | Seq. ID No. 5582 |
| 2667a | Seq. ID No. 5583 | Seq. ID No. 5584 |
| 2667b | Seq. ID No. 5585 | Seq. ID No. 5586 |
| 2669b | Seq. ID No. 5589 | Seq. ID No. 5590 |
| 2669c | Seq. ID No. 5591 | Seq. ID No. 5592 |
| 2672 | Seq. ID No. 5593 | Seq. ID No. 5594 |
| 2673 | Seq. ID No. 5595 | Seq. ID No. 5596 |
| 2674b | Seq. ID No. 5599 | Seq. ID No. 5600 |
| 2676 | Seq. ID No. 5601 | Seq. ID No. 5602 |
| 2677c | Seq. ID No. 5607 | Seq. ID No. 5608 |
| 2679c | Seq. ID No. 5613 | Seq. ID No. 5614 |
| 2679d | Seq. ID No. 5615 | Seq. ID No. 5616 |
| 2680a | Seq. ID No. 5617 | Seq. ID No. 5618 |
| 2680b | Seq. ID No. 5619 | Seq. ID No. 5620 |
| 2680c | Seq. ID No. 5621 | Seq. ID No. 5622 |
| 2683b | Seq. ID No. 5625 | Seq. ID No. 5626 |
| 2684a | Seq. ID No. 5627 | Seq. ID No. 5628 |
| 2684b | Seq. ID No. 5629 | Seq. ID No. 5630 |
| 2686 | Seq. ID No. 5631 | Seq. ID No. 5632 |
| 2688c | Seq. ID No. 5637 | Seq. ID No. 5638 |
| 2689a | Seq. ID No. 5639 | Seq. ID No. 5640 |
| 2689b | Seq. ID No. 5641 | Seq. ID No. 5642 |
| 2690b | Seq. ID No. 5645 | Seq. ID No. 5646 |
| 2690c | Seq. ID No. 5647 | Seq. ID No. 5648 |
| 2692b | Seq. ID No. 5649 | Seq. ID No. 5650 |
| 2693 | Seq. ID No. 5651 | Seq. ID No. 5652 |
| 2694b | Seq. ID No. 5655 | Seq. ID No. 5656 |
| 2695 | Seq. ID No. 5657 | Seq. ID No. 5658 |
| 2696b | Seq. ID No. 5661 | Seq. ID No. 5662 |
| 2709 | Seq. ID No. 5665 | Seq. ID No. 5666 |
| 2710c | Seq. ID No. 5667 | Seq. ID No. 5668 |
| 2712 | Seq. ID No. 5669 | Seq. ID No. 5670 |
| 2716b | Seq. ID No. 5677 | Seq. ID No. 5678 |
| 2716c | Seq. ID No. 5679 | Seq. ID No. 5680 |
| 2718b | Seq. ID No. 5683 | Seq. ID No. 5684 |
| 2718c | Seq. ID No. 5685 | Seq. ID No. 5686 |
| 2719a | Seq. ID No. 5687 | Seq. ID No. 5688 |
| 2719b | Seq. ID No. 5689 | Seq. ID No. 5690 |
| 2721a | Seq. ID No. 5691 | Seq. ID No. 5692 |
| 2721b | Seq. ID No. 5693 | Seq. ID No. 5694 |
| 2722b | Seq. ID No. 5697 | Seq. ID No. 5698 |
| 2723 | Seq. ID No. 5699 | Seq. ID No. 5700 |
| 2724 | Seq. ID No. 5701 | Seq. ID No. 5702 |
| 2725a | Seq. ID No. 5703 | Seq. ID No. 5704 |
| 2725b | Seq. ID No. 5705 | Seq. ID No. 5706 |
| 2726 | Seq. ID No. 5707 | Seq. ID No. 5708 |
| 2728b | Seq. ID No. 5711 | Seq. ID No. 5712 |
| 2731a | Seq. ID No. 5713 | Seq. ID No. 5714 |
| 2731b | Seq. ID No. 5715 | Seq. ID No. 5716 |
| 2732 | Seq. ID No. 5717 | Seq. ID No. 5718 |
| 2734a | Seq. ID No. 5719 | Seq. ID No. 5720 |
| 2734b | Seq. ID No. 5721 | Seq. ID No. 5722 |
| 2734c | Seq. ID No. 5723 | Seq. ID No. 5724 |
| 2735a | Seq. ID No. 5725 | Seq. ID No. 5726 |
| 2735b | Seq. ID No. 5727 | Seq. ID No. 5728 |
| 2738d | Seq. ID No. 5735 | Seq. ID No. 5736 |
| 2742b | Seq. ID No. 5739 | Seq. ID No. 5740 |
| 2743a | Seq. ID No. 5741 | Seq. ID No. 5742 |
| 2743b | Seq. ID No. 5743 | Seq. ID No. 5744 |
| 2744 | Seq. ID No. 5745 | Seq. ID No. 5746 |
| 2745a | Seq. ID No. 5747 | Seq. ID No. 5748 |
| 2745b | Seq. ID No. 5749 | Seq. ID No. 5750 |
| 2746 | Seq. ID No. 5751 | Seq. ID No. 5752 |
| 2747a | Seq. ID No. 5753 | Seq. ID No. 5754 |
| 2747b | Seq. ID No. 5755 | Seq. ID No. 5756 |
| 2748a | Seq. ID No. 5757 | Seq. ID No. 5758 |
| 2748b | Seq. ID No. 5759 | Seq. ID No. 5760 |
| 2748c | Seq. ID No. 5761 | Seq. ID No. 5762 |
| 2749d | Seq. ID No. 5769 | Seq. ID No. 5770 |
| 2749e | Seq. ID No. 5771 | Seq. ID No. 5772 |
| 2752 | Seq. ID No. 5777 | Seq. ID No. 5778 |
| 2753 | Seq. ID No. 5779 | Seq. ID No. 5780 |
| 2757b | Seq. ID No. 5783 | Seq. ID No. 5784 |
| 2758b | Seq. ID No. 5787 | Seq. ID No. 5788 |
| 2758d | Seq. ID No. 5791 | Seq. ID No. 5792 |
| 2759b | Seq. ID No. 5795 | Seq. ID No. 5796 |
| 2760b | Seq. ID No. 5799 | Seq. ID No. 5800 |
| 2760c | Seq. ID No. 5801 | Seq. ID No. 5802 |
| 2763b | Seq. ID No. 5807 | Seq. ID No. 5808 |
| 2763c | Seq. ID No. 5809 | Seq. ID No. 5810 |
| 2765b | Seq. ID No. 5813 | Seq. ID No. 5814 |
| 2765c | Seq. ID No. 5815 | Seq. ID No. 5816 |
| 2766b | Seq. ID No. 5819 | Seq. ID No. 5820 |
| 2768a | Seq. ID No. 5821 | Seq. ID No. 5822 |
| 2768b | Seq. ID No. 5823 | Seq. ID No. 5824 |
| 2768c | Seq. ID No. 5825 | Seq. ID No. 5826 |
| 2769a | Seq. ID No. 5827 | Seq. ID No. 5828 |
| 2770 | Seq. ID No. 5829 | Seq. ID No. 5830 |
| 2771a | Seq. ID No. 5831 | Seq. ID No. 5832 |
| 2771b | Seq. ID No. 5833 | Seq. ID No. 5834 |
| 2773 | Seq. ID No. 5835 | Seq. ID No. 5836 |
| 2774a | Seq. ID No. 5837 | Seq. ID No. 5838 |
| 2774b | Seq. ID No. 5839 | Seq. ID No. 5840 |
| 2774c | Seq. ID No. 5841 | Seq. ID No. 5842 |
| 2776b | Seq. ID No. 5845 | Seq. ID No. 5846 |
| 2777 | Seq. ID No. 5847 | Seq. ID No. 5848 |
| 2778 | Seq. ID No. 5849 | Seq. ID No. 5850 |
| 2779 | Seq. ID No. 5851 | Seq. ID No. 5852 |
| 2784 | Seq. ID No. 5855 | Seq. ID No. 5856 |
| 2785a | Seq. ID No. 5857 | Seq. ID No. 5858 |
| 2785b | Seq. ID No. 5859 | Seq. ID No. 5860 |
| 2786a | Seq. ID No. 5861 | Seq. ID No. 5862 |
| 2786b | Seq. ID No. 5863 | Seq. ID No. 5864 |
| 2786c | Seq. ID No. 5865 | Seq. ID No. 5866 |
| 2787b | Seq. ID No. 5869 | Seq. ID No. 5870 |
| 2787c | Seq. ID No. 5871 | Seq. ID No. 5872 |
| 2788b | Seq. ID No. 5873 | Seq. ID No. 5874 |
| 2789 | Seq. ID No. 5875 | Seq. ID No. 5876 |
| 2791 | Seq. ID No. 5879 | Seq. ID No. 5880 |
| 2793 | Seq. ID No. 5881 | Seq. ID No. 5882 |
| 2794 | Seq. ID No. 5883 | Seq. ID No. 5884 |
| 2799a | Seq. ID No. 5889 | Seq. ID No. 5890 |
| 2801b | Seq. ID No. 5895 | Seq. ID No. 5896 |
| 2804 | Seq. ID No. 5897 | Seq. ID No. 5898 |
| 2805b | Seq. ID No. 5901 | Seq. ID No. 5902 |
| 2809 | Seq. ID No. 5903 | Seq. ID No. 5904 |
| 2810d | Seq. ID No. 5911 | Seq. ID No. 5912 |
| 2812 | Seq. ID No. 5913 | Seq. ID No. 5914 |
| 2814 | Seq. ID No. 5915 | Seq. ID No. 5916 |
| 2815 | Seq. ID No. 5917 | Seq. ID No. 5918 |
| 2816 | Seq. ID No. 5919 | Seq. ID No. 5920 |
| 2818d | Seq. ID No. 5927 | Seq. ID No. 5928 |
| 2818e | Seq. ID No. 5929 | Seq. ID No. 5930 |
| 2820 | Seq. ID No. 5933 | Seq. ID No. 5934 |
| 2821a | Seq. ID No. 5935 | Seq. ID No. 5936 |
| 2821b | Seq. ID No. 5937 | Seq. ID No. 5938 |
| 2822b | Seq. ID No. 5941 | Seq. ID No. 5942 |
| 2824a | Seq. ID No. 5945 | Seq. ID No. 5946 |
| 2824b | Seq. ID No. 5947 | Seq. ID No. 5948 |
| 2829b | Seq. ID No. 5951 | Seq. ID No. 5952 |
| 2834a | Seq. ID No. 5959 | Seq. ID No. 5960 |
| 2834b | Seq. ID No. 5961 | Seq. ID No. 5962 |
| 2837a | Seq. ID No. 5963 | Seq. ID No. 5964 |
| 2837b | Seq. ID No. 5965 | Seq. ID No. 5966 |
| 2842a | Seq. ID No. 5967 | Seq. ID No. 5968 |
| 2842b | Seq. ID No. 5969 | Seq. ID No. 5970 |
| 2843a | Seq. ID No. 5971 | Seq. ID No. 5972 |
| 2843b | Seq. ID No. 5973 | Seq. ID No. 5974 |
| 2846a | Seq. ID No. 5977 | Seq. ID No. 5978 |
| 2846b | Seq. ID No. 5979 | Seq. ID No. 5980 |
| 2848 | Seq. ID No. 5981 | Seq. ID No. 5982 |
| 2851 | Seq. ID No. 5985 | Seq. ID No. 5986 |
| 2852 | Seq. ID No. 5987 | Seq. ID No. 5988 |
| 2853 | Seq. ID No. 5989 | Seq. ID No. 5990 |
| 2854a | Seq. ID No. 5991 | Seq. ID No. 5992 |
| 2854b | Seq. ID No. 5993 | Seq. ID No. 5994 |
| 2855 | Seq. ID No. 5995 | Seq. ID No. 5996 |
| 2856b | Seq. ID No. 5999 | Seq. ID No. 6000 |
| 2856c | Seq. ID No. 6001 | Seq. ID No. 6002 |
| 2857 | Seq. ID No. 6003 | Seq. ID No. 6004 |
| 2860b | Seq. ID No. 6009 | Seq. ID No. 6010 |
| 2860c | Seq. ID No. 6011 | Seq. ID No. 6012 |
| 2862 | Seq. ID No. 6013 | Seq. ID No. 6014 |
| 2863 | Seq. ID No. 6015 | Seq. ID No. 6016 |
| 2864 | Seq. ID No. 6017 | Seq. ID No. 6018 |
| 2869b | Seq. ID No. 6025 | Seq. ID No. 6026 |
| 2869c | Seq. ID No. 6027 | Seq. ID No. 6028 |
| 2871 | Seq. ID No. 6029 | Seq. ID No. 6030 |
| 2872 | Seq. ID No. 6031 | Seq. ID No. 6032 |
| 2875 | Seq. ID No. 6033 | Seq. ID No. 6034 |
| 2877 | Seq. ID No. 6035 | Seq. ID No. 6036 |
| 2879b | Seq. ID No. 6039 | Seq. ID No. 6040 |
| 2879c | Seq. ID No. 6041 | Seq. ID No. 6042 |
| 2881 | Seq. ID No. 6043 | Seq. ID No. 6044 |
| 2882 | Seq. ID No. 6045 | Seq. ID No. 6046 |
| 2883b | Seq. ID No. 6049 | Seq. ID No. 6050 |
| 2883c | Seq. ID No. 6051 | Seq. ID No. 6052 |
| 2883d | Seq. ID No. 6053 | Seq. ID No. 6054 |
| 2886a | Seq. ID No. 6055 | Seq. ID No. 6056 |
| 2886b | Seq. ID No. 6057 | Seq. ID No. 6058 |
| 2887b | Seq. ID No. 6061 | Seq. ID No. 6062 |
| 2888 | Seq. ID No. 6063 | Seq. ID No. 6064 |
| 2890 | Seq. ID No. 6065 | Seq. ID No. 6066 |
| 2891b | Seq. ID No. 6069 | Seq. ID No. 6070 |
| 2891c | Seq. ID No. 6071 | Seq. ID No. 6072 |
| 2893b | Seq. ID No. 6073 | Seq. ID No. 6074 |
| 2894b | Seq. ID No. 6077 | Seq. ID No. 6078 |
| 2894c | Seq. ID No. 6079 | Seq. ID No. 6080 |
| 2897b | Seq. ID No. 6085 | Seq. ID No. 6086 |
| 2900a | Seq. ID No. 6087 | Seq. ID No. 6088 |
| 2900b | Seq. ID No. 6089 | Seq. ID No. 6090 |
| 2901b | Seq. ID No. 6093 | Seq. ID No. 6094 |
| 2902 | Seq. ID No. 6095 | Seq. ID No. 6096 |
| 2905b | Seq. ID No. 6101 | Seq. ID No. 6102 |
| 2906 | Seq. ID No. 6103 | Seq. ID No. 6104 |
| 2909c | Seq. ID No. 6109 | Seq. ID No. 6110 |
| 2909d | Seq. ID No. 6111 | Seq. ID No. 6112 |
| 2913b | Seq. ID No. 6117 | Seq. ID No. 6118 |
| 2915b | Seq. ID No. 6121 | Seq. ID No. 6122 |
| 2915c | Seq. ID No. 6123 | Seq. ID No. 6124 |
| 2918 | Seq. ID No. 6129 | Seq. ID No. 6130 |
| 2920 | Seq. ID No. 6131 | Seq. ID No. 6132 |
| 2921 | Seq. ID No. 6133 | Seq. ID No. 6134 |
| 2922b | Seq. ID No. 6135 | Seq. ID No. 6136 |
| 2923a | Seq. ID No. 6137 | Seq. ID No. 6138 |
| 2923b | Seq. ID No. 6139 | Seq. ID No. 6140 |
| 2923c | Seq. ID No. 6141 | Seq. ID No. 6142 |
| 2925b | Seq. ID No. 6145 | Seq. ID No. 6146 |
| 2926c | Seq. ID No. 6151 | Seq. ID No. 6152 |
| 2928b | Seq. ID No. 6155 | Seq. ID No. 6156 |
| 2928c | Seq. ID No. 6157 | Seq. ID No. 6158 |
| 2929b | Seq. ID No. 6159 | Seq. ID No. 6160 |
| 2931c | Seq. ID No. 6165 | Seq. ID No. 6166 |
| 2933a | Seq. ID No. 6167 | Seq. ID No. 6168 |
| 2933b | Seq. ID No. 6169 | Seq. ID No. 6170 |
| 2934 | Seq. ID No. 6171 | Seq. ID No. 6172 |
| 2935b | Seq. ID No. 6175 | Seq. ID No. 6176 |
| 2936 | Seq. ID No. 6177 | Seq. ID No. 6178 |
| 2939b | Seq. ID No. 6181 | Seq. ID No. 6182 |
| 2941c | Seq. ID No. 6187 | Seq. ID No. 6188 |
| 2943c | Seq. ID No. 6193 | Seq. ID No. 6194 |
| 2943d | Seq. ID No. 6195 | Seq. ID No. 6196 |
| 2944b | Seq. ID No. 6197 | Seq. ID No. 6198 |
| 2945b | Seq. ID No. 6199 | Seq. ID No. 6200 |
| 2947 | Seq. ID No. 6201 | Seq. ID No. 6202 |
| 2948d | Seq. ID No. 6209 | Seq. ID No. 6210 |
| 2950b | Seq. ID No. 6213 | Seq. ID No. 6214 |
| 2951 | Seq. ID No. 6215 | Seq. ID No. 6216 |
| 2952 | Seq. ID No. 6217 | Seq. ID No. 6218 |
| 2954 | Seq. ID No. 6219 | Seq. ID No. 6220 |
| 2955f | Seq. ID No. 6231 | Seq. ID No. 6232 |
| 2955g | Seq. ID No. 6233 | Seq. ID No. 6234 |
| 2957 | Seq. ID No. 6235 | Seq. ID No. 6236 |
| 2958b | Seq. ID No. 6239 | Seq. ID No. 6240 |
| 2958c | Seq. ID No. 6241 | Seq. ID No. 6242 |
| 2959 | Seq. ID No. 6243 | Seq. ID No. 6244 |
| 2962b | Seq. ID No. 6249 | Seq. ID No. 6250 |
| 2965c | Seq. ID No. 6257 | Seq. ID No. 6258 |
| 2966 | Seq. ID No. 6259 | Seq. ID No. 6260 |
| 2967 | Seq. ID No. 6261 | Seq. ID No. 6262 |
| 2969 | Seq. ID No. 6263 | Seq. ID No. 6264 |
| 2970b | Seq. ID No. 6267 | Seq. ID No. 6268 |
| 2971a | Seq. ID No. 6269 | Seq. ID No. 6270 |
| 2971b | Seq. ID No. 6271 | Seq. ID No. 6272 |
| 2974b | Seq. ID No. 6275 | Seq. ID No. 6276 |
| 2975 | Seq. ID No. 6277 | Seq. ID No. 6278 |
| 2977a | Seq. ID No. 6279 | Seq. ID No. 6280 |
| 2977b | Seq. ID No. 6281 | Seq. ID No. 6282 |
| 2978a | Seq. ID No. 6283 | Seq. ID No. 6284 |
| 2978b | Seq. ID No. 6285 | Seq. ID No. 6286 |
| 2979 | Seq. ID No. 6287 | Seq. ID No. 6288 |
| 2980c | Seq. ID No. 6293 | Seq. ID No. 6294 |
| 2980d | Seq. ID No. 6295 | Seq. ID No. 6296 |
| 2980e | Seq. ID No. 6297 | Seq. ID No. 6298 |
| 2984 | Seq. ID No. 6299 | Seq. ID No. 6300 |
| 2986c | Seq. ID No. 6305 | Seq. ID No. 6306 |
| 2988b | Seq. ID No. 6309 | Seq. ID No. 6310 |
| 2988c | Seq. ID No. 6311 | Seq. ID No. 6312 |
| 2990 | Seq. ID No. 6315 | Seq. ID No. 6316 |
| 2991a | Seq. ID No. 6317 | Seq. ID No. 6318 |
| 2991b | Seq. ID No. 6319 | Seq. ID No. 6320 |
| 2991c | Seq. ID No. 6321 | Seq. ID No. 6322 |
| 2992 | Seq. ID No. 6323 | Seq. ID No. 6324 |
| 2993a | Seq. ID No. 6325 | Seq. ID No. 6326 |
| 2993b | Seq. ID No. 6327 | Seq. ID No. 6328 |
| 2995a | Seq. ID No. 6329 | Seq. ID No. 6330 |
| 2995b | Seq. ID No. 6331 | Seq. ID No. 6332 |
| 2998a | Seq. ID No. 6335 | Seq. ID No. 6336 |
| 2998b | Seq. ID No. 6337 | Seq. ID No. 6338 |
| 3001 | Seq. ID No. 6341 | Seq. ID No. 6342 |
| 3005 | Seq. ID No. 6345 | Seq. ID No. 6346 |
| 3008b | Seq. ID No. 6349 | Seq. ID No. 6350 |
| 3008c | Seq. ID No. 6351 | Seq. ID No. 6352 |
| 3008d | Seq. ID No. 6353 | Seq. ID No. 6354 |
| 3012 | Seq. ID No. 6359 | Seq. ID No. 6360 |
| 3015 | Seq. ID No. 6361 | Seq. ID No. 6362 |
| 3016c | Seq. ID No. 6367 | Seq. ID No. 6368 |
| 3017 | Seq. ID No. 6369 | Seq. ID No. 6370 |
| 3018a | Seq. ID No. 6371 | Seq. ID No. 6372 |
| 3018b | Seq. ID No. 6373 | Seq. ID No. 6374 |
| 3020 | Seq. ID No. 6375 | Seq. ID No. 6376 |
| 3021 | Seq. ID No. 6377 | Seq. ID No. 6378 |
| 3022 | Seq. ID No. 6379 | Seq. ID No. 6380 |
| 3023 | Seq. ID No. 6381 | Seq. ID No. 6382 |
| 3024b | Seq. ID No. 6385 | Seq. ID No. 6386 |
| 3026b | Seq. ID No. 6389 | Seq. ID No. 6390 |
| 3028b | Seq. ID No. 6393 | Seq. ID No. 6394 |
| 3028c | Seq. ID No. 6395 | Seq. ID No. 6396 |
| 3029b | Seq. ID No. 6399 | Seq. ID No. 6400 |
| 3033a | Seq. ID No. 6409 | Seq. ID No. 6410 |
| 3033b | Seq. ID No. 6411 | Seq. ID No. 6412 |
| 3035 | Seq. ID No. 6413 | Seq. ID No. 6414 |
| 3037b | Seq. ID No. 6417 | Seq. ID No. 6418 |
| 3040a | Seq. ID No. 6421 | Seq. ID No. 6422 |
| 3040b | Seq. ID No. 6423 | Seq. ID No. 6424 |
| 3042a | Seq. ID No. 6425 | Seq. ID No. 6426 |
| 3042b | Seq. ID No. 6427 | Seq. ID No. 6428 |
| 3043a | Seq. ID No. 6429 | Seq. ID No. 6430 |
| 3043b | Seq. ID No. 6431 | Seq. ID No. 6432 |
| 3049a | Seq. ID No. 6441 | Seq. ID No. 6442 |
| 3049b | Seq. ID No. 6443 | Seq. ID No. 6444 |
| 3049c | Seq. ID No. 6445 | Seq. ID No. 6446 |
| 3052 | Seq. ID No. 6451 | Seq. ID No. 6452 |
| 3054 | Seq. ID No. 6453 | Seq. ID No. 6454 |
| 3057 | Seq. ID No. 6459 | Seq. ID No. 6460 |
| 3059 | Seq. ID No. 6461 | Seq. ID No. 6462 |
| 3060 | Seq. ID No. 6463 | Seq. ID No. 6464 |
| 3061 | Seq. ID No. 6465 | Seq. ID No. 6466 |
| 3062 | Seq. ID No. 6467 | Seq. ID No. 6468 |
| 3063a | Seq. ID No. 6469 | Seq. ID No. 6470 |
| 3063b | Seq. ID No. 6471 | Seq. ID No. 6472 |
| 3064b | Seq. ID No. 6473 | Seq. ID No. 6474 |
| 3066 | Seq. ID No. 6479 | Seq. ID No. 6480 |
| 3068 | Seq. ID No. 6483 | Seq. ID No. 6484 |
| 3074 | Seq. ID No. 6493 | Seq. ID No. 6494 |
| 3075 | Seq. ID No. 6495 | Seq. ID No. 6496 |
| 3076 | Seq. ID No. 6497 | Seq. ID No. 6498 |
| 3077b | Seq. ID No. 6501 | Seq. ID No. 6502 |
| 3077c | Seq. ID No. 6503 | Seq. ID No. 6504 |
| 3078 | Seq. ID No. 6505 | Seq. ID No. 6506 |
| 3079 | Seq. ID No. 6507 | Seq. ID No. 6508 |
| 3081b | Seq. ID No. 6511 | Seq. ID No. 6512 |
| 3085 | Seq. ID No. 6517 | Seq. ID No. 6518 |
| 3087c | Seq. ID No. 6523 | Seq. ID No. 6524 |
| 3088 | Seq. ID No. 6525 | Seq. ID No. 6526 |
| 3092a | Seq. ID No. 6535 | Seq. ID No. 6536 |
| 3092b | Seq. ID No. 6537 | Seq. ID No. 6538 |
| 3095 | Seq. ID No. 6539 | Seq. ID No. 6540 |
| 3096a | Seq. ID No. 6541 | Seq. ID No. 6542 |
| 3096b | Seq. ID No. 6543 | Seq. ID No. 6544 |
| 3097 | Seq. ID No. 6545 | Seq. ID No. 6546 |
| 3098a | Seq. ID No. 6547 | Seq. ID No. 6548 |
| 3098b | Seq. ID No. 6549 | Seq. ID No. 6550 |
| 3098c | Seq. ID No. 6551 | Seq. ID No. 6552 |
| 3099 | Seq. ID No. 6553 | Seq. ID No. 6554 |
| 3100a | Seq. ID No. 6555 | Seq. ID No. 6556 |
| 3100b | Seq. ID No. 6557 | Seq. ID No. 6558 |
| 3101 | Seq. ID No. 6559 | Seq. ID No. 6560 |
| 3103b | Seq. ID No. 6563 | Seq. ID No. 6564 |
| 3107b | Seq. ID No. 6573 | Seq. ID No. 6574 |
| 3108a | Seq. ID No. 6575 | Seq. ID No. 6576 |
| 3108b | Seq. ID No. 6577 | Seq. ID No. 6578 |
| 3109 | Seq. ID No. 6579 | Seq. ID No. 6580 |
| 3110b | Seq. ID No. 6583 | Seq. ID No. 6584 |
| 3113 | Seq. ID No. 6585 | Seq. ID No. 6586 |
| 3116 | Seq. ID No. 6587 | Seq. ID No. 6588 |
| 3118b | Seq. ID No. 6591 | Seq. ID No. 6592 |
| 3119c | Seq. ID No. 6597 | Seq. ID No. 6598 |
| 3119e | Seq. ID No. 6601 | Seq. ID No. 6602 |
| 3119f | Seq. ID No. 6603 | Seq. ID No. 6604 |
| 3121 | Seq. ID No. 6605 | Seq. ID No. 6606 |
| 3122b | Seq. ID No. 6609 | Seq. ID No. 6610 |
| 3123a | Seq. ID No. 6611 | Seq. ID No. 6612 |
| 3123b | Seq. ID No. 6613 | Seq. ID No. 6614 |
| 3124 | Seq. ID No. 6615 | Seq. ID No. 6616 |
| 3126 | Seq. ID No. 6617 | Seq. ID No. 6618 |
| 3129a | Seq. ID No. 6619 | Seq. ID No. 6620 |
| 3129b | Seq. ID No. 6621 | Seq. ID No. 6622 |
| 3131 | Seq. ID No. 6623 | Seq. ID No. 6624 |
| 3134b | Seq. ID No. 6627 | Seq. ID No. 6628 |
| 3138 | Seq. ID No. 6629 | Seq. ID No. 6630 |
| 3140 | Seq. ID No. 6631 | Seq. ID No. 6632 |
| 3141 | Seq. ID No. 6633 | Seq. ID No. 6634 |
| 3145b | Seq. ID No. 6637 | Seq. ID No. 6638 |
| 3145c | Seq. ID No. 6639 | Seq. ID No. 6640 |
| 3147b | Seq. ID No. 6643 | Seq. ID No. 6644 |
| 3147c | Seq. ID No. 6645 | Seq. ID No. 6646 |
| 3150a | Seq. ID No. 6649 | Seq. ID No. 6650 |

[0123] Listed in Table 21, are 615 ORFs detected by another ORF finder program (Signal Search) of Applicant's assignee that searches for transmembrane regions between two Stop codons and a Start codon immediately upstream of the transmembrane region.

TABLE 21
SIGNAL SEARCH ORFS

| ORF Number | DNA SEQ ID Number | Protein SEQ ID Number |
|---|---|---|
| 4a | Seq. ID No. 7 | Seq. ID No. 8 |
| 4b | Seq. ID No. 9 | Seq. ID No. 10 |
| 23a | Seq. ID No. 33 | Seq. ID No. 34 |
| 38b | Seq. ID No. 47 | Seq. ID No. 48 |
| 44b | Seq. ID No. 67 | Seq. ID No. 68 |
| 51a | Seq. ID No. 85 | Seq. ID No. 86 |
| 51b | Seq. ID No. 87 | Seq. ID No. 88 |
| 66a | Seq. ID No. 123 | Seq. ID No. 124 |
| 73b | Seq. ID No. 133 | Seq. ID No. 134 |
| 80a | Seq. ID No. 141 | Seq. ID No. 142 |
| 86 | Seq. ID No. 159 | Seq. ID No. 160 |
| 87b | Seq. ID No. 163 | Seq. ID No. 164 |
| 99 | Seq. ID No. 191 | Seq. ID No. 192 |
| 109a | Seq. ID No. 209 | Seq. ID No. 210 |
| 109b | Seq. ID No. 211 | Seq. ID No. 212 |
| 109d | Seq. ID No. 215 | Seq. ID No. 216 |
| 111a | Seq. ID No. 217 | Seq. ID No. 218 |
| 114 | Seq. ID No. 225 | Seq. ID No. 226 |
| 124a | Seq. ID No. 235 | Seq. ID No. 236 |
| 124b | Seq. ID No. 237 | Seq. ID No. 238 |
| 129a | Seq. ID No. 249 | Seq. ID No. 250 |
| 129b | Seq. ID No. 251 | Seq. ID No. 252 |
| 132a | Seq. ID No. 255 | Seq. ID No. 256 |
| 138a | Seq. ID No. 271 | Seq. ID No. 272 |
| 143 | Seq. ID No. 277 | Seq. ID No. 278 |
| 145a | Seq. ID No. 285 | Seq. ID No. 286 |
| 145b | Seq. ID No. 287 | Seq. ID No. 288 |
| 145c | Seq. ID No. 289 | Seq. ID No. 290 |
| 162a | Seq. ID No. 327 | Seq. ID No. 328 |
| 162b | Seq. ID No. 329 | Seq. ID No. 330 |
| 180a | Seq. ID No. 373 | Seq. ID No. 374 |
| 180b | Seq. ID No. 375 | Seq. ID No. 376 |
| 201a | Seq. ID No. 419 | Seq. ID No. 420 |
| 239a | Seq. ID No. 487 | Seq. ID No. 488 |
| 245a | Seq. ID No. 497 | Seq. ID No. 498 |
| 245b | Seq. ID No. 499 | Seq. ID No. 500 |
| 246a | Seq. ID No. 503 | Seq. ID No. 504 |
| 246b | Seq. ID No. 505 | Seq. ID No. 506 |
| 248a | Seq. ID No. 509 | Seq. ID No. 510 |
| 248b | Seq. ID No. 511 | Seq. ID No. 512 |
| 249b | Seq. ID No. 515 | Seq. ID No. 516 |
| 255a | Seq. ID No. 525 | Seq. ID No. 526 |
| 255b | Seq. ID No. 527 | Seq. ID No. 528 |
| 263a | Seq. ID No. 545 | Seq. ID No. 546 |
| 273a | Seq. ID No. 567 | Seq. ID No. 568 |
| 273b | Seq. ID No. 569 | Seq. ID No. 570 |
| 277c | Seq. ID No. 575 | Seq. ID No. 576 |
| 279a | Seq. ID No. 577 | Seq. ID No. 578 |
| 279b | Seq. ID No. 579 | Seq. ID No. 580 |
| 283b | Seq. ID No. 593 | Seq. ID No. 594 |
| 297 | Seq. ID No. 617 | Seq. ID No. 618 |
| 311 | Seq. ID No. 637 | Seq. ID No. 638 |
| 313a | Seq. ID No. 639 | Seq. ID No. 640 |
| 313b | Seq. ID No. 641 | Seq. ID No. 642 |
| 313d | Seq. ID No. 645 | Seq. ID No. 646 |
| 317a | Seq. ID No. 653 | Seq. ID No. 654 |
| 317b | Seq. ID No. 655 | Seq. ID No. 656 |
| 318b | Seq. ID No. 659 | Seq. ID No. 660 |
| 321 | Seq. ID No. 669 | Seq. ID No. 670 |
| 324 | Seq. ID No. 675 | Seq. ID No. 676 |
| 327a | Seq. ID No. 677 | Seq. ID No. 678 |
| 327b | Seq. ID No. 679 | Seq. ID No. 680 |
| 342a | Seq. ID No. 715 | Seq. ID No. 716 |
| 342b | Seq. ID No. 717 | Seq. ID No. 718 |
| 342c | Seq. ID No. 719 | Seq. ID No. 720 |
| 342d | Seq. ID No. 721 | Seq. ID No. 722 |
| 342e | Seq. ID No. 723 | Seq. ID No. 724 |
| 349c | Seq. ID No. 747 | Seq. ID No. 748 |
| 350b | Seq. ID No. 751 | Seq. ID No. 752 |
| 352a | Seq. ID No. 755 | Seq. ID No. 756 |
| 352b | Seq. ID No. 757 | Seq. ID No. 758 |
| 352c | Seq. ID No. 759 | Seq. ID No. 760 |
| 354a | Seq. ID No. 761 | Seq. ID No. 762 |
| 354b | Seq. ID No. 763 | Seq. ID No. 764 |
| 356a | Seq. ID No. 769 | Seq. ID No. 770 |
| 358a | Seq. ID No. 777 | Seq. ID No. 778 |
| 358b | Seq. ID No. 779 | Seq. ID No. 780 |
| 372d | Seq. ID No. 807 | Seq. ID No. 808 |
| 374 | Seq. ID No. 809 | Seq. ID No. 810 |
| 382b | Seq. ID No. 819 | Seq. ID No. 820 |
| 384a | Seq. ID No. 825 | Seq. ID No. 826 |
| 403b | Seq. ID No. 863 | Seq. ID No. 864 |
| 418a | Seq. ID No. 893 | Seq. ID No. 894 |
| 419c | Seq. ID No. 901 | Seq. ID No. 902 |
| 431 | Seq. ID No. 935 | Seq. ID No. 936 |
| 437c | Seq. ID No. 943 | Seq. ID No. 944 |
| 441b | Seq. ID No. 955 | Seq. ID No. 956 |
| 448 | Seq. ID No. 967 | Seq. ID No. 968 |
| 452b | Seq. ID No. 979 | Seq. ID No. 980 |
| 462 | Seq. ID No. 1005 | Seq. ID No. 1006 |
| 463b | Seq. ID No. 1009 | Seq. ID No. 1010 |
| 464a | Seq. ID No. 1011 | Seq. ID No. 1012 |
| 464b | Seq. ID No. 1013 | Seq. ID No. 1014 |
| 464c | Seq. ID No. 1015 | Seq. ID No. 1016 |
| 465b | Seq. ID No. 1019 | Seq. ID No. 1020 |
| 472a | Seq. ID No. 1029 | Seq. ID No. 1030 |
| 472b | Seq. ID No. 1031 | Seq. ID No. 1032 |
| 472c | Seq. ID No. 1033 | Seq. ID No. 1034 |
| 472e | Seq. ID No. 1037 | Seq. ID No. 1038 |
| 472f | Seq. ID No. 1039 | Seq. ID No. 1040 |
| 476 | Seq. ID No. 1045 | Seq. ID No. 1046 |
| 480a | Seq. ID No. 1055 | Seq. ID No. 1056 |
| 492 | Seq. ID No. 1075 | Seq. ID No. 1076 |
| 507a | Seq. ID No. 1105 | Seq. ID No. 1106 |
| 521b | Seq. ID No. 1131 | Seq. ID No. 1132 |
| 524a | Seq. ID No. 1135 | Seq. ID No. 1136 |
| 524b | Seq. ID No. 1137 | Seq. ID No. 1138 |
| 541a | Seq. ID No. 1165 | Seq. ID No. 1166 |
| 541b | Seq. ID No. 1167 | Seq. ID No. 1168 |
| 541c | Seq. ID No. 1169 | Seq. ID No. 1170 |
| 545a | Seq. ID No. 1183 | Seq. ID No. 1184 |
| 546c | Seq. ID No. 1193 | Seq. ID No. 1194 |
| 547b | Seq. ID No. 1197 | Seq. ID No. 1198 |
| 556 | Seq. ID No. 1213 | Seq. ID No. 1214 |
| 561 | Seq. ID No. 1223 | Seq. ID No. 1224 |
| 564a | Seq. ID No. 1227 | Seq. ID No. 1228 |
| 564b | Seq. ID No. 1229 | Seq. ID No. 1230 |
| 570b | Seq. ID No. 1237 | Seq. ID No. 1238 |
| 576a | Seq. ID No. 1243 | Seq. ID No. 1244 |
| 587a | Seq. ID No. 1265 | Seq. ID No. 1266 |
| 587b | Seq. ID No. 1267 | Seq. ID No. 1268 |
| 587c | Seq. ID No. 1269 | Seq. ID No. 1270 |
| 587d | Seq. ID No. 1271 | Seq. ID No. 1272 |
| 595a | Seq. ID No. 1283 | Seq. ID No. 1284 |
| 596a | Seq. ID No. 1287 | Seq. ID No. 1288 |
| 596c | Seq. ID No. 1291 | Seq. ID No. 1292 |
| 598b | Seq. ID No. 1297 | Seq. ID No. 1298 |
| 600b | Seq. ID No. 1305 | Seq. ID No. 1306 |
| 609a | Seq. ID No. 1315 | Seq. ID No. 1316 |
| 613a | Seq. ID No. 1325 | Seq. ID No. 1326 |
| 613b | Seq. ID No. 1327 | Seq. ID No. 1328 |
| 613c | Seq. ID No. 1329 | Seq. ID No. 1330 |
| 613d | Seq. ID No. 1331 | Seq. ID No. 1332 |
| 619a | Seq. ID No. 1341 | Seq. ID No. 1342 |
| 624c | Seq. ID No. 1353 | Seq. ID No. 1354 |
| 631c | Seq. ID No. 1367 | Seq. ID No. 1368 |
| 645 | Seq. ID No. 1401 | Seq. ID No. 1402 |
| 665 | Seq. ID No. 1429 | Seq. ID No. 1430 |
| 674a | Seq. ID No. 1435 | Seq. ID No. 1436 |
| 679a | Seq. ID No. 1445 | Seq. ID No. 1446 |
| 700a | Seq. ID No. 1481 | Seq. ID No. 1482 |
| 722a | Seq. ID No. 1513 | Seq. ID No. 1514 |
| 722b | Seq. ID No. 1515 | Seq. ID No. 1516 |
| 722c | Seq. ID No. 1517 | Seq. ID No. 1518 |
| 728a | Seq. ID No. 1529 | Seq. ID No. 1530 |
| 730a | Seq. ID No. 1533 | Seq. ID No. 1534 |
| 730b | Seq. ID No. 1535 | Seq. ID No. 1536 |
| 738a | Seq. ID No. 1545 | Seq. ID No. 1546 |
| 738b | Seq. ID No. 1547 | Seq. ID No. 1548 |
| 739 | Seq. ID No. 1551 | Seq. ID No. 1552 |
| 743a | Seq. ID No. 1559 | Seq. ID No. 1560 |
| 744 | Seq. ID No. 1563 | Seq. ID No. 1564 |
| 746b | Seq. ID No. 1571 | Seq. ID No. 1572 |
| 749 | Seq. ID No. 1579 | Seq. ID No. 1580 |
| 754a | Seq. ID No. 1583 | Seq. ID No. 1584 |
| 754b | Seq. ID No. 1585 | Seq. ID No. 1586 |
| 772a | Seq. ID No. 1621 | Seq. ID No. 1622 |
| 779 | Seq. ID No. 1633 | Seq. ID No. 1634 |
| 786b | Seq. ID No. 1643 | Seq. ID No. 1644 |
| 788a | Seq. ID No. 1645 | Seq. ID No. 1646 |
| 788b | Seq. ID No. 1647 | Seq. ID No. 1648 |
| 789a | Seq. ID No. 1649 | Seq. ID No. 1650 |
| 789c | Seq. ID No. 1653 | Seq. ID No. 1654 |
| 799a | Seq. ID No. 1671 | Seq. ID No. 1672 |
| 799b | Seq. ID No. 1673 | Seq. ID No. 1674 |
| 799d | Seq. ID No. 1677 | Seq. ID No. 1678 |
| 799f | Seq. ID No. 1681 | Seq. ID No. 1682 |
| 826 | Seq. ID No. 1707 | Seq. ID No. 1708 |
| 837a | Seq. ID No. 1731 | Seq. ID No. 1732 |
| 837b | Seq. ID No. 1733 | Seq. ID No. 1734 |
| 843 | Seq. ID No. 1737 | Seq. ID No. 1738 |
| 853a | Seq. ID No. 1753 | Seq. ID No. 1754 |
| 853c | Seq. ID No. 1757 | Seq. ID No. 1758 |
| 859a | Seq. ID No. 1765 | Seq. ID No. 1766 |
| 859b | Seq. ID No. 1767 | Seq. ID No. 1768 |
| 868a | Seq. ID No. 1787 | Seq. ID No. 1788 |
| 870 | Seq. ID No. 1791 | Seq. ID No. 1792 |
| 873c | Seq. ID No. 1797 | Seq. ID No. 1798 |
| 876 | Seq. ID No. 1805 | Seq. ID No. 1806 |
| 885 | Seq. ID No. 1819 | Seq. ID No. 1820 |
| 886 | Seq. ID No. 1821 | Seq. ID No. 1822 |
| 887 | Seq. ID No. 1823 | Seq. ID No. 1824 |
| 908a | Seq. ID No. 1839 | Seq. ID No. 1840 |
| 929a | Seq. ID No. 1869 | Seq. ID No. 1870 |
| 931 | Seq. ID No. 1875 | Seq. ID No. 1876 |
| 939a | Seq. ID No. 1891 | Seq. ID No. 1892 |
| 939b | Seq. ID No. 1893 | Seq. ID No. 1894 |
| 939c | Seq. ID No. 1895 | Seq. ID No. 1896 |
| 952b | Seq. ID No. 1923 | Seq. ID No. 1924 |
| 955a | Seq. ID No. 1927 | Seq. ID No. 1928 |
| 977a | Seq. ID No. 1969 | Seq. ID No. 1970 |
| 981a | Seq. ID No. 1981 | Seq. ID No. 1982 |
| 987 | Seq. ID No. 1991 | Seq. ID No. 1992 |
| 988a | Seq. ID No. 1993 | Seq. ID No. 1994 |
| 998a | Seq. ID No. 2013 | Seq. ID No. 2014 |
| 999a | Seq. ID No. 2017 | Seq. ID No. 2018 |
| 1003b | Seq. ID No. 2027 | Seq. ID No. 2028 |
| 1006a | Seq. ID No. 2033 | Seq. ID No. 2034 |
| 1013a | Seq. ID No. 2041 | Seq. ID No. 2042 |
| 1017a | Seq. ID No. 2049 | Seq. ID No. 2050 |
| 1017c | Seq. ID No. 2053 | Seq. ID No. 2054 |
| 1036a | Seq. ID No. 2087 | Seq. ID No. 2088 |
| 1036b | Seq. ID No. 2089 | Seq. ID No. 2090 |
| 1044a | Seq. ID No. 2105 | Seq. ID No. 2106 |
| 1047b | Seq. ID No. 2115 | Seq. ID No. 2116 |
| 1050a | Seq. ID No. 2121 | Seq. ID No. 2122 |
| 1050d | Seq. ID No. 2127 | Seq. ID No. 2128 |
| 1065b | Seq. ID No. 2151 | Seq. ID No. 2152 |
| 1067 | Seq. ID No. 2159 | Seq. ID No. 2160 |
| 1077a | Seq. ID No. 2171 | Seq. ID No. 2172 |
| 1077b | Seq. ID No. 2173 | Seq. ID No. 2174 |
| 1077d | Seq. ID No. 2177 | Seq. ID No. 2178 |
| 1081a | Seq. ID No. 2187 | Seq. ID No. 2188 |
| 1111a | Seq. ID No. 2237 | Seq. ID No. 2238 |
| 1111b | Seq. ID No. 2239 | Seq. ID No. 2240 |
| 1125 | Seq. ID No. 2245 | Seq. ID No. 2246 |
| 1126b | Seq. ID No. 2249 | Seq. ID No. 2250 |
| 1140a | Seq. ID No. 2271 | Seq. ID No. 2272 |
| 1144a | Seq. ID No. 2283 | Seq. ID No. 2284 |
| 1146a | Seq. ID No. 2289 | Seq. ID No. 2290 |
| 1146b | Seq. ID No. 2291 | Seq. ID No. 2292 |
| 1146c | Seq. ID No. 2293 | Seq. ID No. 2294 |
| 1146d | Seq. ID No. 2295 | Seq. ID No. 2296 |
| 1152a | Seq. ID No. 2303 | Seq. ID No. 2304 |
| 1152b | Seq. ID No. 2305 | Seq. ID No. 2306 |
| 1152c | Seq. ID No. 2307 | Seq. ID No. 2308 |
| 1155a | Seq. ID No. 2317 | Seq. ID No. 2318 |
| 1155b | Seq. ID No. 2319 | Seq. ID No. 2320 |
| 1155c | Seq. ID No. 2321 | Seq. ID No. 2322 |
| 1155d | Seq. ID No. 2323 | Seq. ID No. 2324 |
| 1155e | Seq. ID No. 2325 | Seq. ID No. 2326 |
| 1155f | Seq. ID No. 2327 | Seq. ID No. 2328 |
| 1158b | Seq. ID No. 2333 | Seq. ID No. 2334 |
| 1165 | Seq. ID No. 2343 | Seq. ID No. 2344 |
| 1167a | Seq. ID No. 2347 | Seq. ID No. 2348 |
| 1167b | Seq. ID No. 2349 | Seq. ID No. 2350 |
| 1168 | Seq. ID No. 2351 | Seq. ID No. 2352 |
| 1169a | Seq. ID No. 2353 | Seq. ID No. 2354 |
| 1169b | Seq. ID No. 2355 | Seq. ID No. 2356 |
| 1169c | Seq. ID No. 2357 | Seq. ID No. 2358 |
| 1172 | Seq. ID No. 2365 | Seq. ID No. 2366 |
| 1180d | Seq. ID No. 2389 | Seq. ID No. 2390 |
| 1180e | Seq. ID No. 2391 | Seq. ID No. 2392 |
| 1186a | Seq. ID No. 2407 | Seq. ID No. 2408 |
| 1192a | Seq. ID No. 2419 | Seq. ID No. 2420 |
| 1192b | Seq. ID No. 2421 | Seq. ID No. 2422 |
| 1196b | Seq. ID No. 2427 | Seq. ID No. 2428 |
| 1197 | Seq. ID No. 2429 | Seq. ID No. 2430 |
| 1199a | Seq. ID No. 2433 | Seq. ID No. 2434 |
| 1207 | Seq. ID No. 2449 | Seq. ID No. 2450 |
| 1212 | Seq. ID No. 2459 | Seq. ID No. 2460 |
| 1224b | Seq. ID No. 2489 | Seq. ID No. 2490 |
| 1228a | Seq. ID No. 2497 | Seq. ID No. 2498 |
| 1229c | Seq. ID No. 2503 | Seq. ID No. 2504 |
| 1231 | Seq. ID No. 2507 | Seq. ID No. 2508 |
| 1234a | Seq. ID No. 2515 | Seq. ID No. 2516 |
| 1236a | Seq. ID No. 2523 | Seq. ID No. 2524 |
| 1237 | Seq. ID No. 2525 | Seq. ID No. 2526 |
| 1241a | Seq. ID No. 2531 | Seq. ID No. 2532 |
| 1241c | Seq. ID No. 2535 | Seq. ID No. 2536 |
| 1243 | Seq. ID No. 2537 | Seq. ID No. 2538 |
| 1245a | Seq. ID No. 2541 | Seq. ID No. 2542 |
| 1245b | Seq. ID No. 2543 | Seq. ID No. 2544 |
| 1245c | Seq. ID No. 2545 | Seq. ID No. 2546 |
| 1250a | Seq. ID No. 2555 | Seq. ID No. 2556 |
| 1250b | Seq. ID No. 2557 | Seq. ID No. 2558 |
| 1253a | Seq. ID No. 2569 | Seq. ID No. 2570 |
| 1253b | Seq. ID No. 2571 | Seq. ID No. 2572 |
| 1258a | Seq. ID No. 2583 | Seq. ID No. 2584 |
| 1260 | Seq. ID No. 2591 | Seq. ID No. 2592 |
| 1266a | Seq. ID No. 2597 | Seq. ID No. 2598 |
| 1266b | Seq. ID No. 2599 | Seq. ID No. 2600 |
| 1267a | Seq. ID No. 2601 | Seq. ID No. 2602 |
| 1268b | Seq. ID No. 2607 | Seq. ID No. 2608 |
| 1270 | Seq. ID No. 2611 | Seq. ID No. 2612 |
| 1275a | Seq. ID No. 2621 | Seq. ID No. 2622 |
| 1278b | Seq. ID No. 2629 | Seq. ID No. 2630 |
| 1288 | Seq. ID No. 2651 | Seq. ID No. 2652 |
| 1308a | Seq. ID No. 2679 | Seq. ID No. 2680 |
| 1315 | Seq. ID No. 2693 | Seq. ID No. 2694 |
| 1319a | Seq. ID No. 2701 | Seq. ID No. 2702 |
| 1319b | Seq. ID No. 2703 | Seq. ID No. 2704 |
| 1320a | Seq. ID No. 2705 | Seq. ID No. 2706 |
| 1320b | Seq. ID No. 2707 | Seq. ID No. 2708 |
| 1334b | Seq. ID No. 2731 | Seq. ID No. 2732 |
| 1335a | Seq. ID No. 2733 | Seq. ID No. 2734 |
| 1365b | Seq. ID No. 2783 | Seq. ID No. 2784 |
| 1366a | Seq. ID No. 2785 | Seq. ID No. 2786 |
| 1381b | Seq. ID No. 2813 | Seq. ID No. 2814 |
| 1382 | Seq. ID No. 2815 | Seq. ID No. 2816 |
| 1384c | Seq. ID No. 2823 | Seq. ID No. 2824 |
| 1393a | Seq. ID No. 2835 | Seq. ID No. 2836 |
| 1393b | Seq. ID No. 2837 | Seq. ID No. 2838 |
| 1393d | Seq. ID No. 2841 | Seq. ID No. 2842 |
| 1399a | Seq. ID No. 2853 | Seq. ID No. 2854 |
| 1411a | Seq. ID No. 2873 | Seq. ID No. 2874 |
| 1411b | Seq. ID No. 2875 | Seq. ID No. 2876 |
| 1412b | Seq. ID No. 2881 | Seq. ID No. 2882 |
| 1426a | Seq. ID No. 2905 | Seq. ID No. 2906 |
| 1438 | Seq. ID No. 2935 | Seq. ID No. 2936 |
| 1439a | Seq. ID No. 2937 | Seq. ID No. 2938 |
| 1439b | Seq. ID No. 2939 | Seq. ID No. 2940 |
| 1439c | Seq. ID No. 2941 | Seq. ID No. 2942 |
| 1440a | Seq. ID No. 2947 | Seq. ID No. 2948 |
| 1440b | Seq. ID No. 2949 | Seq. ID No. 2950 |
| 1447a | Seq. ID No. 2969 | Seq. ID No. 2970 |
| 1448 | Seq. ID No. 2973 | Seq. ID No. 2974 |
| 1449b | Seq. ID No. 2977 | Seq. ID No. 2978 |
| 1452a | Seq. ID No. 2981 | Seq. ID No. 2982 |
| 1454 | Seq. ID No. 2987 | Seq. ID No. 2988 |
| 1455b | Seq. ID No. 2991 | Seq. ID No. 2992 |
| 1457a | Seq. ID No. 2995 | Seq. ID No. 2996 |
| 1457b | Seq. ID No. 2997 | Seq. ID No. 2998 |
| 1462b | Seq. ID No. 3005 | Seq. ID No. 3006 |
| 1463a | Seq. ID No. 3007 | Seq. ID No. 3008 |
| 1466a | Seq. ID No. 3013 | Seq. ID No. 3014 |
| 1469a | Seq. ID No. 3023 | Seq. ID No. 3024 |
| 1469b | Seq. ID No. 3025 | Seq. ID No. 3026 |
| 1469c | Seq. ID No. 3027 | Seq. ID No. 3028 |
| 1470a | Seq. ID No. 3029 | Seq. ID No. 3030 |
| 1470b | Seq. ID No. 3031 | Seq. ID No. 3032 |
| 1475 | Seq. ID No. 3043 | Seq. ID No. 3044 |
| 1479c | Seq. ID No. 3055 | Seq. ID No. 3056 |
| 1484a | Seq. ID No. 3063 | Seq. ID No. 3064 |
| 1487 | Seq. ID No. 3071 | Seq. ID No. 3072 |
| 1488a | Seq. ID No. 3073 | Seq. ID No. 3074 |
| 1488b | Seq. ID No. 3075 | Seq. ID No. 3076 |
| 1488c | Seq. ID No. 3077 | Seq. ID No. 3078 |
| 1507c | Seq. ID No. 3123 | Seq. ID No. 3124 |
| 1517a | Seq. ID No. 3145 | Seq. ID No. 3146 |
| 1520 | Seq. ID No. 3155 | Seq. ID No. 3156 |
| 1522 | Seq. ID No. 3157 | Seq. ID No. 3158 |
| 1530a | Seq. ID No. 3163 | Seq. ID No. 3164 |
| 1543 | Seq. ID No. 3183 | Seq. ID No. 3184 |
| 1552 | Seq. ID No. 3193 | Seq. ID No. 3194 |
| 1554b | Seq. ID No. 3201 | Seq. ID No. 3202 |
| 1557a | Seq. ID No. 3213 | Seq. ID No. 3214 |
| 1557b | Seq. ID No. 3215 | Seq. ID No. 3216 |
| 1557c | Seq. ID No. 3217 | Seq. ID No. 3218 |
| 1559a | Seq. ID No. 3219 | Seq. ID No. 3220 |
| 1572a | Seq. ID No. 3241 | Seq. ID No. 3242 |
| 1572b | Seq. ID No. 3243 | Seq. ID No. 3244 |
| 1572c | Seq. ID No. 3245 | Seq. ID No. 3246 |
| 1572e | Seq. ID No. 3249 | Seq. ID No. 3250 |
| 1577b | Seq. ID No. 3257 | Seq. ID No. 3258 |
| 1580a | Seq. ID No. 3261 | Seq. ID No. 3262 |
| 1582b | Seq. ID No. 3269 | Seq. ID No. 3270 |
| 1585a | Seq. ID No. 3275 | Seq. ID No. 3276 |
| 1594a | Seq. ID No. 3297 | Seq. ID No. 3298 |
| 1606a | Seq. ID No. 3317 | Seq. ID No. 3318 |
| 1607b | Seq. ID No. 3323 | Seq. ID No. 3324 |
| 1619 | Seq. ID No. 3337 | Seq. ID No. 3338 |
| 1621 | Seq. ID No. 3339 | Seq. ID No. 3340 |
| 1624 | Seq. ID No. 3349 | Seq. ID No. 3350 |
| 1625a | Seq. ID No. 3351 | Seq. ID No. 3352 |
| 1625b | Seq. ID No. 3353 | Seq. ID No. 3354 |
| 1626a | Seq. ID No. 3357 | Seq. ID No. 3358 |
| 1626b | Seq. ID No. 3359 | Seq. ID No. 3360 |
| 1634c | Seq. ID No. 3377 | Seq. ID No. 3378 |
| 1646a | Seq. ID No. 3389 | Seq. ID No. 3390 |
| 1646b | Seq. ID No. 3391 | Seq. ID No. 3392 |
| 1646d | Seq. ID No. 3395 | Seq. ID No. 3396 |
| 1649a | Seq. ID No. 3405 | Seq. ID No. 3406 |
| 1659a | Seq. ID No. 3421 | Seq. ID No. 3422 |
| 1659c | Seq. ID No. 3425 | Seq. ID No. 3426 |
| 1673a | Seq. ID No. 3449 | Seq. ID No. 3450 |
| 1673b | Seq. ID No. 3451 | Seq. ID No. 3452 |
| 1673c | Seq. ID No. 3453 | Seq. ID No. 3454 |
| 1673d | Seq. ID No. 3455 | Seq. ID No. 3456 |
| 1673e | Seq. ID No. 3457 | Seq. ID No. 3458 |
| 1675a | Seq. ID No. 3463 | Seq. ID No. 3464 |
| 1683a | Seq. ID No. 3481 | Seq. ID No. 3482 |
| 1688a | Seq. ID No. 3491 | Seq. ID No. 3492 |
| 1688b | Seq. ID No. 3493 | Seq. ID No. 3494 |
| 1690a | Seq. ID No. 3503 | Seq. ID No. 3504 |
| 1690b | Seq. ID No. 3505 | Seq. ID No. 3506 |
| 1699a | Seq. ID No. 3527 | Seq. ID No. 3528 |
| 1735a | Seq. ID No. 3593 | Seq. ID No. 3594 |
| 1735b | Seq. ID No. 3595 | Seq. ID No. 3596 |
| 1749a | Seq. ID No. 3621 | Seq. ID No. 3622 |
| 1750a | Seq. ID No. 3625 | Seq. ID No. 3626 |
| 1756b | Seq. ID No. 3635 | Seq. ID No. 3636 |
| 1778b | Seq. ID No. 3679 | Seq. ID No. 3680 |
| 1798a | Seq. ID No. 3723 | Seq. ID No. 3724 |
| 1798c | Seq. ID No. 3727 | Seq. ID No. 3728 |
| 1806b | Seq. ID No. 3745 | Seq. ID No. 3746 |
| 1808a | Seq. ID No. 3753 | Seq. ID No. 3754 |
| 1808b | Seq. ID No. 3755 | Seq. ID No. 3756 |
| 1808c | Seq. ID No. 3757 | Seq. ID No. 3758 |
| 1809a | Seq. ID No. 3761 | Seq. ID No. 3762 |
| 1809b | Seq. ID No. 3763 | Seq. ID No. 3764 |
| 1809c | Seq. ID No. 3765 | Seq. ID No. 3766 |
| 1812b | Seq. ID No. 3783 | Seq. ID No. 3784 |
| 1816a | Seq. ID No. 3793 | Seq. ID No. 3794 |
| 1817a | Seq. ID No. 3799 | Seq. ID No. 3800 |
| 1825 | Seq. ID No. 3813 | Seq. ID No. 3814 |
| 1838a | Seq. ID No. 3837 | Seq. ID No. 3838 |
| 1838b | Seq. ID No. 3839 | Seq. ID No. 3840 |
| 1842a | Seq. ID No. 3849 | Seq. ID No. 3850 |
| 1842b | Seq. ID No. 3851 | Seq. ID No. 3852 |
| 1842c | Seq. ID No. 3853 | Seq. ID No. 3854 |
| 1845a | Seq. ID No. 3859 | Seq. ID No. 3860 |
| 1845b | Seq. ID No. 3861 | Seq. ID No. 3862 |
| 1845c | Seq. ID No. 3863 | Seq. ID No. 3864 |
| 1848a | Seq. ID No. 3865 | Seq. ID No. 3866 |
| 1854a | Seq. ID No. 3879 | Seq. ID No. 3880 |
| 1857b | Seq. ID No. 3889 | Seq. ID No. 3890 |
| 1857c | Seq. ID No. 3891 | Seq. ID No. 3892 |
| 1862a | Seq. ID No. 3903 | Seq. ID No. 3904 |
| 1873c | Seq. ID No. 3925 | Seq. ID No. 3926 |
| 1896a | Seq. ID No. 3963 | Seq. ID No. 3964 |
| 1898a | Seq. ID No. 3973 | Seq. ID No. 3974 |
| 1898b | Seq. ID No. 3975 | Seq. ID No. 3976 |
| 1919a | Seq. ID No. 4005 | Seq. ID No. 4006 |
| 1931a | Seq. ID No. 4025 | Seq. ID No. 4026 |
| 1931b | Seq. ID No. 4027 | Seq. ID No. 4028 |
| 1936 | Seq. ID No. 4039 | Seq. ID No. 4040 |
| 1937a | Seq. ID No. 4041 | Seq. ID No. 4042 |
| 1937b | Seq. ID No. 4043 | Seq. ID No. 4044 |
| 1937c | Seq. ID No. 4045 | Seq. ID No. 4046 |
| 1937d | Seq. ID No. 4047 | Seq. ID No. 4048 |
| 1941b | Seq. ID No. 4061 | Seq. ID No. 4062 |
| 1946a | Seq. ID No. 4071 | Seq. ID No. 4072 |
| 1946b | Seq. ID No. 4073 | Seq. ID No. 4074 |
| 1950 | Seq. ID No. 4079 | Seq. ID No. 4080 |
| 1951a | Seq. ID No. 4081 | Seq. ID No. 4082 |
| 1951b | Seq. ID No. 4083 | Seq. ID No. 4084 |
| 1958a | Seq. ID No. 4101 | Seq. ID No. 4102 |
| 1958b | Seq. ID No. 4103 | Seq. ID No. 4104 |
| 1960c | Seq. ID No. 4111 | Seq. ID No. 4112 |
| 1970b | Seq. ID No. 4133 | Seq. ID No. 4134 |
| 1973 | Seq. ID No. 4137 | Seq. ID No. 4138 |
| 1976 | Seq. ID No. 4139 | Seq. ID No. 4140 |
| 1977c | Seq. ID No. 4145 | Seq. ID No. 4146 |
| 1980a | Seq. ID No. 4151 | Seq. ID No. 4152 |
| 2016a | Seq. ID No. 4221 | Seq. ID No. 4222 |
| 2016b | Seq. ID No. 4223 | Seq. ID No. 4224 |
| 2016c | Seq. ID No. 4225 | Seq. ID No. 4226 |
| 2016d | Seq. ID No. 4227 | Seq. ID No. 4228 |
| 2016f | Seq. ID No. 4231 | Seq. ID No. 4232 |
| 2023a | Seq. ID No. 4241 | Seq. ID No. 4242 |
| 2024b | Seq. ID No. 4247 | Seq. ID No. 4248 |
| 2025 | Seq. ID No. 4253 | Seq. ID No. 4254 |
| 2030a | Seq. ID No. 4257 | Seq. ID No. 4258 |
| 2030c | Seq. ID No. 4261 | Seq. ID No. 4262 |
| 2056 | Seq. ID No. 4307 | Seq. ID No. 4308 |
| 2059a | Seq. ID No. 4311 | Seq. ID No. 4312 |
| 2059b | Seq. ID No. 4313 | Seq. ID No. 4314 |
| 2074b | Seq. ID No. 4343 | Seq. ID No. 4344 |
| 2092 | Seq. ID No. 4379 | Seq. ID No. 4380 |
| 2096a | Seq. ID No. 4385 | Seq. ID No. 4386 |
| 2096c | Seq. ID No. 4389 | Seq. ID No. 4390 |
| 2120b | Seq. ID No. 4439 | Seq. ID No. 4440 |
| 2140a | Seq. ID No. 4469 | Seq. ID No. 4470 |
| 2142a | Seq. ID No. 4473 | Seq. ID No. 4474 |
| 2146 | Seq. ID No. 4481 | Seq. ID No. 4482 |
| 2147a | Seq. ID No. 4483 | Seq. ID No. 4484 |
| 2147b | Seq. ID No. 4485 | Seq. ID No. 4486 |
| 2150c | Seq. ID No. 4497 | Seq. ID No. 4498 |
| 2159b | Seq. ID No. 4515 | Seq. ID No. 4516 |
| 2165 | Seq. ID No. 4533 | Seq. ID No. 4534 |
| 2190a | Seq. ID No. 4587 | Seq. ID No. 4588 |
| 2219a | Seq. ID No. 4639 | Seq. ID No. 4640 |
| 2219c | Seq. ID No. 4643 | Seq. ID No. 4644 |
| 2236a | Seq. ID No. 4681 | Seq. ID No. 4682 |
| 2249 | Seq. ID No. 4705 | Seq. ID No. 4706 |
| 2253a | Seq. ID No. 4707 | Seq. ID No. 4708 |
| 2253b | Seq. ID No. 4709 | Seq. ID No. 4710 |
| 2253c | Seq. ID No. 4711 | Seq. ID No. 4712 |
| 2255a | Seq. ID No. 4715 | Seq. ID No. 4716 |
| 2255b | Seq. ID No. 4717 | Seq. ID No. 4718 |
| 2264b | Seq. ID No. 4737 | Seq. ID No. 4738 |
| 2276a | Seq. ID No. 4759 | Seq. ID No. 4760 |
| 2300 | Seq. ID No. 4813 | Seq. ID No. 4814 |
| 2308 | Seq. ID No. 4827 | Seq. ID No. 4828 |
| 2329a | Seq. ID No. 4869 | Seq. ID No. 4870 |
| 2329b | Seq. ID No. 4871 | Seq. ID No. 4872 |
| 2329c | Seq. ID No. 4873 | Seq. ID No. 4874 |
| 2329d | Seq. ID No. 4875 | Seq. ID No. 4876 |
| 2357 | Seq. ID No. 4919 | Seq. ID No. 4920 |
| 2363b | Seq. ID No. 4931 | Seq. ID No. 4932 |
| 2371a | Seq. ID No. 4949 | Seq. ID No. 4950 |
| 2372 | Seq. ID No. 4951 | Seq. ID No. 4952 |
| 2390 | Seq. ID No. 4987 | Seq. ID No. 4988 |
| 2412 | Seq. ID No. 5031 | Seq. ID No. 5032 |
| 2423a | Seq. ID No. 5061 | Seq. ID No. 5062 |
| 2434 | Seq. ID No. 5085 | Seq. ID No. 5086 |
| 2445 | Seq. ID No. 5103 | Seq. ID No. 5104 |
| 2456c | Seq. ID No. 5123 | Seq. ID No. 5124 |
| 2458a | Seq. ID No. 5129 | Seq. ID No. 5130 |
| 2458b | Seq. ID No. 5131 | Seq. ID No. 5132 |
| 2458d | Seq. ID No. 5135 | Seq. ID No. 5136 |
| 2458e | Seq. ID No. 5137 | Seq. ID No. 5138 |
| 2458g | Seq. ID No. 5141 | Seq. ID No. 5142 |
| 2469b | Seq. ID No. 5165 | Seq. ID No. 5166 |
| 2474b | Seq. ID No. 5175 | Seq. ID No. 5176 |
| 2484b | Seq. ID No. 5199 | Seq. ID No. 5200 |
| 2490 | Seq. ID No. 5205 | Seq. ID No. 5206 |
| 2492a | Seq. ID No. 5207 | Seq. ID No. 5208 |
| 2495a | Seq. ID No. 5213 | Seq. ID No. 5214 |
| 2497b | Seq. ID No. 5219 | Seq. ID No. 5220 |
| 2500a | Seq. ID No. 5223 | Seq. ID No. 5224 |
| 2518a | Seq. ID No. 5267 | Seq. ID No. 5268 |
| 2521 | Seq. ID No. 5281 | Seq. ID No. 5282 |
| 2567a | Seq. ID No. 5385 | Seq. ID No. 5386 |
| 2567b | Seq. ID No. 5387 | Seq. ID No. 5388 |
| 2587a | Seq. ID No. 5413 | Seq. ID No. 5414 |
| 2587b | Seq. ID No. 5415 | Seq. ID No. 5416 |
| 2596 | Seq. ID No. 5433 | Seq. ID No. 5434 |
| 2610 | Seq. ID No. 5453 | Seq. ID No. 5454 |
| 2616a | Seq. ID No. 5459 | Seq. ID No. 5460 |
| 2616b | Seq. ID No. 5461 | Seq. ID No. 5462 |
| 2616c | Seq. ID No. 5463 | Seq. ID No. 5464 |
| 2616d | Seq. ID No. 5465 | Seq. ID No. 5466 |
| 2623b | Seq. ID No. 5491 | Seq. ID No. 5492 |
| 2625a | Seq. ID No. 5497 | Seq. ID No. 5498 |
| 2628 | Seq. ID No. 5509 | Seq. ID No. 5510 |
| 2629b | Seq. ID No. 5513 | Seq. ID No. 5514 |
| 2633d | Seq. ID No. 5525 | Seq. ID No. 5526 |
| 2637b | Seq. ID No. 5531 | Seq. ID No. 5532 |
| 2660 | Seq. ID No. 5569 | Seq. ID No. 5570 |
| 2669a | Seq. ID No. 5587 | Seq. ID No. 5588 |
| 2673 | Seq. ID No. 5595 | Seq. ID No. 5596 |
| 2674a | Seq. ID No. 5597 | Seq. ID No. 5598 |
| 2679a | Seq. ID No. 5609 | Seq. ID No. 5610 |
| 2679b | Seq. ID No. 5611 | Seq. ID No. 5612 |
| 2680c | Seq. ID No. 5621 | Seq. ID No. 5622 |
| 2683a | Seq. ID No. 5623 | Seq. ID No. 5624 |
| 2688a | Seq. ID No. 5633 | Seq. ID No. 5634 |
| 2688c | Seq. ID No. 5637 | Seq. ID No. 5638 |
| 2690a | Seq. ID No. 5643 | Seq. ID No. 5644 |
| 2692b | Seq. ID No. 5649 | Seq. ID No. 5650 |
| 2696a | Seq. ID No. 5659 | Seq. ID No. 5660 |
| 2718b | Seq. ID No. 5683 | Seq. ID No. 5684 |
| 2718c | Seq. ID No. 5685 | Seq. ID No. 5686 |
| 2723 | Seq. ID No. 5699 | Seq. ID No. 5700 |
| 2725b | Seq. ID No. 5705 | Seq. ID No. 5706 |
| 2728a | Seq. ID No. 5709 | Seq. ID No. 5710 |
| 2738a | Seq. ID No. 5729 | Seq. ID No. 5730 |
| 2738c | Seq. ID No. 5733 | Seq. ID No. 5734 |
| 2749a | Seq. ID No. 5763 | Seq. ID No. 5764 |
| 2749b | Seq. ID No. 5765 | Seq. ID No. 5766 |
| 2749c | Seq. ID No. 5767 | Seq. ID No. 5768 |
| 2749e | Seq. ID No. 5771 | Seq. ID No. 5772 |
| 2757b | Seq. ID No. 5783 | Seq. ID No. 5784 |
| 2758d | Seq. ID No. 5791 | Seq. ID No. 5792 |
| 2760a | Seq. ID No. 5797 | Seq. ID No. 5798 |
| 2796a | Seq. ID No. 5885 | Seq. ID No. 5886 |
| 2799a | Seq. ID No. 5889 | Seq. ID No. 5890 |
| 2801a | Seq. ID No. 5893 | Seq. ID No. 5894 |
| 2801b | Seq. ID No. 5895 | Seq. ID No. 5896 |
| 2805a | Seq. ID No. 5899 | Seq. ID No. 5900 |
| 2805b | Seq. ID No. 5901 | Seq. ID No. 5902 |
| 2810a | Seq. ID No. 5905 | Seq. ID No. 5906 |
| 2810c | Seq. ID No. 5909 | Seq. ID No. 5910 |
| 2818a | Seq. ID No. 5921 | Seq. ID No. 5922 |
| 2818b | Seq. ID No. 5923 | Seq. ID No. 5924 |
| 2818d | Seq. ID No. 5927 | Seq. ID No. 5928 |
| 2822a | Seq. ID No. 5939 | Seq. ID No. 5940 |
| 2869c | Seq. ID No. 6027 | Seq. ID No. 6028 |
| 2881 | Seq. ID No. 6043 | Seq. ID No. 6044 |
| 2883a | Seq. ID No. 6047 | Seq. ID No. 6048 |
| 2887a | Seq. ID No. 6059 | Seq. ID No. 6060 |
| 2891a | Seq. ID No. 6067 | Seq. ID No. 6068 |
| 2900b | Seq. ID No. 6089 | Seq. ID No. 6090 |
| 2901a | Seq. ID No. 6091 | Seq. ID No. 6092 |
| 2909b | Seq. ID No. 6107 | Seq. ID No. 6108 |
| 2909d | Seq. ID No. 6111 | Seq. ID No. 6112 |
| 2913b | Seq. ID No. 6117 | Seq. ID No. 6118 |
| 2931a | Seq. ID No. 6161 | Seq. ID No. 6162 |
| 2931b | Seq. ID No. 6163 | Seq. ID No. 6164 |
| 2931c | Seq. ID No. 6165 | Seq. ID No. 6166 |
| 2933b | Seq. ID No. 6169 | Seq. ID No. 6170 |
| 2941a | Seq. ID No. 6183 | Seq. ID No. 6184 |
| 2941b | Seq. ID No. 6185 | Seq. ID No. 6186 |
| 2943a | Seq. ID No. 6189 | Seq. ID No. 6190 |
| 2943b | Seq. ID No. 6191 | Seq. ID No. 6192 |
| 2944b | Seq. ID No. 6197 | Seq. ID No. 6198 |
| 2948a | Seq. ID No. 6203 | Seq. ID No. 6204 |
| 2948b | Seq. ID No. 6205 | Seq. ID No. 6206 |
| 2948d | Seq. ID No. 6209 | Seq. ID No. 6210 |
| 2955a | Seq. ID No. 6221 | Seq. ID No. 6222 |
| 2955b | Seq. ID No. 6223 | Seq. ID No. 6224 |
| 2955c | Seq. ID No. 6225 | Seq. ID No. 6226 |
| 2955d | Seq. ID No. 6227 | Seq. ID No. 6228 |
| 2955e | Seq. ID No. 6229 | Seq. ID No. 6230 |
| 2957 | Seq. ID No. 6235 | Seq. ID No. 6236 |
| 2958a | Seq. ID No. 6237 | Seq. ID No. 6238 |
| 2959 | Seq. ID No. 6243 | Seq. ID No. 6244 |
| 2960a | Seq. ID No. 6245 | Seq. ID No. 6246 |
| 2962b | Seq. ID No. 6249 | Seq. ID No. 6250 |
| 2965a | Seq. ID No. 6253 | Seq. ID No. 6254 |
| 2969 | Seq. ID No. 6263 | Seq. ID No. 6264 |
| 2970a | Seq. ID No. 6265 | Seq. ID No. 6266 |
| 2974a | Seq. ID No. 6273 | Seq. ID No. 6274 |
| 2974b | Seq. ID No. 6275 | Seq. ID No. 6276 |
| 2978b | Seq. ID No. 6285 | Seq. ID No. 6286 |
| 2980a | Seq. ID No. 6289 | Seq. ID No. 6290 |
| 2986a | Seq. ID No. 6301 | Seq. ID No. 6302 |
| 2986b | Seq. ID No. 6303 | Seq. ID No. 6304 |
| 3016a | Seq. ID No. 6363 | Seq. ID No. 6364 |
| 3021 | Seq. ID No. 6377 | Seq. ID No. 6378 |
| 3023 | Seq. ID No. 6381 | Seq. ID No. 6382 |
| 3024a | Seq. ID No. 6383 | Seq. ID No. 6384 |
| 3037a | Seq. ID No. 6415 | Seq. ID No. 6416 |
| 3042b | Seq. ID No. 6427 | Seq. ID No. 6428 |
| 3043b | Seq. ID No. 6431 | Seq. ID No. 6432 |
| 3064b | Seq. ID No. 6473 | Seq. ID No. 6474 |
| 3076 | Seq. ID No. 6497 | Seq. ID No. 6498 |
| 3107a | Seq. ID No. 6571 | Seq. ID No. 6572 |
| 3110a | Seq. ID No. 6581 | Seq. ID No. 6582 |
| 3119a | Seq. ID No. 6593 | Seq. ID No. 6594 |
| 3119d | Seq. ID No. 6599 | Seq. ID No. 6600 |
| 3140 | Seq. ID No. 6631 | Seq. ID No. 6632 |
| 3145c | Seq. ID No. 6639 | Seq. ID No. 6640 |

### B. ALLOIOCOCCUS OTITIDIS ORF POLYNUCLEOTIDES ENCODING SURFACE EXPOSED POLYPEPTIDES

[0124] Isolated and purified Alloiococcus otitidis ORF polynucleotides of the present invention are contemplated for use in the production of Alloiococcus otitidis polypeptides. More specifically, in certain embodiments, the ORFs encode Alloiococcus otitidis surface exposed polypeptides, particularly antigenic polypeptides. Thus, in one aspect, the present invention provides isolated and purified polynucleotides (ORFS) that encode Alloiococcus otitidis surface exposed polypeptides. In particular embodiments, a polynucleotide of the present invention is a DNA molecule, wherein the DNA may be genomic DNA, plasmid DNA or cDNA. In a preferred embodiment, a polynucleotide of the present invention is a recombinant polynucleotide, which encodes an Alloiococcus otitidis polypeptide comprising an amino acid sequence that has at least 70% identity to an amino acid sequence of one of the even numbered sequences set forth in SEQ ID NO: 2 through SEQ ID NO: 6650 or a fragment thereof. In another embodiment, an isolated and purified ORF polynucleotide comprises a nucleotide sequence that has at least 70% identity to one of the ORF polynucleotide nucleotide sequences of odd numbered sequences set forth in SEQ ID NO: 1 through SEQ ID NO: 6649, a degenerate variant thereof, or a complement thereof. In yet another embodiment, an ORF polynucleotide of one of the odd numbered sequences set forth in SEQ ID NO: 1 through SEQ ID NO: 6649 is comprised in a plasmid vector and expressed in a host cell. In a preferred embodiment, the host cell is a prokaryotic host cell.

[0125] As used herein, the term “polynucleotide” means a sequence of nucleotides connected by phosphodiester linkages. It is well understood that in all prokaryotes studied to date, including Alloiococcus otitidis , most or all cellular genetic material is contained within a single circular chromosome. The single circular chromosome is usually comprised of double stranded DNA, wherein the ORFs encoding polypeptides may be represented on either strand of the bacterial chromosome in a head to tail or a head to head orientation. Polynucleotides are presented herein from the 5′ to the 3′ direction. A polynucleotide of the present invention can comprise from about 10 nucleotides to about several hundred thousand nucleotides. Preferably, a polynucleotide comprises from about 10 to about 3,000 nucleotides. Preferred lengths of particular polynucleotide are set forth hereinafter.

[0126] A polynucleotide of the present invention can be a deoxyribonucleic acid (DNA) molecule, a ribonucleic acid (RNA) molecule, or analogs of the DNA or RNA generated using nucleotide analogs. The nucleic acid molecule can be single-stranded or double-stranded, but preferably is double-stranded DNA. Where a polynucleotide is a DNA molecule, that molecule can be a gene, a cDNA molecule or a genomic DNA molecule. Nucleotide bases are indicated herein by a single letter code: adenine (A), guanine (G), thymine (T) and cytosine (C).

[0127] “Isolated” means altered “by the hand of man” from the natural state. An “isolated” composition or substance is one that has been changed or removed from its original environment, or both. For example, a polynucleotide or a polypeptide naturally present in a living animal is not “isolated,” but the same polynucleotide or polypeptide separated from the coexisting materials of its natural state is “isolated,” as the term is employed herein.

[0128] Preferably, an “isolated” polynucleotide is free of sequences, which naturally flank the nucleic acid (ie., sequences located at the 5′ and 3′ ends of the nucleic acid) in the genomic DNA of the organism from which the nucleic acid is derived. For example, in various embodiments, the isolated Alloiococcus otitidis nucleic acid molecule can contain less than about 5 kb, 4 kb, 3 kb, 2 kb, 1 kb, 0.5 kb or 0.1 kb of nucleotide sequences which naturally flank the nucleic acid molecule in genomic DNA of the cell from which the nucleic acid is derived (e.g., neuronal or placenta). However, the Alloiococcus otitidis nucleic acid molecule can be fused to heterologous protein encoding or regulatory sequences and still be considered isolated.

[0129] ORF polynucleotides of the present invention are obtained using standard cloning and screening techniques from a cDNA library derived from mRNA. Polynucleotides of the invention are also obtained from natural sources such as genomic DNA libraries (e.g., an Alloiococcus otitidis library) or are synthesized using well known and commercially available techniques. As contemplated in the present invention, ORF polynucleotides are obtained using Alloiococcus otitidis chromosomal DNA as the template.

[0130] The invention further encompasses nucleic acid molecules that differ from the nucleotide sequences shown in one of the odd numbered sequences set forth in SEQ ID NO: 1 through SEQ ID NO: 6649 (and fragments thereof) due to degeneracy of the genetic code, and thus encode the same Alloiococcus otitidis polypeptide as that encoded by the nucleotide sequence shown in one of the odd numbered sequences set forth in SEQ ID NO:1 through SEQ ID NO: 6649.

[0131] Orthologs and allelic variants of the Alloiococcus otitidis polynucleotides are readily identified using methods well known in the art. Allelic variants and orthologs of the polynucleotides comprise a nucleotide sequence that is typically at least about 70-75%, more typically at least about 80-85%, and most typically at least about 90-95% or more homologous to a nucleotide sequence shown in one of the odd numbered sequences set forth in SEQ ID NO:1 through SEQ ID NO: 6649, or a fragment of these nucleotide sequences. Such nucleic acid molecules are readily identified as being able to hybridize, preferably under stringent conditions, to a nucleotide sequence shown in one of the odd numbered sequences set forth in SEQ ID NO:1 through SEQ ID NO: 6649, or a fragment of these nucleotide sequences.

[0132] Moreover, the polynucleotides of the invention also comprise only a fragment of the coding region of an Alloiococcus otitidis polynucleotide or gene, such as a fragment of and one of the odd numbered sequences set forth in SEQ ID NO:1 through SEQ ID NO: 6649. Preferably, such fragments encode polypeptides, which are immunogenic fragments.

[0133] When the ORF polynucleotides of the invention are used for the recombinant production of Alloiococcus otitidis polypeptides of the present invention, the polynucleotide may include the coding sequence for the mature polypeptide, by itself, or the coding sequence for the mature polypeptide in reading frame with other coding sequences, such as those encoding a leader or secretory sequence, a pre-, or pro- or prepro-protein sequence, or other fusion peptide portions. For example, a marker sequence, which facilitates purification of the fused polypeptide, can be linked to the coding sequence (see Gentz et al., 1989, incorporated herein by reference). Thus, contemplated in the present invention is the preparation of polynucleotides encoding fusion polypeptides permitting His-tag purification of expression products. The polynucleotide may also contain non-coding 5′ and 3′ sequences, such as transcribed, non-translated sequences, splicing and polyadenylation signals.

[0134] Thus, a polynucleotide encoding a polypeptide of the present invention, including homologs and orthologs from species other than Alloiococcus otitidis , is obtained by a process which comprises the steps of screening an appropriate library under stringent hybridization conditions (discussed below) with a labeled probe having the sequence of one of the odd numbered sequences set forth in one of SEQ ID NO:1 through SEQ ID NO: 6649 or a fragment thereof; and isolating full-length cDNA and genomic clones containing the polynucleotide sequence. Such hybridization techniques are well known to the skilled artisan. The skilled artisan will appreciate that, in many cases, an isolated cDNA sequence will be incomplete, in that the region coding for the polypeptide is cut short at the 5′ end of the cDNA. This is a consequence of reverse transcriptase, an enzyme with inherently low “processivity” (a measure of the ability of the enzyme to remain attached to the template during the polymerization reaction), failing to complete a DNA copy of the mRNA template during 1st strand cDNA synthesis.

[0135] Thus, in certain embodiments, the polynucleotide sequence information provided by the present invention allows for the preparation of relatively short DNA (or RNA) oligonucleotide sequences having the ability to specifically hybridize to gene sequences of the selected polynucleotides disclosed herein. The term “oligonucleotide” as used herein is defined as a molecule comprised of two or more deoxyribonucleotides or ribonucleotides, usually more than three (3), and typically more than ten (10) and up to one hundred (100) or more (although preferably between twenty and thirty). The exact size will depend on many factors, which in turn depends on the ultimate function or use of the oligonucleotide. Thus, in particular embodiments of the invention, nucleic acid probes of an appropriate length are prepared based on a consideration of a selected nucleotide sequence, e.g., a sequence such as that shown in one of odd numbered sequences set forth in SEQ ID NO:1 through SEQ ID NO: 6649. The ability of such nucleic acid probes to specifically hybridize to a polynucleotide encoding an Alloiococcus otitidis polypeptide lends them particular utility in a variety of embodiments. Most importantly, the probes are used in a variety of assays for detecting the presence of complementary sequences in a given sample.

[0136] In certain embodiments, it is advantageous to use oligonucleotide primers. These primers may be generated in any manner, including chemical synthesis, DNA replication, reverse transcription, or a combination thereof. The sequence of such primers is designed using a polynucleotide of the present invention for use in detecting, amplifying or mutating a defined segment of an ORF polynucleotide that encodes an Alloiococcus otitidis polypeptide from prokaryotic cells using polymerase chain reaction (PCR) technology.

[0137] In certain embodiments, it is advantageous to employ a polynucleotide of the present invention in combination with an appropriate label for detecting hybrid formation. A wide variety of appropriate labels are known in the art, including radioactive, enzymatic or other ligands, such as avidin/biotin, which are capable of giving a detectable signal.

[0138] Polynucleotides which are identical or sufficiently identical to a nucleotide sequence contained in one of odd numbered sequences set forth in SEQ ID NO:1 through SEQ ID NO: 6649, or a fragment thereof, may be used as hybridization probes for cDNA and genomic DNA or as primers for a nucleic acid amplification (PCR) reaction, to isolate full-length cDNAs and genomic clones encoding polypeptides of the present invention and to isolate cDNA and genomic clones of other genes (including genes encoding homologs and orthologs from species other than Alloiococcus otitidis ) that have a high sequence similarity to polynucleotide sequences set forth in one of the odd numbered sequences set forth in SEQ ID NO:1 through SEQ ID NO:6649, or a fragment thereof. Typically these nucleotide sequences are from at least 70% identical to at least about 70% identical to that of the reference polynucleotide sequence. The probes or primers will generally comprise at least 15 nucleotides, preferably, at least 30 nucleotides and may have at least 50 nucleotides. Particularly preferred probes will have between 30 and 50 nucleotides.

[0139] There are several methods available and well known to those skilled in the art to obtain full-length cDNAs, or extend short cDNAs, for example those based on the method of Rapid Amplification of cDNA ends (RACE) (see, Frohman et al., 1988). Recent modifications of the technique, exemplified by the Marathon™ technology (BD Biosciences Clontech, Palo Alto, Calif.) for example, have significantly simplified the search for longer cDNAs. In the Marathon™ technology, cDNAs have been prepared from mRNA extracted from a chosen tissue and an “adaptor” sequence ligated onto each end. Nucleic acid amplification (PCR) is then carried out to amplify the “rhissing” 5′ end of the cDNA using a combination of gene specific and adaptor specific oligonucleotide primers. The PCR reaction is then repeated using “nested” primers, that is, primers designed to anneal within the amplified product (typically an adaptor specific primer that anneals further 3′ in the adaptor sequence and a gene specific primer that anneals further 5′ in the known gene sequence). The products of this reaction are then analyzed by DNA sequencing and a full-length cDNA constructed either by joining the product directly to the existing cDNA to give a complete sequence, or carrying out a separate full-length PCR using the new sequence information for the design of the 5′ primer.

[0140] To provide certain of the advantages in accordance with the present invention, a preferred nucleic acid sequence employed for hybridization studies or assays includes probe molecules that are complementary to at least a 10 to about 70 long nucleotide stretch of a polynucleotide that encodes an Alloiococcus otitidis polypeptide, such as that shown in one of the even numbered sequences set forth in SEQ ID NO: 2 through SEQ ID NO: 6650. A size of at least 10 nucleotides in length helps to ensure that the fragment will be of sufficient length to form a duplex molecule that is both stable and selective. Molecules having complementary sequences over stretches greater than 10 bases in length are generally preferred in order to increase stability and selectivity of the hybrid, and thereby improve the quality and degree of specific hybrid molecules obtained. It is generally preferred to design nucleic acid molecules with gene-complementary stretches of 25 to 40 nucleotides, 55 to 70 nucleotides, or even longer where desired. For example, such fragments are readily prepared by directly synthesizing the fragment by chemical means, by application of nucleic acid reproduction technology, such as the PCR technology (U.S. Pat. No. 4,683,202, incorporated herein by reference), or by excising selected DNA fragments from recombinant plasmids containing appropriate inserts and suitable restriction enzyme sites.

[0141] In another aspect, the present invention contemplates an isolated and purified polynucleotide comprising a nucleotide sequence that is identical or complementary to a segment of at least 10 contiguous bases of one of the odd numbered sequences set forth in SEQ ID NO: 1 through SEQ ID NO: 6649, wherein the polynucleotide hybridizes to a polynucleotide that encodes an Alloiococcus otitidis polypeptide. Preferably, the isolated and purified polynucleotide comprises a base sequence that is identical or complementary to a segment of at least 25 to 70 contiguous bases of one of the odd numbered sequences set forth in SEQ ID NO: 1 through SEQ ID NO: 6649. For example, the polynucleotide of the invention can comprise a segment of bases identical or complementary to from 40 to 55 contiguous bases of the disclosed nucleotide sequences.

[0142] Accordingly, a polynucleotide probe molecule of the invention is used for its ability to selectively form duplex molecules with complementary stretches of the gene. Depending on the application envisioned, one will desire to employ varying conditions of hybridization stringency to achieve varying degree of selectivity of the probe toward the target sequence (see Table 22 below). For applications requiring a high degree of selectivity, one will typically desire to employ relatively stringent conditions to form the hybrids. For some applications, for example, where one desires to prepare mutants employing a mutant primer strand hybridized to an underlying template or where one seeks to isolate an Alloiococcus otitidis homologous polypeptide coding sequence from other cells, functional equivalents, or the like, less stringent hybridization conditions are typically needed to allow formation of the heteroduplex (see Table 22). Cross-hydridizing species can thereby be readily identified as positively hybridizing signals with respect to control hybridizations. In any case, it is generally appreciated that conditions can be rendered more stringent by the addition of increasing amounts of formamide, which serves to destabilize the hybrid duplex in the same manner as increased temperature. Thus, hybridization conditions can be readily manipulated, and thus will generally be a method of choice depending on the desired results.

[0143] The present invention also includes polynucleotides capable of hybridizing under reduced stringency conditions, more preferably stringent conditions, and most preferably highly, stringent conditions, to polynucleotides described herein. Examples of stringency conditions are shown in the Table 22 below: highly stringent conditions are those that are at least as stringent as, for example, conditions A-F; stringent conditions are at least as stringent as, for example, conditions G-L; and reduced stringency conditions are at least as stringent as, for example, conditions M-R.

TABLE 22
HYBRIDIZATION STRINGENCY CONDITIONS

| | | | Hybridization | |
|---|---|---|---|---|
| Stringency | Polynucleotide | Hybrid | Temperature | Wash Temperature |
| Condition | Hybrid | Length (bp)¹ | and Buffer^{H} | and Buffer^{H} |
| A | DNA:DNA | >50 | 65° C.; 1 × SSC -or- | 65° C.; 0.3 × SSC |
| | | | 42° C.; 1 × SSC, | |
| | | | 50% formamide | |
| B | DNA:DNA | <50 | T_{B}; 1 × SSC | T_{B}; 1 × SSC |
| C | DNA:RNA | >50 | 67° C.; 1 × SSC - | 67° C.; 0.3 × SSC |
| | | | or- | |
| | | | 45° C.; 1 × SSC, | |
| | | | 50% formamide | |
| D | DNA:RNA | <50 | T_{D}; 1 × SSC | T_{D}; 1 × SSC |
| E | RNA:RNA | >50 | 70° C.; 1 × SSC - | 70° C.; 0.3 × SSC |
| | | | or- | |
| | | | 50° C.; 1 × SSC, | |
| | | | 50% formamide | |
| F | RNA:RNA | <50 | T_{F}; 1 × SSC | T_{F}; 1 × SSC |
| G | DNA:DNA | >50 | 65° C.; 4 × SSC - | 65 0; 1 × SSC |
| | | | or- | |
| | | | 42° C.; 4 × SSC, | |
| | | | 50% formamide | |
| H | DNA:DNA | <50 | T_{H}; 4 × SSC | T_{H}; 4 × SSC |
| I | DNA:RNA | >50 | 67° C.; 4 × SSC - | 67° C.; 1 × SSC |
| | | | or- | |
| | | | 45° C.; 4 × SSC, | |
| | | | 50% formamide | |
| J | DNA:RNA | <50 | T_{J}; 4 × SSC | T_{J}; 4 × SSC |
| K | RNA:RNA | >50 | 70° C.; 4 × SSC - | 67° C.; 1 × SSC |
| | | | or- | |
| | | | 50° C.; 4 × SSC, | |
| | | | 50% formamide | |
| L | RNA:RNA | <50 | T_{L}; 2 × SSC | T_{L}; 2 × SSC |
| M | DNA:DNA | >50 | 50° C.; 4 × SSC - | 50° C.; 2 × SSC |
| | | | or- | |
| | | | 40° C.; 6 × SSC, | |
| | | | 50% formamide | |
| N | DNA:DNA | <50 | T_{N}; 6 × SSC | T_{N}; 6 × SSC |
| O | DNA:RNA | >50 | 55° C.; 4 × SSC - | 55° C.; 2 × SSC |
| | | | or- | |
| | | | 42° C.; 6 × SSC, | |
| | | | 50% formamide | |
| P | DNA:RNA | <50 | T_{P}; 6 × SSC | T_{P}; 6 × SSC |
| Q | RNA:RNA | >50 | 60° C.; 4 × SSC - | 60° C.; 2 × SSC |
| | | | or- | |
| | | | 45° C.; 6 × SSC, | |
| | | | 50% formamide | |
| R | RNA:RNA | <50 | T_{R}; 4 × SSC | T_{R}; 4 × SSC |
| (bp)¹: The hybrid length is that anticipated for the hybridized region(s) of the hybridizing polynucleotides. When hybridizing a polynucleotide to a target polynucleotide of unknown sequence, the hybrid length is assumed to be that of the hybridizing polynucleotide. When polynucleotides of known sequence are hybridized, the hybrid | | | | |
| # length is determined by aligning the sequences of the polynucleotides and identifying the region or regions of optimal sequence complementarity. | | | | |
| Buffer^{H}: SSPE (1 × SSPE is 0.15 M NaCl, 10 mM NaH₂PO₄, and 1.25 mM EDTA, pH 7.4), can be substituted for SSC (1 × SSC is 0.15 M NaCl and 15 mM sodium citrate) in the hybridization and wash buffers; washes are performed for 15 minutes after hybridization is complete. | | | | |
| T_{B} through T_{R}: The hybridization temperature for hybrids anticipated to be less than 50 base pairs in length should be 5-10° C. less than the melting temperature (Tₘ) of the hybrid, where Tₘ is determined according to the following equations. For hybrids less than 18 base pairs in length, Tₘ(° C.) = 2(# of A + T bases) + 4(# of G + C bases). | | | | |
| # For hybrids between 18 and 49 base pairs in length, Tₘ(° C.) = 81.5 + 16.6(log₁₀[Na⁺]) + 0.41 (% G + C) − (600/N), where N is the number of bases in the hybrid, and [Na⁺] is the concentration of sodium ions in the hybridization buffer ([Na⁺] for 1 × SSC = 0.165 M). | | | | |

[0144] Additional examples of stringency conditions for polynucleotide hybridization are provided in Sambrook et al., 1.989, Molecular Cloning: A Laboratory Manual, Cold Spring Harbor Laboratory Press, Cold Spring Harbor, N.Y., chapters 9 and 11, and Ausubel et al., 1995, Current Protocols in Molecular Biology, Eds., John Wiley & Sons, Inc., sections 2.10 and 6.3-6.4, incorporated herein by reference.

[0145] In addition to the nucleic acid molecules encoding Alloiococcus otitidis polypeptides described above, another aspect of the invention pertains to isolated nucleic acid molecules that are antisense thereto. An “antisense” nucleic acid comprises a nucleotide sequence that is complementary to a “sense” nucleic acid encoding a protein, e.g., complementary to the coding strand of a double-stranded cDNA molecule or complementary to an mRNA sequence. Accordingly, an antisense nucleic acid can hydrogen bond to a sense nucleic acid. The antisense nucleic acid can be complementary to an entire Alloiococcus otitidis coding strand, or to only a fragment thereof. In one embodiment, an antisense nucleic acid molecule is antisense to a “coding region” of the coding strand of a nucleotide sequence encoding an Alloiococcus otitidis polypeptide.

[0146] The term “coding region” refers to the region of the nucleotide sequence comprising codons which are translated into amino acid residues, e.g., the entire coding region of each of odd numbered sequences set forth in SEQ ID NO: 1 through SEQ ID NO: 6649. In another embodiment, the antsense nucleic acid molecule is antisense to a “noncoding region” of the coding strand of a nucleofide sequence encoding an Alloiococcus otitidis polypeptide. The term “noncoding region” refers to 5′ and 3′ sequences that flank the coding region that are not translated into amino acids (i.e., also referred to as 5′ and 3′ untranslated regions).

[0147] Given the coding strand sequence encoding the Alloiococcus otitidis polypeptides disclosed herein antisense nucleic acids of the invention can be designed according to the rules of Watson and Crick base pairing. The antisense nucleic acid molecule can be complementary to the entire coding region of Alloiococcus otitidis mRNA, but more preferably is an oligonucleotide which is antisense to only a fragment of the coding or noncoding region of Alloiococcus otitidis mRNA. For example, the antisense oligonucleotide can be complementary to the region surrounding the translation start site of Alloiococcus otitidis mRNA.

[0148] An antisense oligonucleotide can be, for example, about 5, 10, 15,20, 25, 30, 35, 40, 45 or 50 nucleotides in length. An antisense nucleic acid of the invention can be constructed using chemical synthesis and enzymatic ligation reactions using procedures known in the art. For example, an antisense nucleic acid (e.g., an antisense oligonucleotide) can be chemically synthesized using naturally occurring nucleotides or variously modified nucleotides designed to increase the biological stability of the molecules or to increase the physical stability of the duplex formed between the antisense and sense nucleic acids, e.g., phosphorothioate derivatives and acridine substituted nucleotides can be used. Examples of modified nucleotides which can be used to generate the antisense nucleic acid include 5-fluorouracil, 5-bromouracil, 5-chlorouracil, 5-iodouracil, hypoxanthine, xanthine, 4-acetylcytosine, 5-(carboxyhydroxylmethyl)uracil, 5-carboxymethylaminomethyl-2-thiouridine, 5-carboxymethylaminomethyluracil, dihydrouracil, beta-D-galactosylqueosine, inosine, N6-isopentenyladenine, 1-methylguanine, 1-methylinosine, 2,2-dimethylguanine, 2-methyladenine, 2-methylguanine, 3-methylcytosine, 5-methylcytosine, N6-adenine, 7-methylguanine, 5-methylaminomethyluracil, 5-methoxyaminomethyl-2-thiouracil, beta-D-mannosylqueosine, 5′-methoxycarboxymethyluracil, 5-methoxyuracil, 2-methylthio-N6-isopentenyladenine, uracil-5-oxyacetic acid (v), wybutoxosine, pseudouracil, queosine, 2-thiocytosine, 5-methyl-2-thiouracil, 2-thiouracil, 4-thiouracil, 5-methyluracil, uracil-5-oxyacetic acid methylester, uracil-5-oxyacetic acid (v), 5-methyl-2-thiouracil, 3-(3-amino-3-N-2-carboxypropyl) uracil, (acp3)w, and 2,6-diaminopurine.

[0149] Alternatively, the antisense nucleic acid can be produced biologically using an expression vector into which a nucleic acid has been subcloned in an antisense orientation (i.e., RNA transcribed from the inserted nucleic acid will be of an antisense orientation to a target nucleic acid of interest, described further in the following subsection).

[0150] The antisense nucleic acid molecules of the invention are typically administered to a subject or generated in situ such that they hybridize with or bind to cellular mRNA and/or genomic DNA encoding an Alloiococcus otitidis polypeptide to thereby inhibit expression of the polypeptide, e.g., by inhibiting transcription and/or translation. The hybridization can be by conventional nucleotide complementarity to form a stable duplex, or, for example, in the case of an antisense nucleic acid molecule which binds to DNA duplexes, through specific interactions in the major groove of the double helix. An example of a route of administration of an antisense nucleic acid molecule of the invention includes direct injection at a tissue site. Alternatively, an antisense nucleic acid molecule can be modified to target selected cells and then administered systemically. For example, for systemic administration, an antisense molecule can be modified such that it specifically binds to a receptor or an antigen expressed on a selected cell surface, e.g., by linking the antisense nucleic acid molecule to a peptide or an antibody which binds to a cell surface receptor or antigen. The antisense nucleic acid molecule can also be delivered to cells using the vectors described herein.

[0151] In yet another embodiment, the antisense nucleic acid molecule of the invention is an α-anomeric nucleic acid molecule. An α-anomeric nucleic acid molecule forms specific double-stranded hybrids with complementary RNA in which, contrary to the usual γ-units, the strands run parallel to each other (Gaultier et al., 1987). The antisense nucleic acid molecule can also comprise a 2′-o-methylribonucleotide (Inoue et al., 1987a) or a chimeric RNA-DNA analogue (Inoue et al., 1987b).

[0152] In still another embodiment, an antisense nucleic acid of the invention is a ribozyme. Ribozymes are catalytic RNA molecules with ribonuclease activity that are capable of cleaving a single-stranded nucleic acid, such as a mRNA, to which they have a complementary region. Thus, ribozymes (e.g., hammerhead ribozymes described in Haselhoff and Gerlach, 1988) can be used to catalytically cleave Alloiococcus otitidis mRNA transcripts to thereby inhibit translation of Alloiococcus otitidis mRNA. A ribozyme having specificity for an Alloiococcus otitidis-encoding nucleic acid can be designed based upon the nucleotide sequence of an Alloiococcus otitidis cDNA disclosed herein. For example, a derivative of a Tetrahymena L-19 IVS RNA can be constructed in which the nucleotide sequence of the active site is complementary to the nucleotide sequence to be cleaved in an Alloiococcus otitidis-encoding mRNA. See, e.g., Cech et al. U.S. Pat. No. 4,987,071 and Cech et al. U.S. Pat. No. 5,116,742 both incorporated herein in their entirety by reference. Altematively, Alloiococcus otitidis mRNA can be used to select a catalytic RNA having a specific ribonuclease activity from a pool of RNA molecules. See, e.g., Bartel and Szostak, 1993.

[0153] Alternatively Alloiococcus otitidis gene expression is inhibited by targeting nucleotide sequences complementary to the regulatory region of the Alloiococcus otitidis gene (e.g., the Alloiococcus otitidis gene promoter and/or enhancers) to form triple helical structures that prevent transcription of the Alloiococcus otitidis gene in target cells. (See generally, Helene, 1991; Helene et al., 1992; and Maher, 1992).

[0154] Alloiococcus otitidis gene expression is also inhibited using RNA interference (RNAi). This is a technique for post-transcriptional gene silencing (PTGS), in which target gene activity is specifically abolished with cognate double-stranded RNA (dsRNA). RNAi resembles in many aspects PTGS in plants and has been detected in many invertebrates including trypanosome, hydra, planaria, nematode and fruit fly (Drosophila melangnoste). It may be involved in the modulation of transposable element mobilization and antiviral state formation. RNAi in mammalian systems is disclosed in WO 00/63364, which is incorporated by reference herein in its entirety. Basically, dsRNA of at least about 600 nucleotides, homologous to the target is introduced into the cell and a sequence specific reduction in gene activity is observed.

### C. ALLOIOCOCCUS OTITIDIS POLYPEPTIDES

[0155] In particular embodiments, the present invention provides isolated and purified Alloiococcus otitidis polypeptides. Preferably, an Alloiococcus otitidis polypeptide of the invention is a recombinant polypeptide. In certain embodiments, an Alloiococcus otitidis polypeptide of the present invention comprises the amino acid sequence that has at least 70% identity to the amino acid sequence of one of even numbered sequences set forth in SEQ ID NO: 2 through SEQ ID NO: 6650, a biological equivalent thereof, or a fragment thereof.

[0156] An Alloiococcus otitidis polypeptide according to the present invention encompasses a polypeptide that comprises: 1) the amino acid sequence shown in one of the even numbered sequences set forth in SEQ ID NO: 2 through SEQ ID NO: 6650); (2) functional and non-functional naturally occurring variants or biological equivalents of Alloiococcus otitidis polypeptides of in one of the even numbered sequences set forth in SEQ ID NO: 2 through SEQ ID NO: 6650; (3) recombinantly produced variants or biological equivalents of Alloiococcus otitidis polypeptides set out in one of the even numbered sequences set forth in SEQ ID NO: 2 through SEQ ID NO: 6650; (4) polypeptides isolated from organisms other than Alloiococcus otitidis (orthologs of Alloiococcus otitidis polypeptides).

[0157] A biological equivalent or variant of an Alloiococcus otitidis polypeptide according to the present invention encompasses 1) a polypeptide isolated from Alloiococcus otitidis, and 2) a polypeptide that contains substantial homology to an Alloiococcus otitidis polypeptide.

[0158] Biological equivalents or variants of Alloiococcus otitidis include both functional and non-functional Alloiococcus otitidis polypeptides. Functional biological equivalents or variants are naturally occurring amino acid sequence variants of an Alloiococcus otitidis polypeptide that maintain the ability to elicit an immunological or antigenic response in a subject. Functional variants will typically contain only conservative substitutions of one or more amino acids in one of the even numbered sequences set forth in SEQ ID NO: 2 through SEQ ID NO: 6650 or substitution, deletion or insertion of non-critical residues in non-critical regions of the polypeptide (e.g., not in regions containing antigenic determinants or protective epitopes).

[0159] The present invention further provides non-Alloiococcus otitidis orthologs of Alloiococcus otitidis polypeptides. Orthologs of Alloiococcus otitidis polypeptides are polypeptides that are isolated from non-Alloiococcus otitidis organisms and possess antigenic capabilities of the Alloiococcus otitidis polypeptide. Orthologs of an Alloiococcus otitidis polypeptide can readily be identified as comprising an amino acid sequence that is substantially homologous to one of the even numbered sequences set forth in set forth in SEQ ID NO: 2 through SEQ ID NO: 6650.

[0160] Modifications and changes can be made in the structure of a polypeptide of the present invention and still obtain a molecule having Alloiococcus otitidis antigenicity. For example, certain amino acids can be substituted for other amino acids in a sequence without appreciable loss of antigenicity. Because it is the interactive capacity and nature of a polypeptide that defines that polypeptide's biological functional activity, certain amino acid sequence substitutions can be made in a polypeptide sequence (or, of course, its underlying DNA coding sequence) and nevertheless obtain a polypeptide with like properties.

[0161] In making such changes, the hydropathic index of amino acids can be considered. The importance of the hydropathic amino acid index in conferring interactive biologic function on a polypeptide is generally understood in the art (Kyte & Doolittle, 1982). It is known that certain amino acids can be substituted for other amino acids having a similar hydropathic index or score and still result in a polypeptide with similar biological activity. Each amino acid has been assigned a hydropathic index on the basis of its hydrophobicity and charge characteristics. Those indices are: isoleucine (+4.5); valine (+4.2); leucine (+3.8); phenylalanine (+2.8); cysteine/cystine (+2.5); methionine (+1.9); alanine (+1.8); glycine (−0.4); threonine (−0.7); serine (−0.8); tryptophan (−0.9); tyrosine (−1.3); proline (−1.6); histidine (−3.2); glutamate (−3.5); glutamine (−3.5); aspartate (−3.5); asparagine (−3.5); lysine (−3.9); and arginine (−4.5).

[0162] It is believed that the relative hydropathic character of the amino acid residue determines the secondary and tertiary structure of the resultant polypeptide, which in turn defines the interaction of the polypeptide with other molecules, such as enzymes, substrates, receptors, antibodies, antigens, and the like. It is known in the art that an amino acid can be substituted by another amino acid having a similar hydropathic index and still obtain a functionally equivalent polypeptide. In such changes, the substitution of amino acids whose hydropathic indices are within ±2 is preferred, those within ±1 are particularly preferred, and those within ±0.5 are even more particularly preferred.

[0163] Substitution of like amino acids can also be made on the basis of hydrophilicity, particularly where the biologically functional equivalent polypeptide or peptide thereby created is intended for use in immunological embodiments. U.S. Pat. No. 4,554,101, incorporated herein by reference, states that the greatest local average hydrophilicity of a polypeptide, as governed by the hydrophilicity of its adjacent amino acids, correlates with its immunogenicity and antigenicity, i.e. with a biological property of the polypeptide.

[0164] As detailed in U.S. Pat. No. 4,554,101, the following hydrophilicity values have been assigned to amino acid residues: arginine (+3.0); lysine (+3.0); aspartate (+3.0±1); glutamate (+3.0±1); serine (+0.3); asparagine (+0.2); glutamine (+0.2); glycine (0); proline (−0.5±1); threonine (−0.4); alanine (−0.5); histidine (−0.5); cysteine (−1.0); methionine (−1.3); valine (−1.5); leucine (−1.8); isoleucine (−1.8); tyrosine (−2.3); phenylalanine (−2.5); tryptophan (−3.4). It is understood that an amino acid can be substituted for another having a similar hydrophilicity value and still obtain a biologically equivalent, and in particular, an immunologically equivalent polypeptide. In such changes, the substitution of amino acids whose hydrophilicity values are within ±2 is preferred, those that are within ±1 are particularly preferred, and those within ±0.5 are even more particularly preferred.

[0165] As outlined above, amino acid substitutions are generally therefore based on the relative similarity of the amino acid side-chain substituents, for example, their hydrophobicity, hydrophilicity, charge, size, and the like. Exemplary substitutions which take various of the foregoing characteristics into consideration are well known to those of skill in the art and include: arginine and lysine; glutamate and aspartate; serine and threonine; glutamine and asparagine; and valine, leucine and isoleucine (see Table 23, below). The present invention thus contemplates functional or biological equivalents of an Alloiococcus otitidis polypeptide as set forth above.

TABLE 23
AMINO ACID SUBSTITUTIONS

| Original | Exemplary Residue |
|---|---|
| Residue | Substitution |
| Ala | Gly; Ser |
| Arg | Lys |
| Asn | Gln; His |
| Asp | Glu |
| Cys | Ser |
| Gln | Asn |
| Glu | Asp |
| Gly | Ala |
| His | Asn; Gln |
| Ile | Leu; Val |
| Leu | Ile; Val |
| Lys | Arg |
| Met | Met; Leu; Tyr |
| Ser | Thr |
| Thr | Ser |
| Trp | Tyr |
| Tyr | Trp; Phe |
| Val | Ile; Leu |

[0166] Biological or functional equivalents of a polypeptide are also prepared using site-specific mutagenesis. Site-specific mutagenesis is a technique useful in the preparation of second generation polypeptides, or biologically functional equivalent polypeptides or peptides, derived from the sequences thereof, through specific mutagenesis of the underlying DNA. As noted above, such changes can be desirable where amino acid substitutions are desirable. The technique further provides a capacity to prepare and test sequence variants, for example, incorporating one or more of the foregoing considerations, by introducing one or more nucleotide sequence changes into the DNA. Site-specific mutagenesis allows the production of mutants through the use of specific oligonucleotide sequences which encode the DNA sequence of the desired mutation, as well as a sufficient number of adjacent nucleotides, to provide a primer sequence of sufficient size and sequence complexity to form a stable duplex on both sides of the deletion junction being traversed. Typically, a primer of about 17 to 25 nucleotides in length is preferred, with about 5 to 10 residues on both sides of the site of the alteration of the sequence.

[0167] In general, the technique of site-specific mutagenesis is well known in the art. As will be appreciated, the technique typically employs a phage vector that can exist in both a single stranded and double stranded form. Typically, site-directed mutagenesis in accordance herewith is performed by first obtaining a single-stranded vector which includes within its sequence a DNA sequence which encodes all or a portion of the Alloiococcus otitidis polypeptide sequence selected. An oligonucleotide primer bearing the desired mutated sequence is prepared (e.g., synthetically). This primer is then annealed to the singled-stranded vector, and extended by the use of enzymes such as Escherichia coli polymerase I Klenow fragment, in order to complete the synthesis of the mutation-bearing strand. Thus, a heteroduplex is formed wherein one strand encodes the original non-mutated sequence and the second strand bears the desired mutation. This heteroduplex vector is then used to transform appropriate cells such as Escherichia coli cells and clones are selected which include recombinant vectors bearing the mutation. Commercially available kits come with all the reagents necessary, except the oligonucleotide primers.

[0168] An Alloiococcus otitidis polypeptide or polypeptide antigen of the present invention is understood to mean any Alloiococcus otitidis polypeptide comprising substantial sequence similarity, structural similarity and/or functional similarity to an Alloiococcus otitidis polypeptide comprising the amino acid sequence of one of the even numbered sequences set forth in SEQ ID NO: 2 through SEQ ID NO: 6650. In addition, an Alloiococcus otitidis polypeptide or polypeptide antigen of the invention is not limited to a particular source. Thus, the invention provides for the general detection and isolation of the polypeptides from a variety of sources.

[0169] It is contemplated in the present invention, that an Alloiococcus otitidis polypeptide may advantageously be cleaved into fragments for use in further structural or functional analysis, or in the generation of reagents such as Alloiococcus otitidis-related polypeptides and Alloiococcus otitidis-specific antibodies. This can be accomplished by treating purified or unpurified Alloiococcus otitidis polypeptides with a peptidase such as endoproteinase glu-C (Roche Diagnostics Corporation, Indianapolis, Ind.). Treatment with CNBr is another method by which peptide fragments may be produced from natural Alloiococcus otitidis polypeptides. Recombinant techniques also can be used to produce specific fragments of an Alloiococcus otitidis polypeptide.

[0170] In addition, the Applicants also contemplate that compounds sterically similar to a particular Alloiococcus otitidis polypeptide antigen, called peptidomimetics, may be formulated to mimic the key portions of the peptide structure. Peptidemimetics are peptide-containing molecules that mimic elements of protein secondary structure. (See, for example, Johnson et al., 1993.) The underlying rationale behind the use of peptide mimetics is that the peptide backbone of proteins exists chiefly to orient amino acid side chains in such a way as to facilitate molecular interactions, such as those of receptor and ligand.

[0171] Successful applications of the peptide mimetic concept have thus far focused on mimetics of β-turns within proteins. Likely β-turn structures within Alloiococcus otitidis proteins can be predicted by computer-based algorithms as discussed above. Once the component amino acids of the turn are determined, mimetics can be constructed to achieve a similar spatial orientation of the essential elements of the amino acid side chains, as discussed in Johnson et al., 1993.

[0172] Fragments of the Alloiococcus otitidis polypeptides are also included in the invention. A fragment is a polypeptide having an amino acid sequence that entirely is the same as a part, but not all, of the amino acid sequence. The fragment can comprise, for example, at least 7 or more (e.g., 8, 10 12, 14,16, 18, 20 or more) contiguous amino acids of an one of amino acid sequence selected from one of the even numbered sequences set forth in SEQ ID NO.: 2 through SEQ ID NO.: 6650. Fragments may be “freestanding” or comprised within a larger polypeptide of which they form a part or region, most preferably as a single, continuous region. In one embodiment, the fragments include at least one epitope of the mature polypeptide sequence. “Fusion protein” refers to a protein encoded by two, often unrelated, fused genes or fragments thereof. For example, fusion proteins comprising various portions of constant region of immunoglobulin molecules together with another human protein or part thereof have been described. In many cases, employing an immunoglobulin Fc region as a part of a fusion protein is advantageous for use in therapy and diagnosis resulting in, for example, improved pharmacokinetic properties (see, e.g., EP-A 0232 2621). On the other hand, for some uses it would be desirable to be able to delete the Fc part after the fusion protein has been expressed, detected and purified.

### D. ALLOIOCOCCUS OTITIDIS POLYNUCLEOTIDE AND POLYPEPTIDE VARIANTS

[0173] “Variant” as the term is used herein, is a polynucleotide or polypeptide that differs from a reference polynucleotide or polypeptide respectively, but retains essential properties. A typical variant of a polynucleotide differs in nucleotide sequence from another, reference polynucleotide. Changes in the nucleotide sequence of the variant may or may not alter the amino acid sequence of a polypeptide encoded by the reference polynucleotide. Nucleotide changes may result in amino acid substitutions, additions, deletions, fusions and truncations in the polypeptide encoded by the reference sequence, as discussed below. A typical variant of a polypeptide differs in amino acid sequence from another, reference polypeptide. Generally, differences are limited so that the sequences of the reference polypeptide and the variant are closely similar overall and, in many regions, identical. A variant and reference polypeptide may differ in amino acid sequence by one or more substitutions, additions and deletions in any combination. A substituted or inserted amino acid residue may or may not be one encoded by the genetic code. A variant of a polynucleotide or polypeptide may be a naturally occurring such as an allelic variant, or it may be a variant that is not known to occur naturally. Non-naturally occurring variants of polynucleotides and polypeptides may be made by mutagenesis techniques or by direct synthesis.

[0174] “Identity,” as known in the art, is a relationship between two or more polypeptide sequences or two or more polynucleotide sequences, as determined by comparing the sequences. In the art, “identity” also means the degree of sequence relatedness between polypeptide or polynucleotide sequences, as the case may be, as determined by the match between strings of such sequences. “Identity” can be readily calculated by known methods, including but not limited to those described in (Computational Molecular Biology, Lesk, A. M., ed., Oxford University Press, New York, 1988; Biocomputing: Informatics and Genome Projects, Smith, D. W., ed., Academic Press, New York, 1993; Computer Analysis of Sequence Data, Part I, Griffin, A. M., and Griffin, H. G., eds., Humana Press, New Jersey, 1994; Sequence Analysis in Molecular Biology, von Heinje, G., Academic Press, 1987; and Sequence Analysis Primer, Gribskov, M. and Devereux, J., eds., M Stockton Press, New York, 1991; and Carillo, H., and Lipman, D., SIAM J. Applied Math., 48: 1073 (1988). Preferred methods to determine identity are designed to give the largest match between the sequences tested. Methods to determine identity are codified in publicly available computer programs. Preferred computer program methods to determine identity between two sequences include, but are not limited to, the GCG program package (Devereux, J., et al 1984), BLASTP, BLASTN, and FASTA (Altschul, S. F., et al., 1990. The BLASTX program is publicly available from NCBI and other sources (BLAST Manual, Altschul, S., et al., NCBI NLM NIH Bethesda, Md. 20894; Altschul, S., et al., 1990). The well-known Smith-Waterman algorithm may also be used to determine identity. (Smith, T. L. and Waterman, M. S., 1981).

[0175] By way of example, a polynucleotide sequence of the present invention may be identical to the reference sequence of one of the odd numbered sequences set forth in SEQ ID NO:1 through SEQ ID NO: 6649, that is be 100% identical, or it may include up to a certain integer number of nucleotide alterations as compared to the reference sequence. Such alterations are selected from the group consisting of at least one nucleotide deletion, substitution, including transition and transversion, or insertion, and wherein said alterations may occur at the 5′ or 3′ terminal positions of the reference nucleotide sequence or anywhere between those terminal positions, interspersed either individually among the nucleotides in the reference sequence or in one or more contiguous groups within the reference sequence. The number of nucleotide alterations is determined by multiplying the total number of nucleotides in one of the odd numbered sequences set forth in SEQ ID NO: 1 through SEQ ID NO: 6649 by the numerical percent of the respective percent identity (divided by 100) and subtracting that product from said total number of nucleotides in one of the odd numbered sequences set forth in SEQ ID NO: 1 through SEQ ID NO: 6649.

[0176] For example, the alterations in an isolated Alloiococcus otitidis polynucleotide comprising a polynucleotide sequence that has at least 70% identity to the nucleic acid sequence of one of the odd numbered sequences set forth in SEQ ID NO: 1 through SEQ ID NO: 6649; a degenerate variant thereof or a fragment thereof, wherein the polynucleotide sequence may include up to nₙ nucleic acid alterations over the entire polynucleotide region of the nucleic acid sequence of one of the odd numbered sequences set forth in SEQ ID NO: 1 through SEQ ID NO: 6649, wherein nₙ is the maximum number of alterations and is calculated by the formula:
nₙ≦xₙ−(xₙ·y),
in which xₙ is the total number of nucleic acids of one of the odd numbered sequences set forth in SEQ ID NO:1 through SEQ ID NO:6649 and y has a value of 0.70, wherein any non-integer product of xₙ and y is rounded down to the nearest integer prior to subtracting such product from xₙ. Furthermore, y may also have a value of 0.80 for 80%, 0.85 for 85%, 0.90 for 90% 0.95 for 95%, etc.

[0177] Similarly, a polypeptide sequence of the present invention may be identical to the reference sequence of one of the even numbered sequences set forth in SEQ ID NO: 2 through SEQ ID NO: 6650, that is 100% identical, or it may include up to a certain integer number of amino acid alterations as compared to the reference sequence such that the percentage identity is less than 100%. Such alterations are selected from the group consisting of at least one amino acid deletion, substitution, including conservative and non-conservative substitution, or insertion, and wherein said alterations may occur at the amino- or carboxy-terminal positions of the reference polypeptide sequence or anywhere between those terminal positions, interspersed either individually among the amino acids in the reference sequence or in one or more contiguous groups within the reference sequence. The number of amino acid alterations for a given % identity is determined by multiplying the total number of amino acids in one of the even numbered sequences set forth in SEQ ID NO: 2 through SEQ ID NO: 6650 by the numerical percent of the respective percent identity (divided by 100) and then subtracting that product from said total number of amino acids in one of the even numbered sequences set forth in SEQ ID NO: 2 through SEQ ID NO: 6650, or:
nₐ≦xₐ−(xₐ·y),
wherein nₐ is the number of amino acid alterations, xₐ is the total number of amino acids in one of the even numbered sequences set forth in SEQ ID NO: 2 through SEQ ID NO: 6650, and y is, for instance 0.70 for 70%, 0.80 for 80%, 0.85 for 85% etc., and wherein any non-integer product of xₐ and y is rounded down to the nearest integer prior to subtracting it from xₐ.
E. VECTORS, HOST CELLS AND RECOMBINANT ALLOIOCOCCUS OTITIDIS POLYPEPTIDES

[0178] In a preferred embodiment, the present invention provides expression vectors comprising ORF polynucleotides that encode Alloiococcus otitidis polypeptides. Preferably, the expression vectors of the present invention comprise ORF polynucleotides that encode Alloiococcus otitidis polypeptides comprising the amino acid residue sequence of one of the even numbered sequences set forth in SEQ ID NO: 2 through SEQ ID NO: 6650. More preferably, the expression vectors of the present invention comprise a polynucleotide comprising the nucleotide base sequence of one of the odd numbered sequences set forth in SEQ ID NO: 1 through SEQ ID NO: 6649. Even more preferably, the expression vectors of the invention comprise a polynucleotide operatively linked to a promoter. Still more preferably, the expression vectors of the invention comprise a polynucleotide operatively linked to a prokaryotic promoter. Alternatively, the expression vectors of the present invention comprise a polynucleotide operatively linked to an enhancer-promoter, that is, an eukaryotic promoter. The expression vectors further comprise a polyadenylation signal that is positioned 3′ of the codon encoding the carboxy-terminal amino acid and within a transcriptional unit of the encoded polypeptide.

[0179] Expression of proteins in prokaryotes is most often carried out in Escherichia coil with vectors containing constitutive or inducible promoters directing the expression of either fusion or non-fusion proteins. Fusion vectors add a number of amino acids to a protein encoded therein, usually to the amino terminus of the recombinant protein. Such fusion vectors typically serve three purposes: 1) to increase expression of recombinant protein; 2) to increase the solubility of the recombinant protein; and 3) to aid in the purification of the recombinant protein by acting as a ligand in affinity purification. Often, in fusion expression vectors, a proteolytic cleavage site is introduced at the junction of the fusion moiety and the recombinant protein to enable separation of the recombinant protein from the fusion moiety subsequent to purification of the fusion protein. Such enzymes, and their cognate recognition sequences, include Factor Xa, thrombin and enterokinase.

[0180] Typical fusion expression vectors include pGEX (Pharmacia Biotech Inc;), pMAL (New England Biolabs, Beverly; Mass.) and pRIT5 (Pharmacia, Piscataway, N.J.) which fuse glutathione S-transferase (GST), maltose E binding protein, or protein A, respectively, to the target recombinant protein.

[0181] In one embodiment, the coding sequence of the Alloiococcus otitidis polynucleotide is cloned into a pGEX expression vector to create a vector encoding a fusion protein comprising, from the N-terminus to the C-terminus, GST-thrombin cleavage site-Alloiococcus otitidis polypeptide. The fusion protein is purified by affinity chromatography using glutathione-agarose resin. Recombinant Alloiococcus otitidis polypeptide unfused to GST is recovered by cleavage of the fusion protein with thrombin.

[0182] Examples of suitable inducible non-fusion Escherichia coli expression vectors include pTrc (Amann et al., 1988) and pET I I d (Studier et al., 1990). Target gene expression from the pTrc vector relies on host RNA polymerase transcription from a hybrid trp-lac fusion promoter. Target gene expression from the pET II vector relies on transcription from a T7 gene1 lac fusion promoter mediated by a coexpressed viral RNA polymerase T7 genel. This viral polymerase is supplied by host strains BL21 (DE3) or HMS I 74(DE3) from a resident prophage harboring a T7 gene1 gene under the transcriptional control of the lacUV 5 promoter.

[0183] One strategy to maximize recombinant protein expression in Escherichia coli is to express the protein in a host bacterium with an impaired capacity to proteolytically cleave the recombinant protein. Another strategy is to alter the nucleic acid sequence of the nucleic acid to be inserted into an expression vector so that the individual codons for each amino acid are those preferentially utilized in Escherichia coli. Such alteration of nucleic acid sequences of the invention can be carried out by standard DNA mutagenesis or synthesis techniques.

[0184] In another embodiment, the Alloiococcus otitidis polynucleotide expression vector is a yeast expression vector. Examples of vectors for expression in a yeast such as S. cerevisiae include pYepSec I (Baldari, et al., 1987), pMFa (Kurjan and Herskowitz, 1982), pJRY88 (Schultz et al., 1987), and pYES2 (Invitrogen Corporation, San Diego, Calif.).

[0185] Alternatively, an Alloiococcus otitidis polynucleotide is expressed in insect cells using, for example, baculovirus expression vectors. Baculovirus vectors available for expression of proteins in cultured insect cells (e.g., Sf 9 or Sf 21 cells) include the pAc series (Smith et al., 1983) and the pVL series (Lucklow and Summers, 1989).

[0186] In yet another embodiment, a nucleic acid of the invention is expressed in mammalian cells using a mammalian expression vector. Examples of mammalian expression vectors include pCDM8 (Seed, 1987) and pMT2PC (Kaufman et al., 1987). When used in mammalian cells, the expression vector's control functions are often provided by viral regulatory elements.

[0187] For example, commonly used promoters are derived from polyoma, Adenovirus 2, cytomegalovirus (CMV) and Simian Virus 40 (SV40). For other suitable expression systems for both prokaryotic and eukaryotic cells see chapters 16 and 17 of Sambrook et al., “Molecular Cloning: A Laboratory Manual” 2nd, ed, Cold Spring Harbor Laboratory, Cold Spring Harbor Laboratory Press, Cold Spring Harbor, N.Y., 1989, incorporated herein by reference.

[0188] In another embodiment, the recombinant mammalian expression vector is capable of directing expression of the nucleic acid preferentially in a particular cell type (e.g., tissue-specific regulatory elements are used to express the nucleic acid). Tissue-specific regulatory elements are known in the art. Non-limiting examples of suitable tissue-specific promoters include the albumin promoter (liver-specific; Pinkert et al., 1987), lymphoid-specific promoters (Calame and Eaton, 1988), in particular promoters of T cell receptors (Winoto and Baltimore, 1989) and immunoglobulins (Banerli et al., (1983); and Queen and Baltimore (1983)), neuron-specific promoters (e.g., the neurofilament promoter; Byrne and Ruddle, 1989), pancreas-specific promoters (Edlund et al., 1985), and mammary gland-specific promoters (e.g., milk whey promoter; U.S. Pat. No. 4, 873,316 and EP 264,166). Developmentally-regulated promoters are also encompassed, for example the murine hox promoters (Kessel and Gruss, 1990) and the α-fetoprotein promoter (Campes and Tilghman, 1989).

[0189] The invention further provides a recombinant expression vector comprising a DNA molecule encoding an Alloiococcus otitidis polypeptide cloned into the expression vector in an antisense orientation. That is, the DNA molecule is operatively linked to a regulatory sequence in a manner which allows for expression (by transcription of the DNA molecule) of an RNA molecule which is antisense to Alloiococcus otitidis mRNA. Regulatory sequences operatively linked to a nucleic acid cloned in the antisense orientation can be chosen which direct the continuous expression of the antisense RNA molecule in a variety of cell types, for instance viral promoters and/or enhancers, or regulatory sequences can be chosen which direct constitutive, tissue specific or cell type specific expression of antisense RNA. The antisense expression vector cari be in the form of a recombinant plasmid, phagemid or attenuated virus in which antisense nucleic acids are produced under the control of a high efficiency regulatory region, the activity of which can be determined by the cell type into which the vector is introduced.

[0190] Another aspect of the invention pertains to host cells into which a recombinant expression vector of the invention has been introduced. The terms “host cell” and “recombinant host cell” are used interchangeably herein. It is understood that such terms refer not only to the particular subject cell but also to the progeny or potential progeny of such a cell. Because certain modifications may occur in succeeding generations due to either mutation or environmental influences, such progeny may not, in fact, be identical to the parent cell, but are still included within the scope of the term as used herein. A host cell can be any prokaryotic or eukaryotic cell. For example, an Alloiococcus otitidis polypeptide can be expressed in bacterial cells such as Escherichia coli, insect cells, yeast or mammalian cells (such as Chinese hamster ovary cells (CHO), NIH3T3, PER C6, NSO or COS cells). Other suitable host cells are known to those skilled in the art.

[0191] Vector DNA can be introduced into prokaryotc or eukaryotic cells via conventional transformation, infection or transfection techniques. As used herein, the terms “transformation” and “transfection” are intended to refer to a variety of art-recongnized techniques for introducing foreign nucleic acid (e.g., DNA) into a host cell, including calcium phosphate or calcium chloride co-precipitation, DEAE-dextran-mediated transfection, lipofection, protoplast fusion, direct microinfection. Another recognized technique for introducing DNA into a host cell is “infection”, such as by adenovirus infection or electroporation. Suitable methods for transforming, infecting or transfecting host cells can be found in Sambrook, et al. (“Molecular Cloning: A Laboratory Manual” 2nd ed, Cold Spring Harbor Laboratory, Cold Spring Harbor Laboratory Press, Cold Spring Harbor, N.Y., 1989), and other laboratory manuals.

[0192] The most widely used method is transfection mediated by either calcium phosphate or DEAE-dextran. Although the mechanism remains unclear, it is believed that the transfected DNA enters the cytoplasm of the cell by endocytosis and is transported to the nucleus. Depending on the cell type, up to 90% of a population of cultured cells can be transfected at any one time. Because of its high efficiency, transfection mediated by calcium phosphate or DEAE-dextran is the method of choice for experiments that require transient expression of the foreign DNA in large numbers of cells. Calcium phosphate-mediated transfection is also used to establish cell lines that integrate copies of the foreign DNA, which are usually arranged in head-to-tail tandem arrays into the host cell genome.

[0193] In the protoplast fusion method, protoplasts derived from bacteria carrying high numbers of copies of plasmid of interest are mixed directly with cultured mammalian cells. After fusion of the cell membranes (usually with polyethylene glycol), the contents of the bacteria are delivered into the cytoplasm of the mammalian cells and the plasmid DNA is transported to the nucleus. Protoplast fusion is not as efficient as transfection for many of the cell lines that are commonly used for transient expression assays, but it is useful for cell lines in which endocytosis of DNA occurs inefficiently. Protoplast fusion frequently yields multiple copies of the plasmid DNA tandemly integrated into the host chormosome.

[0194] The application of brief, high-voltage electric pulses (electroporation) to a variety of mammalian and plant cells leads to the formation of nanometer-sized pores in the plasma membrane. DNA is taken directly into the cell cytoplasm either through these pores or as a consequence of the redistribution of membrane components that accompanies closure of the pores. Electroporation can be extremely efficient and can be used both for transient expression of cloned genes and for establishment of cell lines that carry integrated copies of the gene of interest. Electroporation, in contrast to calcium phosphate-mediated transfection and protoplast fusion, frequently gives rise to cell lines that carry one, or at most a few, integrated copies of the foreign DNA.

[0195] Liposome transfection involves encapsulation of DNA and RNA within liposomes, followed by fusion of the liposomes with the cell membrane. The mechanism of how DNA is delivered into the cell is unclear, but transfection efficiencies can be as high as 90%.

[0196] Direct microinjection of a DNA molecule into nuclei has the advantage of not exposing DNA to cellular compartments such as low-pH endosomes. Microinjection therefore used primarily as a method to establish lines of cells that carry integrated copies of the DNA of interest.

[0197] The use of adenovirus as a vector for cell transfection is well known in the art. Adenovirus vector-mediated cell transfection has been reported for various cells (Stratford-Perricaudet, et al. 1992).

[0198] A host cell of the invention, such as a prokaryotic or eukaryotic host cell in culture, is used to produce (ie., express) one or more Alloiococcus otitidis polypeptides. Accordingly, the invention further provides methods for producing an Alloiococcus otitidis polypeptide using the host cells of the invention. In one embodiment, the method comprises culturing the host cell of invention (into which a recombinant expression vector encoding an Alloiococcus otitidis polypeptide has been introduced) in a suitable medium until the Alloiococcus otitidis polypeptide is produced. In another embodiment, the method further comprises isolating the Alloiococcus otitidis polypeptide from the medium or the host cell.

[0199] As used herein, a promoter is a region of a DNA molecule typically within about 100 nucleotide pairs in front of (upstream of) the point at which transcription begins (i.e., a transcription start site). That region typically contains several types of DNA sequence elements that are located in similar relative positions in different genes. As used herein, the term “promoter” includes what is referred to in the art as an upstream promoter region, a promoter region or a promoter of a generalized eukaryotic RNA Polymerase II transcription unit.

[0200] Another type of discrete transcription regulatory sequence element is an enhancer. An enhancer provides specificity of time, location and expression level for a particular encoding region (e.g., gene). A major function of an enhancer is to increase the level of transcription of a coding sequence in a cell that contains one or more transcription factors that bind to that enhancer. Unlike a promoter, an enhancer can function when located at variable distances from transcription start sites so long as a promoter is present.

[0201] As used herein, the phrase “enhancer-promoter” means a composite unit that contains both enhancer and promoter elements. An enhancer-promoter is operatively linked to a coding sequence that encodes at least one gene product. As used herein, the phrase “operatively linked” means that an enhancer-promoter is connected to a coding sequence in such a way that the transcription of that coding sequence is controlled and regulated by that enhancer-promoter. Means for operatively linking an enhancer-promoter to a coding sequence are well known in the art. As is also well known in the art, the precise orientation and location relative to a coding sequence whose transcription is controlled, is dependent inter alia upon the specific nature of the enhancer-promoter. Thus, a TATA box minimal promoter is typically located from about 25 to about 30 base pairs upstream of a transcription initiation site and an upstream promoter element is typically located from about 100 to about 200 base pairs upstream of a transcription initiation site. In contrast, an enhancer can be located downstream from the initiation site and can be at a considerable distance from that site.

[0202] An enhancer-promoter used in a vector construct of the present invention can be any enhancer-promoter that drives expression in a cell to be transfected. By employing an enhancer-promoter with well-known properties, the level and pattern of gene product expression can be optimized.

[0203] A coding sequence of an expression vector is operatively linked to a transcription termination region. RNA polymerase transcribes an encoding DNA sequence through a site where polyadenylation occurs. Typically, DNA sequences located a few hundred base pairs downstream of the polyadenylation site serve to terminate transcription. Those DNA sequences are referred to herein as transcription-termination regions. Those regions are required for efficient polyadenylation of transcribed messenger RNA (mRNA). Transcription-terminating regions are well known in the art. A preferred transcription-terminating region used in a vector construct of the present invention comprises a polyadenylation signal of SV40 or the protamine gene. The bGH polyadenylation signal is also suitable for use.

[0204] An expression vector comprises a polynucleotide that encodes an Alloiococcus otitidis polypeptide. Such a polypeptide is meant to include a sequence of nucleotide bases encoding an Alloiococcus otitidis polypeptide sufficient in length to distinguish the segment from a polynucleotide segment encoding a non-Alloiococcus otitidis polypeptide. A polypeptide of the invention can also encode biologically functional polypeptides or peptides, which have variant amino acid sequences, such as with changes selected, based on considerations such as the relative hydropathic score of the amino acids being exchanged. These variant sequences are those isolated from natural sources or induced in the sequences disclosed herein using a mutagenic procedure such as site-directed mutagenesis.

[0205] Preferably, an expression vector of the present invention comprises a polynucleotide that encodes a polypeptide comprising the amino acid residue sequence of one of even numbered sequences set forth in SEQ ID NO: 2 through SEQ ID NO:.6650 An expression vector can include an Alloiococcus otitidis polypeptide coding region itself of any of the Alloiococcus otitidis polypeptides noted above or it can contain coding regions bearing selected alterations or modifications in the basic coding region of such an Alloiococcus otitidis polypeptide. Alternatively, such vectors or fragments can encode larger polypeptides or polypeptides which nevertheless include the basic coding region. In any event, it should be appreciated that due to codon redundancy as well as biological functional equivalence, this aspect of the invention is not limited to the particular DNA molecules corresponding to the polypeptide sequences noted above.

[0206] Exemplary vectors include the mammalian expression vectors of the pCMV family including pCMV6b and pCMV6c (Chiron Corp., Emeryville Calif.). In certain cases, and specifically in the case of these individual mammalian expression vectors, the resulting constructs can require co-transfection with a vector containing a selectable marker such as pSV2neo. Via co-transfection into a dihydrofolate reductase-deficient Chinese hamster ovary cell line, such as DG44, clones expressing Alloiococcus otitidis polypeptides by virtue of DNA incorporated into such expression vectors can be detected.

[0207] A DNA molecule of the present invention can be incorporated into a vector by a number of techniques that are well known in the art. For instance, the vector pUC18 has been demonstrated to be of particular value in cloning and expression of genes. Likewise, the related vectors M13mp18 and M13mp19 can also be used in certain embodiments of the invention, in particular, in performing dideoxy sequencing.

[0208] An expression vector of the present invention is useful both as a means for preparing quantities of the Alloiococcus otitidis polypeptide-encoding DNA itself, and as a means for preparing the encoded polypeptide and peptides. It is contemplated that where Alloiococcus otitidis polypeptides of the invention are made by recombinant means, one can employ either prokaryotic or eukaryotic expression vectors as shuttle systems. In another aspect, the recombinant host cells of the present invention are prokaryotic host cells. Preferably, the recombinant host cells of the invention are bacterial cells of the DH5α strain of Escherichia coli. In general, prokaryotes are preferred for the initial cloning of DNA sequences and constructing the vectors useful in the invention. For example, Escherichia coli K12 strains can be particularly useful. Other microbial strains that can be used include Escherichia coli B, Escherichia coli W3110 (ATCC No. 273325) and Escherichia. coliₓ1976 (ATCC No. 31537). Bacilli such as Bacillus subtilis, or other enterobacteriaceae such as Salmonella typhimurium or Serratia marcesans, and various Pseudomonas species can be used. These examples are, of course, intended to be illustrative rather than limiting.

[0209] In general, plasmid vectors containing replicon and control sequences that are derived from species compatible with the host cell are used in connection with these hosts. The vector ordinarily carries a replication site, as well as marking sequences that are capable of providing phenotypic selection in transformed cells. For example, Escherichia coli is transformed using pBR322, a plasmid derived from an Escherichia coli species (Bolivar, et al. 1977). pBR322 contains genes for ampicillin and tetracycline resistance and thus provides an easy means for identifying transformed cells. The pBR322 plasmid, or other microbial plasmid or phage, must also contain, or be modified to contain, promoters, which can be used by the microbial organism for expression of its own polypeptides.

[0210] Those promoters most commonly used in recombinant DNA construction include the β-lactamase (penicillinase) and lactose promoter systems (Chang, et al. 1978; Itakura, et al. 1977, Goeddel, et al. 1979; Goeddel, et al. 1980) and a tryptophan (TRP) promoter system (EP 0036776; Siebwenlist et al. 1980). While these are the most commonly used, other microbial promoters have been discovered and utilized, and details concerning their nucleotide sequences have been published, enabling a skilled worker to introduce functional promoters into plasmid vectors (Siebwenlist, et al. 1980).

[0211] In addition to prokaryotes, eukaryotic microbes such as yeast can also be used. Saccharomyces cerevisiase or common baker's yeast is the most commonly used among eukaryotic microorganisms, although a number of other strains are commonly available. For expression in Saccharomyces, the plasmid YRp7, for example, is commonly used (Stinchcomb, et al. 1979; Kingsman, et al. 1979; Tschemper, et al. 1980). This plasmid already contains the trpl gene that provides a selection marker for a mutant strain of yeast lacking the ability to grow in tryptophan, for example ATCC No. 44076 or PEP4-1 (Jones, 1977). The presence of the trpl lesion as a characteristic of the yeast host cell genome then provides an effective environment for detecting transformation by growth in the absence of tryptophan.

[0212] Suitable promoter sequences in yeast vectors include the promoters for 3-phosphoglycerate kinase (PGK) (Hitzeman, et al. 1980) or other glycolytic enzymes such as enolase, glyceraldehyde-3-phosphate dehydrogenase, hexokinase, pyruvate decarboxylase, phosphofructokinase, glucose-6-phosphate isomerase, 3-phosphoglycerate mutase, pyruvate kinase, triosephosphate isomerase, phosphoglucose isomerase, and glucokinase. In constructing suitable expression plasmids, the termination sequences associated with these genes are also introduced into the expression vector downstream from the sequences to be expressed to provide polyadenylation of the mRNA and termination. Other promoters, which have the additional advantage of transcription controlled by growth conditions are the promoter region for alcohol dehydrogenase 2, isocytochrome C, acid phosphatase, degradative enzymes associated with nitrogen metabolism, and the aforementioned glyceraldehyde-3-phosphate dehydrogenase, and enzymes responsible for maltose and galactose utilization. Any plasmid vector containing a yeast-compatible promoter, origin of replication, and termination sequences is suitable.

[0213] In addition to microorganisms, cultures of cells derived from multicellular organisms can also be used as hosts. In principle, any such cell culture is workable, whether from vertebrate or invertebrate culture. However, interest has been greatest in vertebrate cells, and propagation of vertebrate cells in culture (tissue culture) has become a routine procedure in recent years. Examples of such useful host cell lines are AtT-20, VERO, HeLa, NSO, PER C6, Chinese hamster ovary (CHO) cell lines, W138, BHK, COSM6, COS-7, 293 and MDCK cell lines. Expression vectors for such cells ordinarily include (if necessary) an origin of replication, a promoter located upstream of the gene to be expressed, along with any necessary ribosome binding sites, RNA splice sites, polyadenylation site, and transcriptional terminator sequences.

[0214] Where expression of recombinant Alloiococcus otitidis polypeptides is desired and a eukaryotic host is contemplated, it is most desirable to employ a vector, such as a plasmid, that incorporates a eukaryotic origin of replication. Additionally, for the purposes of expression in eukaryotic systems, one desires to position the Alloiococcus otitidis encoding sequence adjacent to and under the control of an effective eukaryotic promoter such as promoters used in combination with Chinese hamster ovary cells (CHO). To bring a coding sequence under control of a promoter, whether it is eukaryotic or prokaryotic, what is generally needed is to position the 5′ end of the translation initiation site of the proper translational reading frame of the polypeptide between about 1 and about 50 nucleotides 3′ of (downstream) the promoter chosen. Furthermore, where eukaryotic expression is anticipated, one would typically desire to incorporate an appropriate polyadenylation site into the transcriptional unit that includes the Alloiococcus otitidis polypeptide.

[0215] A transfected cell can be prokaryotic or eukaryotc. Preferably, the host cells of the invention are prokaryotic host cells. Where it is of interest to produce an Alloiococcus otitidis polypeptide, cultured prokaryotic host cells are of particular interest.

[0216] In yet another embodiment, the present invention contemplates a process or method of preparing Alloiococcus otitidis polypeptides comprising transfecting, transforming or infecting cells with a polynucleotide that encodes an Alloiococcus otitidis polypeptide to produce transformed host cells; and maintaining the transformed host cells under biological conditions sufficient for expression of the polypeptide. Preferably, the transformed host cells are prokaryotic cells. Alternatively, the host cells are eukaryotic cells. More preferably, the prokaryotic cells are bacterial cells of the DH5α strain of Escherichia coli. Even more preferably, the polynucleotide transfected into the transformed cells comprises the nucleic acid sequence of one of the odd numbered sequences set forth in SEQ ID NO: 1 through SEQ ID NO: 6649. Additionally, transfection is accomplished using an expression vector disclosed above. A host cell used in the process is capable of expressing a functional, recombinant Alloiococcus otitidis polypeptide.

[0217] Following transfection, the cell is maintained under culture conditions for a period of time sufficient for expression of an Alloiococcus otitidis polypeptide. Culture conditions are well known in the art and include ionic composition and concentration, temperature, pH and the like. Typically, transfected cells are maintained under culture conditions in a culture medium. Suitable media for various cell types are well known in the art. in a preferred embodiment, temperature is from about 20° C. to about 50° C., more preferably from about 30° C. to about 40° C. and, even more preferably about 37° C.

[0218] The pH is preferably from about a value of 6.0 to a value of about 8.0, more preferably from about a value of about 6.8 to a value of about 7.8 and, most preferably about 7.4. Osmolality is preferably from about 200 milliosmols per liter (mosm/L) to about 400 mosm/l and, more preferably from about 290 mosm/L to about 310 mosm/L. Other biological conditions needed for transfection and expression of an encoded protein are well known in the art.

[0219] Transfected cells are maintained for a period of time sufficient for expression of an Alloiococcus otitidis polypeptide. A suitable time depends inter alla upon the cell type used and is readily determinable by a skilled artisan. Typically, maintenance time is from about 2 to about 14 days.

[0220] Recombinant Alloiococcus otitidis polypeptide is recovered or collected either from the transfected cells or the medium in which those cells are cultured. Recovery comprises isolating and purifying the Alloiococcus otitidis polypeptide. Isolation and purification techniques for polypeptides are well known in the art and include such procedures as precipitation, filtration, chromatography, electrophoresis and the like.

### F. ANTIBODIES IMMUNOREACTIVE WITH ALLOIOCOCCUS OTITIDIS POLYPEPTIDES

[0221] In still another embodiment, the present invention provides antibodies immunoreactive with Alloiococcus otitidis polypeptides. Preferably, the antibodies of the invention are monoclonal antibodies. Additionally, the Alloiococcus otitidis polypeptides comprise the amino acid residue sequence of one of the even numbered sequences set forth in SEQ ID NO: 2 through SEQ ID NO: 6650. Means for preparing and characterizing antibodies are well known in the art (see, e.g., Antibodies “A Laboratory. Manual”, E. Howell and D. Lane, Cold Spring Harbor Laboratory, 1988). Polyclonal antisera is obtained by bleeding an immunized animal into a glass or plastic container, incubating the blood at 25° C. for one hour, followed by incubating at 4° C. for 2-18 hours. The serum is then recovered by centrifugation.

[0222] Briefly, a polyclonal antibody is prepared by immunizing the animal with an immunogen comprising a polypeptide or polynucleotide of the present invention, and collecting antisera from that immunized animal. A wide range of animal species can be used for the production of antisera. Typically an animal used for production of anti-antisera is a rabbit, a mouse, a rat, a hamster or a guinea pig. Because of the relatively large blood volume of rabbits, a rabbit is a preferred choice for production of polyclonal antibodies.

[0223] As is well known in the art, a given polypeptide or polynucleotide may vary in its immunogenicity. It is often necessary therefore to couple the immunogen (e.g., a polypeptide or polynucleotide) of the present invention with a carrier. Exemplary and preferred carriers are keyhole limpet hemocyanin (KLH) and bovine serum albumin (BSA). Other albumins such as ovalbumin, mouse serum albumin or rabbit serum albumin can also be used as carriers.

[0224] Means for conjugating a polypeptide or a polynucleotide to a carrier protein are well known in the art and include glutaraldehyde, m-maleimidobencoyl-N-hydroxysuccinimide ester, carbodiimide and bis-biazotized benzidine.

[0225] The amount of immunogen used for the production of polyclonal antibodies varies inter alia, upon the nature of the immunogen as well as the animal used for immunization. A variety of routes can be used to administer the immunogen (subcutaneous, intramuscular, intradermal, intravenous and intraperitoneal). The production of polyclonal antibodies is monitored by sampling blood from the immunized animal at various points following immunization. When a desired level of immunogenicity is obtained, the immunized animal can be bled and the serum isolated and stored.

[0226] In another aspect, the present invention contemplates a process of producing an antibody immunoreactive with an Alloiococcus otitidis polypeptide comprising the steps of (a) transfecting recombinant host cells with a polynucleotide that encodes an Alloiococcus otitidis polypeptide; (b) culturing the host cells under conditions sufficient for expression of the polypeptide; (c) recovering the polypeptides; and (d) preparing the antibodies to the polypeptides. Preferably, the host cell is transfected with the polynucleotide of one of the odd numbered sequences set forth in SEQ ID NO: 1 through SEQ ID NO: 6649. Even more preferably, the present invention provides antibodies prepared according to the process described above.

[0227] A monoclonal antibody of the present invention is readily prepared through use of well-known techniques such as those exemplified in U.S. Pat. No. 4,196,265, herein incorporated by reference. Typically, the technique involves first immunizing a suitable animal with a selected antigen (e.g., a polypeptide or polynucleotide of the present invention) in a manner sufficient to provide an immune response. Rodents such as mice and rats are preferred animals. Spleen cells from the immunized animal are then fused with cells of an immortal myeloma cell. Where the immunized animal is a mouse, a preferred myeloma cell is a murine NS-1 myeloma cell.

[0228] The fused spleen/myeloma cells are cultured in a selective medium to select fused spleen/myeloma cells from the parental cells. Fused cells are separated from the mixture of non-fused parental cells, e.g., by the addition of agents that block the de novo synthesis of nucleotides in the tissue culture media. Exemplary and preferred agents are aminopterin, methotrexate, and azaserine. Aminopterin and methotrexate block de novo synthesis of both purines and pyrimidines, whereas azaserine blocks only purine synthesis. Where aminopterin or methotrexate is used, the media is supplemented with hypoxanthine and thymidine as a source of nucleotides. Where azaserine is used, the media is supplemented with hypoxanthine.

[0229] This culturing provides a population of hybridomas from which specific hybridomas are selected. Typically, selection of hybridomas is performed by culturing the cells by single-clone dilution in microtiter plates, followed by testing the individual clonal supernatants for reactivity with an antigen-polypeptide. The selected clones are then propagated indefinitely to provide the monoclonal antibody.

[0230] By way of specific example, to produce an antibody of the present invention, mice are injected intraperitoneally with between about 1-200 μg of an antigen comprising a polypeptide of the present invention. B lymphocyte cells are stimulated to grow by injecting the antigen in association with an adjuvant such as complete Freund's adjuvant (CFA; a non-specific stimulator of the immune response containing killed Mycobacterium tuberculosis). At some time (e.g., at least two weeks) after the first injection, mice are boosted by injection with a second dose of the antigen mixed with incomplete Freund's adjuvant (IFA; lacks the killed mycobacterium of CFA).

[0231] A few weeks after the second injection, mice are tail bled and the sera titered by immunoprecipitation against radiolabeled antigen. Preferably, the process of boosting and titering is repeated until a suitable titer is achieved. The spleen of the mouse with the highest titer is removed and the spleen lymphocytes are obtained by homogenizing the spleen with a syringe. Typically, a spleen from an immunized mouse contains approximately 5×10⁷ to 2×10⁸ lymphocytes.

[0232] Mutant lymphocyte cells known as myeloma cells are obtained from laboratory animals in which such cells have been induced to grow by a variety of well-known methods. Myeloma cells lack the salvage pathway of nucleotide biosynthesis. Because myeloma cells are tumor cells, they can be propagated indefinitely in tissue culture, and are thus denominated immortal. Numerous cultured cell lines of myeloma cells from mice and rats, such as murine NS-1 myeloma cells, have been established.

[0233] Myeloma cells are combined under conditions appropriate to foster fusion with the normal antibody-producing cells from the spleen of the mouse or rat injected with the antigen/polypeptide of the present invention. Fusion conditions include, for example, the presence of polyethylene glycol. The resulting fused cells are hybridoma cells. Like myeloma cells, hybridoma cells grow indefinitely in culture.

[0234] Hybridoma cells are separated from unfused myeloma cells by culturing in a selection medium such as HAT media (hypoxanthine, aminopterin, thymidine). Unfused myeloma cells lack the enzymes necessary to synthesize nucleotides from the salvage pathway because they are killed in the presence of aminopterin, methotrexate, or azaserine. Unfused lymphocytes also do not continue to grow in tissue culture. Thus, only cells that have successfully fused (hybridoma cells) can grow in the selection media.

[0235] Each of the surviving hybridoma cells produces a single antibody. These cells are then screened for the production of the specific antibody immunoreactive with an antigen/polypeptide of the present invention. Single cell hybridomas are isolated by limiting dilutions of the hybridomas. The hybridomas are serially diluted many times and, after the dilutions are allowed to grow, the supematant is tested for the presence of the monoclonal antibody. The clones producing that antibody are then cultured in large amounts to produce an antibody of the present invention in convenient quantity.

[0236] By use of a monoclonal antibody of the present invention, specific polypeptides and polynucleotide of the invention are identified as antigens. Once identified, those polypeptides and polynucleotide are isolated and purified by techniques such as antibody-affinity chromatography. In antibody-affinity chromatography, a monoclonal antibody is bound to a solid substrate and exposed to a solution containing the desired antigen. The antigen is removed from the solution through an immunospecific reaction with the bound antibody. The polypeptide or polynucleotide is then easily removed from the substrate and purified.

[0237] Additionally, examples of methods and reagents particularly amenable for use in generating and screening an antibody display library can be found in, for example, U.S. Pat. No. 5,223,409; WO 92/18619; WO 91/17271; WO 92/20791; WO 92/15679; WO 93/01288; WO 92/01047; WO 92/09690; WO 90/02809, which are incorporated herein in their entirety by reference.

[0238] Additionally, recombinant anti-Alloiococcus otitidis antibodies, such as chimeric and humanized monoclonal antibodies, comprising both human and non-human fragments, which are made using standard recombinant DNA techniques, are within the scope of the invention. Such chimeric and humanized monoclonal antibodies are produced by recombinant DNA techniques known in the art, for example using methods described in PCT/US86/02269; EP 184,187; EP 171,496; EP 173,494; WO 86/01533; U.S. Pat. No. 4,816,567; and EP 125,023.

[0239] An anti-Alloiococcus otitidis antibody (e.g., monoclonal antibody) is used to isolate Alloiococcus otitidis polypeptides by standard techniques, such as affinity chromatography or immunoprecipitation. An anti-Alloiococcus otitidis antibody facilitates the purification of a natural Alloiococcus otitidis polypeptide from cells and recombinantly produced Alloiococcus otitidis polypeptides expressed in host cells. Moreover, an anti-Alloiococcus otitidis antibody is used to detect Alloiococcus otitidis polypeptide (e.g., in a cellular lysate or cell supernatant) in order to evaluate the abundance of the Alloiococcus otitidis polypeptide. The detection of circulating fragments of an Alloiococcus otitidis polypeptide is used to identify Alloiococcus otitidis polypeptide turnover in a subject. Anti-Alloiococcus otitidis antibodies are used diagnostically to monitor protein levels in issue as part of a clinical testing procedure, e.g., to, for example, determine the efficacy of a given treatment regimen. Detection is facilitated by coupling (i.e., physically linking) the antibody to a detectable substance. Examples of detectable substances include various enzymes, prosthetic groups, fluorescent materials, luminescent materials, bioluminescent materials, and radioactive materials. Examples of suitable enzymes include horseradish peroxidase, alkaline phosphatase, P-galactosidase, or acetylcholinesterase; examples of suitable prosthetic group complexes include streptavidin/biotin and avidin/biotin; examples of suitable fluorescent materials include umbelliferone, fluorescein, fluorescein isothiocyanate, rhodamine, dichlorotriazinylarnine fluorescein, dansyl chloride or phycoerythrin; an example of a luminescent material includes luminol; examples of bioluminescent materials include luciferase, luciferin, and acquorin, and examples of suitable radioactive material include ¹²⁵I, ¹³¹I, ¹⁵S or ³H.

### G. PHARMACEUTICAL AND IMMUNOGENIC COMPOSITIONS

[0240] In certain embodiments, the present invention provides pharmaceutical and immunogenic compositions comprising Alloiococcus otitidis polypeptides, and physiologically acceptable carriers. More preferably, the pharmaceutical and immunogenic compositions comprise Alloiococcus otitidis polypeptides comprising the amino acid residue sequence of one or more of the even numbered sequences set forth in SEQ ID NO: 2 through SEQ ID NO: 6650. In other embodiments, the pharmaceutical and immunogenic compositions of the invention comprise polynucleotides that encode Alloiococcus otitidis polypeptides, such as the polynucleotides comprising the nucleotide sequence of one of odd numbered sequences set forth in SEQ ID NO: 1 through SEQ ID NO: 6649, and physiologically acceptable carriers. Various tests may be used to assess the in vitro immunogenicity of the polypeptides of the invention. For example, an in vitro opsonic assay is conducted by incubating together a mixture of Alloiococcus otitidis cells, heat inactivated human serum containing specific antibodies to the polypeptide in question, and an exogenous complement source. Opsonophagocytosis proceeds during incubation of freshly isolated human polymorphonuclear cells (PMN) and the antibody/complement/Alloiococcal cell mixture. Bacterial cells that are coated with antibody and complement are killed upon opsonophagocytosis. Colony forming units (cfu) of surviving bacteria that escape from opsonophagocytosis are determined by plating the assay mixture. Titers are reported as the reciprocal of the highest dilution that gives ≧50% bacterial killing, as determined comparison to assay controls. The method described above is a modification of Gray's method (Gray, B. M., 1990).

[0241] A whole Alloiococcus otitidis cell ELISA assay is also used to assess in vitro immunogenicity and surface exposure of the polypeptide antigen, wherein the bacterial strain of interest (Alloiococcus otitidis) is coated onto a plate, such as 96 well plate, and test sera from an immunized animal is reacted with bacterial cells. If any antibody, specific for the test polypeptide antigen, is reactive with surface exposed epitope of the polypeptide antigen, it can be detected by standard methods known to one of skill in the art.

[0242] Any polypeptide demonstrating the desired in vitro activity is then tested in an in vivo animal challenge model. In certain embodiments, immunogenic compositions are used in the immunization of an animal (e.g., a mouse) by methods and routes of immunization known to those of skill in the art (e.g., intranasal, parenteral, intraperitoneal, intravenous, subcutaneous, etc.). Following immunization of the animal with a particular Alloiococcus otitidis immunogenic composition, the animal is challenged with Alloiococcus otitidis and assayed for resistance to Alloiococcus otitidis infection.

[0243] The Alloiococcus otitidis polynucleotides and polypeptides, and modulators of Alloiococcus otitidis polynucleotides and polypeptides, and anti-Alloiococcus otitidis antibodies (also referred to herein as “active compounds”) of the invention can be incorporated into pharmaceutical and immunogenic compositions suitable for administration to a subject, e.g., a human. Such compositions typically comprise the nucleic acid molecule, protein, modulator, or antibody and a pharmaceutically acceptable carrier. As used herein the language “pharmaceutically acceptable carrier” is intended to include any and all solvents, dispersion media, coatings, antibacterial and antifungal agents, isotonic and absorption delaying agents, and the like, compatible with pharmaceutical administration. The use of such media and agents for pharmaceutically active substances is well known in the art. Except insofar as any conventional media or agent is incompatible with the active compound, such media can be used in the compositions of the invention. Supplementary active compounds can also be incorporated into the compositions.

[0244] A pharmaceutical or immunogenic composition of the invention is formulated to be compatible with its intended route of administration. Examples of routes of administration include parenteral, (e.g., intravenous, intradermal, subcutaneous, intramuscular, and intraperitoneal), mucosal (e.g., oral, rectal, buccal, vaginal, intranasal, inhalation), and transdermal (topical). Solutions or suspensions used for parenteral, intradermal, or subcutaneous application can include the following components: a sterile diluents such as water for injection, saline solution, fixed oils, polyethylene glycols, glycerine, propylene glycol or other synthetic solvents; antibacterial agents such as benzyl alcohol or methyl parabens; antioxidants such as ascorbic acid or sodium bisulfite; chelating agents such as ethylenediaminetetraacetic acid; buffers such as acetates, citrates or phosphates and agents for the adjustment of tonicity such as sodium chloride or dextrose. pH can be adjusted with acids or bases, such as hydrochloric acid or sodium hydroxide. The parenteral preparation can be enclosed in ampoules, disposable syringes or multiple dose vials made of glass or plastic.

[0245] Pharmaceutical compositions suitable for injectable use include sterile aqueous solutions (where water soluble) or dispersions and sterile powders for the extemporaneous preparation of sterile injectable solutions or dispersion. For intravenous administration, suitable carriers include physiological saline, bacteriostatic water, Cremophor EL™(BASF, Parsippany, N.J.) or phosphate buffered saline (PBS). In all cases, the composition must be sterile and should be fluid to the extent that easy syringability exists. It must be stable under the conditions of manufacture and storage and must be preserved against the contaminating action of microorganisms such as bacteria and fungi. The carrier is a solvent or dispersion medium containing, for example, water, ethanol, polyol (for example, glycerol, propylene glycol, and liquid polyetheylene glycol, and the like), and suitable mixtures thereof. The proper fluidity is maintained, for example, by the use of a coating such as lecithin, by the maintenance of the required particle size in the case of dispersion and by the use of surfactants. Prevention of the action of microorganisms is achieved by various antibacterial and antifungal agents, for example, parabens, chlorobutanol, phenol, ascorbic acid,. thimerosal, and the like. In many cases, it is preferable to include isotonic agents, for example, sugars, polyalcohols such as manitol, sorbitol, and sodium chloride in the composition. Prolonged absorption of the injectable compositions is brought about by including in the composition an agent which delays absorption, for example, aluminum monostearate and gelatin.

[0246] Sterile injectable solutions are prepared by incorporating the active compound (e.g., an Alloiococcus otitidis polypeptide or anti-Alloiococcus otitidis antibody) in the required amount in an appropriate solvent with one or a combination of ingredients enumerated above, as required, followed by filtered sterilization. Generally, dispersions are prepared by incorporating the active compound into a sterile vehicle which contains a basic dispersion medium and the required other ingredients from those enumerated above. In the case of sterile powders for the preparation of sterile injectable solutions, the preferred methods of preparation are vacuum drying and freeze-drying which yields a powder of the active ingredient plus any additional desired ingredient from a previously sterile-filtered solution thereof.

[0247] Oral compositions generally include an inert diluent or an edible carrier. They can be enclosed in gelatin capsules or compressed into tablets. For the purpose of oral therapeutic administration, the active compound is incorporated with excipients and used in the form of tablets, troches, or capsules. Oral compositions are also prepared using a fluid carrier for use as a mouthwash, wherein the compound in the fluid carrier is applied orally and swished and expectorated or swallowed. Pharmaceutically compatible binding agents, and/or adjuvant materials can be included as part of the composition. The tablets, pills, capsules, troches and the like can contain any of the following ingredients, or compounds of a similar nature: a binder such as microcrystalline cellulose, gum tragacanth or gelatin; an excipient such as starch or lactose, a disintegrating agent such as alginic acid, Primogel, or corn starch; a lubricant such as magnesium stearate or Sterotes; a glidant such as colloidal silicon dioxide; a sweetening agent such as sucrose or saccharin; or a flavoring agent such as peppermint, methyl salicylate, or orange flavoring.

[0248] For administration by inhalation, the compounds are delivered in the form of an aerosol spray from pressured container or dispenser that contains a suitable propellant, e.g., a gas such as carbon dioxide, or a nebulizer. Systemic administration can also be by mucosal or transdermal means. For mucosal or transdermal administration, penetrants appropriate to the barrier to be permeated are used in the formulation. Such penetrants are generally known in the art, and include, for example, for mucosal administration, detergents, bile salts, and fusidic acid derivatives. Mucosal administration is accomplished through the use of nasal sprays or suppositories. For transdermal administration, the active compounds are formulated into ointments, salves, gels, or creams as generally known in the art.

[0249] The compounds is also prepared in the form of suppositories (e.g., with conventional suppository bases such as cocoa butter and other glycerides) or retention enemas for rectal delivery.

[0250] In one embodiment, the active compounds are prepared with carriers that will protect the compound against rapid elimination from the body, such as a controlled release formulation, including implants and microencapsulated delivery systems.

[0251] Biodegradable, biocompatible polymers can be used, such as ethylene vinyl acetate, polyanhydrides, polyglycolic acid, collagen, polyorthoesters, and polylactic acid. Methods for preparation of such formulations will be apparent to those skilled in the art. The materials are also obtained commercially from Alza Corporation (Palo Alto, Calif.) and Nova Pharmaceuticals, Inc. (Clifton, N.J.) Liposomal suspensions (including liposomes targeted to infected cells with monoclonal antibodies to viral antigens) are also used as pharmaceutically acceptable carriers. These are prepared according to methods known to those skilled in the art, for example, as described in U.S. Pat. No. 4,522,811, which is incorporated herein by reference.

[0252] It is especially advantageous to formulate oral or parenteral compositions in dosage unit form for ease of administration and uniformity of dosage. Dosage unit form as used herein refers to physically discrete units suited as unitary dosages for the subject to be treated; each unit containing a predetermined quantity of active compound calculated to produce the desired therapeutic effect in association with the required pharmaceutical carrier. The specification for the dosage unit forms of the invention are dictated by and directly dependent on the unique characteristics of the active compound and the particular therapeutic effect to be achieved, and the limitations inherent in the art of compounding such an active compound for the treatment of individuals.

[0253] Combination immunogenic compositions are provided by including two or more of the polypeptides of this invention. Multivalent immunogenic compositions directed against various bacteria responsible for causing otitis media comprise one or more of the polypeptides of this invention together with one or more known nontypable Haemophilus influenzae polypeptides, including, but not limited to, the P2, P4, P5, P6 and PCP proteins, and/or one or more known Moraxella catarrhalis polypeptides, including, but not limited to, the UspA1, UspA2, B1, C/D, E and 74 kDa proteins, and/or one or more known Streptococcus pneumoniae polypeptides and polysaccharide-protein conjugates, including, but not limited to, the currently available 23-valent pneumococcal capsular polysaccharide vaccine and the 7-valent pneumococcal polysaccharide-protein conjugate vaccine. One particularly preferred multivalent immunogenic composition comprises one or more of Alloiococcus otitidis polypeptides of the invention together with P4, P6, and UspA2 polypeptides.

[0254] The nucleic acid molecules of the invention are inserted into a variety of vectors and expression systems. A great variety of expression systems are used. Such systems include, among others, chromosomal, episomal and virus-derived systems, e.g., vectors derived from bacterial plasmids, attenuated bacteria such as Salmonella (U.S. Pat. No. 4,837,151) from bacteriophage, from transposons, from yeast episomes, from insertion elements, from yeast chromosomal elements, from viruses such as vaccinia and other poxviruses, sindbis, adenovirus, baculoviruses, papova viruses, such as SV40, fowl pox viruses, pseudorabies viruses and retroviruses, alphaviruses such as Venezuelan equine encephalitis virus (U.S. Pat. No. 5,643,576), nonsegmented negative-stranded RNA viruses such as vesicular stomatitis virus (U.S. Pat. No. 6,168,943), and vectors derived from combinations thereof, such as those derived from plasmid and bacteriophage genetic elements, such as cosmids and phagemids. The expression systems should include control regions that regulate as well as engender expression, such as promoters and other regulatory elements (such as a polyadenylation signal). Generally, any system or vector suitable to maintain, propagate or express polynucleotides to produce a polypeptide in a host may be used. The appropriate nucleotide sequence may be inserted into an expression system by any of a variety of well-known and routine techniques, such as, for example, those set forth in Sambrook et al., “Molecular Cloning: A Laboratory Manual” 2nd, ed, Cold Spring Harbor Laboratory, Cold Spring Harbor Laboratory Press, Cold Spring Harbor, N.Y., 1989.

[0255] The nucleic acid molecules of the invention inserted into vectors as described above are also used to deliver the nucleic acid molecules to a subject by, for example, intravenous injection, local administration (see U.S. Pat. No. 5,328,470) or by stereotactic injection (see e.g., Chen et al., 1994). The pharmaceutical preparation for the administration of the nucleic acid molecules of the invention include, in addition to the nucleic molecules in an appropriate vector, an acceptable diluent, or can comprise a slow release matrix in which the nucleic acid molecule is embedded. Alternatively, where the complete nucleic acid moleculer is produced intact from recombinant cells, e.g. retroviral vectors, the pharmaceutical preparation includes one or more cells which produce the gene delivery system. The pharmaceutical compositions are included in a container, pack, or dispenser together with instructions for administration.

[0256] A pharmaceutically acceptable vehicle is understood to designate a compound or a combination of compounds entering into a pharmaceutical or immunogenic composition which does not cause side effects and which makes it possible, for example, to facilitate the administration of the active compound, to increase its life and/or its efficacy in the body, to increase its solubility in solution or alternatively to enhance its preservation. These pharmaceutically acceptable vehicles are well known and will be adapted by persons skilled in the art according to the nature and the mode of administration of the active compound chosen.

[0257] Immunogenic compositions may comprise appropriate adjuvants to modulate, shift and/or boost the immune response of the recipient to the immunogen. Such adjuvants are known to persons skilled in the art, such as those described in section H below.

[0258] A composition of the present invention is typically administered parenterally in dosage unit formulations containing standard, well-known nontoxic physiologically acceptable carriers, adjuvants, and vehicles as desired. The term parenteral as used herein includes intravenous, intramuscular, subcutaneous, intradermal, intraarterial injection, or infusion techniques, as well as other conventional techniques or routes described above.

[0259] Injectable preparations, for example sterile injectable aqueous or oleaginous suspensions, are formulated according to the known art using suitable dispersing or wetting agents and suspending agents. The sterile injectable preparation can also be a sterile injectable solution or suspension in a nontoxic parenterally acceptable diluent or solvent, for example, as a solution in 1,3-butanediol.

[0260] Among the acceptable vehicles and solvents that may be employed are water, Ringer's solution, and isotonic sodium chloride solution. In addition, sterile, fixed oils are conventionally employed as a solvent or suspending medium. For this purpose any bland fixed oil is employed including synthetic mono- or di-glycerides. In addition, fatty acids such as oleic acid find use in the preparation of injectables.

[0261] Preferred carriers include neutral saline solutions buffered with phosphate, lactate, Tris, and the like. When administering viral vectors, the vector is purified sufficiently to render it essentially free of undesirable contaminants, such as defective interfering adenovirus particles or endotoxins and other pyrogens such that it does not cause any untoward reactions in the individual receiving the vector construct. A preferred means of purifying the vector involves the use of buoyant density gradients, such as cesium chloride gradient centrifugation.

[0262] A carrier can also be a liposome. Means for using liposomes as delivery vehicles are well known in the art (see, e.g. Gabizon et al., 1990; and Ranade, V. V., 1989).

[0263] The immunogenic compositions of this invention also comprise a polynucleotide sequence of this invention operatively associated with a regulatory sequence that controls gene expression. The polynucleotide sequence of interest is engineered into an expression vector, such as a plasmid, under the control of regulatory elements which will promote expression of the DNA, that is, promoter and/or enhancer elements. In a preferred embodiment, the human cytomegalovirus immediate-early promoter/enhancer is used (U.S. Pat. No. 5,168,062). The promoter may be cell specific and permit increased expression of the polynucleotide only in predetermined cells.

[0264] The polynucleotide is introduced directly into the host either as “naked” DNA (U.S. Pat. No. 5,580,859) or formulated in compositions with agents which facilitate immunization, such as bupivicaine and other local anesthetics (U.S. Pat. No. 6,127,170).

[0265] In this polynucleotide immunization procedure, the polypeptides of the invention are expressed on a transient basis in vivo; no genetic material is inserted or integrated into the chromosomes of the host. This procedure is to be distinguished from gene therapy, where the goal is to insert or integrate the genetic material of interest into the chromosome. An assay is used to confirm that the polynucleotides administered by immunization do not rise to a transformed phenotype in the host (U.S. Pat. No. 6,168,918).

### H. USES AND METHODS OF THE INVENTION

[0266] The Alloiococcus otitidis polynucleotides, polypeptides, polypeptide homologues, modulators, adjuvants, and antibodies described in this invention are used in methods of treatment, diagnostic assays particularly in disease identification, drug screening assays and monitoring of effects during clinical trials. The isolated polynucleotides of the invention are used to express Alloiococcus otitidis polypeptides (e.g., via a recombinant expression vector in a host cell or in gene therapy applications) and to detect Alloiococcus otitidis mRNA (e.g., in a biological sample). Moreover, the ant-Alloiococcus otitidis antibodies of the invention are used to detect and isolate an Alloiococcus otitidis polypeptide, particularly fragments of an Alloiococcus otitidis polypeptides present in a biological sample, and to modulate Alloiococcus otitidis polypeptide activity.

[0267] The invention provides immunogenic compositions comprising polypeptides having an amino acid sequence chosen from one or more of the even numbered sequences set forth in SEQ ID NO: 2 through SEQ ID NO: 6650, a biological equivalent thereof or a fragment thereof. The immunogenic composition may further comprise a pharmaceutically acceptable carrier, as outlined in section G.

[0268] In certain preferred embodiments, the immunogenic composition will comprise one or more adjuvants. As defined herein, an “adjuvant” is a substance that serves to enhance the immunogenicity of an “antigen” or the immunogenic compositions comprising a polypeptide antigens having an amino acid sequence chosen from one or more of even numbered sequences set forth in SEQ ID NO: 2 through SEQ ID NO: 6650. Thus, adjuvants are often given to boost the immune response and are well known to the skilled artisan. Preferred adjuvants to enhance effectiveness of the composition include, but are not limited to: (1) aluminum salts (alum), such as aluminum hydroxide, aluminum phosphate, aluminum sulfate, etc; (2) oil-in-water emulsion formulations (with or without other specific immunostimulating agents such as muramyl peptides (see below) or bacterial cell wall components), such as for example (a) MF59 (PCT Publ. No. WO90/14837), containing 5% Squalene, 0.5% Tween 80, and 0.5% Span 85 (optionally containing various amounts of MTP-PE (see below, although not required) formulated into submicron particles using a microfluidizer such as Model 110Y microfluidizer (Microfluidics, Newton, Mass.), (b) SAF, containing 10% Squalane, 0.4% Tween 80, 5% pluronic-blocked polymer L121, and thr-MDP (see below) either microfluidized into a submicron emulsion or vortexed to generate a larger particle size emulsion, and (c) Ribi™ adjuvant system (RAS), (Corixa, Hamilton, Mont.) containing 2% Squalene, 0.2% Tween 80, and one or more bacterial cell wall components from the group consisting of 3-O-deacylated monophosphorylipid A (MPL™) described in U.S. Pat. No. 4,912,094 (Corixa), trehalose dimycolate (TDM), and cell wall skeleton (CWS), preferably MPL+CWS (Detox™), (3) saponin adjuvants, such as Quil A or STIMULON™ QS-21 (Antigenics, Framingham, Mass.) (U.S. Pat. No. 5,057,540) may be used or particles generated therefrom such as ISCOMs (immunostimulating complexes); (4) bacterial lipopolysaccharides, synthetic lipid A analogs such as aminoalkyl glucosamine phosphate compounds (AGP), or derivatives or analogs thereof, which are available from Corixa, and which are described in U.S. Pat. No. 6,113,918; one such AGP is 2-[(R)-3-Tetradecanoyloxytetradecanoylamino]ethyl 2-Deoxy-4-O-phosphono-3-O-[(R)-3-tetradecanoyoxytetradecanoyl]-2-[(R)-3-tetradecanoyoxytetradecanoylamino]-b-D-glucopyranoside, which is also known as 529 (formerly known as RC529), which is formulated as an aqueous form or as a stable emulsion, synthetic polynucleotides such as oligonucleotides containing CpG motif(s) (U.S. Pat. No. 6,207,646); (5) cytokines, such as interleukins (e.g., IL-1, IL-2, IL-4, IL-5, IL-6, IL-7, IL-12, IL-15, IL-18, etc.), interferons (e.g., gamma interferon), granulocyte macrophage colony stimulating factor (GM-CSF), macrophage colony stimulating factor (M-CSF), tumor necrosis factor (TNF), etc; (6) detoxified mutants of a bacterial ADP-ribosylating toxin such as a cholera toxin (CT) either in a wild-type or mutant form, for example, wherein the glutamic acid at amino acid position is replaced by another amino acid, preferably a histidine, in accordance with published International patent Application number WO 00/18434, a pertussis toxin (PT, or an E. coli heat-labile toxin (LT), particularly LT-K63, LT-R72, CT-S109, PT-K9/G129; see, e.g., WO 93/13302 and WO 92/19265; and (7) other substances that act as immunostimulating agents to enhance the effectiveness of the composition.

[0269] As mentioned above, muramyl peptides include, but are not limited to, N-acetyl-muramyl-L-threonyl-D-isoglutamine(thr-MDP), N-acetyl-normuramyl-L-alanine-2-(1′-2′dipalmitoyl-snglycero-3-huydroxyphosphoryloxy)-ethylamine (MTP-PE), etc.

[0270] In another embodiment, the invention provides immunogenic compositions comprising a polynucleotide having a nucleotide sequence chosen from one or more of the odd numbered sequences set forth in SEQ ID NO: 1 through SEQ ID NO: 6649, wherein the polynucleotide is comprised in a recombinant expression vector. Preferably the vector is plasmid DNA. The polynucleotide may further comprise heterologous nucleotides, e.g., the polynucleotide is operatively linked to one or more gene expression regulatory elements, and further comprise one or more adjuvants. In a preferred embodiment, the immunogenic polynucleotide composition directs the expression of a neutralizing epitope of Alloiococcus otitidis.

[0271] Provided also are methods for immunizing a host against Alloiococcus otitidis infection. In a preferred embodiment, the host is human. Thus, a host or subject is administered an immunogenic amount of an immunogenic composition comprising a polypeptide having an amino acid sequence chosen from one or more of the even numbered sequences set forth in SEQ ID NO: 2 through SEQ ID NO: 6650, a biological equivalent thereof or a fragment thereof and a pharmaceutically acceptable carrier. An immunogenic amount of an immunogenic composition is determined by doing a dose response study in which subjects are immunized with gradually increasing amounts of the immunogenic composition and the immune response analyzed to determine the optimal dosage. Starting points for the study is inferred from immunization data in animal models. The dosage amount can vary depending upon specific conditions of the individual. The amount can be determined in routine trials by means known to those skilled in the art.

[0272] An “immunologically effective amount” of the immunogenic composition in an appropriate number of doses is administered to the subject to elicit an immune response. “Immunologically effective amount”, as used herein, means the administration of that amount to a mammalian host (preferably human), either in a single dose or as part of a series of doses, sufficient to at least cause the immune system of the individual treated to generate a response that reduces the clinical impact of the bacterial infection. Protection may be conferred by a single dose of the immunogenic composition, or may require the administration of several doses, in addition to booster doses at later times to maintain protection. This may range from a minimal decrease in bacterial burden to prevention of the infection. Ideally, the treated individuals will not exhibit the more serious clinical manifestations of the Alloiococcus otitidis infection. The dosage amount can vary depending upon specific conditions of the individual, such as age and weight. The amount can be determined in routine trials by means known to those skilled in the art.

### I. DIAGNOSTIC ASSAYS

[0273] The invention provides methods for detecting the presence of an Alloiococcus otitidis polypeptide or Alloiococcus otitidis polynucleotide, or fragment thereof, in a biological sample. The method involves contacting the biological sample with a compound or an agent capable of detecting an Alloiococcus otitidis polypeptide or mRNA such that the presence of the Alloiococcus otitidis polypeptide/encoding nucleic acid molecule is detected in the biological sample. A preferred agent for detecting Alloiococcus otitidis mRNA or DNA is a labeled or labelable oligonucleotide probe capable of hybridizing to Alloiococcus otitidis mRNA or DNA. The nucleic acid probe can be, for example, a full-length Alloiococcus otitidis polynucleotide of one of the odd numbered sequences set forth in SEQ ID NO: 1 through SEQ ID NO: 6649, a complement thereof, or a fragment thereof, such as an oligonucleotide of at least 15, 30, 50, 100, 250 or 500 nucleotides in length and sufficient to specifically hybridize under stringent conditions to Alloiococcus otitidis mRNA or DNA. Alternatively, the sample can be contacted with an oligonucleotide primer of an Alloiococcus otitidis polynucleotide of one of the odd numbered sequences set forth in SEQ ID NO: 1 through SEQ ID No: 6649, a complement thereof, or a fragment thereof, in the presence of nucleotides and a polymerase, under conditions permitting primer extension.

[0274] A preferred agent for detecting an Alloiococcus otitidis polypeptide is a labeled or labelable antibody capable of binding to an Alloiococcus otitidis polypeptide of one of the even numbered sequences set forth in SEQ. ID. NO.: 2 through SEQ. ID. NO. 6650. Antibodies can be polyclonal, or more preferably, monoclonal. An intact antibody, or a fragment thereof (e.g., Fab or F(ab′)₂) can be used. The term “labeled or labelable,” with regard to the probe or antibody, is intended to encompass direct labeling of the probe or antibody by coupling (i.e., physically linking) a detectable substance to the probe or antibody, as well as indirect labeling of the probe or antibody by reactivity with another reagent that is directly labeled. Examples of indirect labeling include detection of a primary antibody using a fluorescently labeled secondary antibody and end-labeling of a DNA probe with biotin such that it are detected with fluorescently labeled streptavidin. The term “biological sample” is intended to include tissues, cells and biological fluids isolated from a subject, as well as tissues, cells and fluids present within a subject. That is, the detection method of the invention can be used to detect Alloiococcus otitidis mRNA, DNA or protein in a biological sample in vitro as well as in vivo. For example, in vitro techniques for detection of Alloiococcus otitidis mRNA include Northern hybridizations and in situ hybridizations. In vitro techniques for detection of Alloiococcus otitidis polypeptide include enzyme linked immunosorbent assays (ELISAs), Western blots, immunoprecipitations and immunofluorescence. Alternatively, Alloiococcus otitidis polypeptides can be detected in vivo in a subject by introducing into the subject a labeled anti-Alloiococcus otitidis antibody. For example, the antibody can be labeled with a radioactive marker whose presence and location in a subject can be detected by standard imaging techniques.

[0275] The polynucleotides according to the invention may also be used in analytical DNA chips, which allow sequencing, the study of mutations and of the expression of genes, and which are currently of interest given their very small size and their high capacity in terms of number of analyses.

[0276] The principle of the operation of these chips is based on molecular probes, most often oligonucleotides, which are attached onto a miniaturized surface, generally of the order of a few square centimeters. During an analysis, a sample containing fragments of a target nucleic acid to be analyzed, for example DNA or RNA labeled, for example, after amplification, is deposited onto the DNA chip in which the support has been coated beforehand with probes. Bringing the labeled target sequences into contact with the probes leads to the formation, through hybridization, of a duplex according to the rule of pairing defined by J. D.Watson and F.Crick. After a washing step, analysis of the surface of the chip allows the effective hybridizations to be located by means of the signals emitted by the labels tagging the target. A hybridization fingerprint results from this analysis which, by appropriate computer processing, will make it possible to determine information such as the presence of specific fragments in the sample, the determination of sequences and the presence of mutations.

[0277] The chip consists of a multitude of molecular probes, precisely organized or arrayed on a solid support whose surface is miniaturized. It is at the center of a system where other elements (imaging system, microcomputer) allow the acquisition and interpretation of a hybridization fingerprint.

[0278] The hybridization supports are provided in the form of flat or porous surfaces (pierced with wells) composed of various materials. The choice of a support is determined by its physicochemical properties, or more precisely, by the relationship between the latter and the conditions under which the support will be placed during the synthesis or the attachment of the probes or during the use of the chip. It is therefore necessary, before considering the use of a particular support, to consider characteristics such as its stability to pH, its physical strength, its reactivity and its chemical stability as well as its capacity to nonspecifically bind nucleic acids. Materials such as glass, silicon and polymers are commonly used. Their surface is, in a first step, called “functionalization”, made reactive towards the groups which it is desired to attach thereon. After the functionalization, so-called spacer molecules are grafted onto the activated surface. Used as intermediates between the surface and the probe, these molecules of variable size render unimportant the surface properties of the supports, which often prove to be problematic for the synthesis or the attachment of the probes and for the hybridization.

[0279] Among the hybridization supports, there may be mentioned glass which is used, for example, in the method of in situ synthesis of oligonucleotides by photochemical addressing developed by the company Affymetrix (E. L. Sheldon, 1993), the glass surface being activated by silane. Genosensor Consortium (P. Mérel, 1994) also uses glass slides carrying wells 3 mm apart, this support being activated with epoxysilane.

[0280] The probes according to the invention may be synthesized directly in situ on the supports of the DNA chips. This in situ synthesis may be carried out by photochemical addressing (developed by the company Affymax (Amsterdam, Holland) and exploited industrially by its subsidiary Affymetrix (United States)) or based on the VLSIPS (very large scale immobilized polymer synthesis) technology (S. P. A. Fodor et al., 1991) which is based on a method of photochemically directed combinatory synthesis and the principle of which combines solid-phase chemistry, the use of photolabile protecting groups and photolithography.

[0281] The probes according to the invention may be attached to the DNA chips in various ways such as electrochemical addressing, automated addressing or the use of probe printers (T. Livache et al., 1994; G. Yershov et al., 1996; and J. Derisi et al., 1996)

[0282] The revealing of the hybridization between the probes of the invention, deposited or synthesized in situ on the supports of the DNA chips, and the sample to be analyzed, may be determined, for example, by measurement of fluorescent signals, by radioactive counting or by electronic detection.

[0283] The use of fluorescent molecules such as fluorescein constitutes the most common method of labeling the samples. It allows direct or indirect revealing of the hybridization and allows the use of various fluorochromes.

[0284] Affymetrix currently provides an apparatus or a scanner designed to read its Gene Chip™ chips. It makes it possible to detect the hybridizations by scanning the surface of the chip in confocal microscopy (R. J. Lipshutz et al., 1995).

[0285] The nucleotide sequences according to the invention are also used in DNA chips to carry out the analysis of the expression of the Alloiococcus otitidis genes. This analysis of the expression of Alloiococcus otitidis genes is based on the use of chips where probes of the invention, chosen for their specificity to characterize a given gene, are present (D. J. Lockhart et al., 1996; D. D. Shoemaker et al., 1996). For the methods of analysis of gene expression using the DNA chips, reference may, for example, be made to the methods described by D. J. Lockhart et al. (1996) and Sosnowsky et al. (1997) for the synthesis of probes in situ or for the addressing and the attachment of previously synthesized probes. The target sequences to be analyzed are labeled and in general fragmented into sequences of about 50 to 100 nucleotides before being hybridized onto the chip. After washing as described, for example, by D. J. Lockhart et al. (1996) and application of different electric fields (Sosnowsky et al., 1997), the labeled compounds are detected and quantified, the hybridizations being carried out at least in duplicate. Comparative analyses of the signal intensities obtained with respect to the same probe for different samples and/or for different probes with the same sample, determine the differential expression of RNA or of DNA derived from the sample.

[0286] The nucleotide sequences according to the invention are, in addition, used in DNA chips where other nucleotide probes specific for other microorganisms are also present, and allow the carrying out of a serial test allowing rapid identification of the presence of a microorganism in a sample.

[0287] Accordingly, the subject of the invention is also the nucleotide sequences according to the invention, characterized in that they are immobilized on a support of a DNA chip.

[0288] The DNA chips, characterized in that they contain at least one nucleotide sequence according to the invention, immobilized on the support of the said chip, also form part of the invention.

[0289] The chips preferably contain several probes or nucleotide sequences of the invention of different length and/or corresponding to different genes so as to identify, with greater certainty, the specificity of the target sequences or the desired mutation in the sample to be analyzed.

[0290] Accordingly, the analyses carried out by means of primers and/or probes according to the invention, immobilized on supports such as DNA chips, make it possible, for example, to identify, in samples, mutations linked to variations such as intraspecies variations. These variations may be correlated or associated with pathologies specific to the variant identified and make it possible to select the appropriate treatment.

[0291] The invention thus comprises a DNA chip according to the invention, characterized in that it contains, in addition, at least one nucleotide sequence of a microorganism different from Alloiococcus otitidis, immobilized on the support of the said chip; preferably, the different microorganism is chosen from an associated microorganism, a bacterium of the Streptococcus family, and a variant of the species Alloiococcus otitidis.

[0292] The principle of the DNA chip as explained above, is also used to produce protein “chips” on which the support has been coated with a polypeptide or an antibody according to the invention, or arrays thereof, in place of the DNA. These protein “chips” make it possible, for example, to analyze the biomolecular interactions (BIA) induced by the affinity capture of target analytes onto a support coated, for example, with proteins, by surface plasma resonance (SPR). Reference may be made, for example, to the techniques for coupling proteins onto a solid support which are described in EP 524 800 or to the methods describing the use of biosensor-type protein chips such as the BIAcore-type technique (Pharmacia) (Arlinghaus et al., 1997 and Krone et al., 1997). These polypeptides or antibodies according to the invention, capable of specifically binding antibodies or polypeptides derived from the sample to be analyzed, are thus used in protein chips for the detection and/or the identification of proteins in samples. The said protein chips may in particular be used for infectious diagnosis and preferably contain, per chip, several polypeptides and/or antibodies of the invention of different specificity, and/or polypeptides and/or antibodies capable of recognizing microorganisms different from Alloiococcus otitidis.

[0293] Accordingly, the present invention also encompasses polypeptides and the antibodies according to the invention, characterized in that they are immobilized on a support, in particular, on a protein chip.

[0294] The protein chips, characterized in that they contain at least one polypeptide or one antibody according to the invention immobilized on the support of the said chip, also form part of the invention.

[0295] The invention comprises, in addition, a protein chip according to the invention, characterized in that it contains, in addition, at least one polypeptide of a microorganism different from Alloiococcus otitidis or at least one antibody directed against a compound of a microorganism different from Alloiococcus otitidis, immobilized on the support of the chip.

[0296] The invention also relates to a kit or set for the detection and/or the identification of bacteria belonging to the species Alloiococcus otitidis or to an associated microorganism, or for the detection and/or the identification of a microorganism characterized in that it comprises a protein chip according to the invention.

[0297] The present invention also provides a method for the detection and/or the identification of bacteria belonging to the species Alloiococcus otitidis or to an associated microorganism in a biological sample, characterized in that it uses a nucleotide sequence according to the invention.

[0298] The invention also encompasses kits for detecting the presence of an Alloiococcus otitidis polypeptide in a biological sample. For example, the kit comprises reagents such as a labeled or labelable compound or agent capable of detecting Alloiococcus otitidis polypeptide or mRNA in a biological sample; means for determining the amount of Alloiococcus otitidis polypeptide in the sample; and means for comparing the amount of Alloiococcus otitidis polypeptide in the sample with a standard. The compound or agent is packaged in a suitable container. The kit further comprises instructions for using the kit to detect Alloiococcus otitidis mRNA or protein.

[0299] In certain embodiments, detection involves the use of a probe/primer in a polymerase chain reaction (PCR) (see, e.g. U.S. Pat. No. 4,683,195 and U.S. Pat. No. 4,683,202), such as anchor PCR or RACE PCR, or, alternatively, in a ligation chain reaction (LCR). This method includes the steps of collecting a sample of cells from a patient, isolating nucleic acid (e.g., genomic, mRNA or both) from the cells of the sample, contacting the nucleic acid sample with one or more primers which specifically hybridize to an Alloiococcus otitidis polynucleotide under conditions such that hybridization and amplification of the Alloiococcus otitidis-polynucleotide (if present) occurs, and detecting the presence or absence of an amplification product, or detecting the size of the amplification product and comparing the length to a control sample.

### J. TRANSGENIC ANIMALS

[0300] It is contemplated that in some instances the genome of a transgenic animal of the present invention will have been altered through the stable introduction of one or more of the Alloiococcus otitidis polynucleotide compositions described herein, either native, synthetically modified or mutated. As described herein, a “transgenic animal” refers to any non-human animal, preferably a non-human mammal (e.g. mouse, rat, rabbit, squirrel, hamster, rabbits, guinea pigs, pigs, micro-pigs, prairie, baboons, squirrel monkeys and chimpanzees, etc), bird or an amphibian, in which one or more cells contain a heterologous nucleic acid sequence introduced by way of human intervention, such as by transgenic techniques well known in the art. The nucleic acid is introduced into the cell, directly or indirectly, by introduction into a precursor of the cell, by way of deliberate genetic manipulation, such as by microinjection or by infection with a recombinant virus. The term genetic manipulation does not include classical crossbreeding, or in vitro fertilization, but rather is directed to the introduction of a recombinant DNA molecule. This molecule may be integrated within a chromosome, or it may be extrachromosomally replicating DNA.

[0301] The host cells of the invention are also used to produce non-human transgenic animals. The non-human transgenic animals are used in screening assays designed to identify infections or compounds, e.g., drugs, pharmaceuticals, etc., which are capable of ameliorating Alloiococcus otitidis symptoms or infections. For example, in one embodiment, a host cell of the invention is a fertilized oocyte or an embryonic stem cell into which an Alloiococcus otitidis polypeptide-coding sequence has been introduced. Such host cells are then used to create non-human transgenic animals in which exogenous Alloiococcus otitidis gene sequences have been introduced into their genome or homologous recombinant animals in which endogenous Alloiococcus otitidis gene sequences have been altered. Such animals are useful for studying the effects of an Alloiococcus otitidis polypeptide and for identifying and/or evaluating modulators of Alloiococcus otitidis polypeptide infectivity.

[0302] A transgenic animal of the invention is created by introducing an Alloiococcus otitidis polypeptide-encoding nucleic acid sequence into the male pronuclei of a fertilized oocyte, e.g., by microinjection, retroviral infection, and allowing the oocyte to develop in a pseudopregnant female foster animal. The human Alloiococcus otitidis cDNA sequence of one or more of the odd numbered sequences set forth in SEQ ID NO:1 through SEQ ID NO: 6649 can be introduced as a transgene into the genome of a non-human animal.

[0303] Moreover, a non-Alloiococcus otitidis homologue of the Alloiococcus otitidis gene can be isolated based on hybridization to the Alloiococcus otitidis cDNA (described above) and used as a transgene. Intronic sequences and polyadenylation signals can also be included in the transgene to increase the efficiency of expression of the transgene. A tissue-specific regulatory sequence(s) can be operably linked to the. Alloiococcus otitidis transgene to direct expression of an Alloiococcus otitidis polypeptide to particular cells. Methods for generating transgenic animals via embryo manipulation S and microinjection, particularly animals such as mice, have become conventional in the art and are described, for example, in U.S. Pat. Nos. 4,736,866 and 4,870, 009, U.S. Pat. No. 4,873,191 and in Hogan, 1986. Similar methods are used for production of other transgenic animals. A transgenic founder animal can be identified based upon the presence of the Alloiococcus otitidis transgene in its genome and/or expression of Alloiococcus otitidis mRNA in tissues or cells of the animals. A transgenic founder animal can then be used to breed additional animals carrying the transgene. Moreover, transgenic animals carrying a transgene encoding an Alloiococcus otitidis polypeptide can further be bred to other transgenic animals carrying other transgenes.

[0304] In another embodiment, transgenic non-human animals can be produced which contain selected systems that allow for regulated expression of the transgene. One example of such a system is the cre/loxP recombinase system of bacteriophage PL. For a description of the cre/loxP recombinase system, see, e.g., Lakso et al., 1992. Another example of a recombinase system is the FLP recombinase system of Saccharomyces cerevisiae (O'Gon-nan et al., 1991). If a cre/loxP recombinase system is used to regulate expression of the transgene, animals containing transgenes encoding both the Cre recombinase and a selected protein are required. Such animals can be provided through the construction of “double” transgenic animals, e.g., by mating two transgenic animals, one containing a transgene encoding a selected protein and the other containing a transgene encoding a recombinase.

[0305] Clones of the non-human transgenic animals described herein can also be produced according to the methods described in Wilmut et al., 1997, and PCT International Publication Nos. WO 97/07668 and WO 97/07669. In brief, a cell, e.g., a somatic cell, from the transgenic animal can be isolated and induced to exit the growth cycle and enter Gₒ phase. The quiescent cell can then be fused, e.g., through the use of electrical pulses, to an enucleated oocyte from an animal of the same species from which the quiescent cell is isolated. The reconstructed oocyte is then cultured such that it develops to morula or blastocyst and then transferred to pseudopregnant female foster animal. The offspring borne of this female foster animal will be a clone of the animal from which the cell, e.g., the somatic cell, is isolated.

[0306] All patents and publications cited herein are hereby incorporated by reference.

### K. EXAMPLES

[0307] The following examples are carried out using standard techniques, which are well known and routine to those of skill in the art, except where otherwise described in detail. The following examples are presented for illustrative purposes only, and should not be construed in any way limiting the scope of this invention.

### Example 1

### Confirmation of the Identity of the Alloiococcus Otitidis 1104-92 Isolate

[0308] An Alloiococcus otitidis isolate designated 1104-92 was obtained from Dr. Richard Facklam of the Centers for Disease Control and Prevention in Atlanta. It was isolated from the middle ear fluid of a child in the Atlanta, Ga. area. It was confirmed to be Alloiococcus otitidis by comparing it to the type strain, ATCC51267, obtained from the American Type Culture Collection (Aguirre, 1992 #1). Both the 1104-92 isolate and the type strain were characterized as Gram positive cocci. Both grow on Columbia agar supplemented with 5% yeast extract, 0.5% polysorbate 80 (Tween 80), and 0.7% phospatidyl choline when incubated at 37° C. On this medium, both strains form slow growing small white colonies that require nearly two days to be easily observed with the naked eye. Both are sensitive to lysis by hen egg white lysozyme and Streptococcus globisporus mutanolysin. Both grow in the presence of 2% sodium azide. Both are killed by incubation at 55° C. for 30 minutes. The 1104-92 isolate was subjected to polymerase chain reaction (PCR) identification based on its 16s rRNA gene. This was done using two of the primers specified by Aguirre and Collins (Aguirre, 1992 #2). The antisense primer used was ATCTTCCTGCTTGCAGGAAGAGG (Seq. ID No.: 6653) and the sense primer was ACGCTTCATCTCTGAAGCTAGC (Seq. ID No.6652). PCR confirmed that the 1104-92 isolate was a strain of Alloiococcus otitidis. Thus by multiple criteria, the 1104-92 strain was confirmed to be an isolate of Alloiococcus otitidis.

### Example 2

### Storage, Growth, and Harvest of Alloiococcus Otitidis 1104-92 Isolate for the Isolation of Dna

[0309] The Alloiococcus otitidis isolate 1104-92 was stored at −70° C. in Todd-Hewlett broth containing 40% glycerol. A small portion of the frozen stock was streaked onto the agar medium described in Example 1 and incubated at 37° C. for two days. The growth from the plate was swabbed into a 17×100 cm tube containing 6 ml of a serum-free broth medium. This broth medium was prepared with 30 g Todd-Hewlett medium, 5 g yeast extract, 10 ml polysorbate 80 (Tween 80), and 1 liter distilled water. This medium was sterilized by autoclaving for 35 minutes. The bacteria were incubated aerobically without shaking in an aerobic incubator at 37° C. for two days. The tube containing the growing bacteria was then shaken to resuspend the bacteria and added to a liter of the same medium in a Fernbach flask. This flask, in turn, was incubated aerobically for three days without shaking. The bacteria were harvested by first swirling the flask to suspend the bacteria and then low speed centrifugation at about 5,000×g for 30 minutes. The pellet of bacteria was washed by resuspending it in 10 to 15 mL of phosphate buffered saline (PBS), and centrifuging the suspension at about 8,000×g for 20 minutes. The pellet of bacteria was retained and stored frozen at −20° C. The yield of wet bacterial pellet was typically about 1 g per liter of broth.

### Example 3

### Preparation of Alloiococcus Otitidis Genomic Dan

[0310] To prepare genomic DNA, 0.95 g frozen pellet of bacteria was defrosted and suspended in 10 mL of PBS containing 1 mM MgCl₂. The bacteria were killed by incubating the suspension at 55° C. for 20 minutes. The suspension was allowed to cool before adding 25 μl of a 10 mg/mL stock of hen egg white lysozyme and 50 μL of a 25,000 unit/mL stock of Streptococcus globisporus mutanolysin to the suspension. It was then incubated for one hour at 37° C. Then 50 μl of a 10 mg/mL stock of RNase was added and the suspension incubated an additional hour at 37° C. After these incubations, sodium dodecylsulfate (SDS) was added to a final concentration of 0.3% (0.3 mL of a 10% stock). This was followed by the addition of 0.3 mL of a 1 mg/mL stock of proteinase K The suspension was then incubated for two hours at 37° C. After this time, an equal volume of water saturated phenol/chloroform/isopropyl (25:24:1) was added to the digested suspension and gently mixed. The upper aqueous layer was retained after a low speed centrifugation and 2.5 volumes of ethanol were added and the tube gently inverted to mix. The DNA was then spooled out on a glass rod and allowed to air dry.

[0311] The DNA at this stage still contained obvious impurities and needed further purification. The DNA dried on the glass rod was soaked in 70% ethanol to remove excess phenol and air-dried once again. It was then suspended in 2 ml of Tris-EDTA buffer to which 2 μl of RNase cocktail was added and incubated at room temperature for 75 minutes. Then 100 μl of protease, 100 μl SDS and 40 μl of 100 mM CaCl₂ were added and the suspension incubated for 3.5 hours. An equal volume of chloroform was added, gently mixed, and then centrifuged at a low speed. The aqueous layer was collected and re-extracted with the phenol, chloroform, and isopropyl alcohol reagent. In turn, the aqueous layer was extracted with chloroform. At this point, 3 M sodium acetate was added to the aqueous phase collected form the last extraction and then 3.75 ml of ethanol was added and gently mixed. The DNA was spooled out, soaked in 70% ethanol and allowed to air-dry. The DNA was finally suspended in 2 ml of Tris-EDTA buffer. Based on absorption at 260 nm, the final yield of DNA was 482 μg of DNA. The DNA was confirmed to be that of Alloiococcus otitidis by the PCR method described in example 1. This DNA was submitted for sequencing. The sequences of all the ORFs were obtained as described in Examples 4 and 5 below, and are set forth in odd numbered sequence listings, Seq. ID No. 1 through Seq. ID No. 6649. The sequence of the entire Alloiococcus otitidis genome is set forth in Seq. ID No: 6651.

### Example 4

### Cloning and Sequencing of the Alloiococcus Otitidis Genome

[0312] This invention provides nucleotide sequences of the genome of Alloiococcus otitidis, which thus comprises a DNA sequence library of Alloiococcus otitidis genomic DNA. The description that follows provides nucleotide sequences of Alloiococcus otitidis, and also describes how the sequences were obtained and how ORFs (Open Reading Frames) and protein-coding sequences were identified.

[0313] To construct a library, genomic DNA was hydrodynamically sheared in an HPLC and then separated on a standard 1% agarose gel. A fraction corresponding to 3000-3500 bp in length was excised from the gel and purified by the GeneClean™ procedure (BIO101, Inc.).

[0314] The purified DNA fragments were then blunt-ended using T4 DNA polymerase. The blunt-ended DNA was then ligated to unique BstX1-linker adapters. These linkers are complementary to the pGTC vector, while the overhang is not self-complementary. Therefore, the linkers will not concatermerize nor will the cut-vector religate itself easily. The liner-adapted inserts were separated from the unincorporated linkers on a 1% agarose gel and again purified using GeneClean. The linker-adapted inserts were then ligated to BstX1-cut vector to construct “shotgun” subclone libraries.

[0315] Only major modifications to the standard protocols are highlighted. Briefly, the library was transformed into DH10B competent cells (Gibco/BRL, DH5a transformation protocol). Transformed cells were detected by plating onto antibiotic plates containing ampicillin. The plates were incubated overnight at 37° C. Transformant clones were then selected for sequencing. The cultures were grown overnight at 37° C. DNA was purified using a silica bead DNA preparation (Egelstein, 1996) method. In this manner, 25 mg of DNA was obtained per clone.

[0316] These purified DNA samples were then sequenced using ABI dye-terminator chemistry. All subsequent steps were based on sequencing by automated DNA sequencing methods. The ABI dye terminator sequence reads were run on MegaBace™ 10000 (Amersham) machines and the data transferred to UNIX based computers. Base calls and quality scores were determined using the PHRED software program (Ewing et al., 1998, Genome Res. 8: 175-185; Ewing and Green, 1998, Genome Res. 8:685-734). Reads were assembled using PHRAP (P. Green, Abstracts of DOE Human Genome Program Contractor-Grantee Workshop V, Jan.1996, p 157) with default program parameters and quality scores.

[0317] To identify Alloiococcus otitidis genome encoded polypeptides, the complete genomic sequence of Alloiococcus otitidis was analyzed essentially as follows: First, all possible stop-to-stop open reading frames (ORFs) greater than or equal to 222 nucleotides in all three reading frames were translated into amino acid sequences.

[0318] Second, the identified ORFs were analyzed for homology to known protein sequences. Third, the coding potential of non-homologous sequences was evaluated with the GeneMark™ software program (Borodovsky and Mcininch, 1993, Comp. Chem. 17:123).

### Example 5

### Bioinformatics and Gene Mining of Alloiococcus Otitidis

[0319] The genomic sequence of Alloiococcus otitidis was examined for suitable open reading frames. ORFs were determined in the following manner. An ORF was defined as having one of three potential start site codons, ATG, GTG, or TTG and one of three potential stop codons, TAA, TAG, TGA. The Applicants used a unique set of three ORF finder algorithms: GLIMMER™ (Salzberg et al., 1998), GeneMark™ (Lukashin and Borodovsky, 1998) and Applicants' assignee's own program to enhance the efficiency for finding “all” ORFs. In order to evaluate the accuracy of the ORFs determined, a program developed by Applicants' assignee called DiCTion was employed that uses a discrete mathematical cosine function to assign a score for each ORF. An ORF with a DiCTion score >1.5 was considered to have a high probability of encoding a protein product. The minimum length of an ORF predicted by the three ORF finders was set to 225 nucleotides (including stop codon) which would encode a protein of 74 amino acids. An in-house graphical analysis program developed by Applicants' assignee also allowed the Applicants to see all six reading frames and the location of the predicted ORFs relative to the genomic sequence. This helped to eliminate those ORFs that have large overlaps with other ORFs, although there are known cases of ORFs being totally embedded within other ORFs (Loessner et al., 1999; Hernandez-Sanchez et al., 1998).

[0320] The initial annotation of the Alloiococcus otitidis ORFs was performed using the BLAST (v. 2.0) Gapped search algorithm, BlastP, to identify homologous sequences (Altschul et al., 1997). A cutoff ‘e’ value of anything <e⁻¹⁰ was considered significant. Other search algorithms such as FASTA or PSI-BLAST were used as needed. The non-redundant protein sequence database used for the homology searches consisted of GenBank, SWISS-PROT, PIR, and TREMBL database sequences. ORFs with a BlastP result of >e⁻¹⁰ were considered to be unique to Alloiococcus otitidis.

[0321] A keyword search of the entire BLAST results was carried out using known or suspected target genes (those that encode polypeptide candidates for inclusion in immunogenic compositions) as well as words that identified the location of a protein or function.

[0322] Several parameters are used to determine partitioning of the predicted proteins. Proteins destined for translocation across the cytoplasmic membrane encode a leader signal (also called signal sequence) composed of a central hydrophobic region flanked at the N-terminus by positively charged residues (Pugsley, 1993). A program called SignalP identifies signal peptides and their cleavage sites (Nielsen et al., 1997). To predict protein localization in bacteria, the software PSORT has been used (Nakai and Kanehisa, 1991). This program uses a neural net algorithm to predict localization of proteins to the ‘cytoplasm', ‘periplasm’, and ‘cytoplasmic membrane’ for Gram-positive bacteria as well as ‘outer membrane’ for Gram-negative bacteria. Transmembrane (TM) domains of proteins have been detected using the software program TopPred2 (Cserzo et al., 1997).

[0323] The Hidden Markov Model (HMM) Pfam database of multiple alignments of protein domains or conserved protein regions (Sonnhammer et al., 1997) was used to identify Alloiococcus otitidis proteins that may belong to an existing protein family. Keyword searching of this output was used to help identify additional candidate polypeptides that may have been missed by the BLAST search criteria. Additional HMM models were developed by Applicants' assignee. A computer algorithm, called HMM Lipo, was developed internally to predict lipoproteins using 131 biologically proven bacterial lipoproteins. This training set was generated from experimentally proven prokaryotic lipoproteins. The protein sequence from the start of the protein to the cysteine amino acid plus the next two additional amino acids was used to generate the HMM. Using approximately 70 known prokaryotic proteins containing the LPXTG cell wall sorting signal, a HMM (Eddy, 1996), was developed to predict cell wall proteins that are anchored to the peptidoglycan layer (Mazmanian et al., 1999; Navarre and Schneewind, 1999). The model used not only the LPXTG sequence, but also included two features of the downstream sequence, the hydrophobic transmembrane domain and the positively charged carboxy terminus. There are also a number of proteins that interact, non-covalently, with the peptidoglycan layer and are distinct from the LPXTG protein class described above. These proteins seem to have a consensus sequence at their carboxy terminus (Koebnik, 1995). The Applicants also have developed and used a HMM of this region to identify any Alloiococcus otitidis that may fall into this class of proteins.

[0324] The proteins encoded by Alloiococcus otitidis identified ORFs were also evaluated for other useful characteristics. A tandem repeat finder (Benson, 1999) identified ORFs containing repeated DNA sequences such as those found in MSCRAMMs (Foster and Hook, 1998) and phase variable surface proteins of Neisseria meningitidis (Parkhill et al., 2000). Proteins that contain the Arg-Gly-Asp (RGD) attachment motif, together with integrins that serve as their receptor, constitute a major recognition system for cell adhesion. RGD recognition is one mechanism used by microbes to gain entry into eukaryotic tissues (Stockbauer et al., 1999; lsberg and Tran Van Nhieu, 1994). However, not all RGD containing proteins mediate cell attachment. It has been shown that RGD-containing peptides with a proline at the carboxy end (RGDP) are inactive in cell attachment assays (Pierschbacher and Ruoslahti, 1987) and were excluded from consideration. The Geanfammer software was used to cluster proteins into homologous families (Park and Teichmann, 1998). Preliminary analysis of the family classes has provided novel ORFs within a polypeptide candidate cluster, as well as defining potential protein function.

### Example 6

### Proteomics

[0325] Two strategies for identifying surface exposed proteins on microorganisms are used to identify surface exposed proteins on Alloiococcus otitidis. The first involves digesting of the surface of live organisms with protease and analyzing the released proteins. The second involves the purification of cellular membrane in a way that preserves the interaction of proteins that normally associate with the membrane. Both techniques revolve around the use of mass spectroscopy to identify the proteins that are detected but otherwise differ substantially.

[0326] In the first strategy, cells are treated with proteolytic enzymes in isotonic solution without substantial cell lysis. Experimentally, the cells are washed and suspended in an isotonic glycerol solution of neutral pH. A reductant, dithiothreitol, is first added to cleave the protein disulfide linkages and then iodoacetamide is added to alkylate the exposed cysteine thiols. The objective of this step is to break up the secondary and tertiary structure of the surface proteins. Porcine trypsin is then added and the cells are incubated at 37° C. for 4 to 24 hours. The cells are then spun down and the supernatant containing the digest of surface exposed proteins is analyzed by mass spectroscopy (vide infra). At the end of the procedure, cell integrity is observed by Scanning Electron Microscopy (SEM). Cells, so treated, have a strikingly different morphology, as seen under the SEM, which is best described as a “clean shave”. That is, the normal spongy or furry appearance is replaced by a smooth spherical morphology. Maintaining cell integrity throughout this operation is important. The intact cell membrane protects all intracellular proteins from the proteolytic step required for identification. Any ruptured cells therefore spill intracellular proteins into the extracellular environment where they are digested and erroneously identified as surface exposed proteins.

[0327] In the second strategy, proteins with a natural tropism for membranes are copurified with membranes by simple centrifugation. In principle, this separates proteins into two classes; soluble and membrane bound. In this case, the class of interest is membrane bound because many of these are also surface exposed as well. Experimentally, cells are ruptured in the absence of detergent by sonication or shear and the lysate is subjected to differential centrifugation. The pellet from a high speed spin (20,000×g) consists of membranes and their associated proteins. This pellet is then dissolved in SDS load buffer and then separated by SDS PAGE. The gel, after staining, shows a large number of still intact proteins that share the quality of being membrane bound. The protein bands from this gel are then cut and exposed to trypsin for the obligate digestion before mass spectroscopic identification.

[0328] It should be pointed out that many of these proteins are actually on the inside (cytoplasmic) surface of the membrane and may well have no surface exposure at all. There are several advantages to this method, however, that offset this apparent lack of selectivity. Many proteins are not apprehended by the aforementioned technique of surface digestion are, however, captured by membrane enrichment. Surface digestion fails for proteins that are minimally exposed to the protease. This would be the case for proteins that are highly structured, membrane buried, or heavily glycosylated. In the final analysis both techniques have different merits and shortcomings and can be used in a complementary way.

[0329] In a typical example, a membrane preparation was dissolved in SDS load buffer and the proteins separated by SDS PAGE. After staining with colloidal Coomassie Blue stain, fifteen gel bands containing the entire sample lane were excised and the bands digested individually with trypsin. The tryptic peptides were analyzed using microcapillary reversed-phase liquid chromatography—nano-electrospray tandem mass spectrometry (LC-MS/MS) on a Finnigan LCQ Deca quadrupole ion trap mass spectrometer. Acquisition was performed using a “3 CADs experiment”. Using SEQUEST software, the uninterpreted tandem mass spectrometric information was used to search appropriate sequence databases to identify the proteins present in each gel band.

### Example 7

### Protein Identification

[0330] In order to identify the polypeptide components in the complex surface digest mixture, an analytical technique is used to separate and sequence multiple peptides with high sensitivity over a large concentration range. Tandem mass spectrometry (MS/MS) has been shown to be a powerful approach to analyze proteins from both gels and in solution. MS/MS first uses a mass analyzer to separate a peptide ion from a mixture of ions, then uses a second step or mass analyzer to activate and dissociate the ion of interest. This process, known as collision induced dissociation (CID) causes the peptide to fragment at the peptide bonds between the amino acids, and therefore, the fragmentation pattern of a peptide can be used to determine its amino acid sequence. In addition, the SEQUEST computer algorithm can be used to search the experimental fragmentation spectrum directly against protein or translated nucleic acid sequence databases. For peptides above roughly 800-900 Da in size, a single spectrum can uniquely identify a protein.

[0331] To sequence multiple peptides from a complex mixture, a reversed phase chromatography system is coupled to an electrospray ion trap mass spectrometer. In this system, it is known that high sensitivity (down to sub-femtomole levels) is attained by minimizing both flow rate and column diameter to concentrate the elution volume and direct as much of the column effluent as possible into the orifice of the mass spectrometer detector. Initial experiments separated peptides using a reversed phase gradient of 1% acetonitrile/minute. In order to increase chromatographic separation, longer gradients, down to 0.28% acetonitrile/minute, and slower flow rates (50 nL/min) will be employed. To maximize the coverage of proteins present in the sample, the data-dependent acquisition feature of the ion trap is employed. The instrument is programmed to acquire a single ms scan in the range of m/z 375-600, then to obtain ms/ms data on the top two ions in that range. It then acquires another ms scan in the range of m/z 600-1000, and obtains ms/ms data on the top two ions in that range. This results in better coverage of the larger peptides.

[0332] Dynamic exclusion is used to prevent reacquisition of tandem mass spectra of ions once a spectrum had been acquired for a particular m/z value. The isotopic exclusion function excludes the ion associated with the ¹³C isotope of peptides from the list of ions slated for MS/MS. A 3-μ mass width window is selected for this purpose. Using these data-dependent features dramatically increases the number of peptide ions that will be selected for CID analysis.

### Example 8

### Sequest Analysis

[0333] The LC-MS/MS data acquisition conditions described above typically results in fragmentation data for more than 2000 peptide ions for each run. Using the Sequest algorithm, this data is searched against a composite protein sequence database containing the translated ORFs from Alloiococcus otitidis combined with the non-redundant protein sequence database OWL. Sequest search conditions using a modified trypsin selectivity allows a differential search of +16 Da on methionine (to account for met oxidation). Candidate matches identified by Sequest are confirmed using the following manual procedure. Those matches with Xcorr values greater than 2.5 (a measure of the similarity of the experimental ms/ms data to that generated from the sequence database), and delCn values greater than 0.1 (delCn measures the normalized difference between the Xcorr values of the first and second matches), are chosen for further analysis. The fragmentation spectra from good matches are checked for reasonable signal/noise, and the list of matched ions are examined for reasonable continuity. Some matches that are not acceptable alone are only included if other confirmatory ms/ms data is generated by the same sample.

### Example 9

### Cloning and Protein Expression

[0334] Primer sets are designed for PCR amplification of desired ORFs such that the forward 5′ primer anneals at the start of the predicted mature protein. For lipoproteins, the 5′ forward primer is designed to anneal just after the codon encoding a cysteine residue of the mature protein to minimize disulfide bridging. Design of the opposing reverse 3′ primers independent upon the type of predicted protein. For those proteins that contain an LPXTG, the primer is designed such that it anneals at the beginning (5′ end) of the cell wall anchor region. For all other predicted proteins, primers are redesigned such that they anneal at the 3′ end of the ORF. Additionally, the 5′-forward primer is initially designed to allow an in-frame fusion to thioredoxin with the opposing 3′-reverse primer allowing read-through to include a downstream his-patch and V5 epitope (pBAD/thio-TOPO®, Invitrogen, Carlsbad, Calif.). In parallel, these same PCR products are cloned into pCR®T7TOPO® (Invitrogen, Carlsbad, Calif.). This allows for an N-terminal fusion to a Xpress epitope and a his-tag for purification.

[0335] All PCR reactions are performed using Alloiococcus otitidis chromosomal DNA as the template. PCR products are transformed into the E. coli host, TOP10, and plated on SOB containing 100 μg/mL ampicillin. Colonies are screened by PCR amplification using a vector specific 5′ primer and the specific 3′ reverse primer annealing to the gene insert. Colonies are seeded into wells of 96 well microtiter plates containing 50 μL 50% glycerol. Ten-12 colonies per gene are seeded in one row of the plate. In a second 96 well PCR plate, 50 μL reactions are set up specific to the gene of interest. One μL of the cells suspended in glycerol is used as template in the PCR reaction. Reactions that produce bands of the expected size are analyzed further. The cells that are seeded in 50% glycerol have SOB media added to them and incubated at 37° C. for 5-8 hours and frozen at −70° C.

[0336] PCR positive colonies are inoculated into 2 mL cultures for overnight growth. Part of the culture is used to prepare plasmid DNA that is then analyzed by restriction digestion to confirm the inserts while another part is used to seed 10 mL expression cultures (for pBAD plasmids) for expression. Mid-log phase cultures are induced with 0.5% L-arabinose for 2-3 hours. T7/NT plasmids are transformed into the expression strain BLR(DE3) pLysS before screening. T7/NT cultures are induced by the addition of 1 mM IPTG and incubated for 2 hours. Whole cell lysates of induced cultures are run on SDS-PAGE in duplicate. One gel is stained with Coomassie and the other transferred to nitrocellulose and probed with antibody to the relevant epitope tag.

[0337] Positive clones are grown in 1-2 L volumes and induced for large-scale purification. Solubility and expression level of the recombinant proteins are assessed by freeze-thaw lysis of the cells, followed by DNase/RNase digestion and centrifugation at 9,000×g for 15 minutes in a RC5B refrigerated centrifuge. The soluble fraction is removed from the insoluble material and both are then separated and evaluated for protein localization and expression by SDS-PAGE. Soluble fusion proteins are purified by passing the soluble fraction of lysed cells over Ni-NTA (Qiagen) resin and eluting the bound proteins with imidazole. Eluted proteins are buffer exchanged on PD-10 columns (Amersham Pharmacia Biotech, Piscataway, N.J.).

[0338] Insoluble recombinant proteins are washed using centrifugation 3 times in PBS, 0.1% Triton-X100. The inclusion bodies are then solubilized in PBS-4 M urea and buffer exchanged through a PD-10 column (Amersham Pharmacia) into PBS, 0.01% Triton-X100, 0.5 M NaCl. Proteins are quantitated by the Lowry assay (Lowry et al., 1951), and checked for purity and concentration by SDS-PAGE.

### Example 10

### Generation of Polyclonal Antisera and Monoclonal Antibodies

[0339] To generate monoclonal antibodies, female, eight week old Blab/c mice are inoculated intraperitoneally with the gene products three times in a four week period (week 0, 2, 4). The dosage of the protein gene product is between 5 and 50 go. Two different fusion procedures are performed. The first fusion is done after a three-month rest period and an intraperitoneal boost with the protein; the second fusion is done after a four-month rest period and a boost by the same route. During the immunization and rest period, mouse sera recollected and tested for antibody activity by ELISA using the protein as the coating antigen.

[0340] For both fusions, the spleens are excised from two immunized mice about 72 hours after the last injection and mixed with the nonsecreting X63Ag8.653 mouse (Balb/c) myeloma cells in a 5:1 ratio (splenocytes:myeloma). The cells are allowed to fuse for four minutes in 50% (wt/wt) polyethylene glycol 1500 and 10% dimethyl sulfoxide in Dulbecco's Modified Eagle medium (D-MEM). Multiple dilutions of the fused cells are then made into the selection medium, i.e., D-MEM supplemented with hypoxanthine, aminopterin, thymine, 10% fetal bovine serum, and 10% NCTC-109 medium supplement (Gibco-BRL). The reactivity in each dilution is evaluated by SDS-PAGE western blots, dot blots, and ELISA using the gene product protein and whole bacterial cells as. the, detection antigens. The positive reacting hybridomas are identified and saved. These hybridomas are then further subcloned by the limiting dilution procedure to isolate the individual antibody secreting cells. The selected hybridoma cells are then used to prepare the monoclonal antibodies. This is either performed by growing them in D-MEM and concentrating the supernatant by ammonium sulfate precipitation, or by injecting mice with the hybridoma cells and collecting the resulting ascites fluid.

### Example 11

### Elisa Titration of Mouse and Human Sera, Monoclonal Antibodies, and Mucosal Washings Against Gene Products and Whole Bacteria

[0341] The levels of antibodies elicited by the gene products cloned and expressed as per Example 10 toward themselves and whole bacterial cells are measured by Enzyme linked immunosorbent assay (ELISA). For the whole cell ELISA, the bacteria are grown overnight on agar medium and swabbed into PBS. The turbidity of the cells is adjusted to 0.10 at 600 nm and 100 μl added to the wells of a 96 ELISA plate. The cells are dried overnight at 37° C., sealed with a mylar plate sealer and stored at 4° C. until needed. On the day of the assay, the residual protein binding sites are blocked by adding 5% non-fat dry milk in PBS with 0.1% Tween 20 (BLOTTO) and incubating at 37° C. for one hour. The blocking solution is then removed and 100 μl of sera serially diluted in the wells with BLOTTO. The sera are allowed to incubate for 1 h at 37° C. The plate wells are soaked with 300 ml PBS containing 0.1% Tween 20 for 30 seconds and washed 3 times for 5 seconds with a SkanWasher 300 plate washer (Skatron Instruments AS, Norway) and then incubated 1 hr at 37° C. with goat anti-mouse IgG conjugated to alkaline phosphatase (BioSource International) diluted 1:1000 in BLOTTO. After washing, the plates are developed at room temperature with 100 μl per well of 1 mg/ml p-nitrophenyl phosphate dissolved in diethanolamine buffer. Development is stopped by adding 50 μl of 3N NaOH to each well. The absorbance of each well is read at 405 nm and titers calculated by linear regression. The titer is reported as the inverse of the dilution extrapolated to an absorption value of 0.10 units.

[0342] For the antigen specific ELISA's, the proteins are diluted to a concentration of 5 μg/ml in a 50 mM sodium carbonate buffer (pH 9.8) containing 0.02% sodium azide (Sigma Chemical Co.). One hundred micro liters is added to each well of a 96 well E.I.A./R.I.A medium binding ELISA plate (Costar Corp., Cambridge, Mass.) and incubated for 16 hours at 4° C. The plates are washed and subsequently treated the same as described for whole cell ELISA procedure except, in addition to dilutions of sera, mucosal washings and monoclonal antibody suspensions are tested as well.

### Example 12

### Immunogold Labeling of Alloiococcus Otitidis and low voltage Scanning Electron Microscopy

[0343] Surface exposure of proteins on Alloiococcus otitidis is assessed by immunogold labeling of whole bacteria and electron microscopy. Bacteria cells are labeled as previously described (Olmsted et al., 1993). Briefly, late-log phase bacterial cultures are washed twice, and resuspended to a concentration of 1×10⁸ cells/ml in 10 mM phosphate buffered saline (PBS) (pH 7.4) and placed on poly-L-lysine coated glass coverslips. Excess bacteria are gently washed from the coverslips and unlabeled samples are placed into fixative (2.0% glutaraldehyde, in a 0.1 M sodium cacodylate buffer containing 7.5% sucrose) for 30 min. Bacteria to be labeled with colloidal gold are washed with PBS containing 0.5% bovine serum albumin, and the pre-immune or hyper-immune mouse polyclonal antibody prepared above applied for 1 hour at room temperature. Bacteria are then gently washed, and a 1:6 dilution of goat anti-mouse conjugated to 18 nm colloidal gold particles (Jackson ImmunoResearch Laboratories, Inc., West Grove, Pa.) applied for 10 min at room temperature. Finally, all samples are washed gently with PBS, and placed into the fixative described above. The fixative is washed from samples twice for 10 min in 0.1 M sodium cacodylate buffer, and posffixed for 30 min in 0.1 M sodium cacodylate containing 1% osmium tetroxide. The samples are then washed twice with 0.1 M sodium cacodylate, dehydrated with successive concentrations of ethanol, critical point dried by the CO₂ method of Anderson (Anderson, 1951) using a Samdri-780A (Tousimis, Rockville, Md.), and coated with a 1-2 nm discontinuous layer of platinum. Alloiococcus otitidis cells are then viewed with a LEO 1550 field emission scanning electron microscope operated at low accelerating voltages (1-4.5 keV) using a secondary electron detector for conventional topographical imaging and a high-resolution Robinson backscatter detector to enhance the visualization of colloidal gold by atomic number contrast.

### Example 13

### Intranasal and Parenteral Immunization of Mice

[0344] Six-week old, pathogen-free mice are purchased from Jackson Laboratories (Bar Harbor, Maine) and housed in cages under standard temperature, humidity, and lighting conditions. The mice, at 10 animals per group, are immunized with an appropriate amount of the protein(s) to be tested. For parenteral immunization, the protein is mixed with 100 μg of monophosphoryl lipid A (MPL™) (Corixa, Hamilton, Mont.) per dose to a final volume of 200 μl in saline and then injected subcutaneously (SC) into mice. All groups receive a booster with the same dose and by the same route 3 and 5 weeks after the primary immunization. Control mice are injected with MPL™ alone. All mice are bled two weeks after the last boosting; sera is then isolated and stored at −20° C. For intranasal (IN) immunization, mice receive three IN immunizations one week apart. On each occasion, an appropriate dose of the protein to be tested is formulated with 0.1 μg of CT-E29H, a genetically modified cholera toxin that is reduced in enzymatic activity and toxicity (Tebbey et al., 2000), and slowly instilled into the nostril of each mouse in a 10 μl volume. Mice immunized with CT-E29H alone are used as controls. Serum samples are collected one week after the last immunization.

### Example 14

### In vitro Opsonphagocytosis Analysis

[0345] An in vitro opsonic reaction, that may mimic the in vivo reaction, is achieved when a mixture of Alloiococcus otitidis cells, heat inactivated human serum containing specific antibodies to the alloiococcal strain, and an exogenous complement source are incubated together. Opsonophagocytosis proceeds during incubation of freshly isolated human polymorphonuclear cells (PMN's) and the antibody/complement/alloiococcal cell mixture. Bacterial cells that are coated with antibody and complement are killed upon opsonophagocytosis. Colony forming units (cfu) of surviving bacteria that escape from opsonophagocytosis are determined by plating the assay mixture. Titers are reported as the reciprocal of the highest dilution that gives ≧50% bacterial killing, as determined by comparison to assay controls. Specimens, which demonstrate less than 50% killing at the lowest serum dilution tested (1:8) are reported as having an OPA titer of 4. The highest dilution tested is 1:2560. Samples with ≧50% killing at the highest dilution are repeated, beginning with a higher initial dilution.

[0346] The method described herein is a modification of Gray's method (Gray, B. M. 1990). The assay mixture is assembled in a 96-well microtiter tissue culture plate at room temperature. The assay mixture consists of 10 μL of test serum (a series of two-fold dilutions) heated to 56° C. for 30 minutes prior to testing, 10 μL of preclostral bovine serum (complement source) having no opsonic activity for the bacterial test strain, and 20 μL of buffer containing viable Alloiococcus otitidis organisms. This mixture is incubated at 37° C. without CO₂ for 30 minutes with shaking. Next, 40 μL of human PMNs, freshly prepared from heparinized peripheral blood by dextran sedimentation and Percoll density centrifugation, suspended in buffer at a concentration of 1×10⁶/mL is added. The assay plate(s) is then incubated at 37° C. for an additional 90 minutes with vigorous shaking. Aliquots from each well are dispensed onto the upper ¼ of a 15×100 mm blood agar plate. The blood agar plate is tilted while pipetting to allow the liquid suspension to “run” down the plate. Plates are incubated overnight in 5% CO₂ at 37° C. The viable cfu are counted the following morning. Negative control wells, lacking bacterial cells, test serum, complement and/or phagocytes in appropriate combination are included in each assay. A test serum control, which contains test serum plus bacterial cells and heat-inactivated complement, is included for each individual serum. This control is used to assess whether the presence of antibiotics or other serum components are capable of killing the bacterial strain directly (Le. in the absence of complement or PMN's). A human serum with known opsonic titer is used as a positive human serum control. The opsonic antibody titer for each unknown serum is calculated as the reciprocal of the initial dilution of serum giving 50% cfu reduction compared to the control without serum.

### Example 15

### Mouse Nasal Clearance Model

[0347] The gene products are evaluated in a mouse nasal clearance model. Groups of at least ten mice, of either the C3H/heJ or Balb/C strains, are immunized as described above. Approximately two weeks after the last immunization, the mice are anesthetized with 1.2 mg of ketamine HCl (Ft. Dodge Laboratories, Ft. Dodge, Iowa) by i.p. injection. The mice are then challenged intranasally by placing 10 μL of a suspension the 1104-92 isolate of Alloiococcus otitidis prepared to an A₅₅₀ of 0.5 in the nose and allowing the animal to inhale it. The 1104-92 isolate used for this challenge is passaged twice in mice by intranasal instillation to select for a variant with optimal colonization capacity. After five hours the mice are killed, their nasal turbinates removed, homogenized in 2 ml of sterile saline, appropriately diluted, and plated onto selective agar medium. The selective medium is a Columbia based agar supplemented with 0.5% Tween-80, 0.5% azide and 20 mg/L erythromycin. Owing to its slow growth, Alloiococcus otitidis requires 3 to 4 days before colonies a visible on this medium. The degree of clearance of the immunized mice is calculated as the percent decrease in colony forming units (CFUs) and statistically compared to a set of mice immunized with an unrelated protein such as CRM, Keyhole Limpet Hemocyanin (KLH) or other protein not derived from Alloiococcus otitidis.

### L. REFERENCES

[0348] U.S. Pat. No. 4,196,265
[0349] U.S. Pat. No. 4,522,811
[0350] U.S. Pat. No. 4,554,101
[0351] U.S. Pat. No. 4,683,195
[0352] U.S. Pat. No. 4,683,202
[0353] U.S. Pat. No. 4,736,866
[0354] U.S. Pat. No. 4,816,567
[0355] U.S. Pat. No. 4,837,151
[0356] U.S. Pat. No. 4,870,009
[0357] U.S. Pat. No. 4,873,191
[0358] U.S. Pat. No. 4,873,316
[0359] U.S. Pat. No. 4,987,071
[0360] U.S. Pat. No. 5,116,742
[0361] U.S. Pat. No. 5,168,062
[0362] U.S. Pat. No. 5,223,409
[0363] U.S. Pat. No. 5,328,470
[0364] U.S. Pat. No. 5,580,859
[0365] U.S. Pat. No. 5,643,576
[0366] U.S. Pat. No. 6,127,170
[0367] U.S. Pat. No. 6,113,918
[0368] U.S. Pat. No. 6,168,918
[0369] U.S. Pat. No. 6,168,943
[0370] U.S. Pat. No. 6,207,646
[0371] International Application No. EP 125,023
[0372] International Application No. EP 171,496
[0373] International Application No. EP 184,187
[0374] International Application No. EP 264,166
[0375] International Application No. EP 524,800
[0376] International Application No. EP PCT/US86/02269
[0377] International Application No. WO 00/18434
[0378] International Application NO. WO 00/36776
[0379] International Application No. WO 86/01533
[0380] International Application No. WO 90/02809
[0381] International Application No. WO 91/17271
[0382] International Application No. WO 92/01047
[0383] International Application No. WO 92/09690
[0384] International Application No. WO 92/15679
[0385] International Application No. WO 92/18619
[0386] International Application No. WO 92/19265
[0387] International Application No. WO 92/20791
[0388] International Application No. WO 93/01288
[0389] International Application No. WO 93/13302
[0390] International Application No. WO 97/07668
[0391] International Application No. WO 97/07669
[0392] International Application No. WO 00/63364
[0393] Abravaya et al., Nucleic Acids Res., 23:675-682, 1995
[0394] Adams et al., Nature 355:632-634, 1992
[0395] Adams et al., Nature 377 Supp:3-174, 1995
[0396] Adams et al., Science 252:1651-1656,1991
[0397] Aguiree, M., and M. D. Collins, 1992 Phylogenetic analysis of Alloiococcus otitis I gen. Nov., sp. Nov., and organism from human ear fluid: Internat. J. System Bacteriol., v.42, p. 79-83.
[0398] Altschul, et al, “Gapped BLAST and PSI—BLAST” a generation of protein database search programs” Nuc. Acids Res. 25(17):33890-402, 1997
[0399] Altschul et al, J. Molec. Biol. 215:403-410, 1990
[0400] Amann et al., Gene 69:301-315,1988.
[0401] Anderson, “Techniques for the preservation of three-dimensional structure in preparing specimens for the electron microscope.” Trans. N.Y. Acad. Sci. 13(130): 130-134, 1951
[0402] Arlinghaus et al., Analysis of biosensor chips for identification of nucleic acids, Analytical Chemistry 69(18):3747-53, 1997.
[0403] Bairoch and Apweiler, Nucleic Acids Research, 28:45-48, 2000.
[0404] Baldari et al, A novel leader peptide which allows efficient secretion of a fragment of human interleukin 1 beta in Saccharomyces cerevisiae, EMBO Journal., 6(1):229-34, 1987.
[0405] Baneji et al., Cell,33:729-740; 1983
[0406] Barker et al., Nucleic Acids Research, 29:29-32, 2001.
[0407] Bartel and Szostak, Science 261:1411-1418, 1993.
[0408] Bartel et al., Biotechniques 14:920-924, 1993(b).
[0409] Bartel, “Cellular Interactions and Development: A Practical Approach” I, pp. 153-179, 1993(a).
[0410] Bateman et al., The Pfam protein families database,” Nucleic Acid Res., 28(1), 263-266, 2000.
[0411] Benson, “Tandem repeats finder: a program to analyze DNA sequences,: Nucleic Acids Res. 27(2):573-80, 1999.
[0412] Beswick, A. J., B. Lawley, and A. P. Fraise, 1999, Detection of Alloiococcus otitis in mixed bacterial populations from middle-ear effusions of patients with otitis media: Lancet v.354, p.386-389.
[0413] Boliver et al., Construction and characterization of new cloning vehicles. II. A multipurpose cloning system, Gene, 2(2):95-113, 1977.
[0414] Borodovsky and Mclinich 1993, Comp. Chem. 17:123.
[0415] Bradley, Current Opinion in Biotechnology 2:823-829, 1991
[0416] Bradley, in “Teratocarcinomas and Embryonic Stem Cells: A Practical Approach,” E. J. Robertson, ed., IRL, Oxford, pp.113-152, 1987.
[0417] Briles et al., “Intranasal immunization of mice with a mixture of the pneumococcal proteins PsaA and PspA is highly protective against nasopharyngeal carriage of Streptococcus pneumoniae,” Infect Immun. 68(2):796-800, 2000.
[0418] Bunzow et al., Nature, 336:783-787, 1988.
[0419] Burge and Karlin, “Prediction of complete gene structures in human genomic DNA.”J. Mol. Biol. 268:78-94, 1997.
[0420] Butler et al., “Pneumococcal vaccines: history, current status, and future directions,: Am. J. Med. 107(1A):69S, 76S, 1999.
[0421] Byrne and Ruddle, PNAS 86:5473-5477, 1989.
[0422] Calame and Eaton, Adv. Immunol. 43:235-275, 1988.
[0423] Campes and Tilghman, Genes Dev. 3:537-546, 1989.
[0424] Chang, et al., Phenotypic expression in E. coil of a DNA sequence coding for mouse dihydrofolate reductase, Nature 275(5681), Oct. 19, 1978.
[0425] Chen et al., PNAS 91:3054-3057, 1994.
[0426] Cohen et al., Adv. Chromatogr. 36:127-162, 1996.
[0427] Cotton et al., PNAS 85:4397, 1988.
[0428] Cotton, Mutat Res. 285-125-144, 1993.
[0429] Cowan et al., “RGS Proteins: Lessons from the RGS9 subfamily,” Progress in Nucleic Acid Research and Molecular Biology 65:341-359, 2001.
[0430] Crain et al., “Streptococcus pneumoniae surface protein A (PspA) is serologically highly variable and is expressed by all clinically important capsular serotypes of Streptococcus pneumoniae.: Infect. Immun. 58(10):3293-9, 1990.
[0431] Cserzo et al., “Prediction of Transmembrane alpha-helices in prokaryotic membrane proteins: the dense alignment surface method,” Protein Engineering 10(6):673-6, 1997.
[0432] DeRisi et al., Use of cDNA microarray to analyze gene expression patterns in human cancer, Nature Genetics Dec 14(4):457-460, 1996.
[0433] D'Eustachio et al., Science 220: 919-924, 1983.
[0434] Devereux et al., “Competence and virulence of streptococcus pneumoniae: Adc and PsaA mutants exhibit a requirement for Zn and Mn resulting from inactivation of putative ABC metal permeases,” Mol. Microbiol. 25(4):727-739, 1997.
[0435] Dintilhac, et al., “Competence and virulence of Streptococcus pneumoniae: Adc and PsaA mutant exhibit a requirement for Zn and Mn resulting from inactivation of putative ABC metal permeases,” Mol. Microbiol. 25(4):727-739, 1997.
[0436] Doestschman et al., “Antibody response to pneumococcal vaccination in children younger than five years of age,” J. Infect.Dis. 148:131-137, 1983.
[0437] Douglas et al, “Antibody response to pneumococcal vaccination in children younger than five years of age,” J. Infect. Dis. 148:131-137, 1983.
[0438] Eddy, “Hidden Markov Models: Current Opinion in Structural Biology 6(3):361-5, 1996.
[0439] Edlund et al., Science230:912-916, 1985.
[0440] Eichelbaum, Clin. Exp. Pharmnacol Phsiol, 23(10-11):983-985, 1996.
[0441] Elledge et al., Proc. Natl. Acad. Sci. USA, 88:1731-1735, 1991.
[0442] Eng, McCormack and Yates, “An approach to correlate tandem mass-spectral data of peptides with amino-acid sequences in a protein database,” Journal of the American Society for Mass Spectrometty,” 5:976-989, 1994.
[0443] Ewing et al., 1988., Genome Res. 8:175-185.
[0444] Ewing and Green, 1988, Genome Res. 8:685-734. Reads were assembled using PHRAP (P. Green, Abstracts of DOE Human Genome Program Contractor-Grantee Workshop V, Jan.1996, p 157.)
[0445] Faden, H., and D. Dryja, 1989, Recovery of a unique bacterial organism in human middle ear fluid and its possible role in chronic otitis media: J. Clin. Microbiol., v. 27, p.2488-2491.
[0446] Fan, Y. et al., PNAS, 87:6223-27, 1990
[0447] Finely et al., Proc. Natl. Acad. Sci. USA, 91:12980-12984, 1994.
[0448] Foster and Hook, “Surface protein adhesins of Staphylococcus aureus,: Trends Microbiol. 6(12):484-8, 1998.
[0449] Fraser et al., Genomic sequence of a Lyme disease spirochaete, Borrelia burgdorferi” Nature 390(6660):580-6, 1997.
[0450] Frohman et al, Proc. Natl. Acad. Sc. USA 85, 8998-9002, 1988.
[0451] Gabizon, et al., Effect of liposome composition and other factors on the targeting of liposomes to experimental tumors: biodistribution and imaging studies, Cancer Research 50(19):6371-6378, Oct. 1, 1990.
[0452] Gaultier et al, Nucleic Acids Res.156625-6641, 1987.
[0453] Gentz et al., Proc. Natl. Acad. Sci. USA, 86:821-824, 1989.
[0454] Goldstein and Garau, ”30 years of penicillin-resistant S pneumoniae: myth or reality?,” Lancet 350(9073):233-4.
[0455] Gray, Conjugate Vaccines Supplement p694-697, 1990.
[0456] Griffen et al., Appl. Biochem Biotechnol. 38:147-159, 1993.
[0457] Gunnar von Heijne, “Membrane Protein Structure Prediction, Hydrophobicity Analysis and the Positive-inside Rule” J. Mol. Biol., 225:487-494, 1992.
[0458] Harlow and Lane, “Antibodies: A Laboratory Manual,” Cold Spring Harbor Laboratory Press, Cold Spring Harbor, N.Y., 1988.
[0459] Harper et al., Cell, 75:805-816, 1993.
[0460] Haselhoff and Gerlach, Nature 334:585-591, 1988.
[0461] Haselhoff and Gerlach, 1988 (p. 634).
[0462] Hausdorff et al., “Which pneumococcal serogroups cause the most invasive disease: implications for conjugate vaccine formulation and use, part I,: Clinical Infectious Diseases 30(1):100-21, 1997.
[0463] Hayashi, Genet Anal. Tech. Appl. 9:73-79, 1992.
[0464] Helene et al., Ann N.Y. Acad. Sci. 660:27-36, 1992.
[0465] Helene et al., Anticancer Drug Des. 6(6):569-84, 1991.
[0466] Hendolin, P. H., U Karkkainen, T. Himi, A. Markanen, and J. Ylikoski, 1999, High incidence of Alloiococcus otitis in otitis media with effusion: Pediatr Infect. Disc. J., v.18, p. 860-865.
[0467] Hendolin, P. H., A. Markkanen, J. Ylikoski, and J. J. Wahifors, 1997, Use of multiplex PCR for simultaneous detection of four bacterial species in middle ear effusions: J. Clin. Microbiol., v. 35, p. 2845-2858.
[0468] Hendolin, P. H., L. Paulin, and J. Ylikoski, 2000, Clinically applicable multiplex PCR for middle ear pathogens: J. Clin. Microbiol., v. 38 p.125-132.
[0469] Hemandez-Sanchez et al., “Lambda bar minigene-mediated inhibition of protein synthesis involves accumulation of peptidyl-tRNA and starvation for tRNA,” EMBO Jour. 17(13), 3758-65, 1998.
[0470] Hitzeman et al., Isolation and characterization of the yeast 3-phosphoglycerokinase gene (PGK) by an immunological screening technique, Journal of Biol. Chem., 255(24): 12073-80, 1980
[0471] Hogan, “Manipulating the Mouse Embryo”, Cold Spring Harbor Laboratory Press, Cold Spring Harbor, N.Y., 1986.
[0472] Howell, E. and D. Lane “Antibodies” A Laboratory Manual, Cold Spring Harbor Laboratoty, 1988.
[0473] Inoue et al, FEBS Lett. 215:327-330, 1987(a).
[0474] Inoue et al., Nucleic Acids Res. 15:6131-6148, 1987(b)
[0475] Isberg, R. R., and G. Tran Van Nhieu, 1994, Binding and internalization of microorganisms by integrin receptors: Trends in Microbiology, v.2, p.10-4, 1994.
[0476] Iwabuchi et al., Oncogene 8:1693-1696, 1993.
[0477] Johnson et al., 1993 (p. 640)
[0478] Jones, 1977
[0479] Kaufman et al., EMBO J 6:187-195, 1987.
[0480] Kessel and Gruss, Science, 249:3 74-379, 1990.
[0481] Kingsman et al., Replication in Saccharomyces cerevisiae of plasmid pBR313 carrying DNA from the yeast trpl region. Gene. Oct;7(2):141-52, 1979.
[0482] Klein, J. O., Otitis media: Clin. Infect. Dis., v. 19, p 823-833 (1994).
[0483] Koebnik, “Proposal for a peptidoglycan-associating alpha-helical motif in the C-terminal regions of some bacterial cell-surface proteins,: Mol. Microbiol. 16(6):1269-70, 1995.,
[0484] Kurjian and Herskowitz, Cell 933-943, 1982.
[0485] Kyte and Doolittle, A simple method for displaying the hydropathic character of a protein, J. Mol. Biol., 157:105-132, 1982.
[0486] Laemmli, “Cleavage of structural proteins during the assembly of the head of bacteriophage T4,” Nature (London) 227:680-685, 1970.
[0487] Lakso et al., PNAS 89:6232-6236, 1992
[0488] Lennette, “General principles for laboratory diagnosis of viral, rickettsial, and chlamydial infections,: p. 17-18, diagnostic procedures for viral, rickettsial, and chlamydial infections, vol. 7^{th} edition, 1995.
[0489] Lewis, “Programmed death in bacteria,” Microbiol. Mol. Biol. Rev. 64(3):503-14, 2000.
[0490] Li et al., Cell 69:915, 1992.
[0491] Linder, Clin. Chem. 43(2):254-266, 1997.
[0492] Lipshutz et al., Using oligonucleotide probe arrays to access genetic diversity, Biotechniques, 19(3):442-447, 1995.
[0493] Livache et al, Preparation of a DNA matrix via an electrochemically directed copolymerization of pyrrole and oligonucleotides bearing a pyrrole group, Nucleic Acids Research. 11;22(15):2915-21, 1994
[0494] Lockhart et al., Expression monitoring by hybridization to high-density oligonucleotide arrays, Nat. Biotechnol. 14(13):1649, 1996.
[0495] Loessner et al., “Evidence for a holin-like protein gene protein gene fully embedded out of frame in the endolysin gene of Staphylococcus aureus bacteriophage 187,: J. Bacteriol. 181(15):4452-60, 1999.
[0496] Lowery et al., ‘Protein measurement with the Folin-Phenol reagents:, J. Biol. Chem. 193:265-275, 1951.
[0497] Luckow and Summers, Virology 170:31-39, 1989.
[0498] Luckashin and Borodovsky, “GeneMark™.hmm: new solutions for gene finding,: Nuc. Acids Res. 26(4):1107-15, 1998.
[0499] Maher, Inhibition of T7 RNA polymerase initiation by triple-helical DNA complexes: a model for artificial gene repression, Biochemistry, 31(33):7587-94, 1992.
[0500] Maher, Bioassays 14(12):807-15, 1992.
[0501] Mansour et al., Nature 336:348, 1988.
[0502] Maxim and Gilbert, PNAS, 74:560, 1997.
[0503] Mazimanian et al., :Staphylococcus aureus sortase, an enzyme that anchors surface proteins to the cell wall,: Science 285(5428):760-3, 1999.
[0504] McAtee et al., “Characterization of a Helicobacter pylori vaccine candidate by proteome techniques,: J. Chromatogr. B. Biomed. Sci. Appl. 714(2)325-33, 1998(c).
[0505] McAtee, C. P., K. E. Fry, and D. E. Berg, 1998a Identification of potential diagnostic and vaccine candidates of Helicobacter pylori by “proteome” technologies: Helicobacter, v. 3, p. 163-9/
[0506] McAtee C. P., M. Y. Lim, K. Fung, M. Velligan, K. Fry, T. Chow, and D. E. Berg, 1998b, Identification of potential diagnostic and vaccine candidates of Helicobater pylori by two-dimensional gel electrophoresis, sequence analysis, and serum profiling: Clin. Diagn. Lab Immunol, v.5, p. 537-42
[0507] McDaniel et al., “Monoclonal antibodies against protease-sensitive pneumococcal antigens can protect mice from fatal infection with Streptococcus pneumoniae,: J. Exp. Med. 160(2):386-97, 1984.
[0508] Mejihede et al., “Ribosomal-1 frame shifting during decoding of Bacillus subtilis cdd occurs at the sequence CGA MG,” J. Bacteriol. 181(9):2930-7, 1999.
[0509] Merel, p. 1994
[0510] Morrison et al., “Isolation and characterization of three new classes of transformation deficient mutants of Streptococcus pneumoniae that are defective in DNA transport and genetic recombination,: Journal of Bacteriology, 156:281-290, 1983.
[0511] Morin et al., Nucleic Acids Res., 21:2157-2163, 1993.
[0512] Myers et al., Nature 313:495, 1985(a).
[0513] Myers et al., Science 230:1242, 1985(b).
[0514] Nabors et al., “Immunization of health adults with a single recombinant pneumococcal surface protein A (PspA) variant stimulates broadly cross-reactive antibodies to heterologous PspA molecules,” Vaccine 18:1743-1754m 2000.
[0515] Nakai and Kanehisa, “Expert system for predicting protein localization sites in gram-negative bacteria,: Proteins 11(2) 95-110, 1991.
[0516] Navarre and Schneewind, “Surface Proteins of Gram-Positive Bacteria and Mechanisms of Their Targeting to the Cell Wall Envelope,: Microbiol. Mol. Biol. Rev. 63(1):174-229, 1999.
[0517] Nielsen et al., Science251:1351-1355, 1997.
[0518] O'Gon-nan et al., Science 251:1351-1355, 1991.
[0519] Olmsted et al., “High-resolution visualization by field emission scanning electron microscopy of Enterococcus faecalis surface proteins encoded by the pheromone-inducible conjugative plasmid pCF10.” J. Bacteriol. 175(19):6229-37, 1993.
[0520] Orita et al., “Peritoneal culture alters Streptococcus pneumoniae protein profiles and virulence properties,” Infect. Immun. 68:6082-6086, 2000.
[0521] Orihuela et al., ‘Pertoneal culture alters Streptococcus pneumoniae protein profiles and virulence properties,: Infect. Immun. 68:6082-6086, 2000.
[0522] Park and Teichmann, “DIVCLUS: an automatic method in the GEANFAMMER package that finds homologous domains in single- and multi-domain proteins,: Biofomatics 14(2):144-50, 1998.
[0523] Parkhill et al., “Complete DNA sequence of a serogroup A strain of Neisseria meningitidis Z2491,: Nature 404(6777):502-6, 2000.
[0524] Pierschbacher and Ruoslahti, “Influence of stereochemistry of the sequence Arg-Gly-Asp-Xaa on binding specificity in cell adhesion,: J. Biol. Chem. 262(36):17294-8, 1987.
[0525] Pinkert, An albumin enhancer located 10 kb upstream functions along with its promoter to direct efficient, liver-specific expression in transgenic mice, Genes & Development. (3): 268-76, 1987.
[0526] Pizza et al., “Identification of vaccine candidates against serogroup B meningococcus by whole-genome sequencing,: Science 287(5459):1816-20, 2000.
[0527] Pugsley, “The complete general secretory pathway in gram-negative bacteria,: Microbiol. Rev. 57(1):50-108, 1993.
[0528] Queen and Baltimore, Immunoglobulin gene transcription is activated by downstream sequence elements, Cell, 33:741-748, 1983.
[0529] Raham et al., Journal of Neuroscience 19:2016-2026, 1999.
[0530] Ranande, V. V., Drug delivery systems. 1. site-specific drug delivery using liposomes as carriers, Journal of Clinical Pharmacology,29(8):685-94, 1989.
[0531] Rose et al., “Methods in Yeast Genetics: A Laboratory Course Manual.: Cold Harbor Press, Cold Spring Harbor, N.Y. (1990).
[0532] Rosenow et al., “Contribution of novel choline-binding proteins to adherence, colonization and immunogenicity of Streptococcus pneumoniae,: Mol. Microbiol. 25(5):819-29, 1997.
[0533] Ross and Wilkie, “GTP'ase-activating proteins for Heterotrimeric G proteins: Regulators of G protein Signaling (RGS) and RGS-like proteins,: Annual Review of Biochemistry 69:795-827, 2000.
[0534] Saleeba et al., Meth. Enzymol. 217:286-295, 1992.
[0535] Salzberg et al., “Microbial gene identification using interpolated Markov models,: Nuc. Acids. Res. 26(2):544-8, 1998.
[0536] Sambrook et al., “Molecular Cloning: A Laboratory Manual: 2^{nd}, ed., Cold Spring Harbor Laboratory, Cold Spring Harbor Laboratory Press, Cold Spring Harbor, N.Y. 1989.
[0537] Sampson et al., :Cloning and nucleotide sequence analysis of psaa, the Streptococcus pneumoniae gene encoding a 37-kilodalton protein homologous to previously reported Streptococcus Sp. Adhesins,: Infect Immun. 62(1):319-24, 1994.
[0538] Sanger, PNAS 74:5463, 1977.
[0539] Schappert, S., 1991, Office Visits for Otitis Media: United States, 1975-1990: DHHS publication No. PHS 92-1250; Hyattsville, Md., US Dept. of Health and Human Sciences, Public Health Services, Centers for Disease Control and Prevention, National Center Schultz et al., Gene 54:113-123, 1987
[0540] Schultz, 1987 (p.646).
[0541] Seed, B., An LFA-3 cDNA encodes a phospholipid-linked membrane protein homologous to its receptor CD2, Nature, 329(6142):840-842, 1987.
[0542] Seed B. and Aruffo A, Molecular cloning of the CD2 antigen, the T-cell erythrocyte receptor, by a rapid immunoselection procedure, Proc. Natl. Acad. Sciences U.S.A. 1987 Sebwenlist et al., 1980
[0543] E. L. Shledon, 1993
[0544] Shinefield and Black, “Efficacy of pneumococcal conjugate vaccines in large scale field trials (In Process Citation), “Pediatr. Infect Dis. J. 19(4):394-7, 2000
[0545] Shoemaker et al., 1996
[0546] Sih, T., B. Schwartz, G. Bosley, and R. Facklam, 1992, Chronic otitis media with effusion caused by Alloiococcus otitis: clinical and laboratory features: the 32^{nd} lnterscience Conference on Antimicrobial Agents and Chemotherapy, p. 222.
[0547] Simon et al., Science, 252:802-8, 1991.
[0548] Smith and Johnson, Gene 67:31-40, 1988.
[0549] Smith et al., Mol. Cell Biol. 3:2156-2165, 1983.
[0550] Smith, T. L. and Waterman, M. S. Waterman, Identification of common molecular subsequences. J. Mol. Biol, 147,195-197 (1981).
[0551] Songyang, et al., Cell72:767-778, 1993.
[0552] Sonhammer, E. L.,G. von Heijne, and A Krogh, 1988, A hidden Markov model for predicting transmembrane helices in protein sequences: Ismb, v. 6, p.175-82.
[0553] Sonnhammer, E. L..,S. R. Eddy, and R. Durbin, 1997 Pfam: a comprehensive database of protein domain families based on seed alignments: Proteins, v. 28, p. 405-20.
[0554] Stinchcomb et al., 1979
[0555] Stratford, Perricaudet, et al., 1992.
[0556] Sonnenberg and Belisle, “Definition of Mycobacterium tuberculosis culture filtrate proteins by two-dimensional polyacrylamide gel electrophoresis, N-terminal amino acid sequencing, and electrospray mass spectrometry,” Infect. Immun. 65(11):4515-24, 1997. Sosnowsky et al., 1997.
[0557] Stockbauer et al., “A natural variant of the cysteine protease virulence factor of group A streptQcoccus with an arginine-glycine-aspartic acid (RGD) motif preferentially binds human integrins alphavbeta3 and alphallbbeta3 (In Process Citation),: Proc. Natl. Acad. Sci. USA 96(1):242-7, 1999.
[0558] Studier et al., “Protection of mice against fata pneumococcal challenge by immunization with pneumococcal surface adhesin A (PsaA),: Microb. Pathog. 21(1):17-22, 1996
[0559] Studier et al., Use of T7 RNA polymerase to direct expression of cloned genes, Methods in Enzymology,185:60-89, 1990.
[0560] Talkington et al., “Protection of mice against fatal pneumococcal challenge by immunization with pneumococcal surface adhesin A (PsaA),: Microb. Pathog. 21(1):17-22, 1996.
[0561] Tebbey et al., “Effective mucosal immunization against respiratory syncytial virus using a genetically detoxified cholera holotoxin, CT-E29H,” Vaccine 18(24):2723-34, 2000.
[0562] Thomas and Capecchi, Cell 51:503, 1987
[0563] Weldingh et al., “Two-dimensional electrophoresis for analysis of Mycobacterium tuberculosis culture filtrate and purification and characterization of six novel proteins,” Infect. Immun. 66(8):3492-500, 1998.
[0564] Wilmut et al., Nature 385:810-813, 1997.
[0565] Wilson et al., Cell 37-767, 1984.
[0566] Winoto and Baltimore, A novel, inducible and T cell-specific enhancer located at the 3′ end of the T cell receptor alpha locus, EMBO Journal. 8(3):729-733, 1989.
[0567] Xu et al., “PHR1 encodes an abundant, pleckstrin homology domain-containing Integral membrane protein in the photoreceptor outer segments,: Journal of Biological Chemistry 274:35676-35685, 1999.
[0568] Yamamoto et al., “A nontoxic adjuvant for mucosal immunity to peumococcal surface protein,: A. J. Immune. 161(8):4115-21, 1998.
[0569] Yershov et al., DNA analysis and diagnostics on oligonucleotide microchips, Proc. Natl. Acad. Sciences U.S.A.93(10):4913-8, 1996.
[0570] Servos et al., Cell 72:223-232, 1993.
[0571] Zhang et al., 2001, “Recombinant PhpA Protein, a Unique Histidine Motif-Containing Protein from Streptococcus pneumoniae, Protects Mice against Intranasal Pneumococcal Challenge,: Infect. Immun. 69:3827-3836

1. An isolated polynucleotide of an Alloiococcus otitidis genomic sequence, wherein the polynucleotide comprises a nucleotide sequence having at least about 70% identity to a nucleotide sequence chosen from one of odd numbered sequences from SEQ ID NO: 1 to SEQ ID NO: 6649, a complement thereof, a degenerate variant thereof, and a fragment thereof.

2. The polynucleotide of claim 1, wherein the polynucleotide is a complement to a nucleotide sequence chosen from one of odd numbered sequences from SEQ ID NO: 1 to SEQ ID NO: 6649, a complement thereof, a degenerate variant thereof, and a fragment thereof.

3. The polynucleotide of claim 2, wherein the polynucleotide is selected from the group consisting of genomic DNA, cDNA and RNA.

4. The polynucleotide of claim 3, wherein the polynucleotide further comprises heterologous nucleotides.

5. An isolated polynucleotide which hybridizes to a nucleotide sequence chosen from one of the odd numbered sequences from SEQ ID NO: 1 to SEQ ID NO: 6649, a complement thereof, a degenerate variant thereof, or a fragment thereof, under high stringency hybridization conditions.

6. The polynucleotide of claim 5, wherein the polynucleotide hybridizes under intermediate stringency hybridization conditions.

7. An isolated polynucleotide of an Alloiococcus otitidis genomic sequence, wherein the polynucleotide comprises a nucleotide sequence chosen from one of odd numbered sequences from SEQ ID NO: 1 to SEQ ID NO: 6649, a complement thereof, a fragment thereof, or a degenerate variant thereof, and encodes a polypeptide, a biological equivalent thereof, or a fragment thereof, and is selected from the group consisting of:
(a) an Alloiococcus otitidis polypeptide predicted by SignalP algorithm analysis as having met all four criteria set out in the SignalP algorithm for a polypeptide having a signal peptide and predicted by HMM SignalP algorithm analysis as having a signal peptide;
(b) an Alloiococcus otitidis polypeptide predicted by SignalP algorithm analysis as having met three of the four criteria set out in the SignalP algorithm for a polypeptide having a signal peptide and predicted by HMM SignalP algorithm analysis as having a signal peptide;
(c) an Alloiococcus otitidis polypeptide predicted by HMM Signal P algorithm analysis as having a signal peptide;
(d) an Alloiococcus otitidis polypeptide predicted by HMM Signal P algorithm analysis as being a non-secretory protein and by PSORT program to be localized to the cytoplasmic membrane;
(e) an Alloiococcus otitidis polypeptide identified by BlastP analysis;
(f) an Alloiococcus otitidis polypeptide identified by Pfam analysis;
(g) an Alloiococcus otitidis polypeptide identified using proteomics methodology as sharing homology with surface exposed proteins of Streptococcus pneumoniae;
(h) an Alloiococcus otitidis lipoprotein;
(i) an Alloiococcus otitidis polypeptide having a LPXTG motif, wherein the polypeptide is covalently attached to the peptidoglycan layer;
(j) an Alloiococcus otitidis polypeptide, wherein the polypeptide is non-covalently associated with the peptidoglycan layer;
(k) an Alloiococcus otitidis polypeptide having an RGDX motif wherein X is not a proline residue;
(l) an Alloiococcus otitidis polypeptide predicted by BlastP as being involved in capsule biosynthesis and transport;
(m) an Alloiococcus otitidis polypeptide identified by BlastP as being localized within the capsule loci of the Alloiococcus otitidis genome;
(n) an Alloiococcus otitidis polypeptide predicted by BlastP as being associated with sporulation;
(o) an Alloiococcus otitidis polypeptide encoded by unique ORFs identified by BlastP analysis as having a BlastP ‘E Value’ of >e⁻¹⁰;
(p) an Alloiococcus otitidis polypeptide identified by Glimmer™ ORF finder program;
(q) an Alloiococcus otitidis polypeptide identified by GeneMark™ ORF finder program;
(r) an Alloiococcus otitidis polypeptide identified by an ORF finder program that searches for an ATG, GTG or TTG Start codon between a Stop-Stop region; and
(s) an Alloiococcus otitidis polypeptide identified by an ORF finder program that searches for a transmembrane domain between two Stop codons and a Start codon immediately upstream of this transmembrane region.

8. The polynucleotide of claim 7, wherein the polynucleotide is a complement to a nucleotide sequence selected from one of the odd numbered sequences from SEQ ID NO: 1 to SEQ ID NO: 6649, a degenerate variant thereof, and a fragment thereof.

9. The polynucleotide of claim 8, wherein the polynucleotide is selected from the group consisting of genomic DNA, cDNA and RNA.

10. The polynucleotide of claim 9, wherein the polynucleotide further comprises heterologous nucleotides.

11. The polynucleotide of claim 10, wherein the polynucleotide encodes a fusion polypeptide.

12. The polynucleotide of claim 7 wherein the polynucleotide encodes a polypeptide, which is predicted by SignalP algorithm analysis as having met all four criteria set out in the SignalP algorithm for a polypeptide having a signal peptide, and which is predicted by HMM SignalP algorithm analysis as having a signal peptide, and the polynucleotide is selected from one of Seq. ID No. 89, Seq. ID No. 127, Seq. ID No. 131, Seq. ID No. 133, Seq. ID No. 161, Seq. ID No. 163, Seq. ID No. 213, Seq. ID No. 215, Seq. ID No. 225, Seq. ID No. 249, Seq. ID No. 251, Seq. ID No. 287, Seq. ID No. 289, Seq. ID No. 369, Seq. ID No. 371, Seq. ID No. 375, Seq. ID No. 377, Seq. ID No. 497, Seq. ID No. 503, Seq. ID No. 505, Seq. ID No. 527, Seq. ID No. 549, Seq. ID No. 575, Seq. ID No. 617, Seq. ID No. 657, Seq. ID No. 659, Seq. ID No. 661, Seq. ID No. 675, Seq. ID No. 715, Seq. ID No. 717, Seq. ID No. 745, Seq. ID No. 747, Seq. ID No. 755, Seq. ID No. 757, Seq. ID No. 759, Seq. ID No. 761, Seq. ID No. 773, Seq. ID No. 807, Seq. ID No. 967, Seq. ID No. 973, Seq. ID No. 975, Seq. ID No. 1013, Seq. ID No. 1025, Seq. ID No. 1027, Seq. ID No. 1039, Seq. ID No. 1075, Seq. ID No. 1089, Seq. ID No. 1195, Seq. ID No. 1197, Seq. ID No. 1207, Seq. ID No. 1239, Seq. ID No. 1243, Seq. ID No. 1245, Seq. ID No. 1269, Seq. ID No. 1315, Seq. ID No. 1317, Seq. ID No. 1331, Seq. ID No. 1365, Seq. ID No. 1367, Seq. ID No. 1369, Seq. ID No. 1445, Seq. ID No. 1447, Seq. ID No. 1513, Seq. ID No. 1517, Seq. ID No. 1545, Seq. ID No. 1549, Seq. ID No. 1561, Seq. ID No. 1569, Seq. ID No. 1571, Seq. ID No. 1585, Seq. ID No. 1643, Seq. ID No. 1653, Seq. ID No. 1661, Seq. ID No. 1663, Seq. ID No. 1707, Seq. ID No. 1733, Seq. ID No. 1737, Seq. ID No. 1755, Seq. ID No. 1765, Seq. ID No. 1767, Seq. ID No. 1775, Seq. ID No. 1791, Seq. ID No. 1805, Seq. ID No. 1875, Seq. ID No. 1969, Seq. ID No. 1981, Seq. ID No. 2053, Seq. ID No. 2055, Seq. ID No. 2087, Seq. ID No. 2089, Seq. ID No. 2091, Seq. ID No. 2105, Seq. ID No. 2115, Seq. ID No. 2149, Seq. ID No. 2151, Seq. ID No. 2159, Seq. ID No. 2177, Seq. ID No. 2277, Seq. ID No. 2293, Seq. ID No. 2321, Seq. ID No. 2347, Seq. ID No. 2351, Seq. ID No. 2353, Seq. ID No. 2365, Seq. ID No. 2395, Seq. ID No. 2421, Seq. ID No. 2425, Seq. ID No. 2427, Seq. ID No. 2429, Seq. ID No. 2449, Seq. ID No. 2459, Seq. ID No. 2525, Seq. ID No. 2531, Seq. ID No. 2607, Seq. ID No. 2651, Seq. ID No. 2679, Seq. ID No. 2693, Seq. ID No. 2699, Seq. ID No. 2703, Seq. ID No. 2753, Seq. ID No. 2785, Seq. ID No. 2813, Seq. ID No. 2829, Seq. ID No. 2835, Seq. ID No 2841, Seq. ID No. 2879, Seq. ID No. 2881, Seq. ID No. 2935, Seq. ID No. 2937, Seq. ID No. 2949, Seq. ID No. 2965, Seq. ID No. 2967, Seq. ID No. 2973, Seq. ID No. 3007, Seq. ID No. 3009, Seq. ID No. 3011, Seq. ID No. 3029, Seq. ID No. 3031, Seq. ID No. 3109, Seq. ID No. 3111, Seq. ID No. 3219, Seq. ID No. 3223, Seq. ID No. 3273, Seq. ID No. 3297, Seq. ID No. 3331, Seq. ID No. 3335, Seq. ID No. 3341, Seq. ID No. 3349, Seq. ID No. 3353, Seq. ID No. 3355, Seq. ID No. 3377, Seq. ID No. 3391, Seq. ID No. 3425, Seq. ID No. 3449, Seq. ID No. 3493, Seq. ID No. 3573, Seq. ID No. 3611, Seq. ID No. 3619, Seq. ID No. 3689, Seq. ID No. 3753, Seq. ID No. 3755, Seq. ID No. 3765, Seq. ID No. 3781, Seq. ID No. 3783, Seq. ID No. 3851, Seq. ID No. 3903, Seq. ID No. 4005, Seq. ID No. 4007, Seq. ID No. 4027, Seq. ID No. 4073, Seq. ID No. 4137, Seq. ID No. 4141, Seq. ID No. 4143, Seq. ID No. 4145, Seq. ID No. 4225, Seq. ID No. 4343, Seq. ID No. 4385, Seq. ID No. 4399, Seq. ID No. 4469, Seq. ID No. 4483, Seq. ID No 4493, Seq. ID No. 4495, Seq. ID No. 4533, Seq. ID No. 4699, Seq. ID No. 4709, Seq. ID No. 4711, Seq. ID No. 4735, Seq. ID No. 4827, Seq. ID No. 4871, Seq. ID No. 4873, Seq. ID No. 4879, Seq. ID No. 4921, Seq. ID No. 4981, Seq. ID No. 5115, Seq. ID No. 5267, Seq. ID No. 5341, Seq. ID No. 5387, Seq. ID No. 5465, Seq. ID No. 5467, Seq. ID No. 5479, Seq. ID No. 5497, Seq. ID No. 5513, Seq. ID No. 5543, Seq. ID No. 5545, Seq. ID No. 5567, Seq. ID No. 5587, Seq. ID No. 5589, Seq. ID No. 5591, Seq. ID No. 5611, Seq. ID No. 5621, Seq. ID No. 5641, Seq. ID No. 5681, Seq. ID No. 5719, Seq. ID No. 5771, Seq. ID No. 5783, Seq. ID No. 5895, Seq. ID No. 5899, Seq. ID No. 5901, Seq. ID No. 5927, Seq. ID No. 5929, Seq. ID No. 5939, Seq. ID No. 5987, Seq. ID No. 6013, Seq. ID No. 6087, Seq. ID No. 6089, Seq. ID No. 6091, Seq. ID No. 6093, Seq. ID No. 6095, Seq. ID No. 6103, Seq. ID No. 6169, Seq. ID No. 6185, Seq. ID No. 6187, Seq. ID No. 6195, Seq. ID No. 6197, Seq. ID No. 6203, Seq. ID No. 6205, Seq. ID No. 6221, Seq. ID No. 6223, Seq. ID No. 6229, Seq. ID No. 6291, Seq. ID No. 6415, Seq. ID No. 6417, Seq. ID No. 6473, Seq. ID No. 6507, Seq. ID No. 6543, Seq. ID No. 6595, Seq. ID No. 6597, Seq. ID No. 6599, Seq. ID No. 6601 and Seq. ID No. 6603.

13. The polynucleotide of claim 7 wherein the polynucleotide encodes a polypeptide, which is predicted by SignalP algorithm analysis as having met three of the four criteria set out in the SignalP algorithm for a polypeptide having a signal peptide and which is predicted by HMM SignalP algorithm analysis as having a signal peptide, and the polynucleotide is selected from one of Seq. ID No. 7, Seq. ID No. 11, Seq. ID No. 23, Seq. ID No. 45, Seq. ID No. 47, Seq. ID No. 53, Seq. ID No. 59, Seq. ID No. 65, Seq. ID No. 67, Seq. ID No. 87, Seq. ID No. 91, Seq. ID No. 139, Seq. ID No. 151, Seq. ID No. 159, Seq. ID No. 165, Seq. ID No. 169, Seq. ID No. 185, Seq. ID No. 211, Seq. ID No. 217, Seq. ID No. 235, Seq. ID No. 237, Seq. ID No. 239, Seq. ID No. 271, Seq. ID No. 285, Seq. ID No. 291, Seq. ID No. 327, Seq. ID No. 349, Seq. ID No. 385, Seq. ID No. 387, Seq. ID No. 407, Seq. ID No. 427, Seq. ID No. 431, Seq. ID No. 455, Seq. ID No. 457, Seq. ID No. 495, Seq. ID No. 499, Seq. ID No. 511, Seq. ID No. 513, Seq. ID No. 515, Seq. ID No. 525, Seq. ID No. 545, Seq. ID No. 547, Seq. ID No. 557, Seq. ID No. 569, Seq. ID No. 589, Seq. ID No. 591, Seq. ID No. 593, Seq. ID No. 595, Seq. ID No. 609, Seq. ID No. 637, Seq. ID No. 639, Seq. ID No. 641, Seq. ID No. 653, Seq. ID No. 669, Seq. ID No. 679, Seq. ID No. 719, Seq. ID No. 723, Seq. ID No. 739, Seq. ID No. 749, Seq. ID No. 751, Seq. ID No. 763, Seq. ID No. 765, Seq. ID No. 769, Seq. ID No. 777, Seq. ID No. 779, Seq. ID No. 781, Seq. ID No. 819, Seq. ID No. 895, Seq. ID No. 903, Seq. ID No. 905, Seq. ID No. 909, Seq. ID No. 935, Seq. ID No. 937, Seq. ID No. 951, Seq. ID No. 955, Seq. ID No. 979, Seq. ID No. 981, Seq. ID No. 983, Seq. ID No. 985, Seq. ID No. 1005, Seq. ID No. 1007, Seq. ID No. 1009, Seq. ID No. 1015, Seq. ID No. 1019, Seq. ID No. 1029, Seq. ID No. 1031, Seq. ID No. 1047, Seq. ID No. 1091, Seq. ID No. 1111, Seq. ID No. 1137, Seq. ID No. 1151, Seq. ID No. 1153, Seq. ID No. 1169, Seq. ID No. 1173, Seq. ID No. 1183, Seq. ID No. 1191, Seq. ID No. 1193, Seq. ID No. 1213, Seq. ID No. 1223, Seq. ID No. 1229, Seq. ID No. 1247, Seq. ID No. 1259, Seq. ID No. 1283, Seq. ID No. 1307, Seq. ID No. 1319, Seq. ID No. 1321, Seq. ID No. 1327, Seq. ID No. 1341, Seq. ID No. 1343, Seq. ID No. 1347, Seq. ID No. 1389, Seq. ID No. 1401, Seq. ID No. 1429, Seq. ID No. 1479, Seq. ID No. 1551, Seq. ID No. 1559, Seq. ID No. 1579, Seq. ID No. 1587, Seq. ID No. 1621, Seq. ID No. 1627, Seq. ID No. 1633, Seq. ID No. 1645, Seq. ID No. 1647, Seq. ID No. 1649, Seq. ID No. 1655, Seq. ID No. 1665, Seq. ID No. 1667, Seq. ID No. 1671, Seq. ID No. 1677, Seq. ID No. 1679, Seq. ID No. 1681, Seq. ID No. 1695, Seq. ID No. 1703, Seq. ID No. 1705, Seq. ID No. 1731, Seq. ID No. 1753, Seq. ID No. 1759, Seq. ID No. 1763, Seq. ID No. 1787, Seq. ID No. 1797, Seq. ID No. 1821, Seq. ID No. 1823, Seq. ID No. 1833, Seq. ID No. 1839, Seq. ID No. 1841, Seq. ID No. 1843, Seq. ID No. 1893, Seq. ID No. 1917, Seq. ID No. 1919, Seq. ID No. 1971, Seq. ID No. 1991, Seq. ID No. 2013, Seq. ID No. 2015, Seq. ID No. 2017, Seq. ID No. 2019, Seq. ID No. 2033, Seq. ID No. 2035, Seq. ID No. 2049, Seq. ID No. 2081, Seq. ID No. 2083, Seq. ID No. 2085, Seq. ID No. 2111, Seq. ID No. 2113, Seq. ID No. 2123, Seq. ID No. 2125, Seq. ID No. 2127, Seq. ID No. 2131, Seq. ID No. 2133, Seq. ID No. 2153, Seq. ID No. 2161, Seq. ID No. 2171, Seq. ID No. 2175, Seq. ID No. 2179, Seq. ID No. 2187, Seq. ID No. 2201, Seq. ID No. 2203, Seq. ID No. 2221, Seq. ID No. 2237, Seq. ID No. 2249, Seq. ID No. 2251, Seq. ID No. 2255, Seq. ID No. 2261, Seq. ID No. 2263, Seq. ID No. 2271, Seq. ID No. 2279, Seq. ID No. 2283, Seq. ID No. 2285, Seq. ID No. 2289, Seq. ID No. 2295, Seq. ID No. 2305, Seq. ID No. 2307, Seq. ID No. 2317, Seq. ID No. 2319, Seq. ID No. 2323, Seq. ID No. 2325, Seq. ID No. 2343, Seq. ID No. 2349, Seq. ID No. 2385, Seq. ID No. 2393, Seq. ID No. 2423, Seq. ID No. 2453, Seq. ID No. 2491, Seq. ID No. 2497, Seq. ID No. 2499, Seq. ID No. 2507, Seq. ID No. 2515, Seq. ID No. 2517, Seq. ID No. 2521, Seq. ID No. 2523, Seq. ID No. 2527, Seq. ID No. 2533, Seq. ID No. 2535, Seq. ID No. 2541, Seq. ID No. 2543, Seq. ID No. 2547, Seq. ID No. 2549, Seq. ID No. 2557, Seq. ID No. 2573, Seq. ID No. 2583, Seq. ID No. 2601, Seq. ID No. 2603, Seq. ID No. 2621, Seq. ID No. 2653, Seq. ID No. 2681, Seq. ID No. 2691, Seq. ID No. 2701, Seq. ID No. 2733, Seq. ID No. 2739, Seq. ID No. 2801, Seq. ID No. 2807, Seq. ID No. 2815, Seq. ID No. 2819, Seq. ID No. 2821, Seq. ID No. 2823, Seq. ID No. 2833, Seq. ID No. 2837, Seq. ID No. 2839, Seq. ID No. 2845, Seq. ID No. 2853, Seq. ID No. 2861, Seq. ID No. 2865, Seq. ID No. 2873, Seq. ID No. 2875, Seq. ID No. 2877, Seq. ID No. 2883, Seq. ID No. 2895, Seq. ID No. 2905, Seq. ID No. 2939, Seq. ID No. 2941, Seq. ID No. 2947, Seq. ID No. 2981, Seq. ID No. 2983, Seq. ID No. 2987, Seq. ID No. 2991, Seq. ID No. 2995, Seq. ID No. 3001, Seq. ID No. 3005, Seq. ID No. 3021, Seq. ID No. 3025, Seq. ID No. 3043, Seq. ID No. 3045, Seq. ID No. 3073, Seq. ID No. 3075, Seq. ID No. 3155, Seq. ID No. 3163, Seq. ID No. 3165, Seq. ID No. 3167, Seq. ID No. 3183, Seq. ID No. 3213, Seq. ID No. 3215, Seq. ID No. 3235, Seq. ID No. 3245, Seq. ID No. 3261, Seq. ID No. 3263, Seq. ID No. 3265, Seq. ID No. 3269, Seq. ID No. 3271, Seq. ID No. 3275, Seq. ID No. 3277, Seq. ID No. 3317, Seq. ID No. 3325, Seq. ID No. 3337, Seq. ID No. 3351, Seq. ID No. 3389, Seq. ID No. 3405, Seq. ID No. 3419, Seq. ID No. 3421, Seq. ID No. 3423, Seq. ID No. 3451, Seq. ID No. 3453, Seq. ID No. 3455, Seq. ID No. 3491, Seq. ID No. 3495, Seq. ID No. 3503, Seq. ID No. 3505, Seq. ID No. 3517, Seq. ID No. 3519, Seq. ID No. 3545, Seq. ID No. 3547, Seq. ID No. 3571, Seq. ID No. 3593, Seq. ID No. 3617, Seq. ID No. 3621, Seq. ID No. 3629, Seq. ID No. 3663, Seq. ID No. 3701, Seq. ID No. 3703, Seq. ID No. 3723, Seq. ID No. 3737, Seq. ID No. 3741, Seq. ID No. 3745, Seq. ID No. 3747, Seq. ID No. 3759, Seq. ID No. 3763, Seq. ID No. 3767, Seq. ID No. 3769, Seq. ID No. 3771, Seq. ID No. 3785, Seq. ID No. 3793, Seq. ID No. 3813, Seq. ID No. 3837, Seq. ID No. 3839, Seq. ID No. 3861, Seq. ID No. 3865, Seq. ID No. 3889, Seq. ID No. 3891, Seq. ID No. 3895, Seq. ID No. 3915, Seq. ID No. 3923, Seq. ID No. 3925, Seq. ID No. 3929, Seq. ID No. 3965, Seq. ID No. 3975, Seq. ID No. 3979, Seq. ID No. 3995, Seq. ID No. 3997, Seq. ID No. 4009, Seq. ID No. 4039, Seq. ID No. 4041, Seq. ID No. 4061, Seq. ID No. 4079, Seq. ID No. 4081, Seq. ID No. 4111, Seq. ID No. 4113, Seq. ID No. 4135, Seq. ID No. 4139, Seq. ID No. 4155, Seq. ID No. 4181, Seq. ID No. 4203, Seq. ID No. 4221, Seq. ID No. 4247, Seq. ID No. 4253, Seq. ID No. 4257, Seq. ID No. 4259, Seq. ID No. 4261, Seq. ID No. 4263, Seq. ID No. 4269, Seq. ID No. 4311, Seq. ID No. 4379, Seq. ID No. 4389, Seq. ID No. 4391, Seq. ID No. 4471, Seq. ID No. 4473, Seq. ID No. 4481, Seq. ID No. 4525, Seq. ID No. 4551, Seq. ID No. 4561, Seq. ID No. 4573, Seq. ID No. 4617, Seq. ID No. 4639, Seq. ID No. 4659, Seq. ID No. 4681, Seq. ID No. 4701, Seq. ID No. 4705, Seq. ID No. 4713, Seq. ID No. 4717, Seq. ID No. 4721, Seq. ID No. 4737, Seq. ID No. 4741, Seq. ID No. 4813, Seq. ID No. 4817, Seq. ID No. 4819, Seq. ID No. 4829, Seq. ID No. 4831, Seq. ID No. 4851, Seq. ID No. 4869, Seq. ID No. 4875, Seq. ID No. 4913, Seq. ID No. 4919, Seq. ID No. 4929, Seq. ID No. 4931, Seq. ID No. 4983, Seq. ID No. 4993, Seq. ID No. 5011, Seq. ID No. 5023, Seq. ID No. 5031, Seq. ID No. 5033, Seq. ID No. 5035, Seq. ID No. 5043, Seq. ID No. 5061, Seq. ID No. 5063, Seq. ID No. 5069, Seq. ID No. 5103, Seq. ID No. 5121, Seq. ID No. 5123, Seq. ID No. 5131, Seq. ID No. 5133, Seq. ID No. 5135, Seq. ID No. 5137, Seq. ID No. 5139, Seq. ID No. 5141, Seq. ID No. 5151, Seq. ID No. 5159, Seq. ID No. 5161, Seq. ID No. 5165, Seq. ID No. 5167, Seq. ID No. 5175, Seq. ID No. 5177, Seq. ID No. 5205, Seq. ID No. 5207, Seq. ID No. 5211, Seq. ID No. 5215, Seq. ID No. 5219, Seq. ID No. 5223, Seq. ID No. 5285, Seq. ID No. 5287, Seq. ID No. 5329, Seq. ID No. 5331, Seq. ID No. 5377, Seq. ID No. 5379, Seq. ID No. 5381, Seq. ID No. 5385, Seq. ID No. 5405, Seq. ID No. 5407, Seq. ID No. 5453, Seq. ID No. 5459, Seq. ID No. 5461, Seq. ID No. 5463, Seq. ID No. 5481, Seq. ID No. 5509, Seq. ID No. 5529, Seq. ID No. 5531, Seq. ID No. 5557, Seq. ID No. 5569, Seq. ID No. 5577, Seq. ID No. 5623, Seq. ID No. 5625, Seq. ID No. 5643, Seq. ID No. 5659, Seq. ID No. 5661, Seq. ID No. 5683, Seq. ID No. 5685, Seq. ID No. 5709, Seq. ID No. 5711, Seq. ID No. 5733, Seq. ID No. 5739, Seq. ID No. 5765, Seq. ID No. 5797, Seq. ID No. 5827, Seq. ID No. 5889, Seq. ID No. 5893, Seq. ID No. 5905, Seq. ID No. 5909, Seq. ID No. 5911, Seq. ID No. 5923, Seq. ID No. 5963, Seq. ID No. 5965, Seq. ID No. 6025, Seq. ID No. 6027, Seq. ID No. 6031, Seq. ID No. 6043, Seq. ID No. 6045, Seq. ID No. 6047, Seq. ID No. 6053, Seq. ID No. 6059, Seq. ID No. 6109, Seq. ID No. 6111, Seq. ID No. 6115, Seq. ID No. 6117, Seq. ID No. 6127, Seq. ID No. 6131, Seq. ID No. 6135, Seq. ID No. 6137, Seq. ID No. 6161, Seq. ID No. 6165, Seq. ID No. 6183, Seq. ID No. 6189, Seq. ID No. 6191, Seq. ID No. 6193, Seq. ID No. 6207, Seq. ID No. 6209, Seq. ID No. 6217, Seq. ID No. 6225, Seq. ID No. 6235, Seq. ID No. 6243, Seq. ID No. 6249, Seq. ID No. 6253, Seq. ID No. 6259, Seq. ID No. 6265, Seq. ID No. 6267, Seq. ID No. 6275, Seq. ID No. 6283, Seq. ID No. 6285, Seq. ID No. 6303, Seq. ID No. 6325, Seq. ID No. 6327, Seq. ID No. 6363, Seq. ID No. 6365, Seq. ID No. 6367, Seq. ID No. 6385, Seq. ID No. 6425, Seq. ID No. 6427, Seq. ID No. 6429, Seq. ID No. 6431, Seq. ID No. 6453, Seq. ID No. 6465, Seq. ID No. 6469, Seq. ID No. 6471, Seq. ID No. 6479, Seq. ID No. 6539, Seq. ID No. 6541, Seq. ID No. 6571, Seq. ID No. 6573, Seq. ID No. 6639, Seq. ID No. 6643, and Seq. ID No. 6645.

14. The polynucleotide of claim 7 wherein the polynucleotide encodes a polypeptide, which is predicted by HMM Signal P algorithm analysis as having a signal peptide, and the polynucleotide is selected from one of Seq. ID No. 3, Seq. ID No. 7, Seq. ID No. 9, Seq. ID No. 19, Seq. ID No. 21, Seq. ID No. 31, Seq. ID No. 33, Seq. ID No. 45, Seq. ID No. 47, Seq. ID No. 49, Seq. ID No. 53, Seq. ID No. 65, Seq. ID No. 67, Seq. ID No. 85, Seq. ID No. 87, Seq. ID No. 105, Seq. ID No. 111, Seq. ID No. 123, Seq. ID No. 131, Seq. ID No. 133, Seq. ID No. 141, Seq. ID No. 159, Seq. ID No. 161, Seq. ID No. 163, Seq. ID No. 171, Seq. ID No. 191, Seq. ID No. 209, Seq. ID No. 211, Seq. ID No. 213, Seq. ID No. 215, Seq. ID No. 217, Seq. ID No. 225, Seq. ID No. 235, Seq. ID No. 237, Seq. ID No. 249, Seq. ID No. 251, Seq. ID No. 255, Seq. ID No. 257, Seq. ID No. 259, Seq. ID No. 271, Seq. ID No. 273, Seq. ID No. 277, Seq. ID No. 285, Seq. ID No. 287, Seq. ID No. 289, Seq. ID No. 327, Seq. ID No. 329, Seq. ID No. 357, Seq. ID No. 359, Seq. ID No. 373, Seq. ID No. 375, Seq. ID No. 393, Seq. ID No. 401, Seq. ID No. 403, Seq. ID No. 455, Seq. ID No. 457, Seq. ID No. 477, Seq. ID No. 487, Seq. ID No. 489, Seq. ID No. 491, Seq. ID No. 493, Seq. ID No. 495, Seq. ID No. 497, Seq. ID No. 499, Seq. ID No. 503, Seq. ID No. 505, Seq. ID No. 509, Seq. ID No. 511, Seq. ID No. 513, Seq. ID No. 515, Seq. ID No. 525, Seq. ID No. 527, Seq. ID No. 545, Seq. ID No. 547, Seq. ID No. 549, Seq. ID No. 557, Seq. ID No. 567, Seq. ID No. 569, Seq. ID No. 575, Seq. ID No. 577, Seq. ID No. 579, Seq. ID No. 591, Seq. ID No. 593, Seq. ID No. 599, Seq. ID No. 617, Seq. ID No. 637, Seq. ID No. 639, Seq. ID No. 641, Seq. ID No. 643, Seq. ID No. 645, Seq. ID No. 647, Seq. ID No. 653, Seq. ID No. 655, Seq. ID No. 657, Seq. ID No. 659, Seq. ID No. 661, Seq. ID No. 667, Seq. ID No. 669, Seq. ID No. 675, Seq. ID No. 677, Seq. ID No. 679, Seq. ID No. 715, Seq. ID No. 717, Seq. ID No. 719, Seq. ID No. 721, Seq. ID No. 723, Seq. ID No. 725, Seq. ID No. 745, Seq. ID No. 747, Seq. ID No. 749, Seq. ID No. 751, Seq. ID No. 755, Seq. ID No. 757, Seq. ID No. 759, Seq. ID No. 761, Seq. ID No. 763, Seq. ID No. 765, Seq. ID No. 769, Seq. ID No. 777, Seq. ID No. 779, Seq. ID No. 781, Seq. ID No. 807, Seq. ID No. 809, Seq. ID No. 819, Seq. ID No. 825, Seq. ID No. 863, Seq. ID No. 893, Seq. ID No. 901, Seq. ID No. 935, Seq. ID No. 937, Seq. ID No. 941, Seq. ID No. 943, Seq. ID No. 955, Seq. ID No. 957, Seq. ID No. 967, Seq. ID No. 979, Seq. ID No. 981, Seq. ID No. 983, Seq. ID No. 985, Seq. ID No. 1001, Seq. ID No. 1003, Seq. ID No. 1005, Seq. ID No. 1007, Seq. ID No. 1009, Seq. ID No. 1011, Seq. ID No. 1013, Seq. ID No. 1015, Seq. ID No. 1019, Seq. ID No. 1029, Seq. ID No. 1031, Seq. ID No. 1033, Seq. ID No. 1035, Seq. ID No. 1037, Seq. ID No. 1039, Seq. ID No. 1045, Seq. ID No. 1055, Seq. ID No. 1075, Seq. ID No. 1077, Seq. ID No. 1105, Seq. ID No. 1107, Seq. ID No. 1131, Seq. ID No. 1135, Seq. ID No. 1137, Seq. ID No. 1139, Seq. ID No. 1151, Seq. ID No. 1165, Seq. ID No. 1167, Seq. ID No. 1169, Seq. ID No. 1173, Seq. ID No. 1183, Seq. ID No. 1195, Seq. ID No. 1197, Seq. ID No. 1203, Seq. ID No. 1213, Seq. ID No. 1223, Seq. ID No. 1227, Seq. ID No. 1229, Seq. ID No. 1237, Seq. ID No. 1243, Seq. ID No. 1245, Seq. ID No. 1259, Seq. ID No. 1265, Seq. ID No. 1267, Seq. ID No. 1269, Seq. ID No. 1271, Seq. ID No. 1283, Seq. ID No. 1287, Seq. ID No. 1289, Seq. ID No. 1291, Seq. ID No. 1295, Seq. ID No. 1297, Seq. ID No. 1303, Seq. ID No. 1305, Seq. ID No. 1315, Seq. ID No. 1317, Seq. ID No. 1319, Seq. ID No. 1325, Seq. ID No. 1327, Seq. ID No. 1329, Seq. ID No. 1331, Seq. ID No. 1337, Seq. ID No. 1341, Seq. ID No. 1343, Seq. ID No. 1347, Seq. ID No. 1349, Seq. ID No. 1351, Seq. ID No. 1353, Seq. ID No. 1365, Seq. ID No. 1367, Seq. ID No. 1369, Seq. ID No. 1371, Seq. ID No. 1381, Seq. ID No. 1401, Seq. ID No. 1429, Seq. ID No. 1435, Seq. ID No. 1445, Seq. ID No. 1447, Seq. ID No. 1481, Seq. ID No. 1513, Seq. ID No. 1515, Seq. ID No. 1517, Seq. ID No. 1529, Seq. ID No. 1533, Seq. ID No. 1535, Seq. ID No. 1545, Seq. ID No. 1547, Seq. ID No. 1551, Seq. ID No. 1553, Seq. ID No. 1559, Seq. ID No. 1561, Seq. ID No. 1563, Seq. ID No. 1571, Seq. ID No. 1579, Seq. ID No. 1583, Seq. ID No. 1585, Seq. ID No. 1621, Seq. ID No. 1633, Seq. ID No. 1639, Seq. ID No. 1643, Seq. ID No. 1645, Seq. ID No. 1647, Seq. ID No. 1649, Seq. ID No. 1653, Seq. ID No. 1661, Seq. ID No. 1663, Seq. ID No. 1665, Seq. ID No. 1671, Seq. ID No. 1673, Seq. ID No. 1677, Seq. ID No. 1679, Seq. ID No. 1681, Seq. ID No. 1693, Seq. ID No. 1707, Seq. ID No. 1711, Seq. ID No. 1731, Seq. ID No. 1733, Seq. ID No. 1737, Seq. ID No. 1753, Seq. ID No. 1755, Seq. ID No. 1757, Seq. ID No. 1765, Seq. ID No. 1767, Seq. ID No. 1771, Seq. ID No. 1781, Seq. ID No. 1787, Seq. ID No. 1791, Seq. ID No. 1797, Seq. ID No. 1805, Seq. ID No. 1819, Seq. ID No. 1821, Seq. ID No. 1823, Seq. ID No. 1839, Seq. ID No. 1857, Seq. ID No. 1869, Seq. ID No. 1875, Seq. ID No. 1891, Seq. ID No. 1893, Seq. ID No. 1895, Seq. ID No. 1915, Seq. ID No. 1917, Seq. ID No. 1919, Seq. ID No. 1923, Seq. ID No. 1927, Seq. ID No. 1929, Seq. ID No. 1969, Seq. ID No. 1981, Seq. ID No. 1991, Seq. ID No. 1993, Seq. ID No. 2005, Seq. ID No. 2013, Seq. ID No. 2017, Seq. ID No. 2019, Seq. ID No. 2025, Seq. ID No. 2027, Seq. ID No. 2033, Seq. ID No. 2035, Seq. ID No. 2041, Seq. ID No. 2049, Seq. ID No. 2053, Seq. ID No. 2055, Seq. ID No. 2087, Seq. ID No. 2089, Seq. ID No. 2091, Seq. ID No. 2105, Seq. ID No. 2107, Seq. ID No. 2109, Seq. ID No. 2113, Seq. ID No. 2115, Seq. ID No. 2121, Seq. ID No. 2123, Seq. ID No. 2125, Seq. ID No. 2127, Seq. ID No. 2149, Seq. ID No. 2151, Seq. ID No. 2155, Seq. ID No. 2157, Seq. ID No. 2159, Seq. ID No. 2171, Seq. ID No. 2173, Seq. ID No. 2177, Seq. ID No. 2187, Seq. ID No. 2191, Seq. ID No. 2205, Seq. ID No. 2237, Seq. ID No. 2239, Seq. ID No. 2245, Seq. ID No. 2249, Seq. ID No. 2251, Seq. ID No. 2255, Seq. ID No. 2259, Seq. ID No. 2271, Seq. ID No. 2283, Seq. ID No. 2289, Seq. ID No. 2291, Seq. ID No. 2293, Seq. ID No. 2295, Seq. ID No. 2303, Seq. ID No. 2305, Seq. ID No. 2307, Seq. ID No. 2317, Seq. ID No. 2319, Seq. ID No. 2321, Seq. ID No. 2323, Seq. ID No. 2325, Seq. ID No. 2327, Seq. ID No. 2329, Seq. ID No. 2333, Seq. ID No. 2343, Seq. ID No. 2347, Seq. ID No. 2349, Seq. ID No. 2351, Seq. ID No. 2353, Seq. ID No. 2355, Seq. ID No. 2357, Seq. ID No. 2365, Seq. ID No. 2367, Seq. ID No. 2371, Seq. ID No. 2375, Seq. ID No. 2387, Seq. ID No. 2389, Seq. ID No. 2391, Seq. ID No. 2393, Seq. ID No. 2407, Seq. ID No. 2419, Seq. ID No. 2421, Seq. ID No. 2425, Seq. ID No. 2427, Seq. ID No. 2429, Seq. ID No. 2433, Seq. ID No. 2449, Seq. ID No. 2459, Seq. ID No. 2487, Seq. ID No. 2489, Seq. ID No. 2491, Seq. ID No. 2493, Seq. ID No. 2497, Seq. ID No. 2499, Seq. ID No. 2501, Seq. ID No. 2503, Seq. ID No. 2507, Seq. ID No. 2515, Seq. ID No. 2517, Seq. ID No. 2523, Seq. ID No. 2525, Seq. ID No. 2527, Seq. ID No. 2531, Seq. ID No. 2533, Seq. ID No. 2535, Seq. ID No. 2537, Seq. ID No. 2541, Seq. ID No. 2543, Seq. ID No. 2545, Seq. ID No. 2555, Seq. ID No. 2557, Seq. ID No. 2565, Seq. ID No. 2569, Seq. ID No. 2571, Seq. ID No. 2583, Seq. ID No. 2591, Seq. ID No. 2597, Seq. ID No. 2599, Seq. ID No. 2601, Seq. ID No. 2607, Seq. ID No. 2611, Seq. ID No. 2621, Seq. ID No. 2627, Seq. ID No. 2629, Seq. ID No. 2651, Seq. ID No. 2679, Seq. ID No. 2681, Seq. ID No. 2683, Seq. ID No. 2691, Seq. ID No. 2693, Seq. ID No. 2695, Seq. ID No. 2697, Seq. ID No. 2699, Seq. ID No. 2701, Seq. ID No. 2703, Seq. ID No. 2705, Seq. ID No. 2707, Seq. ID No. 2717, Seq. ID No. 2729, Seq. ID No. 2731, Seq. ID No. 2733, Seq. ID No. 2783, Seq. ID No. 2785, Seq. ID No. 2801, Seq. ID No. 2809, Seq. ID No. 2813, Seq. ID No. 2815, Seq. ID No. 2819, Seq. ID No. 2821, Seq. ID No. 2823, Seq. ID No. 2831, Seq. ID No. 2833, Seq. ID No. 2835, Seq. ID No. 2837, Seq. ID No. 2839, Seq. ID No. 2841, Seq. ID No. 2845, Seq. ID No. 2853, Seq. ID No. 2855, Seq. ID No. 2859, Seq. ID No. 2861, Seq. ID No. 2873, Seq. ID No. 2881, Seq. ID No. 2893, Seq. ID No. 2905, Seq. ID No. 2935, Seq. ID No. 2937, Seq. ID No. 2939, Seq. ID No. 2941, Seq. ID No. 2947, Seq. ID No. 2949, Seq. ID No. 2951, Seq. ID No. 2969, Seq. ID No. 2973, Seq. ID No. 2975, Seq. ID No. 2977, Seq. ID No. 2981, Seq. ID No. 2983, Seq. ID No. 2987, Seq. ID No. 2991, Seq. ID No. 2995, Seq. ID No. 2997, Seq. ID No. 3005, Seq. ID No. 3007, Seq. ID No. 3009, Seq. ID No. 3011, Seq. ID No. 3013, Seq. ID No. 3023, Seq. ID No. 3025, Seq. ID No. 3027, Seq. ID No. 3029, Seq. ID No. 3031, Seq. ID No. 3043, Seq. ID No. 3055, Seq. ID No. 3063, Seq. ID No. 3071, Seq. ID No. 3073, Seq. ID No. 3075, Seq. ID No. 3077, Seq. ID No. 3119, Seq. ID No. 3121, Seq. ID No. 3123, Seq. ID No. 3145, Seq. ID No. 3155, Seq. ID No. 3157, Seq. ID No. 3163, Seq. ID No. 3165, Seq. ID No. 3173, Seq. ID No. 3183, Seq. ID No. 3193, Seq. ID No. 3201, Seq. ID No. 3213, Seq. ID No. 3215, Seq. ID No. 3217, Seq. ID No. 3219, Seq. ID No. 3241, Seq. ID No. 3243, Seq. ID No. 3245, Seq. ID No. 3249, Seq. ID No. 3255, Seq. ID No. 3257, Seq. ID No. 3261, Seq. ID No. 3263, Seq. ID No. 3269, Seq. ID No. 3275, Seq. ID No. 3277, Seq. ID No. 3297, Seq. ID No. 3317, Seq. ID No. 3323, Seq. ID No. 3325, Seq. ID No. 3331, Seq. ID No. 3335, Seq. ID No. 3337, Seq. ID No. 3339, Seq. ID No. 3349, Seq. ID No. 3351, Seq. ID No. 3353, Seq. ID No. 3355, Seq. ID No. 3357, Seq. ID No. 3359, Seq. ID No. 3375, Seq. ID No. 3377, Seq. ID No. 3389, Seq. ID No. 3391, Seq. ID No. 3395, Seq. ID No. 3405, Seq. ID No. 3415, Seq. ID No. 3421, Seq. ID No. 3425, Seq. ID No. 3427, Seq. ID No. 3433, Seq. ID No. 3441, Seq. ID No. 3449, Seq. ID No. 3451, Seq. ID No. 3453, Seq. ID No. 3455, Seq. ID No. 3457, Seq. ID No. 3463, Seq. ID No. 3481, Seq. ID No. 3491, Seq. ID No. 3493, Seq. ID No. 3503, Seq. ID No. 3505, Seq. ID No. 3517, Seq. ID No. 3519, Seq. ID No. 3527, Seq. ID No. 3531, Seq. ID No. 3539, Seq. ID No. 3561, Seq. ID No. 3573, Seq. ID No. 3581, Seq. ID No. 3587, Seq. ID No. 3593, Seq. ID No. 3595, Seq. ID No. 3611, Seq. ID No. 3617, Seq. ID No. 3619, Seq. ID No. 3621, Seq. ID No. 3625, Seq. ID No. 3629, Seq. ID No. 3635, Seq. ID No. 3677, Seq. ID No. 3679, Seq. ID No. 3689, Seq. ID No. 3717, Seq. ID No. 3723, Seq. ID No. 3727, Seq. ID No. 3741, Seq. ID No. 3745, Seq. ID No. 3753, Seq. ID No. 3755, Seq. ID No. 3757, Seq. ID No. 3761, Seq. ID No. 3763, Seq. ID No. 3765, Seq. ID No. 3781, Seq. ID No. 3783, Seq. ID No. 3793, Seq. ID No. 3799, Seq. ID No. 3807, Seq. ID No. 3813, Seq. ID No. 3815, Seq. ID No. 3817, Seq. ID No. 3837, Seq. ID No. 3839, Seq. ID No. 3849, Seq. ID No. 3851, Seq. ID No. 3853, Seq. ID No. 3859, Seq. ID No. 3861, Seq. ID No. 3863, Seq. ID No. 3865, Seq. ID No. 3879, Seq. ID No. 3889, Seq. ID No. 3891, Seq. ID No. 3895, Seq. ID No. 3903, Seq. ID No. 3915, Seq. ID No. 3923, Seq. ID No. 3925, Seq. ID No. 3959, Seq. ID No. 3963, Seq. ID No. 3973, Seq. ID No. 3975, Seq. ID No. 3993, Seq. ID No. 3995, Seq. ID No. 3997, Seq. ID No. 4005, Seq. ID No. 4007, Seq. ID No. 4009, Seq. ID No. 4025, Seq. ID No. 4027, Seq. ID No. 4039, Seq. ID No. 4041, Seq. ID No. 4043, Seq. ID No. 4045, Seq. ID No. 4047, Seq. ID No. 4049, Seq. ID No. 4061, Seq. ID No. 4071, Seq. ID No. 4073, Seq. ID No. 4079, Seq. ID No. 4081, Seq. ID No. 4083, Seq. ID No. 4101, Seq. ID No. 4103, Seq. ID No. 4111, Seq. ID No. 4133, Seq. ID No. 4135, Seq. ID No. 4137, Seq. ID No. 4139, Seq. ID No. 4141, Seq. ID No. 4143, Seq. ID No. 4145, Seq. ID No. 4151, Seq. ID No. 4153, Seq. ID No. 4181, Seq. ID No. 4221, Seq. ID No. 4223, Seq. ID No. 4225, Seq. ID No. 4227, Seq. ID No. 4231, Seq. ID No. 4233, Seq. ID No. 4241, Seq. ID No. 4247, Seq. ID No. 4253, Seq. ID No. 4257, Seq. ID No. 4259, Seq. ID No. 4261, Seq. ID No. 4263, Seq. ID No. 4265, Seq. ID No. 4269, Seq. ID No. 4275, Seq. ID No. 4285, Seq. ID No. 4287, Seq. ID No. 4297, Seq. ID No. 4307, Seq. ID No. 4311, Seq. ID No. 4313, Seq. ID No. 4343, Seq. ID No. 4379, Seq. ID No. 4385, Seq. ID No. 4389, Seq. ID No. 4391, Seq. ID No. 4399, Seq. ID No. 4403, Seq. ID No. 4437, Seq. ID No. 4439, Seq. ID No. 4441, Seq. ID No. 4469, Seq. ID No. 4473, Seq. ID No. 4481, Seq. ID No. 4483, Seq. ID No. 4485, Seq. ID No. 4493, Seq. ID No. 4495, Seq. ID No. 4497, Seq. ID No. 4513, Seq. ID No. 4515, Seq. ID No. 4527, Seq. ID No. 4529, Seq. ID No. 4533, Seq. ID No. 4587, Seq. ID No. 4589, Seq. ID No. 4639, Seq. ID No. 4641, Seq. ID No. 4643, Seq. ID No. 4659, Seq. ID No. 4681, Seq. ID No. 4687, Seq. ID No. 4695, Seq. ID No. 4705, Seq. ID No. 4707, Seq. ID No. 4709, Seq. ID No. 4711, Seq. ID No. 4715, Seq. ID No. 4717, Seq. ID No. 4737, Seq. ID No. 4759, Seq. ID No. 4813, Seq. ID No. 4827, Seq. ID No. 4853, Seq. ID No. 4863, Seq. ID No. 4869, Seq. ID No. 4871, Seq. ID No. 4873, Seq. ID No. 4875, Seq. ID No. 4919, Seq. ID No. 4921, Seq. ID No. 4923, Seq. ID No. 4929, Seq. ID No. 4931, Seq. ID No. 4949, Seq. ID No. 4951, Seq. ID No. 4975, Seq. ID No. 4987, Seq. ID No. 4999, Seq. ID No. 5013, Seq. ID No. 5031, Seq. ID No. 5061, Seq. ID No. 5063, Seq. ID No. 5069, Seq. ID No. 5085, Seq. ID No. 5103, Seq. ID No. 5115, Seq. ID No. 5123, Seq. ID No. 5125, Seq. ID No. 5129, Seq. ID No. 5131, Seq. ID No. 5133, Seq. ID No. 5135, Seq. ID No. 5137, Seq. ID No. 5139, Seq. ID No. 5141, Seq. ID No. 5159, Seq. ID No. 5165, Seq. ID No. 5175, Seq. ID No. 5197, Seq. ID No. 5199, Seq. ID No. 5205, Seq. ID No. 5207, Seq. ID No. 5213, Seq. ID No. 5219, Seq. ID No. 5223, Seq. ID No. 5267, Seq. ID No. 5273, Seq. ID No. 5275, Seq. ID No. 5277, Seq. ID No. 5279, Seq. ID No. 5281, Seq. ID No. 5285, Seq. ID No. 5327, Seq. ID No. 5329, Seq. ID No. 5331, Seq. ID No. 5341, Seq. ID No. 5377, Seq. ID No. 5379, Seq. ID No. 5385, Seq. ID No. 5387, Seq. ID No. 5405, Seq. ID No. 5413, Seq. ID No. 5415, Seq. ID No. 5433, Seq. ID No. 5453, Seq. ID No. 5459, Seq. ID No. 5461, Seq. ID No. 5463, Seq. ID No. 5465, Seq. ID No. 5491, Seq. ID No. 5497, Seq. ID No. 5509, Seq. ID No. 5513, Seq. ID No. 5515, Seq. ID No. 5517, Seq. ID No. 5525, Seq. ID No. 5529, Seq. ID No. 5531, Seq. ID No. 5533, Seq. ID No. 5543, Seq. ID No. 5545, Seq. ID No. 5569, Seq. ID No. 5587, Seq. ID No. 5589, Seq. ID No. 5591, Seq. ID No. 5593, Seq. ID No. 5595, Seq. ID No. 5597, Seq. ID No. 5609, Seq. ID No. 5611, Seq. ID No. 5621, Seq. ID No. 5623, Seq. ID No. 5625, Seq. ID No. 5633, Seq. ID No. 5637, Seq. ID No. 5639, Seq. ID No. 5641, Seq. ID No. 5643, Seq. ID No. 5649, Seq. ID No. 5659, Seq. ID No. 5667, Seq. ID No. 5681, Seq. ID No. 5683, Seq. ID No. 5685, Seq. ID No. 5687, Seq. ID No. 5689, Seq. ID No. 5699, Seq. ID No. 5703, Seq. ID No. 5705, Seq. ID No. 5709, Seq. ID No. 5711, Seq. ID No. 5719, Seq. ID No. 5729, Seq. ID No. 5733, Seq. ID No. 5735, Seq. ID No. 5739, Seq. ID No. 5763, Seq. ID No. 5765, Seq. ID No. 5767, Seq. ID No. 5771, Seq. ID No. 5783, Seq. ID No. 5785, Seq. ID No. 5791, Seq. ID No. 5797, Seq. ID No. 5829, Seq. ID No. 5879, Seq. ID No. 5883, Seq. ID No. 5885, Seq. ID No. 5889, Seq. ID No. 5893, Seq. ID No. 5895, Seq. ID No. 5899, Seq. ID No. 5901, Seq. ID No. 5905, Seq. ID No. 5909, Seq. ID No. 5921, Seq. ID No. 5923, Seq. ID No. 5927, Seq. ID No. 5929, Seq. ID No. 5939, Seq. ID No. 6023, Seq. ID No. 6025, Seq. ID No. 6027, Seq. ID No. 6043, Seq. ID No. 6047, Seq. ID No. 6053, Seq. ID No. 6059, Seq. ID No. 6063, Seq. ID No. 6067, Seq. ID No. 6087, Seq. ID No. 6089, Seq. ID No. 6091, Seq. ID No. 6095, Seq. ID No. 6103, Seq. ID No. 6107, Seq. ID No. 6109, Seq. ID No. 6111, Seq. ID No. 6115, Seq. ID No. 6117, Seq. ID No. 6135, Seq. ID No. 6137, Seq. ID No. 6159, Seq. ID No. 6161, Seq. ID No. 6163, Seq. ID No. 6165, Seq. ID No. 6169, Seq. ID No. 6183, Seq. ID No. 6185, Seq. ID No. 6187, Seq. ID No. 6189, Seq. ID No. 6191, Seq. ID No. 6197, Seq. ID No. 6203, Seq. ID No. 6205, Seq. ID No. 6209, Seq. ID No. 6217, Seq. ID No. 6221, Seq. ID No. 6223, Seq. ID No. 6225, Seq. ID No. 6227, Seq. ID No. 6229, Seq. ID No. 6235, Seq. ID No. 6237, Seq. ID No. 6241, Seq. ID No. 6243, Seq. ID No. 6245, Seq. ID No. 6249, Seq. ID No. 6253, Seq. ID No. 6259, Seq. ID No. 6263, Seq. ID No. 6265, Seq. ID No. 6267, Seq. ID No. 6273, Seq. ID No. 6275, Seq. ID No. 6283, Seq. ID No. 6285, Seq. ID No. 6289, Seq. ID No. 6301, Seq. ID No. 6303, Seq. ID No. 6325, Seq. ID No. 6327, Seq. ID No. 6363, Seq. ID No. 6365, Seq. ID No. 6377, Seq. ID No. 6381, Seq. ID No. 6383, Seq. ID No. 6415, Seq. ID No. 6425, Seq. ID No. 6427, Seq. ID No. 6429, Seq. ID No. 6431, Seq. ID No. 6473, Seq. ID No. 6479, Seq. ID No. 6497, Seq. ID No. 6517, Seq. ID No. 6541, Seq. ID No. 6543, Seq. ID No. 6555, Seq. ID No. 6557, Seq. ID No. 6571, Seq. ID No. 6573, Seq. ID No. 6581, Seq. ID No. 6593, Seq. ID No. 6595, Seq. ID No. 6597, Seq. ID No. 6599, Seq. ID No. 6601, Seq. ID No. 6603, Seq. ID No. 6631, Seq. ID No. 6637, Seq. ID No. 6639, Seq. ID No. 6643, Seq. ID No. 6645, and Seq. ID No. 6649.

15. The polynucleotide of claim 7, wherein the polynucleotide encodes a polypeptide, which is predicted by HMM Signal P algorithm analysis as being a non-secretory protein, and the polynucleotide is selected from one of Seq. ID No. 1, Seq. ID No. 5, Seq. ID No. 11, Seq. ID No. 13, Seq. ID No. 15, Seq. ID No. 17, Seq. ID No. 23, Seq. ID No. 25, Seq. ID No. 27, Seq. ID No. 29, Seq. ID No. 35, Seq. ID No. 37, Seq. ID No. 39, Seq. ID No. 41, Seq. ID No. 43, Seq. ID No. 51, Seq. ID No. 55, Seq. ID No. 57, Seq. ID No. 59, Seq. ID No. 61, Seq. ID No. 63, Seq. ID No. 69, Seq. ID No. 71, Seq. ID No. 73, Seq. ID No. 75, Seq. ID No. 77, Seq. ID No. 79, Seq. ID No. 81, Seq. ID No. 83, Seq. ID No. 89, Seq. ID No. 91, Seq. ID No. 93, Seq. ID No. 95, Seq. ID No. 97, Seq. ID No. 99, Seq. ID No. 101, Seq. ID No. 103, Seq. ID No. 107, Seq. ID No. 109, Seq. ID No. 113, Seq. ID No. 115, Seq. ID No. 117, Seq. ID No. 119, Seq. ID No. 121, Seq. ID No. 125, Seq. ID No. 127, Seq. ID No. 129, Seq. ID No. 135, Seq. ID No. 137, Seq. ID No. 139, Seq. ID No. 143, Seq. ID No. 145, Seq. ID No. 147, Seq. ID No. 149, Seq. ID No. 151, Seq. ID No. 153, Seq. ID No. 155, Seq. ID No. 157, Seq. ID No. 165, Seq. ID No. 167, Seq. ID No. 169, Seq. ID No. 173, Seq. ID No. 175, Seq. ID No. 177, Seq. ID No. 179, Seq. ID No. 181, Seq. ID No. 183, Seq. ID No. 185, Seq. ID No. 187, Seq. ID No. 189, Seq. ID No. 193, Seq. ID No. 195, Seq. ID No. 197, Seq. ID No. 199, Seq. ID No. 201, Seq. ID No. 203, Seq. ID No. 205, Seq. ID No. 207, Seq. ID No. 219, Seq. ID No. 221, Seq. ID No. 223, Seq. ID No. 227, Seq. ID No. 229, Seq. ID No. 231, Seq. ID No. 233, Seq. ID No. 239, Seq. ID No. 241, Seq. ID No. 243, Seq. ID No. 245, Seq. ID No. 247, Seq. ID No. 253, Seq. ID No. 261, Seq. ID No. 263, Seq. ID No. 265, Seq. ID No. 267, Seq. ID No. 269, Seq. ID No. 275, Seq. ID No. 279, Seq. ID No. 281, Seq. ID No. 283, Seq. ID No. 291, Seq. ID No. 293, Seq. ID No. 295, Seq. ID No. 297, Seq. ID No. 299, Seq. ID No. 301, Seq. ID No. 303, Seq. ID No. 305, Seq. ID No. 307, Seq. ID No. 309, Seq. ID No. 311, Seq. ID No. 313, Seq. ID No. 315, Seq. ID No. 317, Seq. ID No. 319, Seq. ID No. 321, Seq. ID No. 323, Seq. ID No. 325, Seq. ID No. 331, Seq. ID No. 333, Seq. ID No. 335, Seq. ID No. 337, Seq. ID No. 339, Seq. ID No. 341, Seq. ID No. 343, Seq. ID No. 345, Seq. ID No. 347, Seq. ID No. 349, Seq. ID No. 351, Seq. ID No. 353, Seq. ID No. 355, Seq. ID No. 361, Seq. ID No. 363, Seq. ID No. 365, Seq. ID No. 367, Seq. ID No. 369, Seq. ID No. 371, Seq. ID No. 377, Seq. ID No. 379, Seq. ID No. 381, Seq. ID No. 383, Seq. ID No. 385, Seq. ID No. 387, Seq. ID No. 389, Seq. ID No. 391, Seq. ID No. 395, Seq. ID No. 397, Seq. ID No. 399, Seq. ID No. 405, Seq. ID No. 407, Seq. ID No. 409, Seq. ID No. 411, Seq. ID No. 413, Seq. ID No. 415, Seq. ID No. 417, Seq. ID No. 419, Seq. ID No. 421, Seq. ID No. 423, Seq. ID No. 425, Seq. ID No. 427, Seq. ID No. 429, Seq. ID No. 431, Seq. ID No. 433, Seq. ID No. 435, Seq. ID No. 437, Seq. ID No. 439, Seq. ID No. 441, Seq. ID No. 443, Seq. ID No. 445, Seq. ID No. 447, Seq. ID No. 449, Seq. ID No. 451, Seq. ID No. 453, Seq. ID No. 459, Seq. ID No. 461, Seq. ID No. 463, Seq. ID No. 465, Seq. ID No. 467, Seq. ID No. 469, Seq. ID No. 471, Seq. ID No. 473, Seq. ID No. 475, Seq. ID No. 479, Seq. ID No. 481, Seq. ID No. 483, Seq. ID No. 485, Seq. ID No. 501, Seq. ID No. 507, Seq. ID No. 517, Seq. ID No. 519, Seq. ID No. 521, Seq. ID No. 523, Seq. ID No. 529, Seq. ID No. 531, Seq. ID No. 533, Seq. ID No. 535, Seq. ID No. 537, Seq. ID No. 539, Seq. ID No. 541, Seq. ID No. 543, Seq. ID No. 551, Seq. ID No. 553, Seq. ID No. 555, Seq. ID No. 559, Seq. ID No. 561, Seq. ID No. 563, Seq. ID No. 565, Seq. ID No. 571, Seq. ID No. 573, Seq. ID No. 581, Seq. ID No. 583, Seq. ID No. 585, Seq. ID No. 587, Seq. ID No. 589, Seq. ID No. 595, Seq. ID No. 597, Seq. ID No. 601, Seq. ID No. 603, Seq. ID No. 605, Seq. ID No. 607, Seq. ID No. 609, Seq. ID No. 611, Seq. ID No. 613, Seq. ID No. 615, Seq. ID No. 619, Seq. ID No. 621, Seq. ID No. 623, Seq. ID No. 625, Seq. ID No. 627, Seq. ID No. 629, Seq. ID No. 631, Seq. ID No. 633, Seq. ID No. 635, Seq. ID No. 649, Seq. ID No. 651, Seq. ID No. 663, Seq. ID No. 665, Seq. ID No. 671, Seq. ID No. 673, Seq. ID No. 681, Seq. ID No. 683, Seq. ID No. 685, Seq. ID No. 687, Seq. ID No. 689, Seq. ID No. 691, Seq. ID No. 693, Seq. ID No. 695, Seq. ID No. 697, Seq. ID No. 699, Seq. ID No. 701, Seq. ID No. 703, Seq. ID No. 705, Seq. ID No. 707, Seq. ID No. 709, Seq. ID No. 711, Seq. ID No. 713, Seq. ID No. 727, Seq. ID No. 729, Seq. ID No. 731, Seq. ID No. 733, Seq. ID No. 735, Seq. ID No. 737, Seq. ID No. 739, Seq. ID No. 741, Seq. ID No. 743, Seq. ID No. 753, Seq. ID No. 767, Seq. ID No. 771, Seq. ID No. 773, Seq. ID No. 775, Seq. ID No. 783, Seq. ID No. 785, Seq. ID No. 787, Seq. ID No. 789, Seq. ID No. 791, Seq. ID No. 793, Seq. ID No. 795, Seq. ID No. 797, Seq. ID No. 799, Seq. ID No. 801, Seq. ID No. 803, Seq. ID No. 805, Seq. ID No. 811, Seq. ID No. 813, Seq. ID No. 815, Seq. ID No. 817, Seq. ID No. 821, Seq. ID No. 823, Seq. ID No. 827, Seq. ID No. 829, Seq. ID No. 831, Seq. ID No. 833, Seq. ID No. 835, Seq. ID No. 837, Seq. ID No. 839, Seq. ID No. 841, Seq. ID No. 843, Seq. ID No. 845, Seq. ID No. 847, Seq. ID No. 849, Seq. ID No. 851, Seq. ID No. 853, Seq. ID No. 855, Seq. ID No. 857, Seq. ID No. 859, Seq. ID No. 861, Seq. ID No. 865, Seq. ID No. 867, Seq. ID No. 869, Seq. ID No. 871, Seq. ID No. 873, Seq. ID No. 875, Seq. ID No. 877, Seq. ID No. 879, Seq. ID No. 881, Seq. ID No. 883, Seq. ID No. 885, Seq. ID No. 887, Seq. ID No. 889, Seq. ID No. 891, Seq. ID No. 895, Seq. ID No. 897, Seq. ID No. 899, Seq. ID No. 903, Seq. ID No. 905, Seq. ID No. 907, Seq. ID No. 909, Seq. ID No. 911, Seq. ID No. 913,Seq. ID No. 915, Seq. ID No. 917, Seq. ID No. 919, Seq. ID No. 921, Seq. ID No. 923, Seq. ID No. 925, Seq. ID No. 927, Seq. ID No. 929, Seq. ID No. 931, Seq. ID No. 933, Seq. ID No. 939, Seq. ID No. 945, Seq. ID No. 947, Seq. ID No. 949, Seq. ID No. 951, Seq. ID No. 953, Seq. ID No. 959, Seq. ID No. 961, Seq. ID No. 963, Seq. ID No. 95, Seq. ID No. 969, Seq. ID No. 971, Seq. ID No. 973, Seq. ID No. 975, Seq. ID No. 977, Seq. ID No. 987, Seq. ID No. 989, Seq. ID No. 991, Seq. ID No. 993, Seq. ID No. 995, Seq. ID No. 997, Seq. ID No. 999, Seq. ID No. 1017, Seq. ID No. 1021, Seq. ID No. 1023, Seq. ID No. 1025, Seq. ID No. 1027, Seq. ID No. 1041, Seq. ID No. 1043, Seq. ID No. 1047, Seq. ID No. 1049, Seq. ID No. 1051, Seq. ID No. 1053, Seq. ID No. 1057, Seq. ID No. 1059, Seq. ID No. 1061, Seq. ID No. 1063, Seq. ID No. 1065, Seq. ID No. 1067, Seq. ID No. 1069, Seq. ID No. 1071, Seq. ID No. 1073, Seq. ID No. 1079, Seq. ID No. 1081, Seq. ID No. 1083, Seq. ID No. 1085, Seq. ID No. 1087, Seq. ID No. 1089, Seq. ID No. 1091, Seq. ID No. 1093, Seq. ID No. 1095, Seq. ID No. 1097, Seq. ID No. 1099, Seq. ID No. 1101, Seq. ID No. 1103, Seq. ID No. 1109, Seq. ID No. 1111, Seq. ID No. 1113, Seq. ID No. 1115, Seq. ID No. 1117, Seq. ID No. 1119, Seq. ID No. 1121, Seq. ID No. 1123, Seq. ID No. 1125, Seq. ID No. 1127, Seq. ID No. 1129, Seq. ID No. 1133, Seq. ID No. 1141, Seq. ID No. 1143, Seq. ID No. 1145, Seq. ID No. 1147, Seq. ID No. 1149, Seq. ID No. 1153, Seq. ID No. 1155, Seq. ID No. 1157, Seq. ID No. 1159, Seq. ID No. 1161, Seq. ID No. 1163, Seq. ID No. 1171, Seq. ID No. 1175, Seq. ID No. 1177, Seq. ID No. 1179, Seq. ID No. 1181, Seq. ID No. 1185, Seq. ID No. 1187, Seq. ID No. 1189, Seq. ID No. 1191, Seq. ID No. 1193, Seq. ID No. 1199, Seq. ID No. 1201, Seq. ID No. 1205, Seq. ID No. 1207, Seq. ID No. 1209, Seq. ID No. 1211, Seq. ID No. 1215, Seq. ID No. 1217, Seq. ID No. 1219, Seq. ID No. 1221, Seq. ID No. 1225, Seq. ID No. 1231, Seq. ID No. 1233, Seq. ID No. 1235, Seq. ID No. 1239, Seq. ID No. 1241, Seq. ID No. 1247, Seq. ID No. 1249, Seq. ID No. 1251, Seq. ID No. 1253, Seq. ID No. 1255, Seq. ID No. 1257, Seq. ID No. 1261, Seq. ID No. 1263, Seq. ID No. 1273, Seq. ID No. 1275, Seq. ID No. 1277, Seq. ID No. 1279, Seq. ID No. 1281, Seq. ID No. 1285, Seq. ID No. 1293, Seq. ID No. 1299, Seq. ID No. 1301, Seq. ID No. 1307, Seq. ID No. 1309, Seq. ID No. 1311, Seq. ID No. 1313, Seq. ID No. 1321, Seq. ID No. 1323, Seq. ID No. 1333, Seq. ID No. 1335, Seq. ID No. 1339, Seq. ID No. 1345, Seq. ID No. 1355, Seq. ID No. 1357, Seq. ID No. 1359, Seq. ID No. 1361, Seq. ID No. 1363, Seq. ID No. 1373, Seq. ID No. 1375, Seq. ID No. 1377, Seq. ID No. 1379, Seq. ID No. 1383, Seq. ID No. 1385, Seq. ID No. 1387, Seq. ID No. 1389, Seq. ID No. 1391, Seq. ID No. 1393, Seq. ID No. 1395, Seq. ID No. 1397, Seq. ID No. 1399, Seq. ID No. 1403, Seq. ID No. 1405, Seq. ID No. 1407, Seq. ID No. 1409, Seq. ID No. 1411, Seq. ID No. 1413, Seq. ID No. 1415, Seq. ID No. 1417, Seq. ID No. 1419, Seq. ID No. 1421, Seq. ID No. 1423, Seq. ID No. 1425, Seq. ID No. 1427, Seq. ID No. 1431, Seq. ID No. 1433, Seq. ID No. 1437, Seq. ID No. 1439, Seq. ID No. 1441, Seq. ID No. 1443, Seq. ID No. 1449, Seq. ID No. 1451, Seq. ID No. 1453, Seq. ID No. 1455, Seq. ID No. 1457, Seq. ID No. 1459, Seq. ID No. 1461, Seq. ID No. 1463, Seq. ID No. 1465, Seq. ID No. 1467, Seq. ID No. 1469, Seq. ID No. 1471, Seq. ID No. 1473, Seq. ID No. 1475, Seq. ID No. 1477, Seq. ID No. 1479, Seq. ID No. 1483, Seq. ID No. 1485, Seq. ID No. 1487, Seq. ID No. 1489, Seq. ID No. 1491, Seq. ID No. 1493, Seq. ID No. 1495, Seq. ID No. 1497, Seq. ID No. 1499, Seq. ID No. 1501, Seq. ID No. 1503, Seq. ID No. 1505, Seq. ID No. 1507, Seq. ID No. 1509, Seq. ID No. 1511, Seq. ID No. 1519, Seq. ID No. 1521, Seq. ID No. 1523, Seq. ID No. 1525, Seq. ID No. 1527, Seq. ID No. 1531, Seq. ID No. 1537, Seq. ID No. 1539, Seq. ID No. 1541, Seq. ID No. 1543, Seq. ID No. 1549, Seq. ID No. 1555, Seq. ID No. 1557, Seq. ID No. 1565, Seq. ID No. 1567, Seq. ID No. 1569, Seq. ID No. 1573, Seq. ID No. 1575, Seq. ID No. 1577, Seq. ID No. 1581, Seq. ID No. 1587, Seq. ID No. 1589, Seq. ID No. 1591, Seq. ID No. 1593, Seq. ID No. 1595, Seq. ID No. 1597, Seq. ID No. 1601, Seq. ID No. 1603, Seq. ID No. 1605, Seq. ID No. 1607, Seq. ID No. 1609, Seq. ID No. 1611, Seq. ID No. 1613, Seq. ID No. 1615, Seq. ID No. 1617, Seq. ID No. 1619, Seq. ID No. 1623, Seq. ID No. 1625, Seq. ID No. 1627, Seq. ID No. 1629, Seq. ID No. 1631, Seq. ID No. 1635, Seq. ID No. 1637, Seq. ID No. 1641, Seq. ID No. 1651, Seq. ID No. 1655, Seq. ID No. 1657, Seq. ID No. 1659, Seq. ID No. 1667, Seq. ID No. 1669, Seq. ID No. 1675, Seq. ID No. 1683, Seq. ID No. 1685, Seq. ID No. 1687, Seq. ID No. 1689, Seq. ID No. 1691, Seq. ID No. 1695, Seq. ID No. 1697, Seq. ID No. 1699, Seq. ID No. 1701, Seq. ID No. 1703, Seq. ID No. 1705, Seq. ID No. 1709, Seq. ID No. 1713, Seq. ID No. 1715, Seq. ID No. 1717, Seq. ID No. 1719, Seq. ID No. 1721, Seq. ID No. 1723, Seq. ID No. 1725, Seq. ID No. 1727, Seq. ID No. 1729, Seq. ID No. 1735, Seq. ID No. 1739, Seq. ID No. 1741, Seq. ID No. 1743, Seq. ID No. 1745, Seq. ID No. 1747, Seq. ID No. 1749, Seq. ID No. 1751, Seq. ID No. 1759, Seq. ID No. 1761, Seq. ID No. 1763, Seq. ID No. 1769, Seq. ID No. 1773, Seq. ID No. 1775, Seq. ID No. 1777, Seq. ID No. 1779, Seq. ID No. 1783, Seq. ID No. 1785, Seq. ID No. 1789, Seq. ID No. 1793, Seq. ID No. 1795, Seq. ID No. 1799, Seq. ID No. 1801, Seq. ID No. 1803, Seq. ID No. 1807, Seq. ID No. 1809, Seq. ID No. 1811, Seq. ID No. 1813, Seq. ID No. 1815, Seq. ID No. 1817, Seq. ID No. 1825, Seq. ID No. 1827, Seq. ID No. 1829, Seq. ID No. 1831, Seq. ID No. 1833, Seq. ID No. 1835, Seq. ID No. 1837, Seq. ID No. 1841, Seq. ID No. 1843, Seq. ID No. 1845, Seq. ID No. 1847, Seq. ID No. 1849, Seq. ID No. 1851, Seq. ID No. 1853, Seq. ID No. 1855, Seq. ID No. 1859, Seq. ID No. 1861, Seq. ID No. 1863, Seq. ID No. 1865, Seq. ID No. 1867, Seq. ID No. 1871, Seq. ID No. 1873, Seq. ID No. 1877, Seq. ID No. 1879, Seq. ID No. 1881, Seq. ID No. 1883, Seq. ID No. 1885, Seq. ID No. 1887, Seq. ID No. 1889, Seq. ID No. 1897, Seq. ID No. 1899, Seq. ID No. 1901, Seq. ID No. 1903, Seq. ID No. 1905, Seq. ID No. 1907, Seq. ID No. 1909, Seq. ID No. 1911, Seq. ID No. 1913, Seq. ID No. 1921, Seq. ID No. 1925, Seq. ID No. 1931, Seq. ID No. 1933, Seq. ID No. 1935, Seq. ID No. 1937, Seq. ID No. 1939, Seq. ID No. 1941, Seq. ID No. 1943, Seq. ID No. 1945, Seq. ID No. 1947, Seq. ID No. 1949, Seq. ID No. 1951, Seq. ID No. 1953, Seq. ID No. 1955, Seq. ID No. 1957, Seq. ID No. 1959, Seq. ID No. 1961, Seq. ID No. 1963, Seq. ID No. 1965, Seq. ID No. 1967, Seq. ID No. 1971, Seq. ID No. 1973, Seq. ID No. 1975, Seq. ID No. 1977, Seq. ID No. 1979, Seq. ID No. 1983, Seq. ID No. 1985, Seq. ID No. 1987, Seq. ID No. 1989, Seq. ID No. 1995, Seq. ID No. 1997, Seq. ID No. 1999, Seq. ID No. 2001, Seq. ID No. 2003, Seq. ID No. 2007, Seq. ID No. 2009, Seq. ID No. 2011, Seq. ID No. 2015, Seq. ID No. 2021, Seq. ID No. 2023, Seq. ID No. 2029, Seq. ID No. 2031, Seq. ID No. 2037, Seq. ID No. 2039, Seq. ID No. 2043, Seq. ID No. 2045, Seq. ID No. 2047, Seq. ID No. 2051, Seq. ID No. 2057, Seq. ID No. 2059, Seq. ID No. 2061, Seq. ID No. 2063, Seq. ID No. 2065, Seq. ID No. 2067, Seq. ID No. 2069, Seq. ID No. 2071, Seq. ID No. 2073, Seq. ID No. 2075, Seq. ID No. 2077, Seq. ID No. 2079, Seq. ID No. 2081, Seq. ID No. 2083, Seq. ID No. 2085, Seq. ID No. 2093, Seq. ID No. 2095, Seq. ID No. 2097, Seq. ID No. 2099, Seq. ID No. 2101, Seq. ID No. 2103, Seq. ID No. 2111, Seq. ID No. 2117, Seq. ID No. 2119, Seq. ID No. 2129, Seq. ID No. 2131, Seq. ID No. 2133, Seq. ID No. 2135, Seq. ID No. 2137, Seq. ID No. 2139, Seq. ID No. 2141, Seq. ID No. 2143, Seq. ID No. 2145, Seq. ID No. 2147, Seq. ID No. 2153, Seq. ID No. 2161, Seq. ID No. 2163, Seq. ID No. 2165, Seq. ID No. 2167, Seq. ID No. 2169, Seq. ID No. 2175, Seq. ID No. 2179, Seq. ID No. 2181, Seq. ID No. 2183, Seq. ID No. 2185, Seq. ID No. 2189, Seq. ID No. 2193, Seq. ID No. 2195, Seq. ID No. 2197, Seq. ID No. 2199, Seq. ID No. 2201, Seq. ID No. 2203, Seq. ID No. 2207, Seq. ID No. 2209, Seq. ID No. 2211, Seq. ID No. 2213, Seq. ID No. 2215, Seq. ID No. 2217, Seq. ID No. 2219, Seq. ID No. 2221, Seq. ID No. 2223, Seq. ID No. 2225, Seq. ID No. 2227, Seq. ID No. 2229, Seq. ID No. 2231, Seq. ID No. 2233, Seq. ID No. 2235, Seq. ID No. 2241, Seq. ID No. 2243, Seq. ID No. 2247, Seq. ID No. 2253, Seq. ID No. 2257, Seq. ID No. 2261, Seq. ID No. 2263, Seq. ID No. 2265, Seq. ID No. 2267, Seq. ID No. 2269, Seq. ID No. 2273, Seq. ID No. 2275, Seq. ID No. 2277, Seq. ID No. 2279, Seq. ID No. 2281, Seq. ID No. 2285, Seq. ID No. 2287, Seq. ID No. 2297, Seq. ID No. 2299, Seq. ID No. 2301, Seq. ID No. 2309, Seq. ID No. 2311, Seq. ID No. 2313, Seq. ID No. 2315, Seq. ID No. 2331, Seq. ID No. 2335, Seq. ID No. 2337, Seq. ID No. 2339, Seq. ID No. 2341, Seq. ID No. 2345, Seq. ID No. 2359, Seq. ID No. 2361, Seq. ID No. 2363, Seq. ID No. 2369, Seq. ID No. 2373, Seq. ID No. 2377, Seq. ID No. 2379, Seq. ID No. 2381, Seq. ID No. 2383, Seq. ID No. 2385, Seq. ID No. 2395, Seq. ID No. 2397, Seq. ID No. 2399, Seq. ID No. 2401, Seq. ID No. 2403, Seq. ID No. 2405, Seq. ID No. 2409, Seq. ID No. 2411, Seq. ID No. 2413, Seq. ID No. 2415, Seq. ID No. 2417, Seq. ID No. 2423, Seq. ID No. 2431, Seq. ID No. 2435, Seq. ID No. 2437, Seq. ID No. 2439, Seq. ID No. 2441, Seq. ID No. 2443, Seq. ID No. 2445, Seq. ID No. 2447, Seq. ID No. 2451, Seq. ID No. 2453, Seq. ID No. 2455, Seq. ID No. 2457, Seq. ID No. 2461, Seq. ID No. 2463, Seq. ID No. 2465, Seq. ID No. 2467, Seq. ID No. 2469, Seq. ID No. 2471, Seq. ID No. 2473, Seq. ID No. 2475, Seq. ID No. 2477, Seq. ID No. 2479, Seq. ID No. 2481, Seq. ID No. 2483, Seq. ID No. 2485, Seq. ID No. 2495, Seq. ID No. 2505, Seq. ID No. 2509, Seq. ID No. 2511, Seq. ID No. 2513, Seq. ID No. 2519, Seq. ID No. 2521, Seq. ID No. 2529, Seq. ID No. 2539, Seq. ID No. 2547, Seq. ID No. 2549, Seq. ID No. 2551, Seq. ID No. 2553, Seq. ID No. 2559, Seq. ID No. 2561, Seq. ID No. 2563, Seq. ID No. 2567, Seq. ID No. 2573, Seq. ID No. 2575, Seq. ID No. 2577, Seq. ID No. 2579, Seq. ID No. 2581, Seq. ID No. 2585, Seq. ID No. 2587, Seq. ID No. 2589, Seq. ID No. 2593, Seq. ID No. 2595, Seq. ID No. 2603, Seq. ID No. 2605, Seq. ID No. 2609, Seq. ID No. 2613, Seq. ID No. 2615, Seq. ID No. 2617, Seq. ID No. 2619, Seq. ID No. 2623, Seq. ID No. 2625, Seq. ID No. 2631, Seq. ID No. 2633, Seq. ID No, 2635, Seq. ID No. 2637, Seq. ID No. 2639, Seq. ID No. 2641, Seq. ID No. 2643, Seq. ID No. 2645, Seq. ID No. 2647, Seq. ID No. 2649, Seq. ID No. 2653, Seq. ID No. 2655, Seq. ID No. 2657, Seq. ID No. 2659, Seq. ID No. 2661, Seq. ID No. 2663, Seq. ID No. 2665, Seq. ID No. 2667, Seq. ID No. 2669, Seq. ID No. 2671, Seq. ID No. 2673, Seq. ID No. 2675, Seq. ID No. 2677, Seq. ID No. 2685, Seq. ID No. 2687, Seq. ID No. 2689, Seq. ID No. 2709, Seq. ID No. 2711, Seq. ID No. 2713, Seq. ID No. 2715, Seq. ID No. 2719, Seq. ID No. 2721, Seq. ID No. 2723, Seq. ID No. 2725, Seq. ID No. 2727, Seq. ID No. 2735, Seq. ID No. 2737, Seq. ID No. 2739, Seq. ID No. 2741, Seq. ID No. 2743, Seq. ID No. 2745, Seq. ID No. 2747, Seq. ID No. 2749, Seq. ID No. 2751, Seq. ID No. 2753, Seq. ID No. 2755, Seq. ID No. 2757, Seq. ID No. 2759, Seq. ID No. 2761, Seq. ID No. 2763, Seq. ID No. 2765, Seq. ID No. 2767, Seq. ID No. 2769, Seq. ID No. 2771, Seq. ID No. 2773, Seq. ID No. 2775, Seq. ID No. 2777, Seq. ID No. 2779, Seq. ID No. 2781, Seq. ID No. 2787, Seq. ID No. 2789, Seq. ID No. 2791, Seq. ID No. 2793, Seq. ID No. 2795, Seq. ID No. 2797, Seq. ID No. 2799, Seq. ID No. 2803, Seq. ID No. 2805, Seq. ID No. 2807, Seq. ID No. 2811, Seq. ID No. 2817, Seq. ID No. 2825, Seq. ID No. 2827, Seq. ID No. 2829, Seq. ID No. 2843, Seq. ID No. 2847, Seq. ID No. 2849, Seq. ID No. 2851, Seq. ID No. 2857, Seq. ID No. 2863, Seq. ID No. 2865, Seq. ID No. 2867, Seq. ID No. 2869, Seq. ID No. 2871, Seq. ID No. 2875, Seq. ID No. 2877, Seq. ID No. 2879, Seq. ID No. 2883, Seq. ID No. 2885, Seq. ID No. 2887, Seq. ID No. 2889, Seq. ID No. 2891, Seq. ID No. 2895, Seq. ID No. 2897, Seq. ID No. 2899, Seq. ID No. 2901, Seq. ID No. 2903, Seq. ID No. 2907, Seq. ID No. 2909, Seq. ID No. 2911, Seq. ID No. 2913, Seq. ID No. 2915, Seq. ID No. 2917, Seq. ID No. 2919, Seq. ID No. 2921, Seq. ID No. 2923, Seq. ID No. 2925, Seq. ID No. 2927, Seq. ID No. 2929, Seq. ID No. 2931, Seq. ID No. 2933, Seq. ID No. 2943, Seq. ID No. 2945, Seq. ID No. 2953, Seq. ID No. 2955, Seq. ID No. 2957, Seq. ID No. 2959, Seq. ID No. 2961, Seq. ID No. 2963, Seq. ID No. 2965, Seq. ID No. 2967, Seq. ID No. 2971, Seq. ID No. 2979, Seq. ID No. 2985, Seq. ID No. 2989, Seq. ID No. 2993, Seq. ID No. 2999, Seq. ID No. 3001, Seq. ID No. 3003, Seq. ID No. 3015, Seq. ID No. 3017, Seq. ID No. 3019, Seq. ID No. 3021, Seq. ID No. 3033, Seq. ID No. 3035, Seq. ID No. 3037, Seq. ID No. 3039, Seq. ID No. 3041, Seq. ID No. 3045, Seq. ID No. 3047, Seq. ID No. 3049, Seq. ID No. 3051, Seq. ID No. 3053, Seq. ID No. 3057, Seq. ID No. 3059, Seq. ID No. 3061, Seq. ID No. 3065, Seq. ID No. 3067, Seq. ID No. 3069, Seq. ID No. 3079, Seq. ID No. 3081, Seq. ID No. 3083, Seq. ID No. 3085, Seq. ID No. 3087, Seq. ID No. 3089, Seq. ID No. 3091, Seq. ID No. 3093, Seq. ID No. 3095, Seq. ID No. 3097, Seq. ID No. 3099, Seq. ID No. 3101, Seq. ID No. 3103, Seq. ID No. 3105, Seq. ID No. 3107, Seq. ID No. 3109, Seq. ID No. 3111, Seq. ID No. 3113, Seq. ID No. 3115, Seq. ID No. 3117, Seq. ID No. 3125, Seq. ID No. 3127, Seq. ID No. 3129, Seq. ID No. 3131, Seq. ID No. 3133, Seq. ID No. 3135, Seq. ID No. 3137, Seq. ID No. 3139, Seq. ID No. 3141, Seq. ID No. 3143, Seq. ID No. 3147, Seq. ID No. 3149, Seq. ID No. 3151, Seq. ID No. 3153, Seq. ID No. 3159, Seq. ID No. 3161, Seq. ID No. 3167, Seq. ID No. 3169, Seq. ID No. 3171, Seq. ID No. 3175, Seq. ID No. 3177, Seq. ID No. 3179, Seq. ID No. 3181, Seq. ID No. 3185, Seq. ID No. 3187, Seq. ID No. 3189, Seq. ID No. 3191, Seq. ID No. 3195, Seq. ID No. 3197, Seq. ID No. 3199, Seq. ID No. 3203, Seq. ID No. 3205, Seq. ID No. 3207, Seq. ID No. 3209, Seq. ID No. 3211, Seq. ID No. 3221, Seq. ID No. 3223, Seq. ID No. 3225, Seq. ID No. 3227, Seq. ID No. 3229, Seq. ID No. 3231, Seq. ID No. 3233, Seq. ID No. 3235, Seq. ID No. 3237, Seq. ID No. 3239, Seq. ID No. 3247, Seq. ID No. 3251, Seq. ID No. 3253, Seq. ID No. 3259, Seq. ID No. 3265, Seq. ID No. 3267, Seq. ID No. 3271, Seq. ID No. 3273, Seq. ID No. 3279, Seq. ID No. 3281, Seq. ID No. 3283, Seq. ID No. 3285, Seq. ID No. 3287, Seq. ID No. 3289, Seq. ID No. 3291, Seq. ID No. 3293, Seq. ID No. 3295, Seq. ID No. 3299, Seq. ID No. 3301, Seq. ID No. 3303, Seq. ID No. 3305, Seq. ID No. 3307, Seq. ID No. 3309, Seq. ID No. 3311, Seq. ID No. 3313, Seq. ID No. 3315, Seq. ID No. 3319, Seq. ID No. 3321, Seq. ID No. 3327, Seq. ID No. 3329, Seq. ID No. 3333, Seq. ID No. 3341, Seq. ID No. 3343, Seq. ID No. 3345, Seq. ID No. 3347, Seq. ID No. 3361, Seq. ID No. 3363, Seq. ID No. 3365, Seq. ID No. 3367, Seq. ID No. 3369, Seq. ID No. 3371, Seq. ID No. 3373, Seq. ID No. 3379, Seq. ID No. 3381, Seq. ID No. 3383, Seq. ID No. 3385, Seq. ID No. 3387, Seq. ID No. 3393, Seq. ID No. 3397, Seq. ID No. 3399, Seq. ID No. 3401, Seq. ID No. 3403, Seq. ID No. 3407, Seq. ID No. 3409, Seq. ID No. 3411, Seq. ID No. 3413, Seq. ID No. 3417, Seq. ID No. 3419, Seq. ID No. 3423, Seq. ID No. 3429, Seq. ID No. 3431, Seq. ID No. 3435, Seq. ID No. 3437, Seq. ID No. 3439, Seq. ID No. 3443, Seq. ID No. 3445, Seq. ID No. 3447, Seq. ID No. 3459, Seq. ID No. 3461, Seq. ID No. 3465, Seq. ID No. 3467, Seq. ID No. 3469, Seq. ID No. 3471, Seq. ID No. 3473, Seq. ID No. 3475, Seq. ID No. 3477, Seq. ID No. 3479, Seq. ID No. 3483, Seq. ID No. 3485, Seq. ID No. 3487, Seq. ID No. 3489, Seq. ID No. 3495, Seq. ID No. 3497, Seq. ID No. 3499, Seq. ID No. 3501, Seq. ID No. 3507, Seq. ID No. 3509, Seq. ID No. 3511, Seq. ID No. 3513, Seq. ID No. 3515, Seq. ID No. 3521, Seq. ID No. 3523, Seq. ID No. 3525, Seq. ID No. 3529, Seq. ID No. 3533, Seq. ID No. 3535, Seq. ID No. 3537, Seq. ID No. 3541, Seq. ID No. 3543, Seq. ID No. 3545, Seq. ID No. 3547, Seq. ID No. 3549, Seq. ID No. 3551, Seq. ID No. 3553, Seq. ID No. 3555, Seq. ID No. 3557, Seq. ID No. 3559, Seq. ID No. 3563, Seq. ID No. 3565, Seq. ID No. 3567, Seq. ID No. 3569, Seq. ID No. 3571, Seq. ID No. 3575, Seq. ID No. 3577, Seq. ID No. 3579, Seq. ID No. 3583, Seq. ID No. 3585, Seq. ID No. 3589, Seq. ID No. 3591, Seq. ID No. 3597, Seq. ID No. 3599, Seq. ID No. 3601, Seq. ID No. 3603,.Seq. ID No. 3605, Seq. ID No. 3607, Seq. ID No. 3609, Seq. ID No. 3613, Seq. ID No. 3615, Seq. ID No. 3623, Seq. ID No. 3627, Seq. ID No. 3631, Seq. ID No. 3633, Seq. ID No. 3637, Seq. ID No. 3639, Seq. ID No. 3641, Seq. ID No. 3643, Seq. ID No. 3645, Seq. ID No. 3647, Seq. ID No. 3649, Seq. ID No. 3651, Seq. ID No. 3653, Seq. ID No. 3655, Seq. ID No. 3657, Seq. ID No. 3659, Seq. ID No. 3661, Seq. ID No. 3663, Seq. ID No. 3665, Seq. ID No. 3667, Seq. ID No. 3669, Seq. ID No. 3671, Seq. ID No. 3673, Seq. ID No. 3675, Seq. ID No. 3681, Seq. ID No. 3683, Seq. ID No. 3685,Seq. ID No. 3687, Seq. ID No. 3691, Seq. ID No. 3693, Seq. ID No. 3695, Seq. ID No. 3697, Seq. ID No. 3699, Seq. ID No. 3701, Seq. ID No. 3703, Seq. ID No. 3705, Seq. ID No. 3707, Seq. ID No. 3709, Seq. ID No. 3711, Seq. ID No. 3713, Seq. ID No. 3715, Seq. ID No. 3719, Seq. ID No. 3721, Seq. ID No. 3725, Seq. ID No. 3729, Seq. ID No. 3731, Seq. ID No. 3733, Seq. ID No. 3735, Seq. ID No. 3737, Seq. ID No. 3739, Seq. ID No. 3743, Seq. ID No. 3747, Seq. ID No. 3749, Seq. ID No. 3751, Seq. ID No. 3759, Seq. ID No. 3767, Seq. ID No. 3769, Seq. ID No. 3771, Seq. ID No. 3773, Seq. ID No. 3775, Seq. ID No. 3777, Seq. ID No. 3779, Seq. ID No. 3785, Seq. ID No. 3787, Seq. ID No. 3789, Seq. ID No. 3791, Seq. ID No. 3795, Seq. ID No. 3797, Seq. ID No. 3801, Seq. ID No. 3803, Seq. ID No. 3805, Seq. ID No. 3809, Seq. ID No. 3811, Seq. ID No. 3819, Seq. ID No. 3821, Seq. ID No. 3823, Seq. ID No. 3825, Seq. ID No. 3827, Seq. ID No. 3829, Seq. ID No. 3831, Seq. ID No. 3833, Seq. ID No. 3835, Seq. ID No. 3841, Seq. ID No. 3843, Seq. ID No. 3845, Seq. ID No. 3847, Seq. ID No. 3855, Seq. ID No. 3857, Seq. ID No. 3867, Seq. ID No. 3869, Seq. ID No. 3871, Seq. ID No. 3873, Seq. ID No. 3875, Seq. ID No. 3877, Seq. ID No. 3881, Seq. ID No. 3883, Seq. ID No. 3885, Seq. ID No. 3887, Seq. ID No. 3893, Seq. ID No. 3897, Seq. ID No. 3899, Seq. ID No. 3901, Seq. ID No. 3905, Seq. ID No. 3907, Seq. ID No. 3909, Seq. ID No. 3911, Seq. ID No. 3913, Seq. ID No. 3917, Seq. ID No. 3919, Seq. ID No. 3921, Seq. ID No. 3927, Seq. ID No. 3929, Seq. ID No. 3931, Seq. ID No. 3933, Seq. ID No. 3935, Seq. ID No. 3937, Seq. ID No. 3939, Seq. ID No. 3941, Seq. ID No. 3943, Seq. ID No. 3945, Seq. ID No. 3947, Seq. ID No. 3949, Seq. ID No. 3951, Seq. ID No. 3953, Seq. ID No. 3955, Seq. ID No. 3957, Seq. ID No. 3961, Seq. ID No. 3965, Seq. ID No. 3967, Seq. ID No. 3969, Seq. ID No. 3971, Seq. ID No. 3977, Seq. ID No. 3979, Seq. ID No. 3981, Seq. ID No. 3983, Seq. ID No. 3985, Seq. ID No. 3987, Seq. ID No. 3989, Seq. ID No. 3991, Seq. ID No. 3999, Seq. ID No. 4001, Seq. ID No. 4003, Seq. ID No. 4011, Seq. ID No. 4013, Seq. ID No. 4015, Seq. ID No. 4017, Seq. ID No. 4019, Seq. ID No. 4021, Seq. ID No. 4023, Seq. ID No. 4029, Seq. ID No. 4031, Seq. ID No. 4033, Seq. ID No. 4035, Seq. ID No. 4037, Seq. ID No. 4051, Seq. ID No. 4053, Seq. ID No. 4055, Seq. ID No. 4057, Seq. ID No. 4059, Seq. ID No. 4063, Seq. ID No. 4065, Seq. ID No. 4067, Seq. ID No. 4069, Seq. ID No. 4075, Seq. ID No. 4077, Seq. ID No. 4085, Seq. ID No. 4087, Seq. ID No. 4089, Seq. ID No. 4091, Seq. ID No. 4093, Seq. ID No. 4095, Seq. ID No. 4097, Seq. ID No. 4099, Seq. ID No. 4105, Seq. ID No. 4107, Seq. ID No. 4109, Seq. ID No. 4113, Seq. ID No. 4115, Seq. ID No. 4117, Seq. ID No. 4119, Seq. ID No. 4121, Seq. ID No. 4123, Seq. ID No. 4125, Seq. ID No. 4127, Seq. ID No. 4129, Seq. ID No. 4131, Seq. ID No. 4147, Seq. ID No. 4149, Seq. ID No. 4155, Seq. ID No. 4157, Seq. ID No. 4159, Seq. ID No. 4161, Seq. ID No. 4163, Seq. ID No. 4165, Seq. ID No. 4167, Seq. ID No. 4169, Seq. ID No. 4171, Seq. ID No. 4173, Seq. ID No. 4175, Seq. ID No. 4177, Seq. ID No. 4179, Seq. ID No. 4183, Seq. ID No. 4185, Seq. ID No. 4187, Seq. ID No. 4189, Seq. ID No. 4191, Seq. ID No. 4193, Seq. ID No. 4195, Seq. ID No. 4197, Seq. ID No. 4199, Seq. ID No. 4201, Seq. ID No. 4203, Seq. ID No. 4205, Seq. ID No. 4207, Seq. ID No. 4209, Seq. ID No. 4211, Seq. ID No. 4213, Seq. ID No. 4215, Seq. ID No. 4217, Seq. ID No. 4219, Seq. ID No. 4229, Seq. ID No. 4235, Seq. ID No. 4237, Seq. ID No. 4239, Seq. ID No. 4243, Seq. ID No. 4245, Seq. ID No. 4249, Seq. ID No. 4251, Seq. ID No. 4255, Seq. ID No. 4267, Seq. ID No. 4271, Seq. ID No. 4273, Seq. ID No. 4277, Seq. ID No. 4279, Seq. ID No. 4281, Seq. ID No. 4283, Seq. ID No. 4289, Seq. ID No. 4291, Seq. ID No. 4293, Seq. ID No. 4295, Seq. ID No. 4299, Seq. ID No. 4301, Seq. ID No. 4303, Seq. ID No. 4305, Seq. ID No. 4309, Seq. ID No. 4315, Seq. ID No. 4317, Seq. ID No. 4319, Seq. ID No. 4321, Seq. ID No. 4323, Seq. ID No. 4325, Seq. ID No. 4327, Seq. ID No. 4329, Seq. ID No. 4331, Seq. ID No. 4333, Seq. ID No. 4335, Seq. ID No. 4337, Seq. ID No. 4339, Seq. ID No. 4341, Seq. ID No. 4345, Seq. ID No. 4347, Seq. ID No. 4349, Seq. ID No. 4351, Seq. ID No. 4353, Seq. ID No. 4355, Seq. ID No. 4357, Seq. ID No. 4359, Seq. ID No. 4361, Seq. ID No. 4363, Seq. ID No. 4365, Seq. ID No. 4367, Seq. ID No. 4369, Seq. ID No. 4371, Seq. ID No. 4373, Seq. ID No. 4375, Seq. ID No. 4377, Seq. ID No. 4381, Seq. ID No. 4383, Seq. ID No. 4387, Seq. ID No. 4393, Seq. ID No. 4395, Seq. ID No. 4397, Seq. ID No. 4401, Seq. ID No. 4405, Seq. ID No. 4407, Seq. ID No. 4409, Seq. ID No. 4411, Seq. ID No. 4413, Seq. ID No. 4415, Seq. ID No. 4417, Seq. ID No. 4419, Seq. ID No. 4421, Seq. ID No. 4423, Seq. ID No. 4425, Seq. ID No. 4427, Seq. ID No. 4429, Seq. ID No. 4431, Seq. ID No. 4433, Seq. ID No. 4435, Seq. ID No. 4443, Seq. ID No. 4445, Seq. ID No. 4447, Seq. ID No. 4449, Seq. ID No. 4451, Seq. ID No. 4453,.Seq. ID No. 4455, Seq. ID No. 4457, Seq. ID No. 4459, Seq. ID No. 4461, Seq. ID No. 4463, Seq. ID No. 4465, Seq. ID No. 4467, Seq. ID No. 4471, Seq. ID No. 4475, Seq. ID No. 4477, Seq. ID No. 4479, Seq. ID No. 4487, Seq. ID No. 4489, Seq. ID No. 4491, Seq. ID No. 4499, Seq. ID No. 4501, Seq. ID No. 4503, Seq. ID No. 4505, Seq. ID No. 4507, Seq. ID No. 4509, Seq. ID No. 4511, Seq. ID No. 4517, Seq. ID No. 4519, Seq. ID No. 4521, Seq. ID No. 4523, Seq. ID No. 4525, Seq. ID No. 4531, Seq. ID No. 4535, Seq. ID No. 4537, Seq. ID No. 4539, Seq. ID No. 4541, Seq. ID No. 4543, Seq. ID No. 4545, Seq. ID No. 4547, Seq. ID No. 4549, Seq. ID No. 4551, Seq. ID No. 4553, Seq. ID No. 4555, Seq. ID No. 4557, Seq. ID No. 4559, Seq. ID No. 4561, Seq. ID No. 4563, Seq. ID No. 4565, Seq. ID No. 4567, Seq. ID No. 4569, Seq. ID No. 4571, Seq. ID No. 4573, Seq. ID No. 4575, Seq. ID No. 4577, Seq. ID No. 4579, Seq. ID No. 4581, Seq. ID No. 4583, Seq. ID No. 4585, Seq. ID No. 4591, Seq. ID No. 4593, Seq. ID No. 4595, Seq. ID No. 4597, Seq. ID No. 4599, Seq. ID No. 4601, Seq. ID No. 4603, Seq. ID No. 4605, Seq. ID No. 4607, Seq. ID No. 4609, Seq. ID No. 4611, Seq. ID No. 4613, Seq. ID No. 4615, Seq. ID No. 4617, Seq. ID No. 4619, Seq. ID No. 4621, Seq. ID No. 4623, Seq. ID No. 4625, Seq. ID No. 4627, Seq. ID No. 4629, Seq. ID No. 4631, Seq. ID No. 4633, Seq. ID No. 4635, Seq. ID No. 4637, Seq. ID No. 4645, Seq. ID No. 4647, Seq. ID No. 4649, Seq. ID No. 4651, Seq. ID No. 4653, Seq. ID No. 4655, Seq. ID No. 4657, Seq. ID No. 4661, Seq. ID No. 4663, Seq. ID No. 4665, Seq. ID No. 4667, Seq. ID No. 4669, Seq. ID No. 4671, Seq. ID No. 4673, Seq. ID No. 4675, Seq. ID No. 4677, Seq. ID No. 4679, Seq. ID No. 4683, Seq. ID No. 4685, Seq. ID No. 4689, Seq. ID No. 4691, Seq. ID No. 4693, Seq. ID No. 4697, Seq. ID No. 4699, Seq. ID No. 4701, Seq. ID No. 4703, Seq. ID No. 4713, Seq. ID No. 4719, Seq. ID No. 4721, Seq. ID No. 4723, Seq. ID No. 4725, Seq. ID No. 4727, Seq. ID No. 4729, Seq. ID No. 4731, Seq. ID No. 4733, Seq. ID No. 4735, Seq. ID No. 4739, Seq. ID No. 4741, Seq. ID No. 4743, Seq. ID No. 4745, Seq. ID No. 4747, Seq. ID No. 4749, Seq. ID No. 4751, Seq. ID No. 4753, Seq. ID No. 4755, Seq. ID No. 4757, Seq. ID No. 4761, Seq. ID No. 4763, Seq. ID No. 4765, Seq. ID No. 4767, Seq. ID No. 4769, Seq. ID No. 4771, Seq. ID No. 4773, Seq. ID No. 4775, Seq. ID No. 4777, Seq. ID No. 4779, Seq. ID No. 4781, Seq. ID No. 4783, Seq. ID No. 4785, Seq. ID No. 4787, Seq. ID No. 4789, Seq. ID No. 4791, Seq. ID No. 4793, Seq. ID No. 4795, Seq. ID No. 4797, Seq. ID No. 4799, Seq. ID No. 4801, Seq. ID No. 4803, Seq. ID No. 4805, Seq. ID No. 4807, Seq. ID No. 4809, Seq. ID No. 4811, Seq. ID No. 4815, Seq. ID No. 4817, Seq. ID No. 4819, Seq. ID No. 4821, Seq. ID No. 4823, Seq. ID No. 4825, Seq. ID No. 4829, Seq. ID No. 4831, Seq. ID No. 4833, Seq. ID No. 4835, Seq. ID No. 4837, Seq. ID No. 4839, Seq. ID No. 4841, Seq. ID No. 4843, Seq. ID No. 4845, Seq. ID No. 4847, Seq. ID No. 4849, Seq. ID No. 4851, Seq. ID No. 4855, Seq. ID No. 4857, Seq. ID No. 4859, Seq. ID No. 4861, Seq. ID No. 4865, Seq. ID No. 4867, Seq. ID No. 4877, Seq. ID No. 4879, Seq. ID No. 4881, Seq. ID No. 4883, Seq. ID No. 4885, Seq. ID No. 4887, Seq. ID No. 4889, Seq. ID No. 4891, Seq. ID No. 4893, Seq. ID No. 4895, Seq. ID No. 4897, Seq. ID No. 4899, Seq. ID No. 4901, Seq. ID No. 4903, Seq. ID No. 4905, Seq. ID No. 4907, Seq. ID No. 4909, Seq. ID No. 4911, Seq. ID No. 4913, Seq. ID No. 4915, Seq. ID No. 4917, Seq. ID No. 4925, Seq. ID No. 4927, Seq. ID No. 4933, Seq. ID No. 4935, Seq. ID No. 4937, Seq. ID No. 4939, Seq. ID No. 4941, Seq. ID No. 4943, Seq. ID No. 4945, Seq. ID No. 4947, Seq. ID No. 4953, Seq. ID No. 4955, Seq. ID No. 4957, Seq. ID No. 4959, Seq. ID No. 4961, Seq. ID No. 4963, Seq. ID No. 4965, Seq. ID No. 4967, Seq. ID No. 4969, Seq. ID No. 4971, Seq. ID No. 4973, Seq. ID No. 4977, Seq. ID No. 4979, Seq. ID No. 4981, Seq. ID No. 4983, Seq. ID No. 4985, Seq. ID No. 4989, Seq. ID No. 4991, Seq. ID No. 4993, Seq. ID No. 4995, Seq. ID No. 49,97, Seq. ID No. 5001, Seq. ID No. 5003, Seq. ID No. 5005, Seq. ID No. 5007, Seq. ID No. 5009, Seq. ID No. 5011, Seq. ID No. 5015, Seq. ID No. 5017, Seq. ID No. 5019, Seq. ID No. 5021, Seq. ID No. 5023, Seq. ID No. 5025, Seq. ID No. 5027, Seq. ID No. 5029, Seq. ID No. 5033, Seq. ID No. 5035, Seq. ID No. 5037, Seq. ID No. 5039, Seq. ID No. 5041, Seq. ID No. 5043, Seq. ID No. 5045, Seq. ID No. 5047, Seq. ID No. 5049, Seq. ID No. 5051, Seq. ID No. 5053, Seq. ID No. 5055, Seq. ID No. 5057, Seq. ID No. 5059, Seq. ID No. 5065, Seq. ID No. 5067, Seq. ID No. 5071, Seq. ID No. 5073, Seq. ID No. 5075, Seq. ID No. 5077, Seq. ID No. 5079, Seq. ID No. 5081, Seq. ID No. 5083, Seq. ID No. 5087, Seq. ID No. 5089, Seq. ID No. 5091, Seq. ID No. 5093, Seq. ID No. 5095, Seq. ID No. 5097, Seq. ID No. 5099, Seq. ID No. 5101, Seq. ID No. 5105, Seq. ID No. 5107, Seq. ID No. 5109, Seq. ID No. 5111, Seq. ID No. 5113, Seq. ID No. 5117, Seq. ID No. 5119, Seq. ID No. 5121, Seq. ID No. 5127, Seq. ID No. 5143, Seq. ID No. 5145, Seq. ID No. 5147, Seq. ID No. 5149, Seq. ID No. 5151, Seq. ID No. 5153, Seq. ID No. 5155, Seq. ID No. 5157, Seq. ID No. 5161, Seq. ID No. 5163, Seq. ID No. 5167, Seq. ID No. 5169, Seq. ID No. 5171, Seq. ID No. 5173, Seq. ID No. 5177, Seq. ID No. 5179, Seq. ID No. 5181, Seq. ID No. 5183, Seq. ID No. 5185, Seq. ID No. 5187, Seq. ID No. 5189, Seq. ID No. 5191, Seq. ID No. 5193, Seq. ID No. 5195, Seq. ID No. 5201, Seq. ID No. 5203, Seq. ID No. 5209, Seq. ID No. 5211, Seq. ID No. 5215, Seq. ID No. 5217, Seq. ID No. 5221, Seq. ID No. 5225, Seq. ID No. 5227, Seq. ID No. 5229, Seq. ID No. 5231, Seq. ID No. 5233, Seq. ID No. 5235, Seq. ID No. 5237, Seq. ID No. 5239, Seq. ID No. 5241, Seq. ID No. 5243, Seq. ID No. 5245, Seq. ID No. 5247, Seq. ID No. 5249, Seq. ID No. 5251, Seq. ID No. 5253, Seq. ID No. 5255, Seq. ID No. 5257, Seq. ID No. 5259, Seq. ID No. 5261, Seq. ID No. 5263, Seq. ID No. 5265, Seq. ID No. 5269, Seq. ID No. 5271, Seq. ID No. 5283, Seq. ID No. 5287, Seq. ID No. 5289, Seq. ID No. 5291, Seq. ID No. 5293, Seq. ID No. 5295, Seq. ID No. 5297, Seq. ID No. 5299, Seq. ID No. 5301, Seq. ID No. 5303, Seq. ID No. 5305, Seq. ID No. 5307, Seq. ID No. 5309, Seq. ID No. 5311, Seq. ID No. 5313, Seq. ID No. 5315, Seq. ID No. 5317, Seq. ID No. 5319, Seq. ID No. 5321, Seq. ID No. 5323, Seq. ID No. 5325, Seq. ID No. 5333, Seq. ID No. 5335, Seq. ID No. 5337, Seq. ID No. 5339, Seq. ID No. 5343, Seq. ID No. 5345, Seq. ID No. 5347, Seq. ID No. 5349, Seq. ID No. 5351, Seq. ID No. 5353, Seq. ID No. 5355, Seq. ID No. 5357, Seq. ID No. 5359, Seq. ID No. 5361, Seq. ID No. 5363, Seq. ID No. 5365, Seq. ID No. 5367, Seq. ID No. 5369, Seq. ID No. 5371, Seq. ID No. 5373, Seq. ID No. 5375, Seq. ID No. 5381, Seq. ID No. 5383, Seq. ID No. 5389, Seq. ID No. 5391, Seq. ID No. 5393, Seq. ID No. 5395, Seq. ID No. 5397, Seq. ID No. 5399, Seq. ID No. 5401, Seq. ID No. 5403, Seq. ID No. 5407, Seq. ID No. 5409, Seq. ID No. 5411, Seq. ID No. 5417, Seq. ID No. 5419, Seq. ID No. 5421, Seq. ID No. 5423, Seq. ID No. 5425, Seq. ID No. 5427, Seq. ID No. 5429, Seq. ID No. 5431, Seq. ID No. 5435, Seq. ID No. 5437, Seq. ID No. 5439, Seq. ID No. 5441, Seq. ID No. 5443, Seq. ID No. 5445, Seq. ID No. 5447, Seq. ID No. 5449, Seq. ID No. 5451, Seq. ID No. 5455, Seq. ID No. 5457, Seq. ID No. 5467, Seq. ID No. 5469, Seq. ID No. 5471, Seq. ID No. 5473, Seq. ID No. 5475, Seq. ID No. 5477, Seq. ID No. 5479, Seq. ID No. 5481, Seq. ID No. 5483, Seq. ID No. 5485, Seq. ID No. 5487, Seq. ID No. 5489, Seq. ID No. 5493, Seq. ID No. 5495, Seq. ID No. 5499, Seq. ID No. 5501, Seq. ID No. 5503, Seq. ID No. 5505, Seq. ID No. 5507, Seq. ID No. 5511, Seq. ID No. 5519, Seq. ID No. 5521, Seq. ID No. 5523, Seq. ID No. 5527, Seq. ID No. 5535, Seq. ID No. 5537, Seq. ID No. 5539, Seq. ID No. 5541, Seq. ID No. 5547, Seq. ID No. 5549, Seq. ID No. 5551, Seq. ID No. 5553, Seq. ID No. 5555, Seq. ID No. 5557, Seq. ID No. 5559, Seq. ID No. 5561, Seq. ID No. 5563, Seq. ID No. 5565, Seq. ID No. 5567, Seq. ID No. 5571, Seq. ID No. 5573, Seq. ID No. 5575, Seq. ID No. 5577, Seq. ID No. 5579, Seq. ID No. 5581, Seq. ID No. 5583, Seq. ID No. 5585, Seq. ID No. 5599, Seq. ID No. 5601, Seq. ID No. 5603, Seq. ID No. 5605, Seq. ID No. 5607, Seq. ID No. 5613, Seq. ID No. 5615, Seq. ID No. 5617, Seq. ID No. 5619, Seq. ID No. 5627, Seq. ID No. 5629, Seq. ID No. 5631, Seq. ID No. 5635, Seq. ID No. 5645, Seq. ID No. 5647, Seq. ID No. 5651, Seq. ID No. 5653, Seq. ID No. 5655, Seq. ID No. 5657, Seq. ID No. 5661, Seq. ID No. 5663, Seq. ID No. 5665, Seq. ID No. 5669, Seq. ID No. 5671, Seq. ID No. 5673, Seq. ID No. 5675, Seq. ID No. 5677, Seq. ID No. 5679, Seq. ID No. 5691, Seq. ID No. 5693, Seq. ID No. 5695, Seq. ID No. 5697, Seq. ID No. 5701, Seq. ID No. 5707, Seq. ID No. 5713, Seq. ID No. 5715, Seq. ID No. 5717, Seq. ID No. 5721, Seq. ID No. 5723, Seq. ID No. 5725, Seq. ID No. 5727, Seq. ID No. 5731, Seq. ID No. 5737, Seq. ID No. 5741, Seq. ID No. 5743, Seq. ID No. 5745, Seq. ID No. 5747, Seq. ID No. 5749, Seq. ID No. 5751, Seq. ID No. 5753, Seq. ID No. 5755, Seq. ID No. 5757, Seq. ID No. 5759, Seq. ID No. 5761, Seq. ID No. 5769, Seq. ID No. 5773, Seq. ID No. 5775, Seq. ID No. 5777, Seq. ID No. 5779, Seq. ID No. 5781, Seq. ID No. 5787, Seq. ID No. 5789, Seq. ID No. 5793, Seq. ID No. 5795, Seq. ID No. 5799, Seq. ID No. 5801, Seq. ID No. 5803, Seq. ID No. 5805, Seq. ID No. 5807, Seq. ID No. 5809, Seq. ID No. 5811, Seq. ID No. 5813, Seq. ID No. 5815, Seq. ID No. 5817, Seq. ID No. 5819, Seq. ID No. 5821, Seq. ID No. 5823, Seq. ID No. 5825, Seq. ID No. 5827, Seq. ID No. 5831, Seq. ID No. 5833, Seq. ID No. 5835, Seq. ID No. 5837, Seq. ID No. 5839, Seq. ID No. 5841, Seq. ID No. 5843, Seq. ID No. 5845, Seq. ID No. 5847, Seq. ID No. 5849, Seq. ID No. 5851, Seq. ID No. 5853, Seq. ID No. 5855, Seq. ID No. 5857, Seq. ID No. 5859, Seq. ID No. 5861, Seq. ID No. 5863, Seq. ID No. 5865, Seq. ID No. 5867, Seq. ID No. 5869, Seq. ID No. 5871, Seq. ID No. 5873, Seq. ID No. 5875, Seq. ID No. 5877, Seq. ID No. 5881, Seq. ID No. 5887, Seq. ID No. 5891, Seq. ID No. 5897, Seq. ID No. 5903, Seq. ID No. 5907, Seq. ID No. 5911, Seq. ID No. 5913, Seq. ID No. 5915, Seq. ID No. 5917, Seq. ID No. 5919, Seq. ID No. 5925, Seq. ID No. 5931, Seq. ID No. 5933, Seq. ID No. 5935, Seq. ID No. 5937, Seq. ID No. 5941, Seq. ID No. 5943, Seq. ID No. 5945, Seq. ID No. 5947, Seq. ID No. 5949, Seq. ID No. 5951, Seq. ID No. 5953, Seq. ID No. 5955, Seq. ID No. 5957, Seq. ID No. 5959, Seq. ID No. 5961, Seq. ID No. 5963, Seq. ID No. 5965, Seq. ID No. 5967, Seq. ID No. 5969, Seq. ID No. 5971, Seq. ID No. 5973, Seq. ID No. 5975, Seq. ID No. 5977, Seq. ID No. 5979, Seq. ID No. 5981, Seq. ID No. 5983, Seq. ID No. 5985, Seq. ID No. 5987, Seq. ID No. 5989, Seq. ID No. 5991, Seq. ID No. 5993, Seq. ID No. 5995, Seq. ID No. 5997, Seq. ID No. 5999, Seq. ID No. 6001, Seq. ID No. 6003, Seq. ID No. 6005, Seq. ID No. 6007, Seq. ID No. 6009, Seq. ID No. 6011, Seq. ID No. 6013, Seq. ID No. 6015, Seq. ID No. 6017, Seq. ID No. 6019, Seq. ID No. 6021, Seq. ID No. 6029, Seq. ID No. 6031, Seq. ID No. 6033, Seq. ID No. 6035, Seq. ID No. 6037, Seq. ID No. 6039, Seq. ID No. 6041, Seq. ID No. 6045, Seq. ID No. 6049, Seq. ID No. 6051, Seq. ID No. 6055, Seq. ID No. 6057, Seq. ID No. 6061, Seq. ID No. 6065, Seq. ID No. 6069, Seq. ID No. 6071, Seq. ID No. 6073, Seq. ID No. 6075, Seq. ID No. 6077, Seq. ID No. 6079, Seq. ID No. 6081, Seq. ID No. 6083, Seq. ID No. 6085, Seq. ID No. 6093, Seq. ID No. 6097, Seq. ID No. 6099, Seq. ID No. 6101, Seq. ID No. 6105, Seq. ID No. 6113, Seq. ID No. 6119, Seq. ID No. 6121, Seq. ID No. 6123, Seq. ID No. 6125, Seq. ID No. 6127, Seq. ID No. 6129, Seq. ID No. 6131, Seq. ID No. 6133, Seq. ID No. 6139, Seq. ID No. 6141, Seq. ID No. 6143, Seq. ID No. 6145, Seq. ID No. 6147, Seq. ID No. 6149, Seq. ID No. 6151, Seq. ID No. 6153, Seq. ID No. 6155, Seq. ID No. 6157, Seq. ID No. 6167, Seq. ID No. 6171, Seq. ID No. 6173, Seq. ID No. 6175, Seq. ID No. 6177, Seq. ID No. 6179, Seq. ID No. 6181, Seq. ID No. 6193, Seq. ID No. 6195, Seq. ID No. 6199, Seq. ID No. 6201, Seq. ID No. 6207, Seq. ID No. 6211, Seq. ID No. 6213, Seq. ID No. 6215, Seq. ID No. 6219, Seq. ID No. 6231, Seq. ID No. 6233, Seq. ID No. 6239, Seq. ID No. 6247, Seq. ID No. 6251, Seq. ID No. 6255, Seq. ID No. 6257, Seq. ID No. 6261, Seq. ID No. 6269, Seq. ID No. 6271, Seq. ID No. 6277, Seq. ID No. 6279, Seq. ID No. 6281, Seq. ID No. 6287, Seq. ID No. 6291, Seq. ID No. 6293, Seq. ID No. 6295, Seq. ID No. 6297, Seq. ID No. 6299, Seq. ID No. 6305, Seq. ID No. 6307, Seq. ID No. 6309, Seq. ID No. 6311, Seq. ID No. 6313, Seq. ID No. 6315, Seq. ID No. 6317, Seq. ID No. 6319, Seq. ID No. 6321, Seq. ID No. 6323, Seq. ID No. 6329, Seq. ID No. 6331, Seq. ID No. 6333, Seq. ID No. 6335, Seq. ID No. 6337, Seq. ID No. 6339, Seq. ID No. 6341, Seq. ID No. 6343, Seq. ID No. 6345, Seq. ID No. 6347, Seq. ID No. 6349, Seq. ID No. 6351, Seq. ID No. 6353, Seq. ID No. 6355, Seq. ID No. 6357, Seq. ID No. 6359, Seq. ID No. 6361, Seq. ID No. 6367, Seq. ID No. 6369, Seq. ID No. 6371, Seq. ID No. 6373, Seq. ID No. 6375, Seq. ID No. 6379, Seq. ID No. 6385, Seq. ID No. 6387, Seq. ID No. 6389, Seq. ID No. 6391, Seq. ID No. 6393, Seq. ID No. 6395, Seq. ID No. 6397, Seq. ID No. 6399, Seq. ID No. 6401, Seq. ID No. 6403, Seq. ID No. 6405, Seq. ID No. 6407, Seq. ID No. 6409, Seq. ID No. 6411, Seq. ID No. 6413, Seq. ID No. 6417, Seq. ID No. 6419, Seq. ID No. 6421, Seq. ID No. 6423, Seq. ID No. 6433, Seq. ID No. 6435, Seq. ID No. 6437, Seq. ID No. 6439, Seq. ID No. 6441, Seq. ID No. 6443, Seq. ID No. 6445, Seq. ID No. 6447, Seq. ID No. 6449, Seq. ID No. 6451, Seq. ID No. 6453, Seq. ID No. 6455, Seq. ID No. 6457, Seq. ID No. 6459, Seq. ID No. 6461, Seq. ID No. 6463, Seq. ID No. 6465, Seq. ID No. 467, Seq. ID No. 6469, Seq. ID No. 6471, Seq. ID No. 6475, Seq. ID No. 6477, Seq. ID No. 6481, Seq. ID No. 6483, Seq. ID No. 6485, Seq. ID No. 6487, Seq. ID No. 6489, Seq. ID No. 6491, Seq. ID No. 6493, Seq. ID No. 6495, Seq. ID No. 6499, Seq. ID No. 6501, Seq. ID No. 6503, Seq. ID No. 6505, Seq. ID No. 6507, Seq. ID No. 6509, Seq. ID No. 6511, Seq. ID No. 6513, Seq. ID No. 6515, Seq. ID No. 6519, Seq. ID No. 6521, Seq. ID No. 6523, Seq. ID No. 6525, Seq. ID No. 6527, Seq. ID No. 6529, Seq. ID No. 6531, Seq. ID No. 6533, Seq. ID No. 6535, Seq. ID No. 6537, Seq. ID No. 6539, Seq. ID No. 6545, Seq. ID No. 6547, Seq. ID No. 6549, Seq. ID No. 6551, Seq. ID No. 6553, Seq. ID No. 6559, Seq. ID No. 6561, Seq. ID No. 6563, Seq. ID No. 6565, Seq. ID No. 6567, Seq. ID No. 6569, Seq. ID No. 6575, Seq. ID No. 6577, Seq. ID No. 6579, Seq. ID No. 6583, Seq. ID No. 6585, Seq. ID No. 6587, Seq. ID No. 6589, Seq. ID No. 6591, Seq. ID No. 6605, Seq. ID No. 6607, Seq. ID No. 6609, Seq. ID No. 6611, Seq. ID No. 6613, Seq. ID No. 6615, Seq. ID No. 6617, Seq. ID No. 6619, Seq. ID No. 6621, Seq. ID No. 6623, Seq. ID No. 6625, Seq. ID No. 6627, Seq. ID No. 6629, Seq. ID No. 6633, Seq. ID No. 6635, Seq. ID No. 6641, and Seq. ID No. 6647.

16. The polynucleotide of claim 7, wherein the polynucleotide encoding a polypeptide is identified by Pfam analysis, and the polynucleotide is selected from one of Seq. ID No. 89, Seq. ID No. 145, Seq. ID No. 155, Seq. ID No. 167, Seq. ID No. 173, Seq. ID No. 191, Seq. ID No. 215, Seq. ID No. 219, Seq. ID No. 221, Seq. ID No. 223, Seq. ID No. 225, Seq. ID No. 233, Seq. ID No. 239, Seq. ID No. 251, Seq. ID No. 253, Seq. ID No. 271, Seq. ID No. 291, Seq. ID No. 331, Seq. ID No. 341, Seq. ID No. 345, Seq. ID No. 375, Seq. ID No. 501, Seq. ID No. 505, Seq. ID No. 511, Seq. ID No. 529, Seq. ID No. 567, Seq. ID No. 569, Seq. ID No. 575, Seq. ID No. 593, Seq. ID No. 595, Seq. ID No. 601, Seq. ID No. 637, Seq. ID No. 649, Seq. ID No. 661, Seq. ID No. 669, Seq. ID No. 675, Seq. ID No. 681, Seq. ID No. 683, Seq. ID No. 729, Seq. ID No. 753, Seq. ID No. 779, Seq. ID No. 827, Seq. ID No. 839, Seq. ID No. 895, Seq. ID No. 939, Seq. ID No. 969, Seq. ID No. 985, Seq. ID No. 1015, Seq. ID No. 1039, Seq. ID No. 1075, Seq. ID No. 1137, Seq. ID No. 1155, Seq. ID No. 1163, Seq. ID No. 1175, Seq. ID No. 1223, Seq. ID No. 1231, Seq. ID No. 1237, Seq. ID No. 1241, Seq. ID No. 1261, Seq. ID No. 1331, Seq. ID No. 1339, Seq. ID No. 1369, Seq. ID No. 1477, Seq. ID No. 1517, Seq. ID No. 1531, Seq. ID No. 1539, Seq. ID No. 1549, Seq. ID No. 1563, Seq. ID No. 1567, Seq. ID No. 1571, Seq. ID No. 1573, Seq. ID No. 1589, Seq. ID No. 1595, Seq. ID No. 1647, Seq. ID No. 1657, Seq. ID No. 1771, Seq. ID No. 1785, Seq. ID No. 1789, Seq. ID No. 1819, Seq. ID No. 1821, Seq. ID No. 1969, Seq. ID No. 2015, Seq. ID No. 2047, Seq. ID No. 2087, Seq. ID No. 2089, Seq. ID No. 2093, Seq. ID No. 2115, Seq. ID No. 2117, Seq. ID No. 2127, Seq. ID No. 2141, Seq. ID No. 2179, Seq. ID No. 2207, Seq. ID No. 2223, Seq. ID No. 2253, Seq. ID No. 2275, Seq. ID No. 2301, Seq. ID No. 2315, Seq. ID No. 2329, Seq. ID No. 2343, Seq. ID No. 2349, Seq. ID No. 2363, Seq. ID No. 2381, Seq. ID No. 2391, Seq. ID No. 2417, Seq. ID No. 2421, Seq. ID No. 2423, Seq. ID No. 2429, Seq. ID No. 2481, Seq. ID No. 2487, Seq. ID No. 2489, Seq. ID No. 2491, Seq. ID No. 2509, Seq. ID No. 2519, Seq. ID No. 2525, Seq. ID No. 2547, Seq. ID No. 2553, Seq. ID No. 2563, Seq. ID No. 2587, Seq. ID No. 2599, Seq. ID No. 2607, Seq. ID No. 2613, Seq. ID No. 2651, Seq. ID No. 2675, Seq. ID No. 2681, Seq. ID No. 2687, Seq. ID No. 2693, Seq. ID No. 2699, Seq. ID No. 2703, Seq. ID No. 2709, Seq. ID No. 2711, Seq. ID No. 2727, Seq. ID No. 2753, Seq. ID No. 2819, Seq. ID No. 2821, Seq. ID No. 2823, Seq. ID No. 2867, Seq. ID No. 2871, Seq. ID No. 2907, Seq. ID No. 2919, Seq. ID No. 2957, Seq. ID No. 2971, Seq. ID No. 2979, Seq. ID No. 2999, Seq. ID No. 3005, Seq. ID No. 3019, Seq. ID No. 3035, Seq. ID No. 3065, Seq. ID No. 3085, Seq. ID No. 3149, Seq. ID No. 3165, Seq. ID No. 3183, Seq. ID No. 3203, Seq. ID No. 3211, Seq. ID No. 3251, Seq. ID No. 3259, Seq. ID No. 3319, Seq. ID No. 3323, Seq. ID No. 3335, Seq. ID No. 3337, Seq. ID No. 3347, Seq. ID No. 3359, Seq. ID No. 3377, Seq. ID No. 3379, Seq. ID No. 3399, Seq. ID No. 3425, Seq. ID No. 3483, Seq. ID No. 3495, Seq. ID No. 3497, Seq. ID No. 3519, Seq. ID No. 3529, Seq. ID No. 3599, Seq. ID No. 3611, Seq. ID No. 3615, Seq. ID No. 3619, Seq. ID No. 3663, Seq. ID No. 3739, Seq. ID No. 3759, Seq. ID No. 3771, Seq. ID No. 3797, Seq. ID No. 3825, Seq. ID No. 3841, Seq. ID No. 3855, Seq. ID No. 3863, Seq. ID No. 3901, Seq. ID No. 3929, Seq. ID No. 4015, Seq. ID No. 4017, Seq. ID No. 4055, Seq. ID No. 4075, Seq. ID No. 4085, Seq. ID No. 4089, Seq. ID No. 4099, Seq. ID No. 4105, Seq. ID No. 4129, Seq. ID No. 4203, Seq. ID No. 4243, Seq. ID No. 4251, Seq. ID No. 4343, Seq. ID No. 4383, Seq. ID No. 4475, Seq. ID No. 4481, Seq. ID No. 4487, Seq. ID No. 4491, Seq. ID No. 4533, Seq. ID No. 4627, Seq. ID No. 4705, Seq. ID No. 4713, Seq. ID No. 4717, Seq. ID No. 4719, Seq. ID No. 4729, Seq. ID No. 4789, Seq. ID No. 4791, Seq. ID No. 4793, Seq. ID No. 4803, Seq. ID No. 4813, Seq. ID No. 4815, Seq. ID No. 4825, Seq. ID No. 4833, Seq. ID No. 4837, Seq. ID No. 4875, Seq. ID No. 4879, Seq. ID No. 4919, Seq. ID No. 4931, Seq. ID No. 4947, Seq. ID No. 4985, Seq. ID No. 5077, Seq. ID No. 5115, Seq. ID No. 5117, Seq. ID No. 5127, Seq. ID No. 5141, Seq. ID No. 5193, Seq. ID No. 5215, Seq. ID No. 5219, Seq. ID No. 5275, Seq. ID No. 5381, Seq. ID No. 5389, Seq. ID No. 5409, Seq. ID No. 5411, Seq. ID No. 5475, Seq. ID No. 5491, Seq. ID No. 5513, Seq. ID No. 5519, Seq. ID No. 5525, Seq. ID No. 5529, Seq. ID No. 5537, Seq. ID No. 5557, Seq. ID No. 5581, Seq. ID No. 5599, Seq. ID No. 5637, Seq. ID No. 5685, Seq. ID No. 5723, Seq. ID No. 5755, Seq. ID No. 5761, Seq. ID No. 5895, Seq. ID No. 5901, Seq. ID No. 5903, Seq. ID No. 5911, Seq. ID No. 5913, Seq. ID No. 5919, Seq. ID No. 5923, Seq. ID No. 5929, Seq. ID No. 6001, Seq. ID No. 6043, Seq. ID No. 6053, Seq. ID No. 6055, Seq. ID No. 6089, Seq. ID No. 6095, Seq. ID No. 6111, Seq. ID No. 6117, Seq. ID No. 6165, Seq. ID No. 6169, Seq. ID No. 6187, Seq. ID No. 6195, Seq. ID No. 6219, Seq. ID No. 6233, Seq. ID No. 6269, Seq. ID No. 6275, Seq. ID No. 6279, Seq. ID No. 6287, Seq. ID No. 6297, Seq. ID No. 6299, Seq. ID No. 6305, Seq. ID No. 6311, Seq. ID No. 6369, Seq. ID No. 6379, Seq. ID No. 6587, and Seq. ID No. 6591

17. The polynucleotide of claim 7, wherein the polynucleotide encoding a polypeptide is identified by BlastP analysis, and the polynucleotide is selected from one of Seq. ID No. 9, Seq. ID No. 17, Seq. ID No. 45, Seq. ID No. 49, Seq. ID No. 53, Seq. ID No. 59, Seq. ID No. 89, Seq. ID No. 145, Seq. ID No. 157, Seq. ID No. 167, Seq. ID No. 171, Seq. ID No. 191, Seq. ID No. 215, Seq. ID No. 217, Seq. ID No. 225, Seq. ID No. 239, Seq. ID No. 253, Seq. ID No. 273, Seq. ID No. 277, Seq. ID No. 289, Seq. ID. No. 329, Seq. ID No. 343, Seq. ID No. 345, Seq. ID No. 375, Seq. ID No. 501, Seq. ID No. 505, Seq. ID No. 511, Seq. ID No. 515, Seq. ID No. 529, Seq. ID No. 569, Seq. ID No. 575, Seq. ID No. 593, Seq. ID No. 595, Seq. ID No. 637, Seq. ID No. 659, Seq. ID No. 669, Seq. ID No. 675, Seq. ID No. 681, Seq. ID No. 729, Seq. ID No. 779, Seq. ID No. 819, Seq. ID No. 895, Seq. ID No. 921, Seq. ID No. 935, Seq. ID No. 955, Seq. ID No. 967, Seq. ID No. 985, Seq. ID No. 1017, Seq. ID No. 1039, Seq. ID No. 1075, Seq. ID No. 1089, Seq. ID No. 1137, Seq. ID No. 1223, Seq. ID No. 1241, Seq. ID No. 1315, Seq. ID No. 1331, Seq. ID No. 1369, Seq. ID No. 1459, Seq. ID No. 1517, Seq. ID No. 1561, Seq. ID No. 1563, Seq. ID No. 1567, Seq. ID No. 1571, Seq. ID No. 1573, Seq. ID No. 1601, Seq. ID No. 1607, Seq. ID No. 1613, Seq. ID No. 1619, Seq. ID No. 1641, Seq. ID No. 1647, Seq. ID No. 1653, Seq. ID No. 1657, Seq. ID No. 1665, Seq. ID No. 1699, Seq. ID No. 1713, Seq. ID No. 1751, Seq. ID No. 1771, Seq. ID No. 1785, Seq. ID No. 1789, Seq. ID No. 1791, Seq. ID No. 1797, Seq. ID No. 1811, Seq. ID No. 1817, Seq. ID No. 1819, Seq. ID No. 1821, Seq. ID No. 1871, Seq. ID No. 1895, Seq. ID No. 1905, Seq. ID No. 1913, Seq. ID No. 1919, Seq. ID No. 1923, Seq. ID No. 1965, Seq. ID No. 1971, Seq. ID No. 1999, Seq. ID No. 2047, Seq. ID No. 2055, Seq. ID No. 2091, Seq. ID No. 2093, Seq. ID No. 2115, Seq. ID No. 2119, Seq. ID No. 2127, Seq. ID No. 2165, Seq. ID No. 2179, Seq. ID No. 2207, Seq. ID No. 2223, Seq. ID No. 2227, Seq. ID No. 2241, Seq. ID No. 2253, Seq. ID No. 2263, Seq. ID No. 2269, Seq. ID No. 2275, Seq. ID No. 2301, Seq. ID No. 2315, Seq. ID No. 2329, Seq. ID No. 2333, Seq. ID No. 2343, Seq. ID No. 2345, Seq. ID No. 2363, Seq. ID No. 2373, Seq. ID No. 2391, Seq. ID No. 2417, Seq. ID No. 2429, Seq. ID No. 2465, Seq. ID No. 2475, Seq. ID No. 2483, Seq. ID No. 2513, Seq. ID No. 2525, Seq. ID No. 2589, Seq. ID No. 2613, Seq. ID No. 2651, Seq. ID No. 2669, Seq. ID No. 2677, Seq. ID No. 2687, Seq. ID No. 2689, Seq. ID No. 2693, Seq. ID No. 2703, Seq. ID No. 2709, Seq. ID No. 2715, Seq. ID No. 2751, Seq. ID No. 2753, Seq. ID No. 2767, Seq. ID No. 2787, Seq. ID No. 2791, Seq. ID No. 2803, Seq. ID No. 2867, Seq. ID No. 2871, Seq. ID No. 2907, Seq. ID No. 2919, Seq. ID No. 2921, Seq. ID No. 2923, Seq. ID No. 2927, Seq. ID No. 2933, Seq. ID No. 2957, Seq. ID No. 2979, Seq. ID No. 2999, Seq. ID No. 3005, Seq. ID No. 3019, Seq. ID No. 3031, Seq. ID No. 3035, Seq. ID No. 3055, Seq. ID No. 3067, Seq. ID No. 3085, Seq. ID No. 3165, Seq. ID No. 3183, Seq. ID No. 3189, Seq. ID No. 3197, Seq. ID No. 3211, Seq. ID No. 3251, Seq. ID No. 3257, Seq. ID No. 3259, Seq. ID No. 3297, Seq. ID No. 3319, Seq. ID No. 3323, Seq. ID No. 3335, Seq. ID No. 3337, Seq. ID No. 3355, Seq. ID No. 3359, Seq. ID No. 3377, Seq. ID No. 3397, Seq. ID No. 3405, Seq. ID No. 3415, Seq. ID No. 3425, Seq. ID No. 3427, Seq. ID No. 3461, Seq. ID No. 3463, Seq. ID No. 3487, Seq. ID No. 3493, Seq. ID No. 3497, Seq. ID No. 3507, Seq. ID No. 3519, Seq. ID No. 3521, Seq. ID No. 3529, Seq. ID No. 3535, Seq. ID No. 3629, Seq. ID No. 3635, Seq. ID No. 3727, Seq. ID No. 3759, Seq. ID No. 3771, Seq. ID No. 3793, Seq. ID No. 3839, Seq. ID No. 3851, Seq. ID No. 3863, Seq. ID No. 3865, Seq. ID No. 3883, Seq. ID No. 3891, Seq. ID No. 3913, Seq. ID No. 3925, Seq. ID No. 3929, Seq. ID No. 3975, Seq. ID No. 3981, Seq. ID No. 4027, Seq. ID No. 4039, Seq. ID No. 4061, Seq. ID No. 4073, Seq. ID No. 4081, Seq. ID No. 4103, Seq. ID No. 4111, Seq. ID No. 4137, Seq. ID No. 4225, Seq. ID No. 4247, Seq. ID No. 4343, Seq. ID No. 4379, Seq. ID No. 4389, Seq. ID No. 4469, Seq. ID No. 4473, Seq. ID No. 4481, Seq. ID No. 4485, Seq. ID No. 4493, Seq. ID No. 4529, Seq. ID No. 4643, Seq. ID No. 4705, Seq. ID No. 4713, Seq. ID No. 4717, Seq. ID No. 4813, Seq. ID No. 4815, Seq. ID No. 4825, Seq. ID No. 4827, Seq. ID No. 4833, Seq. ID No. 4837, Seq. ID No. 4851, Seq. ID No. 4863, Seq. ID No. 4875, Seq. ID No. 4879, Seq. ID No. 4893, Seq. ID No. 4901, Seq. ID No. 4919, Seq. ID No. 4931, Seq. ID No. 4959, Seq. ID No. 4963, Seq. ID No. 4985, Seq. ID No. 5113, Seq. ID No. 5115, Seq. ID No. 5117, Seq. ID No. 5125, Seq. ID No. 5141, Seq. ID No. 5183, Seq. ID No. 5201, Seq. ID No. 5205, Seq. ID No. 5213, Seq. ID No. 5219, Seq. ID No. 5279, Seq. ID No. 5285, Seq. ID No. 5331, Seq. ID No. 5381, Seq. ID No. 5389, Seq. ID No. 5405, Seq. ID No. 5411, Seq. ID No. 5419, Seq. ID No. 5433, Seq. ID No. 5463, Seq. ID No. 5477, Seq. ID No. 5491, Seq. ID No. 5509, Seq. ID No. 5513, Seq. ID No. 5525, Seq. ID No. 5529, Seq. ID No. 5537, Seq. ID No. 5567, Seq. ID No. 5599, Seq. ID No. 5621, Seq. ID No. 5637, Seq. ID No. 5699, Seq. ID No. 5723, Seq. ID No. 5733, Seq. ID No. 5761, Seq. ID No. 5791, Seq. ID No. 5895, Seq. ID No. 5901, Seq. ID No. 5903, Seq. ID No. 5909, Seq. ID No. 5913, Seq. ID No. 5919, Seq. ID No. 5929, Seq. ID No. 5939, Seq. ID No. 6001, Seq. ID No. 6043, Seq. ID No. 6053, Seq. ID No. 6057, Seq. ID No. 6089, Seq. ID No. 6095, Seq. ID No. 6103, Seq. ID No. 6111, Seq. ID No. 6117, Seq. ID No. 6165, Seq. ID No. 6169, Seq. ID No. 6185, Seq. ID No. 6191, Seq. ID No. 6209, Seq. ID No. 6229, Seq. ID No. 6257, Seq. ID No. 6263, Seq. ID No. 6271, Seq. ID No. 6275, Seq. ID No. 6289, Seq. ID No. 6303, Seq. ID No. 6365, Seq. ID No. 6369, Seq. ID No. 6383, and Seq. ID No. 6415.

18. The polynucleotide of claim 7, wherein the polynucleotide has been identified using the proteomic methods used for studying surface exposed proteins of Streptococcus pneumoniae as encoding a polypeptide, and the polynucleotide is selected from one of Seq. ID No. 1, Seq. ID No. 5, Seq. ID No. 93, Seq. ID No. 95, Seq. ID No. 103, Seq. ID No. 107, Seq. ID No. 157, Seq. ID No. 223, Seq. ID No. 225, Seq. ID No. 233, Seq. ID No. 239, Seq. ID No. 253, Seq. ID No. 317, Seq. ID No. 321, Seq. ID No. 341, Seq. ID No. 345, Seq. ID No. 353, Seq. ID No. 361, Seq. ID No. 363, Seq. ID No. 365, Seq. ID No. 375, Seq. ID No. 379, Seq. ID No. 383, Seq. ID No. 389, Seq. ID No. 391, Seq. ID No. 397, Seq. ID No. 405, Seq. ID No. 409, Seq. ID No. 415, Seq. ID No. 423, Seq. ID No. 425, Seq. ID No. 427, Seq. ID No. 429, Seq. ID No. 435, Seq. ID No. 437, Seq. ID No. 439, Seq. ID No. 441, Seq. ID No. 443, Seq. ID No. 445, Seq. ID No. 447, Seq. ID No. 449, Seq. ID No. 461, Seq. ID No. 463, Seq. ID No. 465, Seq. ID No. 513, Seq. ID No. 543, Seq. ID No. 551, Seq. ID No. 553, Seq. ID No. 559, Seq. ID No. 595, Seq. ID No. 601, Seq. ID No. 637, Seq. ID No. 649, Seq. ID No. 657, Seq. ID No. 669, Seq. ID No. 675, Seq. ID No. 683, Seq. ID No. 753, Seq. ID No. 929, Seq. ID No. 969, Seq. ID No. 1041, Seq. ID No. 1043, Seq. ID No. 1085, Seq. ID No. 1089, Seq. ID No. 1093, Seq. ID No. 1097, Seq. ID No. 1099, Seq. ID No. 1101, Seq. ID No. 1175, Seq. ID No. 1205, Seq. ID No. 1237, Seq. ID No. 1459, Seq. ID No. 1495, Seq. ID No. 1497, Seq. ID No. 1503, Seq. ID No. 1517, Seq. ID No. 1527, Seq. ID No. 1531, Seq. ID No. 1539, Seq. ID No. 1543, Seq. ID No. 1549, Seq. ID No. 1573, Seq. ID No. 1657, Seq. ID No. 1709, Seq. ID No. 1767, Seq. ID No. 1785, Seq. ID No. 1821, Seq. ID No. 1889, Seq. ID No. 1925, Seq. ID No. 1969, Seq. ID No. 2003, Seq. ID No. 2047, Seq. ID No. 2075, Seq. ID No. 2089, Seq. ID No. 2093, Seq. ID No. 2117, Seq. ID No. 2137, Seq. ID No. 2143, Seq. ID No. 2205, Seq. ID No. 2235, Seq. ID No. 2257, Seq. ID No. 2301, Seq. ID No. 2363, Seq. ID No. 2423, Seq. ID No. 2445, Seq. ID No. 2451, Seq. ID No. 2481, Seq. ID No. 2495, Seq. ID No. 2505, Seq. ID No. 2577, Seq. ID No. 2587, Seq. ID No. 2613, Seq. ID No. 2633, Seq. ID No. 2651, Seq. ID No. 2665, Seq. ID No. 2669, Seq. ID No. 2677, Seq. ID No. 2687, Seq. ID No. 2693, Seq. ID No. 2699, Seq. ID No. 2711, Seq. ID No. 2715, Seq. ID No. 2757, Seq. ID No. 2791, Seq. ID No. 2793, Seq. ID No. 2803, Seq. ID No. 2867, Seq. ID No. 2919, Seq. ID No. 2929, Seq. ID No. 3005, Seq. ID No. 3019, Seq. ID No. 3125, Seq. ID No. 3137, Seq. ID No. 3161, Seq. ID No. 3179, Seq. ID No. 3251, Seq. ID No. 3259, Seq. ID No. 3285, Seq. ID No. 3309, Seq. ID No. 3317, Seq. ID No. 3337, Seq. ID No. 3345, Seq. ID No. 3359, Seq. ID No. 3475, Seq. ID No. 3515, Seq. ID No. 3521, Seq. ID No. 3641, Seq. ID No. 3695, Seq. ID No. 3793, Seq. ID No. 3901, Seq. ID No. 3927, Seq. ID No. 3987, Seq. ID No. 4001, Seq. ID No. 4057, Seq. ID No. 4081, Seq. ID No. 4111, Seq. ID No. 4125, Seq. ID No. 4193, Seq. ID No. 4195, Seq. ID No. 4237, Seq. ID No. 4247, Seq. ID No. 4383, Seq. ID No. 4393, Seq. ID No. 4397, Seq. ID No. 4401, Seq. ID No. 4435, Seq. ID No. 4449, Seq. ID No. 4471, Seq. ID No. 4491, Seq. ID No. 4511, Seq. ID No. 4519, Seq. ID No. 4531, Seq. ID No. 4549, Seq. ID No. 4577, Seq. ID No. 4581, Seq. ID No. 4585, Seq. ID No. 4609, Seq. ID No. 4611, Seq. ID No. 4613, Seq. ID No. 4675, Seq. ID No. 4685, Seq. ID No. 4719, Seq. ID No. 4729, Seq. ID No. 4743, Seq. ID No. 4755, Seq. ID No. 4781, Seq. ID No. 4787, Seq. ID No. 4837, Seq. ID No. 4841, Seq. ID No. 4849, Seq. ID No. 4855, Seq. ID No. 4889, Seq. ID No. 4901, Seq. ID No. 4915, Seq. ID No. 4917, Seq. ID No. 4931, Seq. ID No. 4935, Seq. ID No. 4977, Seq. ID No. 5025, Seq. ID No. 5029, Seq. ID No. 5109, Seq. ID No. 5115, Seq. ID No. 5117, Seq. ID No. 5155, Seq. ID No. 5185, Seq. ID No. 5201, Seq. ID No. 5203, Seq. ID No. 5219, Seq. ID No. 5261, Seq. ID No. 5289, Seq. ID No. 5295, Seq. ID No. 5377, Seq. ID No. 5389, Seq. ID No. 5399, Seq. ID No. 5411, Seq. ID No. 5537, Seq. ID No. 5621, Seq. ID No. 5627, Seq. ID No. 5657, Seq. ID No. 5675, Seq. ID No. 5717, Seq. ID No. 5777, Seq. ID No. 5859, Seq. ID No. 5901, Seq. ID No. 5913, Seq. ID No. 5919, Seq. ID No. 5925, Seq. ID No. 5933, Seq. ID No. 6055, Seq. ID No. 6129, Seq. ID No. 6133, Seq. ID No. 6187, Seq. ID No. 6193, Seq. ID No. 6219, Seq. ID No. 6271, Seq. ID No. 6277, Seq. ID No. 6369, Seq. ID No. 6375, Seq. ID No. 6379, Seq. ID No. 6389, Seq. ID No. 6591, and Seq. ID No. 6605.

19. The polynucleotide of claim 7, wherein the polypeptide encoded by the polynucleotide was identified using HMM LPXTG motif finder as having a LPXTG motif and wherein the polypeptide is covalently attached to the peptidoglycan layer, and the polynucleotide is selected from one of Seq. ID No. 503, Seq. ID No. 505, Seq. ID No. 1315, Seq. ID No. 1317, Seq. ID No. 1363, Seq. ID No. 1365, Seq. ID No. 1367, Seq. ID No. 1369, Seq. ID No. 1559, Seq. ID No. 1561, Seq. ID No. 1581, Seq. ID No. 1739, Seq. ID No. 1741, Seq. ID No. 2811, Seq. ID No. 2813, Seq. ID No. 3619, Seq. ID No. 5587, Seq. ID No. 5589, Seq. ID No. 5591, Seq. ID No. 5781, Seq. ID No. 5783, and Seq. ID No. 6103.

20. The polynucleotide of claim 7, wherein the polynucleotide encodes a lipoprotein as predicted by HMM Lipo software program, and the polynucleotide is selected from one of Seq. ID No. 45, Seq. ID No. 47, Seq. ID No. 171, Seq. ID No. 225, Seq. ID No. 419, Seq. ID No. 513, Seq. ID No. 575, Seq. ID No. 591, Seq. ID No. 593, Seq. ID No. 657, Seq. ID No. 659, Seq. ID No. 669, Seq. ID No. 675, Seq. ID No. 745, Seq. ID No. 747, Seq. ID No. 935, Seq. ID No. 1045, Seq. ID No. 1075, Seq. ID No. 1137, Seq. ID No. 1173, Seq. ID No. 1191, Seq. ID No. 1193, Seq. ID No. 1195, Seq. ID No. 1563, Seq. ID No. 1661, Seq. ID No. 1663, Seq. ID No. 1665, Seq. ID No. 1791, Seq. ID No. 1797, Seq. ID No. 1917, Seq. ID No. 1969, Seq. ID No. 2115, Seq. ID No. 2159, Seq. ID No. 2429, Seq. ID No. 2527, Seq. ID No. 2699, Seq. ID No. 2815, Seq. ID No. 2875, Seq. ID No. 2975, Seq. ID No. 2977, Seq. ID No. 2991, Seq. ID No. 3043, Seq. ID No. 3323, Seq. ID No. 3337, Seq. ID No. 4133, Seq. ID No. 4137, Seq. ID No. 4481, Seq. ID No. 4705, Seq. ID No. 4827, Seq. ID No. 4869, Seq. ID No. 5115, Seq. ID No. 5377, Seq. ID No. 5379, Seq. ID No. 5491, Seq. ID No. 5509, Seq. ID No. 5513, Seq. ID No. 5525, Seq. ID No. 5529, Seq. ID No. 5531, Seq. ID No. 5889, Seq. ID No. 5909, Seq. ID No. 6025, Seq. ID No. 6027, Seq. ID No. 6087, Seq. ID No. 6089, Seq. ID No. 6325, Seq. ID No. 6327, Seq. ID No. 6415, Seq. ID No. 6637, Seq. ID No. 6639, and Seq. ID No. 6645.

21. The polynucleotide of claim 7, wherein the polypeptide encoded by the polynucleotide is predicted by HMM program to be non-covalently bound to the peptidoglycan layer, and the polynucleotide is selected from one of Seq. ID No. 3589, Seq. ID No. 3987, Seq. ID No. 5219, and Seq. ID No. 5337.

22. The polynucleotide of claim 7, wherein the polynucleotide encodes a polypeptide having a RGDX motif wherein X is not a proline, and the polynucleotide is selected from one of Seq. ID No. 37, Seq. ID No. 99, Seq. ID No. 107, Seq. ID No. 109, Seq. ID No. 111, Seq. ID No. 351, Seq. ID No. 353, Seq. ID No. 465, Seq. ID No. 467, Seq. ID No. 469, Seq. ID No. 471, Seq. ID No. 683, Seq. ID No. 821, Seq. ID No. 823, Seq. ID No. 1021, Seq. ID No. 1023, Seq. ID No. 1157, Seq. ID No. 1159, Seq. ID No. 1233, Seq. ID No. 1333, Seq. ID No. 1335, Seq. ID No. 1449, Seq. ID No. 1559, Seq. ID No. 1561, Seq. ID No. 1563, Seq. ID No. 1625, Seq. ID No. 1777, Seq. ID No. 1827, Seq. ID No. 1829, Seq. ID No. 1871, Seq. ID No. 1925, Seq. ID No. 2135, Seq. ID No. 2145, Seq. ID No. 2173, Seq. ID No. 2175, Seq. ID No. 2177, Seq. ID No. 2179, Seq. ID No. 2259, Seq. ID No. 2317, Seq. ID No. 2319, Seq. ID No. 2321, Seq. ID No. 2323, Seq. ID No. 2325, Seq. ID No. 2327, Seq. ID No. 2329, Seq. ID No. 2401, Seq. ID No. 2671, Seq. ID No. 2863, Seq. ID No. 2869, Seq. ID No. 2919, Seq. ID No. 2921, Seq. ID No. 2993, Seq. ID No. 3087, Seq. ID No. 3137, Seq. ID No. 3279, Seq. ID No. 3281, Seq. ID No. 3283, Seq. ID No. 3333, Seq. ID No. 3335, Seq. ID No. 3497, Seq. ID No. 3499, Seq. ID No. 3501, Seq. ID No. 3533, Seq. ID No. 3671, Seq. ID No. 3673, Seq. ID No. 3675, Seq. ID No. 3837, Seq. ID No. 3839, Seq. ID No. 3841, Seq. ID No. 3843, Seq. ID No. 3929, Seq. ID No. 3961, Seq. ID No. 4037, Seq. ID No. 4193, Seq. ID No. 4239, Seq. ID No. 4327, Seq. ID No. 4329, Seq. ID No. 4333, Seq. ID No. 4393, Seq. ID No. 4463, Seq. ID No. 4465, Seq. ID No. 4467, Seq. ID No. 4597, Seq. ID No. 4629, Seq. ID No. 4631, Seq. ID No. 4675, Seq. ID No. 4677, Seq. ID No. 4679, Seq. ID No. 4689, Seq. ID No. 4691, Seq. ID No. 4693, Seq. ID No. 4781, Seq. ID No. 4799, Seq. ID No. 4801, Seq. ID No. 4803, Seq. ID No. 4861, Seq. ID No. 5009, Seq. ID No. 5143, Seq. ID No. 5145, Seq. ID No. 5179, Seq. ID No. 5181, Seq. ID No. 5183, Seq. ID No. 5249, Seq. ID No. 5251, Seq. ID No. 5253, Seq. ID No. 5259, Seq. ID No. 5261, Seq. ID No. 5293, Seq. ID No. 5295, Seq. ID No. 5297, Seq. ID No. 5299, Seq. ID No. 5307, Seq. ID No. 5309, Seq. ID No. 5411, Seq. ID No. 5535, Seq. ID No. 5537, Seq. ID No. 5745, Seq. ID No. 5821, Seq. ID No. 5823, Seq. ID No. 5825, Seq. ID No. 6029, Seq. ID No. 6171, Seq. ID No. 6307, Seq. ID No. 6309, and Seq. ID No. 6311.

23. The polynucleotide of claim 7, wherein the polynucleotide encodes a polypeptide that is predicted by BlastP analysis as being involved in capsule biosynthesis and transport, and the polynucleotide is selected from one of Seq. ID No. 49, Seq. ID No. 51, Seq. ID No. 53, Seq. ID No. 59, Seq. ID No. 195, Seq. ID No. 689, Seq. ID No. 703, Seq. ID No. 925, Seq. ID No. 1597, Seq. ID No. 1601, Seq. ID No. 1607, Seq. ID No. 1611, Seq. ID No. 1613, Seq. ID No. 1713, Seq. ID No. 2029, Seq. ID No. 2263, Seq. ID No. 2269, Seq. ID No. 2373, Seq. ID No. 2437, Seq. ID No. 2651, Seq. ID No. 2767, Seq. ID No. 2907, Seq. ID No. 3397, Seq. ID No. 3399, Seq. ID No. 3479, Seq. ID No. 3487, Seq. ID No. 3491, Seq. ID No. 3493, Seq. ID No. 3495, Seq. ID No. 3497, Seq. ID No. 3519, Seq. ID No. 3521, Seq. ID No. 3529, Seq. ID No. 3535, Seq. ID No. 3561, Seq. ID No. 3883, Seq. ID No. 3891, Seq. ID No. 3981, and Seq. ID No. 4087.

24. The polynucleotide of claim 7, wherein the polynucleotide encodes a polypeptide identified by BlastP analysis as being localized within the capsular loci of the Alloiococcus otitidis genome, and the polynucleotide is selected from one of Seq. ID No. 45, Seq. ID No. 47, Seq. ID No. 51, Seq. ID No. 53, Seq. ID No. 55, Seq. ID No. 57, Seq. ID No. 59, Seq. ID No. 683, Seq. ID No. 685, Seq. ID No. 687, Seq. ID No. 689, Seq. ID No. 691, Seq. ID No. 693, Seq. ID No. 695, Seq. ID No. 697, Seq. ID No. 699, Seq. ID No. 701, Seq. ID N. 703, Seq. ID No. 705, Seq. ID No. 707, Seq. ID No. 709, Seq. ID No. 711, Seq. ID No. 713, Seq. ID No. 715, Seq. ID No. 717, Seq. ID No. 719, Seq. ID No. 721, Seq. ID No. 723, Seq. ID No. 725, Seq. ID No. 727, Seq. ID No. 729, Seq. ID No. 731, Seq. ID No. 733, Seq. ID No. 735, Seq. ID No. 737, Seq. ID No. 739, Seq. ID No. 741, Seq. ID No. 743, Seq. ID No. 745, Seq. ID No. 747, Seq. ID No. 749, Seq. ID No. 751, Seq. ID No. 753, Seq. ID No. 3389, Seq. ID No. 3391, Seq. ID No. 3393, Seq. ID No. 3395, Seq. ID No. 3397, Seq. ID No. 3399, Seq. ID No. 3401, Seq. ID No. 3403, Seq. ID No. 3405, Seq. ID No. 3407, Seq. ID No. 3409, Seq. ID No. 3411, Seq. ID No. 3413, Seq. ID No. 3415, Seq. ID No. 3417, Seq. ID No. 3419, Seq. ID No. 3421, Seq. ID No. 3423, Seq. ID No. 3425, Seq. ID No. 3427, Seq. ID No. 3429, Seq. ID No. 3431, Seq. ID No. 3433, Seq. ID No. 3435, Seq. ID No. 3437, Seq. ID No. 3439, Seq. ID No. 3441, Seq. ID No. 3443, Seq. ID No. 3445, Seq. ID No. 3447, Seq. ID No. 3449, Seq. ID No. 3451, Seq. ID No. 3453, Seq. ID No. 3455, Seq. ID No. 3457, Seq. ID No. 3459, Seq. ID No. 3461, Seq. ID No. 3463, Seq. ID No. 3465, Seq. ID No. 3467, Seq. ID No. 3469, Seq. ID No. 3471, Seq. ID No. 3473, Seq. ID No. 3475, Seq. ID No. 3477, Seq. ID No. 3479, Seq. ID No. 3481, Seq. ID No. 3483, Seq. ID No. 3485, Seq. ID No. 3487, Seq. ID No. 3489, Seq. ID No. 3491, Seq. ID No. 3493, Seq. ID No. 3495, Seq. ID No. 3497, Seq. ID No. 3499, Seq. ID No. 3501, Seq. ID No. 3503, Seq. ID No. 3505, Seq. ID No. 3507, Seq. ID No. 3509, Seq. ID No. 3511, Seq. ID No. 3513, Seq. ID No. 3515, Seq. ID No. 3517, Seq. ID No. 3519, Seq. ID No. 3521, Seq. ID No. 3523, Seq. ID No. 3525, Seq. ID No. 3527, Seq. ID No. 3529, Seq. ID No. 3531, Seq. ID No. 3533, Seq. ID No. 3535, Seq. ID No. 3537, Seq. ID No. 3539, Seq. ID No. 3541, Seq. ID No. 3543, Seq. ID No. 3545, Seq. ID No. 3547, Seq. ID No. 3549, Seq. ID No. 3551, Seq. ID No. 3553, Seq. ID No. 3555, Seq. ID No. 3557, Seq. ID No. 3559, and Seq. ID No. 3561.

25. The polynucleotide of claim 7, wherein the polynucleotide encodes a polypeptide identified by BlastP analysis as being associated with sporulation, and the polynucleotide is selected from one of Seq. ID No. 1137, Seq. ID No. 1455, Seq. ID No. 2137, Seq. ID No. 2141, Seq. ID No. 2165, Seq. ID No. 2179, Seq. ID No. 2301, Seq. ID No. 2753, Seq. ID No. 4211, Seq. ID No. 4251, Seq. ID No. 4327, Seq. ID No. 4569, Seq. ID No. 4719, and Seq. ID No. 4729.

26. The polynucleotide of claim 7, wherein the polynucleotide is a unique ORF identified by BlastP analysis as having a BlastP ‘E’ value of >e⁻¹⁰, and the polynucleotide is selected from one of Seq. ID No. 7, Seq. ID No. 19, Seq. ID No. 21, Seq. ID No. 23, Seq. ID No. 31, Seq. ID No. 39, Seq. ID No. 65, Seq. ID No. 67, Seq. ID No. 69, Seq. ID No. 91, Seq. ID No. 99, Seq. ID No. 105, Seq. ID No. 113, Seq. ID No. 115, Seq. ID No. 123, Seq. ID No. 125, Seq. ID No. 127, Seq. ID No. 131, Seq. ID No. 133, Seq. ID No. 139, Seq. ID No. 151, Seq. ID No. 159, Seq. ID No. 161, Seq. ID No. 163, Seq. ID No. 165, Seq. ID No. 169, Seq. ID No. 185, Seq. ID No. 189, Seq. ID No. 193, Seq. ID No. 229, Seq. ID No. 231, Seq. ID No. 255, Seq. ID No. 257, Seq. ID No. 259, Seq. ID No. 275, Seq. ID No. 337, Seq. ID No. 339, Seq. ID No. 347, Seq. ID No. 349, Seq. ID No. 357, Seq. ID No. 359, Seq. ID No. 369, Seq. ID No. 371, Seq. ID No. 377, Seq. ID No. 385, Seq. ID No. 387, Seq. ID No. 393, Seq. ID No. 399, Seq. ID No. 401, Seq. ID No. 403, Seq. ID No. 407, Seq. ID No. 419, Seq. ID No. 431, Seq. ID No. 477, Seq. ID No. 495, Seq. ID No. 507, Seq. ID No. 519, Seq. ID No. 541, Seq. ID No. 545, Seq. ID No. 547, Seq. ID No. 549, Seq. ID No. 557, Seq. ID No. 589, Seq. ID No. 617, Seq. ID No. 619, Seq. ID No. 633, Seq. ID No. 639, Seq. ID No. 641, Seq. ID No. 643, Seq. ID No. 645, Seq. ID No. 647, Seq. ID No. 651, Seq. ID No. 653, Seq. ID No. 655, Seq. ID No. 667, Seq. ID No. 691, Seq. ID No. 693, Seq. ID No. 695, Seq. ID No. 697, Seq. ID No. 715, Seq. ID No. 717, Seq. ID No. 719, Seq. ID No. 731, Seq. ID No. 733, Seq. ID No. 741, Seq. ID No. 743, Seq. ID No. 745, Seq. ID No. 747, Seq. ID No. 749, Seq. ID No. 751, Seq. ID No. 755, Seq. ID No: 757, Seq. ID No. 759, Seq. ID No. 761, Seq. ID No. 763, Seq. ID No. 765, Seq. ID No. 767, Seq. ID No. 801, Seq. ID No. 803, Seq. ID No. 805, Seq. ID No. 807, Seq. ID No. 809, Seq. ID No. 811, Seq. ID No. 813, Seq. ID No. 833, Seq. ID No. 841, Seq. ID No. 849, Seq. ID No. 851, Seq. ID No. 853, Seq. ID No. 855, Seq. ID No. 887, Seq. ID No. 889, Seq. ID No. 891, Seq. ID No. 903, Seq. ID No. 905, Seq. ID No. 909, Seq. ID No. 937, Seq. ID No. 941, Seq. ID No. 943, Seq. ID No. 951, Seq. ID No. 957, Seq. ID No. 973, Seq. ID No. 975, Seq. ID No. 987, Seq. ID No. 1005, Seq. ID No. 1007, Seq. ID No. 1009, Seq. ID No. 1011, Seq. ID No. 1019, Seq. ID No. 1025, Seq. ID No. 1027, Seq. ID No. 1045, Seq. ID No. 1047, Seq. ID No. 1071, Seq. ID No. 1073, Seq. ID No. 1077, Seq. ID No. 1105, Seq. ID No. 1107, Seq. ID No. 1111, Seq. ID No. 1131, Seq. ID No. 1135, Seq. ID No. 1139, Seq. ID No. 1151, Seq. ID No. 1153, Seq. ID No. 1165, Seq. ID No. 1167, Seq. ID No. 1169, Seq. ID No. 1171, Seq. ID No. 1173, Seq. ID No. 1181, Seq. ID No. 1183, Seq. ID No. 1185, Seq. ID No. 1187, Seq. ID No. 1189, Seq. ID No. 1191, Seq. ID No. 1193, Seq. ID No. 1195, Seq. ID No. 1197, Seq. ID No. 1199, Seq. ID No. 1201, Seq. ID No. 1203, Seq. ID No. 1207, Seq. ID No. 1213, Seq. ID No. 1227, Seq. ID No. 1229, Seq. ID No. 1239, Seq. ID No. 1243, Seq. ID No. 1245, Seq. ID No. 1247, Seq. ID No. 1249, Seq. ID No. 1259, Seq. ID No. 1265, Seq. ID No. 1267, Seq. ID No. 1269, Seq. ID No. 1271, Seq. ID No. 1273, Seq. ID No. 1275, Seq. ID No. 1277, Seq. ID No. 1279, Seq. ID No. 1281, Seq. ID No. 1283, Seq. ID No. 1285, Seq. ID No. 1287, Seq. ID No. 1289, Seq. ID No. 1291, Seq. ID No. 1293, Seq. ID No. 1295, Seq. ID No. 1297, Seq. ID No. 1299, Seq. ID No. 1301, Seq. ID No. 1303, Seq. ID No. 1305, Seq. ID No. 1307, Seq. ID No. 1309, Seq. ID No. 1311, Seq. ID No. 1313, Seq. ID No. 1319, Seq. ID No. 1321, Seq. ID No. 1323, Seq. ID No. 1325, Seq. ID No. 1327, Seq. ID No. 1337, Seq. ID No. 1341, Seq. ID No. 1343, Seq. ID No. 1347, Seq. ID No. 1349, Seq. ID No. 1351, Seq. ID No. 1353, Seq. ID No. 1355, Seq. ID No. 1371, Seq. ID No. 1379, Seq. ID No. 1381, Seq. ID No. 1389, Seq. ID No. 1397, Seq. ID No. 1399, Seq. ID No. 1401, Seq. ID No. 1417, Seq. ID No. 1419, Seq. ID No. 1421, Seq. ID No. 1423, Seq. ID No. 1439, Seq. ID No. 1445, Seq. ID No. 1447, Seq. ID No. 1457, Seq. ID No. 1465, Seq. ID No. 1479, Seq. ID No. 1511, Seq. ID No. 1551, Seq. ID No. 1553, Seq. ID No. 1555, Seq. ID No. 1557, Seq. ID No. 1579, Seq. ID No. 1609, Seq. ID No. 1621, Seq. ID No. 1623, Seq. ID No. 1625, Seq. ID No. 1627, Seq. ID No. 1629, Seq. ID No. 1631, Seq. ID No. 1633, Seq. ID No. 1639, Seq. ID No. 1643, Seq. ID No. 1655, Seq. ID No. 1667, Seq. ID No. 1671, Seq. ID No. 1693, Seq. ID No. 1695, Seq. ID No. 1701, Seq. ID No. 1703, Seq. ID No. 1705, Seq. ID No. 1721, Seq. ID No. 1723, Seq. ID No. 1731, Seq. ID No. 1737, Seq. ID No. 1743, Seq. ID No. 1759, Seq. ID No. 1763, Seq. ID No. 1773, Seq. ID No. 1775, Seq. ID No. 1777, Seq. ID No. 1779, Seq. ID No. 1781, Seq. ID No. 1799, Seq. ID No. 1801, Seq. ID No. 1803, Seq. ID No. 1807, Seq. ID No. 1823, Seq. ID No. 1831, Seq. ID No. 1851, Seq. ID No. 1857, Seq. ID No. 1875, Seq. ID No. 1899, Seq. ID No. 1915, Seq. ID No. 1927, Seq. ID No. 1929, Seq. ID No. 1973, Seq. ID No. 1977, Seq. ID No. 1981, Seq. ID No. 2005, Seq. ID No. 2007, Seq. ID No. 2009, Seq. ID No. 2011, Seq. ID No. 2017, Seq. ID No. 2019, Seq. ID No. 2023, Seq. ID No. 2025, Seq. ID No. 2027, Seq. ID No. 2039, Seq. ID No. 2041, Seq. ID No. 2043, Seq. ID No. 2045, Seq. ID No. 2049, Seq. ID No. 2081, Seq. ID No. 2083, Seq. ID No. 2085, Seq. ID No. 2105, Seq. ID No. 2107, Seq. ID No. 2109, Seq. ID No. 2111, Seq. ID No. 2129, Seq. ID No. 2131, Seq. ID No. 2133, Seq. ID No. 2145, Seq. ID No. 2155, Seq. ID No. 2157, Seq. ID No. 2159, Seq. ID No. 2161, Seq. ID No. 2171, Seq. ID No. 2187, Seq. ID No. 2189, Seq. ID No. 2201, Seq. ID No. 2203, Seq. ID No. 2209, Seq. ID No. 2211, Seq. ID No. 2219, Seq. ID No. 2225, Seq. ID No. 2243, Seq. ID No. 2245, Seq. ID No. 2247, Seq. ID No. 2249, Seq. ID No. 2251, Seq. ID No. 2255, Seq. ID No. 2277, Seq. ID No. 2279, Seq. ID No. 2341, Seq. ID No. 2351, Seq. ID No. 2353, Seq. ID No. 2355, Seq. ID No. 2357, Seq. ID No. 2359, Seq. ID No. 2365, Seq. ID No. 2367, Seq. ID No. 2371, Seq. ID No. 2375, Seq. ID No. 2393, Seq. ID No. 2395, Seq. ID No. 2425, Seq. ID No. 2427, Seq. ID No. 2431, Seq. ID No. 2439, Seq. ID No. 2441, Seq. ID No. 2443, Seq. ID No. 2447, Seq. ID No. 2459, Seq. ID No. 2479, Seq. ID No. 2493, Seq. ID No. 2501, Seq. ID No. 2503, Seq. ID No. 2521, Seq. ID No. 2523, Seq. ID No. 2527, Seq. ID No. 2591, Seq. ID No. 2601, Seq. ID No. 2603, Seq. ID No. 2611, Seq. ID No. 2627, Seq. ID No. 2629, Seq. ID No. 2653, Seq. ID No. 2661, Seq. ID No. 2691, Seq. ID No. 2695, Seq. ID No. 2697, Seq. ID No. 2717, Seq. ID No. 2729, Seq. ID No. 2731, Seq. ID No. 2733, Seq. ID No. 2735, Seq. ID No. 2739, Seq. ID No. 2741, Seq. ID No. 2743, Seq. ID No. 2777, Seq. ID No. 2779, Seq. ID No. 2781, Seq. ID No. 2783, Seq. ID No. 2801, Seq. ID No. 2805, Seq. ID No. 2807, Seq. ID No. 2809, Seq. ID No. 2811, Seq. ID No. 2813, Seq. ID No. 2815, Seq. ID No. 2817, Seq. ID No. 2819, Seq. ID No. 2829, Seq. ID No. 2831, Seq. ID No. 2833, Seq. ID No. 2835, Seq. ID No. 2837, Seq. ID No. 2839, Seq. ID No. 2841, Seq. ID No. 2845, Seq. ID No. 2849, Seq. ID No. 2851, Seq. ID No. 2853, Seq. ID No. 2855, Seq. ID No. 2857, Seq. ID No. 2859, Seq. ID No. 2861, Seq. ID No. 2865, Seq. ID No. 2873, Seq. ID No. 2875, Seq. ID No. 2877, Seq. ID No. 2883, Seq. ID No. 2885, Seq. ID No. 2887, Seq. ID No. 2889, Seq. ID No. 2893, Seq. ID No. 2895, Seq. ID No. 2903, Seq. ID No. 2909, Seq. ID No. 2935, Seq. ID No. 2937, Seq. ID No. 2939, Seq. ID No. 2941, Seq. ID No. 2943, Seq. ID No. 2945, Seq. ID No. 2947, Seq. ID No. 2949, Seq. ID No. 2951, Seq. ID No. 2953, Seq. ID No. 2965, Seq. ID No. 2967, Seq. ID No. 2973, Seq. ID No. 2975, Seq. ID No. 2977, Seq. ID No. 2981, Seq. ID No. 2983, Seq. ID No. 2985, Seq. ID No. 2987, Seq. ID No. 2989, Seq. ID No. 2991, Seq. ID No. 3001, Seq. ID No. 3007, Seq. ID No. 3009, Seq. ID No. 3011, Seq. ID No. 3021, Seq. ID No. 3023, Seq. ID No. 3041, Seq. ID No. 3045, Seq. ID No. 3071, Seq. ID No. 3087, Seq. ID No. 3105, Seq. ID No. 3107, Seq. ID No. 3119, Seq. ID No. 3121, Seq. ID No. 3123, Seq. ID No. 3151, Seq. ID No. 3153, Seq. ID No. 3167, Seq. ID No. 3173, Seq. ID No. 3175, Seq. ID No. 3177, Seq. ID No. 3181, Seq. ID No. 3193, Seq. ID No. 3213, Seq. ID No. 3215, Seq. ID No. 3217, Seq. ID No. 3219, Seq. ID No. 3221, Seq. ID No. 3223, Seq. ID No. 3231, Seq. ID No. 3233, Seq. ID No. 3235, Seq. ID No. 3237, Seq. ID No. 3239, Seq. ID No. 3241, Seq. ID No. 3243, Seq. ID No. 3245, Seq. ID No. 3247, Seq. ID No. 3249, Seq. ID No. 3261, Seq. ID No. 3263, Seq. ID No. 3265, Seq. ID No. 3267, Seq. ID No. 3269, Seq. ID No. 3271, Seq. ID No. 3273, Seq. ID No. 3275, Seq. ID No. 3277, Seq. ID No. 3325, Seq. ID No. 3331, Seq. ID No. 3339, Seq. ID No. 3341, Seq. ID No. 3349, Seq. ID No. 3361, Seq. ID No. 3363, Seq. ID No. 3369, Seq. ID No. 3371, Seq. ID No. 3389, Seq. ID No. 3403, Seq. ID No. 3417, Seq. ID No. 3419, Seq. ID No. 3421, Seq. ID No. 3433, Seq. ID No. 3437, Seq. ID No. 3441, Seq. ID No. 3443, Seq. ID No. 3445, Seq. ID No. 3447, Seq. ID No. 3473, Seq. ID No. 3481, Seq. ID No. 3483, Seq. ID No. 3489, Seq. ID No. 3503, Seq. ID No. 3505, Seq. ID No. 3509, Seq. ID No. 3511, Seq. ID No. 3523, Seq. ID No. 3525, Seq. ID No. 3531, Seq. ID No. 3533, Seq. ID No. 3539, Seq. ID No. 3541, Seq. ID No. 3543, Seq. ID No. 3545, Seq. ID No. 3547, Seq. ID No. 3555, Seq. ID No. 3557, Seq. ID No. 3563, Seq. ID No. 3565, Seq. ID No. 3571, Seq. ID No. 3573, Seq. ID No. 3581, Seq. ID No. 3587, Seq. ID No. 3591, Seq. ID No. 3593, Seq. ID No. 3595, Seq. ID No. 3611, Seq. ID No. 3613, Seq. ID No. 3617, Seq. ID No. 3619, Seq. ID No. 3621, Seq. ID No. 3623, Seq. ID No. 3625, Seq. ID No. 3631, Seq. ID No. 3637, Seq. ID No. 3639, Seq. ID No. 3655, Seq. ID No. 3657, Seq. ID No. 3659, Seq. ID No. 3661, Seq. ID No. 3677, Seq. ID No. 3679, Seq. ID No. 3683, Seq. ID No. 3685, Seq. ID No. 3701, Seq. ID No. 3703, Seq. ID No. 3717, Seq. ID No. 3719, Seq. ID No. 3721, Seq. ID No. 3723, Seq. ID No. 3729, Seq. ID No. 3731, Seq. ID No. 3733, Seq. ID No. 3735, Seq. ID No. 3737, Seq. ID No. 3739, Seq. ID No. 3741, Seq. ID No. 3749, Seq. ID No. 3751, Seq. ID No. 3753, Seq. ID No. 3755, Seq. ID No. 3761, Seq. ID No. 3781, Seq. ID No. 3783, Seq. ID No. 3785, Seq. ID No. 3787, Seq. ID No. 3789, Seq. ID No. 3791, Seq. ID No. 3799, Seq. ID No. 3807, Seq. ID No. 3809, Seq. ID No. 3811, Seq. ID No. 3813, Seq. ID No. 3815, Seq. ID No. 3817, Seq. ID No. 3827, Seq. ID No. 3829, Seq. ID No. 3831, Seq. ID No. 3833, Seq. ID No. 3835, Seq. ID No. 3849, Seq. ID No. 3879, Seq. ID No. 3881, Seq. ID No. 3895, Seq. ID No. 3903, Seq. ID No. 3909, Seq. ID No. 3915, Seq. ID No. 3939, Seq. ID No. 3959, Seq. ID No. 3961, Seq. ID No. 3963, Seq. ID No. 3965, Seq. ID No. 3973, Seq. ID No. 3977, Seq. ID No. 3979, Seq. ID No. 3993, Seq. ID No. 3995, Seq. ID No. 3997, Seq. ID No. 4005, Seq. ID No. 4007, Seq. ID No. 4009, Seq. ID No. 4041, Seq. ID No. 4043, Seq. ID No. 4045, Seq. ID No. 4069, Seq. ID No. 4077, Seq. ID No. 4097, Seq. ID No. 4113, Seq. ID No. 4123, Seq. ID No. 4131, Seq. ID No. 4133, Seq. ID No. 4135, Seq. ID No. 4139, Seq. ID No. 4151, Seq. ID No. 4153, Seq. ID No. 4155, Seq. ID No. 4181, Seq. ID No. 4221, Seq. ID No. 4241, Seq. ID No. 4253, Seq. ID No. 4257, Seq. ID No. 4259, Seq. ID No. 4261, Seq. ID No. 4263, Seq. ID No. 4265, Seq. ID No. 4269, Seq. ID No. 4275, Seq. ID No. 4277, Seq. ID No. 4279, Seq. ID No. 4281, Seq. ID No. 4285, Seq. ID No. 4287, Seq. ID No. 4297, Seq. ID No. 4305, Seq. ID No. 4307, Seq. ID No. 4363, Seq. ID No. 4365, Seq. ID No. 4371, Seq. ID No. 4373, Seq. ID No. 4395, Seq. ID No. 4399, Seq. ID No. 4403, Seq. ID No. 4425, Seq. ID No. 4437, Seq. ID No. 4439, Seq. ID No. 4441, Seq. ID No. 4453, Seq. ID No. 4455, Seq. ID No. 4513, Seq. ID No. 4515, Seq. ID No. 4551, Seq. ID No. 4561, Seq. ID No. 4573, Seq. ID No. 4575, Seq. ID No. 4587, Seq. ID No. 4589, Seq. ID No. 4591, Seq. ID No. 4593, Seq. ID No. 4595, Seq. ID No. 4617, Seq. ID No. 4619, Seq. ID No. 4621, Seq. ID No. 4625, Seq. ID No. 4627, Seq. ID No. 4633, Seq. ID No. 4635, Seq. ID No. 4637, Seq. ID No. 4639, Seq. ID No. 4659, Seq. ID No. 4681, Seq. ID No. 4687, Seq. ID No. 4695, Seq. ID No. 4699, Seq. ID No. 4701, Seq. ID No. 4721, Seq. ID No. 4735, Seq. ID No. 4737, Seq. ID No. 4741, Seq. ID No. 4783, Seq. ID No. 4789, Seq. ID No. 4805, Seq. ID No. 4811, Seq. ID No. 4817, Seq. ID No. 4819, Seq. ID No. 4821, Seq. ID No. 4823, Seq. ID No. 4835, Seq. ID No. 4853, Seq. ID No. 4885, Seq. ID No. 4913, Seq. ID No. 4923, Seq. ID No. 4949, Seq. ID No. 4951, Seq. ID No. 4975, Seq. ID No. 4981, Seq. ID No. 4983, Seq. ID No. 4987, Seq. ID No. 4993, Seq. ID No. 4999, Seq. ID No. 5001, Seq. ID No. 5011, Seq. ID No. 5013, Seq. ID No. 5023, Seq. ID No. 5031, Seq. ID No. 5033, Seq. ID No. 5035, Seq. ID No. 5037, Seq. ID No. 5041, Seq. ID No. 5043, Seq. ID No. 5053, Seq. ID No. 5061, Seq. ID No. 5063, Seq. ID No. 5085, Seq. ID No. 5093, Seq. ID No. 5151, Seq. ID No. 5153, Seq. ID No. 5159, Seq. ID No. 5161, Seq. ID No. 5167, Seq. ID No. 5173, Seq. ID No. 5175, Seq. ID No. 5177, Seq. ID No. 5189, Seq. ID No. 5191, Seq. ID No. 5193, Seq. ID No. 5197, Seq. ID No. 5199, Seq. ID No. 5221, Seq. ID No. 5223, Seq. ID No. 5225, Seq. ID No. 5227, Seq. ID No. 5237, Seq. ID No. 5267, Seq. ID No. 5269, Seq. ID No. 5271, Seq. ID No. 5281, Seq. ID No. 5301, Seq. ID No. 5303, Seq. ID No. 5315, Seq. ID No. 5321, Seq. ID No. 5327, Seq. ID No. 5347, Seq. ID No. 5385, Seq. ID No. 5445, Seq. ID No. 5447, Seq. ID No. 5459, Seq. ID No. 5465, Seq. ID No. 5467, Seq. ID No. 5479, Seq. ID No. 5481, Seq. ID No. 5485, Seq. ID No. 5487, Seq. ID No. 5515, Seq. ID No. 5517, Seq. ID No. 5533, Seq. ID No. 5543, Seq. ID No. 5545, Seq. ID No. 5549, Seq. ID No. 5569, Seq. ID No. 5577, Seq. ID No. 5593, Seq. ID No. 5595, Seq. ID No. 5609, Seq. ID No. 5623, Seq. ID No. 5625, Seq. ID No. 5639, Seq. ID No. 5641, Seq. ID No. 5643, Seq. ID No. 5649, Seq. ID No. 5659, Seq. ID No. 5661, Seq. ID No. 5663, Seq. ID No. 5667, Seq. ID No. 5671, Seq. ID No. 5687, Seq. ID No. 5689, Seq. ID No. 5703, Seq. ID No. 5705, Seq. ID No. 5709, Seq. ID No. 5711, Seq. ID No. 5737, Seq. ID No. 5739, Seq. ID No. 5745, Seq. ID No. 5751, Seq. ID No. 5763, Seq. ID No. 5797, Seq. ID No. 5811, Seq. ID No. 5813, Seq. ID No. 5815, Seq. ID No. 5827, Seq. ID No. 5829, Seq. ID No. 5843, Seq. ID No. 5845, Seq. ID No. 5873, Seq. ID No. 5879, Seq. ID No. 5883, Seq. ID No. 5885, Seq. ID No. 5887, Seq. ID No. 5889, Seq. ID No. 5891, Seq. ID No. 5931, Seq. ID No. 5955, Seq. ID No. 5963, Seq. ID No. 5965, Seq. ID No. 5975, Seq. ID No. 5983, Seq. ID No. 5985, Seq. ID No. 5987, Seq. ID No. 5989, Seq. ID No. 6005, Seq. ID No. 6013, Seq. ID No. 6031, Seq. ID No. 6035, Seq. ID No. 6045, Seq. ID No. 6059, Seq. ID No. 6061, Seq. ID No. 6063, Seq. ID No. 6073, Seq. ID No. 6081, Seq. ID No. 6091, Seq. ID No. 6093, Seq. ID No. 6127, Seq. ID No. 6159, Seq. ID No. 6197, Seq. ID No. 6199, Seq. ID No. 6203, Seq. ID No. 6217, Seq. ID No. 6221, Seq. ID No. 6223, Seq. ID No. 6237, Seq. ID No. 6239, Seq. ID No. 6241, Seq. ID No. 6245, Seq. ID No. 6247, Seq. ID No. 6249, Seq. ID No. 6259, Seq. ID No. 6265, Seq. ID No. 6267, Seq. ID No. 6273, Seq. ID No. 6283, Seq. ID No. 6285, Seq. ID No. 6323, Seq. ID No. 6325, Seq. ID No. 6327, Seq. ID No. 6361, Seq. ID No. 6363, Seq. ID No. 6377, Seq. ID No. 6381, Seq. ID No. 6401, Seq. ID No. 6403, Seq. ID No. 6419, Seq. ID No. 6425, Seq. ID No. 6427, Seq. ID No. 6429, Seq. ID No. 6431, Seq. ID No. 6433, Seq. ID No. 6435, Seq. ID No. 6437, Seq. ID No. 6439, Seq. ID No. 6447, Seq. ID No. 6449, Seq. ID No. 6451, Seq. ID No. 6453, Seq. ID No. 6455, Seq. ID No. 6457, Seq. ID No. 6465, Seq. ID No. 6467, Seq. ID No. 6469, Seq. ID No. 6471, Seq. ID No. 6473, Seq. ID No. 6475, Seq. ID No. 6477, Seq. ID No. 6479, Seq. ID No. 6481, Seq. ID No. 6483, Seq. ID No. 6485, Seq. ID No. 6487, Seq. ID No. 6489, Seq. ID No. 6491, Seq. ID No. 6495, Seq. ID No. 6497, Seq. ID No. 6507, Seq. ID No. 6517, Seq. ID No. 6519, Seq. ID No. 6521, Seq. ID No. 6523, Seq. ID No. 6525, Seq. ID No. 6527, Seq. ID No. 6529, Seq. ID No. 6533, Seq. ID No. 6539, Seq. ID No. 6541, Seq. ID No. 6543, Seq. ID No. 6555, Seq. ID No. 6557, Seq. ID No. 6561, Seq. ID No. 6563, Seq. ID No. 6565, Seq. ID No. 6567, Seq. ID No. 6569, Seq. ID No. 6571, Seq. ID No. 6573, Seq. ID No. 6581, Seq. ID No. 6583, Seq. ID No. 6631, Seq. ID No. 6635, Seq. ID No. 6637, Seq. ID No. 6639, Seq. ID No. 6643, Seq. ID No. 6645, Seq. ID No. 6647, and Seq. ID No. 6649.

27. The polynucleotide of claim 7, wherein the polypeptide encoded by the polynucleotide is identified by GLIMMER™ ORF finder program, and the polynucleotide is selected from one of Seq. ID No. 1, Seq. ID No. 5, Seq. ID No. 11, Seq. ID No. 13, Seq. ID No. 15, Seq. ID No. 17, Seq. ID No. 25, Seq. ID No. 27, Seq. ID No. 29, Seq. ID No. 35, Seq. ID No. 37, Seq. ID No. 41, Seq. ID No. 43, Seq. ID No. 47, Seq. ID No. 51, Seq. ID No. 53, Seq. ID No. 59, Seq. ID No. 63, Seq. ID No. 69, Seq. ID No. 73, Seq. ID No. 75, Seq. ID No. 81, Seq. ID No. 83, Seq. ID No. 89, Seq. ID No. 93, Seq. ID No. 97, Seq. ID No. 103, Seq. ID No. 111, Seq. ID No. 121, Seq. ID No. 125, Seq. ID No. 129, Seq. ID No. 135, Seq. ID No. 137, Seq. ID No. 145, Seq. ID No. 149, Seq. ID No. 157, Seq. ID No. 167, Seq. ID No. 173, Seq. ID No. 183, Seq. ID No. 187, Seq. ID No. 189, Seq. ID No. 191, Seq. ID No. 195, Seq. ID No. 197, Seq. ID No. 203, Seq. ID No. 207, Seq. ID No. 215, Seq. ID No. 219, Seq. ID No. 223, Seq. ID No. 225, Seq. ID No. 227, Seq. ID No. 231, Seq. ID No. 233, Seq. ID No. 239, Seq. ID No. 241, Seq. ID No. 247, Seq. ID No. 253, Seq. ID No. 261, Seq. ID No. 265, Seq. ID No. 269, Seq. ID No. 273, Seq. ID No. 275, Seq. ID No. 277, Seq. ID No. 283, Seq. ID No. 291, Seq. ID No. 293, Seq. ID No. 297, Seq. ID No. 301, Seq. ID No. 307, Seq. ID No. 309, Seq. ID No. 313, Seq. ID No. 317, Seq. ID No. 321, Seq. ID No. 325, Seq. ID No. 335, Seq. ID No. 343, Seq. ID No. 345, Seq. ID No. 353, Seq. ID No. 355, Seq. ID No. 361, Seq. ID No. 363, Seq. ID No. 367, Seq. ID No. 375, Seq. ID No. 379, Seq. ID No. 383, Seq. ID No. 389, Seq. ID No. 391, Seq. ID No. 397, Seq. ID No. 405, Seq. ID No. 411, Seq. ID No. 415, Seq. ID No. 417, Seq. ID No. 423, Seq. ID No. 425, Seq. ID No. 427, Seq. ID No. 429, Seq. ID No. 435, Seq. ID No. 437, Seq. ID No. 439, Seq. ID No. 441, Seq. ID No. 445, Seq. ID No. 447, Seq. ID No. 453, Seq. ID No. 461, Seq. ID No. 463, Seq. ID No. 471, Seq. ID No. 485, Seq. ID No. 501, Seq. ID No. 505, Seq. ID No. 511, Seq. ID No. 515, Seq. ID No. 517, Seq. ID No. 521, Seq. ID No. 523, Seq. ID No. 531, Seq. ID No. 533, Seq. ID No. 539, Seq. ID No. 541, Seq. ID No. 543, Seq. ID No. 551, Seq. ID No. 555, Seq. ID No. 561, Seq. ID No. 565, Seq. ID No. 569, Seq. ID No. 575, Seq. ID No. 579, Seq. ID No. 587, Seq. ID No. 593, Seq. ID No. 597, Seq. ID No. 603, Seq. ID No. 605, Seq. ID No. 609, Seq. ID No. 611, Seq. ID No. 613, Seq. ID No. 615, Seq. ID No. 623, Seq. ID No. 627, Seq. ID No. 629, Seq. ID No. 631, Seq. ID No. 635, Seq. ID No. 637, Seq. ID No. 647, Seq. ID No. 649, Seq. ID No. 661, Seq. ID No. 669, Seq. ID No. 673, Seq. ID No. 675, Seq. ID No. 681, Seq. ID No. 683, Seq. ID No. 689, Seq. ID No. 701, Seq. ID No. 703, Seq. ID No. 709, Seq. ID No. 713, Seq. ID No. 729, Seq. ID No. 733, Seq. ID No. 735, Seq. ID No. 737, Seq. ID No. 741, Seq. ID No. 747, Seq. ID No. 751, Seq. ID No. 753, Seq. ID No. 759, Seq. ID No. 765, Seq. ID No. 767, Seq. ID No. 771, Seq. ID No. 781, Seq. ID No. 783, Seq. ID No. 787, Seq. ID No. 791, Seq. ID No. 795, Seq. ID No. 799, Seq. ID No. 807, Seq. ID No. 817, Seq. ID No. 819, Seq. ID No. 823, Seq. ID No. 827, Seq. ID No. 831, Seq. ID No. 835, Seq. ID No. 837, Seq. ID No. 839, Seq. ID No. 847, Seq. ID No. 851, Seq. ID No. 855, Seq. ID No. 859, Seq. ID No. 867, Seq. ID No. 871, Seq. ID No. 875, Seq. ID No. 881, Seq. ID No. 885, Seq. ID No. 889, Seq. ID No. 891, Seq. ID No. 895, Seq. ID No. 901, Seq. ID No. 907, Seq. ID No. 915, Seq. ID No. 919,Seq. ID No. 925, Seq. ID No. 929, Seq. ID No. 935, Seq. ID No. 939, Seq. ID No. 949, Seq. ID No. 951, Seq. ID No. 955, Seq. ID No. 961, Seq. ID No. 965, Seq. ID No. 967, Seq. ID No. 971, Seq. ID No. 985, Seq. ID No. 993, Seq. ID No. 997, Seq. ID No. 1003, Seq. ID No. 1005, Seq. ID No. 1009, Seq. ID No. 1017, Seq. ID No. 1023, Seq. ID No. 1039, Seq. ID No. 1041, Seq. ID No. 1043, Seq. ID No. 1051, Seq. ID No. 1053, Seq. ID No. 1057, Seq. ID No. 1061, Seq. ID No. 1065, Seq. ID No. 1067, Seq. ID No. 1069, Seq. ID No. 1073, Seq. ID No. 1075, Seq. ID No. 1083, Seq. ID No. 1087, Seq. ID No. 1091, Seq. ID No. 1093, Seq. ID No. 1097, Seq. ID No. 1099, Seq. ID No. 1103, Seq. ID No. 1109, Seq. ID No. 1115, Seq. ID No.1117, Seq. ID No. 1123, Seq. ID No. 1129, Seq. ID No. 1133, Seq. ID No. 1137, Seq. ID No. 1143, Seq. ID No. 1147, Seq. ID No. 1149, Seq. ID No. 1155, Seq. ID No. 1157, Seq. ID No. 1159, Seq. ID No. 1163, Seq. ID No. 1171, Seq. ID No. 1179, Seq. ID No. 1181, Seq. ID No. 1187, Seq. ID No. 1193, Seq. ID No. 1199, Seq. ID No. 1205, Seq. ID No. 1211, Seq. ID No. 1217, Seq. ID No. 1221, Seq. ID No. 1223, Seq. ID No. 1225, Seq. ID No. 1231, Seq. ID No. 1233, Seq. ID No. 1237, Seq. ID No. 1241, Seq. ID No. 1253, Seq. ID No. 1257, Seq. ID No. 1263, Seq. ID No. 1271, Seq. ID No. 1281, Seq. ID No. 1317, Seq. ID No. 1323, Seq. ID No. 1331, Seq. ID No. 1335, Seq. ID No. 1339, Seq. ID No. 1345, Seq. ID No. 1347, Seq. ID No. 1361, Seq. ID No. 1369, Seq. ID No. 1377, Seq. ID No. 1379, Seq. ID No. 1387, Seq. ID No. 1393, Seq. ID No. 1395, Seq. ID No. 1399, Seq. ID No. 1403, Seq. ID No. 1405, Seq. ID No. 1411, Seq. ID No. 1413, Seq. ID No. 1415, Seq. ID No. 1419, Seq. ID No. 1425, Seq. ID No. 1427, Seq. ID No. 1429, Seq. ID No. 1431, Seq. ID No. 1433, Seq. ID No. 1437, Seq. ID No. 1443, Seq. ID No. 1449, Seq. ID No. 1451, Seq. ID No. 1455, Seq. ID No. 1457, Seq. ID No. 1459, Seq. ID No. 1463, Seq. ID No. 1465, Seq. ID No. 1469, Seq. ID No. 1471, Seq. ID No. 1473, Seq. ID No. 1475, Seq. ID No. 1477, Seq. ID No. 1485, Seq. ID No. 1487, Seq. ID No. 1491, Seq. ID No. 1493, Seq. ID No. 1495, Seq. ID No. 1497, Seq. ID No. 1501, Seq. ID No. 1505, Seq. ID No. 1507, Seq. ID No. 1509, Seq. ID No. 1517, Seq. ID No. 1525, Seq. ID No. 1527, Seq. ID No. 1531, Seq. ID No. 1539, Seq. ID No. 1541, Seq. ID No. 1543, Seq. ID No. 1549, Seq. ID No. 1561, Seq. ID No. 1563, Seq. ID No. 1567, Seq. ID No. 1571, Seq. ID No. 1573, Seq. ID No. 1577, Seq. ID No. 1581, Seq. ID No. 1589, Seq. ID No. 1593, Seq. ID No. 1595, Seq. ID No. 1597, Seq. ID No. 1603, Seq. ID No. 1607, Seq. ID No. 1611, Seq. ID No. 1613, Seq. ID No. 1619, Seq. ID No. 1623, Seq. ID No. 1627, Seq. ID No. 1631, Seq. ID No. 1637, Seq. ID No. 1639, Seq. ID No. 1641, Seq. ID No. 1647, Seq. ID No. 1653, Seq. ID No. 1657, Seq. ID No. 1665, Seq. ID No. 1669, Seq. ID No. 1681, Seq. ID No. 1685, Seq. ID No. 1689, Seq. ID No. 1691, Seq. ID No. 1697, Seq. ID No. 1699, Seq. ID No. 1707, Seq. ID No. 1711, Seq. ID No. 1713, Seq. ID No. 1719, Seq. ID No. 1723, Seq. ID No. 1729, Seq. ID No. 1735, Seq. ID No. 1737, Seq. ID No. 1741, Seq. ID No. 1747, Seq. ID No. 1751, Seq. ID No. 1757, Seq. ID No. 1759, Seq. ID No. 1761, Seq. ID No. 1771, Seq. ID No. 1777, Seq. ID No. 1785, Seq. ID No. 1789, Seq. ID No. 1791, Seq. ID No. 1797, Seq. ID No. 1801, Seq. ID No. 1803, Seq. ID No. 1805, Seq. ID No. 1811, Seq. ID No. 1817, Seq. ID No. 1819, Seq. ID No. 1821, Seq. ID No. 1825, Seq. ID No. 1829, Seq. ID No. 1837, Seq. ID No. 1843, Seq. ID No. 1845, Seq. ID No. 1847, Seq. ID No. 1849, Seq. ID No. 1851, Seq. ID No. 1855, Seq. ID No. 1859, Seq. ID No. 1863, Seq. ID No. 1865, Seq. ID No. 1867, Seq. ID No. 1871, Seq. ID No. 1873, Seq. ID No. 1877, Seq. ID No. 1885, Seq. ID No. 1887, Seq. ID No. 1889, Seq. ID No. 1895, Seq. ID No. 1897, Seq. ID No. 1899, Seq. ID No. 1903, Seq. ID No. 1905, Seq. ID No. 1913, Seq. ID No. 1919, Seq. ID No. 1923, Seq. ID No. 1925, Seq. ID No. 1931, Seq. ID No. 1935, Seq. ID No. 1937, Seq. ID No. 1943, Seq. ID No. 1945, Seq. ID No. 1949, Seq. ID No. 1953, Seq. ID No. 1957, Seq. ID No. 1959, Seq. ID No. 1961, Seq. ID No. 1965, Seq. ID No. 1967, Seq. ID No. 1971, Seq. ID No. 1975, Seq. ID No. 1979, Seq. ID No. 1983, Seq. ID No. 1987, Seq. ID No. 1989, Seq. ID No. 1991, Seq. ID No. 1999, Seq. ID No. 2001, Seq. ID No. 2003, Seq. ID No. 2009, Seq. ID No. 2015, Seq. ID No. 2019, Seq. ID No. 2021, Seq. ID No. 2031, Seq. ID No. 2035, Seq. ID No. 2037, Seq. ID No. 2045, Seq. ID No. 2047, Seq. ID No. 2055, Seq. ID No. 2059, Seq. ID No. 2065, Seq. ID No. 2067, Seq. ID No. 2069, Seq. ID No. 2071, Seq. ID No. 2073, Seq. ID No. 2079, Seq. ID No. 2091, Seq. ID No. 2093, Seq. ID No. 2097, Seq. ID No. 2099, Seq. ID No. 2103, Seq. ID No. 2115, Seq. ID No. 2119, Seq. ID No. 2127, Seq. ID No. 2135, Seq. ID No. 2137, Seq. ID No. 2141, Seq. ID No. 2143, Seq. ID No. 2147, Seq. ID No. 2153, Seq. ID No. 2159, Seq. ID No. 2161, Seq. ID No. 2165, Seq. ID No. 2169, Seq. ID No. 2179, Seq. ID No. 2183, Seq. ID No. 2185, Seq. ID No. 2189, Seq. ID No. 2191, Seq. ID No. 2193, Seq. ID No. 2195, Seq. ID No. 2199, Seq. ID No. 2207, Seq. ID No. 2217, Seq. ID No. 2219, Seq. ID No. 9921, Seq. ID No. 2223, Seq. ID No. 2227, Seq. ID No. 2229, Seq. ID No. 2231, Seq. ID No. 2233, Seq. ID No. 2241, Seq. ID No. 2245, Seq. ID No. 2251, Seq. ID No. 2253, Seq. ID No. 2257, Seq. ID No. 2259, Seq. ID No. 9963, Seq. ID No. 2267, Seq. ID No. 2269, Seq. ID No. 2275, Seq. ID No. 2281, Seq. ID No. 2287, Seq. ID No. 2297, Seq. ID No. 2299, Seq. ID No. 2301, Seq. ID No. 2315, Seq. ID No. 2329, Seq. ID No. 2333, Seq. ID No. 2335, Seq. ID No. 2339, Seq. ID No. 2343, Seq. ID No. 2345, Seq. ID No. 2349, Seq. ID No. 2351, Seq. ID No. 2357, Seq. ID No. 2359, Seq. ID No. 2363, Seq. ID No. 2365, Seq. ID No. 2369, Seq. ID No. 2373, Seq. ID No. 2381, Seq. ID No. 2391, Seq. ID No. 2399, Seq. ID No. 2401, Seq. ID No. 2405, Seq. ID No. 2409, Seq. ID No. 2415, Seq. ID No. 2417, Seq. ID No. 2421, Seq. ID No. 2423, Seq. ID No. 2427, Seq. ID No. 2429, Seq. ID No. 2431, Seq. ID No. 2435, Seq. ID No. 2437, Seq. ID No. 2439, Seq. ID No. 2443, Seq. ID No. 2445, Seq. ID No. 2449, Seq. ID No. 2451, Seq. ID No. 2453, Seq. ID No. 2457, Seq. ID No. 2463, Seq. ID No. 2465, Seq. ID No. 2469, Seq. ID No. 2471, Seq. ID No. 2475, Seq. ID No. 2477, Seq. ID No. 2483, Seq. ID No. 2485, Seq. ID No. 2491, Seq. ID No. 2495, Seq. ID No. 2505, Seq. ID No. 2507, Seq. ID No. 2513, Seq. ID No. 2519, Seq. ID No. 2525, Seq. ID No. 2529, Seq. ID No. 2535, Seq. ID No. 2537, Seq. ID No. 2539, Seq. ID No. 2549, Seq. ID No. 2553, Seq. ID No. 2563, Seq. ID No. 2567, Seq. ID No. 2575, Seq. ID No. 2577, Seq. ID No. 2581, Seq. ID No. 2589, Seq. ID No. 2593, Seq. ID No. 2595, Seq. ID No. 2599, Seq. ID No. 2603, Seq. ID No. 2607, Seq. ID No. 2609, Seq. ID No. 2613, Seq. ID No. 2617, Seq. ID No. 2619, Seq. ID No. 2623, Seq. ID No. 2625, Seq. ID No. 2631, Seq. ID No. 2633, Seq. ID No. 2639, Seq. ID No. 2641, Seq. ID No. 2645, Seq. ID No. 2649, Seq. ID No. 2651, Seq. ID No. 2655, Seq. ID No. 2659, Seq. ID No. 2663, Seq. ID No. 2667, Seq. ID No. 2669, Seq. ID No. 2671, Seq. ID No. 2677, Seq. ID No. 2687, Seq. ID No. 2689, Seq. ID No. 2693, Seq. ID No. 2699, Seq. ID No. 2703, Seq. ID No. 2709, Seq. ID No. 2711, Seq. ID No. 2715, Seq. ID No. 2719, Seq. ID No. 2725, Seq. ID No. 2727, Seq. ID No. 2737, Seq. ID No. 2743, Seq. ID No. 2747, Seq. ID No. 2751, Seq. ID No. 2753, Seq. ID No. 2759, Seq. ID No. 2763, Seq. ID No. 2765, Seq. ID No. 2767, Seq. ID No. 2771, Seq. ID No. 2773, Seq. ID No. 2775, Seq. ID No. 2781, Seq. ID No. 2787, Seq. ID No. 2789, Seq. ID No. 2791, Seq. ID No. 2793, Seq. ID No. 2797, Seq. ID No. 2799, Seq. ID No. 2803, Seq. ID No. 2805, Seq. ID No. 2811, Seq. ID No. 2815, Seq. ID No. 2823, Seq. ID No. 2827, Seq. ID No. 2843, Seq. ID No. 2847, Seq. ID No. 2863, Seq. ID No. 2867, Seq. ID No. 2869, Seq. ID No. 2871, Seq. ID No. 2877, Seq. ID No. 2881, Seq. ID No. 2891, Seq. ID No. 2899, Seq. ID No. 2901, Seq. ID No. 2903, Seq. ID No. 2907, Seq. ID No. 2911, Seq. ID No. 2913, Seq. ID No. 2917, Seq. ID No. 2919, Seq. ID No. 2921, Seq. ID No. 2923, Seq. ID No. 2927, Seq. ID No. 2933, Seq. ID No. 2945, Seq. ID No. 2953, Seq. ID No. 2957, Seq. ID No. 2963, Seq. ID No. 2971, Seq. ID No. 2973, Seq. ID No. 2977, Seq. ID No. 2979, Seq. ID No. 2983, Seq. ID No. 2985, Seq. ID No. 2991, Seq. ID No. 2993, Seq. ID No. 2999, Seq. ID No. 3001, Seq. ID No. 3005, Seq. ID No. 3011, Seq. ID No. 3019, Seq. ID No. 3027, Seq. ID No. 3033, Seq. ID No. 3035, Seq. ID No. 3039, Seq. ID No. 3043, Seq. ID No. 3045, Seq. ID No. 3049, Seq. ID No. 3055, Seq. ID No. 3059, Seq. ID No. 3061, Seq. ID No. 3067, Seq. ID No. 3069, Seq. ID No. 3081, Seq. ID No. 3089, Seq. ID No. 3091, Seq. ID No. 3093, Seq. ID No. 3097, Seq. ID No. 3103, Seq. ID No. 3107, Seq. ID No. 3111, Seq. ID No. 3117, Seq. ID No. 3125, Seq. ID No. 3133, Seq. ID No. 3135, Seq. ID No. 3137, Seq. ID No. 3141, Seq. ID No. 3143, Seq. ID No. 3149, Seq. ID No. 3155, Seq. ID No. 3157, Seq. ID No. 3159, Seq. ID No. 3161, Seq. ID No. 3165, Seq. ID No. 3171, Seq. ID No. 3177, Seq. ID No. 3179, Seq. ID No. 3183, Seq. ID No. 3185, Seq. ID No. 3189, Seq. ID No. 3191, Seq. ID No. 3197, Seq. ID No. 3203, Seq. ID No. 3205, Seq. ID No. 3211, Seq. ID No. 3217; Seq. ID No. 3221, Seq. ID No. 3227, Seq. ID No. 3229, Seq. ID No. 3233, Seq. ID No. 3235, Seq. ID No. 3239, Seq. ID No. 3249, Seq. ID No. 3251, Seq. ID No. 3253, Seq. ID No. 3257, Seq. ID No. 3259, Seq. ID No. 3263, Seq. ID No. 3265, Seq. ID No. 3271, Seq. ID No. 3273, Seq. ID No. 3277, Seq. ID No. 3283, Seq. ID No. 3285, Seq. ID No. 3287, Seq. ID No. 3289, Seq. ID No. 3293, Seq. ID No. 3295, Seq. ID No. 3299, Seq. ID No. 3303, Seq. ID No. 3307, Seq. ID No. 3313, Seq. ID No. 3315, Seq. ID No. 3319, Seq. ID No. 3323, Seq. ID No. 3329, Seq. ID No. 3335, Seq. ID No. 3337, Seq. ID No. 3347, Seq. ID No. 3355, Seq. ID No. 3359, Seq. ID No. 3363, Seq. ID No. 3367, Seq. ID No. 3377, Seq. ID No. 3379, Seq. ID No. 3383, Seq. ID No. 3387, Seq. ID No. 3399, Seq. ID No. 3401, Seq. ID No. 3403, Seq. ID No. 3409, Seq. ID No. 3413, Seq. ID No. 3415, Seq. ID No. 3417, Seq. ID No. 3425, Seq. ID No. 3427, Seq. ID No. 3431, Seq. ID No. 3435, Seq. ID No. 3437, Seq. ID No. 3439, Seq. ID No. 3447, Seq. ID No. 3459, Seq. ID No. 3461, Seq. ID No. 3467, Seq. ID No. 3469, Seq. ID No. 3471, Seq. ID No. 3473, Seq. ID No. 3475, Seq. ID No. 3479, Seq. ID No. 3483, Seq. ID No. 3485, Seq. ID No. 3487, Seq. ID No. 3495, Seq. ID No. 3501, Seq. ID No. 3505, Seq. ID No. 3507, Seq. ID No. 3509, Seq. ID No. 3511, Seq. ID No. 3519, Seq. ID No. 3521, Seq. ID No. 3525, Seq. ID No. 3529, Seq. ID No. 3533, Seq. ID No. 3537, Seq. ID No. 3543, Seq. ID No. 3549, Seq. ID No. 3553, Seq. ID No. 3561, Seq. ID No. 3565, Seq. ID No. 3569, Seq. ID No. 3575, Seq. ID No. 3579, Seq. ID No. 3583, Seq. ID No. 3585, Seq. ID No. 3589, Seq. ID No. 3599, Seq. ID No. 3605, Seq. ID No. 3607, Seq. ID No. 3609, Seq. ID No. 3611, Seq. ID No. 3615, Seq. ID No. 3619, Seq. ID No. 3629, Seq. ID No. 3635, Seq. ID No. 3639, Seq. ID No. 3641, Seq. ID No. 3643, Seq. ID No. 3645, Seq. ID No. 3651, Seq. ID No. 3653, Seq. ID No. 3659, Seq. ID No. 3663, Seq. ID No. 3665, Seq. ID No. 3667, Seq. ID No. 3669, Seq. ID No. 3675, Seq. ID No. 3681, Seq. ID No. 3689, Seq. ID No. 3695, Seq. ID No. 3699, Seq. ID No. 3709, Seq. ID No. 3715, Seq. ID No. 3721, Seq. ID No. 3727, Seq. ID No. 3729, Seq. ID No. 3733, Seq. ID No. 3735, Seq. ID No. 3739, Seq. ID No. 3741, Seq. ID No. 3747, Seq. ID No. 3751, Seq. ID No. 3759, Seq. ID No. 3771, Seq. ID No. 3775, Seq. ID No. 3779, Seq. ID No. 3783, Seq. ID No. 3791, Seq. ID No. 3797, Seq. ID No. 3803, Seq. ID No. 3805, Seq. ID No. 3811, Seq. ID No. 3813, Seq. ID No. 3819, Seq. ID No. 3823, Seq. ID No. 3825, Seq. ID No. 3833, Seq. ID No. 3835, Seq. ID No. 3843, Seq. ID No. 3847, Seq. ID No. 3855, Seq. ID No. 3857, Seq. ID No. 3863, Seq. ID No. 3867, Seq. ID No. 3873, Seq. ID No. 3877, Seq. ID No. 3881, Seq. ID No. 3883, Seq. ID No. 3885, Seq. ID No. 3893, Seq. ID No. 3897, Seq. ID No. 3901, Seq. ID No. 3907, Seq. ID No. 3913, Seq. ID No. 3915, Seq. ID No. 3917, Seq. ID No. 3919, Seq. ID No. 3925, Seq. ID No. 3929, Seq. ID No. 3933, Seq. ID No. 3935, Seq. ID No. 3937, Seq. ID No. 3941, Seq. ID No. 3943, Seq. ID No. 3945, Seq. ID No. 3949, Seq. ID No. 3951, Seq. ID No. 3955, Seq. ID No. 3957, Seq. ID No. 3971, Seq. ID No. 3975, Seq. ID No. 3983, Seq. ID No. 3985, Seq. ID No. 3987, Seq. ID No. 3991, Seq. ID No. 4003, Seq. ID No. 4009, Seq. ID No. 4013, Seq. ID No. 4015, Seq. ID No. 4017, Seq. ID No. 4021, Seq. ID No. 4023, Seq. ID No. 4029, Seq. ID No. 4031, Seq. ID No. 4035, Seq. ID No. 4037, Seq. ID No. 4039, Seq. ID No. 4049, Seq. ID No. 4055, Seq. ID No. 4057, Seq. ID No. 4061, Seq. ID No. 4063, Seq. ID No. 4067, Seq. ID No. 4069, Seq. ID No. 4075, Seq. ID No. 4077, Seq. ID No. 4079, Seq. ID No. 4087, Seq. ID No. 4089, Seq. ID No. 4095, Seq. ID No. 4097, Seq. ID No. 4099, Seq. ID No. 4105, Seq. ID No. 4111, Seq. ID No. 4117, Seq. ID No. 4121, Seq. ID No. 4123, Seq. ID No. 4127, Seq. ID No. 4129, Seq. ID No. 4133, Seq. ID No. 4137, Seq. ID No. 4145, Seq. ID No. 4149, Seq. ID No. 4157, Seq. ID No. 4161, Seq. ID No. 4163, Seq. ID No. 4167, Seq. ID No. 4173, Seq. ID No. 4179, Seq. ID No. 4185, Seq. ID No. 4191, Seq. ID No. 4193, Seq. ID No. 4195, Seq. ID No. 4197, Seq. ID No. 4199, Seq. ID No. 4201, Seq. ID No. 4203, Seq. ID No. 4205, Seq. ID No. 4211, Seq. ID No. 4215, Seq. ID No. 4217, Seq. ID No. 4219, Seq. ID No. 4235, Seq. ID No. 4237, Seq. ID No. 4239, Seq. ID No. 4243, Seq. ID No. 4251, Seq. ID No. 4255, Seq. ID No. 4263, Seq. ID No. 4267, Seq. ID No. 4271, Seq. ID No. 4273, Seq. ID No. 4279, Seq. ID No. 4281, Seq. ID No. 4283, Seq. ID No. 4291, Seq. ID No. 4295, Seq. ID No. 4299, Seq. ID No. 4301, Seq. ID No. 4303, Seq. ID No. 4307, Seq. ID No. 4309, Seq. ID No. 4313, Seq. ID No. 4317, Seq. ID No. 4323, Seq. ID No. 4325, Seq. ID No. 4329, Seq. ID No. 4331, Seq. ID No. 4333, Seq. ID No. 4339, Seq. ID No. 4343, Seq. ID No. 4347, Seq. ID No. 4353, Seq. ID No. 4355, Seq. ID No. 4357, Seq. ID No. 4365, Seq. ID No. 4369, Seq. ID No. 4373, Seq. ID No. 4375, Seq. ID No. 4377, Seq. ID No. 4379, Seq. ID No. 4381, Seq. ID No. 4383, Seq. ID No. 4391, Seq. ID No. 4393, Seq. ID No. 4397, Seq. ID No. 4401, Seq. ID No. 4411, Seq. ID No. 4417, Seq. ID No. 4423, Seq. ID No. 4431, Seq. ID No. 4433, Seq. ID No. 4435, Seq. ID No. 4443, Seq. ID No. 4447, Seq. ID No. 4451, Seq. ID No. 4459, Seq. ID No. 4461, Seq. ID No. 4467, Seq. ID No. 4471, Seq. ID No. 4475, Seq. ID No. 4479, Seq. ID No. 4481, Seq. ID No. 4487, Seq. ID No. 4491, Seq. ID No. 4501, Seq. ID No. 4505, Seq. ID No. 4511, Seq. ID No. 4523, Seq. ID No. 4531, Seq. ID No. 4533, Seq. ID No. 4537, Seq. ID No. 4539, Seq. ID No. 4541, Seq. ID No. 4543, Seq. ID No. 4547, Seq. ID No. 4549, Seq. ID No. 4559, Seq. ID No. 4565, Seq. ID No. 4567, Seq. ID No. 4571, Seq. ID No. 4575, Seq. ID No. 4577, Seq. ID No. 4581, Seq. ID No. 4585, Seq. ID No. 4591, Seq. ID No. 4595, Seq. ID No. 4597, Seq. ID No. 4603, Seq. ID No. 4607, Seq. ID No. 4609, Seq. ID No. 4611, Seq. ID No. 4615, Seq. ID No. 4623, Seq. ID No. 4627, Seq. ID No. 4631, Seq. ID No. 4635, Seq. ID No. 4637, Seq. ID No. 4643, Seq. ID No. 4649, Seq. ID No. 4651, Seq. ID No. 4653, Seq. ID No. 4657, Seq. ID No. 4661, Seq. ID No. 4663, Seq. ID No. 4669, Seq. ID No. 4671, Seq. ID No. 4673, Seq. ID No. 4679, Seq. ID No. 4685, Seq. ID No. 4693, Seq. ID No. 4697, Seq. ID No. 4703, Seq. ID No. 4705, Seq. ID No. 4713, Seq. ID No. 4717, Seq. ID No. 4719, Seq. ID No. 4725, Seq. ID No. 4729, Seq. ID No. 4731, Seq. ID No. 4733, Seq. ID No. 4739, Seq. ID No. 4743, Seq. ID No. 4745, Seq. ID No. 4747, Seq. ID No. 4749, Seq. ID No. 4751, Seq. ID No. 4757, Seq. ID No. 4765, Seq. ID No. 4769, Seq. ID No. 4777, Seq. ID No. 4779, Seq. ID No. 4781, Seq. ID No. 4787, Seq. ID No. 4789, Seq. ID No. 4791, Seq. ID No. 4797, Seq. ID No. 4803, Seq. ID No. 4807, Seq. ID No. 4809, Seq. ID No. 4811, Seq. ID No. 4813, Seq. ID No. 4815, Seq. ID No. 4821, Seq. ID No. 4823, Seq. ID No. 4825, Seq. ID No. 4827, Seq. ID No. 4833, Seq. ID No. 4835, Seq. ID No. 4837, Seq. ID No. 4843, Seq. ID No. 4845, Seq. ID No. 4847, Seq. ID No. 4849, Seq. ID No. 4859, Seq. ID No. 4861, Seq. ID No. 4865, Seq. ID No. 4867, Seq. ID No. 4875, Seq. ID No. 4877, Seq. ID No. 4879, Seq. ID No. 4881, Seq. ID No. 4883, Seq. ID No. 4885, Seq. ID No. 4887, Seq. ID No. 4893, Seq. ID No. 4899, Seq. ID No. 4901, Seq. ID No. 4903, Seq. ID No. 4905, Seq. ID No. 4907, Seq. ID No. 4911, Seq. ID No. 4915, Seq. ID No. 4917, Seq. ID No. 4919, Seq. ID No. 4921, Seq. ID No. 4927, Seq. ID No. 4931, Seq. ID No. 4935, Seq. ID No. 4939, Seq. ID No. 4941, Seq. ID No. 4943, Seq. ID No. 4945, Seq. ID No. 4947, Seq. ID No. 4953, Seq. ID No. 4957, Seq. ID No. 4959, Seq. ID No. 4963, Seq. ID No. 4965, Seq. ID No. 4969, Seq. ID No. 4971, Seq. ID No. 4973, Seq. ID No. 4979, Seq. ID No. 4985, Seq. ID No. 4989, Seq. ID No. 4991, Seq. ID No. 4995, Seq. ID No. 4997, Seq. ID No. 5001, Seq. ID No. 5007, Seq. ID No. 5009, Seq. ID No. 5017, Seq. ID No. 5021, Seq. ID No. 5027, Seq. ID No. 5029, Seq. ID No. 5039, Seq. ID No. 5047, Seq. ID No. 5051, Seq. ID No. 5053, Seq. ID No. 5055, Seq. ID No. 5059, Seq. ID No. 5061, Seq. ID No. 5069, Seq. ID No. 5077, Seq. ID No. 5079, Seq. ID No. 5081, Seq. ID No. 5083, Seq. ID No. 5087, Seq. ID No. 5091, Seq. ID No. 5093, Seq. ID No. 5097, Seq. ID No. 5103, Seq. ID No. 5105, Seq. ID No. 5109, Seq. ID No. 5111, Seq. ID No. 5113, Seq. ID No. 5115, Seq. ID No. 5117, Seq. ID No. 5127, Seq. ID No. 5141, Seq. ID No. 5145, Seq. ID No. 5149, Seq. ID No. 5153, Seq. ID No. 5157, Seq. ID No. 5165, Seq. ID No. 5169, Seq. ID No. 5171, Seq. ID No. 5177, Seq. ID No. 5183, Seq. ID No. 5185, Seq. ID No. 5187, Seq. ID No. 5193, Seq. ID No. 5195, Seq. ID No. 5201, Seq. ID No. 5203, Seq. ID No. 5205, Seq. ID No. 5209, Seq. ID No. 5211, Seq. ID No. 5215, Seq. ID No. 5219, Seq. ID No. 5227, Seq. ID No. 5231, Seq. ID No. 5235, Seq. ID No. 5237, Seq. ID No. 5239, Seq. ID No. 5243, Seq. ID No. 5245, Seq. ID No. 5247, Seq. ID No. 5253, Seq. ID No. 5255, Seq. ID No. 5257, Seq. ID No. 5261, Seq. ID No. 5263, Seq. ID No. 5271, Seq. ID No. 5275, Seq. ID No. 5283, Seq. ID No. 5291, Seq. ID No. 5299, Seq. ID No. 5305, Seq. ID No. 5309, Seq. ID No. 5311, Seq. ID No. 5313, Seq. ID No. 5319, Seq. ID No. 5323, Seq. ID No. 5325, Seq. ID No. 5335, Seq. ID No. 5337, Seq. ID No. 5341, Seq. ID No. 5345, Seq. ID No. 5351, Seq. ID No. 5355, Seq. ID No. 5363, Seq. ID No. 5365, Seq. ID No. 5367, Seq. ID No. 5371, Seq. ID No. 5373, Seq. ID No. 5381, Seq. ID No. 5383, Seq. ID No. 5387, Seq. ID No. 5389, Seq. ID No. 5391, Seq. ID No. 5393, Seq. ID No. 5395, Seq. ID No. 5397, Seq. ID No. 5399, Seq. ID No. 5401, Seq. ID No. 5403, Seq. ID No. 5409, Seq. ID No. 5411, Seq. ID No. 5415, Seq. ID No. 5417, Seq. ID No. 5419, Seq. ID No. 5421, Seq. ID No. 5423, Seq. ID No. 5427, Seq. ID No. 5431, Seq. ID No. 5433, Seq. ID No. 5439, Seq. ID No. 5441, Seq. ID No. 5443, Seq. ID No. 5447, Seq. ID No. 5449, Seq. ID No. 5451, Seq. ID No. 5453, Seq. ID No. 5455, Seq. ID No. 5457, Seq. ID No. 5473, Seq. ID No. 5477, Seq. ID No. 5483, Seq. ID No. 5487, Seq. ID No. 5491, Seq. ID No. 5495, Seq. ID No. 5499, Seq. ID No. 5503, Seq. ID No. 5507, Seq. ID No. 5509, Seq. ID No. 5513, Seq. ID No. 5527, Seq. ID No. 5531, Seq. ID No. 5537, Seq. ID No. 5539, Seq. ID No. 5541, Seq. ID No. 5547, Seq. ID No. 5553, Seq. ID No. 5557, Seq. ID No. 5559, Seq. ID No. 5563, Seq. ID No. 5567, Seq. ID No. 5571, Seq. ID No. 5575, Seq. ID No. 5581, Seq. ID No. 5585, Seq. ID No. 5591, Seq. ID No. 5599, Seq. ID No. 5601, Seq. ID No. 5605, Seq. ID No. 5615, Seq. ID No. 5621, Seq. ID No. 5629, Seq. ID No. 5631, Seq. ID No. 5637, Seq. ID No. 5647, Seq. ID No. 5651, Seq. ID No. 5655, Seq. ID No. 5657, Seq. ID No. 5661, Seq. ID No. 5665, Seq. ID No. 5669, Seq. ID No. 5671, Seq. ID No. 5673, Seq. ID No. 5679, Seq. ID No. 5685, Seq. ID No. 5693, Seq. ID No. 5697, Seq. ID No. 5699, Seq. ID No. 5701, Seq. ID No. 5707, Seq. ID No. 5715, Seq. ID No. 5717, Seq. ID No. 5723, Seq. ID No. 5727, Seq. ID No. 5735, Seq. ID No. 5739, Seq. ID No. 5749, Seq. ID No. 5751, Seq. ID No. 5755, Seq. ID No. 5761, Seq. ID No. 5771, Seq. ID No. 5775, Seq. ID No. 5777, Seq. ID No. 5779, Seq. ID No. 5783, Seq. ID No. 5789, Seq. ID No. 5795, Seq. ID No. 5801, Seq. ID No. 5803, Seq. ID No. 5809, Seq. ID No. 5815, Seq. ID No. 5819, Seq. ID No. 5825, Seq. ID No. 5833, Seq. ID No. 5835, Seq. ID No. 5841, Seq. ID No. 5845, Seq. ID No. 5847, Seq. ID No. 5849, Seq. ID No. 5851; Seq. ID No. 5853, Seq. ID No. 5855, Seq. ID No. 5859, Seq. ID No. 5865, Seq. ID No. 5871, Seq. ID No. 5875, Seq. ID No. 5877, Seq. ID No. 5881, Seq. ID No. 5887, Seq. ID No. 5891, Seq. ID No. 5895, Seq. ID No. 5897, Seq. ID No. 5901, Seq. ID No. 5903, Seq. ID No. 5911, Seq. ID No. 5913, Seq. ID No. 5915, Seq. ID No. 5917, Seq. ID No. 5919, Seq. ID No. 5929, Seq. ID No. 5931, Seq. ID No. 5933, Seq. ID No. 5937, Seq. ID No. 5941, Seq. ID No. 5943, Seq. ID No. 5947, Seq. ID No. 5951, Seq. ID No. 5953, Seq. ID No. 5955, Seq. ID No. 5957, Seq. ID No. 5961, Seq. ID No. 5969, Seq. ID No. 5973, Seq. ID No. 5979, Seq. ID No. 5981, Seq. ID No. 5985, Seq. ID No. 5989, Seq. ID No. 5993, Seq. ID No. 6001, Seq. ID No. 6003, Seq. ID No. 6011, Seq. ID No. 6015, Seq. ID No. 6017, Seq. ID No. 6021, Seq. ID No. 6027, Seq. ID No. 6029, Seq. ID No. 6033, Seq. ID No. 6035, Seq. ID No. 6041, Seq. ID No. 6043, Seq. ID No. 6053, Seq. ID No. 6057, Seq. ID No. 6065, Seq. ID No. 6071, Seq. ID No. 6079, Seq. ID No. 6085, Seq. ID No. 6089, Seq. ID No. 6095, Seq. ID No. 6097, Seq. ID No. 6101, Seq. ID No. 6103, Seq. ID No. 6111, Seq. ID No. 6113, Seq. ID No. 6117, Seq. ID No. 6123, Seq. ID No. 6125, Seq. ID No. 6129, Seq. ID No. 6131, Seq. ID No. 6133, Seq. ID No. 6141, Seq. ID No. 6145, Seq. ID No. 6149, Seq. ID No. 6157, Seq. ID No. 6165, Seq. ID No. 6169, Seq. ID No. 6171, Seq. ID No. 6175, Seq. ID No. 6177, Seq. ID No. 6181, Seq. ID No. 6187, Seq. ID No. 6195, Seq. ID No. 6201, Seq. ID No. 6209, Seq. ID No. 6213, Seq. ID No. 6215, Seq. ID No. 6219, Seq. ID No. 6233, Seq. ID No. 6235, Seq. ID No. 6243, Seq. ID No. 6249, Seq. ID No. 6251, Seq. ID No. 6257, Seq. ID No. 6261, Seq. ID No. 6263, Seq. ID No. 6271, Seq. ID No. 6275, Seq. ID No. 6277, Seq. ID No. 6281, Seq. ID No. 6287, Seq. ID No. 6297, Seq. ID No. 6299, Seq. ID No. 6305, Seq. ID No. 6311, Seq. ID No. 6315, Seq. ID No. 6321, Seq. ID No. 6323, Seq. ID No. 6327, Seq. ID No. 6331, Seq. ID No. 6333, Seq. ID No. 6337, Seq. ID No. 6339, Seq. ID No. 6341, Seq. ID No. 6343, Seq. ID No. 6345, Seq. ID No. 6353, Seq. ID No. 6357, Seq. ID No. 6359, Seq. ID No. 6361, Seq. ID No. 6367, Seq. ID No. 6369, Seq. ID No. 6373, Seq. ID No. 6375, Seq. ID No. 6377, Seq. ID No. 6379, Seq. ID No. 6389, Seq. ID No. 6395, Seq. ID No. 6399, Seq. ID No. 6403, Seq. ID No. 6407, Seq. ID No. 6411, Seq. ID No. 6413, Seq. ID No. 6417, Seq. ID No. 6423, Seq. ID No. 6433, Seq. ID No. 6437, Seq. ID No. 6439, Seq. ID No. 6445, Seq. ID No. 6449, Seq. ID No. 6451, Seq. ID No. 6457, Seq. ID No. 6459, Seq. ID No. 6461, Seq. ID No. 6463, Seq. ID No. 6477, Seq. ID No. 6481, Seq. ID No. 6483, Seq. ID No. 6487, Seq. ID No. 6489, Seq. ID No. 6491, Seq. ID No. 6493, Seq. ID No. 6495, Seq. ID No. 6503, Seq. ID No. 6505, Seq. ID No. 6511, Seq. ID No. 6515, Seq. ID No. 6519, Seq. ID No. 6523, Seq. ID No. 6525, Seq. ID No. 6529, Seq. ID No. 6531, Seq. ID No. 6533, Seq. ID No. 6537, Seq. ID No. 6545, Seq. ID No. 6551, Seq. ID No. 6553, Seq. ID No. 6559, Seq. ID No. 6563, Seq. ID No. 6567, Seq. ID No. 6577, Seq. ID No. 6579, Seq. ID No. 6583, Seq. ID No. 6585, Seq. ID No. 6587, Seq. ID No. 6589, Seq. ID No. 6603, Seq. ID No. 6605, Seq. ID No. 6609, Seq. ID No. 6613, Seq. ID No. 6615, Seq. ID No. 6617, Seq. ID No. 6621, Seq. ID No. 6623, Seq. ID No. 6627, Seq. ID No. 6629, Seq. ID No. 6633, and Seq. ID No. 6639.

28. The polynucleotide of claim 7, wherein the polynucleotide encoded by the polynucleotide is identified by GeneMark™ ORF finder program, and the polynucleotide is selected from one of Seq. ID No. 1, Seq. ID No. 3, Seq. ID No. 11, Seq. ID No. 13, Seq. ID No. 15, Seq. ID No. 17, Seq. ID No. 25, Seq. ID No. 27, Seq. ID No. 29, Seq. ID No. 35, Seq. ID No. 37, Seq. ID No. 39, Seq. ID No. 41, Seq. ID No. 43, Seq. ID No. 45, Seq. ID No. 49, Seq. ID No. 53, Seq. ID No. 57, Seq. ID No. 61, Seq. ID No. 69, Seq. ID No. 71, Seq. ID No. 75, Seq. ID No. 81, Seq. ID No. 83, Seq. ID No. 89, Seq. ID No. 95, Seq. ID No. 101, Seq. ID No. 111, Seq. ID No. 119, Seq. ID No. 125, Seq. ID No. 129, Seq. ID No. 135, Seq. ID No. 137, Seq. ID No. 141, Seq. ID No. 147, Seq. ID No. 151, Seq. ID No. 155, Seq. ID No. 167, Seq. ID No. 171, Seq. ID No. 181, Seq. ID No. 185, Seq. ID No. 187, Seq. ID No. 189, Seq. ID No. 191, Seq. ID No. 195, Seq. ID No. 199, Seq. ID No. 207, Seq. ID No. 213, Seq. ID No. 219, Seq. ID No. 221, Seq. ID No. 225, Seq. ID No. 227, Seq. ID No. 229, Seq. ID No. 233, Seq. ID No. 239, Seq. ID No. 241, Seq. ID No. 243, Seq. ID No. 253, Seq. ID No. 261, Seq. ID No. 263, Seq. ID No. 267, Seq. ID No. 273, Seq. ID No. 275, Seq. ID No. 277, Seq. ID No. 279, Seq. ID No. 291, Seq. ID No. 293, Seq. ID No. 295, Seq. ID No. 299, Seq. ID No. 303, Seq. ID No. 309, Seq. ID No. 311, Seq. ID No. 315, Seq. ID No. 319, Seq. ID No. 323, Seq. ID No. 331, Seq. ID No. 341, Seq. ID No. 345, Seq. ID No. 351, Seq. ID No. 355, Seq. ID No. 361, Seq. ID No. 363, Seq. ID No. 365, Seq. ID No. 375, Seq. ID No. 379, Seq. ID No. 381, Seq. ID No. 383, Seq. ID No. 389, Seq. ID No. 391, Seq. ID No. 395, Seq. ID No. 399, Seq. ID No. 405, Seq. ID No. 409, Seq. ID No. 413, Seq. ID No. 417, Seq. ID No. 421, Seq. ID No. 423, Seq. ID No. 425, Seq. ID No. 427, Seq. ID No. 429, Seq. ID No. 435, Seq. ID No. 437, Seq. ID No. 439, Seq. ID No. 441, Seq. ID No. 443, Seq. ID No. 445, Seq. ID No. 447, Seq. ID No. 449, Seq. ID No. 459, Seq. ID No. 465, Seq. ID No. 485, Seq. ID No. 501, Seq. ID No. 505, Seq. ID No. 511, Seq. ID No. 513, Seq. ID No. 517, Seq. ID No. 519, Seq. ID No. 523, Seq. ID No. 529, Seq. ID No. 533, Seq. ID No. 535, Seq. ID No. 541, Seq. ID No. 543, Seq. ID No. 551, Seq. ID No. 553, Seq. ID No. 559, Seq. ID No. 563, Seq. ID No. 569, Seq. ID No. 575, Seq. ID No. 579, Seq. ID No. 583, Seq. ID No. 591, Seq. ID No. 595, Seq. ID No. 601, Seq. ID No. 605, Seq. ID No. 607, Seq. ID No. 611, Seq. ID No. 613, Seq. ID No. 615, Seq. ID No. 621, Seq. ID No. 627, Seq. ID No. 629, Seq. ID No. 633, Seq. ID No. 635, Seq. ID No. 637, Seq. ID No. 643, Seq. ID No. 649, Seq. ID No. 651, Seq. ID No. 655, Seq. ID No. 657, Seq. ID No. 669, Seq. ID No. 671, Seq. ID No. 675, Seq. ID No. 681, Seq. ID No. 683, Seq. ID No. 685, Seq. ID No. 693, Seq. ID No. 703, Seq. ID No. 705, Seq. ID No. 711, Seq. ID No. 725, Seq. ID No. 731, Seq. ID No. 735, Seq. ID No. 737, Seq. ID No. 741, Seq. ID No. 743, Seq. ID No. 749, Seq. ID No. 753, Seq. ID No. 759, Seq. ID No. 773, Seq. ID No. 781, Seq. ID No. 783, Seq. ID No. 785, Seq. ID No. 789, Seq. ID No. 793, Seq. ID No. 797, Seq. ID No. 803, Seq. ID No. 815, Seq. ID No. 819, Seq. ID No. 821, Seq. ID No. 827, Seq. ID No. 831, Seq. ID No. 833, Seq. ID No. 835, Seq. ID No. 837, Seq. ID No. 841, Seq. ID No. 843, Seq. ID No. 849, Seq. ID No. 851, Seq. ID No. 853, Seq. ID No. 857, Seq. ID No. 865, Seq. ID No. 869, Seq. ID No. 873, Seq. ID No. 877, Seq. ID No. 883, Seq. ID No. 887, Seq. ID No. 891, Seq. ID No. 895, Seq. ID No. 901, Seq. ID No. 907, Seq. ID No. 911, Seq. ID No. 917, Seq. ID No. 921, Seq. ID No. 927, Seq. ID No. 935, Seq. ID No. 939, Seq. ID No. 945, Seq. ID No. 951, Seq. ID No. 953, Seq. ID No. 959, Seq. ID No. 963, Seq. ID No. 967, Seq. ID No. 969, Seq. ID No. 977, Seq. ID No. 989, Seq. ID No. 995, Seq. ID No. 999, Seq. ID No. 1005, Seq. ID No. 1007, Seq. ID No. 1015, Seq. ID No. 1021, Seq. ID No. 1035, Seq. ID No. 1041, Seq. ID No. 1043, Seq. ID No. 1049, Seq. ID No. 1053, Seq. ID No. 1057, Seq. ID No. 1059, Seq. ID No. 1063, Seq. ID No. 1067, Seq. ID No. 1069, Seq. ID No. 1071, Seq. ID No. 1075, Seq. ID No. 1083, Seq. ID No. 1085, Seq. ID No. 1089, Seq. ID No. 1093, Seq. ID No. 1097, Seq. ID No. 1099, Seq. ID No. 1101, Seq. ID No. 1109, Seq. ID No. 1113, Seq. ID No. 1117, Seq. ID No. 1121, Seq. ID No. 1129, Seq. ID No. 1133, Seq. ID No. 1137, Seq. ID No. 1141, Seq. ID No. 1145, Seq. ID No. 1149, Seq. ID No. 1155, Seq. ID No. 1157, Seq. ID No. 1159, Seq. ID No. 1163, Seq. ID No. 1171, Seq. ID No. 1173, Seq. ID No. 1175, Seq. ID No. 1181, Seq. ID No. 1185, Seq. ID No. 1189, Seq. ID No. 1199, Seq. ID No. 1205, Seq. ID No. 1209, Seq. ID No. 1215, Seq. ID No. 1219, Seq. ID No. 1223, Seq. ID No. 1225, Seq. ID No. 1233, Seq. ID No. 1235, Seq. ID No. 1241, Seq. ID No. 1251, Seq. ID No. 1255, Seq. ID No. 1261, Seq. ID No. 1271, Seq. ID No. 1281, Seq. ID No. 1315, Seq. ID No. 1323, Seq. ID No. 1331, Seq. ID No. 1333, Seq. ID No. 1339, Seq. ID No. 1345, Seq. ID No. 1347, Seq. ID No. 1355, Seq. ID No. 1357, Seq. ID No. 1369, Seq. ID No. 1373, Seq. ID No. 1387, Seq. ID No. 1391, Seq. ID No. 1395, Seq. ID No. 1397, Seq. ID No. 1403, Seq. ID No. 1405, Seq. ID No. 1407, Seq. ID No. 1413, Seq. ID No. 1415, Seq. ID No. 1417, Seq. ID No. 1425, Seq. ID No. 1427, Seq. ID No. 1429, Seq. ID No. 1431, Seq. ID No. 1433, Seq. ID No. 1435, Seq. ID No. 1439, Seq. ID No. 1441, Seq. ID No. 1451, Seq. ID No. 1453, Seq. ID No. 1459, Seq. ID No. 1461, Seq. ID No. 1469, Seq. ID No. 1471, Seq. ID No. 1473, Seq. ID No. 1475, Seq. ID No. 1477, Seq. ID No. 1483, Seq. ID No. 1487, Seq. ID No. 1489, Seq. ID No. 1493, Seq. ID No. 1495, Seq. ID No. 1497, Seq. ID No. 1501, Seq. ID No. 1503, Seq. ID No. 1507, Seq. ID No. 1509, Seq. ID No. 1517, Seq. ID No. 1521, Seq. ID No. 1527, Seq. ID No. 1531, Seq. ID No. 1537, Seq. ID No. 1541, Seq. ID No. 1543, Seq. ID No. 1549, Seq. ID No. 1561, Seq. ID No. 1563, Seq. ID No. 1565, Seq. ID No. 1569, Seq. ID No. 1573, Seq. ID No. 1575, Seq. ID No. 1581, Seq. ID No. 1587, Seq. ID No. 1591, Seq. ID No. 1595, Seq. ID No. 1597, Seq. ID No. 1605, Seq. ID No. 1609, Seq. ID No. 1613, Seq. ID No. 1619, Seq. ID No. 1623, Seq. ID No. 1627, Seq. ID No. 1629, Seq. ID No. 1635, Seq. ID No. 1641, Seq. ID No. 1647, Seq. ID No. 1651, Seq. ID No. 1657, Seq. ID No. 1659, Seq. ID No. 1667, Seq. ID No. 1669, Seq. ID No. 1679, Seq. ID No. 1683, Seq. ID No. 1687, Seq. ID No. 1691, Seq. ID No. 1697, Seq. ID No. 1699, Seq. ID No. 1701, Seq. ID No. 1707, Seq. ID No. 1709, Seq. ID No. 1713, Seq. ID No. 1717, Seq. ID No. 1721, Seq. ID No. 1725, Seq. ID No. 1735, Seq. ID No. 1737, Seq. ID No. 1739, Seq. ID No. 1743, Seq. ID No. 1745, Seq. ID No. 1749, Seq. ID No. 1755, Seq. ID No. 1769, Seq. ID No. 1773, Seq. ID No. 1777, Seq. ID No. 1785, Seq. ID No. 1789, Seq. ID No. 1791, Seq. ID No. 1797, Seq. ID No. 1799, Seq. ID No. 1803, Seq. ID No. 1805, Seq. ID No. 1807, Seq. ID No. 1817, Seq. ID No. 1819, Seq. ID No. 1821, Seq. ID No. 1825, Seq. ID No. 1827, Seq. ID No. 1831, Seq. ID No. 1835, Seq. ID No. 1841, Seq. ID No. 1845, Seq. ID No. 1847, Seq. ID No. 1849, Seq. ID No. 1851, Seq. ID No. 1855, Seq. ID No. 1859, Seq. ID No. 1861, Seq. ID No. 1865, Seq. ID No. 1867, Seq. ID No. 1871, Seq. ID No. 1873, Seq. ID No. 1877, Seq. ID No. 1879, Seq. ID No. 1887, Seq. ID No. 1889, Seq. ID No. 1895, Seq. ID No. 1897, Seq. ID No. 1899, Seq. ID No. 1901, Seq. ID No. 1905, Seq. ID No. 1909, Seq. ID No. 1917, Seq. ID No. 1921, Seq. ID No. 1925, Seq. ID No. 1931, Seq. ID No. 1933, Seq. ID No. 1937, Seq. ID No. 1939, Seq. ID No. 1945, Seq. ID No. 1947, Seq. ID No. 1951, Seq. ID No. 1955, Seq. ID No. 1959, Seq. ID No. 1961, Seq. ID No. 1965, Seq. ID No. 1967, Seq. ID No. 1969, Seq. ID No. 1973, Seq. ID No. 1977, Seq. ID No. 1979, Seq. ID No. 1983, Seq. ID No. 1989, Seq. ID No. 1991, Seq. ID No. 1997, Seq. ID No. 2001, Seq. ID No. 2003, Seq. ID No. 2011, Seq. ID No. 2021, Seq. ID No. 2023, Seq. ID No. 2029, Seq. ID No. 2033, Seq. ID No. 2037, Seq. ID No. 2039, Seq. ID No. 2045, Seq. ID No. 2047, Seq. ID No. 2051, Seq. ID No. 2057, Seq. ID No. 2061, Seq. ID No. 2067, Seq. ID No. 2069, Seq. ID No. 2071, Seq. ID No. 2073, Seq. ID No. 2077, Seq. ID No. 2089, Seq. ID No. 2093, Seq. ID No. 2095, Seq. ID No. 2099, Seq. ID No. 2101, Seq. ID No. 2113, Seq. ID No. 2117, Seq. ID No. 2123, Seq. ID No. 2135, Seq. ID No. 2137, Seq. ID No. 2139, Seq. ID No. 2143, Seq. ID No. 2147, Seq. ID No. 2153, Seq. ID No. 2159, Seq. ID No. 2163, Seq. ID No. 2167, Seq. ID No. 2175, Seq. ID No. 2181, Seq. ID No. 2185, Seq. ID No. 2189, Seq. ID No. 2193, Seq. ID No. 2195, Seq. ID No. 2197, Seq. ID No. 2205, Seq. ID No. 2217, Seq. ID No. 2219, Seq. ID No. 2223, Seq. ID No. 2225, Seq. ID No. 2229, Seq. ID No. 2235, Seq. ID No. 2239, Seq. ID No. 2243, Seq. ID No. 2245, Seq. ID No. 2247, Seq. ID No. 2253, Seq. ID No. 2255, Seq. ID No. 2257, Seq. ID No. 2259, Seq. ID No. 2261, Seq. ID No. 2265, Seq. ID No. 2269, Seq. ID No. 2273, Seq. ID No. 2285, Seq. ID No. 2297, Seq. ID No. 2299, Seq. ID No. 2301, Seq. ID No. 2313, Seq. ID No. 2327, Seq. ID No. 2331, Seq. ID No. 2335, Seq. ID No. 2337, Seq. ID No. 2341, Seq. ID No. 2343, Seq. ID No. 2345, Seq. ID No. 2349, Seq. ID No. 2351, Seq. ID No. 2357, Seq. ID No. 2359, Seq. ID No. 2361, Seq. ID No. 2365, Seq. ID No. 2369, Seq. ID No. 2373, Seq. ID No. 2377, Seq. ID No. 2383, Seq. ID No. 2397, Seq. ID No. 2401, Seq. ID No. 2403, Seq. ID No. 2409, Seq. ID No. 2411, Seq. ID No. 2417, Seq. ID No. 2421, Seq. ID No. 2423, Seq. ID No. 2425, Seq. ID No. 2429, Seq. ID No. 2435, Seq. ID No. 2437, Seq. ID No. 2439, Seq. ID No. 2441, Seq. ID No. 2445, Seq. ID No. 2449, Seq. ID No. 2451, Seq. ID No. 2453, Seq. ID No. 2461, Seq. ID No. 2465, Seq. ID No. 2467, Seq. ID No. 2471, Seq. ID No. 2473, Seq. ID No. 2477, Seq. ID No. 2479, Seq. ID No. 2481, Seq. ID No. 2485, Seq. ID No. 2487, Seq. ID No. 2495, Seq. ID No. 2505, Seq. ID No. 2507, Seq. ID No. 2509, Seq. ID. No. 2519, Seq. ID No. 2525, Seq. ID No. 2527, Seq. ID No. 2529, Seq. ID No. 2535, Seq. ID No. 2537, Seq. ID No. 2539, Seq. ID No. 2547, Seq. ID No. 2551, Seq. ID No. 2563, Seq. ID No. 2565, Seq. ID No. 2573, Seq. ID No. 2577, Seq. ID No. 2579, Seq. ID No. 2585, Seq. ID No. 2593, Seq. ID No. 2595, Seq. ID No. 2599, Seq. ID No. 2607, Seq. ID No. 2609, Seq. ID No. 2613, Seq. ID No. 2615, Seq. ID No. 2619, Seq. ID No. 2623, Seq. ID No. 2625, Seq. ID No. 2631, Seq. ID No. 2633, Seq. ID No. 2639, Seq. ID No. 2641, Seq. ID No. 2643, Seq. ID No. 2647, Seq. ID No. 2651, Seq. ID No. 2655, Seq. ID No. 2657, Seq. ID No. 2661, Seq. ID No. 2665, Seq. ID No. 2669, Seq. ID No. 2671, Seq. ID No. 2673, Seq. ID No. 2681, Seq. ID No. 2689, Seq. ID No. 2693, Seq. ID No. 2699, Seq. ID No. 2703, Seq. ID No. 2709, Seq. ID No. 2711, Seq. ID No. 2713, Seq. ID No. 2719, Seq. ID No. 2721, Seq. ID No. 2727, Seq. ID No. 2737, Seq. ID No. 2741, Seq. ID No. 2745, Seq. ID No. 2749, Seq. ID No. 2753, Seq. ID No. 2757, Seq. ID No. 2761, Seq. ID No. 2765, Seq. ID No. 2767, Seq. ID No. 2769, Seq. ID No. 2773, Seq. ID No. 2775, Seq. ID No. 2777, Seq. ID No. 2787, Seq. ID No. 2789, Seq. ID No. 2791, Seq. ID No. 2793, Seq. ID No. 2795, Seq. ID No. 2799, Seq. ID No. 2803, Seq. ID No. 2815, Seq. ID No. 2817, Seq. ID No. 2819, Seq. ID No. 2825, Seq. ID No. 2843, Seq. ID No. 2847, Seq. ID No. 2849, Seq. ID No. 2851, Seq. ID No. 2857, Seq. ID No. 2859, Seq. ID No. 2863, Seq. ID No. 2867, Seq. ID No. 2869, Seq. ID No. 2871, Seq. ID No. 2877, Seq. ID No. 2879, Seq. ID No. 2889, Seq. ID No. 2891, Seq. ID No. 2897, Seq. ID No. 2901, Seq. ID No. 2903, Seq. ID No. 2907, Seq. ID No. 2909, Seq. ID No. 2913, Seq. ID No. 2915, Seq. ID No. 2919, Seq. ID No. 2921, Seq. ID No. 2923, Seq. ID No. 2925, Seq. ID No. 2929, Seq. ID No. 2935, Seq. ID No. 2943, Seq. ID No. 2951, Seq. ID No. 2955, Seq. ID No. 2963, Seq. ID No. 2965, Seq. ID No. 2971, Seq. ID No. 2973, Seq. ID No. 2975, Seq. ID No. 2979, Seq. ID No. 2981, Seq. ID No. 2985, Seq. ID No. 2989, Seq. ID No. 2993, Seq. ID No. 2999, Seq. ID No. 3001, Seq. ID No. 3003, Seq. ID No. 3017, Seq. ID No. 3027, Seq. ID No. 3033, Seq. ID No. 3035, Seq. ID No. 3039, Seq. ID No. 3041, Seq. ID No. 3043, Seq. ID No. 3045, Seq. ID No. 3047, Seq. ID No. 3055, Seq. ID No. 3057, Seq. ID No. 3061, Seq. ID No. 3065, Seq. ID No. 3069, Seq. ID No. 3079, Seq. ID No. 3089, Seq. ID No. 3091, Seq. ID No. 3093, Seq. ID No. 3095, Seq. ID No. 3103, Seq. ID No. 3105, Seq. ID No. 3109, Seq. ID No. 3113, Seq. ID No. 3125, Seq. ID No. 3127, Seq. ID No. 3135, Seq. ID No. 3137, Seq. ID No. 3141, Seq. ID No. 3143, Seq. ID No. 3147, Seq. ID No. 3155, Seq. ID No. 3157, Seq. ID No. 3159, Seq. ID No. 3161, Seq. ID No. 3165, Seq. ID No. 3169, Seq. ID No. 3175, Seq. ID No. 3179, Seq. ID No. 3183, Seq. ID No. 3185, Seq. ID No. 3189, Seq. ID No. 3191, Seq. ID No. 3195, Seq. ID No. 3199, Seq. ID No. 3205, Seq. ID No. 3211, Seq. ID No. 3217, Seq. ID No. 3221, Seq. ID No. 3225, Seq. ID No. 3229, Seq. ID No. 3231, Seq. ID No. 3237, Seq. ID No. 3239, Seq. ID No. 3247, Seq. ID No. 3251, Seq. ID No. 3253, Seq. ID No. 3255, Seq. ID No. 3259, Seq. ID No. 3261, Seq. ID No. 3267, Seq. ID No. 3273, Seq. ID No. 3277, Seq. ID No. 3279, Seq. ID No. 3285, Seq. ID No. 3287, Seq. ID No. 3289, Seq. ID No. 3293, Seq. ID No. 3295, Seq. ID No. 3299, Seq. ID No. 3301, Seq. ID No. 3305, Seq. ID No. 3309, Seq. ID No. 3315, Seq. ID No. 3319, Seq. ID No. 3321, Seq. ID No. 3327, Seq. ID No. 3333, Seq. ID No. 3337, Seq. ID No. 3343, Seq. ID No. 3353, Seq. ID No. 3359, Seq. ID No. 3361, Seq. ID No. 3365, Seq. ID No. 3373, Seq. ID No. 3381, Seq. ID No. 3385, Seq. ID No. 3393, Seq. ID No. 3401, Seq. ID No. 3407, Seq. ID No. 3411, Seq. ID No. 3415, Seq. ID No. 3417, Seq. ID No. 3423, Seq. ID No. 3429, Seq. ID No. 3437, Seq. ID No. 3439, Seq. ID No. 3443, Seq. ID No. 3459, Seq. ID No. 3461, Seq. ID No. 3465, Seq. ID No. 3469, Seq. ID No. 3471, Seq. ID No. 3473, Seq. ID No. 3475, Seq. ID No. 3477, Seq. ID No. 3483, Seq. ID No. 3487, Seq. ID No. 3495, Seq. ID No. 3497, Seq. ID No. 3505, Seq. ID No. 3507, Seq. ID No. 3509, Seq. ID No. 3511, Seq. ID No. 3515, Seq. ID No. 3521, Seq. ID No. 3523, Seq. ID No. 3529, Seq. ID No. 3535, Seq. ID No. 3541, Seq. ID No. 3551, Seq. ID No. 3559, Seq. ID No. 3563, Seq. ID No. 3567, Seq. ID No. 3575, Seq. ID No. 3577, Seq. ID No. 3583, Seq. ID No. 3585, Seq. ID No. 3589, Seq. ID No. 3591, Seq. ID No. 3599, Seq. ID No. 3601, Seq. ID No. 3607, Seq. ID No. 3609, Seq. ID No. 3611, Seq. ID No. 3615, Seq. ID No. 3619, Seq. ID No. 3629, Seq. ID No. 3631, Seq. ID No. 3633, Seq. ID No. 3637, Seq. ID No. 3641, Seq. ID No. 3643, Seq. ID No. 3645, Seq. ID No. 3651, Seq. ID No. 3653, Seq. ID No. 3655, Seq. ID No. 3661, Seq. ID No. 3665, Seq. ID No. 3667, Seq. ID No. 3669, Seq. ID No. 3675, Seq. ID No. 3681, Seq. ID No. 3689, Seq. ID No. 3695, Seq. ID No. 3697, Seq. ID No. 3705, Seq. ID No. 3711, Seq. ID No. 3719, Seq. ID No. 3725, Seq. ID No. 3729, Seq. ID No. 3731, Seq. ID No. 3735, Seq. ID No. 3739, Seq. ID No. 3741, Seq. ID No. 3743, Seq. ID No. 3749, Seq. ID No. 3759, Seq. ID No. 3769, Seq. ID No. 3773, Seq. ID No. 3777, Seq. ID No. 3781, Seq. ID No. 3787, Seq. ID No. 3795, Seq. ID No. 3801, Seq. ID No. 3805, Seq. ID No. 3809, Seq. ID No. 3813, Seq. ID No. 3819, Seq. ID No. 3821, Seq. ID No. 3825, Seq. ID No. 3827, Seq. ID No. 3829, Seq. ID No. 3831, Seq. ID No. 3835, Seq. ID No. 3841, Seq. ID No. 3845, Seq. ID No. 3855, Seq. ID No. 3857, Seq. ID No. 3863, Seq. ID No. 3867, Seq. ID No. 3869, Seq. ID No. 3875, Seq. ID No. 3881, Seq. ID No. 3883, Seq. ID No. 3885, Seq. ID No. 3887, Seq. ID No. 3,897, Seq. ID No. 3901, Seq. ID No. 3905, Seq. ID No. 3909, Seq. ID No. 3913, Seq. ID No. 3915, Seq. ID No. 3917, Seq. ID No. 3919, Seq. ID No. 3921, Seq. ID No. 3929, Seq. ID No. 3931, Seq. ID No. 3935, Seq. ID No. 3941, Seq. ID No. 3943, Seq. ID No. 3945, Seq. ID No. 3947, Seq. ID No. 3951, Seq. ID No. 3953, Seq. ID No. 3957, Seq. ID No. 3971, Seq. ID No. 3977, Seq. ID No. 3981, Seq. ID No. 3985, Seq. ID No. 3987, Seq. ID No. 3989, Seq. ID No. 3993, Seq. ID No. 4001, Seq. ID No. 4005, Seq. ID No. 4011, Seq. ID No. 4015, Seq. ID No. 4017, Seq. ID No. 4019, Seq. ID No. 4023, Seq. ID No. 4029, Seq. ID No. 4031, Seq. ID No. 4033, Seq. ID No. 4037, Seq. ID No. 4039, Seq. ID No. 4049, Seq. ID No. 4051, Seq. ID No. 4057, Seq. ID No. 4059, Seq. ID No. 4065, Seq. ID No. 4069, Seq. ID No. 4075, Seq. ID No. 4079, Seq. ID No. 4085, Seq. ID No. 4089, Seq. ID No. 4095, Seq. ID No. 4097, Seq. ID No. 4099, Seq. ID No. 4105, Seq. ID No. 4111, Seq. ID No. 4115, Seq. ID No. 4121, Seq. ID No. 4123, Seq. ID No. 4127, Seq. ID No. 4129, Seq. ID No. 4131, Seq. ID No. 4137, Seq. ID No. 4141, Seq. ID No. 4147, Seq. ID No. 4157, Seq. ID No. 4159, Seq. ID No. 4163, Seq. ID No. 4165, Seq. ID No. 4169, Seq. ID No. 4179, Seq. ID No. 4183, Seq. ID No. 4187, Seq. ID No. 4193, Seq. ID No. 4195, Seq. ID No. 4197, Seq. ID No. 4199, Seq. ID No. 4201, Seq. ID No. 4205, Seq. ID No. 4207, Seq. ID No. 4213, Seq. ID No. 4219, Seq. ID No. 4235, Seq. ID No. 4237, Seq. ID No. 4239, Seq. ID No. 4243, Seq. ID No. 4245, Seq. ID No. 4255, Seq. ID No. 4259, Seq. ID No. 4267, Seq. ID No. 4271, Seq. ID No. 4277, Seq. ID No. 4279, Seq. ID No. 4281, Seq. ID No. 4283, Seq. ID No. 4289, Seq. ID No. 4293, Seq. ID No. 4299, Seq. ID No. 4301, Seq. ID No. 4303, Seq. ID No. 4305, Seq. ID No. 4307, Seq. ID No. 4309, Seq. ID No. 4313, Seq. ID No. 4315, Seq. ID No. 4323, Seq. ID No. 4325, Seq. ID No. 4327, Seq. ID No. 4331, Seq. ID No. 4333, Seq. ID No. 4337, Seq. ID No. 4341, Seq. ID No. 4345, Seq. ID No. 4349, Seq. ID No. 4355, Seq. ID No. 4357, Seq. ID No. 4365, Seq. ID No. 4367, Seq. ID No. 4371, Seq. ID No. 4375, Seq. ID No. 4377, Seq. ID No. 4379, Seq. ID No. 4383, Seq. ID No. 4387, Seq. ID No. 4393, Seq. ID No. 4397, Seq. ID No. 4401, Seq. ID No. 4409, Seq. ID No. 4413, Seq. ID No. 4421, Seq. ID No. 4433, Seq. ID No. 4435, Seq. ID No. 4445, Seq. ID No. 4449, Seq. ID No. 4457, Seq. ID No. 4461, Seq. ID No. 4463, Seq. ID No. 4471, Seq. ID No. 4475, Seq. ID No. 4477, Seq. ID No. 4481, Seq. ID No. 4487, Seq. ID No. 4491, Seq. ID No. 4499, Seq. ID No. 4501, Seq. ID No. 4503, Seq. ID No. 4509, Seq. ID No. 4517, Seq. ID No. 4531, Seq. ID No. 4533, Seq. ID No. 4535, Seq. ID No. 4539, Seq. ID No. 4541, Seq. ID No. 4545, Seq. ID No. 4549, Seq. ID No. 4557, Seq. ID No. 4563, Seq. ID No. 4567, Seq. ID No. 4569, Seq. ID No. 4575, Seq. ID No. 4577, Seq. ID No. 4579, Seq. ID No. 4583, Seq. ID No. 4591, Seq. ID No. 4593, Seq. ID No. 4597, Seq. ID No. 4601, Seq. ID No. 4605, Seq. ID No. 4609, Seq. ID No. 4611, Seq. ID No. 4613, Seq. ID No. 4623, Seq. ID No. 4625, Seq. ID No. 4629, Seq. ID No. 4633, Seq. ID No. 4637, Seq. ID No. 4641, Seq. ID No. 4645,.Seq. ID No. 4651, Seq. ID No. 4653, Seq. ID No. 4655, Seq. ID No. 4661, Seq. ID No. 4663, Seq. ID No. 4669, Seq. ID No. 4671, Seq. ID No. 4673, Seq. ID No. 4675, Seq. ID No. 4685, Seq. ID No. 4689, Seq. ID No. 4697, Seq. ID No. 4703, Seq. ID No. 4705, Seq. ID No. 4713, Seq. ID No. 4717, Seq. ID No. 4719, Seq. ID No. 4723, Seq. ID No. 4729, Seq. ID No. 4731, Seq. ID No. 4733, Seq. ID No. 4739, Seq. ID No. 4743, Seq. ID No. 4745, Seq. ID No. 4747, Seq. ID No. 4749, Seq. ID No. 4751, Seq. ID No. 4753, Seq. ID No. 4761, Seq. ID No. 4767, Seq. ID No. 4771, Seq. ID No. 4779, Seq. ID No. 4781, Seq. ID No. 4783, Seq. ID No. 4785, Seq. ID No. 4789, Seq. ID No. 4791, Seq. ID No. 4793, Seq. ID No. 4799, Seq. ID No. 4807, Seq. ID No. 4809, Seq. ID No. 4811, Seq. ID No. 4813, Seq. ID No. 4815, Seq. ID No. 4821, Seq. ID No. 4825, Seq. ID No. 4827, Seq. ID No. 4829, Seq. ID No. 4837, Seq. ID No. 4839, Seq. ID No. 4845, Seq. ID No. 4847, Seq. ID No. 4849, Seq. ID No. 4857, Seq. ID No. 4861, Seq. ID No. 4865, Seq. ID No. 4867, Seq. ID No. 4875, Seq. ID No. 4879, Seq. ID No. 4881, Seq. ID No. 4883, Seq. ID No. 4885, Seq. ID No. 4887, Seq. ID No. 4893, Seq. ID No. 4899, Seq. ID No. 4901, Seq. ID No. 4903, Seq. ID No. 4905, Seq. ID No. 4907, Seq. ID No. 4909, Seq. ID No. 4915, Seq. ID No. 4917, Seq. ID No. 4919, Seq. ID No. 4921, Seq. ID No. 4925, Seq. ID No. 4929, Seq. ID No. 4933, Seq. ID No. 4937, Seq. ID No. 4941, Seq. ID No. 4943, Seq. ID No. 4945, Seq. ID No. 4947, Seq. ID No. 4953, Seq. ID No. 4955, Seq. ID No. 4959, Seq. ID No. 4961, Seq. ID No. 4965, Seq. ID No. 4967, Seq. ID No. 4971, Seq. ID No. 4973, Seq. ID No. 4977, Seq. ID No. 4985, Seq. ID No. 4989, Seq. ID No. 4991, Seq. ID No. 4995, Seq. ID No. 4997, Seq. ID No. 5005, Seq. ID No. 5009, Seq. ID No. 5015, Seq. ID No. 5019, Seq. ID No. 5025, Seq. ID No. 5029, Seq. ID No. 5037, Seq. ID No. 5045, Seq. ID No. 5049, Seq. ID No. 5053, Seq. ID No. 5055, Seq. ID No. 5059, Seq. ID No. 5061, Seq. ID No. 5065, Seq. ID No. 5071, Seq. ID No. 5073, Seq. ID No. 5079, Seq. ID No. 5081, Seq. ID No. 5083, Seq. ID No. 5087, Seq. ID No. 5089, Seq. ID No. 5093, Seq. ID No. 5095, Seq. ID No. 5103, Seq. ID No. 5105, Seq. ID No. 5107, Seq. ID No. 5111, Seq. ID No. 5113, Seq. ID No. 5115, Seq. ID No. 5117, Seq. ID No. 5119, Seq. ID No. 5141, Seq. ID No. 5143, Seq. ID No. 5147, Seq. ID No. 5153, Seq. ID No. 5155, Seq. ID No. 5163, Seq. ID No. 5169, Seq. ID No. 5171, Seq. ID No. 5173, Seq. ID No. 5179, Seq. ID-No. 5185, Seq. ID No. 5187, Seq. ID No. 5193, Seq. ID No. 5195, Seq. ID No. 5201, Seq. ID No. 5203, Seq. ID No. 5205, Seq. ID No. 5209, Seq. ID No. 5211, Seq. ID No. 5213, Seq. ID No. 5217, Seq. ID No. 5225, Seq. ID No. 5231, Seq. ID No. 5233, Seq. ID No. 5237, Seq. ID No. 5239, Seq. ID No. 5245, Seq. ID No. 5247, Seq. ID No. 5249, Seq. ID No. 5255, Seq. ID No. 5257, Seq. ID No. 5259, Seq. ID No. 5263, Seq. ID No. 5269, Seq. ID No. 5273, Seq. ID No. 5283, Seq. ID No. 5289, Seq. ID No. 5293, Seq. ID No. 5307, Seq. ID No. 5311, Seq. ID No. 5313, Seq. ID No. 5315, Seq. ID No. 5323, Seq. ID No. 5325, Seq. ID No. 5335, Seq. ID No. 5337, Seq. ID No. 5339, Seq. ID No. 5345, Seq. ID No. 5347, Seq. ID No. 5349, Seq. ID No. 5353, Seq. ID No. 5361, Seq. ID No. 5365, Seq. ID No. 5367, Seq. ID No. 5369, Seq. ID No. 5373, Seq. ID No. 5375, Seq. ID No. 5387, Seq. ID No. 5389, Seq. ID No. 5391, Seq. ID No. 5393, Seq. ID No. 5395, Seq. ID No. 5397, Seq. ID No. 5399, Seq. ID No. 5401, Seq. ID No. 5403, Seq. ID No. 5405, Seq. ID No. 5411, Seq. ID No. 5415, Seq. ID No. 5417, Seq. ID No. 5419, Seq. ID No. 5421, Seq. ID No. 5423, Seq. ID No. 5429, Seq. ID No. 5433, Seq. ID No. 5441, Seq. ID No. 5443, Seq. ID No. 5445, Seq. ID No. 5449, Seq. ID No. 5451, Seq. ID No. 5453, Seq. ID No. 5455, Seq. ID No. 5457, Seq. ID No. 5469, Seq. ID No. 5475, Seq. ID No. 5483, Seq. ID No. 5485, Seq. ID No. 5489, Seq. ID No. 5493, Seq. ID No. 5499, Seq. ID No. 5501, Seq. ID No. 5505, Seq. ID No. 5509, Seq. ID No. 5511, Seq. ID No. 5523, Seq. ID No. 5529, Seq. ID No. 5535, Seq. ID No. 5539, Seq. ID No. 5541, Seq. ID No. 5547, Seq. ID No. 5551, Seq. ID No. 5555, Seq. ID No. 5559, Seq. ID No. 5561, Seq. ID No. 5565, Seq. ID No. 5571, Seq. ID No. 5573, Seq. ID No. 5579, Seq. ID No. 5583, Seq. ID No. 5589, Seq. ID No. 5599, Seq. ID No. 5601, Seq. ID No. 5603, Seq. ID No. 5613, Seq. ID No. 5621, Seq. ID No. 5627, Seq. ID No. 5631, Seq. ID No. 5635, Seq. ID No. 5645, Seq. ID No. 5651, Seq. ID No. 5653, Seq. ID No. 5657, Seq. ID No. 5661, Seq. ID No. 5663, Seq. ID No. 5665, Seq. ID No. 5669, Seq. ID No. 5671, Seq. ID No. 5673, Seq. ID No. 5675, Seq. ID No. 5681, Seq. ID No. 5693, Seq. ID No. 5695, Seq. ID No. 5699, Seq. ID No. 5701, Seq. ID No. 5707, Seq. ID No. 5713, Seq. ID No. 5717, Seq. ID No. 5723, Seq. ID No. 5725, Seq. ID No. 5731, Seq. ID No. 5737, Seq. ID No. 5747, Seq. ID No. 5751, Seq. ID No. 5755, Seq. ID No. 5759, Seq. ID No. 5771, Seq. ID No. 5773, Seq. ID No. 5777, Seq. ID No. 5779, Seq. ID No. 5781, Seq. ID No. 5785, Seq. ID No. 5793, Seq. ID No. 5799, Seq. ID No. 5805, Seq. ID No. 5811, Seq. ID No. 5815, Seq. ID No. 5817, Seq. ID No. 5823, Seq. ID No. 5831, Seq. ID No. 5835, Seq. ID No. 5839, Seq. ID No. 5843, Seq. ID No. 5847, Seq. ID No. 5849, Seq. ID No. 5851, Seq. ID No. 5853, Seq. ID No. 5855, Seq. ID No. 5857, Seq. ID No. 5861, Seq. ID No. 5867, Seq. ID No. 5875, Seq. ID No. 5877, Seq. ID No. 5881, Seq. ID No. 5889, Seq. ID No. 5895, Seq. ID No. 5897, Seq. ID No. 5901, Seq. ID No. 5903, Seq. ID No. 5907, Seq. ID No. 5913, Seq. ID No. 5915, Seq. ID No. 5917, Seq. ID No. 5919, Seq. ID No. 5925, Seq. ID No. 5931, Seq. ID No. 5933, Seq. ID No. 5935, Seq. ID No. 5941, Seq. ID No. 5943, Seq. ID No. 5945, Seq. ID No. 5949, Seq. ID No. 5955, Seq. ID No. 5957, Seq. ID No. 5959, Seq. ID No. 5967, Seq. ID No. 5971, Seq. ID No. 5975, Seq. ID No. 5977, Seq. ID No. 5981, Seq. ID No. 5983, Seq. ID No. 5985, Seq. ID No. 5989, Seq. ID No. 5991, Seq. ID No. 5995, Seq. ID No. 5997, Seq. ID No. 6003, Seq. ID No. 6005, Seq. ID No. 6007, Seq. ID No. 6015, Seq. ID No. 6017, Seq. ID No. 6019, Seq. ID No. 6023, Seq. ID No. 6029, Seq. ID No. 6033, Seq. ID No. 6035, Seq. ID No. 6037, Seq. ID No. 6043, Seq. ID No. 6049, Seq. ID No. 6055, Seq. ID No. 6065, Seq. ID No. 6069, Seq. ID No. 6075, Seq. ID No. 6081, Seq. ID No. 6083, Seq. ID No. 6087, Seq. ID No. 6095, Seq. ID No. 6097, Seq. ID No. 6099, Seq. ID No. 6103, Seq. ID No. 6105, Seq. ID No. 6113, Seq. ID No. 6115, Seq. ID No. 6119, Seq. ID No. 6125, Seq. ID No. 6127, Seq. ID No. 6129, Seq. ID No. 6131, Seq. ID No. 6133, Seq. ID No. 6141, Seq. ID No. 6143, Seq. ID No. 6147, Seq. ID No. 6153, Seq. ID No. 6165, Seq. ID No. 6169, Seq. ID No. 6171, Seq. ID No. 6173, Seq. ID No. 6177, Seq. ID No. 6179, Seq. ID No. 6187, Seq. ID No. 6193, Seq. ID No. 6201, Seq. ID No. 6207, Seq. ID No. 6211, Seq. ID No. 6215, Seq. ID No. 6219, Seq. ID No. 6231, Seq. ID No. 6235, Seq. ID No. 6243, Seq. ID No. 6247, Seq. ID No. 6251, Seq. ID No. 6255, Seq. ID No. 6261, Seq. ID No. 6263, Seq. ID No. 6269, Seq. ID No. 6275, Seq. ID No. 6277, Seq. ID No. 6279, Seq. ID No. 6287, Seq. ID No. 6291, Seq. ID No. 6299, Seq. ID No. 6305, Seq. ID No. 6307, Seq. ID No. 6313, Seq. ID No. 6315, Seq. ID No. 6321, Seq. ID No. 6323, Seq. ID No. 6325, Seq. ID No. 6331, Seq. ID No. 6335, Seq. ID No. 6339, Seq. ID No. 6341, Seq. ID No. 6343, Seq. ID No. 6345, Seq. ID No. 6347, Seq. ID No. 6355, Seq. ID No. 6359, Seq. ID No. 6361, Seq. ID No. 6365, Seq. ID No. 6369, Seq. ID No. 6371, Seq. ID No. 6375, Seq. ID No. 6377, Seq. ID No. 6379, Seq. ID No. 6387, Seq. ID No. 6391, Seq. ID No. 6397, Seq. ID No. 6401, Seq. ID No. 6405, Seq. ID No. 6409, Seq. ID No. 6413, Seq. ID No. 6417, Seq. ID No. 6419, Seq. ID No. 6423, Seq. ID No. 6429, Seq. ID No. 6433, Seq. ID No. 6435, Seq. ID No. 6439, Seq. ID No. 6445, Seq. ID No. 6447, Seq. ID No. 6451, Seq. ID No. 6455, Seq. ID No. 6459, Seq. ID No. 6461, Seq. ID No. 6463, Seq. ID No. 6475, Seq. ID No. 6481, Seq. ID No. 6483, Seq. ID No. 6485, Seq. ID No. 6487, Seq. ID No. 6489, Seq. ID No. 6491, Seq. ID No. 6493, Seq. ID No. 6495, Seq. ID No. 6499, Seq. ID No. 6505, Seq. ID No. 6509, Seq. ID No. 6513, Seq. ID No. 6519, Seq. ID No. 6521, Seq. ID No. 6525, Seq. ID No. 6527, Seq. ID No. 6531, Seq. ID No. 6533, Seq. ID No. 6535, Seq. ID No. 6545, Seq. ID No. 6551, Seq. ID No. 6553, Seq. ID No. 6559, Seq. ID No. 6561, Seq. ID No. 6563, Seq. ID No. 6565, Seq. ID No. 6567, Seq. ID No. 6569, Seq. ID No. 6575, Seq. ID No. 6579, Seq. ID No. 6583, Seq. ID No. 6585, Seq. ID No. 6591, Seq. ID No. 6595, Seq. ID No. 6605, Seq. ID No. 6607, Seq. ID No. 6611, Seq. ID No. 6615, Seq. ID No. 6617, Seq. ID No. 6619, Seq. ID No. 6623, Seq. ID No. 6625, Seq. ID No. 6629, Seq. ID No. 6633, Seq. ID No. 6635, Seq. ID No. 6641, and Seq. ID No. 6647.

29. The polynucleotide of claim 7, wherein the polynucleotide that encodes a polypeptide is identified using an ORF finder program that searches for an ATG, GTG or TTG Start codon between a Stop-Stop region, and the polynucleotide is selected from one of Seq. ID No. 1, Seq. ID No. 5, Seq. ID No. 11, Seq. ID No. 13, Seq. ID No. 15, Seq. ID No. 17, Seq. ID No. 19, Seq. ID No. 21, Seq. ID No. 23, Seq. ID No. 27, Seq. ID No. 29, Seq. ID No. 31, Seq. ID No. 35, Seq. ID No. 37, Seq. ID No. 41, Seq. ID No. 43, Seq. ID No. 45, Seq. ID No. 47, Seq. ID No. 49, Seq. ID No. 51, Seq. ID No. 53, Seq. ID No. 55, Seq. ID No. 57, Seq. ID No. 59, Seq. ID No. 65, Seq. ID No. 67, Seq. ID No. 75, Seq. ID No. 77, Seq. ID No. 79, Seq. ID No. 81, Seq. ID No. 83, Seq. ID No. 89, Seq. ID No. 91, Seq. ID No. 93, Seq. ID No. 97, Seq. ID No. 99, Seq. ID No. 103, Seq. ID No. 105, Seq. ID No. 107, Seq. ID No. 109, Seq. ID No. 111, Seq. ID No. 113, Seq. ID No. 115, Seq. ID No. 117, Seq. ID No. 119, Seq. ID No. 121, Seq. ID No. 127, Seq. ID No. 129, Seq. ID No. 131, Seq. ID No. 133, Seq. ID No. 135, Seq. ID No. 137, Seq. ID No. 139, Seq. ID No. 143, Seq. ID No. 145, Seq. ID No. 147, Seq. ID No. 149, Seq. ID No. 153, Seq. ID No. 155, Seq. ID No. 157, Seq. ID No. 159, Seq. ID No. 161, Seq. ID No. 163, Seq. ID No. 165, Seq. ID No. 167, Seq. ID No. 169, Seq. ID No. 171, Seq. ID No. 175, Seq. ID No. 177, Seq. ID No. 179, Seq. ID No. 181, Seq. ID No. 183, Seq. ID No. 187, Seq. ID No. 191, Seq. ID No. 193, Seq. ID No. 195, Seq. ID No. 201, Seq. ID No. 205, Seq. ID No. 207, Seq. ID No. 215, Seq. ID No. 219, Seq. ID No. 221, Seq. ID No. 223, Seq. ID No. 225, Seq. ID No. 227, Seq. ID No. 231, Seq. ID No. 233, Seq. ID No. 239, Seq. ID No. 243, Seq. ID No. 245, Seq. ID No. 247, Seq. ID No. 253, Seq. ID No. 257, Seq. ID No. 259, Seq. ID No. 261, Seq. ID No. 263, Seq. ID No. 265, Seq. ID No. 267, Seq. ID No. 269, Seq. ID No. 273, Seq. ID No. 277, Seq. ID No. 279, Seq. ID No. 281, Seq. ID No. 283, Seq. ID No. 291, Seq. ID No. 293, Seq. ID No. 297, Seq. ID No. 301, Seq. ID No. 305, Seq. ID No. 307, Seq. ID No. 309, Seq. ID No. 313, Seq. ID No. 317, Seq. ID No. 321, Seq. ID No. 323, Seq. ID No. 325, Seq. ID No. 331, Seq. ID No. 333, Seq. ID No. 335, Seq. ID No. 337, Seq. ID No. 339, Seq. ID No. 343, Seq. ID No. 345, Seq. ID No. 347, Seq. ID No. 349, Seq. ID No. 353, Seq. ID No. 355, Seq. ID No. 357, Seq. ID No. 359, Seq. ID No. 361, Seq. ID No. 363, Seq. ID No. 365, Seq. ID No. 367, Seq. ID No. 369, Seq. ID No. 371, Seq. ID No. 375, Seq. ID No. 377, Seq. ID No. 379, Seq. ID No. 383, Seq. ID No. 385, Seq. ID No. 387, Seq. ID No. 389, Seq. ID No. 391, Seq. ID No. 393, Seq. ID No. 397, Seq. ID No. 401, Seq. ID No. 403, Seq. ID No. 405, Seq. ID No. 407, Seq. ID No. 409, Seq. ID No. 415, Seq. ID No. 423, Seq. ID No. 425, Seq. ID No. 427, Seq. ID No. 429, Seq. ID No. 431, Seq. ID No. 433, Seq. ID No. 435, Seq. ID No. 437, Seq. ID No. 439, Seq. ID No. 441, Seq. ID No. 443, Seq. ID No. 445, Seq. ID No. 447, Seq. ID No. 451, Seq. ID No. 453, Seq. ID No. 455, Seq. ID No. 457, Seq. ID No. 461, Seq. ID No. 463, Seq. ID No. 467, Seq. ID No. 469, Seq. ID No. 471, Seq. ID No. 473, Seq. ID No. 475, Seq. ID No. 477, Seq. ID No. 479, Seq. ID No. 481, Seq. ID No. 483, Seq. ID No. 485, Seq. ID No. 489, Seq. ID No. 491, Seq. ID No. 493, Seq. ID No. 495, Seq. ID No. 501, Seq. ID No. 505, Seq. ID No. 507, Seq. ID No. 511, Seq. ID No. 515, Seq. ID No. 517, Seq. ID No. 523, Seq. ID No. 529, Seq. ID No. 531, Seq. ID No. 533, Seq. ID No. 537, Seq. ID No. 539, Seq. ID No. 543, Seq. ID No. 547, Seq. ID No. 549, Seq. ID No. 551, Seq. ID No. 553, Seq. ID No. 555, Seq. ID No. 557, Seq. ID No. 559, Seq. ID No. 561, Seq. ID No. 565, Seq. ID No. 569, Seq. ID No. 571, Seq. ID No. 573, Seq. ID No. 575, Seq. ID No. 579, Seq. ID No. 581, Seq. ID No. 585, Seq. ID No. 587, Seq. ID No. 589, Seq. ID No. 591, Seq. ID No. 593, Seq. ID No. 595, Seq. ID No. 597, Seq. ID No. 599, Seq. ID No. 601, Seq. ID No. 603, Seq. ID No. 605, Seq. ID No. 609, Seq. ID No. 613, Seq. ID No. 615, Seq. ID No. 617, Seq. ID No. 619, Seq. ID No. 621, Seq. ID No. 623, Seq. ID No. 625, Seq. ID No. 627, Seq. ID No. 635, Seq. ID No. 637, Seq. ID No. 643, Seq. ID No. 645, Seq. ID No. 647, Seq. ID No. 649, Seq. ID No. 655, Seq. ID No. 663, Seq. ID No. 665, Seq. ID No. 667, Seq. ID No. 669, Seq. ID No. 675, Seq. ID No. 681, Seq. ID No. 683, Seq. ID No. 687, Seq. ID No. 689, Seq. ID No. 691, Seq. ID No. 695, Seq. ID No. 697, Seq. ID No. 699, Seq. ID No. 701, Seq. ID No. 703, Seq. ID No. 705, Seq. ID No. 707, Seq. ID No. 709, Seq. ID No. 713, Seq. ID No. 725, Seq. ID No. 727, Seq. ID No. 729, Seq. ID No. 731, Seq. ID No. 733, Seq. ID No. 735, Seq. ID No. 739, Seq. ID No. 741, Seq. ID No. 745, Seq. ID No. 747, Seq. ID No. 749, Seq. ID No. 751, Seq. ID No. 753, Seq. ID No. 759, Seq. ID No. 763, Seq. ID No. 765, Seq. ID No. 773, Seq. ID No. 775, Seq. ID No. 781, Seq. ID No. 783, Seq. ID No. 787, Seq. ID No. 793, Seq. ID No. 795, Seq. ID No. 799, Seq. ID No. 801, Seq. ID No. 805, Seq. ID No. 807, Seq. ID No. 809, Seq. ID No. 811, Seq. ID No. 813, Seq. ID No. 815, Seq. ID No. 817, Seq. ID No. 819, Seq. ID No. 821, Seq. ID No. 823, Seq. ID No. 827, Seq. ID No. 829, Seq. ID No. 831, Seq. ID No. 835, Seq. ID No. 837, Seq. ID No. 839, Seq. ID No. 843, Seq. ID No. 845, Seq. ID No. 847, Seq. ID No. 855, Seq. ID No. 859, Seq. ID No. 861, Seq. ID No. 865, Seq. ID No. 867, Seq:ID No. 871, Seq. ID No. 873, Seq. ID No. 875, Seq. ID No. 877, Seq. ID No. 879, Seq. ID No. 881, Seq. ID No. 885, Seq. ID No. 895, Seq. ID No. 897, Seq. ID No. 899, Seq. ID No. 901, Seq. ID No. 903, Seq. ID No. 905, Seq. ID No. 907, Seq. ID No. 909, Seq. ID No. 913, Seq. ID No. 915, Seq. ID No. 921, Seq. ID No. 923, Seq. ID No. 925, Seq. ID No. 931, Seq. ID No. 933, Seq. ID No. 935, Seq. ID No. 937, Seq. ID No. 939, Seq. ID No. 941, Seq. ID No. 943, Seq. ID No. 947, Seq. ID No. 949, Seq. ID No. 951, Seq. ID No. 953, Seq. ID No. 955, Seq. ID No. 957, Seq. ID No. 961, Seq. ID No. 963, Seq. ID No. 965, Seq. ID No. 967, Seq. ID No. 969, Seq. ID No. 971, Seq. ID No. 973, Seq. ID No. 975, Seq. ID No. 981, Seq. ID No. 983, Seq. ID No. 985, Seq. ID No. 987, Seq. ID No. 989, Seq. ID No. 991, Seq. ID No. 993, Seq. ID No. 995, Seq. ID No. 997, Seq. ID No. 1001, Seq. ID No. 1003, Seq. ID No. 1005, Seq. ID No. 1007, Seq. ID No. 1009, Seq. ID No. 1017, Seq. ID No. 1019, Seq. ID No. 1023, Seq. ID No. 1025, Seq. ID No. 1027, Seq. ID No. 1039, Seq. ID No. 1041, Seq. ID No. 1043, Seq. ID No. 1045, Seq. ID No. 1047, Seq. ID No. 1049, Seq. ID No. 1051, Seq. ID No. 1057, Seq. ID No. 1059, Seq. ID No. 1061, Seq. ID No. 1065, Seq. ID No. 1069, Seq. ID No. 1075, Seq. ID No. 1077, Seq. ID No. 1079, Seq. ID No. 1081, Seq. ID No. 1083, Seq. ID No. 1085, Seq. ID No. 1087, Seq. ID No. 1091, Seq. ID No. 1093, Seq. ID No. 1095, Seq. ID No. 1097, Seq. ID No. 1099, Seq. ID No. 1101, Seq. ID No. 1103, Seq. ID No. 1107, Seq. ID No. 1109, Seq. ID No. 1111, Seq. ID No. 1113, Seq. ID No. 1115, Seq. ID No. 1119, Seq. ID No. 1121, Seq. ID No. 1123, Seq. ID No. 1125, Seq. ID No. 1127, Seq. ID No. 1129, Seq. ID No. 1131, Seq. ID No. 1137, Seq. ID No. 1139, Seq. ID No. 1141, Seq. ID No. 1143, Seq. ID No. 1145, Seq. ID No. 1147, Seq. ID No. 1149, Seq. ID No. 1151, Seq. ID No. 1153, Seq. ID No. 1155, Seq. ID No. 1157, Seq. ID No. 1159, Seq. ID No. 1161, Seq. ID No. 1163, Seq. ID No. 1171, Seq. ID No. 1175, Seq. ID No. 1177, Seq. ID No. 1179, Seq. ID No. 1181, Seq. ID No. 1187, Seq. ID No. 1191, Seq. ID No. 1193, Seq. ID No. 1195, Seq. ID No. 1197, Seq. ID No. 1201, Seq. ID No. 1203, Seq. ID No. 1205, Seq. ID No. 1207, Seq. ID No. 1211, Seq. ID No. 1213, Seq. ID No. 1215, Seq. ID No. 1217, Seq. ID No. 1221, Seq. ID No. 1223, Seq. ID No. 1225, Seq. ID No. 1231, Seq. ID No. 1233, Seq. ID No. 1237, Seq. ID No. 1239, Seq. ID No. 1241, Seq. ID No. 1245, Seq. ID No. 1247, Seq. ID No. 1249, Seq. ID No. 1251, Seq. ID No. 1253, Seq. ID No. 1255, Seq. ID No. 1257, Seq. ID No. 1259, Seq. ID No. 1261, Seq. ID No. 1263, Seq. ID No. 1271, Seq. ID No. 1273, Seq. ID No. 1275, Seq. ID No. 1277, Seq. ID No. 1279, Seq. ID No. 1285, Seq. ID No. 1289, Seq. ID No. 1291, Seq. ID No. 1293, Seq. ID No. 1295, Seq. ID No. 1297, Seq. ID No. 1299, Seq. ID No. 1301, Seq. ID No. 1303, Seq. ID No. 1305, Seq. ID No. 1307, Seq. ID No. 1309, Seq. ID No. 1311, Seq. ID No. 1313, Seq. ID No. 1317, Seq. ID No. 1319, Seq. ID No. 1321, Seq. ID No. 1331, Seq. ID No. 1333, Seq. ID No. 1335, Seq. ID No. 1337, Seq. ID No. 1339, Seq. ID No. 1343, Seq. ID No. 1345, Seq. ID No. 1347, Seq. ID No. 1349, Seq. ID No. 1351, Seq. ID No. 1359, Seq. ID No. 1361, Seq. ID No. 1363, Seq. ID No. 1365, Seq. ID No. 1369, Seq. ID No. 1371, Seq. ID No. 1375, Seq. ID No. 1377, Seq. ID No. 1381, Seq. ID No. 1383, Seq. ID No. 1385, Seq. ID No. 1387, Seq. ID No. 1389, Seq. ID No. 1391, Seq. ID No. 1393, Seq. ID No. 1401, Seq. ID No. 1403, Seq. ID No. 1407, Seq. ID No. 1409, Seq. ID No. 1411, Seq. ID No. 1413, Seq. ID No. 1415, Seq. ID No. 1419, Seq. ID No. 1421, Seq. ID No. 1423, Seq. ID No. 1425, Seq. ID No. 1427, Seq. ID No. 1429, Seq. ID No. 1433, Seq. ID No. 1437, Seq. ID No. 1441, Seq. ID No. 1443, Seq. ID No. 1447, Seq. ID No. 1449, Seq. ID No. 1451, Seq. ID No. 1455, Seq. ID No. 1459, Seq. ID No. 1463, Seq. ID No. 1465, Seq. ID No. 1467, Seq. ID No. 1469, Seq. ID No. 1471, Seq. ID No. 1473, Seq. ID No. 1475, Seq. ID No. 1477, Seq. ID No. 1479, Seq. ID No. 1483, Seq. ID No. 1485, Seq. ID No. 1487, Seq. ID No. 1491, Seq. ID No. 1493, Seq. ID No. 1495, Seq. ID No. 1497, Seq. ID No. 1499, Seq. ID No. 1501, Seq. ID No. 1505, Seq. ID No. 1507, Seq. ID No. 1511, Seq. ID No. 1517, Seq. ID No. 1519, Seq. ID No. 1523, Seq. ID No. 1525, Seq. ID No. 1527, Seq. ID No. 1531, Seq. ID No. 1539, Seq. ID No. 1543, Seq. ID No. 1549, Seq. ID No. 1551, Seq. ID No. 1553, Seq. ID No. 1555, Seq. ID No. 1557, Seq. ID No. 1561, Seq. ID No. 1563, Seq. ID No. 1565, Seq. ID No. 1567, Seq. ID No. 1571, Seq. ID No. 1573, Seq. ID No. 1575, Seq. ID No. 1577, Seq. ID No. 1579, Seq. ID No. 1581, Seq. ID No. 1589, Seq. ID No. 1593, Seq. ID No. 1595, Seq. ID No. 1597, Seq. ID No. 1599, Seq. ID No. 1601, Seq. ID No. 1607, Seq. ID No. 1611, Seq. ID No. 1613, Seq. ID No. 1615, Seq. ID No. 1617, Seq. ID No. 1619, Seq. ID No. 1623, Seq. ID No. 1625, Seq. ID No. 1627, Seq. ID No. 1633, Seq. ID No. 1637, Seq. ID No. 1639, Seq. ID No. 1641, Seq. ID No. 1643, Seq. ID No. 1647, Seq. ID No. 1651, Seq. ID No. 1653, Seq. ID No. 1655, Seq. ID No. 1657, Seq. ID No. 1661, Seq. ID No. 1663, Seq. ID No. 1665, Seq. ID No. 1669, Seq. ID No. 1675, Seq. ID No. 1679, Seq. ID No. 1681, Seq. ID No. 1685, Seq. ID No. 1687, Seq. ID No. 1689, Seq. ID No. 1691, Seq. ID No. 1693, Seq. ID No. 1695, Seq. ID No. 1697, Seq. ID No. 1699, Seq. ID No. 1703, Seq. ID No. 1705, Seq. ID No. 1707, Seq. ID No. 1711, Seq. ID No. 1713, Seq. ID No. 1715, Seq. ID No. 1717, Seq. ID No. 1719, Seq. ID No. 1721, Seq. ID No. 1723, Seq. ID No. 1727, Seq. ID No. 1729, Seq. ID No. 1735, Seq. ID No. 1737, Seq. ID No. 1739, Seq. ID No. 1741, Seq. ID No. 1747, Seq. ID No. 1749, Seq. ID No. 1751, Seq. ID No. 1755, Seq. ID No. 1757, Seq. ID No. 1759, Seq. ID No. 1763, Seq. ID No. 1769, Seq. ID No. 1771, Seq. ID No. 1775, Seq. ID No. 1777, Seq. ID No. 1779, Seq. ID No. 1781, Seq. ID No. 1783, Seq. ID No. 1785, Seq. ID No. 1789, Seq. ID No. 1791, Seq. ID No. 1793, Seq. ID No. 1795, Seq. ID No. 1797, Seq. ID No. 1805, Seq. ID No. 1809, Seq. ID No. 1811, Seq. ID No. 1813, Seq. ID No. 1815, Seq. ID No. 1817, Seq. ID No. 1819, Seq. ID No. 1821, Seq. ID No. 1823, Seq. ID No. 1825, Seq. ID No. 1829, Seq. ID No. 1833, Seq. ID No. 1841, Seq. ID No. 1843, Seq. ID No. 1845, Seq. ID No. 1847, Seq. ID No. 1849, Seq. ID No. 1853, Seq. ID No. 1855, Seq. ID No. 1857, Seq. ID No. 1859, Seq. ID No. 1861, Seq. ID No. 1863, Seq. ID No. 1865, Seq. ID No. 1867, Seq. ID No. 1871, Seq. ID No. 1873, Seq. ID No. 1875, Seq. ID No. 1877, Seq. ID No. 1881, Seq. ID No. 1883, Seq. ID No. 1885, Seq. ID No. 1887, Seq. ID No. 1889, Seq. ID No. 1895, Seq. ID No. 1903, Seq. ID No. 1905, Seq. ID No. 1907, Seq. ID No. 1911, Seq. ID No. 1913, Seq. ID No. 1915, Seq. ID No. 1919, Seq. ID No. 1923, Seq. ID No. 1925, Seq. ID No. 1927, Seq. ID No. 1929, Seq. ID No. 1931, Seq. ID No. 1935, Seq. ID No. 1941, Seq. ID No. 1943, Seq. ID No. 1945, Seq. ID No. 1947, Seq. ID No. 1949, Seq. ID No. 1951, Seq. ID No. 1953, Seq. ID No. 1959, Seq. ID No. 1961, Seq. ID No. 1963, Seq. ID No. 1965, Seq. ID No. 1967, Seq. ID No. 1969, Seq. ID No. 1971, Seq. ID No. 1979, Seq. ID No. 1983, Seq. ID No. 1985, Seq. ID No. 1987, Seq. ID No. 1989, Seq. ID No. 1991, Seq. ID No. 1995, Seq. ID No. 1997, Seq. ID No. 1999, Seq. ID No. 2001, Seq. ID No. 2003, Seq. ID No. 2005, Seq. ID No. 2007, Seq. ID No. 2015, Seq. ID No. 2019, Seq. ID No. 2021, Seq. ID No. 2025, Seq. ID No. 2027, Seq. ID No. 2029, Seq. ID No. 2031, Seq. ID No. 2035, Seq. ID No. 2037, Seq. ID No. 2041, Seq. ID No. 2043, Seq. ID No. 2045, Seq. ID No. 2047, Seq. ID No. 2053, Seq. ID No. 2055, Seq. ID No. 2059, Seq. ID No. 2063, Seq. ID No. 2065, Seq. ID No. 2067, Seq. ID No. 2069, Seq. ID No. 2071, Seq. ID No. 2073, Seq. ID No. 2075, Seq. ID No. 2077, Seq. ID No. 2079, Seq. ID No. 2081, Seq. ID No. 2083, Seq. ID No. 2085, Seq. ID No. 2089, Seq. ID No. 2091, Seq. ID No. 2093, Seq. ID No. 2097, Seq. ID No. 2099, Seq. ID No. 2101, Seq. ID No. 2103, Seq. ID No. 2107, Seq. ID No. 2109, Seq. ID No. 2111, Seq. ID No. 2115, Seq. ID No. 2117, Seq. ID No. 2119, Seq. ID No. 2125, Seq. ID No. 2127, Seq. ID No. 2129, Seq. ID No. 2131, Seq. ID No. 2133, Seq. ID No. 2135, Seq. ID No. 2137, Seq. ID No. 2141, Seq. ID No. 2143, Seq. ID No. 2145, Seq. ID No. 2149, Seq. ID No. 2151, Seq. ID No. 2153, Seq. ID No. 2155, Seq. ID No. 2157, Seq. ID No. 2159, Seq. ID No. 2161, Seq. ID No. 2165, Seq. ID No. 2167, Seq. ID No. 2169, Seq. ID No. 2179, Seq. ID No. 2181, Seq. ID No. 2183, Seq. ID No. 2189, Seq. ID No. 2191, Seq. ID No. 2195, Seq. ID No. 2197, Seq. ID No. 2199, Seq. ID No. 2201, Seq. ID No. 2203, Seq. ID No. 2205, Seq. ID No. 2207, Seq. ID No. 2209, Seq. ID No. 2211, Seq. ID No. 2213, Seq. ID No. 2215, Seq. ID No. 2217, Seq. ID No. 2221, Seq. ID No. 2223, Seq. ID No. 2227, Seq. ID No. 2229, Seq. ID No. 2235, Seq. ID No. 2241, Seq. ID No. 2245, Seq. ID No. 2247, Seq. ID No. 2251, Seq. ID No. 2253, Seq. ID No. 2257, Seq. ID No. 2259, Seq. ID No. 2261, Seq. ID No. 2263, Seq. ID No. 2265, Seq. ID No. 2267, Seq. ID No. 2269, Seq. ID No. 2275, Seq. ID No. 2277, Seq. ID No. 2279, Seq. ID No. 2285, Seq. ID No. 2287, Seq. ID No. 2297, Seq. ID No. 2299, Seq. ID No. 2301, Seq. ID No. 2309, Seq. ID No. 2311, Seq. ID No. 2315, Seq. ID No. 2327, Seq. ID No. 2329, Seq. ID No. 2333, Seq. ID No. 2343, Seq. ID No. 2345, Seq. ID No. 2349, Seq. ID No. 2351, Seq. ID No. 2357, Seq. ID No. 2363, Seq. ID No. 2365, Seq. ID No. 2367, Seq. ID No. 2369, Seq. ID No. 2371, Seq. ID No. 2373, Seq. ID No. 2375, Seq. ID No. 2379, Seq. ID No. 2381, Seq. ID No. 2385, Seq. ID No. 2387, Seq. ID No. 2391, Seq. ID No. 2393, Seq. ID No. 2395, Seq. ID No. 2397, Seq. ID No. 2399, Seq. ID No. 2401, Seq. ID No. 2405, Seq. ID No. 2409, Seq. ID No. 2413, Seq. ID No. 2415, Seq. ID No. 2417, Seq. ID No. 2421, Seq. ID No. 2423, Seq. ID No. 2425, Seq. ID No. 2427, Seq. ID No. 2429, Seq. ID No. 2435, Seq. ID No. 2437, Seq. ID No. 2445, Seq. ID No. 2447, Seq. ID No. 2449, Seq. ID No. 2451, Seq. ID No. 2453, Seq. ID No. 2455, Seq. ID No. 2457, Seq. ID No. 2459, Seq. ID No. 2461, Seq. ID No. 2463, Seq. ID No. 2465, Seq. ID No. 2469, Seq. ID No. 2471, Seq. ID No. 2475, Seq. ID No. 2481, Seq. ID No. 2483, Seq. ID No. 2485, Seq. ID No. 2491, Seq. ID No. 2493, Seq. ID No. 2495, Seq. ID No. 2499, Seq. ID No. 2501, Seq. ID No. 2503, Seq. ID No. 2505, Seq. ID No. 2507, Seq. ID No. 2511, Seq. ID No. 2513, Seq. ID No. 2517, Seq. ID No. 2519, Seq. ID No. 2521, Seq. ID No. 2525, Seq. ID No. 2529, Seq. ID No. 2533, Seq. ID No. 2535, Seq. ID No. 2537, Seq. ID No. 2539, Seq. ID No. 2547, Seq. ID No. 2549, Seq. ID No. 2551, Seq. ID No. 2553, Seq. ID No. 2559, Seq. ID No. 2561, Seq. ID No. 2563, Seq. ID No. 2565, Seq. ID No. 2573, Seq. ID No. 2575, Seq. ID No. 2577, Seq. ID No. 2579, Seq. ID No. 2581, Seq. ID No. 2587, Seq. ID No. 2589, Seq. ID No. 2591, Seq. ID No. 2593, Seq. ID No. 2595, Seq. ID No. 2599, Seq. ID No. 2603, Seq. ID No. 2605, Seq. ID No. 2607, Seq. ID No. 2609, Seq. ID No. 2611, Seq. ID No. 2613, Seq. ID No. 2617, Seq. ID No. 2619, Seq. ID No. 2623, Seq. ID No. 2625, Seq. ID No. 2627, Seq. ID No. 2629, Seq. ID No. 2631, Seq. ID No. 2633, Seq. ID No. 2635, Seq. ID No. 2637, Seq. ID No. 2639, Seq. ID No. 2641, Seq. ID No. 2643, Seq. ID No. 2645, Seq. ID No. 2647, Seq. ID No. 2649, Seq. ID No. 2651, Seq. ID No. 2653, Seq. ID No. 2655, Seq. ID No. 2659, Seq. ID No. 2663, Seq. ID No. 2667, Seq. ID No. 2669, Seq. ID No. 2671, Seq. ID No. 2675, Seq. ID No. 2677, Seq. ID No. 2683, Seq. ID No. 2685, Seq. ID No. 2687, Seq. ID No. 2689, Seq. ID No. 2691, Seq. ID No. 2693, Seq. ID No. 2695, Seq. ID No. 2697, Seq. ID No. 2699, Seq. ID No. 2703, Seq. ID No. 2709, Seq. ID No. 2711, Seq. ID No. 2715, Seq. ID No. 2717, Seq. ID No. 2719, Seq. ID No. 2723, Seq. ID No. 2725, Seq. ID No. 2727, Seq. ID No. 2729, Seq. ID No. 2731, Seq. ID No. 2735, Seq. ID No. 2737, Seq. ID No. 2739, Seq. ID No. 2749, Seq. ID No. 2751, Seq. ID No. 2753, Seq. ID No. 2755, Seq. ID No. 2759, Seq. ID No. 2765, Seq. ID No. 2767, Seq. ID No. 2769, Seq. ID No. 2771, Seq. ID No. 2773, Seq. ID No. 2775, Seq. ID No. 2779, Seq. ID No. 2781, Seq. ID No. 2783, Seq. ID No. 2787, Seq. ID No. 2789, Seq. ID No. 2791, Seq. ID No. 2793, Seq. ID No. 2795, Seq. ID No. 2797, Seq. ID No. 2799, Seq. ID No. 2801, Seq. ID No. 2803, Seq. ID No. 2807, Seq. ID No. 2809, Seq. ID No. 2813, Seq. ID No. 2815, Seq. ID No. 2821, Seq. ID No. 2823, Seq. ID No. 2827, Seq. ID No. 2829, Seq. ID No. 2831, Seq. ID No. 2833, Seq. ID No. 2839, Seq. ID No. 2841, Seq. ID No. 2843, Seq. ID No. 2845, Seq. ID No. 2847, Seq. ID No. 2855, Seq. ID No. 2861, Seq. ID No. 2863, Seq. ID No. 2865, Seq. ID No. 2867, Seq. ID No. 2869, Seq. ID No. 2871, Seq. ID No. 2877, Seq. ID No. 2881, Seq. ID No. 2883, Seq. ID No. 2885, Seq. ID No. 2887, Seq. ID No. 2891, Seq. ID No. 2893, Seq. ID No. 2895, Seq. ID No. 2899, Seq. ID No. 2901, Seq. ID No. 2907, Seq. ID No. 2915, Seq. ID No. 2917, Seq. ID No. 2919, Seq. ID No. 2921, Seq. ID No. 2923, Seq. ID No. 2927, Seq. ID No. 2931, Seq. ID No. 2933, Seq. ID No. 2935, Seq. ID No. 2943, Seq. ID No. 2945, Seq. ID No. 2951, Seq. ID No. 2953, Seq. ID No. 2957, Seq. ID No. 2959, Seq. ID No. 2961, Seq. ID No. 2963, Seq. ID No. 2965, Seq. ID No. 2967, Seq. ID No. 2971, Seq. ID No. 2973, Seq. ID No. 2975, Seq. ID No. 2977, Seq. ID No. 2979, Seq. ID No. 2983, Seq. ID No. 2985, Seq. ID No. 2987, Seq. ID No. 2991, Seq. ID No. 2993, Seq. ID No. 2999, Seq. ID No. 3001, Seq. ID No. 3005, Seq. ID No. 3009, Seq. ID No. 3011, Seq. ID No. 3015, Seq. ID No. 3017, Seq. ID No. 3019, Seq. ID No. 3021, Seq. ID No. 3027, Seq. ID No. 3033, Seq. ID No. 3035, Seq. ID No. 3037, Seq. ID No. 3039, Seq. ID No. 3043, Seq. ID No. 3045, Seq. ID No. 3047, Seq. ID No. 3049, Seq. ID No. 3051, Seq. ID No. 3053, Seq. ID No. 3055, Seq. ID No. 3057, Seq. ID No. 3059, Seq. ID No. 3067, Seq. ID No. 3069, Seq. ID No. 3071, Seq. ID No. 3079, Seq. ID No. 3083, Seq. ID No. 3085, Seq. ID No. 3087, Seq. ID No. 3091, Seq. ID No. 3093, Seq. ID No. 3099, Seq. ID No. 3101, Seq. ID No. 3103, Seq. ID No. 3109, Seq. ID No. 3111, Seq. ID No. 3115, Seq. ID No. 3117, Seq. ID No. 3119, Seq. ID No. 3121, Seq. ID No. 3123, Seq. ID No. 3125, Seq. ID No. 3129, Seq. ID No. 3131, Seq. ID No. 3133, Seq. ID No. 3135, Seq. ID No. 3137, Seq. ID No. 3139, Seq. ID No. 3141, Seq. ID No. 3143, Seq. ID No. 3147, Seq. ID No. 3149, Seq. ID No. 3151, Seq. ID No. 3153, Seq. ID No. 3155, Seq. ID No. 3157, Seq. ID No. 3159, Seq. ID No. 3161, Seq. ID No. 3165, Seq. ID No. 3167, Seq. ID No. 3169, Seq. ID No. 3171, Seq. ID No. 3173, Seq. ID No. 3179, Seq. ID No. 3181, Seq. ID No. 3183, Seq. ID No. 3185, Seq. ID No. 3187, Seq. ID No. 3189, Seq. ID No. 3191, Seq. ID No. 3193, Seq. ID No. 3195, Seq. ID No. 3197, Seq. ID No. 3203, Seq. ID No. 3205, Seq. ID No. 3207, Seq. ID No. 3209, Seq. ID No. 3211, Seq. ID No. 3217, Seq. ID No. 3223, Seq. ID No. 3225, Seq. ID No. 3227, Seq. ID No. 3229, Seq. ID No. 3235, Seq. ID No. 3249, Seq. ID No. 3251, Seq. ID No. 3253, Seq. ID No. 3255, Seq. ID No. 3257, Seq. ID No. 3259, Seq. ID No. 3263, Seq. ID No. 3265, Seq. ID No. 3269, Seq. ID No. 3271, Seq. ID No. 3273, Seq. ID No. 3277, Seq. ID No. 3281, Seq. ID No. 3283, Seq. ID No. 3285, Seq. ID No. 3289, Seq. ID No. 3291, Seq. ID No. 3293, Seq. ID No. 3299, Seq. ID No. 3301, Seq. ID No. 3303, Seq. ID No. 3305, Seq. ID No. 3307, Seq. ID No. 3309, Seq. ID No. 3311, Seq. ID No. 3313, Seq. ID No. 3315, Seq. ID No. 3319, Seq. ID No. 3321, Seq. ID No. 3323, Seq. ID No. 3325, Seq. ID No. 3331, Seq. ID No. 3335, Seq. ID No. 3337, Seq. ID No. 3339, Seq. ID No. 3341, Seq. ID No. 3345, Seq. ID No. 3347, Seq. ID No. 3349, Seq. ID No. 3353, Seq. ID No. 3355, Seq. ID No. 3359, Seq. ID No. 3361, Seq. ID No. 3363, Seq. ID No. 3365, Seq. ID No. 3367, Seq. ID No. 3369, Seq. ID No. 3371, Seq. ID No. 3373, Seq. ID No. 3375, Seq. ID No. 3377, Seq. ID No. 3379, Seq. ID No. 3381, Seq. ID No. 3383, Seq. ID No. 3397, Seq. ID No. 3399, Seq. ID No. 3401, Seq. ID No. 3407, Seq. ID No. 3409, Seq. ID No. 3413, Seq. ID No. 3415, Seq. ID No. 3419, Seq. ID No. 3425, Seq. ID No. 3427, Seq. ID No. 3431, Seq. ID No. 3433, Seq. ID No. 3435, Seq. ID No. 3439, Seq. ID No. 3441, Seq. ID No. 3443, Seq. ID No. 3445, Seq. ID No. 3447, Seq. ID No. 3455, Seq. ID No. 3457, Seq. ID No. 3459, Seq. ID No. 3461, Seq. ID No. 3465, Seq. ID No. 3467, Seq. ID No. 3471, Seq. ID No. 3473, Seq. ID No. 3475, Seq. ID No. 3479, Seq. ID No. 3483, Seq. ID No. 3485, Seq. ID No. 3487, Seq. ID No. 3489, Seq. ID No. 3495, Seq. ID No. 3497, Seq. ID No. 3499, Seq. ID No. 3501, Seq. ID No. 3505, Seq. ID No. 3507, Seq. ID No. 3509, Seq. ID No. 3511, Seq. ID No. 3513, Seq. ID No. 3517, Seq. ID No. 3519, Seq. ID No. 3521, Seq. ID No. 3525, Seq. ID No. 3529, Seq. ID No. 3531, Seq. ID No. 3533, Seq. ID No. 3535, Seq. ID No. 3537, Seq. ID No. 3539, Seq. ID No. 3541, Seq. ID No. 3543, Seq. ID No. 3545, Seq. ID No. 3547, Seq. ID No. 3549, Seq. ID No. 3551, Seq. ID No. 3553, Seq. ID No. 3555, Seq. ID No. 3557, Seq. ID No. 3559, Seq. ID No. 3561, Seq. ID No. 3563, Seq. ID No. 3565, Seq. ID No. 3567, Seq. ID No. 3569, Seq. ID No. 3571, Seq. ID No. 3573, Seq. ID No. 3575, Seq. ID No. 3579, Seq. ID No. 3581, Seq. ID No. 3583, Seq. ID No. 3587, Seq. ID No. 3589, Seq. ID No. 3595, Seq. ID No. 3597, Seq. ID No. 3599, Seq. ID No. 3603, Seq. ID No. 3605, Seq. ID No. 3607, Seq. ID No. 3609, Seq. ID No. 3611, Seq. ID No. 3613, Seq. ID No. 3615, Seq. ID No. 3617, Seq. ID No. 3619, Seq. ID No. 3621, Seq. ID No. 3623, Seq. ID No. 3627, Seq. ID No. 3629, Seq. ID No. 3635, Seq. ID No. 3637, Seq. ID No. 3639, Seq. ID No. 3641, Seq. ID No. 3645, Seq. ID No. 3647, Seq. ID No. 3649, Seq. ID No. 3651, Seq. ID No. 3653, Seq. ID No. 3657, Seq. ID No. 3659, Seq. ID No. 3663, Seq. ID No. 3665, Seq. ID No. 3667, Seq. ID No. 3671, Seq. ID No. 3673, Seq. ID No. 3675, Seq. ID No. 3677, Seq. ID No. 3679, Seq. ID No. 3681, Seq. ID No. 3683, Seq. ID No. 3685, Seq. ID No. 3687, Seq. ID No. 3689, Seq. ID No. 3691, Seq. ID No. 3693, Seq. ID No. 3695, Seq. ID No. 3699, Seq. ID No. 3701, Seq. ID No. 3703, Seq. ID No. 3705, Seq. ID No. 3707, Seq. ID No. 3709, Seq. ID No. 3713, Seq. ID No. 3715, Seq. ID No. 3717, Seq. ID No. 3727, Seq. ID No. 3729, Seq. ID No. 3733, Seq. ID No. 3737, Seq. ID No. 3739, Seq. ID No. 3741, Seq. ID No. 3745, Seq. ID No. 3747, Seq. ID No. 3759, Seq. ID No. 3767, Seq. ID No. 3769, Seq. ID No. 3771, Seq. ID No. 3779, Seq. ID No. 3783, Seq. ID No. 3785, Seq. ID No. 3789, Seq. ID No. 3791, Seq. ID No. 3795, Seq. ID No. 3797, Seq. ID No. 3803, Seq. ID No. 3805, Seq. ID No. 3807, Seq. ID No. 3809, Seq. ID No. 3811, Seq. ID No. 3813, Seq. ID No. 3815, Seq. ID No. 3817, Seq. ID No. 3819, Seq. ID No. 3823, Seq. ID No. 3825, Seq. ID No. 3831, Seq. ID No. 3833, Seq. ID No. 3835, Seq. ID No. 3841, Seq. ID No. 3843, Seq. ID No. 3847, Seq. ID No. 3855, Seq. ID No. 3857, Seq. ID No. 3863, Seq. ID No. 3867, Seq. ID No. 3871, Seq. ID No. 3873, Seq. ID No. 3875, Seq. ID No. 3877, Seq. ID No. 3881, Seq. ID No. 3883, Seq. ID No. 3885, Seq. ID No. 3893, Seq. ID No. 3895, Seq. ID No. 3899, Seq. ID No. 3901, Seq. ID No. 3905, Seq. ID No. 3907, Seq. ID No. 3911, Seq. ID No. 3913, Seq. ID No. 3915, Seq. ID No. 3919, Seq. ID No. 3921, Seq. ID No. 3923, Seq. ID No. 3925, Seq. ID No. 3927, Seq. ID No. 3929, Seq. ID No. 3931, Seq. ID No. 3933, Seq. ID No. 3935, Seq. ID No. 3939, Seq. ID No. 3941, Seq. ID No. 3943, Seq. ID No. 3945, Seq. ID No. 3947, Seq. ID No. 3949, Seq. ID No. 3951, Seq. ID No. 3953, Seq. ID No. 3955, Seq. ID No. 3957, Seq. ID No. 3959, Seq. ID No. 3961, Seq. ID No. 3965, Seq. ID No. 3967, Seq. ID No. 3969, Seq. ID No. 3971, Seq. ID No. 3975, Seq. ID No. 3979, Seq. ID No. 3981, Seq. ID No. 3983, Seq. ID No. 3985, Seq. ID No. 3987, Seq. ID No. 3991, Seq. ID No. 3995, Seq. ID No. 3997, Seq. ID No. 3999, Seq. ID No. 4003, Seq. ID No. 4007, Seq. ID No. 4009, Seq. ID No. 4015, Seq. ID No. 4017, Seq. ID No. 4021, Seq. ID No. 4023, Seq. ID No. 4029, Seq. ID No. 4035, Seq. ID No. 4037, Seq. ID No. 4039, Seq. ID No. 4049, Seq. ID No. 4051, Seq. ID No. 4058, Seq. ID No. 4055, Seq. ID No. 4057, Seq. ID No. 4061, Seq. ID No. 4075, Seq. ID No. 4079, Seq. ID No. 4085, Seq. ID No. 4087, Seq. ID No. 4089, Seq. ID No. 4091, Seq. ID No. 4093, Seq. ID No. 4095, Seq. ID No. 4099, Seq. ID No. 4105, Seq. ID No. 4107, Seq. ID No. 4109, Seq. ID No. 4111, Seq. ID No. 4113, Seq. ID No. 4117, Seq. ID No. 4119, Seq. ID No. 4121, Seq. ID No. 4123, Seq. ID No. 4125, Seq. ID No. 4127, Seq. ID No. 4129, Seq. ID No. 4131, Seq. ID No. 4133, Seq. ID No. 4135, Seq. ID No. 4137, Seq. ID No. 4139, Seq. ID No. 4141, Seq. ID No. 4143, Seq. ID No. 4145, Seq. ID No. 4149, Seq. ID No. 4153, Seq. ID No. 4155, Seq. ID No. 4157, Seq. ID No. 4161, Seq. ID No. 4163, Seq. ID No. 4167, Seq. ID No. 4171, Seq. ID No. 4173, Seq. ID No. 4175, Seq. ID No. 4177, Seq. ID No. 4179, Seq. ID No. 4181, Seq. ID No. 4185, Seq. ID No. 4187, Seq. ID No. 4189, Seq. ID No. 4191, Seq. ID No. 4193, Seq. ID No. 4195, Seq. ID No. 4197, Seq. ID No. 4199, Seq. ID No. 4203, Seq. ID No. 4205, Seq. ID No. 4207, Seq. ID No. 4209, Seq. ID No. 4211, Seq. ID No. 4219, Seq. ID No. 4229, Seq. ID No. 4233, Seq. ID No. 4235, Seq. ID No. 4237, Seq. ID No. 4239, Seq. ID No. 4243, Seq. ID No. 4249, Seq. ID No. 4251, Seq. ID No. 4253, Seq. ID No. 4255, Seq. ID No. 4259, Seq. ID No. 4263, Seq. ID No. 4265, Seq. ID No. 4267, Seq. ID No. 4269, Seq. ID No. 4271, Seq. ID No. 4273, Seq. ID No. 4275, Seq. ID No. 4281, Seq. ID No. 4283, Seq. ID No. 4285, Seq. ID No. 4287, Seq. ID No. 4289, Seq. ID No. 4291, Seq. ID No. 4293, Seq. ID No. 4295, Seq. ID No. 4297, Seq. ID No. 4299, Seq. ID No. 4301, Seq. ID No. 4303, Seq. ID No. 4307, Seq. ID No. 4309, Seq. ID No. 4313, Seq. ID No. 4315, Seq. ID No. 4317, Seq. ID No. 4319, Seq. ID No. 4321, Seq. ID No. 4323, Seq. ID No. 4325, Seq. ID No. 4329, Seq. ID No. 4331, Seq. ID No. 4333, Seq. ID No. 4335, Seq. ID No. 4337, Seq. ID No. 4339, Seq. ID No. 4343, Seq. ID No. 4345, Seq. ID No. 4347, Seq. ID No. 4351, Seq. ID No. 4353, Seq. ID No. 4355, Seq. ID No. 4359, Seq. ID No. 4361, Seq. ID No. 4363, Seq. ID No. 4365, Seq. ID No. 4367, Seq. ID No. 4369, Seq. ID No. 4375, Seq. ID No. 4377, Seq. ID No. 4379, Seq. ID No. 4383, Seq. ID No. 4389, Seq. ID No. 4391, Seq. ID No. 4393, Seq. ID No. 4395, Seq. ID No. 4397, Seq. ID No. 4399, Seq. ID No. 4401, Seq. ID No. 4403, Seq. ID No. 4405, Seq. ID No. 4407, Seq. ID No. 4409, Seq. ID No. 4411, Seq. ID No. 4413, Seq. ID No. 4415, Seq. ID No. 4417, Seq. ID No. 4419, Seq. ID No. 4421, Seq. ID No. 4423, Seq. ID No. 4425, Seq. ID No. 4427, Seq. ID No. 4429, Seq. ID No. 4431, Seq. ID No. 4435, Seq. ID No. 4437, Seq. ID No. 4439, Seq. ID No. 4441, Seq. ID No. 4449,.Seq. ID No. 4451, Seq. ID No. 4453, Seq. ID No. 4455, Seq. ID No. 4457, Seq. ID No. 4459, Seq. ID No. 4461, Seq. ID No. 4465, Seq. ID No. 4467, Seq. ID No. 4471, Seq. ID No. 4475, Seq. ID No. 4477, Seq. ID No. 4479, Seq. ID No. 4481, Seq. ID No. 4485, Seq. ID No. 4487, Seq. ID No. 4489, Seq. ID No. 4491, Seq. ID No. 4493, Seq. ID No. 4495, Seq. ID No. 4497, Seq. ID No. 4501, Seq. ID No. 4503, Seq. ID No. 4505, Seq. ID No. 4507, Seq. ID No. 4509, Seq. ID No. 4511, Seq. ID No. 4513, Seq. ID No. 4515, Seq. ID No. 4519, Seq. ID No. 4521, Seq. ID No. 4523, Seq. ID No. 4525, Seq. ID No. 4527, Seq. ID No. 4529, Seq. ID No. 4531, Seq. ID No. 4533, Seq. ID No. 4537, Seq. ID No. 4541, Seq. ID No. 4545, Seq. ID No. 4547, Seq. ID No. 4549, Seq. ID No. 4551, Seq. ID No. 4553, Seq. ID No. 4555, Seq. ID No. 4559, Seq. ID No. 4561, Seq. ID No. 4565, Seq. ID No. 4567, Seq. ID No. 4571, Seq. ID No. 4573, Seq. ID No. 4575, Seq. ID No. 4577, Seq. ID No. 4581, Seq. ID No. 4585, Seq. ID No. 4589, Seq. ID No. 4591, Seq. ID No. 4597, Seq. ID No. 4599, Seq. ID No. 4601, Seq. ID No. 4603, Seq. ID No. 4605, Seq. ID No. 4607, Seq. ID No. 4609, Seq. ID No. 4611, Seq. ID No. 4613, Seq. ID No. 4615, Seq. ID No. 4617, Seq. ID No. 4619, Seq. ID No. 4621, Seq. ID No. 4623, Seq. ID No. 4627, Seq. ID No. 4631, Seq. ID No. 4637, Seq. ID No. 4641, Seq. ID No. 4643, Seq. ID No. 4645, Seq. ID No. 4647, Seq. ID No. 4649, Seq. ID No. 4653, Seq. ID No. 4659, Seq. ID No. 4661, Seq. ID No. 4663, Seq. ID No. 4665, Seq. ID No. 4667, Seq. ID No. 4669, Seq. ID No. 4671, Seq. ID No. 4673, Seq. ID No. 4675, Seq. ID No. 4677, Seq. ID No. 4679, Seq. ID No. 4683, Seq. ID No. 4685, Seq. ID No. 4687, Seq. ID No. 4691, Seq. ID No. 4693, Seq. ID No. 4695, Seq. ID No. 4699, Seq. ID No. 4701, Seq. ID No. 4703, Seq. ID No. 4705, Seq. ID No. 4713, Seq. ID No. 4717, Seq. ID No. 4719, Seq. ID No. 4721, Seq. ID No. 4727, Seq. ID No. 4729, Seq. ID No. 4733, Seq. ID No. 4735, Seq. ID No. 4737, Seq. ID No. 4739, Seq. ID No. 4741, Seq. ID No. 4743, Seq. ID No. 4747, Seq. ID No. 4749, Seq. ID No. 4751, Seq. ID No. 4755, Seq. ID No. 4757, Seq. ID No. 4763, Seq. ID No. 4765, Seq. ID No. 4767, Seq. ID No. 4769, Seq. ID No. 4773, Seq. ID No. 4775, Seq. ID No. 4777, Seq. ID No. 4779, Seq. ID No. 4781, Seq. ID No. 4787, Seq. ID No. 4789, Seq. ID No. 4791, Seq. ID No. 4793, Seq. ID No. 4795, Seq. ID No. 4797, Seq. ID No. 4801, Seq. ID No. 4803, Seq. ID No. 4805, Seq. ID No. 4809, Seq. ID No. 4811, Seq. ID No. 4813, Seq. ID No. 4815, Seq. ID No. 4817, Seq. ID No. 4819, Seq. ID No. 4825, Seq. ID No. 4827, Seq. ID No. 4829, Seq. ID No. 4831, Seq. ID No. 4833, Seq. ID No. 4837, Seq. ID No. 4839, Seq. ID No. 4841, Seq. ID No. 4843, Seq. ID No. 4845, Seq. ID No. 4849, Seq. ID No. 4851, Seq. ID No. 4853, Seq. ID No. 4855, Seq. ID No. 4861, Seq. ID No. 4863, Seq. ID No. 4867, Seq. ID No. 4875, Seq. ID No. 4877, Seq. ID No. 4879, Seq. ID No. 4881, Seq. ID No. 4883, Seq. ID No. 4889, Seq. ID No. 4891, Seq. ID No. 4893, Seq. ID No. 4895, Seq. ID No. 4897, Seq;. ID No. 4899, Seq. ID No. 4901, Seq. ID No. 4903, Seq. ID No. 4905, Seq. ID No. 4907, Seq. ID No. 4909, Seq. ID No. 4911, Seq. ID No. 4913, Seq. ID No. 4915, Seq. ID No. 4917, Seq. ID No. 4919, Seq. ID No. 4921, Seq. ID No. 4923, Seq. ID No. 4927, Seq. ID No. 4931, Seq. ID No. 4935, Seq. ID No. 4937, Seq. ID No. 4939, Seq. ID No. 4941, Seq. ID No. 4943, Seq. ID No. 4945, Seq. ID No. 4947, Seq. ID No. 4949, Seq. ID No. 4951, Seq. ID No. 4953, Seq. ID No. 4957, Seq. ID No. 4959, Seq. ID No. 4961, Seq. ID No. 4963, Seq. ID No. 4973, Seq. ID No. 4975, Seq. ID No. 4977, Seq. ID No. 4979, Seq. ID No. 4981, Seq. ID No. 4983, Seq. ID No. 4985, Seq. ID No. 4987, Seq. ID No. 4989, Seq. ID No. 4991, Seq. ID No. 4993, Seq. ID No. 4995, Seq. ID No. 4997, Seq. ID No. 4999, Seq. ID No. 5003, Seq. ID No. 5005, Seq. ID No. 5007, Seq. ID No. 5009, Seq. ID No. 5011, Seq. ID No. 5013, Seq. ID No. 5017, Seq. ID No. 5019, Seq. ID No. 5021, Seq. ID No. 5023, Seq. ID No. 5025, Seq. ID No. 5029, Seq. ID No. 5031, Seq. ID No. 5033, Seq. ID No. 5035, Seq. ID No. 5041, Seq. ID No. 5043, Seq. ID No. 5045, Seq. ID No. 5047, Seq. ID No. 5057, Seq. ID No. 5059, Seq. ID No. 5063, Seq. ID No. 5065, Seq. ID No. 5067, Seq. ID No. 5069, Seq. ID No. 5075, Seq. ID No. 5077, Seq. ID No. 5079, Seq. ID No. 5081, Seq. ID No. 5083, Seq. ID No. 5085, Seq. ID No. 5087, Seq. ID No. 5091, Seq. ID No. 5099, Seq. ID No. 5101, Seq. ID No. 5103, Seq. ID No. 5109, Seq. ID No. 5111, Seq. ID No. 5113, Seq. ID No. 5115, Seq. ID No. 5117, Seq. ID No. 5121, Seq. ID No. 5125, Seq. ID No. 5127, Seq. ID No. 5133, Seq. ID No. 5139, Seq. ID No. 5141, Seq. ID No. 5145, Seq. ID No. 5147, Seq. ID No. 5149, Seq. ID No. 5151, Seq. ID No. 5155, Seq. ID No. 5157, Seq. ID No. 5159, Seq. ID No. 5161, Seq. ID No. 5165, Seq. ID No. 5167, Seq. ID No. 5169, Seq. ID No. 5177, Seq. ID No. 5181, Seq. ID No. 5183, Seq. ID No. 5185, Seq. ID No. 5187, Seq. ID No. 5189, Seq. ID No. 5191, Seq. ID No. 5193, Seq. ID No. 5195, Seq. ID No. 5197, Seq. ID No. 5199, Seq. ID No. 5201, Seq. ID No. 5203, Seq. ID No. 5205, Seq. ID No. 5209, Seq. ID No. 5211, Seq. ID No. 5215, Seq. ID No. 5219, Seq. ID No. 5221, Seq. ID No. 5229, Seq. ID No. 5231, Seq. ID No. 5239, Seq. ID No. 5241, Seq. ID No. 5243, Seq. ID No. 5245, Seq. ID No. 5251, Seq. ID No. 5253, Seq. ID No. 5255, Seq. ID No. 5261, Seq. ID No. 5263, Seq. ID No. 5265, Seq. ID No. 5267, Seq. ID No. 5277, Seq. ID No. 5279, Seq. ID No. 5281, Seq. ID No. 5285, Seq. ID No. 5287, Seq. ID No. 5291, Seq. ID No. 5295, Seq. ID No. 5297, Seq. ID No. 5299, Seq. ID No. 5301, Seq. ID No. 5303, Seq. ID No. 5305, Seq. ID No. 5307, Seq. ID No. 5309, Seq. ID No. 5311, Seq. ID No. 5313, Seq. ID No. 5317, Seq. ID No. 5319, Seq. ID No. 5321, Seq. ID No. 5323, Seq. ID No. 5327, Seq. ID No. 5329, Seq. ID No. 5331, Seq. ID No. 5333, Seq. ID No. 5335, Seq. ID No. 5337, Seq. ID No. 5343, Seq. ID No. 5345, Seq. ID No. 5349, Seq. ID No. 5351, Seq. ID No. 5357, Seq. ID No. 5359, Seq. ID No. 5365, Seq. ID No. 5367, Seq. ID No. 5373, Seq. ID No. 5377, Seq. ID No. 5379, Seq. ID No. 5381, Seq. ID No. 5383, Seq. ID No. 5387, Seq. ID No. 5389, Seq. ID No. 5391, Seq. ID No. 5393, Seq. ID No. 5397, Seq. ID No. 5399, Seq. ID No. 5401, Seq. ID No. 5403, Seq. ID No. 5405, Seq. ID No. 5407, Seq. ID No. 5409, Seq. ID No. 5411, Seq. ID No. 5415, Seq. ID No. 5417, Seq. ID No. 5419, Seq. ID No. 5421, Seq. ID No. 5423, Seq. ID No. 5425, Seq. ID No. 5427, Seq. ID No. 5431, Seq. ID No. 5433, Seq. ID No. 5435, Seq. ID No. 5437, Seq. ID No. 5439, Seq. ID No. 5441, Seq. ID No. 5443, Seq. ID No. 5447, Seq. ID No. 5449, Seq. ID No. 5451, Seq. ID No. 5453, Seq. ID No. 5455, Seq. ID No. 5457, Seq. ID No. 5467, Seq. ID No. 5471, Seq. ID No. 5473, Seq. ID No. 5477, Seq. ID No. 5479, Seq: ID No. 5481, Seq. ID No. 5491, Seq. ID No. 5493, Seq. ID No. 5495, Seq. ID No. 5499, Seq. ID No. 5503, Seq. ID No. 5509, Seq. ID No. 5513, Seq. ID No. 5515, Seq. ID No. 5517, Seq. ID No. 5519, Seq. ID No. 5521, Seq. ID No. 5527, Seq. ID No. 5529, Seq. ID No. 5531, Seq. ID No. 5533, Seq. ID No. 5537, Seq. ID No. 5539, Seq. ID No. 5541, Seq. ID No. 5543, Seq. ID No. 5545, Seq. ID No. 5547, Seq. ID No. 5549, Seq. ID No. 5551, Seq. ID No. 5553, Seq. ID No. 5557, Seq. ID No. 5559, Seq. ID No. 5563, Seq. ID No. 5567, Seq. ID No. 5569, Seq. ID No. 5575, Seq. ID No. 5577, Seq. ID No. 5581, Seq. ID No. 5583, Seq. ID No. 5585, Seq. ID No. 5589, Seq. ID No. 5591, Seq. ID No. 5593, Seq. ID No. 5595, Seq. ID No. 5599, Seq. ID No. 5601, Seq. ID No. 5607, Seq. ID No. 5613, Seq. ID No. 5615, Seq. ID No. 5617, Seq. ID No. 5619, Seq. ID No. 5621, Seq. ID No. 5625, Seq. ID No. 5627, Seq. ID No. 5629, Seq. ID No. 5631, Seq. ID No. 5637, Seq. ID No. 5639, Seq. ID No. 5641, Seq. ID No. 5645, Seq. ID No. 5647, Seq. ID No. 5649, Seq. ID No. 5651, Seq. ID No. 5655 Seq. ID No. 5657, Seq. ID No. 5661, Seq. ID No. 5665, Seq. ID No. 5667, Seq. ID No. 5669, Seq. ID No. 5677, Seq. ID No. 5679, Seq. ID No. 5683, Seq. ID No. 5685, Seq. ID No. 5687, Seq. ID No. 5689, Seq. ID No. 5691, Seq. ID No. 5693, Seq. ID No. 5697, Seq. ID No. 5699, Seq. ID No. 5701, Seq. ID No. 5703, Seq. ID No. 5705, Seq. ID No. 5707, Seq. ID No. 5711, Seq. ID No. 5713, Seq. ID No. 5715, Seq. ID No. 5717, Seq. ID No. 5719, Seq. ID No. 5721, Seq. ID No. 5723, Seq. ID No. 5725, Seq. ID No. 5727, Seq. ID No. 5735, Seq. ID No. 5739, Seq. ID No. 5741, Seq. ID No. 5743, Seq. ID No. 5745, Seq. ID No. 5747, Seq. ID No. 5749, Seq. ID No. 5751, Seq. ID No. 5753, Seq. ID No. 5755, Seq. ID No. 5757, Seq. ID No. 5759, Seq. ID No. 5761, Seq. ID No. 5769, Seq. ID No. 5771, Seq. ID No. 5777, Seq. ID No. 5779, Seq. ID No. 5783, Seq. ID No. 5787, Seq. ID No. 5791, Seq. ID No. 5795, Seq. ID No. 5799, Seq. ID No. 5801, Seq. ID No. 5807, Seq. ID No. 5809, Seq. ID No. 5813, Seq. ID No. 5815, Seq. ID No. 5819, Seq. ID No. 5821, Seq. ID No. 5823, Seq. ID No. 5825, Seq. ID No. 5827, Seq. ID No. 5829, Seq. ID No. 5831, Seq. ID No. 5833, Seq. ID No. 5835, Seq. ID No. 5837, Seq. ID No. 5839, Seq. ID No. 5841, Seq. ID No. 5845, Seq. ID No. 5847, Seq. ID No. 5849, Seq. ID No. 5851, Seq. ID No. 5855, Seq. ID No. 5857, Seq. ID No. 5859, Seq. ID No. 5861, Seq. ID No. 5863, Seq. ID No. 5865, Seq. ID No. 5869, Seq. ID No. 5871, Seq. ID No. 5873, Seq. ID No. 5875, Seq. ID No. 5879, Seq. ID No. 5881, Seq. ID No. 5883, Seq. ID No. 5889, Seq. ID No. 5895, Seq. ID No. 5897, Seq. ID No. 5901, Seq. ID No. 5903, Seq. ID No. 5911, Seq. ID No. 5913, Seq. ID No. 5915, Seq. ID No. 5917, Seq. ID No. 5919, Seq. ID No. 5927, Seq. ID No. 5929, Seq. ID No. 5933, Seq. ID No. 5935, Seq. ID No. 5937, Seq. ID No. 5941, Seq. ID No. 5945, Seq. ID No. 5947, Seq. ID No. 5951, Seq. ID No. 5959, Seq. ID No. 5961, Seq. ID No. 5963, Seq. ID No. 5965, Seq. ID No. 5967, Seq. ID No. 5969, Seq. ID No. 5971, Seq. ID No. 5973, Seq. ID No. 5977, Seq. ID No. 5979, Seq. ID No. 5981, Seq. ID No. 5985, Seq. ID No. 5987, Seq. ID No. 5989, Seq. ID No. 5991, Seq. ID No. 5993, Seq. ID No. 5995, Seq. ID No. 5999, Seq. ID No. 6001, Seq. ID No. 6003, Seq. ID No. 6009, Seq. ID No. 6011, Seq. ID No. 6013, Seq. ID No. 6015, Seq. ID No. 6017, Seq. ID No. 6025, Seq. ID No. 6027, Seq. ID No. 6029, Seq. ID No. 6031, Seq. ID No. 6033, Seq. ID No. 6035, Seq. ID No. 6039, Seq. ID No. 6041, Seq. ID No. 6043, Seq. ID No. 6045, Seq. ID No. 6049, Seq. ID No. 6051, Seq. ID No. 6053, Seq. ID No. 6055, Seq. ID No. 6057, Seq. ID No. 6061, Seq. ID No. 6063, Seq. ID No. 6065, Seq. ID No. 6069, Seq. ID No. 6071, Seq. ID No. 6073, Seq. ID No. 6077, Seq. ID No. 6079, Seq. ID No. 6085, Seq. ID No. 6087, Seq. ID No. 6089, Seq. ID No. 6093, Seq. ID No. 6095, Seq. ID No. 6101, Seq. ID No. 6103, Seq. ID No. 6109, Seq. ID No. 6111, Seq. ID No. 6117, Seq. ID No. 6121, Seq. ID No. 6123, Seq. ID No. 6129, Seq. ID No. 6131, Seq. ID No. 6133, Seq. ID No. 6135, Seq. ID No. 6137, Seq. ID No. 6139, Seq. ID No. 6141, Seq. ID No. 6145, Seq. ID No. 6151, Seq. ID No. 6155, Seq. ID No. 6157, Seq. ID No. 6159, Seq. ID No. 6165, Seq. ID No. 6167, Seq. ID No. 6169, Seq. ID No. 6171, Seq. ID No. 6175, Seq. ID No. 6177, Seq. ID No. 6181, Seq. ID No. 6187, Seq. ID No. 6193, Seq. ID No. 6195, Seq. ID No. 6197, Seq. ID No. 6199, Seq. ID No. 6201, Seq. ID No. 6209, Seq. ID No. 6213, Seq. ID No. 6215, Seq. ID No. 6217, Seq. ID No. 6219, Seq. ID No. 6231, Seq. ID No. 6233, Seq. ID No. 6235, Seq. ID No. 6239, Seq. ID No. 6241, Seq. ID No. 6243, Seq. ID No. 6249, Seq. ID No. 6257, Seq. ID No. 6259, Seq. ID No. 6261, Seq. ID No. 6263, Seq. ID No. 6267, Seq. ID No. 6269, Seq. ID No. 6271, Seq. ID No. 6275, Seq. ID No. 6277, Seq. ID No. 6279, Seq. ID No. 6281, Seq. ID No. 6283, Seq. ID No. 6285, Seq. ID No. 6287, Seq. ID No. 6293, Seq. ID No. 6295, Seq. ID No. 6297, Seq. ID No. 6299, Seq. ID No. 6305, Seq. ID No. 6309, Seq. ID No. 6311, Seq. ID No. 6315, Seq. ID No. 6317, Seq. ID No. 6319, Seq. ID No. 6321, Seq. ID No. 6323, Seq. ID No. 6325, Seq. ID No. 6327, Seq. ID No. 6329, Seq. ID No. 6331, Seq. ID No. 6335, Seq. ID No. 6337, Seq. ID No. 6341, Seq. ID No. 6345, Seq. ID No. 6349, Seq. ID No. 6351, Seq. ID No. 6353, Seq. ID No. 6359, Seq. ID No. 6361, Seq. ID No. 6367, Seq. ID No; 6369, Seq. ID No. 6371, Seq. ID No. 6373, Seq. ID No. 6375, Seq. ID No. 6377, Seq. ID No. 6379, Seq. ID No. 6381, Seq. ID No. 6385, Seq. ID No. 6389, Seq. ID No. 6393, Seq. ID No. 6395, Seq. ID No. 6399, Seq. ID No. 6409, Seq. ID No. 6411, Seq. ID No. 6413, Seq. ID No. 6417, Seq. ID No. 6421, Seq. ID No. 6423, Seq. ID No. 6425, Seq. ID No. 6427, Seq. ID No. 6429, Seq. ID No. 6431, Seq. ID No. 6441, Seq. ID No. 6443, Seq. ID No. 6445, Seq. ID No. 6451, Seq. ID No. 6453, Seq. ID No. 6459, Seq. ID No. 6461, Seq. ID No. 6463, Seq. ID No. 6465, Seq. ID No. 6467, Seq. ID No. 6469, Seq. ID No. 6471, Seq. ID No. 6473, Seq. ID No. 6479, Seq. ID No. 6483, Seq. ID No. 6493, Seq. ID No. 6495, Seq. ID No. 6497, Seq. ID No. 6501, Seq. ID No. 6503, Seq. ID No. 6505, Seq. ID No. 6507, Seq. ID No. 6511, Seq. ID No. 6517, Seq. ID No. 6523, Seq. ID No. 6525, Seq. ID No. 6535, Seq. ID No. 6537, Seq. ID No. 6539, Seq. ID No. 6541, Seq. ID No. 6543, Seq. ID No. 6545, Seq. ID No. 6547, Seq. ID No. 6549, Seq. ID No. 6551, Seq. ID No. 6553, Seq. ID No. 6555, Seq. ID No. 6557, Seq. ID No. 6559, Seq. ID No. 6563, Seq. ID No. 6573, Seq. ID No. 6575, Seq. ID No. 6577, Seq. ID No. 6579, Seq. ID No. 6583, Seq. ID No. 6585, Seq. ID No. 6587, Seq. ID No. 6591, Seq. ID No. 6597, Seq. ID No. 6601, Seq. ID No. 6603, Seq. ID No. 6605, Seq. ID No. 6609, Seq. ID No. 6611, Seq. ID No. 6613, Seq. ID No. 6615, Seq. ID No. 6617, Seq. ID No. 6619, Seq. ID No. 6621, Seq. ID No. 6623, Seq. ID No. 6627, Seq. ID No. 6629, Seq. ID No. 6631, Seq. ID No. 6633, Seq. ID No. 6637, Seq. ID No. 6639, Seq. ID No. 6643, Seq. ID No. 6645, and Seq. ID No. 6649.

30. The polynucleotide of claim 7 wherein the polynucleotide encodes a polypeptide that is identified by an ORF finder program, which searches for a transmembrane domain between two Stop codons and a Start codon immediately upstream of this transmembrane region, and the polynucleotide is selected from one of Seq. ID No. 7, Seq. ID No. 9, Seq. ID No. 33, Seq. ID No. 47, Seq. ID No. 67, Seq. ID No. 85, Seq. ID No. 87, Seq. ID No. 123, Seq. ID No. 133, Seq. ID No. 141, Seq. ID No. 159, Seq. ID No. 163, Seq. ID No. 191, Seq. ID No. 209, Seq. ID No. 211, Seq. ID No. 215, Seq. ID No. 217, Seq. ID No. 225, Seq. ID No. 235, Seq. ID No. 237, Seq. ID No. 249, Seq. ID No. 251, Seq. ID No. 255, Seq. ID No. 271, Seq. ID No. 277., Seq. ID No. 285, Seq. ID No. 287, Seq. ID No. 289, Seq. ID No. 327, Seq. ID No. 329, Seq. ID No. 373, Seq. ID No. 375, Seq. ID No. 419, Seq. ID No. 487, Seq. ID No. 497, Seq. ID No. 499, Seq. ID No. 503, Seq. ID No. 505, Seq. ID No. 509, Seq. ID No. 511, Seq. ID No. 515, Seq. ID No. 525, Seq. ID No. 527, Seq. ID No. 545, Seq. ID No. 567, Seq. ID No. 569, Seq. ID No. 575, Seq. ID No. 577, Seq. ID No. 579, Seq. ID No. 593, Seq. ID No. 617, Seq. ID No. 637, Seq. ID No. 639, Seq. ID No. 641, Seq. ID No. 645, Seq. ID No. 653, Seq. ID No. 655, Seq. ID No. 659, Seq. ID No. 669, Seq. ID No. 675, Seq. ID No. 677, Seq. ID No. 679, Seq. ID No. 715, Seq. ID No. 717, Seq. ID No. 719, Seq. ID No. 721, Seq. ID No. 723, Seq. ID No. 747, Seq. ID No. 751, Seq. ID No. 755, Seq. ID No. 757, Seq. ID No. 759, Seq. ID No. 761, Seq. ID No. 763, Seq. ID No. 769, Seq. ID No. 777, Seq. ID No. 779, Seq. ID No. 807, Seq. ID No. 809, Seq. ID No. 819, Seq. ID No. 825, Seq. ID No. 863, Seq. ID No. 893, Seq. ID No. 901, Seq. ID No. 935, Seq. ID No. 943, Seq. ID No. 955, Seq. ID No. 967, Seq. ID No. 979, Seq. ID No. 1005, Seq. ID No. 1009, Seq. ID No. 1011, Seq. ID No. 1013, Seq. ID No. 1015, Seq. ID No. 1019, Seq. ID No. 1029, Seq. ID No. 1031, Seq. ID No. 1033, Seq. ID No. 1037, Seq. ID No. 1039, Seq. ID No. 1045, Seq. ID No. 1055, Seq. ID No. 1075, Seq. ID No. 1105, Seq. ID No. 1131, Seq. ID No. 1135, Seq. ID No. 1137, Seq. ID No. 1165, Seq. ID No. 1167, Seq. ID No. 1169, Seq. ID No. 1183, Seq. ID No. 1193, Seq. ID No. 1197, Seq. ID No. 1213, Seq. ID No. 1223, Seq. ID No. 1227, Seq. ID No. 1229, Seq. ID No. 1237, Seq. ID No. 1243, Seq. ID No. 1265, Seq. ID No. 1267, Seq. ID No. 1269, Seq. ID No. 1271, Seq. ID No. 1283, Seq. ID No. 1287, Seq. ID No. 1291, Seq. ID No. 1297, Seq. ID No. 1305, Seq. ID No. 1315, Seq. ID No. 1325, Seq. ID No. 1327, Seq. ID No. 1329, Seq. ID No. 1331, Seq. ID No. 1341, Seq. ID No. 1353, Seq. ID No. 1367, Seq. ID No. 1401, Seq. ID No. 1429, Seq. ID No. 1435, Seq. ID No. 1445, Seq. ID No. 1481, Seq. ID No. 1513, Seq. ID No. 1515, Seq. ID No. 1517, Seq. ID No. 1529, Seq. ID No. 1533, Seq. ID No. 1535, Seq. ID No. 1545, Seq. ID No. 1547, Seq. ID No. 1551, Seq. ID No. 1559, Seq. ID No. 1563, Seq. ID No. 1571, Seq. ID No. 1579, Seq. ID No. 1583, Seq. ID No. 1585, Seq. ID No. 1621, Seq. ID No. 1633, Seq. ID No. 1643, Seq. ID No. 1645, Seq. ID No. 1647, Seq. ID No. 1649, Seq. ID No. 1653, Seq. ID No. 1671, Seq. ID No. 1673, Seq. ID No. 1677, Seq. ID No. 1681, Seq. ID No. 1707, Seq. ID No. 1731, Seq. ID No. 1733, Seq. ID No. 1737, Seq. ID No. 1753, Seq. ID No. 1757, Seq. ID No. 1765, Seq. ID No. 1767, Seq. ID No. 1787, Seq. ID No. 1791, Seq. ID No. 1797, Seq. ID No. 1805, Seq. ID No. 1819, Seq. ID No. 1821, Seq. ID No. 1823, Seq. ID No. 1839, Seq. ID No. 1869, Seq. ID No. 1875, Seq. ID No. 1891, Seq. ID No. 1893, Seq. ID No. 1895, Seq. ID No. 1923, Seq. ID No. 1927, Seq. ID No. 1969, Seq. ID No. 1981, Seq. ID No. 1991, Seq. ID No. 1993, Seq. ID No. 2013, Seq. ID No. 2017, Seq. ID No. 2027, Seq. ID No. 2033, Seq. ID No. 2041, Seq. ID No. 2049, Seq. ID No. 2053, Seq. ID No. 2087, Seq. ID No. 2089, Seq. ID No. 2105, Seq. ID No. 2115, Seq. ID No. 2121, Seq. ID No. 2127, Seq. ID No. 2151, Seq. ID No. 2159, Seq. ID No. 2171, Seq. ID No. 2173, Seq. ID No. 2177, Seq. ID No. 2187, Seq. ID No. 2237, Seq. ID No. 2239, Seq. ID No. 2245, Seq. ID No. 2249, Seq. ID No. 2271, Seq. ID No. 2283, Seq. ID No. 2289, Seq. ID No. 2291, Seq. ID No. 2293, Seq. ID No. 2295, Seq. ID No. 2303, Seq. ID No. 2305, Seq. ID No. 2307, Seq. ID No. 2317, Seq. ID No. 2319, Seq. ID No. 2321, Seq. ID No. 2323, Seq. ID No. 2325, Seq. ID No. 2327, Seq. ID No. 2333, Seq. ID No. 2343, Seq. ID No. 2347, Seq. ID No. 2349, Seq. ID No. 2351, Seq. ID No. 2353, Seq. ID No. 2355, Seq. ID No. 2357, Seq. ID No. 2365, Seq. ID No. 2389, Seq. ID No. 2391, Seq. ID No. 2407, Seq. ID No. 2419, Seq. ID No. 2421, Seq. ID No. 2427, Seq. ID No. 2429, Seq. ID No. 2433, Seq. ID No. 2449, Seq. ID No. 2459, Seq. ID No. 2489, Seq. ID No. 2497, Seq. ID No. 2503, Seq. ID No. 2507, Seq. ID No. 2515, Seq. ID No. 2523, Seq. ID No. 2525, Seq. ID No. 2531, Seq. ID No. 2535, Seq. ID No. 2537, Seq. ID No. 2541, Seq. ID No. 2543, Seq. ID No. 2545, Seq. ID No. 2555, Seq. ID No. 2557, Seq. ID No. 2569, Seq. ID No. 2571, Seq. ID No. 2583, Seq. ID No. 2591, Seq. ID No. 2597, Seq. ID No. 2599, Seq. ID No. 2601, Seq. ID No. 2607, Seq. ID No. 2611, Seq. ID No. 2621, Seq. ID No. 2629, Seq. ID No. 2651, Seq. ID No. 2679, Seq. ID No. 2693, Seq. ID No. 2701, Seq. ID No. 2703, Seq. ID No. 2705, Seq. ID No. 2707, Seq. ID No. 2731, Seq. ID No. 2733, Seq. ID No. 2783, Seq. ID No. 2785, Seq. ID No. 2813, Seq. ID No. 2815, Seq. ID No. 2823, Seq. ID No. 2835, Seq. ID No. 2837, Seq. ID No. 2841, Seq. ID No. 2853, Seq. ID No. 2873, Seq. ID No. 2875, Seq. ID No. 2881, Seq. ID No. 2905, Seq. ID No. 2935, Seq. ID No. 2937, Seq. ID No. 2939, Seq. ID No. 2941, Seq. ID No. 2947, Seq. ID No. 2949, Seq. ID No. 2969, Seq. ID No. 2973, Seq. ID No. 2977, Seq. ID No. 2981, Seq. ID No. 2987, Seq. ID No. 2991, Seq. ID No. 2995, Seq. ID No. 2997, Seq. ID No. 3005, Seq. ID No. 3007, Seq. ID No. 3013, Seq. ID No. 3023, Seq. ID No. 3025, Seq. ID No. 3027, Seq. ID No. 3029, Seq. ID No. 3031, Seq. ID No. 3043, Seq. ID No. 3055, Seq. ID No. 3063, Seq. ID No. 3071, Seq. ID No. 3073, Seq. ID No. 3075, Seq. ID No. 3077, Seq. ID No. 3123, Seq. ID No. 3145, Seq. ID No. 3155, Seq. ID No. 3157, Seq. ID No. 3163, Seq. ID No. 3183, Seq. ID No. 3193, Seq. ID No. 3201, Seq. ID No. 3213, Seq. ID No. 3215, Seq. ID No. 3217, Seq. ID No. 3219, Seq. ID No. 3241, Seq. ID No. 3243, Seq. ID No. 3245, Seq. ID No. 3249, Seq. ID No. 3257, Seq. ID No. 3261, Seq. ID No. 3269, Seq. ID No. 3275, Seq. ID No. 3297, Seq. ID No. 3317, Seq. ID No. 3323, Seq. ID No. 3337, Seq. ID No. 3339, Seq. ID No. 3349, Seq. ID No. 3351, Seq. ID No. 3353, Seq. ID No. 3357, Seq. ID No. 3359, Seq. ID No. 3377, Seq. ID No. 3389, Seq. ID No. 3391, Seq. ID No. 3395, Seq. ID No. 3405, Seq. ID No. 3421, Seq. ID No. 3425, Seq. ID No. 3449, Seq. ID No. 3451, Seq. ID No. 3453, Seq. ID No. 3455, Seq. ID No. 3457, Seq. ID No. 3463, Seq. ID No. 3481, Seq. ID No. 3491, Seq. ID No. 3493, Seq. ID No. 3503, Seq. ID No. 3505, Seq. ID No. 3527, Seq. ID No. 3593, Seq. ID No. 3595, Seq. ID No. 3621, Seq. ID No. 3625, Seq. ID No. 3635, Seq. ID No. 3679, Seq. ID No. 3723, Seq. ID No. 3727, Seq. ID No. 3745, Seq. ID No. 3753, Seq. ID No. 3755, Seq. ID No. 3757, Seq. ID No. 3761, Seq. ID No. 3763, Seq. ID No. 3765, Seq. ID No. 3783, Seq. ID No. 3793, Seq. ID No. 3799, Seq. ID No. 3813, Seq. ID No. 3837, Seq. ID No. 3839, Seq. ID No. 3849, Seq. ID No. 3851, Seq. ID No. 3853, Seq. ID No. 3859, Seq. ID No. 3861, Seq. ID No. 3863, Seq. ID No. 3865, Seq. ID No. 3879, Seq. ID No. 3889, Seq. ID No. 3891, Seq. ID No. 3903, Seq. ID No. 3925, Seq. ID No. 3963, Seq. ID No. 3973, Seq. ID No. 3975, Seq. ID No. 4005, Seq. ID No. 4025, Seq. ID No. 4027, Seq. ID No. 4039, Seq. ID No. 4041, Seq. ID No. 4043, Seq. ID No. 4045, Seq. ID No. 4047, Seq. ID No. 4061, Seq. ID No. 4071, Seq. ID No. 4073, Seq. ID No. 4079, Seq. ID No. 4081, Seq. ID No. 4083, Seq. ID No. 4101, Seq. ID No. 4103, Seq. ID No. 4111, Seq. ID No. 4133, Seq. ID No. 4137, Seq. ID No. 4139, Seq. ID No. 4145, Seq. ID No. 4151, Seq. ID No. 4221, Seq. ID No. 4223, Seq. ID No. 4225, Seq. ID No. 4227, Seq. ID No. 4231, Seq. ID No. 4241, Seq. ID No. 4247, Seq. ID No. 4253, Seq. ID No. 4257, Seq. ID No. 4261, Seq. ID No. 4307, Seq. ID No. 4311, Seq. ID No. 4313, Seq. ID No. 4343, Seq. ID No. 4379, Seq. ID No. 4385, Seq. ID No. 4389, Seq. ID No. 4439, Seq. ID No. 4469, Seq. ID No. 4473, Seq. ID No. 4481, Seq. ID No. 4483, Seq. ID No. 4485, Seq. ID No. 4497, Seq. ID No. 4515, Seq. ID No. 4533, Seq. ID No. 4587, Seq. ID No. 4639, Seq. ID No. 4643, Seq. ID No. 4681, Seq. ID No. 4705, Seq. ID No. 4707, Seq. ID No. 4709, Seq. ID No. 4711, Seq. ID No. 4715, Seq. ID No. 4717, Seq. ID No. 4737, Seq. ID No. 4759, Seq. ID No. 4813, Seq. ID No. 4827, Seq. ID No. 4869, Seq. ID No. 4871, Seq. ID No. 4873, Seq. ID No. 4875, Seq. ID No. 4919, Seq. ID No. 4931, Seq. ID No. 4949, Seq. ID No. 4951, Seq. ID No. 4987, Seq. ID No. 5031, Seq. ID No. 5061, Seq. ID No. 5085, Seq. ID No. 5103, Seq. ID No. 5123, Seq. ID No. 5129, Seq. ID No. 5131, Seq. ID No. 5135, Seq. ID No. 5137, Seq. ID No. 5141, Seq. ID No. 5165, Seq. ID No. 5175, Seq. ID No. 5199, Seq. ID No. 5205, Seq. ID No. 5207, Seq. ID No. 5213, Seq. ID No. 5219, Seq. ID No. 5223, Seq. ID No. 5267, Seq. ID No. 5281, Seq. ID No. 5385, Seq. ID No. 5387, Seq. ID No. 5413, Seq. ID No. 5415, Seq. ID No. 5433, Seq. ID No. 5453, Seq. ID No. 5459, Seq. ID No. 5461, Seq. ID No. 5463, Seq. ID No. 5465, Seq. ID No. 5491, Seq. ID No. 5497, Seq. ID No. 5509, Seq. ID No. 5513, Seq. ID No. 5525, Seq. ID No. 5531, Seq. ID No. 5569, Seq. ID No. 5587, Seq. ID No. 5595, Seq. ID No. 5597, Seq. ID No. 5609, Seq. ID No. 5611, Seq. ID No. 5621, Seq. ID No. 5623, Seq. ID No. 5633, Seq. ID No. 5637, Seq. ID No. 5643, Seq. ID No. 5649, Seq. ID No. 5659, Seq. ID No. 5683, Seq. ID No. 5685, Seq. ID No. 5699, Seq. ID No. 5705, Seq. ID No. 5709, Seq. ID No. 5729, Seq. ID No. 5733, Seq. ID No. 5763, Seq. ID No. 5765, Seq. ID No. 5767, Seq. ID No. 5771, Seq. ID No. 5783, Seq. ID No. 5791, Seq. ID No. 5797, Seq. ID No. 5885, Seq. ID No. 5889, Seq. ID No. 5893, Seq. ID No. 5895, Seq. ID No. 5899, Seq. ID No. 5901, Seq. ID No. 5905, Seq. ID No. 5909, Seq. ID No. 5921, Seq. ID No. 5923, Seq. ID No. 5927, Seq. ID No. 5939, Seq. ID No. 6027, Seq. ID No. 6043, Seq. ID No. 6047, Seq. ID No. 6059, Seq. ID No. 6067, Seq. ID No. 6089, Seq. ID No. 6091, Seq. ID No. 6107, Seq. ID No. 6111, Seq. ID No. 6117, Seq. ID No. 6161, Seq. ID No. 6163, Seq. ID No. 6165, Seq. ID No. 6169, Seq. ID No. 6183, Seq. ID No. 6185, Seq. ID No. 6189, Seq. ID No. 6191, Seq. ID No. 6197, Seq. ID No. 6203, Seq. ID No. 6205, Seq. ID No. 6209, Seq. ID No. 6221, Seq. ID No. 6223, Seq. ID No. 6225, Seq. ID No. 6227, Seq. ID No. 6229, Seq. ID No. 6235, Seq. ID No. 6237, Seq. ID No. 6243, Seq. ID No. 6245, Seq. ID No. 6249, Seq. ID No. 6253, Seq. ID No. 6263, Seq. ID No. 6265, Seq. ID No. 6273, Seq. ID No. 6275, Seq. ID No. 6285, Seq. ID No. 6289, Seq. ID No. 6301, Seq. ID No. 6303, Seq. ID No. 6363, Seq. ID No. 6377, Seq. ID No. 6381, Seq. ID No. 6383, Seq. ID No. 6415, Seq. ID No. 6427, Seq. ID No. 6431, Seq. ID No. 6473, Seq. ID No. 6497, Seq. ID No. 6571, Seq. ID No. 6581, Seq. ID No. 6593, Seq. ID No. 6599, Seq. ID No. 6631, and Seq. ID No. 6639.

31. An isolated polynucleotide of an Alloiococcus otitidis genomic sequence, wherein the polynucleotide comprises a nucleotide sequence having at least about 70% identity to a nucleotide sequence contained within SEQ ID NO: 6651, a complement thereof, a degenerate variant thereof, and a fragment thereof.

32. An isolated polypeptide encoded by a polynucleotide comprising a nucleotide sequence having at least about 70% identity to a nucleotide sequence selected from one of odd numbered sequences from SEQ ID NO: 1 to SEQ ID NO: 6649, a degenerate variant thereof, and a fragment thereof.

33. The polypeptide of claim 32, wherein the polypeptide comprises an amino acid sequence having at least about 70% identity to an amino acid sequence chosen from one of the even-numbered sequences from SEQ ID NO: 2 to SEQ ID NO: 6650, a biological equivalent thereof, and a fragment thereof.

34. The polypeptide of claim 32, wherein the polypeptide is a fusion polypeptide.

35. The polypeptide of claim 32, which immunoreacts with seropositive serum of an individual infected with Alloiococcus otitidis.

36. The polypeptide of claim 32, further defined as:
(a) an Alloiococcus otitidis polypeptide predicted by SignalP algorithm analysis as having met all four criteria set out in the SignalP algorithm for a polypeptide having a signal peptide and predicted by HMM Signal P algorithm analysis as having a signal peptide;
(b) an Alloiococcus otitidis polypeptide predicted by SignalP algorithm analysis as having met three of the four criteria set out in the SignalP algorithm for a polypeptide having a signal peptide and predicted by HMM SignalP algorithm analysis as having a signal peptide;
(c) an Alloiococcus otitidis polypeptide predicted by HMM Signal P algorithm analysis as having a signal peptide;
(d) an Alloiococcus otitidis polypeptide predicted by HMM SignalP algorithm analysis as being a non-secretory protein;
(e) an Alloiococcus otitidis polypeptide identified by BlastP analysis;
(f) an Alloiococcus otitidis polypeptide identified by Pfam analysis;
(g) an Alloiococcus otitidis polypeptide identified using proteomics methodology as sharing homology with surface exposed proteins of Streptococcus pneumoniae;
(h) an Alloiococcus otitidis lipoprotein;
(i) an Alloiococcus otitidis polypeptide having a LPXTG motif, wherein the polypeptide is covalently attached to the peptidoglycan layer;
(j) an Alloiococcus otitidis polypeptide, wherein the polypeptide is non-covalently associated with the peptidoglycan layer;
(k) an Alloiococcus otitidis polypeptide having an RGDX motif wherein X is not a proline residue;
(l) an Alloiococcus otitidis polypeptide predicted by BlastP as being involved in capsule biosynthesis and transport;
(m) an Alloiococcus otitidis polypeptide identified by BlastP as being localized within the capsule loci of the Alloiococcus otitidis genome;
(n) an Alloiococcus otitidis polypeptide predicted by BlastP as being associated with sporulation;
(o) an Alloiococcus otitidis polypeptide encoded by unique ORFs identified by BlastP analysis as having a BlastP ‘E Value’ of >e⁻¹⁰;
(p) an Alloiococcus otitidis polypeptide identified by Glimmer™ ORF finder program;
(q) an Alloiococcus otitidis polypeptide identified by GeneMark™ ORF finder program;
(r) an Alloiococcus otitidis polypeptide identified by an ORF finder program that searches for an ATG, GTG or TTG Start codon between a Stop-Stop region; and
(s) an Alloiococcus otitidis polypeptide identified by an ORF finder program that searches for a transmembrane domain between two Stop codon and a Start codon immediately upstream of this transmembrane region.

37. The Alloiococcus otitidis polypeptide of claim 36, wherein the polypeptide is predicted by SignalP algorithm analysis as having met all four criteria set out in the SignalP algorithm for a polypeptide having a signal peptide and predicted by HMM Signal P algorithm analysis as having a signal peptide; and is selected from one of Seq. ID No. 90, Seq. ID No. 128, Seq. ID No. 132, Seq. ID No. 134, Seq. ID No. 162, Seq. ID No. 164, Seq. ID No. 214, Seq. ID No. 216, Seq. ID No. 226, Seq. ID No. 250, Seq. ID No. 252, Seq. ID No. 288, Seq. ID No. 290, Seq. ID No. 370, Seq. ID No. 372, Seq. ID No. 376, Seq. ID No. 378, Seq. ID No. 498, Seq. ID No. 504, Seq. ID No. 506, Seq. ID No. 528, Seq. ID No. 550, Seq. ID No. 576, Seq. ID No. 618, Seq. ID No. 658, Seq. ID No. 660, Seq. ID No. 662, Seq. ID No. 676, Seq. ID No. 716, Seq. ID No. 718, Seq. ID No. 746, Seq. ID No. 748, Seq. ID No. 756, Seq. ID No. 758, Seq. ID No. 760, Seq. ID No. 762, Seq. ID No. 774, Seq. ID No. 808, Seq. ID No. 968, Seq. ID No. 974, Seq. ID No. 976, Seq. ID No. 1014, Seq. ID No. 1026, Seq. ID No. 1028, Seq. ID No. 1040, Seq. ID No. 1076, Seq. ID No. 1090, Seq. ID No. 1196, Seq. ID No. 1198, Seq. ID No. 1208, Seq. ID No. 1240, Seq. ID No. 1244, Seq. ID No. 1246, Seq. ID No. 1270, Seq. ID No. 1316, Seq. ID No. 1318, Seq. ID No. 1332, Seq. ID No. 1366, Seq. ID No. 1368, Seq. ID No. 1370, Seq. ID No. 1446, Seq. ID No. 1448, Seq. ID No. 1514, Seq. ID No. 1518, Seq. ID No. 1546, Seq. ID No. 1550, Seq. ID No. 1562, Seq. ID No. 1570, Seq. ID No. 1572, Seq. ID No. 1586, Seq. ID No. 1644, Seq. ID No. 1654, Seq. ID No. 1662, Seq. ID No. 1664, Seq. ID No. 1708, Seq. ID No. 1734, Seq. ID No. 1738, Seq. ID No. 1756, Seq. ID No. 1766, Seq. ID No. 1768, Seq. ID No. 1776, Seq. ID No. 1792, Seq. ID No. 1806, Seq. ID No. 1876, Seq. ID No. 1970, Seq. ID No. 1982, Seq. ID No. 2054, Seq. ID No. 2056, Seq. ID No. 2088, Seq. ID No. 2090, Seq. ID No. 2092, Seq. ID No. 2106, Seq. ID No. 2116, Seq. ID No. 2150, Seq. ID No. 2152, Seq. ID No. 2160, Seq. ID No. 2178, Seq. ID No. 2278, Seq. ID No. 2294, Seq. ID No. 2322, Seq. ID No. 2348, Seq. ID No. 2352, Seq. ID No. 2354, Seq. ID No. 2366, Seq. ID No. 2396, Seq. ID No. 2422, Seq. ID No. 2426, Seq. ID No. 2428, Seq. ID No. 2430, Seq. ID No. 2450, Seq. ID No. 2460, Seq. ID No. 2526, Seq. ID No. 2532, Seq. ID No. 2608, Seq. ID No. 2652, Seq. ID No. 2680, Seq. ID No. 2694, Seq. ID No. 2700, Seq. ID No. 2704, Seq. ID No. 2754, Seq. ID No. 2786, Seq. ID No. 2814, Seq. ID No. 2830, Seq. ID No. 2836, Seq. ID No. 2842, Seq. ID No. 2880, Seq. ID No. 2882, Seq. ID No. 2936, Seq. ID No. 2938, Seq. ID No. 2950,.Seq. ID No. 2966, Seq. ID No. 2968, Seq. ID No. 2974, Seq. ID No. 3008, Seq. ID No. 3010, Seq. ID No. 3012, Seq. ID No. 3030, Seq. ID No. 3032, Seq. ID No. 3110, Seq. ID No. 3112, Seq. ID No. 3220, Seq. ID No. 3224, Seq. ID No. 3274, Seq. ID No. 3298, Seq. ID No. 3332, Seq. ID No. 3336, Seq. ID No. 3342, Seq. ID No. 3350, Seq. ID No. 3354, Seq. ID No. 3356, Seq. ID No. 3378, Seq. ID No. 3392, Seq. ID No. 3426, Seq. ID No. 3450, Seq. ID No. 3494, Seq. ID No. 3574, Seq. ID No. 3612, Seq. ID No. 3620, Seq. ID No. 3690, Seq. ID No. 3754, Seq. ID No. 3756, Seq. ID No. 3766, Seq. ID No. 3782, Seq. ID No. 3784, Seq. ID No. 3852, Seq. ID No. 3904, Seq. ID No. 4006, Seq. ID No. 4008, Seq. ID No. 4028, Seq. ID No. 4074, Seq. ID No. 4138, Seq. ID No. 4142, Seq. ID No. 4144, Seq. ID No. 4146, Seq. ID No. 4226, Seq. ID No. 4344, Seq. ID No. 4386, Seq. ID No. 4400, Seq. ID No. 4470, Seq. ID No. 4484, Seq. ID No. 4494, Seq. ID No. 4496, Seq. ID No. 4534, Seq. ID No. 4700, Seq. ID No. 4710, Seq. ID No. 4712, Seq. ID No. 4736, Seq. ID No. 4828, Seq. ID No. 4872, Seq. ID No. 4874, Seq. ID No. 4880, Seq. ID No. 4922, Seq. ID No. 4982, Seq. ID No. 5116, Seq. ID No. 5268, Seq. ID No. 5342, Seq. ID No. 5388, Seq. ID No. 5466, Seq. ID No. 5468, Seq. ID No. 5480, Seq. ID No. 5498, Seq. ID No. 5514, Seq. ID No. 5544, Seq. ID No. 5546, Seq. ID No. 5568, Seq. ID No. 5588, Seq. ID No. 5590, Seq. ID No. 5592, Seq. ID No. 5612, Seq. ID No. 5622, Seq. ID No. 5642, Seq. ID No. 5682, Seq. ID No. 5720, Seq. ID No. 5772, Seq. ID No. 5784, Seq. ID No. 5896, Seq. ID No. 5900, Seq. ID No. 5902, Seq. ID No. 5928, Seq. ID No. 5930, Seq. ID No. 5940, Seq. ID No. 5988, Seq. ID No. 6014, Seq. ID No. 6088, Seq. ID No. 6090, Seq. ID No. 6092, Seq. ID No. 6094, Seq. ID No. 6096, Seq. ID No. 6104, Seq. ID No. 6170, Seq. ID No. 6186, Seq. ID No. 6188, Seq. ID No. 6196, Seq. ID No. 6198, Seq. ID No. 6204, Seq. ID No. 6206, Seq. ID No. 6222, Seq. ID No. 6224, Seq. ID No. 6230, Seq. ID No. 6292, Seq. ID No. 6416, Seq. ID No. 6418, Seq. ID No. 6474, Seq. ID No. 6508, Seq. ID No. 6544, Seq. ID No. 6596, Seq. ID No. 6598, Seq. ID No. 6600, Seq. ID No. 6602, and Seq. ID No. 6604.

38. The Alloiococcus otitidis polypeptide of claim 36, wherein the polypeptide is predicted by SignalP algorithm analysis as having met three of the four criteria set out in the SignalP algorithm for a polypeptide having a signal peptide and predicted by HMM SignalP algorithm analysis as having a signal peptide; and is selected from one of Seq. ID No. 8, Seq. ID No. 12, Seq. ID No. 24, Seq. ID No. 46, Seq. ID No. 48, Seq. ID No. 54, Seq. ID No. 60, Seq. ID No. 66, Seq. ID No. 68, Seq. ID No. 88, Seq. ID No. 92, Seq. ID No. 140, Seq. ID No. 152, Seq. ID No. 160, Seq. ID No. 166, Seq. ID No. 170, Seq. ID No. 186, Seq. ID No. 212, Seq. ID No. 218, Seq. ID No. 236, Seq. ID No. 238, Seq. ID No. 240, Seq. ID No. 272, Seq. ID No. 286, Seq. ID No. 292, Seq. ID No. 328, Seq. ID No. 350, Seq. ID No. 386, Seq. ID No. 388, Seq. ID No. 408, Seq. ID No. 428, Seq. ID No. 432, Seq. ID No. 456, Seq. ID No. 458, Seq. ID No. 496, Seq. ID No. 500, Seq. ID No. 512, Seq. ID No. 514, Seq. ID No. 516, Seq. ID No. 526, Seq. ID No. 546, Seq. ID No. 548, Seq. ID No. 558, Seq. ID No. 570, Seq. ID No. 590, Seq. ID No. 592, Seq. ID No. 594, Seq. ID No. 596, Seq. ID No. 610, Seq. ID No. 638, Seq. ID No. 640, Seq. ID No. 642, Seq. ID No. 654, Seq. ID No. 670, Seq. ID No. 680, Seq. ID No. 720, Seq. ID No. 724, Seq. ID No. 740, Seq. ID No. 750, Seq. ID No. 752, Seq. ID No. 764, Seq. ID No. 766, Seq. ID No. 770, Seq. ID No. 778, Seq. ID No. 780, Seq. ID No. 782, Seq. ID No. 820, Seq. ID No. 896, Seq. ID No. 904, Seq. ID No. 906, Seq. ID No. 910, Seq. ID No. 936, Seq. ID No. 938, Seq. ID No. 952, Seq. ID No. 956, Seq. ID No. 980, Seq. ID No. 982, Seq. ID No. 984, Seq. ID No. 986, Seq. ID No. 1006, Seq. ID No. 1008, Seq. ID No. 1010, Seq. ID No. 1016, Seq. ID No. 1020, Seq. ID No. 1030, Seq. ID No. 1032, Seq. ID No. 1048, Seq. ID No. 1092, Seq. ID No. 1112, Seq. ID No. 1138, Seq. ID No. 1152, Seq. ID No. 1154, Seq. ID No. 1170, Seq. ID No. 1174, Seq. ID No. 1184, Seq. ID No. 1192, Seq. ID No. 1194, Seq. ID No. 1214, Seq. ID No. 1224, Seq. ID No. 1230, Seq. ID No. 1248, Seq. ID No. 1260, Seq. ID No. 1284, Seq. ID No. 1308, Seq. ID No. 1320, Seq. ID No. 1322, Seq. ID No. 1328, Seq. ID No. 1342, Seq. ID No. 1344, Seq. ID No. 1348, Seq. ID No. 1390, Seq. ID No. 1402, Seq. ID No. 1430, Seq. ID No. 1480, Seq. ID No. 1552, Seq. ID No. 1560, Seq. ID No. 1580, Seq. ID No. 1588, Seq. ID No. 1622, Seq. ID No. 1628, Seq. ID No. 1634, Seq. ID No. 1646, Seq. ID No. 1648, Seq. ID No. 1650, Seq. ID No. 1656, Seq. ID No. 1666, Seq. ID No. 1668, Seq. ID No. 1672, Seq. ID No. 1678, Seq. ID No. 1680, Seq. ID No. 1682, Seq. ID No. 1696, Seq. ID No. 1704, Seq. ID No. 1706, Seq. ID No. 1732, Seq. ID No. 1754, Seq. ID No. 1760, Seq. ID No. 1764, Seq. ID No. 1788, Seq. ID No. 1798, Seq. ID No. 1822, Seq. ID No. 1824, Seq. ID No. 1834, Seq. ID No. 1840, Seq. ID No. 1842, Seq. ID No. 1844, Seq. ID No. 1894, Seq. ID No. 1918, Seq. ID No. 1920, Seq. ID No. 1972, Seq. ID No. 1992, Seq. ID No. 2014, Seq. ID No. 2016, Seq. ID No. 2018, Seq. ID No. 2020, Seq. ID No. 2034, Seq. ID No. 2036, Seq. ID No. 2050, Seq. ID No. 2082, Seq. ID No. 2084, Seq. ID No. 2086, Seq. ID No. 2112, Seq. ID No. 2114, Seq. ID No. 2124, Seq. ID No. 2126, Seq. ID No. 2128, Seq. ID No. 2132, Seq. ID No. 2134, Seq. ID No. 2154, Seq. ID No. 2162, Seq. ID No. 2172, Seq. ID No. 2176, Seq. ID No. 2180, Seq. ID No. 2188, Seq. ID No. 2202, Seq. ID No. 2204, Seq. ID No. 2222, Seq. ID No. 2238, Seq. ID No. 2250, Seq. ID No. 2252, Seq. ID No. 2256, Seq. ID No. 2262, Seq. ID No. 2264, Seq. ID No. 2272, Seq. ID No. 2280, Seq. ID No. 2284, Seq. ID No. 2286, Seq. ID No. 2290, Seq. ID No. 2296, Seq. ID No. 2306, Seq. ID No. 2308, Seq. ID No. 2318, Seq. ID No. 2320, Seq. ID No. 2324, Seq. ID No. 2326, Seq. ID No. 2344, Seq. ID No. 2350, Seq. ID No. 2386, Seq. ID No. 2394, Seq. ID No. 2424, Seq. ID No. 2454, Seq. ID No. 2492, Seq. ID No. 2498, Seq. ID No. 2500, Seq. ID No. 2508, Seq. ID No. 2516, Seq. ID No. 2518, Seq. ID No. 2522, Seq. ID No. 2524, Seq. ID No. 2528, Seq. ID No. 2534, Seq. ID No. 2536, Seq. ID No. 2542, Seq. ID No. 2544, Seq. ID No. 2548, Seq. ID No. 2550, Seq. ID No. 2558, Seq. ID No. 2574, Seq. ID No. 2584, Seq. ID No. 2602, Seq. ID No. 2604, Seq. ID No. 2622, Seq. ID No. 2654, Seq. ID No. 2682, Seq. ID No. 2692, Seq. ID No. 2702, Seq. ID No. 2734, Seq. ID No. 2740, Seq. ID No. 2802, Seq. ID No. 2808, Seq. ID No. 2816, Seq. ID No. 2820, Seq. ID No. 2822, Seq. ID No. 2824, Seq. ID No. 2834, Seq. ID No. 2838, Seq. ID No. 2840, Seq. ID No. 2846, Seq. ID No. 2854, Seq. ID No. 2862, Seq. ID No. 2866, Seq. ID No. 2874, Seq. ID No. 2876, Seq. ID No. 2878, Seq. ID No. 2884, Seq. ID No. 2896, Seq. ID No. 2906, Seq. ID No. 2940, Seq. ID No. 2942, Seq. ID No. 2948, Seq. ID No. 2982, Seq. ID No. 2984, Seq. ID No. 2988, Seq. ID No. 2992, Seq. ID No. 2996, Seq. ID No. 3002, Seq. ID No. 3006, Seq. ID No. 3022, Seq. ID No. 3026, Seq. ID No. 3044, Seq. ID No. 3046, Seq. ID No. 3074, Seq. ID No. 3076, Seq. ID No. 3156, Seq. ID No. 3164, Seq. ID No. 3166, Seq. ID No. 3168, Seq. ID No. 3184, Seq. ID No. 3214, Seq. ID No. 3216, Seq. ID No. 3236, Seq. ID No. 3246, Seq. ID No. 3262, Seq. ID No. 3264, Seq. ID No. 3266, Seq. ID No. 3270, Seq. ID No. 3272, Seq. ID No. 3276, Seq. ID No. 3278, Seq. ID No. 3318, Seq. ID No. 3326, Seq. ID No. 3338, Seq. ID No. 3352, Seq. ID No. 3390, Seq. ID No. 3406, Seq. ID No. 3420, Seq. ID No. 3422, Seq. ID No. 3424, Seq. ID No. 3452, Seq. ID No. 3454, Seq. ID No. 3456, Seq. ID No. 3492, Seq. ID No. 3496, Seq. ID No. 3504, Seq. ID No. 3506, Seq. ID No. 3518, Seq. ID No. 3520, Seq. ID No. 3546, Seq. ID No. 3548, Seq. ID No. 3572, Seq. ID No. 3594, Seq. ID No. 3618, Seq. ID No. 3622, Seq. ID No. 3630, Seq. ID No. 3664, Seq. ID No. 3702, Seq. ID No. 3704, Seq. ID No. 3724, Seq. ID No. 3738, Seq. ID No. 3742, Seq. ID No. 3746, Seq. ID No. 3748, Seq. ID No. 3760, Seq. ID No. 3764, Seq. ID No. 3768, Seq. ID No. 3770, Seq. ID No. 3772, Seq. ID No. 3786, Seq. ID No. 3794, Seq. ID No. 3814, Seq. ID No. 3838, Seq. ID No. 3840, Seq. ID No. 3862, Seq. ID No. 3866, Seq. ID No. 3890, Seq. ID No. 3892, Seq. ID No. 3896, Seq. ID No. 3916, Seq. ID No. 3924, Seq. ID No. 3926, Seq. ID No. 3930, Seq. ID No. 3966, Seq. ID No. 3976, Seq. ID No. 3980, Seq. ID No. 3996, Seq. ID No. 3998, Seq. ID No. 4010, Seq. ID No. 4040, Seq. ID No. 4042, Seq. ID No. 4062, Seq. ID No. 4080, Seq. ID No. 4082, Seq. ID No. 4112, Seq. ID No. 4114, Seq. ID No. 4136, Seq. ID No. 4140, Seq. ID No. 4156, Seq. ID No. 4182, Seq. ID No. 4204, Seq. ID No. 4222, Seq. ID No. 4248, Seq. ID No. 4254, Seq. ID No. 4258, Seq. ID No. 4260, Seq. ID No. 4262, Seq. ID No. 4264, Seq. ID No. 4270, Seq. ID No. 4312, Seq. ID No. 4380, Seq. ID No. 4390, Seq. ID No. 4392, Seq. ID No. 4472, Seq. ID No. 4474, Seq. ID No. 4482, Seq. ID No. 4526, Seq. ID No. 4552, Seq. ID No. 4562, Seq. ID No. 4574, Seq. ID No. 4618, Seq. ID No. 4640, Seq. ID No. 4660, Seq. ID No. 4682, Seq. ID No. 4702, Seq. ID No. 4706, Seq. ID No. 4714, Seq. ID No. 4718, Seq. ID No. 4722, Seq. ID No. 4738, Seq. ID No. 4742, Seq. ID No. 4814, Seq. ID No. 4818, Seq. ID No. 4820, Seq. ID No. 4830, Seq. ID No. 4832, Seq. ID No. 4852, Seq. ID No. 4870, Seq. ID No. 4876, Seq. ID No. 4914, Seq. ID No. 4920, Seq. ID No. 4930, Seq. ID No. 4932, Seq. ID No. 4984, Seq. ID No. 4994, Seq. ID No. 5012, Seq. ID No. 5024, Seq. ID No. 5032, Seq. ID No. 5034, Seq. ID No. 5036, Seq. ID No. 5044, Seq. ID No. 5062, Seq. ID No. 5064, Seq. ID No. 5070, Seq. ID No. 5104, Seq. ID No. 5122, Seq. ID No. 5124, Seq. ID No. 5132, Seq. ID No. 5134, Seq. ID No. 5136, Seq. ID No. 5138, Seq. ID No. 5140, Seq. ID No. 5142, Seq. ID No. 5152, Seq. ID No. 5160, Seq. ID No. 5162, Seq. ID No. 5166, Seq. ID No. 5168, Seq. ID No. 5176, Seq. ID No. 5178, Seq. ID No. 5206, Seq. ID No. 5208, Seq. ID No. 5212, Seq. ID No. 5216, Seq. ID No. 5220, Seq. ID No. 5224, Seq. ID No. 5286, Seq. ID No. 5288, Seq. ID No. 5330, Seq. ID No. 5332, Seq. ID No. 5378, Seq. ID No. 5380, Seq. ID No. 5382, Seq. ID No. 5386, Seq. ID No. 5406, Seq. ID No. 5408, Seq. ID No. 5454, Seq. ID No. 5460, Seq. ID No. 5462, Seq. ID No. 5464, Seq. ID No. 5482, Seq. ID No. 5510, Seq. ID No. 5530, Seq. ID No. 5532, Seq. ID No. 5558, Seq. ID No. 5570, Seq. ID No. 5578, Seq. ID No. 5624, Seq. ID No. 5626, Seq. ID No. 5644, Seq. ID No. 5660, Seq. ID No. 5662, Seq. ID No. 5684, Seq. ID No. 5686, Seq. ID No. 5710, Seq. ID No. 5712, Seq. ID No. 5734, Seq. ID No. 5740, Seq. ID No. 5766, Seq. ID No. 5798, Seq. ID No. 5828, Seq. ID No. 5890, Seq. ID No. 5894, Seq. ID No. 5906, Seq. ID No. 5910, Seq. ID No. 5912, Seq. ID No. 5924, Seq. ID No. 5964, Seq. ID No. 5966, Seq. ID No. 6026, Seq. ID No. 6028, Seq. ID No. 6032, Seq. ID No. 6044, Seq. ID No. 6046, Seq. ID No. 6048, Seq. ID No. 6054, Seq. ID No. 6060, Seq. ID No. 6110, Seq. ID No. 6112, Seq. ID No. 6116, Seq. ID No. 6118, Seq. ID No. 6128, Seq. ID No. 6132, Seq. ID No. 6136, Seq. ID No. 6138, Seq. ID No. 6162, Seq. ID No. 6166, Seq. ID No. 6184, Seq. ID No. 6190, Seq. ID No. 6192, Seq. ID No. 6194, Seq. ID No. 6208, Seq. ID No. 6210, Seq. ID No. 6218, Seq. ID No. 6226, Seq. ID No. 6236, Seq. ID No. 6244, Seq. ID No. 6250, Seq. ID No. 6254, Seq. ID No. 6260, Seq. ID No. 6266, Seq. ID No. 6268, Seq. ID No. 6276, Seq. ID No. 6284, Seq. ID No. 6286, Seq. ID No. 6304, Seq. ID No. 6326, Seq. ID No. 6328, Seq. ID No. 6364, Seq. ID No. 6366, Seq. ID No. 6368, Seq. ID No. 6386, Seq. ID No. 6426, Seq. ID No. 6428, Seq. ID No. 6430, Seq. ID No. 6432, Seq. ID No. 6454, Seq. ID No. 6466, Seq. ID No. 6470, Seq. ID No. 6472, Seq. ID No. 6480, Seq. ID No. 6540, Seq. ID No. 6542, Seq. ID No. 6572, Seq. ID No. 6574, Seq. ID No. 6640, Seq. ID No. 6644, and Seq. ID No. 6646.

39. The Alloiococcus otitidis polypeptide of claim 36, wherein the polypeptide is predicted by HMM SignalP algorithm analysis as having a signal peptide, and is selected from one of Seq. ID No. 4, Seq. ID No. 8, Seq. ID No. 10, Seq. ID No. 20, Seq. ID No. 22, Seq. ID No. 32, Seq. ID No. 34, Seq. ID No. 46, Seq. ID No. 48, Seq. ID No. 50, Seq. ID No. 54, Seq. ID No. 66, Seq. ID No. 68, Seq. ID No. 86, Seq. ID No. 88, Seq. ID No. 106, Seq. ID No. 112, Seq. ID No. 124, Seq. ID No. 132, Seq. ID No. 134, Seq. ID No. 142, Seq. ID No. 160, Seq. ID No. 162, Seq. ID No. 164, Seq. ID No. 172, Seq. ID No. 192, Seq. ID No. 210, Seq. ID No. 212, Seq. ID No. 214, Seq. ID No. 216, Seq. ID No. 218, Seq. ID No. 226, Seq. ID No. 236, Seq. ID No. 238, Seq. ID No. 250, Seq. ID No. 252, Seq. ID No. 256, Seq. ID No. 258, Seq. ID No. 260, Seq. ID No. 272, Seq. ID No. 274, Seq. ID No. 278, Seq. ID No. 286, Seq. ID No. 288, Seq. ID No. 290, Seq. ID No. 328, Seq. ID No. 330, Seq. ID No. 358, Seq. ID No. 360, Seq. ID No. 374, Seq. ID No. 376, Seq. ID No. 394, Seq. ID No. 402, Seq. ID No. 404, Seq. ID No. 456, Seq. ID No. 458, Seq. ID No. 478, Seq. ID No. 488, Seq. ID No. 490, Seq. ID No. 492, Seq. ID No. 494, Seq. ID No. 496, Seq. ID No. 498, Seq. ID No. 500, Seq. ID No. 504, Seq. ID No. 506, Seq. ID No. 510, Seq. ID No. 512, Seq. ID No. 514, Seq. ID No. 516, Seq. ID No. 526, Seq. ID No. 528, Seq. ID No. 546, Seq. ID No. 548, Seq. ID No. 550, Seq. ID No. 558, Seq. ID No. 568, Seq. ID No. 570, Seq. ID No. 576, Seq. ID No. 578, Seq. ID No. 580, Seq. ID No. 592, Seq. ID No. 594, Seq. ID No. 600, Seq. ID No. 618, Seq. ID No. 638, Seq. ID No. 640, Seq. ID No. 642, Seq. ID No. 644, Seq. ID No. 646, Seq. ID No. 648, Seq. ID No. 654, Seq. ID No. 656, Seq. ID No. 658, Seq. ID No. 660, Seq. ID No. 662, Seq. ID No. 668, Seq. ID No. 670, Seq. ID No. 676, Seq. ID No. 678, Seq. ID No. 680, Seq. ID No. 716, Seq. ID No. 718, Seq. ID No. 720, Seq. ID No. 722, Seq. ID No. 724, Seq. ID No. 726, Seq. ID No. 746, Seq. ID No. 748, Seq. ID No. 750, Seq. ID No. 752, Seq. ID No. 756, Seq. ID No. 758, Seq. ID No. 760, Seq. ID No. 762, Seq. ID No. 764, Seq. ID No. 766, Seq. ID No. 770, Seq. ID No. 778, Seq. ID No. 780, Seq. ID No. 782, Seq. ID No. 808, Seq. ID No. 810, Seq. ID No. 820, Seq. ID No. 826, Seq. ID No. 864, Seq. ID No. 894, Seq. ID No. 902, Seq. ID No. 936, Seq. ID No. 938, Seq. ID No. 942, Seq. ID No. 944, Seq. ID No. 956, Seq. ID No. 958, Seq. ID No. 968, Seq. ID No. 980, Seq. ID No. 982, Seq. ID No. 984, Seq. ID No. 986, Seq. ID No. 1002, Seq. ID No. 1004, Seq. ID No. 1006, Seq. ID No. 1008, Seq. ID No. 1010, Seq. ID No. 1012, Seq. ID No. 1014, Seq. ID No. 1016, Seq. ID No. 1020, Seq. ID No. 1030, Seq. ID No. 1032, Seq. ID No. 1034, Seq. ID No. 1036, Seq. ID No. 1038, Seq. ID No. 1040, Seq. ID No. 1046, Seq. ID No. 1056, Seq. ID No. 1076, Seq. ID No. 1078, Seq. ID No. 1106, Seq. ID No. 1108, Seq. ID No. 1132, Seq. ID No. 1136, Seq. ID No. 1138, Seq. ID No. 1140, Seq. ID No. 1152, Seq. ID No. 1166, Seq. ID No. 1168, Seq. ID No. 1170, Seq. ID No. 1174, Seq. ID No. 1184, Seq. ID No. 1196, Seq. ID No. 1198, Seq. ID No. 1204, Seq. ID No. 1214, Seq. ID No. 1224, Seq. ID No. 1228, Seq. ID No. 1230, Seq. ID No. 1238, Seq. ID No. 1244, Seq. ID No. 1246, Seq. ID No. 1260, Seq. ID No. 1266, Seq. ID No. 1268, Seq. ID No. 1270, Seq. ID No. 1272, Seq. ID No. 1284, Seq. ID No. 1288, Seq. ID No. 1290, Seq. ID No. 1292, Seq. ID No. 1296, Seq. ID No. 1298, Seq. ID No. 1304, Seq. ID No. 1306, Seq. ID No. 1316, Seq. ID No. 1318, Seq. ID No. 1320, Seq. ID No. 1326, Seq. ID No. 1328, Seq. ID No. 1330, Seq. ID No. 1332, Seq. ID No. 1338, Seq. ID No. 1342, Seq. ID No. 1344, Seq. ID No. 1348, Seq. ID No. 1350, Seq. ID No. 1352, Seq. ID No. 1354, Seq ID No. 1366, Seq. ID No. 1368, Seq. ID No. 1370, Seq. ID No. 1372, Seq. ID No. 1382, Seq. ID No. 1402, Seq. ID No. 1430, Seq. ID No. 1436, Seq. ID No. 1446, Seq. ID No. 1448, Seq. ID No. 1482, Seq. ID No. 1514, Seq. ID No. 1516, Seq. ID No. 1518, Seq. ID No. 1530, Seq. ID No. 1534, Seq. ID No. 1536, Seq. ID No. 1546, Seq. ID No. 1548, Seq. ID No. 1552, Seq. ID No. 1554, Seq. ID No. 1560, Seq. ID No. 1562, Seq. ID No. 1564, Seq. ID No. 1572, Seq. ID No. 1580, Seq. ID No. 1584, Seq. ID No. 1586, Seq. ID No. 1622, Seq. ID No. 1634, Seq. ID No. 1640, Seq. ID No. 1644, Seq. ID No. 1646, Seq. ID No. 1648, Seq. ID No. 1650, Seq. ID No. 1654, Seq. ID No. 1662, Seq. ID No. 1664, Seq. ID No. 1666, Seq. ID No. 1672, Seq. ID No. 1674, Seq. ID No. 1678, Seq. ID No. 1680, Seq. ID No. 1682, Seq. ID No. 1694, Seq. ID No. 1708, Seq. ID No. 1712, Seq. ID No. 1732, Seq. ID No. 1734, Seq. ID No. 1738, Seq. ID No. 1754, Seq. ID No. 1756, Seq. ID No. 1758, Seq. ID No. 1766, Seq. ID No. 1768, Seq. ID No. 1772, Seq. ID No. 1782, Seq. ID No. 1788, Seq. ID No. 1792, Seq. ID No. 1798, Seq. ID No. 1806, Seq. ID No. 1820, Seq. ID No. 1822, Seq. ID No. 1824, Seq. ID No. 1840, Seq. ID No. 1858, Seq. ID No. 1870, Seq. ID No. 1876, Seq. ID No. 1892, Seq. ID No. 1894, Seq. ID No. 1896, Seq. ID No. 1916, Seq. ID No. 1918, Seq. ID No. 1920, Seq. ID No. 1924, Seq. ID No. 1928, Seq. ID No. 1930, Seq. ID No. 1970, Seq. ID No. 1982, Seq. ID No. 1992, Seq. ID No. 1994, Seq. ID No. 2006, Seq. ID No. 2014, Seq. ID No. 2018, Seq. ID No. 2020, Seq. ID No. 2026, Seq. ID No. 2028, Seq. ID No. 2034, Seq. ID No. 2036, Seq. ID No. 2042, Seq. ID No. 2050, Seq. ID No. 2054, Seq. ID No. 2056, Seq. ID No. 2088, Seq. ID No. 2090, Seq. ID No. 2092, Seq. ID No. 2106, Seq. ID No. 2108, Seq. ID No. 2110, Seq. ID No. 2114, Seq. ID No. 2116, Seq. ID No. 2122, Seq. ID No. 2124, Seq. ID No. 2126, Seq. ID No. 2128, Seq. ID No. 2150, Seq. ID No. 2152, Seq. ID No. 2156, Seq. ID No. 2158, Seq. ID No. 2160, Seq. ID No. 2172, Seq. ID No. 2174, Seq. ID No. 2178, Seq. ID No. 2188, Seq. ID No. 2192, Seq. ID No. 2206, Seq. ID No. 2238, Seq. ID No. 2240, Seq. ID No. 2246, Seq. ID No. 2250, Seq. ID No. 2252, Seq. ID No. 2256, Seq. ID No. 2260, Seq. ID No. 2272, Seq. ID No. 2284, Seq. ID No. 2290, Seq. ID No. 2292, Seq. ID No. 2294, Seq. ID No. 2296, Seq. ID No. 2304, Seq. ID No. 2306, Seq. ID No. 2308, Seq. ID No. 2318, Seq. ID No. 2320, Seq. ID No. 2322, Seq. ID No. 2324, Seq. ID No. 2326, Seq. ID No. 2328, Seq. ID No. 2330, Seq. ID No. 2334, Seq. ID No. 2344, Seq. ID No. 2348, Seq. ID No. 2350, Seq. ID No. 2352, Seq. ID No. 2354, Seq. ID No. 2356, Seq. ID No. 2358, Seq. ID No. 2366, Seq. ID No. 2368, Seq. ID No. 2372, Seq. ID No. 2376, Seq. ID No. 2388, Seq. ID No. 2390, Seq. ID No. 2392, Seq. ID No. 2394, Seq. ID No. 2408, Seq. ID No. 2420, Seq. ID No. 2422, Seq. ID No. 2426, Seq. ID No. 2428, Seq. ID No. 2430, Seq. ID No. 2434, Seq. ID No. 2450, Seq. ID No. 2460, Seq. ID No. 2488, Seq. ID No. 2490, Seq. ID No. 2492, Seq. ID No. 2494, Seq. ID No. 2498, Seq. ID No. 2500, Seq. ID No. 2502, Seq. ID No. 2504, Seq. ID No. 2508, Seq. ID No. 2516, Seq. ID No. 2518, Seq. ID No. 2524, Seq. ID No. 2526, Seq. ID No. 2528, Seq. ID No. 2532, Seq. ID No. 2534, Seq. ID No. 2536, Seq. ID No. 2538, Seq. ID No. 2542, Seq. ID No. 2544, Seq. ID No. 2546, Seq. ID No. 2556, Seq. ID No. 2558, Seq. ID No. 2566, Seq. ID No. 2570, Seq. ID No. 2572, Seq. ID No. 2584, Seq. ID No. 2592, Seq. ID No. 2598, Seq. ID No. 2600, Seq. ID No. 2602, Seq. ID No. 2608, Seq. ID No. 2612, Seq. ID No. 2622, Seq. ID No. 2628, Seq. ID No. 2630, Seq. ID No. 2652, Seq. ID No. 2680, Seq. ID No. 2682, Seq. ID No. 2684, Seq. ID No. 2692, Seq. ID No. 2694, Seq. ID No. 2696, Seq. ID No. 2698, Seq. ID No. 2700, Seq. ID No. 2702, Seq. ID No. 2704, Seq. ID No. 2706, Seq. ID No. 2708, Seq. ID No. 2718, Seq. ID No. 2730, Seq. ID No. 2732, Seq. ID No. 2734, Seq. ID No. 2784, Seq. ID No. 2786, Seq. ID No. 2802, Seq. ID No. 2810, Seq. ID No. 2814, Seq. ID No. 2816, Seq. ID No. 2820, Seq. ID No. 2822, Seq. ID No. 2824, Seq. ID No. 2832, Seq. ID No. 2834, Seq. ID No. 2836, Seq. ID No. 2838, Seq. ID No. 2840, Seq. ID No. 2842, Seq. ID No. 2846, Seq. ID No. 2854, Seq. ID No. 2856, Seq. ID No. 2860, Seq. ID No. 2862, Seq. ID No. 2874, Seq. ID No. 2882, Seq. ID No. 2894, Seq. ID No. 2906, Seq. ID No. 2936, Seq. ID No. 2938, Seq. ID No. 2940, Seq. ID No. 2942, Seq. ID No. 2948, Seq. ID No. 2950, Seq. ID No. 2952, Seq. ID No. 2970, Seq. ID No. 2974, Seq. ID No. 2976, Seq. ID No. 2978, Seq. ID No. 2982, Seq. ID No. 2984, Seq. ID No. 2988, Seq. ID No. 2992, Seq. ID No. 2996, Seq. ID No. 2998, Seq. ID No. 3006, Seq. ID No. 3008, Seq. ID No. 3010, Seq. ID No. 3012, Seq. ID No. 3014, Seq. ID No. 3024, Seq. ID No. 3026, Seq. ID No. 3028, Seq. ID No. 3030, Seq. ID No. 3032, Seq. ID No. 3044, Seq. ID No. 3056, Seq. ID No. 3064, Seq. ID No. 3072, Seq. ID No. 3074, Seq. ID No. 3076, Seq. ID No. 3078, Seq. ID No. 3120, Seq. ID No. 3122, Seq. ID No. 3124, Seq. ID No. 3146, Seq. ID No. 3156, Seq. ID No. 3158, Seq. ID No. 3164, Seq. ID No. 3166, Seq. ID No. 3174, Seq. ID No. 3184, Seq. ID No. 3194, Seq. ID No. 3202, Seq. ID No. 3214, Seq. ID No. 3216, Seq. ID No. 3218, Seq. ID No. 3220, Seq. ID No. 3242, Seq. ID No. 3244, Seq. ID No. 3246, Seq. ID No. 3250, Seq. ID No. 3256, Seq. ID No. 3258, Seq. ID No. 3262, Seq. ID No. 3264, Seq. ID No. 3270, Seq. ID No. 3276, Seq. ID No. 3278, Seq. ID No. 3298, Seq. ID No. 3318, Seq. ID No. 3324, Seq. ID No. 3326, Seq. ID No. 3332, Seq. ID No. 3336, Seq. ID No. 3338, Seq. ID No. 3340, Seq. ID No. 3350, Seq. ID No. 3352, Seq. ID No. 3354, Seq. ID No. 3356, Seq. ID No. 3358, Seq. ID No. 3360, Seq. ID No. 3376, Seq. ID No. 3378, Seq. ID No. 3390, Seq. ID No. 3392, Seq. ID No. 3396, Seq. ID No. 3406, Seq. ID No. 3416, Seq. ID No. 3422, Seq. ID No. 3426, Seq. ID No. 3428, Seq. ID No. 3434, Seq. ID No. 3442, Seq. ID No. 3450, Seq. ID No. 3452, Seq. ID No. 3454, Seq. ID No. 3456, Seq. ID No. 3458, Seq. ID No. 3464, Seq. ID No. 3482, Seq. ID No. 3492, Seq. ID No. 3494, Seq. ID No. 3504, Seq. ID No. 3506, Seq. ID No. 3518, Seq. ID No. 3520, Seq. ID No. 3528, Seq. ID No. 3532, Seq. ID No. 3540, Seq. ID No. 3562, Seq. ID No. 3574, Seq. ID No. 3582, Seq. ID No. 3588, Seq. ID No. 3594, Seq. ID No. 3596, Seq. ID No. 3612, Seq. ID No. 3618, Seq. ID No. 3620, Seq. ID No. 3622, Seq. ID No. 3626, Seq. ID No. 3630, Seq. ID No. 3636, Seq. ID No. 3678, Seq. ID No. 3680, Seq. ID No. 3690, Seq. ID No. 3718, Seq. ID No. 3724, Seq. ID No. 3728, Seq. ID No. 3742, Seq. ID No. 3746, Seq. ID No. 3754, Seq. ID No. 3756, Seq. ID No. 3758, Seq. ID No. 3762, Seq. ID No. 3764, Seq. ID No. 3766, Seq. ID No. 3782, Seq. ID No. 3784, Seq. ID No. 3794, Seq. ID No. 3800, Seq. ID No. 3808, Seq. ID No. 3814, Seq. ID No. 3816, Seq. ID No. 3818, Seq. ID No. 3838, Seq. ID No. 3840, Seq. ID No. 3850, Seq. ID No. 3852, Seq. ID No. 3854, Seq. ID No. 3860, Seq. ID No. 3862, Seq. ID No. 3864, Seq. ID No. 3866, Seq. ID No. 3880, Seq. ID No. 3890, Seq. ID No. 3892, Seq. ID No. 3896, Seq. ID No. 3904, Seq. ID No. 3916, Seq. ID No. 3924, Seq. ID No. 3926, Seq. ID No. 3960, Seq. ID No. 3964, Seq. ID No. 3974, Seq. ID No. 3976, Seq. ID No. 3994, Seq. ID No. 3996, Seq. ID No. 3998, Seq. ID No. 4006, Seq. ID No. 4008, Seq. ID No. 4010, Seq. ID No. 4026, Seq. ID No. 4028, Seq. ID No. 4040, Seq. ID No. 4042, Seq. ID No. 4044, Seq. ID No. 4046, Seq. ID No. 4048, Seq. ID No. 4050, Seq. ID No. 4062, Seq. ID No. 4072, Seq. ID No. 4074, Seq. ID No. 4080, Seq. ID No. 4082, Seq. ID No. 4084, Seq. ID No. 4102, Seq. ID No. 4104, Seq. ID No. 4112, Seq. ID No. 4134, Seq. ID No. 4136, Seq. ID No. 4138, Seq. ID No. 4140, Seq. ID No. 4142, Seq. ID No. 4144, Seq. ID No. 4146, Seq. ID No. 4152, Seq. ID No. 4154, Seq. ID No. 4182, Seq. ID No. 4222, Seq. ID No. 4224, Seq. ID No. 4226, Seq. ID No. 4228, Seq. ID No. 4232, Seq. ID No. 4234, Seq. ID No. 4242, Seq. ID No. 4248, Seq. ID No. 4254, Seq. ID No. 4258, Seq. ID No. 4260, Seq. ID No. 4262, Seq. ID No. 4264, Seq. ID No. 4266, Seq. ID No. 4270, Seq. ID No. 4276, Seq. ID No. 4286, Seq. ID No. 4288, Seq. ID No. 4298, Seq. ID No. 4308, Seq. ID No. 4312, Seq. ID No. 4314, Seq. ID No. 4344, Seq. ID No. 4380, Seq. ID No. 4386, Seq. ID No. 4390, Seq. ID No. 4392, Seq. ID No. 4400, Seq. ID No. 4404, Seq. ID No. 4438, Seq. ID No. 4440, Seq. ID No. 4442, Seq. ID No. 4470, Seq. ID No. 4474, Seq. ID No. 4482, Seq. ID No. 4484, Seq. ID No. 4486, Seq. ID No. 4494, Seq. ID No. 4496, Seq. ID No. 4498, Seq. ID No. 4514, Seq. ID No. 4516, Seq. ID No. 4528, Seq. ID No. 4530, Seq. ID No. 4534, Seq. ID No. 4588, Seq. ID No. 4590, Seq. ID No. 4640, Seq. ID No. 4642, Seq. ID No. 4644, Seq. ID No. 4660, Seq. ID No. 4682, Seq. ID No. 4688, Seq. ID No. 4696, Seq. ID No. 4706, Seq. ID No. 4708, Seq. ID No. 4710, Seq. ID No. 4712, Seq. ID No. 4716, Seq. ID No. 4718, Seq. ID No. 4738, Seq. ID No. 4760, Seq. ID No. 4814, Seq. ID No. 4828, Seq. ID No. 4854, Seq. ID No. 4864, Seq. ID No. 4870, Seq. ID No. 4872, Seq. ID No. 4874, Seq. ID No. 4876, Seq. ID No. 4920, Seq. ID No. 4922, Seq. ID No. 4924, Seq. ID No. 4930, Seq. ID No. 4932, Seq. ID No. 4950, Seq. ID No. 4952, Seq. ID No. 4976, Seq. ID No. 4988, Seq. ID No. 5000, Seq. ID No. 5014, Seq. ID No. 5032, Seq. ID No. 5062, Seq. ID No. 5064, Seq. ID No. 5070, Seq. ID No. 5086, Seq. ID No. 5104, Seq. ID No. 5116, Seq. ID No. 5124, Seq. ID No. 5126, Seq. ID No. 5130, Seq. ID No. 5132, Seq. ID No. 5134, Seq. ID No. 5136, Seq. ID No. 5138, Seq. ID No. 5140, Seq. ID No. 5142, Seq. ID No. 5160, Seq. ID No. 5166, Seq. ID No. 5176, Seq. ID No. 5198, Seq. ID No. 5200, Seq. ID No. 5206, Seq. ID No. 5208, Seq. ID No. 5214, Seq. ID No. 5220, Seq. ID No. 5224, Seq. ID No. 5268, Seq. ID No. 5274, Seq. ID No. 5276, Seq. ID No. 5278, Seq. ID No. 5280, Seq. ID No. 5282, Seq. ID No. 5286, Seq. ID No. 5328, Seq. ID No. 5330, Seq. ID No. 5332, Seq. ID No. 5342, Seq. ID No. 5378, Seq. ID No. 5380, Seq. ID No. 5386, Seq. ID No. 5388, Seq. ID No. 5406, Seq. ID No. 5414, Seq. ID No. 5416, Seq. ID No. 5434, Seq. ID No. 5454, Seq. ID No. 5460, Seq. ID No. 5462, Seq. ID No. 5464, Seq. ID No. 5466, Seq. ID No. 5492, Seq. ID No. 5498, Seq. ID No. 5510, Seq. ID No. 5514, Seq. ID No. 5516, Seq. ID No. 5518, Seq. ID No. 5526, Seq. ID No. 5530, Seq. ID No. 5532, Seq. ID No. 5534, Seq. ID No. 5544, Seq. ID No. 5546, Seq. ID No. 5570, Seq. ID No. 5588, Seq. ID No. 5590, Seq. ID No. 5592, Seq. ID No. 5594, Seq. ID No. 5596, Seq. ID No. 5598, Seq. ID No. 5610, Seq. ID No. 5612, Seq. ID No. 5622, Seq. ID No. 5624, Seq. ID No. 5626, Seq. ID No. 5634, Seq. ID No. 5638, Seq. ID No. 5640, Seq. ID No. 5642, Seq. ID No. 5644, Seq. ID No. 5650, Seq. ID No. 5660, Seq. ID No. 5668, Seq. ID No. 5682, Seq. ID No. 5684, Seq. ID No. 5686, Seq. ID No. 5688, Seq. ID No. 5690, Seq. ID No. 5700, Seq. ID No. 5704, Seq. ID No. 5706, Seq. ID No. 5710, Seq. ID No. 5712, Seq. ID No. 5720, Seq. ID No. 5730, Seq. ID No. 5734, Seq. ID No. 5736, Seq. ID No. 5740, Seq. ID No. 5764, Seq. ID No. 5766, Seq. ID No. 5768, Seq. ID No. 5772, Seq. ID No. 5784, Seq. ID No. 5786, Seq. ID No. 5792, Seq. ID No. 5798, Seq. ID No. 5830, Seq. ID No. 5880, Seq. ID No. 5884, Seq. ID No. 5886, Seq. ID No. 5890, Seq. ID No. 5894, Seq. ID No. 5896, Seq. ID No. 5900, Seq. ID No. 5902, Seq. ID No. 5906, Seq. ID No. 5910, Seq. ID No. 5922, Seq. ID No. 5924, Seq. ID No. 5928, Seq. ID No. 5930, Seq. ID No. 5940, Seq. ID No. 6024, Seq. ID No. 6026, Seq. ID No. 6028, Seq. ID No. 6044, Seq. ID No. 6048, Seq. ID No. 6054, Seq. ID No. 6060, Seq. ID No. 6064, Seq. ID No. 6068, Seq. ID No. 6088, Seq. ID No. 6090, Seq. ID No. 6092, Seq. ID No. 6096, Seq. ID No. 6104, Seq. ID No. 6108, Seq. ID No. 6110, Seq. ID No. 6112, Seq. ID No. 6116, Seq. ID No. 6118, Seq. ID No. 6136, Seq. ID No. 6138, Seq. ID No. 6160, Seq. ID No. 6162, Seq. ID No. 6164, Seq. ID No. 6166, Seq. ID No. 6170, Seq. ID No. 6184, Seq. ID No. 6186, Seq. ID No. 6188, Seq. ID No. 6190, Seq. ID No. 6192, Seq. ID No. 6198, Seq. ID No. 6204, Seq. ID No. 6206, Seq. ID No. 6210, Seq. ID No. 6218, Seq. ID No. 6222, Seq. ID No. 6224, Seq. ID No. 6226, Seq. ID No. 6228, Seq. ID No. 6230, Seq. ID No. 6236, Seq. ID No. 6238, Seq. ID No. 6242, Seq. ID No. 6244, Seq. ID No. 6246, Seq. ID No. 6250, Seq. ID No. 6254, Seq. ID No. 6260, Seq. ID No. 6264, Seq. ID No. 6266, Seq. ID No. 6268, Seq. ID No. 6274, Seq. ID No. 6276, Seq. ID No. 6284, Seq. ID No. 6286, Seq. ID No. 6290, Seq. ID No. 6302, Seq. ID No. 6304, Seq. ID No. 6326, Seq. ID No. 6328, Seq. ID No. 6364, Seq. ID No. 6366, Seq. ID No. 6378, Seq. ID No. 6382, Seq. ID No. 6384, Seq. ID No. 6416, Seq. ID No. 6426, Seq. ID No. 6428, Seq. ID No. 6430, Seq. ID No. 6432, Seq. ID No. 6474, Seq. ID No. 6480, Seq. ID No. 6498, Seq. ID No. 6518, Seq. ID No. 6542, Seq. ID No. 6544, Seq. ID No. 6556, Seq. ID No. 6558, Seq. ID No. 6572, Seq. ID No. 6574, Seq. ID No. 6582, Seq. ID No. 6594, Seq. ID No. 6596, Seq. ID No. 6598, Seq. ID No. 6600, Seq. ID No. 6602, Seq. ID No. 6604, Seq. ID No. 6632, Seq. ID No. 6638, Seq. ID No. 6640, Seq. ID No. 6644, Seq. ID No. 6646, and Seq. ID No. 6650.

40. The Alloiococcus otitidis polypeptide of claim 36, wherein the polypeptide is predicted by HMM SignalP algorithm analysis as being a non-secretory protein, and is selected from one of Seq. ID No. 2, Seq. ID No. 6, Seq. ID No. 12, Seq. ID No. 14, Seq. ID No. 16, Seq. ID No. 18, Seq. ID No. 24, Seq. ID No. 26, Seq. ID No. 28, Seq. ID No. 30, Seq. ID No. 36, Seq. ID No. 38, Seq. ID No. 40, Seq. ID No. 42, Seq. ID No. 44, Seq. ID No. 52, Seq. ID No. 56, Seq. ID No. 58, Seq. ID No. 60, Seq. ID No. 62, Seq. ID No. 64, Seq. ID No. 70, Seq. ID No. 72, Seq. ID No. 74, Seq. ID No. 76, Seq. ID No. 78, Seq. ID No. 80, Seq. ID No. 82, Seq. ID No. 84, Seq. ID No. 90, Seq. ID No. 92, Seq. ID No. 94, Seq. ID No. 96, Seq. ID No. 98, Seq. ID No. 100, Seq. ID No. 102, Seq. ID No. 104, Seq. ID No. 108, Seq. ID No. 110, Seq. ID No. 114, Seq. ID No. 116, Seq. ID No. 118, Seq. ID No. 120, Seq. ID No. 122, Seq. ID No. 126, Seq. ID No. 128, Seq. ID No. 130, Seq. ID No. 136, Seq. ID No. 138, Seq. ID No. 140, Seq. ID No. 144, Seq. ID No. 146, Seq. ID No. 148, Seq. ID No. 150, Seq. ID No. 152, Seq. ID No. 154, Seq. ID No. 156, Seq. ID No. 158, Seq. ID No. 166, Seq. ID No. 168, Seq. ID No. 170, Seq. ID No. 174, Seq. ID No. 176, Seq. ID No. 178, Seq. ID No. 180, Seq. ID No. 182, Seq. ID No. 184, Seq. ID No. 186, Seq. ID No. 188, Seq. ID No. 190, Seq. ID No. 194, Seq. ID No. 196, Seq. ID No. 198, Seq. ID No. 200, Seq. ID No. 202, Seq. ID No. 204, Seq. ID No. 206, Seq. ID No. 208, Seq. ID No. 220, Seq. ID No. 222, Seq. ID No. 224, Seq. ID No. 228, Seq. ID No. 230, Seq. ID No. 232, Seq. ID No. 234, Seq. ID No. 240, Seq. ID No. 242, Seq. ID No. 244, Seq. ID No. 246, Seq. ID No. 248, Seq. ID No. 254, Seq. ID No. 262, Seq. ID No. 264, Seq. ID No. 266, Seq. ID No. 268, Seq. ID No. 270, Seq. ID No. 276, Seq. ID No. 280, Seq. ID No. 282, Seq. ID No. 284, Seq. ID No. 292, Seq. ID No. 294, Seq. ID No. 296, Seq. ID No. 298, Seq. ID No. 300, Seq. ID No. 302, Seq. ID No. 304, Seq. ID No. 306, Seq. ID No. 308, Seq. ID No. 310, Seq. ID No. 312, Seq. ID No. 314, Seq. ID No. 316, Seq. ID No. 318, Seq. ID No. 320, Seq. ID No. 322, Seq. ID No. 324, Seq. ID No. 326, Seq. ID No. 332, Seq. ID No. 334, Seq. ID No. 336, Seq. ID No. 338, Seq. ID No. 340, Seq. ID No. 342, Seq. ID No. 344, Seq. ID No. 346, Seq. ID No. 348, Seq. ID No. 350, Seq. ID No. 352, Seq. ID No. 354, Seq. ID No. 356, Seq. ID No. 362, Seq. ID No. 364, Seq. ID No. 366, Seq. ID No. 368, Seq. ID No. 370, Seq. ID No. 372, Seq. ID No. 378, Seq. ID No. 380, Seq. ID No. 382, Seq. ID No. 384, Seq. ID No. 386, Seq. ID No. 388, Seq. ID No. 390, Seq. ID No. 392, Seq. ID No. 396, Seq. ID No. 398, Seq. ID No. 400, Seq. ID No. 406, Seq. ID No. 408, Seq. ID No. 410, Seq. ID No. 412, Seq. ID No. 414, Seq. ID No. 416, Seq. ID No. 418, Seq. ID No. 420, Seq. ID No. 422, Seq. ID No. 424, Seq. ID No. 426, Seq. ID No. 428, Seq. ID No. 430, Seq. ID No. 432, Seq. ID No. 434, Seq. ID No. 436, Seq. ID No. 438, Seq. ID No. 440, Seq. ID No. 442, Seq. ID No. 444, Seq. ID No. 446, Seq. ID No. 448, Seq. ID No. 450, Seq. ID No. 452, Seq. ID No. 454, Seq. ID No. 460, Seq. ID No. 462, Seq. ID No. 464, Seq. ID No. 466, Seq. ID No. 468, Seq. ID No. 470, Seq. ID No. 472, Seq. ID No. 474, Seq. ID No. 476, Seq. ID No. 480, Seq. ID No. 482, Seq. ID No. 484, Seq. ID No. 486, Seq. ID No. 502, Seq. ID No. 508, Seq. ID No. 518, Seq. ID No. 520, Seq. ID No. 522, Seq. ID No. 524, Seq. ID No. 530, Seq. ID No. 532, Seq. ID No. 534, Seq. ID No. 536, Seq. ID No. 538, Seq. ID No. 540, Seq. ID No. 542, Seq. ID No. 544, Seq. ID No. 552, Seq. ID No. 554, Seq. ID No. 556, Seq. ID No. 560, Seq. ID No. 562, Seq. ID No. 564, Seq. ID No. 566, Seq. ID No. 572, Seq. ID No. 574, Seq. ID No. 582, Seq. ID No. 584, Seq. ID No. 586, Seq. ID No. 588, Seq. ID No. 590, Seq. ID No. 596, Seq. ID No. 598, Seq. ID No. 602, Seq. ID No. 604, Seq. ID No. 606, Seq. ID No. 608, Seq. ID No. 610, Seq. ID No. 612, Seq. ID No. 614, Seq. ID No. 616, Seq. ID No. 620, Seq. ID No. 622, Seq. ID No. 624, Seq. ID No. 626, Seq. ID No. 628, Seq. ID No. 630, Seq. ID No. 632, Seq. ID No. 634, Seq. ID No. 636, Seq. ID No. 650, Seq. ID No. 652, Seq. ID No. 664, Seq. ID No. 666, Seq. ID No. 672, Seq. ID No. 674, Seq. ID No. 682, Seq. ID No. 684, Seq. ID No. 686, Seq. ID No. 688, Seq. ID No. 690, Seq. ID No. 692, Seq. ID No. 694, Seq. ID No. 696, Seq. ID No. 698, Seq. ID No. 700, Seq. ID No. 702, Seq. ID No. 704, Seq. ID No. 706, Seq. ID No. 708, Seq. ID No. 710, Seq. ID No. 712, Seq. ID No. 714, Seq. ID No. 728, Seq. ID No. 730, Seq. ID No. 732, Seq. ID No. 734, Seq. ID No. 736, Seq. ID No. 738, Seq. ID No. 740, Seq. ID No. 742, Seq. ID No. 744, Seq. ID No. 754, Seq. ID No. 768, Seq. ID No. 772, Seq. ID No. 774, Seq. ID No. 776, Seq. ID No. 784, Seq. ID No. 786, Seq. ID No. 788, Seq. ID No. 790, Seq. ID No. 792, Seq. ID No. 794, Seq. ID No. 796, Seq. ID No. 798, Seq. ID No. 800, Seq. ID No. 802, Seq. ID No. 804, Seq. ID No. 806, Seq. ID No. 812, Seq. ID No. 814, Seq. ID No. 816, Seq. ID No. 818, Seq. ID No. 822, Seq. ID No. 824, Seq. ID No. 828, Seq. ID No. 830, Seq. ID No. 832, Seq. ID No. 834, Seq. ID No. 836, Seq. ID No. 838, Seq. ID No. 840, Seq. ID No. 842, Seq. ID No. 844, Seq. ID No. 846, Seq. ID No. 848, Seq. ID No. 850, Seq. ID No. 852, Seq. ID No. 854, Seq. ID No. 856, Seq. ID No. 858, Seq. ID No. 860, Seq. ID No. 862, Seq. ID No. 866, Seq. ID No. 868, Seq. ID No. 870, Seq. ID No. 872, Seq. ID No. 874, Seq. ID No. 876, Seq. ID No. 878, Seq. ID No. 880, Seq. ID No. 882, Seq. ID No. 884, Seq. ID No. 886, Seq. ID No. 888, Seq. ID No. 890, Seq. ID No. 892, Seq. ID No. 896, Seq. ID No. 898, Seq. ID No. 900, Seq. ID No. 904, Seq. ID No. 906, Seq. ID No. 908, Seq. ID No. 910, Seq. ID No. 912, Seq. ID No. 914, Seq. ID No. 916, Seq. ID No. 918, Seq. ID No. 920, Seq. ID No. 922, Seq. ID No. 924, Seq. ID No. 926, Seq. ID No. 928, Seq. ID No. 930, Seq. ID No. 932, Seq. ID No. 934, Seq. ID No. 940, Seq. ID No. 946, Seq. ID No. 948, Seq. ID No. 950, Seq. ID No. 952, Seq. ID No. 954, Seq. ID No. 960, Seq. ID No. 962, Seq. ID No. 964, Seq. ID No. 966, Seq. ID No. 970, Seq. ID No. 972, Seq. ID No. 974, Seq. ID No. 976, Seq. ID No. 978, Seq. ID No. 988, Seq. ID No. 990, Seq. ID No. 992, Seq. ID No. 994, Seq. ID No. 996, Seq. ID No. 998, Seq. ID No. 1000, Seq. ID No. 1018, Seq. ID No. 1022, Seq. ID No. 1024, Seq. ID No. 1026, Seq. ID No. 1028, Seq. ID No. 1042, Seq. ID No. 1044, Seq. ID No. 1048, Seq. ID No. 1050, Seq. ID No. 1052, Seq. ID No. 1054, Seq. ID No. 1058, Seq. ID No. 1060, Seq. ID No. 1062, Seq. ID No. 1064, Seq. ID No. 1066, Seq. ID No. 1068, Seq. ID No. 1070, Seq. ID No. 1072, Seq. ID No. 1074, Seq. ID No. 1080, Seq. ID No. 1082, Seq. ID No. 1084, Seq. ID No. 1086, Seq. ID No. 1088, Seq. ID No. 1090, Seq. ID No. 1092, Seq. ID No. 1094, Seq. ID No. 1096, Seq. ID No. 1098, Seq. ID No. 1100, Seq. ID No. 1102, Seq. ID No. 1104, Seq. ID No. 1110, Seq. ID No. 1112, Seq. ID No. 1114, Seq. ID No. 1116, Seq. ID No. 1118, Seq. ID No. 1120, Seq. ID No. 1122, Seq. ID No. 1124, Seq. ID No. 1126, Seq. ID No. 1128, Seq. ID No. 1130, Seq. ID No. 1134, Seq. ID No. 1142, Seq. ID No. 1144, Seq. ID No. 1146, Seq. ID No. 1148, Seq. ID No. 1150, Seq. ID No. 1154, Seq. ID No. 1156, Seq. ID No. 1158, Seq. ID No. 1160, Seq. ID No. 1162, Seq. ID No. 1164, Seq. ID No. 1172, Seq. ID No. 1176, Seq. ID No. 1178, Seq. ID No. 1180, Seq. ID No. 1182, Seq. ID No. 1186, Seq. ID No. 1188, Seq. ID No. 1190, Seq. ID No. 1192, Seq. ID No. 1194, Seq. ID No. 1200, Seq. ID No. 1202, Seq. ID No. 1206, Seq. ID No. 1208, Seq. ID No. 1210, Seq. ID No. 1212, Seq. ID No. 1216, Seq. ID No. 1218, Seq. ID No. 1220, Seq. ID No. 1222, Seq. ID No. 1226, Seq. ID No. 1232, Seq. ID No. 1234, Seq. ID No. 1236, Seq. ID No. 1240, Seq. ID No. 1242, Seq. ID No. 1248, Seq. ID No. 1250, Seq. ID No. 1252, Seq. ID No. 1254, Seq. ID No. 1256, Seq. ID No. 1258, Seq. ID No. 1262, Seq. ID No. 1264, Seq. ID No. 1274, Seq. ID No. 1276, Seq. ID No. 1278, Seq. ID No. 1280, Seq. ID No. 1282, Seq. ID No. 1286, Seq. ID No. 1294, Seq. ID No. 1300, Seq. ID No. 1302, Seq. ID No. 1308, Seq. ID No. 1310, Seq. ID No. 1312, Seq. ID No. 1314, Seq. ID No. 1322, Seq. ID No. 1324, Seq. ID No. 1334, Seq. ID No. 1336, Seq. ID No. 1340, Seq. ID No. 1346, Seq. ID No. 1356, Seq. ID No. 1358, Seq. ID No. 1360, Seq. ID No. 1362, Seq. ID No. 1364, Seq. ID No. 1374, Seq. ID No. 1376, Seq. ID No. 1378, Seq. ID No. 1380, Seq. ID No. 1384, Seq. ID No. 1386, Seq. ID No. 1388, Seq. ID No. 1390, Seq. ID No. 1392, Seq. ID No. 1394, Seq. ID No. 1396, Seq. ID No. 1398, Seq. ID No. 1400, Seq. ID No. 1404, Seq. ID No. 1406, Seq. ID No. 1408, Seq. ID No. 1410, Seq. ID No. 1412, Seq. ID No. 1414, Seq. ID No. 1416, Seq. ID No. 1418, Seq. ID No. 1420, Seq. ID No. 1422, Seq. ID No. 1424, Seq. ID No. 1426, Seq. ID No. 1428, Seq. ID No. 1432, Seq. ID No. 1434, Seq. ID No. 1438, Seq. ID No. 1440, Seq. ID No. 1442, Seq. ID No. 1444, Seq. ID No. 1450, Seq. ID No. 1452, Seq. ID No. 1454, Seq. ID No. 1456, Seq. ID No. 1458, Seq. ID No. 1460, Seq. ID No. 1462, Seq. ID No. 1464, Seq. ID No. 1466, Seq. ID No. 1468, Seq. ID No. 1470, Seq. ID No. 1472, Seq. ID No. 1474, Seq. ID No. 1476, Seq. ID No. 1478, Seq. ID No. 1480, Seq. ID No. 1484, Seq. ID No. 1486, Seq. ID No. 1488, Seq. ID No. 1490, Seq. ID No. 1492, Seq. ID No. 1494, Seq. ID No. 1496, Seq. ID No. 1498, Seq. ID No. 1500, Seq. ID No. 1502, Seq. ID No. 1504, Seq. ID No. 1506, Seq. ID No. 1508, Seq. ID No. 1510, Seq. ID No. 1512, Seq. ID No. 1520, Seq. ID No. 1522, Seq. ID No. 1524, Seq. ID No. 1526, Seq. ID No. 1528, Seq. ID No. 1532, Seq. ID No. 1538, Seq. ID No. 1540, Seq. ID No. 1542, Seq. ID No. 1544, Seq. ID No. 1550, Seq. ID No. 1556, Seq. ID No. 1558, Seq. ID No. 1566, Seq. ID No. 1568, Seq. ID No. 1570, Seq. ID No. 1574, Seq. ID No. 1576, Seq. ID No. 1578, Seq. ID No. 1582, Seq. ID No. 1588, Seq. ID No. 1590, Seq. ID No. 1592, Seq. ID No. 1594, Seq. ID No. 1596, Seq. ID No. 1598, Seq. ID No. 1602, Seq. ID No. 1604, Seq. ID No. 1606, Seq. ID No. 1608, Seq. ID No. 1610, Seq. ID No. 1612, Seq. ID No. 1614, Seq. ID No. 1616, Seq. ID No. 1618, Seq. ID No. 1620, Seq. ID No. 1624, Seq. ID No. 1626, Seq. ID No. 1628, Seq. ID No. 1630, Seq. ID No. 1632, Seq. ID No. 1636, Seq. ID No. 1638, Seq. ID No. 1642, Seq. ID No. 1652, Seq. ID No. 1656, Seq. ID No. 1658, Seq. ID No. 1660, Seq. ID No. 1668, Seq. ID No. 1670, Seq. ID No. 1676, Seq. ID No. 1684, Seq. ID No. 1686, Seq. ID No. 1688, Seq. ID No. 1690, Seq. ID No. 1692, Seq. ID No. 1696, Seq. ID No. 1698, Seq. ID No. 1700, Seq. ID No. 1702, Seq. ID No. 1704, Seq. ID No. 1706, Seq. ID No. 1710, Seq. ID No. 1714, Seq. ID No. 1716, Seq. ID No. 1718, Seq. ID No. 1720, Seq. ID No. 1722, Seq. ID No. 1724, Seq. ID No. 1726, Seq. ID No. 1728, Seq. ID No. 1730, Seq. ID No. 1736, Seq. ID No. 1740, Seq. ID No. 1742, Seq. ID No. 1744, Seq. ID No. 1746, Seq. ID No. 1748, Seq. ID No. 1750, Seq. ID No. 1752, Seq. ID No. 1760, Seq. ID No. 1762, Seq. ID No. 1764, Seq. ID No. 1770, Seq. ID No. 1774, Seq. ID No. 1776, Seq. ID No. 1778, Seq. ID No. 1780, Seq. ID No. 1784, Seq. ID No. 1786, Seq. ID No. 1790, Seq. ID No. 1794, Seq. ID No. 1796, Seq. ID No. 1800, Seq. ID No. 1802, Seq. ID No. 1804, Seq. ID No. 1808, Seq. ID No. 1810, Seq. ID No. 1812, Seq. ID No. 1814, Seq. ID No. 1816, Seq. ID No. 1818, Seq. ID No. 1826, Seq. ID No. 1828, Seq. ID No. 1830, Seq. ID No. 1832, Seq. ID No. 1834, Seq. ID No. 1836, Seq. ID No. 1838, Seq. ID No. 1842, Seq. ID No. 1844, Seq. ID No. 1846, Seq. ID No. 1848, Seq. ID No. 1850, Seq. ID No. 1852, Seq. ID No. 1854, Seq. ID No. 1856, Seq. ID No. 1860, Seq. ID No. 1862, Seq. ID No. 1864, Seq. ID No. 1866, Seq. ID No. 1868, Seq. ID No. 1872, Seq. ID No. 1874, Seq. ID No. 1878, Seq. ID No. 1880, Seq. ID No. 1882, Seq. ID No. 1884, Seq. ID No. 1886, Seq. ID No. 1888, Seq. ID No. 1890, Seq. ID No. 1898, Seq. ID No. 1900, Seq. ID No. 1902, Seq. ID No. 1904, Seq. ID No. 1906, Seq. ID No. 1908, Seq. ID No. 1910, Seq. ID No. 1912, Seq. ID No. 1914, Seq. ID No. 1922, Seq. ID No. 1926, Seq. ID No. 1932, Seq. ID No. 1934, Seq. ID No. 1936, Seq. ID No. 1938, Seq. ID No. 1940, Seq. ID No. 1942, Seq. ID No. 1944, Seq. ID No. 1946, Seq. ID No. 1948, Seq. ID No. 1950, Seq. ID No. 1952, Seq. ID No. 1954, Seq. ID No. 1956, Seq. ID No. 1958, Seq. ID No. 1960, Seq. ID No. 1962, Seq. ID No. 1964, Seq. ID No. 1966, Seq. ID No. 1968, Seq. ID No. 1972, Seq. ID No. 1974, Seq. ID No. 1976, Seq. ID No. 1978, Seq. ID No. 1980, Seq. ID No. 1984, Seq. ID No. 1986, Seq. ID No. 1988, Seq. ID No. 1990, Seq. ID No. 1996, Seq. ID No. 1998, Seq. ID No. 2000, Seq. ID No. 2002, Seq. ID No. 2004, Seq. ID No. 2008, Seq. ID No. 2010, Seq. ID No. 2012, Seq. ID No. 2016, Seq. ID No. 2022, Seq. ID No. 2024, Seq. ID No. 2030, Seq. ID No. 2032, Seq. ID No. 2038, Seq. ID No. 2040, Seq. ID No. 2044, Seq. ID No. 2046, Seq. ID No. 2048, Seq. ID No. 2052, Seq. ID No. 2058, Seq. ID No. 2060, Seq. ID No. 2062, Seq. ID No. 2064, Seq. ID No. 2066, Seq. ID No. 2068, Seq. ID No. 2070, Seq. ID No. 2072, Seq. ID No. 2074, Seq. ID No. 2076, Seq. ID No. 2078, Seq. ID No. 2080, Seq. ID No. 2082, Seq. ID No. 2084, Seq. ID No. 2086, Seq. ID No. 2094, Seq. ID No. 2096, Seq. ID No. 2098, Seq. ID No. 2100, Seq. ID No. 2102, Seq. ID No. 2104, Seq. ID No. 2112, Seq. ID No. 2118, Seq. ID No. 2120, Seq. ID No. 2130, Seq. ID No. 2132, Seq. ID No. 2134, Seq. ID No. 2136, Seq. ID No. 2138, Seq. ID No. 2140, Seq. ID No. 2142, Seq. ID No. 2144, Seq. ID No. 2146, Seq. ID No. 2148, Seq. ID No. 2154, Seq. ID No. 2162, Seq. ID No. 2164, Seq. ID No. 2166, Seq. ID No. 2168, Seq. ID No. 2170, Seq. ID No. 2176, Seq. ID No. 2180, Seq. ID No. 2182, Seq. ID No. 2184, Seq. ID No. 2186, Seq. ID No. 2190, Seq. ID No. 2194, Seq. ID No. 2196, Seq. ID No. 2198, Seq. ID No. 2200, Seq. ID No. 2202, Seq. ID No. 2204, Seq. ID No. 2208, Seq. ID No. 2210, Seq. ID No. 2212, Seq. ID No. 2214, Seq. ID No. 2216, Seq. ID No. 2218, Seq. ID No. 2220, Seq. ID No. 2222, Seq. ID No. 2224, Seq. ID No. 2226, Seq. ID No. 2228, Seq. ID No. 2230, Seq. ID No. 2232, Seq. ID No. 2234, Seq. ID No. 2236, Seq. ID No. 2242, Seq. ID No. 2244, Seq. ID No. 2248, Seq. ID No. 2254, Seq. ID No. 2258, Seq. ID No. 2262, Seq. ID No. 2264, Seq. ID No. 2266, Seq. ID No. 2268, Seq. ID No. 2270, Seq. ID No. 2274, Seq. ID No. 2276, Seq. ID No. 2278, Seq. ID No. 2280, Seq. ID No. 2282, Seq. ID No. 2286, Seq. ID No. 2288, Seq. ID No. 2298, Seq. ID No. 2300, Seq. ID No. 2302, Seq. ID No. 2310, Seq. ID No. 2312, Seq. ID No. 2314, Seq. ID No. 2316, Seq. ID No. 2332, Seq. ID No. 2336, Seq. ID No. 2338, Seq. ID No. 2340, Seq. ID No. 2342, Seq. ID No. 2346, Seq. ID No. 2360, Seq. ID No. 2362, Seq. ID No. 2364, Seq. ID No. 2370, Seq. ID No. 2374, Seq. ID No. 2378, Seq. ID No. 2380, Seq. ID No. 2382, Seq. ID No. 2384, Seq. ID No. 2386, Seq. ID No. 2396, Seq. ID No. 2398, Seq. ID No. 2400, Seq. ID No. 2402, Seq. ID No. 2404, Seq. ID No. 2406, Seq. ID No. 2410, Seq. ID No. 2412, Seq. ID No. 2414, Seq. ID No. 2416, Seq. ID No. 2418, Seq. ID No. 2424, Seq. ID No. 2432, Seq. ID No. 2436, Seq. ID No. 2438, Seq. ID No. 2440, Seq. ID No. 2442, Seq. ID No. 2444, Seq. ID No. 2446, Seq. ID No. 2448, Seq. ID No. 2452, Seq. ID No. 2454, Seq. ID No. 2456, Seq. ID No. 2458, Seq. ID No. 2462, Seq. ID No. 2464, Seq. ID No. 2466, Seq. ID No. 2468, Seq. ID No. 2470, Seq. ID No. 2472, Seq. ID No. 2474, Seq. ID No. 2476, Seq. ID No. 2478, Seq. ID No. 2480, Seq. ID No. 2482, Seq. ID No. 2484, Seq. ID No. 2486, Seq. ID No. 2496, Seq. ID No. 2506, Seq. ID No. 2510, Seq. ID No. 2512, Seq. ID No. 2514, Seq. ID No. 2520, Seq. ID No. 2522, Seq. ID No. 2530, Seq. ID No. 2540, Seq. ID No. 2548, Seq. ID No. 2550, Seq. ID No. 2552, Seq. ID No. 2554, Seq. ID No. 2560, Seq. ID No. 2562, Seq. ID No. 2564, Seq. ID No. 2568, Seq. ID No. 2574, Seq. ID No. 2576, Seq. ID No. 2578, Seq. ID No. 2580, Seq. ID No. 2582, Seq. ID No. 2586, Seq. ID No. 2588, Seq. ID No. 2590, Seq. ID No. 2594, Seq. ID No. 2596, Seq. ID No. 2604, Seq. ID No. 2606, Seq. ID No. 2610, Seq. ID No. 2614, Seq. ID No. 2616, Seq. ID No. 2618, Seq. ID No. 2620, Seq. ID No. 2624, Seq. ID No. 2626, Seq. ID No. 2632, Seq. ID No. 2634, Seq. ID No. 2636, Seq. ID No. 2638, Seq. ID No. 2640, Seq. ID No. 2642, Seq. ID No. 2644, Seq. ID No. 2646, Seq. ID No. 2648, Seq. ID No. 2650, Seq. ID No. 2654, Seq. ID No. 2656, Seq. ID No. 2658, Seq. ID No. 2660, Seq. ID No. 2662, Seq. ID No. 2664, Seq. ID No. 2666, Seq. ID No. 2668, Seq. ID No. 2670, Seq. ID No. 2672, Seq. ID No. 2674, Seq. ID No. 2676, Seq. ID No. 2678, Seq. ID No. 2686, Seq. ID No. 2688, Seq. ID No. 2690, Seq. ID No. 2710, Seq. ID No. 2712, Seq. ID No. 2714, Seq. ID No. 2716, Seq. ID No. 2720, Seq. ID No. 2722, Seq. ID No. 2724, Seq. ID No. 2726, Seq. ID No. 2728, Seq. ID No. 2736, Seq. ID No. 2738, Seq. ID No. 2740, Seq. ID No. 2742, Seq. ID No. 2744, Seq. ID No. 2746, Seq. ID No. 2748, Seq. ID No. 2750, Seq. ID No. 2752, Seq. ID No. 2754, Seq. ID No. 2756, Seq. ID No. 2758, Seq. ID No. 2760, Seq. ID No. 2762, Seq. ID No. 2764, Seq. ID No. 2766, Seq. ID No. 2768, Seq. ID No. 2770, Seq. ID No. 2772, Seq. ID No. 2774, Seq. ID No. 2776, Seq. ID No. 2778, Seq. ID No. 2780, Seq. ID No. 2782, Seq. ID No. 2788, Seq. ID No. 2790, Seq. ID No. 2792, Seq. ID No. 2794, Seq. ID No. 2796, Seq. ID No. 2798, Seq. ID No. 2800, Seq. ID No. 2804, Seq. ID No. 2806, Seq. ID No. 2808, Seq. ID No. 2812, Seq. ID No. 2818, Seq. ID No. 2826, Seq. ID No. 2828, Seq. ID No. 2830, Seq. ID No. 2844, Seq. ID No. 2848, Seq. ID No. 2850, Seq. ID No. 2852, Seq. ID No. 2858, Seq. ID No. 2864, Seq. ID No. 2866, Seq. ID No. 2868, Seq. ID No. 2870, Seq. ID No. 2872, Seq. ID No. 2876, Seq. ID No. 2878, Seq. ID No. 2880, Seq. ID No. 2884, Seq. ID No. 2886, Seq. ID No. 2888, Seq. ID No. 2890, Seq. ID No. 2892, Seq. ID No. 2896, Seq. ID No. 2898, Seq. ID No. 2900, Seq. ID No. 2902, Seq. ID No. 2904, Seq. ID No. 2908, Seq. ID No. 2910, Seq. ID No. 2912, Seq. ID No. 2914, Seq. ID No. 2916, Seq. ID No. 2918, Seq. ID No. 2920, Seq. ID No. 2922, Seq. ID No. 2924, Seq. ID No. 2926, Seq. ID No. 2928, Seq. ID No. 2930, Seq. ID No. 2932, Seq. ID No. 2934, Seq. ID No. 2944, Seq. ID No. 2946, Seq. ID No. 2954, Seq. ID No. 2956, Seq. ID No. 2958, Seq. ID No. 2960, Seq. ID No. 2962, Seq. ID No. 2964, Seq. ID No. 2966, Seq. ID No. 2968, Seq. ID No. 2972, Seq. ID No. 2980, Seq. ID No. 2986, Seq. ID No. 2990, Seq. ID No. 2994, Seq. ID No. 3000, Seq. ID No. 3002, Seq. ID No. 3004, Seq. ID No. 3016, Seq. ID No. 3018, Seq. ID No. 3020, Seq. ID No. 3022, Seq. ID No. 3034, Seq. ID No. 3036, Seq. ID No. 3038, Seq. ID No. 3040, Seq. ID No. 3042, Seq. ID No. 3046, Seq. ID No. 3048, Seq. ID No. 3050, Seq. ID No. 3052, Seq. ID No. 3054, Seq. ID No. 3058, Seq. ID No. 3060, Seq. ID No. 3062, Seq. ID No. 3066, Seq. ID No. 3068, Seq. ID No. 3070, Seq. ID No. 3080, Seq. ID No. 3082, Seq. ID No. 3084, Seq. ID No. 3086, Seq. ID No. 3088, Seq. ID No. 3090, Seq. ID No. 3092, Seq. ID No. 3094, Seq. ID No. 3096, Seq. ID No. 3098, Seq. ID No. 3100, Seq. ID No. 3102, Seq. ID No. 3104, Seq. ID No. 3106, Seq. ID No. 3108, Seq. ID No. 3110, Seq. ID No. 3112, Seq. ID No. 3114, Seq. ID No. 3116, Seq. ID No. 3118, Seq. ID No. 3126, Seq. ID No. 3128, Seq. ID No. 3130, Seq. ID No. 3132, Seq. ID No. 3134, Seq. ID No. 3136, Seq. ID No. 3138, Seq. ID No. 3140, Seq. ID No. 3142, Seq. ID No. 3144, Seq. ID No. 3148, Seq. ID No. 3150, Seq. ID No. 3152, Seq. ID No. 3154, Seq. ID No. 3160, Seq. ID No. 3162, Seq. ID No. 3168, Seq. ID No. 3170, Seq. ID No. 3172, Seq. ID No. 3176, Seq. ID No. 3178, Seq. ID No. 3180, Seq. ID No. 3182, Seq. ID No. 3186, Seq. ID No. 3188, Seq. ID No. 3190, Seq. ID No. 3192, Seq. ID No. 3196, Seq. ID No. 3198, Seq. ID No. 3200, Seq. ID No. 3204, Seq. ID No. 3206, Seq. ID No. 3208, Seq. ID No. 3210, Seq. ID No. 3212, Seq. ID No. 3222, Seq. ID No. 3224, Seq. ID No. 3226, Seq. ID No. 3228, Seq. ID No. 3230, Seq. ID No. 3232, Seq. ID No. 3234, Seq. ID No. 3236, Seq. ID No. 3238, Seq. ID No. 3240, Seq. ID No. 3248, Seq. ID No. 3252, Seq. ID No. 3254, Seq. ID No. 3260, Seq. ID No. 3266, Seq. ID No. 3268, Seq. ID No. 3272, Seq. ID No. 3274, Seq. ID No. 3280, Seq. ID No. 3282, Seq. ID No. 3284, Seq. ID No. 3286, Seq. ID No. 3288, Seq. ID No. 3290, Seq. ID No. 3292, Seq. ID No. 3294, Seq. ID No. 3296, Seq. ID No. 3300, Seq. ID No. 3302, Seq. ID No. 3304, Seq. ID No. 3306, Seq. ID No. 3308, Seq. ID No. 3310, Seq. ID No. 3312, Seq. ID No. 3314, Seq. ID No. 3316, Seq. ID No. 3320, Seq. ID No. 3322, Seq. ID No. 3328, Seq. ID No. 3330, Seq. ID No. 3334, Seq. ID No. 3342, Seq. ID No. 3344, Seq. ID No. 3346, Seq. ID No. 3348, Seq. ID No. 3362, Seq. ID No. 3364, Seq. ID No. 3366, Seq. ID No. 3368, Seq. ID No. 3370, Seq. ID No. 3372, Seq. ID No. 3374, Seq. ID No. 3380, Seq. ID No. 3382, Seq. ID No. 3384, Seq. ID No. 3386, Seq. ID No. 3388, Seq. ID No. 3394, Seq. ID No. 3398, Seq. ID No. 3400, Seq. ID No. 3402, Seq. ID No. 3404, Seq. ID No. 3408, Seq. ID No. 3410, Seq. ID No. 3412, Seq. ID No. 3414, Seq. ID No. 3418, Seq. ID No. 3420, Seq. ID No. 3424, Seq. ID No. 3430, Seq. ID No. 3432, Seq. ID No. 3436, Seq. ID No. 3438, Seq. ID No. 3440, Seq. ID No. 3444, Seq. ID No. 3446, Seq. ID No. 3448, Seq. ID No. 3460, Seq. ID No. 3462, Seq. ID No. 3466, Seq. ID No. 3468, Seq. ID No. 3470, Seq. ID No. 3472, Seq. ID No. 3474, Seq. ID No. 3476, Seq. ID No. 3478, Seq. ID No. 3480, Seq. ID No. 3484, Seq. ID No. 3486, Seq. ID No. 3488, Seq. ID No. 3490, Seq. ID No. 3496, Seq. ID No. 3498, Seq. ID No. 3500, Seq. ID No. 3502, Seq. ID No. 3508, Seq. ID No. 3510, Seq. ID No. 3512, Seq. ID No. 3514, Seq. ID No. 3516, Seq. ID No. 3522, Seq. ID No. 3524, Seq. ID No. 3526, Seq. ID No. 3530, Seq. ID No. 3534, Seq. ID No. 3536, Seq. ID No. 3538, Seq. ID No. 3542, Seq. ID No. 3544, Seq. ID No. 3546, Seq. ID No. 3548, Seq. ID No. 3550, Seq. ID No. 3552, Seq. ID No. 3554, Seq. ID No. 3556, Seq. ID No. 3558, Seq. ID No. 3560, Seq. ID No. 3564, Seq. ID No. 3566, Seq. ID No. 3568, Seq. ID No. 3570, Seq. ID No. 3572, Seq. ID No. 3576, Seq. ID No. 3578, Seq. ID No. 3580, Seq. ID No. 3584, Seq. ID No. 3586, Seq. ID No. 3590, Seq. ID No. 3592, Seq. ID No. 3598, Seq. ID No. 3600, Seq. ID No. 3602, Seq. ID No. 3604, Seq. ID No. 3606, Seq. ID No. 3608, Seq. ID No. 3610, Seq. ID No. 3614, Seq. ID No. 3616, Seq. ID No. 3624, Seq. ID No. 3628, Seq. ID No. 3632, Seq. ID No. 3634, Seq. ID No. 3638, Seq. ID No. 3640, Seq. ID No. 3642, Seq. ID No. 3644, Seq. ID No. 3646, Seq. ID No. 3648, Seq. ID No. 3650, Seq. ID No. 3652, Seq. ID No. 3654, Seq. ID No. 3656, Seq. ID No. 3658, Seq. ID No. 3660, Seq. ID No. 3662, Seq. ID No. 3664, Seq. ID No. 3666, Seq. ID No. 3668, Seq. ID No. 3670, Seq. ID No. 3672, Seq. ID No. 3674, Seq. ID No. 3676, Seq. ID No. 3682, Seq. ID No. 3684, Seq. ID No. 3686, Seq. ID No. 3688, Seq. ID No. 3692, Seq. ID No. 3694, Seq. ID No. 3696, Seq. ID No. 3698, Seq. ID No. 3700, Seq. ID No. 3702, Seq. ID No. 3704, Seq. ID No. 3706, Seq. ID No. 3708, Seq. ID No. 3710, Seq. ID No. 3712, Seq. ID No. 3714, Seq. ID No. 3716, Seq. ID No. 3720, Seq. ID No. 3722, Seq. ID No. 3726, Seq. ID No. 3730, Seq. ID No. 3732, Seq. ID No. 3734, Seq. ID No. 3736, Seq. ID No. 3738, Seq. ID No. 3740, Seq. ID No. 3744, Seq. ID No. 3748, Seq. ID No. 3750, Seq. ID No. 3752, Seq. ID No. 3760, Seq. ID No. 3768, Seq. ID No. 3770, Seq. ID No. 3772, Seq. ID No. 3774, Seq. ID No. 3776, Seq. ID No. 3778, Seq. ID No. 3780, Seq. ID No. 3786, Seq. ID No. 3788, Seq. ID No. 3790, Seq. ID No. 3792, Seq. ID No. 3796, Seq. ID No. 3798, Seq. ID No. 3802, Seq. ID No. 3804, Seq. ID No. 3806, Seq. ID No. 3810, Seq. ID No. 3812, Seq. ID No. 3820, Seq. ID No. 3822, Seq. ID No. 3824, Seq. ID No. 3826, Seq. ID No. 3828, Seq. ID No. 3830, Seq. ID No. 3832, Seq. ID No. 3834, Seq. ID No. 3836, Seq. ID No. 3842, Seq. ID No. 3844, Seq. ID No. 3846, Seq. ID No. 3848, Seq. ID No. 3856, Seq. ID No. 3858, Seq. ID No. 3868, Seq. ID No. 3870, Seq. ID No. 3872, Seq. ID No. 3874, Seq. ID No. 3876, Seq. ID No. 3878, Seq. ID No. 3882, Seq. ID No. 3884, Seq. ID No. 3886, Seq. ID No. 3888, Seq. ID No. 3894, Seq. ID No. 3898, Seq. ID No. 3900, Seq. ID No. 3902, Seq. ID No. 3906, Seq. ID No. 3908, Seq. ID No. 3910, Seq. ID No. 3912, Seq. ID No. 3914, Seq. ID No. 3918, Seq. ID No. 3920, Seq. ID No. 3922, Seq. ID No. 3928, Seq. ID No. 3930, Seq. ID No. 3932, Seq. ID No. 3934, Seq. ID No. 3936, Seq. ID No. 3938, Seq. ID No. 3940, Seq. ID No. 3942, Seq. ID No. 3944, Seq. ID No. 3946, Seq. ID No. 3948, Seq. ID No. 3950, Seq. ID No. 3952, Seq. ID No. 3954, Seq. ID No. 3956, Seq. ID No. 3958, Seq. ID No. 3962, Seq. ID No. 3966, Seq. ID No. 3968, Seq. ID No. 3970, Seq. ID No. 3972, Seq. ID No. 3978, Seq. ID No. 3980, Seq. ID No. 3982, Seq. ID No. 3984, Seq. ID No. 3986, Seq. ID No. 3988, Seq. ID No. 3990, Seq. ID No. 3992, Seq. ID No. 4000, Seq. ID No. 4002, Seq. ID No. 4004, Seq. ID No. 4012, Seq. ID No. 4014, Seq. ID No. 4016, Seq. ID No. 4018, Seq. ID No. 4020, Seq. ID No. 4022, Seq. ID No. 4024, Seq. ID No. 4030, Seq. ID No. 4032, Seq. ID No. 4034, Seq. ID No. 4036, Seq. ID No. 4038, Seq. ID No. 4052, Seq. ID No. 4054, Seq. ID No. 4056, Seq. ID No. 4058, Seq. ID No. 4060, Seq. ID No. 4064, Seq. ID No. 4066, Seq. ID No. 4068, Seq. ID No. 4070, Seq. ID No. 4076, Seq. ID No. 4078, Seq. ID No. 4086, Seq. ID No. 4088, Seq. ID No. 4090, Seq. ID No. 4092, Seq. ID No. 4094, Seq. ID No. 4096, Seq. ID No. 4098, Seq. ID No. 4100, Seq. ID No. 4106, Seq. ID No. 4108, Seq. ID No. 4110, Seq. ID No. 4114, Seq. ID No. 4116, Seq. ID No. 4118, Seq. ID No. 4120, Seq. ID No. 4122, Seq. ID No. 4124, Seq. ID No. 4126, Seq. ID No. 4128, Seq. ID No. 4130, Seq. ID No. 4132, Seq. ID No. 4148, Seq. ID No. 4150, Seq. ID No. 4156, Seq. ID No. 4158, Seq. ID No. 4160, Seq. ID No. 4162, Seq. ID No. 4164, Seq. ID No. 4166, Seq. ID No. 4168, Seq. ID No. 4170, Seq. ID No. 4172, Seq. ID No. 4174, Seq. ID No. 4176, Seq. ID No. 4178, Seq. ID No. 4180, Seq. ID No. 4184, Seq. ID No. 4186, Seq. ID No. 4188, Seq. ID No. 4190, Seq. ID No. 4192, Seq. ID No. 4194, Seq. ID No. 4196, Seq. ID No. 4198, Seq. ID No. 4200, Seq. ID No. 4202, Seq. ID No. 4204, Seq. ID No. 4206, Seq. ID No. 4208, Seq. ID No. 4210, Seq. ID No. 4212, Seq. ID No. 4214, Seq. ID No. 4216, Seq. ID No. 4218, Seq. ID No. 4220, Seq. ID No. 4230, Seq. ID No. 4236, Seq. ID No. 4238, Seq. ID No. 4240, Seq. ID No. 4244, Seq. ID No. 4246, Seq. ID No. 4250, Seq. ID No. 4252, Seq. ID No. 4256, Seq. ID No. 4268, Seq. ID No. 4272, Seq. ID No. 4274, Seq. ID No. 4278, Seq. ID No. 4280, Seq. ID No. 4282, Seq. ID No. 4284, Seq. ID No. 4290, Seq. ID No. 4292, Seq. ID No. 4294, Seq. ID No. 4296, Seq. ID No. 4300, Seq. ID No. 4302, Seq. ID No. 4304, Seq. ID No. 4306, Seq. ID No. 4310, Seq. ID No. 4316, Seq. ID No. 4318, Seq. ID No. 4320, Seq. ID No. 4322, Seq. ID No. 4324, Seq. ID No. 4326, Seq. ID No. 4328, Seq. ID No. 4330, Seq. ID No. 4332, Seq. ID No. 4334, Seq. ID No. 4336, Seq. ID No. 4338, Seq. ID No. 4340, Seq. ID No. 4342, Seq. ID No. 4346, Seq. ID No. 4348, Seq. ID No. 4350, Seq. ID No. 4352, Seq. ID No. 4354, Seq. ID No. 4356, Seq. ID No. 4358, Seq. ID No. 4360, Seq. ID No. 4362, Seq. ID No. 4364, Seq. ID No. 4366, Seq. ID No. 4368, Seq. ID No. 4370, Seq. ID No. 4372, Seq. ID No. 4374, Seq. ID No. 4376, Seq. ID No. 4378, Seq. ID No. 4382, Seq. ID No. 4384, Seq. ID No. 4388, Seq. ID No. 4394, Seq. ID No. 4396, Seq. ID No. 4398, Seq. ID No. 4402, Seq. ID No. 4406, Seq. ID No. 4408, Seq. ID No. 4410, Seq. ID No. 4412, Seq. ID No. 4414, Seq. ID No. 4416, Seq. ID No. 4418, Seq. ID No. 4420, Seq. ID No. 4422, Seq. ID No. 4424, Seq. ID No. 4426, Seq. ID No. 4428, Seq. ID No. 4430, Seq. ID No. 4432, Seq. ID No. 4434, Seq. ID No. 4436, Seq. ID No. 4444, Seq. ID No. 4446, Seq. ID No. 4448, Seq. ID No. 4450, Seq. ID No. 4452, Seq. ID No. 4454, Seq. ID No. 4456, Seq. ID No. 4458, Seq. ID No. 4460, Seq. ID No. 4462, Seq. ID No. 4464, Seq. ID No. 4466, Seq. ID No. 4468, Seq. ID No. 4472, Seq. ID No. 4476, Seq. ID No. 4478, Seq. ID No. 4480, Seq. ID No. 4488, Seq. ID No. 4490, Seq. ID No. 4492, Seq. ID No. 4500, Seq. ID No. 4502, Seq. ID No. 4504, Seq. ID No. 4506, Seq. ID No. 4508, Seq. ID No. 4510, Seq. ID No. 4512, Seq. ID No. 4518, Seq. ID No. 4520, Seq. ID No. 4522, Seq. ID No. 4524, Seq. ID No. 4526, Seq. ID No. 4532, Seq. ID No. 4536, Seq. ID No. 4538, Seq. ID No. 4540, Seq. ID No. 4542, Seq. ID No. 4544, Seq. ID No. 4546, Seq. ID No. 4548, Seq. ID No. 4550, Seq. ID No. 4552, Seq. ID No. 4554, Seq. ID No. 4556, Seq. ID No. 4558, Seq. ID No. 4560, Seq. ID No. 4562, Seq. ID No. 4564, Seq. ID No. 4566, Seq. ID No. 4568, Seq. ID No. 4570, Seq. ID No. 4572, Seq. ID No. 4574, Seq. ID No. 4576, Seq. ID No. 4578, Seq. ID No. 4580, Seq. ID No. 4582, Seq. ID No. 4584, Seq. ID No. 4586, Seq. ID No. 4592, Seq. ID No. 4594, Seq. ID No. 4596, Seq. ID No. 4598, Seq. ID No. 4600, Seq. ID No. 4602, Seq. ID No. 4604, Seq. ID No. 4606, Seq. ID No. 4608, Seq. ID No. 4610, Seq. ID No. 4612, Seq. ID No. 4614, Seq. ID No. 4616, Seq. ID No. 4618, Seq. ID No. 4620, Seq. ID No. 4622, Seq. ID No. 4624, Seq. ID No. 4626, Seq. ID No. 4628, Seq. ID No. 4630, Seq. ID No. 4632, Seq. ID No. 4634, Seq. ID No. 4636, Seq. ID No. 4638, Seq. ID No. 4646, Seq. ID No. 4648, Seq. ID No. 4650, Seq. ID No. 4652, Seq. ID No. 4654, Seq. ID No. 4656, Seq. ID No. 4658, Seq. ID No. 4662, Seq. ID No. 4664, Seq. ID No. 4666, Seq. ID No. 4668, Seq. ID No. 4670, Seq. ID No. 4672, Seq. ID No. 4674, Seq. ID No. 4676, Seq. ID No. 4678, Seq. ID No. 4680, Seq. ID No. 4684, Seq. ID No. 4686, Seq. ID No. 4690, Seq. ID No. 4692, Seq. ID No. 4694, Seq. ID No. 4698, Seq. ID No. 4700, Seq. ID No. 4702, Seq. ID No. 4704, Seq. ID No. 4714, Seq. ID No. 4720, Seq. ID No. 4722, Seq. ID No. 4724, Seq. ID No. 4726, Seq. ID No. 4728, Seq. ID No. 4730, Seq. ID No. 4732, Seq. ID No. 4734, Seq. ID No. 4736, Seq. ID No. 4740, Seq. ID No. 4742, Seq. ID No. 4744, Seq. ID No. 4746, Seq. ID No. 4748, Seq. ID No. 4750, Seq. ID No. 4752, Seq. ID No. 4754, Seq. ID No. 4756, Seq. ID No. 4758, Seq. ID No. 4762, Seq. ID No. 4764, Seq. ID No. 4766, Seq. ID No. 4768, Seq. ID No. 4770, Seq. ID No. 4772, Seq. ID No. 4774, Seq. ID No. 4776, Seq. ID No. 4778, Seq. ID No. 4780, Seq. ID No. 4782, Seq. ID No. 4784, Seq. ID No. 4786, Seq. ID No. 4788, Seq. ID No. 4790, Seq. ID No. 4792, Seq. ID No. 4794, Seq. ID No. 4796, Seq. ID No. 4798, Seq. ID No. 4800, Seq. ID No. 4802, Seq. ID No. 4804, Seq. ID No. 4806, Seq. ID No. 4808, Seq. ID No. 4810, Seq. ID No. 4812, Seq. ID No. 4816, Seq. ID No. 4818, Seq. ID No. 4820, Seq. ID No. 4822, Seq. ID No. 4824, Seq. ID No. 4826, Seq. ID No. 4830, Seq. ID No. 4832, Seq. ID No. 4834, Seq. ID No. 4836, Seq. ID No. 4838, Seq. ID No. 4840, Seq. ID No. 4842, Seq. ID No. 4844, Seq. ID No. 4846, Seq. ID No. 4848, Seq. ID No. 4850, Seq. ID No. 4852, Seq. ID No. 4856, Seq. ID No. 4858, Seq. ID No. 4860, Seq. ID No. 4862, Seq. ID No. 4866, Seq. ID No. 4868, Seq. ID No. 4878, Seq. ID No. 4880, Seq. ID No. 4882, Seq. ID No. 4884, Seq. ID No. 4886, Seq. ID No. 4888, Seq. ID No. 4890, Seq. ID No. 4892, Seq. ID No. 4894, Seq. ID No. 4896, Seq. ID No. 4898, Seq. ID No. 4900, Seq. ID No. 4902, Seq. ID No. 4904, Seq. ID No. 4906, Seq. ID No. 4908, Seq. ID No. 4910, Seq. ID No. 4912, Seq. ID No. 4914, Seq. ID No. 4916, Seq. ID No. 4918, Seq. ID No. 4926, Seq. ID No. 4928, Seq. ID No. 4934, Seq. ID No. 4936, Seq. ID No. 4938, Seq. ID No. 4940, Seq. ID No. 4942, Seq. ID No. 4944, Seq. ID No. 4946, Seq. ID No. 4948, Seq. ID No. 4954, Seq. ID No. 4956, Seq. ID No. 4958, Seq. ID No. 4960, Seq. ID No. 4962, Seq. ID No. 4964, Seq. ID No. 4966, Seq. ID No. 4968, Seq. ID No. 4970, Seq. ID No. 4972, Seq. ID No. 4974, Seq. ID No. 4978, Seq. ID No. 4980, Seq. ID No. 4982, Seq. ID No. 4984, Seq. ID No. 4986, Seq. ID No. 4990, Seq. ID No. 4992, Seq. ID No. 4994, Seq. ID No. 4996, Seq. ID No. 4998, Seq. ID No. 5002, Seq. ID No. 5004, Seq. ID No. 5006, Seq. ID No. 5008, Seq. ID No. 5010, Seq. ID No. 5012, Seq. ID No. 5016, Seq. ID No. 5018, Seq. ID No. 5020, Seq. ID No. 5022, Seq. ID No. 5024, Seq. ID No. 5026, Seq. ID No. 5028, Seq. ID No. 5030, Seq. ID No. 5034, Seq. ID No. 5036, Seq. ID No. 5038, Seq. ID No. 5040, Seq. ID No. 5042, Seq. ID No. 5044, Seq. ID No. 5046, Seq. ID No. 5048, Seq. ID No. 5050, Seq. ID No. 5052, Seq. ID No. 5054, Seq. ID No. 5056, Seq. ID No. 5058, Seq. ID No. 5060, Seq. ID No. 5066, Seq. ID No. 5068, Seq. ID No. 5072, Seq. ID No. 5074, Seq. ID No. 5076, Seq. ID No. 5078, Seq. ID No. 5080, Seq. ID No. 5082, Seq. ID No. 5084, Seq. ID No. 5088, Seq. ID No. 5090, Seq. ID No. 5092, Seq. ID No. 5094, Seq. ID No. 5096, Seq. ID No. 5098, Seq. ID No. 5100, Seq. ID No. 5102, Seq. ID No. 5106, Seq. ID No. 5108, Seq. ID No. 5110, Seq. ID No. 5112, Seq. ID No. 5114, Seq. ID No. 5118, Seq. ID No. 5120, Seq. ID No. 5122, Seq. ID No. 5128, Seq. ID No. 5144, Seq. ID No. 5146, Seq. ID No. 5148, Seq. ID No. 5150, Seq. ID No. 5152, Seq. ID No. 5154, Seq. ID No. 5156, Seq. ID No. 5158, Seq. ID No. 5162, Seq. ID No. 5164, Seq. ID No. 5168, Seq. ID No. 5170, Seq. ID No. 5172, Seq. ID No. 5174, Seq. ID No. 5178, Seq. ID No. 5180, Seq. ID No. 5182, Seq. ID No. 5184, Seq. ID No. 5186, Seq. ID No. 5188, Seq. ID No. 5190, Seq. ID No. 5192, Seq. ID No. 5194, Seq. ID No. 5196, Seq. ID No. 5202, Seq. ID No. 5204, Seq. ID No. 5210, Seq. ID No. 5212, Seq. ID No. 5216, Seq. ID No. 5218, Seq. ID No. 5222, Seq. ID No. 5226, Seq. ID No. 5228, Seq. ID No. 5230, Seq. ID No. 5232, Seq. ID No. 5234, Seq. ID No. 5236, Seq. ID No. 5238, Seq. ID No. 5240, Seq. ID No. 5242, Seq. ID No. 5244, Seq. ID No. 5246, Seq. ID No. 5248, Seq. ID No. 5250, Seq. ID No. 5252, Seq. ID No. 5254, Seq. ID No. 5256, Seq. ID No. 5258, Seq. ID No. 5260, Seq. ID No. 5262, Seq. ID No. 5264, Seq. ID No. 5266, Seq. ID No. 5270, Seq. ID No. 5272, Seq. ID No. 5284, Seq. ID No. 5288, Seq. ID No. 5290, Seq. ID No. 5292, Seq. ID No. 5294, Seq. ID No. 5296, Seq. ID No. 5298, Seq. ID No. 5300, Seq. ID No. 5302, Seq. ID No. 5304, Seq. ID No. 5306, Seq. ID No. 5308, Seq. ID No. 5310, Seq. ID No. 5312, Seq. ID No. 5314, Seq. ID No. 5316, Seq. ID No. 5318, Seq. ID No. 5320, Seq. ID No. 5322, Seq. ID No. 5324, Seq. ID No. 5326, Seq. ID No. 5334, Seq. ID No. 5336, Seq. ID No. 5338, Seq. ID No. 5340, Seq. ID No. 5344, Seq. ID No. 5346, Seq. ID No. 5348, Seq. ID No. 5350, Seq. ID No. 5352, Seq. ID No. 5354, Seq. ID No. 5356, Seq. ID No. 5358, Seq. ID No. 5360, Seq. ID No. 5362, Seq. ID No. 5364, Seq. ID No. 5366, Seq. ID No. 5368, Seq. ID No. 5370, Seq. ID No. 5372, Seq. ID No. 5374, Seq. ID No. 5376, Seq. ID No. 5382, Seq. ID No. 5384, Seq. ID No. 5390, Seq. ID No. 5392, Seq. ID No. 5394, Seq. ID No. 5396, Seq. ID No. 5398, Seq. ID No. 5400, Seq. ID No. 5402, Seq. ID No. 5404, Seq. ID No. 5408, Seq. ID No. 5410, Seq. ID No. 5412, Seq. ID No. 5418, Seq. ID No. 5420, Seq. ID No. 5422, Seq. ID No. 5424, Seq. ID No. 5426, Seq. ID No. 5428, Seq. ID No. 5430, Seq. ID No. 5432, Seq. ID No. 5436, Seq. ID No. 5438, Seq. ID No. 5440, Seq. ID No. 5442, Seq. ID No. 5444, Seq. ID No. 5446, Seq. ID No. 5448, Seq. ID No. 5450, Seq. ID No. 5452, Seq. ID No. 5456, Seq. ID No. 5458, Seq. ID No. 5468, Seq. ID No. 5470, Seq. ID No. 5472, Seq. ID No. 5474, Seq. ID No. 5476, Seq. ID No. 5478, Seq. ID No. 5480, Seq. ID No. 5482, Seq. ID No. 5484, Seq. ID No. 5486, Seq. ID No. 5488, Seq. ID No. 5490, Seq. ID No. 5494, Seq. ID No. 5496, Seq. ID No. 5500, Seq. ID No. 5502, Seq. ID No. 5504, Seq. ID No. 5506, Seq. ID No. 5508, Seq. ID No. 5512, Seq. ID No. 5520, Seq. ID No. 5522, Seq. ID No. 5524, Seq. ID No. 5528, Seq. ID No. 5536, Seq. ID No. 5538, Seq. ID No. 5540, Seq. ID No. 5542, Seq. ID No. 5548, Seq. ID No. 5550, Seq. ID No. 5552, Seq. ID No. 5554, Seq. ID No. 5556, Seq. ID No. 5558, Seq. ID No. 5560, Seq. ID No. 5562, Seq. ID No. 5564, Seq. ID No. 5566, Seq. ID No. 5568, Seq. ID No. 5572, Seq. ID No. 5574, Seq. ID No. 5576, Seq. ID No. 5578, Seq. ID No. 5580, Seq. ID No. 5582, Seq. ID No. 5584, Seq. ID No. 5586, Seq. ID No. 5600, Seq. ID No. 5602, Seq. ID No. 5604, Seq. ID No. 5606, Seq. ID No. 5608, Seq. ID No. 5614, Seq. ID No. 5616, Seq. ID No. 5618, Seq. ID No. 5620, Seq. ID No. 5628, Seq. ID No. 5630, Seq. ID No. 5632, Seq. ID No. 5636, Seq. ID No. 5646, Seq. ID No. 5648, Seq. ID No. 5652, Seq. ID No. 5654, Seq. ID No. 5656, Seq. ID No. 5658, Seq. ID No. 5662, Seq. ID No. 5664, Seq. ID No. 5666, Seq. ID No. 5670, Seq. ID No. 5672, Seq. ID No. 5674, Seq. ID No. 5676, Seq. ID No. 5678, Seq. ID No. 5680, Seq. ID No. 5692, Seq. ID No. 5694, Seq. ID No. 5696, Seq. ID No. 5698, Seq. ID No. 5702, Seq. ID No. 5708, Seq. ID No. 5714, Seq. ID No. 5716, Seq. ID No. 5718, Seq. ID No. 5722, Seq. ID No. 5724, Seq. ID No. 5726, Seq. ID No. 5728, Seq. ID No. 5732, Seq. ID No. 5738, Seq. ID No. 5742, Seq. ID No. 5744, Seq. ID No. 5746, Seq. ID No. 5748, Seq. ID No. 5750, Seq. ID No. 5752, Seq. ID No. 5754, Seq. ID No. 5756, Seq. ID No. 5758, Seq. ID No. 5760, Seq. ID No. 5762, Seq. ID No. 5770, Seq. ID No. 5774, Seq. ID No. 5776, Seq. ID No. 5778, Seq. ID No. 5780, Seq. ID No. 5782, Seq. ID No. 5788, Seq. ID No. 5790, Seq. ID No. 5794, Seq. ID No. 5796, Seq. ID No. 5800, Seq. ID No. 5802, Seq. ID No. 5804, Seq. ID No. 5806, Seq. ID No. 5808, Seq. ID No. 5810, Seq. ID No. 5812, Seq. ID No. 5814, Seq. ID No. 5816, Seq. ID No. 5818, Seq. ID No. 5820, Seq. ID No. 5822, Seq. ID No. 5824, Seq. ID No. 5826, Seq. ID No. 5828, Seq. ID No. 5832, Seq. ID No. 5834, Seq. ID No. 5836, Seq. ID No. 5838, Seq. ID No. 5840, Seq. ID No. 5842, Seq. ID No. 5844, Seq. ID No. 5846, Seq. ID No. 5848, Seq. ID No. 5850, Seq. ID No. 5852, Seq. ID No. 5854, Seq. ID No. 5856, Seq. ID No. 5858, Seq. ID No. 5860, Seq. ID No. 5862, Seq. ID No. 5864, Seq. ID No. 5866, Seq. ID No. 5868, Seq. ID No. 5870, Seq. ID No. 5872, Seq. ID No. 5874, Seq. ID No. 5876, Seq. ID No. 5878, Seq. ID No. 5882, Seq. ID No. 5888, Seq. ID No. 5892, Seq. ID No. 5898, Seq. ID No. 5904, Seq. ID No. 5908, Seq. ID No. 5912, Seq. ID No. 5914, Seq. ID No. 5916, Seq. ID No. 5918, Seq. ID No. 5920, Seq. ID No. 5926, Seq. ID No. 5932, Seq. ID No. 5934, Seq. ID No. 5936, Seq. ID No. 5938, Seq. ID No. 5942, Seq. ID No. 5944, Seq. ID No. 5946, Seq. ID No. 5948, Seq. ID No. 5950, Seq. ID No. 5952, Seq. ID No. 5954, Seq. ID No. 5956, Seq. ID No. 5958, Seq. ID No. 5960, Seq. ID No. 5962, Seq. ID No. 5964, Seq. ID No. 5966, Seq. ID No. 5968, Seq. ID No. 5970, Seq. ID No. 5972, Seq. ID No. 5974, Seq. ID No. 5976, Seq. ID No. 5978, Seq. ID No. 5980, Seq. ID No. 5982, Seq. ID No. 5984, Seq. ID No. 5986, Seq. ID No. 5988, Seq. ID No. 5990, Seq. ID No. 5992, Seq. ID No. 5994, Seq. ID No. 5996, Seq. ID No. 5998, Seq. ID No. 6000, Seq. ID No. 6002, Seq. ID No. 6004, Seq. ID No. 6006, Seq. ID No. 6008, Seq. ID No. 6010, Seq. ID No. 6012, Seq. ID No. 6014, Seq. ID No. 6016, Seq. ID No. 6018, Seq. ID No. 6020, Seq. ID No. 6022, Seq. ID No. 6030, Seq. ID No. 6032, Seq. ID No. 6034, Seq. ID No. 6036, Seq. ID No. 6038, Seq. ID No. 6040, Seq. ID No. 6042, Seq. ID No. 6046, Seq. ID No. 6050, Seq. ID No. 6052, Seq. ID No. 6056, Seq. ID No. 6058, Seq. ID No. 6062, Seq. ID No. 6066, Seq. ID No. 6070, Seq. ID No. 6072, Seq. ID No. 6074, Seq. ID No. 6076, Seq. ID No. 6078, Seq. ID No. 6080, Seq. ID No. 6082, Seq. ID No. 6084, Seq. ID No. 6086, Seq. ID No. 6094, Seq. ID No. 6098, Seq. ID No. 6100, Seq. ID No. 6102, Seq. ID No. 6106, Seq. ID No. 6114, Seq. ID No. 6120, Seq. ID No. 6122, Seq. ID No. 6124, Seq. ID No. 6126, Seq. ID No. 6128, Seq. ID No. 6130, Seq. ID No. 6132, Seq. ID No. 6134, Seq. ID No. 6140, Seq. ID No. 6142, Seq. ID No. 6144, Seq. ID No. 6146, Seq. ID No. 6148, Seq. ID No. 6150, Seq. ID No. 6152, Seq. ID No. 6154, Seq. ID No. 6156, Seq. ID No. 6158, Seq. ID No. 6168, Seq. ID No. 6172, Seq. ID No. 6174, Seq. ID No. 6176, Seq. ID No. 6178, Seq. ID No. 6180, Seq. ID No. 6182, Seq. ID No. 6194, Seq. ID No. 6196, Seq. ID No. 6200, Seq. ID No. 6202, Seq. ID No. 6208, Seq. ID No. 6212, Seq. ID No. 6214, Seq. ID No. 6216, Seq. ID No. 6220, Seq. ID No. 6232, Seq. ID No. 6234, Seq. ID No. 6240, Seq. ID No. 6248, Seq. ID No. 6252, Seq. ID No. 6256, Seq. ID No. 6258, Seq. ID No. 6262, Seq. ID No. 6270, Seq. ID No. 6272, Seq. ID No. 6278, Seq. ID No. 6280, Seq. ID No. 6282, Seq. ID No. 6288, Seq. ID No. 6292, Seq. ID No. 6294, Seq. ID No. 6296, Seq. ID No. 6298, Seq. ID No. 6300, Seq. ID No. 6306, Seq. ID No. 6308, Seq. ID No. 6310, Seq. ID No. 6312, Seq. ID No. 6314, Seq. ID No. 6316, Seq. ID No. 6318, Seq. ID No. 6320, Seq. ID No. 6322, Seq. ID No. 6324, Seq. ID No. 6330, Seq. ID No. 6332, Seq. ID No. 6334, Seq. ID No. 6336, Seq. ID No. 6338, Seq. ID No. 6340, Seq. ID No. 6342, Seq. ID No. 6344, Seq. ID No. 6346, Seq. ID No. 6348, Seq. ID No. 6350, Seq. ID No. 6352, Seq. ID No. 6354, Seq. ID No. 6356, Seq. ID No. 6358, Seq. ID No. 6360, Seq. ID No. 6362, Seq. ID No. 6368, Seq. ID No. 6370, Seq. ID No. 6372, Seq. ID No. 6374, Seq. ID No. 6376, Seq. ID No. 6380, Seq. ID No. 6386, Seq. ID No. 6388, Seq. ID No. 6390, Seq. ID No. 6392, Seq. ID No. 6394, Seq. ID No. 6396, Seq. ID No. 6398, Seq. ID No. 6400, Seq. ID No. 6402, Seq. ID No. 6404, Seq. ID No. 6406, Seq. ID No. 6408, Seq. ID No. 6410, Seq. ID No. 6412, Seq. ID No. 6414, Seq. ID No. 6418, Seq. ID No. 6420, Seq. ID No. 6422, Seq. ID No. 6424, Seq. ID No. 6434, Seq. ID No. 6436, Seq. ID No. 6438, Seq. ID No. 6440, Seq. ID No. 6442, Seq. ID No. 6444, Seq. ID No. 6446, Seq. ID No. 6448, Seq. ID No. 6450, Seq. ID No. 6452, Seq. ID No. 6454, Seq. ID No. 6456, Seq. ID No. 6458, Seq. ID No. 6460, Seq. ID No. 6462, Seq. ID No. 6464, Seq. ID No. 6466, Seq. ID No. 6468, Seq. ID No. 6470, Seq. ID No. 6472, Seq. ID No. 6476, Seq. ID No. 6478, Seq. ID No. 6482, Seq. ID No. 6484, Seq. ID No. 6486, Seq. ID No. 6488, Seq. ID No. 6490, Seq. ID No. 6492, Seq. ID No. 6494, Seq. ID No. 6496, Seq. ID No. 6500, Seq. ID No. 6502, Seq. ID No. 6504, Seq. ID No. 6506, Seq. ID No. 6508, Seq. ID No. 6510, Seq. ID No. 6512, Seq. ID No. 6514, Seq. ID No. 6516, Seq. ID No. 6520, Seq. ID No. 6522, Seq. ID No. 6524, Seq. ID No. 6526, Seq. ID No. 6528, Seq. ID No. 6530, Seq. ID No. 6532, Seq. ID No. 6534, Seq. ID No. 6536, Seq. ID No. 6538, Seq. ID No. 6540, Seq. ID No. 6546, Seq. ID No. 6548, Seq. ID No. 6550, Seq. ID No. 6552, Seq. ID No. 6554, Seq. ID No. 6560, Seq. ID No. 6562, Seq. ID No. 6564, Seq. ID No. 6566, Seq. ID No. 6568, Seq. ID No. 6570, Seq. ID No. 6576, Seq. ID No. 6578, Seq. ID No. 6580, Seq. ID No. 6584, Seq. ID No. 6586, Seq. ID No. 6588, Seq. ID No. 6590, Seq. ID No. 6592, Seq. ID No. 6606, Seq. ID No. 6608, Seq. ID No. 6610, Seq. ID No. 6612, Seq. ID No. 6614, Seq. ID No. 6616, Seq. ID No. 6618, Seq. ID No. 6620, Seq. ID No. 6622, Seq. ID No. 6624, Seq. ID No. 6626, Seq. ID No. 6628, Seq. ID No. 6630, Seq. ID No. 6634, Seq. ID No. 6636, Seq. ID No. 6642, and Seq. ID No. 6648.

41. The Alloiococcus otitidis polypeptide of claim 36, wherein the polypeptide is identified by BlastP analysis, and is selected from one of Seq. ID No. 10, Seq. ID No. 18, Seq. ID No. 46, Seq. ID No. 50, Seq. ID No. 54, Seq. ID No. 60, Seq. ID No. 90, Seq. ID No. 146, Seq. ID No. 158, Seq. ID No. 168, Seq. ID No. 172, Seq. ID No. 192, Seq. ID No. 216, Seq. ID No. 218, Seq. ID No. 226, Seq. ID No. 240, Seq. ID No. 254, Seq. ID No. 274, Seq. ID No. 278, Seq. ID No. 290, Seq. ID No. 330, Seq. ID No. 344, Seq. ID No. 346, Seq. ID No. 376, Seq. ID No. 502, Seq. ID No. 506, Seq. ID No. 512, Seq. ID No. 516, Seq. ID No. 530, Seq. ID No. 570, Seq. ID No. 576, Seq. ID No. 594, Seq. ID No. 596, Seq. ID No. 638, Seq. ID No. 660, Seq. ID No. 670, Seq. ID No. 676, Seq. ID No. 682, Seq. ID No. 730, Seq. ID No. 780, Seq. ID No. 820, Seq. ID No. 896, Seq. ID No. 922, Seq. ID No. 936, Seq. ID No. 956, Seq. ID No. 968, Seq. ID No. 986, Seq. ID No. 1018, Seq. ID No. 1040, Seq. ID No. 1076, Seq. ID No. 1090, Seq. ID No. 1138, Seq. ID No. 1224, Seq. ID No. 1242, Seq. ID No. 1316, Seq. ID No. 1332, Seq. ID No. 1370, Seq. ID No. 1460, Seq. ID No. 1518, Seq. ID No. 1562, Seq. ID No. 1564, Seq. ID No. 1568, Seq. ID No. 1572, Seq. ID No. 1574, Seq. ID No. 1602, Seq. ID No. 1608, Seq. ID No. 1614, Seq. ID No. 1620, Seq. ID No. 1642, Seq. ID No. 1648, Seq. ID No. 1654, Seq. ID No. 1658, Seq. ID No. 1666, Seq. ID No. 1700, Seq. ID No. 1714, Seq. ID No. 1752, Seq. ID No. 1772, Seq. ID No. 1786, Seq. ID No. 1790, Seq. ID No. 1792, Seq. ID No. 1798, Seq. ID No. 1812, Seq. ID No. 1818, Seq. ID No. 1820, Seq. ID No. 1822, Seq. ID No. 1872, Seq. ID No. 1896, Seq. ID No. 1906, Seq. ID No. 1914, Seq. ID No. 1920, Seq. ID No. 1924, Seq. ID No. 1966, Seq. ID No. 1972, Seq. ID No. 2000, Seq. ID No. 2048, Seq. ID No. 2056, Seq. ID No. 2092, Seq. ID No. 2094, Seq. ID No. 2116, Seq. ID No. 2120, Seq. ID No. 2128, Seq. ID No. 2166, Seq. ID No. 2180, Seq. ID No. 2208, Seq. ID No. 2224, Seq. ID No. 2228, Seq. ID No. 2242, Seq. ID No. 2254, Seq. ID No. 2264, Seq. ID No. 2270, Seq. ID No. 2276, Seq. ID No. 2302, Seq. ID No. 2316, Seq. ID No. 2330, Seq. ID No. 2334, Seq. ID No. 2344, Seq. ID No. 2346, Seq. ID No. 2364, Seq. ID No. 2374, Seq. ID No. 2392, Seq. ID No. 2418, Seq. ID No. 2430, Seq. ID No. 2466, Seq. ID No. 2476, Seq. ID No. 2484, Seq. ID No. 2514, Seq. ID No. 2526, Seq. ID No. 2590, Seq. ID No. 2614, Seq. ID No. 2652, Seq. ID No. 2670, Seq. ID No. 2678, Seq. ID No. 2688, Seq. ID No. 2690, Seq. ID No. 2694, Seq. ID No. 2704, Seq. ID No. 2710, Seq. ID No. 2716, Seq. ID No. 2752, Seq. ID No. 2754, Seq. ID No. 2768, Seq. ID No. 2788, Seq. ID No. 2792, Seq. ID No. 2804, Seq. ID No. 2868, Seq. ID No. 2872, Seq. ID No. 2908, Seq. ID No. 2920, Seq. ID No. 2922, Seq. ID No. 2924, Seq. ID No. 2928, Seq. ID No. 2934, Seq. ID No. 2958, Seq. ID No. 2980, Seq. ID No. 3000, Seq. ID No. 3006, Seq. ID No. 3020, Seq. ID No. 3032, Seq. ID No. 3036, Seq. ID No. 3056, Seq. ID No. 3068, Seq. ID No. 3086, Seq. ID No. 3166, Seq. ID No. 3184, Seq. ID No. 3190, Seq. ID No. 3198, Seq. ID No. 3212, Seq. ID No. 3252, Seq. ID No. 3258, Seq. ID No. 3260, Seq. ID No. 3298, Seq. ID No. 3320, Seq. ID No. 3324, Seq. ID No. 3336, Seq. ID No. 3338, Seq. ID No. 3356, Seq. ID No. 3360, Seq. ID No. 3378, Seq. ID No. 3398, Seq. ID No. 3406, Seq. ID No. 3416, Seq. ID No. 3426, Seq. ID No. 3428, Seq. ID No. 3462, Seq. ID No. 3464, Seq. ID No. 3488, Seq. ID No. 3494, Seq. ID No. 3498, Seq. ID No. 3508, Seq. ID No. 3520, Seq. ID No. 3522, Seq. ID No. 3530, Seq. ID No. 3536, Seq. ID No. 3630, Seq. ID No. 3636, Seq. ID No. 3728, Seq. ID No. 3760, Seq. ID No. 3772, Seq. ID No. 3794, Seq. ID No. 3840, Seq. ID No. 3852, Seq. ID No. 3864, Seq. ID No. 3866, Seq. ID No. 3884, Seq. ID No. 3892, Seq. ID No. 3914, Seq. ID No. 3926, Seq. ID No. 3930, Seq. ID No. 3976, Seq. ID No. 3982, Seq. ID No. 4028, Seq. ID No. 4040, Seq. ID No. 4062, Seq. ID No. 4074, Seq. ID No. 4082, Seq. ID No. 4104, Seq. ID No. 4112, Seq. ID No. 4138, Seq. ID No. 4226, Seq. ID No. 4248, Seq. ID No. 4344, Seq. ID No. 4380, Seq. ID No. 4390, Seq. ID No. 4470, Seq. ID No. 4474, Seq. ID No. 4482, Seq. ID No. 4486, Seq. ID No. 4494, Seq. ID No. 4530, Seq. ID No. 4644, Seq. ID No. 4706, Seq. ID No. 4714, Seq. ID No. 4718, Seq. ID No. 4814, Seq. ID No. 4816, Seq. ID No. 4826, Seq. ID No. 4828, Seq. ID No. 4834, Seq. ID No. 4838, Seq. ID No. 4852, Seq. ID No. 4864, Seq. ID No. 4876, Seq. ID No. 4880, Seq. ID No. 4894, Seq. ID No. 4902, Seq. ID No. 4920, Seq. ID No. 4932, Seq. ID No. 4960, Seq. ID No. 4964, Seq. ID No. 4986, Seq. ID No. 5114, Seq. ID No. 5116, Seq. ID No. 5118, Seq. ID No. 5126, Seq. ID No. 5142, Seq. ID No. 5184, Seq. ID No. 5202, Seq. ID No. 5206, Seq. ID No. 5214, Seq. ID No. 5220, Seq. ID No. 5280, Seq. ID No. 5286, Seq. ID No. 5332, Seq. ID No. 5382, Seq. ID No. 5390, Seq. ID No. 5406, Seq. ID No. 5412, Seq. ID No. 5420, Seq. ID No. 5434, Seq. ID No. 5464, Seq. ID No. 5478, Seq. ID No. 5492, Seq. ID No. 5510, Seq. ID No. 5514, Seq. ID No. 5526, Seq. ID No. 5530, Seq. ID No. 5538, Seq. ID No. 5568, Seq. ID No. 5600, Seq. ID No. 5622, Seq. ID No. 5638, Seq. ID No. 5700, Seq. ID No. 5724, Seq. ID No. 5734, Seq. ID No. 5762, Seq. ID No. 5792, Seq. ID No. 5896, Seq. ID No. 5902, Seq. ID No. 5904, Seq. ID No. 5910, Seq. ID No. 5914, Seq. ID No. 5920, Seq. ID No. 5930, Seq. ID No. 5940, Seq. ID No. 6002, Seq. ID No. 6044, Seq. ID No. 6054, Seq. ID No. 6058, Seq. ID No. 6090, Seq. ID No. 6096, Seq. ID No. 6104, Seq. ID No. 6112, Seq. ID No. 6118, Seq. ID No. 6166, Seq. ID No. 6170, Seq. ID No. 6186, Seq. ID No. 6192, Seq. ID No. 6210, Seq. ID No. 6230, Seq. ID No. 6258, Seq. ID No. 6264, Seq. ID No. 6272, Seq. ID No. 6276, Seq. ID No. 6290, Seq. ID No. 6304, Seq. ID No. 6366, Seq. ID No. 6370, Seq. ID No. 6384, and Seq. ID No. 6416.

42. The Alloiococcus otitidis polypeptide of claim 36, wherein the polypeptide is identified by Pfam analysis, and is selected from one of Seq. ID No. 90, Seq. ID No. 146, Seq. ID No. 156, Seq. ID No. 168, Seq. ID No. 174, Seq. ID No. 192, Seq. ID No. 216, Seq. ID No. 220, Seq. ID No. 222, Seq. ID No. 224, Seq. ID No. 226, Seq. ID No. 234, Seq. ID No. 240, Seq. ID No. 252, Seq. ID No. 254, Seq. ID No. 272, Seq. ID No. 292, Seq. ID No. 332, Seq. ID No. 342, Seq. ID No. 346, Seq. ID No. 376, Seq. ID No. 502, Seq. ID No. 506, Seq. ID No. 512, Seq. ID No. 530, Seq. ID No. 568, Seq. ID No. 570, Seq. ID No. 576, Seq. ID No. 594, Seq. ID No. 596, Seq. ID No. 602, Seq. ID No. 638, Seq. ID No. 650, Seq. ID No. 662, Seq. ID No. 670, Seq. ID No. 676, Seq. ID No. 682, Seq. ID No. 684, Seq. ID No. 730, Seq. ID No. 754, Seq. ID No. 780, Seq. ID No. 828, Seq. ID No. 840, Seq. ID No. 896, Seq. ID No. 940, Seq. ID No. 970, Seq. ID No. 986, Seq. ID No. 1016, Seq. ID No. 1040, Seq. ID No. 1076, Seq. ID No. 1138, Seq. ID No. 1156, Seq. ID No. 1164, Seq. ID No. 1176, Seq. ID No. 1224, Seq. ID No. 1232, Seq. ID No. 1238, Seq. ID No. 1242, Seq. ID No. 1262, Seq. ID No. 1332, Seq. ID No. 1340, Seq. ID No. 1370, Seq. ID No. 1478, Seq. ID No. 1518, Seq. ID No. 1532, Seq. ID No. 1540, Seq. ID No. 1550, Seq. ID No. 1564, Seq. ID No. 1568, Seq. ID No. 1572, Seq. ID No. 1574, Seq. ID No. 1590, Seq. ID No. 1596, Seq. ID No. 1648, Seq. ID No. 1658, Seq. ID No. 1772, Seq. ID No. 1786, Seq. ID No. 1790, Seq. ID No. 1820, Seq. ID No. 1822, Seq. ID No. 1970, Seq. ID No. 2016, Seq. ID No. 2048, Seq. ID No. 2088, Seq. ID No. 2090, Seq. ID No. 2094, Seq. ID No. 2116, Seq. ID No. 2118, Seq. ID No. 2128, Seq. ID No. 2142, Seq. ID No. 2180, Seq. ID No. 2208, Seq. ID No. 2224, Seq. ID No. 2254, Seq. ID No. 2276, Seq. ID No. 2302, Seq. ID No. 2316, Seq. ID No. 2330, Seq. ID No. 2344, Seq. ID No. 2350, Seq. ID No. 2364, Seq. ID No. 2382, Seq. ID No. 2392, Seq. ID No. 2418, Seq. ID No. 2422, Seq. ID No. 2424, Seq. ID No. 2430, Seq. ID No. 2482, Seq. ID No. 2488, Seq. ID No. 2490, Seq. ID No. 2492, Seq. ID No. 2510, Seq. ID No. 2520, Seq. ID No. 2526, Seq. ID No. 2548, Seq. ID No. 2554, Seq. ID No. 2564, Seq. ID No. 2588, Seq. ID No. 2600, Seq. ID No. 2608, Seq. ID No. 2614, Seq. ID No. 2652, Seq. ID No. 2676, Seq. ID No. 2682, Seq. ID No. 2688, Seq. ID No. 2694, Seq. ID No. 2700, Seq. ID No. 2704, Seq. ID No. 2710, Seq. ID No. 2712, Seq. ID No. 2728, Seq. ID No. 2754, Seq. ID No. 2820, Seq. ID No. 2822, Seq. ID No. 2824, Seq. ID No. 2868, Seq. ID No. 2872, Seq. ID No. 2908, Seq. ID No. 2920, Seq. ID No. 2958, Seq. ID No. 2972, Seq. ID No. 2980, Seq. ID No. 3000, Seq. ID No. 3006, Seq. ID No. 3020, Seq. ID No. 3036, Seq. ID No. 3066, Seq. ID No. 3086, Seq. ID No. 3150, Seq. ID No. 3166, Seq. ID No. 3184, Seq. ID No. 3204, Seq. ID No. 3212, Seq. ID No. 3252, Seq. ID No. 3260, Seq. ID No. 3320, Seq. ID No. 3324, Seq. ID No. 3336, Seq. ID No. 3338, Seq. ID No. 3348, Seq. ID No. 3360, Seq. ID No. 3378, Seq. ID No. 3380, Seq. ID No. 3400, Seq. ID No. 3426, Seq. ID No. 3484, Seq. ID No. 3496, Seq. ID No. 3498, Seq. ID No. 3520, Seq. ID No. 3530, Seq. ID No. 3600, Seq. ID No. 3612, Seq. ID No. 3616, Seq. ID No. 3620, Seq. ID No. 3664, Seq. ID No. 3740, Seq. ID No. 3760, Seq. ID No. 3772, Seq. ID No. 3798, Seq. ID No. 3826, Seq. ID No. 3842, Seq. ID No. 3856, Seq. ID No. 3864, Seq. ID No. 3902, Seq. ID No. 3930, Seq. ID No. 4016, Seq. ID No. 4018, Seq. ID No. 4056, Seq. ID No. 4076, Seq. ID No. 4086, Seq. ID No. 4090, Seq. ID No. 4100, Seq. ID No. 4106, Seq. ID No. 4130, Seq. ID No. 4204, Seq. ID No. 4244, Seq. ID No. 4252, Seq. ID No. 4344, Seq. ID No. 4384, Seq. ID No. 4476, Seq. ID No. 4482, Seq. ID No. 4488, Seq. ID No. 4492, Seq. ID No. 4534, Seq. ID No. 4628, Seq. ID No. 4706, Seq. ID No. 4714, Seq. ID No. 4718, Seq. ID No. 4720, Seq. ID No. 4730, Seq. ID No. 4790, Seq. ID No. 4792, Seq. ID No. 4794, Seq. ID No. 4804, Seq. ID No. 4814, Seq. ID No. 4816, Seq. ID No. 4826, Seq. ID No. 4834, Seq. ID No. 4838, Seq. ID No. 4876, Seq. ID No. 4880, Seq. ID No. 4920, Seq. ID No. 4932, Seq. ID No. 4948, Seq. ID No. 4986, Seq. ID No. 5078, Seq. ID No. 5116, Seq. ID No. 5118, Seq. ID No. 5128, Seq. ID No. 5142, Seq. ID No. 5194, Seq. ID No. 5216, Seq. ID No. 5220, Seq. ID No. 5276, Seq. ID No. 5382, Seq. ID No. 5390, Seq. ID No. 5410, Seq. ID No. 5412, Seq. ID No. 5476, Seq. ID No. 5492, Seq. ID No. 5514, Seq. ID No. 5520, Seq. ID No. 5526, Seq. ID No. 5530, Seq. ID No. 5538, Seq. ID No. 5558, Seq. ID No. 5582, Seq. ID No. 5600, Seq. ID No. 5638, Seq. ID No. 5686, Seq. ID No. 5724, Seq. ID No. 5756, Seq. ID No. 5762, Seq. ID No. 5896, Seq. ID No. 5902, Seq. ID No. 5904, Seq. ID No. 5912, Seq. ID No. 5914, Seq. ID No. 5920, Seq. ID No. 5924, Seq. ID No. 5930, Seq. ID No. 6002, Seq. ID No. 6044, Seq. ID No. 6054, Seq. ID No. 6056, Seq. ID No. 6090, Seq. ID No. 6096, Seq. ID No. 6112, Seq. ID No. 6118, Seq. ID No. 6166, Seq. ID No. 6170, Seq. ID No. 6188, Seq. ID No. 6196, Seq. ID No. 6220, Seq. ID No. 6234, Seq. ID No. 6270, Seq. ID No. 6276, Seq. ID No. 6280, Seq. ID No. 6288, Seq. ID No. 6298, Seq. ID No. 6300, Seq. ID No. 6306, Seq. ID No. 6312, Seq. ID No. 6370, Seq. ID No. 6380, Seq. ID No. 6588, and Seq. ID No. 6592.

43. The Alloiococcus otitidis polypeptide of claim 36, wherein the polypeptide is identified using proteomics methodology as sharing homology with surface exposed proteins of Streptococcus pneumoniae, and is selected from one of Seq. ID No. 2, Seq. ID No. 6, Seq. ID No. 94, Seq. ID No. 96, Seq. ID No. 104, Seq. ID No. 108, Seq. ID No. 158, Seq. ID No. 224, Seq. ID No. 226, Seq. ID No. 234, Seq. ID No. 240, Seq. ID No. 254, Seq. ID No. 318, Seq. ID No. 322, Seq. ID No. 342, Seq. ID No. 346, Seq. ID No. 354, Seq. ID No. 362, Seq. ID No. 364, Seq. ID No. 366, Seq. ID No. 376, Seq. ID No. 380, Seq. ID No. 384, Seq. ID No. 390, Seq. ID No. 392, Seq. ID No. 398, Seq. ID No. 406, Seq. ID No. 410, Seq. ID No. 416, Seq. ID No. 424, Seq. ID No. 426, Seq. ID No. 428, Seq. ID No. 430, Seq. ID No. 436; Seq. ID No. 438, Seq. ID No. 440, Seq. ID No. 442, Seq. ID No. 444, Seq. ID No. 446, Seq. ID No. 448, Seq. ID No. 450, Seq. ID No. 462, Seq. ID No. 464, Seq. ID No. 466, Seq. ID No. 514, Seq. ID No. 544, Seq. ID No. 552, Seq. ID No. 554, Seq. ID No. 560, Seq. ID No. 596, Seq. ID No. 602, Seq. ID No. 638, Seq. ID No. 650, Seq. ID No. 658, Seq. ID No. 670, Seq. ID No. 676, Seq. ID No. 684, Seq. ID No. 754, Seq. ID No. 930, Seq. ID No. 970, Seq. ID No. 1042, Seq. ID No. 1044, Seq. ID No. 1086, Seq. ID No. 1090, Seq. ID No. 1094, Seq. ID No. 1098, Seq. ID No. 1100, Seq. ID No. 1102, Seq. ID No. 1176, Seq. ID No. 1206, Seq. ID No. 1238, Seq. ID No. 1460, Seq. ID No. 1496, Seq. ID No. 1498, Seq. ID No. 1504, Seq. ID No. 1518, Seq. ID No. 1528, Seq. ID No. 1532, Seq. ID No. 1540, Seq. ID No. 1544, Seq. ID No. 1550, Seq. ID No. 1574, Seq. ID No. 1658, Seq. ID No. 1710, Seq. ID No. 1768, Seq. ID No. 1786, Seq. ID No. 1822, Seq. ID No. 1890, Seq. ID No. 1926, Seq. ID No. 1970, Seq. ID No. 2004, Seq. ID No. 2048, Seq. ID No. 2076, Seq. ID No. 2090, Seq. ID No. 2094, Seq. ID No. 2118, Seq. ID No. 2138, Seq. ID No. 2144, Seq. ID No. 2206, Seq. ID No. 2236, Seq. ID No. 2258, Seq. ID No. 2302, Seq. ID No. 2364, Seq. ID No. 2424, Seq. ID No. 2446, Seq. ID No. 2452, Seq. ID No. 2482, Seq. ID No. 2496, Seq. ID No. 2506, Seq. ID No. 2578, Seq. ID No. 2588, Seq. ID No. 2614, Seq. ID No. 2634, Seq. ID No. 2652, Seq. ID No. 2666, Seq. ID No. 2670, Seq. ID No. 2678, Seq. ID No. 2688, Seq. ID No. 2694, Seq. ID No. 2700, Seq. ID No. 2712, Seq. ID No. 2716, Seq. ID No. 2758, Seq. ID No. 2792, Seq. ID No. 2794, Seq. ID No. 2804, Seq. ID No. 2868, Seq. ID No. 2920, Seq. ID No. 2930, Seq. ID No. 3006, Seq. ID No. 3020, Seq. ID No. 3126, Seq. ID No. 3138, Seq. ID No. 3162, Seq. ID No. 3180, Seq. ID No. 3252, Seq. ID No. 3260, Seq. ID No. 3286, Seq. ID No. 3310, Seq. ID No. 3318, Seq. ID No. 3338, Seq. ID No. 3346, Seq. ID No. 3360, Seq. ID No. 3476, Seq. ID No. 3516, Seq. ID No. 3522, Seq. ID No. 3642, Seq. ID No. 3696, Seq. ID No. 3794, Seq. ID No. 3902, Seq. ID No. 3928, Seq. ID No. 3988, Seq. ID No. 4002, Seq. ID No. 4058, Seq. ID No. 4082, Seq. ID No. 4112, Seq. ID No. 4126, Seq. ID No. 4194, Seq. ID No. 4196, Seq. ID No. 4238, Seq. ID No. 4248, Seq. ID No. 4384, Seq. ID No. 4394, Seq. ID No. 4398, Seq. ID No. 4402, Seq. ID No. 4436, Seq. ID No. 4450, Seq. ID No. 4472, Seq. ID No. 4492, Seq. ID No. 4512, Seq. ID No. 4520, Seq. ID No. 4532, Seq. ID No. 4550, Seq. ID No. 4578, Seq. ID No. 4582, Seq. ID No. 4586, Seq. ID No. 4610, Seq. ID No. 4612, Seq. ID No. 4614, Seq. ID No. 4676, Seq. ID No. 4686, Seq. ID No. 4720, Seq. ID No. 4730, Seq. ID No. 4744, Seq. ID No. 4756, Seq. ID No. 4782, Seq. ID No. 4788, Seq. ID No. 4838, Seq. ID No. 4842, Seq. ID No. 4850, Seq. ID No. 4856, Seq. ID No. 4890, Seq. ID No. 4902, Seq. ID No. 4916, Seq. ID No. 4918, Seq. ID No. 4932, Seq. ID No. 4936, Seq. ID No. 4978, Seq. ID No. 5026, Seq. ID No. 5030, Seq. ID No. 5110, Seq. ID No. 5116, Seq. ID No. 5118, Seq. ID No. 5156, Seq. ID No. 5186, Seq. ID No. 5202, Seq. ID No. 5204, Seq. ID No. 5220, Seq. ID No. 5262, Seq. ID No. 5290, Seq. ID No. 5296, Seq. ID No. 5378, Seq. ID No. 5390, Seq. ID No. 5400, Seq. ID No. 5412, Seq. ID No. 5538, Seq. ID No. 5622, Seq. ID No. 5628, Seq. ID No. 5658, Seq. ID No. 5676, Seq. ID No. 5718, Seq. ID No. 5778, Seq. ID No. 5860, Seq. ID No. 5902, Seq. ID No. 5914, Seq. ID No. 5920, Seq. ID No. 5926, Seq. ID No. 5934, Seq. ID No. 6056, Seq. ID No. 6130, Seq. ID No. 6134, Seq. ID No. 6188, Seq. ID No. 6194, Seq. ID No. 6220, Seq. ID No. 6272, Seq. ID No. 6278, Seq. ID No. 6370, Seq. ID No. 6376, Seq. ID No. 6380, Seq. ID No. 6390, Seq. ID No. 6592, and Seq. ID No. 6606.

44. The Alloiococcus otitidis polypeptide of claim 36, wherein the polypeptide is identified as an Alloiococcus otitidis lipoprotein, and is selected from one Seq. ID No. 46, Seq. ID No. 48, Seq. ID No. 172, Seq. ID No. 226, Seq. ID No. 420, Seq. ID No. 514, Seq. ID No. 576, Seq. ID No. 592, Seq. ID No. 594, Seq. ID No. 658, Seq. ID No. 660, Seq. ID No. 670, Seq. ID No. 676, Seq. ID No. 746, Seq. ID No. 748, Seq. ID No. 936, Seq. ID No. 1046, Seq. ID No. 1076, Seq. ID No. 1138, Seq. ID No. 1174, Seq. ID No. 1192, Seq. ID No. 1194, Seq. ID No. 1196, Seq. ID No. 1564, Seq. ID No. 1662, Seq. ID No. 1664, Seq. ID No. 1666, Seq. ID No. 1792, Seq. ID No. 1798, Seq. ID No. 1918, Seq. ID No. 1970, Seq. ID No. 2116, Seq. ID No. 2160, Seq. ID No. 2430, Seq. ID No. 2528, Seq. ID No. 2700, Seq. ID No. 2816, Seq. ID No. 2876, Seq. ID No. 2976, Seq. ID No. 2978, Seq. ID No. 2992, Seq. ID No. 3044, Seq. ID No. 3324, Seq. ID No. 3338, Seq. ID No. 4134, Seq. ID No. 4138, Seq. ID No. 4482, Seq. ID No. 4706, Seq. ID No. 4828, Seq. ID No. 4870, Seq. ID No. 5116, Seq. ID No. 5378, Seq. ID No. 5380, Seq. ID No. 5492, Seq. ID No. 5510, Seq. ID No. 5514, Seq. ID No. 5526, Seq. ID No. 5530, Seq. ID No. 5532, Seq. ID No. 5890, Seq. ID No. 5910, Seq. ID No. 6026, Seq. ID No. 6028, Seq. ID No. 6088, Seq. ID No. 6090, Seq. ID No. 6326, Seq. ID No. 6328, Seq. ID No. 6416, Seq. ID No. 6638, Seq. ID No. 6640, and Seq. ID No. 6646.

45. The Alloiococcus otitidis polypeptide of claim 36, wherein the polypeptide is identified as having a LPXTG motif and is covalently attached to the peptidoglycan layer, and is selected from one of Seq. ID No. 504, Seq. ID No. 506, Seq. ID No. 1316, Seq. ID No. 1318, Seq. ID No. 1364, Seq. ID No. 1366, Seq. ID No. 1368, Seq. ID No. 1370, Seq. ID No. 1560, Seq. ID No. 1562, Seq. ID No. 1582, Seq. ID No. 1740, Seq. ID No. 1742, Seq. ID No. 2812, Seq. ID No. 2814, Seq. ID No. 3620, Seq. ID No. 5588, Seq. ID No. 5590, Seq. ID No. 5592, Seq. ID No. 5782, Seq. ID No. 5784, and Seq. ID No. 6104.

46. The Alloiococcus otitidis polypeptide of claim 36, wherein the polypeptide is identified as an Alloiococcus otitidis polypeptide, which is non-covalently associated with the peptidoglycan layer, and is selected from one of Seq. ID No. 3590, Seq. ID No. 3988, Seq. ID No. 5220, and Seq. ID No. 5338.

47. The Alloiococcus otitidis polypeptide of claim 36, wherein the polypeptide is identified as an Alloiococcus otitidis polypeptide having an RGDX motif wherein X is not a proline residue and is selected from one of Seq. ID No. 38, Seq. ID No. 100, Seq. ID No. 108, Seq. ID No. 110, Seq. ID No. 112, Seq. ID No. 352, Seq. ID No. 354, Seq. ID No. 466, Seq. ID No. 468, Seq. ID No. 470, Seq. ID No. 472, Seq. ID No. 684, Seq. ID No. 822, Seq. ID No. 824, Seq. ID No. 1022, Seq. ID No. 1024, Seq. ID No. 1158, Seq. ID No. 1160, Seq. ID No. 1234, Seq. ID No. 1334, Seq. ID No. 1336, Seq. ID No. 1450, Seq. ID No. 1560, Seq. ID No. 1562, Seq. ID No. 1564, Seq. ID No. 1626, Seq. ID No. 1778, Seq. ID No. 1828, Seq. ID No. 1830, Seq. ID No. 1872, Seq. ID No. 1926, Seq. ID No. 2136, Seq. ID No. 2146, Seq. ID No. 2174, Seq. ID No. 2176, Seq. ID No. 2178, Seq. ID No. 2180, Seq. ID No. 2260, Seq. ID No. 2318, Seq. ID No. 2320, Seq. ID No. 2322, Seq. ID No. 2324, Seq. ID No. 2326, Seq. ID No. 2328, Seq. ID No. 2330, Seq. ID No. 2402, Seq. ID No. 2672, Seq. ID No. 2864, Seq. ID No. 2870, Seq. ID No. 2920, Seq. ID No. 2922, Seq. ID No. 2994, Seq. ID No. 3088, Seq. ID No. 3138, Seq. ID No. 3280, Seq. ID No. 3282, Seq. ID No. 3284, Seq. ID No. 3334, Seq. ID No. 3336, Seq. ID No. 3498, Seq. ID No. 3500, Seq. ID No. 3502, Seq. ID No. 3534, Seq. ID No. 3672, Seq. ID No. 3674, Seq. ID No. 3676, Seq. ID No. 3838, Seq. ID No. 3840, Seq. ID No. 3842, Seq. ID No. 3844, Seq. ID No. 3930, Seq. ID No. 3962, Seq. ID No. 4038, Seq. ID No. 4194, Seq. ID No. 4240, Seq. ID No. 4328, Seq. ID No. 4330, Seq. ID No. 4334, Seq. ID No. 4394, Seq. ID No. 4464, Seq. ID No. 4466, Seq. ID No. 4468, Seq. ID No. 4598, Seq. ID No. 4630, Seq. ID No. 4632, Seq. ID No. 4676, Seq. ID No. 4678, Seq. ID No. 4680, Seq. ID No. 4690, Seq. ID No. 4692, Seq. ID No. 4694, Seq. ID No. 4782, Seq. ID No. 4800, Seq. ID No. 4802, Seq. ID No. 4804, Seq. ID No. 4862, Seq. ID No. 5010, Seq. ID No. 5144, Seq; ID No. 5146, Seq. ID No. 5180, Seq. ID No. 5182, Seq. ID No. 5184, Seq. ID No. 5250, Seq. ID No. 5252, Seq. ID No. 5254, Seq. ID No. 5260, Seq. ID No. 5262, Seq. ID No. 5294, Seq. ID No. 5296, Seq. ID No. 5298, Seq. ID No. 5300, Seq. ID No. 5308, Seq. ID No. 5310, Seq. ID No. 5412, Seq. ID No. 5536, Seq. ID No. 5538, Seq. ID No. 5746, Seq. ID No. 5822, Seq. ID No. 5824, Seq. ID No. 5826, Seq. ID No. 6030, Seq. ID No. 6172, Seq. ID No. 6308, Seq. ID No. 6310, and Seq. ID No. 6312.

48. The Alloiococcus otitidis polypeptide of claim 36, wherein the polypeptide is predicted by BlastP as being involved in capsule biosynthesis and transport, and is selected from one of Seq. ID No. 50, Seq. ID No. 52, Seq. ID No. 54, Seq. ID No. 60, Seq. ID No. 196, Seq. ID No. 690, Seq. ID No. 704, Seq. ID No. 926, Seq. ID No. 1598, Seq. ID No. 1602, Seq. ID No. 1608, Seq. ID No. 1612, Seq. ID No. 1614, Seq. ID No. 1714, Seq. ID No. 2030, Seq. ID No. 2264, Seq. ID No. 2270, Seq. ID No. 2374, Seq. ID No. 2438, Seq. ID No. 2652, Seq. ID No. 2768, Seq. ID No. 2908, Seq. ID No. 3398, Seq. ID No. 3400, Seq. ID No. 3480, Seq. ID No. 3488, Seq. ID No. 3492, Seq. ID No. 3494, Seq. ID No. 3496, Seq. ID No. 3498, Seq. ID No. 3520, Seq. ID No. 3522, Seq. ID No. 3530, Seq. ID No. 3536, Seq. ID No. 3562, Seq. ID No. 3884, Seq. ID No. 3892, Seq. ID No. 3982, and Seq. ID No. 4088.

49. The Alloiococcus otitidis polypeptide of claim 36 wherein the polynucleotide encoding the polypeptide is predicted by BlastP as being localized in the capsule loci region of Alloiococcus otitidis, and is selected from one of Seq. ID No. 46, Seq. ID No. 48, Seq. ID No. 52, Seq. ID No. 54, Seq. ID No. 56, Seq. ID No. 58, Seq. ID No. 60, Seq. ID No. 684, Seq. ID No. 686, Seq. ID No. 688, Seq. ID No. 690, Seq. ID No. 692, Seq. ID No. 694, Seq. ID No. 696, Seq. ID No. 698, Seq. ID No. 700, Seq. ID No. 702, Seq. ID No. 704, Seq. ID No. 706, Seq. ID No. 708, Seq. ID No. 710, Seq. ID No. 712, Seq. ID No. 714, Seq. ID No. 716, Seq. ID No. 718, Seq. ID No. 720, Seq. ID No. 722, Seq. ID No. 724, Seq. ID No. 726, Seq. ID No. 728, Seq. ID No. 730, Seq. ID No. 732, Seq. ID No. 734, Seq. ID No. 736, Seq. ID No. 738, Seq. ID No. 740, Seq. ID No. 742, Seq. ID No. 744, Seq. ID No. 746, Seq. ID No. 748, Seq. ID No. 750, Seq. ID No. 752, Seq. ID No. 754, Seq. ID No. 3390, Seq. ID No. 3392, Seq. ID No. 3394, Seq. ID No. 3396, Seq. ID No. 3398, Seq. ID No. 3400, Seq. ID No. 3402, Seq. ID No. 3404, Seq. ID No. 3406, Seq. ID No. 3408, Seq. ID No. 3410, Seq. ID No. 3412, Seq. ID No. 3414, Seq. ID No. 3416, Seq. ID No. 3418, Seq. ID No. 3420, Seq. ID No. 3422, Seq. ID No. 3424, Seq. ID No. 3426, Seq. ID No. 3428, Seq. ID No. 3430, Seq. ID No. 3432, Seq. ID No. 3434, Seq. ID No. 3436, Seq. ID No. 3438, Seq. ID No. 3440, Seq. ID No. 3442, Seq. ID No. 3444, Seq. ID No. 3446, Seq. ID No. 3448, Seq. ID No. 3450, Seq. ID No. 3452, Seq. ID No. 3454, Seq. ID No. 3456, Seq. ID No. 3458, Seq. ID No. 3460, Seq. ID No. 3462, Seq. ID No. 3464, Seq. ID No. 3466, Seq. ID No. 3468, Seq. ID No. 3470, Seq. ID No. 3472, Seq. ID No. 3474, Seq. ID No. 3476, Seq. ID No. 3478, Seq. ID No. 3480, Seq. ID No. 3482, Seq. ID No. 3484, Seq. ID No. 3486, Seq. ID No. 3488, Seq. ID No. 3490, Seq. ID No. 3492, Seq. ID No. 3494, Seq. ID No. 3496, Seq. ID No. 3498, Seq. ID No. 3500, Seq. ID No. 3502, Seq. ID No. 3504, Seq. ID No. 3506, Seq. ID No. 3508, Seq. ID No. 3510, Seq. ID No. 3512, Seq. ID No. 3514, Seq. ID No. 3516, Seq. ID No. 3518, Seq. ID No. 3520, Seq. ID No. 3522, Seq. ID No. 3524, Seq. ID No. 3526, Seq. ID No. 3528, Seq. ID No. 3530, Seq. ID No. 3532, Seq. ID No. 3534, Seq. ID No. 3536, Seq. ID No. 3538, Seq. ID No. 3540, Seq. ID No. 3542, Seq. ID No. 3544, Seq. ID No. 3546, Seq. ID No. 3548, Seq. ID No. 3550, Seq. ID No. 3552, Seq. ID No. 3554, Seq. ID No. 3556, Seq. ID No. 3558, Seq. ID No. 3560, and Seq. ID No. 3562.

50. The Alloiococcus otitidis polypeptide of claim 36, wherein the polypeptide is predicted by BlastP to be associated with sporulation, and is selected from one of Seq. ID No. 1138, Seq. ID No. 1456, Seq. ID No. 2138, Seq. ID No. 2142, Seq. ID No. 2166, Seq. ID No. 2180, Seq. ID No. 2302, Seq. ID No. 2754, Seq. ID No. 4212, Seq. ID No. 4252, Seq. ID No. 4328, Seq. ID No. 4570, Seq. ID No. 4720, and Seq. ID No. 4730.

51. The Alloiococcus otitidis polypeptide of claim 36 wherein the polypeptide encoded by the polynucleotide is predicted by BlastP to be a unique polypeptide, and is selected from one of Seq. ID No. 8, Seq. ID No. 20, Seq. ID No. 22, Seq. ID No. 24, Seq. ID No. 32, Seq. ID No. 40, Seq. ID No. 66, Seq. ID No. 68, Seq. ID No. 70, Seq. ID No. 92, Seq. ID No. 100, Seq. ID No. 106, Seq. ID No. 114, Seq. ID No. 116, Seq. ID No. 124, Seq. ID No. 126, Seq. ID No. 128, Seq. ID No. 132, Seq. ID No. 134, Seq. ID No. 140, Seq. ID No. 152, Seq. ID No. 160, Seq. ID No. 162, Seq. ID No. 164, Seq. ID No. 166, Seq. ID No. 170, Seq. ID No. 186, Seq. ID No. 190, Seq. ID No. 194, Seq. ID No. 230, Seq. ID No. 232, Seq. ID No. 256, Seq. ID No. 258, Seq. ID No. 260, Seq. ID No. 276, Seq. ID No. 338, Seq. ID No. 340, Seq. ID No. 348, Seq. ID No. 350, Seq. ID No. 358, Seq. ID No. 360, Seq. ID No. 370, Seq. ID No. 372, Seq. ID No. 378, Seq. ID No. 386, Seq. ID No. 388, Seq. ID No. 394, Seq. ID No. 400, Seq. ID No. 402, Seq. ID No. 404, Seq. ID No. 408, Seq. ID No. 420, Seq. ID No. 432, Seq. ID No. 478, Seq. ID No. 496, Seq. ID No. 508, Seq. ID No. 520, Seq. ID No. 542, Seq. ID No. 546, Seq. ID No. 548, Seq. ID No. 550, Seq. ID No. 558, Seq. ID No. 590, Seq. ID No. 618, Seq. ID No. 620, Seq. ID No. 634, Seq. ID No. 640, Seq. ID No. 642, Seq. ID No. 644, Seq. ID No. 646, Seq. ID No. 648, Seq. ID No. 652, Seq. ID No. 654, Seq. ID No. 656, Seq. ID No. 668, Seq. ID No. 692, Seq. ID No. 694, Seq. ID No. 696, Seq. ID No. 698, Seq. ID No. 716, Seq. ID No. 718, Seq. ID No. 720, Seq. ID No. 732, Seq. ID No. 734, Seq. ID No. 742, Seq. ID No. 744, Seq. ID No. 746, Seq. ID No. 748, Seq. ID No. 750, Seq. ID No. 752, Seq. ID No. 756, Seq. ID No. 758, Seq. ID No. 760, Seq. ID No. 762, Seq. ID No. 764, Seq. ID No. 766, Seq. ID No. 768, Seq. ID No. 802, Seq. ID No. 804, Seq. ID No. 806, Seq. ID No. 808, Seq. ID No. 810, Seq. ID No. 812, Seq. ID No. 814, Seq. ID No. 834, Seq. ID No. 842, Seq. ID No. 850, Seq. ID No. 852, Seq. ID No. 854, Seq. ID No. 856, Seq. ID No. 888, Seq. ID No. 890, Seq. ID No. 892, Seq. ID No. 904, Seq. ID No. 906, Seq. ID No. 910, Seq. ID No. 938, Seq. ID No. 942, Seq. ID No. 944, Seq. ID No. 952, Seq. ID No. 958, Seq. ID No. 974, Seq. ID No. 976, Seq. ID No. 988, Seq. ID No. 1006, Seq. ID No. 1008, Seq. ID No. 1010, Seq: ID No. 1012, Seq. ID No. 1020, Seq. ID No. 1026, Seq. ID No. 1028, Seq. ID No. 1046, Seq. ID No. 1048, Seq. ID No. 1072, Seq. ID No. 1074, Seq. ID No. 1078, Seq. ID No. 1106, Seq. ID No. 1108, Seq. ID No. 1112, Seq. ID No. 1132, Seq. ID No. 1136, Seq. ID No. 1140, Seq. ID No. 1152, Seq. ID No. 1154, Seq. ID No. 1166, Seq. ID No. 1168, Seq. ID No. 1170, Seq. ID No. 1172, Seq. ID No. 1174, Seq. ID No. 1182, Seq. ID No. 1184, Seq. ID No. 1186, Seq. ID No. 1188, Seq. ID No. 1190, Seq. ID No. 1192, Seq. ID No. 1194, Seq. ID No. 1196, Seq. ID No. 1198, Seq. ID No. 1200, Seq. ID No. 1202, Seq. ID No. 1204, Seq. ID No. 1208, Seq. ID No. 1214, Seq. ID No. 1228, Seq. ID No. 1230, Seq. ID No. 1240, Seq. ID No. 1244, Seq. ID No. 1246, Seq. ID No. 1248, Seq. ID No. 1250, Seq. ID No. 1260, Seq. ID No. 1266, Seq. ID No. 1268, Seq. ID No. 1270, Seq. ID No. 1272, Seq. ID No. 1274, Seq. ID No. 1276, Seq. ID No. 1278, Seq. ID No. 1280, Seq. ID No. 1282, Seq. ID No. 1284, Seq. ID No. 1286, Seq. ID No. 1288, Seq. ID No. 1290, Seq. ID No. 1292, Seq. ID No. 1294, Seq. ID No. 1296, Seq. ID No. 1298, Seq. ID No. 1300, Seq. ID No. 1302, Seq. ID No. 1304, Seq. ID No. 1306, Seq. ID No. 1308, Seq. ID No. 1310, Seq. ID No. 1312, Seq. ID No. 1314, Seq. ID No. 1320, Seq. ID No. 1322, Seq. ID No. 1324, Seq. ID No. 1326, Seq. ID No. 1328, Seq. ID No. 1338, Seq. ID No. 1342, Seq. ID No. 1344, Seq. ID No. 1348, Seq. ID No. 1350, Seq. ID No. 1352, Seq. ID No. 1354, Seq. ID No. 1356, Seq. ID No. 1372, Seq. ID No. 1380, Seq. ID No. 1382, Seq. ID No. 1390, Seq. ID No. 1398, Seq. ID No. 1400, Seq. ID No. 1402, Seq. ID No. 1418, Seq. ID No. 1420, Seq. ID No. 1422, Seq. ID No. 1424, Seq. ID No. 1440, Seq. ID No. 1446, Seq. ID No. 1448, Seq. ID No. 1458, Seq. ID No. 1466, Seq. ID No. 1480, Seq. ID No. 1512, Seq. ID No. 1552, Seq. ID No. 1554, Seq. ID No. 1556, Seq. ID No. 1558, Seq. ID No. 1580, Seq. ID No. 1610, Seq. ID No. 1622, Seq. ID No. 1624, Seq. ID No. 1626, Seq. ID No. 1628, Seq. ID No. 1630, Seq. ID No. 1632, Seq. ID No. 1634, Seq. ID No. 1640, Seq. ID No. 1644, Seq. ID No. 1656, Seq. ID No. 1668, Seq. ID No. 1672, Seq. ID No. 1694, Seq. ID No. 1696, Seq. ID No. 1702, Seq. ID No. 1704, Seq. ID No. 1706, Seq. ID No. 1722, Seq. ID No. 1724, Seq. ID No. 1732, Seq. ID No. 1738, Seq. ID No. 1744, Seq. ID No. 1760, Seq. ID No. 1764, Seq. ID No. 1774, Seq. ID No. 1776, Seq. ID No. 1778, Seq. ID No. 1780, Seq. ID No. 1782, Seq. ID No. 1800, Seq. ID No. 1802, Seq. ID No. 1804, Seq. ID No. 1808, Seq. ID No. 1824, Seq. ID No. 1832, Seq. ID No. 1852, Seq. ID No. 1858, Seq. ID No. 1876, Seq. ID No. 1900, Seq. ID No. 1916, Seq. ID No. 1928, Seq. ID No. 1930, Seq. ID No. 1974, Seq. ID No. 1978, Seq. ID No. 1982, Seq. ID No. 2006, Seq. ID No. 2008, Seq. ID No. 2010, Seq. ID No. 2012, Seq. ID No. 2018, Seq. ID No. 2020, Seq. ID No. 2024, Seq. ID No. 2026, Seq. ID No. 2028, Seq. ID No. 2040, Seq. ID No. 2042, Seq. ID No. 2044, Seq. ID No. 2046, Seq. ID No. 2050, Seq. ID No. 2082, Seq. ID No. 2084, Seq. ID No. 2086, Seq. ID No. 2106, Seq. ID No. 2108, Seq. ID No. 2110, Seq. ID No. 2112, Seq. ID No. 2130, Seq. ID No. 2132, Seq. ID No. 2134, Seq. ID No. 2146, Seq. ID No. 2156, Seq. ID No. 2158, Seq. ID No. 2160, Seq. ID No. 2162, Seq. ID No. 2172, Seq. ID No. 2188, Seq. ID No. 2190, Seq. ID No. 2202, Seq. ID No. 2204, Seq. ID No. 2210, Seq. ID No. 2212, Seq. ID No. 2920, Seq. ID No. 2226, Seq. ID No. 2244, Seq. ID No. 2246, Seq. ID No. 2248, Seq. ID No. 2250, Seq. ID No. 2252, Seq. ID No. 2256, Seq. ID No. 2278, Seq. ID No. 2280, Seq. ID No. 2342, Seq. ID No. 2352, Seq. ID No. 2354, Seq. ID No. 2356, Seq. ID No. 2358, Seq. ID No. 2360, Seq. ID No. 2366, Seq. ID No. 2368, Seq. ID No. 2372, Seq. ID No. 2376, Seq. ID No. 2394, Seq. ID No. 2396, Seq. ID No. 2426, Seq. ID No. 2428, Seq. ID No. 2432, Seq. ID No. 2440, Seq. ID No. 2442, Seq. ID No. 2444, Seq. ID No. 2448, Seq. ID No. 2460, Seq. ID No. 2480, Seq. ID No. 2494, Seq. ID No. 2502, Seq. ID No. 2504, Seq. ID No. 2522, Seq. ID No. 2524, Seq. ID No. 2528, Seq. ID No. 2592, Seq. ID No. 2602, Seq. ID No. 2604, Seq. ID No. 2612, Seq. ID No. 2628, Seq. ID No. 2630, Seq. ID No. 2654, Seq. ID No. 2662, Seq. ID No. 2692, Seq. ID No. 2696, Seq. ID No. 2698, Seq. ID No. 2718, Seq. ID No. 2730, Seq. ID No. 2732, Seq. ID No. 2734, Seq. ID No. 2736, Seq. ID No. 2740, Seq. ID No. 2742, Seq. ID No. 2744, Seq. ID No. 2778, Seq. ID No. 2780, Seq. ID No. 2782, Seq. ID No. 2784, Seq. ID No. 2802, Seq. ID No. 2806, Seq. ID No. 2808, Seq. ID No. 2810, Seq. ID No. 2812, Seq. ID No. 2814, Seq. ID No. 2816, Seq. ID No. 2818, Seq. ID No. 2820, Seq. ID No. 2830, Seq. ID No. 2832, Seq. ID No. 2834, Seq. ID No. 2836, Seq. ID No. 2838, Seq. ID No. 2840, Seq. ID No. 2842, Seq. ID No. 2846, Seq. ID No. 2850, Seq. ID No. 2852, Seq. ID No. 2854, Seq. ID No. 2856, Seq. ID No. 2858, Seq. ID No. 2860, Seq. ID No. 2862, Seq. ID No. 2866, Seq. ID No. 2874, Seq. ID No. 2876, Seq. ID No. 2878, Seq. ID No. 2884, Seq. ID No. 2886, Seq. ID No. 2888, Seq. ID No. 2890, Seq. ID No. 2894, Seq. ID No. 2896, Seq. ID No. 2904, Seq. ID No. 2910, Seq. ID No. 2936, Seq. ID No. 2938, Seq. ID No. 2940, Seq. ID No. 2942, Seq. ID No. 2944, Seq. ID No. 2946, Seq. ID No. 2948, Seq. ID No. 2950, Seq. ID No. 2952, Seq. ID No. 2954, Seq. ID No. 2966, Seq. ID No. 2968, Seq. ID No. 2974, Seq. ID No. 2976, Seq. ID No. 2978, Seq. ID No. 2982, Seq. ID No. 2984, Seq. ID No. 2986, Seq. ID No. 2988, Seq. ID No. 2990, Seq. ID No. 2992, Seq. ID No. 3002, Seq. ID No. 3008, Seq. ID No. 3010, Seq. ID No. 3012, Seq. ID No. 3022, Seq. ID No. 3024, Seq. ID No. 3042, Seq. ID No. 3046, Seq. ID No. 3072, Seq. ID No. 3088, Seq. ID No. 3106, Seq. ID No. 3108, Seq. ID No. 3120, Seq. ID No. 3122, Seq. ID No. 3124, Seq. ID No. 3152, Seq. ID No. 3154, Seq. ID No. 3168, Seq. ID No. 3174, Seq. ID No. 3176, Seq. ID No. 3178, Seq. ID No. 3182, Seq. ID No. 3194, Seq. ID No. 3214, Seq. ID No. 3216, Seq. ID No. 3218, Seq. ID No. 3220, Seq. ID No. 3222, Seq. ID No. 3224, Seq. ID No. 3232, Seq. ID No. 3234, Seq. ID No. 3236, Seq. ID No. 3238, Seq. ID No. 3240, Seq. ID No. 3242, Seq. ID No. 3244, Seq. ID No. 3246, Seq. ID No. 3248, Seq. ID No. 3250, Seq. ID No. 3262, Seq. ID No. 3264, Seq. ID No. 3266, Seq. ID No. 3268, Seq. ID No. 3270, Seq. ID No. 3272, Seq. ID No. 3274, Seq. ID No. 3276, Seq. ID No. 3278, Seq. ID No. 3326, Seq. ID No. 3332, Seq. ID No. 3340, Seq. ID No. 3342, Seq. ID No. 3350, Seq. ID No. 3362, Seq. ID No. 3364, Seq. ID No. 3370, Seq. ID No. 3372, Seq. ID No. 3390, Seq. ID No. 3404, Seq. ID No. 3418, Seq. ID No. 3420, Seq. ID No. 3422, Seq. ID No. 3434, Seq. ID No. 3438, Seq. ID No. 3442, Seq. ID No. 3444, Seq. ID No. 3446, Seq. ID No. 3448, Seq. ID No. 3474, Seq. ID No. 3482, Seq. ID No. 3484, Seq. ID No. 3490, Seq. ID No. 3504, Seq. ID No. 3506, Seq. ID No. 3510, Seq. ID No. 3512, Seq. ID No. 3524, Seq. ID No. 3526, Seq. ID No. 3532, Seq. ID No. 3534, Seq. ID No. 3540, Seq. ID No. 3542, Seq. ID No. 3544, Seq. ID No. 3546, Seq. ID No. 3548, Seq. ID No. 3556, Seq. ID No. 3558, Seq. ID No. 3564, Seq. ID No. 3566, Seq. ID No. 3572, Seq. ID No. 3574, Seq. ID No. 3582, Seq. ID No. 3588, Seq. ID No. 3592, Seq. ID No. 3594, Seq. ID No. 3596, Seq. ID No. 3612, Seq. ID No. 3614, Seq. ID No. 3618, Seq. ID No. 3620, Seq. ID No. 3622, Seq. ID No. 3624, Seq. ID No. 3626, Seq. ID No. 3632, Seq. ID No. 3638, Seq. ID No. 3640, Seq. ID No. 3656, Seq. ID No. 3658, Seq. ID No. 3660, Seq. ID No. 3662, Seq. ID No. 3678, Seq. ID No. 3680, Seq. ID No. 3684, Seq. ID No. 3686, Seq. ID No. 3702, Seq. ID No. 3704, Seq. ID No. 3718, Seq. ID No. 3720, Seq. ID No. 3722, Seq. ID No. 3724, Seq. ID No. 3730, Seq. ID No. 3732, Seq. ID No. 3734, Seq. ID No. 3736, Seq. ID No. 3738, Seq. ID No. 3740, Seq. ID No. 3742, Seq. ID No. 3750, Seq. ID No. 3752, Seq. ID No. 3754, Seq. ID No. 3756, Seq. ID No. 3762, Seq. ID No. 3782, Seq. ID No. 3784, Seq. ID No. 3786, Seq. ID No. 3788, Seq. ID No. 3790, Seq. ID No. 3792, Seq. ID No. 3800, Seq. ID No. 3808, Seq. ID No. 3810, Seq. ID No. 3812, Seq. ID No. 3814, Seq. ID No. 3816, Seq. ID No. 3818, Seq. ID No. 3828, Seq. ID No. 3830, Seq. ID No. 3832, Seq. ID No. 3834, Seq. ID No. 3836, Seq. ID No. 3850, Seq. ID No. 3880, Seq. ID No. 3882, Seq. ID No. 3896, Seq. ID No. 3904, Seq. ID No. 3910, Seq. ID No. 3916, Seq. ID No. 3940, Seq. ID No. 3960, Seq. ID No. 3962, Seq. ID No. 3964, Seq. ID No. 3966, Seq. ID No. 3974, Seq. ID No. 3978, Seq. ID No. 3980, Seq. ID No. 3994, Seq. ID No. 3996, Seq. ID No. 3998, Seq. ID No. 4006, Seq: ID No. 4008, Seq. ID No. 4010, Seq. ID No. 4042, Seq. ID No. 4044, Seq. ID No. 4046, Seq. ID No. 4070, Seq. ID No. 4078, Seq. ID No. 4098, Seq. ID No. 4114, Seq. ID No. 4124, Seq. ID No. 4132, Seq. ID No. 4134, Seq. ID No. 4136, Seq. ID No. 4140, Seq. ID No. 4152, Seq. ID No. 4154, Seq. ID No. 4156, Seq. ID No. 4182, Seq. ID No. 4222, Seq. ID No. 4242, Seq. ID No. 4254, Seq. ID No. 4258, Seq. ID No. 4260, Seq. ID No. 4262, Seq. ID No. 4264, Seq. ID No. 4266, Seq. ID No. 4270, Seq. ID No. 4276, Seq. ID No. 4278, Seq. ID No. 4280, Seq. ID No. 4282, Seq. ID No. 4286, Seq. ID No. 4288, Seq. ID No. 4298, Seq. ID No. 4306, Seq. ID No. 4308, Seq. ID No. 4364, Seq. ID No. 4366, Seq. ID No. 4372, Seq. ID No. 4374, Seq. ID No. 4396, Seq. ID No. 4400; Seq. ID No. 4404, Seq. ID No. 4426, Seq. ID No. 4438, Seq. ID No. 4440, Seq. ID No. 4442, Seq. ID No. 4454, Seq. ID No. 4456, Seq. ID No. 4514, Seq. ID No. 4516, Seq. ID No. 4552, Seq. ID No. 4562, Seq. ID No. 4574, Seq. ID No. 4576, Seq. ID No. 4588, Seq. ID No. 4590, Seq. ID No. 4592, Seq. ID No. 4594, Seq. ID No. 4596, Seq. ID No. 4618, Seq. ID No. 4620, Seq. ID No. 4622, Seq. ID No. 4626, Seq. ID No. 4628, Seq. ID No. 4634, Seq. ID No. 4636, Seq. ID No. 4638, Seq. ID No. 4640, Seq. ID No. 4660, Seq. ID No. 4682, Seq. ID No. 4688, Seq. ID No. 4696, Seq. ID No. 4700, Seq. ID No. 4702, Seq. ID No. 4722, Seq. ID No. 4736, Seq. ID No. 4738, Seq. ID No. 4742, Seq. ID No. 4784, Seq. ID No. 4790, Seq. ID No. 4806, Seq. ID No. 4812, Seq. ID No. 4818, Seq. ID No. 4820, Seq. ID No. 4822, Seq. ID No. 4824, Seq. ID No. 4836, Seq. ID No. 4854, Seq. ID No. 4886, Seq. ID No. 4914, Seq. ID No. 4924, Seq. ID No. 4950, Seq. ID No. 4952, Seq. ID No. 4976, Seq. ID No. 4982, Seq. ID No. 4984, Seq. ID No. 4988, Seq. ID No. 4994, Seq. ID No. 5000, Seq. ID No. 5002, Seq. ID No. 5012, Seq. ID No. 5014, Seq. ID No. 5024, Seq. ID No. 5032, Seq. ID No. 5034, Seq. ID No. 5036, Seq. ID No. 5038, Seq. ID No. 5042, Seq. ID No. 5044, Seq. ID No. 5054, Seq. ID No. 5062, Seq. ID No. 5064, Seq. ID No. 5086, Seq. ID No. 5094, Seq. ID No. 5152, Seq. ID No. 5154, Seq. ID No. 5160, Seq. ID No. 5162, Seq. ID No. 5168, Seq. ID No. 5174, Seq. ID No. 5176, Seq. ID No. 5178, Seq. ID No. 5190, Seq. ID No. 5192, Seq. ID No. 5194, Seq. ID No. 5198, Seq. ID No. 5200, Seq. ID No. 5222, Seq. ID No. 5224, Seq. ID No. 5226, Seq. ID No. 5228, Seq. ID No. 5238, Seq. ID No. 5268, Seq. ID No. 5270, Seq. ID No. 5272, Seq. ID No. 5282, Seq. ID No. 5302, Seq. ID No. 5304, Seq. ID No. 5316, Seq. ID No. 5322, Seq. ID No. 5328, Seq. ID No. 5348, Seq. ID No. 5386, Seq. ID No. 5446, Seq. ID No. 5448, Seq. ID No. 5460, Seq. ID No. 5466, Seq. ID No. 5468, Seq. ID No. 5480, Seq. ID No. 5482, Seq. ID No. 5486, Seq. ID No. 5488, Seq. ID No. 5516, Seq. ID No. 5518, Seq. ID No. 5534, Seq. ID No. 5544, Seq. ID No. 5546, Seq. ID No. 5550, Seq. ID No. 5570, Seq. ID No. 5578, Seq. ID No. 5594, Seq. ID No. 5596, Seq. ID No. 5610, Seq. ID No. 5624, Seq. ID No. 5626, Seq. ID No. 5640, Seq. ID No. 5642, Seq. ID No. 5644, Seq. ID No. 5650, Seq. ID No. 5660, Seq. ID No. 5662, Seq. ID No. 5664, Seq. ID No. 5668, Seq. ID No. 5672, Seq. ID No. 5688, Seq. ID No. 5690, Seq. ID No. 5704, Seq. ID No. 5706, Seq. ID No. 5710, Seq. ID No. 5712, Seq. ID No. 5738, Seq. ID No. 5740, Seq. ID No. 5746, Seq. ID No. 5752, Seq. ID No. 5764, Seq. ID No. 5798, Seq. ID No. 5812, Seq. ID No. 5814, Seq. ID No. 5816, Seq. ID No. 5828, Seq. ID No. 5830, Seq. ID No. 5844, Seq. ID No. 5846, Seq. ID No. 5874, Seq. ID No. 5880, Seq. ID No. 5884, Seq. ID No. 5886, Seq. ID No. 5888, Seq. ID No. 5890, Seq. ID No. 5892, Seq. ID No. 5932, Seq. ID No. 5956, Seq. ID No. 5964, Seq. ID No. 5966, Seq. ID No. 5976, Seq. ID No. 5984, Seq. ID No. 5986, Seq. ID No. 5988, Seq. ID No. 5990, Seq. ID No. 6006, Seq. ID No. 6014, Seq. ID No. 6032, Seq. ID No. 6036, Seq. ID No. 6046, Seq. ID No. 6060, Seq. ID No. 6062, Seq. ID No. 6064, Seq. ID No. 6074, Seq. ID No. 6082, Seq. ID No. 6092, Seq. ID No. 6094, Seq. ID No. 6128, Seq. ID No. 6160, Seq. ID No. 6198, Seq. ID No. 6200, Seq. ID No. 6204, Seq. ID No. 6218, Seq. ID No. 6222, Seq. ID No. 6224, Seq. ID No. 6238, Seq. ID No. 6240, Seq. ID No. 6242, Seq. ID No. 6246, Seq. ID No. 6248, Seq. ID No. 6250, Seq. ID No. 6260, Seq. ID No. 6266, Seq. ID No. 6268, Seq. ID No. 6274, Seq. ID No. 6284, Seq. ID No. 6286, Seq. ID No. 6324, Seq. ID No. 6326, Seq. ID No. 6328, Seq. ID No. 6362, Seq. ID No. 6364, Seq. ID No. 6378, Seq. ID No. 6382, Seq. ID No. 6402, Seq. ID No. 6404, Seq. ID No. 6420, Seq. ID No. 6426, Seq. ID No. 6428, Seq. ID No. 6430, Seq. ID No. 6432, Seq. ID No. 6434, Seq. ID No. 6436, Seq. ID No. 6438, Seq. ID No. 6440, Seq. ID No. 6448, Seq. ID No. 6450, Seq. ID No. 6452, Seq. ID No. 6454, Seq. ID No. 6456, Seq. ID No. 6458, Seq. ID No. 6466, Seq. ID No. 6468, Seq. ID No. 6470, Seq. ID No. 6472, Seq. ID No. 6474, Seq. ID No. 6476, Seq. ID No. 6478, Seq. ID No. 6480, Seq. ID No. 6482, Seq. ID No. 6484, Seq. ID No. 6486, Seq. ID No. 6488, Seq. ID No. 6490, Seq. ID No. 6492, Seq. ID No. 6496, Seq. ID No. 6498, Seq. ID No. 6508, Seq. ID No. 6518, Seq. ID No. 6520, Seq. ID No. 6522, Seq. ID No. 6524, Seq. ID No. 6526, Seq. ID No. 6528, Seq. ID No. 6530, Seq. ID No. 6534, Seq. ID No. 6540, Seq. ID No. 6542, Seq. ID No. 6544, Seq. ID No. 6556, Seq. ID No. 6558, Seq. ID No. 6562, Seq. ID No. 6564, Seq. ID No. 6566, Seq. ID No. 6568, Seq. ID No. 6570, Seq. ID No. 6572, Seq. ID No. 6574, Seq. ID No. 6582, Seq. ID No. 6584, Seq. ID No. 6632, Seq. ID No. 6636, Seq. ID No. 6638, Seq. ID No. 6640, Seq. ID No. 6644, Seq. ID No. 6646, Seq. ID No. 6648, and Seq. ID No. 6650.

52. The Alloiococcus otitidis polypeptide of claim 36, wherein the polypeptide is identified as an Alloiococcus otitidis polypeptide identified by Glimmer™ ORF finder program, and is selected from one of Seq. ID No. 2, Seq. ID No. 6, Seq. ID No. 12, Seq. ID No. 14, Seq. ID No. 16, Seq. ID No. 18, Seq. ID No. 26, Seq. ID No. 28, Seq. ID No. 30, Seq. ID No. 36, Seq. ID No. 38, Seq. ID No. 42, Seq. ID No. 44, Seq. ID No. 48, Seq. ID No. 52, Seq. ID No. 54, Seq. ID No. 60, Seq. ID No. 64, Seq. ID No. 70, Seq. ID No. 74, Seq. ID No. 76, Seq. ID No. 82, Seq. ID No. 84, Seq. ID No. 90, Seq. ID No. 94, Seq. ID No. 98, Seq. ID No. 104, Seq. ID No. 112, Seq. ID No. 122, Seq. ID No. 126, Seq. ID No. 130, Seq. ID No. 136, Seq. ID No. 138, Seq. ID No. 146, Seq. ID No. 150, Seq. ID No. 158, Seq. ID No. 168, Seq. ID No. 174, Seq. ID No. 184, Seq. ID No. 188, Seq. ID No. 190, Seq. ID No. 192, Seq. ID No. 196, Seq. ID No. 198, Seq. ID No. 204, Seq. ID No. 208, Seq. ID No. 216, Seq. ID No. 220, Seq. ID No. 224, Seq. ID No. 226, Seq. ID No. 228, Seq. ID No. 232, Seq. ID No. 234, Seq. ID No. 240, Seq. ID No. 242, Seq. ID No. 248, Seq. ID No. 254, Seq. ID No. 262, Seq. ID No. 266, Seq. ID No. 270, Seq. ID No. 274, Seq. ID No. 276, Seq. ID No. 278, Seq. ID No. 284, Seq. ID No. 292, Seq. ID No. 294, Seq. ID No. 298, Seq. ID No. 302, Seq. ID No. 308, Seq. ID No. 310, Seq. ID No. 314, Seq. ID No. 318, Seq. ID No. 322, Seq. ID No. 326, Seq. ID No. 336, Seq. ID No. 344, Seq. ID No. 346, Seq. ID No. 354, Seq. ID No. 356, Seq. ID No. 362, Seq. ID No. 364, Seq. ID No. 368, Seq. ID No. 376, Seq. ID No. 380, Seq. ID No. 384, Seq. ID No. 390, Seq. ID No. 392, Seq. ID No. 398, Seq. ID No. 406, Seq. ID No. 412, Seq. ID No. 416, Seq. ID No. 418, Seq. ID No. 424, Seq. ID No. 426, Seq. ID No. 428, Seq. ID No. 430, Seq. ID No. 436, Seq. ID No. 438, Seq. ID No. 440, Seq. ID No. 442, Seq. ID No. 446, Seq. ID No. 448, Seq. ID No. 454, Seq. ID No. 462, Seq. ID No. 464, Seq. ID No. 472, Seq. ID No. 486, Seq. ID No. 502, Seq. ID No. 506, Seq. ID No. 512, Seq. ID No. 516, Seq. ID No. 518, Seq. ID No. 522, Seq. ID No. 524, Seq. ID No. 532, Seq. ID No. 534, Seq. ID No. 540, Seq. ID No. 542, Seq. ID No. 544, Seq. ID No. 552, Seq. ID No. 556, Seq. ID No. 562, Seq. ID No. 566, Seq. ID No. 570, Seq. ID No. 576, Seq. ID No. 580, Seq. ID No. 588, Seq. ID No. 594, Seq. ID No. 598, Seq. ID No. 604, Seq. ID No. 606, Seq. ID No. 610, Seq. ID No. 612, Seq. ID No. 614, Seq. ID No. 616, Seq. ID No. 624, Seq. ID No. 628, Seq. ID No. 630, Seq. ID No. 632, Seq. ID No. 636, Seq. ID No. 638, Seq. ID No. 648, Seq. ID No. 650, Seq. ID No. 662, Seq. ID No. 670, Seq. ID No. 674, Seq. ID No. 676, Seq. ID No. 682, Seq. ID No. 684, Seq. ID No. 690, Seq. ID No. 702, Seq. ID No. 704, Seq. ID No. 710, Seq. ID No. 714, Seq. ID No. 730, Seq. ID No. 734, Seq. ID No. 736, Seq. ID No. 738, Seq. ID No. 742, Seq. ID No. 748, Seq. ID No. 752, Seq. ID No. 754, Seq. ID No. 760, Seq. ID No. 766, Seq. ID No. 768, Seq. ID No. 772, Seq. ID No. 782, Seq. ID No. 784, Seq. ID No. 788, Seq. ID No. 792, Seq. ID No. 796, Seq. ID No. 800, Seq. ID No. 808, Seq. ID No. 818, Seq. ID No. 820, Seq. ID No. 824, Seq. ID No. 828, Seq. ID No. 832, Seq. ID No. 836, Seq. ID No. 838, Seq. ID No. 840, Seq. ID No. 848, Seq. ID No. 852, Seq. ID No. 856, Seq. ID No. 860, Seq. ID No. 868, Seq. ID No. 872, Seq. ID No. 876, Seq. ID No. 882, Seq. ID No. 886, Seq. ID No. 890, Seq. ID No. 892, Seq. ID No. 896, Seq. ID No. 902, Seq. ID No. 908, Seq. ID No. 916, Seq. ID No. 920, Seq. ID No. 926, Seq. ID No. 930, Seq. ID No. 936, Seq. ID No. 940, Seq. ID No. 950, Seq. ID No. 952, Seq. ID No. 956, Seq. ID No. 962, Seq. ID No. 966, Seq. ID No. 968, Seq. ID No. 972, Seq. ID No. 986, Seq. ID No. 994, Seq. ID No. 998, Seq. ID No. 1004, Seq. ID No. 1006, Seq. ID No. 1010, Seq. ID No. 1018, Seq. ID No. 1024, Seq. ID No. 1040, Seq. ID No. 1042, Seq. ID No. 1044, Seq. ID No. 1052, Seq. ID No. 1054, Seq. ID No. 1058, Seq. ID No. 1062, Seq. ID No. 1066, Seq. ID No. 1068, Seq. ID No. 1070, Seq. ID No. 1074, Seq. ID No. 1076, Seq. ID No. 1084, Seq. ID No. 1088, Seq. ID No. 1092, Seq. ID No. 1094, Seq. ID No. 1098, Seq. ID No. 1100, Seq. ID No. 1104, Seq. ID No. 1110, Seq. ID No. 1116, Seq. ID No. 1118, Seq. ID No. 1124, Seq. ID No. 1130, Seq. ID No. 1134, Seq. ID No. 1138, Seq. ID No. 1144, Seq. ID No. 1148, Seq. ID No. 1150, Seq. ID No. 1156, Seq. ID No. 1158, Seq. ID No. 1160, Seq. ID No. 1164, Seq. ID No. 1172, Seq. ID No. 1180, Seq. ID No. 1182, Seq. ID No. 1188, Seq. ID No. 1194, Seq. ID No. 1200, Seq. ID No. 1206, Seq. ID No. 1212, Seq. ID No. 1218, Seq. ID No. 1222, Seq. ID No. 1224, Seq. ID No. 1226, Seq. ID No. 1232, Seq. ID No. 1234, Seq. ID No. 1238, Seq. ID No. 1242, Seq. ID No. 1254, Seq. ID No. 1258, Seq. ID No. 1264, Seq. ID No. 1272, Seq. ID No. 1282, Seq. ID No. 1318, Seq. ID No. 1324, Seq. ID No. 1332, Seq. ID No. 1336, Seq. ID No. 1340, Seq. ID No. 1346, Seq. ID No. 1348, Seq. ID No. 1362, Seq. ID No. 1370, Seq. ID No. 1378, Seq. ID No. 1380, Seq. ID No. 1388, Seq. ID No. 1394, Seq. ID No. 1396, Seq. ID No. 1400, Seq. ID No. 1404, Seq. ID No. 1406, Seq. ID No. 1412, Seq. ID No. 1414, Seq. ID No. 1416, Seq. ID No. 1420, Seq. ID No. 1426, Seq. ID No. 1428, Seq. ID No. 1430, Seq. ID No. 1432, Seq. ID No. 1434, Seq. ID No. 1438, Seq. ID No. 1444, Seq. ID No. 1450, Seq. ID No. 1452, Seq. ID No. 1456, Seq. ID No. 1458, Seq. ID No. 1460, Seq. ID No. 1464, Seq. ID No. 1466, Seq. ID No. 1470, Seq. ID No. 1472, Seq. ID No. 1474, Seq. ID No. 1476, Seq. ID No. 1478, Seq. ID No. 1486, Seq. ID No. 1488, Seq. ID No. 1492, Seq. ID No. 1494, Seq. ID No. 1496, Seq. ID No. 1498, Seq. ID No. 1502, Seq. ID No. 1506, Seq. ID No. 1508, Seq. ID No. 1510, Seq. ID No. 1518, Seq. ID No. 1526, Seq. ID No. 1528, Seq. ID No. 1532, Seq. ID No. 1540, Seq. ID No. 1542, Seq. ID No. 1544, Seq. ID No. 1550, Seq. ID No. 1562, Seq. ID No. 1564, Seq. ID No. 1568, Seq. ID No. 1572, Seq. ID No. 1574, Seq. ID No. 1578, Seq. ID No. 1582, Seq. ID No. 1590, Seq. ID No. 1594, Seq. ID No. 1596, Seq. ID No. 1598, Seq. ID No. 1604, Seq. ID No. 1608, Seq. ID No. 1612, Seq. ID No. 1614, Seq. ID No. 1620, Seq. ID No. 1624, Seq. ID No. 1628, Seq. ID No. 1632, Seq. ID No. 1638, Seq. ID No. 1640, Seq. ID No. 1642, Seq. ID No. 1648, Seq. ID No. 1654, Seq. ID No. 1658, Seq. ID No. 1666, Seq. ID No. 1670, Seq. ID No. 1682, Seq. ID No. 1686, Seq. ID No. 1690, Seq. ID No. 1692, Seq. ID No. 1698, Seq. ID No. 1700, Seq. ID No. 1708, Seq. ID No. 1712, Seq. ID No. 1714, Seq. ID No. 1720, Seq. ID No. 1724, Seq. ID No. 1730, Seq. ID No. 1736, Seq. ID No. 1738, Seq. ID No. 1742, Seq. ID No. 1748, Seq. ID No. 1752, Seq. ID No. 1758, Seq. ID No. 1760, Seq. ID No. 1762, Seq. ID No. 1772, Seq. ID No. 1778, Seq. ID No. 1786, Seq. ID No. 1790, Seq. ID No. 1792, Seq. ID No. 1798, Seq. ID No. 1802, Seq. ID No. 1804, Seq. ID No. 1806, Seq. ID No. 1812, Seq. ID No. 1818, Seq. ID No. 1820, Seq. ID No. 1822, Seq. ID No. 1826, Seq. ID No. 1830, Seq. ID No. 1838, Seq. ID No. 1844, Seq. ID No. 1846, Seq. ID No. 1848, Seq. ID No. 1850, Seq. ID No. 1852, Seq. ID No. 1856, Seq. ID No. 1860, Seq. ID No. 1864, Seq. ID No. 1866, Seq. ID No. 1868, Seq. ID No. 1872, Seq. ID No. 1874, Seq. ID No. 1878, Seq. ID No. 1886, Seq. ID No. 1888, Seq. ID No. 1890, Seq. ID No. 1896, Seq. ID No. 1898, Seq. ID No. 1900, Seq. ID No. 1904, Seq. ID No. 1906, Seq. ID No. 1914, Seq. ID No. 1920, Seq. ID No. 1924, Seq. ID No. 1926, Seq. ID No. 1932, Seq. ID No. 1936, Seq. ID No. 1938, Seq. ID No. 1944, Seq. ID No. 1946, Seq. ID No. 1950, Seq. ID No. 1954, Seq. ID No. 1958, Seq. ID No. 1960, Seq. ID No. 1962, Seq. ID No. 1966, Seq. ID No. 1968, Seq. ID No. 1972, Seq. ID No. 1976, Seq. ID No. 1980, Seq. ID No. 1984, Seq. ID No. 1988, Seq. ID No. 1990, Seq. ID No. 1992, Seq. ID No. 2000, Seq. ID No. 2002, Seq. ID No. 2004, Seq. ID No. 2010, Seq. ID No. 2016, Seq. ID No. 2020, Seq. ID No. 2022, Seq. ID No. 2032, Seq. ID No. 2036, Seq. ID No. 2038, Seq. ID No. 2046, Seq. ID No. 2048, Seq. ID No. 2056, Seq. ID No. 2060, Seq. ID No. 2066, Seq. ID No. 2068, Seq. ID No. 2070, Seq. ID No. 2072, Seq. ID No. 2074, Seq. ID No. 2080, Seq. ID No. 2092, Seq. ID No. 2094, Seq. ID No. 2098, Seq. ID No. 2100, Seq. ID No. 2104, Seq. ID No. 2116, Seq. ID No. 2120, Seq. ID No. 2128, Seq. ID No. 2136, Seq. ID No. 2138, Seq. ID No. 2142, Seq. ID No. 2144, Seq. ID No. 2148, Seq. ID No. 2154, Seq. ID No. 2160, Seq. ID No. 2162, Seq. ID No. 2166, Seq. ID No. 2170, Seq. ID No. 2180, Seq. ID No. 2184, Seq. ID No. 2186, Seq. ID No. 2190, Seq. ID No. 2192, Seq. ID No. 2194, Seq. ID No. 2196, Seq. ID No. 2200, Seq. ID No. 2208, Seq. ID No. 2218, Seq. ID No. 2220, Seq. ID No. 2222, Seq. ID No. 2224, Seq. ID No. 2228, Seq. ID No. 2230, Seq. ID No. 2232, Seq. ID No. 2234, Seq. ID No. 2242, Seq. ID No. 2246, Seq. ID No. 2252, Seq. ID No. 2254, Seq. ID No. 2258, Seq. ID No. 2260, Seq. ID No. 2264, Seq. ID No. 2268, Seq. ID No. 2270, Seq. ID No. 2276, Seq. ID No. 2282, Seq. ID No. 2288, Seq. ID No. 2298, Seq. ID No. 2300, Seq. ID No. 2302, Seq. ID No. 2316, Seq. ID No. 2330, Seq. ID No. 2334, Seq. ID No. 2336, Seq. ID No. 2340, Seq. ID No. 2344, Seq. ID No. 2346, Seq. ID No. 2350, Seq. ID No. 2352, Seq. ID No. 2358, Seq. ID No. 2360, Seq. ID No. 2364, Seq. ID No. 2366, Seq. ID No. 2370, Seq. ID No. 2374, Seq. ID No. 2382, Seq. ID No. 2392, Seq. ID No. 2400, Seq. ID No. 2402, Seq. ID No. 2406, Seq. ID No. 2410, Seq. ID No. 2416, Seq. ID No. 2418, Seq. ID No. 2422, Seq. ID No. 2424, Seq. ID No. 2428, Seq. ID No. 2430, Seq. ID No. 2432, Seq. ID No. 2436, Seq. ID No. 2438, Seq. ID No. 2440, Seq. ID No. 2444, Seq. ID No. 2446, Seq. ID No. 2450, Seq. ID No. 2452, Seq. ID No. 2454, Seq. ID No. 2458, Seq. ID No. 2464, Seq. ID No. 2466, Seq. ID No. 2470, Seq. ID No. 2472, Seq. ID No. 2476, Seq. ID No. 2478, Seq. ID No. 2484, Seq. ID No. 2486, Seq. ID No. 2492, Seq. ID No. 2496, Seq. ID No. 2506, Seq. ID No. 2508, Seq. ID No. 2514, Seq. ID No. 2520, Seq. ID No. 2526, Seq. ID No. 2530, Seq. ID No. 2536, Seq. ID No. 2538, Seq. ID No. 2540, Seq. ID No. 2550, Seq. ID No. 2554, Seq. ID No. 2564, Seq. ID No. 2568, Seq. ID No. 2576, Seq. ID No. 2578, Seq. ID No. 2582, Seq. ID No. 2590, Seq. ID No. 2594, Seq. ID No. 2596, Seq. ID No. 2600, Seq. ID No. 2604, Seq. ID No. 2608, Seq. ID No. 2610, Seq. ID No. 2614, Seq. ID No. 2618, Seq. ID No. 2620, Seq. ID No. 2624, Seq. ID No. 2626, Seq. ID No. 2632, Seq. ID No. 2634, Seq. ID No. 2640, Seq. ID No. 2642, Seq. ID No. 2646, Seq. ID No. 2650, Seq. ID No. 2652, Seq. ID No. 2656, Seq. ID No. 2660, Seq. ID No. 2664, Seq. ID No. 2668, Seq. ID No. 2670, Seq. ID No. 2672, Seq. ID No. 2678, Seq. ID No. 2688, Seq. ID No. 2690, Seq. ID No. 2694, Seq. ID No. 2700, Seq. ID No. 2704, Seq. ID No. 2710, Seq. ID No. 2712, Seq. ID No. 2716, Seq. ID No. 2720, Seq. ID No. 2726, Seq. ID No. 2728, Seq. ID No. 2738, Seq. ID No. 2744, Seq. ID No. 2748, Seq. ID No. 2752, Seq. ID No. 2754, Seq. ID No. 2760, Seq. ID No. 2764, Seq. ID No. 2766, Seq. ID No. 2768, Seq. ID No. 2772, Seq. ID No. 2774, Seq. ID No. 2776, Seq. ID No. 2782, Seq. ID No. 2788, Seq. ID No. 2790, Seq. ID No. 2792, Seq. ID No. 2794, Seq. ID No. 2798, Seq. ID No. 2800, Seq. ID No. 2804, Seq. ID No. 2806, Seq. ID No. 2812, Seq. ID No. 2816, Seq. ID No. 2824, Seq. ID No. 2828, Seq. ID No. 2844, Seq. ID No. 2848, Seq. ID No. 2864, Seq. ID No. 2868, Seq. ID No. 2870, Seq. ID No. 2872, Seq. ID No. 2878, Seq. ID No. 2882, Seq. ID No. 2892, Seq. ID No. 2900, Seq. ID No. 2902, Seq. ID No. 2904, Seq. ID No. 2908, Seq. ID No. 2912, Seq. ID No. 2914, Seq. ID No. 2918, Seq. ID No. 2920, Seq. ID No. 2922, Seq. ID No. 2924, Seq. ID No. 2928, Seq. ID No. 2934, Seq. ID No. 2946, Seq. ID No. 2954, Seq. ID No. 2958, Seq. ID No. 2964, Seq. ID No. 2972, Seq. ID No. 2974, Seq. ID No. 2978, Seq. ID No. 2980, Seq. ID No. 2984, Seq. ID No. 2986, Seq. ID No. 2992, Seq. ID No. 2994, Seq. ID No. 3000, Seq. ID No. 3002, Seq. ID No. 3006, Seq. ID No. 3012, Seq. ID No. 3020, Seq. ID No. 3028, Seq. ID No. 3034, Seq. ID No. 3036, Seq. ID No. 3040, Seq. ID No. 3044, Seq. ID No. 3046, Seq. ID No. 3050, Seq. ID No. 3056, Seq. ID No. 3060, Seq. ID No. 3062, Seq. ID No. 3068, Seq. ID No. 3070, Seq. ID No. 3082, Seq. ID No. 3090, Seq. ID No. 3092, Seq. ID No. 3094, Seq. ID No. 3098, Seq. ID No. 3104, Seq. ID No. 3108, Seq. ID No. 3112, Seq. ID No. 3118, Seq. ID No. 3126, Seq. ID No. 3134, Seq. ID No. 3136, Seq. ID No. 3138, Seq. ID No. 3142, Seq. ID No. 3144, Seq. ID No. 3150, Seq. ID No. 3156, Seq. ID No. 3158, Seq. ID No. 3160, Seq. ID No. 3162, Seq. ID No. 3166, Seq. ID No. 3172, Seq. ID No. 3178, Seq. ID No. 3180, Seq. ID No. 3184, Seq. ID No. 3186, Seq. ID No. 3190, Seq. ID No. 3192, Seq. ID No. 3198, Seq. ID No. 3204, Seq. ID No. 3206, Seq. ID No. 3212, Seq. ID No. 3218, Seq. ID No. 3222, Seq. ID No. 3228, Seq. ID No. 3230, Seq. ID No. 3234, Seq. ID No. 3236, Seq. ID No. 3240, Seq. ID No. 3250, Seq. ID No. 3252, Seq. ID No. 3254, Seq. ID No. 3258, Seq. ID No. 3260, Seq. ID No. 3264, Seq. ID No. 3266, Seq. ID No. 3272, Seq. ID No. 3274, Seq. ID No. 3278, Seq. ID No. 3284, Seq. ID No. 3286, Seq. ID No. 3288, Seq. ID No. 3290, Seq. ID No. 3294, Seq. ID No. 3296, Seq. ID No. 3300, Seq. ID No. 3304, Seq. ID No. 3308, Seq. ID No. 3314, Seq. ID No. 3316, Seq. ID No. 3320, Seq. ID No. 3324, Seq. ID No. 3330, Seq. ID No. 3336, Seq. ID No. 3338, Seq. ID No. 3348, Seq. ID No. 3356, Seq. ID No. 3360, Seq. ID No. 3364, Seq. ID No. 3368, Seq. ID No. 3378, Seq. ID No. 3380, Seq. ID No. 3384, Seq. ID No. 3388, Seq. ID No. 3400, Seq. ID No. 3402, Seq. ID No. 3404, Seq. ID No. 3410, Seq. ID No. 3414, Seq. ID No. 3416, Seq. ID No. 3418, Seq. ID No. 3426, Seq. ID No. 3428, Seq. ID No. 3432, Seq. ID No. 3436, Seq. ID No. 3438, Seq. ID No. 3440, Seq. ID No. 3448, Seq. ID No. 3460, Seq. ID No. 3462, Seq. ID No. 3468, Seq. ID No. 3470, Seq. ID No. 3472, Seq. ID No. 3474, Seq. ID No. 3476, Seq. ID No. 3480, Seq. ID No. 3484, Seq. ID No. 3486, Seq. ID No. 3488, Seq. ID No. 3496, Seq. ID No. 3502, Seq. ID No. 3506, Seq. ID No. 3508, Seq. ID No. 3510, Seq. ID No. 3512, Seq. ID No. 3520, Seq. ID No. 3522, Seq. ID No. 3526, Seq. ID No. 3530, Seq. ID No. 3534, Seq. ID No. 3538, Seq. ID No. 3544, Seq. ID No. 3550, Seq. ID No. 3554, Seq. ID No. 3562, Seq. ID No. 3566, Seq. ID No. 3570, Seq. ID No. 3576, Seq. ID No. 3580, Seq. ID No. 3584, Seq. ID No. 3586, Seq. ID No. 3590, Seq. ID No. 3600, Seq. ID No. 3606, Seq. ID No. 3608, Seq. ID No. 3610, Seq. ID No. 3612, Seq. ID No. 3616, Seq. ID No. 3620, Seq. ID No. 3630, Seq. ID No. 3636, Seq. ID No. 3640, Seq. ID No. 3642, Seq. ID No. 3644, Seq. ID No. 3646, Seq. ID No. 3652, Seq. ID No. 3654, Seq. ID No. 3660, Seq. ID No. 3664, Seq. ID No. 3666, Seq. ID No. 3668, Seq. ID No. 3670, Seq. ID No. 3676, Seq. ID No. 3682, Seq. ID No. 3690, Seq. ID No. 3696, Seq. ID No. 3700, Seq. ID No. 3710, Seq. ID No. 3716, Seq. ID No. 3722, Seq. ID No. 3728, Seq. ID No. 3730, Seq. ID No. 3734, Seq. ID No. 3736, Seq. ID No. 3740, Seq. ID No. 3742, Seq. ID No. 3748, Seq. ID No. 3752, Seq. ID No. 3760, Seq. ID No. 3772, Seq. ID No. 3776, Seq. ID No. 3780, Seq. ID No. 3784, Seq. ID No. 3792, Seq. ID No. 3798, Seq. ID No. 3804, Seq. ID No. 3806, Seq. ID No. 3812, Seq. ID No. 3814, Seq. ID No. 3820, Seq. ID No. 3824, Seq. ID No. 3826, Seq. ID No. 3834, Seq. ID No. 3836, Seq. ID No. 3844, Seq. ID No. 3848, Seq. ID No. 3856, Seq. ID No. 3858, Seq. ID No. 3864, Seq. ID No. 3868, Seq. ID No. 3874, Seq. ID No. 3878, Seq. ID No. 3882, Seq. ID No. 3884, Seq. ID No. 3886, Seq. ID No. 3894, Seq. ID No. 3898, Seq. ID No. 3902, Seq. ID No. 3908, Seq. ID No. 3914, Seq. ID No. 3916, Seq. ID No. 3918, Seq. ID No. 3920, Seq. ID No. 3926, Seq. ID No. 3930, Seq. ID No. 3934, Seq. ID No. 3936, Seq. ID No. 3938, Seq. ID No. 3942, Seq. ID No. 3944, Seq. ID No. 3946, Seq. ID No. 3950, Seq. ID No. 3952, Seq. ID No. 3956, Seq. ID No. 3958, Seq. ID No. 3972, Seq. ID No. 3976, Seq. ID No. 3984, Seq. ID No. 3986, Seq. ID No. 3988, Seq. ID No. 3992, Seq. ID No. 4004, Seq. ID No. 4010, Seq. ID No. 4014, Seq. ID No. 4016, Seq. ID No. 4018, Seq. ID No. 4022, Seq. ID No. 4024, Seq. ID No. 4030, Seq. ID No. 4032, Seq. ID No. 4036, Seq. ID No. 4038, Seq. ID No. 4040, Seq. ID No. 4050, Seq. ID No. 4056, Seq. ID No. 4058, Seq. ID No. 4062, Seq. ID No. 4064, Seq. ID No. 4068, Seq. ID No. 4070, Seq. ID No. 4076, Seq. ID No. 4078, Seq. ID No. 4080, Seq. ID No. 4088, Seq. ID No. 4090, Seq. ID No. 4096, Seq. ID No. 4098, Seq. ID No. 4100, Seq. ID No. 4106, Seq. ID No. 4112, Seq. ID No. 4118, Seq. ID No. 4122, Seq. ID No. 4124, Seq. ID No. 4128, Seq. ID No. 4130, Seq. ID No. 4134, Seq. ID No. 4138, Seq. ID No. 4146, Seq. ID No. 4150, Seq. ID No. 4158, Seq. ID No. 4162, Seq. ID No. 4164, Seq. ID No. 4168, Seq. ID No. 4174, Seq. ID No. 4180, Seq. ID No. 4186, Seq. ID No. 4192, Seq. ID No. 4194, Seq. ID No. 4196, Seq. ID No. 4198, Seq. ID No. 4200, Seq. ID No. 4202, Seq. ID No. 4204, Seq. ID No. 4206, Seq. ID No. 4212, Seq. ID No. 4216, Seq. ID No. 4218, Seq. ID No. 4220, Seq. ID No. 4236, Seq. ID No. 4238, Seq. ID No. 4240, Seq. ID No. 4244, Seq. ID No. 4252, Seq. ID No. 4256, Seq. ID No. 4264, Seq. ID No. 4268, Seq. ID No. 4272, Seq. ID No. 4274, Seq. ID No. 4280, Seq. ID No. 4282, Seq. ID No. 4284, Seq. ID No. 4292, Seq. ID No. 4296, Seq. ID No. 4300, Seq. ID No. 4302, Seq. ID No. 4304, Seq. ID No. 4308, Seq. ID No. 4310, Seq. ID No. 4314, Seq. ID No. 4318, Seq. ID No. 4324, Seq. ID No. 4326, Seq. ID No. 4330, Seq. ID No. 4332, Seq. ID No. 4334, Seq. ID No. 4340, Seq. ID No. 4344, Seq. ID No. 4348, Seq. ID No. 4354, Seq. ID No. 4356, Seq. ID No. 4358, Seq. ID No. 4366, Seq. ID No. 4370, Seq. ID No. 4374, Seq. ID No. 4376, Seq. ID No. 4378, Seq. ID No. 4380, Seq. ID No. 4382, Seq. ID No. 4384, Seq. ID No. 4392, Seq. ID No. 4394, Seq. ID No. 4398, Seq. ID No. 4402, Seq. ID No. 4412, Seq. ID No. 4418, Seq. ID No. 4424, Seq. ID No. 4432, Seq. ID No. 4434, Seq. ID No. 4436, Seq. ID No. 4444, Seq. ID No. 4448, Seq. ID No. 4452, Seq. ID No. 4460, Seq. ID No. 4462, Seq. ID No. 4468, Seq. ID No. 4472, Seq. ID No. 4476, Seq. ID No. 4480, Seq. ID No. 4482, Seq. ID No. 4488, Seq. ID No. 4492, Seq. ID No. 4502, Seq. ID No. 4506, Seq. ID No. 4512, Seq. ID No. 4524, Seq. ID No. 4532, Seq. ID No. 4534, Seq. ID No. 4538, Seq. ID No. 4540, Seq. ID No. 4542, Seq. ID No. 4544, Seq. ID No. 4548, Seq. ID No. 4550, Seq. ID No. 4560, Seq. ID No. 4566, Seq. ID No. 4568, Seq. ID No. 4572, Seq. ID No. 4576, Seq. ID No. 4578, Seq. ID No. 4582, Seq. ID No. 4586, Seq. ID No. 4592, Seq. ID No. 4596, Seq. ID No. 4598, Seq. ID No. 4604, Seq. ID No. 4608, Seq. ID No. 4610, Seq. ID No. 4612, Seq. ID No. 4616, Seq. ID No. 4624, Seq. ID No. 4628, Seq. ID No. 4632, Seq. ID No. 4636, Seq. ID No. 4638, Seq. ID No. 4644, Seq. ID No. 4650, Seq. ID No. 4652, Seq. ID No. 4654, Seq. ID No. 4658, Seq. ID No. 4662, Seq. ID No. 4664, Seq. ID No. 4670, Seq. ID No. 4672, Seq. ID No. 4674, Seq. ID No. 4680, Seq. ID No. 4686, Seq. ID No. 4694, Seq. ID No. 4698, Seq. ID No. 4704, Seq. ID No. 4706, Seq. ID No. 4714, Seq. ID No. 4718, Seq. ID No. 4720, Seq. ID No. 4726, Seq. ID No. 4730, Seq. ID No. 4732, Seq. ID No. 4734, Seq. ID No. 4740, Seq. ID No. 4744, Seq. ID No. 4746, Seq. ID No. 4748, Seq. ID No. 4750, Seq. ID No. 4752, Seq. ID No. 4758, Seq. ID No. 4766, Seq. ID No. 4770, Seq. ID No. 4778, Seq. ID No. 4780, Seq. ID No. 4782, Seq. ID No. 4788, Seq. ID No. 4790, Seq. ID No. 4792, Seq. ID No. 4798, Seq. ID No. 4804, Seq. ID No. 4808, Seq. ID No. 4810, Seq. ID No. 4812, Seq. ID No. 4814, Seq. ID No. 4816, Seq. ID No. 4822, Seq. ID No. 4824, Seq. ID No. 4826, Seq. ID No. 4828, Seq. ID No. 4834, Seq. ID No. 4836, Seq. ID No. 4838, Seq. ID No. 4844, Seq. ID No. 4846, Seq. ID No. 4848, Seq. ID No. 4850, Seq. ID No. 4860, Seq. ID No. 4862, Seq. ID No. 4866, Seq. ID No. 4868, Seq. ID No. 4876, Seq. ID No. 4878, Seq. ID No. 4880, Seq. ID No. 4882, Seq. ID No. 4884, Seq. ID No. 4886, Seq. ID No. 4888, Seq. ID No. 4894, Seq. ID No. 4900, Seq. ID No. 4902, Seq. ID No. 4904, Seq. ID No. 4906, Seq. ID No. 4908, Seq. ID No. 4912, Seq. ID No. 4916, Seq. ID No. 4918, Seq. ID No. 4920, Seq. ID No. 4922, Seq. ID No. 4928, Seq. ID No. 4932, Seq. ID No. 4936, Seq. ID No. 4940, Seq. ID No. 4942, Seq. ID No. 4944, Seq. ID No. 4946, Seq. ID No. 4948, Seq. ID No. 4954, Seq. ID No. 4958, Seq. ID No. 4960, Seq. ID No. 4964, Seq. ID No. 4966, Seq. ID No. 4970, Seq. ID No. 4972, Seq. ID No. 4974, Seq. ID No. 4980, Seq. ID No. 4986, Seq. ID No. 4990, Seq. ID No. 4992, Seq. ID No. 4996, Seq. ID No. 4998, Seq. ID No. 5002, Seq. ID No. 5008, Seq. ID No. 5010, Seq. ID No. 5018, Seq. ID No. 5022, Seq. ID No. 5028, Seq. ID No. 5030, Seq. ID No. 5040, Seq. ID No. 5048, Seq. ID No. 5052, Seq. ID No. 5054, Seq. ID No. 5056, Seq. ID No. 5060, Seq. ID No. 5062, Seq. ID No. 5070, Seq. ID No. 5078, Seq. ID No. 5080, Seq. ID No. 5082, Seq. ID No. 5084, Seq. ID No. 5088, Seq. ID No. 5092, Seq. ID No. 5094, Seq. ID No. 5098, Seq. ID No. 5104, Seq. ID No. 5106, Seq. ID No. 5110, Seq. ID No. 5112, Seq. ID No. 5114, Seq. ID No. 5116, Seq. ID No. 5118, Seq. ID No. 5128, Seq. ID No. 5142, Seq. ID No. 5146, Seq. ID No. 5150, Seq. ID No. 5154, Seq. ID No. 5158, Seq. ID No. 5166, Seq. ID No. 5170, Seq. ID No. 5172, Seq. ID No. 5178, Seq. ID No. 5184, Seq. ID No. 5186, Seq. ID No. 5188, Seq. ID No. 5194, Seq. ID No. 5196, Seq. ID No. 5202, Seq. ID No. 5204, Seq. ID No. 5206, Seq. ID No. 5210, Seq. ID No. 5212, Seq. ID No. 5216, Seq. ID No. 5220, Seq. ID No. 5228, Seq. ID No. 5232, Seq. ID No. 5236, Seq. ID No. 5238, Seq. ID No. 5240, Seq. ID No. 5244, Seq. ID No. 5246, Seq. ID No. 5248, Seq. ID No. 5254, Seq. ID No. 5256, Seq. ID No. 5258, Seq. ID No. 5262, Seq. ID No. 5264, Seq. ID No. 5272, Seq. ID No. 5276, Seq. ID No. 5284, Seq. ID No. 5292, Seq. ID No. 5300, Seq. ID No. 5306, Seq. ID No. 5310, Seq. ID No. 5312, Seq. ID No. 5314, Seq. ID No. 5320, Seq. ID No. 5324, Seq. ID No. 5326, Seq. ID No. 5336, Seq. ID No. 5338, Seq. ID No. 5342, Seq. ID No. 5346, Seq. ID No. 5352, Seq. ID No. 5356, Seq. ID No. 5364, Seq. ID No. 5366, Seq. ID No. 5368, Seq. ID No. 5372, Seq. ID No. 5374, Seq. ID No. 5382, Seq. ID No. 5384, Seq. ID No. 5388, Seq. ID No. 5390, Seq. ID No. 5392, Seq. ID No. 5394, Seq. ID No. 5396, Seq. ID No. 5398, Seq. ID No. 5400, Seq. ID No. 5402, Seq. ID No. 5404, Seq. ID No. 5410, Seq. ID No. 5412, Seq. ID No. 5416, Seq. ID No. 5418, Seq. ID No. 5420, Seq. ID No. 5422, Seq. ID No. 5424, Seq. ID No. 5428, Seq. ID No. 5432, Seq. ID No. 5434, Seq. ID No. 5440, Seq. ID No. 5442, Seq. ID No. 5444, Seq. ID No. 5448, Seq. ID No. 5450, Seq. ID No. 5452, Seq. ID No. 5454, Seq. ID No. 5456, Seq. ID No. 5458, Seq. ID No. 5474, Seq. ID No. 5478, Seq. ID No. 5484, Seq. ID No. 5488, Seq. ID No. 5492, Seq. ID No. 5496, Seq. ID No. 5500, Seq. ID No. 5504, Seq. ID No. 5508, Seq. ID No. 5510, Seq. ID No. 5514, Seq. ID No. 5528, Seq. ID No. 5532, Seq. ID No. 5538, Seq. ID No. 5540, Seq. ID No. 5542, Seq. ID No. 5548, Seq. ID No. 5554, Seq. ID No. 5558, Seq. ID No. 5560, Seq. ID No. 5564, Seq. ID No. 5568, Seq. ID No. 5572, Seq. ID No. 5576, Seq. ID No. 5582, Seq. ID No. 5586, Seq. ID No. 5592, Seq. ID No. 5600, Seq. ID No. 5602, Seq. ID No. 5606, Seq. ID No. 5616, Seq. ID No. 5622, Seq. ID No. 5630, Seq. ID No. 5632, Seq. ID No. 5638, Seq. ID No. 5648, Seq. ID No. 5652, Seq. ID No. 5656, Seq. ID No. 5658, Seq. ID No. 5662, Seq. ID No. 5666, Seq. ID No. 5670, Seq. ID No. 5672, Seq. ID No. 5674, Seq. ID No. 5680, Seq. ID No. 5686, Seq. ID No. 5694, Seq. ID No. 5698, Seq. ID No. 5700, Seq. ID No. 5702, Seq. ID No. 5708, Seq. ID No. 5716, Seq. ID No. 5718, Seq. ID No. 5724, Seq. ID No. 5728, Seq. ID No. 5736, Seq. ID No. 5740, Seq. ID No. 5750, Seq. ID No. 5752, Seq. ID No. 5756, Seq. ID No. 5762, Seq. ID No. 5772, Seq. ID No. 5776, Seq. ID No. 5778, Seq. ID No. 5780, Seq. ID No. 5784, Seq. ID No. 5790, Seq. ID No. 5796, Seq. ID No. 5802, Seq. ID No. 5804, Seq. ID No. 5810, Seq. ID No. 5816, Seq. ID No. 5820, Seq. ID No. 5826, Seq. ID No. 5834, Seq. ID No. 5836, Seq. ID No. 5842, Seq. ID No. 5846, Seq. ID No. 5848, Seq. ID No. 5850, Seq. ID No. 5852, Seq. ID No. 5854, Seq. ID No. 5856, Seq. ID No. 5860, Seq. ID No. 5866, Seq. ID No. 5872, Seq. ID No. 5876, Seq. ID No. 5878, Seq. ID No. 5882, Seq. ID No. 5888, Seq. ID No. 5892, Seq. ID No. 5896, Seq. ID No. 5898, Seq. ID No. 5902, Seq. ID No. 5904, Seq. ID No. 5912, Seq. ID No. 5914, Seq. ID No. 5916, Seq. ID No. 5918, Seq. ID No. 5920, Seq. ID No. 5930, Seq. ID No. 5932, Seq. ID No. 5934, Seq. ID No. 5938, Seq. ID No. 5942, Seq. ID No. 5944, Seq. ID No. 5948, Seq. ID No. 5952, Seq. ID No. 5954, Seq. ID No. 5956, Seq. ID No. 5958, Seq. ID No. 5962, Seq. ID No. 5970, Seq. ID No. 5974, Seq. ID No. 5980, Seq. ID No. 5982, Seq. ID No. 5986, Seq. ID No. 5990, Seq. ID No. 5994, Seq. ID No. 6002, Seq. ID No. 6004, Seq. ID No. 6012, Seq. ID No. 6016, Seq. ID No. 6018, Seq. ID No. 6022, Seq. ID No. 6028, Seq. ID No. 6030, Seq. ID No. 6034, Seq. ID No. 6036, Seq. ID No. 6042, Seq. ID No. 6044, Seq. ID No. 6054, Seq. ID No. 6058, Seq. ID No. 6066, Seq. ID No. 6072, Seq. ID No. 6080, Seq. ID No. 6086, Seq. ID No. 6090, Seq. ID No. 6096, Seq. ID No. 6098, Seq. ID No. 6102, Seq. ID No. 6104, Seq. ID No. 6112, Seq. ID No. 6114, Seq. ID No. 6118, Seq. ID No. 6124, Seq. ID No. 6126, Seq. ID No. 6130, Seq. ID No. 6132, Seq. ID No. 6134, Seq. ID No. 6142, Seq. ID No. 6146, Seq. ID No. 6150, Seq. ID No. 6158, Seq. ID No. 6166, Seq. ID No. 6170, Seq. ID No. 6172, Seq. ID No. 6176, Seq. ID No. 6178, Seq. ID No. 6182, Seq. ID No. 6188, Seq. ID No. 6196, Seq. ID No. 6202, Seq. ID No. 6210, Seq. ID No. 6214, Seq. ID No. 6216, Seq. ID No. 6220, Seq. ID No. 6234, Seq. ID No. 6236, Seq. ID No. 6244, Seq. ID No. 6250, Seq. ID No. 6252, Seq. ID No. 6258, Seq. ID No. 6262, Seq. ID No. 6264, Seq. ID No. 6272, Seq. ID No. 6276, Seq. ID No. 6278, Seq. ID No. 6282, Seq. ID No. 6288, Seq. ID No. 6298, Seq. ID No. 6300, Seq. ID No. 6306, Seq. ID No. 6312, Seq. ID No. 6316, Seq. ID No. 6322, Seq. ID No. 6324, Seq. ID No. 6328, Seq. ID No. 6332, Seq. ID No. 6334, Seq. ID No. 6338, Seq. ID No. 6340, Seq. ID No. 6342, Seq. ID No. 6344, Seq. ID No. 6346, Seq. ID No. 6354, Seq. ID No. 6358, Seq. ID No. 6360, Seq. ID No. 6362, Seq. ID No. 6368, Seq. ID No. 6370, Seq. ID No. 6374, Seq. ID No. 6376, Seq. ID No. 6378, Seq. ID No. 6380, Seq. ID No. 6390, Seq. ID No. 6396, Seq. ID No. 6400, Seq. ID No. 6404, Seq. ID No. 6408, Seq. ID No. 6412, Seq. ID No. 6414, Seq. ID No. 6418, Seq. ID No. 6424, Seq. ID No. 6434, Seq. ID No. 6438, Seq. ID No. 6440, Seq. ID No. 6446, Seq. ID No. 6450, Seq. ID No. 6452, Seq. ID No. 6458, Seq. ID No. 6460, Seq. ID No. 6462, Seq. ID No. 6464, Seq. ID No. 6478, Seq. ID No. 6482, Seq. ID No. 6484, Seq. ID No. 6488, Seq. ID No. 6490, Seq. ID No. 6492, Seq. ID No. 6494, Seq. ID No. 6496, Seq. ID No. 6504, Seq. ID No. 6506, Seq. ID No. 6512, Seq. ID No. 6516, Seq. ID No. 6520, Seq. ID No. 6524, Seq. ID No. 6526, Seq. ID No. 6530, Seq. ID No. 6532, Seq. ID No. 6534, Seq. ID No. 6538, Seq. ID No. 6546, Seq. ID No. 6552, Seq. ID No. 6554, Seq. ID No. 6560, Seq. ID No. 6564, Seq. ID No. 6568, Seq. ID No. 6578, Seq. ID No. 6580, Seq. ID No. 6584, Seq. ID No. 6586, Seq. ID No. 6588, Seq. ID No. 6590, Seq. ID No. 6604, Seq. ID No. 6606, Seq. ID No. 6610, Seq. ID No. 6614, Seq. ID No. 6616, Seq. ID No. 6618, Seq. ID No. 6622, Seq. ID No. 6624, Seq. ID No. 6628, Seq. ID No. 6630, Seq. ID No. 6634, and Seq. ID No. 6640.

53. The Alloiococcus otitidis polypeptide of claim 36 wherein the polypeptide is identified as an Alloiococcus otitidis polypeptide by GeneMark™ ORF finder program, and is selected from one of Seq. ID No. 2, Seq. ID No. 4, Seq. ID No. 12, Seq. ID No. 14, Seq. ID No. 16, Seq. ID No. 18, Seq. ID No. 26, Seq. ID No. 28, Seq. ID No. 30, Seq. ID No. 36, Seq. ID No. 38, Seq. ID No. 40, Seq. ID No. 42, Seq. ID No. 44, Seq. ID No. 46, Seq. ID No. 50, Seq. ID No. 54, Seq. ID No. 58, Seq. ID No. 62, Seq. ID No. 70, Seq. ID No. 72, Seq. ID No. 76, Seq. ID No. 82, Seq. ID No. 84, Seq. ID No. 90, Seq. ID No. 96, Seq. ID No. 102, Seq. ID No. 112, Seq. ID No. 120, Seq. ID No. 126, Seq. ID No. 130, Seq. ID No. 136, Seq. ID No. 138, Seq. ID No. 142, Seq. ID No. 148, Seq. ID No. 152, Seq. ID No. 156, Seq. ID No. 168, Seq. ID No. 172, Seq. ID No. 182, Seq. ID No. 186, Seq. ID No. 188, Seq. ID No. 190, Seq. ID No. 192, Seq. ID No. 196, Seq. ID No. 200, Seq. ID No. 208, Seq. ID No. 214, Seq. ID No. 220, Seq. ID No. 222, Seq. ID No. 226, Seq. ID No. 228, Seq. ID No. 230, Seq. ID No. 234, Seq. ID No. 240, Seq. ID No. 242, Seq. ID No. 244, Seq. ID No. 254, Seq. ID No. 262, Seq. ID No. 264, Seq. ID No. 268, Seq. ID No. 274, Seq. ID No. 276, Seq. ID No. 278, Seq. ID No. 280, Seq. ID No. 292, Seq. ID No. 294, Seq. ID No. 296, Seq. ID No. 300, Seq. ID No. 304, Seq. ID No. 310, Seq. ID No. 312, Seq. ID No. 316, Seq. ID No. 320, Seq. ID No. 324, Seq. ID No. 332, Seq. ID No. 342, Seq. ID No. 346, Seq. ID No. 352, Seq. ID No. 356, Seq. ID No. 362, Seq. ID No. 364, Seq. ID No. 366, Seq. ID No. 376, Seq. ID No. 380, Seq. ID No. 382, Seq. ID No. 384, Seq. ID No. 390, Seq. ID No. 392, Seq. ID No. 396, Seq. ID No. 400, Seq. ID No. 406, Seq. ID No. 410, Seq. ID No. 414, Seq. ID No. 418, Seq. ID No. 422, Seq. ID No. 424, Seq. ID No. 426, Seq. ID No. 428, Seq. ID No. 430, Seq. ID No. 436, Seq. ID No. 438, Seq. ID No. 440, Seq. ID No. 442, Seq. ID No. 444, Seq. ID No. 446, Seq. ID No. 448, Seq. ID No. 450, Seq. ID No. 460, Seq. ID No. 466, Seq. ID No. 486, Seq. ID No. 502, Seq. ID No. 506, Seq. ID No. 512, Seq. ID No. 514, Seq. ID No. 518, Seq. ID No. 520, Seq. ID No. 524, Seq. ID No. 530, Seq. ID No. 534, Seq. ID No. 536, Seq. ID No. 542, Seq. ID No. 544, Seq. ID No. 552, Seq. ID No. 554, Seq. ID No. 560, Seq. ID No. 564, Seq. ID No. 570, Seq. ID No. 576, Seq. ID No. 580, Seq. ID No. 584, Seq. ID No. 592, Seq. ID No. 596, Seq. ID No. 602, Seq. ID No. 606, Seq. ID No. 608, Seq. ID No. 612, Seq. ID No. 614, Seq. ID No. 616, Seq. ID No. 622, Seq. ID No. 628, Seq. ID No. 630, Seq. ID No. 634, Seq. ID No. 636, Seq. ID No. 638, Seq. ID No. 644, Seq. ID No. 650, Seq. ID No. 652, Seq. ID No. 656, Seq. ID No. 658, Seq. ID No. 670, Seq. ID No. 672, Seq. ID No. 676, Seq. ID No. 682, Seq. ID No. 684, Seq. ID No. 686, Seq. ID No. 694, Seq. ID No. 704, Seq. ID No. 706, Seq. ID No. 712, Seq. ID No.;726, Seq. ID No. 732, Seq. ID No. 736, Seq. ID No. 738, Seq. ID No. 742, Seq. ID No. 744, Seq. ID No. 750, Seq. ID No. 754, Seq. ID No. 760, Seq. ID No. 774, Seq. ID No. 782, Seq. ID No. 784, Seq. ID No. 786, Seq. ID No. 790, Seq. ID No. 794, Seq. ID No. 798, Seq. ID No. 804, Seq. ID No. 816, Seq. ID No. 820, Seq. ID No. 822, Seq. ID No. 828, Seq. ID No. 832, Seq. ID No. 834, Seq. ID No. 836, Seq. ID No. 838, Seq. ID No. 842, Seq. ID No. 844, Seq. ID No. 850, Seq. ID No. 852, Seq. ID No. 854, Seq. ID No. 858, Seq. ID No. 866, Seq. ID No. 870, Seq. ID No. 874, Seq. ID No. 878, Seq. ID No. 884, Seq. ID No. 888, Seq. ID No. 892, Seq. ID No. 896, Seq. ID No. 902, Seq. ID No. 908, Seq. ID No. 912, Seq. ID No. 918, Seq. ID No. 922, Seq. ID No. 928, Seq. ID No. 936, Seq. ID No. 940, Seq. ID No. 946, Seq. ID No. 952, Seq. ID No. 954, Seq. ID No. 960, Seq. ID No. 964, Seq. ID No. 968, Seq. ID No. 970, Seq. ID No. 978, Seq. ID No. 990, Seq. ID No. 996, Seq. ID No. 1000, Seq. ID No. 1006, Seq. ID No. 1008, Seq. ID No. 1016, Seq. ID No. 1022, Seq. ID No. 1036, Seq. ID No. 1042, Seq. ID No. 1044, Seq. ID No. 1050, Seq. ID No. 1054, Seq. ID No. 1058, Seq. ID No. 1060, Seq. ID No. 1064, Seq. ID No. 1068, Seq. ID No. 1070, Seq. ID No. 1072, Seq. ID No. 1076, Seq. ID No. 1084, Seq. ID No. 1086, Seq. ID No. 1090, Seq. ID No. 1094, Seq. ID No. 1098, Seq. ID No. 1100, Seq. ID No. 1102, Seq. ID No. 1110, Seq. ID No. 1114, Seq. ID No. 1118, Seq. ID No. 1122, Seq. ID No. 1130, Seq. ID No. 1134, Seq. ID No. 1138, Seq. ID No. 1142, Seq. ID No. 1146, Seq. ID No. 1150, Seq. ID No. 1156, Seq. ID No. 1158, Seq. ID No. 1160, Seq. ID No. 1164, Seq. ID No. 1172, Seq. ID No. 1174, Seq. ID No. 1176, Seq. ID No. 1182, Seq. ID No. 1186, Seq. ID No. 1190, Seq. ID No. 1200, Seq. ID No. 1206, Seq. ID No. 1210, Seq. ID No. 1216, Seq. ID No. 1220, Seq. ID No. 1224, Seq. ID No. 1226, Seq. ID No. 1234, Seq. ID No. 1236, Seq. ID No. 1242, Seq. ID No. 1252, Seq. ID No. 1256, Seq. ID No. 1262, Seq. ID No. 1272, Seq. ID No. 1282, Seq. ID No. 1316, Seq. ID No. 1324, Seq. ID No. 1332, Seq. ID No. 1334, Seq. ID No. 1340, Seq. ID No. 1346, Seq. ID No. 1348, Seq. ID No. 1356, Seq. ID No. 1358, Seq. ID No. 1370, Seq. ID No. 1374, Seq. ID No. 1388, Seq. ID No. 1392, Seq. ID No. 1396, Seq. ID No. 1398, Seq. ID No. 1404, Seq. ID No. 1406, Seq. ID No. 1408, Seq. ID No. 1414, Seq. ID No. 1416, Seq. ID No. 1418, Seq. ID No. 1426, Seq. ID No. 1428, Seq. ID No. 1430, Seq. ID No. 1432, Seq. ID No. 1434, Seq. ID No. 1436, Seq. ID No. 1440, Seq. ID No. 1442, Seq. ID No. 1452, Seq. ID No. 1454, Seq. ID No. 1460, Seq. ID No. 1462, Seq. ID No. 1470, Seq. ID No. 1472, Seq. ID No. 1474, Seq. ID No. 1476, Seq. ID No. 1478, Seq. ID No. 1484, Seq. ID No. 1488, Seq. ID No. 1490, Seq. ID No. 1494, Seq. ID No. 1496, Seq. ID No. 1498, Seq. ID No. 1502, Seq. ID No. 1504, Seq. ID No. 1508, Seq. ID No. 1510, Seq. ID No. 1518, Seq. ID No. 1522, Seq. ID No. 1528, Seq. ID No. 1532, Seq. ID No. 1538, Seq. ID No. 1542, Seq. ID No. 1544, Seq. ID No. 1550, Seq. ID No. 1562, Seq. ID No. 1564, Seq. ID No. 1566, Seq. ID No. 1570, Seq. ID No. 1574, Seq. ID No. 1576, Seq. ID No. 1582, Seq. ID No. 1588, Seq. ID No. 1592, Seq. ID No. 1596, Seq. ID No. 1598, Seq. ID No. 1606, Seq. ID No. 1610, Seq. ID No. 1614, Seq. ID No. 1620, Seq. ID No. 1624, Seq. ID No. 1628, Seq. ID No. 1630, Seq. ID No. 1636, Seq. ID No. 1642, Seq. ID No. 1648, Seq. ID No. 1652, Seq. ID No. 1658, Seq. ID No. 1660, Seq. ID No. 1668, Seq. ID No. 1670, Seq. ID No. 1680, Seq. ID No. 1684, Seq. ID No. 1688, Seq. ID No. 1692, Seq. ID No. 1698, Seq. ID No. 1700, Seq. ID No. 1702, Seq. ID No. 1708, Seq. ID No. 1710, Seq. ID No. 1714, Seq. ID No. 1718, Seq. ID No. 1722, Seq. ID No. 1726, Seq. ID No. 1736, Seq. ID No. 1738, Seq. ID No. 1740, Seq. ID No. 1744, Seq. ID No. 1746, Seq. ID No. 1750, Seq. ID No. 1756, Seq. ID No. 1770, Seq. ID No. 1774, Seq. ID No. 1778, Seq. ID No. 1786, Seq. ID No. 1790, Seq. ID No. 1792, Seq. ID No. 1798, Seq. ID No. 1800, Seq. ID No. 1804, Seq. ID No. 1806, Seq. ID No. 1808, Seq. ID No. 1818, Seq. ID No. 1820, Seq. ID No. 1822, Seq. ID No. 1826, Seq. ID No. 1828, Seq. ID No. 1832, Seq. ID No.-1836, Seq. ID No. 1842, Seq. ID No. 1846, Seq. ID No. 1848, Seq. ID No. 1850, Seq. ID No. 1852, Seq. ID No. 1856, Seq. ID No. 1860, Seq. ID No. 1862, Seq. ID No. 1866, Seq. ID No. 1868, Seq. ID No. 1872, Seq. ID No. 1874, Seq. ID No. 1878, Seq. ID No. 1880, Seq. ID No. 1888, Seq. ID No. 1890, Seq. ID No. 1896, Seq. ID No. 1898, Seq. ID No. 1900, Seq. ID No. 1902, Seq. ID No. 1906, Seq. ID No. 1910, Seq. ID No. 1918, Seq. ID No. 1922, Seq. ID No. 1926, Seq. ID No. 1932, Seq. ID No. 1934, Seq. ID No. 1938, Seq. ID No. 1940, Seq. ID No. 1946, Seq. ID No. 1948, Seq. ID No. 1952, Seq. ID No. 1956, Seq. ID No. 1960, Seq. ID No. 1962, Seq. ID No. 1966, Seq. ID No. 1968, Seq. ID No. 1970, Seq. ID No. 1974, Seq. ID No. 1978, Seq. ID No. 1980, Seq. ID No. 1984, Seq. ID No. 1990, Seq. ID No. 1992, Seq. ID No. 1998, Seq. ID No. 2002, Seq. ID No. 2004, Seq. ID No. 2012, Seq. ID No. 2022, Seq. ID No. 2024, Seq. ID No. 2030, Seq:. ID No. 2034, Seq. ID No. 2038, Seq. ID No. 2040, Seq. ID No. 2046, Seq. ID No. 2048, Seq. ID No. 2052, Seq. ID No. 2058, Seq. ID No. 2062, Seq. ID No. 2068, Seq. ID No. 2070, Seq. ID No. 2072, Seq. ID No. 2074, Seq. ID No. 2078, Seq. ID No. 2090, Seq. ID No. 2094, Seq. ID No. 2096, Seq. ID No. 2100, Seq. ID No. 2102, Seq. ID No. 2114, Seq. ID No. 2118, Seq. ID No. 2124, Seq. ID No. 2136, Seq. ID No. 2138, Seq. ID No. 2140, Seq. ID No. 2144, Seq. ID No. 2148, Seq. ID No. 2154, Seq. ID No. 2160, Seq. ID No. 2164, Seq. ID No. 2168, Seq. ID No. 2176, Seq. ID No. 2182, Seq. ID No. 2186, Seq. ID No. 2190, Seq. ID No. 2194, Seq. ID No. 2196, Seq. ID No. 2198, Seq. ID No. 2206, Seq. ID No. 2218, Seq. ID No. 2220, Seq. ID No. 2224, Seq. ID No. 2226, Seq. ID No. 2230, Seq. ID No. 2236, Seq. ID No. 2240, Seq. ID No. 2244, Seq. ID No. 2246, Seq. ID No. 2248, Seq. ID No. 2254, Seq. ID No. 2256, Seq. ID No. 2258, Seq. ID No. 2260, Seq. ID No. 2262, Seq. ID No. 2266, Seq. ID No. 2270, Seq. ID No. 2274, Seq. ID No. 2286, Seq. ID No. 2298, Seq. ID No. 2300, Seq. ID No. 2302, Seq. ID No. 2314, Seq. ID No. 2328, Seq. ID No. 2332, Seq. ID No. 2336, Seq. ID No. 2338, Seq. ID No. 2342, Seq. ID No. 2344, Seq. ID No. 2346, Seq. ID No. 2350, Seq. ID No. 2352, Seq. ID No. 2358, Seq. ID No. 2360, Seq. ID No. 2362, Seq. ID No. 2366, Seq. ID No. 2370, Seq. ID No. 2374, Seq. ID No. 2378, Seq. ID No. 2384, Seq. ID No. 2398, Seq. ID No. 2402, Seq. ID No. 2404, Seq. ID No. 2410, Seq. ID No. 2412, Seq. ID No. 2418, Seq. ID No. 2422, Seq. ID No. 2424, Seq. ID No. 2426, Seq. ID No. 2430, Seq. ID No. 2436, Seq. ID No. 2438, Seq. ID No. 2440, Seq. ID No. 2442, Seq. ID No. 2446, Seq. ID No. 2450, Seq. ID No. 2452, Seq. ID No. 2454, Seq. ID No. 2462, Seq. ID No. 2466, Seq. ID No. 2468, Seq. ID No. 2472, Seq. ID No. 2474, Seq. ID No. 2478, Seq. ID No. 2480, Seq. ID No. 2482, Seq. ID No. 2486, Seq. ID No. 2488, Seq. ID No. 2496, Seq. ID No. 2506, Seq. ID No. 2508, Seq. ID No. 2510, Seq. ID No. 2520, Seq. ID No. 2526, Seq. ID No. 2528, Seq. ID No. 2530, Seq. ID No. 2536, Seq. ID No. 2538, Seq. ID No. 2540, Seq. ID No. 2548, Seq. ID No. 2552, Seq. ID No. 2564, Seq. ID No. 2566, Seq. ID No. 2574, S6q. ID No. 2578, Seq. ID No. 2580, Seq. ID No. 2586, Seq. ID No. 2594, Seq. ID No. 2596, Seq. ID No. 2600, Seq. ID No. 2608, Seq. ID No. 2610, Seq. ID No. 2614, Seq. ID No. 2616, Seq. ID No. 2620, Seq. ID No. 2624, Seq. ID No. 2626, Seq. ID No. 2632, Seq. ID No. 2634, Seq. ID No. 2640, Seq. ID No. 2642, Seq. ID No. 2644, Seq. ID No. 2648, Seq. ID No. 2652, Seq. ID No. 2656, Seq. ID No. 2658, Seq. ID No. 2662, Seq. ID No. 2666, Seq. ID No. 2670, Seq. ID No. 2672, Seq. ID No. 2674, Seq. ID No. 2682, Seq. ID No. 2690, Seq. ID No. 2694, Seq. ID No. 2700, Seq. ID No. 2704, Seq. ID No. 2710, Seq. ID No. 2712, Seq. ID No. 2714, Seq. ID No. 2720, Seq. ID No. 2722, Seq. ID No. 2728, Seq. ID No. 2738, Seq. ID No. 2742, Seq. ID No. 2746, Seq. ID No. 2750, Seq. ID No. 2754, Seq. ID No. 2758, Seq. ID No. 2762, Seq. ID No. 2766, Seq. ID No. 2768, Seq. ID No. 2770, Seq. ID No. 2774, Seq. ID No. 2776, Seq. ID No. 2778, Seq. ID No. 2788, Seq. ID No. 2790, Seq. ID No. 2792, Seq. ID No. 2794, Seq. ID No. 2796, Seq. ID No. 2800, Seq. ID No. 2804, Seq. ID No. 2816, Seq. ID No. 2818, Seq. ID No. 2820, Seq. ID No. 2826, Seq. ID No. 2844, Seq. ID No. 2848, Seq. ID No. 2850, Seq. ID No. 2852, Seq. ID No. 2858, Seq. ID No. 2860, Seq. ID No. 2864, Seq. ID No. 2868, Seq. ID No. 2870, Seq. ID No. 2872, Seq. ID No. 2878, Seq. ID No. 2880, Seq. ID No. 2890, Seq. ID No. 2892, Seq. ID No. 2898, Seq. ID No. 2902, Seq. ID No. 2904, Seq. ID No. 2908, Seq. ID No. 2910, Seq. ID No. 2914, Seq. ID No. 2916, Seq. ID No. 2920, Seq. ID No. 2922, Seq. ID No. 2924, Seq. ID No. 2926, Seq. ID No. 2930, Seq. ID No. 2936, Seq. ID No. 2944, Seq. ID No. 2952, Seq. ID No. 2956, Seq. ID No. 2964, Seq. ID No. 2966, Seq. ID No. 2972, Seq. ID No. 2974, Seq. ID No. 2976, Seq. ID No. 2980, Seq. ID No. 2982, Seq. ID No. 2986, Seq. ID No. 2990, Seq. ID No. 2994, Seq. ID No. 3000, Seq. ID No. 3002, Seq. ID No. 3004, Seq. ID No. 3018, Seq. ID No. 3028, Seq. ID No. 3034, Seq. ID No. 3036, Seq. ID No. 3040, Seq. ID No. 3042, Seq. ID No. 3044, Seq. ID No. 3046, Seq. ID No. 3048, Seq. ID No. 3056, Seq. ID No. 3058, Seq. ID No. 3062, Seq. ID No. 3066, Seq. ID No. 3070, Seq. ID No. 3080, Seq. ID No. 3090, Seq. ID No. 3092, Seq. ID No. 3094, Seq. ID No. 3096, Seq. ID No. 3104, Seq. ID No. 3106, Seq. ID No. 3110, Seq. ID No. 3114, Seq. ID No. 3126, Seq. ID No. 3128, Seq. ID No. 3136, Seq. ID No. 3138, Seq. ID No. 3142, Seq. ID No. 3144, Seq. ID No. 3148, Seq. ID No. 3156, Seq. ID No. 3158, Seq. ID No. 3160, Seq. ID No. 3162, Seq. ID No. 3166, Seq. ID No. 3170, Seq. ID No. 3176, Seq. ID No. 3180, Seq. ID No. 3184, Seq. ID No. 3186, Seq. ID No. 3190, Seq. ID No. 3192, Seq. ID No. 3196, Seq. ID No. 3200, Seq. ID No. 3206, Seq. ID No. 3212, Seq. ID No. 3218, Seq. ID No. 3222, Seq. ID No. 3226, Seq. ID No. 3230, Seq. ID No. 3232, Seq. ID No. 3238, Seq. ID No. 3240, Seq. ID No. 3248, Seq. ID No. 3252, Seq. ID No. 3254, Seq. ID No. 3256, Seq. ID No. 3260, Seq. ID No. 3262, Seq. ID No. 3268, Seq. ID No. 3274, Seq. ID No. 3278, Seq. ID No. 3280, Seq. ID No. 3286, Seq. ID No. 3288, Seq. ID No. 3290, Seq. ID No. 3294, Seq. ID No. 3296, Seq. ID No. 3300, Seq. ID No. 3302, Seq. ID No. 3306, Seq. ID No. 3310, Seq. ID No. 3316, Seq. ID No. 3320, Seq. ID No. 3322, Seq. ID No. 3328, Seq. ID No. 3334, Seq. ID No. 3338, Seq. ID No. 3344, Seq. ID No. 3354, Seq. ID No. 3360, Seq. ID No. 3362, Seq. ID No. 3366, Seq. ID No. 3374, Seq. ID No. 3382, Seq. ID No. 3386, Seq. ID No. 3394, Seq. ID No. 3402, Seq. ID No. 3408, Seq. ID No. 3412, Seq. ID No. 3416, Seq. ID No. 3418, Seq. ID No. 3424, Seq. ID No. 3430, Seq. ID No. 3438, Seq. ID No. 3440, Seq. ID No. 3444, Seq. ID No. 3460, Seq. ID No. 3462, Seq. ID No. 3466, Seq. ID No. 3470, Seq. ID No. 3472, Seq. ID No. 3474, Seq. ID No. 3476, Seq. ID No. 3478, Seq. ID No. 3484, Seq. ID No. 3488, Seq. ID No. 3496, Seq. ID No. 3498, Seq. ID No. 3506, Seq. ID No. 3508, Seq. ID No. 3510, Seq. ID No. 3512, Seq. ID No. 3516, Seq. ID No. 3522, Seq. ID No. 3524, Seq. ID No. 3530, Seq. ID No. 3536, Seq. ID No. 3542, Seq. ID No. 3552, Seq. ID No. 3560, Seq. ID No. 3564, Seq. ID No. 3568, Seq. ID No. 3576, Seq. ID No. 3578, Seq. ID No. 3584, Seq. ID No. 3586, Seq. ID No. 3590, Seq. ID No. 3592, Seq. ID No. 3600, Seq. ID No. 3602, Seq. ID No. 3608, Seq. ID No. 3610, Seq. ID No. 3612, Seq. ID No. 3616, Seq. ID No. 3620, Seq. ID No. 3630, Seq. ID No. 3632, Seq. ID No. 3634, Seq. ID No. 3638, Seq. ID No. 3642, Seq. ID No. 3644, Seq. ID No. 3646, Seq. ID No. 3652, Seq. ID No. 3654, Seq. ID No. 3656, Seq. ID No. 3662, Seq. ID No. 3666, Seq. ID No. 3668, Seq. ID No. 3670, Seq. ID No. 3676, Seq. ID No. 3682, Seq. ID No. 3690, Seq. ID No. 3696, Seq. ID No. 3698, Seq. ID No. 3706, Seq. ID No. 3712, Seq. ID No. 3720, Seq. ID No. 3726, Seq. ID No. 3730, Seq. ID No. 3732, Seq. ID No. 3736, Seq. ID No. 3740, Seq. ID No. 3742, Seq. ID No. 3744, Seq. ID No. 3750, Seq. ID No. 3760, Seq. ID No. 3770, Seq. ID No. 3774, Seq. ID No. 3778, Seq. ID No. 3782, Seq. ID No. 3788, Seq. ID No. 3796, Seq. ID No. 3802, Seq. ID No. 3806, Seq. ID No. 3810, Seq. ID No. 3814, Seq. ID No. 3820, Seq. ID No. 3822, Seq. ID No. 3826, Seq. ID No. 3828, Seq. ID No. 3830, Seq. ID No. 3832, Seq. ID No. 3836, Seq. ID No. 3842, Seq. ID No. 3846, Seq. ID No. 3856, Seq. ID No. 3858, Seq. ID No. 3864, Seq. ID No. 3868, Seq. ID No. 3870, Seq. ID No. 3876, Seq. ID No. 3882, Seq. ID No. 3884, Seq. ID No. 3886, Seq. ID No. 3888, Seq. ID No. 3898, Seq. ID No. 3902, Seq. ID No. 3906, Seq. ID No. 3910, Seq. ID No. 3914, Seq. ID No. 3916, Seq. ID No. 3918, Seq. ID No. 3920, Seq. ID No. 3922, Seq. ID No. 3930, Seq. ID No. 3932, Seq. ID No. 3936, Seq. ID No. 3942, Seq. ID No. 3944, Seq. ID No. 3946, Seq. ID No. 3948, Seq. ID No. 3952, Seq. ID No. 3954, Seq. ID No. 3958, Seq. ID No. 3972, Seq. ID No. 3978, Seq. ID No. 3982, Seq. ID No. 3986, Seq. ID No. 3988, Seq. ID No. 3990, Seq. ID No. 3994, Seq. ID No. 4002, Seq. ID No. 4006, Seq. ID No. 4012, Seq. ID No. 4016, Seq. ID No. 4018, Seq. ID No. 4020, Seq. ID No. 4024, Seq. ID No. 4030, Seq. ID No. 4032, Seq. ID No. 4034, Seq. ID No. 4038, Seq. ID No. 4040, Seq. ID No. 4050, Seq. ID No. 4052, Seq. ID No. 4058, Seq. ID No. 4060, Seq. ID No. 4066, Seq. ID No. 4070, Seq. ID No. 4076, Seq. ID No. 4080, Seq. ID No. 4086, Seq. ID No. 4090, Seq. ID No. 4096, Seq. ID No. 4098, Seq. ID No. 4100, Seq. ID No. 4106, Seq. ID No. 4112, Seq. ID No. 4116, Seq. ID No. 4122, Seq. ID No. 4124, Seq. ID No. 4128, Seq. ID No. 4130, Seq. ID No. 4132, Seq. ID No. 4138, Seq. ID No. 4142, Seq. ID No. 4148, Seq. ID No. 4158, Seq. ID No. 4160, Seq. ID No. 4164, Seq. ID No. 4166, Seq. ID No. 4170, Seq. ID No. 4180, Seq. ID No. 4184, Seq. ID No. 4188, Seq. ID No. 4194, Seq. ID No. 4196, Seq. ID No. 4198, Seq. ID No. 4200, Seq. ID No. 4202, Seq. ID No. 4206, Seq. ID No. 4208, Seq. ID No. 4214, Seq. ID No. 4220, Seq. ID No. 4236, Seq. ID No. 4238, Seq. ID No. 4240, Seq. ID No. 4244, Seq. ID No. 4246, Seq. ID No. 4256, Seq. ID No. 4260, Seq. ID No. 4268, Seq. ID No. 4272, Seq. ID No. 4278, Seq. ID No. 4280, Seq. ID No. 4282, Seq. ID No. 4284, Seq. ID No. 4290, Seq. ID No. 4294, Seq. ID No. 4300, Seq. ID No. 4302, Seq. ID No. 4304, Seq. ID No. 4306, Seq. ID No. 4308, Seq. ID No. 4310, Seq. ID No. 4314, Seq. ID No. 4316, Seq. ID No. 4324, Seq. ID No. 4326, Seq. ID No. 4328, Seq. ID No. 4332, Seq. ID No. 4334, Seq. ID No. 4338, Seq. ID No. 4342, Seq. ID No. 4346, Seq. ID No. 4350, Seq. ID No. 4356, Seq. ID No. 4358, Seq. ID No. 4366, Seq. ID No. 4368, Seq. ID No. 4372, Seq. ID No. 4376, Seq. ID No. 4378, Seq. ID No. 4380, Seq. ID No. 4384, Seq. ID No. 4388, Seq. ID No. 4394, Seq. ID No. 4398, Seq. ID No. 4402, Seq. ID No. 4410, Seq. ID No. 4414, Seq. ID No. 4422, Seq. ID No. 4434, Seq. ID No. 4436, Seq. ID No. 4446, Seq. ID No. 4450, Seq. ID No. 4458, Seq. ID No. 4462, Seq. ID No. 4464, Seq. ID No. 4472, Seq. ID No. 4476, Seq. ID No. 4478, Seq. ID No. 4482, Seq. ID No. 4488, Seq. ID No. 4492, Seq. ID No. 4500, Seq. ID No. 4502, Seq. ID No. 4504, Seq. ID No. 4510, Seq. ID No. 4518, Seq. ID No. 4532, Seq. ID No. 4534, Seq. ID No. 4536, Seq. ID No. 4540, Seq. ID No. 4542, Seq. ID No. 4546, Seq. ID No. 4550, Seq. ID No. 4558, Seq. ID No. 4564, Seq. ID No. 4568, Seq. ID No. 4570, Seq. ID No. 4576, Seq. ID No. 4578, Seq. ID No. 4580, Seq. ID No. 4584, Seq. ID No. 4592, Seq. ID No. 4594, Seq. ID No. 4598, Seq. ID No. 4602, Seq. ID No. 4606, Seq. ID No. 4610, Seq. ID No. 4612, Seq. ID No. 4614, Seq. ID No. 4624, Seq. ID No. 4626, Seq. ID No. 4630, Seq. ID No. 4634, Seq. ID No. 4638, Seq. ID No. 4642, Seq. ID No. 4646, Seq. ID No. 4652, Seq. ID No. 4654, Seq. ID No. 4656, Seq. ID No. 4662, Seq. ID No. 4664, Seq. ID No. 4670, Seq. ID No. 4672, Seq. ID No. 4674, Seq. ID No. 4676, Seq. ID No. 4686, Seq. ID No. 4690, Seq. ID No. 4698, Seq. ID No. 4704, Seq. ID No. 4706, Seq. ID No. 4714, Seq. ID No. 4718, Seq. ID No. 4720, Seq. ID No. 4724, Seq. ID No. 4730, Seq. ID No. 4732, Seq. ID No. 4734, Seq. ID No. 4740, Seq. ID No. 4744, Seq. ID No. 4746, Seq. ID No. 4748, Seq. ID No. 4750, Seq. ID No. 4752, Seq. ID No. 4754, Seq. ID No. 4762, Seq. ID No. 4768, Seq. ID No. 4772, Seq. ID No. 4780, Seq. ID No. 4782, Seq. ID No. 4784, Seq. ID No. 4786, Seq. ID No. 4790, Seq. ID No. 4792, Seq. ID No. 4794, Seq. ID No. 4800, Seq. ID No. 4808, Seq. ID No. 4810, Seq. ID No. 4812, Seq. ID No. 4814, Seq. ID No. 4816, Seq. ID No. 4822, Seq. ID No. 4826, Seq. ID No. 4828, Seq. ID No. 4830, Seq. ID No. 4838, Seq. ID No. 4840, Seq. ID No. 4846, Seq. ID No. 4848, Seq. ID No. 4850, Seq. ID No. 4858, Seq. ID No. 4862, Seq. ID No. 4866, Seq. ID No. 4868, Seq. ID No. 4876, Seq. ID No. 4880, Seq. ID No. 4882, Seq. ID No. 4884, Seq. ID No. 4886, Seq. ID No. 4888, Seq. ID No. 4894, Seq. ID No. 4900, Seq. ID No. 4902, Seq. ID No. 4904, Seq. ID No. 4906, Seq. ID No. 4908, Seq. ID No. 4910, Seq. ID No. 4916, Seq. ID No. 4918, Seq. ID No. 4920, Seq. ID No. 4922, Seq. ID No. 4926, Seq. ID No. 4930, Seq. ID No. 4934, Seq. ID No. 4938, Seq. ID No. 4942, Seq. ID No. 4944, Seq. ID No. 4946, Seq. ID No. 4948, Seq. ID No. 4954, Seq. ID No. 4956, Seq. ID No. 4960, Seq. ID No. 4962, Seq. ID No. 4966, Seq. ID No. 4968, Seq. ID No. 4972, Seq. ID No. 4974, Seq. ID No. 4978, Seq. ID No. 4986, Seq. ID No. 4990, Seq. ID No. 4992, Seq. ID No. 4996, Seq. ID No. 4998, Seq. ID No. 5006, Seq. ID No. 5010, Seq. ID No. 5016, Seq. ID No. 5020, Seq. ID No. 5026, Seq. ID No. 5030, Seq. ID No. 5038, Seq. ID No. 5046, Seq. ID No. 5050, Seq. ID No. 5054, Seq. ID No. 5056, Seq. ID No. 5060, Seq. ID No. 5062, Seq. ID No. 5066, Seq. ID No. 5072, Seq. ID No. 5074, Seq. ID No. 5080, Seq. ID No. 5082, Seq. ID No. 5084, Seq. ID No. 5088, Seq. ID No. 5090, Seq. ID No. 5094, Seq. ID No. 5096, Seq. ID No. 5104, Seq. ID No. 5106, Seq. ID No. 5108, Seq. ID No. 5112, Seq. ID No. 5114, Seq. ID No. 5116, Seq. ID No. 5118, Seq. ID No. 5120, Seq. ID No. 5142, Seq. ID No. 5144, Seq. ID No. 5148, Seq. ID No. 5154, Seq. ID No. 5156, Seq. ID No. 5164, Seq. ID No. 5170, Seq. ID No. 5172, Seq. ID No. 5174, Seq. ID No. 5180, Seq. ID No. 5186, Seq. ID No. 5188, Seq. ID No. 5194, Seq. ID No. 5196, Seq. ID No. 5202, Seq. ID No. 5204, Seq. ID No. 5206, Seq. ID No. 5210, Seq. ID No. 5212, Seq. ID No. 5214, Seq. ID No. 5218, Seq. ID No. 5226, Seq. ID No. 5232, Seq. ID No. 5234, Seq. ID No. 5238, Seq. ID No. 5240, Seq. ID No. 5246, Seq. ID No. 5248, Seq. ID No. 5250, Seq. ID No. 5256, Seq. ID No. 5258, Seq. ID No. 5260, Seq. ID No. 5264, Seq. ID No. 5270, Seq. ID No. 5274, Seq. ID No. 5284, Seq. ID No. 5290, Seq. ID No. 5294, Seq. ID No. 5308, Seq. ID No. 5312, Seq. ID No. 5314, Seq. ID No. 5316, Seq. ID No. 5324, Seq. ID No. 5326, Seq. ID No. 5336, Seq. ID No. 5338, Seq. ID No. 5340, Seq. ID No. 5346, Seq. ID No. 5348, Seq. ID No. 5350, Seq. ID No. 5354, Seq. ID No. 5362, Seq. ID No. 5366, Seq. ID No. 5368, Seq. ID No. 5370, Seq. ID No. 5374, Seq. ID No. 5376, Seq. ID No. 5388, Seq. ID No. 5390, Seq. ID No. 5392, Seq. ID No. 5394, Seq. ID No. 5396, Seq. ID No. 5398, Seq. ID No. 5400, Seq. ID No. 5402, Seq. ID No. 5404, Seq. ID No. 5406, Seq. ID No. 5412, Seq. ID No. 5416, Seq. ID No. 5418, Seq. ID No. 5420, Seq. ID No. 5422, Seq. ID No. 5424, Seq. ID No. 5430, Seq. ID No. 5434, Seq. ID No. 5442, Seq. ID No. 5444, Seq. ID No. 5446, Seq. ID No. 5450, Seq. ID No. 5452, Seq. ID No. 5454, Seq. ID No. 5456, Seq. ID No. 5458, Seq. ID No. 5470, Seq. ID No. 5476, Seq. ID No. 5484, Seq. ID No. 5486, Seq. ID No. 5490, Seq. ID No. 5494, Seq. ID No. 5500, Seq. ID No. 5502, Seq. ID No. 5506, Seq. ID No. 5510, Seq. ID No. 5512, Seq. ID No. 5524, Seq. ID No. 5530, Seq. ID No. 5536, Seq. ID No. 5540, Seq. ID No. 5542, Seq. ID No. 5548, Seq. ID No. 5552, Seq. ID No. 5556, Seq. ID No. 5560, Seq. ID No. 5562, Seq. ID No. 5566, Seq. ID No. 5572, Seq. ID No. 5574, Seq. ID No. 5580, Seq. ID No. 5584, Seq. ID No. 5590, Seq. ID No. 5600, Seq. ID No. 5602, Seq. ID No. 5604, Seq. ID No. 5614, Seq. ID No. 5622, Seq. ID No. 5628, Seq. ID No. 5632, Seq. ID No. 5636, Seq. ID No. 5646, Seq. ID No. 5652, Seq. ID No. 5654, Seq. ID No. 5658, Seq. ID No. 5662, Seq. ID No. 5664, Seq. ID No. 5666, Seq. ID No. 5670, Seq. ID No. 5672, Seq. ID No. 5674, Seq. ID No. 5676, Seq. ID No. 5682, Seq. ID No. 5694, Seq. ID No. 5696, Seq. ID No. 5700, Seq. ID No. 5702, Seq. ID No. 5708, Seq. ID No. 5714, Seq. ID No. 5718, Seq. ID No. 5724, Seq. ID No. 5726, Seq. ID No. 5732, Seq. ID No. 5738, Seq. ID No. 5748, Seq. ID No. 5752, Seq. ID No. 5756, Seq. ID No. 5760, Seq. ID No. 5772, Seq. ID No. 5774, Seq. ID No. 5778, Seq. ID No. 5780, Seq. ID No. 5782, Seq. ID No. 5786, Seq. ID No. 5794, Seq. ID No. 5800, Seq. ID No. 5806, Seq. ID No. 5812, Seq. ID No. 5816, Seq. ID No. 5818, Seq. ID No. 5824, Seq. ID No. 5832, Seq. ID No. 5836, Seq. ID No. 5840, Seq. ID No. 5844, Seq. ID No. 5848, Seq. ID No. 5850, Seq. ID No. 5852, Seq. ID No. 5854, Seq. ID No. 5856, Seq. ID No. 5858, Seq. ID No. 5862, Seq. ID No. 5868, Seq. ID No. 5876, Seq. ID No. 5878, Seq. ID No. 5882, Seq. ID No. 5890, Seq. ID No. 5896, Seq. ID No. 5898, Seq. ID No. 5902, Seq. ID No. 5904, Seq. ID No. 5908, Seq. ID No. 5914, Seq. ID No. 5916, Seq. ID No. 5918, Seq. ID No. 5920, Seq. ID No. 5926, Seq. ID No. 5932, Seq. ID No. 5934, Seq. ID No. 5936, Seq. ID No. 5942, Seq. ID No. 5944, Seq. ID No. 5946, Seq. ID No. 5950, Seq. ID No. 5956, Seq. ID No. 5958, Seq. ID No. 5960, Seq. ID No. 5968, Seq. ID No. 5972, Seq. ID No. 5976, Seq. ID No. 5978, Seq. ID No. 5982, Seq. ID No. 5984, Seq. ID No. 5986, Seq. ID No. 5990, Seq. ID No. 5992, Seq. ID No. 5996, Seq. ID No. 5998, Seq. ID No. 6004, Seq. ID No. 6006, Seq. ID No. 6008, Seq. ID No. 6016, Seq. ID No. 6018, Seq. ID No. 6020, Seq. ID No. 6024, Seq. ID No. 6030, Seq. ID No. 6034, Seq. ID No. 6036, Seq. ID No. 6038, Seq. ID No. 6044, Seq. ID No. 6050, Seq. ID No. 6056, Seq. ID No. 6066, Seq. ID No. 6070, Seq. ID No. 6076, Seq-. ID No. 6082, Seq. ID No. 6084, Seq. ID No. 6088, Seq. ID No. 6096, Seq. ID No. 6098, Seq. ID No. 6100, Seq. ID No. 6104, Seq. ID No. 6106, Seq. ID No. 6114, Seq. ID No. 6116, Seq. ID No. 6120, Seq. ID No. 6126, Seq. ID No. 6128, Seq. ID No. 6130, Seq. ID No. 6132, Seq. ID No. 6134, Seq. ID No. 6142, Seq. ID No. 6144, Seq. ID No. 6148, Seq. ID No. 6154, Seq. ID No. 6166, Seq. ID No. 6170, Seq. ID No. 6172, Seq. ID No. 6174, Seq. ID No. 6178, Seq. ID No. 6180, Seq. ID No. 6188, Seq. ID No. 6194, Seq. ID No. 6202, Seq. ID No. 6208, Seq. ID No. 6212, Seq. ID No. 6216, Seq. ID No. 6220, Seq. ID No. 6232, Seq. ID No. 6236, Seq. ID No. 6244, Seq. ID No. 6248, Seq. ID No. 6252, Seq. ID No. 6256, Seq. ID No. 6262, Seq. ID No. 6264, Seq. ID No. 6270, Seq. ID No. 6276, Seq. ID No. 6278, Seq. ID No. 6280, Seq. ID No. 6288, Seq. ID No. 6292, Seq. ID No. 6300, Seq. ID No. 6306, Seq. ID No. 6308, Seq. ID No. 6314, Seq. ID No. 6316, Seq. ID No. 6322, Seq. ID No. 6324, Seq. ID No. 6326, Seq. ID No. 6332, Seq. ID No. 6336, Seq. ID No. 6340, Seq. ID No. 6342, Seq. ID No. 6344, Seq. ID No. 6346, Seq. ID No. 6348, Seq. ID No. 6356, Seq. ID No. 6360, Seq. ID No. 6362, Seq. ID No. 6366, Seq. ID No. 6370, Seq. ID No. 6372, Seq. ID No. 6376, Seq. ID No. 6378, Seq. ID No. 6380, Seq. ID No. 6388, Seq. ID No. 6392, Seq. ID No. 6398, Seq. ID No. 6402, Seq. ID No. 6406, Seq. ID No. 6410, Seq. ID No. 6414, Seq. ID No. 6418, Seq. ID No. 6420, Seq. ID No. 6424, Seq. ID No. 6430, Seq. ID No. 6434, Seq. ID No. 6436, Seq. ID No. 6440, Seq. ID No. 6446, Seq. ID No. 6448, Seq. ID No. 6452, Seq. ID No. 6456, Seq. ID No. 6460, Seq. ID No. 6462, Seq. ID No. 6464, Seq. ID No. 6476, Seq. ID No. 6482, Seq. ID No. 6484, Seq. ID No. 6486, Seq. ID No. 6488, Seq. ID No. 6490, Seq. ID No. 6492, Seq. ID No. 6494, Seq. ID No. 6496, Seq. ID No. 6500, Seq. ID No. 6506, Seq. ID No. 6510, Seq. ID No. 6514, Seq. ID No. 6520, Seq. ID No. 6522, Seq. ID No. 6526, Seq. ID No. 6528, Seq. ID No. 6532, Seq. ID No. 6534, Seq. ID No. 6536, Seq. ID No. 6546, Seq. ID No. 6552, Seq. ID No. 6554, Seq. ID No. 6560, Seq. ID No. 6562, Seq. ID No. 6564, Seq. ID No. 6566, Seq. ID No. 6568, Seq. ID No. 6570, Seq. ID No. 6576, Seq. ID No. 6580, Seq. ID No. 6584, Seq. ID No. 6586, Seq. ID No. 6592, Seq. ID No. 6596, Seq. ID No. 6606, Seq. ID No. 6608, Seq. ID No. 6612, Seq. ID No. 6616, Seq. ID No. 6618, Seq. ID No. 6620, Seq. ID No. 6624, Seq. ID No. 6626, Seq. ID No. 6630, Seq. ID No. 6634, Seq. ID No. 6636, Seq. ID No. 6642, and Seq. ID No. 6648.

54. The Alloiococcus otitidis polypeptide of claim 36, wherein the polypeptide is identified as an Alloiococcus otitidis polypeptide identified by an ORF finder program that searches for an ATG, GTG or TTG start codon between a Stop-Stop region, and is selected from one of Seq. ID No. 2, Seq. ID No. 6, Seq. ID No. 12, Seq. ID No. 14, Seq. ID No. 16, Seq. ID No. 18, Seq. ID No. 20, Seq. ID No. 22, Seq. ID No. 24, Seq. ID No. 28, Seq. ID No. 30, Seq. ID No. 32, Seq. ID No. 36, Seq. ID No. 38, Seq. ID No. 42, Seq. ID No. 44, Seq. ID No. 46, Seq. ID No. 48, Seq. ID No. 50, Seq. ID No. 52, Seq. ID No. 54, Seq. ID No. 56, Seq. ID No. 58, Seq. ID No. 60, Seq. ID No. 66, Seq. ID No. 68, Seq. ID No. 76, Seq. ID No. 78, Seq. ID No. 80, Seq. ID No. 82, Seq. ID No. 84, Seq. ID No. 90, Seq. ID No. 92, Seq. ID No. 94, Seq. ID No. 98, Seq. ID No. 100, Seq. ID No. 104, Seq. ID No. 106, Seq. ID No. 108, Seq. ID No. 110, Seq. ID No. 112, Seq. ID No. 114, Seq. ID No. 116, Seq. ID No. 118, Seq. ID No. 120, Seq. ID No. 122, Seq. ID No. 128, Seq. ID No. 130, Seq. ID No. 132, Seq. ID No. 134, Seq. ID No. 136, Seq. ID No. 138, Seq. ID No. 140, Seq. ID No. 144, Seq. ID No. 146, Seq. ID No. 148, Seq. ID No. 150, Seq. ID No. 154, Seq. ID No. 156, Seq. ID No. 158, Seq. ID No. 160, Seq. ID No. 162, Seq. ID No. 164, Seq. ID No. 166, Seq. ID No. 168, Seq. ID No. 170, Seq. ID No. 172, Seq. ID No. 176, Seq. ID No. 178, Seq. ID No. 180, Seq. ID No. 182, Seq. ID No. 184, Seq. ID No. 188, Seq. ID No. 192, Seq. ID No. 194, Seq. ID No. 196, Seq. ID No. 202, Seq. ID No. 206, Seq. ID No. 208, Seq. ID No. 216, Seq. ID No. 220, Seq. ID No. 222, Seq. ID No. 224, Seq. ID No. 226, Seq. ID No. 228, Seq. ID No. 232, Seq. ID No. 234, Seq. ID No. 240, Seq. ID No. 244, Seq. ID No. 246, Seq. ID No. 248, Seq. ID No. 254, Seq. ID No. 258, Seq. ID No. 260, Seq. ID No. 262, Seq. ID No. 264, Seq. ID No. 266, Seq. ID No. 268, Seq. ID No. 270, Seq. ID No. 274, Seq. ID No. 278, Seq. ID No. 280, Seq. ID No. 282, Seq. ID No. 284, Seq. ID No. 292, Seq. ID No. 294, Seq. ID No. 298, Seq. ID No. 302, Seq. ID No. 306, Seq. ID No. 308, Seq. ID No. 310, Seq. ID No. 314, Seq. ID No. 318, Seq. ID No. 322, Seq. ID No. 324, Seq. ID No. 326, Seq. ID No. 332, Seq. ID No. 334, Seq. ID No. 336, Seq. ID No. 338, Seq. ID No. 340, Seq. ID No. 344, Seq. ID No. 346, Seq. ID No. 348, Seq. ID No. 350, Seq. ID No. 354, Seq. ID No. 356, Seq. ID No. 358, Seq. ID No. 360, Seq. ID No. 362, Seq. ID No. 364, Seq. ID No. 366, Seq. ID No. 368, Seq. ID No. 370, Seq. ID No. 372, Seq. ID No. 376, Seq. ID No. 378, Seq. ID No. 380, Seq. ID No. 384, Seq. ID No. 386, Seq. ID No. 388, Seq. ID No. 390, Seq. ID No. 392, Seq. ID No. 394, Seq. ID No. 398, Seq. ID No. 402, Seq. ID No. 404, Seq. ID No. 406, Seq. ID No. 408, Seq. ID No. 410, Seq. ID No. 416, Seq. ID No. 424, Seq. ID No. 426, Seq. ID No. 428, Seq. ID No. 430, Seq. ID No. 432, Seq. ID No. 434, Seq. ID No. 436, Seq. ID No. 438, Seq. ID No. 440, Seq. ID No. 442, Seq. ID No. 444, Seq. ID No. 446, Seq. ID No. 448, Seq. ID No. 452, Seq. ID No. 454, Seq. ID No. 456, Seq. ID No. 458, Seq. ID No. 462, Seq. ID No. 464, Seq. ID No. 468, Seq. ID No. 470, Seq. ID No. 472, Seq. ID No. 474, Seq. ID No. 476, Seq. ID No. 478, Seq. ID No. 480, Seq. ID No. 482, Seq. ID No. 484, Seq. ID No. 486, Seq. ID No. 490, Seq. ID No. 492, Seq. ID No. 494, Seq. ID No. 496, Seq. ID No. 502, Seq. ID No. 506, Seq. ID No. 508, Seq. ID No. 512, Seq. ID No. 516, Seq. ID No. 518, Seq. ID No. 524, Seq. ID No. 530, Seq. ID No. 532, Seq. ID No. 534, Seq. ID No. 538, Seq. ID No. 540, Seq. ID No. 544, Seq. ID No. 548, Seq. ID No. 550, Seq. ID No. 552, Seq. ID No. 554, Seq. ID No. 556, Seq. ID No. 558, Seq. ID No. 560, Seq. ID No. 562, Seq. ID No. 566, Seq. ID No. 570, Seq. ID No. 572, Seq. ID No. 574, Seq. ID No. 576, Seq. ID No. 580, Seq. ID No. 582, Seq. ID No. 586, Seq. ID No. 588, Seq. ID No. 590, Seq. ID No. 592, Seq. ID No. 594, Seq. ID No. 596, Seq. ID No. 598, Seq. ID No. 600, Seq. ID No. 602, Seq. ID No. 604, Seq. ID No. 606, Seq. ID No. 610, Seq. ID No. 614, Seq. ID No. 616, Seq. ID No. 618, Seq. ID No. 620, Seq. ID No. 622, Seq. ID No. 624, Seq. ID No. 626, Seq. ID No. 628, Seq. ID No. 636, Seq. ID No. 638, Seq. ID No. 644, Seq. ID No. 646, Seq. ID No. 648, Seq. ID No. 650, Seq. ID No. 656, Seq. ID No. 664, Seq. ID No. 666, Seq. ID No. 668, Seq. ID No. 670, Seq. ID No. 676, Seq. ID No. 682, Seq. ID No. 684, Seq. ID No. 688, Seq. ID No. 690, Seq. ID No. 692, Seq. ID No. 696, Seq. ID No. 698, Seq. ID No. 700, Seq. ID No. 702, Seq. ID No. 704, Seq. ID No. 706, Seq. ID No. 708, Seq. ID No. 710, Seq. ID No. 714, Seq. ID No. 726, Seq. ID No. 728, Seq. ID No. 730, Seq. ID No. 732, Seq. ID No. 734, Seq. ID No. 736, Seq. ID No. 740, Seq. ID No. 742, Seq. ID No. 746, Seq. ID No. 748, Seq. ID No. 750, Seq. ID No. 752, Seq. ID No. 754, Seq. ID No. 760, Seq. ID No. 764, Seq. ID No. 766, Seq. ID No. 774, Seq. ID No. 776, Seq. ID No. 782, Seq. ID No. 784, Seq. ID No. 788, Seq. ID No. 794, Seq. ID No. 796, Seq. ID No. 800, Seq. ID No. 802, Seq. ID No. 806, Seq. ID No. 808, Seq. ID No. 810, Seq. ID No. 812, Seq. ID No. 814, Seq. ID No. 816, Seq. ID No. 818, Seq. ID No. 820, Seq. ID No. 822, Seq. ID No. 824, Seq. ID No. 828, Seq. ID No. 830, Seq. ID No. 832, Seq. ID No. 836, Seq. ID No. 838, Seq. ID No. 840, Seq. ID No. 844, Seq. ID No. 846, Seq. ID No. 848, Seq. ID No. 856, Seq. ID No. 860, Seq. ID No. 862, Seq. ID No. 866, Seq. ID No. 868, Seq. ID No. 872, Seq. ID No. 874, Seq. ID No. 876, Seq. ID No. 878, Seq. ID No. 880, Seq. ID No. 882, Seq. ID No. 886, Seq. ID No. 896, Seq. ID No. 898, Seq. ID No. 900, Seq. ID No. 902, Seq. ID No. 904, Seq. ID No. 906, Seq. ID No. 908, Seq. ID No. 910, Seq. ID No. 914, Seq. ID No. 916, Seq. ID No. 922, Seq. ID No. 924, Seq. ID No. 926, Seq. ID No. 932, Seq. ID No. 934, Seq. ID No. 936, Seq. ID No. 938, Seq. ID No. 940, Seq. ID No. 942, Seq. ID No. 944, Seq. ID No. 948, Seq. ID No. 950, Seq. ID No. 952, Seq. ID No. 954, Seq. ID No. 956, Seq. ID No. 958, Seq. ID No. 962, Seq. ID No. 964, Seq. ID No. 966, Seq. ID No. 968, Seq. ID No. 970, Seq. ID No. 972, Seq. ID No. 974, Seq. ID No. 976, Seq. ID No. 982, Seq. ID No. 984, Seq. ID No. 986, Seq. ID No. 988, Seq. ID No. 990, Seq. ID No. 992, Seq. ID No. 994, Seq. ID No. 996, Seq. ID No. 998, Seq. ID No. 1002, Seq. ID No. 1004, Seq. ID No. 1006, Seq. ID No. 1008, Seq. ID No. 1010, Seq. ID No. 1018, Seq. ID No. 1020, Seq. ID No. 1024, Seq. ID No. 1026, Seq. ID No. 1028, Seq. ID No. 1040, Seq. ID No. 1042, Seq. ID No. 1044, Seq. ID No. 1046, Seq. ID No. 1048, Seq. ID No. 1050, Seq. ID No. 1052, Seq. ID No. 1058, Seq. ID No. 1060, Seq. ID No. 1062, Seq. ID No. 1066, Seq. ID No. 1070, Seq. ID No. 1076, Seq. ID No. 1078, Seq. ID No. 1080, Seq. ID No. 1082, Seq. ID No. 1084, Seq. ID No. 1086, Seq. ID No. 1088, Seq. ID No. 1092, Seq. ID No. 1094, Seq. ID No. 1096, Seq. ID No. 1098, Seq. ID No. 1100, Seq. ID No. 1102, Seq. ID No. 1104, Seq. ID No. 1108, Seq. ID No. 1110, Seq. ID No. 1112, Seq. ID No. 1114, Seq. ID No. 1116, Seq. ID No. 1120, Seq. ID No. 1122, Seq. ID No. 1124, Seq. ID No. 1126, Seq. ID No. 1128, Seq. ID No. 1130, Seq. ID No. 1132, Seq. ID No. 1138, Seq. ID No. 1140, Seq. ID No. 1142, Seq. ID No. 1144, Seq. ID No. 1146, Seq. ID No. 1148, Seq. ID No. 1150, Seq. ID No. 1152, Seq. ID No. 1154, Seq. ID No. 1156, Seq. ID No. 1158, Seq. ID No. 1160, Seq. ID No. 1162, Seq. ID No. 1164, Seq. ID No. 1172, Seq. ID No. 1176, Seq. ID No. 1178, Seq. ID No. 1180, Seq. ID No. 1182, Seq. ID No. 1188, Seq. ID No. 1192, Seq. ID No. 1194, Seq. ID No. 1196, Seq. ID No. 1198, Seq. ID No. 1202, Seq. ID No. 1204, Seq. ID No. 1206, Seq. ID No. 1208, Seq. ID No. 1212, Seq. ID No. 1214, Seq. ID No. 1216, Seq. ID No. 1218, Seq. ID No. 1222, Seq. ID No. 1224, Seq. ID No. 1226, Seq. ID No. 1232, Seq. ID No. 1234, Seq. ID No. 1238, Seq. ID No. 1240, Seq. ID No. 1242, Seq. ID No. 1246, Seq. ID No. 1248, Seq. ID No. 1250, Seq. ID No. 1252, Seq. ID No. 1254, Seq. ID No. 1256, Seq. ID No. 1258, Seq. ID No. 1260, Seq. ID No. 1262, Seq. ID No. 1264, Seq. ID No. 1272, Seq. ID No. 1274, Seq. ID No. 1276, Seq. ID No. 1278, Seq. ID No. 1280, Seq. ID No. 1286, Seq. ID No. 1290, Seq. ID No. 1292, Seq. ID No. 1294, Seq. ID No. 1296, Seq. ID No. 1298, Seq. ID No. 1300, Seq. ID No. 1302, Seq. ID No. 1304, Seq. ID No. 1306, Seq. ID No. 1308, Seq. ID No. 1310, Seq. ID No. 1312, Seq. ID No. 1314, Seq. ID No. 1318, Seq. ID No. 1320, Seq. ID No. 1322, Seq. ID No. 1332, Seq. ID No. 1334, Seq. ID No. 1336, Seq. ID No. 1338, Seq. ID No. 1340, Seq. ID No. 1344, Seq. ID No. 1346, Seq. ID No. 1348, Seq. ID No. 1350, Seq. ID No. 1352, Seq. ID No. 1360, Seq. ID No. 1362, Seq. ID No. 1364, Seq. ID No. 1366, Seq. ID No. 1370, Seq. ID No. 1372, Seq. ID No. 1376, Seq. ID No. 1378, Seq. ID No. 1382, Seq. ID No. 1384, Seq. ID No. 1386, Seq. ID No. 1388, Seq. ID No. 1390, Seq. ID No. 1392, Seq. ID No. 1394, Seq. ID No. 1402, Seq. ID No. 1404, Seq. ID No. 1408, Seq. ID No. 1410, Seq. ID No. 1412, Seq. ID No. 1414, Seq. ID No. 1416, Seq. ID No. 1420, Seq. ID No. 1422, Seq. ID No. 1424, Seq. ID No. 1426, Seq. ID No. 1428, Seq. ID No. 1430, Seq. ID No. 1434, Seq. ID No. 1438, Seq. ID No. 1442, Seq. ID No. 1444, Seq. ID No. 1448, Seq. ID No. 1450, Seq. ID No. 1452, Seq. ID No. 1456, Seq. ID No. 1460, Seq. ID No. 1464, Seq. ID No. 1466, Seq. ID No. 1468, Seq. ID No. 1470, Seq. ID No. 1472, Seq. ID No. 1474, Seq. ID No. 1476, Seq. ID No. 1478, Seq. ID No. 1480, Seq. ID No. 1484, Seq. ID No. 1486, Seq. ID No. 1488, Seq. ID No. 1492, Seq. ID No. 1494, Seq. ID No. 1496, Seq. ID No. 1498, Seq. ID No. 1500, Seq. ID No. 1502, Seq. ID No. 1506, Seq. ID No. 1508, Seq. ID No. 1512, Seq. ID No. 1518, Seq. ID No. 1520, Seq. ID No. 1524, Seq. ID No. 1526, Seq. ID No. 1528, Seq. ID No. 1532, Seq. ID No. 1540, Seq. ID No. 1544, Seq. ID No. 1550, Seq. ID No. 1552, Seq. ID No. 1554, Seq. ID No. 1556, Seq. ID No. 1558, Seq. ID No. 1562, Seq. ID No. 1564, Seq. ID No. 1566, Seq. ID No. 1568, Seq. ID No. 1572, Seq. ID No. 1574, Seq. ID No. 1576, Seq. ID No. 1578, Seq. ID No. 1580, Seq. ID No. 1582, Seq. ID No. 1590, Seq. ID No. 1594, Seq. ID No. 1596, Seq. ID No. 1598, Seq. ID No. 1600, Seq. ID No. 1602, Seq. ID No. 1608, Seq. ID No. 1612, Seq. ID No. 1614, Seq. ID No. 1616, Seq. ID No. 1618, Seq. ID No. 1620, Seq. ID No. 1624, Seq. ID No. 1626, Seq. ID No. 1628, Seq. ID No. 1634, Seq. ID No. 1638, Seq. ID No. 1640, Seq. ID No. 1642, Seq. ID No. 1644, Seq. ID No. 1648, Seq. ID No. 1652, Seq. ID No. 1654, Seq. ID No. 1656, Seq. ID No. 1658, Seq. ID No. 1662, Seq. ID No. 1664, Seq. ID No. 1666, Seq. ID No. 1670, Seq. ID No. 1676, Seq. ID No. 1680, Seq. ID No. 1682, Seq. ID No. 1686, Seq. ID No. 1688, Seq. ID No. 1690, Seq. ID No. 1692, Seq. ID No. 1694, Seq. ID No. 1696, Seq. ID No. 1698, Seq. ID No. 1700, Seq. ID No. 1704, Seq. ID No. 1706, Seq. ID No. 1708, Seq. ID No. 1712, Seq. ID No. 1714, Seq. ID No. 1716, Seq. ID No. 1718, Seq. ID No. 1720, Seq. ID No. 1722, Seq. ID No. 1724, Seq. ID No. 1728, Seq. ID No. 1730, Seq. ID No. 1736, Seq. ID No. 1738, Seq. ID No. 1740, Seq. ID No. 1742, Seq. ID No. 1748, Seq. ID No. 1750, Seq. ID No. 1752, Seq. ID No. 1756, Seq. ID No. 1758, Seq. ID No. 1760, Seq. ID No. 1764, Seq. ID No. 1770, Seq. ID No. 1772, Seq. ID No. 1776, Seq. ID No. 1778, Seq. ID No. 1780, Seq. ID No. 1782, Seq. ID No. 1784, Seq. ID No. 1786, Seq. ID No. 1790, Seq. ID No. 1792, Seq. ID No. 1794, Seq. ID No. 1796, Seq. ID No. 1798, Seq. ID No. 1806, Seq. ID No. 1810, Seq. ID No. 1812, Seq. ID No. 1814, Seq. ID No. 1816, Seq. ID No. 1818, Seq. ID No. 1820, Seq. ID No. 1822, Seq. ID No. 1824, Seq. ID No. 1826, Seq. ID No. 1830, Seq. ID No. 1834, Seq. ID No. 1842, Seq. ID No. 1844, Seq. ID No. 1846, Seq. ID No. 1848, Seq. ID No. 1850, Seq. ID No. 1854, Seq. ID No. 1856, Seq. ID No. 1858, Seq. ID No. 1860, Seq. ID No. 1862, Seq. ID No. 1864, Seq. ID No. 1866, Seq. ID No. 1868, Seq. ID No. 1872, Seq. ID No. 1874, Seq. ID No. 1876, Seq. ID No. 1878, Seq. ID No. 1882, Seq. ID No. 1884, Seq. ID No. 1886, Seq. ID No. 1888, Seq. ID No. 1890, Seq. ID No. 1896, Seq. ID No. 1904, Seq. ID No. 1906, Seq. ID No. 1908, Seq. ID No. 1912, Seq. ID No. 1914, Seq. ID No. 1916, Seq. ID No. 1920, Seq. ID No. 1924, Seq. ID No. 1926, Seq. ID No. 1928, Seq. ID No. 1930, Seq. ID No. 1932, Seq. ID No. 1936, Seq. ID No. 1942, Seq. ID No. 1944, Seq. ID No. 1946, Seq. ID No. 1948, Seq. ID No. 1950, Seq. ID No. 1952, Seq. ID No. 1954, Seq. ID No. 1960, Seq. ID No. 1962, Seq. ID No. 1964, Seq. ID No. 1966, Seq. ID No. 1968, Seq. ID No. 1970, Seq. ID No. 1972, Seq. ID No. 1980, Seq. ID No. 1984, Seq. ID No. 1986, Seq. ID No. 1988, Seq. ID No. 1990, Seq. ID No. 1992, Seq. ID No. 1996, Seq. ID No. 1998, Seq. ID No. 2000, Seq. ID No. 2002, Seq. ID No. 2004, Seq. ID No. 2006, Seq. ID No. 2008, Seq. ID No. 2016, Seq. ID No. 2020, Seq. ID No. 2022, Seq. ID No. 2026, Seq. ID No. 2028, Seq. ID No. 2030, Seq. ID No. 2032, Seq. ID No. 2036, Seq. ID No. 2038, Seq. ID No. 2042, Seq. ID No. 2044, Seq. ID No. 2046, Seq. ID No. 2048, Seq. ID No. 2054, Seq. ID No. 2056, Seq. ID No. 2060, Seq. ID No. 2064, Seq. ID No. 2066, Seq. ID No. 2068, Seq. ID No. 2070, Seq. ID No. 2072, Seq. ID No. 2074, Seq. ID No. 2076, Seq. ID No. 2078, Seq. ID No. 2080, Seq. ID No. 2082, Seq. ID No. 2084, Seq. ID No. 2086, Seq. ID No. 2090, Seq. ID No. 2092, Seq. ID No. 2094, Seq. ID No. 2098, Seq. ID No. 2100, Seq. ID No. 2102, Seq. ID No. 2104, Seq. ID No. 2108, Seq. ID No. 2110, Seq. ID No. 2112, Seq. ID No. 2116, Seq. ID No. 2118, Seq. ID No. 2120, Seq. ID No. 2126, Seq. ID No. 2128, Seq. ID No. 2130, Seq. ID No. 2132, Seq. ID No. 2134, Seq. ID No. 2136, Seq. ID No. 2138, Seq. ID No. 2142, Seq. ID No. 2144, Seq. ID No. 2146, Seq. ID No. 2150, Seq. ID No. 2152, Seq. ID No. 2154, Seq. ID No. 2156, Seq. ID No. 2158, Seq. ID No. 2160, Seq. ID No. 2162, Seq. ID No. 2166, Seq. ID No. 2168, Seq. ID No. 2170, Seq. ID No. 2180, Seq. ID No. 2182, Seq. ID No. 2184, Seq. ID No. 2190, Seq. ID No. 2192, Seq. ID No. 2196, Seq. ID No. 2198, Seq. ID No. 2200, Seq. ID No. 2202, Seq. ID No. 2204, Seq. ID No. 2206, Seq. ID No. 2208, Seq. ID No. 2210, Seq. ID No. 2212, Seq. ID No. 2214, Seq. ID No. 2216, Seq. ID No. 2218, Seq. ID No. 2222, Seq. ID No. 2224, Seq. ID No. 2228, Seq. ID No. 2230, Seq. ID No. 2236, Seq. ID No. 2242, Seq. ID No. 2246, Seq. ID No. 2248, Seq. ID No. 2252, Seq. ID No. 2254, Seq. ID No. 2258, Seq. ID No. 2260, Seq. ID No. 2262, Seq. ID No. 2264, Seq. ID No. 2266, Seq. ID No. 2268, Seq. ID No. 2270, Seq. ID No. 2276, Seq. ID No. 2278, Seq. ID No. 2280, Seq. ID No. 2286, Seq. ID No. 2288, Seq. ID No. 2298, Seq. ID No. 2300, Seq. ID No. 2302, Seq. ID No. 2310, Seq. ID No. 2312, Seq. ID No. 2316, Seq. ID No. 2328, Seq. ID No. 2330, Seq. ID No. 2334, Seq. ID No. 2344, Seq. ID No. 2346, Seq. ID No. 2350, Seq. ID No. 2352, Seq. ID No. 2358, Seq. ID No. 2364, Seq. ID No. 2366, Seq. ID No. 2368, Seq. ID No. 2370, Seq. ID No. 2372, Seq. ID No. 2374, Seq. ID No. 2376, Seq. ID No. 2380, Seq. ID No. 2382, Seq. ID No. 2386, Seq. ID No. 2388, Seq. ID No. 2392, Seq. ID No. 2394, Seq. ID No. 2396, Seq. ID No. 2398, Seq. ID No. 2400, Seq. ID No. 2402, Seq. ID No. 2406, Seq. ID No. 2410, Seq. ID No. 2414, Seq. ID No. 2416, Seq. ID No. 2418, Seq. ID No. 2422, Seq. ID No. 2424, Seq. ID No. 2426, Seq. ID No. 2428, Seq. ID No. 2430, Seq. ID No. 2436, Seq. ID No. 2438, Seq. ID No. 2446, Seq. ID No. 2448, Seq. ID No. 2450, Seq. ID No. 2452, Seq. ID No. 2454, Seq. ID No. 2456, Seq. ID No. 2458, Seq. ID No. 2460, Seq. ID No. 2462, Seq. ID No. 2464, Seq. ID No. 2466, Seq. ID No. 2470, Seq. ID No. 2472, Seq. ID No. 2476, Seq. ID No. 2482, Seq. ID No. 2484, Seq. ID No. 2486, Seq. ID No. 2492, Seq. ID No. 2494, Seq. ID No. 2496, Seq. ID No. 2500, Seq. ID No. 2502, Seq. ID No. 2504, Seq. ID No. 2506, Seq. ID No. 2508, Seq. ID No. 2512, Seq. ID No. 2514, Seq. ID No. 2518, Seq. ID No. 2520, Seq. ID No. 2522, Seq. ID No. 2526, Seq. ID No. 2530, Seq. ID No. 2534, Seq. ID No. 2536, Seq. ID No. 2538, Seq. ID No. 2540, Seq. ID No. 2548, Seq. ID No. 2550, Seq. ID No. 2552, Seq. ID No. 2554, Seq. ID No. 2560, Seq. ID No. 2562, Seq. ID No. 2564, Seq. ID No. 2566, Seq. ID No. 2574, Seq. ID No. 2576, Seq. ID No. 2578, Seq. ID No. 2580, Seq. ID No. 2582, Seq. ID No. 2588, Seq. ID No. 2590, Seq. ID No. 2592, Seq. ID No. 2594, Seq. ID No. 2596, Seq. ID No. 2600, Seq. ID No. 2604, Seq. ID No. 2606, Seq. ID No. 2608, Seq; ID No. 2610, Seq. ID No. 2612, Seq. ID No. 2614, Seq. ID No. 2618, Seq. ID No. 2620, Seq. ID No. 2624, Seq. ID No. 2626, Seq. ID No. 2628, Seq. ID No. 2630, Seq. ID No. 2632, Seq. ID No. 2634, Seq. ID No. 2636, Seq. ID No. 2638, Seq. ID No. 2640, Seq. ID No. 2642, Seq. ID No. 2644, Seq. ID No. 2646, Seq. ID No. 2648, Seq. ID No. 2650, Seq. ID No. 2652, Seq. ID No. 2654, Seq. ID No. 2656, Seq. ID No. 2660, Seq. ID No. 2664, Seq. ID No. 2668, Seq. ID No. 2670, Seq. ID No. 2672, Seq. ID No. 2676, Seq. ID No. 2678, Seq. ID No. 2684, Seq. ID No. 2686, Seq. ID No. 2688, Seq. ID No. 2690, Seq. ID No. 2692, Seq. ID No. 2694, Seq. ID No. 2696, Seq. ID No. 2698, Seq. ID No. 2700, Seq. ID No. 2704, Seq. ID No. 2710, Seq. ID No. 2712, Seq. ID No. 2716, Seq. ID No. 2718, Seq. ID No. 2720, Seq. ID No. 2724, Seq. ID No. 2726, Seq. ID No. 2728, Seq. ID No. 2730, Seq. ID No. 2732, Seq. ID No. 2736, Seq. ID No. 2738, Seq. ID No. 2740, Seq. ID No. 2750, Seq. ID No. 2752, Seq. ID No. 2754, Seq. ID No. 2756, Seq. ID No. 2760, Seq. ID No. 2766, Seq. ID No. 2768, Seq. ID No. 2770, Seq. ID No. 2772, Seq. ID No. 2774, Seq. ID No. 2776, Seq. ID No. 2780, Seq. ID No. 2782, Seq. ID No. 2784, Seq. ID No. 2788, Seq. ID No. 2790, Seq. ID No. 2792, Seq. ID No. 2794, Seq. ID No. 2796, Seq. ID No. 2798, Seq. ID No. 2800, Seq. ID No. 2802, Seq. ID No. 2804, Seq. ID No. 2808, Seq. ID No. 2810, Seq. ID No. 2814, Seq. ID No. 2816, Seq. ID No. 2822, Seq. ID No. 2824, Seq. ID No. 2828, Seq. ID No. 2830, Seq. ID No. 2832, Seq. ID No. 2834, Seq. ID No. 2840, Seq. ID No. 2842, Seq. ID No. 2844, Seq. ID No. 2846, Seq. ID No. 2848, Seq. ID No. 2856, Seq. ID No. 2862, Seq. ID No. 2864, Seq. ID No. 2866, Seq. ID No. 2868, Seq. ID No. 2870, Seq. ID No. 2872, Seq. ID No. 2878, Seq. ID No. 2882, Seq. ID No. 2884, Seq. ID No. 2886, Seq. ID No. 2888, Seq. ID No. 2892, Seq. ID No. 2894, Seq. ID No. 2896, Seq. ID No. 2900, Seq. ID No. 2902, Seq. ID No. 2908, Seq. ID No. 2916, Seq. ID No. 2918, Seq. ID No. 2920, Seq. ID No. 2922, Seq. ID No. 2924, Seq. ID No. 2928, Seq. ID No. 2932, Seq. ID No. 2934, Seq. ID No. 2936, Seq. ID No. 2944, Seq. ID No. 2946, Seq. ID No. 2952, Seq. ID No. 2954, Seq. ID No. 2958, Seq. ID No. 2960, Seq. ID No. 2962, Seq. ID No. 2964, Seq. ID No. 2966, Seq. ID No. 2968, Seq. ID No. 2972, Seq. ID No. 2974, Seq. ID No. 2976, Seq. ID No. 2978, Seq. ID No. 2980, Seq. ID No. 2984, Seq. ID No. 2986, Seq. ID No. 2988, Seq. ID No. 2992, Seq. ID No. 2994, Seq. ID No. 3000, Seq. ID No. 3002, Seq. ID No. 3006, Seq. ID No. 3010, Seq. ID No. 3012, Seq. ID No. 3016, Seq. ID No. 3018, Seq. ID No. 3020, Seq. ID No. 3022, Seq. ID No. 3028, Seq. ID No. 3034, Seq. ID No. 3036, Seq. ID No. 3038, Seq. ID No. 3040, Seq. ID No. 3044, Seq. ID No. 3046, Seq. ID No. 3048, Seq. ID No. 3050, Seq. ID No. 3052, Seq. ID No. 3054, Seq. ID No. 3056, Seq. ID No. 3058, Seq. ID No. 3060, Seq. ID No. 3068, Seq. ID No. 3070, Seq. ID No. 3072, Seq. ID No. 3080, Seq. ID No. 3084, Seq. ID No. 3086, Seq. ID No. 3088, Seq. ID No. 3092, Seq. ID No. 3094, Seq. ID No. 3100, Seq. ID No. 3102, Seq. ID No. 3104, Seq. ID No. 3110, Seq. ID No. 3112, Seq. ID No. 3116, Seq. ID No. 3118, Seq. ID No. 3120, Seq. ID No. 3122, Seq. ID No. 3124, Seq. ID No. 3126, Seq. ID No. 3130, Seq. ID No. 3132, Seq. ID No. 3134, Seq. ID No. 3136, Seq. ID No. 3138, Seq. ID No. 3140, Seq. ID No. 3142, Seq. ID No. 3144, Seq. ID No. 3148, Seq. ID No. 3150, Seq. ID No. 3152, Seq. ID No. 3154, Seq. ID No. 3156, Seq. ID No. 3158, Seq. ID No. 3160, Seq. ID No. 3162, Seq. ID No. 3166, Seq. ID No. 3168, Seq. ID No. 3170, Seq. ID No. 3172, Seq. ID No. 3174, Seq. ID No. 3180, Seq. ID No. 3182, Seq. ID No. 3184, Seq. ID No. 3186, Seq. ID No. 3188, Seq. ID No. 3190, Seq. ID No. 3192, Seq. ID No. 3194, Seq. ID No. 3196, Seq. ID No. 3198, Seq. ID No. 3204, Seq. ID No. 3206, Seq. ID No. 3208, Seq. ID No. 3210, Seq. ID No. 3212, Seq. ID No. 3218, Seq. ID No. 3224, Seq. ID No. 3226, Seq. ID No. 3228, Seq. ID No. 3230, Seq. ID No. 3236, Seq. ID No. 3250, Seq. ID No. 3252, Seq. ID No. 3254, Seq. ID No. 3256, Seq. ID No. 3258, Seq. ID No. 3260, Seq. ID No. 3264, Seq. ID No. 3266, Seq. ID No. 3270, Seq. ID No. 3272, Seq. ID No. 3274, Seq. ID No. 3278, Seq. ID No. 3282, Seq. ID No. 3284, Seq. ID No. 3286, Seq. ID No. 3290, Seq. ID No. 3292, Seq. ID No. 3294, Seq. ID No. 3300, Seq. ID No. 3302, Seq. ID No. 3304, Seq. ID No. 3306, Seq. ID No. 3308, Seq. ID No. 3310, Seq. ID No. 3312, Seq. ID No. 3314, Seq. ID No. 3316, Seq. ID No. 3320, Seq. ID No. 3322, Seq. ID No. 3324, Seq. ID No. 3326, Seq. ID No. 3332, Seq. ID No. 3336, Seq. ID No. 3338, Seq. ID No. 3340, Seq. ID No. 3342, Seq. ID No. 3346, Seq. ID No. 3348, Seq. ID No. 3350, Seq. ID No. 3354, Seq. ID No. 3356, Seq. ID No. 3360, Seq. ID No. 3362, Seq. ID No. 3364, Seq. ID No. 3366, Seq. ID No. 3368, Seq. ID No. 3370, Seq. ID No. 3372, Seq. ID No. 3374, Seq. ID No. 3376, Seq. ID No. 3378, Seq. ID No. 3380, Seq. ID No. 3382, Seq. ID No. 3384, Seq. ID No. 3398, Seq. ID No. 3400, Seq. ID No. 3402, Seq. ID No. 3408, Seq. ID No. 3410, Seq. ID No. 3414, Seq. ID No. 3416, Seq. ID No. 3420, Seq. ID No. 3426, Seq. ID No. 3428, Seq. ID No. 3432, Seq. ID No. 3434, Seq. ID No. 3436, Seq. ID No. 3440, Seq. ID No. 3442, Seq. ID No. 3444, Seq. ID No. 3446, Seq. ID No. 3448, Seq. ID No. 3456, Seq. ID No. 3458, Seq. ID No. 3460, Seq. ID No. 3462, Seq. ID No. 3466, Seq. ID No. 3468, Seq. ID No. 3472, Seq. ID No. 3474, Seq. ID No. 3476, Seq. ID No. 3480, Seq. ID No. 3484, Seq. ID No. 3486, Seq. ID No. 3488, Seq. ID No. 3490, Seq. ID No. 3496, Seq. ID No. 3498, Seq. ID No. 3500, Seq. ID No. 3502, Seq. ID No. 3506, Seq. ID No. 3508, Seq. ID No. 3510, Seq. ID No. 3512, Seq. ID No. 3514, Seq. ID No. 3518, Seq. ID No. 3520, Seq. ID No. 3522, Seq. ID No. 3526, Seq. ID No. 3530, Seq. ID No. 3532, Seq. ID No. 3534, Seq. ID No. 3536, Seq. ID No. 3538, Seq. ID No. 3540, Seq. ID No. 3542, Seq. ID No. 3544, Seq. ID No. 3546, Seq. ID No. 3548, Seq. ID No. 3550, Seq. ID No. 3552, Seq. ID No. 3554, Seq. ID No. 3556, Seq. ID No. 3558, Seq. ID No. 3560, Seq. ID No. 3562, Seq. ID No. 3564, Seq. ID No. 3566, Seq. ID No. 3568, Seq. ID No. 3570, Seq. ID No. 3572, Seq. ID No. 3574, Seq. ID No. 3576, Seq. ID No. 3580, Seq. ID No. 3582, Seq. ID No. 3584, Seq. ID No. 3588, Seq. ID No. 3590, Seq. ID No. 3596, Seq. ID No. 3598, Seq. ID No. 3600, Seq. ID No. 3604, Seq. ID No. 3606, Seq. ID No. 3608, Seq. ID No. 3610, Seq. ID No. 3612, Seq. ID No. 3614, Seq. ID No. 3616, Seq. ID No. 3618, Seq. ID No. 3620, Seq. ID No. 3622, Seq. ID No. 3624, Seq. ID No. 3628, Seq. ID No. 3630, Seq. ID No. 3636, Seq. ID No. 3638, Seq. ID No. 3640, Seq. ID No. 3642, Seq. ID No. 3646, Seq. ID No. 3648, Seq. ID No. 3650, Seq. ID No. 3652, Seq. ID No. 3654, Seq. ID No. 3658, Seq. ID No. 3660, Seq. ID No. 3664, Seq. ID No. 3666, Seq. ID No. 3668, Seq. ID No. 3672, Seq. ID No. 3674, Seq. ID No. 3676, Seq. ID No. 3678, Seq. ID No. 3680, Seq. ID No. 3682, Seq. ID No. 3684, Seq. ID No. 3686, Seq. ID No. 3688, Seq. ID No. 3690, Seq. ID No. 3692, Seq. ID No. 3694, Seq. ID No. 3696, Seq. ID No. 3700, Seq. ID No. 3702, Seq. ID No. 3704, Seq. ID No. 3706, Seq. ID No. 3708, Seq. ID No. 3710, Seq. ID No. 3714, Seq. ID No. 3716, Seq. ID No. 3718, Seq. ID No. 3728, Seq. ID No. 3730, Seq. ID No. 3734, Seq. ID No. 3738, Seq. ID No. 3740, Seq. ID No. 3742, Seq. ID No. 3746, Seq. ID No. 3748, Seq. ID No. 3760, Seq. ID No. 3768, Seq. ID No. 3770, Seq. ID No. 3772, Seq. ID No. 3780, Seq. ID No. 3784, Seq. ID No. 3786, Seq. ID No. 3790, Seq. ID No. 3792, Seq. ID No. 3796, Seq. ID No. 3798, Seq. ID No. 3804, Seq. ID No. 3806, Seq. ID No. 3808, Seq. ID No. 3810, Seq. ID No. 3812, Seq. ID No. 3814, Seq. ID No. 3816, Seq. ID No. 3818, Seq. ID No. 3820, Seq. ID No. 3824, Seq. ID No. 3826, Seq. ID No. 3832, Seq. ID No. 3834, Seq. ID No. 3836, Seq. ID No. 3842, Seq. ID No. 3844, Seq. ID No. 3848, Seq. ID No. 3856, Seq. ID No. 3858, Seq. ID No. 3864, Seq. ID No. 3868, Seq. ID No. 3872, Seq. ID No. 3874, Seq. ID No. 3876, Seq. ID No. 3878, Seq. ID No. 3882, Seq. ID No. 3884, Seq. ID No. 3886, Seq. ID No. 3894, Seq. ID No. 3896, Seq. ID No. 3900, Seq. ID No. 3902, Seq. ID No. 3906, Seq. ID No. 3908, Seq. ID No. 3912, Seq. ID No. 3914, Seq. ID No. 3916, Seq. ID No. 3920, Seq. ID No. 3922, Seq. ID No. 3924, Seq. ID No. 3926, Seq. ID No. 3928, Seq. ID No. 3930, Seq. ID No. 3932, Seq. ID No. 3934, Seq. ID No. 3936, Seq. ID No. 3940, Seq. ID No. 3942, Seq. ID No. 3944, Seq. ID No. 3946, Seq. ID No. 3948, Seq. ID No. 3950, Seq. ID No. 3952, Seq. ID No. 3954, Seq. ID No. 3956, Seq. ID No. 3958, Seq. ID No. 3960, Seq. ID No. 3962, Seq. ID No. 3966, Seq. ID No. 3968, Seq. ID No. 3970, Seq. ID No. 3972, Seq. ID No. 3976, Seq. ID No. 3980, Seq. ID No. 3982, Seq. ID No. 3984, Seq. ID No. 3986, Seq. ID No. 3988, Seq. ID No. 3992, Seq. ID No. 3996, Seq. ID No. 3998, Seq. ID No. 4000, Seq. ID No. 4004, Seq. ID No. 4008, Seq. ID No. 4010, Seq. ID No. 4016, Seq. ID No. 4018, Seq. ID No. 4022, Seq. ID No. 4024, Seq. ID No. 4030, Seq. ID No. 4036, Seq. ID No. 4038, Seq. ID No. 4040, Seq. ID No. 4050, Seq. ID No. 4052, Seq. ID No. 4054, Seq. ID No. 4056, Seq. ID No. 4058, Seq. ID No. 4062, Seq. ID No. 4076, Seq. ID No. 4080, Seq. ID No. 4086, Seq. ID No. 4088, Seq. ID No. 4090, Seq. ID No. 4092, Seq. ID No. 4094, Seq. ID No. 4096, Seq. ID No. 4100, Seq. ID No. 4106, Seq. ID No. 4108, Seq. ID No. 4110, Seq. ID No. 4112, Seq. ID No. 4114, Seq. ID No. 4118, Seq. ID No. 4120, Seq. ID No. 4122, Seq. ID No. 4124, Seq. ID No. 4126, Seq. ID No. 4128, Seq. ID No. 4130, Seq. ID No. 4132, Seq. ID No. 4134, Seq. ID No. 4136, Seq. ID No. 4138, Seq. ID No. 4140, Seq. ID No. 4142, Seq. ID No. 4144, Seq. ID No. 4146, Seq. ID No. 4150, Seq. ID No. 4154, Seq. ID No. 4156, Seq. ID No. 4158, Seq. ID No. 4162, Seq. ID No. 4164, Seq. ID No. 4168, Seq. ID No. 4172, Seq. ID No. 4174, Seq. ID No. 4176, Seq. ID No. 4178, Seq. ID No. 4180, Seq. ID No. 4182, Seq. ID No. 4186, Seq. ID No. 4188, Seq. ID No. 4190, Seq. ID No. 4192, Seq. ID No. 4194, Seq. ID No. 4196, Seq. ID No. 4198, Seq. ID No. 4200, Seq. ID No. 4204, Seq. ID No. 4206, Seq. ID No. 4208, Seq. ID No. 4210, Seq. ID No. 4212, Seq. ID No. 4220, Seq. ID No. 4230, Seq. ID No. 4234, Seq. ID No. 4236, Seq. ID No. 4238, Seq. ID No. 4240, Seq. ID No. 4244, Seq. ID No. 4250, Seq. ID No. 4252, Seq. ID No. 4254, Seq. ID No. 4256, Seq. ID No. 4260, Seq. ID No. 4264, Seq. ID No. 4266, Seq. ID No. 4268, Seq. ID No. 4270, Seq. ID No. 4272, Seq. ID No. 4274, Seq. ID No. 4276, Seq. ID No. 4282, Seq. ID No. 4284, Seq. ID No. 4286, Seq. ID No. 4288, Seq. ID No. 4290, Seq. ID No. 4292, Seq. ID No. 4294, Seq. ID No. 4296, Seq. ID No. 4298, Seq. ID No. 4300, Seq. ID No. 4302, Seq. ID No. 4304, Seq. ID No. 4308, Seq. ID No. 4310, Seq. ID No. 4314, Seq. ID No. 4316, Seq. ID No. 4318, Seq. ID No. 4320, Seq. ID No. 4322, Seq. ID No. 4324, Seq. ID No. 4326, Seq. ID No. 4330, Seq. ID No. 4332, Seq. ID No. 4334, Seq. ID No. 4336, Seq. ID No. 4338, Seq. ID No. 4340, Seq. ID No. 4344, Seq. ID No. 4346, Seq. ID No. 4348, Seq. ID No. 4352, Seq. ID No. 4354, Seq. ID No. 4356, Seq. ID No. 4360, Seq. ID No. 4362, Seq. ID No. 4364, Seq. ID No. 4366, Seq. ID No. 4368, Seq. ID No. 4370, Seq. ID No. 4376, Seq. ID No. 4378, Seq. ID No. 4380, Seq. ID No. 4384, Seq. ID No. 4390, Seq. ID No. 4392, Seq. ID No. 4394, Seq. ID No. 4396, Seq. ID No. 4398, Seq. ID No. 4400, Seq. ID No. 4402, Seq. ID No. 4404, Seq. ID No. 4406, Seq. ID No. 4408, Seq. ID No. 4410, Seq. ID No. 4412, Seq. ID No. 4414, Seq. ID No. 4416, Seq. ID No. 4418, Seq. ID No. 4420, Seq. ID No. 4422, Seq. ID No. 4424, Seq. ID No. 4426, Seq. ID No. 4428, Seq. ID No. 4430, Seq. ID No. 4432, Seq. ID No. 4436, Seq. ID No. 4438, Seq. ID No. 4440, Seq. ID No. 4442, Seq. ID No. 4450, Seq. ID No. 4452, Seq. ID No. 4454, Seq. ID No. 4456, Seq. ID No. 4458, Seq. ID No. 4460, Seq. ID No. 4462, Seq. ID No. 4466, Seq. ID No. 4468, Seq. ID No. 4472, Seq. ID No. 4476, Seq. ID No. 4478, Seq. ID No. 4480, Seq. ID No. 4482, Seq. ID No. 4486, Seq. ID No. 4488, Seq. ID No. 4490, Seq. ID No. 4492, Seq. ID No. 4494, Seq. ID No. 4496, Seq. ID No. 4498, Seq. ID No. 4502, Seq. ID No. 4504, Seq. ID No. 4506, Seq. ID No. 4508, Seq. ID No. 4510, Seq. ID No. 4512, Seq. ID No. 4514, Seq. ID No. 4516, Seq. ID No. 4520, Seq. ID No. 4522, Seq. ID No. 4524, Seq. ID No. 4526, Seq. ID No. 4528, Seq. ID No. 4530, Seq. ID No. 4532, Seq. ID No. 4534, Seq. ID No. 4538, Seq. ID No. 4542, Seq. ID No. 4546, Seq. ID No. 4548, Seq. ID No. 4550, Seq. ID No. 4552, Seq. ID No. 4554, Seq. ID No. 4556, Seq. ID No. 4560, Seq. ID No. 4562, Seq. ID No. 4566, Seq. ID No. 4568, Seq. ID No. 4572, Seq. ID No. 4574, Seq. ID No. 4576, Seq. ID No. 4578, Seq. ID No. 4582, Seq. ID No. 4586, Seq. ID No. 4590, Seq. ID No. 4592, Seq. ID No. 4598, Seq. ID No. 4600, Seq. ID No. 4602, Seq. ID No. 4604, Seq. ID No. 4606, Seq. ID No. 4608, Seq. ID No. 4610, Seq. ID No. 4612, Seq. ID No. 4614, Seq. ID No. 4616, Seq. ID No. 4618, Seq. ID No. 4620, Seq. ID No. 4622, Seq. ID No. 4624, Seq. ID No. 4628, Seq. ID No. 4632, Seq. ID No. 4638, Seq. ID No. 4642, Seq. ID No. 4644, Seq. ID No. 4646, Seq. ID No. 4648, Seq. ID No. 4650, Seq. ID No. 4654, Seq. ID No. 4660, Seq. ID No. 4662, Seq. ID No. 4664, Seq. ID No. 4666, Seq. ID No. 4668, Seq. ID No. 4670, Seq. ID No. 4672, Seq. ID No. 4674, Seq. ID No. 4676, Seq. ID No. 4678, Seq. ID No. 4680, Seq. ID No. 4684, Seq. ID No. 4686, Seq. ID No. 4688, Seq. ID No. 4692, Seq. ID No. 4694, Seq. ID No. 4696, Seq. ID No. 4700, Seq. ID No. 4702, Seq. ID No. 4704, Seq. ID No. 4706, Seq. ID No. 4714, Seq. ID No. 4718, Seq. ID No. 4720, Seq. ID No. 4722, Seq. ID No. 4728, Seq. ID No. 4730, Seq. ID No. 4734, Seq. ID No. 4736, Seq. ID No. 4738, Seq. ID No. 4740, Seq. ID No. 4742, Seq. ID No. 4744, Seq. ID No. 4748, Seq. ID No. 4750, Seq. ID No. 4752, Seq. ID No. 4756, Seq. ID No. 4758, Seq. ID No. 4764, Seq. ID No. 4766, Seq. ID No. 4768, Seq. ID No. 4770, Seq. ID No. 4774, Seq. ID No. 4776, Seq. ID No. 4778, Seq. ID No. 4780, Seq. ID No. 4782, Seq. ID No. 4788, Seq. ID No. 4790, Seq. ID No. 4792, Seq. ID No. 4794, Seq. ID No. 4796, Seq. ID No. 4798, Seq. ID No. 4802, Seq. ID No. 4804, Seq. ID No. 4806, Seq. ID No. 4810, Seq. ID No. 4812, Seq. ID No. 4814, Seq. ID No. 4816, Seq. ID No. 4818, Seq. ID No. 4820, Seq. ID No. 4826, Seq. ID No. 4828, Seq. ID No. 4830, Seq. ID No. 4832, Seq. ID No. 4834, Seq. ID No. 4838, Seq. ID No. 4840, Seq. ID No. 4842, Seq. ID No. 4844, Seq. ID No. 4846, Seq. ID No. 4850, Seq. ID No. 4852, Seq. ID No. 4854, Seq. ID No. 4856, Seq. ID No. 4862, Seq. ID No. 4864, Seq. ID No. 4868, Seq. ID No. 4876, Seq. ID No. 4878, Seq. ID No. 4880, Seq. ID No. 4882, Seq. ID No. 4884, Seq. ID No. 4890, Seq. ID No. 4892, Seq. ID No. 4894, Seq. ID No. 4896, Seq. ID No. 4898, Seq. ID No. 4900, Seq. ID No. 4902, Seq. ID No. 4904, Seq. ID No. 4906, Seq. ID No. 4908, Seq. ID No. 4910, Seq. ID No. 4912, Seq. ID No. 4914, Seq. ID No. 4916, Seq. ID No. 4918, Seq. ID No. 4920, Seq. ID No. 4922, Seq. ID No. 4924, Seq. ID No. 4928, Seq. ID No. 4932, Seq. ID No. 4936, Seq. ID No. 4938, Seq. ID No. 4940, Seq. ID No. 4942, Seq. ID No. 4944, Seq. ID No. 4946, Seq. ID No. 4948, Seq. ID No. 4950, Seq. ID No. 4952, Seq. ID No. 4954, Seq. ID No. 4958, Seq. ID No. 4960, Seq. ID No. 4962, Seq. ID No. 4964, Seq. ID No. 4974, Seq. ID No. 4976, Seq. ID No. 4978, Seq. ID No. 4980, Seq. ID No. 4982, Seq. ID No. 4984, Seq. ID No. 4986, Seq. ID No. 4988, Seq. ID No. 4990, Seq. ID No. 4992, Seq. ID No. 4994, Seq. ID No. 4996, Seq. ID No. 4998, Seq. ID No. 5000, Seq. ID No. 5004, Seq. ID No. 5006, Seq. ID No. 5008, Seq. ID No. 5010, Seq. ID No. 5012, Seq. ID No. 5014, Seq. ID No. 5018, Seq. ID No. 5020, Seq. ID No. 5022, Seq. ID No. 5024, Seq. ID No. 5026, Seq. ID No. 5030, Seq. ID No. 5032, Seq. ID No. 5034, Seq. ID No. 5036, Seq. ID No. 5042, Seq. ID No. 5044, Seq. ID No. 5046, Seq. ID No. 5048, Seq. ID No. 5058, Seq. ID No. 5060, Seq. ID No. 5064, Seq. ID No. 5066, Seq. ID No. 5068, Seq. ID No. 5070, Seq. ID No. 5076, Seq. ID No. 5078, Seq. ID No. 5080, Seq. ID No. 5082, Seq. ID No. 5084, Seq. ID No. 5086, Seq. ID No. 5088, Seq. ID No. 5092, Seq. ID No. 5100, Seq. ID No. 5102, Seq. ID No. 5104, Seq. ID No. 5110, Seq. ID No. 5112, Seq. ID No. 5114, Seq. ID No. 5116, Seq. ID No. 5118, Seq. ID No. 5122, Seq. ID No. 5126, Seq. ID No. 5128, Seq. ID No. 5134, Seq. ID No. 5140, Seq. ID No. 5142, Seq. ID No. 5146, Seq. ID No. 5148, Seq. ID No. 5150, Seq. ID No. 5152, Seq. ID No. 5156, Seq. ID No. 5158, Seq. ID No. 5160, Seq. ID No. 5162, Seq. ID No. 5166, Seq. ID No. 5168, Seq. ID No. 5170, Seq. ID No. 5178, Seq. ID No. 5182, Seq. ID No. 5184, Seq. ID No. 5186, Seq. ID No. 5188, Seq. ID No. 5190, Seq. ID No. 5192, Seq. ID No. 5194, Seq. ID No. 5196, Seq. ID No. 5198, Seq. ID No. 5200, Seq. ID No. 5202, Seq. ID No. 5204, Seq. ID No. 5206, Seq. ID No. 5210, Seq. ID No. 5212, Seq. ID No. 5216, Seq. ID No. 5220, Seq. ID No. 5222, Seq. ID No. 5230, Seq. ID No. 5232, Seq. ID No. 5240, Seq. ID No. 5242, Seq. ID No. 5244, Seq. ID No. 5246, Seq. ID No. 5252, Seq. ID No. 5254, Seq. ID No. 5256, Seq. ID No. 5262, Seq. ID No. 5264, Seq. ID No. 5266, Seq. ID No. 5268, Seq. ID No. 5278, Seq. ID No. 5280, Seq. ID No. 5282, Seq. ID No. 5286, Seq. ID No. 5288, Seq. ID No. 5292, Seq. ID No. 5296, Seq. ID No. 5298, Seq. ID No. 5300, Seq. ID No. 5302, Seq. ID No. 5304, Seq. ID No. 5306, Seq. ID No. 5308, Seq. ID No. 5310, Seq. ID No. 5312, Seq. ID No. 5314, Seq. ID No. 5318, Seq. ID No. 5320, Seq. ID No. 5322, Seq. ID No. 5324, Seq. ID No. 5328, Seq. ID No. 5330, Seq. ID No. 5332, Seq. ID No. 5334, Seq. ID No. 5336, Seq. ID No. 5338, Seq. ID No. 5344, Seq. ID No. 5346, Seq. ID No. 5350, Seq. ID No. 5352, Seq. ID No. 5358, Seq. ID No. 5360, Seq. ID No. 5366, Seq. ID No. 5368, Seq. ID No. 5374, Seq. ID No. 5378, Seq. ID No. 5380, Seq. ID No. 5382, Seq. ID No. 5384, Seq. ID No. 5388, Seq. ID No. 5390, Seq. ID No. 5392, Seq. ID No. 5394, Seq. ID No. 5398, Seq. ID No. 5400, Seq. ID No. 5402, Seq. ID No. 5404, Seq. ID No. 5406, Seq. ID No. 5408, Seq. ID No. 5410, Seq. ID No. 5412, Seq. ID No. 5416, Seq. ID No. 5418, Seq. ID No. 5420, Seq. ID No. 5422, Seq. ID No. 5424, Seq. ID No. 5426, Seq. ID No. 5428, Seq. ID No. 5432, Seq. ID No. 5434, Seq. ID No. 5436, Seq. ID No. 5438, Seq. ID No. 5440, Seq. ID No. 5442, Seq. ID No. 5444, Seq. ID No. 5448, Seq. ID No. 5450, Seq. ID No. 5452, Seq. ID No. 5454, Seq. ID No. 5456, Seq. ID No. 5458, Seq. ID No. 5468, Seq. ID No. 5472, Seq. ID No. 5474, Seq. ID No. 5478, Seq. ID No. 5480, Seq. ID No. 5482, Seq. ID No. 5492, Seq. ID No. 5494, Seq. ID No. 5496, Seq. ID No. 5500, Seq. ID No. 5504, Seq. ID No. 5510, Seq. ID No. 5514, Seq. ID No. 5516, Seq. ID No. 5518, Seq. ID No. 5520, Seq. ID No. 5522, Seq. ID No. 5528, Seq. ID No. 5530, Seq. ID No. 5532, Seq. ID No. 5534, Seq. ID No. 5538, Seq. ID No. 5540, Seq. ID No. 5542, Seq. ID No. 5544, Seq. ID No. 5546, Seq. ID No. 5548, Seq. ID No. 5550, Seq. ID No. 5552, Seq. ID No. 5554, Seq. ID No. 5558, Seq. ID No. 5560, Seq. ID No. 5564, Seq. ID No. 5568, Seq. ID No. 5570, Seq. ID No. 5576, Seq. ID No. 5578, Seq. ID No. 5582, Seq. ID No. 5584, Seq. ID No. 5586, Seq. ID No. 5590, Seq. ID No. 5592, Seq. ID No. 5594, Seq. ID No. 5596, Seq. ID No. 5600, Seq. ID No. 5602, Seq. ID No. 5608, Seq. ID No. 5614, Seq. ID No. 5616, Seq. ID No. 5618, Seq. ID No. 5620, Seq. ID No. 5622, Seq. ID No. 5626, Seq. ID No. 5628, Seq. ID No. 5630, Seq. ID No. 5632, Seq. ID No. 5638, Seq. ID No. 5640, Seq. ID No. 5642, Seq. ID No. 5646, Seq. ID No. 5648, Seq. ID No. 5650, Seq. ID No. 5652, Seq. ID No. 5656, Seq. ID No. 5658, Seq. ID No. 5662, Seq. ID No. 5666, Seq. ID No. 5668, Seq. ID No. 5670, Seq. ID No. 5678, Seq. ID No. 5680, Seq. ID No. 5684, Seq. ID No. 5686, Seq. ID No. 5688, Seq. ID No. 5690, Seq. ID No. 5692, Seq. ID No. 5694, Seq. ID No. 5698, Seq. ID No. 5700, Seq. ID No. 5702, Seq. ID No. 5704, Seq. ID No. 5706, Seq. ID No. 5708, Seq. ID No. 5712, Seq. ID No. 5714, Seq. ID No. 5716, Seq. ID No. 5718, Seq. ID No. 5720, Seq. ID No. 5722, Seq. ID No. 5724, Seq. ID No. 5726, Seq. ID No. 5728, Seq. ID No. 5736, Seq. ID No. 5740, Seq. ID No. 5742, Seq. ID No. 5744, Seq. ID No. 5746, Seq. ID No. 5748, Seq. ID No. 5750, Seq. ID No. 5752, Seq. ID No. 5754, Seq. ID No. 5756, Seq. ID No. 5758, Seq. ID No. 5760, Seq. ID No. 5762, Seq. ID No. 5770, Seq. ID No. 5772, Seq. ID No. 5778, Seq. ID No. 5780, Seq. ID No. 5784, Seq. ID No. 5788, Seq. ID No. 5792, Seq. ID No. 5796, Seq. ID No. 5800, Seq. ID No. 5802, Seq. ID No. 5808, Seq. ID No. 5810, Seq. ID No. 5814, Seq. ID No. 5816, Seq. ID No. 5820, Seq. ID No. 5822, Seq. ID No. 5824, Seq. ID No. 5826, Seq. ID No. 5828, Seq. ID No. 5830, Seq. ID No. 5832, Seq. ID No. 5834, Seq. ID No. 5836, Seq. ID No. 5838, Seq. ID No. 5840, Seq. ID No. 5842, Seq. ID No. 5846, Seq. ID No. 5848, Seq. ID No. 5850, Seq. ID No. 5852, Seq. ID No. 5856, Seq. ID No. 5858, Seq. ID No. 5860, Seq. ID No. 5862, Seq. ID No. 5864, Seq. ID No. 5866, Seq. ID No. 5870, Seq. ID No. 5872, Seq. ID No. 5874, Seq. ID No. 5876, Seq. ID No. 5880, Seq. ID No. 5882, Seq. ID No. 5884, Seq. ID No. 5890, Seq. ID No. 5896, Seq. ID No. 5898, Seq. ID No. 5902, Seq. ID No. 5904, Seq. ID No. 5912, Seq. ID No. 5914, Seq. ID No. 5916, Seq. ID No. 5918, Seq. ID No. 5920, Seq. ID No. 5928, Seq. ID No. 5930, Seq. ID No. 5934, Seq. ID No. 5936, Seq. ID No. 5938, Seq. ID No. 5942, Seq. ID No. 5946, Seq. ID No. 5948, Seq. ID No. 5952, Seq. ID No. 5960, Seq. ID No. 5962, Seq. ID No. 5964, Seq. ID No. 5966, Seq. ID No. 5968, Seq. ID No. 5970, Seq. ID No. 5972, Seq. ID No. 5974, Seq. ID No. 5978, Seq. ID No. 5980, Seq. ID No. 5982, Seq. ID No. 5986, Seq. ID No. 5988, Seq. ID No. 5990, Seq. ID No. 5992, Seq. ID No. 5994, Seq. ID No. 5996, Seq. ID No. 6000, Seq. ID No. 6002, Seq. ID No. 6004, Seq. ID No. 6010, Seq. ID No. 6012, Seq. ID No. 6014, Seq. ID No. 6016, Seq. ID No. 6018, Seq. ID No. 6026, Seq. ID No. 6028, Seq. ID No. 6030, Seq. ID No. 6032, Seq. ID No. 6034, Seq. ID No. 6036, Seq. ID No. 6040, Seq. ID No. 6042, Seq. ID No. 6044, Seq. ID No. 6046, Seq. ID No. 6050, Seq. ID No. 6052, Seq. ID No. 6054, Seq. ID No. 6056, Seq. ID No. 6058, Seq. ID No. 6062, Seq. ID No. 6064, Seq. ID No. 6066, Seq. ID No. 6070, Seq. ID No. 6072, Seq. ID No. 6074, Seq. ID No. 6078, Seq. ID No. 6080, Seq. ID No. 6086, Seq. ID No. 6088, Seq. ID No. 6090, Seq. ID No. 6094, Seq. ID No. 6096, Seq. ID No. 6102, Seq. ID No. 6104, Seq. ID No. 6110, Seq. ID No. 6112, Seq. ID No. 6118, Seq. ID No. 6122, Seq. ID No. 6124, Seq. ID No. 6130, Seq. ID No. 6132, Seq. ID No. 6134, Seq. ID No. 6136, Seq. ID No. 6138, Seq. ID No. 6140, Seq. ID No. 6142, Seq. ID No. 6146, Seq. ID No. 6152, Seq. ID No. 6156, Seq. ID No. 6158, Seq. ID No. 6160, Seq. ID No. 6166, Seq. ID No. 6168, Seq. ID No. 6170, Seq. ID No. 6172, Seq. ID No. 6176, Seq. ID No. 6178, Seq. ID No. 6182, Seq. ID No. 6188, Seq. ID No. 6194, Seq. ID No. 6196, Seq. ID No. 6198, Seq. ID No. 6200, Seq. ID No. 6202, Seq. ID No. 6210, Seq. ID No. 6214, Seq. ID No. 6216, Seq. ID No. 6218, Seq. ID No. 6220, Seq. ID No. 6232, Seq. ID No. 6234, Seq. ID No. 6236, Seq. ID No. 6240, Seq. ID No. 6242, Seq. ID No. 6244, Seq. ID No. 6250, Seq. ID No. 6258, Seq. ID No. 6260, Seq. ID No. 6262, Seq. ID No. 6264, Seq. ID No. 6268, Seq. ID No. 6270, Seq. ID No. 6272, Seq. ID No. 6276, Seq. ID No. 6278, Seq. ID No. 6280, Seq. ID No. 6282, Seq. ID No. 6284, Seq. ID No. 6286, Seq. ID No. 6288, Seq. ID No. 6294, Seq. ID No: 6296, Seq. ID No. 6298, Seq. ID No. 6300, Seq. ID No. 6306, Seq. ID No. 6310, Seq. ID No. 6312, Seq. ID No. 6316, Seq. ID No. 6318, Seq. ID No. 6320, Seq. ID No. 6322, Seq. ID No. 6324, Seq. ID No. 6326, Seq. ID No. 6328, Seq. ID No. 6330, Seq. ID No. 6332, Seq. ID No. 6336, Seq. ID No. 6338, Seq. ID No. 6342, Seq. ID No. 6346, Seq. ID No. 6350, Seq. ID No. 6352, Seq. ID No. 6354, Seq. ID No. 6360, Seq. ID No. 6362, Seq. ID No. 6368, Seq. ID No. 6370, Seq. ID No. 6372, Seq. ID No. 6374, Seq. ID No. 6376, Seq. ID No. 6378, Seq. ID No. 6380, Seq. ID No. 6382, Seq. ID No. 6386, Seq. ID No. 6390, Seq. ID No. 6394, Seq. ID No. 6396, Seq. ID No. 6400, Seq. ID No. 6410, Seq. ID No. 6412, Seq. ID No. 6414, Seq. ID No. 6418, Seq. ID No. 6422, Seq. ID No. 6424, Seq. ID No. 6426, Seq. ID No. 6428, Seq. ID No. 6430, Seq. ID No. 6432, Seq. ID No. 6442, Seq. ID No. 644.4, Seq. ID No. 6446, Seq. ID No. 6452, Seq. ID No. 6454, Seq. ID No. 6460, Seq. ID No. 6462, Seq. ID No. 6464, Seq. ID No. 6466, Seq. ID No. 6468, Seq. ID No. 6470, Seq. ID No. 6472, Seq. ID No. 6474, Seq. ID No. 6480, Seq. ID No. 6484, Seq. ID No. 6494, Seq. ID No. 6496, Seq. ID No. 6498, Seq. ID No. 6502, Seq. ID No. 6504, Seq. ID No. 6506, Seq. ID No. 6508, Seq. ID No. 6512, Seq. ID No. 6518, Seq. ID No. 6524, Seq. ID No. 6526, Seq. ID No. 6536, Seq. ID No. 6538, Seq. ID No. 6540, Seq. ID No. 6542, Seq. ID No. 6544, Seq. ID No. 6546, Seq. ID No. 6548, Seq. ID No. 6550, Seq. ID No. 6552, Seq. ID No. 6554, Seq. ID No. 6556, Seq. ID No. 6558, Seq. ID No. 6560, Seq. ID No. 6564, Seq. ID No. 6574, Seq. ID No. 6576, Seq. ID No. 6578, Seq. ID No. 6580, Seq. ID No. 6584, Seq. ID No. 6586, Seq. ID No. 6588, Seq. ID No. 6592, Seq. ID No. 6598, Seq. ID No. 6602, Seq. ID No. 6604, Seq. ID No. 6606, Seq. ID No. 6610, Seq. ID No. 6612, Seq. ID No. 6614, Seq. ID No. 6616, Seq. ID No. 6618, Seq. ID No. 6620, Seq. ID No. 6622, Seq. ID No. 6624, Seq. ID No. 6628, Seq. ID No. 6630, Seq. ID No. 6632, Seq. ID No. 6634, Seq. ID No. 6638, Seq. ID No. 6640, Seq. ID No. 6644, Seq. ID No. 6646, and Seq. ID No. 6650.

55. The Alloiococcus otitidis polypeptide of claim 36, wherein the polypeptide is identified by an ORF finder program that searches for a transmembrane domain between two Stop codons and a Start codon immediately upstream of this transmembrane region, and is selected from one of Seq. ID No. 8, Seq. ID No. 10, Seq. ID No. 34, Seq. ID No. 48, Seq. ID No. 68, Seq. ID No. 86, Seq. ID No. 88, Seq. ID No. 124, Seq. ID No. 134, Seq. ID No. 142, Seq. ID No. 160, Seq. ID No. 164, Seq. ID No. 192, Seq. ID No. 210, Seq. ID No. 212, Seq. ID No. 216, Seq. ID No. 218, Seq. ID No. 226, Seq. ID No. 236, Seq. ID No. 238, Seq. ID No. 250, Seq. ID No. 252, Seq. ID No. 256, Seq. ID No. 272, Seq. ID No. 278, Seq. ID No. 286, Seq. ID No. 288, Seq. ID No. 290, Seq. ID No. 328, Seq. ID No. 330, Seq. ID No. 374, Seq. ID No. 376, Seq. ID No. 420, Seq. ID No. 488, Seq. ID No. 498, Seq. ID No. 500, Seq. ID No. 504, Seq. ID No. 506, Seq. ID No. 510, Seq. ID No. 512, Seq. ID No. 516, Seq. ID No. 526, Seq. ID No. 528, Seq. ID No. 546, Seq. ID No. 568, Seq. ID No. 570, Seq. ID No. 576, Seq. ID No. 578, Seq. ID No. 580, Seq. ID No. 594, Seq. ID No. 618, Seq. ID No. 638, Seq. ID No. 640, Seq. ID No. 642, Seq. ID No. 646, Seq. ID No. 654, Seq. ID No. 656, Seq. ID No. 660, Seq. ID No. 670, Seq. ID No. 676, Seq. ID No. 678, Seq. ID No. 680, Seq. ID No. 716, Seq. ID No. 718, Seq. ID No. 720, Seq. ID No. 722, Seq. ID No. 724, Seq. ID No. 748, Seq. ID No. 752, Seq. ID No. 756, Seq. ID No. 758, Seq. ID No. 760, Seq. ID No. 762, Seq. ID No. 764, Seq. ID No. 770, Seq. ID No. 778, Seq. ID No. 780, Seq. ID No. 808, Seq. ID No. 810, Seq. ID No. 820, Seq. ID No. 826, Seq. ID No. 864, Seq. ID No. 894, Seq. ID No. 902, Seq. ID No. 936, Seq. ID No. 944, Seq. ID No. 956, Seq. ID No. 968, Seq. ID No. 980, Seq. ID No. 1006, Seq. ID No. 1010, Seq. ID No. 1012, Seq. ID No. 1014, Seq. ID No. 1016, Seq. ID No. 1020, Seq. ID No. 1030, Seq. ID No. 1032, Seq. ID No. 1034, Seq. ID No. 1038, Seq. ID No. 1040, Seq. ID No. 1046, Seq. ID No. 1056, Seq. ID No. 1076, Seq. ID No. 1106, Seq. ID No. 1132, Seq. ID No. 1136, Seq. ID No. 1138, Seq. ID No. 1166, Seq. ID No. 1168, Seq. ID No. 1170, Seq. ID No. 1184, Seq. ID No. 1194, Seq. ID No. 1198, Seq. ID No. 1214, Seq. ID No. 1224, Seq. ID No. 1228, Seq. ID No. 1230, Seq. ID No. 1238, Seq. ID No. 1244, Seq. ID No. 1266, Seq. ID No. 1268, Seq. ID No. 1270, Seq. ID No. 1272, Seq. ID No. 1284, Seq. ID No. 1288, Seq. ID No. 1292, Seq. ID No. 1298, Seq. ID No. 1306, Seq. ID No. 1316, Seq. ID No. 1326, Seq. ID No. 1328, Seq. ID No. 1330, Seq. ID No. 1332, Seq. ID No. 1342, Seq. ID No. 1354, Seq. ID No. 1368, Seq. ID No. 1402, Seq. ID No. 1430, Seq. ID No. 1436, Seq. ID No. 1446, Seq. ID No. 1482, Seq. ID No. 1514, Seq. ID No. 1516, Seq. ID No. 1518, Seq. ID No. 1530, Seq. ID No. 1534, Seq. ID No. 1536, Seq. ID No. 1546, Seq. ID No. 1548, Seq. ID No. 1552, Seq. ID No. 1560, Seq. ID No. 1564, Seq. ID No. 1572, Seq. ID No. 1580, Seq. ID No. 1584, Seq. ID No. 1586, Seq. ID No. 1622, Seq. ID No. 1634, Seq. ID No. 1644, Seq. ID No. 1646, Seq. ID No. 1648, Seq. ID No. 1650, Seq. ID No. 1654, Seq. ID No. 1672, Seq. ID No. 1674, Seq. ID No. 1678, Seq. ID No. 1682, Seq. ID No. 1708, Seq. ID No. 1732, Seq. ID No. 1734, Seq. ID No. 1738; Seq. ID No. 1754, Seq: ID No. 1758, Seq. ID No. 1766, Seq. ID No. 1768, Seq. ID No. 1788, Seq. ID No. 1792, Seq. ID No. 1798, Seq. ID No. 1806, Seq. ID No. 1820, Seq. ID No. 1822, Seq. ID No. 1824, Seq. ID No. 1840, Seq. ID No. 1870, Seq. ID No. 1876, Seq. ID No. 1892, Seq. ID No. 1894, Seq. ID No. 1896, Seq. ID No. 1924, Seq. ID No. 1928, Seq. ID No. 1970, Seq. ID No. 1982, Seq. ID No. 1992, Seq. ID No. 1994, Seq. ID No. 2014, Seq. ID No. 2018, Seq. ID No. 2028, Seq. ID No. 2034, Seq. ID No. 2042, Seq. ID No. 2050, Seq. ID No. 2054, Seq. ID No. 2088, Seq. ID No. 2090, Seq. ID No. 2106, Seq. ID No. 2116, Seq. ID No. 2122, Seq. ID No. 2128, Seq. ID No. 2152, Seq. ID No. 2160, Seq. ID No. 2172, Seq. ID No. 2174, Seq. ID No. 2178, Seq. ID No. 2188, Seq. ID No. 2238, Seq. ID No. 2240, Seq. ID No. 2246, Seq. ID No. 2250, Seq. ID No. 2272, Seq. ID No. 2284, Seq. ID No. 2290, Seq. ID No. 2292, Seq. ID No. 2294, Seq. ID No. 2296, Seq. ID No. 2304, Seq. ID No. 2306, Seq. ID No. 2308, Seq. ID No. 2318, Seq. ID No. 2320, Seq. ID No. 2322, Seq. ID No. 2324, Seq. ID No. 2326, Seq. ID No. 2328, Seq. ID No. 2334, Seq. ID No. 2344, Seq. ID No. 2348, Seq. ID No. 2350, Seq. ID No. 2352, Seq. ID No. 2354, Seq. ID No. 2356, Seq. ID No. 2358, Seq. ID No. 2366, Seq. ID No. 2390, Seq. ID No. 2392, Seq. ID No. 2408, Seq. ID No. 2420, Seq. ID No. 2422, Seq. ID No. 2428, Seq. ID No. 2430, Seq. ID No. 2434, Seq. ID No. 2450, Seq. ID No. 2460, Seq. ID No. 2490, Seq. ID No. 2498, Seq. ID No. 2504, Seq. ID No. 2508, Seq. ID No. 2516, Seq. ID No. 2524, Seq. ID No. 2526, Seq. ID No. 2532, Seq. ID No. 2536, Seq. ID No. 2538, Seq. ID No. 2542, Seq. ID No. 2544, Seq. ID No. 2546, Seq. ID No. 2556, Seq. ID No. 2558, Seq. ID No. 2570, Seq. ID No. 2572, Seq. ID No. 2584, Seq. ID No. 2592, Seq. ID No. 2598, Seq. ID No. 2600, Seq. ID No. 2602, Seq. ID No. 2608, Seq. ID No. 2612, Seq. ID No. 2622, Seq. ID No. 2630, Seq. ID No. 2652, Seq. ID No. 2680, Seq. ID No. 2694, Seq. ID No. 2702, Seq. ID No. 2704, Seq. ID No. 2706, Seq. ID No. 2708, Seq. ID No. 2732, Seq. ID No. 2734, Seq. ID No. 2784, Seq. ID No. 2786, Seq. ID No. 2814, Seq. ID No. 2816, Seq. ID No. 2824, Seq. ID No. 2836, Seq. ID No. 2838, Seq. ID No. 2842, Seq. ID No. 2854, Seq. ID No. 2874, Seq. ID No. 2876, Seq. ID No. 2882, Seq. ID No. 2906, Seq. ID No. 2936, Seq. ID No. 2938, Seq. ID No. 2940, Seq. ID No. 2942, Seq. ID No. 2948, Seq. ID No. 2950, Seq. ID No. 2970, Seq. ID No. 2974, Seq. ID No. 2978, Seq. ID No. 2982, Seq. ID No. 2988, Seq. ID No. 2992, Seq. ID No. 2996, Seq. ID No. 2998, Seq. ID No. 3006, Seq. ID No. 3008, Seq. ID No. 3014, Seq. ID No. 3024, Seq. ID No. 3026, Seq. ID No. 3028, Seq. ID No. 3030, Seq. ID No. 3032, Seq. ID No. 3044, Seq. ID No. 3056, Seq. ID No. 3064, Seq. ID No. 3072, Seq. ID No. 3074, Seq. ID No. 3076, Seq. ID No. 3078, Seq. ID No. 3124, Seq. ID No. 3146, Seq. ID No. 3156, Seq. ID No. 3158, Seq. ID No. 3164, Seq. ID No. 3184, Seq. ID No. 3194, Seq. ID No. 3202, Seq. ID No. 3214, Seq. ID No. 3216, Seq. ID No. 3218, Seq. ID No. 3220, Seq. ID No. 3242, Seq. ID No. 3244, Seq. ID No. 3246, Seq. ID No. 3250, Seq. ID No. 3258, Seq. ID No. 3262, Seq. ID No. 3270, Seq. ID No. 3276, Seq. ID No. 3298, Seq. ID No. 3318, Seq. ID No. 3324, Seq. ID No. 3338, Seq. ID No. 3340, Seq. ID No. 3350, Seq. ID No. 3352, Seq. ID No. 3354, Seq. ID No. 3358, Seq. ID No. 3360, Seq. ID No. 3378, Seq. ID No. 3390, Seq. ID No. 3392, Seq. ID No. 3396, Seq. ID No. 3406, Seq. ID No. 3422, Seq. ID No. 3426, Seq. ID No. 3450, Seq. ID No. 3452, Seq. ID No. 3454, Seq. ID No. 3456, Seq. ID No. 3458, Seq. ID No. 3464, Seq. ID No. 3482, Seq. ID No. 3492, Seq. ID No. 3494, Seq. ID No. 3504, Seq. ID No. 3506, Seq. ID No. 3528, Seq. ID No. 3594, Seq. ID No. 3596, Seq. ID No. 3622, Seq. ID No. 3626, Seq. ID No. 3636, Seq. ID No. 3680, Seq. ID No. 3724, Seq. ID No. 3728, Seq. ID No. 3746, Seq. ID No. 3754, Seq. ID No. 3756, Seq. ID No. 3758, Seq. ID No. 3762, Seq. ID No. 3764, Seq. ID No. 3766, Seq. ID No. 3784, Seq. ID No. 3794, Seq. ID No. 3800, Seq. ID No. 3814, Seq. ID No. 3838, Seq. ID No. 3840, Seq. ID No. 3850, Seq. ID No. 3852, Seq. ID No. 3854, Seq. ID No. 3860, Seq. ID No. 3862, Seq. ID No. 3864, Seq. ID No. 3866, Seq. ID No. 3880, Seq. ID No. 3890, Seq. ID No. 3892, Seq. ID No. 3904, Seq. ID No. 3926, Seq. ID No. 3964, Seq. ID No. 3974, Seq. ID No. 3976, Seq. ID No. 4006, Seq. ID No. 4026, Seq. ID No. 4028, Seq. ID No. 4040, Seq. ID No. 4042, Seq. ID No. 4044, Seq. ID No. 4046, Seq. ID No. 4048, Seq. ID No. 4062, Seq. ID No. 4072, Seq. ID No. 4074, Seq. ID No. 4080, Seq. ID No. 4082, Seq. ID No. 4084, Seq. ID No. 4102, Seq. ID No. 4104, Seq. ID No. 4112, Seq. ID No. 4134, Seq. ID No. 4138, Seq. ID No. 4140, Seq. ID No. 4146, Seq. ID No. 4152, Seq. ID No. 4222, Seq. ID No. 4224, Seq. ID No. 4226, Seq. ID No. 4228, Seq. ID No. 4232, Seq. ID No. 4242, Seq. ID No. 4248, Seq. ID No. 4254, Seq. ID No. 4258, Seq. ID No. 4262, Seq. ID No. 4308, Seq. ID No. 4312, Seq. ID No. 4314, Seq. ID No. 4344, Seq. ID No. 4380, Seq. ID No. 4386, Seq. ID No. 4390, Seq. ID No. 4440, Seq. ID No. 4470, Seq. ID No. 4474, Seq. ID No. 4482, Seq. ID No. 4484, Seq. ID No. 4486, Seq. ID No. 4498, Seq. ID No. 4516, Seq. ID No. 4534, Seq. ID No. 4588, Seq. ID No. 4640, Seq. ID No. 4644, Seq. ID No. 4682, Seq. ID No. 4706, Seq. ID No. 4708, Seq. ID No. 4710, Seq. ID No. 4712, Seq. ID No. 4716, Seq. ID No. 4718, Seq. ID No. 4738, Seq. ID No. 4760, Seq. ID No. 4814, Seq. ID No. 4828, Seq. ID No. 4870, Seq. ID No. 4872, Seq. ID No. 4874, Seq. ID No. 4876, Seq. ID No. 4920, Seq. ID No. 4932, Seq. ID No. 4950, Seq. ID No. 4952, Seq. ID No. 4988, Seq. ID No. 5032, Seq. ID No. 5062, Seq. ID No. 5086, Seq. ID No. 5104, Seq. ID No. 5124, Seq. ID No. 5130, Seq. ID No. 5132, Seq. ID No. 5136, Seq. ID No. 5138, Seq. ID No. 5142, Seq. ID No. 5166, Seq. ID No. 5176, Seq. ID No. 5200, Seq. ID No. 5206, Seq. ID No. 5208, Seq. ID No. 5214, Seq. ID No. 5220, Seq. ID No. 5224, Seq. ID No. 5268, Seq. ID No. 5282, Seq. ID No. 5386, Seq. ID No. 5388, Seq. ID No. 5414, Seq. ID No. 5416, Seq. ID No. 5434, Seq. ID No. 5454, Seq. ID No. 5460, Seq. ID No. 5462, Seq. ID No. 5464, Seq. ID No. 5466, Seq. ID No. 5492, Seq. ID No. 5498, Seq. ID No. 5510, Seq. ID No. 5514, Seq. ID No. 5526, Seq. ID No. 5532, Seq. ID No. 5570, Seq. ID No. 5588, Seq. ID No. 5596, Seq. ID No. 5598, Seq. ID No. 5610, Seq. ID No. 5612, Seq. ID No. 5622, Seq. ID No. 5624, Seq. ID No. 5634, Seq. ID No. 5638, Seq. ID No. 5644, Seq. ID No. 5650, Seq. ID No. 5660, Seq. ID No. 5684, Seq. ID No. 5686, Seq. ID No. 5700, Seq. ID No. 5706, Seq. ID No. 5710, Seq. ID No. 5730, Seq. ID No. 5734, Seq. ID No. 5764, Seq. ID No. 5766, Seq. ID No. 5768, Seq. ID No. 5772, Seq. ID No. 5784, Seq. ID No. 5792, Seq. ID No. 5798, Seq. ID No. 5886, Seq. ID No. 5890, Seq. ID No. 5894, Seq. ID No. 5896, Seq. ID No. 5900, Seq. ID No. 5902, Seq. ID No. 5906, Seq. ID No. 5910, Seq. ID No. 5922, Seq. ID No. 5924, Seq. ID No. 5928, Seq. ID No. 5940, Seq. ID No. 6028, Seq. ID No. 6044, Seq. ID No. 6048, Seq. ID No. 6060, Seq. ID No. 6068, Seq. ID No. 6090, Seq. ID No. 6092, Seq. ID No. 6108, Seq. ID No. 6112, Seq. ID No. 6118, Seq. ID No. 6162, Seq. ID No. 6164, Seq. ID No. 6166, Seq. ID No. 6170, Seq. ID No. 6184, Seq. ID No. 6186, Seq. ID No. 6190, Seq. ID No. 6192, Seq. ID No. 6198, Seq. ID No. 6204, Seq. ID No. 6206, Seq. ID No. 6210, Seq. ID No. 6222, Seq. ID No. 6224, Seq. ID No. 6226, Seq. ID No. 6228, Seq. ID No. 6230, Seq. ID No. 6236, Seq. ID No. 6238, Seq. ID No. 6244, Seq. ID No. 6246, Seq. ID No. 6250, Seq. ID No. 6254, Seq. ID No. 6264, Seq. ID No. 6266, Seq. ID No. 6274, Seq. ID No. 6276, Seq. ID No. 6286, Seq. ID No. 6290, Seq. ID No. 6302, Seq. ID No. 6304, Seq. ID No. 6364, Seq. ID No. 6378, Seq. ID No. 6382, Seq. ID No. 6384, Seq. ID No. 6416, Seq. ID No. 6428, Seq. ID No. 6432, Seq. ID No. 6474, Seq. ID No. 6498, Seq. ID No. 6572, Seq. ID No. 6582, Seq. ID No. 6594, Seq. ID No. 6600, Seq. ID No. 6632, and Seq. ID No. 6640.

56. An isolated polypeptide encoded by a polynucleotide comprising a nucleotide sequence having at least about 70% identity to a nucleotide sequence contained within SEQ ID NO: 6651, a complement thereof, a degenerate variant thereof, and a fragment thereof.

57. A recombinant expression vector comprising a nucleotide sequence having at least about 70% identity to a nucleotide sequence chosen from one of the odd numbered sequences set out in SEQ ID NO: 1 through SEQ ID NO: 6649, a complement thereof, a degenerate variant thereof, and a fragment thereof.

58. The vector of claim 57, wherein the polynucleotide is selected from the group consisting of genomic DNA, cDNA, and RNA.

59. The vector of claim 58, wherein the polynucleotide comprises heterologous nucleotide sequences.

60. The vector of claim 58, wherein the polynucleotide is operatively linked to one or more gene expression regulatory elements.

61. The vector of claim 60, wherein the polynucleotide encodes a polypeptide comprising an amino acid sequence having at least about 70% identity to an amino acid sequence chosen from one of even numbered sequences set out in SEQ ID NO: 2 through SEQ ID NO: 6650, a biological equivalent thereof, and a fragment thereof.

62. The vector of claim 57, wherein the vector is a plasmid.

63. A genetically engineered host cell, transfected, transformed or infected with the vector of claim 57.

64. The host cell of claim 63, wherein the host cell is a bacterial cell.

65. The host cell of claim 64, wherein the polynucleotide is expressed to produce the encoded polypeptide, a biological equivalent thereof, or a fragment thereof.

66. An antibody specific for a polypeptide encoded by an Alloiococcus otitidis polynucleotide chosen from one of the odd numbered sequences from SEQ ID NO: 1 through SEQ ID NO: 6649, a complement thereof, a fragment thereof, and a degenerate variant thereof.

67. An antibody specific for an Alloiococcus otitidis polypeptide chosen from one of even numbered sequence listings set out in SEQ ID NO: 2 through SEQ ID NO: 6650, a complement thereof, a biological equivalent thereof, and a fragment thereof.

68. The antibody of claim 66, wherein the antibody is selected from the group consisting of monoclonal, polyclonal, chimeric, humanized and single chain.

69. The antibody of claim 67, wherein the antibody is selected from the group consisting of monoclonal, polyclonal, chimeric, humanized and single chain.

70. The antibody of claim 66, wherein the antibody is monoclonal.

71. The antibody of claim 67, wherein the antibody is monoclonal.

72. The antibody of claim 66, wherein the antibody is humanized.

73. The antibody of claim 67, wherein the antibody is humanized.

74. An immunogenic composition comprising a polypeptide having an amino acid a sequence chosen from one of even numbered sequence listings set out in SEQ ID NO: 2 through SEQ ID NO: 6650, a complement thereof, a biological equivalent thereof, and a fragment thereof.

75. The immunogenic composition of claim 74, further comprising a pharmaceutically acceptable carrier.

76. The immunogenic composition of claim 74, further comprising one or more adjuvants.

77. The immunogenic composition of claim 74, wherein the polypeptide is further defined as:
(a) an Alloiococcus otitidis polypeptide predicted by SignalP algorithm analysis as having met all four criteria set out in the SignalP algorithm for a polypeptide having a signal peptide and predicted by HMM Signal P algorithm analysis as having a signal peptide;
(b) an Alloiococcus otitidis polypeptide predicted by SignalP algorithm analysis as having met three of the four criteria set out in the SignalP algorithm for a polypeptide having a signal peptide and predicted by HMM Signal P algorithm analysis as having a signal peptide;
(c) an Alloiococcus otitidis polypeptide predicted by HMM SignalP algorithm analysis as having a signal peptide;
(d) an Alloiococcus otitidis polypeptide predicted by HMM SignalP algorithm analysis as being a non-secretory protein;
(e) an Alloiococcus otitidis polypeptide identified by BlastP analysis;
(f) an Alloiococcus otitidis polypeptide identified by Pfam analysis;
(g) an Alloiococcus otitidis polypeptide identified using proteomics methodology as sharing homology with surface exposed proteins of Streptococcus pneumoniae;
(h) an Alloiococcus otitidis lipoprotein;
(i) an Alloiococcus otitidis polypeptide having a LPXTG motif, wherein the polypeptide is covalently attached to the peptidoglycan layer;
(j) an Alloiococcus otitidis polypeptide, wherein the polypeptide is non-covalently associated with the peptidoglycan layer;
(k) an Alloiococcus otitidis polypeptide having an RGDX motif wherein X is not a proline residue;
(l) an Alloiococcus otitidis polypeptide predicted by BlastP as being involved in capsule biosynthesis and transport;
(m) an Alloiococcus otitidis polypeptide identified by BlastP as being localized within the capsule loci of the Alloiococcus otitidis genome;
(n) an Alloiococcus otitidis polypeptide predicted by BlastP as being associated with sporulation;
(o) an Alloiococcus otitidis polypeptide encoded by unique ORFs identified by BlastP analysis as having a BlastP ‘E Value’ of >e⁻¹⁰;
(p) an Alloiococcus otitidis polypeptide identified by Glimmer™ ORF finder program;
(q) an Alloiococcus otitidis polypeptide identified by GeneMark™ ORF finder program;
(r) an Alloiococcus otitidis polypeptide identified by an ORF finder program that searches for an ATG, GTG or TTG start codon between a Stop-Stop region; and
(s) an Alloiococcus otitidis polypeptide identified by an ORF finder program that searches for a transmembrane domain between two Stop codons and a Stop codon immediately upstream of this transmembrane region.

78. The immunogenic composition of claim 77, wherein the polypeptide further comprises heterologous amino acids.

79. The immunogenic composition of claim 77, wherein the polypeptide is a fusion polypeptide.

80. The immunogenic composition of claim 77, wherein the polypeptide is encoded by a polynucleotide comprising a nucleotide sequence having at least about 70% identity to a nucleotide sequence chosen from one of odd numbered sequence listings set out in SEQ ID NO: 1 through SEQ ID NO: 6649, a degenerate variant thereof, or a fragment thereof.

81. The immunogenic composition of claim 8D, wherein the polynucleotide further comprises heterologous nucleotides.

82. An immunogenic composition comprising a polynucleotide having a nucleotide sequence chosen from one of one of odd numbered sequence listings set out in SEQ ID NO: 1 through SEQ ID NO: 6649, a degenerate variant thereof, or a fragment thereof and is comprised in an expression vector.

83. The immunogenic composition of claim 82, wherein the vector is plasmid DNA.

84. The immunogenic composition of claim 83, wherein the polynucleotide comprises heterologous nucleotides.

85. The immunogenic composition of claim 83, wherein the polynucleotide is operatively linked to one or more gene expression regulatory elements.

86. The immunogenic composition of claim 85, wherein the polynucleotide directs the expression of a neutralizing epitope of Alloiococcus otitidis.

87. The immunogenic composition of claim 86, further comprising one or more adjuvants.

88. A pharmaceutical composition comprising a polypeptide and a pharmaceutically acceptable carrier, wherein the polypeptide comprises an amino acid chosen from one of even numbered sequence listings set out in SEQ ID NO: 2 through SEQ ID NO: 6650, a complement thereof, a biological equivalent thereof, and a fragment thereof.

89. The pharmaceutical composition of claim 88, wherein the polypeptide is further defined as:
(a) an Alloiococcus otitidis polypeptide predicted by SignalP algorithm analysis as having met all four criteria set out in the SignalP algorithm for a polypeptide having a signal peptide and predicted by HMM SignalP algorithm analysis as having a signal peptide;
(b) an Alloiococcus otitidis polypeptide predicted by SignalP algorithm analysis as having met three of the four criteria set out in the SignalP algorithm for a polypeptide having a signal peptide and predicted by HMM SignalP algorithm analysis as having a signal peptide;
(c) an Alloiococcus otitidis polypeptide predicted by HMM SignalP algorithm analysis as having a signal peptide;
(d) an Alloiococcus otitidis polypeptide predicted by HMM SignalP algorithm analysis as being a non-secretory protein;
(e) an Alloiococcus otitidis polypeptide identified by BlastP analysis;
(f) an Alloiococcus otitidis polypeptide identified by Pfam analysis;
(g) an Alloiococcus otitidis polypeptide identified using proteomics methodology as sharing homology with surface exposed proteins of Streptococcus pneumoniae;
(h) an Alloiococcus otitidis lipoprotein;
(i) an Alloiococcus otitidis polypeptide having a LPXTG motif, wherein the polypeptide is covalently attached to the peptidoglycan layer;
(j) an Alloiococcus otitidis polypeptide, wherein the polypeptide is non-covalently associated with the peptidoglycan layer;
(k) an Alloiococcus otitidis polypeptide having an RGDX motif wherein X is not a proline residue;
(l) an Alloiococcus otitidis polypeptide predicted by BlastP as being involved in capsule biosynthesis and transport;
(m) an Alloiococcus otitidis polypeptide identified by BlastP as being localized within the capsule loci of the Alloiococcus otitidis genome;
(n) an Alloiococcus otitidis polypeptide predicted by BlastP as being associated with sporulation;
(o) an Alloiococcus otitidis polypeptide encoded by unique ORFs identified by BlastP analysis as having a BlastP ‘E Value’ of >e⁻¹⁰;
(p) an Alloiococcus otitidis polypeptide identified by Glimmer™ ORF finder program;
(q) an Alloiococcus otitidis polypeptide identified by GeneMark™ ORF finder program;
(r) an Alloiococcus otitidis polypeptide identified by an ORF finder program that searches for an ATG, GTG or TTG start codon between a Stop-Stop region; and
(s) an Alloiococcus otitidis polypeptide identified by an ORF finder program that searches for a transmembrane domain between two Stop codons and a Start codon immediately upstream of this transmembrane region.

90. The pharmaceutical composition of claim 89, wherein the polypeptide further comprises heterologous amino acids.

91. The pharmaceutical composition of claim 90, wherein the polypeptide is a fusion polypeptide.

92. A DNA chip comprising an array of polynucleotides, wherein at least one of the polynucleotides comprise a nucleotide sequence chosen from one of one of odd numbered sequence listings set out in SEQ ID NO: 1 through SEQ ID NO: 6649, a complement thereof, a degenerate variant thereof, and a fragment thereof.

93. A protein chip comprising an array of polypeptides, wherein at least one of the polypeptides comprises an amino acid sequence chosen from one of even numbered sequence listings set out in SEQ ID NO: 2 through SEQ ID NO: 6650, a biological equivalent thereof, or a fragment thereof.

94. A method of immunizing against Alloiococcus otitidis comprising administering to a host an immunizing amount of an immunogenic composition comprising a polypeptide and a pharmaceutically acceptable carrier, wherein the polypeptide comprises an amino acid sequence chosen from one of even numbered sequence listings set out in SEQ ID NO: 2 through SEQ ID NO: 6650, a biological equivalent thereof, or a fragment thereof.

95. The method of claim 94, wherein the polypeptide is a fusion polypeptide.

96. The method of claim 94, further comprising an adjuvant.

97. A method for the detection and/or identification of Alloiococcus otitidis in a biological sample comprising:
(a) contacting the sample with an oligonucleotide probe of a polynucleotide comprising the nucleotide sequence chosen from one of odd numbered sequence listings set out in SEQ ID NO: 1 through SEQ ID NO: 6649, a degenerate variant thereof, or a fragment thereof, under conditions permitting hybridization; and
(b) detecting the presence of hybridization complexes in the sample, wherein hybridization complexes indicate the presence of Alloiococcus otitidis in the sample.

98. A method for the detection and/or identification of Alloiococcus otitidis in a biological sample comprising:
(a) contacting the sample with an oligonucleotide primer of a polynucleotide comprising the nucleotide sequence chosen from one of odd numbered sequence listings set out in SEQ ID NO: 1 through SEQ ID NO: 6649, a degenerate variant thereof, or a fragment thereof, in the presence of nucleotides and a polymerase enzyme under conditions permitting primer extension; and
(b) detecting the presence of primer extension products in the sample, wherein extension products indicate the presence of Alloiococcus otitidis in the sample.

99. A method for the detection and/or identification of Alloiococcus otitidis in a biological sample comprising:
(a) contacting the sample with an antibody specific for a polypeptide comprising an amino acid sequence chosen from one of even numbered sequence listings set out in SEQ ID NO: 2 through SEQ ID NO: 6650, a biological equivalent thereof, or a fragment thereof, under conditions permitting immune complex formation; and
(b) detecting the presence of immune complexes in the sample, wherein immune complexes indicate the presence of Alloiococcus otitidis in the sample.

100. A method for the detection and/or identification of antibodies to Alloiococcus otitidis in a biological sample comprising:
(a) contacting the sample with a polypeptide comprising an amino acid sequence chosen from one of even numbered sequence listings set out in SEQ ID NO: 2 through SEQ ID NO: 6650, a biological equivalent thereof, Nor a fragment thereof, under conditions permitting immune complex formation; and
(b) detecting the presence of immune complexes in the sample, wherein immune complexes indicate the presence of Alloiococcus otitidis in the sample.

101. A kit comprising a container containing an isolated polynucleotide comprising an nucleotide sequence chosen from one of odd numbered sequence listing set out in SEQ ID NO: 1 through SEQ ID NO: 6649, a degenerate variant thereof, or a fragment thereof.

102. The kit of claim 101, wherein the polynucleotide is a primer or a probe.

103. The kit of claim 101, wherein the polynucleotide is a primer and the kit further comprises a container containing a polymerase.

104. The kit of claim 103, wherein the kit further comprises a container containing dNTP.

105. A kit comprising a container containing an antibody that immunospecifically binds to a polypeptide comprising the amino acid sequence chosen from one of even numbered sequence listings set out in SEQ ID NO: 2 through SEQ ID NO: 6650, a biological equivalent thereof, or a fragment thereof.

106. A kit comprising a container containing an antibody that immunospecifically binds to a fusion polypeptide comprising at least the amino acid sequence chosen from one of even numbered sequence listings set out in SEQ ID NO: 2 through SEQ ID NO: 6650, a biological equivalent thereof, or a fragment thereof.

107. A method for producing a polypeptide, which comprises culturing the genetically engineered host cell of claim 63 under conditions suitable to produce the polypeptide and recovering the polypeptide from the culture.

The application's sequence listing, which the Patent Office published only in electronic form, follows.

SEQUENCE LISTING (6653 sequences)

SEQ ID NO: 1 - DNA, 870 bp, Alloiococcus otitidis
  CDS (4)..(867)
accatgatggatgagcgactaaccagcctactgggcataagctacccaattattcaaggcggaatggcgaagatttccagacctgacctggtttctgccgtgagtcaagcgggtggcttgggtgttttgacctccatggggctgactccccaagagttgagccaggatatccaggaagtccaaaagcggattgatcagccctttgccgtcaacctaatgctccagcaagataatatttttgacctcctggaagtgatcaaagaagtgaaaccccctgtggtgatgaccggtgctggcagtcccaaagcttttgtccaagatttaagggatttggacatcaaggtcatcccagtcctgtcgacggtgagccaggcccagaaaatggaagccttaggggtggatgccatcgtagtagaaggtcaagaagcaggtggtcacattggttggacgtcaaccatggctagcctgccccaggtggtccaggctgttgacattccggttgtagcggcaggcggtatcgggtcaggacaggccattgcagcagcggaatgtctgggagcttgtggtgttcagttggggaccttgtttttgtcggctaaagaatgccccatcagtgacctctaccgcaaaaaattactggcctgccaggaccaggacaccctggttagtgaactccacccgggtggccgggttcggagcttaaaagctagctgtcaagatgaccctgacctcttggccaaggaaggggaagccggcctccattatgccggggaagtggcaggacaaatagacaatttagccacagcccaagaaattgtagaccgacttgtagcccaataccaatcgacactaaaaaaactaattcaataa

SEQ ID NO: 2 - protein, 288 aa, Alloiococcus otitidis
MMDERLTSLLGISYPIIQGGMAKISRPDLVSAVSQAGGLGVLTSMGLTPQELSQDIQEVQKRIDQPFAVNLMLQQDNIFDLLEVIKEVKPPVVMTGAGSPKAFVQDLRDLDIKVIPVLSTVSQAQKMEALGVDAIVVEGQEAGGHIGWTSTMASLPQVVQAVDIPVVAAGGIGSGQAIAAAECLGACGVQLGTLFLSAKECPISDLYRKKLLACQDQDTLVSELHPGGRVRSLKASCQDDPDLLAKEGEAGLHYAGEVAGQIDNLATAQEIVDRLVAQYQSTLKKLIQ

SEQ ID NO: 3 - DNA, 957 bp, Alloiococcus otitidis
  CDS (85)..(954)
aatcactacaaggaggaagataagatgattgatagacgtttaaccgacctcttgggaacccagtacccaattatccagggtgggatggcccggattagtaagccagaattagtcagtgctgtcagcagtgcaggtggcctaggcgttttaacctcggttggggtggatgcagcgggttttcgggcggacatccaggaaatccgccgtttgacggacaagccctttggggtcaacttgatgttgcagttggacaacattcctgaattgttggaggttgtcaaggaagaaaaaccagccgttgtcttaactggagcggggaccccgaaagactttgcccaagacttgcaagcacttggcatcaaagttatcccggttgtctctgccgtcaagcatgccaagaaaatggaagccttgggtgtggatgccgtagtatgtgaaggccaagaagctggtggtcacattgggatcacttctaccatggccaccctgccccaggtggtgcaagctgttgatatgccagttattgctgctggtggaatcgggtcaggccaggccattgctgcagcagaatgtttaggggcatgcggggtacaaatagggaccttgtttttggcagcagaagagtgtgccattagcgaggcctaccgccagcaggtcattgatgctggcgaccaagataccattgttaccggaattagtaccggtggccgggtcaggtccgttgcctctcctttcttggctgaactcttggccgatgaattaaaggggttagaccctaaagttttcttggaaaggactcaaggatcttatggccgggccattgccggagaaattgaccaagggaccatccaggctggcgaagtagcaggtcaagttaaagccaagtctactgccaaagcaatcattgaccggctcgtggctgaataccaggaaaccgtagccaagtttcagagttaa

SEQ ID NO: 4 - protein, 290 aa, Alloiococcus otitidis
MARISKPELVSAVSSAGGLGVLTSVGVDAAGFRADIQEIRRLTDKPFGVNLMLQLDNIPELLEVVKEEKPAVVLTGAGTPKDFAQDLQALGIKVIPVVSAVKHAKKMEALGVDAVVCEGQEAGGHIGITSTMATLPQVVQAVDMPVIAAGGIGSGQAIAAAECLGACGVQIGTLFLAAEECAISEAYRQQVIDAGDQDTIVTGISTGGRVRSVASPFLAELLADELKGLDPKVFLERTQGSYGRAIAGEIDQGTIQAGEVAGQVKAKSTAKAIIDRLVAEYQETVAKFQS

SEQ ID NO: 5 - DNA, 957 bp, Alloiococcus otitidis; identical to SEQ ID NO: 3
  CDS (25)..(954)

SEQ ID NO: 6 - protein, 310 aa, Alloiococcus otitidis
MIDRRLTDLLGTQYPIIQGGMARISKPELVSAVSSAGGLGVLTSVGVDAAGFRADIQEIRRLTDKPFGVNLMLQLDNIPELLEVVKEEKPAVVLTGAGTPKDFAQDLQALGIKVIPVVSAVKHAKKMEALGVDAVVCEGQEAGGHIGITSTMATLPQVVQAVDMPVIAAGGIGSGQAIAAAECLGACGVQIGTLFLAAEECAISEAYRQQVIDAGDQDTIVTGISTGGRVRSVASPFLAELLADELKGLDPKVFLERTQGSYGRAIAGEIDQGTIQAGEVAGQVKAKSTAKAIIDRLVAEYQETVAKFQS

SEQ ID NO: 7 - DNA, 1326 bp, Alloiococcus otitidis
  CDS (907)..(1323)
aatattatttataaaggagcaattattatgtcacaagatttaaagaagcatgacggtgtctacccaggttggtggatagtcgtcaccggattcctagcaatggctattatcttcccggccggtctagctcttatgagtgtcttgatcgggccgatcgctgaatcctttggcgttcccacatccaccgtttccgtccaattctccatgatcaccctcttttcgatgttcgggtccatgacctcaggttacttcttcgataaatttgggatgaagaaaaccatgctggcttcaaccttaatcgctattattggtttccttgccttagccttctcgccaaccatttacttaaactatgttattgctgccatcatgggctttgcccttccgttggtgaccaatgtggggatttcagttatcgttaacgtctggtttggtaagaaactagcaggtaacgctgtcggaattgccatgactggtagtggtttcggtgccatgatcttaaccccagttatgacccaaattatcgaaaactttgaagcgagctggcgggctggttacatcttcttagccatcttatccaccttgatcgttttgccttttgtcatttttgccattaaagaaagtcctgaagcagaaggtatccaaaaaattgggactggatcacctgatggtgaaagtggtggctcttctattaaagaagacagtaactatgggattaccctaagcaaggccaaatcaacagcagccttttatatcacagccttcattattattgtcggttccctagttggtttgattttcttcaccattgcttacgaatattttgtagaaactggattttcaccagaatttgcctctatcctcctatctgtccaagcggcagctgttattgttgggaagtacttcatgggggccttaagtgaccggaccaatgcctttgtttctacctttatcgttgctgccttcatgctagctggtgtcctttgcatcatgctggtcaacggtagccaggtcctagcaattatcgctatgctcttgtttgggatcgggaacgctatcggtactatttccgtccctacccttacccaagatgtctttggaaatgttaactacagtaagatcgttggtttaatgacaacctttgcaggtttaggtgcagcagttggccctatccttacttctaccattctagacctttcaggtagctttatggttccttggtctgtagcagcaggtgctttaatcctagctcttatcttaactgttgtcctaagccgaatcagcaagaatatggaagaacaacgccttccttctaacaaccaataa

SEQ ID NO: 8 - protein, 139 aa, Alloiococcus otitidis
MGALSDRTNAFVSTFIVAAFMLAGVLCIMLVNGSQVLAIIAMLLFGIGNAIGTISVPTLTQDVFGNVNYSKIVGLMTTFAGLGAAVGPILTSTILDLSGSFMVPWSVAAGALILALILTVVLSRISKNMEEQRLPSNNQ

SEQ ID NO: 9 - DNA, 1326 bp, Alloiococcus otitidis; identical to SEQ ID NO: 7
  CDS (223)..(1323)

SEQ ID NO: 10 - protein, 367 aa, Alloiococcus otitidis
MFGSMTSGYFFDKFGMKKTMLASTLIAIIGFLALAFSPTIYLNYVIAAIMGFALPLVTNVGISVIVNVWFGKKLAGNAVGIAMTGSGFGAMILTPVMTQIIENFEASWRAGYIFLAILSTLIVLPFVIFAIKESPEAEGIQKIGTGSPDGESGGSSIKEDSNYGITLSKAKSTAAFYITAFIIIVGSLVGLIFFTIAYEYFVETGFSPEFASILLSVQAAAVIVGKYFMGALSDRTNAFVSTFIVAAFMLAGVLCIMLVNGSQVLAIIAMLLFGIGNAIGTISVPTLTQDVFGNVNYSKIVGLMTTFAGLGAAVGPILTSTILDLSGSFMVPWSVAAGALILALILTVVLSRISKNMEEQRLPSNNQ

SEQ ID NO: 11 - DNA, 1326 bp, Alloiococcus otitidis; identical to SEQ ID NO: 7
  CDS (28)..(1323)

SEQ ID NO: 12 - protein, 432 aa, Alloiococcus otitidis
MSQDLKKHDGVYPGWWIVVTGFLAMAIIFPAGLALMSVLIGPIAESFGVPTSTVSVQFSMITLFSMFGSMTSGYFFDKFGMKKTMLASTLIAIIGFLALAFSPTIYLNYVIAAIMGFALPLVTNVGISVIVNVWFGKKLAGNAVGIAMTGSGFGAMILTPVMTQIIENFEASWRAGYIFLAILSTLIVLPFVIFAIKESPEAEGIQKIGTGSPDGESGGSSIKEDSNYGITLSKAKSTAAFYITAFIIIVGSLVGLIFFTIAYEYFVETGFSPEFASILLSVQAAAVIVGKYFMGALSDRTNAFVSTFIVAAFMLAGVLCIMLVNGSQVLAIIAMLLFGIGNAIGTISVPTLTQDVFGNVNYSKIVGLMTTFAGLGAAVGPILTSTILDLSGSFMVPWSVAAGALILALILTVVLSRISKNMEEQRLPSNNQ

SEQ ID NO: 13 - DNA, 726 bp, Alloiococcus otitidis
  CDS (10)..(723)
gggaatacaatgaaaattgaatttgaccaaggattttcttttggtaagggggcttttgaaaccatcaaggtggtgggcaaccgccccctctttttgcaggcccacttagcccggctggcgtctagtttggacttttttggtattgaacgcgagttggaccaagacagtatccttgactacattgaccaggttgatgaggacaactttgctttaaaagtaatggtgtcagatgacaacctggtcttgacccaccgaccagacccttaccgggataataaggataagttccacttaaccatttcccaagtgcaaagaaacaccacttccaagctcatttaccacaagagtttggcctactatgaaaatattttggaagaccacttagccaaagataagggctttgattcagccctctttgtcaatgaagcgggtcaagtggctgagactgcctttgccaatatcttcttggtcaaagacggcaaaatctatacccctgccctatcttcaggactgttagctggcactatgcggtcttacctgctggatcattacgacattgaagaaggcctgatcccggcccaagacttggccagctttgatgaatgttttatcagtaatgccctgatgggggttcaaaatgttgaagccattgatgaccactactatccaagtgaccaggtaacccaagccatccaggccgacctcgccaagcttggctttcgttaa

SEQ ID NO: 14 - protein, 238 aa, Alloiococcus otitidis
MKIEFDQGFSFGKGAFETIKVVGNRPLFLQAHLARLASSLDFFGIERELDQDSILDYIDQVDEDNFALKVMVSDDNLVLTHRPDPYRDNKDKFHLTISQVQRNTTSKLIYHKSLAYYENILEDHLAKDKGFDSALFVNEAGQVAETAFANIFLVKDGKIYTPALSSGLLAGTMRSYLLDHYDIEEGLIPAQDLASFDECFISNALMGVQNVEAIDDHYYPSDQVTQAIQADLAKLGFR

SEQ ID NO: 15 - DNA, 792 bp, Alloiococcus otitidis
  CDS (13)..(789)
gggggaataaaaatggggatgccagcaaatcaaaaagttgtgaaggtaaaagatttagttatcggtcaagatcaagctgtcctgatcgcaggcccttgttcaattgaatcgagagaccacattctagaagaagccaagtccttgaaaaaaatcggagttgacctcttgcggggcggggccttcaaaccacgaaccaagcccgacaccttccaaggtctaggctttgaggggctggattacttgaaagaagcttcggaagagactggcttgccgatcgtgaccgaggtcttgagcgaagaccatgtcgagaccatggttgactatgtcgatgtttttcaaatcggagcccgtaatatgtacaactactccttactgaagaaggtaggagcgactggtaaaccagtcttgttaaaacgaggcttggccgcaaccctccacgagtgggagatggccgccaagtatattgagcaagaaggcaatgaccagattatcttttgtgagcggggcatccggacttttgagaccgaaacccgcaataccttggacctggctggggcttacttgattaaggaaaaaacaggctatcctgttattgttgaccccagtcacgggacaggcaagcggcaattaatcgaacccatgaccaaggcggccttggccatgggagcagatggggtcatggtagaagtccactcccagcctgatgaggcctggacggatgcggcccaaaccattgactacatcacttaccgcaaaattgcagaccaagtgagggaatacaatgaaaattga

SEQ ID NO: 16 - protein, 259 aa, Alloiococcus otitidis
MGMPANQKVVKVKDLVIGQDQAVLIAGPCSIESRDHILEEAKSLKKIGVDLLRGGAFKPRTKPDTFQGLGFEGLDYLKEASEETGLPIVTEVLSEDHVETMVDYVDVFQIGARNMYNYSLLKKVGATGKPVLLKRGLAATLHEWEMAAKYIEQEGNDQIIFCERGIRTFETETRNTLDLAGAYLIKEKTGYPVIVDPSHGTGKRQLIEPMTKAALAMGADGVMVEVHSQPDEAWTDAAQTIDYITYRKIADQVREYNEN

SEQ ID NO: 17 - DNA, 2046 bp, Alloiococcus otitidis
  CDS (22)..(2043)
agactatttggagggacaaggatgaagtcactcattatcgataactatgattcttatacttacaacttataccagcttattgggaaggtcacagggaaagagcccatggtgataaaaaatgaccagatgacctaccaagaactattggatctcgactttgataatgtcattatttcaccggggcccggtagtccggaccgggacaaggacttcggcttgtgccggcaagtaattgaaaagcttgacaagcctatctttggcatttgcctgggccaccagggcatttattattataacggtggcaacttagtgggggctgatatccccatgcatggtcggcagagttcggtctaccataatgggaaaaatatctttgacggcatagaccaaggctttgaagtcaaccgctaccactccattgtttgtgaagacaaggaattagagaatattcaaatcgatgccaaaaccgatgatggaattgtcatggccctgtcccacaagaccaagcccatctatggggtccaattccaccccgaatccattgccacccagtatggggaaaaaatgatggaaaactttatggccttgtgccaggactactataaccaatccagcctttattatgaaaaagttccgggaactagggacagccaagacctctacgatcaattggccaaaattgatgaccaagtactttggctcgactccagcaaggtggagcctggcttgtcacggttttccatctttggcatggctggaccaaagcggggccacaccttaaaatacgatgtcgaccaaaaagaagtgaaaaaacaagatagccagtccgcagcagttgaaagcttccagactgacatcttttcttacttaaaagccaaccgaccaaaatggccttatgagccggccttgccctttgactttcagctaggctatattggctatatcggctatgaggtcaaaaaagatacagttcaagtccacaacaagcaccagtcaccctatccggatgcctactttacttattgtgaccgggccttggtctatgaccaccaggaagaggacctttacttcctctcctaccaggatgaccaggattggattcaagcggtcaaagacaggctcaagcaggcagtcaaagttcagcaagaaggaccaagaggcaagcaagacttcccacgactggccttcgtcaaagacaaagcagcctatatcaaagacattgaaaccatccaagacctgatcaaggctggggaaagttatgaagtttgcttgaccaaccggctggatattgagggtcagattgatggcctcgcttattacaaacacttgcgccaggaaagtcccggtcagtactctgcctttttgcctttagatgattttcaagttctttcctcttccatggagcgttttattaatgtcgacaaggaccgggttgtgaccactaagcccatcaaggggacggtcagacgggggacagatgaccaagaagaccaagacttgatagaaggcctccgcagtgaagagaaaaccaaggcagaaaacctgatgattgtcgacctcttgcgcaatgatctgggccgtttttgtgaaatcgggtcggttgaggtacccaaactgatggatgtagagacctactccaccctccaccagctggttaccacggtttcaggccgggtcaaagaagacctagatgtggttgaagtgttagaaaacaccttcccgggcgggtccatgactggggcgcctaaaaaaagaaccctggaaattattgatgacttagaagcagttcccagagggatctattctgggactattggctttttagccaacaattccactatagacttcaacatcgtcatccggaccagtgtggtggaagcagacaaggcaagcatcggcctggggggtgcgattgtcatgctatctgatcctgaagaagagtttgatgaagttgttttaaaagctaagggggccttgtccgccttgcaagcctattaccataatgatgacccaattaagattgaaggaagtaataagggggaataa

SEQ ID NO: 18 - protein, 674 aa, Alloiococcus otitidis
MKSLIIDNYDSYTYNLYQLIGKVTGKEPMVIKNDQMTYQELLDLDFDNVIISPGPGSPDRDKDFGLCRQVIEKLDKPIFGICLGHQGIYYYNGGNLVGADIPMHGRQSSVYHNGKNIFDGIDQGFEVNRYHSIVCEDKELENIQIDAKTDDGIVMALSHKTKPIYGVQFHPESIATQYGEKMMENFMALCQDYYNQSSLYYEKVPGTRDSQDLYDQLAKIDDQVLWLDSSKVEPGLSRFSIFGMAGPKRGHTLKYDVDQKEVKKQDSQSAAVESFQTDIFSYLKANRPKWPYEPALPFDFQLGYIGYIGYEVKKDTVQVHNKHQSPYPDAYFTYCDRALVYDHQEEDLYFLSYQDDQDWIQAVKDRLKQAVKVQQEGPRGKQDFPRLAFVKDKAAYIKDIETIQDLIKAGESYEVCLTNRLDIEGQIDGLAYYKHLRQESPGQYSAFLPLDDFQVLSSSMERFINVDKDRVVTTKPIKGTVRRGTDDQEDQDLIEGLRSEEKTKAENLMIVDLLRNDLGRFCEIGSVEVPKLMDVETYSTLHQLVTTVSGRVKEDLDVVEVLENTFPGGSMTGAPKKRTLEIIDDLEAVPRGIYSGTIGFLANNSTIDFNIVIRTSVVEADKASIGLGGAIVMLSDPEEEFDEVVLKAKGALSALQAYYHNDDPIKIEGSNKGE

SEQ ID NO: 19 - DNA, 252 bp, Alloiococcus otitidis
  CDS (19)..(249)
gtctctacatccatcagtttgggtacctcaaccgacccgatttcacaaaaacggcccagatcattgcgcaagaggtcgacaatcatcaggttttctgccttggttttctcttcactgcggaggccttctatcaagtcttggtcttcttggtcatctgtcccccgtctgaccgtccccttgatgggcttagtggtcacaacccggtccttgtcgacattaataaaacgctccatggaagaggaaagaacttga

SEQ ID NO: 20 - protein, 77 aa, Alloiococcus otitidis
MGTSTDPISQKRPRSLRKRSTIIRFSALVFSSLRRPSIKSWSSWSSVPRLTVPLMGLVVTTRSLSTLIKRSMEEERT

SEQ ID NO: 21 - DNA, 312 bp, Alloiococcus otitidis
  CDS (22)..(309)
gctatattggctatatcggctatgaggtcaaaaaagatacagttcaagtccacaacaagcaccagtcaccctatccggatgcctactttacttattgtgaccgggccttggtctatgaccaccaggaagaggacctttacttcctctcctaccaggatgaccaggattggattcaagcggtcaaagacaggctcaagcaggcagtcaaagttcagcaagaaggaccaagaggcaagcaagacttcccacgactggccttcgtcaaagacaaagcagcctatatcaaagacattgaaaccatccaagacctga

SEQ ID NO: 22 - protein, 96 aa, Alloiococcus otitidis
MRSKKIQFKSTTSTSHPIRMPTLLIVTGPWSMTTRKRTFTSSPTRMTRIGFKRSKTGSSRQSKFSKKDQEASKTSHDWPSSKTKQPISKTLKPSKT

SEQ ID NO: 23 - DNA, 291 bp, Alloiococcus otitidis
  CDS (40)..(288)
caagccaggctccaccttgctggagtcgagccaaagtacttggtcatcaattttggccaattgatcgtagaggtcttggctgtccctagttcccggaactttttcataataaaggctggattggttatagtagtcctggcacaaggccataaagttttccatcattttttccccatactgggtggcaatggattcggggtggaattggaccccatagatgggcttggtcttgtgggacagggccatgacaattccatcatcggttttggcatcgatttgaatattctctaa

SEQ ID NO: 24 - protein, 83 aa, Alloiococcus otitidis
MVINFGQLIVEVLAVPSSRNFFIIKAGLVIVVLAQGHKVFHHFFPILGGNGFGVELDPIDGLGLVGQGHDNSIIGFGIDLNIL

SEQ ID NO: 25 - DNA, 462 bp, Alloiococcus otitidis
  CDS (19)..(459)
tatggaaaggtttggctgatgatgaaaattttagtgatgaatggccccaatattaacctgctaggagtccgggaagtggagatttatggtcgggaaagctaccaagacttattggacttactcgaccaagtccaggtggaattaggggttgacctcatccatttccagtccaaccatgaaggggacttggttgattttatccaagccaactaccaggatgcagacgggattgtgattaacccggcagcctacacccacaccagtattgccctcctggatgctttgaaggctgttgatttgccgacagtggaagtccatttgtcaaaggtatcccagcgtgaggacttccgccaggtcaactatgtcagggactttgccatccagtcatttgaaaacttgggcattgcaggttaccgcaaggccataaactaccttagagactatttggagggacaaggatga

SEQ ID NO: 26 - protein, 147 aa, Alloiococcus otitidis
MMKILVMNGPNINLLGVREVEIYGRESYQDLLDLLDQVQVELGVDLIHFQSNHEGDLVDFIQANYQDADGIVINPAAYTHTSIALLDALKAVDLPTVEVHLSKVSQREDFRQVNYVRDFAIQSFENLGIAGYRKAINYLRDYLEGQG

SEQ ID NO: 27 - DNA, 1362 bp, Alloiococcus otitidis
  CDS (55)..(1359)
aatggtgaccgctatcgccattttggacctcctaatcgaaggggacaaggaaagatgagacagaagaatgaccaagacccagttaacttagctgacctggggcagtttgactacggtttgatcggggcaagtctctcccatagtaagtcccaagaaatccatgaagcttttggctactattcttaccggctcgttaatatcccaggccaggacttagaagcttttatgaagcaaagaagctttaaagggattaatgtgaccattccctataaagaaacagtcatggactatttggactatgtggacccaagggcccaggcaattggggccgtcaacactatcgtcaaccagaacggccgcttactaggctataataccgactacctgggctttgcccacagcttgaaagcctataggatccatttgaagggtaaaaaagtcatggttttaggtagtggcggggccagcaagatggtccaggcttacgccaaggaccagtcagctcaagaaatcattgtgataagtcggtccgggcccaaggattaccaaatgctggaccagtttcaagacgttgacattatcatcaatgctactccagttggcatgtacccccataacctggaatccaagattgacctggctaactttcagcacttagacagtgtcattgatttgatctataatcccttaaagactaagctcctcctagaggccaaagaaaaaggggtcaagatcatgtcgggcctcttgatgctggtcgcccaagccttttatgcctgccaaatctttactgaccagaaattagataaagcactactagaccaagtctattccaaggtcaaaaaagacttggccaatattgcactgattgggatgcctgcttcgggcaagactaccatggcccaactcctaggtcaaaagaccggtcgaccggttcgagacattgaccagctggtggaggagagggctggcctgccaattcccagtctttttgaccagtacggcgaagactacttccgtcaactagaaagccaggtcctagcagaagtgagcaaagaagggggccaggtaattgcaacagggggcgggtccgtcttaagaagggacaaccggcaaatgctagcccaaaattcactcctggtctacctcaaccggccagtggacaagctggatactagcaagcggaccttgtccaaggaccgaaccagcctcaaaaagatggcccggtcaaggcaacccttatatgaaggcctagcagacttgcaggtagatgttgtagaagacaaggaggcaactctcgacttgatatggaaaggtttggctgatgatgaaaattttagtgatgaatggccccaatattaa

SEQ ID NO: 28 - protein, 435 aa, Alloiococcus otitidis
MRQKNDQDPVNLADLGQFDYGLIGASLSHSKSQEIHEAFGYYSYRLVNIPGQDLEAFMKQRSFKGINVTIPYKETVMDYLDYVDPRAQAIGAVNTIVNQNGRLLGYNTDYLGFAHSLKAYRIHLKGKKVMVLGSGGASKMVQAYAKDQSAQEIIVISRSGPKDYQMLDQFQDVDIIINATPVGMYPHNLESKIDLANFQHLDSVIDLIYNPLKTKLLLEAKEKGVKIMSGLLMLVAQAFYACQIFTDQKLDKALLDQVYSKVKKDLANIALIGMPASGKTTMAQLLGQKTGRPVRDIDQLVEERAGLPIPSLFDQYGEDYFRQLESQVLAEVSKEGGQVIATGGGSVLRRDNRQMLAQNSLLVYLNRPVDKLDTSKRTLSKDRTSLKKMARSRQPLYEGLADLQVDVVEDKEATLDLIWKGLADDENFSDEWPQY

SEQ ID NO: 29 - DNA, 1092 bp, Alloiococcus otitidis
  CDS (1)..(1089)
atgtcttatgatatgggaaaaaattataaactcaccttgtttggccagtctcactcccaggctattggtgttgtcatcgatgggatccaggcgggttatgaaattaattatgacttgatccggaaaaatatgtaccggagacggccaggaaaaaacaagtattcgaccccgcgcaaggagctagatgagtttaaaattgtcagcggtgaagtagatggcgtcacttgtggggcccctatttgtgccattatcgaaaacaaggacaagaaaagtaaagactatgatgatatccgggacaagccccggccatcccattccgactacccagcctatgtcaagtaccagggccacaatgacattaggggtggggggcaattttcaggccggatgaccgctcccatggtcattgcaggctcgattgcagaagaccttttgcagcaaagaaatatccgggttttttcacgggtcaagcaaattggccaggcccatgatgtggaggttgactactctaaaattgacctagaccagctggaaaaactgaaaaacgatgacctgccgactatcgacgaccaggccaagttagccatgcaagaagagatcttaaaggttaaggaagaggaagactccattgggggaattgtggaagtcgtggtgttaaatatgcctgtcggttacggccagccccgatttcattcagttgagtcccaattggcttccgccatcttttcggttccagctgtcaaggggattgagtttggcagtggctttaaggcagctgagatgcgggggagtgaacacaatgacccctattattacgacggtgaccaggtaaaaaccaagaccaacaaccacggtggggttattgggggcttgagttcttccatgccaattgtcttccgggtgccggttaaacccacttcttccattggtaaggtccaagatacggtctctctcaaggataaaagcaacacccaactcaaaattgaaggacggcatgacccctctattgttcccagggcagctgttgcccttgaaatggtgaccgctatcgccattttggacctcctaatcgaaggggacaaggaaagatga

SEQ ID NO: 30 - protein, 363 aa, Alloiococcus otitidis
MSYDMGKNYKLTLFGQSHSQAIGVVIDGIQAGYEINYDLIRKNMYRRRPGKNKYSTPRKELDEFKIVSGEVDGVTCGAPICAIIENKDKKSKDYDDIRDKPRPSHSDYPAYVKYQGHNDIRGGGQFSGRMTAPMVIAGSIAEDLLQQRNIRVFSRVKQIGQAHDVEVDYSKIDLDQLEKLKNDDLPTIDDQAKLAMQEEILKVKEEEDSIGGIVEVVVLNMPVGYGQPRFHSVESQLASAIFSVPAVKGIEFGSGFKAAEMRGSEHNDPYYYDGDQVKTKTNNHGGVIGGLSSSMPIVFRVPVKPTSSIGKVQDTVSLKDKSNTQLKIEGRHDPSIVPRAAVALEMVTAIAILDLLIEGDKER

SEQ ID NO: 31 - DNA, 309 bp, Alloiococcus otitidis
  CDS (13)..(306)
gttaactgggtcttggtcattcttctgtctcatctttccttgtccccttcgattaggaggtccaaaatggcgatagcggtcaccatttcaagggcaacagctgccctgggaacaatagaggggtcatgccgtccttcaattttgagttgggtgttgcttttatccttgagagagaccgtatcttggaccttaccaatggaagaagtgggtttaaccggcacccggaagacaattggcatggaagaactcaagcccccaataaccccaccgtggttgttggtcttggtttttacctggtcaccgtcgtaa

SEQ ID NO: 32 - protein, 98 aa, Alloiococcus otitidis
MVILLSHLSLSPSIRRSKMAIAVTISRATAALGTIEGSCRPSILSWVLLLSLRETVSWTLPMEEVGLTGTRKTIGMEELKPPITPPWLLVLVFTWSPS

SEQ ID NO: 33 - DNA, 1251 bp, Alloiococcus otitidis
  CDS (472)..(1248)
aaatgggtaaagattatggatagaatgattggcaaggaaaagttacacggggcaattgagggaatttcttctaagtcttatgcccaccgagctattttttgtgccgccctgtcaaaaggagcgtcgcagttagttatcaaccacctgtccaaggatattgaggcttctctaaaagcagttgcagccattggagtggaagttaagcaagaaggcagtcactactccatttgtccgccagaccagtatacaagccctgccagaattcccgttggcgaaagcgggacgaccctgagattgatcctgccagttttggctgctttagggatagaagcagaagtcatccggtccggtagtctaattaaccggaccaatgtggtttactttgacagcttccctgagcatggggtggcgatttcccagcaggggccgtctatctttttaaagggcaagcttgaggactatcactttagtttgccaggcaatattagctcccaatttatctcgggcttccttcttgcatctggtattgccggccaaccagcccaaattgatattactacggcactggaatccaagccttatattgacatgaccgtggatgttatggcccactttggtgtccaggtcaagcaagaaggttcaacttacacctgccagggccccttccaagctcgttactatcaagtcgaaaaagattggtccaatgccctctttttcctagcaggcggggttgaggtgcagggcttaaaccctgactccaagcagggggaccgccaggctttgacctttttacaaagcctgggctatgagaatatgtcacaaaaggactttcatctagttaaacgatatcccagccaggaagaagtcagcctggatgccagagacatgcccgatactgttcctattctctgtgtcttggccggcttatgccagaccaaaactcgggtggtccataccaagcgactgcggttaaaagaaagtgaccgagtcctttccaccagccaaatgctagaaaacttaggggtcaaggtgaccataggggaagacacttttagctttactggagtcgactgctacaagtcctgtacagtccatgcccacaacgaccaccggattgccatggctgctagcattgcagcaacttttgccgatggtccagttaccgtgatggatagccacagtgtggaaaaatcctaccctggtttttttgaagattttaaatcattaggaggaaaagtagatgtcttatga

SEQ ID NO: 34 - protein, 259 aa, Alloiococcus otitidis
MPGNISSQFISGFLLASGIAGQPAQIDITTALESKPYIDMTVDVMAHFGVQVKQEGSTYTCQGPFQARYYQVEKDWSNALFFLAGGVEVQGLNPDSKQGDRQALTFLQSLGYENMSQKDFHLVKRYPSQEEVSLDARDMPDTVPILCVLAGLCQTKTRVVHTKRLRLKESDRVLSTSQMLENLGVKVTIGEDTFSFTGVDCYKSCTVHAHNDHRIAMAASIAATFADGPVTVMDSHSVEKSYPGFFEDFKSLGGKVDVL

SEQ ID NO: 35 - DNA, 1251 bp, Alloiococcus otitidis; identical to SEQ ID NO: 33
  CDS (16)..(1248)

SEQ ID NO: 36 - protein, 411 aa, Alloiococcus otitidis
MDRMIGKEKLHGAIEGISSKSYAHRAIFCAALSKGASQLVINHLSKDIEASLKAVAAIGVEVKQEGSHYSICPPDQYTSPARIPVGESGTTLRLILPVLAALGIEAEVIRSGSLINRTNVVYFDSFPEHGVAISQQGPSIFLKGKLEDYHFSLPGNISSQFISGFLLASGIAGQPAQIDITTALESKPYIDMTVDVMAHFGVQVKQEGSTYTCQGPFQARYYQVEKDWSNALFFLAGGVEVQGLNPDSKQGDRQALTFLQSLGYENMSQKDFHLVKRYPSQEEVSLDARDMPDTVPILCVLAGLCQTKTRVVHTKRLRLKESDRVLSTSQMLENLGVKVTIGEDTFSFTGVDCYKSCTVHAHNDHRIAMAASIAATFADGPVTVMDSHSVEKSYPGFFEDFKSLGGKVDVL

SEQ ID NO: 37 - DNA, 1086 bp, Alloiococcus otitidis
  CDS (4)..(1083)
tctatgatagaatctattcataatatagtgaggggtgggtttatgaaagttccagtaaaagacaaccactacgatatacatattggctaccagagcgacaatcaactgattgattttttaaatcagtttaaagactctaagtttttacttgtaacggaccagaccgtctttgacatttaccaagaccggctcaacagtctcctaagaggcttggatgctaaactatttaccatagctggcggggaagagtccaagtccatggaaaactttattgccattaaccgctatttatctgagaacaacttcactaggggcgatacggttattgcctttggtggaggcgtggttggcgacttggcaggctttgcggcctcggcctacctacgaggtattcgcctggttgcggtccccactagtctcttagccatggtggactcgtcggttggggggaaaaccgggattaacttccggcacttaaagaaccaaattggtagtttttactttccctcctatgttcatatagattattcttttttaaaaagcttagacaagcgcaatatcaataacggtttggctgaggttttcaagtatgcggttttgtctgatgctgacttttttacctacttgaaagaagcggaaaaattagattttgaaaaaatcatccaccagtctattttgaccaagttggcttttgttaaaaatgatgtgaaagataaaggaaaaaggcaaaaattaaacctgggtcacactattggtcatgggatcgaatcgatatccaactatgacctcaaccacggcgaatcgatcgggattggcaccatctatatttcccgggcgagttacaagatgggcctatgccaggaggatattgcccaagacttggtccaagcctttcacaagtatggcttgccaacccggtatgactttgatacccaagaactcctagaggccatagagcatgacaaaaaaattcaaggagagaccatcaatattatccttcctttaaggatgggtgaggtaaccagtcaaaagctttctctggatcagctagcagaaatcatagaaatgggtaaagattatggatag

SEQ ID NO: 38 - protein, 360 aa, Alloiococcus otitidis
MIESIHNIVRGGFMKVPVKDNHYDIHIGYQSDNQLIDFLNQFKDSKFLLVTDQTVFDIYQDRLNSLLRGLDAKLFTIAGGEESKSMENFIAINRYLSENNFTRGDTVIAFGGGVVGDLAGFAASAYLRGIRLVAVPTSLLAMVDSSVGGKTGINFRHLKNQIGSFYFPSYVHIDYSFLKSLDKRNINNGLAEVFKYAVLSDADFFTYLKEAEKLDFEKIIHQSILTKLAFVKNDVKDKGKRQKLNLGHTIGHGIESISNYDLNHGESIGIGTIYISRASYKMGLCQEDIAQDLVQAFHKYGLPTRYDFDTQELLEAIEHDKKIQGETINIILPLRMGEVTSQKLSLDQLAEIIEMGKDYG

SEQ ID NO: 39 - DNA, 87 bp, Alloiococcus otitidis
  CDS (1)..(84)
atggaccggcgagtgacgatcgactgcgaggttaagctgaagaagcggagccgaagcgaaagcgagtctgaagagggcgtcgagtag

SEQ ID NO: 40 - protein, 28 aa, Alloiococcus otitidis
MDRRVTIDCEVKLKKRSRSESESEEGVE

SEQ ID NO: 41 - DNA, 798 bp, Alloiococcus otitidis
  CDS (46)..(795)
catgttttctcctcctgtagtggtttcaataggattataccaaaaatgatgagaaaatgtttattaaattataatgaaagaggaaaaataatgcataaacgcaatgaaatgatggaccgtcccgtgattaataatgatgtgcgggagttcttacgcaagggacaaaggcagctgaagggtcctttaaaagaaattgaatcctttgcccaccaaaaccggattccgatcattccccatgaaacagttgttttccttatatggctctttcaccaagtccaaccgaaagccgttttagaagtagggacggctataggcttttcggcagccttgatggcagaccagatggatggaggacgtgttataacgattgaacgcaatcccgatatgtaccaacgggcggaaaaagtttttgcggatttaaatttagaagacaaaatcatcctaaaaaaaggccaggctaaggagattcttaaagaactagaaagtgacgcatatgactttatctttatggacagtgctaaggctaaatattactcttttttcccagattgcttccgtctcttgcaaaagggcggcatcattgctgttgatgatgtcctgcagggagggactgtcttacaagatctggaagaaatccccaaacgagtccgcaagattcaccggaaattaaatgattttttagacgtggtcttggatcatcctgccttggattccaccatccttcctttaggagacggtcttctattgataactaaaaaagaagaagcagatttctcctttatgcaagaagaagggtaa

SEQ ID NO: 42 - protein, 250 aa, Alloiococcus otitidis
MMRKCLLNYNERGKIMHKRNEMMDRPVINNDVREFLRKGQRQLKGPLKEIESFAHQNRIPIIPHETVVFLIWLFHQVQPKAVLEVGTAIGFSAALMADQMDGGRVITIERNPDMYQRAEKVFADLNLEDKIILKKGQAKEILKELESDAYDFIFMDSAKAKYYSFFPDCFRLLQKGGIIAVDDVLQGGTVLQDLEEIPKRVRKIHRKLNDFLDVVLDHPALDSTILPLGDGLLLITKKEEADFSFMQEEG

SEQ ID NO: 43 - DNA, 705 bp, Alloiococcus otitidis
  CDS (58)..(702)
acattttctcatcatttttggtataatcctattgaaaccactacaggaggagaaaacatgttaatcaaacaattatcaaaacacaaggatgaggtcagaacgatttcggaagacaccaccctacaagaagctattgacttgcttgaagcaaccggcttccgttgtgtaccaattttagacgagacaggcaagatctacaggggcaacatctacaagatgcacatctaccggcacaagtcacgaggcggggacatgtcactgccggtcacccacctcttgaagaatgccaccaaatatatccacttaaagtcttctttcttcaaggtcttctttatgattaaagacttaccttatatcactgtcttggatgaaaataaccatttctatgggatcttgacccactcctcgctcattgatatgttacaacaatcatggagtattgagcaagggtcttatgtcatcaccgtagctgttccgattgaaaaaggttctttggcagaagttgccaagatcatcaaccggacttgttccattatgagtgtcctctcccttgacctcaaacacgaacaaggccacaccaaggtccgccgcctaatcttcactttagagcccaatattcaacaaaaagacttggacaccatccagcgtaatctagataaaaaaggctactctatcgtctccgttgaagacttacaggaaaactaa

SEQ ID NO: 44 - protein, 215 aa, Alloiococcus otitidis
MLIKQLSKHKDEVRTISEDTTLQEAIDLLEATGFRCVPILDETGKIYRGNIYKMHIYRHKSRGGDMSLPVTHLLKNATKYIHLKSSFFKVFFMIKDLPYITVLDENNHFYGILTHSSLIDMLQQSWSIEQGSYVITVAVPIEKGSLAEVAKIINRTCSIMSVLSLDLKHEQGHTKVRRLIFTLEPNIQQKDLDTIQRNLDKKGYSIVSVEDLQEN

SEQ ID NO: 45 - DNA, 1611 bp, Alloiococcus otitidis
  CDS (28)..(1608)
tatctatttaaaagaggagtcaaagtgatgaagaaaatttataccattggtttatcgatctttttaagttgcttactaatagcctgtcagccttcaggaaactctttggaaagctatgtcgataaagaagtcaatgaacaagaaaacaactcaatcagtcttcattacggcatttctacttcagaaaaattagctaccgaactaggagaatgggtcttagaaaaagggggttctgctgctgatgtcctagttgccagctcatttatgttaaatgtaacagagggttttgggtcaggaattggtggatcagggggagcattagtttttgatccagatacagaagagtatactttttatgattatatggcccaagctggcagccaaaagaaccaaattggtattccaggtcagttgaatgggctttggcaaatccatcaagatcatggcaagctcccttgggaagatttaattgaaccagcaattattgttgcggaagaaggttttactatcagccccaagctttcttataagatagccacattaggtggtcaagttgaacagtttgaaaattttattgatgaggaaggtcaaccactagaaacaggagatcgacttatacaaaatgacttagctgagtctttcagagaaatacaagctaagggtattacttctttttatgaaggagagatgggcaggcgggttgctgaagcagctggactagattttgaagaattcaaagaataccaaacaagaaaaatagaccccattattctaaactttggtgaacaccgattgattggtgctccggctccctttggctcacaaatgaccatgcagatgtaccgagatatgattgaccaaggtattagaccattagaagaaagtccaaaccaattttttgatgtttaccaaaagacttatgtagatgcacgcaatgatggaagccagacaattgcagatccttcattttatgattttgaccaagaggactatttggcccagtctaaagtggttagtcgagaagagggaccacctatagcccagtttgaagaagagccaggctcgaccactcatctatcaatagttgaccaagatggaatggttatttcagctaccaataccttgtccaacttttggggtagccgagttcaggtggacggtttttttctaaataactcaaatcgaaatttttctaatactgggataaattcctatgagccatataaacgggcaaggaccactgcttcgcctataattgtagagagggatagtgaaaagtatgctattggaagtcctggcggaggctatattccccaggtcttagcctatattcttttacagcatgagcaatttgatcaggactttgacgacctcctaacccagcgaagatttttagtcaatcgtgatggctctattatcctagatcaatcagagcttaatcaagaagatgaagcgataacagaattaattagcagtacagggcgtaatattataagagaaagaaaggcaacattctatggctttggtagtatatctatagccggctatgatggtgaagattatttcgcttatggagatgtttaccgcgaaggatactccttgtctaattaa

SEQ ID NO: 46 - protein, 527 aa, Alloiococcus otitidis
MKKIYTIGLSIFLSCLLIACQPSGNSLESYVDKEVNEQENNSISLHYGISTSEKLATELGEWVLEKGGSAADVLVASSFMLNVTEGFGSGIGGSGGALVFDPDTEEYTFYDYMAQAGSQKNQIGIPGQLNGLWQIHQDHGKLPWEDLIEPAIIVAEEGFTISPKLSYKIATLGGQVEQFENFIDEEGQPLETGDRLIQNDLAESFREIQAKGITSFYEGEMGRRVAEAAGLDFEEFKEYQTRKIDPIILNFGEHRLIGAPAPFGSQMTMQMYRDMIDQGIRPLEESPNQFFDVYQKTYVDARNDGSQTIADPSFYDFDQEDYLAQSKVVSREEGPPIAQFEEEPGSTTHLSIVDQDGMVISATNTLSNFWGSRVQVDGFFLNNSNRNFSNTGINSYEPYKRARTTASPIIVERDSEKYAIGSPGGGYIPQVLAYILLQHEQFDQDFDDLLTQRRFLVNRDGSIILDQSELNQEDEAITELISSTGRNIIRERKATFYGFGSISIAGYDGEDYFAYGDVYREGYSLSN

SEQ ID NO: 47 - DNA, 1611 bp, Alloiococcus otitidis; identical to SEQ ID NO: 45
  CDS (25)..(1608)

SEQ ID NO: 48 - protein, 528 aa, Alloiococcus otitidis
MMKKIYTIGLSIFLSCLLIACQPSGNSLESYVDKEVNEQENNSISLHYGISTSEKLATELGEWVLEKGGSAADVLVASSFMLNVTEGFGSGIGGSGGALVFDPDTEEYTFYDYMAQAGSQKNQIGIPGQLNGLWQIHQDHGKLPWEDLIEPAIIVAEEGFTISPKLSYKIATLGGQVEQFENFIDEEGQPLETGDRLIQNDLAESFREIQAKGITSFYEGEMGRRVAEAAGLDFEEFKEYQTRKIDPIILNFGEHRLIGAPAPFGSQMTMQMYRDMIDQGIRPLEESPNQFFDVYQKTYVDARNDGSQTIADPSFYDFDQEDYLAQSKVVSREEGPPIAQFEEEPGSTTHLSIVDQDGMVISATNTLSNFWGSRVQVDGFFLNNSNRNFSNTGINSYEPYKRARTTASPIIVERDSEKYAIGSPGGGYIPQVLAYILLQHEQFDQDFDDLLTQRRFLVNRDGSIILDQSELNQEDEAITELISSTGRNIIRERKATFYGFGSISIAGYDGEDYFAYGDVYREGYSLSN

SEQ ID NO: 49 - DNA, 480 bp, Alloiococcus otitidis
  CDS (28)..(477)
cttgtggcagagaaggagaatgaattaatggctctaacagatttttatattgccttggctttgggcttaacactatccctattagtagaaagcttttttggaattattgctggtggtatgattgccccaggatacctagccctttatattgatgagcccttgatgcttcttcaggtatatttaatctcactgctagtctatttgattgttaattatgggatttcgaaattcgtcattttatatgggaagcgttattttgttttaaatatcttggtagctttggcattaaaattgattattgaactattcttatttcctactctccttcccttagattcggttatgtttagggggattggggcagtagttcccggtttactggccaatacttatcgacgacagtcactgccgataactttggctgcgtcattgggattgactcttatagtaggtttagttttatatctgatatctatttaa

SEQ ID NO: 50 - protein, 150 aa, Alloiococcus otitidis
MALTDFYIALALGLTLSLLVESFFGIIAGGMIAPGYLALYIDEPLMLLQVYLISLLVYLIVNYGISKFVILYGKRYFVLNILVALALKLIIELFLFPTLLPLDSVMFRGIGAVVPGLLANTYRRQSLPITLAASLGLTLIVGLVLYLISI

SEQ ID NO: 51 - DNA, 480 bp, Alloiococcus otitidis; identical to SEQ ID NO: 49
  CDS (4)..(477)

SEQ ID NO: 52 - protein, 158 aa, Alloiococcus otitidis
MAEKENELMALTDFYIALALGLTLSLLVESFFGIIAGGMIAPGYLALYIDEPLMLLQVYLISLLVYLIVNYGISKFVILYGKRYFVLNILVALALKLIIELFLFPTLLPLDSVMFRGIGAVVPGLLANTYRRQSLPITLAASLGLTLIVGLVLYLISI

SEQ ID NO: 53 - DNA, 1212 bp, Alloiococcus otitidis
  CDS (13)..(1209)
tggaggtacgccatgacttccttgattgttattgttctctgtattggtcttcttattggcctaggtgttatagagaagcagcgtaacgaggaaaatattaaaaaaatcgacctacgcattaatattaatggcaccagaggcaagacaacagtgactcgtttggttactggggtgctacaagcagctggctaccaagttattggaaaaacaacaggaactgagtcacgcattatttactgggaccaggcagaagaggaggagatcgaaaggcctccatctggacctaatatttctgaacaaatatcagttattgaaaaggcaagaaaaagaggggctgatgcccttgtattagaatgtatggcagttaatccagagtaccaagatgtttattctaatgaaatgtttcaatcaaatattacagccatcgttaacgtctttgaagaccatatggatatcctaggtccaacaaatgatcaaattgcctgggcctatgccaagaccatccccaaaaatggccttgttgtcatctcagatgatgactataaagacttttttattgaagtagcccaggagagaaattgccgggtgaaagttatagacgaaccaggcgttagtcaagaattattggatcgctttgactatcttgtcttcccaaacaatctagctgttccgctggctattgctgaagaactcgacgttgaccgcgatactgccattaaaggtatgcttcaagctgaccctgatccgggcattatgcaattgtttgagataggggagcctattgaccagaaggttattctagcttatgcctttgctgctaatgaacccacttctaccatgctgatctatgaagagctcaaggaaggtggcctaataggtgaaagccctattattttgatcaattgccgagaagaccgcagtgaccggactaaattattcaccaaagactttattggtcaaataaaagatgccagggttatcgccattggacaaaatactggcattattgagaaggctataaaatcaggtaggatcaaggtcagggattatttatctttggaagggaaatccttggaagatatttacatgaccctaatgacttatgcttctggtgaagttgtcttgggtattggaaatattcatggtgtcggtgaagatttttttgcttaccttgatgaaaataacttgtggcagagaaggagaatgaattaa

SEQ ID NO: 54 - protein, 399 aa, Alloiococcus otitidis
MTSLIVIVLCIGLLIGLGVIEKQRNEENIKKIDLRININGTRGKTTVTRLVTGVLQAAGYQVIGKTTGTESRIIYWDQAEEEEIERPPSGPNISEQISVIEKARKRGADALVLECMAVNPEYQDVYSNEMFQSNITAIVNVFEDHMDILGPTNDQIAWAYAKTIPKNGLVVISDDDYKDFFIEVAQERNCRVKVIDEPGVSQELLDRFDYLVFPNNLAVPLAIAEELDVDRDTAIKGMLQADPDPGIMQLFEIGEPIDQKVILAYAFAANEPTSTMLIYEELKEGGLIGESPIILINCREDRSDRTKLFTKDFIGQIKDARVIAIGQNTGIIEKAIKSGRIKVRDYLSLEGKSLEDIYMTLMTYASGEVVLGIGNIHGVGEDFFAYLDENNLWQRRRMN

SEQ ID NO: 55 - DNA, 1212 bp, Alloiococcus otitidis
  CDS (463)..(1209)
aaggagaatttaaagttgaaactaccaccccgtgctgaattgcacaagaagcagtcacttaaagataggatccaaatttaccttaaacgaaatgaaaccagtctgggccaagctcttgtatttttagtcattgtattttgtcttgctattgggggatttttttacagggaattttccaaccaagctaacccggagtctcaattccatgtccaagccaatgctgagaccccttctatatcatttgtgggcgatatatccttgagtcgctatattgcggaaatcggtgaacgagatggttacgaggaattttttacatatgttaaaccacattttgacggtagagacttggtcgttgccaatcttgaatctgccgtcacctatgacaatcgaacttacgttaagccggcttcaagtttaagtggaggtatttatttggattcttccattgactcagtcaaagccatgcaagaagctggcattgacctagtttccatggccaacaaccataccggcgacatgggcaagcagggtatggttgacggcatggaaattttaagagatgtagaaatggattatattggaatgggccatgatcgagcagaagctggccaagcttatcaatttgttgcgaataatttgactacctccatttttgcagttagcgatgtgattaaacctggccaagcagctagtgatgatgaaccaggtgtactcacgaccaactcccaagcctttcttaacctggccaatagctatgaccaagaatctgatttggttatcgcctatatccatgctggaatagagtatattcgtcaacctgatgcaaaccaccaggagctggctgaaagcttaattgatgctggtgcagatattgttatttgctcccacacccactccctcctgcctgttgaaaaataccaagatgggattattttttatggcttgggcaattttatttttgaccaaggcatgcaaagttcaaccgattccgttattttagacatggatatcaatagtccagaccaggttcgttttaccttaaggccaatgaaaatagaagctggtattcccaaacccaatcctaatggcttggtcactcaaaggattcaaaaacgcttgactgagcgactagacgatcaagactttaagattgatagagctgacaatatagtaattgactttgacttagctaatgatggaggtacgccatga

SEQ ID NO: 56 - protein, 249 aa, Alloiococcus otitidis
MQEAGIDLVSMANNHTGDMGKQGMVDGMEILRDVEMDYIGMGHDRAEAGQAYQFVANNLTTSIFAVSDVIKPGQAASDDEPGVLTTNSQAFLNLANSYDQESDLVIAYIHAGIEYIRQPDANHQELAESLIDAGADIVICSHTHSLLPVEKYQDGIIFYGLGNFIFDQGMQSSTDSVILDMDINSPDQVRFTLRPMKIEAGIPKPNPNGLVTQRIQKRLTERLDDQDFKIDRADNIVIDFDLANDGGTP

SEQ ID NO: 57 - DNA, 1212 bp, Alloiococcus otitidis; identical to SEQ ID NO: 55
  CDS (244)..(1209)

SEQ ID NO: 58 - protein, 322 aa, Alloiococcus otitidis
MGDISLSRYIAEIGERDGYEEFFTYVKPHFDGRDLVVANLESAVTYDNRTYVKPASSLSGGIYLDSSIDSVKAMQEAGIDLVSMANNHTGDMGKQGMVDGMEILRDVEMDYIGMGHDRAEAGQAYQFVANNLTTSIFAVSDVIKPGQAASDDEPGVLTTNSQAFLNLANSYDQESDLVIAYIHAGIEYIRQPDANHQELAESLIDAGADIVICSHTHSLLPVEKYQDGIIFYGLGNFIFDQGMQSSTDSVILDMDINSPDQVRFTLRPMKIEAGIPKPNPNGLVTQRIQKRLTERLDDQDFKIDRADNIVIDFDLANDGGTP

SEQ ID NO: 59 - DNA, 1212 bp, Alloiococcus otitidis; identical to SEQ ID NO: 55
  CDS (16)..(1209)

SEQ ID NO: 60 - protein, 398 aa, Alloiococcus otitidis
MKLPPRAELHKKQSLKDRIQIYLKRNETSLGQALVFLVIVFCLAIGGFFYREFSNQANPESQFHVQANAETPSISFVGDISLSRYIAEIGERDGYEEFFTYVKPHFDGRDLVVANLESAVTYDNRTYVKPASSLSGGIYLDSSIDSVKAMQEAGIDLVSMANNHTGDMGKQGMVDGMEILRDVEMDYIGMGHDRAEAGQAYQFVANNLTTSIFAVSDVIKPGQAASDDEPGVLTTNSQAFLNLANSYDQESDLVIAYIHAGIEYIRQPDANHQELAESLIDAGADIVICSHTHSLLPVEKYQDGIIFYGLGNFIFDQGMQSSTDSVILDMDINSPDQVRFTLRPMKIEAGIPKPNPNGLVTQRIQKRLTERLDDQDFKIDRADNIVIDFDLANDGGTP

SEQ ID NO: 61 - DNA, 396 bp, Alloiococcus otitidis
  CDS (40)..(393)
gattcttcaaccgatgagtctttattaggaggagtgccagtggtgcaaagaggggagatctattatgcagatctatctccggtggtgggttctgaacaaggcggcatgcgaccggtattgattttgcaaaataatgtagggaacaagtacagccctactgttattgttgctgccataacgactaggataaataagggccggatgccgacgcacgttgaggttggagaaaaaaatggcttagaaaagaattctgtcgttttacttgaacaaattcggacaattgacaaacagcggatcaaggacaaggtaacacagctaaagaaagaaaaaatgaaagaaattgacgatgccttgaggataagcatcggactttccaataaatataaatatatctaa

SEQ ID NO: 62 - protein, 118 aa, Alloiococcus otitidis
MVQRGEIYYADLSPVVGSEQGGMRPVLILQNNVGNKYSPTVIVAAITTRINKGRMPTHVEVGEKNGLEKNSVVLLEQIRTIDKQRIKDKVTQLKKEKMKEIDDALRISIGLSNKYKYI

SEQ ID NO: 63 - DNA, 396 bp, Alloiococcus otitidis; identical to SEQ ID NO: 61
  CDS (34)..(393)

SEQ ID NO: 64 - protein, 120 aa, Alloiococcus otitidis
MPVVQRGEIYYADLSPVVGSEQGGMRPVLILQNNVGNKYSPTVIVAAITTRINKGRMPTHVEVGEKNGLEKNSVVLLEQIRTIDKQRIKDKVTQLKKEKMKEIDDALRISIGLSNKYKYI

SEQ ID NO: 65 - DNA, 330 bp, Alloiococcus otitidis
  CDS (28)..(327)
atatatttatatttattggaaagtccgatgcttatcctcaaggcatcgtcaatttctttcattttttctttctttagctgtgttaccttgtccttgatccgctgtttgtcaattgtccgaatttgttcaagtaaaacgacagaattcttttctaagccatttttttctccaacctcaacgtgcgtcggcatccggcccttatttatcctagtcgttatggcagcaacaataacagtagggctgtacttgttccctacattattttgcaaaatcaataccggtcgcatgccgccttgttcagaacccaccaccggagatagatctgcataa

SEQ ID NO: 66 - protein, 100 aa, Alloiococcus otitidis
MLILKASSISFIFSFFSCVTLSLIRCLSIVRICSSKTTEFFSKPFFSPTSTCVGIRPLFILVVMAATITVGLYLFPTLFCKINTGRMPPCSEPTTGDRSA

SEQ ID NO: 67 - DNA, 330 bp, Alloiococcus otitidis; identical to SEQ ID NO: 65
  CDS (16)..(327)

SEQ ID NO: 68 - protein, 104 aa, Alloiococcus otitidis
MESPMLILKASSISFIFSFFSCVTLSLIRCLSIVRICSSKTTEFFSKPFFSPTSTCVGIRPLFILVVMAATITVGLYLFPTLFCKINTGRMPPCSEPTTGDRSA

SEQ ID NO: 69 - DNA, 300 bp, Alloiococcus otitidis
  CDS (49)..(297)
tgttgctgtcctttttcgctatttaatatttctttcggagggtgtatcatggaagaacaacaatctaaagaattaactgttaaagtggattcggggacttacaaagcctttcaagcttactgtgaagaatctagttttgaccaggacgaaattgttgaacacttaatggaccgcttcgttgatgaaagccgaatgatgatcaatcaaatgcgcaagggttatgctgaaatggctaacctcaatttagagatagcagccgagttttctgaatgtgacaacgaggtcaatataaatttgtaa

SEQ ID NO: 70 - protein, 83 aa, Alloiococcus otitidis
MEEQQSKELTVKVDSGTYKAFQAYCEESSFDQDEIVEHLMDRFVDESRMMINQMRKGYAEMANLNLEIAAEFSECDNEVNINL

SEQ ID NO: 71 - DNA, 426 bp, Alloiococcus otitidis
  CDS (85)..(423)
aagacaaaaaagaagagggaaaagatcttaagacacttccctaagtctgaacatattctaggagggttacaagtgattacaggaatgggtgtggatattgttgaaatgagccggattcaagctgtttgggaccgaaagcccagctttgcccagcggattttaacccaaagggagttggcttatttcgagaaagcgactggtaggcggagaattgaattcctagcgggacggtttgccggtaaagaagcttacagtaaagccttgggaactggtattggacgcttgagctttaaagatattgaaatcctaatcaatgaccaaggccagccagtcctaacatctcatcctaaagctggccgggccttgatttcaatttctcacactagagacctctgcctggcccaggtccttttacaggaaaattga

SEQ ID NO: 72 - protein, 113 aa, Alloiococcus otitidis
MGVDIVEMSRIQAVWDRKPSFAQRILTQRELAYFEKATGRRRIEFLAGRFAGKEAYSKALGTGIGRLSFKDIEILINDQGQPVLTSHPKAGRALISISHTRDLCLAQVLLQEN

SEQ ID NO: 73 - DNA, 426 bp, Alloiococcus otitidis; identical to SEQ ID NO: 71
  CDS (73)..(423)

SEQ ID NO: 74 - protein, 117 aa, Alloiococcus otitidis
MITGMGVDIVEMSRIQAVWDRKPSFAQRILTQRELAYFEKATGRRRIEFLAGRFAGKEAYSKALGTGIGRLSFKDIEILINDQGQPVLTSHPKAGRALISISHTRDLCLAQVLLQEN

SEQ ID NO: 75 - DNA, 1467 bp, Alloiococcus otitidis
  CDS (19)..(1464)
agaagggaagtcgttcagatgaattttttggacctgcaattaagttctgatttagttaaggccttaagcaagaagggctacagccagccgacccgaattcaagttcagaccatccccttgctcttagaggggaaggatgtcattggccaggcacagacgggaacagggaaaacagctgcctatgccctccccttgcttgacttattagatcatgaccaagctagacctcaagccctgatcttaacccctacccgggagttggccagccaggtcaaaggggaaatcgactcctttggccgctttaagtctttcaaaagcctggctatttttggcggtgtttcaatccaagaccaaatcaagtcccttaaacagggcagtcaaatcttagtggccacaccaggtcgtttgctagacttgttgcagcgggggaaggtggatacttcgggtcttcatcggcttgttttagatgaagctgacgagatgttagatatgggcttcattgaagagatcaaagagattctaagttacttgaataagctgcaacaagttgccttgttctcggccacactgtcggaagaagttttagccattgcggatgattttatccccgactatcatttggttagtctaggggccaaaagtcaaccggcccaagcagttagccagttctttaccaaggtcaaggactcggaaaaattccaggtcctccatgcctttttgcaggttttagacccgaaagctgccttgatctttgtccggaccaagaagcgggtggatgaaatggtccaggccctgcaacaaatgacctaccaagtggcaggcctccacagtgacttttcccaaaagcaaaggttagccgtcatacaccggctcaagaccggccaaagcaagctcttagtcgccactgacctggccgctcggggcttggacatcgaccatatctcccatgtcttcaatttcgatgcccctcaagatgcagaaagctacacccaccggattggacggacgggacgggcaggctcgcaagggatggccatcagcttcttcgaacccaaggaacacggctatttaaaaaaacttgagaaggaaatcggccacaaactccaacccctaaaaccacccactacaagcgacttatactaccacaagcttgatgcagcttaccaaaatgttcagtccagtctcgaccaagacgacctagcatctctctaccctgctgcagaggatttattagaccactacccggctaaagacttggtggctcttttggtcaaggtcttgactgaggaccaaatttctgctaaagaggtcaagctcagccctcaaaaagacctgccccatttagaacggtcaggtaggaagtccaaaaataaaagaggcttaaacaaggggcagagaaaacggcgccagagcaaaggtggccaaaataagggtaaaagacaaaaaagaagagggaaaagatcttaa

SEQ ID NO: 76 - protein, 482 aa, Alloiococcus otitidis
MNFLDLQLSSDLVKALSKKGYSQPTRIQVQTIPLLLEGKDVIGQAQTGTGKTAAYALPLLDLLDHDQARPQALILTPTRELASQVKGEIDSFGRFKSFKSLAIFGGVSIQDQIKSLKQGSQILVATPGRLLDLLQRGKVDTSGLHRLVLDEADEMLDMGFIEEIKEILSYLNKLQQVALFSATLSEEVLAIADDFIPDYHLVSLGAKSQPAQAVSQFFTKVKDSEKFQVLHAFLQVLDPKAALIFVRTKKRVDEMVQALQQMTYQVAGLHSDFSQKQRLAVIHRLKTGQSKLLVATDLAARGLDIDHISHVFNFDAPQDAESYTHRIGRTGRAGSQGMAISFFEPKEHGYLKKLEKEIGHKLQPLKPPTTSDLYYHKLDAAYQNVQSSLDQDDLASLYPAAEDLLDHYPAKDLVALLVKVLTEDQISAKEVKLSPQKDLPHLERSGRKSKNKRGLNKGQRKRRQSKGGQNKGKRQKRRGKRS

SEQ ID NO: 77 - DNA, 1410 bp, Alloiococcus otitidis
  CDS (325)..(1407)
ataggagtcataacggtgtcttggaaattaaaagagattgcccaggcagttgggggagagctagttagtgcggacggccaggaggaggtcaccggggtccactttgattcaaggcgacttgaaccaggtgacttgtttgttcctattttaggccagcgggatggtcatgattttgcccaagccgccctagaccaaggagctagcggagccttttgggccaaagattcaagcttagcccctaaaggtcttcccttgatcaaggtagaagatagctaccaggccctagttgacctggccaagtggcatcttgaagctgtcgcacctatgaaaattgccatcaccggcagtaatgggaagaccactactaaggacatggtggctagtgtggtgggccaagcatttaagtgtcacaaaacagttagcaacttaaataatgaacttggcgtgcccatgactatcttagctatgcctgcagactgccaggtcatagttgttgaaatgggcatggatggaccaggtcagatctcggccttgtccaaactcttgcagcctgacattgccattatcaccatgattggcgaggcccacatcgagttctttgggtcaagggacaaaattgcccaggccaaactggaaattctagatggcctaagcgaccagggcgtctttattgccaacggggatgaacccctgcttgagtctgccttgaaccaccacccccacagcctgcgttttggccaatcgccccacaatgacatttatcctttgaccactgagattggacagcggcaaagccagttcacccttaacctggaccctagtctgcaatttaccatcccttcaccaggaaaatataatgtcattaacgccctagctgcagtcttggtagcccaggtcctggacttggacctccaactagctgtccagggcttggcccagtttcagctaagcaaaaaccggctggaatggctaaaaggctataagcaggcccacttattaaatgatgcttacaatgctagtcccacttccatgaaggcggtcttggattatttcagccatttggacctagatggggagaagatagcggttttaggggacttgcgggagttagggtctttgtccggtcaactccaccggtcacttagtcaagccatcgaccccaaacttttagaccgggttgtcttatatggaccagaaatggcagccctctaccaggtcttgaaggctgattttgatcctgaccacttgacttatttcccagaggatcgaaaagccttgaccgactttttaaaagaaatcatgggcccatcttcttatcttttgttgaagtccagtctaggaacaggtctgcttgaagtggtccaagccctaagtcaaaaagaagatgatgaaaaccagcccctggactaa

SEQ ID NO: 78 - protein, 361 aa, Alloiococcus otitidis
MKIAITGSNGKTTTKDMVASVVGQAFKCHKTVSNLNNELGVPMTILAMPADCQVIVVEMGMDGPGQISALSKLLQPDIAIITMIGEAHIEFFGSRDKIAQAKLEILDGLSDQGVFIANGDEPLLESALNHHPHSLRFGQSPHNDIYPLTTEIGQRQSQFTLNLDPSLQFTIPSPGKYNVINALAAVLVAQVLDLDLQLAVQGLAQFQLSKNRLEWLKGYKQAHLLNDAYNASPTSMKAVLDYFSHLDLDGEKIAVLGDLRELGSLSGQLHRSLSQAIDPKLLDRVVLYGPEMAALYQVLKADFDPDHLTYFPEDRKALTDFLKEIMGPSSYLLLKSSLGTGLLEVVQALSQKEDDENQPLD

SEQ ID NO: 79 - DNA, 1410 bp, Alloiococcus otitidis; identical to SEQ ID NO: 77
  CDS (133)..(1407)

SEQ ID NO: 80 - protein, 425 aa, Alloiococcus otitidis
MFVPILGQRDGHDFAQAALDQGASGAFWAKDSSLAPKGLPLIKVEDSYQALVDLAKWHLEAVAPMKIAITGSNGKTTTKDMVASVVGQAFKCHKTVSNLNNELGVPMTILAMPADCQVIVVEMGMDGPGQISALSKLLQPDIAIITMIGEAHIEFFGSRDKIAQAKLEILDGLSDQGVFIANGDEPLLESALNHHPHSLRFGQSPHNDIYPLTTEIGQRQSQFTLNLDPSLQFTIPSPGKYNVINALAAVLVAQVLDLDLQLAVQGLAQFQLSKNRLEWLKGYKQAHLLNDAYNASPTSMKAVLDYFSHLDLDGEKIAVLGDLRELGSLSGQLHRSLSQAIDPKLLDRVVLYGPEMAALYQVLKADFDPDHLTYFPEDRKALTDFLKEIMGPSSYLLLKSSLGTGLLEVVQALSQKEDDENQPLD

SEQ ID NO: 81 - DNA, 1410 bp, Alloiococcus otitidis; identical to SEQ ID NO: 77
  CDS (16)..(1407)

SEQ ID NO: 82 - protein, 464 aa, Alloiococcus otitidis
MSWKLKEIAQAVGGELVSADGQEEVTGVHFDSRRLEPGDLFVPILGQRDGHDFAQAALDQGASGAFWAKDSSLAPKGLPLIKVEDSYQALVDLAKWHLEAVAPMKIAITGSNGKTTTKDMVASVVGQAFKCHKTVSNLNNELGVPMTILAMPADCQVIVVEMGMDGPGQISALSKLLQPDIAIITMIGEAHIEFFGSRDKIAQAKLEILDGLSDQGVFIANGDEPLLESALNHHPHSLRFGQSPHNDIYPLTTEIGQRQSQFTLNLDPSLQFTIPSPGKYNVINALAAVLVAQVLDLDLQLAVQGLAQFQLSKNRLEWLKGYKQAHLLNDAYNASPTSMKAVLDYFSHLDLDGEKIAVLGDLRELGSLSGQLHRSLSQAIDPKLLDRVVLYGPEMAALYQVLKADFDPDHLTYFPEDRKALTDFLKEIMGPSSYLLLKSSLGTGLLEVVQALSQKEDDENQPLD

SEQ ID NO: 83 - DNA, 1068 bp, Alloiococcus otitidis
  CDS (16)..(1065)
agggaatttaagacgatggatattttcttgatttatggcggtaagagcgctgaacatgatatttcaattatttctgctttttatattttaaaagaaattttttatgataattaccaagtcaatttggtctacattagccgcgagggggtctggttagaaggaccaaccattaccgacccagaccaggtccaaaaagatagcgaccttcgtttaggggattctgcaacacgatttgactttgccaagcttcaagaagaggaggccatagcctttccagtcctccacggtccgaacggggaggacgggacagttcagggcttgtttgaggttttaaatgtcccttatgtgggctgcggtgttttagctagttcaactggcatggacaaaattatatccaaagccctatttgaacaagctggcatccctcaactcccctaccaggctattttgtacaataattgggtttatgatccagaagaagtggtccgagatatcgaaagccatttaagttaccctatttttgtcaagcccgctaatatgggatccagtgttggcatttctcaggtccacgaccaagcggaactcaaggcggggatcaatttggcctttgaatatgaccaccgaattgtggtggaagaaggggtcacagcccgagaaattgagatgtccatcctaggcaatgaagatgtccacacttccgtcccaggggaattggtcaaggatgcccaattttatgattatgcggctaagtatgaaaacaatacggttcaactggatatcccagccaagctagattctgaagtggtcagccagttgaaagtatatgcgaccaaggcctttttagccatagatgggagtggtctaacccgggcagacttttttgtgacggaagacaagaaaatttacatcaacgaggtcaataccttccctggcttcaccactattagtatgtatcccaaattatgggaagcaacagggctcagctacaaggacttgattgaagagttgattcagttgggcttgaaacgtcaccgaatgaagcaagctaagcaattgagagatagatag

SEQ ID NO: 84 - protein, 350 aa, Alloiococcus otitidis
MDIFLIYGGKSAEHDISIISAFYILKEIFYDNYQVNLVYISREGVWLEGPTITDPDQVQKDSDLRLGDSATRFDFAKLQEEEAIAFPVLHGPNGEDGTVQGLFEVLNVPYVGCGVLASSTGMDKIISKALFEQAGIPQLPYQAILYNNWVYDPEEVVRDIESHLSYPIFVKPANMGSSVGISQVHDQAELKAGINLAFEYDHRIVVEEGVTAREIEMSILGNEDVHTSVPGELVKDAQFYDYAAKYENNTVQLDIPAKLDSEVVSQLKVYATKAFLAIDGSGLTRADFFVTEDKKIYINEVNTFPGFTTISMYPKLWEATGLSYKDLIEELIQLGLKRHRMKQAKQLRDR

SEQ ID NO: 85 - DNA, 1407 bp, Alloiococcus otitidis
  CDS (688)..(1404)
gtaaaaaggagggccttcatggctacagttattttcttagctatttttatagcattattatacttattgtaccgcatgcaagctaatcacgtgagctataccaagcggacttttattgctttaggacttgggattgtccttggtggagtaatccagctgatccttggggctgaaagtgggaccactgaaacaattgttgactggatcaatattgtcggtaacggctatgtccgtttcttgcaattagtcgttgttcccttgatcttagtgtctcttatccgggccttcacccaagttaaggggagtgccaacttaggccggatcagtgttaatgttttaaccttcttgattgtgactgttatgatcgcttcagctatcggtattttgaccaccatcctctttaacttggatggggcagaatttacccagggagctgctgaaatggagcggatcgctgaggtccaagagtcacaagctgaaattgctgacttgaccctacccgaacaaattgtcagtttcattccggccaacatctttgaagactttgccaacagccgtccaaccagtattattgctgtcgtcattttcgctgccctaaccgggattgcctacttaggtgttagccgtaagcagcctgaacaaggggaaacttttgaacgttttatcgaaaccctgcatgccattgtcatgcgaattgtgacccttgttcttcgaatggcaccatttggtatcctggccttgatgaccgatatggtggccacatcaagcattaatgctttgattaatatgggtaccttcttagtggccagctatgttgctattatcgcaatgttccttgtccacggcttgatcctagccctctttggcttgaacccgatcacttatttcagaaatgcccgtgaggtactcacctttacctttacttcccggtctagtgcaggggccttgccaatgaatatcgaaacccaaagagaagccatgggtgtcgacgatgccaatgccaacttctctagtgcctttggcttgtcaatcgggcaaaatggttgtgcaggtatctacccaaccatgctggttgccattattgcaccagctgtcggcatggacttatcaaacccatggacctgggtgaccatcattgtgacagtggctatctcttccttcggtgttgccggtgttgggggcggggcaacctttgcatccctcattgtcttcggtacacttggccttccagtggaaatcattggtctaatgatctccatcgaaccggttattgacatgggccgtactgccttaaacgtcaatgacagtatcgtggctggtgttatctcagctaaacgggaaggtacgctagacaaggaagtctatgacagcccagaccacaaattgacttcagaatattcactttaa

SEQ ID NO: 86 - protein, 239 aa, Alloiococcus otitidis
MRIVTLVLRMAPFGILALMTDMVATSSINALINMGTFLVASYVAIIAMFLVHGLILALFGLNPITYFRNAREVLTFTFTSRSSAGALPMNIETQREAMGVDDANANFSSAFGLSIGQNGCAGIYPTMLVAIIAPAVGMDLSNPWTWVTIIVTVAISSFGVAGVGGGATFASLIVFGTLGLPVEIIGLMISIEPVIDMGRTALNVNDSIVAGVISAKREGTLDKEVYDSPDHKLTSEYSL

SEQ ID NO: 87 - DNA, 1407 bp, Alloiococcus otitidis; identical to SEQ ID NO: 85
  CDS (67)..(1404)

SEQ ID NO: 88 - protein, 446 aa, Alloiococcus otitidis
MYRMQANHVSYTKRTFIALGLGIVLGGVIQLILGAESGTTETIVDWINIVGNGYVRFLQLVVVPLILVSLIRAFTQVKGSANLGRISVNVLTFLIVTVMIASAIGILTTILFNLDGAEFTQGAAEMERIAEVQESQAEIADLTLPEQIVSFIPANIFEDFANSRPTSIIAVVIFAALTGIAYLGVSRKQPEQGETFERFIETLHAIVMRIVTLVLRMAPFGILALMTDMVATSSINALINMGTFLVASYVAIIAMFLVHGLILALFGLNPITYFRNAREVLTFTFTSRSSAGALPMNIETQREAMGVDDANANFSSAFGLSIGQNGCAGIYPTMLVAIIAPAVGMDLSNPWTWVTIIVTVAISSFGVAGVGGGATFASLIVFGTLGLPVEIIGLMISIEPVIDMGRTALNVNDSIVAGVISAKREGTLDKEVYDSPDHKLTSEYSL

SEQ ID NO: 89 - DNA, 1407 bp, Alloiococcus otitidis; identical to SEQ ID NO: 85
  CDS (19)..(1404)

SEQ ID NO: 90 - protein, 462 aa, Alloiococcus otitidis
MATVIFLAIFIALLYLLYRMQANHVSYTKRTFIALGLGIVLGGVIQLILGAESGTTETIVDWINIVGNGYVRFLQLVVVPLILVSLIRAFTQVKGSANLGRISVNVLTFLIVTVMIASAIGILTTILFNLDGAEFTQGAAEMERIAEVQESQAEIADLTLPEQIVSFIPANIFEDFANSRPTSIIAVVIFAALTGIAYLGVSRKQPEQGETFERFIETLHAIVMRIVTLVLRMAPFGILALMTDMVATSSINALINMGTFLVASYVAIIAMFLVHGLILALFGLNPITYFRNAREVLTFTFTSRSSAGALPMNIETQREAMGVDDANANFSSAFGLSIGQNGCAGIYPTMLVAIIAPAVGMDLSNPWTWVTIIVTVAISSFGVAGVGGGATFASLIVFGTLGLPVEIIGLMISIEPVIDMGRTALNVNDSIVAGVISAKREGTLDKEVYDSPDHKLTSEYSL

SEQ ID NO: 91 - DNA, 255 bp, Alloiococcus otitidis
  CDS (22)..(252)
ctggttcaactaaacattcagatgaaacagttgaatgggaagatggcaatgaataccctcttattcgggttgaaatttctgctgattcccaccccttttacactggacgacaaaaattcgcccaagcagatggtcgaatcgaccgtttcaacaaaaaatacggcctcacagacgaaaactaaaattcgtggggttcagctctcacacttgtgggagcttttttattttgttggtgaagcacaccttgtcgggtga

SEQ ID NO: 92 - protein, 77 aa, Alloiococcus otitidis
MKQLNGKMAMNTLLFGLKFLLIPTPFTLDDKNSPKQMVESTVSTKNTASQTKTKIRGVQLSHLWELFYFVGEAHLVG

SEQ ID NO: 93 - DNA, 267 bp, Alloiococcus otitidis
  CDS (4)..(264)
ggagtgaaagagatgaaacaagatatccacccagattaccacaaggttgtctttatggacaccactactggttttaaatttctaactggttcaactaaacattcagatgaaacagttgaatgggaagatggcaatgaataccctcttattcgggttgaaatttctgctgattcccaccccttttacactggacgacaaaaattcgcccaagcagatggtcgaatcgaccgtttcaacaaaaaatacggcctcacagacgaaaactaa

SEQ ID NO: 94 - protein, 87 aa, Alloiococcus otitidis
MKEMKQDIHPDYHKVVFMDTTTGFKFLTGSTKHSDETVEWEDGNEYPLIRVEISADSHPFYTGRQKFAQADGRIDRFNKKYGLTDEN

SEQ ID NO: 95 - DNA, 1284 bp, Alloiococcus otitidis
  CDS (16)..(1281)
gattggatgaatataatgaaaaaactaatcatcaacggtggccggaccctcaagggtgaagtcacggtatcaggggccaaaaatagtacggtggctctcattccagcatctattttagcagacagcccggtaatcctagagggggtacccgatatccaggatgttcattccctactggagattttaaatgaaatgaatgtcaagaccgactttgacggaaacactttgaccattgacccaagagaaatggtctctatccccatgccaagtggtaagatccaaagcttgcgggcttcctactactttatgggagccctcttggccaaattcggtaaaggggtagtcggtcttcccggtggttgcttcctggggccacgacccatcgaccaacacttgaaaggcttccgcctgcttggagcagatgtggataatgaaatgggggccatgtaccttaaaaccagtgattcaggcctagtgggtagtcggatttacttagatgttgtttcgattggtgcaaccattaatatcatgttagccgctgttagggcccaaggtcggacggtcattgagaatgcggcccgagaaccagaaattattgatgttgccaccctcttgaacaagatgggggctaaaatacgtggggctggcactgatatgatccggattgaaggggttgaccagctgactggctgccagcactccatcatccccgaccggattgaagctgggacctacctggctattgcagcggcagctggggaggatgtcctggtaaacaatgttatagttgaacatattgatagtttaattgccaaactcgacgaaattggtattgacctggacatcggcgaagacagtatccgggtgaaagcccccagtaaacctttgcagcctgttaccatcaaaaccctgccttaccctggttttgccactgacctccagcagcccatcacccctctcttgcttctggccaaaggggagtccgttatcaccgataccatctatcctaaacgggttaagcacatccctgagctggaacggatgggggccaatatccgggtcgaaagcgatatcatcctcattgaaggtggccaccccctcaagggggcagaagtggaagccagtgatttaagagccggggcttgcttgattaatgcaggtttgatcgcggaaggtcagacggaaattactggcgttgacaaaattctaagaggctactctcatattgttgaaaaactcaatgacctaggcgcagatgtttatatgcaagagggggaagactga

SEQ ID NO: 96 - protein, 422 aa, Alloiococcus otitidis
MKKLIINGGRTLKGEVTVSGAKNSTVALIPASILADSPVILEGVPDIQDVHSLLEILNEMNVKTDFDGNTLTIDPREMVSIPMPSGKIQSLRASYYFMGALLAKFGKGVVGLPGGCFLGPRPIDQHLKGFRLLGADVDNEMGAMYLKTSDSGLVGSRIYLDVVSIGATINIMLAAVRAQGRTVIENAAREPEIIDVATLLNKMGAKIRGAGTDMIRIEGVDQLTGCQHSIIPDRIEAGTYLAIAAAAGEDVLVNNVIVEHIDSLIAKLDEIGIDLDIGEDSIRVKAPSKPLQPVTIKTLPYPGFATDLQQPITPLLLLAKGESVITDTIYPKRVKHIPELERMGANIRVESDIILIEGGHPLKGAEVEASDLRAGACLINAGLIAEGQTEITGVDKILRGYSHIVEKLNDLGADVYMQEGED

SEQ ID NO: 97 - DNA, 1284 bp, Alloiococcus otitidis; identical to SEQ ID NO: 95
  CDS (7)..(1281)

SEQ ID NO: 98 - protein, 425 aa, Alloiococcus otitidis
MNIMKKLIINGGRTLKGEVTVSGAKNSTVALIPASILADSPVILEGVPDIQDVHSLLEILNEMNVKTDFDGNTLTIDPREMVSIPMPSGKIQSLRASYYFMGALLAKFGKGVVGLPGGCFLGPRPIDQHLKGFRLLGADVDNEMGAMYLKTSDSGLVGSRIYLDVVSIGATINIMLAAVRAQGRTVIENAAREPEIIDVATLLNKMGAKIRGAGTDMIRIEGVDQLTGCQHSIIPDRIEAGTYLAIAAAAGEDVLVNNVIVEHIDSLIAKLDEIGIDLDIGEDSIRVKAPSKPLQPVTIKTLPYPGFATDLQQPITPLLLLAKGESVITDTIYPKRVKHIPELERMGANIRVESDIILIEGGHPLKGAEVEASDLRAGACLINAGLIAEGQTEITGVDKILRGYSHIVEKLNDLGADVYMQEGED

SEQ ID NO: 99 - DNA, 324 bp, Alloiococcus otitidis
  CDS (34)..(321)
atcactggcttccacttctgcccccttgagggggtggccaccttcaatgaggatgatatcgctttcgacccggatattggcccccatccgttccagctcagggatgtgcttaacccgtttaggatagatggtatcggtgataacggactcccctttggccagaagcaagagaggggtgatgggctgctggaggtcagtggcaaaaccagggtaaggcagggttttgatggtaacaggctgcaaaggtttactgggggctttcacccggatactgtcttcgccgatgtccaggtcaataccaatttcgtcgagtttggcaattaa

SEQ ID NO: 100 - protein, 96 aa, Alloiococcus otitidis
MATFNEDDIAFDPDIGPHPFQLRDVLNPFRIDGIGDNGLPFGQKQERGDGLLEVSGKTRVRQGFDGNRLQRFTGGFHPDTVFADVQVNTNFVEFGN

SEQ ID NO: 101 - DNA, 879 bp, Alloiococcus otitidis
  CDS (40)..(876)
ataataggaggcaaacttgaaatgagtcctttagtcaatatgacagacatgttaaacaaagctttgcagggaggctatgcggtcggccagtttaatatcaacaacctagagtggacccaggctattctgcaagctgcccaagaagcccagtccccagctatcttaggcgtatcggaaggggctgccaaatacatgggtggctttaaagtggtcatgggcatagtaaatgccttgcttgaagaaatggaaattacagttccgattgctgtccaccttgaccacggctcaacccttgaagcctgccaaaaagcgatcgatgctggatttagctcagtcatgattgataattccaagttcccaattgacgaaaacatcgaaaacaccaaaaaagtagtggaatatgcccacgctaaaggggtatcggtggaagcggaagttggcgcagtcggtggaactgaagacggagtcactggcggtgtcatttacgctgaccccgaagaatgtaagcgaattgtcgaagaagccaacatcgatgctctagccgctgccttgggttcggttcacggtgattacgatggggagccaaaacttggctttgacgaaatgaaagaaatttctgaattaaccaaggcccctcttgtcctccacggtggctccggtattccggattaccaaatcaaacaagcgatcgaatacggtcacagtaaaatcaatgtcaacactgaactccaacaagcatggactaaacggactcgtcaagttattgcccaagacgaaaaagtttacgacccacgtaagattatcggcccaggcaaagaagacattacccgggtaacgaaagaaaaaatggacatctttggctcaagccagcaagcttag

SEQ ID NO: 102 - protein, 279 aa, Alloiococcus otitidis
MTDMLNKALQGGYAVGQFNINNLEWTQAILQAAQEAQSPAILGVSEGAAKYMGGFKVVMGIVNALLEEMEITVPIAVHLDHGSTLEACQKAIDAGFSSVMIDNSKFPIDENIENTKKVVEYAHAKGVSVEAEVGAVGGTEDGVTGGVIYADPEECKRIVEEANIDALAAALGSVHGDYDGEPKLGFDEMKEISELTKAPLVLHGGSGIPDYQIKQAIEYGHSKINVNTELQQAWTKRTRQVIAQDEKVYDPRKIIGPGKEDITRVTKEKMDIFGSSQQA

SEQ ID NO: 103 - DNA, 879 bp, Alloiococcus otitidis; identical to SEQ ID NO: 101
  CDS (22)..(876)

SEQ ID NO: 104 - protein, 285 aa, Alloiococcus otitidis
MSPLVNMTDMLNKALQGGYAVGQFNINNLEWTQAILQAAQEAQSPAILGVSEGAAKYMGGFKVVMGIVNALLEEMEITVPIAVHLDHGSTLEACQKAIDAGFSSVMIDNSKFPIDENIENTKKVVEYAHAKGVSVEAEVGAVGGTEDGVTGGVIYADPEECKRIVEEANIDALAAALGSVHGDYDGEPKLGFDEMKEISELTKAPLVLHGGSGIPDYQIKQAIEYGHSKINVNTELQQAWTKRTRQVIAQDEKVYDPRKIIGPGKEDITRVTKEKMDIFGSSQQA

SEQ ID NO: 105 - DNA, 408 bp, Alloiococcus otitidis
  CDS (1)..(405)
atgacaccgccagtgactccgtcttcagttccaccgactgcgccaacttccgcttccaccgatacccctttagcgtgggcatattccactacttttttggtgttttcgatgttttcgtcaattgggaacttggaattatcaatcatgactgagctaaatccagcatcgatcgctttttggcaggcttcaagggttgagccgtggtcaaggtggacagcaatcggaactgtaatttccatttcttcaagcaaggcatttactatgcccatgaccactttaaagccacccatgtatttggcagccccttccgatacgcctaagatagctggggactgggcttcttgggcagcttgcagaatagcctgggtccactctaggttgttgatattaaactggccgaccgcatag

SEQ ID NO: 106 - protein, 135 aa, Alloiococcus otitidis
MTPPVTPSSVPPTAPTSASTDTPLAWAYSTTFLVFSMFSSIGNLELSIMTELNPASIAFWQASRVEPWSRWTAIGTVISISSSKAFTMPMTTLKPPMYLAAPSDTPKIAGDWASWAACRIAWVHSRLLILNWPTA

SEQ ID NO: 107 - DNA, 1620 bp, Alloiococcus otitidis
  CDS (163)..(1617)
ggaggcataattgtgacaaaatatatttttgtaaccggtggtgtcgtttcgtcaatcggtaaagggattgcggctgcttcattggggcgcttgctcaagaaccggggcttgaaaataaccattcaaaaatttgacccttacataaatgtcgacccgggcaccatgagtccttaccagcatggggaagttttcgtaactgatgatggggccgaaactgacctagacctaggccactatgaacgctttatcgatattaacttaaaccgctattccaatgtgaccactggcaaggtctattctgaagtattggccaaggaaagacgaggggactacctaggggccaccgttcaagtcattccccacattaccaatgctatcaaggataaaattatgcgggcaggtcggaccgctgactctgatattgtgatcactgaagtaggcgggacagttggggatattgaatccttgcctttcttagaagccttacgccaaatgaagtcagaagtcggcccagataatgtgatgtatatccacaccaccctcattccctatctcaaggcagcaggggaaatgaagaccaaaccaacccaacatagtgtcaaagaactgcgtagcctagggatccagcccaatgtcttgattgtccggtctgatcaagaaattgaccaatccatcaaggacaagttggccttgtttactgacgtggaacctcaagctgtgattgaatccatcgatgtggataccttgtactccatccctttacggttgaaagagcaaggtttggatgaaattgtagtccgacacctgaaaatcgatgcccctgaagctgacatgtctaactggattgagctcgaagaaaaagtccaaaacttgtctcgcaaggttaagattgccttagttggtaaatatgccgaattacccgatgcctacttgtcagtgaatgaagccttgaaacatgccggctttgcctttgactccgatgtcgaaattgactggatcaactccgaaacccaaacggctgaccaaatcatccaggccattgaccaatgtgacggcgtggtggtcccgggtggcttcggatctcggggcttggaagggaaattgaccgctatcaaatacatccgggaaaacaagattcctttcttgggcatttgcctgggcatgcaattggcgaccattgaatatgctagaaacgttgcaggacttgctggggccaactctgctgaagtggacccggatgctgaccacaaggttattgacttgatggccgaccagcacgaggtggaagacttgggtggtaccttgcgtctgggtctctacccttgtaaattggctgaagacagtgtggctaaagcagcttaccaagacgatgtggtccaagagcgccaccgccaccgctatgaatttaacaatgcctaccgccaaatcttaactgaccacggtttgactatttctggggtttcaccagacaataaattggttgaaatcattgaaataaccgaccatcccttcttcgtggccacccaatttcatcccgaatttgtttcccgccccaaccggcctcaagccctcttcaccaagtttattgaagcttcgctacaagctcgggctaataaatag

SEQ ID NO: 108 - protein, 485 aa, Alloiococcus otitidis
MSPYQHGEVFVTDDGAETDLDLGHYERFIDINLNRYSNVTTGKVYSEVLAKERRGDYLGATVQVIPHITNAIKDKIMRAGRTADSDIVITEVGGTVGDIESLPFLEALRQMKSEVGPDNVMYIHTTLIPYLKAAGEMKTKPTQHSVKELRSLGIQPNVLIVRSDQEIDQSIKDKLALFTDVEPQAVIESIDVDTLYSIPLRLKEQGLDEIVVRHLKIDAPEADMSNWIELEEKVQNLSRKVKIALVGKYAELPDAYLSVNEALKHAGFAFDSDVEIDWINSETQTADQIIQAIDQCDGVVVPGGFGSRGLEGKLTAIKYIRENKIPFLGICLGMQLATIEYARNVAGLAGANSAEVDPDADHKVIDLMADQHEVEDLGGTLRLGLYPCKLAEDSVAKAAYQDDVVQERHRHRYEFNNAYRQILTDHGLTISGVSPDNKLVEIIEITDHPFFVATQFHPEFVSRPNRPQALFTKFIEASLQARANK

SEQ ID NO: 109 - DNA, 1620 bp, Alloiococcus otitidis; identical to SEQ ID NO: 107
  CDS (82)..(1617)

SEQ ID NO: 110 - protein, 512 aa, Alloiococcus otitidis
MGRLLKNRGLKITIQKFDPYINVDPGTMSPYQHGEVFVTDDGAETDLDLGHYERFIDINLNRYSNVTTGKVYSEVLAKERRGDYLGATVQVIPHITNAIKDKIMRAGRTADSDIVITEVGGTVGDIESLPFLEALRQMKSEVGPDNVMYIHTTLIPYLKAAGEMKTKPTQHSVKELRSLGIQPNVLIVRSDQEIDQSIKDKLALFTDVEPQAVIESIDVDTLYSIPLRLKEQGLDEIVVRHLKIDAPEADMSNWIELEEKVQNLSRKVKIALVGKYAELPDAYLSVNEALKHAGFAFDSDVEIDWINSETQTADQIIQAIDQCDGVVVPGGFGSRGLEGKLTAIKYIRENKIPFLGICLGMQLATIEYARNVAGLAGANSAEVDPDADHKVIDLMADQHEVEDLGGTLRLGLYPCKLAEDSVAKAAYQDDVVQERHRHRYEFNNAYRQILTDHGLTISGVSPDNKLVEIIEITDHPFFVATQFHPEFVSRPNRPQALFTKFIEASLQARANK

SEQ ID NO: 111 - DNA, 1620 bp, Alloiococcus otitidis; identical to SEQ ID NO: 107
  CDS (13)..(1617)

SEQ ID NO: 112 - protein, 535 aa, Alloiococcus otitidis
MTKYIFVTGGVVSSIGKGIAAASLGRLLKNRGLKITIQKFDPYINVDPGTMSPYQHGEVFVTDDGAETDLDLGHYERFIDINLNRYSNVTTGKVYSEVLAKERRGDYLGATVQVIPHITNAIKDKIMRAGRTADSDIVITEVGGTVGDIESLPFLEALRQMKSEVGPDNVMYIHTTLIPYLKAAGEMKTKPTQHSVKELRSLGIQPNVLIVRSDQEIDQSIKDKLALFTDVEPQAVIESIDVDTLYSIPLRLKEQGLDEIVVRHLKIDAPEADMSNWIELEEKVQNLSRKVKIALVGKYAELPDAYLSVNEALKHAGFAFDSDVEIDWINSETQTADQIIQAIDQCDGVVVPGGFGSRGLEGKLTAIKYIRENKIPFLGICLGMQLATIEYARNVAGLAGANSAEVDPDADHKVIDLMADQHEVEDLGGTLRLGLYPCKLAEDSVAKAAYQDDVVQERHRHRYEFNNAYRQILTDHGLTISGVSPDNKLVEIIEITDHPFFVATQFHPEFVSRPNRPQALFTKFIEASLQARANK

SEQ ID NO: 113 - DNA, 495 bp, Alloiococcus otitidis
  CDS (34)..(492)
gatttggcggtaggcattgttaaattcatagcggtggcggtggcgctcttggaccacatcgtcttggtaagctgctttagccacactgtcttcagccaatttacaagggtagagacccagacgcaaggtaccacccaagtcttccacctcgtgctggtcggccatcaagtcaataaccttgtggtcagcatccgggtccacttcagcagagttggccccagcaagtcctgcaacgtttctagcatattcaatggtcgccaattgcatgcccaggcaaatgcccaagaaaggaatcttgttttcccggatgtatttgatagcggtcaatttcccttccaagccccgagatccgaagccacccgggaccaccacgccgtcacattggtcaatggcctggatgatttggtcagccgtttgggtttcggagttgatccagtcaatttcgacatcggagtcaaaggcaaagccggcatgtttcaaggcttcattcactga

SEQ ID NO: 114 - protein, 153 aa, Alloiococcus otitidis
MAVALLDHIVLVSCFSHTVFSQFTRVETQTQGTTQVFHLVLVGHQVNNLVVSIRVHFSRVGPSKSCNVSSIFNGRQLHAQANAQERNLVFPDVFDSGQFPFQAPRSEATRDHHAVTLVNGLDDLVSRLGFGVDPVNFDIGVKGKAGMFQGFIH

SEQ ID NO: 115 - DNA, 495 bp, Alloiococcus otitidis; identical to SEQ ID NO: 113
  CDS (4)..(492)

SEQ ID NO: 116 - protein, 163 aa, Alloiococcus otitidis
MAVGIVKFIAVAVALLDHIVLVSCFSHTVFSQFTRVETQTQGTTQVFHLVLVGHQVNNLVVSIRVHFSRVGPSKSCNVSSIFNGRQLHAQANAQERNLVFPDVFDSGQFPFQAPRSEATRDHHAVTLVNGLDDLVSRLGFGVDPVNFDIGVKGKAGMFQGFIH

SEQ ID NO: 117 - DNA, 612 bp, Alloiococcus otitidis
  CDS (88)..(609)
cttttgcatagacaagacttgaatcgtgaaaggaagtcagatgtggaattaaaagagtttgatggaaagaaaaaagaagaactagccatgattgatgtggccaaggccattttagaccaggtccatgacttgatgcacttcaacgacctcttgagtgaagtgtctgaatatctagacttgtcagatgacgagatcgaaagcggtatgggccaattttacaccgatttaaatattgacggtcgcttcatctctttaggcgacaaccattggggcttacgtgaatggtatccagtcgattctatcgatgaagagttgacccacgacaatgacctggagaaggtcacacccaagcaggcggaagacggctttgatgacttagagcatgtcgaaaaagaagtgatggatgacgcaaaagaagaattagatgaccaggccgtcaatgaagatgaagaaaatgttgctccagatgaaatcaccgacgatggagatgaagacaagctggatgaatactctagcgatatcgaagacctcgaagatgatcgtaaggctagccaagacaagctgtccattgttgacgacgaagatgtcttaacaaatgatgacgatgagtaa

SEQ ID NO: 118 - protein, 174 aa, Alloiococcus otitidis
MIDVAKAILDQVHDLMHFNDLLSEVSEYLDLSDDEIESGMGQFYTDLNIDGRFISLGDNHWGLREWYPVDSIDEELTHDNDLEKVTPKQAEDGFDDLEHVEKEVMDDAKEELDDQAVNEDEENVAPDEITDDGDEDKLDEYSSDIEDLEDDRKASQDKLSIVDDEDVLTNDDDE

SEQ ID NO: 119 - DNA, 612 bp, Alloiococcus otitidis; identical to SEQ ID NO: 117
  CDS (43)..(609)

SEQ ID NO: 120 - protein, 189 aa, Alloiococcus otitidis
MELKEFDGKKKEELAMIDVAKAILDQVHDLMHFNDLLSEVSEYLDLSDDEIESGMGQFYTDLNIDGRFISLGDNHWGLREWYPVDSIDEELTHDNDLEKVTPKQAEDGFDDLEHVEKEVMDDAKEELDDQAVNEDEENVAPDEITDDGDEDKLDEYSSDIEDLEDDRKASQDKLSIVDDEDVLTNDDDE

SEQ ID NO: 121 - DNA, 612 bp, Alloiococcus otitidis; identical to SEQ ID NO: 117
  CDS (4)..(609)

SEQ ID NO: 122 - protein, 202 aa, Alloiococcus otitidis
MHRQDLNRERKSDVELKEFDGKKKEELAMIDVAKAILDQVHDLMHFNDLLSEVSEYLDLSDDEIESGMGQFYTDLNIDGRFISLGDNHWGLREWYPVDSIDEELTHDNDLEKVTPKQAEDGFDDLEHVEKEVMDDAKEELDDQAVNEDEENVAPDEITDDGDEDKLDEYSSDIEDLEDDRKASQDKLSIVDDEDVLTNDDDE

SEQ ID NO: 123 - DNA, 468 bp, Alloiococcus otitidis
  CDS (187)..(465)
tctctttttatagagagcccaagcattagtttaaagatgaaatcggcatccgtcaagtcttttatttgccattactcatcgtcatcatttgttaagacatcttcgtcgtcaacaatggacagcttgtcttggctagccttacgatcatcttcgaggtcttcgatatcgctagagtattcatccagcttgtcttcatctccatcgtcggtgatttcatctggagcaacattttcttcatcttcattgacggcctggtcatctaattcttcttttgcgtcatccatcacttctttttcgacatgctctaagtcatcaaagccgtcttccgcctgcttgggtgtgaccttctccaggtcattgtcgtgggtcaactcttcatcgatagaatcgactggataccattcacgtaagccccaatggttgtcgcctaaagagatgaagcgaccgtcaatatttaaatcggtgtaa

SEQ ID NO: 124 - protein, 93 aa, Alloiococcus otitidis
MSSSPSSVISSGATFSSSSLTAWSSNSSFASSITSFSTCSKSSKPSSACLGVTFSRSLSWVNSSSIESTGYHSRKPQWLSPKEMKRPSIFKSV

SEQ ID NO: 125 - DNA, 453 bp, Alloiococcus otitidis
  CDS (13)..(450)
agaggtgatggtatggacgagaaagaaaaaaatggtgtgccagcagagattgtgatgaaaacagagaccagtcaagctggcgacattaaccaacatatttttgaagagatgggacgttttgttgaaatgaatggtcactattacatccgctttgaagaaagctatgacgatggcaaagtgcctgttatggttaaaatcacaagcgacaaccgagttcacttgacccggtttggtgaccagcacaagaccaaccttgtctttgacagtgaccaagccacctacaccaagttaaataccccagccggtcctgctgaaattaaggtagagacccggtctttggatattgcctaccatgaaaaacctttttctggtcaagtcgatatttcatacagacttgaaatgaatggacaaaaattaggcgactaccaaatccagttcaactttaccacttag

SEQ ID NO: 126 - protein, 146 aa, Alloiococcus otitidis
MDEKEKNGVPAEIVMKTETSQAGDINQHIFEEMGRFVEMNGHYYIRFEESYDDGKVPVMVKITSDNRVHLTRFGDQHKTNLVFDSDQATYTKLNTPAGPAEIKVETRSLDIAYHEKPFSGQVDISYRLEMNGQKLGDYQIQFNFTT

SEQ ID NO: 127 - DNA, 339 bp, Alloiococcus otitidis
  CDS (64)..(336)
ccacggcgaggccaccagaattacgggagacgtagcggtagttgtggtcttttaaaacttcaagtgcatcttcaatataaggcattttggtgtcgatcatgcctaaaaagaccaatttttctgtcggccagaagtagagcatgggctcttccgtattggccgcatggtggatcagggcgtcagtcaaggaaaagtaggtcaaggggttggtttcgccaggaaattgctgggcatggtagatggaatagctttgttttatccagggatagcttgtattcatatcaaattccttttctatataatctccttgccattataccaaaaataagtcttcattaa

SEQ ID NO: 128 - protein, 91 aa, Alloiococcus otitidis
MHLQYKAFWCRSCLKRPIFLSARSRAWALPYWPHGGSGRQSRKSRSRGWFRQEIAGHGRWNSFVLSRDSLYSYQIPFLYNLLAIIPKISLH

SEQ ID NO: 129 - DNA, 894 bp, Alloiococcus otitidis
  CDS (34)..(891)
tggcaaggagattatatagaaaaggaatttgatatgaatacaagctatccctggataaaacaaagctattccatctaccatgcccagcaatttcctggcgaaaccaaccccttgacctacttttccttgactgacgccctgatccaccatgcggccaatacggaagagcccatgctctacttctggccgacagaaaaattggtctttttaggcatgatcgacaccaaaatgccttatattgaagatgcacttgaagttttaaaagaccacaactaccgctacgtctcccgtaattctggtggcctcgccgtggtcagtgaccccggcatcttaaatttttctatgattttccctgaagaaggcaagcaaaggctcaaaatcaatgacgcctatgaacggatgcatgccttggtgtccgaaactttcaaggactacaatattgacatccaagccaaggaaattccaaactcctactgtccaggcgactatgacctgtccattaatggtaggaagattgcgggcatttcccaaagacgggtcaagggcgggtccgccattatgatttacatcggtatcaatggtgaccaagatgagcggtcctacctgatcaaggacttctatgaccaggggattaagggccaagaagtcaagtgggattatcccgatatcgaccccaaagtcatgaccaccgtctcccaagaattaggctttgagatcagtgtcgaccaggtaattgacctcatcatccaggtctttgaaacacacggccaggtcaagcagggcccttacaccgaggacatcatcgtcaactaccaggatgaataccaaaaaatgatccgccgcaaccaaaaactactaggccccctatttaaggaaggagtggacgagggatga

SEQ ID NO: 130 - protein, 286 aa, Alloiococcus otitidis
MNTSYPWIKQSYSIYHAQQFPGETNPLTYFSLTDALIHHAANTEEPMLYFWPTEKLVFLGMIDTKMPYIEDALEVLKDHNYRYVSRNSGGLAVVSDPGILNFSMIFPEEGKQRLKINDAYERMHALVSETFKDYNIDIQAKEIPNSYCPGDYDLSINGRKIAGISQRRVKGGSAIMIYIGINGDQDERSYLIKDFYDQGIKGQEVKWDYPDIDPKVMTTVSQELGFEISVDQVIDLIIQVFETHGQVKQGPYTEDIIVNYQDEYQKMIRRNQKLLGPLFKEGVDEG

SEQ ID NO: 131 - DNA, 240 bp, Alloiococcus otitidis
  CDS (16)..(237)
tttcgagtcaaattgatgctgaccggatggactacctcctccgcgatgcctactatactggggcgacttatgggtcttttgacctgtctcggatcatgcgggttatgcggccatatagccaggggatcgcctttgacatctccggtatgcatgctgtggaagactatatcctctgccgctaccaaatgtacatgcaggtctacttccaccccgtctcccgggggatggaagttaccctag

SEQ ID NO: 132 - protein, 74 aa, Alloiococcus otitidis
MLTGWTTSSAMPTILGRLMGLLTCLGSCGLCGHIARGSPLTSPVCMLWKTISSAATKCTCRSTSTPSPGGWKLP

SEQ ID NO: 133 - DNA, 240 bp, Alloiococcus otitidis; identical to SEQ ID NO: 131
  CDS (13)..(237)

SEQ ID NO: 134 - protein, 75 aa, Alloiococcus otitidis
MMLTGWTTSSAMPTILGRLMGLLTCLGSCGLCGHIARGSPLTSPVCMLWKTISSAATKCTCRSTSTPSPGGWKLP

SEQ ID NO: 135 - DNA, 1368 bp, Alloiococcus otitidis
  CDS (19)..(1365)
ggaaggagtggacgagggatgaatactgacacatttgaagaaagcaaccggctggcttatgagaaggtctttcgggacccggtccacgaccatgtccatgtcaaccaccagctgatcttggaccttatcaatgccaaggaattccagcgtctacgccgaattaaacagttagggacctctcagtataccttccatggggctgaacactcccgcttttcccattctttaggcgtttacgaattggcccggaagatcatcaacaacttcaaccgtcgctacaatggcgactgggatgacagcttccgcctggtcaccctgtgtgcggccctcttgcacgatattggacacggccctttctcccatacctttgagaaaatcttccagactaaccacgaaaaattaacgactgatattatcctccaggaaggaacggaagtcaaccagatcttaagaagtgtttctcaagacttccccaaccaggtagccagtgtgatcacccaagaccaccccaacccccaagtggtccaattgatttcgagtcaaattgatgctgaccggatggactacctcctccgcgatgcctactatactggggcgacttatgggtcttttgacctgtctcggatcatgcgggttatgcggccatatagccaggggatcgcctttgacatctccggtatgcatgctgtggaagactatatcctctgccgctaccaaatgtacatgcaggtctacttccaccccgtctcccgggggatggaagttaccctagaccgcttactcaaacgggccaaggacctttatattgaaggggaattgcaaagccctaccccccacctggctcccttttttgaagggaactttaacctgaacgactacttgaaactagatgacggggtcctcctgaccgccatttccatgtggactgaggaccaagacccctatctcaaggaactagcccagatgtttctcaaccgccatcctttgaaatccattgaatacaatcccgataccgacatggccacggtggaccatctgagggacttggttagccaggccagctacgaccgagacctcttcaccgccttgaaccggtcactggacatttcctatgactataaattgaagaaaaaagcccctatcctcctctacctatcggacaatgacctgtctgagttaggcgaacaatcgaaaattgcccatattttaagtgacaatatccatggagactaccggctctatgtcccccgggaatttgtcaagccgtccgattttgaaactatgggcatcttttctgacttgtaccgggaatttagccggtatgtgtctaagggtaaaatcgttcgccaatacaagggaaaaagctag

SEQ ID NO: 136 - protein, 449 aa, Alloiococcus otitidis
MNTDTFEESNRLAYEKVFRDPVHDHVHVNHQLILDLINAKEFQRLRRIKQLGTSQYTFHGAEHSRFSHSLGVYELARKIINNFNRRYNGDWDDSFRLVTLCAALLHDIGHGPFSHTFEKIFQTNHEKLTTDIILQEGTEVNQILRSVSQDFPNQVASVITQDHPNPQVVQLISSQIDADRMDYLLRDAYYTGATYGSFDLSRIMRVMRPYSQGIAFDISGMHAVEDYILCRYQMYMQVYFHPVSRGMEVTLDRLLKRAKDLYIEGELQSPTPHLAPFFEGNFNLNDYLKLDDGVLLTAISMWTEDQDPYLKELAQMFLNRHPLKSIEYNPDTDMATVDHLRDLVSQASYDRDLFTALNRSLDISYDYKLKKKAPILLYLSDNDLSELGEQSKIAHILSDNIHGDYRLYVPREFVKPSDFETMGIFSDLYREFSRYVSKGKIVRQYKGKS

SEQ ID NO: 137 - DNA, 807 bp, Alloiococcus otitidis
  CDS (10)..(804)
gaggaaagtatgataaaactaattgccatcgacattgacggaaccctttataattcccaaaaagaggtcagccctgccaacctaaaagctgtccaaaaggccttacaggctggcatcaaaatcgtcctatgcacgggccgccccaccccggcagccattcaagcaacccggaccttgggcttgtatggccatgacaactacttgatcacctaccatggggccgtaaccagccaattgaaagacctcagccggacccggtccctccctctctatgaggaccaaatcaagcaattgtttgacctggcccaggaccaaaatatatacgccttttcccaaaaggatactgccatccaggctctggacgactcagccccagacctagccaagtacgaagctgaattggtcggcctgcccattgaggttagctcaagacaagacttgacccaggcagataagtttatgatggtagcgccggctgacaagctagaccaagtcacccaaaacttgacgccaaacctctataaccactacaccattttgcggagcgaaccccgctttattgaatttattcacaaagattctgacaaggggagtgccacagcccaactagcaaaccagctcgacatccccatgtctgacgtcatggggattggtgacggtggcaacgacctccaattaattgaccaggcaggacttggagtagccatgggaaatgcggtccaagacctcaaagacaaggctgattacgtcactgcaagcaatgaccaggatggcttggcccaggctcttgaaaaatttgttttttag

SEQ ID NO: 138 - protein, 265 aa, Alloiococcus otitidis
MIKLIAIDIDGTLYNSQKEVSPANLKAVQKALQAGIKIVLCTGRPTPAAIQATRTLGLYGHDNYLITYHGAVTSQLKDLSRTRSLPLYEDQIKQLFDLAQDQNIYAFSQKDTAIQALDDSAPDLAKYEAELVGLPIEVSSRQDLTQADKFMMVAPADKLDQVTQNLTPNLYNHYTILRSEPRFIEFIHKDSDKGSATAQLANQLDIPMSDVMGIGDGGNDLQLIDQAGLGVAMGNAVQDLKDKADYVTASNDQDGLAQALEKFVF

SEQ ID NO: 139 - DNA, 510 bp, Alloiococcus otitidis
  CDS (1)..(507)
atggaagagcgattggagaccaagtcagatttcatcaaaaaagtagccgcctcgacccgaaagaaggaagaactcttcgaccaaagtaaggcccactattttgtccgagccatgtatgcgggagctatgctggtttttgctacagctggtggcgcatatgcagcagatgccttgaacaaaatcaaccctaacctaggcaagtttggctttgcttttatctttgcttttggtctggtttggattttatacttacaccatgaattggtcgacctcgaatatgatgtacttaacagcttcttgctatcacaagattattacgcctcccaaagcactctctatccttcttttttgtaccctgggagatatagctggggcagttctggttggtcttttgattggcaataccagtcctttccaagccttgacagccgattcctttatcttgacggtcttggatggcaagctaaccaaggaagttggcctcatctttttagaagccattgccgctaa

SEQ ID NO: 140 - protein, 169 aa, Alloiococcus otitidis
MEERLETKSDFIKKVAASTRKKEELFDQSKAHYFVRAMYAGAMLVFATAGGAYAADALNKINPNLGKFGFAFIFAFGLVWILYLHHELVDLEYDVLNSFLLSQDYYASQSTLYPSFLYPGRYSWGSSGWSFDWQYQSFPSLDSRFLYLDGLGWQANQGSWPHLFRSHCR

SEQ ID NO: 141 - DNA, 609 bp, Alloiococcus otitidis
  CDS (82)..(606)
gcaagtttggctttgcttttatctttgcttttggtctggtttggattttatacttacaccatgaattggtcgacctcgaatatgatgtacttaacagcttcttgctatcacaagattattacgcctcccaaagcactctctatccttcttttttgtaccctgggagatatagctggggcagttctggttggtcttttgattggcaataccagtcctttccaagccttgacagccgattcctttatcttgacggtcttggatggcaagctaaccaaggaagttggcctcatctttttagaagccattgccgctaatatctttgttaacattgccatcctgggctttatcttaaccaagtcagaaatggccaaaatttttatggtcttgaccgctattttcctcttcgtttacttgtcttacgaacacgtggtcgccaactttgctattaccggcattgcctggtttaccaatgttggcgtctcctactccctaggccatatcctcttcacttggctggtggcctggctgggtaactatgtaggcggggggctgatcatggggcttgtttacggctggtacaacgatgaccagttaagctaccgtgactaa

SEQ ID NO: 142 - protein, 175 aa, Alloiococcus otitidis
MMYLTASCYHKIITPPKALSILLFCTLGDIAGAVLVGLLIGNTSPFQALTADSFILTVLDGKLTKEVGLIFLEAIAANIFVNIAILGFILTKSEMAKIFMVLTAIFLFVYLSYEHVVANFAITGIAWFTNVGVSYSLGHILFTWLVAWLGNYVGGGLIMGLVYGWYNDDQLSYRD

SEQ ID NO: 143 - DNA, 609 bp, Alloiococcus otitidis; identical to SEQ ID NO: 141
  CDS (61)..(606)

SEQ ID NO: 144 - protein, 182 aa, Alloiococcus otitidis
MNWSTSNMMYLTASCYHKIITPPKALSILLFCTLGDIAGAVLVGLLIGNTSPFQALTADSFILTVLDGKLTKEVGLIFLEAIAANIFVNIAILGFILTKSEMAKIFMVLTAIFLFVYLSYEHVVANFAITGIAWFTNVGVSYSLGHILFTWLVAWLGNYVGGGLIMGLVYGWYNDDQLSYRD

SEQ ID NO: 145 - DNA, 609 bp, Alloiococcus otitidis; identical to SEQ ID NO: 141
  CDS (7)..(606)

SEQ ID NO: 146 - protein, 200 aa, Alloiococcus otitidis
MALLLSLLLVWFGFYTYTMNWSTSNMMYLTASCYHKIITPPKALSILLFCTLGDIAGAVLVGLLIGNTSPFQALTADSFILTVLDGKLTKEVGLIFLEAIAANIFVNIAILGFILTKSEMAKIFMVLTAIFLFVYLSYEHVVANFAITGIAWFTNVGVSYSLGHILFTWLVAWLGNYVGGGLIMGLVYGWYNDDQLSYRD

SEQ ID NO: 147 - DNA, 561 bp, Alloiococcus otitidis
  CDS (10)..(558)
ggagtggaaatgatggacaaagaccaaatcagacaggaagtcaccaaaaaaataaaaaacttatcgcgggaagaccatcaggctatctcccaggacctttttaatcagctggtccaaacaaaaaaatggcaacaagcttcagtcattggcttgaccatgtcggatggcctagaatgggagacacgtccgattattgagcaagcctggaaggaaggcaagaaggtggcggtacccaaggcgattaaagaaggtagccaaatggacttccgccaaattgattcctttgaccaggttgaagcaggttttgccggcatttcagaaccagacccagaccaaacccagtctttagcacctgaggaaattgacttattggtggtcccaggccgggtctttacgccagagggttaccggatcggctttggtgggggtttttatgaccgctacctggccaaatttgacaacccgaccatctccctggtctggcaaggtcagttaaccgaccacttgcccactgacaagtacgaccttccagttcaagaattattgattagtgagctgtaa

SEQ ID NO: 148 - protein, 183 aa, Alloiococcus otitidis
MMDKDQIRQEVTKKIKNLSREDHQAISQDLFNQLVQTKKWQQASVIGLTMSDGLEWETRPIIEQAWKEGKKVAVPKAIKEGSQMDFRQIDSFDQVEAGFAGISEPDPDQTQSLAPEEIDLLVVPGRVFTPEGYRIGFGGGFYDRYLAKFDNPTISLVWQGQLTDHLPTDKYDLPVQELLISEL

SEQ ID NO: 149 - DNA, 561 bp, Alloiococcus otitidis; identical to SEQ ID NO: 147
  CDS (4)..(558)

SEQ ID NO: 150 - protein, 185 aa, Alloiococcus otitidis
MEMMDKDQIRQEVTKKIKNLSREDHQAISQDLFNQLVQTKKWQQASVIGLTMSDGLEWETRPIIEQAWKEGKKVAVPKAIKEGSQMDFRQIDSFDQVEAGFAGISEPDPDQTQSLAPEEIDLLVVPGRVFTPEGYRIGFGGGFYDRYLAKFDNPTISLVWQGQLTDHLPTDKYDLPVQELLISEL

SEQ ID NO: 151 - DNA, 222 bp, Alloiococcus otitidis
  CDS (1)..(219)
atgaaaattctagaccgtttagccttattgatacttatcttagctggcatccatctcttgctaattggcttgttgagctttaatgtttttgaagaattctttggagagtacaaccaaaatataaccgatattatctacatcattgtcggtattgctgccttgtggtgtatcaaatacttcacttatactcctaaaggtgggtctcggctgaagggccggtga

SEQ ID NO: 152 - protein, 73 aa, Alloiococcus otitidis
MKILDRLALLILILAGIHLLLIGLLSFNVFEEFFGEYNQNITDIIYIIVGIAALWCIKYFTYTPKGGSRLKGR

SEQ ID NO: 153 - DNA, 795 bp, Alloiococcus otitidis
  CDS (208)..(792)
acaaggacaggagagggttctatactatttacgaaaagatttttgccaaggaggaatactgtgatccaatttgaatccgtctccaaaaaatttgagcgtgctagtaaggagaccctggccctgtcggatgttaacttgaccatccagtcccaggaatgctttggcgtgatcggtgaaagtggggccggcaagtctaccctactgcggatgatcaatgccttggaatacccaacttccggtcatgtccttgttgacggagtaaaagttggggacctagccggcaagcaactccagcgtcaccggagtgaaattggcatggttttccagcaattcaacttactcaacaacaagaccatccaagaaaatattaccttgccactagaattacataagcaccaagaagtcttggaggttgaccatgtcttagactttgtcgggctcactgacaagcgggatgcctatcctgctgaattgtccggaggccaaaagcagagagtggggattgcccgggccctgattaccaagcccaagatcctcttgtgtgatgaaccaacctcggccttggaccagttgaccactgatgaaattgtccagctcctgaaacgggccaaccaagaatttgaaatgaccatcctagtggtgacccacgaactggaagtggtcaagcaactttgtgaccggtcagccgtcatggaagaaggaaaagtggtttccatccttgatgtgaagaaaagggataatccctaccaggatatggactacaagacacgggcaagtgaggtgctacaagcatga

SEQ ID NO: 154 - protein, 195 aa, Alloiococcus otitidis
MINALEYPTSGHVLVDGVKVGDLAGKQLQRHRSEIGMVFQQFNLLNNKTIQENITLPLELHKHQEVLEVDHVLDFVGLTDKRDAYPAELSGGQKQRVGIARALITKPKILLCDEPTSALDQLTTDEIVQLLKRANQEFEMTILVVTHELEVVKQLCDRSAVMEEGKVVSILDVKKRDNPYQDMDYKTRASEVLQA

SEQ ID NO: 155 - DNA, 795 bp, Alloiococcus otitidis; identical to SEQ ID NO: 153
  CDS (61)..(792)

SEQ ID NO: 156 - protein, 244 aa, Alloiococcus otitidis
MIQFESVSKKFERASKETLALSDVNLTIQSQECFGVIGESGAGKSTLLRMINALEYPTSGHVLVDGVKVGDLAGKQLQRHRSEIGMVFQQFNLLNNKTIQENITLPLELHKHQEVLEVDHVLDFVGLTDKRDAYPAELSGGQKQRVGIARALITKPKILLCDEPTSALDQLTTDEIVQLLKRANQEFEMTILVVTHELEVVKQLCDRSAVMEEGKVVSILDVKKRDNPYQDMDYKTRASEVLQA

SEQ ID NO: 157 - DNA, 795 bp, Alloiococcus otitidis; identical to SEQ ID NO: 153
  CDS (43)..(792)

SEQ ID NO: 158 - protein, 250 aa, Alloiococcus otitidis
MPRRNTVIQFESVSKKFERASKETLALSDVNLTIQSQECFGVIGESGAGKSTLLRMINALEYPTSGHVLVDGVKVGDLAGKQLQRHRSEIGMVFQQFNLLNNKTIQENITLPLELHKHQEVLEVDHVLDFVGLTDKRDAYPAELSGGQKQRVGIARALITKPKILLCDEPTSALDQLTTDEIVQLLKRANQEFEMTILVVTHELEVVKQLCDRSAVMEEGKVVSILDVKKRDNPYQDMDYKTRASEVLQA

SEQ ID NO: 159 - DNA, 255 bp, Alloiococcus otitidis
  CDS (22)..(252)
aagcggcggattaagggaagcatggccaccaccagtaagaggaaagggaaggcccggataatgttgacaaaggtgttggcaatgttgttgatgaccttgttttcccgtggtttgccatcggaggtcaaaaagaggagggttcctaaggggagaccgagcaagatagcagcggccatggcaaagaccatcataatgccagtatcgattaaactttggataatttctggcataaaatccaccagacgttccaaataa

SEQ ID NO: 160 - protein, 77 aa, Alloiococcus otitidis
MATTSKRKGKARIMLTKVLAMLLMTLFSRGLPSEVKKRRVPKGRPSKIAAAMAKTIIMPVSIKLWIISGIKSTRRSK

SEQ ID NO: 161 - DNA, 354 bp, Alloiococcus otitidis
  CDS (103)..(351)
tcgtcagtttggccagtgttttcttcactttcctgggtagggtctgcttcttggccaccgttatcgttgcaagcaacgaggaccaggctagcagcagtaaccatgcccaatttcttcagtaatccttgtctaagttccatcgtaatactcctttttgtattattttttatcaaattttctagcgagtttgaggcccaaccattgggcgatttccaccaggacaataataatgacgatggcggtatacataatgtccgtttcaaacctttggtaaccgtagcggatggcgaagtccccaatccctccgccaccgaccacccccatgatggtggagtaagaaacaaaactaactaa

SEQ ID NO: 162 - protein, 83 aa, Alloiococcus otitidis
MPNFFSNPCLSSIVILLFVLFFIKFSSEFEAQPLGDFHQDNNNDDGGIHNVRFKPLVTVADGEVPNPSATDHPHDGGVRNKTN

SEQ ID NO: 163 - DNA, 354 bp, Alloiococcus otitidis; identical to SEQ ID NO: 161
  CDS (67)..(351)

SEQ ID NO: 164 - protein, 95 aa, Alloiococcus otitidis
MQATRTRLAAVTMPNFFSNPCLSSIVILLFVLFFIKFSSEFEAQPLGDFHQDNNNDDGGIHNVRFKPLVTVADGEVPNPSATDHPHDGGVRNKTN

SEQ ID NO: 165 - DNA, 354 bp, Alloiococcus otitidis; identical to SEQ ID NO: 161
  CDS (16)..(351)

SEQ ID NO: 166 - protein, 112 aa, Alloiococcus otitidis
MFSSLSWVGSASWPPLSLQATRTRLAAVTMPNFFSNPCLSSIVILLFVLFFIKFSSEFEAQPLGDFHQDNNNDDGGIHNVRFKPLVTVADGEVPNPSATDHPHDGGVRNKTN

SEQ ID NO: 167 - DNA, 711 bp, Alloiococcus otitidis
  CDS (13)..(708)
ggtgctacaagcatgattaccctactagctacaacagatgagccttatttggaacgtctggtggattttatgccagaaattatccaaagtttaatcgatactggcattatgatggtctttgccatggccgctgctatcttgctcggtctccccttaggaaccctcctctttttgacctccgatggcaaaccacgggaaaacaaggtcatcaacaacattgccaacacctttgtcaacattatccgggccttccctttcctcttactggtggtggccatgcttcccttaatccgccgcttttacggccgggcaacgggagaccctgtggcagcctcctttcccatgatgctcatttccctggccctctacgcccggtttgtggaacagtccttgcttgacgtgccgaccggggtcattgaactagccgaagccatgggagcttcaacctcccaactggtcttcaaattcctctacgttgaagcccggtcttccttgattatcggctttacgaccgccttagttagttttgtttcttactccaccatcatgggggtggtcggtggcggagggattggggacttcgccatccgctacggttaccaaaggtttgaaacggacattatgtataccgccatcgtcattattattgtcctggtggaaatcgcccaatggttgggcctcaaactcgctagaaaatttgataaaaaataa

SEQ ID NO: 168 - protein, 232 aa, Alloiococcus otitidis
MITLLATTDEPYLERLVDFMPEIIQSLIDTGIMMVFAMAAAILLGLPLGTLLFLTSDGKPRENKVINNIANTFVNIIRAFPFLLLVVAMLPLIRRFYGRATGDPVAASFPMMLISLALYARFVEQSLLDVPTGVIELAEAMGASTSQLVFKFLYVEARSSLIIGFTTALVSFVSYSTIMGVVGGGGIGDFAIRYGYQRFETDIMYTAIVIIIVLVEIAQWLGLKLARKFDKK

SEQ ID NO: 169 - DNA, 297 bp, Alloiococcus otitidis
  CDS (43)..(294)
ctcttcaatggcgagttcgacgacatcgaccatgggggtagtgtggctagcgatggagaagttaaagtcttctgggatgtcgctagccgtgtcttcagcttggtcatcttcttggttgtcagcttcaccctggttatctgtatcatcttgactgtcattttggtcttctgcttgatcgtcagtttggccagtgttttcttcactttcctgggtagggtctgcttcttggccaccgttatcgttgcaagcaacgaggaccaggctagcagcagtaaccatgcccaatttcttcagtaa

SEQ ID NO: 170 - protein, 84 aa, Alloiococcus otitidis
MASDGEVKVFWDVASRVFSLVIFLVVSFTLVICIILTVILVFCLIVSLASVFFTFLGRVCFLATVIVASNEDQASSSNHAQFLQ

SEQ ID NO: 171 - DNA, 1185 bp, Alloiococcus otitidis
  CDS (211)..(1182)
ttagttttgtttcttactccaccatcatgggggtggtcggtggcggagggattggggacttcgccatccgctacggttaccaaaggtttgaaacggacattatgtataccgccatcgtcattattattgtcctggtggaaatcgcccaatggttgggcctcaaactcgctagaaaatttgataaaaaataatacaaaaaggagtattacgatggaacttagacaaggattactgaagaaattgggcatggttactgctgctagcctggtcctcgttgcttgcaacgataacggtggccaagaagcagaccctacccaggaaagtgaagaaaacactggccaaactgacgatcaagcagaagaccaaaatgacagtcaagatgatacagataaccagggtgaagctgacaaccaagaagatgaccaagctgaagacacggctagcgacatcccagaagactttaacttctccatcgctagccacactacccccatggtcgatgtcgtcgaactcgccattgaagagctagaagaccaaagcttccaaggggaattggtcccagtcaatgacaacatccaatacaatgaagctgtcttaaacgatgaggcctttgctagctttgcccaacacgaaccttttatggaaatttttaacgaagaaagagatggagacttggtggcgatccaaaaaatctacaatgccatcgttggcttctactctcccaactacgactccatcgatgacttggaagaaggggctgaagttgtgattgccggtgacatggctaacactgcccggtcactcttcatccttgaacagcacgacctgattaccctggatgatgaggaagagttattcccaagcctggataacattgaagataacccctatgacctccagttcgttgaactcgaagtatccaatacagcccaaggttacctagacggctatgacctagtctttgcctatccgacctttattgaacaggctgctgggttaaccccagatgatgccttgattctagaagaagacccggacaacctttttgccatctcagtcgttgtcagagaagaaaatgccaacacaccggaagctgaaaaactcaaacaagcctttacttctgaccgtgtgactgaatttttagatgacctagctgaagagggccaccttgaacgggcctactaa

SEQ ID NO: 172 - protein, 324 aa, Alloiococcus otitidis
MELRQGLLKKLGMVTAASLVLVACNDNGGQEADPTQESEENTGQTDDQAEDQNDSQDDTDNQGEADNQEDDQAEDTASDIPEDFNFSIASHTTPMVDVVELAIEELEDQSFQGELVPVNDNIQYNEAVLNDEAFASFAQHEPFMEIFNEERDGDLVAIQKIYNAIVGFYSPNYDSIDDLEEGAEVVIAGDMANTARSLFILEQHDLITLDDEEELFPSLDNIEDNPYDLQFVELEVSNTAQGYLDGYDLVFAYPTFIEQAAGLTPDDALILEEDPDNLFAISVVVREENANTPEAEKLKQAFTSDRVTEFLDDLAEEGHLERAY

SEQ ID NO: 173 - DNA, 1185 bp, Alloiococcus otitidis; identical to SEQ ID NO: 171
  CDS (127)..(1182)

SEQ ID NO: 174 - protein, 352 aa, Alloiococcus otitidis
MSWWKSPNGWASNSLENLIKNNTKRSITMELRQGLLKKLGMVTAASLVLVACNDNGGQEADPTQESEENTGQTDDQAEDQNDSQDDTDNQGEADNQEDDQAEDTASDIPEDFNFSIASHTTPMVDVVELAIEELEDQSFQGELVPVNDNIQYNEAVLNDEAFASFAQHEPFMEIFNEERDGDLVAIQKIYNAIVGFYSPNYDSIDDLEEGAEVVIAGDMANTARSLFILEQHDLITLDDEEELFPSLDNIEDNPYDLQFVELEVSNTAQGYLDGYDLVFAYPTFIEQAAGLTPDDALILEEDPDNLFAISVVVREENANTPEAEKLKQAFTSDRVTEFLDDLAEEGHLERAY

SEQ ID NO: 175 - DNA, 1185 bp, Alloiococcus otitidis; identical to SEQ ID NO: 171
  CDS (40)..(1182)

SEQ ID NO: 176 - protein, 381 aa, Alloiococcus otitidis
MAEGLGTSPSATVTKGLKRTLCIPPSSLLLSWWKSPNGWASNSLENLIKNNTKRSITMELRQGLLKKLGMVTAASLVLVACNDNGGQEADPTQESEENTGQTDDQAEDQNDSQDDTDNQGEADNQEDDQAEDTASDIPEDFNFSIASHTTPMVDVVELAIEELEDQSFQGELVPVNDNIQYNEAVLNDEAFASFAQHEPFMEIFNEERDGDLVAIQKIYNAIVGFYSPNYDSIDDLEEGAEVVIAGDMANTARSLFILEQHDLITLDDEEELFPSLDNIEDNPYDLQFVELEVSNTAQGYLDGYDLVFAYPTFIEQAAGLTPDDALILEEDPDNLFAISVVVREENANTPEAEKLKQAFTSDRVTEFLDDLAEEGHLERAY

SEQ ID NO: 177 - DNA, 1185 bp, Alloiococcus otitidis; identical to SEQ ID NO: 171
  CDS (7)..(1182)

SEQ ID NO: 178 - protein, 392 aa, Alloiococcus otitidis
MFLTPPSWGWSVAEGLGTSPSATVTKGLKRTLCIPPSSLLLSWWKSPNGWASNSLENLIKNNTKRSITMELRQGLLKKLGMVTAASLVLVACNDNGGQEADPTQESEENTGQTDDQAEDQNDSQDDTDNQGEADNQEDDQAEDTASDIPEDFNFSIASHTTPMVDVVELAIEELEDQSFQGELVPVNDNIQYNEAVLNDEAFASFAQHEPFMEIFNEERDGDLVAIQKIYNAIVGFYSPNYDSIDDLEEGAEVVIAGDMANTARSLFILEQHDLITLDDEEELFPSLDNIEDNPYDLQFVELEVSNTAQGYLDGYDLVFAYPTFIEQAAGLTPDDALILEEDPDNLFAISVVVREENANTPEAEKLKQAFTSDRVTEFLDDLAEEGHLERAY

SEQ ID NO: 179 - DNA, 1143 bp, Alloiococcus otitidis
  CDS (199)..(1140)
gagagagggattgcattgacaagtaatgttgctgtgattggtggaggcattgtcggagcaagtgccgccttctacctcagcaaagacccaggaattgacctcacgctttttgaccagggacagggccagggaaccagggctgcagctggtattatcagcccctggctttcccgccggcggaacaaaaaatggtaccggatggtcaaggaagctgccgccttctatcccgactttatgcaagaagtgagccaaggcaagcgaattccccagtcggtctacaagcaggtcggtaccctcttgttcaagtctaagccggaatacctggaggaaatgttagaaattggtctcaagcggcgggaaaaggctccagaaatcggcgagctcaagatcttaagtccccaagacattcgtgacttagtgcccatctatgacaaaaaagccggggctctctgggcttcaggtggggccaaggtggacggcagtcacttggttgacctccttttggataaaataaaagaccagggaggccaaatcatccaggaaaaagtccaaatcaaaagccgaactgccccttaccacctatttagcccaaacttttctggtcattttgacaagctagtcttggccaatgccgcctggttgaaggaaagcctggaacccctgggctaccaagttgatgtccgggcccaaaaaggccaacttgctgaactccaacttgaccaggctacttcgacctggcccgttgtcatgccagaaggagaaagtgacatcatcccctttgacaatggccaagtcatcgtaggagccagccatgaagatgacatgggctttaacttggatttagacaggagcctagtgctccggatggtcgatgcggctcagggagttttttcgaatcgcttgtcccgggaccgggttgtcaactaccgggtcgggacccgggcctacacacctgactacgcccccttcttcggtccagttcctggcttggacggggtggtggccgcttctggtctagggtcaactggtctcaccgcagggcctctggtcggcaaaatcctttaccaattgattacccaccaaaatcctagcctccccattgaagactatccagttagtcgctacatccatgccttagactaa

SEQ ID NO: 180 - protein, 314 aa, Alloiococcus otitidis
MVKEAAAFYPDFMQEVSQGKRIPQSVYKQVGTLLFKSKPEYLEEMLEIGLKRREKAPEIGELKILSPQDIRDLVPIYDKKAGALWASGGAKVDGSHLVDLLLDKIKDQGGQIIQEKVQIKSRTAPYHLFSPNFSGHFDKLVLANAAWLKESLEPLGYQVDVRAQKGQLAELQLDQATSTWPVVMPEGESDIIPFDNGQVIVGASHEDDMGFNLDLDRSLVLRMVDAAQGVFSNRLSRDRVVNYRVGTRAYTPDYAPFFGPVPGLDGVVAASGLGSTGLTAGPLVGKILYQLITHQNPSLPIEDYPVSRYIHALD

SEQ ID NO: 181 - DNA, 1143 bp, Alloiococcus otitidis; identical to SEQ ID NO: 179
  CDS (34)..(1140)

SEQ ID NO: 182 - protein, 369 aa, Alloiococcus otitidis
MIGGGIVGASAAFYLSKDPGIDLTLFDQGQGQGTRAAAGIISPWLSRRRNKKWYRMVKEAAAFYPDFMQEVSQGKRIPQSVYKQVGTLLFKSKPEYLEEMLEIGLKRREKAPEIGELKILSPQDIRDLVPIYDKKAGALWASGGAKVDGSHLVDLLLDKIKDQGGQIIQEKVQIKSRTAPYHLFSPNFSGHFDKLVLANAAWLKESLEPLGYQVDVRAQKGQLAELQLDQATSTWPVVMPEGESDIIPFDNGQVIVGASHEDDMGFNLDLDRSLVLRMVDAAQGVFSNRLSRDRVVNYRVGTRAYTPDYAPFFGPVPGLDGVVAASGLGSTGLTAGPLVGKILYQLITHQNPSLPIEDYPVSRYIHALD

SEQ ID NO: 183 - DNA, 1143 bp, Alloiococcus otitidis; identical to SEQ ID NO: 179
  CDS (16)..(1140)

SEQ ID NO: 184 - protein, 375 aa, Alloiococcus otitidis
MTSNVAVIGGGIVGASAAFYLSKDPGIDLTLFDQGQGQGTRAAAGIISPWLSRRRNKKWYRMVKEAAAFYPDFMQEVSQGKRIPQSVYKQVGTLLFKSKPEYLEEMLEIGLKRREKAPEIGELKILSPQDIRDLVPIYDKKAGALWASGGAKVDGSHLVDLLLDKIKDQGGQIIQEKVQIKSRTAPYHLFSPNFSGHFDKLVLANAAWLKESLEPLGYQVDVRAQKGQLAELQLDQATSTWPVVMPEGESDIIPFDNGQVIVGASHEDDMGFNLDLDRSLVLRMVDAAQGVFSNRLSRDRVVNYRVGTRAYTPDYAPFFGPVPGLDGVVAASGLGSTGLTAGPLVGKILYQLITHQNPSLPIEDYPVSRYIHALD

SEQ ID NO: 185 - DNA, 201 bp, Alloiococcus otitidis
  CDS (1)..(198)
atgctaacggaccaacaaggaaaatacatcggctacctagctattgccctgtccatcatcggcttctttatttgggggattccgctggggattattgccatgatcttaagtgccatcggggtatggcagtccgacattaaagggcttaactggaactccctagccctaggatcaatttgcgttattattgcccttatatag

SEQ ID NO: 186 - protein, 66 aa, Alloiococcus otitidis
MLTDQQGKYIGYLAIALSIIGFFIWGIPLGIIAMILSAIGVWQSDIKGLNWNSLALGSICVIIALI

SEQ ID NO: 187 - DNA, 588 bp, Alloiococcus otitidis
  CDS (70)..(585)
accgggggtcaccactatttttattcctggattccaagccatattggctacggcaagtatgatgagggtttggctattcttgctaaaaataaatttaaagcaagtagctatttgctttcggaagataaggactatcgtcaatttaccagacgggtcggactcaaggccttggttacggtcggaggtgaagactatcacttttttaatgtccacttatcttggtgggagcgagaaggagttccgtattttaaaaaagaatgggacaaactatctaatcacctagtgaaagacggtaagttgatagtcgtaggtgactttaataatagtgcggatgtatccaatgaaggctatgactatatctttgaccaaagaccggatttactggatagttactattctgctgaccaggttctcggccaggcgactgtacaaggggcaatcgatggttgggaagggaaggacggggctaagcggatagacctagttttaactgaccggtcaaccattcccaaaactcatcgtcttgtttttgatggacaaaacgggtcggtagttagtgaccattacggagtagaagtgatcatttaa

SEQ ID NO: 188 - protein, 172 aa, Alloiococcus otitidis
MAILAKNKFKASSYLLSEDKDYRQFTRRVGLKALVTVGGEDYHFFNVHLSWWEREGVPYFKKEWDKLSNHLVKDGKLIVVGDFNNSADVSNEGYDYIFDQRPDLLDSYYSADQVLGQATVQGAIDGWEGKDGAKRIDLVLTDRSTIPKTHRLVFDGQNGSVVSDHYGVEVII

SEQ ID NO: 189 - DNA, 318 bp, Alloiococcus otitidis
  CDS (16)..(315)
ctggagggtggcagcttgaaaattttaactttaaatactcattcttggttagaagatcaacaagcagacaagatagaagtcttagtgaataaaattgtggaggaaggttatgacttacttgccttccaagaagttaatcaagccttagatgacccatcggttgaagaccgaagatatattgaagctgacatggttagtcctaaaattccactcaaggctagtaattttgcctatattttagtgagccggctaatagaccgggggtcaccactatttttattcctggattccaagccatattggctacggcaagtatga

SEQ ID NO: 190 - protein, 100 aa, Alloiococcus otitidis
MKILTLNTHSWLEDQQADKIEVLVNKIVEEGYDLLAFQEVNQALDDPSVEDRRYIEADMVSPKIPLKASNFAYILVSRLIDRGSPLFLFLDSKPYWLRQV

SEQ ID NO: 191 - DNA, 1557 bp, Alloiococcus otitidis
  CDS (16)..(1554)
aaaggagcaagacaaatgatgcagaaaattcaacgttttggaggcgctatgattaccccggtattactgtttgcctttaacgggttaatgctagccttgtctattgccttccaaaatcctgatatattagggtcaattgctaatgaaggaactttttggaataatatttggagtgtaatcgaacaaggtggttgggttgttttcaaccacatggagatcctatttgtcctcggtttaccaataggactagctaaaaaagcacaagctcgggctgcattagaagcctttgtcatatacatgacttggaacacctttatcaacgctatgatgacgacatggaactttggtgtcgacctaacggatgcggagggtattggtgtcaaagaaattgcaggcgtggtgaccttagatacaaatatcattggagctattttaatttcagctgtagctatttggctacataaccacttctttgatactcccttaccagaatggctgggaatcttttttggctcctcctttgttgtcatactgggtttctttttggcccttccccttgcttatttgacagcagtcatttggcctccgattcaagaactcattttccaactgcaaggggtcatggctacaagtggcacccttggagtcggaatctatgtatttttggagaaaattttaattccaactggtctccaccactttatttaccaaccctttgaatttgggccggcagttgtggagggaggtttagtggcacgttggtttgaaatgcttcccgaaattgcctcctttgaaggaccattgaggcaaatcttccctgctgggggattctttttccaaaatgcctccaaactcttctacccaattggcattggggcggcttttgtagccacagctaaaccagaaagacggaagcaaacccttgctttaattatcccaacagctctaacagctatcttaacggggattaccgaaccctttgaatttactttcttgttcttggctcctcaattgtttttggtccatgccttgcttacagcgacctttgccatgaccatttatagtttgggtgtggctgggaatattggtgggggcttaattggtcacatcagtggctttgctttgcctttaattaataaccacctggactcccttttaatctactatggggccggactcgtttttatcttgatctactttgcggtctttcgttttgccatcttgcggttcgatatcaaaacacctggacgtgaattagatggtgaagcagtcagaatgtatagcaaatctgattatagggaaaaacaaaaaaccaatcctaaccaggaaaaagccatccaatttttaagaggcttaggtggtaaagaaaatattaaggaagtgaccaactgtgtctcccgtctacgtttaattgtcaaggacgaaagtatagttgaagatgatcaattcttcaaagcagctggagctcacggtgtcgttagaaatggttctggtattcaaatagttgtagggatggaagttccgaaggttagggaattctttgatgaattattgtaa

SEQ ID NO: 192 - protein, 513 aa, Alloiococcus otitidis
MMQKIQRFGGAMITPVLLFAFNGLMLALSIAFQNPDILGSIANEGTFWNNIWSVIEQGGWVVFNHMEILFVLGLPIGLAKKAQARAALEAFVIYMTWNTFINAMMTTWNFGVDLTDAEGIGVKEIAGVVTLDTNIIGAILISAVAIWLHNHFFDTPLPEWLGIFFGSSFVVILGFFLALPLAYLTAVIWPPIQELIFQLQGVMATSGTLGVGIYVFLEKILIPTGLHHFIYQPFEFGPAVVEGGLVARWFEMLPEIASFEGPLRQIFPAGGFFFQNASKLFYPIGIGAAFVATAKPERRKQTLALIIPTALTAILTGITEPFEFTFLFLAPQLFLVHALLTATFAMTIYSLGVAGNIGGGLIGHISGFALPLINNHLDSLLIYYGAGLVFILIYFAVFRFAILRFDIKTPGRELDGEAVRMYSKSDYREKQKTNPNQEKAIQFLRGLGGKENIKEVTNCVSRLRLIVKDESIVEDDQFFKAAGAHGVVRNGSGIQIVVGMEVPKVREFFDELL

SEQ ID NO: 193 - DNA, 531 bp, Alloiococcus otitidis
  CDS (31)..(528)
gcaaggggaagggccaaaaagaaacccagtatgacaacaaaggaggagccaaaaaagattcccagccattctggtaagggagtatcaaagaagtggttatgtagccaaatagctacagctgaaattaaaatagctccaatgatatttgtatctaaggtcaccacgcctgcaatttctttgacaccaataccctccgcatccgttaggtcgacaccaaagttccatgtcgtcatcatagcgttgataaaggtgttccaagtcatgtatatgacaaaggcttctaatgcagcccgagcttgtgcttttttagctagtcctattggtaaaccgaggacaaataggatctccatgtggttgaaaacaacccaaccaccttgttcgattacactccaaatattattccaaaaagttccttcattagcaattgaccctaatatatcaggattttggaaggcaatagacaaggctagcattaacccgttaaaggcaaacagtaataccggggtaatcatagcgcctccaaaacgttga

SEQ ID NO: 194 - protein, 166 aa, Alloiococcus otitidis
MTTKEEPKKIPSHSGKGVSKKWLCSQIATAEIKIAPMIFVSKVTTPAISLTPIPSASVRSTPKFHVVIIALIKVFQVMYMTKASNAARACAFLASPIGKPRTNRISMWLKTTQPPCSITLQILFQKVPSLAIDPNISGFWKAIDKASINPLKANSNTGVIIAPPKR

SEQ ID NO: 195 - DNA, 1686 bp, Alloiococcus otitidis
  CDS (16)..(1683)
aaaagaggagagtatatggcacaaaagtggtggaaggaagccgttgtttaccaaatctacccccggtctttcaaagactccaatggggatgggatcggcgatattcaaggaattattcaaaaattagattacttagaagatctaggaatagatgtgatctggatatgccccgtttaccagtctccaatggatgataatggttatgatattagtgactacaagtccatcttagccgagtttggaaccatggcagacttggatgacttgattgaccaggtccaccaacgaggtatgaaattgctgatggacattgtgatgaaccatacttctgatgaacatccttggtttatcgaatcccggtcctcaaaagacaatccttatcgtgattattatatttggcgaccggctagtgaggacggcggtcggccaaataactgggagtccatctttagtggaccagcctgggagtgggatgaccagagtcaagaatactaccttcatgttttttctaaaaaacaaccggatttaaactgggaaaatccaaaagttcgtagagacctgcaagaaatgaccaattggtggctagacaagggaattgatggttttcgcgtggatgccattagccatatcaagaaagctccaggcctaccggacatgcccaatcccgataacaaggaagttgttccgtcttttgatggacatatgaaccagccgggtattaatgacttcctgactgaatttcgccaggctactttcgaccactatgacattatgacagtaggagaagctaatggagtagctgttgaagatgcagcagaatgggtaggagaagaccatggccattttgatatgatctttcaattcgaagcccttgatttatggggtagccaagcaggtgactttgacttaagggactataaaagagttatgaccaaatggcaaaaaggtctggaaggtatgggttggaatgccttgtatattgaaaaccatgacctagtccgggccacttcagctatgggagatgaaggggacctccgcgaaaaatctgccaaggccctggcaaccatgtacttcttcatgcagggaaccccttatatttaccaaggtcaagaaattggaatgaccaatgcccacttcgaccggcttgaggactatgacgatatccaatcagttaaccgggccaagtatatgatggaccatgaaggggctagtctagaggaagccatggcatatatgtggcagaattctcgtgataatgtccggacacctatgcagtgggaccagactaagcatgctggctttacatcaggccaaccctggctcaaggttaatgaaaactatacaaatattaatgtagctagttctatgtctgacccagattcgatttaccactactataaaaaaatgatccaggtccgccgagcgtcccaggcccttatttatgggtcgtatgaattgattttacctgaccatccagaagtttatgcctacctccgccggggggaggaagaaactttcctcgttgtggttaacctgtttgataatccaagccaagtcgacctcagtgactaccagctagactttactgtcttagccaattatccaattgaggaaggtaagcaaatcagacaactcagaccttatgaggcgcggttggttaggctgcaaaatgaagatgctaattga

SEQ ID NO: 196 - protein, 556 aa, Alloiococcus otitidis
MAQKWWKEAVVYQIYPRSFKDSNGDGIGDIQGIIQKLDYLEDLGIDVIWICPVYQSPMDDNGYDISDYKSILAEFGTMADLDDLIDQVHQRGMKLLMDIVMNHTSDEHPWFIESRSSKDNPYRDYYIWRPASEDGGRPNNWESIFSGPAWEWDDQSQEYYLHVFSKKQPDLNWENPKVRRDLQEMTNWWLDKGIDGFRVDAISHIKKAPGLPDMPNPDNKEVVPSFDGHMNQPGINDFLTEFRQATFDHYDIMTVGEANGVAVEDAAEWVGEDHGHFDMIFQFEALDLWGSQAGDFDLRDYKRVMTKWQKGLEGMGWNALYIENHDLVRATSAMGDEGDLREKSAKALATMYFFMQGTPYIYQGQEIGMTNAHFDRLEDYDDIQSVNRAKYMMDHEGASLEEAMAYMWQNSRDNVRTPMQWDQTKHAGFTSGQPWLKVNENYTNINVASSMSDPDSIYHYYKKMIQVRRASQALIYGSYELILPDHPEVYAYLRRGEEETFLVVVNLFDNPSQVDLSDYQLDFTVLANYPIEEGKQIRQLRPYEARLVRLQNEDAN

SEQ ID NO: 197 - DNA, 654 bp, Alloiococcus otitidis
  CDS (46)..(651)
cccgtgatagtaaaaacttgggaaatagcgatggttatattatttgtggcatgcgggaagctgatttcccctgaaattgaccgacttgacaagccagtggtcttatttggtgaaaataagcatggctatgactatgtcgattccaataataaagagggcattgcccaggttacaaactactgccagcaagttggctaccaaaatttggtttatatcgatatggctattgatgaacccttttcaaggagtcgacgggaaggctatcaggcagtgatgactcaattgaaaaaacagcctaggattttgacctttaccaacgattcggatgccatttttgaatacttaatggaccaggccagttatttccagccaggaactgccttcatctgcgcttcagaccgtctggccttaggagtcgttcgggctttgcaaattcgcggggaaataattcctagtgattatggggtaacaggtcatgacggtgtctttctagaccaaataacttatcccaagttgacaacgatgaagcaggatattaaagaaatgggagcggcctgtgccaacttacttatggggaaaattaagctggacaaacctagccagcacaagctccttttcccaaccaaacttcgcttgggaggaacgaccaagtaa

SEQ ID NO: 198 - protein, 202 aa, Alloiococcus otitidis
MACGKLISPEIDRLDKPVVLFGENKHGYDYVDSNNKEGIAQVTNYCQQVGYQNLVYIDMAIDEPFSRSRREGYQAVMTQLKKQPRILTFTNDSDAIFEYLMDQASYFQPGTAFICASDRLALGVVRALQIRGEIIPSDYGVTGHDGVFLDQITYPKLTTMKQDIKEMGAACANLLMGKIKLDKPSQHKLLFPTKLRLGGTTK

SEQ ID NO: 199 - DNA, 654 bp, Alloiococcus otitidis; identical to SEQ ID NO: 197
  CDS (31)..(651)

SEQ ID NO: 200 - protein, 207 aa, Alloiococcus otitidis
MVILFVACGKLISPEIDRLDKPVVLFGENKHGYDYVDSNNKEGIAQVTNYCQQVGYQNLVYIDMAIDEPFSRSRREGYQAVMTQLKKQPRILTFTNDSDAIFEYLMDQASYFQPGTAFICASDRLALGVVRALQIRGEIIPSDYGVTGHDGVFLDQITYPKLTTMKQDIKEMGAACANLLMGKIKLDKPSQHKLLFPTKLRLGGTTK

SEQ ID NO: 201 - DNA, 654 bp, Alloiococcus otitidis; identical to SEQ ID NO: 197
  CDS (4)..(651)

SEQ ID NO: 202 - protein, 216 aa, Alloiococcus otitidis
MIVKTWEIAMVILFVACGKLISPEIDRLDKPVVLFGENKHGYDYVDSNNKEGIAQVTNYCQQVGYQNLVYIDMAIDEPFSRSRREGYQAVMTQLKKQPRILTFTNDSDAIFEYLMDQASYFQPGTAFICASDRLALGVVRALQIRGEIIPSDYGVTGHDGVFLDQITYPKLTTMKQDIKEMGAACANLLMGKIKLDKPSQHKLLFPTKLRLGGTTK

SEQ ID NO: 203 - DNA, 777 bp, Alloiococcus otitidis
  CDS (400)..(774)
ccgggaccgattttatcaaaccgaccagattgtccaccttcccatggacttttactatcctggcaaggccaaaactggagacaaacctccccgcaaggcctttgccaagaaatggcaccccaaaattttgaaacagatgccccaagtcaaaaccattgtgttagtggggagccatgcccaagaattttatttgggaaaagaccggaaacggaacctgacagaaacggtcaagaactaccaagactacctaccaagctacttgccccttgtccacccatcccccttaaacatgggctggctggccaagaatccttggttcgaaaaagaagtggtgccagttttaaaaaaccgggtccaggagattatggacgggacagctggataggtaaaaaatgcgaggtgatagtggtggctactctagccgatgttgccaaattggccattgtttctaaaatgactgtttcccgagtattgaaccacccagaccaggtgtctgacgaattgaaaagcttggtgtaccaggctatggccgacttaaactaccaaccaaaccgcttggcccgagccctagtgaaccagcaaagccaaatgattaagctaatgatcttagaagatacggattcagtagaaccctattatatggctttattaactggtattgccatggagttagaccgacacgcatatggtttacaaattttgacccgtgatagtaaaaacttgggaaatagcgatggttatattatttgtggcatgcgggaagctgatttcccctga

SEQ ID NO: 204 - protein, 125 aa, Alloiococcus otitidis
MIVVATLADVAKLAIVSKMTVSRVLNHPDQVSDELKSLVYQAMADLNYQPNRLARALVNQQSQMIKLMILEDTDSVEPYYMALLTGIAMELDRHAYGLQILTRDSKNLGNSDGYIICGMREADFP

SEQ ID NO: 205 - DNA, 777 bp, Alloiococcus otitidis; identical to SEQ ID NO: 203
  CDS (112)..(774)

SEQ ID NO: 206 - protein, 221 aa, Alloiococcus otitidis
MAPQNFETDAPSQNHCVSGEPCPRILFGKRPETEPDRNGQELPRLPTKLLAPCPPIPLKHGLAGQESLVRKRSGASFKKPGPGDYGRDSWIGKKCEVIVVATLADVAKLAIVSKMTVSRVLNHPDQVSDELKSLVYQAMADLNYQPNRLARALVNQQSQMIKLMILEDTDSVEPYYMALLTGIAMELDRHAYGLQILTRDSKNLGNSDGYIICGMREADFP

SEQ ID NO: 207 - DNA, 615 bp, Alloiococcus otitidis
  CDS (22)..(612)
tgtggggcaaggaggctaaacatgtccatttttgatgagttaaaacaagaaattatggctgatcccatgaatcaggactacactgacaaaggaattgaacccctcttcagcgcttcaaaagaggtcaagatggtcatcgtcggtcaagcaccaggcaagaaggccgaggcaagccggctcttttggaatgacctcagtggggaccgactccgtgagtggatgggaattagccgggaccgattttatcaaaccgaccagattgtccaccttcccatggacttttactatcctggcaaggccaaaactggagacaaacctccccgcaaggcctttgccaagaaatggcaccccaaaattttgaaacagatgccccaagtcaaaaccattgtgttagtggggagccatgcccaagaattttatttgggaaaagaccggaaacggaacctgacagaaacggtcaagaactaccaagactacctaccaagctacttgccccttgtccacccatcccccttaaacatgggctggctggccaagaatccttggttcgaaaaagaagtggtgccagttttaaaaaaccgggtccaggagattatggacgggacagctggatag

SEQ ID NO: 208 - protein, 197 aa, Alloiococcus otitidis
MSIFDELKQEIMADPMNQDYTDKGIEPLFSASKEVKMVIVGQAPGKKAEASRLFWNDLSGDRLREWMGISRDRFYQTDQIVHLPMDFYYPGKAKTGDKPPRKAFAKKWHPKILKQMPQVKTIVLVGSHAQEFYLGKDRKRNLTETVKNYQDYLPSYLPLVHPSPLNMGWLAKNPWFEKEVVPVLKNRVQEIMDGTAG

SEQ ID NO: 209 - DNA, 891 bp, Alloiococcus otitidis
  CDS (223)..(888)
tcgatgagttatctattccctatgattttaattgccattgttgtttccatggcttctagtctcttaggaactttcttagtcctcaggggagcagctatggtatcagatgccattacccacacggttttgttggggattgtcctagcctactttgtcgttcatgacttagactcgccttttctgatgctaggggctactttggttggtcttttaacagtctggttgattgaattggtcagcaagtccaagttaatcaactacgatggagcgatcggggttgtcttccccttcctcttcggcttagccattatcctcctaacccagtatgctagcggtacccacttagacgtggatgctgttttgatgggtgagttaggctttgcccccttcaatcgtttgattattaatggggtagaccttggaccagttgccttggttcggatgtctatcattcttgtgatcaatatcttatttgtgaccatcttttaccggcaactaaaaattactaccttcgacccaggctttgcccggtctatcgggatttcaccaagcaagtattattatgctttgatgaccttggtttctctaacagcagttgggtcttatgaagcggttgggtcagtcttggttgttggtttcgtggttggcccagccttggccggttacatgctatcggatgacctcaagcacattattggcttggccatggtcttctccgtcctcaacagtgtcatcggtgtctacttagcctaccaatttgacaccacctttgccggcatgattgcggtggttataggggtaaccaccatgcttacgatggttttctcccctaaaaaaggcctagtcagaaagctaggcaaaagtaaatcctatagtgaatctagcgcttga

SEQ ID NO: 210 - protein, 222 aa, Alloiococcus otitidis
MIELVSKSKLINYDGAIGVVFPFLFGLAIILLTQYASGTHLDVDAVLMGELGFAPFNRLIINGVDLGPVALVRMSIILVINILFVTIFYRQLKITTFDPGFARSIGISPSKYYYALMTLVSLTAVGSYEAVGSVLVVGFVVGPALAGYMLSDDLKHIIGLAMVFSVLNSVIGVYLAYQFDTTFAGMIAVVIGVTTMLTMVFSPKKGLVRKLGKSKSYSESSA

SEQ ID NO: 211 - DNA, 891 bp, Alloiococcus otitidis; identical to SEQ ID NO: 209
  CDS (49)..(888)

SEQ ID NO: 212 - protein, 280 aa, Alloiococcus otitidis
MASSLLGTFLVLRGAAMVSDAITHTVLLGIVLAYFVVHDLDSPFLMLGATLVGLLTVWLIELVSKSKLINYDGAIGVVFPFLFGLAIILLTQYASGTHLDVDAVLMGELGFAPFNRLIINGVDLGPVALVRMSIILVINILFVTIFYRQLKITTFDPGFARSIGISPSKYYYALMTLVSLTAVGSYEAVGSVLVVGFVVGPALAGYMLSDDLKHIIGLAMVFSVLNSVIGVYLAYQFDTTFAGMIAVVIGVTTMLTMVFSPKKGLVRKLGKSKSYSESSA

SEQ ID NO: 213 - DNA, 891 bp, Alloiococcus otitidis; identical to SEQ ID NO: 209
  CDS (22)..(888)

SEQ ID NO: 214 - protein, 289 aa, Alloiococcus otitidis
MILIAIVVSMASSLLGTFLVLRGAAMVSDAITHTVLLGIVLAYFVVHDLDSPFLMLGATLVGLLTVWLIELVSKSKLINYDGAIGVVFPFLFGLAIILLTQYASGTHLDVDAVLMGELGFAPFNRLIINGVDLGPVALVRMSIILVINILFVTIFYRQLKITTFDPGFARSIGISPSKYYYALMTLVSLTAVGSYEAVGSVLVVGFVVGPALAGYMLSDDLKHIIGLAMVFSVLNSVIGVYLAYQFDTTFAGMIAVVIGVTTMLTMVFSPKKGLVRKLGKSKSYSESSA

SEQ ID NO: 215 - DNA, 891 bp, Alloiococcus otitidis; identical to SEQ ID NO: 209
  CDS (4)..(888)

SEQ ID NO: 216 - protein, 295 aa, Alloiococcus otitidis
MSYLFPMILIAIVVSMASSLLGTFLVLRGAAMVSDAITHTVLLGIVLAYFVVHDLDSPFLMLGATLVGLLTVWLIELVSKSKLINYDGAIGVVFPFLFGLAIILLTQYASGTHLDVDAVLMGELGFAPFNRLIINGVDLGPVALVRMSIILVINILFVTIFYRQLKITTFDPGFARSIGISPSKYYYALMTLVSLTAVGSYEAVGSVLVVGFVVGPALAGYMLSDDLKHIIGLAMVFSVLNSVIGVYLAYQFDTTFAGMIAVVIGVTTMLTMVFSPKKGLVRKLGKSKSYSESSA

SEQ ID NO: 217 - DNA, 927 bp, Alloiococcus otitidis
  CDS (169)..(924)
atgagcggaattttagattggtcctttatgagccaggtccttagtgactatacctttcaaatcgttgccttagggacagtagtcctaggcatagctactggagtagtcgggtcatttgctaccctaagacgggaaagtttgatgggggatgccttgagccacgcagccttgccaggtattggcctagcctttatcttgattcaagttaaaatcacccctctcttattgctaggggctttggtgactggtttaattgctattttcctgatccagttttttaccaataagttacctgtcaaactggatgggtccatggccttgattttatcctctttctttggcttgggtttggtctttctgaccgccatccaaggccaagaaaatgccaaccaggccggtctctccagctttgtttttggtcaggccagtgccatgttacgtagtgatgtctggatgattatccttgtttcagccattattttactcgtgatagccctgtgctggtatccctttaagctgatcacctttgaccaacaatatgcccagtccatttatccaaatattaaatggtataactttaccatggctctgttaattgtcgcagccattatgatcggtttggagtctgttggggttatcttaatgtcagccctcttagtggggccatcgatagctgctcgccagtggactgatcgcttgcttccccttgttatcctagccggagtttttggggctgtgtccagttttatcggaacctatatttcctccacggctggacggataccgacaggaccagccattgtggtcgtcctcagcttgatcttatttgccagtttatttattgcccctaaaaatggtctgatcagtcaaaccctcagacgacgaaaacagcaacgaaaaataaaacgggaggtggctgatcgatga

SEQ ID NO: 218 - protein, 252 aa, Alloiococcus otitidis
MPGIGLAFILIQVKITPLLLLGALVTGLIAIFLIQFFTNKLPVKLDGSMALILSSFFGLGLVFLTAIQGQENANQAGLSSFVFGQASAMLRSDVWMIILVSAIILLVIALCWYPFKLITFDQQYAQSIYPNIKWYNFTMALLIVAAIMIGLESVGVILMSALLVGPSIAARQWTDRLLPLVILAGVFGAVSSFIGTYISSTAGRIPTGPAIVVVLSLILFASLFIAPKNGLISQTLRRRKQQRKIKREVADR

SEQ ID NO: 219 - DNA, 927 bp, Alloiococcus otitidis; identical to SEQ ID NO: 217
  CDS (1)..(924)

SEQ ID NO: 220 - protein, 308 aa, Alloiococcus otitidis
MSGILDWSFMSQVLSDYTFQIVALGTVVLGIATGVVGSFATLRRESLMGDALSHAALPGIGLAFILIQVKITPLLLLGALVTGLIAIFLIQFFTNKLPVKLDGSMALILSSFFGLGLVFLTAIQGQENANQAGLSSFVFGQASAMLRSDVWMIILVSAIILLVIALCWYPFKLITFDQQYAQSIYPNIKWYNFTMALLIVAAIMIGLESVGVILMSALLVGPSIAARQWTDRLLPLVILAGVFGAVSSFIGTYISSTAGRIPTGPAIVVVLSLILFASLFIAPKNGLISQTLRRRKQQRKIKREVADR

SEQ ID NO: 221 - DNA, 774 bp, Alloiococcus otitidis
  CDS (25)..(771)
tgccctcaaataggagtggttagaatgacagaagaaaacgacgttgctataaaagtagatcaattaactgtagcctacgaccaaactccagttttagtggataataatgtgacctttaagaaaggtcagatgacagctattgtagggccaaatggagctggtaagtcaactctcttagatagtattttaggcttcttgaccccattaaacggtcaggtgaccttctttgacggtctcagctataatcaggcccgggaccaagttacctacgtcccgcaaaaacaagctgtggactggcaatttccggccacggttatggatgttgtcttaatgggacgctatggcaaactgggtctttttagccgtttgtccaaagaggaccgaaccatcgctcgggataaactaagggcagtagaaatgttagactatgctgaccgccagatcaaccaattgtctggtggtcaaaaacagcgtatctttctagcccgggccctagctgctgaggcagaaatatacttgctagatgaacccttggcaggggtggataaaaaaaccgaaaaaattatcatggacctccttggtcaattgacccgggaaggcaagaccgtggtagtggtccaccacgacctccatacggtggaagcatactttgaccagatcgttttcttgaacaaaaaaatctttgccagtggaccagtggccgacatttttaatgacgaaacagttgaccggacatttcggtctggccaagaagtagagaagggttatgaatga

SEQ ID NO: 222 - protein, 249 aa, Alloiococcus otitidis
MTEENDVAIKVDQLTVAYDQTPVLVDNNVTFKKGQMTAIVGPNGAGKSTLLDSILGFLTPLNGQVTFFDGLSYNQARDQVTYVPQKQAVDWQFPATVMDVVLMGRYGKLGLFSRLSKEDRTIARDKLRAVEMLDYADRQINQLSGGQKQRIFLARALAAEAEIYLLDEPLAGVDKKTEKIIMDLLGQLTREGKTVVVVHHDLHTVEAYFDQIVFLNKKIFASGPVADIFNDETVDRTFRSGQEVEKGYE

SEQ ID NO: 223 - DNA, 774 bp, Alloiococcus otitidis; identical to SEQ ID NO: 221
  CDS (16)..(771)

SEQ ID NO: 224 - protein, 252 aa, Alloiococcus otitidis
MVRMTEENDVAIKVDQLTVAYDQTPVLVDNNVTFKKGQMTAIVGPNGAGKSTLLDSILGFLTPLNGQVTFFDGLSYNQARDQVTYVPQKQAVDWQFPATVMDVVLMGRYGKLGLFSRLSKEDRTIARDKLRAVEMLDYADRQINQLSGGQKQRIFLARALAAEAEIYLLDEPLAGVDKKTEKIIMDLLGQLTREGKTVVVVHHDLHTVEAYFDQIVFLNKKIFASGPVADIFNDETVDRTFRSGQEVEKGYE

SEQ ID NO: 225 - DNA, 984 bp, Alloiococcus otitidis
  CDS (31)..(981)
aatatattatcaattataacaaaagaagggatgaatgctatgaaaatattactgatgaccttagtcgccttcctcctgaccgcctgtggcaatcaggcagaaggaggaagccaagccaatgaccaagcaagcgaaaatggtggtgaccccattaactttgtggcgacgaccactcacgccaaagatatcgtcacccaaattggtggtgaccacattgaagttgaagccttgatgggacctggtgtagaccctcacgagtaccaaccttcatctgccgatgtggaggccttgcaaaacgcggaagtcgtagcttataacggcttgcacctagaagggatgtttgactcggtttttgaatctctcgatgagatgggcaaagatactttgatcttggcagatgccttgtcagaggatcaaatcttagcctctgatgaagatgacttggcccatgaccctcatatctggtttagtgtggaaaactggcgtgatattgcccagcatacagccgattacctcagtaacctagaccctgccaatgaagcggactaccaggctaatgccgaaaattacctggctgagttagatgaattggatgattacattaatagtagaattgaagaagtaccggaagaatcccgctacctgatcacagcccacgatgcctttaactactttggtgaagacttcgactttgaagtggttgggatccaaggcttgaacaccaaaacagaagcggggacaggcgatatcgctgacttggctgactttattgtcgaaaacaatatcaaggccgtctttattgaaagttccgtgtctgaccgtaacgtttctgccttggttgaagctgttgagtccagaggcgggaacttagaaattgggggcgaactttattcagatgcccttggtagtgacgaagatggggctggcaactatattgacatgtacaaggcaaatattgatactattgttgatgccctcaaatag

SEQ ID NO: 226 - protein, 317 aa, Alloiococcus otitidis
MNAMKILLMTLVAFLLTACGNQAEGGSQANDQASENGGDPINFVATTTHAKDIVTQIGGDHIEVEALMGPGVDPHEYQPSSADVEALQNAEVVAYNGLHLEGMFDSVFESLDEMGKDTLILADALSEDQILASDEDDLAHDPHIWFSVENWRDIAQHTADYLSNLDPANEADYQANAENYLAELDELDDYINSRIEEVPEESRYLITAHDAFNYFGEDFDFEVVGIQGLNTKTEAGTGDIADLADFIVENNIKAVFIESSVSDRNVSALVEAVESRGGNLEIGGELYSDALGSDEDGAGNYIDMYKANIDTIVDALK

SEQ ID NO: 227 - DNA, 756 bp, Alloiococcus otitidis
  CDS (28)..(753)
tttttagtctatcctaaaacatacgctatgtcaatacttgaatttcaatttcttaaaaatccatgtataatagataacgctaaggaggatggtgattctttgaccccgaacaaagagaattttatcaaggcaatctacgagttgaacggtgaccaagaaattgtgaccaaccgccaactggttgaaattttagaggtatcagctgcctccataaccgaaatgaatgcccgcttggtggccgaagatattatagaaagttacccttataagggggtccaactcacagacaagggcttggccatcgccaaacaattgatccgcaagcaccgtttgtgggaggtcttcttatatgaaaagttaggctaccagtggcatgaacttcaccaagatgcggaccttttggaacatgtttcttccgacttattgatcaaccgcttggacgactacctcaaccacccagaaatagaccctcatggtgcctttattcctgaccaggcggggcaggtcgacccaagcgaatatgtccggttaaacacttgccgggtaggtgatgaaatcaccatcaaacaagtcgaagatgaccgggctctcttaagctacctaacccaaaaagaagtccaactaaacaagcaatacttagtagctgatatccaggcctttgacggggccatcacccttaaagatgaccaaggagtcaaaaccatccttagtcccaacgcagtcaaccatatctatatcagtaaaaaagacaagtag

SEQ ID NO: 228 - protein, 242 aa, Alloiococcus otitidis
MSILEFQFLKNPCIIDNAKEDGDSLTPNKENFIKAIYELNGDQEIVTNRQLVEILEVSAASITEMNARLVAEDIIESYPYKGVQLTDKGLAIAKQLIRKHRLWEVFLYEKLGYQWHELHQDADLLEHVSSDLLINRLDDYLNHPEIDPHGAFIPDQAGQVDPSEYVRLNTCRVGDEITIKQVEDDRALLSYLTQKEVQLNKQYLVADIQAFDGAITLKDDQGVKTILSPNAVNHIYISKKDK

SEQ ID NO: 229 - DNA, 1059 bp, Alloiococcus otitidis
  CDS (244)..(1056)
accagtggagaaaggagttttattatggcaagaagaggtcgtggcatggggggcggccgaggcggtccccgcatgggcggaggacgggctggtggtttcagacaaggtgtcggcggtggtcgaggacgaagtggccgtggtggcggtcctaataaaggaggctatagacctagacctggctactcgagaccgagaggtggctttggttttggctccttcttacctggcttcctcttagggtccatgactggcggacgccgccgctactatggaccaggcgggggctgcggtggctgtggcaacggcttagggtgtggtctctttgtcctcctcctctttatcttggccatcacccttctcaataactccgacaaccccaactttgacttcaaccaagctgaaccccaagtccaagttagggattcaactattgatcgagaccccattccagaaggtttggttaacgaaacagactattataccgaccaggtcaactggataaccaatcccgatgaattgacagagggcatggaggttttctatgaccttaccaatatccagccccacctctacttgactgacgagatcgacggggagaccaatccagaatttcaagaaatccaaaactttacccaggacctctacgaccagctctttacggatgaagcccacctccttctggtttttttcgagggagacaattatgaacgaggcgttagctaccacacggcggtcgggtctgaggcccacaaaatatttggcgacgaagcccagggaatcttgtttgactacttagactattactactattccgattttagcgaagaagactacttttctaccgtctttgaaaagaccggccaagacatgatggatgtttcacctagtatctttaccagtgattcttctgaaacccaaataagctggccccggattatcttcggtgtcctcatcgtcttattggtcatcggtttgattatctatttcttcaaccgtcggcaaaaaaaccaggaagctgaaatcattgagcctgaagacgatgacgatttacatttttaa

SEQ ID NO: 230 - protein, 271 aa, Alloiococcus otitidis
MTGGRRRYYGPGGGCGGCGNGLGCGLFVLLLFILAITLLNNSDNPNFDFNQAEPQVQVRDSTIDRDPIPEGLVNETDYYTDQVNWITNPDELTEGMEVFYDLTNIQPHLYLTDEIDGETNPEFQEIQNFTQDLYDQLFTDEAHLLLVFFEGDNYERGVSYHTAVGSEAHKIFGDEAQGILFDYLDYYYYSDFSEEDYFSTVFEKTGQDMMDVSPSIFTSDSSETQISWPRIIFGVLIVLLVIGLIIYFFNRRQKNQEAEIIEPEDDDDLHF

SEQ ID NO: 231 - DNA, 1059 bp, Alloiococcus otitidis; identical to SEQ ID NO: 229
  CDS (25)..(1056)

SEQ ID NO: 232 - protein, 344 aa, Alloiococcus otitidis
MARRGRGMGGGRGGPRMGGGRAGGFRQGVGGGRGRSGRGGGPNKGGYRPRPGYSRPRGGFGFGSFLPGFLLGSMTGGRRRYYGPGGGCGGCGNGLGCGLFVLLLFILAITLLNNSDNPNFDFNQAEPQVQVRDSTIDRDPIPEGLVNETDYYTDQVNWITNPDELTEGMEVFYDLTNIQPHLYLTDEIDGETNPEFQEIQNFTQDLYDQLFTDEAHLLLVFFEGDNYERGVSYHTAVGSEAHKIFGDEAQGILFDYLDYYYYSDFSEEDYFSTVFEKTGQDMMDVSPSIFTSDSSETQISWPRIIFGVLIVLLVIGLIIYFFNRRQKNQEAEIIEPEDDDDLHF

SEQ ID NO: 233 - DNA, 978 bp, Alloiococcus otitidis
  CDS (13)..(975)
agaggtgaaagtatgattacatttgaccaggtgtccaagatctatggtgacacggcagttgtcaaggacttgaccctaaccattgaaacgggtgaaatttttgtctttattggacctagtggtagtggtaaaacaactagtcttaaaatgatcaacaagctgatagaaaattccaaaggggatattctgatagacggcaagcctcatagccagtatgacctgcatgaactccgctggaatatcggctatgtcctccagcaaattgccctcttccccaatatgacggtggaggaaaatatcgccctggtccccgaaatgaaggaatgggacaaagaaagtatagaccaacgaattaacgaattactcatcatggtcaacctagaccctaaagactaccggaaacggtccgtatctgacttgtctggaggccagcagcaaagaattggtgtcttacgggccctggcagccaacccagatatcctactcatggatgaacctttctcagccttagaccctttaagccgggccaagttacaagatgagcttttagccatccaaggccagctacataagaccattgtctttgttacccacgacattcaagaagccctcaaattgggcgaccgaatttgcatcatgaaagacggccaggtggaacaaatcggaacacctgaccaaatcctaaaccagcccgagtcagacttcgtcaaaaactttgtcaaaactggcttgccaacctatcctgaccaagaccacattgaccaggtgattgcgggtggtttttatagtaaagtaagcaagaacttagagggcagctcaagcttacaagcagaccaagaaacccatgcccttttacaggccttaagccaaaaagattcagtttatgttttacaccaagggcaaagctacctcatcagccaaacagattatctccaatacctcagtaaaaaaccaggtctagggggtagaggcaaatga

SEQ ID NO: 234 - protein, 321 aa, Alloiococcus otitidis
MITFDQVSKIYGDTAVVKDLTLTIETGEIFVFIGPSGSGKTTSLKMINKLIENSKGDILIDGKPHSQYDLHELRWNIGYVLQQIALFPNMTVEENIALVPEMKEWDKESIDQRINELLIMVNLDPKDYRKRSVSDLSGGQQQRIGVLRALAANPDILLMDEPFSALDPLSRAKLQDELLAIQGQLHKTIVFVTHDIQEALKLGDRICIMKDGQVEQIGTPDQILNQPESDFVKNFVKTGLPTYPDQDHIDQVIAGGFYSKVSKNLEGSSSLQADQETHALLQALSQKDSVYVLHQGQSYLISQTDYLQYLSKKPGLGGRGK

SEQ ID NO: 235 - DNA, 1533 bp, Alloiococcus otitidis
  CDS (589)..(1530)
aggcaaatgaatttcttagacaacttaatcgaaacctttgacatgcgcagtggccaactctgggagtccttattagaacatatccagttgtcctttatctcccttgccctggccgttatcattgctgttcctttggggatttacttgatggatcggaaaaaaattgccgagcccatcatccaagtcaccgggatcttccaaaccatcccttccctggccctcttaggtcttctcattccacttttggggattggcttctttccagcagtggtagctttaacggtctacgccctcctgcccatcctccgcaatacctataccggtctaaccgaaattgacgactccctcctagaggcagccgatgccatgggaatggaccggtcccggaagcttaaaaaagtccaactcccccttgccatgcccgttatcatggccggcatccggacagccaccgtcttaatcatcggaacagctactgttgctgccctaatcggggctgggggtttggggtccttgatcctgctcggaattgaccgggctgacaactacctgatcttaattggagctatcccggccgccatcttgtctttggtctttgacggcctcctccactacttggagcagtctagtttcaaaaaagttgccacgactttagtggtaactgggggaatcatcctagcctttatcttcttacccagcctcatcttccctaatgaccagctagtagtttctggtaagttaggggctgagcctgaaattctaatgaacatgtacaaagaattaattgaacaggacaccgacctagatgtccaggttgaagaaaactttggcaagacccaattcgtcttcaatgccttggaaagccatgacatcgacatcgctaccgaatataccgggacagtcttgggtacctttttcgacgaaataccagagcccggaacacctgccgaccaagtctttgaccgggcccaagaccggcttaaagaagaatacggcatggacctcctaccttctttaggctttaacaatacctacaccctggcagttgacccagcttacgccgaagaacataacctagagaccatctctgacttaaaagccgtccaagatgacatcaaggtaggctttaccctagaatttgccgaccgggaagatggctacttgggaatccaagacacctacggcattgaatttgataacctgactaccatggacccacagctccgctatacagccatggagcaaggggaggtaaacctcgtggatgcctattcgaccgacagcgaaattgaatcctatgacctagtcgtcttagaagatgaccaaaacctatttccaccctaccatgcggcccctattttacgggacggactcttggatgaccaccctgaaattgctgaaatcatcagccaattggaaggtctcattgatgatgaggccatgcgggaaatgaactaccaggtagaagtcaaccaggccgatgccaaccaagttgctagagacttcttagaccaagcaggcttgctaaaatag

SEQ ID NO: 236 - protein, 314 aa, Alloiococcus otitidis
MVFDGLLHYLEQSSFKKVATTLVVTGGIILAFIFLPSLIFPNDQLVVSGKLGAEPEILMNMYKELIEQDTDLDVQVEENFGKTQFVFNALESHDIDIATEYTGTVLGTFFDEIPEPGTPADQVFDRAQDRLKEEYGMDLLPSLGFNNTYTLAVDPAYAEEHNLETISDLKAVQDDIKVGFTLEFADREDGYLGIQDTYGIEFDNLTTMDPQLRYTAMEQGEVNLVDAYSTDSEIESYDLVVLEDDQNLFPPYHAAPILRDGLLDDHPEIAEIISQLEGLIDDEAMREMNYQVEVNQADANQVARDFLDQAGLLK

SEQ ID NO: 237 - DNA, 1533 bp, Alloiococcus otitidis; identical to SEQ ID NO: 235
  CDS (418)..(1530)

SEQ ID NO: 238 - protein, 371 aa, Alloiococcus otitidis
MPVIMAGIRTATVLIIGTATVAALIGAGGLGSLILLGIDRADNYLILIGAIPAAILSLVFDGLLHYLEQSSFKKVATTLVVTGGIILAFIFLPSLIFPNDQLVVSGKLGAEPEILMNMYKELIEQDTDLDVQVEENFGKTQFVFNALESHDIDIATEYTGTVLGTFFDEIPEPGTPADQVFDRAQDRLKEEYGMDLLPSLGFNNTYTLAVDPAYAEEHNLETISDLKAVQDDIKVGFTLEFADREDGYLGIQDTYGIEFDNLTTMDPQLRYTAMEQGEVNLVDAYSTDSEIESYDLVVLEDDQNLFPPYHAAPILRDGLLDDHPEIAEIISQLEGLIDDEAMREMNYQVEVNQADANQVARDFLDQAGLLK

SEQ ID NO: 239 - DNA, 1533 bp, Alloiococcus otitidis; identical to SEQ ID NO: 235
  CDS (7)..(1530)

SEQ ID NO: 240 - protein, 508 aa, Alloiococcus otitidis
MNFLDNLIETFDMRSGQLWESLLEHIQLSFISLALAVIIAVPLGIYLMDRKKIAEPIIQVTGIFQTIPSLALLGLLIPLLGIGFFPAVVALTVYALLPILRNTYTGLTEIDDSLLEAADAMGMDRSRKLKKVQLPLAMPVIMAGIRTATVLIIGTATVAALIGAGGLGSLILLGIDRADNYLILIGAIPAAILSLVFDGLLHYLEQSSFKKVATTLVVTGGIILAFIFLPSLIFPNDQLVVSGKLGAEPEILMNMYKELIEQDTDLDVQVEENFGKTQFVFNALESHDIDIATEYTGTVLGTFFDEIPEPGTPADQVFDRAQDRLKEEYGMDLLPSLGFNNTYTLAVDPAYAEEHNLETISDLKAVQDDIKVGFTLEFADREDGYLGIQDTYGIEFDNLTTMDPQLRYTAMEQGEVNLVDAYSTDSEIESYDLVVLEDDQNLFPPYHAAPILRDGLLDDHPEIAEIISQLEGLIDDEAMREMNYQVEVNQADANQVARDFLDQAGLLK

SEQ ID NO: 241 - DNA, 555 bp, Alloiococcus otitidis
  CDS (25)..(552)
aatagaagtgaatatttaaagcgaatgttgaaagggatggagcaaatggaaagacaagatattgctagtttaattttggaccgagcccaagaccggttacttgaatcgctcaaccagatgactgttgaagaagccaataccatgccaaaaccccttatcaagtctgtaacttggttagtttggcatacagcccgcatgattgacctgcaaatatccagcttaaaaggcgagtctcctctttggaccagtaagggttggaccgaccgctttgacctagacttgccagatgataccccagactacaagcacagtcctcaagaagccgaaaaagtaaaagtggaagacaaaagccttttgacagactatttatctgaaagcatcgacctggccaaggactatttgggaaaaatcgacccagctagtttggatgaagtcattgaccggtcctacacacccccagtgacccggctaacccggttgatatcaattgtcgatgatgctgacatgcactcgggtcaagctgtctacaccagacgtttggttcttggcaaataa

SEQ ID NO: 242 - protein, 176 aa, Alloiococcus otitidis
MLKGMEQMERQDIASLILDRAQDRLLESLNQMTVEEANTMPKPLIKSVTWLVWHTARMIDLQISSLKGESPLWTSKGWTDRFDLDLPDDTPDYKHSPQEAEKVKVEDKSLLTDYLSESIDLAKDYLGKIDPASLDEVIDRSYTPPVTRLTRLISIVDDADMHSGQAVYTRRLVLGK

SEQ ID NO: 243 - DNA, 681 bp, Alloiococcus otitidis
  CDS (25)..(678)
caaataagaaaggaagtgtgtttgatgaatgttttaattgtcggtgcccatggtcaaattggccaacacctcgtagacctattaaaagaagaaggacagcacaatcctatagcatttgttcgaagtgaagaccagatcaaacaattccaagacaagggtgtagaagctcggcttggtaacttggaagactcaattgatgagattaagaaaactttaactgatattgatgccgtcgttttctctgctggttctggcggatcaactggggcagataagaccctcttagttgacttagacggtgcggttaaagtgatggaagctaccaaggctagtggcattaaacgtttcttgattgtctctgcctttggtgcaggtaaccgtgaccgctttagcgaccaaattaagccttactatgtcgctaaacactttgctgaccaatggctggttgacaagaccgacctagactacaccattatccggccaggcctcttaagtgatgaagattccaacgatacggttcgtcttgagtatgaaatcactgatgcagaagacaatactgtcccaagaatcgacgtggcccgggttattgctgctagcttagacaatgactcaactgtccgcaaggcttttgacttggtctctggctcagaccagattgaagatgccttgaacaaactttaa

SEQ ID NO: 244 - protein, 218 aa, Alloiococcus otitidis
MNVLIVGAHGQIGQHLVDLLKEEGQHNPIAFVRSEDQIKQFQDKGVEARLGNLEDSIDEIKKTLTDIDAVVFSAGSGGSTGADKTLLVDLDGAVKVMEATKASGIKRFLIVSAFGAGNRDRFSDQIKPYYVAKHFADQWLVDKTDLDYTIIRPGLLSDEDSNDTVRLEYEITDAEDNTVPRIDVARVIAASLDNDSTVRKAFDLVSGSDQIEDALNKL

SEQ ID NO: 245 - DNA, 681 bp, Alloiococcus otitidis; identical to SEQ ID NO: 243
  CDS (22)..(678)

SEQ ID NO: 246 - protein, 219 aa, Alloiococcus otitidis
MMNVLIVGAHGQIGQHLVDLLKEEGQHNPIAFVRSEDQIKQFQDKGVEARLGNLEDSIDEIKKTLTDIDAVVFSAGSGGSTGADKTLLVDLDGAVKVMEATKASGIKRFLIVSAFGAGNRDRFSDQIKPYYVAKHFADQWLVDKTDLDYTIIRPGLLSDEDSNDTVRLEYEITDAEDNTVPRIDVARVIAASLDNDSTVRKAFDLVSGSDQIEDALNKL

SEQ ID NO: 247 - DNA, 681 bp, Alloiococcus otitidis; identical to SEQ ID NO: 243
  CDS (16)..(678)

SEQ ID NO: 248 - protein, 221 aa, Alloiococcus otitidis
MCLMNVLIVGAHGQIGQHLVDLLKEEGQHNPIAFVRSEDQIKQFQDKGVEARLGNLEDSIDEIKKTLTDIDAVVFSAGSGGSTGADKTLLVDLDGAVKVMEATKASGIKRFLIVSAFGAGNRDRFSDQIKPYYVAKHFADQWLVDKTDLDYTIIRPGLLSDEDSNDTVRLEYEITDAEDNTVPRIDVARVIAASLDNDSTVRKAFDLVSGSDQIEDALNKL

SEQ ID NO: 249 - DNA, 2001 bp, Alloiococcus otitidis
  CDS (1351)..(1998)
actatgcaattatctgaattattttcaccggccttcatggacctcaacttacaagcagactctaagcaagaagccttggagaatttggtcaagcttttacaccaggaagggaaaatatctcagccagataagttcttagaagccttaatgaaccgggaaagtcagtcaaccactggagtgggagatgaaattgccatcccccatgcccaagatgaagacttggctgtcccagtcattgtctttgcccgagttcagtctggacttgactgggaggcgttggacggccagcctgccaagttaatcttcctcatcgctgctcccaaagacggcaacaatgcccacttgtctgccttagccaaactgtcaggtgtcttgatgaaggaaggggtcaaagcccagctcttacaagcgactagtcctgaccaagtcttgtcagtctttaaggcttacgaagaagatccaaaagacagccaagaaacggagtcagatgacacgggccaagccggtctcaaagaccaagatcctaatgaaaagcagccagagattgatcctagcagccaaaaagagccctatatcttagcggtgacagcctgcccaactgggatcgcccacacctttatggctgaagaaaagctcaaagaaaccgctaaaaaaagaaatattaatatcaaagtcgaaaccaatggccaaaatggggttaacaaccgcttgaccaagcaagatatagaagacgcaagggctattatcgtagccgctgacaagcaggtggacatggcccggtttgatggcaagcctgtcttgatccgcaaggtggcagatgggattaacaagccggatgaacttcttgacaaggccattaaccaggatgccaaaatttaccacgctggcaaaaatgaaaggtcagatgaagaccaagggggagacgaatcacttggccgacgtttttacaagcacttgatgaacggggtctcccacatgctccccttcattgtagcaggtggtctcctgatcgctatttccttcttttggggcattaatgcagctgattcagccagcccagacttcaatgccaatgcccactttatcaacagtttaggcaacatggcctttgccatgatgctgcccatgttagctggctttatcggccaatccatggccgaccgaccgggactggtggttggctttatgggtgggatatttgccgacccagaaattctatccgcctttggtcaggaaggatactttgaaaacttccaggggtctggcttcctaggggctttggtagccggctttctagctggagggatcatctacttcctccgctgggccttctcttggctacccaagtccttggatggtttaaaacccatctttatcttcccgattttaggtgtcttattgatgggtggcctcatgttctttgtcatcaatagtcccatggcttgggtgatggatggtttgatcaattttatcaatagcatcccgagagaatattccatcctacttggttttgtggtggcggccatgatggccattgacatgggtgggccaattaacaaggctgcctatgttactgggacagccctcttaaccacctcagctgggtctggttctgatatcatggcggctgttatgatcggcgggatggtgccacccctagccatagcggtatcagctctgattaacaaaaacttatggcctgaccagcaaagaaaaagtgcctatgtcaatattgttatgggggcaagctttattactgaaggggctattccttttgcggccagcaatcccctaagggtcatcccacccctagctgtctcttcaggtctagctggtgccttgtctatgttctttgggtcagccagccaagtccctcacggtggtctctttgcggttgtcgctggcggcgtatctagccccttgttttacaccttatcctggcttattgctggtattttagggggcttcctactcaacctcactatgaaaaagaggggctag

SEQ ID NO: 250 - protein, 216 aa, Alloiococcus otitidis
MDGLKPIFIFPILGVLLMGGLMFFVINSPMAWVMDGLINFINSIPREYSILLGFVVAAMMAIDMGGPINKAAYVTGTALLTTSAGSGSDIMAAVMIGGMVPPLAIAVSALINKNLWPDQQRKSAYVNIVMGASFITEGAIPFAASNPLRVIPPLAVSSGLAGALSMFFGSASQVPHGGLFAVVAGGVSSPLFYTLSWLIAGILGGFLLNLTMKKRG

SEQ ID NO: 251 - DNA, 2001 bp, Alloiococcus otitidis; identical to SEQ ID NO: 249
  CDS (955)..(1998)

SEQ ID NO: 252 - protein, 348 aa, Alloiococcus otitidis
MMNGVSHMLPFIVAGGLLIAISFFWGINAADSASPDFNANAHFINSLGNMAFAMMLPMLAGFIGQSMADRPGLVVGFMGGIFADPEILSAFGQEGYFENFQGSGFLGALVAGFLAGGIIYFLRWAFSWLPKSLDGLKPIFIFPILGVLLMGGLMFFVINSPMAWVMDGLINFINSIPREYSILLGFVVAAMMAIDMGGPINKAAYVTGTALLTTSAGSGSDIMAAVMIGGMVPPLAIAVSALINKNLWPDQQRKSAYVNIVMGASFITEGAIPFAASNPLRVIPPLAVSSGLAGALSMFFGSASQVPHGGLFAVVAGGVSSPLFYTLSWLIAGILGGFLLNLTMKKRG

SEQ ID NO: 253 - DNA, 2001 bp, Alloiococcus otitidis; identical to SEQ ID NO: 249
  CDS (4)..(1998)

SEQ ID NO: 254 - protein, 665 aa, Alloiococcus otitidis
MQLSELFSPAFMDLNLQADSKQEALENLVKLLHQEGKISQPDKFLEALMNRESQSTTGVGDEIAIPHAQDEDLAVPVIVFARVQSGLDWEALDGQPAKLIFLIAAPKDGNNAHLSALAKLSGVLMKEGVKAQLLQATSPDQVLSVFKAYEEDPKDSQETESDDTGQAGLKDQDPNEKQPEIDPSSQKEPYILAVTACPTGIAHTFMAEEKLKETAKKRNINIKVETNGQNGVNNRLTKQDIEDARAIIVAADKQVDMARFDGKPVLIRKVADGINKPDELLDKAINQDAKIYHAGKNERSDEDQGGDESLGRRFYKHLMNGVSHMLPFIVAGGLLIAISFFWGINAADSASPDFNANAHFINSLGNMAFAMMLPMLAGFIGQSMADRPGLVVGFMGGIFADPEILSAFGQEGYFENFQGSGFLGALVAGFLAGGIIYFLRWAFSWLPKSLDGLKPIFIFPILGVLLMGGLMFFVINSPMAWVMDGLINFINSIPREYSILLGFVVAAMMAIDMGGPINKAAYVTGTALLTTSAGSGSDIMAAVMIGGMVPPLAIAVSALINKNLWPDQQRKSAYVNIVMGASFITEGAIPFAASNPLRVIPPLAVSSGLAGALSMFFGSASQVPHGGLFAVVAGGVSSPLFYTLSWLIAGILGGFLLNLTMKKRG

SEQ ID NO: 255 - DNA, 306 bp, Alloiococcus otitidis
  CDS (46)..(303)
attttggcatcctggttaatggccttgtcaagaagttcatccggcttgttaatcccatctgccaccttgcggatcaagacaggcttgccatcaaaccgggccatgtccacctgcttgtcagcggctacgataatagcccttgcgtcttctatatcttgcttggtcaagcggttgttaaccccattttggccattggtttcgactttgatattaatatttctttttttagcggtttctttgagcttttcttcagccataaaggtgtgggcgatcccagttgggcaggctgtcaccgctaagatatag

SEQ ID NO: 256 - protein, 86 aa, Alloiococcus otitidis
MLIPSATLRIKTGLPSNRAMSTCLSAATIIALASSISCLVKRLLTPFWPLVSTLILIFLFLAVSLSFSSAIKVWAIPVGQAVTAKI

SEQ ID NO: 257 - DNA, 306 bp, Alloiococcus otitidis; identical to SEQ ID NO: 255
  CDS (19)..(303)

SEQ ID NO: 258 - protein, 95 aa, Alloiococcus otitidis
MALSRSSSGLLIPSATLRIKTGLPSNRAMSTCLSAATIIALASSISCLVKRLLTPFWPLVSTLILIFLFLAVSLSFSSAIKVWAIPVGQAVTAKI

SEQ ID NO: 259 - DNA, 306 bp, Alloiococcus otitidis; identical to SEQ ID NO: 255
  CDS (4)..(303)

SEQ ID NO: 260 - protein, 100 aa, Alloiococcus otitidis
MASWLMALSRSSSGLLIPSATLRIKTGLPSNRAMSTCLSAATIIALASSISCLVKRLLTPFWPLVSTLILIFLFLAVSLSFSSAIKVWAIPVGQAVTAKI

SEQ ID NO: 261 - DNA, 918 bp, Alloiococcus otitidis
  CDS (4)..(915)
gaaatgttttacacggtaacttttaacccggcagttgacctttttatccaagccgatgagatcaagttgggccagctcaaccggattaaccaagagacctttatccctggaggtaaagggataaatatttcggttcttttaaagaacttgggggtagaatcggttgcgacgggttttattgggggctttacgggcgattatatcgaaagcagtctaaaagactggggcatagccagccactttatagacctgggccagcccagccgggtcaatattaaactgaatgacggccgagagactgaaatcaatgggccgggtcctcaagtcagcccagattattttgaccaattgacccgctattttaaagaccacttaagaccagctgacctggtttttctatcaggcaatatagccccgggtatgaccaaggaccactaccagactatggcagacttggtgaaaaaagcgggaagccaattagtggttgacaccaatactgacctcttgactgctagcctggcctaccagccctttttgatcaaacccaacatccatgagttaggggacatctttggtgtccagcttaaaacagggtcagaggccctcccctatgccaaaaaactccaagaagcgggggctaaacacatcctcttatctatggggggtgatggggccctccttctcaaaggggatggccaggttctcagggcccaggcgccaaaaggacaggtggtcaatcctagtggggcgggtgactccatgctagcgggctttattgcctccctttgggataagggagattaccgtcaagctttagcctttgccaccgcatgtggggcagcttcggcctttagttcggggattgccagccaagacttggtccaatccctcgttgaccaagttagcattcaagaatga

SEQ ID NO: 262 - protein, 304 aa, Alloiococcus otitidis
MFYTVTFNPAVDLFIQADEIKLGQLNRINQETFIPGGKGINISVLLKNLGVESVATGFIGGFTGDYIESSLKDWGIASHFIDLGQPSRVNIKLNDGRETEINGPGPQVSPDYFDQLTRYFKDHLRPADLVFLSGNIAPGMTKDHYQTMADLVKKAGSQLVVDTNTDLLTASLAYQPFLIKPNIHELGDIFGVQLKTGSEALPYAKKLQEAGAKHILLSMGGDGALLLKGDGQVLRAQAPKGQVVNPSGAGDSMLAGFIASLWDKGDYRQALAFATACGAASAFSSGIASQDLVQSLVDQVSIQE

SEQ ID NO: 263 - DNA, 774 bp, Alloiococcus otitidis
  CDS (22)..(771)
gtgtattatagacttgaggtgatggaagtgcttacggcaaaacggcgacagcttattttaacccaactacagcaagataaaatcatccaaagccaggacttggttgaccggctaggcatttcagaatcaacggtgcggcgggacctggccagcctagaagcagatggcaagcttatccgggtccatggcggtgccaaattgccccgggacttgaccccggaattggacttgagtgaaaaagcagtcaaaaacagtcaagaaaaggctaagattgcacgttatgccgctagtcttgtccaagacggggcccggatctatttggatgccgggacaaccagcttggcaatggtgggctacttaaagggcaaggacatcctagtggtaactaatggagtcaaccatggccaccgtctcttgaccctagggattgagaccatcctagttggtggccaggccaagttgaacacccaggctgtggtagggacccaggcagttgaccaagtccgcaactaccgtttttcccatgttttcttaggaaccaacagtatcgatgctaagttggggcttaccacaccggactctgaagaagccgctatgaagcaggcagcagctgaaaatggggaccgggtttttgtcctggctgacccgtctaagtttgacaaggtcagctttcacaaatttttagacttggctgactgtatggttatcacttccactttgactgatccattacgcaaagactatatagacttgaccacactgaaggaggtttag

SEQ ID NO: 264 - protein, 250 aa, Alloiococcus otitidis
MEVLTAKRRQLILTQLQQDKIIQSQDLVDRLGISESTVRRDLASLEADGKLIRVHGGAKLPRDLTPELDLSEKAVKNSQEKAKIARYAASLVQDGARIYLDAGTTSLAMVGYLKGKDILVVTNGVNHGHRLLTLGIETILVGGQAKLNTQAVVGTQAVDQVRNYRFSHVFLGTNSIDAKLGLTTPDSEEAAMKQAAAENGDRVFVLADPSKFDKVSFHKFLDLADCMVITSTLTDPLRKDYIDLTTLKEV

SEQ ID NO: 265 - DNA, 774 bp, Alloiococcus otitidis; identical to SEQ ID NO: 263
  CDS (1)..(771)

SEQ ID NO: 266 - protein, 257 aa, Alloiococcus otitidis
MYYRLEVMEVLTAKRRQLILTQLQQDKIIQSQDLVDRLGISESTVRRDLASLEADGKLIRVHGGAKLPRDLTPELDLSEKAVKNSQEKAKIARYAASLVQDGARIYLDAGTTSLAMVGYLKGKDILVVTNGVNHGHRLLTLGIETILVGGQAKLNTQAVVGTQAVDQVRNYRFSHVFLGTNSIDAKLGLTTPDSEEAAMKQAAAENGDRVFVLADPSKFDKVSFHKFLDLADCMVITSTLTDPLRKDYIDLTTLKEV

SEQ ID NO: 267 - DNA, 507 bp, Alloiococcus otitidis
  CDS (31)..(504)
agattgaatccctttgtcaaaagacctaaaatgaaaccagtcgagaattcgaacaaaggagagagatcaatgtcagactacgaaaaagtttattctactagaggcgttaacgaaaacggtcgagatggtcgaagctacatcgaaggtggcgactttgaagttcaagtttctgctccaggtaaggacaaaccaggaactactaacccggaacaactttttgccctaggttattctgcttgctttaacggtgctttagaagcagttaaaggccaagaaaatgtcgatggcaagtctgttgtccgtaaccaagttgacctttatgccaaacctggccaagctgactttcgattggccgtccggatcgaagttgggattgatggtgtggacaaagacaaggtccaagaattagccgataaggcccacactgtttgcccttattccaaagctgttcaaaacggcgaaattgatgtggaagttgtcgcggtcgatttccaagataccaaataa

SEQ ID NO: 268 - protein, 158 aa, Alloiococcus otitidis
MKPVENSNKGERSMSDYEKVYSTRGVNENGRDGRSYIEGGDFEVQVSAPGKDKPGTTNPEQLFALGYSACFNGALEAVKGQENVDGKSVVRNQVDLYAKPGQADFRLAVRIEVGIDGVDKDKVQELADKAHTVCPYSKAVQNGEIDVEVVAVDFQDTK

SEQ ID NO: 269 - DNA, 507 bp, Alloiococcus otitidis; identical to SEQ ID NO: 267
  CDS (4)..(504)

SEQ ID NO: 270 - protein, 167 aa, Alloiococcus otitidis
MNPFVKRPKMKPVENSNKGERSMSDYEKVYSTRGVNENGRDGRSYIEGGDFEVQVSAPGKDKPGTTNPEQLFALGYSACFNGALEAVKGQENVDGKSVVRNQVDLYAKPGQADFRLAVRIEVGIDGVDKDKVQELADKAHTVCPYSKAVQNGEIDVEVVAVDFQDTK

SEQ ID NO: 271 - DNA, 1959 bp, Alloiococcus otitidis
  CDS (67)..(1956)
ataaagatctcgataagcttattaacaataatgattataaacaaagaccaccagggaggggacagcatgctaaaatttttattcaagtcacgaaagggccagtttttttctttggctatcctatttaccgttgccggatttgtcctgatgcccattcatgacctagccagtcgggtttgtttttatattgctattttctttggtggcttttttgccgccaaggatgccgttgttgacacgataagagaaaagagtcctaatgtcgacttgctcatgattttgtccgcattaggggcagctgccattaactttgaatcagaaggggccgtccttttaattattttctccgggtccgacttgttggaggagtatgccactgacaagaccaccaatgaaatttcagccttgatgtccaatgtgccagaaacagccaaactagttatggcgtccggacagaccaaggaagtggcaactgaagacctgcaattagaagaccaggtcctggtcgcaaagggagagcaggttccgatcgacggctatgttgacagtcaggttagcattgatgaatcagccttgactggggagtctatcccagttagcaaggaagcgggccaggaagtttttgccgggaccatcaaccaaggcaatgcctttaagttgaccgtttccaaaactagtgatgagaccatcttctcctctatcgtaaaaatggtggaagaagctcaagaccacccgtccaatattgctaaatttatcgaccgcttcgaaacgaaatatgttattactgttttaattgctgtccccctctttgtcttagctctttatggcctaactgctaataactggcaagaatccatctaccggggcttggtcctactcacagttgccagtccttgtgccttggttgcttcagcgacccctgctaccttaagtgccattagtaatggcgccaagcacgggatcttagtcaagggtggggcagctatggagtccttgtcttccatggaccaactttttaccgacaagaccggaactctaacctttggtgaatttaccttggtggactaccaagccagcgaccaaacccttgcctatgttacttatatggaaaaccaatccaaccaccccattgctagagctttggttgaccactttaaggaccttgaattcagccaggtcgatagcagtcaaccggtggaagaagtagccggtgtggggctaaaaatgggagactggctcttagggaagctgtcggtctttgaaagttacaagggctaccaagaattgaatcaagaattagaaaacaagcaaacgactgtggtagcagcctacaaggatgaaattaagggttactttgtcctagcagatgaaatcagacaagaggccaaagaagctgtccgcaatttcatggcggcaggggtggatgtctctctcttgaccggggacaatgaaacagctgccagccaggtagcccaagctattggtctagaccattacgaagccagcctaacaccagaagacaagaccgtctttgtcaaggaagcccaaaacgaggaaacagtcatcggtatgatcggagacgatattaatgatgcccctgccctagccaatgctgatattgggatcgccatggggtctgggtcttcggttgccatggagtcttcagacctgatcgtggtaaaaaacaacctagccaagctcttctactcctttgacctcagtaagcggctgaacaagatcattatccaaaatatcgtctttgctgtcggggtcattgtcatcctggtcatcttaaatctcctgggtattttagacttgccgacaggggttgtggcccacgaaggatctactatcttggtcatcctaaacggcctccgccttctcaaaacacctaaggatgccgatgacgatgaagttgaaaaagaggaagaagccagctcggttagtctacaggcataa

SEQ ID NO: 272 - protein, 630 aa, Alloiococcus otitidis
MLKFLFKSRKGQFFSLAILFTVAGFVLMPIHDLASRVCFYIAIFFGGFFAAKDAVVDTIREKSPNVDLLMILSALGAAAINFESEGAVLLIIFSGSDLLEEYATDKTTNEISALMSNVPETAKLVMASGQTKEVATEDLQLEDQVLVAKGEQVPIDGYVDSQVSIDESALTGESIPVSKEAGQEVFAGTINQGNAFKLTVSKTSDETIFSSIVKMVEEAQDHPSNIAKFIDRFETKYVITVLIAVPLFVLALYGLTANNWQESIYRGLVLLTVASPCALVASATPATLSAISNGAKHGILVKGGAAMESLSSMDQLFTDKTGTLTFGEFTLVDYQASDQTLAYVTYMENQSNHPIARALVDHFKDLEFSQVDSSQPVEEVAGVGLKMGDWLLGKLSVFESYKGYQELNQELENKQTTVVAAYKDEIKGYFVLADEIRQEAKEAVRNFMAAGVDVSLLTGDNETAASQVAQAIGLDHYEASLTPEDKTVFVKEAQNEETVIGMIGDDINDAPALANADIGIAMGSGSSVAMESSDLIVVKNNLAKLFYSFDLSKRLNKIIIQNIVFAVGVIVILVILNLLGILDLPTGVVAHEGSTILVILNGLRLLKTPKDADDDEVEKEEEASSVSLQA

SEQ ID NO: 273 - DNA, 1959 bp, Alloiococcus otitidis; identical to SEQ ID NO: 271
  CDS (31)..(1956)

SEQ ID NO: 274 - protein, 642 aa, Alloiococcus otitidis
MIINKDHQGGDSMLKFLFKSRKGQFFSLAILFTVAGFVLMPIHDLASRVCFYIAIFFGGFFAAKDAVVDTIREKSPNVDLLMILSALGAAAINFESEGAVLLIIFSGSDLLEEYATDKTTNEISALMSNVPETAKLVMASGQTKEVATEDLQLEDQVLVAKGEQVPIDGYVDSQVSIDESALTGESIPVSKEAGQEVFAGTINQGNAFKLTVSKTSDETIFSSIVKMVEEAQDHPSNIAKFIDRFETKYVITVLIAVPLFVLALYGLTANNWQESIYRGLVLLTVASPCALVASATPATLSAISNGAKHGILVKGGAAMESLSSMDQLFTDKTGTLTFGEFTLVDYQASDQTLAYVTYMENQSNHPIARALVDHFKDLEFSQVDSSQPVEEVAGVGLKMGDWLLGKLSVFESYKGYQELNQELENKQTTVVAAYKDEIKGYFVLADEIRQEAKEAVRNFMAAGVDVSLLTGDNETAASQVAQAIGLDHYEASLTPEDKTVFVKEAQNEETVIGMIGDDINDAPALANADIGIAMGSGSSVAMESSDLIVVKNNLAKLFYSFDLSKRLNKIIIQNIVFAVGVIVILVILNLLGILDLPTGVVAHEGSTILVILNGLRLLKTPKDADDDEVEKEEEASSVSLQA

SEQ ID NO: 275 - DNA, 405 bp, Alloiococcus otitidis
  CDS (79)..(402)
accgtaaccattctcaataaaaaggctgtattcttcttagaagatttccggtatactataaaaaaggaggttcaggctatggaagaagaaaaagactttatcatgcgacaaatccaccaggtcatcgataatcttggtcggtacttgaccaaagactccctcaaagcctatatcgactacgacctggccagtcaatctgccctgacggaaagggaaattgaccaaattcttttgattcaggacttaaaggaagtggttagtcgctaccagattagccaagacacactcagccgggaccttagtttagacctagaccaaattgagacctactaccacctggaagaagacctccctgacccggtccatgccaagatccaagcttttgtgaaagaccattcagactaa

SEQ ID NO: 276 - protein, 108 aa, Alloiococcus otitidis
MEEEKDFIMRQIHQVIDNLGRYLTKDSLKAYIDYDLASQSALTEREIDQILLIQDLKEVVSRYQISQDTLSRDLSLDLDQIETYYHLEEDLPDPVHAKIQAFVKDHSD

SEQ ID NO: 277 - DNA, 933 bp, Alloiococcus otitidis
  CDS (1)..(930)
atgaaaaagaaaagctatatgaccttggctagtttgatcggaatagccggcatttatttggccatcaaccaatggcctgttcaaaagcaaaaatcagcctttaccaagaaggcggaaggcatgaaaaaaggccaacttcccttggtgattgcccaccgtgctggggcgggtctggcacctgaagggagtcaggaagcctttgaccactcaattgacttgggtgtcaatttttttgaactggatgttcacttgactaaagatggccagttgcttgtgattcatgaccccgtagtggaccgggtcactaatgggtcaggccgggtgaatgatatgaccctggctcaagtcaaagacttggatgctggctaccattttcaagatgaagccggtcaatttccctaccggggccaaggggtctctcttctaagcttagatcaagtttttgcccgctatccagaccagttatttgtcattgaatttaaggctagcaaccggaaagacatccaccagcaagggcttgaggaattgtggcgactgatacaagcttatcaaatgcaggaccaagttacagtgggaagtttcgaccaggccttgttagatgactttgcccgcatcagtggcggccaggttgctttaggagcagggatttccgctgttgcctcttttgtggtcaagtcccaatttggtctaaccggtctgactaagagttcagcttcttccttccaactccccttaggtcgttacggttttgacctaacccgcgagtcccttcggaaaatggcctataaaagaggactccacctttattactggacagtgaatgatgagcgagaaatgaagcggttaattgacttaggagttgacggtatcatgacggactatcctgaccgtttgcttgcccttttaaatgacttagaaaaagatgaatgctag

SEQ ID NO: 278 - protein, 310 aa, Alloiococcus otitidis
MKKKSYMTLASLIGIAGIYLAINQWPVQKQKSAFTKKAEGMKKGQLPLVIAHRAGAGLAPEGSQEAFDHSIDLGVNFFELDVHLTKDGQLLVIHDPVVDRVTNGSGRVNDMTLAQVKDLDAGYHFQDEAGQFPYRGQGVSLLSLDQVFARYPDQLFVIEFKASNRKDIHQQGLEELWRLIQAYQMQDQVTVGSFDQALLDDFARISGGQVALGAGISAVASFVVKSQFGLTGLTKSSASSFQLPLGRYGFDLTRESLRKMAYKRGLHLYYWTVNDEREMKRLIDLGVDGIMTDYPDRLLALLNDLEKDEC

SEQ ID NO: 279 - DNA, 873 bp, Alloiococcus otitidis
  CDS (88)..(870)
agtaaagcaagcgaagaggaggcagtcaatgtgacacaagctcggcttttgattatccaagatatatcggctagttgccggatttccatgaatgtggccctgccggttctatcctgcctggatcatgaggttaacatcttgcccactgccctgctcagtacccataccacggccggctttgaccagtatacttacttagacttaaccgaggaaaacgaaaaaatcctagctcactgggataagctgggaattcgttttgacggtattttagtgggctatatcggttcagttaagcagatcaagcggattgaggccattgttgatcgttttttaaaaaagggtggtcacttcattcttgacccggctatggctgaatccggagacctttatgatggctttggccaggattatgtaaatgagatgcgactgttggccaagcgggcctctgtcctcttgcccaaccagactgaagcgggtttattggtgggcagtcaggacttgggtcaagattcggttgacctcgaagacttggtcatccaggttgccaagatcagccaggagaccgctattttaacaggagttcattcaaaggatagccaagagattggggcctattcctgcaatggccaaacccagcaagtacagcgggaatttgccccctactacccaggacactatgaagggagcggggacctttttgctagtgtggtgactggtttgatcctacaaggcaaatcaatccaccaggctatgacgattgcggtgggctatgttagccgctgtattggtcggaccagccatctgtcagaggataagcgtcggtatgggattcaatttgaaagtgacttaccttacttaatgaaccagctttaa

SEQ ID NO: 280 - protein, 261 aa, Alloiococcus otitidis
MNVALPVLSCLDHEVNILPTALLSTHTTAGFDQYTYLDLTEENEKILAHWDKLGIRFDGILVGYIGSVKQIKRIEAIVDRFLKKGGHFILDPAMAESGDLYDGFGQDYVNEMRLLAKRASVLLPNQTEAGLLVGSQDLGQDSVDLEDLVIQVAKISQETAILTGVHSKDSQEIGAYSCNGQTQQVQREFAPYYPGHYEGSGDLFASVVTGLILQGKSIHQAMTIAVGYVSRCIGRTSHLSEDKRRYGIQFESDLPYLMNQL

SEQ ID NO: 281 - DNA, 873 bp, Alloiococcus otitidis; identical to SEQ ID NO: 279
  CDS (49)..(870)

SEQ ID NO: 282 - protein, 274 aa, Alloiococcus otitidis
MIIQDISASCRISMNVALPVLSCLDHEVNILPTALLSTHTTAGFDQYTYLDLTEENEKILAHWDKLGIRFDGILVGYIGSVKQIKRIEAIVDRFLKKGGHFILDPAMAESGDLYDGFGQDYVNEMRLLAKRASVLLPNQTEAGLLVGSQDLGQDSVDLEDLVIQVAKISQETAILTGVHSKDSQEIGAYSCNGQTQQVQREFAPYYPGHYEGSGDLFASVVTGLILQGKSIHQAMTIAVGYVSRCIGRTSHLSEDKRRYGIQFESDLPYLMNQL

SEQ ID NO: 283 - DNA, 873 bp, Alloiococcus otitidis; identical to SEQ ID NO: 279
  CDS (31)..(870)

SEQ ID NO: 284 - protein, 280 aa, Alloiococcus otitidis
MTQARLLIIQDISASCRISMNVALPVLSCLDHEVNILPTALLSTHTTAGFDQYTYLDLTEENEKILAHWDKLGIRFDGILVGYIGSVKQIKRIEAIVDRFLKKGGHFILDPAMAESGDLYDGFGQDYVNEMRLLAKRASVLLPNQTEAGLLVGSQDLGQDSVDLEDLVIQVAKISQETAILTGVHSKDSQEIGAYSCNGQTQQVQREFAPYYPGHYEGSGDLFASVVTGLILQGKSIHQAMTIAVGYVSRCIGRTSHLSEDKRRYGIQFESDLPYLMNQL

SEQ ID NO: 285 - DNA, 1584 bp, Alloiococcus otitidis
  CDS (1294)..(1581)
atactgcttctccttgctagtcatgctagaatagctgtaaccaagaaaaaaggaggatcttgtatgggagacaagaaaaaagaaagcggtaacacgggtcttttaggctacatcgaacgtgggggtaatgccttgccccacccggttgtcctctttattattttgattgggatcgtcatggttgctgcccacctagcttatatgatgggggcttctttaagttattttgatgcttcaagcaatgaagaaatattggttgaggccaaaaccatgtttgactttgaaggcttgcggtatatttttaaccaggctgttgataactttatgggcttttcagccttaggggttgtcattttagccatgttaggagtagggattgcggaatggaccggtttgataggggctagtttaaaaagactcctggacaacttaccatctgccttcttgtccatggctgtcgtctttgccggtgttatgtccagtatcgcttctgacgtgggctatgtcgtcatcattcccttaggtgccaccatttttgctggagcaggacgccacccgattgcaggacttgcagcagcctttgccggagtatccggtggcttttcggccaacttactggttgggccaattgatgccctggttgttgggatcatcaatgatgccttggcttcagccaatatcggctatgaagtaacggtgactgctaactggtacttcctcattgtctcgacaatcttactgaccattgtgggggcgattgtgaccgaaaaaattgtggaaccaaggctgggagagtacaccgggtcctatatgccggacaatgaacccttaacggaccaggagcggaaggggcttaagtgggccttggcagtttttcttgtttatgcccttgtgatggctttgttgatgtttccaccaggagcccccttccagacctacaatgaagtgactggccaagttgatttaaatgactttcttgaaaatggcttactgctggctatcttcttcctctttgccctacctggtttgtgttacggacttgtggtgggcaagatcaaggactcagctgactttgtagctgggatgaccgaggccatttcttcgattgcaggtatgattgtcctagtcttctttgcagcccagctagttaattattttgaatacaccaatcttgggaccttgattgcggtcgggggtgccaactttttaagggacatcaacctaagcgggattcctttaattattggttttatcctcttaacttccatcatcaacctctttattggtggggcagtgactaagtgggttatcttggctccaatttttgcccctatgtttatgagtttgaatattccgcctgaagttaccctaatggcttaccggattgccgactcctcaaccaatatcattgcccccttgatgagttttatgcccatcatcctcataatggcccagcgctatgatgaagaaagtggcctaggaacgatcatttcaaccatgttctcttactctatggccttcctagccttctggtctatcctgctcatcgtctggctcggttttggcatcccacttggaccataa

SEQ ID NO: 286 - protein, 96 aa, Alloiococcus otitidis
MTKWVILAPIFAPMFMSLNIPPEVTLMAYRIADSSTNIIAPLMSFMPIILIMAQRYDEESGLGTIISTMFSYSMAFLAFWSILLIVWLGFGIPLGP

SEQ ID NO: 287 - DNA, 1584 bp, Alloiococcus otitidis; identical to SEQ ID NO: 285
  CDS (394)..(1581)

SEQ ID NO: 288 - protein, 396 aa, Alloiococcus otitidis
MIGASLKRLLDNLPSAFLSMAVVFAGVMSSIASDVGYVVIIPLGATIFAGAGRHPIAGLAAAFAGVSGGFSANLLVGPIDALVVGIINDALASANIGYEVTVTANWYFLIVSTILLTIVGAIVTEKIVEPRLGEYTGSYMPDNEPLTDQERKGLKWALAVFLVYALVMALLMFPPGAPFQTYNEVTGQVDLNDFLENGLLLAIFFLFALPGLCYGLVVGKIKDSADFVAGMTEAISSIAGMIVLVFFAAQLVNYFEYTNLGTLIAVGGANFLRDINLSGIPLIIGFILLTSIINLFIGGAVTKWVILAPIFAPMFMSLNIPPEVTLMAYRIADSSTNIIAPLMSFMPIILIMAQRYDEESGLGTIISTMFSYSMAFLAFWSILLIVWLGFGIPLGP

SEQ ID NO: 289 - DNA, 1584 bp, Alloiococcus otitidis; identical to SEQ ID NO: 285
  CDS (133)..(1581)

SEQ ID NO: 290 - protein, 483 aa, Alloiococcus otitidis
MPHPVVLFIILIGIVMVAAHLAYMMGASLSYFDASSNEEILVEAKTMFDFEGLRYIFNQAVDNFMGFSALGVVILAMLGVGIAEWTGLIGASLKRLLDNLPSAFLSMAVVFAGVMSSIASDVGYVVIIPLGATIFAGAGRHPIAGLAAAFAGVSGGFSANLLVGPIDALVVGIINDALASANIGYEVTVTANWYFLIVSTILLTIVGAIVTEKIVEPRLGEYTGSYMPDNEPLTDQERKGLKWALAVFLVYALVMALLMFPPGAPFQTYNEVTGQVDLNDFLENGLLLAIFFLFALPGLCYGLVVGKIKDSADFVAGMTEAISSIAGMIVLVFFAAQLVNYFEYTNLGTLIAVGGANFLRDINLSGIPLIIGFILLTSIINLFIGGAVTKWVILAPIFAPMFMSLNIPPEVTLMAYRIADSSTNIIAPLMSFMPIILIMAQRYDEESGLGTIISTMFSYSMAFLAFWSILLIVWLGFGIPLGP

SEQ ID NO: 291 - DNA, 1584 bp, Alloiococcus otitidis; identical to SEQ ID NO: 285
  CDS (64)..(1581)

SEQ ID NO: 292 - protein, 506 aa, Alloiococcus otitidis
MGDKKKESGNTGLLGYIERGGNALPHPVVLFIILIGIVMVAAHLAYMMGASLSYFDASSNEEILVEAKTMFDFEGLRYIFNQAVDNFMGFSALGVVILAMLGVGIAEWTGLIGASLKRLLDNLPSAFLSMAVVFAGVMSSIASDVGYVVIIPLGATIFAGAGRHPIAGLAAAFAGVSGGFSANLLVGPIDALVVGIINDALASANIGYEVTVTANWYFLIVSTILLTIVGAIVTEKIVEPRLGEYTGSYMPDNEPLTDQERKGLKWALAVFLVYALVMALLMFPPGAPFQTYNEVTGQVDLNDFLENGLLLAIFFLFALPGLCYGLVVGKIKDSADFVAGMTEAISSIAGMIVLVFFAAQLVNYFEYTNLGTLIAVGGANFLRDINLSGIPLIIGFILLTSIINLFIGGAVTKWVILAPIFAPMFMSLNIPPEVTLMAYRIADSSTNIIAPLMSFMPIILIMAQRYDEESGLGTIISTMFSYSMAFLAFWSILLIVWLGFGIPLGP

SEQ ID NO: 293 - DNA, 1194 bp, Alloiococcus otitidis
  CDS (4)..(1191)
gcaatggaaagagcagtcggcacggtcgtacgcgggctcaggggccctattgtccataaaggagacgacatggtagagacggtcgttcagaccatcttacaagctgcagatgctgaaaaatttgagattaaagaccgggatattgttaccattacagaatctgtggtcgcacgcgcccagggcaactatgccagcttggaccagatcgcacaagatatcaaagataagttccaagaccatactcttggcctagtcttccctattttaagtcggaaccggtttgccaacttgcttaaagggattgccagaggggctcagaaaatcgtcctcctcttctcctaccctgctgatgaagtgggtaaccaccttatctctttggaccaattagacaaaaaaagtgttaatccttggtcgcaagtccttgatgaaggagaattccgggagctctttggctaccagaaacacccctttaccggcattgactacatcgactactacaaatctattgtccaagaagagggggctgaccttgacattatcttctccaacgatccccggaccatcttagactacaccaaacacgttttgacctgcgatatccacaaccgtaagcgaacccaggcccaaattaaagctggaggggcaaacttggtctacggcctcgaagacgtcttatctaaacctgtaaagggcagtggccacaatactctttatggcttgctagggtcaaatcggtcgaccgaagaatctgttaaactattccccgagggcggccaggaagtggtggaagccatccaagcccaaatcaaagaaaaaacaggcaaaaccatcgaagtcatgattaatggcgacggggctttcaaagacccagttggccaaatttgggagttagctgaccccatcgtctccccagcctacacccagggccttgaaggaaccccaagtgaaatcaagctcaagtatttggctgataataacttcgcccaccttgaaggggaagagctcaaggctgccgtttcagactatattaaaaacaaagatgaggacttggttggttccctagaatcacagggaaccaccccaagaagattgactgacttaatcggttccttggccgacctcacttccggtagtggcgacaagggaacccccttcgtttacatccaaggctactttgacaattttactgattaa

SEQ ID NO: 294 - protein, 396 aa, Alloiococcus otitidis
MERAVGTVVRGLRGPIVHKGDDMVETVVQTILQAADAEKFEIKDRDIVTITESVVARAQGNYASLDQIAQDIKDKFQDHTLGLVFPILSRNRFANLLKGIARGAQKIVLLFSYPADEVGNHLISLDQLDKKSVNPWSQVLDEGEFRELFGYQKHPFTGIDYIDYYKSIVQEEGADLDIIFSNDPRTILDYTKHVLTCDIHNRKRTQAQIKAGGANLVYGLEDVLSKPVKGSGHNTLYGLLGSNRSTEESVKLFPEGGQEVVEAIQAQIKEKTGKTIEVMINGDGAFKDPVGQIWELADPIVSPAYTQGLEGTPSEIKLKYLADNNFAHLEGEELKAAVSDYIKNKDEDLVGSLESQGTTPRRLTDLIGSLADLTSGSGDKGTPFVYIQGYFDNFTD

SEQ ID NO: 295 - DNA, 1074 bp, Alloiococcus otitidis
  CDS (40)..(1071)
agtagttttttaggaggaatgagaatggatcaatattttatggaaaaagccatccagctagctcgagctgggcaagggcaaacccttaccaaccccctagtgggtgctgtgattgtctaccagggcactatcgtagcaactggctgccacctgcaatatggtggtccccatgcggaggtcaatgccctgaagaattgccctgaagaaatcttggctaaggccacaatgtacgttaccctggaaccttgttcccaccagggcaagcagcccccctgcagccaggccattatacaaagtggcattaagcaagtcgtcatcggccagctagaccccaacccccttgtggctggccggggccaagccatgctccgggaaaatggggttgaagttgaaagtggggtccttgaagcagagtgcaagcagttaaaccccttctataatttttttcaccaaaacaagagaccctttatcactttaaaactagccagcagtttagatgggaaaattagcttacgggacataagaaccccaattaccggatcggaagtttaccaatatgtccgccgggaaagaaaaaaataccaggctatcttagtcggtagccaaaccgccattacagatgatccttcccttcacactattccaagggggccctaccccccgcttcggattgtccttgaccgccggggtaggttgaaaggctacgaccagcttcaactattccatgataaggaccaggaagtctggattttttcagaagccaatccccccacaagtctgcctgaccattgccggtgggttgtccaagaaaaagtaaccatagagagcctggtagactatttgagccaagaaggggtccagtccctctatgtggagggtggggccaggatccatgacgcctttatcaatgaaggcttgtgggatgcatttatcagctacctagctccaaaaattattgcaggcaatggcttgcctgccacatcaagtgaccgagtaagccaggaacttttagacttgaaggatgtcaaagttcagcaaatcggccaggatattcgcatatctgggaggagataa

SEQ ID NO: 296 - protein, 344 aa, Alloiococcus otitidis
MEKAIQLARAGQGQTLTNPLVGAVIVYQGTIVATGCHLQYGGPHAEVNALKNCPEEILAKATMYVTLEPCSHQGKQPPCSQAIIQSGIKQVVIGQLDPNPLVAGRGQAMLRENGVEVESGVLEAECKQLNPFYNFFHQNKRPFITLKLASSLDGKISLRDIRTPITGSEVYQYVRRERKKYQAILVGSQTAITDDPSLHTIPRGPYPPLRIVLDRRGRLKGYDQLQLFHDKDQEVWIFSEANPPTSLPDHCRWVVQEKVTIESLVDYLSQEGVQSLYVEGGARIHDAFINEGLWDAFISYLAPKIIAGNGLPATSSDRVSQELLDLKDVKVQQIGQDIRISGRR

SEQ ID NO: 297 - DNA, 1074 bp, Alloiococcus otitidis; identical to SEQ ID NO: 295
  CDS (19)..(1071)

SEQ ID NO: 298 - protein, 351 aa, Alloiococcus otitidis
MRMDQYFMEKAIQLARAGQGQTLTNPLVGAVIVYQGTIVATGCHLQYGGPHAEVNALKNCPEEILAKATMYVTLEPCSHQGKQPPCSQAIIQSGIKQVVIGQLDPNPLVAGRGQAMLRENGVEVESGVLEAECKQLNPFYNFFHQNKRPFITLKLASSLDGKISLRDIRTPITGSEVYQYVRRERKKYQAILVGSQTAITDDPSLHTIPRGPYPPLRIVLDRRGRLKGYDQLQLFHDKDQEVWIFSEANPPTSLPDHCRWVVQEKVTIESLVDYLSQEGVQSLYVEGGARIHDAFINEGLWDAFISYLAPKIIAGNGLPATSSDRVSQELLDLKDVKVQQIGQDIRISGRR

SEQ ID NO: 299 - DNA, 651 bp, Alloiococcus otitidis
  CDS (58)..(648)
aggatgtcaaagttcagcaaatcggccaggatattcgcatatctgggaggagataaaatgtttaccggattagttcaggaaaaaggcaagattttagacatcgaaaagagtggccagaccatccgcttaacctgccaggcctcgccaagctcacttgaggactacaaagaaggcgacagtatggcagtaaacggcacctgtctaaccgctacagagattgaccaagcgaaattttcagttgatattatgcctgagacctttaaccggacaaattttgcagacttagagccgggtgacccagtcaatttagagagacccttaggagtgaaggaccggattgaaggccacattgtggcgggccacatcgatactaccgtccggctcctacaaaaggaagaaagagaaaatgccttggttttgacctttcaatatccccaagaccatagaggagaaattatcagccaaggttccattgccatcaatggggtcagtctaacggtcagccaagtcaccgatcagaccttttcagttagcctgatcccccacactttagacttgaccaatcttggaagagtggaaattggtaacaaggtgaatattgaaacagacatgctggctaaatacttaaaagctcagagattgccagtctaa

SEQ ID NO: 300 - protein, 197 aa, Alloiococcus otitidis
MFTGLVQEKGKILDIEKSGQTIRLTCQASPSSLEDYKEGDSMAVNGTCLTATEIDQAKFSVDIMPETFNRTNFADLEPGDPVNLERPLGVKDRIEGHIVAGHIDTTVRLLQKEERENALVLTFQYPQDHRGEIISQGSIAINGVSLTVSQVTDQTFSVSLIPHTLDLTNLGRVEIGNKVNIETDMLAKYLKAQRLPV

SEQ ID NO: 301 - DNA, 651 bp, Alloiococcus otitidis; identical to SEQ ID NO: 299
  CDS (4)..(648)

SEQ ID NO: 302 - protein, 215 aa, Alloiococcus otitidis
MSKFSKSARIFAYLGGDKMFTGLVQEKGKILDIEKSGQTIRLTCQASPSSLEDYKEGDSMAVNGTCLTATEIDQAKFSVDIMPETFNRTNFADLEPGDPVNLERPLGVKDRIEGHIVAGHIDTTVRLLQKEERENALVLTFQYPQDHRGEIISQGSIAINGVSLTVSQVTDQTFSVSLIPHTLDLTNLGRVEIGNKVNIETDMLAKYLKAQRLPV

SEQ ID NO: 303 - DNA, 1200 bp, Alloiococcus otitidis
  CDS (235)..(1197)
aatagaaagaaggtcatatcattgacagacacagttcaagaggctgttcaggccttacaagatggtaagctcattatagtcgctgacgacgacaaccgggaagcagaaggcgatttagtcggactagctagccaagcgagtcctgaaacccttaacttcatggtcacccatgcaagaggcttggtttgtgctcccctatcccccaaaatcgctaaacaattagacttaggtcccatgacccaggacagtagcgatccttatggcaccggctttaccgttagtgttgaccaccaaaacactactaccggtatttcagcctttgaccgggccgaaaccattcggcaactggcttcccctaagtctcaggctttggatttccgccggcccggccacatctttcccttgattgccaaggaagggggcgttttagagcggcgggggcacaccgaagctgctgtcgacctagccaaattagctggagaccgtcaagcagcttatatctgtgagattttaaaagaagatggcagcatggcccggttgccagacttggaacaattagccaagcagtggcaaatccctctcatcaccatcgaggacttgtctatcgccttagcttttgacagtgacctccatgtttccctacccaccaagtacggcgattttgaccttacccttttccaagaccaaaagcaaaaagaccacctcctcctgtccaagggggatatccgccaaagccctgaccccctcttagtccggatccattctgaatgcttgaccggtgatgtctttggatctgagcggtgcgactgcggtcagcagttagaagcagccatgcagaagatccaagaagctggccggggagccatcatctacctcaggcaggaaggtcgggggatcggtttaaaaaataaaatcaaggcctacaagctccaagaaaaaggaatggacacctatgatgccaatgtccacttgggctttaaaccggatgagagagactaccgttttgcctataaaatcctccaaaccttggggatccagtcagtccagcttttaaccaataaccctgaaaaaattgaccagctaaaggacctgggacttgaagtcaccaaacggattcctttagaagtccaagccaccgggagcagtcaggcttacctcaaaaccaaaaaagaaaaattccaccacctattatcattgtaa

SEQ ID NO: 304 - protein, 321 aa, Alloiococcus otitidis
MTQDSSDPYGTGFTVSVDHQNTTTGISAFDRAETIRQLASPKSQALDFRRPGHIFPLIAKEGGVLERRGHTEAAVDLAKLAGDRQAAYICEILKEDGSMARLPDLEQLAKQWQIPLITIEDLSIALAFDSDLHVSLPTKYGDFDLTLFQDQKQKDHLLLSKGDIRQSPDPLLVRIHSECLTGDVFGSERCDCGQQLEAAMQKIQEAGRGAIIYLRQEGRGIGLKNKIKAYKLQEKGMDTYDANVHLGFKPDERDYRFAYKILQTLGIQSVQLLTNNPEKIDQLKDLGLEVTKRIPLEVQATGSSQAYLKTKKEKFHHLLSL

SEQ ID NO: 305 - DNA, 1200 bp, Alloiococcus otitidis; identical to SEQ ID NO: 303
  CDS (160)..(1197)

SEQ ID NO: 306 - protein, 346 aa, Alloiococcus otitidis
MVTHARGLVCAPLSPKIAKQLDLGPMTQDSSDPYGTGFTVSVDHQNTTTGISAFDRAETIRQLASPKSQALDFRRPGHIFPLIAKEGGVLERRGHTEAAVDLAKLAGDRQAAYICEILKEDGSMARLPDLEQLAKQWQIPLITIEDLSIALAFDSDLHVSLPTKYGDFDLTLFQDQKQKDHLLLSKGDIRQSPDPLLVRIHSECLTGDVFGSERCDCGQQLEAAMQKIQEAGRGAIIYLRQEGRGIGLKNKIKAYKLQEKGMDTYDANVHLGFKPDERDYRFAYKILQTLGIQSVQLLTNNPEKIDQLKDLGLEVTKRIPLEVQATGSSQAYLKTKKEKFHHLLSL

SEQ ID NO: 307 - DNA, 1200 bp, Alloiococcus otitidis; identical to SEQ ID NO: 303
  CDS (22)..(1197)

SEQ ID NO: 308 - protein, 392 aa, Alloiococcus otitidis
MTDTVQEAVQALQDGKLIIVADDDNREAEGDLVGLASQASPETLNFMVTHARGLVCAPLSPKIAKQLDLGPMTQDSSDPYGTGFTVSVDHQNTTTGISAFDRAETIRQLASPKSQALDFRRPGHIFPLIAKEGGVLERRGHTEAAVDLAKLAGDRQAAYICEILKEDGSMARLPDLEQLAKQWQIPLITIEDLSIALAFDSDLHVSLPTKYGDFDLTLFQDQKQKDHLLLSKGDIRQSPDPLLVRIHSECLTGDVFGSERCDCGQQLEAAMQKIQEAGRGAIIYLRQEGRGIGLKNKIKAYKLQEKGMDTYDANVHLGFKPDERDYRFAYKILQTLGIQSVQLLTNNPEKIDQLKDLGLEVTKRIPLEVQATGSSQAYLKTKKEKFHHLLSL

SEQ ID NO: 309 - DNA, 483 bp, Alloiococcus otitidis
  CDS (7)..(480)
aggagtatgatcatgacaacatatagaggaaatttcaccctaaagcctaagacaaaaattgccctggtagcaggtcaattcaatgactttatcaccgaacgtttggttgagggggctaagggcaccctcgtccagcacgggattgacccagacctaatcgacacctactgggtacctggttcatttgaaatcccctacctgagccagcagttattaaaacacaaagattatgacggcatcctcaccctgggggccgttatcagaggggccaccagccattatgacctcgtcagcaatggggtggctaaaggggttgctaacctgtctttacaagccgatattcccatcttatttggtgttttaaccaccgacagcattgaccaagccattgagagggctgggaccaaggctggtaacaaggggagcgaagtcgcccaagccttactggaaatgatctctttaactgaccaaatccagccttaa

SEQ ID NO: 310 - protein, 158 aa, Alloiococcus otitidis
MIMTTYRGNFTLKPKTKIALVAGQFNDFITERLVEGAKGTLVQHGIDPDLIDTYWVPGSFEIPYLSQQLLKHKDYDGILTLGAVIRGATSHYDLVSNGVAKGVANLSLQADIPILFGVLTTDSIDQAIERAGTKAGNKGSEVAQALLEMISLTDQIQP

SEQ ID NO: 311 - DNA, 1308 bp, Alloiococcus otitidis
  CDS (46)..(1305)
actttaggtgaaatgacagaaatgtatcgtaagtctccaaacttaatggagcaagttgttgacagaagaaacttggaaacagcagccaaagccgttaaacggaacaaaggcgctgcaggtattgacggtatgaccgtttttgagatagaggagcacattcaagcgtattatcaacccttacggaagaaattacttgatggaacgtataagcctcaaccagttaaacgagtagaaataccaaagccgaatggagaaaaacgaaagttaggtataccttgtgtgcgggatagagttgttcaacaagccatacggcaagtaattgaaccgattatagacccgcacttctatgacaacagtcacggattccgaccagggaaaagcacgcacagtgctctcaagcaatgtgcacagtattataaagaaggctatcgagttgtagttgattgtgacctcaaacaatgctttgacacgctcaatcacgacaaacttatctattatcttgaacagtacatccaagataaaatgatactgaaaattatccgtaagtttttgagagcgggtgtaattgatttgactagcgaatttatcgcaagtgaaacaggggcaccacaaggtggtgttctatcaccgcttttgagtaatgtgtacttacatgaactggataaagagttggttaaccgtggtcaccgatttgtccgatacgcagatgactttgtcatctacgttaaatcaaaacgagccggtgaacgggtaatgaacagcatcacacgctttattgaaaaagacttaaagttaatcgtcaatcaagacaaaagccaggttgggtctcctacccgtttaaagtttttgagctgtctgatgaagcaagtgaatggggattatcgttttatccctaccaaagaagccaagcagaaattcaaacgcagattgagaaagctgaccagtcgtaaacggccaggtacttttaaaaagataatgactgaaattaatcgagtcacccgcggttggattaattactttggtttaggcttcattaaaagctttatcaaagaagttgagcaatggttaaatcaccgtatcagacagctgattcttaaacggtggaaacgtccacgaactattataccaaagttggaacaatatggactggacttagattcagccaaacggattgcgtattcacgcaaaaagtactggcgactgtcatgcacacatgaatttcatcgtgcaataacaacagaaagactcagcaagtggggcttagttccactaagcactatcgctgagtctgcttacgcaagatattga

SEQ ID NO: 312 - protein, 420 aa, Alloiococcus otitidis
MEQVVDRRNLETAAKAVKRNKGAAGIDGMTVFEIEEHIQAYYQPLRKKLLDGTYKPQPVKRVEIPKPNGEKRKLGIPCVRDRVVQQAIRQVIEPIIDPHFYDNSHGFRPGKSTHSALKQCAQYYKEGYRVVVDCDLKQCFDTLNHDKLIYYLEQYIQDKMILKIIRKFLRAGVIDLTSEFIASETGAPQGGVLSPLLSNVYLHELDKELVNRGHRFVRYADDFVIYVKSKRAGERVMNSITRFIEKDLKLIVNQDKSQVGSPTRLKFLSCLMKQVNGDYRFIPTKEAKQKFKRRLRKLTSRKRPGTFKKIMTEINRVTRGWINYFGLGFIKSFIKEVEQWLNHRIRQLILKRWKRPRTIIPKLEQYGLDLDSAKRIAYSRKKYWRLSCTHEFHRAITTERLSKWGLVPLSTIAESAYARY

SEQ ID NO: 313 - DNA, 1308 bp, Alloiococcus otitidis; identical to SEQ ID NO: 311
  CDS (13)..(1305)

SEQ ID NO: 314 - protein, 431 aa, Alloiococcus otitidis
MTEMYRKSPNLMEQVVDRRNLETAAKAVKRNKGAAGIDGMTVFEIEEHIQAYYQPLRKKLLDGTYKPQPVKRVEIPKPNGEKRKLGIPCVRDRVVQQAIRQVIEPIIDPHFYDNSHGFRPGKSTHSALKQCAQYYKEGYRVVVDCDLKQCFDTLNHDKLIYYLEQYIQDKMILKIIRKFLRAGVIDLTSEFIASETGAPQGGVLSPLLSNVYLHELDKELVNRGHRFVRYADDFVIYVKSKRAGERVMNSITRFIEKDLKLIVNQDKSQVGSPTRLKFLSCLMKQVNGDYRFIPTKEAKQKFKRRLRKLTSRKRPGTFKKIMTEINRVTRGWINYFGLGFIKSFIKEVEQWLNHRIRQLILKRWKRPRTIIPKLEQYGLDLDSAKRIAYSRKKYWRLSCTHEFHRAITTERLSKWGLVPLSTIAESAYARY

SEQ ID NO: 315 - DNA, 411 bp, Alloiococcus otitidis
  CDS (121)..(408)
tttaaggagggaattactttggctaaagtacaatatttcggaactggtcgccgtaaaaactctactgcccgggttattttgacacctggatcaggttctattgtcattaacggtagagatatgagcgattacctaaactatgaccaccaccacatcatcgttagacaaccctttgaagcaactgacacagtcggcagctacgacgtgtccgtaaacgttaaaggtgggggctttactggccaagcaggtgctattcgtcacggtattgcccgtgccttgactagcgttgaccctgacttccgtggcccgctgaaagaagcaggactcttgacccgtgattcacgtatgaaagaacgtaaaaaacctgggctcaaaaaagcacgtaaaagcccacaattctcaaaacgttaa

SEQ ID NO: 316 - protein, 96 aa, Alloiococcus otitidis
MSDYLNYDHHHIIVRQPFEATDTVGSYDVSVNVKGGGFTGQAGAIRHGIARALTSVDPDFRGPLKEAGLLTRDSRMKERKKPGLKKARKSPQFSKR

SEQ ID NO: 317 - DNA, 411 bp, Alloiococcus otitidis; identical to SEQ ID NO: 315
  CDS (19)..(408)

SEQ ID NO: 318 - protein, 130 aa, Alloiococcus otitidis
MAKVQYFGTGRRKNSTARVILTPGSGSIVINGRDMSDYLNYDHHHIIVRQPFEATDTVGSYDVSVNVKGGGFTGQAGAIRHGIARALTSVDPDFRGPLKEAGLLTRDSRMKERKKPGLKKARKSPQFSKR

SEQ ID NO: 319 - DNA, 462 bp, Alloiococcus otitidis
  CDS (34)..(459)
agatattggaggaagaacatgcgtacaacctatatggctaatgcaagcgatattgaacggaaatggtacgtccttgatgctactgacgtctctcttggtcgtctttcagcagcagttgctaaaattttacgtggcaaacacaagccaagctacaccccacatgtggacaccggtgacaatgttattatcgttaatgcatcaaaagttaaattaactggtaaaaaagccagcgacaagatctactcacgtcactctggctacccaggtggcctaaaacaaatttcagctggcgaattgcttcgtgacaaacctgaacgtttgttagaactatccattaaaggcatgctaccagccaaccgacttggccgtcagcaactgaaaaaacttcatatttatgctggccaagaccacaaacatgccgctcaacaaccagaagaattagacatcacaaacttgatttaa

SEQ ID NO: 320 - protein, 142 aa, Alloiococcus otitidis
MANASDIERKWYVLDATDVSLGRLSAAVAKILRGKHKPSYTPHVDTGDNVIIVNASKVKLTGKKASDKIYSRHSGYPGGLKQISAGELLRDKPERLLELSIKGMLPANRLGRQQLKKLHIYAGQDHKHAAQQPEELDITNLI

SEQ ID NO: 321 - DNA, 462 bp, Alloiococcus otitidis; identical to SEQ ID NO: 319
  CDS (19)..(459)

SEQ ID NO: 322 - protein, 147 aa, Alloiococcus otitidis
MRTTYMANASDIERKWYVLDATDVSLGRLSAAVAKILRGKHKPSYTPHVDTGDNVIIVNASKVKLTGKKASDKIYSRHSGYPGGLKQISAGELLRDKPERLLELSIKGMLPANRLGRQQLKKLHIYAGQDHKHAAQQPEELDITNLI

SEQ ID NO: 323 - DNA, 828 bp, Alloiococcus otitidis
  CDS (34)..(825)
aagttggttgaatccgaagtaaggaggaagtccatgtctttacgctataaaatggtgatagcctatgatggcacacggtattcaggctaccaaactcaggtcaatgctttgaccgtccaagatgaaattgaaggggccctccaaaaactggccaaaggagaatttgtccgcatccatgctgcctcccgaacggatgctggggtccatgctaggggtcaggtggcccactttgactttccttttgaaatcgaaagcaagggactccagcgtggcttaaacaccctcttgcctggtgacattgccatccagtctctcgaccgggtaggagaggacttccactcccgctttgatgccaaagggaagcactaccgctactggctgtctaataaccctatcatggacccctttaaccgcctctatgcctgccaccatccctacccgcttgacctagaagctgctcaagctgccctgacccacttggtcggacgccatgactttaccagctttgcggctagccaaactgacgtaaaagacaaggttcgcaccctctaccgggctgacttggaagtgcgggaccatgactggatttttaactttgtcggggatggcttcttgtataatatggttcggatcatggtggggactgtggtcgctgcaggtgaaggcaagatcgatccagaccaggtcccagatattatccaagctaaagaccggtcccaggcaggcaagaccatgcccagcaagggcttatgcttgatggaactttactacgggtcagtccccgtcagtggggacaaaaaaatgggaaaatgtcctggtaaagattga

SEQ ID NO: 324 - protein, 264 aa, Alloiococcus otitidis
MSLRYKMVIAYDGTRYSGYQTQVNALTVQDEIEGALQKLAKGEFVRIHAASRTDAGVHARGQVAHFDFPFEIESKGLQRGLNTLLPGDIAIQSLDRVGEDFHSRFDAKGKHYRYWLSNNPIMDPFNRLYACHHPYPLDLEAAQAALTHLVGRHDFTSFAASQTDVKDKVRTLYRADLEVRDHDWIFNFVGDGFLYNMVRIMVGTVVAAGEGKIDPDQVPDIIQAKDRSQAGKTMPSKGLCLMELYYGSVPVSGDKKMGKCPGKD

SEQ ID NO: 325 - DNA, 828 bp, Alloiococcus otitidis; identical to SEQ ID NO: 323
  CDS (4)..(825)

SEQ ID NO: 326 - protein, 274 aa, Alloiococcus otitidis
MVESEVRRKSMSLRYKMVIAYDGTRYSGYQTQVNALTVQDEIEGALQKLAKGEFVRIHAASRTDAGVHARGQVAHFDFPFEIESKGLQRGLNTLLPGDIAIQSLDRVGEDFHSRFDAKGKHYRYWLSNNPIMDPFNRLYACHHPYPLDLEAAQAALTHLVGRHDFTSFAASQTDVKDKVRTLYRADLEVRDHDWIFNFVGDGFLYNMVRIMVGTVVAAGEGKIDPDQVPDIIQAKDRSQAGKTMPSKGLCLMELYYGSVPVSGDKKMGKCPGKD

SEQ ID NO: 327 - DNA, 855 bp, Alloiococcus otitidis
  CDS (376)..(852)
ccacagaagaattgggtcaagcaattgctagtaaactgcgagaggagagtggttcatatgatggataagttaatctttgggcgctatattccaggcgactccatcatccaccgactcgatcccagaagtaagcttctgtccgccatggcctttatcattattattttctttgccaataattggcagacctacctgcttttggcggcctttgtttttttgggactgaagctgtctggtatcaagttttccttctttcttaatggtgttaaacccttgatatggctgattttgtttactgtcgtcctccaagtcctcttcacgtcgggtaacaccattctgtttagctttggtcctattgtggtttctgaggaaggcttggttaacggggtgttcattgccctgcgctttgtcttgattatctttatgtctacccttttgactttgaccactatgccactcagtttgactgatgcgattgaatttattcttcgacccttcaagtatgtgaaggtgccggtccatgaaattgccttgatgttatccattgccctccgctttgtcccaactttgatggatgaaaccgagaaaattatgaatgcccagcgtgcccgggggatagagtttggggaaggcaatttgtatgagcaaatgaaagccattgtccccatgctgattcccctctttgtttcgtcatttaaccgggcagatgacctggctactgccatggaagcccgtggttaccggggtggggaaggtcggaccaagttccggcagttggaatggtacagacgagacagcttcctcctcttggtcatgttggctttggccattttacttttcctactgcgaacataa

SEQ ID NO: 328 - protein, 159 aa, Alloiococcus otitidis
MVNGVFIALRFVLIIFMSTLLTLTTMPLSLTDAIEFILRPFKYVKVPVHEIALMLSIALRFVPTLMDETEKIMNAQRARGIEFGEGNLYEQMKAIVPMLIPLFVSSFNRADDLATAMEARGYRGGEGRTKFRQLEWYRRDSFLLLVMLALAILLFLLRT

SEQ ID NO: 329 - DNA, 855 bp, Alloiococcus otitidis; identical to SEQ ID NO: 327
  CDS (217)..(852)

SEQ ID NO: 330 - protein, 212 aa, Alloiococcus otitidis
MGLKLSGIKFSFFLNGVKPLIWLILFTVVLQVLFTSGNTILFSFGPIVVSEEGLVNGVFIALRFVLIIFMSTLLTLTTMPLSLTDAIEFILRPFKYVKVPVHEIALMLSIALRFVPTLMDETEKIMNAQRARGIEFGEGNLYEQMKAIVPMLIPLFVSSFNRADDLATAMEARGYRGGEGRTKFRQLEWYRRDSFLLLVMLALAILLFLLRT

SEQ ID NO: 331 - DNA, 855 bp, Alloiococcus otitidis; identical to SEQ ID NO: 327
  CDS (58)..(852)

SEQ ID NO: 332 - protein, 265 aa, Alloiococcus otitidis
MMDKLIFGRYIPGDSIIHRLDPRSKLLSAMAFIIIIFFANNWQTYLLLAAFVFLGLKLSGIKFSFFLNGVKPLIWLILFTVVLQVLFTSGNTILFSFGPIVVSEEGLVNGVFIALRFVLIIFMSTLLTLTTMPLSLTDAIEFILRPFKYVKVPVHEIALMLSIALRFVPTLMDETEKIMNAQRARGIEFGEGNLYEQMKAIVPMLIPLFVSSFNRADDLATAMEARGYRGGEGRTKFRQLEWYRRDSFLLLVMLALAILLFLLRT

SEQ ID NO: 333 - DNA, 855 bp, Alloiococcus otitidis; identical to SEQ ID NO: 327
  CDS (49)..(852)

SEQ ID NO: 334 - protein, 268 aa, Alloiococcus otitidis
MVHMMDKLIFGRYIPGDSIIHRLDPRSKLLSAMAFIIIIFFANNWQTYLLLAAFVFLGLKLSGIKFSFFLNGVKPLIWLILFTVVLQVLFTSGNTILFSFGPIVVSEEGLVNGVFIALRFVLIIFMSTLLTLTTMPLSLTDAIEFILRPFKYVKVPVHEIALMLSIALRFVPTLMDETEKIMNAQRARGIEFGEGNLYEQMKAIVPMLIPLFVSSFNRADDLATAMEARGYRGGEGRTKFRQLEWYRRDSFLLLVMLALAILLFLLRT

SEQ ID NO: 335 - DNA, 855 bp, Alloiococcus otitidis; identical to SEQ ID NO: 327
  CDS (25)..(852)

SEQ ID NO: 336 - protein, 276 aa, Alloiococcus otitidis
MLVNCERRVVHMMDKLIFGRYIPGDSIIHRLDPRSKLLSAMAFIIIIFFANNWQTYLLLAAFVFLGLKLSGIKFSFFLNGVKPLIWLILFTVVLQVLFTSGNTILFSFGPIVVSEEGLVNGVFIALRFVLIIFMSTLLTLTTMPLSLTDAIEFILRPFKYVKVPVHEIALMLSIALRFVPTLMDETEKIMNAQRARGIEFGEGNLYEQMKAIVPMLIPLFVSSFNRADDLATAMEARGYRGGEGRTKFRQLEWYRRDSFLLLVMLALAILLFLLRT

SEQ ID NO: 337 - DNA, 549 bp, Alloiococcus otitidis
  CDS (13)..(546)
ccacgggcttccatggcagtagccaggtcatctgcccggttaaatgacgaaacaaagaggggaatcagcatggggacaatggctttcatttgctcatacaaattgccttccccaaactctatcccccgggcacgctgggcattcataattttctcggtttcatccatcaaagttgggacaaagcggagggcaatggataacatcaaggcaatttcatggaccggcaccttcacatacttgaagggtcgaagaataaattcaatcgcatcagtcaaactgagtggcatagtggtcaaagtcaaaagggtagacataaagataatcaagacaaagcgcagggcaatgaacaccccgttaaccaagccttcctcagaaaccacaataggaccaaagctaaacagaatggtgttacccgacgtgaagaggacttggaggacgacagtaaacaaaatcagccatatcaagggtttaacaccattaagaaagaaggaaaacttgataccagacagcttcagtcccaaaaaaacaaaggccgccaaaagcaggtag

SEQ ID NO: 338 - protein, 178 aa, Alloiococcus otitidis
MAVARSSARLNDETKRGISMGTMAFICSYKLPSPNSIPRARWAFIIFSVSSIKVGTKRRAMDNIKAISWTGTFTYLKGRRINSIASVKLSGIVVKVKRVDIKIIKTKRRAMNTPLTKPSSETTIGPKLNRMVLPDVKRTWRTTVNKISHIKGLTPLRKKENLIPDSFSPKKTKAAKSR

SEQ ID NO: 339 - DNA, 468 bp, Alloiococcus otitidis
  CDS (16)..(465)
catcaaggcaatttcatggaccggcaccttcacatacttgaagggtcgaagaataaattcaatcgcatcagtcaaactgagtggcatagtggtcaaagtcaaaagggtagacataaagataatcaagacaaagcgcagggcaatgaacaccccgttaaccaagccttcctcagaaaccacaataggaccaaagctaaacagaatggtgttacccgacgtgaagaggacttggaggacgacagtaaacaaaatcagccatatcaagggtttaacaccattaagaaagaaggaaaacttgataccagacagcttcagtcccaaaaaaacaaaggccgccaaaagcaggtaggtctgccaattattggcaaagaaaataataatgataaaggccatggcggacagaagcttacttctgggatcgagtcggtggatgatggagtcgcctggaatatagcgcccaaagattaa

SEQ ID NO: 340 - protein, 150 aa, Alloiococcus otitidis
MDRHLHILEGSKNKFNRISQTEWHSGQSQKGRHKDNQDKAQGNEHPVNQAFLRNHNRTKAKQNGVTRREEDLEDDSKQNQPYQGFNTIKKEGKLDTRQLQSQKNKGRQKQVGLPIIGKENNNDKGHGGQKLTSGIESVDDGVAWNIAPKD

SEQ ID NO: 341 - DNA, 987 bp, Alloiococcus otitidis
  CDS (109)..(984)
cttgggcttggacctgcccttttccgaacaagtcaaattagccctaaaaaaccagggcatccccgtgccagaagactacctatcagaagaagggatggtggaatggctatggacatccgtttccaagaagtaggctttacataccaaaaaggaaccccctttgaaagtcgtgccctttatgacatcaacctctccattaaagacggttcttacaccgccttggttggccatacggggagcgggaagtccactgttttacaacacttaaatgccctgaaaattcccactgaaggtcaagtccatattggggaccgggtcatttcccaagaaagtgaaaacaagaaattaaaagccttgcgcaaaaaagtgggcattgtttttcagtttcctgaagcccagctttttgaagaaacggtcggccaagatattgcctttggacctaaaaactttggcaagagccaagaggaagccgatgacattgtccaagacatgcttcttttggttggcttagatgagtcctttagagaccggtctccctttgacctatccgggggccagatgcggcgggttgccatagctggtgttttggccttgcaaccggaagtcttggtcctggacgaacctacagctggtttagaccccaagggccggcaagaaatcatggacatgttttacaaactccataaggaagagggcttgaccattgtcctggtaacccaccagatggaggatgtggcagactatgcggaccatatgattgttctagatcatggaacggtcaagcgtgaaggtcagccccgggagatttttaaggaagcggactggttgaatagcctgaaacttgggcttccaaagtctgttcgatttgccaataggctccaaaaagagtttggatgggactttgacttcctccccttgaccacagaagaattgggtcaagcaattgctagtaaactgcgagaggagagtggttcatatgatggataa

SEQ ID NO: 342 - protein, 292 aa, Alloiococcus otitidis
MDIRFQEVGFTYQKGTPFESRALYDINLSIKDGSYTALVGHTGSGKSTVLQHLNALKIPTEGQVHIGDRVISQESENKKLKALRKKVGIVFQFPEAQLFEETVGQDIAFGPKNFGKSQEEADDIVQDMLLLVGLDESFRDRSPFDLSGGQMRRVAIAGVLALQPEVLVLDEPTAGLDPKGRQEIMDMFYKLHKEEGLTIVLVTHQMEDVADYADHMIVLDHGTVKREGQPREIFKEADWLNSLKLGLPKSVRFANRLQKEFGWDFDFLPLTTEELGQAIASKLREESGSYDG

SEQ ID NO: 343 - DNA, 987 bp, Alloiococcus otitidis; identical to SEQ ID NO: 341
  CDS (103)..(984)

SEQ ID NO: 344 - protein, 294 aa, Alloiococcus otitidis
MAMDIRFQEVGFTYQKGTPFESRALYDINLSIKDGSYTALVGHTGSGKSTVLQHLNALKIPTEGQVHIGDRVISQESENKKLKALRKKVGIVFQFPEAQLFEETVGQDIAFGPKNFGKSQEEADDIVQDMLLLVGLDESFRDRSPFDLSGGQMRRVAIAGVLALQPEVLVLDEPTAGLDPKGRQEIMDMFYKLHKEEGLTIVLVTHQMEDVADYADHMIVLDHGTVKREGQPREIFKEADWLNSLKLGLPKSVRFANRLQKEFGWDFDFLPLTTEELGQAIASKLREESGSYDG

SEQ ID NO: 345 - DNA, 855 bp, Alloiococcus otitidis
  CDS (16)..(852)
atatggagcggttggatggctgaaataataagcgtagataatattagctttaaatataatagtgaagatgaccacaaggccttgaatgaggtctcttttaccattgacaagggggattgggtttcggttattgggtctaatggttcaggcaagtcgaccctggctaagaccatcaatggcctcattgccccaaactctggccgagtccaggttggagattatgaactcaatgaagacaatgtgtggtccatccgtcagatggtgggaatggtcttccaaaacccagacaaccaatttgttggctcaaccgtccaagatgatgtcgcctttggtttggaaaacttgggtgtgccacgagaagatatggtggttcggatccgggctgccttagaccgggttggaatgttggaatatgctgaccgggagcctgcccgcctgtcaggggggcaaaagcagagggtcgccattgctggaattatagccctccagcctgagattatgattttagatgaggcaaccagtatgctggacccatctggccggttagatgttttgcggacggtcaaagaagtcaaggaccaggaaaacttaaccgttatttccatcacccatgatattgatgaagcaacggaaagcgaccaaatcattgtcatgaaagacggcaagatcgaccggattggcccgccccaagagatttttgacctcggacaagacttgattgacttgggcttggacctgcccttttccgaacaagtcaaattagccctaaaaaaccagggcatccccgtgccagaagactacctatcagaagaagggatggtggaatggctatggacatccgtttccaagaagtag

SEQ ID NO: 346 - protein, 279 aa, Alloiococcus otitidis
MAEIISVDNISFKYNSEDDHKALNEVSFTIDKGDWVSVIGSNGSGKSTLAKTINGLIAPNSGRVQVGDYELNEDNVWSIRQMVGMVFQNPDNQFVGSTVQDDVAFGLENLGVPREDMVVRIRAALDRVGMLEYADREPARLSGGQKQRVAIAGIIALQPEIMILDEATSMLDPSGRLDVLRTVKEVKDQENLTVISITHDIDEATESDQIIVMKDGKIDRIGPPQEIFDLGQDLIDLGLDLPFSEQVKLALKNQGIPVPEDYLSEEGMVEWLWTSVSKK

SEQ ID NO: 347 - DNA, 543 bp, Alloiococcus otitidis
  CDS (16)..(540)
tcttctggcacggggatgccctggttttttagggctaatttgacttgttcggaaaagggcaggtccaagcccaagtcaatcaagtcttgtccgaggtcaaaaatctcttggggcgggccaatccggtcgatcttgccgtctttcatgacaatgatttggtcgctttccgttgcttcatcaatatcatgggtgatggaaataacggttaagttttcctggtccttgacttctttgaccgtccgcaaaacatctaaccggccagatgggtccagcatactggttgcctcatctaaaatcataatctcaggctggagggctataattccagcaatggcgaccctctgcttttgcccccctgacaggcgggcaggctcccggtcagcatattccaacattccaacccggtctaaggcagcccggatccgaaccaccatatcttctcgtggcacacccaagttttccaaaccaaaggcgacatcatcttggacggttgagccaacaaattggttgtctgggttttggaagaccattcccaccatctga

SEQ ID NO: 348 - protein, 175 aa, Alloiococcus otitidis
MPWFFRANLTCSEKGRSKPKSIKSCPRSKISWGGPIRSILPSFMTMIWSLSVASSISWVMEITVKFSWSLTSLTVRKTSNRPDGSSILVASSKIIISGWRAIIPAMATLCFCPPDRRAGSRSAYSNIPTRSKAARIRTTISSRGTPKFSKPKATSSWTVEPTNWLSGFWKTIPTI

SEQ ID NO: 349 - DNA, 291 bp, Alloiococcus otitidis
  CDS (34)..(288)
tctccaacctggactcggccagagtttggggcaatgaggccattgatggtcttagccagggtcgacttgcctgaaccattagacccaataaccgaaacccaatcccccttgtcaatggtaaaagagacctcattcaaggccttgtggtcatcttcactattatatttaaagctaatattatctacgcttattatttcagccatccaaccgctccatatttacatatcattaacatttcaccttaacgctattagactaacaaaaacaaaagctttttacaatttaaattag

SEQ ID NO: 350 - protein, 85 aa, Alloiococcus otitidis
MRPLMVLARVDLPEPLDPITETQSPLSMVKETSFKALWSSSLLYLKLILSTLIISAIQPLHIYISLTFHLNAIRLTKTKAFYNLN

SEQ ID NO: 351 - DNA, 462 bp, Alloiococcus otitidis
  CDS (61)..(459)
aggaggaatagtaaaatgggatatcgtaaactcggacgtactagttcacaacgaaaagccatgcttcgcgatttagtatcagacttagttattaatgaacgcatcattaccacaaaaactcgtgccaaagaagcccaacgtttagcagacaaaatggtgaccttaggcaaacgtggtgacttgcatgctcgtcgccaagctgcagctttcttgcgcaatgaattggcaactgttggtgaaacagaagaagaaattattgttcaatcaacgctacaaaagttatttgacgacattgctccccgttttgaagaccgtaatggtggctacactcgtgtcttgaacactgaacctcgtcgcggtgacaatgcgccaatggccgtcttggaattcgttgtcaaaggcgacactgattctattgacgaagatgacgatgttgaagaagttgtagcagaagaagaataa

SEQ ID NO: 352 - protein, 133 aa, Alloiococcus otitidis
MLRDLVSDLVINERIITTKTRAKEAQRLADKMVTLGKRGDLHARRQAAAFLRNELATVGETEEEIIVQSTLQKLFDDIAPRFEDRNGGYTRVLNTEPRRGDNAPMAVLEFVVKGDTDSIDEDDDVEEVVAEEE

SEQ ID NO: 353 - DNA, 462 bp, Alloiococcus otitidis; identical to SEQ ID NO: 351
  CDS (16)..(459)

SEQ ID NO: 354 - protein, 148 aa, Alloiococcus otitidis
MGYRKLGRTSSQRKAMLRDLVSDLVINERIITTKTRAKEAQRLADKMVTLGKRGDLHARRQAAAFLRNELATVGETEEEIIVQSTLQKLFDDIAPRFEDRNGGYTRVLNTEPRRGDNAPMAVLEFVVKGDTDSIDEDDDVEEVVAEEE

SEQ ID NO: 355 - DNA, 942 bp, Alloiococcus otitidis
  CDS (1)..(939)
atgatcgaaattgaaaagccagtaattgaaacagtagagatcagtgaagatggcaaattcggtaagtttgttgttgaaccattggaacgtggttatgggactaccttagggaattccttacgccgcatcttattatcatcactaccgggtgctgcggtcaccaatattcaaattgatggtgttttgcatgagtttacagctattgatggtgtggttgaagatgtgacttccatcatcttaaacctgaaaaaactggctttaaaacttcatactgaagaaacaaaaacaattgaattggatattgaaggccctgctgaagtgacagcagctgatattattactgatagtgatgttgagattatgaatccagacctatacttgtgtactgtttctgaaggtggtcatttacacatccggatggaagcagaaactggtagaggttatgtgaatgcagagcacaacaagcatgatgatatgccaatcggtgttttgccaattgattcaatttataccccaattagccgtgtcaactatactgttgaagacacccgcgttggtgaacgcgagcaatatgataagttaaccctggatatttggacagatggatccatctccccagaggatggcttgagtctagcggctaagatcatgaatgaacacttgaacatcttcatcaacttaactgagcaagcacgtgaagcggacattatggttgaaaaagaagaagaccagaaagaaaaaatgcttgagatgaccatcgaagagcttgatttatctgttcggtcttacaactgtttgaaacgtgctggcatcaatactgtccaagaactaacggacaaaactgaaccggaaatgatgaaagttcgcaatctcggacgtaagtcattagaagaagttaaaaacaagcttgatgacttagacctaagcttgaaagaagaatag

SEQ ID NO: 356 - protein, 313 aa, Alloiococcus otitidis
MIEIEKPVIETVEISEDGKFGKFVVEPLERGYGTTLGNSLRRILLSSLPGAAVTNIQIDGVLHEFTAIDGVVEDVTSIILNLKKLALKLHTEETKTIELDIEGPAEVTAADIITDSDVEIMNPDLYLCTVSEGGHLHIRMEAETGRGYVNAEHNKHDDMPIGVLPIDSIYTPISRVNYTVEDTRVGEREQYDKLTLDIWTDGSISPEDGLSLAAKIMNEHLNIFINLTEQAREADIMVEKEEDQKEKMLEMTIEELDLSVRSYNCLKRAGINTVQELTDKTEPEMMKVRNLGRKSLEEVKNKLDDLDLSLKEE

SEQ ID NO: 357 - DNA, 288 bp, Alloiococcus otitidis
  CDS (43)..(285)
acaataatttcttcttctgtttcaccaacagttgccaattcattgcgcaagaaagctgcagcttggcgacgagcatgcaagtcaccacgtttgcctaaggtcaccattttgtctgctaaacgttgggcttctttggcacgagtttttgtggtaatgatgcgttcattaataactaagtctgatactaaatcgcgaagcatggcttttcgttgtgaactagtacgtccgagtttacgatatcccattttactattcctcctttacctactattcttctttcaagcttag

SEQ ID NO: 358 - protein, 81 aa, Alloiococcus otitidis
MRKKAAAWRRACKSPRLPKVTILSAKRWASLARVFVVMMRSLITKSDTKSRSMAFRCELVRPSLRYPILLFLLYLLFFFQA

SEQ ID NO: 359 - DNA, 255 bp, Alloiococcus otitidis
  CDS (28)..(252)
gaccgaacagataaatcaagctcttcgatggtcatctcaagcattttttctttctggtcttcttctttttcaaccataatgtccgcttcacgtgcttgctcagttaagttgatgaagatgttcaagtgttcattcatgatcttagccgctagactcaagccatcctctggggagatggatccatctgtccaaatatccagggttaacttatcatattgctcgcgttcaccaacgcgggtgtcttcaacagtatag

SEQ ID NO: 360 - protein, 75 aa, Alloiococcus otitidis
MVISSIFSFWSSSFSTIMSASRACSVKLMKMFKCSFMILAARLKPSSGEMDPSVQISRVNLSYCSRSPTRVSSTV

SEQ ID NO: 361 - DNA, 414 bp, Alloiococcus otitidis
  CDS (13)..(411)
gaggtatatcgtatggcaaaagctaaaagaagaagccaaggttcacgtaaacgtcgtgccaaaaagaatattgaacatggtgtagcccacattcgttctacttttaacaatacaatcgttatgattacagatgttcaagggaatgccatttcttggtcatctgctggacaactaggctttaaagggtctcgtaaatcaactcctttcgctgctcaaatggtggctgaagctgcagctaaaggtagcatggaaaatggtatgaaatctgttgaagtatcagttaaaggtcctggttcaggccgtgaatctgcaattcgttcacttcaagctactggtttagatattacagctatcagagacgtgacaccagtcccacacaacggatgccgtcctccaaaacgtcgtcgcgtttaa

SEQ ID NO: 362 - protein, 133 aa, Alloiococcus otitidis
MAKAKRRSQGSRKRRAKKNIEHGVAHIRSTFNNTIVMITDVQGNAISWSSAGQLGFKGSRKSTPFAAQMVAEAAAKGSMENGMKSVEVSVKGPGSGRESAIRSLQATGLDITAIRDVTPVPHNGCRPPKRRRV

SEQ ID NO: 363 - DNA, 369 bp, Alloiococcus otitidis
  CDS (4)..(366)
attatggcacgtattgtcggtgttgatattccccgtgataaacacattgttatttcattgacttacatttacggtattggcaaatcaactgctcaaaaagttttagcggatgctggcgttccagaagaaatccgtgtccgtgacttgaccaacgaccaattggatgccatccgtcgtgaggttgacaagctaaaagttgaaggtgacttgcgccgtgaaaaaagtcaaaatatcaaacgtttgactgaaattggttcctaccgtggtatccgccaccgtcgtaacctacccgttcgtggtcaaagaaccaaaaacaatgcccgtacccgtaaaggcccagctgttgcaattgctggtaagaaaaaataa

SEQ ID NO: 364 - protein, 121 aa, Alloiococcus otitidis
MARIVGVDIPRDKHIVISLTYIYGIGKSTAQKVLADAGVPEEIRVRDLTNDQLDAIRREVDKLKVEGDLRREKSQNIKRLTEIGSYRGIRHRRNLPVRGQRTKNNARTRKGPAVAIAGKKK

SEQ ID NO: 365 - DNA, 690 bp, Alloiococcus otitidis
  CDS (25)..(687)
ccttatttcttgcaggacacattaatggaggactttatgaatttaatcttattaggcttgccaggtgccggcaagggaacacaagcagcaagaatcacgaagaaatacgacctgccccacatttcaaccggggacatgttccgggcagccatgaaaaatgaaacagaacttggcaaggaagctaagaaatacatggatgctggcgacttggtacctgaccaggtcaccaacggaattgtggcagaacgtttagatgaggatgatgcccagactggcttcttgctagacggttaccctcgtacaatcaaccaggctaaagccttggaagacatgctggaagacaaaggtagatcgttggacacagtcttgtatatccaagtggataaagaaatcctcctggaaagactgaccggacgctttatatgctctaattgcggggcaacctaccacaaggttaacaagcaacctgaaaaagagggcgtttgtgacgtttgtggctctactgatttttaccagcgtgatgacgacaaaccagagacagttaaacgcagaatccaggttaacgaagaccaaactaatgacctcgttgacttttacaaggaccgaggtattgtggcaagggttgacggtcaaggagacccgaatgatgtctttgaggatgtcaaggaaatcttggatcaaaacttgtag

SEQ ID NO: 366 - protein, 221 aa, Alloiococcus otitidis
MEDFMNLILLGLPGAGKGTQAARITKKYDLPHISTGDMFRAAMKNETELGKEAKKYMDAGDLVPDQVTNGIVAERLDEDDAQTGFLLDGYPRTINQAKALEDMLEDKGRSLDTVLYIQVDKEILLERLTGRFICSNCGATYHKVNKQPEKEGVCDVCGSTDFYQRDDDKPETVKRRIQVNEDQTNDLVDFYKDRGIVARVDGQGDPNDVFEDVKEILDQNL

SEQ ID NO: 367 - DNA, 690 bp, Alloiococcus otitidis; identical to SEQ ID NO: 365
  CDS (10)..(687)

SEQ ID NO: 368 - protein, 226 aa, Alloiococcus otitidis
MQDTLMEDFMNLILLGLPGAGKGTQAARITKKYDLPHISTGDMFRAAMKNETELGKEAKKYMDAGDLVPDQVTNGIVAERLDEDDAQTGFLLDGYPRTINQAKALEDMLEDKGRSLDTVLYIQVDKEILLERLTGRFICSNCGATYHKVNKQPEKEGVCDVCGSTDFYQRDDDKPETVKRRIQVNEDQTNDLVDFYKDRGIVARVDGQGDPNDVFEDVKEILDQNL

SEQ ID NO: 369 - DNA, 288 bp, Alloiococcus otitidis
  CDS (64)..(285)
ccgtctagcaagaagccagtctgggcatcatcctcatctaaacgttctgccacaattccgttggtgacctggtcaggtaccaagtcgccagcatccatgtatttcttagcttccttgccaagttctgtttcatttttcatggctgcccggaacatgtccccggttgaaatgtggggcaggtcgtatttcttcgtgattcttgctgcttgtgttcccttgccggcacctggcaagcctaataagattaaattcataaagtcctccattaatgtgtcctgcaagaaataa

SEQ ID NO: 370 - protein, 74 aa, Alloiococcus otitidis
MTWSGTKSPASMYFLASLPSSVSFFMAARNMSPVEMWGRSYFFVILAACVPLPAPGKPNKIKFIKSSINVSCKK

SEQ ID NO: 371 - DNA, 288 bp, Alloiococcus otitidis; identical to SEQ ID NO: 369
  CDS (61)..(285)

SEQ ID NO: 372 - protein, 75 aa, Alloiococcus otitidis
MVTWSGTKSPASMYFLASLPSSVSFFMAARNMSPVEMWGRSYFFVILAACVPLPAPGKPNKIKFIKSSINVSCKK

SEQ ID NO: 373 - DNA, 1320 bp, Alloiococcus otitidis
  CDS (1093)..(1317)
tctaagggaatgttcaaaatattaaaaggggcattcaccgagaaggaagttcgtggccgagtttttttcaccttggccttgctcttcgtctttcgaatcgggacccacattacggttcctggtgttgatgcctcagcattaaatgaattatcagaaactggactcttcaccctccttgacacatttggtgggggtgccttatccagttattccgtttttgctctaggtgtttcgccttatattactgcatccattattgtccaattactacagatggatgttatacccaagttcaaggaatggtcagagcaaggtgaagttggccgtcgtaagctgaacaatgtcacccggtatgggacaatcgctttaggtttcttacaaggcttagggatctcgattggttttaatgccttggccgactttggtctcgtcagaaatccaaatgccgcaacgtatattaccatcgctattattttgactgctggaaccatgctggtcatgtggctgggtgaaatgatatccgtccacggggtcggcaatgggacctccttgatcatctttgctggtattgttgcgactatcccacaggacttgatcaacttttaccgggtacaggtcggcaacgccggggacgaactcatccaatcagtactcgtctttgccctggtcatgcttgctttaattgcccttgtcatttttgtcacctggatggaaaatgccaaacggaatattccggtgcggtattctaaacgcgcttcatcagctggagatgcgactttaccattaaaagttaactcagctggtgttatcccggttattttcgccagttcctttatcatgacaccgcaaattttcttaaacttgtttgctcaaggtagtcaggattcgacttggttccaggtagcgactagtattttcagcttggaagaaccagttggggctatcttctataccattttgattgtagccttcacttacttttatgcctttatccagattaatccggagaaagttgctgaaaacttgcaaaaacaaaatgcctatattcctagtgttagaccaggacgggcaacagaagactacatttcctacatgcttattcgcttaagtacggtaggagcgctttacttgggacttatctcagtcctaccgattattgcttccaatttctggaacatgccttcttccattaccctaggcggtacaagcttactcattgttgtcggtgtcggtttagataccatgcgccagcttgaaggcttgttgagcaagaacaactaccaaggatttattcaatcctaccaaaaaagtgaggaataa

SEQ ID NO: 374 - protein, 75 aa, Alloiococcus otitidis
MLIRLSTVGALYLGLISVLPIIASNFWNMPSSITLGGTSLLIVVGVGLDTMRQLEGLLSKNNYQGFIQSYQKSEE

SEQ ID NO: 375 - DNA, 1320 bp, Alloiococcus otitidis; identical to SEQ ID NO: 373
  CDS (10)..(1317)

SEQ ID NO: 376 - protein, 436 aa, Alloiococcus otitidis
MFKILKGAFTEKEVRGRVFFTLALLFVFRIGTHITVPGVDASALNELSETGLFTLLDTFGGGALSSYSVFALGVSPYITASIIVQLLQMDVIPKFKEWSEQGEVGRRKLNNVTRYGTIALGFLQGLGISIGFNALADFGLVRNPNAATYITIAIILTAGTMLVMWLGEMISVHGVGNGTSLIIFAGIVATIPQDLINFYRVQVGNAGDELIQSVLVFALVMLALIALVIFVTWMENAKRNIPVRYSKRASSAGDATLPLKVNSAGVIPVIFASSFIMTPQIFLNLFAQGSQDSTWFQVATSIFSLEEPVGAIFYTILIVAFTYFYAFIQINPEKVAENLQKQNAYIPSVRPGRATEDYISYMLIRLSTVGALYLGLISVLPIIASNFWNMPSSITLGGTSLLIVVGVGLDTMRQLEGLLSKNNYQGFIQSYQKSEE

SEQ ID NO: 377 - DNA, 366 bp, Alloiococcus otitidis
  CDS (46)..(363)
aagttgatcaagtcctgtgggatagtcgcaacaataccagcaaagatgatcaaggaggtcccattgccgaccccgtggacggatatcatttcacccagccacatgaccagcatggttccagcagtcaaaataatagcgatggtaatatacgttgcggcatttggatttctgacgagaccaaagtcggccaaggcattaaaaccaatcgagatccctaagccttgtaagaaacctaaagcgattgtcccataccgggtgacattgttcagcttacgacggccaacttcaccttgctctgaccattccttgaacttgggtataacatccatctgtagtaattggacaataatggatgcagtaatataa

SEQ ID NO: 378 - protein, 106 aa, Alloiococcus otitidis
MIKEVPLPTPWTDIISPSHMTSMVPAVKIIAMVIYVAAFGFLTRPKSAKALKPIEIPKPCKKPKAIVPYRVTLFSLRRPTSPCSDHSLNLGITSICSNWTIMDAVI

SEQ ID NO: 379 - DNA, 453 bp, Alloiococcus otitidis
  CDS (16)..(450)
aggaggtgccaggttatgaaacttcacgaattaaaagctccccaagctcggaaagcccgtaaacgggtcggtcgaggctcatctagtggacaaggtaatacagctggccgaggtgaacacggccaaaaatcaagatctggtggaaatgttcgtctaggctttgaaggtggtcaaactccacttttccaaaccctgcctaaacgaggtttcaccaatgttaaccgtaaagagtatgcgattattaacttaaaaactttaaacgaattagatgaaggcactgaagttacaccagaacttctgaaagacaaaggaattataaaaaatcaaaaatccggtattaaagttttagctaaaggtgaattagaccgcaaattaactgtgaaggcgcacaaattctcagttgcagctaaagaagcaattgaaaacgccggaggatcagttgaggtgatctaa

SEQ ID NO: 380 - protein, 145 aa, Alloiococcus otitidis
MKLHELKAPQARKARKRVGRGSSSGQGNTAGRGEHGQKSRSGGNVRLGFEGGQTPLFQTLPKRGFTNVNRKEYAIINLKTLNELDEGTEVTPELLKDKGIIKNQKSGIKVLAKGELDRKLTVKAHKFSVAAKEAIENAGGSVEVI

SEQ ID NO: 381 - DNA, 192 bp, Alloiococcus otitidis
  CDS (1)..(189)
gtgggcacattggcaaacttggaaataacccttaagcgaagtttgattggtcgtccacaaaaccaacacaagattatcaaggcattgggacttggcaaggttaattctagtgtcatcagacctgataacgaagcggttcgtggtgcaatcaaacacgtcgatcatttagtagaagttaaggaagtcaactaa

SEQ ID NO: 382 - protein, 63 aa, Alloiococcus otitidis
MGTLANLEITLKRSLIGRPQNQHKIIKALGLGKVNSSVIRPDNEAVRGAIKHVDHLVEVKEVN

SEQ ID NO: 383 - DNA, 507 bp, Alloiococcus otitidis
  CDS (4)..(504)
actatggtatcaaacattgatccttcaacattagacctagaagatcgtttggttgaaatcaaccgagtaacgaaagttgtaaaaggtggacgtaacttacgatttgcggcagttgtcgttgttggcgatggggatggccatgtcggcttaggaactggtaaagctcttgaagtgccagaagctatccgaaaggctgttgaagatgggaaacaaaaccttatctacctccctcgcgttggtacaaccattccacacgaagtgattggtgagcacgctggtggtcgtatcttactcaaacctgctgttgctggttctggtgtttcagccggaggaccagtccgtgccgtcttagaacttgctggtgtggcggatgcaactagtaaatcaattgggtctaacacagcaattaacatgattcgtgcgaccttggatgccatttcgcaactaaaaactgctgaagaagtagctaaattgcgtggcgtctcagttgaagacttacaaggataa

SEQ ID NO: 384 - protein, 167 aa, Alloiococcus otitidis
MVSNIDPSTLDLEDRLVEINRVTKVVKGGRNLRFAAVVVVGDGDGHVGLGTGKALEVPEAIRKAVEDGKQNLIYLPRVGTTIPHEVIGEHAGGRILLKPAVAGSGVSAGGPVRAVLELAGVADATSKSIGSNTAINMIRATLDAISQLKTAEEVAKLRGVSVEDLQG

SEQ ID NO: 385 - DNA, 450 bp, Alloiococcus otitidis
  CDS (46)..(447)
tcgacgtgtttgattgcaccacgaaccgcttcgttatcaggtctgatgacactagaattaaccttgccaagtcccaatgccttgataatcttgtgttggttttgtggacgaccaatcaaacttcgcttaagggttatttccaagtttgccaatgtgcccactccttatccttgtaagtcttcaactgagacgccacgcaatttagctacttcttcagcagtttttagttgcgaaatggcatccaaggtcgcacgaatcatgttaattgctgtgttagacccaattgatttactagttgcatccgccacaccagcaagttctaagacggcacggactggtcctccggctgaaacaccagaaccagcaacagcaggtttgagtaagatacgaccaccagcgtgctcaccaatcacttcgtgtggaatggttgtaccaacgcgagggaggtag

SEQ ID NO: 386 - protein, 134 aa, Alloiococcus otitidis
MTLELTLPSPNALIILCWFCGRPIKLRLRVISKFANVPTPYPCKSSTETPRNLATSSAVFSCEMASKVARIMLIAVLDPIDLLVASATPASSKTARTGPPAETPEPATAGLSKIRPPACSPITSCGMVVPTRGR

SEQ ID NO: 387 - DNA, 450 bp, Alloiococcus otitidis; identical to SEQ ID NO: 385
  CDS (10)..(447)

SEQ ID NO: 388 - protein, 146 aa, Alloiococcus otitidis
MIAPRTASLSGLMTLELTLPSPNALIILCWFCGRPIKLRLRVISKFANVPTPYPCKSSTETPRNLATSSAVFSCEMASKVARIMLIAVLDPIDLLVASATPASSKTARTGPPAETPEPATAGLSKIRPPACSPITSCGMVVPTRGR

SEQ ID NO: 389 - DNA, 378 bp, Alloiococcus otitidis
  CDS (10)..(375)
aataaagaggtgacaattgtgatttcaaaaccagataaaaataaagtgcgtaaaaaaagacacaaacggattcgtcgcaatctttctggtactgctgagtgcccacgtttaaacatctttcgttcaaacaaaaacatctacgctcaagttattgatgacgtagagggtgtaacgctcgcaagtgcatctacattggacagcgaagtttccaattccgaaagcaagactgaacaagctgccttggtaggcgaattagtggctaaacgggctaaagaacacgatattgaacaagtcgtttttgaccgtggcggttacaaataccacggccgggtccaagctttagcagatgcagcccgtgaaaatggactagacttttaa

SEQ ID NO: 390 - protein, 122 aa, Alloiococcus otitidis
MTIVISKPDKNKVRKKRHKRIRRNLSGTAECPRLNIFRSNKNIYAQVIDDVEGVTLASASTLDSEVSNSESKTEQAALVGELVAKRAKEHDIEQVVFDRGGYKYHGRVQALADAARENGLDF

SEQ ID NO: 391 - DNA, 570 bp, Alloiococcus otitidis
  CDS (31)..(567)
acaatttatttattaaggaggtgccggtcagtgagtcgtatcggaaataaacctattaatattccagaaggcgttgaagtctctttaaaagagggaaacgtccttacagctaaagggaaacagggcgaaattactcgtaccctcagtccaagtattgagattaatgtgtcagaccaagacattgtttgtgaacgtcccaatgattcgaaagctaaccgtattgcccacggaactacccggtctttagtctttaacatggttgaaggggtagccaatgggtttagcaaaaaattagaattgaacggggttgggtaccgtgcccaaaaacaagggaacaaattggtcttaaatgttggactatcccatccagtagaattcgaacagcccgacggtattgagattgaagttccatctaacaccgaaatcgtcattaagggtgctagcaaagaggcggttggccaactagcagccaaagttagaggagttagaccacctgaaccttaccaaggtaaagggattaaatacgccgatgaacaaattcgccgtaaagaaggtaaaactggtaaatag

SEQ ID NO: 392 - protein, 179 aa, Alloiococcus otitidis
MSRIGNKPINIPEGVEVSLKEGNVLTAKGKQGEITRTLSPSIEINVSDQDIVCERPNDSKANRIAHGTTRSLVFNMVEGVANGFSKKLELNGVGYRAQKQGNKLVLNVGLSHPVEFEQPDGIEIEVPSNTEIVIKGASKEAVGQLAAKVRGVRPPEPYQGKGIKYADEQIRRKEGKTGK

SEQ ID NO: 393 - DNA, 495 bp, Alloiococcus otitidis
  CDS (28)..(492)
ggttcaggtggtctaactcctctaactttggctgctagttggccaaccgcctctttgctagcacccttaatgacgatttcggtgttagatggaacttcaatctcaataccgtcgggctgttcgaattctactggatgggatagtccaacatttaagaccaatttgttcccttgtttttgggcacggtacccaaccccgttcaattctaattttttgctaaacccattggctaccccttcaaccatgttaaagactaaagaccgggtagttccgtgggcaatacggttagctttcgaatcattgggacgttcacaaacaatgtcttggtctgacacattaatctcaatacttggactgagggtacgagtaatttcgccctgtttccctttagctgtaaggacgtttccctcttttaaagagacttcaacgccttctggaatattaataggtttatttccgatacgactcactgaccggcacctccttaataaataa

SEQ ID NO: 394 - protein, 155 aa, Alloiococcus otitidis
MAASWPTASLLAPLMTISVLDGTSISIPSGCSNSTGWDSPTFKTNLFPCFWARYPTPFNSNFLLNPLATPSTMLKTKDRVVPWAIRLAFESLGRSQTMSWSDTLISILGLRVRVISPCFPLAVRTFPSFKETSTPSGILIGLFPIRLTDRHLLNK

SEQ ID NO: 395 - DNA, 399 bp, Alloiococcus otitidis
  CDS (7)..(396)
atggtcatgacagatccgattgcagatttcctaactcgcgttcgtaacgctagtgatgcacaccacgaaagtgtggaaatccctgcatctaatgttaaaaaaagtatggccgacatccttaaagctgaaggttttgtcaaagatgtagaagtcattgaagacaataagcaggatgttgttcgtatccaattgaaatatggacaagataaagaacgggtcattacagggatcaaacgtatttctaaacccggcttacgtgtctatgctaatgcagaagaagtacccaaagtcttaaatggcttagggattgctattatttcaacttcccaaggtgtcgttactgataaagaagctcgtgctaaaaaaatcggtggcgaagtattagcatacgtttggtaa

SEQ ID NO: 396 - protein, 130 aa, Alloiococcus otitidis
MTDPIADFLTRVRNASDAHHESVEIPASNVKKSMADILKAEGFVKDVEVIEDNKQDVVRIQLKYGQDKERVITGIKRISKPGLRVYANAEEVPKVLNGLGIAIISTSQGVVTDKEARAKKIGGEVLAYVW

SEQ ID NO: 397 - DNA, 399 bp, Alloiococcus otitidis; identical to SEQ ID NO: 395
  CDS (1)..(396)

SEQ ID NO: 398 - protein, 132 aa, Alloiococcus otitidis
MVMTDPIADFLTRVRNASDAHHESVEIPASNVKKSMADILKAEGFVKDVEVIEDNKQDVVRIQLKYGQDKERVITGIKRISKPGLRVYANAEEVPKVLNGLGIAIISTSQGVVTDKEARAKKIGGEVLAYVW

SEQ ID NO: 399 - DNA, 174 bp, Alloiococcus otitidis
  CDS (1)..(171)
gtgaatatacacgttgccaacgatgcggacgacctcatgctgtctacaaaaaatttaaattatgccgtgtttgtcttcgtgaacttgctcataaaggacaaatcccaggccttaaaaaagcaagctggtaaaaataatattactgataaaggaggctactttgaatggtcatga

SEQ ID NO: 400 - protein, 57 aa, Alloiococcus otitidis
MNIHVANDADDLMLSTKNLNYAVFVFVNLLIKDKSQALKKQAGKNNITDKGGYFEWS

SEQ ID NO: 401 - DNA, 285 bp, Alloiococcus otitidis
  CDS (40)..(282)
acacgtaagccgggtttagaaatacgtttgatccctgtaatgacccgttctttatcttgtccatatttcaattggatacgaacaacatcctgcttattgtcttcaatgacttctacatctttgacaaaaccttcagctttaaggatgtcggccatactttttttaacattagatgcagggatttccacactttcgtggtgtgcatcactagcgttacgaacgcgagttaggaaatctgcaatcggatctgtcatgaccattcaaagtagcctcctttatcagtaa

SEQ ID NO: 402 - protein, 81 aa, Alloiococcus otitidis
MTRSLSCPYFNWIRTTSCLLSSMTSTSLTKPSALRMSAILFLTLDAGISTLSWCASLALRTRVRKSAIGSVMTIQSSLLYQ

SEQ ID NO: 403 - DNA, 285 bp, Alloiococcus otitidis; identical to SEQ ID NO: 401
  CDS (28)..(282)

SEQ ID NO: 404 - protein, 85 aa, Alloiococcus otitidis
MIPVMTRSLSCPYFNWIRTTSCLLSSMTSTSLTKPSALRMSAILFLTLDAGISTLSWCASLALRTRVRKSAIGSVMTIQSSLLYQ

SEQ ID NO: 405 - DNA, 594 bp, Alloiococcus otitidis
  CDS (55)..(591)
aaaatctggcaaacaagtttaattaaacttatagcgaagggaggacaagtaaagatgtcacgattaagtgaaaaataccaaaacgaagtacgcccatcactaatggataaatttgactatacttccattatggaagcacccaaagttgtcaagatcgttgtcaacatgggtgtcggtgatgcagttgcaaacactaaaaacctagatgatgcagtagaagacttgactaaaattacaggtcaaaaacctgtcgtcaccaaggccaaaaaatctattgcagctttccgtttacgtgatggtatgccaatcggtaccaaagtaaccttgcgtagtcaaagaatgtacgaattcttggacaaattagttacgatttcattaccacgggtgcgggacttccgcggcgtcagccaaaactcttttgacggccgagggaactacactctgggaattaaagagcaactgattttccctgaaatcgactttgatgaagtgaataaagtacgcggcatggacattgtgatcgtcacatcagctaacactgatgaagaaggacgcgaattactaagagaattgggcatgccatttagaaaataa

SEQ ID NO: 406 - protein, 179 aa, Alloiococcus otitidis
MSRLSEKYQNEVRPSLMDKFDYTSIMEAPKVVKIVVNMGVGDAVANTKNLDDAVEDLTKITGQKPVVTKAKKSIAAFRLRDGMPIGTKVTLRSQRMYEFLDKLVTISLPRVRDFRGVSQNSFDGRGNYTLGIKEQLIFPEIDFDEVNKVRGMDIVIVTSANTDEEGRELLRELGMPFRK

SEQ ID NO: 407 - DNA, 294 bp, Alloiococcus otitidis
  CDS (22)..(291)
tttaaattttttgtagacagcatgaggtcgtccgcatcgttggcaacgtgtatattcacgagtagaaaattttgctggttttttagctttttcaatcattgcttttctagccatttcgttataacctcctatttttattttctaaatggcatgcccaattctcttagtaattcgcgtccttcttcatcagtgttagctgatgtgacgatcacaatgtccatgccgcgtactttattcacttcatcaaagtcgatttcagggaaaatcagttgctctttaattcccagagtgtag

SEQ ID NO: 408 - protein, 90 aa, Alloiococcus otitidis
MRSSASLATCIFTSRKFCWFFSFFNHCFSSHFVITSYFYFLNGMPNSLSNSRPSSSVLADVTITMSMPRTLFTSSKSISGKISCSLIPRV

SEQ ID NO: 409 - DNA, 315 bp, Alloiococcus otitidis
  CDS (13)..(312)
gaggtgcgagacatgtttgtaaaaacaggagataaggtacaagtaatctctggtaaagaaaaagggaaacaaggtacggttattgaagctttgcccaaacaagaccgagtcaaagttgaaggcttgaatatcatcaaaaaacaccagcgacctggcatgggagtcgaaggtgggatcgttgaagaagaaggttcgatccacgtttccaacgttcagttagtcgaccctgaaactggtgaaccgactcgagtgggttaccggtttgaagacggcaaaaaagttcgttacgctaaaaaatctggcaaacaagtttaa

SEQ ID NO: 410 - protein, 100 aa, Alloiococcus otitidis
MFVKTGDKVQVISGKEKGKQGTVIEALPKQDRVKVEGLNIIKKHQRPGMGVEGGIVEEEGSIHVSNVQLVDPETGEPTRVGYRFEDGKKVRYAKKSGKQV

SEQ ID NO: 411 - DNA, 315 bp, Alloiococcus otitidis; identical to SEQ ID NO: 409
  CDS (4)..(312)

SEQ ID NO: 412 - protein, 103 aa, Alloiococcus otitidis
MRDMFVKTGDKVQVISGKEKGKQGTVIEALPKQDRVKVEGLNIIKKHQRPGMGVEGGIVEEEGSIHVSNVQLVDPETGEPTRVGYRFEDGKKVRYAKKSGKQV

SEQ ID NO: 413 - DNA, 384 bp, Alloiococcus otitidis
  CDS (37)..(381)
aaggaggattctaacgtgattcaaagtgaaagtcgtatgaaagttgctgataactctggtgcccgtgaagtactggttgtaaaagtactgggagggtcaggtgctaagacagctaatatcggtgacgaggtagttgttagtgttaaaaatgctacaccaggtggcgttgtcaaaaaaggtgatgtagctcgagcggtcatcgttcgatcaaaaactggcttgcgccgtccagatggttcatatatcaaatttgatgagaatgcttgtgtaatcgtacgtgaagacaaggcacctcgaggaactcgtatttttggaccagttgcccgcgaattgcgtgatagcaacttcatgagaattatttcgttagctccggaagtattataa

SEQ ID NO: 414 - protein, 115 aa, Alloiococcus otitidis
MKVADNSGAREVLVVKVLGGSGAKTANIGDEVVVSVKNATPGGVVKKGDVARAVIVRSKTGLRRPDGSYIKFDENACVIVREDKAPRGTRIFGPVARELRDSNFMRIISLAPEVL

SEQ ID NO: 415 - DNA, 384 bp, Alloiococcus otitidis; identical to SEQ ID NO: 413
  CDS (16)..(381)

SEQ ID NO: 416 - protein, 122 aa, Alloiococcus otitidis
MIQSESRMKVADNSGAREVLVVKVLGGSGAKTANIGDEVVVSVKNATPGGVVKKGDVARAVIVRSKTGLRRPDGSYIKFDENACVIVREDKAPRGTRIFGPVARELRDSNFMRIISLAPEVL

SEQ ID NO: 417 - DNA, 267 bp, Alloiococcus otitidis
  CDS (4)..(264)
agaatggctgaccgcaatttgcgtaaagagtatgtgggtaaagtcgtctctgacaaaatggataagaccattgtagttgaaatcagaacaacccgcgaacaccctaaatacaaaaaacgaataaaatactcaactaaatttaaggcacatgatgaaaataacactgccaaagaaggcgacactgttcgaatcatggaaactcgtccactttccaaagacaaacgataccgtttagttgaagtagttgaagaagcagttatcttataa

SEQ ID NO: 418 - protein, 87 aa, Alloiococcus otitidis
MADRNLRKEYVGKVVSDKMDKTIVVEIRTTREHPKYKKRIKYSTKFKAHDENNTAKEGDTVRIMETRPLSKDKRYRLVEVVEEAVIL

SEQ ID NO: 419 - DNA, 387 bp, Alloiococcus otitidis
  CDS (163)..(384)
ccctcccagtacttttacaaccagtacttcacgggcaccagagttatcagcaactttcatacgactttcactttgaatcacgttagaatcctcctttcaactcagacatgccagccttataagataactgcttcttcaactacttcaactaaacggtatcgtttgtctttggaaagtggacgagtttccatgattcgaacagtgtcgccttctttggcagtgttattttcatcatgtgccttaaatttagttgagtattttattcgttttttgtatttagggtgttcgcgggttgttctgatttcaactacaatggtcttatccattttgtcagagacgactttacccacatactctttacgcaaattgcggtcagccattctttaa

SEQ ID NO: 420 - protein, 74 aa, Alloiococcus otitidis
MSLESGRVSMIRTVSPSLAVLFSSCALNLVEYFIRFLYLGCSRVVLISTTMVLSILSETTLPTYSLRKLRSAIL

SEQ ID NO: 421 - DNA, 195 bp, Alloiococcus otitidis
  CDS (1)..(192)
atgaaggctaaagaattgaaagaattatccactgctgaactacttgagaaagaggcagagtacaaagaagaactctttaacttacgcttccaactggcaacaggacaattggaagatacagctcaaatcaaaaaagttcggaaaaatattgctcgtgtgaaaactgtactaagacaagcagaacttgcccaataa

SEQ ID NO: 422 - protein, 64 aa, Alloiococcus otitidis
MKAKELKELSTAELLEKEAEYKEELFNLRFQLATGQLEDTAQIKKVRKNIARVKTVLRQAELAQ

SEQ ID NO: 423 - DNA, 435 bp, Alloiococcus otitidis
  CDS (4)..(432)
tcaatgttagtacctaaacgtgtgaagtaccgtcgtgaatttcgcggtaaaatgaaaggtgaagcaaaaggcggtaaagaagttgcttacggtcaatacggtttgcagtcacttgactccaaatggatctctaaccgccaaatcgaatcagcccgtattgctatgacccgatacatgaaacgtggtgggaaagtatggattaaaattttccctcataaatcagtaactgctaaaggtatcggagttcggatgggttccggtaaaggtgctcctgaaaaatgggtagctccagttaagcgtggtaaaatcatgttcgaagtcggtggtgtttcggaagaagtcgctcacgaagctttgagacttgcttccatgaaattgccagtgcgaactcgtgtggtagctcgtgaagaaagtggtgaatcacatgaaggctaa

SEQ ID NO: 424 - protein, 143 aa, Alloiococcus otitidis
MLVPKRVKYRREFRGKMKGEAKGGKEVAYGQYGLQSLDSKWISNRQIESARIAMTRYMKRGGKVWIKIFPHKSVTAKGIGVRMGSGKGAPEKWVAPVKRGKIMFEVGGVSEEVAHEALRLASMKLPVRTRVVAREESGESHEG

SEQ ID NO: 425 - DNA, 660 bp, Alloiococcus otitidis
  CDS (4)..(657)
agcatgggatctaaaattaatccacacggcttgcgtgtcggcgttatccacgattgggacgcaaagtggtatgctgaaaaagattttgcagacaaattacacgaagacttggctatccgaaactatattgcagacaaactagttgatgcctcagtttcccgcgttgaaattgaacgtgcggcgaaccgggtcaacatttcgatccacacagctaaaccaggtatggtgattggtaaaggtggttctgaagttgacgctttaagaaaccaattggccaacttaactggcaaacgcgttcacgttaacatcatcgaagtgaaaaaaccggatattgatgcaacactagtggctaaatcgattgcagaacaacttgaaaaccgtatttcattccgacgagcacaaaaacaagccatccaaagagctatgcgtgatggcgctcaagggattaaaacacttgttgctggtcggttaaacggtgcagatatggctcgttcagaaggattctctgaagggaccgttcctcttcacactatccgagctgatattgactacgataacgtcgaagcggatacccaatttggtaaaataggtgtgaaagtctggatctacaaaggagaagttcttcctgaaattgacgatagcgaggaaggaggaaaataa

SEQ ID NO: 426 - protein, 218 aa, Alloiococcus otitidis
MGSKINPHGLRVGVIHDWDAKWYAEKDFADKLHEDLAIRNYIADKLVDASVSRVEIERAANRVNISIHTAKPGMVIGKGGSEVDALRNQLANLTGKRVHVNIIEVKKPDIDATLVAKSIAEQLENRISFRRAQKQAIQRAMRDGAQGIKTLVAGRLNGADMARSEGFSEGTVPLHTIRADIDYDNVEADTQFGKIGVKVWIYKGEVLPEIDDSEEGGK

SEQ ID NO: 427 - DNA, 375 bp, Alloiococcus otitidis
  CDS (19)..(372)
tcggagggaggaaaaatcatgacagacaaggtaacagaagctaaagcatctgctcgtatgattcgtattgctccacgtaaagttcgcttagtcgttgaccaaatccgtggcaaagatgctggtgaagcaattgctatccttcgatttaccaatagaggtgcagctgaagcggtagaaaaagtcttaaaatcagctattgccaatgctgaacacaactatgatatgaatgtcgaagacttatttgtcagtgaagcatatgccaatgaaggaccaaccttaaaacgtttccgtccaagagcgaaaggtgcagcttcaaaaatcaataaacgaacaagccacattactgttgtggtatctgagaagaaggagggttaa

SEQ ID NO: 428 - protein, 118 aa, Alloiococcus otitidis
MTDKVTEAKASARMIRIAPRKVRLVVDQIRGKDAGEAIAILRFTNRGAAEAVEKVLKSAIANAEHNYDMNVEDLFVSEAYANEGPTLKRFRPRAKGAASKINKRTSHITVVVSEKKEG

SEQ ID NO: 429 - DNA, 288 bp, Alloiococcus otitidis
  CDS (13)..(285)
ggagggcgtaacatgggtcgtagcttgaaaaaaggaccttttgtcgatgatcacttaatgaaaaaagtaaaggctatggacgatgacaataaaaaagtaatcaaaacatggtctcgtcgttcaactattttcccaaactttgttgggcacacaattgctgtttatgacggtcgcaaacatgtccctgtctacattcaagaagatatggtcggccacaaattgggtgaattcgcaccaactcgaacatttagaggtcacagtaaagatgaccgcgtgactaagaaataa

SEQ ID NO: 430 - protein, 91 aa, Alloiococcus otitidis
MGRSLKKGPFVDDHLMKKVKAMDDDNKKVIKTWSRRSTIFPNFVGHTIAVYDGRKHVPVYIQEDMVGHKLGEFAPTRTFRGHSKDDRVTKK

SEQ ID NO: 431 - DNA, 252 bp, Alloiococcus otitidis
  CDS (1)..(249)
ttgtgttcagcattggcaatagctgattttaagactttttctaccgcttcagctgcacctctattggtaaatcgaaggatagcaattgcttcaccagcatctttgccacggatttggtcaacgactaagcgaactttacgtggagcaatacgaatcatacgagcagatgctttagcttctgttaccttgtctgtcatgatttttcctccctccgattattatttcttagtcacgcggtcatctttactgtga

SEQ ID NO: 432 - protein, 83 aa, Alloiococcus otitidis
MCSALAIADFKTFSTASAAPLLVNRRIAIASPASLPRIWSTTKRTLRGAIRIIRADALASVTLSVMIFPPSDYYFLVTRSSLL

SEQ ID NO: 433 - DNA, 870 bp, Alloiococcus otitidis
  CDS (70)..(867)
aaacaaattaaggaggggaagaccgtggcgattaaaagttataaatctatcactaatggacgtcgtaatatgactacgctcgataactccgaaattacgactcacaaaccagaaaaaagcttgctagaaccacaaaaaagaggatctggccgaaacaatgctggtaaaatcactgtccgtcacaaaggcggaggccacaaacacaaataccgtgtgatcgactttaaacgtcgaaaagatagtgtccgcggtgttgttaaaacagtcgaatatgacccaaaccgttcagctaatatttccttggtccaatatgatgatggggttaaaacctacatcctagcacccaaaggaattaaagttggacaagaaatctactctggtgaagatgttgatatcaaagtagggaatgctttgccactggctaacattccagttgggactaccatccacaacctcgaattaaaaccaggcaagggtggacaacttgctcgatctgctggttcaagtgccaagatcctcggtaaagaagggaaatacgtgcttgttaagttgagttctggcgagaaccgcttgatactagcagactgccgggcaacaattggctctgttgggaatgaacaacacgaactcattaactttggtaaagcaggccgaagccgttggaaaggcaaacgtcctactgtccgtggttctgtcatgaacccgaacgatcacccacacggtggtggtgaaggtcgtgctccaatcggtcgaccaagtccagtttcaccttggggtaaaccaacccttggtaagaaaacacgtaagggcaaaaacaagtcggataaattgattgtccgtcgtcgccgaactaaaaaacgaagcaaataa

SEQ ID NO: 434 - protein, 266 aa, Alloiococcus otitidis
MTTLDNSEITTHKPEKSLLEPQKRGSGRNNAGKITVRHKGGGHKHKYRVIDFKRRKDSVRGVVKTVEYDPNRSANISLVQYDDGVKTYILAPKGIKVGQEIYSGEDVDIKVGNALPLANIPVGTTIHNLELKPGKGGQLARSAGSSAKILGKEGKYVLVKLSSGENRLILADCRATIGSVGNEQHELINFGKAGRSRWKGKRPTVRGSVMNPNDHPHGGGEGRAPIGRPSPVSPWGKPTLGKKTRKGKNKSDKLIVRRRRTKKRSK

SEQ ID NO: 435 - DNA, 870 bp, Alloiococcus otitidis; identical to SEQ ID NO: 433
  CDS (25)..(867)

SEQ ID NO: 436 - protein, 281 aa, Alloiococcus otitidis
MAIKSYKSITNGRRNMTTLDNSEITTHKPEKSLLEPQKRGSGRNNAGKITVRHKGGGHKHKYRVIDFKRRKDSVRGVVKTVEYDPNRSANISLVQYDDGVKTYILAPKGIKVGQEIYSGEDVDIKVGNALPLANIPVGTTIHNLELKPGKGGQLARSAGSSAKILGKEGKYVLVKLSSGENRLILADCRATIGSVGNEQHELINFGKAGRSRWKGKRPTVRGSVMNPNDHPHGGGEGRAPIGRPSPVSPWGKPTLGKKTRKGKNKSDKLIVRRRRTKKRSK

SEQ ID NO: 437 - DNA, 348 bp, Alloiococcus otitidis
  CDS (55)..(345)
cgacttaatccttacccaggctgctctggaacaagtagaggaggcacttcaataatgtcagcacatgatatcatcaagcgaccagtgatcactgaaaaatcaatgtatgctatggaagataaaaaatacacatttgaagtggacgctcgtgctacgaaagttcaagttagaaaagccgtcgaagaattatttgatgttgacgtcttaaaagttaatatcgtcaacactgcccgtaaacctaaacgaatgggccgctacaatggttacactaaacgcaaacgtaaagctattgttagcctaaccgaaacatctaatgaaattgatgtttttggtgacgaagaagaataa

SEQ ID NO: 438 - protein, 97 aa, Alloiococcus otitidis
MSAHDIIKRPVITEKSMYAMEDKKYTFEVDARATKVQVRKAVEELFDVDVLKVNIVNTARKPKRMGRYNGYTKRKRKAIVSLTETSNEIDVFGDEEE

SEQ ID NO: 439 - DNA, 627 bp, Alloiococcus otitidis
  CDS (4)..(624)
ccaatgcctaaagtaaccgtatttaaccaagaaggaaaagagaatggtgaaatcactttaaacgatgcaatctttggtatcgagccaaacgataacgtcttgtatgatgccattatcatgcaacaagcttcacaacgacaaggaactcactcggttaaaaaccgaagtgctgttcgtggtggtggccgtaaaccatggcgtcaaaaagggactggtcgtgcccgtcacggatccaacacctcaccaatctggcgtggcggtggtgtcgtatttggaccaactccacggtcttacagctacaaattaccgaagaaagttcgccgtttagcgattttatctgcactttcacaaaaagttattgattcagagctatctgtcattgacaaactcgaatttgataaaccaaaaacaaaagatttcagagccctactcgaccaattagacgtcgaccgcaaagcattagtcgtgttagaaaaagacaacgaatttgctgccctatccgcacgaaatattccaggagttaaagtagtagcccctgataatgtatctgtgctggatgttgttggccatgacgacttaatccttacccaggctgctctggaacaagtagaggaggcacttcaataa

SEQ ID NO: 440 - protein, 207 aa, Alloiococcus otitidis
MPKVTVFNQEGKENGEITLNDAIFGIEPNDNVLYDAIIMQQASQRQGTHSVKNRSAVRGGGRKPWRQKGTGRARHGSNTSPIWRGGGVVFGPTPRSYSYKLPKKVRRLAILSALSQKVIDSELSVIDKLEFDKPKTKDFRALLDQLDVDRKALVVLEKDNEFAALSARNIPGVKVVAPDNVSVLDVVGHDDLILTQAALEQVEEALQ

SEQ ID NO: 441 - DNA, 663 bp, Alloiococcus otitidis
  CDS (31)..(660)
attaactatattaaatatggaggtgtaatcatgaccaaaggaatcttagggaaaaaagtcggtatgacacagattttcgcagagaacggtgaattagtacccgttactgtcgttgaagctaaaccaaacgttgtcttgcaagttaaaacagccgaaacagacggctacgatgcagtccaagttggtttcgatgacaagcgaaatgttttgtctaaccaggctgagcaaggtcatgttaaaaaagctgatactgctcctaagcgcttcgttcgcgaatttcgtgatgctgagctaggagaggttgaagtcggtagcgaaattacagtcgaaacatttgcggaaggcgacatcattgatgtcaccggtacatcaaaaggtaaaggataccaaggtgccatcaagcgccacggccaaagtcggggtcctgaaagtcacgggtctcactaccaccgaaaagcaggtgctatggccatggctgctgacccatctcgtgtttacaaaggcaaaaaattgccaggtcgtatgggtggtaaccaagtaaccgtccaaaacctagaagttgtccgcgttgacgctgaccgcaatgttctcttgatcaaagggaatgtacctggtgccaaaaaatccctagttgaaattagaactgctaaaaaatcaaactaa

SEQ ID NO: 442 - protein, 210 aa, Alloiococcus otitidis
MTKGILGKKVGMTQIFAENGELVPVTVVEAKPNVVLQVKTAETDGYDAVQVGFDDKRNVLSNQAEQGHVKKADTAPKRFVREFRDAELGEVEVGSEITVETFAEGDIIDVTGTSKGKGYQGAIKRHGQSRGPESHGSHYHRKAGAMAMAADPSRVYKGKKLPGRMGGNQVTVQNLEVVRVDADRNVLLIKGNVPGAKKSLVEIRTAKKSN

SEQ ID NO: 443 - DNA, 453 bp, Alloiococcus otitidis
  CDS (67)..(450)
aacacccacacaggggtgcgattcatagatagtaggctaagaagtgagaggttgcgacacacccggatgcattgccatgtgaagggtgtgcggaaattttcatggagccagtttatttttaaagtaagcgaaggagggaataacatggcaaaacaaaaaatccgtatccgtttgaaagcatacgaacaccgcgtgttagatcaatcagcgtctaaaatcgttgaaacggcagaaagaacaggtgctaacgttgcaggccctattccattgccaactgaacgaaaattattcacagtgattcgttcaccacacaaacacaaagactcacgtgagcaattcgaaatgcgtacccacaaacgagtcgttgatattgttaacccaacaccaaaaacagtcgatgccctaactaagctcgacctaccatctggtgttgacattgaaattaaactataa

SEQ ID NO: 444 - protein, 128 aa, Alloiococcus otitidis
MHCHVKGVRKFSWSQFIFKVSEGGNNMAKQKIRIRLKAYEHRVLDQSASKIVETAERTGANVAGPIPLPTERKLFTVIRSPHKHKDSREQFEMRTHKRVVDIVNPTPKTVDALTKLDLPSGVDIEIKL

SEQ ID NO: 445 - DNA, 456 bp, Alloiococcus otitidis
  CDS (13)..(453)
aggggtaaggacatggaccaggatagagtaaaccgcgtcaacgaccaactggttttgatttttaatgagattcttgaaattcaagaaagggtactcaaaaagagccgtttttcggatttaacccttaaagaaatgcatacaatcgaagccatcgcccaggatggaagtttgagctccaaccaggtggctaaaaacctgaaagtcaccccagggaccttgaccgtagccatccagggtcttgagaaaaaaggctacgttaaacgagtcaaatcggacaaggaccgccgtgtcgtcctactccaattaacagaccgtggccaagccatctaccaggtccataaagacttccaccaggaaatggtggaagaaaccttgactggtttagaccctaaagaagtggaagtcttgaccaaggggttaaataacctccaccaatttttgttaaagaaaaagtaa

SEQ ID NO: 446 - protein, 147 aa, Alloiococcus otitidis
MDQDRVNRVNDQLVLIFNEILEIQERVLKKSRFSDLTLKEMHTIEAIAQDGSLSSNQVAKNLKVTPGTLTVAIQGLEKKGYVKRVKSDKDRRVVLLQLTDRGQAIYQVHKDFHQEMVEETLTGLDPKEVEVLTKGLNNLHQFLLKKK

SEQ ID NO: 447 - DNA, 1200 bp, Alloiococcus otitidis
  CDS (16)..(1197)
ggaggaaaaataaacatggcaaaagaaaaatttgatcgttccaaagaacacatgaatattggtaccctaggtcacgtcgaccacggtaaaactaccttaactgcagctatcacttacgttttagctaaaaaaggtttggcagaagcttcagcttacgaccaaattgatggtgctgctgaagagcgtgaacgtggtattaccattgcgactgctcacgttgaatactcaaccgaaaaccgtcactatgcccacgttgactgcccaggacacgctgactatgttaaaaacatgattactggtgcggctcaaatggacggtgctatcttagttgtatcagctgcagatggcccaatgccacaaactcgtgagcacatccttcttgctcgtcaagttggtgttccttacttcgttgtattcttgaacaaagttgaccaagtcgacgatgaagaattacttgaactcgttgaacttgaagttcgtgacctcttaactgaatacgacttcccaggtgacgaagttccagttgttgctggttctgcacttcttgctcttcaagatgatgaagaacaaatgaataacatccttaaattaatggatgaagtagacaactacattccagcgccagaacgtgacgctaacaaagacttcttgatgccagttgaagacatcttctctatcactggtcgtggtactgttgcaaccggccgtgtagaacaaggtcaacttaaagttggtgacgaagttgaaatcgttggtattaaagatactgcgactacaactgttactggtgttgaaatgttccgtaaattgttagactacgctgaagctggtgacaacattggtgccttgttacgtggtctttcacgtgacgatgttgaacgtggtcaagttcttgcaactccaggttccatcacccctcactctaaattcaaaggcgaagtttacgtcttgtcaaaagatgaaggtggccgtcacactccattcttctctaactaccgaccacaattcttcttccgtacaactgacgtaactggtgtcgttaacctaccggaaggtactgaaatggttatgccaggcgacaacactgaaatggaagttgaattgattgctccaatcgcagttgaagaaggtaccaaatttaccatccgtgaaggtggccgtactgttggtgctggtgttgtttctgaaattatcgaataa

SEQ ID NO: 448 - protein, 394 aa, Alloiococcus otitidis
MAKEKFDRSKEHMNIGTLGHVDHGKTTLTAAITYVLAKKGLAEASAYDQIDGAAEERERGITIATAHVEYSTENRHYAHVDCPGHADYVKNMITGAAQMDGAILVVSAADGPMPQTREHILLARQVGVPYFVVFLNKVDQVDDEELLELVELEVRDLLTEYDFPGDEVPVVAGSALLALQDDEEQMNNILKLMDEVDNYIPAPERDANKDFLMPVEDIFSITGRGTVATGRVEQGQLKVGDEVEIVGIKDTATTTVTGVEMFRKLLDYAEAGDNIGALLRGLSRDDVERGQVLATPGSITPHSKFKGEVYVLSKDEGGRHTPFFSNYRPQFFFRTTDVTGVVNLPEGTEMVMPGDNTEMEVELIAPIAVEEGTKFTIREGGRTVGAGVVSEIIE

SEQ ID NO: 449 - DNA, 2091 bp, Alloiococcus otitidis
  CDS (151)..(2088)
gtggcaaaaagagaatatcctctagagagaacgcgtaacattggtattatggcgcacatcgatgctggtaagaccactgctactgaacgtatcttgttcttctcaggccggatccacaaaatcggtgaaacccacgaaggggctgcccagatggactggatggaccaggaacaagaacgtgggattaccattacttctgctgcaaccactacttcctggttagaccaccgtatcaacattattgataccccgggacacgtggactttacagtagaggttgaacggtccctccgtgtcttagacggtgctgtgactgtcttagatgctcaatcaggtgtagaaccacaaactgaaaccgtttggcgccaagcaaccacctaccatgttccacgtattgtttttgtaaacaaaatggacaagttgggtgccaacttcttagaagcggttgacagtttgcatgaccgtttgcaagccaatgcccaccccgttcaattgccaattggggctgaggatgactttgaaggaatcgttgacctagtagagatgaaagcttactactacggtaatgaattaggaactgatattgaagaagctgaaattccagaagatatgcaagaactcgctcaagaacagcacgaacgccttgttgaagctgtagttgagttagatgaagacttgatggtagcatacctggaaggggaagaaatttcaactgaacaattaaaagcggctattcgtcaagcaaccttggacgttgaattttacccatgcttctgtggttcagccttcaaaaacaagggtgtccaactcctattaaacgggattgtcgactaccttccagctccaacagacgtaccagctattgagggacacgtgaaagatgaccccgatacagtggtcacccgtgaagctggcgatgaccaatctttctcagctcttgccttcaaagtgatgactgacccttatgtgggtcgtctaaccttcttcagagtttactctggtaccctagaagctggttcctacatcttgaatgcaaccaaagacagccgggagcgagtcggtcgtctcttgcagatgcacgccaactcccgtaaagaaatcccagaagtcttctctggtgatattgcagcagcagtcggcttgaaagatacagggactggggacaccttgtctgatattgatgatcctgtcatccttgagtcaatggaattccctgaacccgttatccaggttgctattgagccgaaatccaaggctgaccaagacaagatgtctgttgccttggctaagttggctgaagaagacccaactttcagagctgagactgaccacgaaactggcgaaaccctaatcgctggtatgggtgagttgcacttggatatcatcgtcgaccgattgaaacgtgaattcaaggtagaagcaactgttgggaacccacaagtatcctaccgtgaaaccttcacaaaatctgttcaagcagaaggtaagttcgtccgtcaatccggtggtaaagggcagtatggtcacgtctgggtcgaatttactccacttgatgaaggggaaggttatgaattcgaagatgccattgttggtggtgtcgttccacgtgaatatattccgtccgttgacgccggtttgcaagctgccatggaaaatggtgtcttagcaggttacccactggttgacgttaaggccaaactatatgatggctcttaccacgacgtcgactccagtgaatctgccttcaaggttgcggcttctctagccttgcgtaatgcagcaaaacaagcagagcctgttatcttggaaccagttatggcggttgaaatcactatccctgaagaataccttggggatatcatgggtcacatttcagctcgtcgtggtcaaatcgaaggccaaacccctcgaggcaatgccttgattgttaaaggatccattccgttatctcaaatgtttggttacgcaacaactctacgttctgctacccaaggtcgcggaaccttcaccatgcaatttgaccactatgcaccagttccatcaagtattgcagatgaaattattaaacaacacggtggcagttccaactag

SEQ ID NO: 450 - protein, 646 aa, Alloiococcus otitidis
MDWMDQEQERGITITSAATTTSWLDHRINIIDTPGHVDFTVEVERSLRVLDGAVTVLDAQSGVEPQTETVWRQATTYHVPRIVFVNKMDKLGANFLEAVDSLHDRLQANAHPVQLPIGAEDDFEGIVDLVEMKAYYYGNELGTDIEEAEIPEDMQELAQEQHERLVEAVVELDEDLMVAYLEGEEISTEQLKAAIRQATLDVEFYPCFCGSAFKNKGVQLLLNGIVDYLPAPTDVPAIEGHVKDDPDTVVTREAGDDQSFSALAFKVMTDPYVGRLTFFRVYSGTLEAGSYILNATKDSRERVGRLLQMHANSRKEIPEVFSGDIAAAVGLKDTGTGDTLSDIDDPVILESMEFPEPVIQVAIEPKSKADQDKMSVALAKLAEEDPTFRAETDHETGETLIAGMGELHLDIIVDRLKREFKVEATVGNPQVSYRETFTKSVQAEGKFVRQSGGKGQYGHVWVEFTPLDEGEGYEFEDAIVGGVVPREYIPSVDAGLQAAMENGVLAGYPLVDVKAKLYDGSYHDVDSSESAFKVAASLALRNAAKQAEPVILEPVMAVEITIPEEYLGDIMGHISARRGQIEGQTPRGNALIVKGSIPLSQMFGYATTLRSATQGRGTFTMQFDHYAPVPSSIADEIIKQHGGSSN

SEQ ID NO: 451 - DNA, 2091 bp, Alloiococcus otitidis; identical to SEQ ID NO: 449
  CDS (49)..(2088)

SEQ ID NO: 452 - protein, 680 aa, Alloiococcus otitidis
MAHIDAGKTTATERILFFSGRIHKIGETHEGAAQMDWMDQEQERGITITSAATTTSWLDHRINIIDTPGHVDFTVEVERSLRVLDGAVTVLDAQSGVEPQTETVWRQATTYHVPRIVFVNKMDKLGANFLEAVDSLHDRLQANAHPVQLPIGAEDDFEGIVDLVEMKAYYYGNELGTDIEEAEIPEDMQELAQEQHERLVEAVVELDEDLMVAYLEGEEISTEQLKAAIRQATLDVEFYPCFCGSAFKNKGVQLLLNGIVDYLPAPTDVPAIEGHVKDDPDTVVTREAGDDQSFSALAFKVMTDPYVGRLTFFRVYSGTLEAGSYILNATKDSRERVGRLLQMHANSRKEIPEVFSGDIAAAVGLKDTGTGDTLSDIDDPVILESMEFPEPVIQVAIEPKSKADQDKMSVALAKLAEEDPTFRAETDHETGETLIAGMGELHLDIIVDRLKREFKVEATVGNPQVSYRETFTKSVQAEGKFVRQSGGKGQYGHVWVEFTPLDEGEGYEFEDAIVGGVVPREYIPSVDAGLQAAMENGVLAGYPLVDVKAKLYDGSYHDVDSSESAFKVAASLALRNAAKQAEPVILEPVMAVEITIPEEYLGDIMGHISARRGQIEGQTPRGNALIVKGSIPLSQMFGYATTLRSATQGRGTFTMQFDHYAPVPSSIADEIIKQHGGSSN

SEQ ID NO: 453 - DNA, 2091 bp, Alloiococcus otitidis; identical to SEQ ID NO: 449
  CDS (1)..(2088)

SEQ ID NO: 454 - protein, 696 aa, Alloiococcus otitidis
MAKREYPLERTRNIGIMAHIDAGKTTATERILFFSGRIHKIGETHEGAAQMDWMDQEQERGITITSAATTTSWLDHRINIIDTPGHVDFTVEVERSLRVLDGAVTVLDAQSGVEPQTETVWRQATTYHVPRIVFVNKMDKLGANFLEAVDSLHDRLQANAHPVQLPIGAEDDFEGIVDLVEMKAYYYGNELGTDIEEAEIPEDMQELAQEQHERLVEAVVELDEDLMVAYLEGEEISTEQLKAAIRQATLDVEFYPCFCGSAFKNKGVQLLLNGIVDYLPAPTDVPAIEGHVKDDPDTVVTREAGDDQSFSALAFKVMTDPYVGRLTFFRVYSGTLEAGSYILNATKDSRERVGRLLQMHANSRKEIPEVFSGDIAAAVGLKDTGTGDTLSDIDDPVILESMEFPEPVIQVAIEPKSKADQDKMSVALAKLAEEDPTFRAETDHETGETLIAGMGELHLDIIVDRLKREFKVEATVGNPQVSYRETFTKSVQAEGKFVRQSGGKGQYGHVWVEFTPLDEGEGYEFEDAIVGGVVPREYIPSVDAGLQAAMENGVLAGYPLVDVKAKLYDGSYHDVDSSESAFKVAASLALRNAAKQAEPVILEPVMAVEITIPEEYLGDIMGHISARRGQIEGQTPRGNALIVKGSIPLSQMFGYATTLRSATQGRGTFTMQFDHYAPVPSSIADEIIKQHGGSSN

SEQ ID NO: 455 - DNA, 426 bp, Alloiococcus otitidis
  CDS (61)..(423)
gatacttgtgggttcccaacagttgcttctaccttgaattcacgtttcaatcggtcgacgatgatatccaagtgcaactcacccataccagcgattagggtttcgccagtttcgtggtcagtctcagctctgaaagttgggtcttcttcagccaacttagccaaggcaacagacatcttgtcttggtcagccttggatttcggctcaatagcaacctggataacgggttcagggaattccattgactcaaggatgacaggatcatcaatatcagacaaggtgtccccagtccctgtatctttcaagccgactgctgctgcaatatcaccagagaagacttctgggatttctttacgggagttggcgtgcatctgcaagagacgaccgactcgctcccggctgtctttggttgcattcaagatgtag

SEQ ID NO: 456 - protein, 121 aa, Alloiococcus otitidis
MISKCNSPIPAIRVSPVSWSVSALKVGSSSANLAKATDILSWSALDFGSIATWITGSGNSIDSRMTGSSISDKVSPVPVSFKPTAAAISPEKTSGISLRELACICKRRPTRSRLSLVAFKM

SEQ ID NO: 457 - DNA, 426 bp, Alloiococcus otitidis; identical to SEQ ID NO: 455
  CDS (34)..(423)

SEQ ID NO: 458 - protein, 130 aa, Alloiococcus otitidis
MNSRFNRSTMISKCNSPIPAIRVSPVSWSVSALKVGSSSANLAKATDILSWSALDFGSIATWITGSGNSIDSRMTGSSISDKVSPVPVSFKPTAAAISPEKTSGISLRELACICKRRPTRSRLSLVAFKM

SEQ ID NO: 459 - DNA, 498 bp, Alloiococcus otitidis
  CDS (118)..(495)
atagatgaatcggaaggaggacatgagatgtctcgtaaaggaccagctcagaaacgtgatattttaccagatcccatttataactcaaaacttgttgctcgtttaatcaaccgcttgatggtcgatggtaaacgagggaaagcttctactatcttgtatacagcttttgacaaagtaaaagaagaaactggcaatgacccagttgaagttttcgagcaagctctcgaaaacattatgcccgtactggaagttaaagcccgccgtgtaggtggttcaaactaccaagtacccgttgaagtcagacctgccagacgaactaccttggcccttcgttggttagtcaactacgctcgtttgcgtggggaatataccatggaagaccgcctagccaaagaaattatggatgctgctaacaataccggtgcttccgtacgtcgccgtgaagaagtacaccgtatggctgaagctaacaaggcttttgcccactatcgttggtaa

SEQ ID NO: 460 - protein, 126 aa, Alloiococcus otitidis
MVDGKRGKASTILYTAFDKVKEETGNDPVEVFEQALENIMPVLEVKARRVGGSNYQVPVEVRPARRTTLALRWLVNYARLRGEYTMEDRLAKEIMDAANNTGASVRRREEVHRMAEANKAFAHYRW

SEQ ID NO: 461 - DNA, 498 bp, Alloiococcus otitidis; identical to SEQ ID NO: 459
  CDS (28)..(495)

SEQ ID NO: 462 - protein, 156 aa, Alloiococcus otitidis
MSRKGPAQKRDILPDPIYNSKLVARLINRLMVDGKRGKASTILYTAFDKVKEETGNDPVEVFEQALENIMPVLEVKARRVGGSNYQVPVEVRPARRTTLALRWLVNYARLRGEYTMEDRLAKEIMDAANNTGASVRRREEVHRMAEANKAFAHYRW

SEQ ID NO: 463 - DNA, 429 bp, Alloiococcus otitidis
  CDS (19)..(426)
gaagggaggacatacaagatgcctactattaaccaattagtacgtaagcctcgtaaatctaaattgtcaaaaactgaatcaccagccttgaacaagggatacaacaccttgaaacggaaacaaacaactgtttactctcctcaaaaacgtggtgtctgcactcgggttgggactatgacccctaagaaaccgaactcagccttacggaagtatgcccgtgttcgtttgtcaaaccaaattgaggtgacagcctacatccctggtgaaggtcacaacctccaagaacactccgttgttctgatccgtggtggtcgtgttaaagacttacctggtgttcgctaccacattgttcgtggtgccttggatactgcaggagttaacgaccgcaaatccagccgttccaaatacggtactaaaaaacctagctaa

SEQ ID NO: 464 - protein, 136 aa, Alloiococcus otitidis
MPTINQLVRKPRKSKLSKTESPALNKGYNTLKRKQTTVYSPQKRGVCTRVGTMTPKKPNSALRKYARVRLSNQIEVTAYIPGEGHNLQEHSVVLIRGGRVKDLPGVRYHIVRGALDTAGVNDRKSSRSKYGTKKPS

SEQ ID NO: 465 - DNA, 3681 bp, Alloiococcus otitidis
  CDS (361)..(3678)
aataaagggaggtttgcccccttggtagatgtaaataattttgaaagtattcaaattggactggcttcaccagagaaaatccgttcatggtctcatggtgaagtgaagaaacctgaaaccattaactaccggacattaaaacctgaaaaagacggtttgttctgcgaacgcatttttggcccaaccaaggactatgaatgtgcttgcggaaaatataaacgagtccactataaagggatagtttgtgaccgttgcggtgttgaagtcaccaagtcgagtgtcagacgagaacgcatgggccacttggaattagcagctcctgtcacccacatttggtacttcaagggtattccaagtcggatgggccttatcttagatatgagcccaagatccttggaagaaattatctattttgcctcttatgttgttattgacggtggggataccccgcttgaacgcaaacagctcttaactgaacgtgaataccgggaaaacaaaagcaagtacggcaatgaattccaagctgaaattggagctgaagctgttcggaccttgctaaaaaatgtcgatttggaacaagaagttgctgacctcaaagaaatcttagaaactgcaactggccaaaaacggacccgggctattcgtcgtttagacattattgactccttcaagtcttccaacaacaaaccggaatggatggtcttggatgctattccaattatcccacctgaactccgcccaatggtacaactagaaggtggccggtttgcaaccagcgacttgaacgacttgtaccgccgggtgattaaccggaacaaccggttgaaacgcttgcttgacttgaatgccccccacattatcgtccaaaatgaaaaacggatgctgcaagaagctgttgacgccttgattgacaatggtcgtcgcggtcgggcagtcaacggtcctggtaaccgtccgcttaaatctctttctcacatgttgaaagggaaacaagggcgcttccgtcagaacctactagggaaacgggttgactactctggccggtctgtcattgttgttgggccaacccttaaaatgtaccaatgtggtctaccgaaagaaatggccatcgaactcttcaaaccttttgtcatgcgggagctagttgagcgagatattgcaaataacattaaaaatgccaaacgaaaagtggaacggatggaagatgatgtctggcctgttttagaagatgtcattaaagaacaccctgtcctcttaaaccgggcccctacccttcaccggctagggatccaagcctttgaacctgtccttgtcaatgggaaggctattcgcttacacccactcgcttgtgaagcctacaatgctgactttgacggagaccaaatggctgtccacgtacccctcagtgatgaagcccaggcagaagcccgcatcttaatgctgggtgcccaaaatatcttaaaccctaaagatggtcaaccagtcgttaccccttcccaagacatggtcctagggaactactacctaaccatggaagaagaaggtaaaattggtgaaggaactgtcttctccagtgcttctgaggctatccaagcctaccaaacaggctatgtccacctccacacccgggttgcgatccgtgcggtggacttaccggacaaaccttttactgactggcagaaagacaagtacttgattaccacagtcggtaagattatctttaatgaaattatgccagcagaatttccattcttgaacgaaccatctaaggttaacctggaacagcaaaccccagacaagtactttgtcgaccggggccaaaacttgaaagaccttattgccgaccgtcctttagttcagcctttcaaaaaacaagacctgtccaacattatcgccgaagtctttaataacttccaagtgaccgaaacctctaaaatgttggaccgcatgaagaacttgggctacaagtactctacccggtctggtattactgttgggattgctgacgtttcagtcctagaagctaaaccagaaatcctgaaagaagcccacgccaaggttgataaaatcaatgccacccaccgccgcggtttaattactgaagaagagcgttacgacaacgttatcgatgtctggcaaaaggctaaggatgaaattcaagatgccttgatggattcccttgacccaagaaataacatctttatgatgtcagactctggtgcccgtgggaatatttccaacttcacccaactagccggtatgcgtggtttgatggcagcaccaagtggtgagatcatggaattgccgatcacgtctaacttccgtgaaggcctgtctgtcttagagatgtttatttccacccacggtgcccgtaaaggcatgaccgataccgcccttaaaactgccgactctggttacttgaccagacgtttggttgatgttgcccaagacgtcatcatccgagaagaagactgtggcactaaacgtggccttaaagtttctgccatccaagtaggaaatgaacagattgaaagcttgtctgaccgtatcttgggtcgttatgcccaagaaaccgtcacccaccccgaaactggtgaagtcattgttcacaaggatgaattgattgatgaaggcaaaacccgaaaaattgtcgatgccggtattgaagaagttactatccggtctgccttctgctgcaacaccaaccacggtgtctgcaagcactgctatggccgtaacttggcaactggccgggaagttgaagttggtgaagcagttggaactatcgctgcccaatccattggggaacccggtacccaattgaccatgcggaccttccacactggtggggtcgctggggacgacatcacccaaggtctaccacgggttcaagaaatctttgaagcccgccatccgaaagggcaagccaccattacagaagtgaatggtcaaatccaagagatcgttgaagaccctgaagaacgcactaagaccgtcactgttaaggggaatgttgaccaacgtgactactccttgccaatcaatgcccggatgaaggttgaagttggggattatgttgaacgaggcgatgctctaaacgaggggtctattgatccgaaagagttactcgcggtgagtgatatgatgaaattgcagaaatacctcttgcaagaagtccaatacgcttaccggtctcaaggggtcgaaattggtgacaagcacgtggaggttatggtgcgacaaatgctccgtaaagtccgtgtcttgcaaccaggggacactgatatcctgcctggtaccatgattgacctccacgacttcaaggaacgcaaccaagaaaccttgatgtccggtggccaacccgcaactgctagactggtcctactgggtattaccaaggcctcccttgaaaccaactctttcttgtctgcagcttccttccaagaaaccacccgggtcctcaccgatgcagctattcgcggtaaagttgatgacctggttggcttgaaagaaaatgttattatcggtaaatccatcccagctggtactggtatgagagcctacagtaatattgaacctaaaaaagttggtgtcgttagcgaaaatgtctacagcatcaatgaagaagaccaagtcagtcaagaagaaaaccgagaaactgaagaaactagcgagaaataa

SEQ ID NO: 466 - protein, 1106 aa, Alloiococcus otitidis
MGLILDMSPRSLEEIIYFASYVVIDGGDTPLERKQLLTEREYRENKSKYGNEFQAEIGAEAVRTLLKNVDLEQEVADLKEILETATGQKRTRAIRRLDIIDSFKSSNNKPEWMVLDAIPIIPPELRPMVQLEGGRFATSDLNDLYRRVINRNNRLKRLLDLNAPHIIVQNEKRMLQEAVDALIDNGRRGRAVNGPGNRPLKSLSHMLKGKQGRFRQNLLGKRVDYSGRSVIVVGPTLKMYQCGLPKEMAIELFKPFVMRELVERDIANNIKNAKRKVERMEDDVWPVLEDVIKEHPVLLNRAPTLHRLGIQAFEPVLVNGKAIRLHPLACEAYNADFDGDQMAVHVPLSDEAQAEARILMLGAQNILNPKDGQPVVTPSQDMVLGNYYLTMEEEGKIGEGTVFSSASEAIQAYQTGYVHLHTRVAIRAVDLPDKPFTDWQKDKYLITTVGKIIFNEIMPAEFPFLNEPSKVNLEQQTPDKYFVDRGQNLKDLIADRPLVQPFKKQDLSNIIAEVFNNFQVTETSKMLDRMKNLGYKYSTRSGITVGIADVSVLEAKPEILKEAHAKVDKINATHRRGLITEEERYDNVIDVWQKAKDEIQDALMDSLDPRNNIFMMSDSGARGNISNFTQLAGMRGLMAAPSGEIMELPITSNFREGLSVLEMFISTHGARKGMTDTALKTADSGYLTRRLVDVAQDVIIREEDCGTKRGLKVSAIQVGNEQIESLSDRILGRYAQETVTHPETGEVIVHKDELIDEGKTRKIVDAGIEEVTIRSAFCCNTNHGVCKHCYGRNLATGREVEVGEAVGTIAAQSIGEPGTQLTMRTFHTGGVAGDDITQGLPRVQEIFEARHPKGQATITEVNGQIQEIVEDPEERTKTVTVKGNVDQRDYSLPINARMKVEVGDYVERGDALNEGSIDPKELLAVSDMMKLQKYLLQEVQYAYRSQGVEIGDKHVEVMVRQMLRKVRVLQPGDTDILPGTMIDLHDFKERNQETLMSGGQPATARLVLLGITKASLETNSFLSAASFQETTRVLTDAAIRGKVDDLVGLKENVIIGKSIPAGTGMRAYSNIEPKKVGVVSENVYSINEEDQVSQEENRETEETSEK

SEQ ID NO: 467 - DNA, 3681 bp, Alloiococcus otitidis; identical to SEQ ID NO: 465
  CDS (295)..(3678)

SEQ ID NO: 468 - protein, 1128 aa, Alloiococcus otitidis
MGHLELAAPVTHIWYFKGIPSRMGLILDMSPRSLEEIIYFASYVVIDGGDTPLERKQLLTEREYRENKSKYGNEFQAEIGAEAVRTLLKNVDLEQEVADLKEILETATGQKRTRAIRRLDIIDSFKSSNNKPEWMVLDAIPIIPPELRPMVQLEGGRFATSDLNDLYRRVINRNNRLKRLLDLNAPHIIVQNEKRMLQEAVDALIDNGRRGRAVNGPGNRPLKSLSHMLKGKQGRFRQNLLGKRVDYSGRSVIVVGPTLKMYQCGLPKEMAIELFKPFVMRELVERDIANNIKNAKRKVERMEDDVWPVLEDVIKEHPVLLNRAPTLHRLGIQAFEPVLVNGKAIRLHPLACEAYNADFDGDQMAVHVPLSDEAQAEARILMLGAQNILNPKDGQPVVTPSQDMVLGNYYLTMEEEGKIGEGTVFSSASEAIQAYQTGYVHLHTRVAIRAVDLPDKPFTDWQKDKYLITTVGKIIFNEIMPAEFPFLNEPSKVNLEQQTPDKYFVDRGQNLKDLIADRPLVQPFKKQDLSNIIAEVFNNFQVTETSKMLDRMKNLGYKYSTRSGITVGIADVSVLEAKPEILKEAHAKVDKINATHRRGLITEEERYDNVIDVWQKAKDEIQDALMDSLDPRNNIFMMSDSGARGNISNFTQLAGMRGLMAAPSGEIMELPITSNFREGLSVLEMFISTHGARKGMTDTALKTADSGYLTRRLVDVAQDVIIREEDCGTKRGLKVSAIQVGNEQIESLSDRILGRYAQETVTHPETGEVIVHKDELIDEGKTRKIVDAGIEEVTIRSAFCCNTNHGVCKHCYGRNLATGREVEVGEAVGTIAAQSIGEPGTQLTMRTFHTGGVAGDDITQGLPRVQEIFEARHPKGQATITEVNGQIQEIVEDPEERTKTVTVKGNVDQRDYSLPINARMKVEVGDYVERGDALNEGSIDPKELLAVSDMMKLQKYLLQEVQYAYRSQGVEIGDKHVEVMVRQMLRKVRVLQPGDTDILPGTMIDLHDFKERNQETLMSGGQPATARLVLLGITKASLETNSFLSAASFQETTRVLTDAAIRGKVDDLVGLKENVIIGKSIPAGTGMRAYSNIEPKKVGVVSENVYSINEEDQVSQEENRETEETSEK

SEQ ID NO: 469 - DNA, 3681 bp, Alloiococcus otitidis; identical to SEQ ID NO: 465
  CDS (103)..(3678)

SEQ ID NO: 470 - protein, 1192 aa, Alloiococcus otitidis
MKKPETINYRTLKPEKDGLFCERIFGPTKDYECACGKYKRVHYKGIVCDRCGVEVTKSSVRRERMGHLELAAPVTHIWYFKGIPSRMGLILDMSPRSLEEIIYFASYVVIDGGDTPLERKQLLTEREYRENKSKYGNEFQAEIGAEAVRTLLKNVDLEQEVADLKEILETATGQKRTRAIRRLDIIDSFKSSNNKPEWMVLDAIPIIPPELRPMVQLEGGRFATSDLNDLYRRVINRNNRLKRLLDLNAPHIIVQNEKRMLQEAVDALIDNGRRGRAVNGPGNRPLKSLSHMLKGKQGRFRQNLLGKRVDYSGRSVIVVGPTLKMYQCGLPKEMAIELFKPFVMRELVERDIANNIKNAKRKVERMEDDVWPVLEDVIKEHPVLLNRAPTLHRLGIQAFEPVLVNGKAIRLHPLACEAYNADFDGDQMAVHVPLSDEAQAEARILMLGAQNILNPKDGQPVVTPSQDMVLGNYYLTMEEEGKIGEGTVFSSASEAIQAYQTGYVHLHTRVAIRAVDLPDKPFTDWQKDKYLITTVGKIIFNEIMPAEFPFLNEPSKVNLEQQTPDKYFVDRGQNLKDLIADRPLVQPFKKQDLSNIIAEVFNNFQVTETSKMLDRMKNLGYKYSTRSGITVGIADVSVLEAKPEILKEAHAKVDKINATHRRGLITEEERYDNVIDVWQKAKDEIQDALMDSLDPRNNIFMMSDSGARGNISNFTQLAGMRGLMAAPSGEIMELPITSNFREGLSVLEMFISTHGARKGMTDTALKTADSGYLTRRLVDVAQDVIIREEDCGTKRGLKVSAIQVGNEQIESLSDRILGRYAQETVTHPETGEVIVHKDELIDEGKTRKIVDAGIEEVTIRSAFCCNTNHGVCKHCYGRNLATGREVEVGEAVGTIAAQSIGEPGTQLTMRTFHTGGVAGDDITQGLPRVQEIFEARHPKGQATITEVNGQIQEIVEDPEERTKTVTVKGNVDQRDYSLPINARMKVEVGDYVERGDALNEGSIDPKELLAVSDMMKLQKYLLQEVQYAYRSQGVEIGDKHVEVMVRQMLRKVRVLQPGDTDILPGTMIDLHDFKERNQETLMSGGQPATARLVLLGITKASLETNSFLSAASFQETTRVLTDAAIRGKVDDLVGLKENVIIGKSIPAGTGMRAYSNIEPKKVGVVSENVYSINEEDQVSQEENRETEETSEK

SEQ ID NO: 471 - DNA, 3681 bp, Alloiococcus otitidis; identical to SEQ ID NO: 465
  CDS (22)..(3678)

SEQ ID NO: 472 - protein, 1219 aa, Alloiococcus otitidis
MVDVNNFESIQIGLASPEKIRSWSHGEVKKPETINYRTLKPEKDGLFCERIFGPTKDYECACGKYKRVHYKGIVCDRCGVEVTKSSVRRERMGHLELAAPVTHIWYFKGIPSRMGLILDMSPRSLEEIIYFASYVVIDGGDTPLERKQLLTEREYRENKSKYGNEFQAEIGAEAVRTLLKNVDLEQEVADLKEILETATGQKRTRAIRRLDIIDSFKSSNNKPEWMVLDAIPIIPPELRPMVQLEGGRFATSDLNDLYRRVINRNNRLKRLLDLNAPHIIVQNEKRMLQEAVDALIDNGRRGRAVNGPGNRPLKSLSHMLKGKQGRFRQNLLGKRVDYSGRSVIVVGPTLKMYQCGLPKEMAIELFKPFVMRELVERDIANNIKNAKRKVERMEDDVWPVLEDVIKEHPVLLNRAPTLHRLGIQAFEPVLVNGKAIRLHPLACEAYNADFDGDQMAVHVPLSDEAQAEARILMLGAQNILNPKDGQPVVTPSQDMVLGNYYLTMEEEGKIGEGTVFSSASEAIQAYQTGYVHLHTRVAIRAVDLPDKPFTDWQKDKYLITTVGKIIFNEIMPAEFPFLNEPSKVNLEQQTPDKYFVDRGQNLKDLIADRPLVQPFKKQDLSNIIAEVFNNFQVTETSKMLDRMKNLGYKYSTRSGITVGIADVSVLEAKPEILKEAHAKVDKINATHRRGLITEEERYDNVIDVWQKAKDEIQDALMDSLDPRNNIFMMSDSGARGNISNFTQLAGMRGLMAAPSGEIMELPITSNFREGLSVLEMFISTHGARKGMTDTALKTADSGYLTRRLVDVAQDVIIREEDCGTKRGLKVSAIQVGNEQIESLSDRILGRYAQETVTHPETGEVIVHKDELIDEGKTRKIVDAGIEEVTIRSAFCCNTNHGVCKHCYGRNLATGREVEVGEAVGTIAAQSIGEPGTQLTMRTFHTGGVAGDDITQGLPRVQEIFEARHPKGQATITEVNGQIQEIVEDPEERTKTVTVKGNVDQRDYSLPINARMKVEVGDYVERGDALNEGSIDPKELLAVSDMMKLQKYLLQEVQYAYRSQGVEIGDKHVEVMVRQMLRKVRVLQPGDTDILPGTMIDLHDFKERNQETLMSGGQPATARLVLLGITKASLETNSFLSAASFQETTRVLTDAAIRGKVDDLVGLKENVIIGKSIPAGTGMRAYSNIEPKKVGVVSENVYSINEEDQVSQEENRETEETSEK

SEQ ID NO: 473 - DNA, 537 bp, Alloiococcus otitidis
  CDS (37)..(534)
accttgggtgatgtcgtccccagcgaccccaccagtgtggaaggtccgcatggtcaattgggtaccgggttccccaatggattgggcagcgatagttccaactgcttcaccaacttcaacttcccggccagttgccaagttacggccatagcagtgcttgcagacaccgtggttggtgttgcagcagaaggcagaccggatagtaacttcttcaataccggcatcgacaatttttcgggttttgccttcatcaatcaattcatccttgtgaacaatgacttcaccagtttcggggtgggtgacggtttcttgggcataacgacccaagatacggtcagacaagctttcaatctgttcatttcctacttggatggcagaaactttaaggccacgtttagtgccacagtcttcttctcggatgatgacgtcttgggcaacatcaaccaaacgtctggtcaagtaaccagagtcggcagttttaagggcggtatcggtcatgcctttacgggcaccgtgggtggaaataaacatctctaa

SEQ ID NO: 474 - protein, 166 aa, Alloiococcus otitidis
MEGPHGQLGTGFPNGLGSDSSNCFTNFNFPASCQVTAIAVLADTVVGVAAEGRPDSNFFNTGIDNFSGFAFINQFILVNNDFTSFGVGDGFLGITTQDTVRQAFNLFISYLDGRNFKATFSATVFFSDDDVLGNINQTSGQVTRVGSFKGGIGHAFTGTVGGNKHL

SEQ ID NO: 475 - DNA, 537 bp, Alloiococcus otitidis; identical to SEQ ID NO: 473
  CDS (4)..(534)

SEQ ID NO: 476 - protein, 177 aa, Alloiococcus otitidis
MGDVVPSDPTSVEGPHGQLGTGFPNGLGSDSSNCFTNFNFPASCQVTAIAVLADTVVGVAAEGRPDSNFFNTGIDNFSGFAFINQFILVNNDFTSFGVGDGFLGITTQDTVRQAFNLFISYLDGRNFKATFSATVFFSDDDVLGNINQTSGQVTRVGSFKGGIGHAFTGTVGGNKHL

SEQ ID NO: 477 - DNA, 552 bp, Alloiococcus otitidis
  CDS (115)..(549)
gaaagagatttaagcggacggttaccaggaccgttgactgcccgaccgcgacgaccattgtcaatcaaggcgtcaacagcttcttgcagcatccgtttttcattttggacgataatgtggggggcattcaagtcaagcaagcgtttcaaccggttgttccggttaatcacccggcggtacaagtcgttcaagtcgctggttgcaaaccggccaccttctagttgtaccattgggcggagttcaggtgggataattggaatagcatccaagaccatccattccggtttgttgttggaagacttgaaggagtcaataatgtctaaacgacgaatagcccgggtccgtttttggccagttgcagtttctaagatttctttgaggtcagcaacttcttgttccaaatcgacattttttagcaaggtccgaacagcttcagctccaatttcagcttggaattcattgccgtacttgcttttgttttcccggtattcacgttcagttaagagctgtttgcgttcaagcggggtatccccaccgtcaataacaacataa

SEQ ID NO: 478 - protein, 145 aa, Alloiococcus otitidis
MWGAFKSSKRFNRLFRLITRRYKSFKSLVANRPPSSCTIGRSSGGIIGIASKTIHSGLLLEDLKESIMSKRRIARVRFWPVAVSKISLRSATSCSKSTFFSKVRTASAPISAWNSLPYLLLFSRYSRSVKSCLRSSGVSPPSITT

SEQ ID NO: 479 - DNA, 552 bp, Alloiococcus otitidis; identical to SEQ ID NO: 477
  CDS (34)..(549)

SEQ ID NO: 480 - protein, 172 aa, Alloiococcus otitidis
MTARPRRPLSIKASTASCSIRFSFWTIMWGAFKSSKRFNRLFRLITRRYKSFKSLVANRPPSSCTIGRSSGGIIGIASKTIHSGLLLEDLKESIMSKRRIARVRFWPVAVSKISLRSATSCSKSTFFSKVRTASAPISAWNSLPYLLLFSRYSRSVKSCLRSSGVSPPSITT

SEQ ID NO: 481 - DNA, 3582 bp, Alloiococcus otitidis
  CDS (154)..(3579)
gaggtgaacaagttggtcggtaaaaaagttaattttggtaaacaccgtgttcgtagaagttactcacgaatcaacgaagtactcgagctcccgaatttaattgaaatccagactgattcatatgattggtttttagatgaaggcttgaaggaaatgtttagtgatatttccccaatcgatgatttttcaggcaatttgtccctagaatttgttgactataaattttacgaaagcaagtatactgttgaagaagctagagagcatgatgcgaactattctgcccccctctacgtgaagttacgtttgatcaacaaggaaactggtgaagtcaaggaacaagaagtcttcttcggtgactttccgttaatgacagaacaagggacctttatcatcaacggggctgagcgggtgattgtttcccaacttgtccggtcgcctggggtttattacagtccaaaagttgagaaaaacggccgggaaggtttttcaaccgttcttatccctaaccggggtgcttggcttgaatacgaaacagataccaaaggcatctccaatgttcgaattgaccgaacccgtaaaattccgatcactgtcttgttaagagctctagggattgggtcagatgatgaaattattgacctgatcggcttgaatgacagcttggaagccaccttggaaaaggatgtccacaagtctacttcagattcccgcgtagaagaagccttgaaagacttgtatgaacgcttgcgtccaggtgaacccaaaacagctgaatcctctcgtaacttgatcaatacccggttctttgaccacaagcgttacgacctagcctatgttggtcgctacaagatgaacaaaaaactagaccttaaaacccgcttgatggggactgtccttgccgaaaacctggttgatcctgaagctggcgaggtcttagctgaagaaggtagtgaagtgacccggtctgtgatggacaagcttggcccttaccttgacggtgacatgaaccaagtaaccattaacccctcagaagaagcggttatccctgaacccattgacctacaaattgtcaaagtctactccaaagaagatccagaccggatcgtgaacatgatcggcaacgggcaccctgacaaaaaggccaaatggattacccctgctgacatgatagcggctatgagttacttctttaacctccaagaaggcattggcgatgttgacgatatcgaccacttgggtaaccgtcggatccggtcagtcggagagcttttgcaaaaccaattccgaattgggctctctcggatggagcgggtggtccgcgaacgaatgtccatccaagacatttctagcaccacaccccaacaattaattaacatccgtcccgttgtagcttctctgaaagaatttttcgggtcttcccaactctcccaattcatggaccaaaccaaccccttgggtgagttaacccacaaacgtcgcttgtctgcccttggaccaggaggcttgactagggaccgggctggttatgaagtccgagacgtccactattcccactacggccggatgtgcccgatcgaaacacctgaaggcccaaacattggtctgattaacagtttgtctacctatgctaagatcaataaatttggttttattgaaacaccttaccgccgggtggaccgggaaactggccaggtaacggataaaattgactacttgactgctgacgaagaagatctttacgttgtagcccaagccaatgctgaattagatgaagatggacattttgctaatgatgtcgtcctagcccgaagacgggatgtcaacgaagaggttgacgcttccgaagttgactatatggacgtgtcaccaaaacaagttgtttctgtggccacagcttccattcctttcttagaaaacgacgactccaaccgggctctaatgggggctaacatgcaacggcaagctgttcctcttatgcaaccagagtccccactagtaggaactggaatcgaacacattgcagcccgtgactctggagctgccgttattgccaaggctgacggggttgtggagtatgttgatgccaagacggtcaaagtccgtcaagccgatggtaccctcaacaactacaagctggctaagtacaaacggtccaactccggaacttcttacaaccaaagaccaattgtaaaaactggtgaggaagttgacaaaggcgacatcctagcagatggtccgtccatggaaaatggtgaaatggcccttggtaaaaacccattgattgcctttaccacctttgatggctacaacttcgaggatgccgtcattatgagtgaacgtttggtcaaagatgacgtttatacctccatccacattgaagaatatgaatctgaagcccgcgataccaagttagggccagaagaaatcacccgggaaattccaaacgtcggggaaagtgccctcaagaacttggatgaaagaggcattatccggatcggggctgaagttcgtgacggggacatcctagttggtaaagttacacccaaaggggttagtgaactatcagctgaggaaaaactcctccacgctatcttcggcgaaaaagcccgggaagttcgtgacacctccctccgtgtcccacacggtagtggcggaattgtccacgatgtccagatctttacccgggaagccggcgacgaactgtcaccaggcgttaactaccttgtccgagttttcattgcccaaaaacgtaaaattgacgttggggacaagatggcaggtcgacacgggaacaagggtgttgtttcccttatcttaccagaagaagacatgccgtttatgccagacggaaccccaattgacatcatgctcaacccacttggtgtcccttcccggatgaatgtcggccaggtcatcgaactccacatggggatggcagcccgacagttaggcgagcacattgctactccagtctttgacggggccaacgaagaagatgtttgggaaactatcaaggaagccggtatggatgcagatgccaaaaccgtcttgtatgacggccggactggcgagccatttgacaacaaggtctccgttggggtgatgtactttatcaaactagtccacatggtcgacgacaagttgcacgccagatccacaggaccatactccttggttacccaacaaccccttggtgggaaagcacagtttggtggccaacgctttggtgagatggaagtctgggccttggaagcttatggggcttcccgcaccctccaagaaatcttgacctacaagtcagatgacgtgattggaagggtagacacctatgaagccattgtcaagggccaacgcattccaaaacctggtgtacctgaatccttccgtgtcctcgtgaaagaactccagtctctggggttggacctgaaagtcctcgacaaggaacaaaacgaaatcaatctcaaggctgaagatgacgagtcggaagaccaagtcgttgattccctagaagaaatgcgtaaagagcaggaagaagaacgccgtaaggaaaaagaaaaagaagagccaagtactgagtcgtaa

SEQ ID NO: 482 - protein, 1142 aa, Alloiococcus otitidis
MFSDISPIDDFSGNLSLEFVDYKFYESKYTVEEAREHDANYSAPLYVKLRLINKETGEVKEQEVFFGDFPLMTEQGTFIINGAERVIVSQLVRSPGVYYSPKVEKNGREGFSTVLIPNRGAWLEYETDTKGISNVRIDRTRKIPITVLLRALGIGSDDEIIDLIGLNDSLEATLEKDVHKSTSDSRVEEALKDLYERLRPGEPKTAESSRNLINTRFFDHKRYDLAYVGRYKMNKKLDLKTRLMGTVLAENLVDPEAGEVLAEEGSEVTRSVMDKLGPYLDGDMNQVTINPSEEAVIPEPIDLQIVKVYSKEDPDRIVNMIGNGHPDKKAKWITPADMIAAMSYFFNLQEGIGDVDDIDHLGNRRIRSVGELLQNQFRIGLSRMERVVRERMSIQDISSTTPQQLINIRPVVASLKEFFGSSQLSQFMDQTNPLGELTHKRRLSALGPGGLTRDRAGYEVRDVHYSHYGRMCPIETPEGPNIGLINSLSTYAKINKFGFIETPYRRVDRETGQVTDKIDYLTADEEDLYVVAQANAELDEDGHFANDVVLARRRDVNEEVDASEVDYMDVSPKQVVSVATASIPFLENDDSNRALMGANMQRQAVPLMQPESPLVGTGIEHIAARDSGAAVIAKADGVVEYVDAKTVKVRQADGTLNNYKLAKYKRSNSGTSYNQRPIVKTGEEVDKGDILADGPSMENGEMALGKNPLIAFTTFDGYNFEDAVIMSERLVKDDVYTSIHIEEYESEARDTKLGPEEITREIPNVGESALKNLDERGIIRIGAEVRDGDILVGKVTPKGVSELSAEEKLLHAIFGEKAREVRDTSLRVPHGSGGIVHDVQIFTREAGDELSPGVNYLVRVFIAQKRKIDVGDKMAGRHGNKGVVSLILPEEDMPFMPDGTPIDIMLNPLGVPSRMNVGQVIELHMGMAARQLGEHIATPVFDGANEEDVWETIKEAGMDADAKTVLYDGRTGEPFDNKVSVGVMYFIKLVHMVDDKLHARSTGPYSLVTQQPLGGKAQFGGQRFGEMEVWALEAYGASRTLQEILTYKSDDVIGRVDTYEAIVKGQRIPKPGVPESFRVLVKELQSLGLDLKVLDKEQNEINLKAEDDESEDQVVDSLEEMRKEQEEERRKEKEKEEPSTES

SEQ ID NO: 483 - DNA, 3582 bp, Alloiococcus otitidis; identical to SEQ ID NO: 481
  CDS (13)..(3579)

SEQ ID NO: 484 - protein, 1189 aa, Alloiococcus otitidis
MVGKKVNFGKHRVRRSYSRINEVLELPNLIEIQTDSYDWFLDEGLKEMFSDISPIDDFSGNLSLEFVDYKFYESKYTVEEAREHDANYSAPLYVKLRLINKETGEVKEQEVFFGDFPLMTEQGTFIINGAERVIVSQLVRSPGVYYSPKVEKNGREGFSTVLIPNRGAWLEYETDTKGISNVRIDRTRKIPITVLLRALGIGSDDEIIDLIGLNDSLEATLEKDVHKSTSDSRVEEALKDLYERLRPGEPKTAESSRNLINTRFFDHKRYDLAYVGRYKMNKKLDLKTRLMGTVLAENLVDPEAGEVLAEEGSEVTRSVMDKLGPYLDGDMNQVTINPSEEAVIPEPIDLQIVKVYSKEDPDRIVNMIGNGHPDKKAKWITPADMIAAMSYFFNLQEGIGDVDDIDHLGNRRIRSVGELLQNQFRIGLSRMERVVRERMSIQDISSTTPQQLINIRPVVASLKEFFGSSQLSQFMDQTNPLGELTHKRRLSALGPGGLTRDRAGYEVRDVHYSHYGRMCPIETPEGPNIGLINSLSTYAKINKFGFIETPYRRVDRETGQVTDKIDYLTADEEDLYVVAQANAELDEDGHFANDVVLARRRDVNEEVDASEVDYMDVSPKQVVSVATASIPFLENDDSNRALMGANMQRQAVPLMQPESPLVGTGIEHIAARDSGAAVIAKADGVVEYVDAKTVKVRQADGTLNNYKLAKYKRSNSGTSYNQRPIVKTGEEVDKGDILADGPSMENGEMALGKNPLIAFTTFDGYNFEDAVIMSERLVKDDVYTSIHIEEYESEARDTKLGPEEITREIPNVGESALKNLDERGIIRIGAEVRDGDILVGKVTPKGVSELSAEEKLLHAIFGEKAREVRDTSLRVPHGSGGIVHDVQIFTREAGDELSPGVNYLVRVFIAQKRKIDVGDKMAGRHGNKGVVSLILPEEDMPFMPDGTPIDIMLNPLGVPSRMNVGQVIELHMGMAARQLGEHIATPVFDGANEEDVWETIKEAGMDADAKTVLYDGRTGEPFDNKVSVGVMYFIKLVHMVDDKLHARSTGPYSLVTQQPLGGKAQFGGQRFGEMEVWALEAYGASRTLQEILTYKSDDVIGRVDTYEAIVKGQRIPKPGVPESFRVLVKELQSLGLDLKVLDKEQNEINLKAEDDESEDQVVDSLEEMRKEQEEERRKEKEKEEPSTES

SEQ ID NO: 485 - DNA, 3582 bp, Alloiococcus otitidis; identical to SEQ ID NO: 481
  CDS (4)..(3579)

SEQ ID NO: 486 - protein, 1192 aa, Alloiococcus otitidis
MNKLVGKKVNFGKHRVRRSYSRINEVLELPNLIEIQTDSYDWFLDEGLKEMFSDISPIDDFSGNLSLEFVDYKFYESKYTVEEAREHDANYSAPLYVKLRLINKETGEVKEQEVFFGDFPLMTEQGTFIINGAERVIVSQLVRSPGVYYSPKVEKNGREGFSTVLIPNRGAWLEYETDTKGISNVRIDRTRKIPITVLLRALGIGSDDEIIDLIGLNDSLEATLEKDVHKSTSDSRVEEALKDLYERLRPGEPKTAESSRNLINTRFFDHKRYDLAYVGRYKMNKKLDLKTRLMGTVLAENLVDPEAGEVLAEEGSEVTRSVMDKLGPYLDGDMNQVTINPSEEAVIPEPIDLQIVKVYSKEDPDRIVNMIGNGHPDKKAKWITPADMIAAMSYFFNLQEGIGDVDDIDHLGNRRIRSVGELLQNQFRIGLSRMERVVRERMSIQDISSTTPQQLINIRPVVASLKEFFGSSQLSQFMDQTNPLGELTHKRRLSALGPGGLTRDRAGYEVRDVHYSHYGRMCPIETPEGPNIGLINSLSTYAKINKFGFIETPYRRVDRETGQVTDKIDYLTADEEDLYVVAQANAELDEDGHFANDVVLARRRDVNEEVDASEVDYMDVSPKQVVSVATASIPFLENDDSNRALMGANMQRQAVPLMQPESPLVGTGIEHIAARDSGAAVIAKADGVVEYVDAKTVKVRQADGTLNNYKLAKYKRSNSGTSYNQRPIVKTGEEVDKGDILADGPSMENGEMALGKNPLIAFTTFDGYNFEDAVIMSERLVKDDVYTSIHIEEYESEARDTKLGPEEITREIPNVGESALKNLDERGIIRIGAEVRDGDILVGKVTPKGVSELSAEEKLLHAIFGEKAREVRDTSLRVPHGSGGIVHDVQIFTREAGDELSPGVNYLVRVFIAQKRKIDVGDKMAGRHGNKGVVSLILPEEDMPFMPDGTPIDIMLNPLGVPSRMNVGQVIELHMGMAARQLGEHIATPVFDGANEEDVWETIKEAGMDADAKTVLYDGRTGEPFDNKVSVGVMYFIKLVHMVDDKLHARSTGPYSLVTQQPLGGKAQFGGQRFGEMEVWALEAYGASRTLQEILTYKSDDVIGRVDTYEAIVKGQRIPKPGVPESFRVLVKELQSLGLDLKVLDKEQNEINLKAEDDESEDQVVDSLEEMRKEQEEERRKEKEKEEPSTES

SEQ ID NO: 487 - DNA, 537 bp, Alloiococcus otitidis
  CDS (169)..(534)
gcttccaaggcccagacttccatctcaccaaagcgttggccaccaaactgtgctttcccaccaaggggttgttgggtaaccaaggagtatggtcctgtggatctggcgtgcaacttgtcgtcgaccatgtggactagtttgataaagtacatcaccccaacggagaccttgttgtcaaatggctcgccagtccggccgtcatacaagacggttttggcatctgcatccataccggcttccttgatagtttcccaaacatcttcttcgttggccccgtcaaagactggagtagcaatgtgctcgcctaactgtcgggctgccatccccatgtggagttcgatgacctggccgacattcatccgggaagggacaccaagtgggttgagcatgatgtcaattggggttccgtctggcataaacggcatgtcttcttctggtaagataagggaaacaacacccttgttcccgtgtcgacctgccatcttgtccccaacgtcaattttacgtttttgggcaatgaaaactcggacaaggtag

SEQ ID NO: 488 - protein, 122 aa, Alloiococcus otitidis
MLSNGSPVRPSYKTVLASASIPASLIVSQTSSSLAPSKTGVAMCSPNCRAAIPMWSSMTWPTFIREGTPSGLSMMSIGVPSGINGMSSSGKIRETTPLFPCRPAILSPTSILRFWAMKTRTR

SEQ ID NO: 489 - DNA, 537 bp, Alloiococcus otitidis; identical to SEQ ID NO: 487
  CDS (127)..(534)

SEQ ID NO: 490 - protein, 136 aa, Alloiococcus otitidis
MWTSLIKYITPTETLLSNGSPVRPSYKTVLASASIPASLIVSQTSSSLAPSKTGVAMCSPNCRAAIPMWSSMTWPTFIREGTPSGLSMMSIGVPSGINGMSSSGKIRETTPLFPCRPAILSPTSILRFWAMKTRTR

SEQ ID NO: 491 - DNA, 537 bp, Alloiococcus otitidis; identical to SEQ ID NO: 487
  CDS (115)..(534)

SEQ ID NO: 492 - protein, 140 aa, Alloiococcus otitidis
MSSTMWTSLIKYITPTETLLSNGSPVRPSYKTVLASASIPASLIVSQTSSSLAPSKTGVAMCSPNCRAAIPMWSSMTWPTFIREGTPSGLSMMSIGVPSGINGMSSSGKIRETTPLFPCRPAILSPTSILRFWAMKTRTR

SEQ ID NO: 493 - DNA, 360 bp, Alloiococcus otitidis
  CDS (94)..(357)
ttaacgcctggtgacagttcgtcgccggcttcccgggtaaagatctggacatcgtggacaattccgccactaccgtgtgggacacggagggaggtgtcacgaacttcccgggctttttcgccgaagatagcgtggaggagtttttcctcagctgatagttcactaacccctttgggtgtaactttaccaactaggatgtccccgtcacgaacttcagccccgatccggataatgcctctttcatccaagttcttgagggcactttccccgacgtttggaatttcccgggtgatttcttctggccctaacttggtatcgcgggcttcagattcatattcttcaatgtggatggaggtataa

SEQ ID NO: 494 - protein, 88 aa, Alloiococcus otitidis
MSRTSRAFSPKIAWRSFSSADSSLTPLGVTLPTRMSPSRTSAPIRIMPLSSKFLRALSPTFGISRVISSGPNLVSRASDSYSSMWMEV

SEQ ID NO: 495 - DNA, 252 bp, Alloiococcus otitidis
  CDS (7)..(249)
cggactttgaccgtcttggcatcaacatactccacaaccccgtcagccttggcaataacggcagctccagagtcacgggctgcaatgtgttcgattccagttcctactagtggggactctggttgcataagaggaacagcttgccgttgcatgttagcccccattagagcccggttggagtcgtcgttttctaagaaaggaatggaagctgtggccacagaaacaacttgttttggtgacacgtccatatag

SEQ ID NO: 496 - protein, 81 aa, Alloiococcus otitidis
MTVLASTYSTTPSALAITAAPESRAAMCSIPVPTSGDSGCIRGTACRCMLAPIRARLESSFSKKGMEAVATETTCFGDTSI

SEQ ID NO: 497 - DNA, 1398 bp, Alloiococcus otitidis
  CDS (643)..(1395)
aggagactcccgagcatttgtaaggttcattgcccagcaatggccttcttttttgtgcattttatcccccaatttttaagtaaaggatggataaatatggaaagtaagcaagcaggactcatcttagatgtctatgacaagccgtcaactggcaaggggttgttgctcagtatccagcacatttttgccatgtttggggccactattttagtccccttggtggttggtcttccggtttcggttgccctctttgccagtggggtagggaccttggtttaccagtttttgacccagcaaaaggtgccggtctatttggggtcatcatttgcctatatttcggccatgcaaattgctatccagcagatgggtggggacttgtctgcctcccagactgggattattttgaccggtttggcctatgtcttgattgctggtcttatcgccgtctttggaactgactggctcaaccggatcatgccgccgattgtaattggcccgatgattatggtgatcgggctcggcttgtcggctactgccattgaaaactcaggccttgtcactggtgggtcttggcgggagatcttagtggccctagtcacctttttagtcactgcctttgtcaataccaaggccaagggttttatgaaaattatccccttcttggtaggtgtagtggctggttacctggtagccgtccttttaggtctggtagactttagtccggtggcagaagcagactggttcgccctaccagaattttactttccctttgagacccaagcctttcactcctatgacctttactttggccctgagacctgggctatcctcccccttgttttggccactgctgctgaacacatcggagaccatgctatgctaggtgaaatttgtaagaaggattttatcgacgatcccggcttgacccggaccttgatgggggacggtctggcgacagccctatctgccttctttggtggaccggccaataccacttacggggaaaatgtaggggttattggcatgacccggattgcctcggtttcggttgtccgcaatgcggcaatactggccgtcattatttccttcctgggcaagtttactgccttgatttccaccatccctgaccctgttctagggggcatgtccatcatcctctacggggtgattgcaagttccggactcaaggtgatgattgaagaccgaactgatttcaataagcctcgcaatttaatcatagccagtgccatgctagttatcggtattggcggagcagttttggatattgggcttgtgaccttgtcagggaccgtccttagtgccttggtcgggattgtcctcaacctcatcctgcccaaagaccaggacttccaaggcgactacttaaaagacaagtaa

SEQ ID NO: 498 - protein, 251 aa, Alloiococcus otitidis
MKIIPFLVGVVAGYLVAVLLGLVDFSPVAEADWFALPEFYFPFETQAFHSYDLYFGPETWAILPLVLATAAEHIGDHAMLGEICKKDFIDDPGLTRTLMGDGLATALSAFFGGPANTTYGENVGVIGMTRIASVSVVRNAAILAVIISFLGKFTALISTIPDPVLGGMSIILYGVIASSGLKVMIEDRTDFNKPRNLIIASAMLVIGIGGAVLDIGLVTLSGTVLSALVGIVLNLILPKDQDFQGDYLKDK

SEQ ID NO: 499 - DNA, 1398 bp, Alloiococcus otitidis; identical to SEQ ID NO: 497
  CDS (160)..(1395)

SEQ ID NO: 500 - protein, 412 aa, Alloiococcus otitidis
MLLSIQHIFAMFGATILVPLVVGLPVSVALFASGVGTLVYQFLTQQKVPVYLGSSFAYISAMQIAIQQMGGDLSASQTGIILTGLAYVLIAGLIAVFGTDWLNRIMPPIVIGPMIMVIGLGLSATAIENSGLVTGGSWREILVALVTFLVTAFVNTKAKGFMKIIPFLVGVVAGYLVAVLLGLVDFSPVAEADWFALPEFYFPFETQAFHSYDLYFGPETWAILPLVLATAAEHIGDHAMLGEICKKDFIDDPGLTRTLMGDGLATALSAFFGGPANTTYGENVGVIGMTRIASVSVVRNAAILAVIISFLGKFTALISTIPDPVLGGMSIILYGVIASSGLKVMIEDRTDFNKPRNLIIASAMLVIGIGGAVLDIGLVTLSGTVLSALVGIVLNLILPKDQDFQGDYLKDK

SEQ ID NO: 501 - DNA, 1398 bp, Alloiococcus otitidis; identical to SEQ ID NO: 497
  CDS (40)..(1395)

SEQ ID NO: 502 - protein, 452 aa, Alloiococcus otitidis
MAFFFVHFIPQFLSKGWINMESKQAGLILDVYDKPSTGKGLLLSIQHIFAMFGATILVPLVVGLPVSVALFASGVGTLVYQFLTQQKVPVYLGSSFAYISAMQIAIQQMGGDLSASQTGIILTGLAYVLIAGLIAVFGTDWLNRIMPPIVIGPMIMVIGLGLSATAIENSGLVTGGSWREILVALVTFLVTAFVNTKAKGFMKIIPFLVGVVAGYLVAVLLGLVDFSPVAEADWFALPEFYFPFETQAFHSYDLYFGPETWAILPLVLATAAEHIGDHAMLGEICKKDFIDDPGLTRTLMGDGLATALSAFFGGPANTTYGENVGVIGMTRIASVSVVRNAAILAVIISFLGKFTALISTIPDPVLGGMSIILYGVIASSGLKVMIEDRTDFNKPRNLIIASAMLVIGIGGAVLDIGLVTLSGTVLSALVGIVLNLILPKDQDFQGDYLKDK

SEQ ID NO: 503 - DNA, 1188 bp, Alloiococcus otitidis
  CDS (202)..(1185)
aggaagagtgtcatgattcagggaattaaaaaccgctataaattaatggataaatacctcctctttgcctacctggtcatggtgatctttagcattgtcatggtcttcagtgccagtagctattctgccatgcagtcccagggcaacccggcctactacctcatccgccaggctgtccatgtgaccttaagcattgtgatcatggcggtgacggcctcgatttccttgaaaaaaattaacaacaaaaaaacggtcatggctattgtagcaatgacaaccctcttgctcctcgccgtcctggtctttggtcgggaaatcaatggggctaaaagatggattcccttccccatcgtcaatatccagccgggtgagatcgccaaggtggtggcggtttggtacatggcctttatcttgtccaaacgggagacctccgatttgtcttcgtttttcgggtcgatcaaaaagcccctcctgatcatcttgctgatggcagccctcatcttcttccagccggataccgggacgactgtcattatcctgggaacggtgaccattatgatctttgctagtgggatccccattaagattgggctaggcttctcggctgcaggggtcggcatactggctggtctcatgctcttgatccggcaatttggggacaaactccccctcatctccggctaccgctatgaacgtttccaagccttttgggatcccttttccttggctgactcccacggtttacaattggttaactcttactatgccttgagccggggcggtcttggcggagttggcttgggtaacagtatccaaaagactggctacctcccctttccttatacggactttatcatcgctattgttggagaagagttaggctttattggacttttgctcgtcttagcctgtttttccttgattgttctgcggatattcttaatcggcatccactctaaaaaggcctttcgtagtcttatctgctttggtatcggcactttacttgtcatccagtccctctttaatatcggtggggtggttggcctcctgcctattaccggtttgacctttcccttcttaagttatggggggtcgagtttgatgattctgtcctttgccattggcctggtcttgaatgtgtccacccgcaacaaccacgaccggcaaaaaagtaaagccgaatcctag

SEQ ID NO: 504 - protein, 328 aa, Alloiococcus otitidis
MAVTASISLKKINNKKTVMAIVAMTTLLLLAVLVFGREINGAKRWIPFPIVNIQPGEIAKVVAVWYMAFILSKRETSDLSSFFGSIKKPLLIILLMAALIFFQPDTGTTVIILGTVTIMIFASGIPIKIGLGFSAAGVGILAGLMLLIRQFGDKLPLISGYRYERFQAFWDPFSLADSHGLQLVNSYYALSRGGLGGVGLGNSIQKTGYLPFPYTDFIIAIVGEELGFIGLLLVLACFSLIVLRIFLIGIHSKKAFRSLICFGIGTLLVIQSLFNIGGVVGLLPITGLTFPFLSYGGSSLMILSFAIGLVLNVSTRNNHDRQKSKAES

SEQ ID NO: 505 - DNA, 1188 bp, Alloiococcus otitidis; identical to SEQ ID NO: 503
  CDS (13)..(1185)

SEQ ID NO: 506 - protein, 391 aa, Alloiococcus otitidis
MIQGIKNRYKLMDKYLLFAYLVMVIFSIVMVFSASSYSAMQSQGNPAYYLIRQAVHVTLSIVIMAVTASISLKKINNKKTVMAIVAMTTLLLLAVLVFGREINGAKRWIPFPIVNIQPGEIAKVVAVWYMAFILSKRETSDLSSFFGSIKKPLLIILLMAALIFFQPDTGTTVIILGTVTIMIFASGIPIKIGLGFSAAGVGILAGLMLLIRQFGDKLPLISGYRYERFQAFWDPFSLADSHGLQLVNSYYALSRGGLGGVGLGNSIQKTGYLPFPYTDFIIAIVGEELGFIGLLLVLACFSLIVLRIFLIGIHSKKAFRSLICFGIGTLLVIQSLFNIGGVVGLLPITGLTFPFLSYGGSSLMILSFAIGLVLNVSTRNNHDRQKSKAES

SEQ ID NO: 507 - DNA, 525 bp, Alloiococcus otitidis
  CDS (7)..(522)
ccggagatgagggggagtttgtccccaaattgccggatcaagagcatgagaccagccagtatgccgacccctgcagccgagaagcctagcccaatcttaatggggatcccactagcaaagatcataatggtcaccgttcccaggataatgacagtcgtcccggtatccggctggaagaagatgagggctgccatcagcaagatgatcaggaggggctttttgatcgacccgaaaaacgaagacaaatcggaggtctcccgtttggacaagataaaggccatgtaccaaaccgccaccaccttggcgatctcacccggctggatattgacgatggggaagggaatccatcttttagccccattgatttcccgaccaaagaccaggacggcgaggagcaagagggttgtcattgctacaatagccatgaccgtttttttgttgttaatttttttcaaggaaatcgaggccgtcaccgccatgatcacaatgcttaaggtcacatggacagcctggcggatgaggtag

SEQ ID NO: 508 - protein, 172 aa, Alloiococcus otitidis
MRGSLSPNCRIKSMRPASMPTPAAEKPSPILMGIPLAKIIMVTVPRIMTVVPVSGWKKMRAAISKMIRRGFLIDPKNEDKSEVSRLDKIKAMYQTATTLAISPGWILTMGKGIHLLAPLISRPKTRTARSKRVVIATIAMTVFLLLIFFKEIEAVTAMITMLKVTWTAWRMR

SEQ ID NO: 509 - DNA, 1227 bp, Alloiococcus otitidis
  CDS (133)..(1224)
gagattctcgcaatgaaaaattcgcctagcccacaacggattgactatagtattattttccccgttttaatcctctgtattatcgggattgttaccctttatgcgacgaccgttcatattcaaggggaagatttgactgttaccctaaggcagttgggctggctggtgattggggcagtcgcagctggtttattgctcttggtggactctgagaaactgtggaaggccaccccttatgtttacggtctttccttgttactgttaattgctacccttcttttttatgaccgacaattggcagccagtgccggggctagacggtggatcagtattcctgggattgggatgactattcagtcgactgaattcgtcaaaattccctttatcctcatgttgtccaaggtggtaacggagcacaaccacaaatacaaggttcataccaacaagtcagattttttcttattaggtaaaattatcctttacacagctccgcccttgttcttagtcctaatgcaacccgacttagggaccggtttggcctttgctgccatagcagctgggattgttctcttgtccggtattcgctggcgtatcttgctccctattattatttttatcctggtctttggggtaggctttgtccttttagccatctaccaaagagactttctcgttgatgtcttaggcttccatgaataccaattcagacggattgatacctggctcaacccccatcaagacatgagttcctacagttatcaagtgacccaggccttcaaggcaattgggtctggcgggattatcggtaagggctttggtgtgtctgaagtctatgttccagtccgggaatcggacatgattatcgcctccattgctgagatgtttggttttgtggggacttctatcgttatttttgtctatttcctactcatctacaacatggtcaaggttatttttgatatccggaatgaattctattcctatattgcgactgggattattatgatgatcgtctttcacattttagaaaatatcggcatgaatattggcttgatgcctttgactgggatccccctcccctttatttcccaaggaggatcggccctggtcggcaacttactcggggtcggtctcatcatgtcgatgaagttccaccacaagtcccattattattcaggggagagacggtcccgctaccggttaaaaaatagaccaggcaaagaatga

SEQ ID NO: 510 - protein, 364 aa, Alloiococcus otitidis
MTVTLRQLGWLVIGAVAAGLLLLVDSEKLWKATPYVYGLSLLLLIATLLFYDRQLAASAGARRWISIPGIGMTIQSTEFVKIPFILMLSKVVTEHNHKYKVHTNKSDFFLLGKIILYTAPPLFLVLMQPDLGTGLAFAAIAAGIVLLSGIRWRILLPIIIFILVFGVGFVLLAIYQRDFLVDVLGFHEYQFRRIDTWLNPHQDMSSYSYQVTQAFKAIGSGGIIGKGFGVSEVYVPVRESDMIIASIAEMFGFVGTSIVIFVYFLLIYNMVKVIFDIRNEFYSYIATGIIMMIVFHILENIGMNIGLMPLTGIPLPFISQGGSALVGNLLGVGLIMSMKFHHKSHYYSGERRSRYRLKNRPGKE

SEQ ID NO: 511 - DNA, 1227 bp, Alloiococcus otitidis; identical to SEQ ID NO: 509
  CDS (13)..(1224)

SEQ ID NO: 512 - protein, 404 aa, Alloiococcus otitidis
MKNSPSPQRIDYSIIFPVLILCIIGIVTLYATTVHIQGEDLTVTLRQLGWLVIGAVAAGLLLLVDSEKLWKATPYVYGLSLLLLIATLLFYDRQLAASAGARRWISIPGIGMTIQSTEFVKIPFILMLSKVVTEHNHKYKVHTNKSDFFLLGKIILYTAPPLFLVLMQPDLGTGLAFAAIAAGIVLLSGIRWRILLPIIIFILVFGVGFVLLAIYQRDFLVDVLGFHEYQFRRIDTWLNPHQDMSSYSYQVTQAFKAIGSGGIIGKGFGVSEVYVPVRESDMIIASIAEMFGFVGTSIVIFVYFLLIYNMVKVIFDIRNEFYSYIATGIIMMIVFHILENIGMNIGLMPLTGIPLPFISQGGSALVGNLLGVGLIMSMKFHHKSHYYSGERRSRYRLKNRPGKE

SEQ ID NO: 513 - DNA, 1479 bp, Alloiococcus otitidis
  CDS (28)..(1476)
atgattactgttttgcatggccttagaatggagttcctgatgaaaaaatcaactgtcttgacccttgtccttgcctttgtggccctcattttactggcctgttcccaaaagccctcccaaaaatccttccagcccaaggaggccagtgtcacccaaaaccgggccttagtagaagaatcccggtatccgggaatagggatcagcaaggaagaaattcatggggactacgacaaccaattcatcagctacccggtttttaaagaagaccaattgaaccaggatattgaagactttatccaagataaaaaggatggctaccaggccttagttgacaacttaaacctagaagaccaaggcctgaccgaggatgacaagctttaccataatatatcttttaccctccatccagtcattgagagtgtctatagtctcgtttttgacacttttatccggtctaataagacaaacccagaaaccagtacccaagctttgatggtggataccaaagcgggaacctggctaaaggcagaggactatttcactgaccaggggcggaagcaatttgaagacctggtcaaaaggaaattggaagcggacttgggccagtacttttttgaagagtattttgaggaaaaaagagcagatggatctctttaccaggccgtttatttcactgaccattccattgtcgttcaattttcccaatatgagattgcagccggagcagcaggggccccgaaagttagcttaggcctgggccaagttaagacctttttaaataaccaaggccactccctcctagaccaaacgtttcctgatttagacatggaaggagacaaggattcgaaagctttagcccaggagggagcagcagatcaagacgaggaagaggagactttagaccaggaagaagagggtaaaaagctggtggcctttacctttgacgacggtccccatccagagtatactgaccaaatcttgaccattttagaccagtatgatgccaaagggactttctttatgctggggaatagcgtggacttttaccccgatgtcgctaagcgggtggcggcagctggtcacgaaattggcaaccattcttttagccaccctgacttgaccacccttggcagtggccaggtccaatctgaaatttcagaaggtgaccgggccattgaaacagcgactgggcaaatccctcagtactaccgcccaccttacggagcccacaatagcagggtggatgacctggcccaaaagcctgccatcttatgggatgtggataccttagactggcagtccaaagacccccaggctatcttgcacaaggttcaggagcaaacgtctgacgggtccattatccttatgcacgatattcaccagaccaccatcgaaggcttccgtctgtcgattgactacctagctgaccagggatatgagtttgtcacagtcagtgaggtcttagcccacaaggaataa

SEQ ID NO: 514 - protein, 483 aa, Alloiococcus otitidis
MEFLMKKSTVLTLVLAFVALILLACSQKPSQKSFQPKEASVTQNRALVEESRYPGIGISKEEIHGDYDNQFISYPVFKEDQLNQDIEDFIQDKKDGYQALVDNLNLEDQGLTEDDKLYHNISFTLHPVIESVYSLVFDTFIRSNKTNPETSTQALMVDTKAGTWLKAEDYFTDQGRKQFEDLVKRKLEADLGQYFFEEYFEEKRADGSLYQAVYFTDHSIVVQFSQYEIAAGAAGAPKVSLGLGQVKTFLNNQGHSLLDQTFPDLDMEGDKDSKALAQEGAADQDEEEETLDQEEEGKKLVAFTFDDGPHPEYTDQILTILDQYDAKGTFFMLGNSVDFYPDVAKRVAAAGHEIGNHSFSHPDLTTLGSGQVQSEISEGDRAIETATGQIPQYYRPPYGAHNSRVDDLAQKPAILWDVDTLDWQSKDPQAILHKVQEQTSDGSIILMHDIHQTTIEGFRLSIDYLADQGYEFVTVSEVLAHKE

SEQ ID NO: 515 - DNA, 1479 bp, Alloiococcus otitidis; identical to SEQ ID NO: 513
  CDS (1)..(1476)

SEQ ID NO: 516 - protein, 492 aa, Alloiococcus otitidis
MITVLHGLRMEFLMKKSTVLTLVLAFVALILLACSQKPSQKSFQPKEASVTQNRALVEESRYPGIGISKEEIHGDYDNQFISYPVFKEDQLNQDIEDFIQDKKDGYQALVDNLNLEDQGLTEDDKLYHNISFTLHPVIESVYSLVFDTFIRSNKTNPETSTQALMVDTKAGTWLKAEDYFTDQGRKQFEDLVKRKLEADLGQYFFEEYFEEKRADGSLYQAVYFTDHSIVVQFSQYEIAAGAAGAPKVSLGLGQVKTFLNNQGHSLLDQTFPDLDMEGDKDSKALAQEGAADQDEEEETLDQEEEGKKLVAFTFDDGPHPEYTDQILTILDQYDAKGTFFMLGNSVDFYPDVAKRVAAAGHEIGNHSFSHPDLTTLGSGQVQSEISEGDRAIETATGQIPQYYRPPYGAHNSRVDDLAQKPAILWDVDTLDWQSKDPQAILHKVQEQTSDGSIILMHDIHQTTIEGFRLSIDYLADQGYEFVTVSEVLAHKE

SEQ ID NO: 517 - DNA, 837 bp, Alloiococcus otitidis
  CDS (13)..(834)
gggggtagtaatatgtttaagcctgacaagtacgaactaaacctggtctcaaccattgaaggcctgtatgaaagttttaccccaaatgaaaaaaagctggccaagtattttttaaagcaaccaggccatgattgcctgtcatcccgccaggtggctgaccaagtccaggtttctgagtctagcttgtcccgctttgcccaaaagtgtggttattcgggctaccgggagttcatctaccactacaaggccgccatcaaccgccaggacctggaccagaaaaatactgacttaacccacctagtggtagacagctaccaggatatcttggccaagtccttttctatggtggatgtggcccagattaagcggatttgcaagtatattaaagctgctgacctaatttatgcttatggtttaggtaattccgctgcttgtgccgatgaatttaaattccgctttatgcggtttggctgcccagtcctgtctgagtccaaccaccatacgatgaaaatccaggccgcttccatgaaccctagccatcttttagtgggaatttccatttcagccaagaccaaagaagtcatggaggccttgcaagttgctaagggaaggggagctaagacggtcttgattacctcaaacaatgaccggacttttcggggcttttacgatgaagtcctcttggtggctgtcaaaaagcacctagatgaaggacggctgatttcaccccaatttccagtcttgattatgttggacttgctctttgcctactattaccaagataaggatagggtatacaaccaaaccattgccaccttcaaggacttgcaggactag

SEQ ID NO: 518 - protein, 274 aa, Alloiococcus otitidis
MFKPDKYELNLVSTIEGLYESFTPNEKKLAKYFLKQPGHDCLSSRQVADQVQVSESSLSRFAQKCGYSGYREFIYHYKAAINRQDLDQKNTDLTHLVVDSYQDILAKSFSMVDVAQIKRICKYIKAADLIYAYGLGNSAACADEFKFRFMRFGCPVLSESNHHTMKIQAASMNPSHLLVGISISAKTKEVMEALQVAKGRGAKTVLITSNNDRTFRGFYDEVLLVAVKKHLDEGRLISPQFPVLIMLDLLFAYYYQDKDRVYNQTIATFKDLQD

SEQ ID NO: 519 - DNA, 273 bp, Alloiococcus otitidis
  CDS (49)..(270)
cccttgaaggagggcaatagggtctgtttggaagagatcgaccggctagtggactatttgacagacggtctgcaagtcttgtgtctgagcctggacccggacatggtcatcctggggggtgggatcatggcccaggccgactatcttatcccccgaatccaggaaggtctagggcaaaaagtcgatcggccacttgcggtcaagccggctaagtacttaaatgatgccggcatcctgggggcctttttcaccggcctggatcagctgggttaa

SEQ ID NO: 520 - protein, 74 aa, Alloiococcus otitidis
MDYLTDGLQVLCLSLDPDMVILGGGIMAQADYLIPRIQEGLGQKVDRPLAVKPAKYLNDAGILGAFFTGLDQLG

SEQ ID NO: 521 - DNA, 273 bp, Alloiococcus otitidis; identical to SEQ ID NO: 519
  CDS (4)..(270)

SEQ ID NO: 522 - protein, 89 aa, Alloiococcus otitidis
MKEGNRVCLEEIDRLVDYLTDGLQVLCLSLDPDMVILGGGIMAQADYLIPRIQEGLGQKVDRPLAVKPAKYLNDAGILGAFFTGLDQLG

SEQ ID NO: 523 - DNA, 654 bp, Alloiococcus otitidis
  CDS (25)..(651)
tgcggtttctttaaggaggaaaacatgaaggcaatctgtgtagatatcggtgggaccgccatcaagtatggcattttaagccaagatggaccagagactcaagttgaaatccaggcaaagggcagccaaaattgggaccccaagagtctggggggtcccaaagtgcccagctttgtatttgacctggtccaagactatttggatgacagtattgactttatcggcatctcgtcagcaggggtggtggatgtccaagcaggggtcatccaatcagccaatgaaaatattccaaactatgctggggtgaagctgaaagaagaattacaaggcttgactggcaagcctgtttttgtcgacaatgatgtcaattgtgccagcctggctgaatataaacagggtcatgccaagtctgctgaagtcgctctaaccttgacccttggtactggggttgggggtggcttaatttaccaaggccaagtcttccgcggggcccactcggcagccatggaagtgggctacctccccttaaaagatgggagttttgaagacttggcttcggtgacaggtctaatcaaacgctgtgaagctcgattagggcaagaaggtttggagggtaagaccatttttgacctagcccttgaaggagggcaatag

SEQ ID NO: 524 - protein, 209 aa, Alloiococcus otitidis
MKAICVDIGGTAIKYGILSQDGPETQVEIQAKGSQNWDPKSLGGPKVPSFVFDLVQDYLDDSIDFIGISSAGVVDVQAGVIQSANENIPNYAGVKLKEELQGLTGKPVFVDNDVNCASLAEYKQGHAKSAEVALTLTLGTGVGGGLIYQGQVFRGAHSAAMEVGYLPLKDGSFEDLASVTGLIKRCEARLGQEGLEGKTIFDLALEGGQ

SEQ ID NO: 525 - DNA, 1539 bp, Alloiococcus otitidis
  CDS (838)..(1536)
aaaggggttttggccatgtcaggacaaggctttacttggatcgatttggtaattttaattgtctacctaatcttcgtcctatttttcggtaattacttcgctaagaaagaaatgattgggaaggaattcttcaaaggcgatgggacggtaccctggtatgtaacctccgtttccatctttgcaaccttgctcagtccgatttccttcctgtctttaccgggtaactccttcgggggaacatggatcttgtggttcgcccaattagggatgattattgccatcccaattgccatagccttcttcctcccggtctttgccaagttggatattgacacggcctatgactacttggagcgacggtttgacaatagaggcctccgggtggtttcggctattatctttatcatctaccaaatcggtcggatgtccatcattatctacctaccttctatcaccttggcggaattaaccggtttgaatgtcaacattttgatcattgccatgggtgccattgccatcttctactcttacaccggcgggcttaagtcagtcctcttctctgactttgtccaagggattatcgtcttggttggggtcaccctctctttaatcatcttgattaacgggattgacggcggtgtgggcaccattgccgaaaccttggtcgatgggaaatttattgcaccagatgaacaatggttctccccgactatctttgaagatactgtcttcctcgtcttcgtcggagctgggatgaataccttgacccaatacatatccagtcaagatattgtccaacgttttaccaccaccactaatactaaagacctgactaaaatgatgctaaccaatggggttctttccctctttattgctactatcctctttttgattggaaccggcttgtttatcttctacggccaagcaggaattgccagtggcatggaccaagacttggcttacggctactttatcgcctaccaattgccaattggggtaactggggtcttgttggcagccatctttgcagcttcccagtctaccttgtcaacaggcttgaactcagtggcaacttcggtagccttggatattgtggaagtctttgacaccaagggcaaatatgattacaaacgcaaaaccaaaattgctcgtggcgttactattgtggtcggcctctttgctatagtggtctccatgattatggtccaatcgaatattgtctctgcctatgaatggtttaacggcttcgttggtctagtcctcggtgtcttaggtggggtctttgccctcggtatctttaccaaacgcggtaatgcagtaggcgcctacatcggcttccttgtttcggctgtggtgatgattatcatcgaatttattatccctgaagaaatcaatatcagtatttgggctaactccctagtttcgatcatcgtagcctttgttgctggttacttgggctctgtcatttactcagctatctcaagcaaggattctaaacgtgaagactactcttctatcctagactttaacaaaaactaa

SEQ ID NO: 526 - protein, 233 aa, Alloiococcus otitidis
MMLTNGVLSLFIATILFLIGTGLFIFYGQAGIASGMDQDLAYGYFIAYQLPIGVTGVLLAAIFAASQSTLSTGLNSVATSVALDIVEVFDTKGKYDYKRKTKIARGVTIVVGLFAIVVSMIMVQSNIVSAYEWFNGFVGLVLGVLGGVFALGIFTKRGNAVGAYIGFLVSAVVMIIIEFIIPEEINISIWANSLVSIIVAFVAGYLGSVIYSAISSKDSKREDYSSILDFNKN

SEQ ID NO: 527 - DNA, 1539 bp, Alloiococcus otitidis; identical to SEQ ID NO: 525
  CDS (247)..(1536)

SEQ ID NO: 528 - protein, 430 aa, Alloiococcus otitidis
MWFAQLGMIIAIPIAIAFFLPVFAKLDIDTAYDYLERRFDNRGLRVVSAIIFIIYQIGRMSIIIYLPSITLAELTGLNVNILIIAMGAIAIFYSYTGGLKSVLFSDFVQGIIVLVGVTLSLIILINGIDGGVGTIAETLVDGKFIAPDEQWFSPTIFEDTVFLVFVGAGMNTLTQYISSQDIVQRFTTTTNTKDLTKMMLTNGVLSLFIATILFLIGTGLFIFYGQAGIASGMDQDLAYGYFIAYQLPIGVTGVLLAAIFAASQSTLSTGLNSVATSVALDIVEVFDTKGKYDYKRKTKIARGVTIVVGLFAIVVSMIMVQSNIVSAYEWFNGFVGLVLGVLGGVFALGIFTKRGNAVGAYIGFLVSAVVMIIIEFIIPEEINISIWANSLVSIIVAFVAGYLGSVIYSAISSKDSKREDYSSILDFNKN

SEQ ID NO: 529 - DNA, 1539 bp, Alloiococcus otitidis; identical to SEQ ID NO: 525
  CDS (16)..(1536)

SEQ ID NO: 530 - protein, 507 aa, Alloiococcus otitidis
MSGQGFTWIDLVILIVYLIFVLFFGNYFAKKEMIGKEFFKGDGTVPWYVTSVSIFATLLSPISFLSLPGNSFGGTWILWFAQLGMIIAIPIAIAFFLPVFAKLDIDTAYDYLERRFDNRGLRVVSAIIFIIYQIGRMSIIIYLPSITLAELTGLNVNILIIAMGAIAIFYSYTGGLKSVLFSDFVQGIIVLVGVTLSLIILINGIDGGVGTIAETLVDGKFIAPDEQWFSPTIFEDTVFLVFVGAGMNTLTQYISSQDIVQRFTTTTNTKDLTKMMLTNGVLSLFIATILFLIGTGLFIFYGQAGIASGMDQDLAYGYFIAYQLPIGVTGVLLAAIFAASQSTLSTGLNSVATSVALDIVEVFDTKGKYDYKRKTKIARGVTIVVGLFAIVVSMIMVQSNIVSAYEWFNGFVGLVLGVLGGVFALGIFTKRGNAVGAYIGFLVSAVVMIIIEFIIPEEINISIWANSLVSIIVAFVAGYLGSVIYSAISSKDSKREDYSSILDFNKN

SEQ ID NO: 531 - DNA, 1539 bp, Alloiococcus otitidis; identical to SEQ ID NO: 525
  CDS (10)..(1536)

SEQ ID NO: 532 - protein, 509 aa, Alloiococcus otitidis
MAMSGQGFTWIDLVILIVYLIFVLFFGNYFAKKEMIGKEFFKGDGTVPWYVTSVSIFATLLSPISFLSLPGNSFGGTWILWFAQLGMIIAIPIAIAFFLPVFAKLDIDTAYDYLERRFDNRGLRVVSAIIFIIYQIGRMSIIIYLPSITLAELTGLNVNILIIAMGAIAIFYSYTGGLKSVLFSDFVQGIIVLVGVTLSLIILINGIDGGVGTIAETLVDGKFIAPDEQWFSPTIFEDTVFLVFVGAGMNTLTQYISSQDIVQRFTTTTNTKDLTKMMLTNGVLSLFIATILFLIGTGLFIFYGQAGIASGMDQDLAYGYFIAYQLPIGVTGVLLAAIFAASQSTLSTGLNSVATSVALDIVEVFDTKGKYDYKRKTKIARGVTIVVGLFAIVVSMIMVQSNIVSAYEWFNGFVGLVLGVLGGVFALGIFTKRGNAVGAYIGFLVSAVVMIIIEFIIPEEINISIWANSLVSIIVAFVAGYLGSVIYSAISSKDSKREDYSSILDFNKN

SEQ ID NO: 533 - DNA, 900 bp, Alloiococcus otitidis
  CDS (19)..(897)
aatagaaaggaagagaccatgcacgacgacttaaaaggcttgcacacagctttaatgatttcagttaacaaagatggcagtttaaacgaagagggaacgcggcaaattgtccgccacaatatcgaccggatgaaggtggacggcctttatgttggtgggtctactggggaaaactttctcttagacactgacatgaagaaaagagttttcgaagtggtcaaagacgaagcgggcagtgaagtgaccttgattggccaaattggtgggactaatgtttatgaagcaattgatttggcccactttgtgactgacctaggctatgacgccatttcagcggtcacccccttttactacaagtataactttgacgaaatcagagactactacaagatgattgcccaagccgttgacaaccggctcttgatttactctattcctgacttgactggggtagagatatcggtagaaaactttaaaaccctctttgaaattgataatattgtgggcgtgaaattcaccgcagccgacttcttcttgttggagagactccgcaaggcttgcccagatgagttgatcctctccggctttgacgaaatgctcctgccagcagtggtcaacggggtggacggcgctattgggtcaacctacaatgttaacggggtcaaggctcgggaaatttttgacctggcccggcaaaataaaatcgaccaagccctagaagttcaacaccaaaccaatgatttaattgaagctattttagataatggtctctacccaaccatcaaggaaatcttaaaactgatgggggttgacgctggctacaatagacgtccaatggcgagtgcaagtgacagccagatcgctcaagctaaggccatttatgaccaatatttaagctaa

SEQ ID NO: 534 - protein, 293 aa, Alloiococcus otitidis
MHDDLKGLHTALMISVNKDGSLNEEGTRQIVRHNIDRMKVDGLYVGGSTGENFLLDTDMKKRVFEVVKDEAGSEVTLIGQIGGTNVYEAIDLAHFVTDLGYDAISAVTPFYYKYNFDEIRDYYKMIAQAVDNRLLIYSIPDLTGVEISVENFKTLFEIDNIVGVKFTAADFFLLERLRKACPDELILSGFDEMLLPAVVNGVDGAIGSTYNVNGVKAREIFDLARQNKIDQALEVQHQTNDLIEAILDNGLYPTIKEILKLMGVDAGYNRRPMASASDSQIAQAKAIYDQYLS

SEQ ID NO: 535 - DNA, 765 bp, Alloiococcus otitidis
  CDS (67)..(762)
ttatactttcagaatctgataagcttgaaaatgaaaaaagggctttcatatacaaggaggaatttgatgacgaccaaagaccaattcgaccatcaggtaaaagggggcttgattgtttcttgccaggccttgcctgaagagcccctccactcgtcctttatcatgggacggatggctttagcggccaagcaaggcggagcagttggaatccgggctaattccagccaggacatcaaagaaattaaagctcaagttgacctgccaattatcggaattgtcaaaagtgattatccggatgcagatgcctttatcacccctaccatcaaggaagtggatgacttaatgtctgtcaaacctgatgtcattgccctggatgcaaccgccagcaagcggccggggggtcagaccctggaggactttttgaaggaggtcaaagacaagtaccctgaccaacttttgatggccgattgttcgacttatgatgaagccctccaggccgaccagcttggttttgactatattgggaccaccctggtcggctacaccgaccagagttcggggactaagattgaggcgggggactttgaactgatccgccgtatactcaaggcggtttcgaccccagtagtggcagaaggcaatattgatagtcccgaaaaagccaaacgggtcctagacttaggagttcacaccgtggtggttgggtctagcattacccggccccaagtccttacccaacgttttgtcgacaaaattaaagaataa

SEQ ID NO: 536 - protein, 232 aa, Alloiococcus otitidis
MTTKDQFDHQVKGGLIVSCQALPEEPLHSSFIMGRMALAAKQGGAVGIRANSSQDIKEIKAQVDLPIIGIVKSDYPDADAFITPTIKEVDDLMSVKPDVIALDATASKRPGGQTLEDFLKEVKDKYPDQLLMADCSTYDEALQADQLGFDYIGTTLVGYTDQSSGTKIEAGDFELIRRILKAVSTPVVAEGNIDSPEKAKRVLDLGVHTVVVGSSITRPQVLTQRFVDKIKE

SEQ ID NO: 537 - DNA, 765 bp, Alloiococcus otitidis; identical to SEQ ID NO: 535
  CDS (31)..(762)

SEQ ID NO: 538 - protein, 244 aa, Alloiococcus otitidis
MKKGLSYTRRNLMTTKDQFDHQVKGGLIVSCQALPEEPLHSSFIMGRMALAAKQGGAVGIRANSSQDIKEIKAQVDLPIIGIVKSDYPDADAFITPTIKEVDDLMSVKPDVIALDATASKRPGGQTLEDFLKEVKDKYPDQLLMADCSTYDEALQADQLGFDYIGTTLVGYTDQSSGTKIEAGDFELIRRILKAVSTPVVAEGNIDSPEKAKRVLDLGVHTVVVGSSITRPQVLTQRFVDKIKE

SEQ ID NO: 539 - DNA, 765 bp, Alloiococcus otitidis; identical to SEQ ID NO: 535
  CDS (25)..(762)

SEQ ID NO: 540 - protein, 246 aa, Alloiococcus otitidis
MKMKKGLSYTRRNLMTTKDQFDHQVKGGLIVSCQALPEEPLHSSFIMGRMALAAKQGGAVGIRANSSQDIKEIKAQVDLPIIGIVKSDYPDADAFITPTIKEVDDLMSVKPDVIALDATASKRPGGQTLEDFLKEVKDKYPDQLLMADCSTYDEALQADQLGFDYIGTTLVGYTDQSSGTKIEAGDFELIRRILKAVSTPVVAEGNIDSPEKAKRVLDLGVHTVVVGSSITRPQVLTQRFVDKIKE

SEQ ID NO: 541 - DNA, 372 bp, Alloiococcus otitidis
  CDS (4)..(369)
gatatggccttagatattgataaaatcattgaagacttgaaagactcaactgtcattgaattaaatgaccttgtatcagctatcgaagaagaattcggcgttgaagctgctgctccagttgctgctgcaggtggcgaagctggtggcgatgctgaagagcaaactgaatttactgttgaattggttgacgccggtgctgctaaaatcaaagttattaaagcagttcgtgaagcaactggtttaggtcttaaagatgccaaagctttagtagacggcgcaccagctgctattaaagaaaacatcgaaaaagacgaagctgaagaattgaaagaaaaaatcgaagaagctggcggtaaagtagaattgaaataa

SEQ ID NO: 542 - protein, 122 aa, Alloiococcus otitidis
MALDIDKIIEDLKDSTVIELNDLVSAIEEEFGVEAAAPVAAAGGEAGGDAEEQTEFTVELVDAGAAKIKVIKAVREATGLGLKDAKALVDGAPAAIKENIEKDEAEELKEKIEEAGGKVELK

SEQ ID NO: 543 - DNA, 510 bp, Alloiococcus otitidis
  CDS (1)..(507)
atgccaaaagaagaggttatcgctcagaagcaagcccgggtggatgagttgaaagacaagtttgaatcgtctgtttcaaccattatctttgactaccggggtttgactgttgcggaagtcactgaattgcgtaaacaattgcgtgaatctggtgtcgacatgcaagtagtaaaaaacaccttgctccgccggtcagctagcgatgctggttttgaagacttggaagatatcttcaaaggcccaactgccattgcctttagcgaggaagaagttgtggcaccagctaaaattatctcagaatttgctgatgaccatgaagccattgagcttaaaggtggcgtgattgaaggtaaaattgcaacgcttgaaacaattggcaaaattgctaaattgccaagccgggaaggtctactttctatgctactatccgtcctacaagcgccagtccgcaatactgcacttgtggtcaaagctcttgccgagaagaaagaagaggaagacgctgcctag

SEQ ID NO: 544 - protein, 169 aa, Alloiococcus otitidis
MPKEEVIAQKQARVDELKDKFESSVSTIIFDYRGLTVAEVTELRKQLRESGVDMQVVKNTLLRRSASDAGFEDLEDIFKGPTAIAFSEEEVVAPAKIISEFADDHEAIELKGGVIEGKIATLETIGKIAKLPSREGLLSMLLSVLQAPVRNTALVVKALAEKKEEEDAA

SEQ ID NO: 545 - DNA, 450 bp, Alloiococcus otitidis
  CDS (127)..(447)
gcttccagtagaccttatttcaattctactttaccgccagcttcttcgattttttctttcaattcttcagcttcgtctttttcgatgttttctttaatagcagctggtgcgccgtctactaaagctttggcatctttaagacctaaaccagttgcttcacgaactgctttaataactttgattttagcagcaccggcgtcaaccaattcaacagtaaattcagtttgctcttcagcatcgccaccagcttcgccacctgcagcagcaactggagcagcagcttcaacgccgaattcttcttcgatagctgatacaaggtcatttaattcaatgacagttgagtctttcaagtcttcaatgattttatcaatatctaaggccatatcttattcctccattttccttaagattattagctttaagagagagcctggtttggatcaaaactag

SEQ ID NO: 546 - protein, 107 aa, Alloiococcus otitidis
MASLRPKPVASRTALITLILAAPASTNSTVNSVCSSASPPASPPAAATGAAASTPNSSSIADTRSFNSMTVESFKSSMILSISKAISYSSIFLKIISFKREPGLDQN

SEQ ID NO: 547 - DNA, 450 bp, Alloiococcus otitidis; identical to SEQ ID NO: 545
  CDS (85)..(447)

SEQ ID NO: 548 - protein, 121 aa, Alloiococcus otitidis
MFSLIAAGAPSTKALASLRPKPVASRTALITLILAAPASTNSTVNSVCSSASPPASPPAAATGAAASTPNSSSIADTRSFNSMTVESFKSSMILSISKAISYSSIFLKIISFKREPGLDQN

SEQ ID NO: 549 - DNA, 414 bp, Alloiococcus otitidis
  CDS (37)..(411)
gcagcgtcttcctcttctttcttctcggcaagagctttgaccacaagtgcagtattgcggactggcgcttgtaggacggatagtagcatagaaagtagaccttcccggcttggcaatttagcaattttgccaattgtttcaagcgttgcaattttaccttcaatcacgccacctttaagctcaatggcttcatggtcatcagcaaattctgagataattttagctggtgccacaacttcttcctcgctaaaggcaatggcagttgggcctttgaagatatcttccaagtcttcaaaaccagcatcgctagctgaccggcggagcaaggtgttttttactacttgcatgtcgacaccagattcacgcaattgtttacgcaattcagtgacttccgcaacagtcaaaccccggtag

SEQ ID NO: 550 - protein, 125 aa, Alloiococcus otitidis
MTTSAVLRTGACRTDSSIESRPSRLGNLAILPIVSSVAILPSITPPLSSMASWSSANSEIILAGATTSSSLKAMAVGPLKISSKSSKPASLADRRSKVFFTTCMSTPDSRNCLRNSVTSATVKPR

SEQ ID NO: 551 - DNA, 753 bp, Alloiococcus otitidis
  CDS (55)..(750)
ccaggaatcagtgggaggtcaaaccgttattaccacaaaaggaggaattatttaatggctaaaggaagtaaaaaatacctagctgcattagaaaaagttgaccgtgataaattttacgacgcagctgagggaattgaacttgtaaaagaaattgactatgcaaactttgacgctagtgtggaagttgcctacaaactaggggtcgaccctaaacaagctgaccagcaattgcgtggggcaaccgttttgccacacgggtccggtaaaacccaaaccgttcttgtctttgccaaaggtgacgctgctaaagcggctgaagatgcaggtgctgactatgtcggcgacactggtttggttgaacgggttcaagcaggctggctagactttgatattgtcgtagctgctcctgatatgatggcagaagttgggaaattgggccggatcttaggacccaaaggcttgatgccaaaccctaagactggaactgttaccccagatgttgccaaagctgttaaagatatcaaggctggacaggtcacctaccgcttagaccgtcagtctaatgtccacgtgacaatcggtaaagtttcctttaccccagatgagctccaagacaacctagcagccatccacgacattattttgaaaaacagaccagctgctatttctcgattggcttacctgaaaaatgtaaccattgctagtacatttggtccaggtgtcaaactagacccaagtaccattattaagtaa

SEQ ID NO: 552 - protein, 232 aa, Alloiococcus otitidis
MAKGSKKYLAALEKVDRDKFYDAAEGIELVKEIDYANFDASVEVAYKLGVDPKQADQQLRGATVLPHGSGKTQTVLVFAKGDAAKAAEDAGADYVGDTGLVERVQAGWLDFDIVVAAPDMMAEVGKLGRILGPKGLMPNPKTGTVTPDVAKAVKDIKAGQVTYRLDRQSNVHVTIGKVSFTPDELQDNLAAIHDIILKNRPAAISRLAYLKNVTIASTFGPGVKLDPSTIIK

SEQ ID NO: 553 - DNA, 516 bp, Alloiococcus otitidis
  CDS (91)..(513)
ggatatttggggtgctggaataaaaagtgggagaggaaaaacacgatcctcattttaaccactcacggacaaaacaaggaggtatgtcacgtggctaaaaaagttgttgatgtagtgaaattgcagattcctgccggtaaagcaagtcctgctccaccagttgggccagctttaggtcaagcagggattaacatcatgggtttcactaaagaatttaatgctcgaacagctgaacaagctggtatgattatcccagtcgtgattacagtttacgaagaccgttcctttacattcattaccaagactccaccggctgctgttttgcttaaaaaagctgctggaattgagtctgcttcaggagaaccgaataaaaacaaggttgccaatgtaaccagcgaccaagttcgcgagatcgctgaaaccaaaatgcaagacttaaacgcagctgacgttgaagctgccatgcggatggtcgaagggactgcccgcagtatggggatcacagtagataaataa

SEQ ID NO: 554 - protein, 141 aa, Alloiococcus otitidis
MAKKVVDVVKLQIPAGKASPAPPVGPALGQAGINIMGFTKEFNARTAEQAGMIIPVVITVYEDRSFTFITKTPPAAVLLKKAAGIESASGEPNKNKVANVTSDQVREIAETKMQDLNAADVEAAMRMVEGTARSMGITVDK

SEQ ID NO: 555 - DNA, 516 bp, Alloiococcus otitidis; identical to SEQ ID NO: 553
  CDS (7)..(513)

SEQ ID NO: 556 - protein, 169 aa, Alloiococcus otitidis
MGCWNKKWERKNTILILTTHGQNKEVCHVAKKVVDVVKLQIPAGKASPAPPVGPALGQAGINIMGFTKEFNARTAEQAGMIIPVVITVYEDRSFTFITKTPPAAVLLKKAAGIESASGEPNKNKVANVTSDQVREIAETKMQDLNAADVEAAMRMVEGTARSMGITVDK

SEQ ID NO: 557 - DNA, 249 bp, Alloiococcus otitidis
  CDS (16)..(246)
gcttatttatctactgtgatccccatactgcgggcagtcccttcgaccatccgcatggcagcttcaacgtcagctgcgtttaagtcttgcattttggtttcagcgatctcgcgaacttggtcgctggttacattggcaaccttgtttttattcggttctcctgaagcagactcaattccagcagcttttttaagcaaaacagcagccggtggagtcttggtaatgaatgtaaaggaacggtcttcgtaa

SEQ ID NO: 558 - protein, 77 aa, Alloiococcus otitidis
MIPILRAVPSTIRMAASTSAAFKSCILVSAISRTWSLVTLATLFLFGSPEADSIPAAFLSKTAAGGVLVMNVKERSS

SEQ ID NO: 559 - DNA, 663 bp, Alloiococcus otitidis
  CDS (109)..(660)
aatcagtgggtgagccccaaaactggttggaaactttgctggataggcaaggttttttatttagccttttttataaaactgttaaaaaaacgatacggagggaataaaatggctgaagagttggaaagtcaaaaagcttggtatgtcttgcacacctattcgggttatgagaacaaggtcaagcagaacttagaatcccggactgaatccatgggaatggaagataatatcttacaggtcctggtaccggagcaagaagtttacgaaaacacagaagagggagtggaaagaaagaccgaaaaaaccttccccggttatgtcttagtggagatggttatgtctgatgaggcctggtatgtggtccggaacacccccaatgtgaccggctttgtggggtcacacggggccggcagtaagccgtcccctctttacccagaagaagtggacaacttgctccgcagcatgggcatgaacccccgtaaggttgacattgaagtggaaattggcgaaaatatccagattatttccggtgcctttgctggtatggaagggaccatcaccgaagtggatccggaaaaaggcaaggtcaaagcctctgtccagatgtttggccgggaaaccaccactgagttggactaccaccaaattgccaaaatggattag

SEQ ID NO: 560 - protein, 184 aa, Alloiococcus otitidis
MAEELESQKAWYVLHTYSGYENKVKQNLESRTESMGMEDNILQVLVPEQEVYENTEEGVERKTEKTFPGYVLVEMVMSDEAWYVVRNTPNVTGFVGSHGAGSKPSPLYPEEVDNLLRSMGMNPRKVDIEVEIGENIQIISGAFAGMEGTITEVDPEKGKVKASVQMFGRETTTELDYHQIAKMD

SEQ ID NO: 561 - DNA, 663 bp, Alloiococcus otitidis; identical to SEQ ID NO: 559
  CDS (10)..(660)

SEQ ID NO: 562 - protein, 217 aa, Alloiococcus otitidis
MSPKTGWKLCWIGKVFYLAFFIKLLKKRYGGNKMAEELESQKAWYVLHTYSGYENKVKQNLESRTESMGMEDNILQVLVPEQEVYENTEEGVERKTEKTFPGYVLVEMVMSDEAWYVVRNTPNVTGFVGSHGAGSKPSPLYPEEVDNLLRSMGMNPRKVDIEVEIGENIQIISGAFAGMEGTITEVDPEKGKVKASVQMFGRETTTELDYHQIAKMD

SEQ ID NO: 563 - DNA, 1308 bp, Alloiococcus otitidis
  CDS (46)..(1305)
actttaggtgaaatgacagaaatgtatcgtaagtctccaaacttaatggagcaagttgttgacagaagaaacttggaaacagcagccaaagccgttaaacggaacaaaggcgctgcaggtattgacggtatgaccgtttttgagatagaggagcacattcaagcgtattatcaacccttacggaagaaattacttgatggaacgtataagcctcaaccagttaaacgagtagaaataccaaagccgaatggagaaaaacgaaagttaggtataccttgtgtgcgggatagagttgttcaacaagccatacggcaagtaattgaaccgattatagacccgcacttctatgacaacagtcacggattccgaccaggaaaaagcacgcacagtgctctcaagcaatgtgcacagtattataaagaaggctatcgtgttgtagttgattgtgacctcaaacaatgctttgacacgctcaatcacgacaaacttatctattatcttgaacagtacatccaagataaaatgatactgaaaattatccgtaagtttttgagagcgggtgtaattgatttgactagcgaatttatcgcaagtgaaacaggggcaccacaaggtggtgttctatcaccgcttttgagtaatgtgtacttacatgaactggataaagagttggttaaccgtggtcatcgatttgtccgatacgcagatgactttgtcatctacgttaaatcaaaacgagccggtgaacgggtaatgaacagcatcacacgctttattgaaaaagacttaaagttaatcgtcaatcaagacaaaagccaggttgggtctcctacccgtttaaagtttttgagctgtctgatgaagcaagtgaatggggattatcgttttatccccaccaaagaagccaagcagaaattcaaacgcagattgagaaagctgaccagtcgtaaacggccaggtacttttaaaaagataatgactgaaattaatcgagtcacccgcggttggattaattactttggtttaggcttcattaaaagctttatcaaagaagttgagcaatggttaaatcaccgtatcagacagctgattcttaaacggtggaaacgtccacgaactattataccaaagttggaacaatatggactggacttagattcagccaaacggattgcgtattcacgcaaaaagtactggcgactgtcatgcacacatgaatttcatcgtgcaataacaacagaaagactcagcaagtggggcttagttccactaagcactatcgctgagtctgcttacgcaagatattga

SEQ ID NO: 564 - protein, 420 aa, Alloiococcus otitidis; identical to SEQ ID NO: 312

SEQ ID NO: 565 - DNA, 1308 bp, Alloiococcus otitidis; identical to SEQ ID NO: 563
  CDS (13)..(1305)

SEQ ID NO: 566 - protein, 431 aa, Alloiococcus otitidis; identical to SEQ ID NO: 314

SEQ ID NO: 567 - DNA, 1653 bp, Alloiococcus otitidis
  CDS (556)..(1650)
agaatgaacgggaaattttttaacctgatgcaaaaattgggcaagacctttatgctacccattgccctcttgcctattgccggtctcttcttagggattggggcctctattaccggccaagcctttgtcgaacagtggggtttggaagcagtcctgggtgaagggactcttttaaatgggattttgaccattttaacggatgttggggacgtgatcttctccaacctggcccttttgtttgccatctcagtgcctatgggtttggccaaggccaaaaaggaagtggccgccttgtctggggcagttggctactttgtgatgtatgccagtatgaccagtaccatccaagtctttggcaatattgaacgcttgcgggagattgaaggcttggtggattctgtcttaggttttgaagaaaccttgaatactggggtttttggtgggatcattataggacttttagtcacctacctacataataaatactacaaggttaagttccctgatgccctctccttctttgccgggacccactttattccgattgtgtccactttggcagggactcttttagggattcttttagcctttgtttggccttatgttggggctggtattgcctgggtcggccaggccattgcttcagctggggtcatcgggaccttcttctatggctatgtctacagagccttgattccctttggtctccaccacgttttttacctgccattttggcaaactgccctgggtgggacagccacagtagctggtgaaactgttcaaggggctcaaaacattgtctttgcccaactccaagccggggaagccatttcaccagcagcagcttcttacttctcctttgccttcccgatgatgctagctggtttccctgcagcagccttggctatgtaccacactgcccgcaaggaccggaaagaagatgttaagggtctcctcctttcttcttctatcacttccttcttgaccgggattaccgagccgattgagttctccatcttgttcgcttctcccttcttgtactttggggtcaatgcggtcttggccggcttgtcaaccattatcgtccagcttttaaacatcggggttggttacaccttctcagctggttttatcgactttgtcctctacggagtcttgccgggcaatggccggaccaactggattgccctagccatctttacagtggtctggggggtcctttactacatcctcttccgcttcagtattgaaaaattcgacctgaagacaccaggccgggaagcagacgatgaagcaagccgcctccacaccaaggatgaataccgagaaagcaaaggaatcgacaaggttagcttggaagaagaagacagcaaagcgcctggtcgtgaagaagaccagcaatcagcccaaatcacccagggcttgggtggtcaagacaacattagtgactttaccaactgtgctaccagactccgggtaactgtggcagatgggtccaaggtccaaaaaagcctcttgcaaaaaacgggcgcagccggtgttgttgttagtggcaattctgtccaagtcatctacggaaccaaggttaccggggtggcatcggatttagaagactacttgaatgaccaaggctggtccagtgaagacgaataa

SEQ ID NO: 568 - protein, 365 aa, Alloiococcus otitidis
MAGTLLGILLAFVWPYVGAGIAWVGQAIASAGVIGTFFYGYVYRALIPFGLHHVFYLPFWQTALGGTATVAGETVQGAQNIVFAQLQAGEAISPAAASYFSFAFPMMLAGFPAAALAMYHTARKDRKEDVKGLLLSSSITSFLTGITEPIEFSILFASPFLYFGVNAVLAGLSTIIVQLLNIGVGYTFSAGFIDFVLYGVLPGNGRTNWIALAIFTVVWGVLYYILFRFSIEKFDLKTPGREADDEASRLHTKDEYRESKGIDKVSLEEEDSKAPGREEDQQSAQITQGLGGQDNISDFTNCATRLRVTVADGSKVQKSLLQKTGAAGVVVSGNSVQVIYGTKVTGVASDLEDYLNDQGWSSEDE

SEQ ID NO: 569 - DNA, 1653 bp, Alloiococcus otitidis; identical to SEQ ID NO: 567
  CDS (4)..(1650)

SEQ ID NO: 570 - protein, 549 aa, Alloiococcus otitidis
MNGKFFNLMQKLGKTFMLPIALLPIAGLFLGIGASITGQAFVEQWGLEAVLGEGTLLNGILTILTDVGDVIFSNLALLFAISVPMGLAKAKKEVAALSGAVGYFVMYASMTSTIQVFGNIERLREIEGLVDSVLGFEETLNTGVFGGIIIGLLVTYLHNKYYKVKFPDALSFFAGTHFIPIVSTLAGTLLGILLAFVWPYVGAGIAWVGQAIASAGVIGTFFYGYVYRALIPFGLHHVFYLPFWQTALGGTATVAGETVQGAQNIVFAQLQAGEAISPAAASYFSFAFPMMLAGFPAAALAMYHTARKDRKEDVKGLLLSSSITSFLTGITEPIEFSILFASPFLYFGVNAVLAGLSTIIVQLLNIGVGYTFSAGFIDFVLYGVLPGNGRTNWIALAIFTVVWGVLYYILFRFSIEKFDLKTPGREADDEASRLHTKDEYRESKGIDKVSLEEEDSKAPGREEDQQSAQITQGLGGQDNISDFTNCATRLRVTVADGSKVQKSLLQKTGAAGVVVSGNSVQVIYGTKVTGVASDLEDYLNDQGWSSEDE

SEQ ID NO: 571 - DNA, 1086 bp, Alloiococcus otitidis
  CDS (241)..(1083)
ggagtatgtcaagtgctgaaggacaaaaaaatcctagtcctcttaatatctttcttgttggtcttaactgcttgttcccaggcgggagaagatgatccgagagacctagcagaccaaccctatgaacgccaagaatttctactggggaccctggtggatatctcggtttatgaccaaggccaggaagaagccttagacaaggcggttgaccgggtggaagaattggatggcattttttccatgaccaacccggattcggaggtttatgccatcaatgaatcctctggtcaggaaccggtccaagtttcggatgaggtttattatgtgattgaaaatgccttggactatgctgaaatctctggtgggcggatggaccctaccattggggccttgaccgatatttgggggattggccaggaggatgcccaggtccctagccaggaagagatcgaccaggctttgcccttggttaattatgagaatgtagagcttgacgaggaagccaagacagtctacttgacccaagaagggatgaagttagacttgggggctatcgccaagggttacattactgaccaggccaaggatgttttagttgaggagggggtcaccacggctattgtcgacctaggcggggacatcttcctcttggggtcatctagccgcggatcccaggataactggcggattggcatccaaaacccctttgatgaaagaggggagattgttggcttgctgccggtcatggatgaagctgtggttacctcaggtatttatgagcgtttgattaccggcgaggacggccaggaataccaccacatcttagacccagagacaggttacccctttgacaatgagctagctggtttgagtgtggcggctgaaaccaccatggatgccgatgccctagccactgtcttgttttctatgggcttggaccagggcatggattatgcttccagcttagaagatgtaacagccgtctttatcacccacgaccaggagatttatgtgtcggaaggggatgcatctgagtttgaactcttggatgaatcctttgacttcaagggagactccttagattaa

SEQ ID NO: 572 - protein, 281 aa, Alloiococcus otitidis
MTNPDSEVYAINESSGQEPVQVSDEVYYVIENALDYAEISGGRMDPTIGALTDIWGIGQEDAQVPSQEEIDQALPLVNYENVELDEEAKTVYLTQEGMKLDLGAIAKGYITDQAKDVLVEEGVTTAIVDLGGDIFLLGSSSRGSQDNWRIGIQNPFDERGEIVGLLPVMDEAVVTSGIYERLITGEDGQEYHHILDPETGYPFDNELAGLSVAAETTMDADALATVLFSMGLDQGMDYASSLEDVTAVFITHDQEIYVSEGDASEFELLDESFDFKGDSLD

SEQ ID NO: 573 - DNA, 1086 bp, Alloiococcus otitidis; identical to SEQ ID NO: 571
  CDS (55)..(1083)

SEQ ID NO: 574 - protein, 343 aa, Alloiococcus otitidis
MLVLTACSQAGEDDPRDLADQPYERQEFLLGTLVDISVYDQGQEEALDKAVDRVEELDGIFSMTNPDSEVYAINESSGQEPVQVSDEVYYVIENALDYAEISGGRMDPTIGALTDIWGIGQEDAQVPSQEEIDQALPLVNYENVELDEEAKTVYLTQEGMKLDLGAIAKGYITDQAKDVLVEEGVTTAIVDLGGDIFLLGSSSRGSQDNWRIGIQNPFDERGEIVGLLPVMDEAVVTSGIYERLITGEDGQEYHHILDPETGYPFDNELAGLSVAAETTMDADALATVLFSMGLDQGMDYASSLEDVTAVFITHDQEIYVSEGDASEFELLDESFDFKGDSLD

SEQ ID NO: 575 - DNA, 1086 bp, Alloiococcus otitidis; identical to SEQ ID NO: 571
  CDS (13)..(1083)

SEQ ID NO: 576 - protein, 357 aa, Alloiococcus otitidis
MLKDKKILVLLISFLLVLTACSQAGEDDPRDLADQPYERQEFLLGTLVDISVYDQGQEEALDKAVDRVEELDGIFSMTNPDSEVYAINESSGQEPVQVSDEVYYVIENALDYAEISGGRMDPTIGALTDIWGIGQEDAQVPSQEEIDQALPLVNYENVELDEEAKTVYLTQEGMKLDLGAIAKGYITDQAKDVLVEEGVTTAIVDLGGDIFLLGSSSRGSQDNWRIGIQNPFDERGEIVGLLPVMDEAVVTSGIYERLITGEDGQEYHHILDPETGYPFDNELAGLSVAAETTMDADALATVLFSMGLDQGMDYASSLEDVTAVFITHDQEIYVSEGDASEFELLDESFDFKGDSLD

SEQ ID NO: 577 - DNA, 561 bp, Alloiococcus otitidis
  CDS (193)..(558)
aggatggttatgatgacccggacgcaaaaaatgatctacattgcccttttatcggcccaggctgtcgttttaggcctggtagaaaatgcgattcccttcccctttgccctggccccaggtgccaagctgggaattgccaacctcattaccctgattgctatctacaccctgcccatcaaagatagtttcaaggtggtcatgatccgcttagtcatgaccagcctcttaggcgggaccctgtcaacttttatgtatagctttatgggggccatgttttcctacctgggcatgctcctggtcaaatttttaggccaaagcaaggtcagtgtcatcggggtcagcgccaccgggggcatcctccataatgtcggccaactctttatggccagcatcattgcccaaacctggaccgtcctcctctacctccctgtcctttcctttgtcggcatcttagcgggtgttgccatcggaatcgccggcaactacctccttgaatatgtcaacgtcatgcggaagttccgccaagattatgaaaatgagaatagaagacggttgggttag

SEQ ID NO: 578 - protein, 122 aa, Alloiococcus otitidis
MVMIRLVMTSLLGGTLSTFMYSFMGAMFSYLGMLLVKFLGQSKVSVIGVSATGGILHNVGQLFMASIIAQTWTVLLYLPVLSFVGILAGVAIGIAGNYLLEYVNVMRKFRQDYENENRRRLG

SEQ ID NO: 579 - DNA, 561 bp, Alloiococcus otitidis; identical to SEQ ID NO: 577
  CDS (4)..(558)

SEQ ID NO: 580 - protein, 185 aa, Alloiococcus otitidis
MVMMTRTQKMIYIALLSAQAVVLGLVENAIPFPFALAPGAKLGIANLITLIAIYTLPIKDSFKVVMIRLVMTSLLGGTLSTFMYSFMGAMFSYLGMLLVKFLGQSKVSVIGVSATGGILHNVGQLFMASIIAQTWTVLLYLPVLSFVGILAGVAIGIAGNYLLEYVNVMRKFRQDYENENRRRLG

SEQ ID NO: 581 - DNA, 1995 bp, Alloiococcus otitidis
  CDS (895)..(1992)
gaaaatattgataatattttaattactaagggagccgattgtgtgagtaaaataacgagccaaagtttatatgaattaaaaaatgtgtcccagccccttgccgtggatgaggcagttttttacctggagacaaggattgataaggaaagcaatagctacaagacttccttgtggcgattggatttgaagaatcaggaccggaccctctggctaagtgaggactacaatcccactgccattgaagtttcgcctaatcagaagtacctgtccttcctctctagctttaaaggggaaaaggcccagctatacctcattccacttacaggtgggggtgcttttgccttaacggatgaaaaacagggtgtcactagctacctctggactgccaattccgcctccctctactaccaaaccagccataaggaagaggaggatcaaaaggcaggttcaacatggccccagccaactaagattaaccgcctgcaacacaaggcagacggggtgggcctcttgccggaagacttgacctaccaagtgaagcaggtagctgtggctagtcaagaagtcagcaccgttttggaaaaagaccaggcttttaacctccaatatgtggctcaagatgaaagctatctcctttatgtggaccggctagacccggatgatgagtgggtctacggggccagtgtatacgagtacaatatcgcccaaaaaaaggcccgcttggtaacgggcgactatccaaagggtagcttttactttgaggctgtcaacagtgacgaaacggccttcctcttatccgggaatgactttagccatgcctttgtcagcctggaaaacctttacctgtgggaccgggaaagccaagaagtaactaatgtgtcagttgaagacaagatggtaggtgacaccattgtgggcgacttccagcaaaagattaccggctttccagttaaatgggtgtcagaccaagacttcatttatccagtcaccgaccatgggaaaacagtcctctaccaggggaatgtccaaggacaaaacgaaatagttttggatgaaaaaatccacctcactggcggtgacctagtcaaagcgaaccaattagtcgtgacctattcgactttaaaccgacccagccggctcgccttggtcgaccttaacagccgggaaatcacagacttgtacaatcccaaccaagcctttgacgcggaccacacttttgcagacatcgacagcttctactacacaggggcggataatgaccaagtccagggctggtatgtcaagccgctagagtcaagcgacaaccaccctgctgtggtttatatccacggtggacctcaagtcaactatggggaaagcttcttccacgaagttcaatacttggctggggcaggatatggagtggttatgctcaaccctcatggagggaacagttacggtcaagaatttgtggctaccatcttgggtgattacggtaacaaggattatgaagatatcatgctaggggtggattatgtcctagaccagtatccaaatattgaccctgaccgcttatttgtggctgggggcagttacggtggctttatgaccaactgggttgtcggccacacccaccgcttcaaagcagctgttacccagcggtcgatttccaactggatcagtttctacgggaccagtgatgtgggagccttctttgtcgagtttcaactgcaagctgaccttagccggccagaagacttgtggcggatgtctccgctcgcttatgccagccagtccaccactccgcttttagtcctccacggtcaggaagacttgcgttgccctcaagagcaaggtgaacagatgtatatcgccatgaaaaaagctggagtcgacaccaaactggtcttgtatcctgactctagccacggtctgtcccggcaaggccttccgaatttgcggattgaacgcctggaagaaatcaagtcctggtttgaccactacgctggtttatag

SEQ ID NO: 582 - protein, 366 aa, Alloiococcus otitidis
MVGDTIVGDFQQKITGFPVKWVSDQDFIYPVTDHGKTVLYQGNVQGQNEIVLDEKIHLTGGDLVKANQLVVTYSTLNRPSRLALVDLNSREITDLYNPNQAFDADHTFADIDSFYYTGADNDQVQGWYVKPLESSDNHPAVVYIHGGPQVNYGESFFHEVQYLAGAGYGVVMLNPHGGNSYGQEFVATILGDYGNKDYEDIMLGVDYVLDQYPNIDPDRLFVAGGSYGGFMTNWVVGHTHRFKAAVTQRSISNWISFYGTSDVGAFFVEFQLQADLSRPEDLWRMSPLAYASQSTTPLLVLHGQEDLRCPQEQGEQMYIAMKKAGVDTKLVLYPDSSHGLSRQGLPNLRIERLEEIKSWFDHYAGL

SEQ ID NO: 583 - DNA, 1995 bp, Alloiococcus otitidis; identical to SEQ ID NO: 581
  CDS (502)..(1992)

SEQ ID NO: 584 - protein, 497 aa, Alloiococcus otitidis
MGLLPEDLTYQVKQVAVASQEVSTVLEKDQAFNLQYVAQDESYLLYVDRLDPDDEWVYGASVYEYNIAQKKARLVTGDYPKGSFYFEAVNSDETAFLLSGNDFSHAFVSLENLYLWDRESQEVTNVSVEDKMVGDTIVGDFQQKITGFPVKWVSDQDFIYPVTDHGKTVLYQGNVQGQNEIVLDEKIHLTGGDLVKANQLVVTYSTLNRPSRLALVDLNSREITDLYNPNQAFDADHTFADIDSFYYTGADNDQVQGWYVKPLESSDNHPAVVYIHGGPQVNYGESFFHEVQYLAGAGYGVVMLNPHGGNSYGQEFVATILGDYGNKDYEDIMLGVDYVLDQYPNIDPDRLFVAGGSYGGFMTNWVVGHTHRFKAAVTQRSISNWISFYGTSDVGAFFVEFQLQADLSRPEDLWRMSPLAYASQSTTPLLVLHGQEDLRCPQEQGEQMYIAMKKAGVDTKLVLYPDSSHGLSRQGLPNLRIERLEEIKSWFDHYAGL

SEQ ID NO: 585 - DNA, 1995 bp, Alloiococcus otitidis; identical to SEQ ID NO: 581
  CDS (169)..(1992)

SEQ ID NO: 586 - protein, 608 aa, Alloiococcus otitidis
MWRLDLKNQDRTLWLSEDYNPTAIEVSPNQKYLSFLSSFKGEKAQLYLIPLTGGGAFALTDEKQGVTSYLWTANSASLYYQTSHKEEEDQKAGSTWPQPTKINRLQHKADGVGLLPEDLTYQVKQVAVASQEVSTVLEKDQAFNLQYVAQDESYLLYVDRLDPDDEWVYGASVYEYNIAQKKARLVTGDYPKGSFYFEAVNSDETAFLLSGNDFSHAFVSLENLYLWDRESQEVTNVSVEDKMVGDTIVGDFQQKITGFPVKWVSDQDFIYPVTDHGKTVLYQGNVQGQNEIVLDEKIHLTGGDLVKANQLVVTYSTLNRPSRLALVDLNSREITDLYNPNQAFDADHTFADIDSFYYTGADNDQVQGWYVKPLESSDNHPAVVYIHGGPQVNYGESFFHEVQYLAGAGYGVVMLNPHGGNSYGQEFVATILGDYGNKDYEDIMLGVDYVLDQYPNIDPDRLFVAGGSYGGFMTNWVVGHTHRFKAAVTQRSISNWISFYGTSDVGAFFVEFQLQADLSRPEDLWRMSPLAYASQSTTPLLVLHGQEDLRCPQEQGEQMYIAMKKAGVDTKLVLYPDSSHGLSRQGLPNLRIERLEEIKSWFDHYAGL

SEQ ID NO: 587 - DNA, 1995 bp, Alloiococcus otitidis; identical to SEQ ID NO: 581
  CDS (43)..(1992)

SEQ ID NO: 588 - protein, 650 aa, Alloiococcus otitidis
MSKITSQSLYELKNVSQPLAVDEAVFYLETRIDKESNSYKTSLWRLDLKNQDRTLWLSEDYNPTAIEVSPNQKYLSFLSSFKGEKAQLYLIPLTGGGAFALTDEKQGVTSYLWTANSASLYYQTSHKEEEDQKAGSTWPQPTKINRLQHKADGVGLLPEDLTYQVKQVAVASQEVSTVLEKDQAFNLQYVAQDESYLLYVDRLDPDDEWVYGASVYEYNIAQKKARLVTGDYPKGSFYFEAVNSDETAFLLSGNDFSHAFVSLENLYLWDRESQEVTNVSVEDKMVGDTIVGDFQQKITGFPVKWVSDQDFIYPVTDHGKTVLYQGNVQGQNEIVLDEKIHLTGGDLVKANQLVVTYSTLNRPSRLALVDLNSREITDLYNPNQAFDADHTFADIDSFYYTGADNDQVQGWYVKPLESSDNHPAVVYIHGGPQVNYGESFFHEVQYLAGAGYGVVMLNPHGGNSYGQEFVATILGDYGNKDYEDIMLGVDYVLDQYPNIDPDRLFVAGGSYGGFMTNWVVGHTHRFKAAVTQRSISNWISFYGTSDVGAFFVEFQLQADLSRPEDLWRMSPLAYASQSTTPLLVLHGQEDLRCPQEQGEQMYIAMKKAGVDTKLVLYPDSSHGLSRQGLPNLRIERLEEIKSWFDHYAGL

SEQ ID NO: 589 - DNA, 315 bp, Alloiococcus otitidis
  CDS (43)..(312)
gctgggcatgttcaggggtgtcgggtaagaagtaaacgacgggtgcggccgttaggttttcttctaggattcggaagtcggcatctctcgtttcaatgtattcgttcagcaaggatcttggggctcccacagcatcaacactgtcaatttccagctgcaagaaggcatcagtggtggagtcgtaacgaacgacttcaaagtccatttcttcagccatttccgtcaagggaatatcagctgcttgaccagcttggactccgacagtcttacctgacaggtcctctaggctttggatgtcttcattgtcagacttaa

SEQ ID NO: 590 - protein, 90 aa, Alloiococcus otitidis
MRPLGFLLGFGSRHLSFQCIRSARILGLPQHQHCQFPAARRHQWWSRNERLQSPFLQPFPSREYQLLDQLGLRQSYLTGPLGFGCLHCQT

SEQ ID NO: 591 - DNA, 864 bp, Alloiococcus otitidis
  CDS (16)..(861)
gaaggattgataaaaatgaaaaaacttttccctaaaaaaacctctctcttagcttttcttgctgcccttgccctggtcttacttgcttgtgggtcagaagaagaccaagaaagcgcagaaatggaccaatgggaaggccccgtccgggtagctactgtcggtaccggccacccctacagcttggttgaagaagatgggacctggaccgggacagaagctgagatctgggaagagattgaagagagaaccggctgggatgtccaagtccaacgagtcgggtctagtgctacctttggtcaattagatacggaccgaagcgatgtcgctgccaacaattatggcttgaccgaagagcgggccgaaaaatatatctacaccgtcccagcctatgccgacgctaataccatcggggttaagtctgacaatgaagacatccaaagcctagaggacctgtcaggtaagactgtcggagtccaagctggtcaagcagctgatattcccttgacggaaatggctgaagaaatggactttgaagtcgttcgttacgactccaccactgatgccttcttgcagctggaaattgacagtgttgatgctgtgggagccccaagatccttgctgaacgaatacattgaaacgagagatgccgacttccgaatcctagaagaaaacctaacggccgcacccgtcgtttacttcttacccgacacccctgaacatgcccagctcagagatgaattaaatgtggtcatcgaagacatggtggaagacggcacaatgggtgaaattacggaaaaatggctcttttctgatatgaccaaaaacttagaagatatcgatttagatgaatacgactttgactaa

SEQ ID NO: 592 - protein, 282 aa, Alloiococcus otitidis
MKKLFPKKTSLLAFLAALALVLLACGSEEDQESAEMDQWEGPVRVATVGTGHPYSLVEEDGTWTGTEAEIWEEIEERTGWDVQVQRVGSSATFGQLDTDRSDVAANNYGLTEERAEKYIYTVPAYADANTIGVKSDNEDIQSLEDLSGKTVGVQAGQAADIPLTEMAEEMDFEVVRYDSTTDAFLQLEIDSVDAVGAPRSLLNEYIETRDADFRILEENLTAAPVVYFLPDTPEHAQLRDELNVVIEDMVEDGTMGEITEKWLFSDMTKNLEDIDLDEYDFD

SEQ ID NO: 593 - DNA, 864 bp, Alloiococcus otitidis; identical to SEQ ID NO: 591
  CDS (7)..(861)

SEQ ID NO: 594 - protein, 285 aa, Alloiococcus otitidis
MIKMKKLFPKKTSLLAFLAALALVLLACGSEEDQESAEMDQWEGPVRVATVGTGHPYSLVEEDGTWTGTEAEIWEEIEERTGWDVQVQRVGSSATFGQLDTDRSDVAANNYGLTEERAEKYIYTVPAYADANTIGVKSDNEDIQSLEDLSGKTVGVQAGQAADIPLTEMAEEMDFEVVRYDSTTDAFLQLEIDSVDAVGAPRSLLNEYIETRDADFRILEENLTAAPVVYFLPDTPEHAQLRDELNVVIEDMVEDGTMGEITEKWLFSDMTKNLEDIDLDEYDFD

SEQ ID NO: 595 - DNA, 690 bp, Alloiococcus otitidis
  CDS (25)..(687)
actgatttggagggaataaccaatatgggatttgatttttcctacttgcttgaagtcctgccccagctcttttactctgcccgctttactctgtatttaacccttgtggccaccttatttggcttgatcattggccttattctagccgtgatcaactattatgaaattaaaatcctcgaccccctagccaaggtctacctcttcgtcatccggagtgctcctttgattgccctcttgtacttcttttactatgggattgccatgtacagtgactttgtacagaatatgaaccccctcaacgctgtctccatcgttatcagcatgacagcaggtggttttatggctgaaagcatccggggagccctcttatcggttgaagaagggcaaaaggacgccgcctactccttggggatgaccgacagccagctcatgcgccggatcattattcctcaagcaacccggatagccctccccagcctctttaacaatgtaatcagcattaccaaaatgacctctctttcctttgtcttaggggtcgttgatgtcatgggggctgcccgggttgaagggtcacggacctttgcttactttgaaatctatgcaggcgtaatcattgtctacctggtcattgttggcctcctcagccttttccaacgctatatcgctaaaaaatcatcccaggcttattaa

SEQ ID NO: 596 - protein, 221 aa, Alloiococcus otitidis
MGFDFSYLLEVLPQLFYSARFTLYLTLVATLFGLIIGLILAVINYYEIKILDPLAKVYLFVIRSAPLIALLYFFYYGIAMYSDFVQNMNPLNAVSIVISMTAGGFMAESIRGALLSVEEGQKDAAYSLGMTDSQLMRRIIIPQATRIALPSLFNNVISITKMTSLSFVLGVVDVMGAARVEGSRTFAYFEIYAGVIIVYLVIVGLLSLFQRYIAKKSSQAY

SEQ ID NO: 597 - DNA, 690 bp, Alloiococcus otitidis; identical to SEQ ID NO: 595
  CDS (7)..(687)

SEQ ID NO: 598 - protein, 227 aa, Alloiococcus otitidis
MEGITNMGFDFSYLLEVLPQLFYSARFTLYLTLVATLFGLIIGLILAVINYYEIKILDPLAKVYLFVIRSAPLIALLYFFYYGIAMYSDFVQNMNPLNAVSIVISMTAGGFMAESIRGALLSVEEGQKDAAYSLGMTDSQLMRRIIIPQATRIALPSLFNNVISITKMTSLSFVLGVVDVMGAARVEGSRTFAYFEIYAGVIIVYLVIVGLLSLFQRYIAKKSSQAY

SEQ ID NO: 599 - DNA, 324 bp, Alloiococcus otitidis
  CDS (4)..(321)
ctagtgtctaaaaatttgcgaaggtcagtatcggtggggttatccaagatttcttctggacttccatcggctgctatccgtccttggttcataaagaggactcggttggctacttttctagcaaaggagatttcatgggtaaccaggagcatggtggtattgccttcttccaccaagccttggatagtggctaaaacctctgacaccaacatggggtctagagctgacgtgggttcgtcaaagaggaagaccttggggttgacggctaaagaccgggcaatccccaccctttgttgctggcctcctgatagctctgaagggtag

SEQ ID NO: 600 - protein, 106 aa, Alloiococcus otitidis
MSKNLRRSVSVGLSKISSGLPSAAIRPWFIKRTRLATFLAKEISWVTRSMVVLPSSTKPWIVAKTSDTNMGSRADVGSSKRKTLGLTAKDRAIPTLCCWPPDSSEG

SEQ ID NO: 601 - DNA, 765 bp, Alloiococcus otitidis
  CDS (16)..(762)
aaggagttgttttttatgacggaaaatgtagtgacgatcgagaatctgtctaaaagttttggcgaccataccgtcctcaaagacatcaacttagaagtcaaagacaaggaaatcgtcgccattattggcccctctggaaccggtaagtcaactttcctgcgaaccttaaattatttaaatgaacccactagcggaaaaattaccatcggagacgttacagtggatgctaagtctcactctaagaaagacgtgcaaagactccgcctgcaatcctccatggtctttcaacactacaacttgttcaaaaacatgactgccttagagaatgttatggaatccctaatcaccgtccggaagctagacaaagaccaggccaagtccatcgcaatagaacaattggaaaaagtcggcatggccaagcgccaagatgcctacccttcagagctatcaggaggccagcaacaaagggtggggattgcccggtctttagccgtcaaccccaaggtcttcctctttgacgaacccacgtcagctctagaccccatgttggtgtcagaggttttagccactatccaaggcttggtggaagaaggcaataccaccatgctcctggttacccatgaaatctcctttgctagaaaagtagccaaccgagtcctctttatgaaccaaggacggatagcagccgatggaagtccagaagaaatcttggataaccccaccgatactgaccttcgcaaatttttagacactagttattactaa

SEQ ID NO: 602 - protein, 249 aa, Alloiococcus otitidis
MTENVVTIENLSKSFGDHTVLKDINLEVKDKEIVAIIGPSGTGKSTFLRTLNYLNEPTSGKITIGDVTVDAKSHSKKDVQRLRLQSSMVFQHYNLFKNMTALENVMESLITVRKLDKDQAKSIAIEQLEKVGMAKRQDAYPSELSGGQQQRVGIARSLAVNPKVFLFDEPTSALDPMLVSEVLATIQGLVEEGNTTMLLVTHEISFARKVANRVLFMNQGRIAADGSPEEILDNPTDTDLRKFLDTSYY

SEQ ID NO: 603 - DNA, 765 bp, Alloiococcus otitidis; identical to SEQ ID NO: 601
  CDS (7)..(762)

SEQ ID NO: 604 - protein, 252 aa, Alloiococcus otitidis
MFFMTENVVTIENLSKSFGDHTVLKDINLEVKDKEIVAIIGPSGTGKSTFLRTLNYLNEPTSGKITIGDVTVDAKSHSKKDVQRLRLQSSMVFQHYNLFKNMTALENVMESLITVRKLDKDQAKSIAIEQLEKVGMAKRQDAYPSELSGGQQQRVGIARSLAVNPKVFLFDEPTSALDPMLVSEVLATIQGLVEEGNTTMLLVTHEISFARKVANRVLFMNQGRIAADGSPEEILDNPTDTDLRKFLDTSYY

SEQ ID NO: 605 - DNA, 897 bp, Alloiococcus otitidis
  CDS (28)..(894)
ctaagacaaactaggagcagggtagacatgttgaatttaaagcaatggaaggaaaaattgccagttgagaacttacagactttacagccagtagcaggtgggtctatcaatgaggcttatgaagtccaaacgtcatcaggcaagtattttctcctggtccaacccggagccaaaacagatttttatgcagctgaaattgctggcttaaagctttttgaagaccaccaggtcaccgcccccaaagttgtggatgccggccagttaaatggggatgcctacctcctcttgtcttacttggatgaaggagggtctggcagccagtctcaattaggccagctggttgccaagctccaccaggtggagtctgattcaggccagtttggttttgactacccaactgatatggcggatattgcctttgacaaccattggacagagacctggcttgacctctttatcaagggccggattgaccccatgtatgaccggatcaaaagccaaggctactgggatcaggggcaagcagccaaggctgaccaagtgtatgacatcatggtcgccagcctcaaggaccatgattcgagaccctctcttttgcatggagacttatggtcgggcaatgtgatgtacttaaaagatgggtctcccgctatctttgacccagcccctttttacggggaccgggaatttgacttgggagctaccctgaccttcgggggctttggcccagacttttaccaggcctatgaagaggcctaccccttagaaccaggtgcctggaaccggattgaattttataacttatacctgctcttgcttcacttgataaaatttgggtctagctaccagggaggcgtggcccggagcatggataagattattcaaaatgttgaatag

SEQ ID NO: 606 - protein, 289 aa, Alloiococcus otitidis
MLNLKQWKEKLPVENLQTLQPVAGGSINEAYEVQTSSGKYFLLVQPGAKTDFYAAEIAGLKLFEDHQVTAPKVVDAGQLNGDAYLLLSYLDEGGSGSQSQLGQLVAKLHQVESDSGQFGFDYPTDMADIAFDNHWTETWLDLFIKGRIDPMYDRIKSQGYWDQGQAAKADQVYDIMVASLKDHDSRPSLLHGDLWSGNVMYLKDGSPAIFDPAPFYGDREFDLGATLTFGGFGPDFYQAYEEAYPLEPGAWNRIEFYNLYLLLLHLIKFGSSYQGGVARSMDKIIQNVE

SEQ ID NO: 607 - DNA, 477 bp, Alloiococcus otitidis
  CDS (64)..(474)
cggggaggaatctttatgatcaaggtagtctttgtttgtttaggaaatatttgccggtctcccatggccgaagttgtttttaaagacttattagaaaaagaaggcatagccgaccaagtccaggtggattcagctggaacttctagcttggaagaaggcaatccggcccaccaaggcacccaggaccgacttgcccaggaaggtttatcagcggagggtttacactcccgccccatcgatcaagaagacctagaagctgattacattgtagccatggaccagagtaatgtgaacgatattttggcctatatctcaggtcgaccagctggccaggtgaaaaaattactcgcctatgctggtagccagaaagatattgctgacccttggtacaccggcgattttgatgccacttacgcggatgtgataaagggctgccaggggcttttagacgaaatcaaggccaagcattttgactaa

SEQ ID NO: 608 - protein, 137 aa, Alloiococcus otitidis
MAEVVFKDLLEKEGIADQVQVDSAGTSSLEEGNPAHQGTQDRLAQEGLSAEGLHSRPIDQEDLEADYIVAMDQSNVNDILAYISGRPAGQVKKLLAYAGSQKDIADPWYTGDFDATYADVIKGCQGLLDEIKAKHFD

SEQ ID NO: 609 - DNA, 477 bp, Alloiococcus otitidis; identical to SEQ ID NO: 607
  CDS (16)..(474)

SEQ ID NO: 610 - protein, 153 aa, Alloiococcus otitidis
MIKVVFVCLGNICRSPMAEVVFKDLLEKEGIADQVQVDSAGTSSLEEGNPAHQGTQDRLAQEGLSAEGLHSRPIDQEDLEADYIVAMDQSNVNDILAYISGRPAGQVKKLLAYAGSQKDIADPWYTGDFDATYADVIKGCQGLLDEIKAKHFD

SEQ ID NO: 611 - DNA, 471 bp, Alloiococcus otitidis
  CDS (34)..(468)
actaagcaaaccattttaaaaaggaggtccactatgccctggaacttaaaaaattaccccgatcgttttaaaaacctagcccttccggtccgcaaaaaagccatcgagatagctaacagtctcctagatagcgattatccagaaggccaggccattccgattgccatccagcaggccaagaactgggcagaaggagctagtccaaaagagattaaagcggtcaagtacggtagccggcctaaaaaatccgactcccatgaagaagcagctgatccagacctgttagaccaggacgtcctggtctacttcgatgccgacaaaaaccagtggcaggtcaaaacggaaggagctgaccaagccagtgattcctatactagcaagaaggaggcgctgggccgggccaaggaaatcgccagcaataagggaagtcaagttgtctcttataccaagcaaggtaaaaaagaaaattga

SEQ ID NO: 612 - protein, 145 aa, Alloiococcus otitidis
MPWNLKNYPDRFKNLALPVRKKAIEIANSLLDSDYPEGQAIPIAIQQAKNWAEGASPKEIKAVKYGSRPKKSDSHEEAADPDLLDQDVLVYFDADKNQWQVKTEGADQASDSYTSKKEALGRAKEIASNKGSQVVSYTKQGKKEN

SEQ ID NO: 613 - DNA, 570 bp, Alloiococcus otitidis
  CDS (7)..(567)
gtcttaatggcaaaagacccgacaaaatggacctctgaccagttttccaagggctatattgctgactacaagccctataactttgtcgacggagaaggggtccggtgcagcctctatgtgtctggttgtccttttgcctgtccgggctgttacaacaagattgcccagaacttctcttacggcaatccttatactaaagacttagaagagcaaattatagaagatctagcggccgactactgccagggcttgaccctcctgggtggggagcccttcttaaacaccgggatcacactgtctttggtcaagcgggtccggcaagaatacggccaggccaaggatatctggtcctggtctggctatacctgggaagaaattgttgacaagggaacagaagataaaaaagaactcttgtcttacctggacattttggttgatggccggttcaaacaggaccaatttgccccggacctccattttcgggggagtgccaaccaacggattatcgatgttccccagtccctggaccaaggggagattgtcctctggcacaatggcgattataaataa

SEQ ID NO: 614 - protein, 187 aa, Alloiococcus otitidis
MAKDPTKWTSDQFSKGYIADYKPYNFVDGEGVRCSLYVSGCPFACPGCYNKIAQNFSYGNPYTKDLEEQIIEDLAADYCQGLTLLGGEPFLNTGITLSLVKRVRQEYGQAKDIWSWSGYTWEEIVDKGTEDKKELLSYLDILVDGRFKQDQFAPDLHFRGSANQRIIDVPQSLDQGEIVLWHNGDYK

SEQ ID NO: 615 - DNA, 2181 bp, Alloiococcus otitidis
  CDS (4)..(2178)
ctgatggtacggacccaacaattgcagttaaatgttttagtccaaccgacctatgtaaacaagcgggatggtcgccagcaagcctttgactttgacaaattttaccactcctacagccaggcctaccaggctagccaggagtctggggaccaggtcagctctgccgacttccaagactacttcctccaactttttaaagacttaccaggcgaccagatccaagcagctaaactttaccaactgatggaagactacctagaagacagccagcagactgactgcttggaggccttccagtctatccggcgcaagaaggtagaccattttaagaaacaaagggatatcaaccaaaggattaacaccctcttggaccgggaccaggatgtcgtccatgaaaacgccaacaaggatagcaatgtcttcaacacccaacgtgatttgacagctggcattgtggccaaggccacaggcttgaagatgctgccggatcatgtggccaatgcccatgaaaagggagagatccactaccatgacctggactactcgccctactcttctatgagcaactgctgcttgattgacttcaagtctatgtttgaagaaggcttttacatcggcaatgccgaagtagaaacacctaaatctatccagactgccactgctcaaacagctcaaatcatcgccaatgtggcttctagccagtatgggggttgtaccttcgaccgggcagaccaagttttagccccttacgctgagaaaaactaccaaaaacacttggctgtggcccaaaaatggattgaggactctgacaagcaggaggcctttgccaaggaaagaaccaaaaaagatatttacgatgccatgcaaagcctggaatatgagatcaacaccctctacacctcccaaggacaaaccccttttaccacagtaggctttggcctgggtcagtcttggtttgagcgggaaatccaaaaggccatcctccaggtccggattaagggcttgggcagggaagagcggactgctattttccctaaattgatttttactattaaggaagggctcaaccgcaaaccagatgaccctaactatgacgtgaaggaactggccttggaatgctcaaccaagcgcatgtacccggacatcataaactatgataaaattatcgaattaaccggtagcttcaaagctccaatgggttgccggtcctttctccaaggctggcgggatgaaaagggtcaagaagttaatgccggtcggatgaacttgggggtcgttacccttaacctgccccggatcgccatggaatcaggcggggactttaatcgctttaaagagattttagacgaccgactagacattgcccacgatgccttggtctttaaggccaaccgggttatggacaccaagccagagaatgctccaatcctctacattcacggggcctttggcaagcggaccaagccaggcggggacatcaagtcctacttcaagaatcgccgggccactgtttccttaggctatattggtctttatgaagtggctactgtcttttacggtggccagtgggaggacaatcccgaggccaaggcctttaccctagacattgtccgctatcttaaggaaaaaactggagaatggtccgaccaagaagacctccacttcagtctctatgccacccctagtgaaagcttgacagaccgttttaatcgtttggatcgggacaagtttggtcttgtggaaaatattactgacaaggaatactacaccaacagtttccactatgatgttcgcaaagacccaactccttttgaaaagatcgactttgaaaaagactatcctaaatattcaagtggtgggtttatccactactgtgagtatcctaaactccaaaccaaccccaaagccctagaagctgtctgggactatgcctatgacaaggtgggctatttggggaccaacacccccattgaccactgttatgagtgtggttatgacggcgactttaagccaactgaccgcggttttgaatgcccgggctgtggcaataccaacccagatacctgtgatgtggtcaaacgaacttgcggctacctgggcaatccccaaaaacgtcctatggtccacggccgtcacaaggaaattcagtcccgggttaaacacgtaaagggtgagtcttaa

SEQ ID NO: 616 - protein, 725 aa, Alloiococcus otitidis
MVRTQQLQLNVLVQPTYVNKRDGRQQAFDFDKFYHSYSQAYQASQESGDQVSSADFQDYFLQLFKDLPGDQIQAAKLYQLMEDYLEDSQQTDCLEAFQSIRRKKVDHFKKQRDINQRINTLLDRDQDVVHENANKDSNVFNTQRDLTAGIVAKATGLKMLPDHVANAHEKGEIHYHDLDYSPYSSMSNCCLIDFKSMFEEGFYIGNAEVETPKSIQTATAQTAQIIANVASSQYGGCTFDRADQVLAPYAEKNYQKHLAVAQKWIEDSDKQEAFAKERTKKDIYDAMQSLEYEINTLYTSQGQTPFTTVGFGLGQSWFEREIQKAILQVRIKGLGREERTAIFPKLIFTIKEGLNRKPDDPNYDVKELALECSTKRMYPDIINYDKIIELTGSFKAPMGCRSFLQGWRDEKGQEVNAGRMNLGVVTLNLPRIAMESGGDFNRFKEILDDRLDIAHDALVFKANRVMDTKPENAPILYIHGAFGKRTKPGGDIKSYFKNRRATVSLGYIGLYEVATVFYGGQWEDNPEAKAFTLDIVRYLKEKTGEWSDQEDLHFSLYATPSESLTDRFNRLDRDKFGLVENITDKEYYTNSFHYDVRKDPTPFEKIDFEKDYPKYSSGGFIHYCEYPKLQTNPKALEAVWDYAYDKVGYLGTNTPIDHCYECGYDGDFKPTDRGFECPGCGNTNPDTCDVVKRTCGYLGNPQKRPMVHGRHKEIQSRVKHVKGES

SEQ ID NO: 617 - DNA, 255 bp, Alloiococcus otitidis
  CDS (16)..(252)
aagctgtctgggactatgcctatgacaaggtgggctatttggggaccaacacccccattgaccactgttatgagtgtggttatgacggcgactttaagccaactgaccgcggttttgaatgcccgggctgtggcaataccaacccagatacctgtgatgtggtcaaacgaacttgcggctacctgggcaatccccaaaaacgtcctatggtccacggccgtcacaaggaaattcagtcccgggttaaacacgtaa

SEQ ID NO: 618 - protein, 79 aa, Alloiococcus otitidis
MPMTRWAIWGPTPPLTTVMSVVMTATLSQLTAVLNARAVAIPTQIPVMWSNELAATWAIPKNVLWSTAVTRKFSPGLNT

SEQ ID NO: 619 - DNA, 483 bp, Alloiococcus otitidis
  CDS (4)..(480)
aacttggtctgcccggtcgaaggtacaacccccatactggctagaagccacattggcgatgatttgagctgtttgagcagtggcagtctggatagatttaggtgtttctacttcggcattgccgatgtaaaagccttcttcaaacatagacttgaagtcaatcaagcagcagttgctcatagaagagtagggcgagtagtccaggtcatggtagtggatctctcccttttcatgggcattggccacatgatccggcagcatcttcaagcctgtggccttggccacaatgccagctgtcaaatcacgttgggtgttgaagacattgctatccttgttggcgttttcatggacgacatcctggtcccggtccaagagggtgttaatcctttggttgatatccctttgtttcttaaaatggtctaccttcttgcgccggatagactggaaggcctccaagcagtcagtctgctggctgtcttctag

SEQ ID NO: 620 - protein, 159 aa, Alloiococcus otitidis
MVCPVEGTTPILARSHIGDDLSCLSSGSLDRFRCFYFGIADVKAFFKHRLEVNQAAVAHRRVGRVVQVMVVDLSLFMGIGHMIRQHLQACGLGHNASCQITLGVEDIAILVGVFMDDILVPVQEGVNPLVDIPLFLKMVYLLAPDRLEGLQAVSLLAVF

SEQ ID NO: 621 - DNA, 1017 bp, Alloiococcus otitidis
  CDS (58)..(1014)
agaagaagtcggcgcaaatgcctgcgaatcttgcactatttaggaaggagggctaggatgagtgatttttatcaagccattaactggaacaacctagaagatttgattgacaagttgacctgggaaaagttggtggaacagttttggaccgatacccggatcccggtttccaatgacctgaatgactggcgggagctttccccagaagaaaaagatatgattgccaaggtctttgccggattgaccctcctggacaccctccagtcccaggacggtatgtctgtgatgaaagacagtgtccggacccagcacgaagaagcggtcttcaacaatattgaatttatggagtccatgcatgctaagagctacagctccatcttctccaccttaaacaccaaggaagagattgaagccatctttgactgggctcactccaatgacctcctccagaacaaggccttgaagatcaatgaaatctaccagagtcgccatcctcttaaaatcaaggtagccagtgtttttttggaatccttcttgttttattccggcttttttgctcccctatattacctgggcaacagtaaaatgactaatacagctgaaattatcaagttgatcttaagagatgagtcggtccacggcacctatatcggctacaagttccaactaggctacaatgaactagatgaagcggaccaggaggacttgaagaactgggcctaccagcttctttacgacctttatgaaaacgagatggaatatgccagcacgatctatgaccagctgggctggaccgacaaggtggggacctttatgcggtacaacgccaacaaggccttgcaaaacctgggctttgaccccttcttccctgatacagcagaagacgtggaccccctcgtgatgaacgggatctcaacgggaacttccaaccatgacttcttctcccaagtcggtaacggctaccgcttgggtatggtggaggccatgagtgatgacgactatacccagtggttataa

SEQ ID NO: 622 - protein, 319 aa, Alloiococcus otitidis
MSDFYQAINWNNLEDLIDKLTWEKLVEQFWTDTRIPVSNDLNDWRELSPEEKDMIAKVFAGLTLLDTLQSQDGMSVMKDSVRTQHEEAVFNNIEFMESMHAKSYSSIFSTLNTKEEIEAIFDWAHSNDLLQNKALKINEIYQSRHPLKIKVASVFLESFLFYSGFFAPLYYLGNSKMTNTAEIIKLILRDESVHGTYIGYKFQLGYNELDEADQEDLKNWAYQLLYDLYENEMEYASTIYDQLGWTDKVGTFMRYNANKALQNLGFDPFFPDTAEDVDPLVMNGISTGTSNHDFFSQVGNGYRLGMVEAMSDDDYTQWL

SEQ ID NO: 623 - DNA, 1017 bp, Alloiococcus otitidis; identical to SEQ ID NO: 621
  CDS (31)..(1014)

SEQ ID NO: 624 - protein, 328 aa, Alloiococcus otitidis
MHYLGRRARMSDFYQAINWNNLEDLIDKLTWEKLVEQFWTDTRIPVSNDLNDWRELSPEEKDMIAKVFAGLTLLDTLQSQDGMSVMKDSVRTQHEEAVFNNIEFMESMHAKSYSSIFSTLNTKEEIEAIFDWAHSNDLLQNKALKINEIYQSRHPLKIKVASVFLESFLFYSGFFAPLYYLGNSKMTNTAEIIKLILRDESVHGTYIGYKFQLGYNELDEADQEDLKNWAYQLLYDLYENEMEYASTIYDQLGWTDKVGTFMRYNANKALQNLGFDPFFPDTAEDVDPLVMNGISTGTSNHDFFSQVGNGYRLGMVEAMSDDDYTQWL

SEQ ID NO: 625 - DNA, 2190 bp, Alloiococcus otitidis
  CDS (307)..(2187)
agaaagaggtggaagcacttgaccacgttaaagaccgctgaaacaacttactttcagctcaataatgaaattaaccgacctgttaataaccaaatccctctccataaggacaaggaagccttagacgcttattttagagaggaaatcaacccgaagaccctagaatttgacagccttagggagaagattgactacttaattaatgaagactttatcgaagaaggctttatcaagaaatacccttttgaatttatcaaggacctctttgaccaagtctatgccaaagatttccgcttccggtcctttatgggggcttacaagttttacacccagtatgccttgaagacggacgacaagtctcactacttagagcggtatgaagaccgggttgcttttaacgccctcttcttggcagacggggaccaagacttggctcaaaatattgcccaagagatgatcagccagcgctaccaaccagctaccccaaccttttccaatgcgggtcgcaagcggcggggtgaatttgtctcttgcttcttaatccagatgactgatgacatgaactccatcggccgggggataaattctgccttgcaactgtctcggattgggggcggggtcggtgtcaacctgtccaaccttcgggcagcgggtgaccccatcaagaaaattcaaaatgcttcctctggtgttttgcctgtcatgaagctcttggaagactccttctcctactccaaccaactaggtcagcgtaacggggccggggccgtttacctcagtgttttccaccccgatattaagtcttttctatcgaccaagaaggagaatgcagatgaaaaagtccgggtcaagaccctgtcacttggcctggttgttccagacaaattttatgaactaactcggaaggatgaagacctctacctcttcagcccctatgatgtggagcggatttatggccaacccttctcttatgttgacatcacggctgaatacgacaagatggtggccaaccctgatatcaaaaaaaccaaaatcaaggcccgggagttagagactgagatttccaagctccaacaggaatctggctacccttatatcatcaacattgatacagccaaccgggccaaccctattgatggtaagattgtcatgagcaatttgtgcagtgaaattctgcaaattcaagagccctccctgatcaagggcaaccaggactatgaaaaattaggaacggacatttcttgtaacttggggtcgaccaacattgtcaacctgatggagactgacgattttgagcggtcggtcgagaccatggttcgggctttgacccacattactgacacatctgatattgatgtggtcccatcgatcaaaaatgggaacgacaagtaccacaccattggtttaggggctatgggcctccacaccttctttgccctcaaccaaatgcactatgggtcgcctgagtcgattgagtttaccgatgcttacttcttgctcttgaattattacagcctcaaggcttccaacaaaattgccaaggagcgcggtcagacctttgctaatttcgaaaattctgactatgcttccggccggtattttgactcttatactgctagcgactttcactttgactctgacaaggtccgccaaatatttgcagaccgggggattgacctgccaaccgcccaagactggcaagacttgaaagaagccgttatggaagacgggctttaccaccaaaaccgcttggcagttgccccaactgggtccatttcctatgtcaatgagaccagtgccagcatccaccctatcacccgcttgatcgaagaacggcaggaaaaattgaccggtaagacttactaccctgccccttacctgtccaacgaaaccattgactactatacttcagcctatgataccgacatgcggaaggtgattgatgtttatgctgcagcccaaaaacacgtggaccaaggcatgagcttgaccctcttcttgcggtccgtcttgtctgaggacttgtatgaatggaagcagggccactccgacaagcagaccaccagggacttaaacatcctccggcactatgcctttgacaaggggattaagtccatctactatgttcgaacctttaccgatgatgaagaagaagtcggcgcaaatgcctgcgaatcttgcactatttag

SEQ ID NO: 626 - protein, 627 aa, Alloiococcus otitidis
MGAYKFYTQYALKTDDKSHYLERYEDRVAFNALFLADGDQDLAQNIAQEMISQRYQPATPTFSNAGRKRRGEFVSCFLIQMTDDMNSIGRGINSALQLSRIGGGVGVNLSNLRAAGDPIKKIQNASSGVLPVMKLLEDSFSYSNQLGQRNGAGAVYLSVFHPDIKSFLSTKKENADEKVRVKTLSLGLVVPDKFYELTRKDEDLYLFSPYDVERIYGQPFSYVDITAEYDKMVANPDIKKTKIKARELETEISKLQQESGYPYIINIDTANRANPIDGKIVMSNLCSEILQIQEPSLIKGNQDYEKLGTDISCNLGSTNIVNLMETDDFERSVETMVRALTHITDTSDIDVVPSIKNGNDKYHTIGLGAMGLHTFFALNQMHYGSPESIEFTDAYFLLLNYYSLKASNKIAKERGQTFANFENSDYASGRYFDSYTASDFHFDSDKVRQIFADRGIDLPTAQDWQDLKEAVMEDGLYHQNRLAVAPTGSISYVNETSASIHPITRLIEERQEKLTGKTYYPAPYLSNETIDYYTSAYDTDMRKVIDVYAAAQKHVDQGMSLTLFLRSVLSEDLYEWKQGHSDKQTTRDLNILRHYAFDKGIKSIYYVRTFTDDEEEVGANACESCTI

SEQ ID NO: 627 - DNA, 2190 bp, Alloiococcus otitidis; identical to SEQ ID NO: 625
  CDS (19)..(2187)

SEQ ID NO: 628 - protein, 723 aa, Alloiococcus otitidis
MTTLKTAETTYFQLNNEINRPVNNQIPLHKDKEALDAYFREEINPKTLEFDSLREKIDYLINEDFIEEGFIKKYPFEFIKDLFDQVYAKDFRFRSFMGAYKFYTQYALKTDDKSHYLERYEDRVAFNALFLADGDQDLAQNIAQEMISQRYQPATPTFSNAGRKRRGEFVSCFLIQMTDDMNSIGRGINSALQLSRIGGGVGVNLSNLRAAGDPIKKIQNASSGVLPVMKLLEDSFSYSNQLGQRNGAGAVYLSVFHPDIKSFLSTKKENADEKVRVKTLSLGLVVPDKFYELTRKDEDLYLFSPYDVERIYGQPFSYVDITAEYDKMVANPDIKKTKIKARELETEISKLQQESGYPYIINIDTANRANPIDGKIVMSNLCSEILQIQEPSLIKGNQDYEKLGTDISCNLGSTNIVNLMETDDFERSVETMVRALTHITDTSDIDVVPSIKNGNDKYHTIGLGAMGLHTFFALNQMHYGSPESIEFTDAYFLLLNYYSLKASNKIAKERGQTFANFENSDYASGRYFDSYTASDFHFDSDKVRQIFADRGIDLPTAQDWQDLKEAVMEDGLYHQNRLAVAPTGSISYVNETSASIHPITRLIEERQEKLTGKTYYPAPYLSNETIDYYTSAYDTDMRKVIDVYAAAQKHVDQGMSLTLFLRSVLSEDLYEWKQGHSDKQTTRDLNILRHYAFDKGIKSIYYVRTFTDDEEEVGANACESCTI

SEQ ID NO: 629 - DNA, 429 bp, Alloiococcus otitidis
  CDS (49)..(426)
gctcttttaacggctttagacccgacatgcttagcaagttggcctaagatgaaagttgtttatttcagcataacaggtcaaacccgtaaatttgtcaacaagctggacatggatttgctggaggtgtctccggccgatccttttatttacctagatgaagactttattatcgtcacccccacctacgatgcccaggtgaccgacttctggtacgattttttggaaacaggggacaaccaggcccacttcaaaggagttgctggtggcggcaaccggaattttaatgacttgtttatttttactgccaaggacctggctcgtgactatggggtccccttgatccatgcctttgaattccaaggcagtgattatgatgttgagactttaaagaaagaggtggaagcacttgaccacgttaaagaccgctga

SEQ ID NO: 630 - protein, 126 aa, Alloiococcus otitidis
MKVVYFSITGQTRKFVNKLDMDLLEVSPADPFIYLDEDFIIVTPTYDAQVTDFWYDFLETGDNQAHFKGVAGGGNRNFNDLFIFTAKDLARDYGVPLIHAFEFQGSDYDVETLKKEVEALDHVKDR

SEQ ID NO: 631 - DNA, 258 bp, Alloiococcus otitidis
  CDS (25)..(255)
aagaagagatttagcctggaggaaatgaagatgaaaaaaattgttgtatactcaaaacccaattgcatgcaatgccaatttaccaaaaaattcttagaagaccggggcattccctatgaaagcaaggatgtccagtctagcgaccaagctttaagtgaagtaaaagatatgggctacacttccctaccagtggtattggcagatggcctaggctcttttaacggctttagacccgacatgcttagcaagttggcctaa

SEQ ID NO: 632 - protein, 77 aa, Alloiococcus otitidis
MKMKKIVVYSKPNCMQCQFTKKFLEDRGIPYESKDVQSSDQALSEVKDMGYTSLPVVLADGLGSFNGFRPDMLSKLA

SEQ ID NO: 633 - DNA, 177 bp, Alloiococcus otitidis
  CDS (1)..(174)
atgcaattgggttttgagtatacaacaatttttttcatcttcatttcctccaggctaaatctcttctttcaagttggaccaattggcagtcagtccaagcaattggccatacttgatgtcgagatgtctttatttacatcctctattttagcgaaaggcttaaaagaaaacaagtga

SEQ ID NO: 634 - protein, 58 aa, Alloiococcus otitidis
MQLGFEYTTIFFIFISSRLNLFFQVGPIGSQSKQLAILDVEMSLFTSSILAKGLKENK

SEQ ID NO: 635 - DNA, 1029 bp, Alloiococcus otitidis
  CDS (19)..(1026)
atagcaaggagacttgacatgaccaatgtgattttaaccggtgaccggccgacagggaaactccacctgggccactttgtagggtccttgcgtaaccgggtccggttgcaggctgatgctgacaatgacctctacattatggtggctgaccagcaggccttgactgacaatgcccgaaatcccaagaaagtccaggactccatcttgcaggtggccttggactatttagcagtggggattgacccggcccaaacaaccctctttatccagtcccaaatcccccaattgccggaattaaccctctacttcctcaacttggtgactacttcaagacttaagcggaacccgacagtgaagtctgaaatccagcagaaagattttaaaagctcgattccagccggctttttcatctatccggttagccaggctgctgatatcgctgccttcaaggccagctatgttccggttggcgacgaccaaaaacccatgatcgaacaaacccgagaaattgtccgcgactttaatagcacttaccaaacagatgttttggtcgaacccgatattgtccttccccctaaaggccagggtcgtttggtagggattgacgggtcaggcaagatgagtaagtctttggggaacgggatttacctgtctgattctgaagatgaaatccaaaagaaagtcatgagcatgtatactgacccagaccacatccatgtggaagacccgggcaaggttgaaggcaatgtcgtttttacctacctggatgtttttgcccaagacaaggacaaagttcaagacttaaaagaccactaccgggctggaggtttaggggatgtcaagctcaaacgataccttaatgaagtccttcaagcccagctcaaacccatccgggaccgccggcaagaattggaagctaacctagattatgtctactccatcctcaaagatgggagccaggcagcagaaaaaattgccagccagaccctagaccaggttaaagaggccatggggattaactatttctaa

SEQ ID NO: 636 - protein, 336 aa, Alloiococcus otitidis
MTNVILTGDRPTGKLHLGHFVGSLRNRVRLQADADNDLYIMVADQQALTDNARNPKKVQDSILQVALDYLAVGIDPAQTTLFIQSQIPQLPELTLYFLNLVTTSRLKRNPTVKSEIQQKDFKSSIPAGFFIYPVSQAADIAAFKASYVPVGDDQKPMIEQTREIVRDFNSTYQTDVLVEPDIVLPPKGQGRLVGIDGSGKMSKSLGNGIYLSDSEDEIQKKVMSMYTDPDHIHVEDPGKVEGNVVFTYLDVFAQDKDKVQDLKDHYRAGGLGDVKLKRYLNEVLQAQLKPIRDRRQELEANLDYVYSILKDGSQAAEKIASQTLDQVKEAMGINYF

SEQ ID NO: 637 - DNA, 1776 bp, Alloiococcus otitidis
  CDS (55)..(1773)
ttaatagtaacacttttaaaaaaatcgaatactaattttaaatggatagataaaatgaataatttagaatttttaagatttttattttctttagtacagaataaatgtaaattgtttattagcatctttttatcgctattaagtgcggttttaacgctatttataccccttattattggacttgtatttaatcctgaaaagatagctttactaaataacaaaccatcaattttaatattaagtttattagtaattgccattattttcattattcatagtttatcaacctatagtttagggacaattgggatagatatattgacgaaattacaagcaaatttttttcagcatagtttgaaactgcctattaccaagatatattccttgaacataggtgatataaatagcagaataatgaatgatttagaaagtatagcacaatttttttccgttttaatgcctcaattaattgttaattcatttattgttatagggtctatcgttttactaatattaatcaattggcaattaacaattattattttatctatgctaccaatatttattttaattcagctaccattaaatattaaattggaaaaattatctcaggatagaagtttaaaaaatggggaaaatagtgcatatattgttcaaagattaacaaatattaaattggttaaaagtaagatgacggaaaactatgaaggatttataagttattatcgctttaaaaatcatggtaaaattataaaaaaaatcctagctttagagactataactttaactgttggtgcaattctattatttgcttatcttttttttattttttatcactcttataatttatatatatctagtgacttgtctataccgaaattagtatctttttttctttatgttttgacggttatcagtcctttattagagattgtaaatattatttcccaaatttcagaaataaaaggaaacatttcaagaattttgcaaattatgaatttaaacgttgaactggataaaggttctaatactgttacaagaattgagaatattactgcaagaggtctgaccttttcatatggttctgaaaaaacaattttacataaagttgattttgaaataaataggccctcattagttgcatttgttggaccatcgggggctggtaagactactttactagagttaatcatgaaatttcatactaattatgaagggtcattaaaaataaacggagttgaattatcgcaaattaaattatcaaatattcgtaaaaatattgaatatataaatcagtatcaagagctatttgaaggaactataagagataatttggtttatggatatgaggggtctattgaagataataaaatatataatatattagaattagtgaatgcaaatgaatttgttagtgcgatgcctaaaggcctagatagttatgtgagcgagtcagcaaataatttatcagcaggtcaaaagcagagacttaatatagcacgttcattgataaatgatcctgatgttttattatttgatgaacctacttcaaatttagacggtttatcaaagcaaattatttataatttgctgaattatttatcaaataaatatatagttattataatatctcatgaaattgaaacaattaaagatgctaacaaaatatatgttttagaaaaagacggtagaattagggacagcggaactcataatgaactatttaatgatagtgagatttatcaaaaactttattatcacagtataaaagaataa

SEQ ID NO: 638 - protein, 573 aa, Alloiococcus otitidis
MNNLEFLRFLFSLVQNKCKLFISIFLSLLSAVLTLFIPLIIGLVFNPEKIALLNNKPSILILSLLVIAIIFIIHSLSTYSLGTIGIDILTKLQANFFQHSLKLPITKIYSLNIGDINSRIMNDLESIAQFFSVLMPQLIVNSFIVIGSIVLLILINWQLTIIILSMLPIFILIQLPLNIKLEKLSQDRSLKNGENSAYIVQRLTNIKLVKSKMTENYEGFISYYRFKNHGKIIKKILALETITLTVGAILLFAYLFFIFYHSYNLYISSDLSIPKLVSFFLYVLTVISPLLEIVNIISQISEIKGNISRILQIMNLNVELDKGSNTVTRIENITARGLTFSYGSEKTILHKVDFEINRPSLVAFVGPSGAGKTTLLELIMKFHTNYEGSLKINGVELSQIKLSNIRKNIEYINQYQELFEGTIRDNLVYGYEGSIEDNKIYNILELVNANEFVSAMPKGLDSYVSESANNLSAGQKQRLNIARSLINDPDVLLFDEPTSNLDGLSKQIIYNLLNYLSNKYIVIIISHEIETIKDANKIYVLEKDGRIRDSGTHNELFNDSEIYQKLYYHSIKE

SEQ ID NO: 639 - DNA, 783 bp, Alloiococcus otitidis
  CDS (514)..(780)
acaagtattttgaaggtgatgatcatgattaatttatataaagcaaatttgaaaatgacgttgatacgaaaagaaagtttaattctatttggctttgctttatttcctctcattttaatcattgtttctttttttgatacacagttcatgcaactttctgcaccagataattctatgagctttgtaactttttttgaagctgttattgatgtgcaatatcaaacttttttacccctagttgctttgatctacctagttattgtaagcattggggatgaaatacgatcagggaaactcatcttatataaagatattgatcgcaatagtattatattctctaagctactatctatgttaagtatatatgtaatttatttttttcttacaattattagtagtttaatcacctattatacatatttgataaatcaaaattatactaatggtcattttttaccaattaataatatagaattgaaaaattcctctttgattatactatctataattgttatgcacatttattgtattttgctttcttcatttttttctataaaattcaataattcagcgacattattgatagtatcggtaattatgctattttcttttgttagtgcaaaactaactttgacttcatatatttttcccaatgcctatccagctttttttgatggttcgaattatctagagcttatttttttcatagcatttaattttatatttgtgtcgttttttttagttttgattaatagtaacacttttaaaaaaatcgaatactaa

SEQ ID NO: 640 - protein, 89 aa, Alloiococcus otitidis
MHIYCILLSSFFSIKFNNSATLLIVSVIMLFSFVSAKLTLTSYIFPNAYPAFFDGSNYLELIFFIAFNFIFVSFFLVLINSNTFKKIEY

SEQ ID NO: 641 - DNA, 783 bp, Alloiococcus otitidis; identical to SEQ ID NO: 639
  CDS (475)..(780)

SEQ ID NO: 642 - protein, 102 aa, Alloiococcus otitidis
MKNSSLIILSIIVMHIYCILLSSFFSIKFNNSATLLIVSVIMLFSFVSAKLTLTSYIFPNAYPAFFDGSNYLELIFFIAFNFIFVSFFLVLINSNTFKKIEY

SEQ ID NO: 643 - DNA, 783 bp, Alloiococcus otitidis; identical to SEQ ID NO: 639
  CDS (19)..(780)

SEQ ID NO: 644 - protein, 254 aa, Alloiococcus otitidis
MIMINLYKANLKMTLIRKESLILFGFALFPLILIIVSFFDTQFMQLSAPDNSMSFVTFFEAVIDVQYQTFLPLVALIYLVIVSIGDEIRSGKLILYKDIDRNSIIFSKLLSMLSIYVIYFFLTIISSLITYYTYLINQNYTNGHFLPINNIELKNSSLIILSIIVMHIYCILLSSFFSIKFNNSATLLIVSVIMLFSFVSAKLTLTSYIFPNAYPAFFDGSNYLELIFFIAFNFIFVSFFLVLINSNTFKKIEY

SEQ ID NO: 645 - DNA, 783 bp, Alloiococcus otitidis; identical to SEQ ID NO: 639
  CDS (16)..(780)

SEQ ID NO: 646 - protein, 255 aa, Alloiococcus otitidis
MMIMINLYKANLKMTLIRKESLILFGFALFPLILIIVSFFDTQFMQLSAPDNSMSFVTFFEAVIDVQYQTFLPLVALIYLVIVSIGDEIRSGKLILYKDIDRNSIIFSKLLSMLSIYVIYFFLTIISSLITYYTYLINQNYTNGHFLPINNIELKNSSLIILSIIVMHIYCILLSSFFSIKFNNSATLLIVSVIMLFSFVSAKLTLTSYIFPNAYPAFFDGSNYLELIFFIAFNFIFVSFFLVLINSNTFKKIEY

SEQ ID NO: 647 - DNA, 783 bp, Alloiococcus otitidis; identical to SEQ ID NO: 639
  CDS (10)..(780)

SEQ ID NO: 648 - protein, 257 aa, Alloiococcus otitidis
MKVMIMINLYKANLKMTLIRKESLILFGFALFPLILIIVSFFDTQFMQLSAPDNSMSFVTFFEAVIDVQYQTFLPLVALIYLVIVSIGDEIRSGKLILYKDIDRNSIIFSKLLSMLSIYVIYFFLTIISSLITYYTYLINQNYTNGHFLPINNIELKNSSLIILSIIVMHIYCILLSSFFSIKFNNSATLLIVSVIMLFSFVSAKLTLTSYIFPNAYPAFFDGSNYLELIFFIAFNFIFVSFFLVLINSNTFKKIEY

SEQ ID NO: 649 - DNA, 897 bp, Alloiococcus otitidis
  CDS (10)..(894)
caattactaatggttttaaaagttaaggacttatataaacaatatcctaaaagtgaacgttttgcattaaaaaatgtatcttttacaatagatgatggagaaattgttggtttagttggtaggaatgggtcaggaaaaactactctcttgaaaatattaataaaagctttgcgacctactaaaggcgaaataatatataaaggacaaagtttgtggtctagatcaaaccagttaaaaaattttggagtacttatacgtcctgttttttacgatcatctaacagttttggaaaacttgcatttttatttaactatccaccaatctgaaagatttaaaaataatatagaatcaattttgaaattagttgacttatgggataatcgtaaagataagccgtcaactttttcttttggtatgaaacaacgactttctttagctatgtctctactaacagaacccacttttcttgtgcttgatgagccatttgtagggttggatccagatggcgtaaaaaaactcatcaaaattttaaatgaagctagattagaacatcaggctacaatgattatttctagccatcagctaaatgaattagagtctatttgccaacgttatttattcattgaaaatggacaattgaacgaattagcatcagaaaagagtggatcttatgacattttgttggctgaagaaatacaattacgaaattttttcgatacacatgtgttgaattttttgacatataaaacggagaaaaatcttttgagtattaatcaatctatcaatcaagaagatttaaataatattttattttctttagcgcagaagcaattaattaaatcttttgcgttaaatagtcctttagacaagtattttgaaggtgatgatcatgattaa

SEQ ID NO: 650 - protein, 295 aa, Alloiococcus otitidis
MVLKVKDLYKQYPKSERFALKNVSFTIDDGEIVGLVGRNGSGKTTLLKILIKALRPTKGEIIYKGQSLWSRSNQLKNFGVLIRPVFYDHLTVLENLHFYLTIHQSERFKNNIESILKLVDLWDNRKDKPSTFSFGMKQRLSLAMSLLTEPTFLVLDEPFVGLDPDGVKKLIKILNEARLEHQATMIISSHQLNELESICQRYLFIENGQLNELASEKSGSYDILLAEEIQLRNFFDTHVLNFLTYKTEKNLLSINQSINQEDLNNILFSLAQKQLIKSFALNSPLDKYFEGDDHD

SEQ ID NO: 651 - DNA, 438 bp, Alloiococcus otitidis
  CDS (55)..(435)
atcgctggaccactatttttatctattgtattgcatgtattattgatagtttttatgacattatcattgcctgatacttctgttatatttataacttcatgcctatatttagcacccattatcgtgaatatatttttttcaatatatttaacttattacaaagatatacatagttataaacgtaatcttatatttccgtttatttcaactatatattttattgcgagtgcaatattatttgaaagaacaggcttatggccacaatttgctaacacaattaatagtgtttctgctagtgcaaatgaaagtgttgtaatatttattagtcctaaattgtttgatttatcacaaattttatttgcattattgctttattttagtattacattactaacaatgttaatacttagaaaattgaaagggaatagcaattactaa

SEQ ID NO: 652 - protein, 127 aa, Alloiococcus otitidis
MTLSLPDTSVIFITSCLYLAPIIVNIFFSIYLTYYKDIHSYKRNLIFPFISTIYFIASAILFERTGLWPQFANTINSVSASANESVVIFISPKLFDLSQILFALLLYFSITLLTMLILRKLKGNSNY

SEQ ID NO: 653 - DNA, 591 bp, Alloiococcus otitidis
  CDS (232)..(588)
gaggaaaaacaaatgaagatgaaatttggtgaatccgttctattttcaatagcgttaattttgattgctggattattaataaatattagtaatattttacacttaatgttctttgatacaaatagtttggctattaacaatatactatttattatattcggcactatatcatttgtattaattcctcggaaatttgtgaattggttaaatatatttccgcctaagataaaattgaatgtaaattacttaagattatttgttgttgttgctattatgctggttttatctagtaatatggctgaatacaataaacttataattcatagagcaattattgtgagcttactagaagagtatctttttagatttattatatataatatatttttgcataatagtaatcaagggatttcttatatattgacttcattattattttcaatgatattacatctaaatgggagtgttatagggaacctattaattaaatttccatcagcattaatattgcaatggatttatattcatattggatatgaatgctcagttactttgcatagtttaaataacattattgtcagtttaatatga

SEQ ID NO: 654 - protein, 119 aa, Alloiococcus otitidis
MNVNYLRLFVVVAIMLVLSSNMAEYNKLIIHRAIIVSLLEEYLFRFIIYNIFLHNSNQGISYILTSLLFSMILHLNGSVIGNLLIKFPSALILQWIYIHIGYECSVTLHSLNNIIVSLI

SEQ ID NO: 655 - DNA, 591 bp, Alloiococcus otitidis; identical to SEQ ID NO: 653
  CDS (13)..(588)

SEQ ID NO: 656 - protein, 192 aa, Alloiococcus otitidis
MKMKFGESVLFSIALILIAGLLINISNILHLMFFDTNSLAINNILFIIFGTISFVLIPRKFVNWLNIFPPKIKLNVNYLRLFVVVAIMLVLSSNMAEYNKLIIHRAIIVSLLEEYLFRFIIYNIFLHNSNQGISYILTSLLFSMILHLNGSVIGNLLIKFPSALILQWIYIHIGYECSVTLHSLNNIIVSLI

SEQ ID NO: 657 - DNA, 1074 bp, Alloiococcus otitidis
  CDS (220)..(1071)
aacctgctgacgaaaattcagaaccctatatcaacgttattgcagccaatgaaggtgatgaaagagaatcttttgacattattgtggatgcctaccagtccgaagataccctggaagttatcagagaggtcagtgagaactccgaaattgtcgtctgggctgaagaaggttacgagttttctgaataagtcaggtttgttagtaaagggagatggtggaatgaaaaagaaaatattagctactctagcagccttgtccttgttttcgctagcgggctgccaaagcagccaagctgaagagcacttgaaaattggagtagtgggcgatgcctcagctgacatctgggaggaagtcgccgacaaggttgctgaccaaggtgtgaacttggaagttgtgaccttttccgactatgtccagcctaaccgggccttagctgatggagacatagatttaaatgccttccagcacctggccttcttgaaggaatatgtggaagattcgggggatgactttgttccggtgggctataccgctatttcgcctacttttgtcttcgccgtcgagggcattgatagtcctgaagacattcctgagggtgcctcggttgccattcccaacacggtgaccaatgctgagcggtctttcctagccttgcaggacctgggcctcttggaattagacccagaggcggggtctgctccgacggtcgatgatattgaagaggtcaagcatggcctggagattgtggagttagacccccaacaagtggcccgggccttgggagatacagacctagccattatcgggtcccagcagactgtggatgccgattatgacccccaagaggccatctataatgatgtagaagacagcgaccgggaagttgacccgctgaagaaaaatgccatcgttaccctaagagaccggcaagacgacccagccatcttaaaggtggtagaggcctaccagagtgatgacattagccaactagtcgttgatgtgacggccgatctagtagcctgggaagaagacgatgaccccattggtgactttgaccgcgtcctggggaagtaa

SEQ ID NO: 658 - protein, 284 aa, Alloiococcus otitidis
MKKKILATLAALSLFSLAGCQSSQAEEHLKIGVVGDASADIWEEVADKVADQGVNLEVVTFSDYVQPNRALADGDIDLNAFQHLAFLKEYVEDSGDDFVPVGYTAISPTFVFAVEGIDSPEDIPEGASVAIPNTVTNAERSFLALQDLGLLELDPEAGSAPTVDDIEEVKHGLEIVELDPQQVARALGDTDLAIIGSQQTVDADYDPQEAIYNDVEDSDREVDPLKKNAIVTLRDRQDDPAILKVVEAYQSDDISQLVVDVTADLVAWEEDDDPIGDFDRVLGK

SEQ ID NO: 659 - DNA, 1074 bp, Alloiococcus otitidis; identical to SEQ ID NO: 657
  CDS (196)..(1071)

SEQ ID NO: 660 - protein, 292 aa, Alloiococcus otitidis
MLVKGDGGMKKKILATLAALSLFSLAGCQSSQAEEHLKIGVVGDASADIWEEVADKVADQGVNLEVVTFSDYVQPNRALADGDIDLNAFQHLAFLKEYVEDSGDDFVPVGYTAISPTFVFAVEGIDSPEDIPEGASVAIPNTVTNAERSFLALQDLGLLELDPEAGSAPTVDDIEEVKHGLEIVELDPQQVARALGDTDLAIIGSQQTVDADYDPQEAIYNDVEDSDREVDPLKKNAIVTLRDRQDDPAILKVVEAYQSDDISQLVVDVTADLVAWEEDDDPIGDFDRVLGK

SEQ ID NO: 661 - DNA, 1074 bp, Alloiococcus otitidis; identical to SEQ ID NO: 657
  CDS (133)..(1071)

SEQ ID NO: 662 - protein, 313 aa, Alloiococcus otitidis
MRTPKLSSGLKKVTSFLNKSGLLVKGDGGMKKKILATLAALSLFSLAGCQSSQAEEHLKIGVVGDASADIWEEVADKVADQGVNLEVVTFSDYVQPNRALADGDIDLNAFQHLAFLKEYVEDSGDDFVPVGYTAISPTFVFAVEGIDSPEDIPEGASVAIPNTVTNAERSFLALQDLGLLELDPEAGSAPTVDDIEEVKHGLEIVELDPQQVARALGDTDLAIIGSQQTVDADYDPQEAIYNDVEDSDREVDPLKKNAIVTLRDRQDDPAILKVVEAYQSDDISQLVVDVTADLVAWEEDDDPIGDFDRVLGK

SEQ ID NO: 663 - DNA, 1074 bp, Alloiococcus otitidis; identical to SEQ ID NO: 657
  CDS (49)..(1071)

SEQ ID NO: 664 - protein, 341 aa, Alloiococcus otitidis
MKVMKENLLTLLWMPTSPKIPWKLSERSVRTPKLSSGLKKVTSFLNKSGLLVKGDGGMKKKILATLAALSLFSLAGCQSSQAEEHLKIGVVGDASADIWEEVADKVADQGVNLEVVTFSDYVQPNRALADGDIDLNAFQHLAFLKEYVEDSGDDFVPVGYTAISPTFVFAVEGIDSPEDIPEGASVAIPNTVTNAERSFLALQDLGLLELDPEAGSAPTVDDIEEVKHGLEIVELDPQQVARALGDTDLAIIGSQQTVDADYDPQEAIYNDVEDSDREVDPLKKNAIVTLRDRQDDPAILKVVEAYQSDDISQLVVDVTADLVAWEEDDDPIGDFDRVLGK

SEQ ID NO: 665 - DNA, 1074 bp, Alloiococcus otitidis; identical to SEQ ID NO: 657
  CDS (40)..(1071)

SEQ ID NO: 666 - protein, 344 aa, Alloiococcus otitidis
MQPMKVMKENLLTLLWMPTSPKIPWKLSERSVRTPKLSSGLKKVTSFLNKSGLLVKGDGGMKKKILATLAALSLFSLAGCQSSQAEEHLKIGVVGDASADIWEEVADKVADQGVNLEVVTFSDYVQPNRALADGDIDLNAFQHLAFLKEYVEDSGDDFVPVGYTAISPTFVFAVEGIDSPEDIPEGASVAIPNTVTNAERSFLALQDLGLLELDPEAGSAPTVDDIEEVKHGLEIVELDPQQVARALGDTDLAIIGSQQTVDADYDPQEAIYNDVEDSDREVDPLKKNAIVTLRDRQDDPAILKVVEAYQSDDISQLVVDVTADLVAWEEDDDPIGDFDRVLGK

SEQ ID NO: 667 - DNA, 306 bp, Alloiococcus otitidis
  CDS (31)..(303)
tcggcatccacagtctgctgggacccgataatggctaggtctgtatctcccaaggcccgggccacttgttgggggtctaactccacaatctccaggccatgcttgacctcttcaatatcatcgaccgtcggagcagaccccgcctctgggtctaattccaagaggcccaggtcctgcaaggctaggaaagaccgctcagcattggtcaccgtgttgggaatggcaaccgaggcaccctcaggaatgtcttcaggactatcaatgccctcgacggcgaagacaaaagtaggcgaaatagcggtatag

SEQ ID NO: 668 - protein, 91 aa, Alloiococcus otitidis
MARSVSPKARATCWGSNSTISRPCLTSSISSTVGADPASGSNSKRPRSCKARKDRSALVTVLGMATEAPSGMSSGLSMPSTAKTKVGEIAV

SEQ ID NO: 669 - DNA, 831 bp, Alloiococcus otitidis
  CDS (4)..(828)
gttatgtcatataaaaaactactcttaacccttgccagtgcaggaagtctattcgccctatccgggtgtgggaaccaagcaaatgaagtggtccggttaggcgttatcggtgaagataatgatgtatgggaatttgtccaagacaaggtggctgaccagggaatagacttggaattagtttcattttcggattactcccagcccaaccgtgccttagatgagggggatattgatctcaatgccttccaaacccgaattttcttggatagcttcaatgaagaatttggatccaatattgtccctattgccgacaccgtcattgcccccttagggatttactcagaagaagtccaagatgtttcagagattagtgagggcgctgaaattgctattcctaacgaggtttccaatgaaggcagggctttggtcttgctccagtcagccggcctgctggaagtagacccagatgcgggcatcctacctacaacagatgatatcacaaacaatcccttgaacttggaaatcactcaactggatgcctcccaaacagctcgttccgttggggacgtcacagctgccgttatcaactcgggtatggcagtggatgccggctataaaccaaacgaagatgccatattcttagaacctgctgacgaaaattcagaaccctatatcaacgttattgcagccaatgaaggtgatgaaagagaatcttttgacattattgtggatgcctaccagtccgaagataccctggaagttatcagagaggtcagtgagaactccgaaattgtcgtctgggctgaagaaggttacgagttttctgaataa

SEQ ID NO: 670 - protein, 275 aa, Alloiococcus otitidis
MSYKKLLLTLASAGSLFALSGCGNQANEVVRLGVIGEDNDVWEFVQDKVADQGIDLELVSFSDYSQPNRALDEGDIDLNAFQTRIFLDSFNEEFGSNIVPIADTVIAPLGIYSEEVQDVSEISEGAEIAIPNEVSNEGRALVLLQSAGLLEVDPDAGILPTTDDITNNPLNLEITQLDASQTARSVGDVTAAVINSGMAVDAGYKPNEDAIFLEPADENSEPYINVIAANEGDERESFDIIVDAYQSEDTLEVIREVSENSEIVVWAEEGYEFSE

SEQ ID NO: 671 - DNA, 285 bp, Alloiococcus otitidis
  CDS (73)..(282)
ttgtcgtctgggctgaagatggctatgaattttctgaataagtcctgtttgtcaggcaggagagataatgggatgaaaaagagtgttaggagctctactgatatctgggaagaagtcgccgacaaggttgctgaccaaggtgtgaacttggaagttgtgaccttttccgattatgtccagcctagccgggccttagctgatggggacatagatttaaatgccatccagcacctggccttcttgaaggattatgtggaagaaaggataatgagttatgtcatataa

SEQ ID NO: 672 - protein, 70 aa, Alloiococcus otitidis
MKKSVRSSTDIWEEVADKVADQGVNLEVVTFSDYVQPSRALADGDIDLNAIQHLAFLKDYVEERIMSYVI

SEQ ID NO: 673 - DNA, 285 bp, Alloiococcus otitidis; identical to SEQ ID NO: 671
  CDS (19)..(282)

SEQ ID NO: 674 - protein, 88 aa, Alloiococcus otitidis
MAMNFLNKSCLSGRRDNGMKKSVRSSTDIWEEVADKVADQGVNLEVVTFSDYVQPSRALADGDIDLNAIQHLAFLKDYVEERIMSYVI

SEQ ID NO: 675 - DNA, 831 bp, Alloiococcus otitidis
  CDS (4)..(828)
gttatgtcatataaaaaactactattaacccttgtcagtgcaggaagtttatttgccctatccggctgtggcagccaagcagatgaagtggtccgtgtgggcgtgattggagaagaccacgaggactgggaattcgtccaagacaaggtggctgaccagggaatagacttggaattagtaacattttcggattactcccagcccaaccgtgccttagacgacggggatatcgacctcaatgccttccagcaccggattttcttggataactttaatgaagaattcggaaccaatatcgtccctattgccgatacagctattgcccctttagggatttactcggaagaagttcaagatgtttcagagattggtgaaggggccgaaattgccatccctaacgatgtcaccaatgggggccgggccttggtcttgctccagtcagccggccttatcgaagtggatccagatgcggggatcctgccttcaacagatgatatcacagacaaccccttgaacctggaaatcaccgaactggatgcctcccaaacagctcgttccattggggatgtgaccgcagctgttatcaactctggtattgccgtggatgccggttacatcccagatgaagatgctgttttcttagagcccgttgacgaaaattcagaaccttatatcaacgttattgcagctaatgaaggcgatgaaagagaatccttcgacatcattgtggatgcttaccagtctgaagataccctggaagtcatcaatgaggccagtgaagattccgtaattgtcgtctgggctgaagatggctatgaattttctgaataa

SEQ ID NO: 676 - protein, 275 aa, Alloiococcus otitidis
MSYKKLLLTLVSAGSLFALSGCGSQADEVVRVGVIGEDHEDWEFVQDKVADQGIDLELVTFSDYSQPNRALDDGDIDLNAFQHRIFLDNFNEEFGTNIVPIADTAIAPLGIYSEEVQDVSEIGEGAEIAIPNDVTNGGRALVLLQSAGLIEVDPDAGILPSTDDITDNPLNLEITELDASQTARSIGDVTAAVINSGIAVDAGYIPDEDAVFLEPVDENSEPYINVIAANEGDERESFDIIVDAYQSEDTLEVINEASEDSVIVVWAEDGYEFSE

SEQ ID NO: 677 - DNA, 732 bp, Alloiococcus otitidis
  CDS (283)..(729)
cattggttcagaggaaggagatacagaatgaccctacttgcaatttctgatattattgagcagcttttgccctactcaagtgaaataccagaacgttttgtcgaaaccacgatcgagaccttgtacatgaccttggtgaccgctgtgattgcgggggccttggggattattttaggggtgactttgaccgtgacccacaagggcaatatcttagacaaccgctatgtttacaagatcttggagaatattatcaatatcctccggtccattcctttcattattatgctggccttgatctacccggtcacccgggccattgtggggaccaccattgggaccacagcggccattgtcccccttgtggtggccactgttcctttctatgccaaacaggtggagtccgccctcttggaagtggatgatgggattgtcgaagcagctgaggctatggggaccagtccagttggcattatcttctcagtctacctcaaggaaggcctgcccagtctcttgcgggtatcctctgttaccattgtcagtttgattgggaccaccactatggccggtgctgttggtgggggcggtttaggggacctagccatcacccggggctataaccgtttccaacacgacgttaccctggtttcgaccttgattattatggcctttgtctttattagtcaagggatcggcaactattttgtcaacaaaaccagtcataagaataagtaa

SEQ ID NO: 678 - protein, 149 aa, Alloiococcus otitidis
MLALIYPVTRAIVGTTIGTTAAIVPLVVATVPFYAKQVESALLEVDDGIVEAAEAMGTSPVGIIFSVYLKEGLPSLLRVSSVTIVSLIGTTTMAGAVGGGGLGDLAITRGYNRFQHDVTLVSTLIIMAFVFISQGIGNYFVNKTSHKNK

SEQ ID NO: 679 - DNA, 732 bp, Alloiococcus otitidis; identical to SEQ ID NO: 677
  CDS (121)..(729)

SEQ ID NO: 680 - protein, 203 aa, Alloiococcus otitidis
MYMTLVTAVIAGALGIILGVTLTVTHKGNILDNRYVYKILENIINILRSIPFIIMLALIYPVTRAIVGTTIGTTAAIVPLVVATVPFYAKQVESALLEVDDGIVEAAEAMGTSPVGIIFSVYLKEGLPSLLRVSSVTIVSLIGTTTMAGAVGGGGLGDLAITRGYNRFQHDVTLVSTLIIMAFVFISQGIGNYFVNKTSHKNK

SEQ ID NO: 681 - DNA, 732 bp, Alloiococcus otitidis; identical to SEQ ID NO: 677
  CDS (28)..(729)

SEQ ID NO: 682 - protein, 234 aa, Alloiococcus otitidis
MTLLAISDIIEQLLPYSSEIPERFVETTIETLYMTLVTAVIAGALGIILGVTLTVTHKGNILDNRYVYKILENIINILRSIPFIIMLALIYPVTRAIVGTTIGTTAAIVPLVVATVPFYAKQVESALLEVDDGIVEAAEAMGTSPVGIIFSVYLKEGLPSLLRVSSVTIVSLIGTTTMAGAVGGGGLGDLAITRGYNRFQHDVTLVSTLIIMAFVFISQGIGNYFVNKTSHKNK

SEQ ID NO: 683 - DNA, 1101 bp, Alloiococcus otitidis
  CDS (1)..(1098)
atgatcgagctgaaggacattgatgttcatttccaatcagatgagcatgtcatcaaggcggtgaaaggagttagtttaaaagtagataagggggacatatatggggtggttggctacagcggggccggcaagtcaaccctggtccggactatcaatctcttgcaaaagccaaccaatggcagcgtccgggtgaatggccaggacatgctggatttatcagccagtgagttgcgggcagcccgcaaaaaaattggcatgatctttcagcacttcaacctgatgaatgcccggacggtagcaggcaatatcttatatgccttacggtcgtctgacttatccagggaagaaaagcaaaccaaggtcaccgacctactagaattggtagacttggccgacaagcatgattcctatccctcccagctatctggtgggcaaaagcagcgggtagggatagccagagccttggccaatgacccagaagtcctcttgtgtgatgaagcaacttcggctctagaccccaagacgaccacggatattttaaagcttttgaaacagttgaaccaggaattgggcttgaccattgtcttgattactcacgagatggacgccatcaaggaaatttgcaacaaggtagccgtcatgggagacggggaagtggttgaacggggggacattgttaagatctttactgaaccggagaaccccctaacccaggaattcatcaacacagcccttgggattgaccaggccttggagaaattgagccggcaggagaccgtgatgaacctgaccaacaaggaccagattgcccagttgacctttaagcaggggagtgctggtcagccttttaccaaggaagtttatgagcgttatggcatttcaaccaatattatctacgggaatgttgagattttaaatggagactacatcgggaacctgattgtcatctttacaggggacgatgagagtttgcaggagtcttaccgctacttagaagaaaaccatgtgacagttggcttgttggaacatgtcaaagacggggaagaatacaagctaatccctcgtagtgacattggttcagaggaaggagatacagaatga

SEQ ID NO: 684 - protein, 366 aa, Alloiococcus otitidis
MIELKDIDVHFQSDEHVIKAVKGVSLKVDKGDIYGVVGYSGAGKSTLVRTINLLQKPTNGSVRVNGQDMLDLSASELRAARKKIGMIFQHFNLMNARTVAGNILYALRSSDLSREEKQTKVTDLLELVDLADKHDSYPSQLSGGQKQRVGIARALANDPEVLLCDEATSALDPKTTTDILKLLKQLNQELGLTIVLITHEMDAIKEICNKVAVMGDGEVVERGDIVKIFTEPENPLTQEFINTALGIDQALEKLSRQETVMNLTNKDQIAQLTFKQGSAGQPFTKEVYERYGISTNIIYGNVEILNGDYIGNLIVIFTGDDESLQESYRYLEENHVTVGLLEHVKDGEEYKLIPRSDIGSEEGDTE

SEQ ID NO: 685 - DNA, 1236 bp, Alloiococcus otitidis
  CDS (388)..(1233)
tgtttgagactgtcactgggctatactaaagatgaagaaagggcgaccaccgacaataatgggtgcaaacctagcctaggaggtccaagcatgaaaattttaatgacaagtgatttatacactccagctatcaatggtgttgtgacatccatccaaaccctaaaacaagcactggaagcagctggccatgaggtccgggtcctcaccctgtcgcccaaaccaggttttgacgaaaaggagggggtttattccgtctcctccattagcttaaacaaaatttacccaggagcccgagtctccttcaccaccactgattggattaaagaccaaatcctgaactggcaacctgaattaatccacacccactgtgagttttccacctttaaaatggccaaagctattgccaaagacttggctattcccatcgtccacacctaccacaccatctacgaagactacacccactacttctctcccaacaaaaaaatgggtaaaaaaatcgtctcccttatatccaaacacttactcaaccaagtaaactacgtgattgcccctacccaaaaagtcaaagacatgctaatgggctaccaagtccaaagctccattgccatcatcccaactggtatccctagccaaaaattcagccacgttctaagccaagcagagcgacaagagcttcgaagccaggctggttaccaagaaggagaccggctcttggtcttcttgggccgactagccaaagagaaaaacctgtctgaaatccttgactacttaagccagagagaggattcaagcctaaaactcatgatttgtggggacggtccttacaaagccagtctccaaagtcaggtaaatgaactcggcttaagtgaccgggtccacttcaccggtatggtagaccctaaccaggtagccaactactaccaaatggcagacctctttgtgtctgcttccaccagtgaaacccagggcttaacctacatcgaagccctcttcagtggcctccccctcctctgccggcaagacgacagcttgaaggaggttatccaaactggtttaaacggctttgcctaccaagacgtggaggacttctaccaaaaactggaccgcttgttggccgatcctaaaacccttagtcaaatgggagactttgcaagaagccaagcccttcaatccttctcagcccaagcctttggctcaagcggtctcagacttgtacgaagaagtcttagatga

SEQ ID NO: 686 - protein, 282 aa, Alloiococcus otitidis
MAKAIAKDLAIPIVHTYHTIYEDYTHYFSPNKKMGKKIVSLISKHLLNQVNYVIAPTQKVKDMLMGYQVQSSIAIIPTGIPSQKFSHVLSQAERQELRSQAGYQEGDRLLVFLGRLAKEKNLSEILDYLSQREDSSLKLMICGDGPYKASLQSQVNELGLSDRVHFTGMVDPNQVANYYQMADLFVSASTSETQGLTYIEALFSGLPLLCRQDDSLKEVIQTGLNGFAYQDVEDFYQKLDRLLADPKTLSQMGDFARSQALQSFSAQAFGSSGLRLVRRSLR

SEQ ID NO: 687 - DNA, 1236 bp, Alloiococcus otitidis; identical to SEQ ID NO: 685
  CDS (91)..(1233)

SEQ ID NO: 688 - protein, 381 aa, Alloiococcus otitidis
MKILMTSDLYTPAINGVVTSIQTLKQALEAAGHEVRVLTLSPKPGFDEKEGVYSVSSISLNKIYPGARVSFTTTDWIKDQILNWQPELIHTHCEFSTFKMAKAIAKDLAIPIVHTYHTIYEDYTHYFSPNKKMGKKIVSLISKHLLNQVNYVIAPTQKVKDMLMGYQVQSSIAIIPTGIPSQKFSHVLSQAERQELRSQAGYQEGDRLLVFLGRLAKEKNLSEILDYLSQREDSSLKLMICGDGPYKASLQSQVNELGLSDRVHFTGMVDPNQVANYYQMADLFVSASTSETQGLTYIEALFSGLPLLCRQDDSLKEVIQTGLNGFAYQDVEDFYQKLDRLLADPKTLSQMGDFARSQALQSFSAQAFGSSGLRLVRRSLR

SEQ ID NO: 689 - DNA, 1236 bp, Alloiococcus otitidis; identical to SEQ ID NO: 685
  CDS (4)..(1233)

SEQ ID NO: 690 - protein, 410 aa, Alloiococcus otitidis
MRLSLGYTKDEERATTDNNGCKPSLGGPSMKILMTSDLYTPAINGVVTSIQTLKQALEAAGHEVRVLTLSPKPGFDEKEGVYSVSSISLNKIYPGARVSFTTTDWIKDQILNWQPELIHTHCEFSTFKMAKAIAKDLAIPIVHTYHTIYEDYTHYFSPNKKMGKKIVSLISKHLLNQVNYVIAPTQKVKDMLMGYQVQSSIAIIPTGIPSQKFSHVLSQAERQELRSQAGYQEGDRLLVFLGRLAKEKNLSEILDYLSQREDSSLKLMICGDGPYKASLQSQVNELGLSDRVHFTGMVDPNQVANYYQMADLFVSASTSETQGLTYIEALFSGLPLLCRQDDSLKEVIQTGLNGFAYQDVEDFYQKLDRLLADPKTLSQMGDFARSQALQSFSAQAFGSSGLRLVRRSLR

SEQ ID NO: 691 - DNA, 243 bp, Alloiococcus otitidis
  CDS (7)..(240)
acggctttgcctaccaagacgtggaggacttctaccaaaaactggaccgcttgttggccgatcctaaaacccttagtcaaatgggagactttgcaagaagccaagcccttcaatccttctcagcccaagcctttggctcaagcggtctcagacttgtacgaagaagtcttagatgaccatgtgccagcttctagccaagccaaaagtcacaaaggcctctccaccctcagaacttgggggtag

SEQ ID NO: 692 - protein, 78 aa, Alloiococcus otitidis
MPTKTWRTSTKNWTACWPILKPLVKWETLQEAKPFNPSQPKPLAQAVSDLYEEVLDDHVPASSQAKSHKGLSTLRTWG

SEQ ID NO: 693 - DNA, 204 bp, Alloiococcus otitidis
  CDS (1)..(201)
atggccaaagaccaagatgcccactgggatggtgatggccccaggaataatggggaggacaacttggataaattggatgaagataaagagtgggccggcccaactaccaaattggtcgagatagtgacgcatgacttccgggttggtaaagaggttgacccggaaggcccagataaggaagatgccggccccaattgtgcctag

SEQ ID NO: 694 - protein, 67 aa, Alloiococcus otitidis
MAKDQDAHWDGDGPRNNGEDNLDKLDEDKEWAGPTTKLVEIVTHDFRVGKEVDPEGPDKEDAGPNCA

SEQ ID NO: 695 - DNA, 237 bp, Alloiococcus otitidis
  CDS (7)..(234)
gcacaattggggccggcatcttccttatctgggccttccgggtcaacctctttaccaacccggaagtcatgcgtcactatctcgaccaatttggtagttgggccggcccactctttatcttcatccaatttatccaagttgtcctccccattattcctggggccatcaccatcccagtgggcatcttggtctttggccatgtcaacggttttttactcaactttaccggcattatga

SEQ ID NO: 696 - protein, 76 aa, Alloiococcus otitidis
MGPASSLSGPSGSTSLPTRKSCVTISTNLVVGPAHSLSSSNLSKLSSPLFLGPSPSQWASWSLAMSTVFYSTLPAL

SEQ ID NO: 697 - DNA, 225 bp, Alloiococcus otitidis
  CDS (1)..(222)
ttgggccggcccactctttatcttcatccaatttatccaagttgtcctccccattattcctggggccatcaccatcccagtgggcatcttggtctttggccatgtcaacggttttttactcaactttaccggcattatgatcgggtcagtcgtcaactactacctcgccaaacgctacggcagaccctttgtcaaaaccatagtcaacgaaaaacaatacaataa

SEQ ID NO: 698 - protein, 74 aa, Alloiococcus otitidis
MGRPTLYLHPIYPSCPPHYSWGHHHPSGHLGLWPCQRFFTQLYRHYDRVSRQLLPRQTLRQTLCQNHSQRKTIQ

SEQ ID NO: 699 - DNA, 648 bp, Alloiococcus otitidis
  CDS (55)..(645)
ccaagccaaaagtcacaaaggcctctccaccctcagaacttgggggtagggcttatggcaaaggtgcaatcgcgaactgttatcaatggtttaaacatcctaggcacaattggggccggcatcttccttatctgggccttccgggtcaacctctttaccaacccggaagtcatgcgtcactatctcgaccaatttggtagttgggccggcccactctttatcttcatccaatttatccaagttgtcctccccattattcctggggccatcaccatcccagtgggcatcttggtctttggccatgtcaacggttttttactcaactttaccggcattatgatcgggtcagtcgtcaactactacctcgccaaacgctacggcagaccctttgtcaaaaccatagtcaacgaaaaacaatacaataaatacattggcaagatcgaaaacagccggctctttgaccgcttgtttaccttctccatgttctttcccatcagtccagctgacctcctctgctacctagctggtctatccaatatgtcttttaaacactttttcttgtccctcttttttggtaaaccctttaccctcttggcctactcctatggtttactcttcgtcttaaatatctttgaacaccttttttag

SEQ ID NO: 700 - protein, 197 aa, Alloiococcus otitidis
MAKVQSRTVINGLNILGTIGAGIFLIWAFRVNLFTNPEVMRHYLDQFGSWAGPLFIFIQFIQVVLPIIPGAITIPVGILVFGHVNGFLLNFTGIMIGSVVNYYLAKRYGRPFVKTIVNEKQYNKYIGKIENSRLFDRLFTFSMFFPISPADLLCYLAGLSNMSFKHFFLSLFFGKPFTLLAYSYGLLFVLNIFEHLF

SEQ ID NO: 701 - DNA, 648 bp, Alloiococcus otitidis; identical to SEQ ID NO: 699
  CDS (40)..(645)

SEQ ID NO: 702 - protein, 202 aa, Alloiococcus otitidis
MGVGLMAKVQSRTVINGLNILGTIGAGIFLIWAFRVNLFTNPEVMRHYLDQFGSWAGPLFIFIQFIQVVLPIIPGAITIPVGILVFGHVNGFLLNFTGIMIGSVVNYYLAKRYGRPFVKTIVNEKQYNKYIGKIENSRLFDRLFTFSMFFPISPADLLCYLAGLSNMSFKHFFLSLFFGKPFTLLAYSYGLLFVLNIFEHLF

SEQ ID NO: 703 - DNA, 1074 bp, Alloiococcus otitidis
  CDS (25)..(1071)
acaccttttttaggaggtttcttcatgaaagtttacttgcttagtgacatgctcaaatcaatcgaaaaaagcggggttggccgggccttggaccaccaaaaaatggccttgcaggcagctgacatcccctataccacaggtcaggagggtcgcgtcaaagactatgacctaatccatatcaacaccatctttccccagtccctcctcaaggcttgctgggccagactccggggcaaaaccgtggtctaccatgcccactccaccgaagaagacttcagggactcctttaaactcgccaatgccctagcccctctctttaagctttggctaaaaatttgctacaacagtggccacttgattgtcactccttctgcttactccaaaagcctcctagaccaataccaactcaaggctcccatccaggtcatctcaaacgggattgacctcgactactggcaggccagccaagaggaaatacaggcctttaaagcccgctaccaagctgatcccaccaggcccctcatcatttcagtgggcctacccattaaacgcaaaggaattattgactttgtcgaactagccaaagacctgcccgactatgactttgtctggtttggccacactgatatccgcttcttgccgaaagaggtccaacaagcctactacaccaagctagacaacctcaaatttgctggctacattgaccgcaaagacatccgggtggcctatgctgcttgtgacatctacctctttttgacccatgaagaaacagaaggcatcgtcctcctcgaagccttggcttctaaggcaaacaccatcgtccgagacatccctgtttttaacaaagacttccatcatgggcaaaatgtttacaaggggcagaaccttgaggaatttaaaagcctcattcaagacctggttcaaggcaaaattcccaacctgacccaggctggctaccgggcagctgcagccaaaagtattgaccaagttggccaccagctcaagctggcctaccaggaagccatggacttggccgacagccagaccggcctcctctctaaaaaagccaactaa

SEQ ID NO: 704 - protein, 349 aa, Alloiococcus otitidis
MKVYLLSDMLKSIEKSGVGRALDHQKMALQAADIPYTTGQEGRVKDYDLIHINTIFPQSLLKACWARLRGKTVVYHAHSTEEDFRDSFKLANALAPLFKLWLKICYNSGHLIVTPSAYSKSLLDQYQLKAPIQVISNGIDLDYWQASQEEIQAFKARYQADPTRPLIISVGLPIKRKGIIDFVELAKDLPDYDFVWFGHTDIRFLPKEVQQAYYTKLDNLKFAGYIDRKDIRVAYAACDIYLFLTHEETEGIVLLEALASKANTIVRDIPVFNKDFHHGQNVYKGQNLEEFKSLIQDLVQGKIPNLTQAGYRAAAAKSIDQVGHQLKLAYQEAMDLADSQTGLLSKKAN

SEQ ID NO: 705 - DNA, 639 bp, Alloiococcus otitidis
  CDS (127)..(636)
aaaagccaactaaaaatatccactcctagcactagcctagctaaagctccgtttttgcttcagttagaccctagtgctagtattgttttagagatacttgacacgggaggcaagactgtggaaaaaatggacttatatgacggcaacaaacgacccctaggggagaccattggccgccaggaaaaaactggtccagggacctataccttgatggtccatggtcttttaatcaatgactcaggccaggtcctcagccaaaaacgggtagagactaaaacaaactggccaagcttatgggacttgtcctgcagtggggcggtcaagactggggagaccagccaagaagctttaagccgggagtttaaagaggagttaggcctggacttggacctcaagaccacagcccccatcctgaccgcttcctaccagcaaggcctgtccgactattacctgcttccttactcaatcgacttggccggcctccaaatagccaaagacgaaatccaaaacgtccagtggctagacttggcagacctgttcgcctacttggaccagggccgctttgtcccctaccaaaagtccttcctccaggccctctttgatatctaccaggctggcagcgaaattttacccgactga

SEQ ID NO: 706 - protein, 170 aa, Alloiococcus otitidis
MDLYDGNKRPLGETIGRQEKTGPGTYTLMVHGLLINDSGQVLSQKRVETKTNWPSLWDLSCSGAVKTGETSQEALSREFKEELGLDLDLKTTAPILTASYQQGLSDYYLLPYSIDLAGLQIAKDEIQNVQWLDLADLFAYLDQGRFVPYQKSFLQALFDIYQAGSEILPD

SEQ ID NO: 707 - DNA, 639 bp, Alloiococcus otitidis; identical to SEQ ID NO: 705
  CDS (118)..(636)

SEQ ID NO: 708 - protein, 173 aa, Alloiococcus otitidis
MEKMDLYDGNKRPLGETIGRQEKTGPGTYTLMVHGLLINDSGQVLSQKRVETKTNWPSLWDLSCSGAVKTGETSQEALSREFKEELGLDLDLKTTAPILTASYQQGLSDYYLLPYSIDLAGLQIAKDEIQNVQWLDLADLFAYLDQGRFVPYQKSFLQALFDIYQAGSEILPD

SEQ ID NO: 709 - DNA, 639 bp, Alloiococcus otitidis; identical to SEQ ID NO: 705
  CDS (55)..(636)

SEQ ID NO: 710 - protein, 194 aa, Alloiococcus otitidis
MLQLDPSASIVLEILDTGGKTVEKMDLYDGNKRPLGETIGRQEKTGPGTYTLMVHGLLINDSGQVLSQKRVETKTNWPSLWDLSCSGAVKTGETSQEALSREFKEELGLDLDLKTTAPILTASYQQGLSDYYLLPYSIDLAGLQIAKDEIQNVQWLDLADLFAYLDQGRFVPYQKSFLQALFDIYQAGSEILPD

SEQ ID NO: 711 - DNA, 873 bp, Alloiococcus otitidis
  CDS (160)..(870)
atgaacacagcttttgtcgttgacagtactgggactctttcccaagacttactcgaccaagacaatatctacgaactaaccttgagtaccaccttccctgacggaaccacttataccgacacccgggatgacaagaagactattgagttctacgagaccatgacagcttccaaagacttgccaaccacctcgcaacccagcccccaacaatactccgaaatccttgatgacatcaaggctaagggctatgaacacgtcattttcatcctgctgtcttctaaaattagtggtgccctgcaatcagctaaagtggtggccgaagattatgccgatgactttcatacttattttattgattccaaaggcacatcacttttaattgaaaacctggttgaacaaggcatgaccctactcgatgaagggctagaccaccaaacagtttgcgataaactccgttgggtggccgaacaaaccgatattttcgtcgtagtggaagacctcaaaaacctggtcaagggcggtcgcttgtccaaaggagaatctttgatggggaacctactccggatcaaacccatcttgatcattgacaagaacggtgaagtcaaaccctatgaaaaagtccgaaccctgaacaaggccctcaagcggatggaagatattgttgacgaaaaaatgaaattatttgatggcaaggctaaaatctgctttgcccatgccaaccgggaaaagaaagttgccaaggagatcgaaaaactccaagtcaaatacccaaacaccagtttccggtcagactttttaaccgtgattttaggtactcactctggcgaaggagctattggggtaggcgttattccctacgcaagcaaggattaa

SEQ ID NO: 712 - protein, 237 aa, Alloiococcus otitidis
MTASKDLPTTSQPSPQQYSEILDDIKAKGYEHVIFILLSSKISGALQSAKVVAEDYADDFHTYFIDSKGTSLLIENLVEQGMTLLDEGLDHQTVCDKLRWVAEQTDIFVVVEDLKNLVKGGRLSKGESLMGNLLRIKPILIIDKNGEVKPYEKVRTLNKALKRMEDIVDEKMKLFDGKAKICFAHANREKKVAKEIEKLQVKYPNTSFRSDFLTVILGTHSGEGAIGVGVIPYASKD

SEQ ID NO: 713 - DNA, 873 bp, Alloiococcus otitidis; identical to SEQ ID NO: 711
  CDS (1)..(870)

SEQ ID NO: 714 - protein, 290 aa, Alloiococcus otitidis
MNTAFVVDSTGTLSQDLLDQDNIYELTLSTTFPDGTTYTDTRDDKKTIEFYETMTASKDLPTTSQPSPQQYSEILDDIKAKGYEHVIFILLSSKISGALQSAKVVAEDYADDFHTYFIDSKGTSLLIENLVEQGMTLLDEGLDHQTVCDKLRWVAEQTDIFVVVEDLKNLVKGGRLSKGESLMGNLLRIKPILIIDKNGEVKPYEKVRTLNKALKRMEDIVDEKMKLFDGKAKICFAHANREKKVAKEIEKLQVKYPNTSFRSDFLTVILGTHSGEGAIGVGVIPYASKD

SEQ ID NO: 715 - DNA, 1350 bp, Alloiococcus otitidis
  CDS (1126)..(1347)
gaaaggggagtgcagccagtggcaagtcagaaacacccgcttttggctgaattttttgaatacatatcttccggtatggtttcgatgattggcgtggccattttcatcttagccgataccttttttattgccaacgggatcggccaggaagcggttgcagccttaaatgtcgccatccccattggcaacatcctccacgggaccggttggatgatcggtgttggcggagccgccctctactctatcgtccgaggtcagggagacttgaaccgggcgaatgggatctttacctttaccgttaagttagcggcaattgtggctacaattgtctgcctcctccttttggtctttaatgaacccattctctatttcttcggggcatctggtcaaaccattggcctggcccaagagtactttattatccatgccttctatggtcctttttttattatagcaaatactttcgtttctttcgtccgaaatgacaacaatcctaggctagctaccatggctttgatgtcgggtgcctttagtaatattatactggattacatttatatttactggtttaattgggggatggcaggggcctcctttgccaccatcctctcaccggctattaccctggcggttttgaccctccacctcaattataccaagcgcaaactcgcctttgctcctttccgctttcgccttgaccgcttgcgacggatcttttccatcggtttctcatccctcctcaacgagctggcttcaggcatgattattgtcttcttcaaccaggccatgctggtcttagtcggggatgtgggggtgtcagcctatgcagtggttgccaatatcaacctggtggcccttttaatcttccaaggcatgggccagggagtccagcccttaattagccggtactatggcatgacccggggccaaaccgttaagcgcctggttaaattcagcattttggccattgccttggttggcggggtattaatgaccatcaatttgtcctttactgaccagatcgtctctctctttaaccggaatgacaatccagaaatggctatgctggccagccaggggatccggttctttagcctgtccattatcttagctggtttaaatatcttggccatttacctgctcgctgctatagagcgggcctttgcctccatgttgatttccctcttgcgaagtctgatcttgattccgcccatcatttccttcctagctagtcagtatggtgttgagggagcttgggccaccatgattgtggttgagcttatcaccctagtctttaccatttcctttaccctctattactggcggaaaaccctggcagaccagacctaa

SEQ ID NO: 716 - protein, 74 aa, Alloiococcus otitidis
MAIYLLAAIERAFASMLISLLRSLILIPPIISFLASQYGVEGAWATMIVVELITLVFTISFTLYYWRKTLADQT

SEQ ID NO: 717 - DNA, 1350 bp, Alloiococcus otitidis; identical to SEQ ID NO: 715
  CDS (1057)..(1347)

SEQ ID NO: 718 - protein, 97 aa, Alloiococcus otitidis
MAMLASQGIRFFSLSIILAGLNILAIYLLAAIERAFASMLISLLRSLILIPPIISFLASQYGVEGAWATMIVVELITLVFTISFTLYYWRKTLADQT

SEQ ID NO: 719 - DNA, 1350 bp, Alloiococcus otitidis; identical to SEQ ID NO: 715
  CDS (916)..(1347)

SEQ ID NO: 720 - protein, 144 aa, Alloiococcus otitidis
MTRGQTVKRLVKFSILAIALVGGVLMTINLSFTDQIVSLFNRNDNPEMAMLASQGIRFFSLSIILAGLNILAIYLLAAIERAFASMLISLLRSLILIPPIISFLASQYGVEGAWATMIVVELITLVFTISFTLYYWRKTLADQT

SEQ ID NO: 721 - DNA, 1350 bp, Alloiococcus otitidis; identical to SEQ ID NO: 715
  CDS (703)..(1347)

SEQ ID NO: 722 - protein, 215 aa, Alloiococcus otitidis
MRRIFSIGFSSLLNELASGMIIVFFNQAMLVLVGDVGVSAYAVVANINLVALLIFQGMGQGVQPLISRYYGMTRGQTVKRLVKFSILAIALVGGVLMTINLSFTDQIVSLFNRNDNPEMAMLASQGIRFFSLSIILAGLNILAIYLLAAIERAFASMLISLLRSLILIPPIISFLASQYGVEGAWATMIVVELITLVFTISFTLYYWRKTLADQT

SEQ ID NO: 723 - DNA, 1350 bp, Alloiococcus otitidis; identical to SEQ ID NO: 715
  CDS (265)..(1347)

SEQ ID NO: 724 - protein, 361 aa, Alloiococcus otitidis
MNRANGIFTFTVKLAAIVATIVCLLLLVFNEPILYFFGASGQTIGLAQEYFIIHAFYGPFFIIANTFVSFVRNDNNPRLATMALMSGAFSNIILDYIYIYWFNWGMAGASFATILSPAITLAVLTLHLNYTKRKLAFAPFRFRLDRLRRIFSIGFSSLLNELASGMIIVFFNQAMLVLVGDVGVSAYAVVANINLVALLIFQGMGQGVQPLISRYYGMTRGQTVKRLVKFSILAIALVGGVLMTINLSFTDQIVSLFNRNDNPEMAMLASQGIRFFSLSIILAGLNILAIYLLAAIERAFASMLISLLRSLILIPPIISFLASQYGVEGAWATMIVVELITLVFTISFTLYYWRKTLADQT

SEQ ID NO: 725 - DNA, 1350 bp, Alloiococcus otitidis; identical to SEQ ID NO: 715
  CDS (76)..(1347)

SEQ ID NO: 726 - protein, 424 aa, Alloiococcus otitidis
MVSMIGVAIFILADTFFIANGIGQEAVAALNVAIPIGNILHGTGWMIGVGGAALYSIVRGQGDLNRANGIFTFTVKLAAIVATIVCLLLLVFNEPILYFFGASGQTIGLAQEYFIIHAFYGPFFIIANTFVSFVRNDNNPRLATMALMSGAFSNIILDYIYIYWFNWGMAGASFATILSPAITLAVLTLHLNYTKRKLAFAPFRFRLDRLRRIFSIGFSSLLNELASGMIIVFFNQAMLVLVGDVGVSAYAVVANINLVALLIFQGMGQGVQPLISRYYGMTRGQTVKRLVKFSILAIALVGGVLMTINLSFTDQIVSLFNRNDNPEMAMLASQGIRFFSLSIILAGLNILAIYLLAAIERAFASMLISLLRSLILIPPIISFLASQYGVEGAWATMIVVELITLVFTISFTLYYWRKTLADQT

SEQ ID NO: 727 - DNA, 1350 bp, Alloiococcus otitidis; identical to SEQ ID NO: 715
  CDS (43)..(1347)

SEQ ID NO: 728 - protein, 435 aa, Alloiococcus otitidis
MAEFFEYISSGMVSMIGVAIFILADTFFIANGIGQEAVAALNVAIPIGNILHGTGWMIGVGGAALYSIVRGQGDLNRANGIFTFTVKLAAIVATIVCLLLLVFNEPILYFFGASGQTIGLAQEYFIIHAFYGPFFIIANTFVSFVRNDNNPRLATMALMSGAFSNIILDYIYIYWFNWGMAGASFATILSPAITLAVLTLHLNYTKRKLAFAPFRFRLDRLRRIFSIGFSSLLNELASGMIIVFFNQAMLVLVGDVGVSAYAVVANINLVALLIFQGMGQGVQPLISRYYGMTRGQTVKRLVKFSILAIALVGGVLMTINLSFTDQIVSLFNRNDNPEMAMLASQGIRFFSLSIILAGLNILAIYLLAAIERAFASMLISLLRSLILIPPIISFLASQYGVEGAWATMIVVELITLVFTISFTLYYWRKTLADQT

SEQ ID NO: 729 - DNA, 1350 bp, Alloiococcus otitidis; identical to SEQ ID NO: 715
  CDS (10)..(1347)

SEQ ID NO: 730 - protein, 446 aa, Alloiococcus otitidis
MQPVASQKHPLLAEFFEYISSGMVSMIGVAIFILADTFFIANGIGQEAVAALNVAIPIGNILHGTGWMIGVGGAALYSIVRGQGDLNRANGIFTFTVKLAAIVATIVCLLLLVFNEPILYFFGASGQTIGLAQEYFIIHAFYGPFFIIANTFVSFVRNDNNPRLATMALMSGAFSNIILDYIYIYWFNWGMAGASFATILSPAITLAVLTLHLNYTKRKLAFAPFRFRLDRLRRIFSIGFSSLLNELASGMIIVFFNQAMLVLVGDVGVSAYAVVANINLVALLIFQGMGQGVQPLISRYYGMTRGQTVKRLVKFSILAIALVGGVLMTINLSFTDQIVSLFNRNDNPEMAMLASQGIRFFSLSIILAGLNILAIYLLAAIERAFASMLISLLRSLILIPPIISFLASQYGVEGAWATMIVVELITLVFTISFTLYYWRKTLADQT

SEQ ID NO: 731 - DNA, 675 bp, Alloiococcus otitidis
  CDS (37)..(672)
gcaaggatctcattgttcacaggaggtactcatgacatgaaagcagaaaatagagaaaccaagcttcgcccaatccaggcacaagacatccccgctattaaggccatcatgggccaggaatggtaccaagaccttttacagaaggaccgggaagcaggtcaagcctttgtccatttcgatgtccaatcctgtctaaacgccagtagcttcggcctggtcgctctagtccaaggtcaacttgtcggggtcattatggcaaggtctgacaaggacaagcgaaacttgcgacttttaaataccgataccacgcctgctttaatgaccctcctggccaaagaccacagtatccgccaagaattggtcgacgactactacttggaacaaaaaacttaccgaagcttagaagaagcttctgacttagtctaccaaggggagattaccctttttatcctgactcctaatgcccggggtcaaggccttggtcgccagctcttccaggctaccttagcctactttaaagaccagggagtagactattacttcctccatactgacgaggactgcaccatttctttttaccaaaaggctggacttcgacaggcccaggccatccaggtccaagatagccggcaagttcctttgtattactacctctatgacaatggtccaagctag

SEQ ID NO: 732 - protein, 212 aa, Alloiococcus otitidis
MKAENRETKLRPIQAQDIPAIKAIMGQEWYQDLLQKDREAGQAFVHFDVQSCLNASSFGLVALVQGQLVGVIMARSDKDKRNLRLLNTDTTPALMTLLAKDHSIRQELVDDYYLEQKTYRSLEEASDLVYQGEITLFILTPNARGQGLGRQLFQATLAYFKDQGVDYYFLHTDEDCTISFYQKAGLRQAQAIQVQDSRQVPLYYYLYDNGPS

SEQ ID NO: 733 - DNA, 675 bp, Alloiococcus otitidis; identical to SEQ ID NO: 731
  CDS (13)..(672)

SEQ ID NO: 734 - protein, 220 aa, Alloiococcus otitidis
MFTGGTHDMKAENRETKLRPIQAQDIPAIKAIMGQEWYQDLLQKDREAGQAFVHFDVQSCLNASSFGLVALVQGQLVGVIMARSDKDKRNLRLLNTDTTPALMTLLAKDHSIRQELVDDYYLEQKTYRSLEEASDLVYQGEITLFILTPNARGQGLGRQLFQATLAYFKDQGVDYYFLHTDEDCTISFYQKAGLRQAQAIQVQDSRQVPLYYYLYDNGPS

SEQ ID NO: 735 - DNA, 678 bp, Alloiococcus otitidis
  CDS (10)..(675)
ggtggaagtatgagttttagtgaccaggctattgaagaaacggttaattttgtcaaaagtcaaaccttcggggaagggactggccatgactggttccacatccaaagggtctggcagacggcttgttatatccacagccaagaaggggaaggagacttgtttattgtccaaatgacagccctccttcatgatctggcggatgagaaattaggggatgaggaggctggcttggaaaaaattgcttactttctggaaggtctgggtctgtcccaaagcaagatggagcaaattttagccagcgtccagtccatttcctaccacaaacagcttgcccaagaaagtctgtcggtcgaggagcaaattgtccaggatgccgatcgcttagatgccatgggagctattggcatagcccgggcttttacttatggtggaagccttggccaggctatttgggacccggcttctgacccgcgtttgcaggatgacccaagcgacttgacaccaacgacgattaatcatttctaccagaagctattattgctaaaagaccagatgaataccgagattggtcaggccttggcccaagaccgtcaccagtttatgttgacttatttagaccaattttaccaggaattggacagggcggaagatctagaagccccagaagccccggattag

SEQ ID NO: 736 - protein, 222 aa, Alloiococcus otitidis
MSFSDQAIEETVNFVKSQTFGEGTGHDWFHIQRVWQTACYIHSQEGEGDLFIVQMTALLHDLADEKLGDEEAGLEKIAYFLEGLGLSQSKMEQILASVQSISYHKQLAQESLSVEEQIVQDADRLDAMGAIGIARAFTYGGSLGQAIWDPASDPRLQDDPSDLTPTTINHFYQKLLLLKDQMNTEIGQALAQDRHQFMLTYLDQFYQELDRAEDLEAPEAPD

SEQ ID NO: 737 - DNA, 408 bp, Alloiococcus otitidis
  CDS (88)..(405)
cttttgacaaaattaaccgtttcttcaatagcctggtcactaaaactcatacttccacctcacagttttttagaaaggacttctagcttgaaaattatcgttgatggagatgcttgtcccgttaaagatatcatcgtagaagaaagccaaggccaaggggtctctgtccttattgtctctagctttgaccattacagcctatccccttatcccgaccatgtccaatgcctgtatgtggaaaagggccgggatgccgtggactttaagattgtccaattggcccaggcccaagatatcgtcgtcacccaagactacggcctagccctgatcttagtcaacaaggtcaagtatgtcctccaccacactggctttatctacacggataagctactagacagcctcatctaa

SEQ ID NO: 738 - protein, 106 aa, Alloiococcus otitidis
MKIIVDGDACPVKDIIVEESQGQGVSVLIVSSFDHYSLSPYPDHVQCLYVEKGRDAVDFKIVQLAQAQDIVVTQDYGLALILVNKVKYVLHHTGFIYTDKLLDSLI

SEQ ID NO: 739 - DNA, 408 bp, Alloiococcus otitidis; identical to SEQ ID NO: 737
  CDS (4)..(405)

SEQ ID NO: 740 - protein, 134 aa, Alloiococcus otitidis
MTKLTVSSIAWSLKLILPPHSFLERTSSLKIIVDGDACPVKDIIVEESQGQGVSVLIVSSFDHYSLSPYPDHVQCLYVEKGRDAVDFKIVQLAQAQDIVVTQDYGLALILVNKVKYVLHHTGFIYTDKLLDSLI

SEQ ID NO: 741 - DNA, 501 bp, Alloiococcus otitidis
  CDS (16)..(498)
gaagtaggtgaagccatgagtgactacccgaccatccaagagtttgccgatcgtttggacgtaaccaagcaaactgtacataatcatttaaagaaggttgcttcaactgaccggaccaaaaatgcccgggggatcattgtcttaacggaagaggaacaagcaggcttgattgaatccattacaggtaaaccagccaatgaagaagacttaaccagtgctagccaggacctttcccaaaagattgaagacttggaggctgaaattgaccagctaaagcttaaaattgacgaaaaagaatcccagatcagggaatccaatacccgcaatggtcgtcaggcggaccaaatcgatgaacttaaccgtctcttggaccagcagcaacaactccaagccgtaacccagaagcaattgaatgcggctttggaagacaagacggaattattggagtacaaagaaaagcaagaggctaaagggttttgggcccgactttttaaccgctaa

SEQ ID NO: 742 - protein, 161 aa, Alloiococcus otitidis
MSDYPTIQEFADRLDVTKQTVHNHLKKVASTDRTKNARGIIVLTEEEQAGLIESITGKPANEEDLTSASQDLSQKIEDLEAEIDQLKLKIDEKESQIRESNTRNGRQADQIDELNRLLDQQQQLQAVTQKQLNAALEDKTELLEYKEKQEAKGFWARLFNR

SEQ ID NO: 743 - DNA, 402 bp, Alloiococcus otitidis
  CDS (91)..(399)
gaggtgggtcttatggccaaaaagctattgactttcatactttcactggtcttgctttcagcatgttccctctttggccaagggggaggagtgggggcagcttcggctacaatcaaaatcacagtcagcgaccaggccggcattgaacgggaagtccgctttcaagagggggaccccctactggaagtgatgaaagaccattttgacatcaaaaccaacgagtcagacaccgaaatcctagccattgaccaattcgatacccaggaagatgaagaaggggcctactggatttaccgggtgaaccagatggaagcccggacttctcccgaccagtatgagctaaaagacggcgaccaagtcgaatgggtctactggtcctataagtcagctgataatccataa

SEQ ID NO: 744 - protein, 103 aa, Alloiococcus otitidis
MGAASATIKITVSDQAGIEREVRFQEGDPLLEVMKDHFDIKTNESDTEILAIDQFDTQEDEEGAYWIYRVNQMEARTSPDQYELKDGDQVEWVYWSYKSADNP

SEQ ID NO: 745 - DNA, 402 bp, Alloiococcus otitidis; identical to SEQ ID NO: 743
  CDS (13)..(399)

SEQ ID NO: 746 - protein, 129 aa, Alloiococcus otitidis
MAKKLLTFILSLVLLSACSLFGQGGGVGAASATIKITVSDQAGIEREVRFQEGDPLLEVMKDHFDIKTNESDTEILAIDQFDTQEDEEGAYWIYRVNQMEARTSPDQYELKDGDQVEWVYWSYKSADNP

SEQ ID NO: 747 - DNA, 402 bp, Alloiococcus otitidis; identical to SEQ ID NO: 743
  CDS (4)..(399)

SEQ ID NO: 748 - protein, 132 aa, Alloiococcus otitidis
MGLMAKKLLTFILSLVLLSACSLFGQGGGVGAASATIKITVSDQAGIEREVRFQEGDPLLEVMKDHFDIKTNESDTEILAIDQFDTQEDEEGAYWIYRVNQMEARTSPDQYELKDGDQVEWVYWSYKSADNP

SEQ ID NO: 749 - DNA, 825 bp, Alloiococcus otitidis
  CDS (46)..(822)
aaaggagttgggctagtggaattactaaaattaactgctaagcggatgctttttaacaaattaaccttgattttactgttcttgttttttgttttagtcctcatggatagttttctttacttgactaccttagcctatactcctgaaacaggctatgcttttcctcatgctttagaggtctttattaccaggcacgacgaatcaacctccattttgcctctgttccttcctttctttgtctttgggattgctggggattattttttcactgataaaagcagtggcatgatgaccttatctgccctacgtattggtagacgccaccagctcatagtaaatattctaagcacttctttcatcactgcttccctcattggcttactctattctgtccttttgatagcctatctttttatcttcccactccaagaaaataatattatccatactttcctagtagagggacaatttgcagaccttcccctctatgcttttagcttaattctggccaacatattggctgccatcgctttccaattgacagggcaagcggtcggcatggtcgtttctaaaaaatcccagctctatatagccttgtttttaatcatttttgccatcccttataccctctattatgccttagatccccggcaattccctatttttaactacacacccatcatctttttactgcaaaccctacaacttcccgacaacattttcaaagtattcatttattggctggcttacattgctttagatttactggtcatttttactctattccactataaatacctgccatcaccaaaaagaggaggctag

SEQ ID NO: 750 - protein, 259 aa, Alloiococcus otitidis
MLFNKLTLILLFLFFVLVLMDSFLYLTTLAYTPETGYAFPHALEVFITRHDESTSILPLFLPFFVFGIAGDYFFTDKSSGMMTLSALRIGRRHQLIVNILSTSFITASLIGLLYSVLLIAYLFIFPLQENNIIHTFLVEGQFADLPLYAFSLILANILAAIAFQLTGQAVGMVVSKKSQLYIALFLIIFAIPYTLYYALDPRQFPIFNYTPIIFLLQTLQLPDNIFKVFIYWLAYIALDLLVIFTLFHYKYLPSPKRGG

SEQ ID NO: 751 - DNA, 825 bp, Alloiococcus otitidis; identical to SEQ ID NO: 749
  CDS (16)..(822)

SEQ ID NO: 752 - protein, 269 aa, Alloiococcus otitidis
MELLKLTAKRMLFNKLTLILLFLFFVLVLMDSFLYLTTLAYTPETGYAFPHALEVFITRHDESTSILPLFLPFFVFGIAGDYFFTDKSSGMMTLSALRIGRRHQLIVNILSTSFITASLIGLLYSVLLIAYLFIFPLQENNIIHTFLVEGQFADLPLYAFSLILANILAAIAFQLTGQAVGMVVSKKSQLYIALFLIIFAIPYTLYYALDPRQFPIFNYTPIIFLLQTLQLPDNIFKVFIYWLAYIALDLLVIFTLFHYKYLPSPKRGG

SEQ ID NO: 753 - DNA, 675 bp, Alloiococcus otitidis
  CDS (34)..(672)
atacctgccatcaccaaaaagaggaggctagccatgtcagaaaaaattaaacttgttcaattatccaaacaatttaagaaccgtcaattatttcatcatattaacgcttcctttcctagtgccaaaatcacagccttgctaggaccaaatgggtcaggaaaaacgaccctcttaaaaatgatttgtggcctgtcttaccctgatgagggtcaagtattactagatggacaattactggctaaagggaaacttgccccatctgtcggtttggttctcggtaacccttcctttatcccgaccctatctggctttgataacctaaaatttttagcctccttaaaaaatcaattgactgaccaagacatccaaaatgtcatggaaaaagtgggactcattccctctttaaagaccaaagtaaaagattattctttaggcatgaagagccgactcagcctggcccaagcgataatggaaaacccggacatctttctcctagatgagcctactaacgctcttgaccaagagggactatccttgttaaaagatatattggtcgaatataaaaataaggggaccactattgttttaatctcccacgacaaggattttatccaagacctttcagataaagcttaccagatcaaccaggctgacttacaggaagtcagcctatga

SEQ ID NO: 754 - protein, 213 aa, Alloiococcus otitidis
MSEKIKLVQLSKQFKNRQLFHHINASFPSAKITALLGPNGSGKTTLLKMICGLSYPDEGQVLLDGQLLAKGKLAPSVGLVLGNPSFIPTLSGFDNLKFLASLKNQLTDQDIQNVMEKVGLIPSLKTKVKDYSLGMKSRLSLAQAIMENPDIFLLDEPTNALDQEGLSLLKDILVEYKNKGTTIVLISHDKDFIQDLSDKAYQINQADLQEVSL

SEQ ID NO: 755 - DNA, 810 bp, Alloiococcus otitidis
  CDS (502)..(807)
cttacaggaagtcagcctatgatcaagctagctagtctaaaaaaactgtcattgctacttttaatctttgccttgattggccttctagtcagaatggagagccttgagttcatgatggctgccaatttgctaaacagcccttccgatcttggtttagtagacttagtattcaatctttttaccctccccttactcagtatttactgggtcctcccccttagctttagcttatactacttaaatagcttttcagagacttttgaggatgatttttttgatatcctagtcctgcgttttgatagccgcccaaaatttttataccagcaatttaagcaactcctagagatactagtggagtacttggtcttgttactagcctcatgcttactcctttggtttttactgggccaccgactagaggacaatcattaccactttattattaaccaaaccccttcacctcttctcattgattttactgttgtaatggtttatatcatattgggtttatttatggttggcttattgaccctttttcttttcctcctaacccaaaatggctttgccgttagcctagttatccttgccttgtgtttaagccatgctgtcatctaccttatcaatctaccagattacattagtgccttattaccctttacccagttttccagggcatccagccagattttccaaccctttgggctggctgtcgactggtttactccaatttttcaattgacttacttagttctgctgatccttgtccttattatagccaacactcggatcttcaatcattttgaaagatag

SEQ ID NO: 756 - protein, 102 aa, Alloiococcus otitidis
MGLFMVGLLTLFLFLLTQNGFAVSLVILALCLSHAVIYLINLPDYISALLPFTQFSRASSQIFQPFGLAVDWFTPIFQLTYLVLLILVLIIANTRIFNHFER

SEQ ID NO: 757 - DNA, 810 bp, Alloiococcus otitidis; identical to SEQ ID NO: 755
  CDS (487)..(807)

SEQ ID NO: 758 - protein, 107 aa, Alloiococcus otitidis
MVYIILGLFMVGLLTLFLFLLTQNGFAVSLVILALCLSHAVIYLINLPDYISALLPFTQFSRASSQIFQPFGLAVDWFTPIFQLTYLVLLILVLIIANTRIFNHFER

SEQ ID NO: 759 - DNA, 810 bp, Alloiococcus otitidis; identical to SEQ ID NO: 755
  CDS (19)..(807)

SEQ ID NO: 760 - protein, 263 aa, Alloiococcus otitidis
MIKLASLKKLSLLLLIFALIGLLVRMESLEFMMAANLLNSPSDLGLVDLVFNLFTLPLLSIYWVLPLSFSLYYLNSFSETFEDDFFDILVLRFDSRPKFLYQQFKQLLEILVEYLVLLLASCLLLWFLLGHRLEDNHYHFIINQTPSPLLIDFTVVMVYIILGLFMVGLLTLFLFLLTQNGFAVSLVILALCLSHAVIYLINLPDYISALLPFTQFSRASSQIFQPFGLAVDWFTPIFQLTYLVLLILVLIIANTRIFNHFER

SEQ ID NO: 761 - DNA, 831 bp, Alloiococcus otitidis
  CDS (403)..(828)
ccaacactcggatcttcaatcattttgaaagatagaattgaaaggaccaagtctatgctcggaagaatcgtcatcgcccacttaaaaataactttcagcttaaaacgcctggccctgttctgcctagccctccttttatttctagctttccggctcattagctttcaaaattatctccaactattcgaccgagaagcaaacttaatggattggcttttatatagtacagggggagctgttggcgacaaccgactagccagtggcctcttctttttcatccttctttttttgcttctaacttttaactggtcaattccaggaagcgatccttccctttctgccatccttttaaccaagatagaatctcgcttaaagggtttatctgctttcctccttagccaagtggtatcaactattatttcgcttgctatcatcctgctactagcattagtaatgggtagctacttttttccgccggctagggcaggtcaattctttcattgggttggcccattacaaacttttgagatggtcctggtatttttatctgtaacgtttggaatctctatcttgtccatcctccataacctacagtctttactaacaggacaagattctgttaatctttttctcagcctggccgggcttttggtcttaatcttttttcatattttttgcccccttttagacccggtcaaccccgtcggacaagtgtcctgggctagctatttgtcaaataccagctcacagtttttcacaatcttaggtccaaccgtcgtctggtcaatcatccttttcaccttgtatcaaactactcaaaaatcaggttaa

SEQ ID NO: 762 - protein, 142 aa, Alloiococcus otitidis
MVSTIISLAIILLLALVMGSYFFPPARAGQFFHWVGPLQTFEMVLVFLSVTFGISILSILHNLQSLLTGQDSVNLFLSLAGLLVLIFFHIFCPLLDPVNPVGQVSWASYLSNTSSQFFTILGPTVVWSIILFTLYQTTQKSG

SEQ ID NO: 763 - DNA, 831 bp, Alloiococcus otitidis; identical to SEQ ID NO: 761
  CDS (55)..(828)

SEQ ID NO: 764 - protein, 258 aa, Alloiococcus otitidis
MLGRIVIAHLKITFSLKRLALFCLALLLFLAFRLISFQNYLQLFDREANLMDWLLYSTGGAVGDNRLASGLFFFILLFLLLTFNWSIPGSDPSLSAILLTKIESRLKGLSAFLLSQVVSTIISLAIILLLALVMGSYFFPPARAGQFFHWVGPLQTFEMVLVFLSVTFGISILSILHNLQSLLTGQDSVNLFLSLAGLLVLIFFHIFCPLLDPVNPVGQVSWASYLSNTSSQFFTILGPTVVWSIILFTLYQTTQKSG

SEQ ID NO: 765 - DNA, 831 bp, Alloiococcus otitidis; identical to SEQ ID NO: 761
  CDS (25)..(828)

SEQ ID NO: 766 - protein, 268 aa, Alloiococcus otitidis
MKDRIERTKSMLGRIVIAHLKITFSLKRLALFCLALLLFLAFRLISFQNYLQLFDREANLMDWLLYSTGGAVGDNRLASGLFFFILLFLLLTFNWSIPGSDPSLSAILLTKIESRLKGLSAFLLSQVVSTIISLAIILLLALVMGSYFFPPARAGQFFHWVGPLQTFEMVLVFLSVTFGISILSILHNLQSLLTGQDSVNLFLSLAGLLVLIFFHIFCPLLDPVNPVGQVSWASYLSNTSSQFFTILGPTVVWSIILFTLYQTTQKSG

SEQ ID NO: 767 - DNA, 342 bp, Alloiococcus otitidis
  CDS (109)..(339)
ggacccaataccagttgggataaaagacaggatctgggcgaccgcgatcatcaaggccccttccacaaaggtccgggtagcattattttccacaaaaaaactcctttcttgagcaaaggagctagtgagatggcctttcaagataagggcaggcaaaataagcatgccaaaaaggccttgctttccctccgcacatacgaatgtgacaggttcaaagggtctggtcttaaccactctcagctctctagctcccctagcaatatcgtttatatgtttatcctatcagaaagtcggccagtaaacaataagaatttaagtttgatttggtcatggtggggctag

SEQ ID NO: 768 - protein, 77 aa, Alloiococcus otitidis
MSKGASEMAFQDKGRQNKHAKKALLSLRTYECDRFKGSGLNHSQLSSSPSNIVYMFILSESRPVNNKNLSLIWSWWG

SEQ ID NO: 769 - DNA, 753 bp, Alloiococcus otitidis
  CDS (424)..(750)
gataaacatataaacgatattgctaggggagctagagagctgagagtggttaagaccagaccctttgaacctgtcacattcgtatgtgcggagggaaagcaaggcctttttggcatgcttattttgcctgcccttatcttgaaaggccatctcactagctcctttgctcaagaaaggagtttttttgtggaaaataatgctacccggacctttgtggaaggggccttgatgatcgcggtcgcccagatcctgtcttttatcccaactggtattgggtcctcattctctgtggacatttcttctatcccgatcatcttattcgccctccgccatggctggaaaaaaggggtcatcgttagcctagcctacggtatttttaaaatcgctatcggagacgtccagtggctgacctttacccaaggcatgatcgaatacaccattccctacttctgtatgggctttgctggggtatttgctggcccattgaagaaggccttggcccaagactctgataaaagagggatccagattatttcggtcgctaccctctttgccatggtcctccgctacttctggcactttgtagccggtgttatctactggggcgaatttgcaccagagggttggaatgaagtggtcttctccgctgtctttaacggggcaagtggactagccaccgctttggctgttatcctcgtcatcggctttttattcaagtcttcccagcgactctttcgacccaacttccgctaa

SEQ ID NO: 770 - protein, 109 aa, Alloiococcus otitidis
MIEYTIPYFCMGFAGVFAGPLKKALAQDSDKRGIQIISVATLFAMVLRYFWHFVAGVIYWGEFAPEGWNEVVFSAVFNGASGLATALAVILVIGFLFKSSQRLFRPNFR

SEQ ID NO: 771 - DNA, 753 bp, Alloiococcus otitidis; identical to SEQ ID NO: 769
  CDS (187)..(750)

SEQ ID NO: 772 - protein, 188 aa, Alloiococcus otitidis
MENNATRTFVEGALMIAVAQILSFIPTGIGSSFSVDISSIPIILFALRHGWKKGVIVSLAYGIFKIAIGDVQWLTFTQGMIEYTIPYFCMGFAGVFAGPLKKALAQDSDKRGIQIISVATLFAMVLRYFWHFVAGVIYWGEFAPEGWNEVVFSAVFNGASGLATALAVILVIGFLFKSSQRLFRPNFR

SEQ ID NO: 773 - DNA, 753 bp, Alloiococcus otitidis; identical to SEQ ID NO: 769
  CDS (115)..(750)

SEQ ID NO: 774 - protein, 212 aa, Alloiococcus otitidis
MLILPALILKGHLTSSFAQERSFFVENNATRTFVEGALMIAVAQILSFIPTGIGSSFSVDISSIPIILFALRHGWKKGVIVSLAYGIFKIAIGDVQWLTFTQGMIEYTIPYFCMGFAGVFAGPLKKALAQDSDKRGIQIISVATLFAMVLRYFWHFVAGVIYWGEFAPEGWNEVVFSAVFNGASGLATALAVILVIGFLFKSSQRLFRPNFR

SEQ ID NO: 775 - DNA, 753 bp, Alloiococcus otitidis; identical to SEQ ID NO: 769
  CDS (46)..(750)

SEQ ID NO: 776 - protein, 235 aa, Alloiococcus otitidis
MVKTRPFEPVTFVCAEGKQGLFGMLILPALILKGHLTSSFAQERSFFVENNATRTFVEGALMIAVAQILSFIPTGIGSSFSVDISSIPIILFALRHGWKKGVIVSLAYGIFKIAIGDVQWLTFTQGMIEYTIPYFCMGFAGVFAGPLKKALAQDSDKRGIQIISVATLFAMVLRYFWHFVAGVIYWGEFAPEGWNEVVFSAVFNGASGLATALAVILVIGFLFKSSQRLFRPNFR

SEQ ID NO: 777 - DNA, 1323 bp, Alloiococcus otitidis
  CDS (958)..(1320)
cttcaacacaaaaggagcatacctatgttaacaaatcctgtctttttatccgttgtggttgtcttggtcctgtctttggccaagctcaacgtcttaattagtctgatcatcggagccttggtagctggctttttggccggcatccccctcggccaggtgatggaggtcttagtctctggcatgggaggaaatgcagaaacggccttaaactatatcctcttaggtgccctggctgccaccattagccagactggcctagacaaggtcctggcccagaagcttgctaaggtcatcaaggacaatggcaagatcctggtcctcctcattggcctggtcagtatcttctcgcaaaacttgatccccgtccacattgcctttattcccattctcatcccacctcttatccccttgatgaacaagcttaaaattgaccgccgagctgtggcatctgctttaacctttggcctcaaggcaccttacttgtccatcccggctggttacgggctcatcttccacggcatcttgcgggatgaaatgtcggctagtggcctgccggttgatttaaataatatctggcaggtgatgtggattccaggcctggccatgctagttggcttcttggtcgctgtctttatctcctaccgtaaacctcgggactacgacatggaccaagttgacctggaccaagacgagtcagacctgtcctttacctttaaccacttaatggccttaattgctgctgtgtctgctttggtcatccagctcacaattgggtccttggccttgggtgctatagtcggcatcggcctcatgctactgaccaaggtagtaacctggtccagtattgacaagatgttagaccgggggatcgggatgatgggctatatcgcctttgtcatgctggtggctgctggttacggtgaagtcatccggcaaagcggagggattgaagacctggtggcaagcattgtcgacttggtcggcaacacccccttcctggcagcagtaggcatggtcttagtcggcctctttatcaccttggggattgggacttcttttgggaccatccccattatcgcagccatttatgtcccccttgccctggaacttggcttcagcggcccagctaccatcctcctggtagggacagctgctgctttaggggatgccggttccccagcatctgactccactttggggcccactgccggcttaaatgtcgacggccagcacgaccacatccaagataccgttattccaaccttcctccactacaataccgccttaatcctctttggcctggtcggtgccactatcttataa

SEQ ID NO: 778 - protein, 121 aa, Alloiococcus otitidis
MASIVDLVGNTPFLAAVGMVLVGLFITLGIGTSFGTIPIIAAIYVPLALELGFSGPATILLVGTAAALGDAGSPASDSTLGPTAGLNVDGQHDHIQDTVIPTFLHYNTALILFGLVGATIL

SEQ ID NO: 779 - DNA, 1323 bp, Alloiococcus otitidis; identical to SEQ ID NO: 777
  CDS (64)..(1320)

SEQ ID NO: 780 - protein, 419 aa, Alloiococcus otitidis
MVLSLAKLNVLISLIIGALVAGFLAGIPLGQVMEVLVSGMGGNAETALNYILLGALAATISQTGLDKVLAQKLAKVIKDNGKILVLLIGLVSIFSQNLIPVHIAFIPILIPPLIPLMNKLKIDRRAVASALTFGLKAPYLSIPAGYGLIFHGILRDEMSASGLPVDLNNIWQVMWIPGLAMLVGFLVAVFISYRKPRDYDMDQVDLDQDESDLSFTFNHLMALIAAVSALVIQLTIGSLALGAIVGIGLMLLTKVVTWSSIDKMLDRGIGMMGYIAFVMLVAAGYGEVIRQSGGIEDLVASIVDLVGNTPFLAAVGMVLVGLFITLGIGTSFGTIPIIAAIYVPLALELGFSGPATILLVGTAAALGDAGSPASDSTLGPTAGLNVDGQHDHIQDTVIPTFLHYNTALILFGLVGATIL

SEQ ID NO: 781 - DNA, 1323 bp, Alloiococcus otitidis; identical to SEQ ID NO: 777
  CDS (25)..(1320)

SEQ ID NO: 782 - protein, 432 aa, Alloiococcus otitidis
MLTNPVFLSVVVVLVLSLAKLNVLISLIIGALVAGFLAGIPLGQVMEVLVSGMGGNAETALNYILLGALAATISQTGLDKVLAQKLAKVIKDNGKILVLLIGLVSIFSQNLIPVHIAFIPILIPPLIPLMNKLKIDRRAVASALTFGLKAPYLSIPAGYGLIFHGILRDEMSASGLPVDLNNIWQVMWIPGLAMLVGFLVAVFISYRKPRDYDMDQVDLDQDESDLSFTFNHLMALIAAVSALVIQLTIGSLALGAIVGIGLMLLTKVVTWSSIDKMLDRGIGMMGYIAFVMLVAAGYGEVIRQSGGIEDLVASIVDLVGNTPFLAAVGMVLVGLFITLGIGTSFGTIPIIAAIYVPLALELGFSGPATILLVGTAAALGDAGSPASDSTLGPTAGLNVDGQHDHIQDTVIPTFLHYNTALILFGLVGATIL

SEQ ID NO: 783 - DNA, 1080 bp, Alloiococcus otitidis
  CDS (28)..(1077)
atttttttaatagaaagaagggctttcatgaaagcagcaagattctataatgcaaaagacattcgggtggaagaggtagaccgggcgtcagtcggaccaaatgatgtcttattgaaggtagcctgggctggtatttgcggcagtgacttgcatgaatataatgcgggtcctttgaacatacctggtgacaaacctgaccccctaactggccaagtcaaacccattaccatgggccacgagttttctggtcttgtcgaagaagtgggatcagatgtcaaagacattgcagtcggcgataaggtttgtgtcaacccgatgattttaagtggtaagcacggaggtggcttgattgacatgtaccaaggtgggtccaccattggcctagcccaagatggtggttttgccgaatacgctgtctttgaagccaaacatgcctacaagttaaacaaggacacttcccttaaattaggtgccttggtagagccgattgctgttgccatgcaagccatccgggaaagtgagttgcgcttcggggaatcccttgctatctttggtgtcggcccaattggtctcgccctcattatggctgcccgggttgcaggagcgcgcgaaatctttgcctttgacctgtctgacaaacgtttagaaaaagccaaagaactcggagccacccacaccatcaactccggaaaccaagacccggttgaatacatcaaacaatactacccttatggtgtcgaccgaagctttgaagtggcaggggtggatgtcgtcttcaagcaagccatccgagctactcgaccgcgggggatggttaatgttgtctctatttacgaaaccggcatcgactttaacccaatgtggttgaccatttccggtgtccacatttcaactagcttgggctatgaggacgatatttttgaattaaccatcaatatgattgagagcggtcaactagacccatggcctttaattaccgaccaaatcgaattggacaatattgtgaaagatggttttgaacagttgcaaaatgacaagagccaggccaaaatcttggttcaattaagcggggaagaataa

SEQ ID NO: 784 - protein, 350 aa, Alloiococcus otitidis
MKAARFYNAKDIRVEEVDRASVGPNDVLLKVAWAGICGSDLHEYNAGPLNIPGDKPDPLTGQVKPITMGHEFSGLVEEVGSDVKDIAVGDKVCVNPMILSGKHGGGLIDMYQGGSTIGLAQDGGFAEYAVFEAKHAYKLNKDTSLKLGALVEPIAVAMQAIRESELRFGESLAIFGVGPIGLALIMAARVAGAREIFAFDLSDKRLEKAKELGATHTINSGNQDPVEYIKQYYPYGVDRSFEVAGVDVVFKQAIRATRPRGMVNVVSIYETGIDFNPMWLTISGVHISTSLGYEDDIFELTINMIESGQLDPWPLITDQIELDNIVKDGFEQLQNDKSQAKILVQLSGEE

SEQ ID NO: 785 - DNA, 636 bp, Alloiococcus otitidis
  CDS (46)..(633)
actttaggtgaaatgacagaaatgtatcgtaagtctccaaacttaatggagcaagttgttgacagaagaaacttggaaacagcagccaaagccgttaaacggaacaaaggcgctgcaggtattgacggtatgaccgtttttgagatagaggagcacattcaagcgtattatcaacccttacggaagaaattacttgatggaacgtataagcctcaaccagttaaacgagtagaaataccaaagccgaatggagaaaaacgaaagttaggtataccttgtgtgcgggatagagttgttcaacaagccatacggcaagtaattgaaccgattatagacccgcacttctatgacaacagtcacggattccgaccagggaaaagcacgcacagtgctctcaagcaatgtgcacagtattataaagaaggctatcgagttgtagttgattgtgacctcaaacaatgctttgacacgctcaatcacgacaaacttatctattatcttgaacagtacatccaagataaaatgatactgaaaattatccgtaagtttttgagagcgggtgtaattgatttgactagcgaatttatcgcagtgaaacaggggcaccacaaggtggtgttctatcaccgcttttga

SEQ ID NO: 786 - protein, 196 aa, Alloiococcus otitidis
MEQVVDRRNLETAAKAVKRNKGAAGIDGMTVFEIEEHIQAYYQPLRKKLLDGTYKPQPVKRVEIPKPNGEKRKLGIPCVRDRVVQQAIRQVIEPIIDPHFYDNSHGFRPGKSTHSALKQCAQYYKEGYRVVVDCDLKQCFDTLNHDKLIYYLEQYIQDKMILKIIRKFLRAGVIDLTSEFIAVKQGHHKVVFYHRF

SEQ ID NO: 787 - DNA, 636 bp, Alloiococcus otitidis; identical to SEQ ID NO: 785
  CDS (13)..(633)

SEQ ID NO: 788 - protein, 207 aa, Alloiococcus otitidis
MTEMYRKSPNLMEQVVDRRNLETAAKAVKRNKGAAGIDGMTVFEIEEHIQAYYQPLRKKLLDGTYKPQPVKRVEIPKPNGEKRKLGIPCVRDRVVQQAIRQVIEPIIDPHFYDNSHGFRPGKSTHSALKQCAQYYKEGYRVVVDCDLKQCFDTLNHDKLIYYLEQYIQDKMILKIIRKFLRAGVIDLTSEFIAVKQGHHKVVFYHRF

SEQ ID NO: 789 - DNA, 729 bp, Alloiococcus otitidis
  CDS (64)..(726)
cgaatttatcgcagtgaaacaggggcaccacaaggtggtgttctatcaccgcttttgagtaatgtgtacttacatgaactggataaagagttggttaaccgtggtcaccgatttgtccgatacgcagatgactttgtcatctacgttaaatcaaaacgagccggtgaacgggtaatgaacagcatcacacgctttattgaaaaagacttaaagttaatcgtcaatcaagacaaaagccaggttgggtctcctacccgtttaaagtttttgagctgtctgatgaagcaagtgaatggggattatcgttttatccctaccaaagaagccaagcagaaattcaaacgcagattgagaaagctgaccagtcgtaaacggccaggtacttttaaaaagataatgactgaaattaatcgagtcacccgcggttggattaattattttggtttaggcttcattaaaagctttatcaaagaagttgagcaatggttaaatcaccgtatcagacagctgattcttaaacggtggaaacgtccacgaactattataccaaagttggaacaatatggactggacttagattcagccaaacggattgcgtattcacgcaaaaagtactggcgactgtcatgcacacatgaatttcatcgtgcaataacaacagaaagactcagcaagtggggcttagttccactaagcactatcgctgagtctgcttacgcaagatattga

SEQ ID NO: 790 - protein, 221 aa, Alloiococcus otitidis
MYLHELDKELVNRGHRFVRYADDFVIYVKSKRAGERVMNSITRFIEKDLKLIVNQDKSQVGSPTRLKFLSCLMKQVNGDYRFIPTKEAKQKFKRRLRKLTSRKRPGTFKKIMTEINRVTRGWINYFGLGFIKSFIKEVEQWLNHRIRQLILKRWKRPRTIIPKLEQYGLDLDSAKRIAYSRKKYWRLSCTHEFHRAITTERLSKWGLVPLSTIAESAYARY

SEQ ID NO: 791 - DNA, 729 bp, Alloiococcus otitidis; identical to SEQ ID NO: 789
  CDS (55)..(726)

SEQ ID NO: 792 - protein, 224 aa, Alloiococcus otitidis
MSNVYLHELDKELVNRGHRFVRYADDFVIYVKSKRAGERVMNSITRFIEKDLKLIVNQDKSQVGSPTRLKFLSCLMKQVNGDYRFIPTKEAKQKFKRRLRKLTSRKRPGTFKKIMTEINRVTRGWINYFGLGFIKSFIKEVEQWLNHRIRQLILKRWKRPRTIIPKLEQYGLDLDSAKRIAYSRKKYWRLSCTHEFHRAITTERLSKWGLVPLSTIAESAYARY

SEQ ID NO: 793 - DNA, 822 bp, Alloiococcus otitidis
  CDS (22)..(819)
ctgttgatttctgataataaaatgatggaggctgatttgatgtctgactatcaaataccaaaagtttgggaatggaaggaagagaaccctgatctttccggcaaccgacccacagcaggtccccgcttcgaccaagacttgccggtcggagatgctcccttgcaagtgtattccttggggacaccaaatgggaaaaaaattaccattatcttagaagagttgaaagaactcggcaaggatatagactatgacttgtacaagattgatattacaaaaggtgaccaattcgggtctgactttgtcaagctaaaccccaactccaagatcccagctatggtagaccagagcctagatcctagcctgaaattatttgaatctggttctatccttcagtatttagctaataaatacggccactttctgccagaagaaatccaccaaaaaacagagacactcaactggctctactggcaaattggggctgcaccttatgtgggtggcggttttggccacttctttgcccatatttcagaagccatggaatacccgattgaccgctttaccaaagaaaccaagcggcagttggacctcttggacaaggtcttagctgaccgaccttatattgccggcgaccaatacaccatcgctgatattgccatttggccttggtacggagagctggtcttgggcaacttgtataagcggtctgatgaattccttaatgtcacagaatacaccaacttaagaaaatgggcgcaaaacattgccgaccgacctggtgtcaaaaagggtctagcggctgattaccaatctattaactaa

SEQ ID NO: 794 - protein, 266 aa, Alloiococcus otitidis
MMEADLMSDYQIPKVWEWKEENPDLSGNRPTAGPRFDQDLPVGDAPLQVYSLGTPNGKKITIILEELKELGKDIDYDLYKIDITKGDQFGSDFVKLNPNSKIPAMVDQSLDPSLKLFESGSILQYLANKYGHFLPEEIHQKTETLNWLYWQIGAAPYVGGGFGHFFAHISEAMEYPIDRFTKETKRQLDLLDKVLADRPYIAGDQYTIADIAIWPWYGELVLGNLYKRSDEFLNVTEYTNLRKWAQNIADRPGVKKGLAADYQSIN

SEQ ID NO: 795 - DNA, 822 bp, Alloiococcus otitidis; identical to SEQ ID NO: 793
  CDS (4)..(819)

SEQ ID NO: 796 - protein, 272 aa, Alloiococcus otitidis
MISDNKMMEADLMSDYQIPKVWEWKEENPDLSGNRPTAGPRFDQDLPVGDAPLQVYSLGTPNGKKITIILEELKELGKDIDYDLYKIDITKGDQFGSDFVKLNPNSKIPAMVDQSLDPSLKLFESGSILQYLANKYGHFLPEEIHQKTETLNWLYWQIGAAPYVGGGFGHFFAHISEAMEYPIDRFTKETKRQLDLLDKVLADRPYIAGDQYTIADIAIWPWYGELVLGNLYKRSDEFLNVTEYTNLRKWAQNIADRPGVKKGLAADYQSIN

SEQ ID NO: 797 - DNA, 462 bp, Alloiococcus otitidis
  CDS (16)..(459)
caagtgactgatggaatgcgcgatgccaaggacttgcacttgggggacagctttgaaagtgacagctaccaagtgaccaaggaagaaatcattgaatttgcccaaaaatatgaccctcaatacttccatgtggatgaggaattggccaaggatggcccttacggcgaattgatctcaagtggtttgttgacggtcaacctgggtatgcgactctggttagacagcacccgggtcagaaatggctgggtcggcttcaagacagacttgacttgggtcaaacccgtcaaaccaggtgactctatccgggttaagtctaaaattagccaattgaaaccctctagcaagaaccccaaccgactcaaggtcgtctttgacctccaagctatcaaccaggatgaccaggtcgttttagaacaaagcaccctttgctttacctacctcaataaaggccccaaagcttaa

SEQ ID NO: 798 - protein, 148 aa, Alloiococcus otitidis
MRDAKDLHLGDSFESDSYQVTKEEIIEFAQKYDPQYFHVDEELAKDGPYGELISSGLLTVNLGMRLWLDSTRVRNGWVGFKTDLTWVKPVKPGDSIRVKSKISQLKPSSKNPNRLKVVFDLQAINQDDQVVLEQSTLCFTYLNKGPKA

SEQ ID NO: 799 - DNA, 462 bp, Alloiococcus otitidis; identical to SEQ ID NO: 797
  CDS (4)..(459)

SEQ ID NO: 800 - protein, 152 aa, Alloiococcus otitidis
MTDGMRDAKDLHLGDSFESDSYQVTKEEIIEFAQKYDPQYFHVDEELAKDGPYGELISSGLLTVNLGMRLWLDSTRVRNGWVGFKTDLTWVKPVKPGDSIRVKSKISQLKPSSKNPNRLKVVFDLQAINQDDQVVLEQSTLCFTYLNKGPKA

SEQ ID NO: 801 - DNA, 2802 bp, Alloiococcus otitidis
  CDS (841)..(2799)
aggaggggcaacgtgaaaaaacttgtaaaaataggggctagcctaatcttgctcgtccaatctatcctccttgcttggcccgtccaggcaattcaagggcaagaccaaattggtcaagattttgattttttcttagacccccctttagtgggtgaccaaagcctgtctggagaagccttgccggaccaacccattacgttagaggtccaagaccaggaatttgaagtcctagtagaagaagatggccaatttgaatttgaccccattccttccctttcggaagaggatgaaatcttagtcaaacagggtgaaaacgaaattgaatgtccggtctttactgaagaccaggcccctgaccgggtagaatttgagggcgactttgattttactggcctagttgacttggaagatgaggactcggaccccgagtctgaccaagctgacgaggatgagtccgattctgatgaagaaactgaagaagaccaggcccaagaagagccagactcagaggatggaactgctggtgaaggggaagaccccgaagaatcagagtcccaagctggtgaagctgaccaagaagaagctgaagcagatgacggtgcagaagatggcgatgaggctgatgacgaaattagcggtgaaccggaagaagaggctgaagcggacgacgacactgaagatgaggaagccgacgacgccagcgaagaggatgaggaagaagaccaggctcctagccagtcacgggctagtggagcttccaatgccaaccgggcaccgggccaaacctccagttcggctcggtctatagaggtatctaactttgctgaattgagacgggccatggaagatcccaatattgaaattgtccgtctaagtcgggatattacgacttcctctggagctagttccaatatgccggttgcttccaacagtcggcggaagatcctagatggtcaaggctttagcctaaccattaaccagaatgctggttttgataccgacacccggatagatgatatggtcgtctgcaacttttataatctctatacccgccactcaggtgatgaacaaggcttcttgcggatgcgggctaacccctataatttccacttggagaatgttacttttaaccggaaccagttagctgatggtgcccacctttttacttcttgggagtcaactatccacttttatggtaatatcgatgtatatacgcctcctaaccgaccatttgttacccgggttagaagggctgaatttcatgatggagctaatgttcagataaaatcggggcaaattggactcgaacagttagaccaaggaaatgtccgcgataagcccaaaggggtcgttgtgggcaacaatgttagactttcgattctgtccggtagccatgccttccataatagctttaatggcaatgggccgaccgattttgaggtagggaacaattccgctgtgaatttgcagtctaataatggccatgcgattaattatgagggcaattcgaattttaacttgacggttggtccgaattccagccttaatttagctgctgctggggacggtttaagagctagcaataacaatcccgaccataattttgttatcgatgtccgggggcaactaaatattgaagctgaccgtgggatctatttcagacggcaggtctttcgttttaccgtccatgaaggaggccaggctgagattgatggtcgtagcaatgcggtttttaaagatgacagaagaaaccccaaccggcccccccaatttaaccttaaacccgggtctagctggatagctgagagccggtctggcgatacctttaggctcttaggccagtccgattttaactttgactcgcccgccatagcggactttatcgcccaccaaaatggaactgtgaccttctcgaccaatgccgaccaccggttcaggattcaaaatgtcctcatgcggtcatgggtagatgatatctatgactatgcctctggtatccaaacacaacagttcgacagaggccagtttaccctgacccctgatggttttagcgatgtcgttaccaacccagctagtaaccttttccctagccaatttccccgcaataataggcggtggcaatttattgaaggcttggacgatcctgacattgacgggccaatcctagataccatgaccgaaatcacagggactgccccggccgacagtacggtcttcatgacaggtgaggattctgaagtcatcggccaaacccaggcagactcacagggccggtttacctttaccctagaccagcctttcccaattgggacaagattaaccttttatgcccggcgggggacggttcagtctggttgggtggatgaagttgttcaaggcaaccggttggaattgacttccgttgacaatcttaactttgaaacaactgagatcaaggaccaggctaatcagcttattcctaaaacccagccagtccaagctaatcttttggatacccgacaagaccagccctggcaactgactgtccaggcccttgaacctttgaccaaccaggctggccaccagctccctaacgccttggtttaccgcaacccagtgaccaacaccactcaagtattggaaggccaggatgtcttggtagcgactgaccggtccaataacgtgacccaaactggtgactataccagtcaggtcacttgggcagagaatgaaggctttttaatccaaaccaacccaatttatgcccaatccggtagtccctataaggcccggattcaatggaccttaaaagatgcaccataa

SEQ ID NO: 802 - protein, 653 aa, Alloiococcus otitidis
MEDPNIEIVRLSRDITTSSGASSNMPVASNSRRKILDGQGFSLTINQNAGFDTDTRIDDMVVCNFYNLYTRHSGDEQGFLRMRANPYNFHLENVTFNRNQLADGAHLFTSWESTIHFYGNIDVYTPPNRPFVTRVRRAEFHDGANVQIKSGQIGLEQLDQGNVRDKPKGVVVGNNVRLSILSGSHAFHNSFNGNGPTDFEVGNNSAVNLQSNNGHAINYEGNSNFNLTVGPNSSLNLAAAGDGLRASNNNPDHNFVIDVRGQLNIEADRGIYFRRQVFRFTVHEGGQAEIDGRSNAVFKDDRRNPNRPPQFNLKPGSSWIAESRSGDTFRLLGQSDFNFDSPAIADFIAHQNGTVTFSTNADHRFRIQNVLMRSWVDDIYDYASGIQTQQFDRGQFTLTPDGFSDVVTNPASNLFPSQFPRNNRRWQFIEGLDDPDIDGPILDTMTEITGTAPADSTVFMTGEDSEVIGQTQADSQGRFTFTLDQPFPIGTRLTFYARRGTVQSGWVDEVVQGNRLELTSVDNLNFETTEIKDQANQLIPKTQPVQANLLDTRQDQPWQLTVQALEPLTNQAGHQLPNALVYRNPVTNTTQVLEGQDVLVATDRSNNVTQTGDYTSQVTWAENEGFLIQTNPIYAQSGSPYKARIQWTLKDAP

SEQ ID NO: 803 - DNA, 2802 bp, Alloiococcus otitidis; identical to SEQ ID NO: 801
  CDS (148)..(2799)

SEQ ID NO: 804 - protein, 884 aa, Alloiococcus otitidis
MGDQSLSGEALPDQPITLEVQDQEFEVLVEEDGQFEFDPIPSLSEEDEILVKQGENEIECPVFTEDQAPDRVEFEGDFDFTGLVDLEDEDSDPESDQADEDESDSDEETEEDQAQEEPDSEDGTAGEGEDPEESESQAGEADQEEAEADDGAEDGDEADDEISGEPEEEAEADDDTEDEEADDASEEDEEEDQAPSQSRASGASNANRAPGQTSSSARSIEVSNFAELRRAMEDPNIEIVRLSRDITTSSGASSNMPVASNSRRKILDGQGFSLTINQNAGFDTDTRIDDMVVCNFYNLYTRHSGDEQGFLRMRANPYNFHLENVTFNRNQLADGAHLFTSWESTIHFYGNIDVYTPPNRPFVTRVRRAEFHDGANVQIKSGQIGLEQLDQGNVRDKPKGVVVGNNVRLSILSGSHAFHNSFNGNGPTDFEVGNNSAVNLQSNNGHAINYEGNSNFNLTVGPNSSLNLAAAGDGLRASNNNPDHNFVIDVRGQLNIEADRGIYFRRQVFRFTVHEGGQAEIDGRSNAVFKDDRRNPNRPPQFNLKPGSSWIAESRSGDTFRLLGQSDFNFDSPAIADFIAHQNGTVTFSTNADHRFRIQNVLMRSWVDDIYDYASGIQTQQFDRGQFTLTPDGFSDVVTNPASNLFPSQFPRNNRRWQFIEGLDDPDIDGPILDTMTEITGTAPADSTVFMTGEDSEVIGQTQADSQGRFTFTLDQPFPIGTRLTFYARRGTVQSGWVDEVVQGNRLELTSVDNLNFETTEIKDQANQLIPKTQPVQANLLDTRQDQPWQLTVQALEPLTNQAGHQLPNALVYRNPVTNTTQVLEGQDVLVATDRSNNVTQTGDYTSQVTWAENEGFLIQTNPIYAQSGSPYKARIQWTLKDAP

SEQ ID NO: 805 - DNA, 2802 bp, Alloiococcus otitidis; identical to SEQ ID NO: 801
  CDS (49)..(2799)

SEQ ID NO: 806 - protein, 917 aa, Alloiococcus otitidis
MLVQSILLAWPVQAIQGQDQIGQDFDFFLDPPLVGDQSLSGEALPDQPITLEVQDQEFEVLVEEDGQFEFDPIPSLSEEDEILVKQGENEIECPVFTEDQAPDRVEFEGDFDFTGLVDLEDEDSDPESDQADEDESDSDEETEEDQAQEEPDSEDGTAGEGEDPEESESQAGEADQEEAEADDGAEDGDEADDEISGEPEEEAEADDDTEDEEADDASEEDEEEDQAPSQSRASGASNANRAPGQTSSSARSIEVSNFAELRRAMEDPNIEIVRLSRDITTSSGASSNMPVASNSRRKILDGQGFSLTINQNAGFDTDTRIDDMVVCNFYNLYTRHSGDEQGFLRMRANPYNFHLENVTFNRNQLADGAHLFTSWESTIHFYGNIDVYTPPNRPFVTRVRRAEFHDGANVQIKSGQIGLEQLDQGNVRDKPKGVVVGNNVRLSILSGSHAFHNSFNGNGPTDFEVGNNSAVNLQSNNGHAINYEGNSNFNLTVGPNSSLNLAAAGDGLRASNNNPDHNFVIDVRGQLNIEADRGIYFRRQVFRFTVHEGGQAEIDGRSNAVFKDDRRNPNRPPQFNLKPGSSWIAESRSGDTFRLLGQSDFNFDSPAIADFIAHQNGTVTFSTNADHRFRIQNVLMRSWVDDIYDYASGIQTQQFDRGQFTLTPDGFSDVVTNPASNLFPSQFPRNNRRWQFIEGLDDPDIDGPILDTMTEITGTAPADSTVFMTGEDSEVIGQTQADSQGRFTFTLDQPFPIGTRLTFYARRGTVQSGWVDEVVQGNRLELTSVDNLNFETTEIKDQANQLIPKTQPVQANLLDTRQDQPWQLTVQALEPLTNQAGHQLPNALVYRNPVTNTTQVLEGQDVLVATDRSNNVTQTGDYTSQVTWAENEGFLIQTNPIYAQSGSPYKARIQWTLKDAP

SEQ ID NO: 807 - DNA, 2802 bp, Alloiococcus otitidis; identical to SEQ ID NO: 801
  CDS (13)..(2799)

SEQ ID NO: 808 - protein, 929 aa, Alloiococcus otitidis
MKKLVKIGASLILLVQSILLAWPVQAIQGQDQIGQDFDFFLDPPLVGDQSLSGEALPDQPITLEVQDQEFEVLVEEDGQFEFDPIPSLSEEDEILVKQGENEIECPVFTEDQAPDRVEFEGDFDFTGLVDLEDEDSDPESDQADEDESDSDEETEEDQAQEEPDSEDGTAGEGEDPEESESQAGEADQEEAEADDGAEDGDEADDEISGEPEEEAEADDDTEDEEADDASEEDEEEDQAPSQSRASGASNANRAPGQTSSSARSIEVSNFAELRRAMEDPNIEIVRLSRDITTSSGASSNMPVASNSRRKILDGQGFSLTINQNAGFDTDTRIDDMVVCNFYNLYTRHSGDEQGFLRMRANPYNFHLENVTFNRNQLADGAHLFTSWESTIHFYGNIDVYTPPNRPFVTRVRRAEFHDGANVQIKSGQIGLEQLDQGNVRDKPKGVVVGNNVRLSILSGSHAFHNSFNGNGPTDFEVGNNSAVNLQSNNGHAINYEGNSNFNLTVGPNSSLNLAAAGDGLRASNNNPDHNFVIDVRGQLNIEADRGIYFRRQVFRFTVHEGGQAEIDGRSNAVFKDDRRNPNRPPQFNLKPGSSWIAESRSGDTFRLLGQSDFNFDSPAIADFIAHQNGTVTFSTNADHRFRIQNVLMRSWVDDIYDYASGIQTQQFDRGQFTLTPDGFSDVVTNPASNLFPSQFPRNNRRWQFIEGLDDPDIDGPILDTMTEITGTAPADSTVFMTGEDSEVIGQTQADSQGRFTFTLDQPFPIGTRLTFYARRGTVQSGWVDEVVQGNRLELTSVDNLNFETTEIKDQANQLIPKTQPVQANLLDTRQDQPWQLTVQALEPLTNQAGHQLPNALVYRNPVTNTTQVLEGQDVLVATDRSNNVTQTGDYTSQVTWAENEGFLIQTNPIYAQSGSPYKARIQWTLKDAP

SEQ ID NO: 809 - DNA, 342 bp, Alloiococcus otitidis
  CDS (82)..(339)
aaggttaatcttgtcccaattgggaaaggctggtctagggtaaaggtaaaccggccctgtgagtctgcctgggtttggccgatgacttcagaatcctcacctgtcatgaagaccgtactgtcggccggggcagtccctgtgatttcggtcatggtatctaggattggcccgtcaatgtcaggatcgtccaagccttcaataaattgccaccgcctattattgcggggaaattggctagggaaaaggttactagctgggttggtaacgacatcgctaaaaccatcaggggtcagggtaaactggcctctgtcgaactgttgtgtttggataccagaggcatag

SEQ ID NO: 810 - protein, 86 aa, Alloiococcus otitidis
MTSESSPVMKTVLSAGAVPVISVMVSRIGPSMSGSSKPSINCHRLLLRGNWLGKRLLAGLVTTSLKPSGVRVNWPLSNCCVWIPEA

SEQ ID NO: 811 - DNA, 840 bp, Alloiococcus otitidis
  CDS (112)..(837)
ccatctaggatcttccgccgactgttggaagcaaccggcatattggaactagctccagaggaagtcgtaatatcccgacttagacggacaatttcaatattgggatcttccatggcccgtctcaattcagcaaagttagatacctctatagaccgagccgaactggaggtttggcccggtgcccggttggcattggaagctccactagcccgtgactggctaggagcctggtcttcttcctcatcctcttcgctggcgtcgtcggcttcctcatcttcagtgtcgtcgtccgcttcagcctcttcttccggttcaccgctaatttcgtcatcagcctcatcgccatcttctgcaccgtcatctgcttcagcttcttcttggtcagcttcaccagcttgggactctgattcttcggggtcttccccttcaccagcagttccatcctctgagtctggctcttcttgggcctggtcttcttcagtttcttcatcagaatcggactcatcctcgtcagcttggtcagactcggggtccgagtcctcatcttccaagtcaactaggccagtaaaatcaaagtcgccctcaaattctacccggtcaggggcctggtcttcagtaaagaccggacattcaatttcgttttcaccctgtttgactaagatttcatcctcttccgaaagggaaggaatggggtcaaattcaaattggccatcttcttctactaggacttcaaattcctggtcttggacctctaacgtaatgggttggtccggcaaggcttctccagacaggctttggtcacccactaaaggggggtctaagaaaaaatcaaaatcttga

SEQ ID NO: 812 - protein, 242 aa, Alloiococcus otitidis
MARLNSAKLDTSIDRAELEVWPGARLALEAPLARDWLGAWSSSSSSSLASSASSSSVSSSASASSSGSPLISSSASSPSSAPSSASASSWSASPAWDSDSSGSSPSPAVPSSESGSSWAWSSSVSSSESDSSSSAWSDSGSESSSSKSTRPVKSKSPSNSTRSGAWSSVKTGHSISFSPCLTKISSSSEREGMGSNSNWPSSSTRTSNSWSWTSNVMGWSGKASPDRLWSPTKGGSKKKSKS

SEQ ID NO: 813 - DNA, 840 bp, Alloiococcus otitidis; identical to SEQ ID NO: 811
  CDS (25)..(837)

SEQ ID NO: 814 - protein, 271 aa, Alloiococcus otitidis
MEATGILELAPEEVVISRLRRTISILGSSMARLNSAKLDTSIDRAELEVWPGARLALEAPLARDWLGAWSSSSSSSLASSASSSSVSSSASASSSGSPLISSSASSPSSAPSSASASSWSASPAWDSDSSGSSPSPAVPSSESGSSWAWSSSVSSSESDSSSSAWSDSGSESSSSKSTRPVKSKSPSNSTRSGAWSSVKTGHSISFSPCLTKISSSSEREGMGSNSNWPSSSTRTSNSWSWTSNVMGWSGKASPDRLWSPTKGGSKKKSKS

SEQ ID NO: 815 - DNA, 1086 bp, Alloiococcus otitidis
  CDS (67)..(1083)
agaagaaaatattatcgctcttacttgtcttatcaagcttgttggccttttttgccacaactgtttatgggcaagatgaaggtcgagccgttccttattcggtccaggccctattgccccgacaaccaagtcaatgaccaggtgtcttatttcgatattgaaatggaacccggtgcttctcaggccctagaagtagaggtctttaactcttccaatgaggagataaaggttgcggtggaaaccaactttggggccagcaacagtaacgggattatcacctatgacggcagtattgacgaatacgatgaaagcatggaagccccttttgacgaaatcagccgggtctatgaagaagaaatgaccattggcccagaggattccaagcgggccattgtcgatgtggatatcccggaagaaggctttgacggccaaattcttgggggtattttcttccgcctgatcaatgatgaagatgaagacggtcaagctgaagatgaagaagctggggtcggctttgaaaatgagtatgcctatgtcgtcggggttaacattgtccaagctgaccctgaagaagacgatggtgaccaagaccaggctggggctgataaaaaatcagttgaccaaatcgacccagaattagaattgaactgggtggaagcagacttgattaactaccaaaccggggtagatgctgaatttgctaataaaacccctgtcttggttgaaggggttaacttccgcgcttacgtcacccagaccggcagcgaggatgtcttgtatgagcgtgaagtggataatttttctattggacccaataatgtcttcaagtttccagtccttttcaaccaggagcctttgcagcctggggactacacctaccatgccaacttgtccaatgaggaagaagattgggaattttcccaagactttaccattacagaagttcaatcggaagaattaaacgaacaagcagttgaacttgacgatggctggaactggactgctattgccattggtgcaattgtcttagttctcatccttattttggtcattgttttcctactgcgtaaattgcaagccaagtaa

SEQ ID NO: 816 - protein, 339 aa, Alloiococcus otitidis
MGKMKVEPFLIRSRPYCPDNQVNDQVSYFDIEMEPGASQALEVEVFNSSNEEIKVAVETNFGASNSNGIITYDGSIDEYDESMEAPFDEISRVYEEEMTIGPEDSKRAIVDVDIPEEGFDGQILGGIFFRLINDEDEDGQAEDEEAGVGFENEYAYVVGVNIVQADPEEDDGDQDQAGADKKSVDQIDPELELNWVEADLINYQTGVDAEFANKTPVLVEGVNFRAYVTQTGSEDVLYEREVDNFSIGPNNVFKFPVLFNQEPLQPGDYTYHANLSNEEEDWEFSQDFTITEVQSEELNEQAVELDDGWNWTAIAIGAIVLVLILILVIVFLLRKLQAK

SEQ ID NO: 817 - DNA, 1086 bp, Alloiococcus otitidis; identical to SEQ ID NO: 815
  CDS (25)..(1083)

SEQ ID NO: 818 - protein, 353 aa, Alloiococcus otitidis
MSYQACWPFLPQLFMGKMKVEPFLIRSRPYCPDNQVNDQVSYFDIEMEPGASQALEVEVFNSSNEEIKVAVETNFGASNSNGIITYDGSIDEYDESMEAPFDEISRVYEEEMTIGPEDSKRAIVDVDIPEEGFDGQILGGIFFRLINDEDEDGQAEDEEAGVGFENEYAYVVGVNIVQADPEEDDGDQDQAGADKKSVDQIDPELELNWVEADLINYQTGVDAEFANKTPVLVEGVNFRAYVTQTGSEDVLYEREVDNFSIGPNNVFKFPVLFNQEPLQPGDYTYHANLSNEEEDWEFSQDFTITEVQSEELNEQAVELDDGWNWTAIAIGAIVLVLILILVIVFLLRKLQAK

SEQ ID NO: 819 - DNA, 723 bp, Alloiococcus otitidis
  CDS (13)..(720)
aagggagaggttttgaatgaaattgaaacctttgtaaaggggagcctgttagcgggcttagttttattgccagtattaggcacaaccgttgatgcagcaccggctccagaagattctgaagctacaattcgtttctctgtagaagagccacctacaattattgaccctgaaaatccaggtcaagacaatgatgaccaaagcggtaccggccaaacaggttcattaactctggattatgttccaaatttggactttggtacccacgaactttcagtcgcagaggaaacttatgaagcgatagacccgaaaccatttgtccaagttactgaccgtcgtggtactggagcaggctggaacttgactgttcaagcatcatcattctctactgggggatcaggtcttcaagaaagcctccctggcgctaaattaacctttaccgatggggaagctgtttcaagacttagctcacttttagcacctgatgttgctgatcctattgtggttaataccggtggtgatgcaacacaagttactactgctagaccaggtcaaggtcttgctataccaggtcaaggtctcggctcatgggttacacgttggttgaaagaagagggagcagatactaactcaaaagttgcattaactgttccacaagctgttgctacaccaggtagccacacttcaaccttgacttggaccttaactgatgcacctggtcaataa

SEQ ID NO: 820 - protein, 236 aa, Alloiococcus otitidis
MNEIETFVKGSLLAGLVLLPVLGTTVDAAPAPEDSEATIRFSVEEPPTIIDPENPGQDNDDQSGTGQTGSLTLDYVPNLDFGTHELSVAEETYEAIDPKPFVQVTDRRGTGAGWNLTVQASSFSTGGSGLQESLPGAKLTFTDGEAVSRLSSLLAPDVADPIVVNTGGDATQVTTARPGQGLAIPGQGLGSWVTRWLKEEGADTNSKVALTVPQAVATPGSHTSTLTWTLTDAPGQ

SEQ ID NO: 821 - DNA, 1074 bp, Alloiococcus otitidis
  CDS (49)..(1071)
caagcttcattattacacggttgtttattaagggaagtgacctggccaatgtttagctcttttggcttatcggtttacctatcttcatttgaaaaacaaaaacctattttaaataaattaaaagggaaaaacattccaatctttatatccttacacatagaagaagagtttagcccatcttatgtgacaaaaacgatagaaatgtgtcgttggttaaccgaaaatcaattttatatcattgcagatgtatctccagtcagtttaaaaagatttaaagtaagggatcttaaacagctggtggaacttctaaaaatagataatcttcgtttagactttgggtttgattctataaattcagtagaactccaagaagatgtagaccttactttcaatgcttccactcttatagatacgagcgaagtccaagcaggagcttactatatgcataatttttatccaaggccagaaacaggactggataaaagctatttgaacagtctgaatgctgcaattaaaaataatggtggacatagcttagcctttatgagtggagatctggaaaaaagaggtccaattcaggaaggattaccaagcatagaagatcaccgctatctcccgccatatgttcaatttttagatttaatcaaaaaccatcaatgtgatagtgtgtttgtcggggatggtctcatatcggaaaaacagctggaacttattttaagctatattgaggatgaattaatccaagtgccagtcgttttaaatcatgactatgaagctataaaaaatcgagactattcagtgcgcatcgactcaccagaaaaattggtcagagtacaagggtctaggcaaattaactgggaatctttcttaacccagcctcaaaatactaaagtgcgaaataagggttgtattaccatggataataataagtacggtcgttatactggggaacttcaaattttaaatagagacctgcctgctcatgagaaggttaatgtagtgggacaggttaaagacgagtatttgggcttgttggattgcctaaatagaggggatagatttaccttgacctaa

SEQ ID NO: 822 - protein, 341 aa, Alloiococcus otitidis
MFSSFGLSVYLSSFEKQKPILNKLKGKNIPIFISLHIEEEFSPSYVTKTIEMCRWLTENQFYIIADVSPVSLKRFKVRDLKQLVELLKIDNLRLDFGFDSINSVELQEDVDLTFNASTLIDTSEVQAGAYYMHNFYPRPETGLDKSYLNSLNAAIKNNGGHSLAFMSGDLEKRGPIQEGLPSIEDHRYLPPYVQFLDLIKNHQCDSVFVGDGLISEKQLELILSYIEDELIQVPVVLNHDYEAIKNRDYSVRIDSPEKLVRVQGSRQINWESFLTQPQNTKVRNKGCITMDNNKYGRYTGELQILNRDLPAHEKVNVVGQVKDEYLGLLDCLNRGDRFTLT

SEQ ID NO: 823 - DNA, 1074 bp, Alloiococcus otitidis; identical to SEQ ID NO: 821
  CDS (37)..(1071)

SEQ ID NO: 824 - protein, 345 aa, Alloiococcus otitidis
MTWPMFSSFGLSVYLSSFEKQKPILNKLKGKNIPIFISLHIEEEFSPSYVTKTIEMCRWLTENQFYIIADVSPVSLKRFKVRDLKQLVELLKIDNLRLDFGFDSINSVELQEDVDLTFNASTLIDTSEVQAGAYYMHNFYPRPETGLDKSYLNSLNAAIKNNGGHSLAFMSGDLEKRGPIQEGLPSIEDHRYLPPYVQFLDLIKNHQCDSVFVGDGLISEKQLELILSYIEDELIQVPVVLNHDYEAIKNRDYSVRIDSPEKLVRVQGSRQINWESFLTQPQNTKVRNKGCITMDNNKYGRYTGELQILNRDLPAHEKVNVVGQVKDEYLGLLDCLNRGDRFTLT

SEQ ID NO: 825 - DNA, 1452 bp, Alloiococcus otitidis
  CDS (1204)..(1449)
aagaaaaataaaagggaggaaattaaaatggccaaccagaacgatgttatcttaaaagaaatcttagatgcggtgggaggaaaagaaaacatacaatccattaacaattgtatgacacgtcttcgacttggcataaaagatgaagatctagttgatcagactcaattggaaaatatagacggtgtattgggagttgtacatgctgataacttacaaattgtggtcgggccgggaaaagcaaaaaaattagctgatttgttagtggaagattatggctttaaaaaagaaagcaagacaccagacaatacttgggaagagaataagcaggatataaagcgtcaacaaaatagaggcaaagtaaggatagctctagaaaccattgccaatatttttatcccgatgatccctgccatcatagctgctggtcttttccaaggtttttctagcttgttaggaactatgatagcggaaggaacacttgatgggacattttggaacgccttacaaataacttttgctttgatagggaatagtttcttaggttactttgcaatttttactggtgttaatgctgctaaagaatttggggcaactgaggccttaggtggtatggttggtgccgcatcaatagcaccacagttaattgaactatcgcaattgtttaacctctatgatgccgaagaacccctcaattcaactttaactactggaaaaggtggtataataggggtaattataggggtttggcttttgtctgttatagaaaaagctgtacgcaaacgcatgcccgacgttttggatataatggttaccccggttattacacttttaatcaccatagtcgtcatggcctttatcattatgcctctttcaggtgtcctatcagattggttggtaaccggtcttagttatattatagggtcggacaatacagttattagtattttatctgggtatattttagcagcagttttccttcctatggttttacttggtcttcaccatggattgatccctatttatgccatacaacttgaagtattaggaggagtcactctctttccagtattagccatggcaggagcaggccaagtaggagcagctctagccatatacaccttggctagaaaggtaggagatgaaaaaatgaaaggtattattacgggggccctaccagcaggtattcttggtattggcgaacccttgatttacggagttactctaccacttggcaaaccatttattactgccggattaggtgctggttttggaggagcttatgtaatgttgatgggagtagcttcaagcgcttgggggccatctggttgggtagctctgcccttaatgcaaaatggcatgatccattatgcaattggtttattaatatcttatttagcaagcttcattattacacggttgtttattaagggaagtgacctggccaatgtttag

SEQ ID NO: 826 - protein, 82 aa, Alloiococcus otitidis
MIYGVTLPLGKPFITAGLGAGFGGAYVMLMGVASSAWGPSGWVALPLMQNGMIHYAIGLLISYLASFIITRLFIKGSDLANV

SEQ ID NO: 827 - DNA, 1452 bp, Alloiococcus otitidis; identical to SEQ ID NO: 825
  CDS (28)..(1449)

SEQ ID NO: 828 - protein, 474 aa, Alloiococcus otitidis
MANQNDVILKEILDAVGGKENIQSINNCMTRLRLGIKDEDLVDQTQLENIDGVLGVVHADNLQIVVGPGKAKKLADLLVEDYGFKKESKTPDNTWEENKQDIKRQQNRGKVRIALETIANIFIPMIPAIIAAGLFQGFSSLLGTMIAEGTLDGTFWNALQITFALIGNSFLGYFAIFTGVNAAKEFGATEALGGMVGAASIAPQLIELSQLFNLYDAEEPLNSTLTTGKGGIIGVIIGVWLLSVIEKAVRKRMPDVLDIMVTPVITLLITIVVMAFIIMPLSGVLSDWLVTGLSYIIGSDNTVISILSGYILAAVFLPMVLLGLHHGLIPIYAIQLEVLGGVTLFPVLAMAGAGQVGAALAIYTLARKVGDEKMKGIITGALPAGILGIGEPLIYGVTLPLGKPFITAGLGAGFGGAYVMLMGVASSAWGPSGWVALPLMQNGMIHYAIGLLISYLASFIITRLFIKGSDLANV

SEQ ID NO: 829 - DNA, 915 bp, Alloiococcus otitidis
  CDS (79)..(912)
caaggagtgaatattgtggaagaaatccatcaattaacgactgaaaagcgcaatccaaacacttcaaacctagatcggatgagtataatcgaggccttgcgagttatgaatgaagaggataaaaaagttgctcaagcgatcgaaaaagtcttgcctgaaataagccaggcagttcaaattgtgactcaaaaatataaggagggcgggcgactgatatatatgggagcagggacaagtggtcgtttgggtattttagatgcttctgaatgcccgccgacctttggagtatctcaggataaggtcattgctttaattgcagggggtcaaaaagctattagtcaacccatagaaggtgcggaagatagctttagtgatggggcaaacgatttaaagcagattaaattatcaaaaaaggacgttttggtaggcttagctgctagtggtcgaacaccctatgtagttggtggtattgaatatgctaataaaattggggtagcaactattgctatagcatgtaacaaggctagcaaaataggcagactagcagatgtggctattgaagctgattctggccccgagattttaactgggtctactcggttaaaggcgggaactgcacaaaagatgattttaaatatgatttccactgtaacgatggttcaagtggggaaagtctatcagaacctcatggtagatgtactccaatctaacgataagttgaaaactcgggctcaaaatattgtgatcgctgccaccggtgtggaagaagatttggcccaacaagcgttacaagctagtcaaggctcagtaaaagtagctattctgatgatcttattggatattgatccggtccaagcttgtgagaagttagatgaggtacacggcaaaataagtgaggcaataaaagaaaaataa

SEQ ID NO: 830 - protein, 278 aa, Alloiococcus otitidis
MSIIEALRVMNEEDKKVAQAIEKVLPEISQAVQIVTQKYKEGGRLIYMGAGTSGRLGILDASECPPTFGVSQDKVIALIAGGQKAISQPIEGAEDSFSDGANDLKQIKLSKKDVLVGLAASGRTPYVVGGIEYANKIGVATIAIACNKASKIGRLADVAIEADSGPEILTGSTRLKAGTAQKMILNMISTVTMVQVGKVYQNLMVDVLQSNDKLKTRAQNIVIAATGVEEDLAQQALQASQGSVKVAILMILLDIDPVQACEKLDEVHGKISEAIKEK

SEQ ID NO: 831 - DNA, 915 bp, Alloiococcus otitidis; identical to SEQ ID NO: 829
  CDS (7)..(912)

SEQ ID NO: 832 - protein, 302 aa, Alloiococcus otitidis
MNIVEEIHQLTTEKRNPNTSNLDRMSIIEALRVMNEEDKKVAQAIEKVLPEISQAVQIVTQKYKEGGRLIYMGAGTSGRLGILDASECPPTFGVSQDKVIALIAGGQKAISQPIEGAEDSFSDGANDLKQIKLSKKDVLVGLAASGRTPYVVGGIEYANKIGVATIAIACNKASKIGRLADVAIEADSGPEILTGSTRLKAGTAQKMILNMISTVTMVQVGKVYQNLMVDVLQSNDKLKTRAQNIVIAATGVEEDLAQQALQASQGSVKVAILMILLDIDPVQACEKLDEVHGKISEAIKEK

SEQ ID NO: 833 - DNA, 105 bp, Alloiococcus otitidis
  CDS (1)..(102)
atggcccaattaaatatcatagatattttgtatttaggctatataaaccagatttacgataaaagtcttgaacaattaaccagaactcaaattgacaaggagtga

SEQ ID NO: 834 - protein, 34 aa, Alloiococcus otitidis
MAQLNIIDILYLGYINQIYDKSLEQLTRTQIDKE

SEQ ID NO: 835 - DNA, 1245 bp, Alloiococcus otitidis
  CDS (16)..(1242)
aaagaaaaagtcataatgacctttttgagctacaatgtagttagagaaaacaaaaaacacattgaaaggaagatcattatgactcaactcaatcttacactagacgccaataaattaacagacgcaattttaaattgtgatctggatcaagtgatgaaatccaccttagtgacggtcttaaacgcttatatggaatccgaacgcgaccaatatatgaaaagcaagcggtacgagcgagatgaagatcgctgcgattaccgcaatgggtattatgagcgagatttcaccacgaaaatcggcaccctcaaactcaacgtacccagaacgcggtcaggcgacttccatacccaattatttgaactcaatcagcggatggatcaaggcctattggctaccatctttgagatgtacgtcaatggcatctccacccgcaaaatgacgaaagtcgtcgaatccctttgtggtcaaaaggtctccaaatcgtttgtctccgatgtcaataaacacctggacaaggatgtctttcactttcaaaagcggtccctcacccatactgatttccggtatatctatgtcgatgccatgtatataaaggtccgagaggataaccgggtggtgtccaaagccctttacatcgcccaaggagtcaatgatgagaataggcgagaaatcatcgggtttaaagtggctgggcaagagtcaacggaaagttggcggtcgttctttcttgatttaaaagccagaggcattgatacgccgaaaatggtgatttcagatgcccatgcaggcttacggaaagctattcaagaatgttttgtcaacaccacttggcaacgctgtacctttcacttattaagcaatatcaccgatgccttgccgaaaaccacggaccgagtgatccgagatcgtttccaagcagttttattttccagaacccagcaggaagcccgtgaacggaaacaggctttggaggcggagttcgaagaccaagcgaagctggccaaagctttgagtctattagatgagggctttgaagatgccattcagtatcaaatggagccttctccttaccatatgtctttgagaacaaccaattccatcgaacgagtcaatcgtgaaattcgacgtcgggaaagagtggtggggattttccccaatatcaaatccgcagagcggctagccggctcggtcttattaaacctgcaggagaattgggaagctcagaactatcgatttttacgatag

SEQ ID NO: 836 - protein, 409 aa, Alloiococcus otitidis
MTFLSYNVVRENKKHIERKIIMTQLNLTLDANKLTDAILNCDLDQVMKSTLVTVLNAYMESERDQYMKSKRYERDEDRCDYRNGYYERDFTTKIGTLKLNVPRTRSGDFHTQLFELNQRMDQGLLATIFEMYVNGISTRKMTKVVESLCGQKVSKSFVSDVNKHLDKDVFHFQKRSLTHTDFRYIYVDAMYIKVREDNRVVSKALYIAQGVNDENRREIIGFKVAGQESTESWRSFFLDLKARGIDTPKMVISDAHAGLRKAIQECFVNTTWQRCTFHLLSNITDALPKTTDRVIRDRFQAVLFSRTQQEARERKQALEAEFEDQAKLAKALSLLDEGFEDAIQYQMEPSPYHMSLRTTNSIERVNREIRRRERVVGIFPNIKSAERLAGSVLLNLQENWEAQNYRFLR

SEQ ID NO: 837 - DNA, 750 bp, Alloiococcus otitidis
  CDS (25)..(747)
agtgattatgaaaagaggatttttatgactatagccagcattaagttaaaggattatatgcaaaatgctacctcgacagagaaggtcattattcatttcatattgaaccatccaggtgaaacaagtcagatgagcatccataaactagcttcagccacttatacttcgccttcttccattatccgtttgtgtaagaagattggttatagggggtataaagactttataaaaagtttgatttatgagcaggctcaacgaaaagattactatgactcctatctgacaattatggaccaaaatgatgagatacaggatacaataagcaaaattacatataaaaatattctgactttggaagaaactcaaaaattactagatccaaaggtcattgcggaatgtgttgatgaaataaataagtgtgaaaaaattgttttattcggtatgggggcttcacttttagttgctcgagatgcttgcttaaaatttaatcgggttgataagttagccctaactagtgatgactggcatactcaacttcttcatgctcgaaacgtaaaagctcaggatttagccatagctatctcttattcaggaaaaaccagggaagtaattgattgcgttaaggaagttaaaacaacaggaactaaggttatcgctataactaaaattggtgcgagccccttatctgatatggctgatactaatatctatataccaaataatgagctaaccataaggagtgcaggataa

SEQ ID NO: 838 - protein, 241 aa, Alloiococcus otitidis
MTIASIKLKDYMQNATSTEKVIIHFILNHPGETSQMSIHKLASATYTSPSSIIRLCKKIGYRGYKDFIKSLIYEQAQRKDYYDSYLTIMDQNDEIQDTISKITYKNILTLEETQKLLDPKVIAECVDEINKCEKIVLFGMGASLLVARDACLKFNRVDKLALTSDDWHTQLLHARNVKAQDLAIAISYSGKTREVIDCVKEVKTTGTKVIAITKIGASPLSDMADTNIYIPNNELTIRSAG

SEQ ID NO: 839 - DNA, 861 bp, Alloiococcus otitidis
  CDS (13)..(858)
aaggaagatggtatgtcccagcaggctatctcggtcctggtttcttttgatgaaaattatatcccaccctttaagaccatgttttactccctcatccaaaataatccagaccaagcttttaaactatggctattacaccaacaggttagcgaggcagcccttgaagaaatccgatcatactgccaagacctgggagctgactttcaggccattaaggtcaaggaccaggattttcaaaatgctgctgtcaccaaccgctacccccgcgaaatgtattttagactactagcaccttttattttgccagctgatttgagccgggttctctacttggacccagatattttggtgattaaccggattgaagagctttggcataccgacttggcgggtaattgctttgcggcagcctcccacaagggctttacagatatggtgggcggaattaaccgagtccgtttgcagacggaaaatgattatttcaatactggggttatcctgatggatttggaccgggcccgccaggtcgttgacccggatgaaatctttgctgccgtcaacaagttcgacaagcttctgctcttgcccgaccaagacatcttcaaccacctttacggcaagcacaccaagctattggccgaagaaaaatggaactacgatacccgcaagtacacccgctattacctaaaaagcgaccaagaatacacccccgagtggacggcgcaaaacaccgccatcctccacttttgtggccgggacaagccatgggagtcgaccaagtttactggttttgtcctcctctaccagcactatgaccaggcccggcaacattttgaaaaagaaagaaagttaaaaacttaa

SEQ ID NO: 840 - protein, 282 aa, Alloiococcus otitidis
MSQQAISVLVSFDENYIPPFKTMFYSLIQNNPDQAFKLWLLHQQVSEAALEEIRSYCQDLGADFQAIKVKDQDFQNAAVTNRYPREMYFRLLAPFILPADLSRVLYLDPDILVINRIEELWHTDLAGNCFAAASHKGFTDMVGGINRVRLQTENDYFNTGVILMDLDRARQVVDPDEIFAAVNKFDKLLLLPDQDIFNHLYGKHTKLLAEEKWNYDTRKYTRYYLKSDQEYTPEWTAQNTAILHFCGRDKPWESTKFTGFVLLYQHYDQARQHFEKERKLKT

SEQ ID NO: 841 - DNA, 345 bp, Alloiococcus otitidis
  CDS (7)..(342)
cttggtgtgcttgccgtaaaggtggttgaagatgtcttggtcgggcaagagcagaagcttgtcgaacttgttgacggcagcaaagatttcatccgggtcaacgacctggcgggcccggtccaaatccatcaggataaccccagtattgaaataatcattttccgtctgcaaacggactcggttaattccgcccaccatatctgtaaagcccttgtgggaggctgccgcaaagcaattacccgccaagtcggtatgccaaagctcttcaatccggttaatcaccaaaatatctgggtccaagtagagaacccggctcaaatcagctggcaaaataaaaggtgctag

SEQ ID NO: 842 - protein, 112 aa, Alloiococcus otitidis
MLAVKVVEDVLVGQEQKLVELVDGSKDFIRVNDLAGPVQIHQDNPSIEIIIFRLQTDSVNSAHHICKALVGGCRKAITRQVGMPKLFNPVNHQNIWVQVENPAQISWQNKRC

SEQ ID NO: 843 - DNA, 741 bp, Alloiococcus otitidis
  CDS (148)..(738)
gtaaaagtgcatgatcttaaccacaaatacccatttttgcatctttcatgtttgggtcattctacctatactataattagaaatcaagggagatggaggtcttggaattatcactccttcaacccccccctgatcaacaggcaggtgatgcaaataggtacaatcgaaattgtcttattagctattgcaatatcactagatgtttttgctgccatggtgatccaaggttccatgctctcacgcattaactaccttaacttacttaaagttggtattctctttggatcttggcagactgtgactgttggtctgagtaatgtcattactggtcgattgatcgactatggaatacccattgatcaaagggcagtccaagacatcctcttgatttttgcaataggaatatttaccattttgggtttgtttatgatctggaagtaccgccacaaggacaccatacttgagcgaagggtcgaccaactgagtatgaccaagatcctatctttggcggtgatcaccagcatcgatgccatcctagtcggcatgggactgggggccttggatgtttcaatttttgaaatcctcctcccctttatcatctttagtatcctagccgtcttcttaggtatctatgtcggccactggtttggctttgaagaaaaaccagtcgcccactatgttgctgggaccatcttcttggtcatcagcgtcgacctactcttcagattggtaagtatctag

SEQ ID NO: 844 - protein, 197 aa, Alloiococcus otitidis
MQIGTIEIVLLAIAISLDVFAAMVIQGSMLSRINYLNLLKVGILFGSWQTVTVGLSNVITGRLIDYGIPIDQRAVQDILLIFAIGIFTILGLFMIWKYRHKDTILERRVDQLSMTKILSLAVITSIDAILVGMGLGALDVSIFEILLPFIIFSILAVFLGIYVGHWFGFEEKPVAHYVAGTIFLVISVDLLFRLVSI

SEQ ID NO: 845 - DNA, 741 bp, Alloiococcus otitidis; identical to SEQ ID NO: 843
  CDS (37)..(738)

SEQ ID NO: 846 - protein, 234 aa, Alloiococcus otitidis
MHLSCLGHSTYTIIRNQGRWRSWNYHSFNPPLINRQVMQIGTIEIVLLAIAISLDVFAAMVIQGSMLSRINYLNLLKVGILFGSWQTVTVGLSNVITGRLIDYGIPIDQRAVQDILLIFAIGIFTILGLFMIWKYRHKDTILERRVDQLSMTKILSLAVITSIDAILVGMGLGALDVSIFEILLPFIIFSILAVFLGIYVGHWFGFEEKPVAHYVAGTIFLVISVDLLFRLVSI

SEQ ID NO: 847 - DNA, 741 bp, Alloiococcus otitidis; identical to SEQ ID NO: 843
  CDS (7)..(738)

SEQ ID NO: 848 - protein, 244 aa, Alloiococcus otitidis
MHDLNHKYPFLHLSCLGHSTYTIIRNQGRWRSWNYHSFNPPLINRQVMQIGTIEIVLLAIAISLDVFAAMVIQGSMLSRINYLNLLKVGILFGSWQTVTVGLSNVITGRLIDYGIPIDQRAVQDILLIFAIGIFTILGLFMIWKYRHKDTILERRVDQLSMTKILSLAVITSIDAILVGMGLGALDVSIFEILLPFIIFSILAVFLGIYVGHWFGFEEKPVAHYVAGTIFLVISVDLLFRLVSI

SEQ ID NO: 849 - DNA, 210 bp, Alloiococcus otitidis
  CDS (1)..(207)
atggaagatagcggactaagcaatacggccggattatggatcggttggatcggtattattatcggtgtgatcggcttcttctggcaaccagtgtggttgggaattatcgctttagttttaggtattatcaatttattctccccacaaaaagcccttgcttgggtagccatcgcaatcggggctattgccttgattatcgccatggtctga

SEQ ID NO: 850 - protein, 69 aa, Alloiococcus otitidis
MEDSGLSNTAGLWIGWIGIIIGVIGFFWQPVWLGIIALVLGIINLFSPQKALAWVAIAIGAIALIIAMV

SEQ ID NO: 851 - DNA, 303 bp, Alloiococcus otitidis
  CDS (58)..(300)
gctaagacagatgatgactttgtaagttcgaaccacaatgctttaggaggcgtttgtatgtcacaagaaccaggaaacacaaaccaagcacctaataacaacagtggactaagtgatacagcaggcttatggctcggttggatcgggattatcgtcggtgttatcggctttttctggcaaccaatctggctcggtattattgctgctgtccttggtatcataggactcttctctccacaaaaaggtgtcaactgggccgctattataatcggtgtgatcgccctcataatcggcctggtctga

SEQ ID NO: 852 - protein, 81 aa, Alloiococcus otitidis
MSQEPGNTNQAPNNNSGLSDTAGLWLGWIGIIVGVIGFFWQPIWLGIIAAVLGIIGLFSPQKGVNWAAIIIGVIALIIGLV

SEQ ID NO: 853 - DNA, 627 bp, Alloiococcus otitidis
  CDS (211)..(624)
aaagagccgcataatgttaaaatgaggttaagaacggatacaaggcaggtggtttttttggccgaggagagaaatacccaagacttactggtcgctagcttcaagtccctgatgatgaagatcccctttaaaaaaatcaccatcaaaaaaataacagatggtgctggtgtcatccgcccaactttttacaactacttctccgacaagtttatgatctttgaacaaatcttggaccaggaattgttcaagaccctctactccttggttgaaattaacatggtcaccgaaatcatcccggttatctttgcctacttcaataaaaacaaagacttctacaaaaaggccttcaacatcgaaggacagcccaacttcattagcatcttatcagataagatcgagacctttgccatctacctcctccaagaacttcccctccaagatgaggaggccattcaaaccctgggcatggaaaatgtggccaagttctacactaatggcctagtccaggtcctctaccactactgccacaacctcaacgatgactatgatatcgacttttacatccatgcttatacttatttggccagccactccctgactgatatttttgaaatccccttggaataa

SEQ ID NO: 854 - protein, 138 aa, Alloiococcus otitidis
MIFEQILDQELFKTLYSLVEINMVTEIIPVIFAYFNKNKDFYKKAFNIEGQPNFISILSDKIETFAIYLLQELPLQDEEAIQTLGMENVAKFYTNGLVQVLYHYCHNLNDDYDIDFYIHAYTYLASHSLTDIFEIPLE

SEQ ID NO: 855 - DNA, 627 bp, Alloiococcus otitidis; identical to SEQ ID NO: 853
  CDS (22)..(624)

SEQ ID NO: 856 - protein, 201 aa, Alloiococcus otitidis
MRLRTDTRQVVFLAEERNTQDLLVASFKSLMMKIPFKKITIKKITDGAGVIRPTFYNYFSDKFMIFEQILDQELFKTLYSLVEINMVTEIIPVIFAYFNKNKDFYKKAFNIEGQPNFISILSDKIETFAIYLLQELPLQDEEAIQTLGMENVAKFYTNGLVQVLYHYCHNLNDDYDIDFYIHAYTYLASHSLTDIFEIPLE

SEQ ID NO: 857 - DNA, 1308 bp, Alloiococcus otitidis
  CDS (46)..(1305)
actttaggtgaaatgacagaaatgtatcgtaagtctccaaacttaatggagcaagttgttgacagaagaaacttggaaacagcagccaaagccgttaaacggaacaaaggcgctgcaggtattgacggtatgaccgtttttgagatagaggagcacattcaagcgtattatcaacccttacggaagaaattacttgatggaacgtataagcctcaaccagttaaacgagtagaaataccaaagccgaatggagaaaaacgaaagttaggtataccttgtgtgcgggatagagttgttcaacaagccatacggcaagtaattgaaccgattatagacccgcacttctatgacaacagtcacggattccgaccagggaaaagcacgcacagtgctctcaagcaatgtgcacagtattataaagaaggctatcgtgttgtagttgattgtgacctcaaacaatgctttgacacgctcaatcacgacaaacttatctattatcttgaacagtacatccaagataaaatgatactgaaaattatccgtaagtttttgagagcgggtgtaattgatttgactagcgaatttatcgcaagtgaaacaggggcaccacaaggtggtgttctatcaccgcttttgagtaatgtgtacttacatgaactggataaagagttggttaaccgtggtcaccgatttgtccgatacgcagatgactttgtcatctacgttaaatcaaaacgagccggtgaacgggtaatgaacagcatcacacgctttattgaaaaagacttaaagttaatcgtcaatcaagacaaaagccaggttgggtctcctgcccgtttaaagtttttgagctgtctgatgaagcaagtgaatggggattatcgttttatccctaccaaagaagccaagcagaaattcaaacgcagattgagaaagctgaccagtcgtaaacggccaggtacttttaaaaagataatgactgaaattaatcgagtcacccgcggttggattaattactttggtttaggcttcattaaaagctttatcaaagaagttgagcaatggttaaatcaccgtatcagacagctgattcttaaacggtggaaacgtccacgaactattataccaaagttggaacaatatggactggacttagattcagccaaacggattgcgtattcacgcaaaaagtactggcgactgtcatgcacacatgaatttcatcgtgcaataacaacagaaagactcagcaagtggggcttagttccactaagcactatcgctgagtctgcttacgcaagatattga

SEQ ID NO: 858 - protein, 420 aa, Alloiococcus otitidis
MEQVVDRRNLETAAKAVKRNKGAAGIDGMTVFEIEEHIQAYYQPLRKKLLDGTYKPQPVKRVEIPKPNGEKRKLGIPCVRDRVVQQAIRQVIEPIIDPHFYDNSHGFRPGKSTHSALKQCAQYYKEGYRVVVDCDLKQCFDTLNHDKLIYYLEQYIQDKMILKIIRKFLRAGVIDLTSEFIASETGAPQGGVLSPLLSNVYLHELDKELVNRGHRFVRYADDFVIYVKSKRAGERVMNSITRFIEKDLKLIVNQDKSQVGSPARLKFLSCLMKQVNGDYRFIPTKEAKQKFKRRLRKLTSRKRPGTFKKIMTEINRVTRGWINYFGLGFIKSFIKEVEQWLNHRIRQLILKRWKRPRTIIPKLEQYGLDLDSAKRIAYSRKKYWRLSCTHEFHRAITTERLSKWGLVPLSTIAESAYARY

SEQ ID NO: 859 - DNA, 1308 bp, Alloiococcus otitidis; identical to SEQ ID NO: 857
  CDS (13)..(1305)

SEQ ID NO: 860 - protein, 431 aa, Alloiococcus otitidis
MTEMYRKSPNLMEQVVDRRNLETAAKAVKRNKGAAGIDGMTVFEIEEHIQAYYQPLRKKLLDGTYKPQPVKRVEIPKPNGEKRKLGIPCVRDRVVQQAIRQVIEPIIDPHFYDNSHGFRPGKSTHSALKQCAQYYKEGYRVVVDCDLKQCFDTLNHDKLIYYLEQYIQDKMILKIIRKFLRAGVIDLTSEFIASETGAPQGGVLSPLLSNVYLHELDKELVNRGHRFVRYADDFVIYVKSKRAGERVMNSITRFIEKDLKLIVNQDKSQVGSPARLKFLSCLMKQVNGDYRFIPTKEAKQKFKRRLRKLTSRKRPGTFKKIMTEINRVTRGWINYFGLGFIKSFIKEVEQWLNHRIRQLILKRWKRPRTIIPKLEQYGLDLDSAKRIAYSRKKYWRLSCTHEFHRAITTERLSKWGLVPLSTIAESAYARY

SEQ ID NO: 861 - DNA, 1950 bp, Alloiococcus otitidis
  CDS (565)..(1947)
caaggtaagagagaggttcacaaagttaggcaagatattttcaccccttctcttatcttggtgaatgtttcagaaatcttactctatcagaataggaaaacgaaagggagatgttttttgattaaacaggtaacgattgctggcggtggcgttttaggttcgcagattgccttccaaaccgcagcttcaggctttaatgtcaccttgtatgatattgatgaggatgcagcagaagcagctcgtggtaagctaaaagaccttattcctcgctaccaggaagacttgggtattgatgaagctaaactgaaagaagtggtcgatgggattaccatcacaaccgacttggaagaagctgcttctgaagctgacttggtagttgaagctattgcggaaaatatagatgtcaaaaaagacttttactcggacttgaacaaggttgcgaaagaagataccatatttgcgaccaacagttctgccctcttgccaagtgacttcaaggatgccactggtcggacggataagttcttggctctccactttgccaatgaaatctgggaccgtcccatggcagaagtgatggggactgaagacactgattcagaagtttacgaaacagttaaacagtttgcccgtgacattcacatgaccccgatcgaactcaactttgaaaaagctggatatgtcttaaataacttattaatcccccttcttcgcgcaggaatagaactcaatgctaatggaattgctgaaccagaagtgattgacaagacttggatgaagggccatgactccccaatgggtccatttgccatgattgatattattggcttaggcactccgcttgaacaaatgaaggccatttatgaagaaaccaaggaagattggcggaaagactttatcgactttgctcaagacaaaattgacaagggcgaatctggtaagtttgacggcaaaggtttctatgaataccctaatccagcttttgaagcagacgacttctttgaaaatccgaaagaaatccaagacctcaaacacgactttaaaaaagtcatggtggctggagctggtgtcttagggtcccagattgcttacctgactgctagcggtggctttgacgttgttctttacgatattgatgaagaagcgatcgaaaatggtaaggaaaccctagaagggattgccaaggaatatgctgaagacatggatgtttcaaaagaccaggccaatgaatacctggaccgaattactttgacctcagacattaaagaagctgcttccgatgtggacttagtcattgaagcagtgtctgaaaaccctgacatcaaagaatccttctacggtgacttggctgaagtcttgccagaggaagcttatatcgcaaccaacacttccaccttgctaccaagcgatttggaagggatgactgaccgaccagagaaatttgctgccctccactttgccaaccgaatttggaagaataacagtggtgaagtcatgccaggaaccaagacgtcagatgaattctttgacaaactccaagcctttgccagagatattggtctgttggttctacccctccacaaggaaaaagatggctacattgtcaactccatcctcattccttacttgaccaatgccttagacctcttggcaactggtgcagctgaccttgagactattgaccggacttggattctaggctacaaacgtgacaaaggacctttcgcttctattgacacggttggtttagaaaccatgaaaaatattattgaccttaacaaagacaaggctgaagaagctggcgatgaagaagaagttgaaaaactaagccagatcttagacctcttgaatgacaaaattgacaagggtgaaacaggtcgagcagctggtaaaggcttctacacctaccctaacccagcctatgaagcagatgacttcttagaagcttaa

SEQ ID NO: 862 - protein, 461 aa, Alloiococcus otitidis
MAEVMGTEDTDSEVYETVKQFARDIHMTPIELNFEKAGYVLNNLLIPLLRAGIELNANGIAEPEVIDKTWMKGHDSPMGPFAMIDIIGLGTPLEQMKAIYEETKEDWRKDFIDFAQDKIDKGESGKFDGKGFYEYPNPAFEADDFFENPKEIQDLKHDFKKVMVAGAGVLGSQIAYLTASGGFDVVLYDIDEEAIENGKETLEGIAKEYAEDMDVSKDQANEYLDRITLTSDIKEAASDVDLVIEAVSENPDIKESFYGDLAEVLPEEAYIATNTSTLLPSDLEGMTDRPEKFAALHFANRIWKNNSGEVMPGTKTSDEFFDKLQAFARDIGLLVLPLHKEKDGYIVNSILIPYLTNALDLLATGAADLETIDRTWILGYKRDKGPFASIDTVGLETMKNIIDLNKDKAEEAGDEEEVEKLSQILDLLNDKIDKGETGRAAGKGFYTYPNPAYEADDFLEA

SEQ ID NO: 863 - DNA, 1950 bp, Alloiococcus otitidis; identical to SEQ ID NO: 861
  CDS (118)..(1947)

SEQ ID NO: 864 - protein, 610 aa, Alloiococcus otitidis
MIKQVTIAGGGVLGSQIAFQTAASGFNVTLYDIDEDAAEAARGKLKDLIPRYQEDLGIDEAKLKEVVDGITITTDLEEAASEADLVVEAIAENIDVKKDFYSDLNKVAKEDTIFATNSSALLPSDFKDATGRTDKFLALHFANEIWDRPMAEVMGTEDTDSEVYETVKQFARDIHMTPIELNFEKAGYVLNNLLIPLLRAGIELNANGIAEPEVIDKTWMKGHDSPMGPFAMIDIIGLGTPLEQMKAIYEETKEDWRKDFIDFAQDKIDKGESGKFDGKGFYEYPNPAFEADDFFENPKEIQDLKHDFKKVMVAGAGVLGSQIAYLTASGGFDVVLYDIDEEAIENGKETLEGIAKEYAEDMDVSKDQANEYLDRITLTSDIKEAASDVDLVIEAVSENPDIKESFYGDLAEVLPEEAYIATNTSTLLPSDLEGMTDRPEKFAALHFANRIWKNNSGEVMPGTKTSDEFFDKLQAFARDIGLLVLPLHKEKDGYIVNSILIPYLTNALDLLATGAADLETIDRTWILGYKRDKGPFASIDTVGLETMKNIIDLNKDKAEEAGDEEEVEKLSQILDLLNDKIDKGETGRAAGKGFYTYPNPAYEADDFLEA

SEQ ID NO: 865 - DNA, 1950 bp, Alloiococcus otitidis; identical to SEQ ID NO: 861
  CDS (61)..(1947)

SEQ ID NO: 866 - protein, 629 aa, Alloiococcus otitidis
MNVSEILLYQNRKTKGRCFLIKQVTIAGGGVLGSQIAFQTAASGFNVTLYDIDEDAAEAARGKLKDLIPRYQEDLGIDEAKLKEVVDGITITTDLEEAASEADLVVEAIAENIDVKKDFYSDLNKVAKEDTIFATNSSALLPSDFKDATGRTDKFLALHFANEIWDRPMAEVMGTEDTDSEVYETVKQFARDIHMTPIELNFEKAGYVLNNLLIPLLRAGIELNANGIAEPEVIDKTWMKGHDSPMGPFAMIDIIGLGTPLEQMKAIYEETKEDWRKDFIDFAQDKIDKGESGKFDGKGFYEYPNPAFEADDFFENPKEIQDLKHDFKKVMVAGAGVLGSQIAYLTASGGFDVVLYDIDEEAIENGKETLEGIAKEYAEDMDVSKDQANEYLDRITLTSDIKEAASDVDLVIEAVSENPDIKESFYGDLAEVLPEEAYIATNTSTLLPSDLEGMTDRPEKFAALHFANRIWKNNSGEVMPGTKTSDEFFDKLQAFARDIGLLVLPLHKEKDGYIVNSILIPYLTNALDLLATGAADLETIDRTWILGYKRDKGPFASIDTVGLETMKNIIDLNKDKAEEAGDEEEVEKLSQILDLLNDKIDKGETGRAAGKGFYTYPNPAYEADDFLEA

SEQ ID NO: 867 - DNA, 1950 bp, Alloiococcus otitidis; identical to SEQ ID NO: 861
  CDS (58)..(1947)

SEQ ID NO: 868 - protein, 630 aa, Alloiococcus otitidis
MVNVSEILLYQNRKTKGRCFLIKQVTIAGGGVLGSQIAFQTAASGFNVTLYDIDEDAAEAARGKLKDLIPRYQEDLGIDEAKLKEVVDGITITTDLEEAASEADLVVEAIAENIDVKKDFYSDLNKVAKEDTIFATNSSALLPSDFKDATGRTDKFLALHFANEIWDRPMAEVMGTEDTDSEVYETVKQFARDIHMTPIELNFEKAGYVLNNLLIPLLRAGIELNANGIAEPEVIDKTWMKGHDSPMGPFAMIDIIGLGTPLEQMKAIYEETKEDWRKDFIDFAQDKIDKGESGKFDGKGFYEYPNPAFEADDFFENPKEIQDLKHDFKKVMVAGAGVLGSQIAYLTASGGFDVVLYDIDEEAIENGKETLEGIAKEYAEDMDVSKDQANEYLDRITLTSDIKEAASDVDLVIEAVSENPDIKESFYGDLAEVLPEEAYIATNTSTLLPSDLEGMTDRPEKFAALHFANRIWKNNSGEVMPGTKTSDEFFDKLQAFARDIGLLVLPLHKEKDGYIVNSILIPYLTNALDLLATGAADLETIDRTWILGYKRDKGPFASIDTVGLETMKNIIDLNKDKAEEAGDEEEVEKLSQILDLLNDKIDKGETGRAAGKGFYTYPNPAYEADDFLEA

SEQ ID NO: 869 - DNA, 1308 bp, Alloiococcus otitidis
  CDS (46)..(1305)
actttaggtgaaatgacagaaatgtatcgtaagtctccaaacttaatggagcaagttgttgacagaagaaacttggaaacagcagccaaagccgttaaacggaacaaaggcgctgcaggtattgacggtatgaccgtttttgagatagaggagcacattcaagcgtattatcaacccttacggaagaaattacttgatggaacgtataagcctcaaccagttaaacgagtagaaataccaaagccgaatggagaaaaacgaaagttaggtataccttgtgtgcgggatagagttgttcaacaagccatacggcaagtaattgaaccgattatagacccgcacttctatgacaacagtcacggattccgaccagggaaaagcacgcacagtgctctcaaacaatgtgcacagtattataaagaaggctatcgtgttgtagttgattgtgacctcaaacaatgctttgacacgctcaatcacgacaaacttatctattatcttgaacagtacatccaagataaaatgatactgaaaattatccgtaagtttttgagagcgggtgtaattgatttgactagcgaatttatcgcaagtgaaacaggggcaccacaaggtggtgttctatcaccgcttttgagtaatgtgtacttacatgaactggataaagagttggttaaccgtggtcatcgatttgtccgatacgcagatgactttgtcatctacgttaaatcaaaacgagccggtgaacgggtaatgaacagcatcacacgctttattgaaaaagacttaaagttaatcgtcaatcaagacaaaagccaggttgggtctcctacccgtttaaagtttttgagctgtctgatgaagcaagtgaatggggattatcgttttatccccaccaaagaagccaagcagaaattcaaacgcagattgagaaagctgaccagtcgtaaacggccaggtacttttaaaaagataatgactgaaattaatcgagtcacccgcggttggattaattactttggtttaggcttcattaaaagttttatcaaagaagttgagcaatggttaaatcaccgtatcagacagctgattcttaaacggtggaaacgtccacgaactattataccaaagttggaacaatatggactggacttagattcagccaaacggattgcgtattcacgcaaaaagtactggcgactgtcatgcacacatgaatttcatcgtgcaataacaacagaaagactcagcaagtggggcttagttccactaagcactatcgctgagtctgcttacgcaagatattga

SEQ ID NO: 870 - protein, 420 aa, Alloiococcus otitidis; identical to SEQ ID NO: 312

SEQ ID NO: 871 - DNA, 1308 bp, Alloiococcus otitidis; identical to SEQ ID NO: 869
  CDS (13)..(1305)

SEQ ID NO: 872 - protein, 431 aa, Alloiococcus otitidis; identical to SEQ ID NO: 314

SEQ ID NO: 873 - DNA, 849 bp, Alloiococcus otitidis
  CDS (103)..(846)
cctttgacttttccaagtactagctcctatagaactacagttaaggggacggttgttgccgtcagcagattgaaaataagacacttcaaggaggcttatttaatgggacgtttagacaataaagtagccattattactggtggagctagtggtattggggaagcaacagttgaagaattcgtcaaagaaggggctaaagttgtaatcgctgatattggcgaacaagggaaagacctggctgacaagattaatgaatcaggtcatgaggccctttttgttaaaactgacgtgacagtagaagatgatattatcaacttggttgaccaaacagtcgaccgctttggtcaattggacattatgtttgctaatgccggaattgcgaaagacggcgaagctgcagacctatcctatgatgactggaaaaaaaccatcgataccaacctatctggtgtcttcttgtcagacaaatatgctattaaacaattcttaaaacaagattccggcggggttattgttaataccgggtctatccacagttttgtctccctacctaacccaactgcctactctgcagccaagggtggagttaagttactaacccaaaacatttgtacagcctatgctgacaagggtgttcgggttaatgctgtctgcccgggctatgtcagaacagcccttttggatgaggtggacgaggaaacccttaaagaattacaagccctccacccacaaggtcgcttgggaactgcagaagaaattgccaaagtcgttttattcttggctagtgacgatgcaagctatgtgaacggcacaaccttgctagttgacggtggctacactgcccaataa

SEQ ID NO: 874 - protein, 248 aa, Alloiococcus otitidis
MGRLDNKVAIITGGASGIGEATVEEFVKEGAKVVIADIGEQGKDLADKINESGHEALFVKTDVTVEDDIINLVDQTVDRFGQLDIMFANAGIAKDGEAADLSYDDWKKTIDTNLSGVFLSDKYAIKQFLKQDSGGVIVNTGSIHSFVSLPNPTAYSAAKGGVKLLTQNICTAYADKGVRVNAVCPGYVRTALLDEVDEETLKELQALHPQGRLGTAEEIAKVVLFLASDDASYVNGTTLLVDGGYTAQ

SEQ ID NO: 875 - DNA, 849 bp, Alloiococcus otitidis; identical to SEQ ID NO: 873
  CDS (4)..(846)

SEQ ID NO: 876 - protein, 281 aa, Alloiococcus otitidis
MTFPSTSSYRTTVKGTVVAVSRLKIRHFKEAYLMGRLDNKVAIITGGASGIGEATVEEFVKEGAKVVIADIGEQGKDLADKINESGHEALFVKTDVTVEDDIINLVDQTVDRFGQLDIMFANAGIAKDGEAADLSYDDWKKTIDTNLSGVFLSDKYAIKQFLKQDSGGVIVNTGSIHSFVSLPNPTAYSAAKGGVKLLTQNICTAYADKGVRVNAVCPGYVRTALLDEVDEETLKELQALHPQGRLGTAEEIAKVVLFLASDDASYVNGTTLLVDGGYTAQ

SEQ ID NO: 877 - DNA, 1836 bp, Alloiococcus otitidis
  CDS (28)..(1833)
ggagtgtttatattggttaagaatgttatggtagcaggcggcggagtactcggaagtcaaattgcatttcaatcagctgtacacgattttgatgtgactctttatgatattgatgaggaggctgccaaagccgctcggaagaaaattgaagcttacatcccccgttatgttgaagatttaggtttagatgaggacgacctccaaaaagcagcagacagtatcaaaattacgactgacttgaaggaagctgcccaggatgccgacttggtcgtcgaagcaattgcagagaacctagacattaaaaaagatttttactcggatttaaatgaactagcaaaagaagatacgatttttgctaccaatagttctgccctcttgccaagtgacttcaaggatgctactggccggactgacaaattcttagccctccactttgccaatgaaatttgggaccgtaacatggctgaagtgatggggacgaaggatactaactctgaagtctatgaaacagtcaagcaatttgctagagatattggtatggtgccgactgaactgaactttgaaaaagctggttatgttttaaacactctcttgatcccggtattaagatcagcaagagaactattttcgaaagaaattgctaagtatgaagacattgatcgagtttggttaagaggccacaattcttccttaggaccctttggaatgttagacattgtaggcttggccacaccacttgagcaagccaaaagtctttacgaagaaagtggcgaagactggcacaagacttttatcgactttgcacaagacaaaatcgataaaggtgagtccggtaagcaggatgggaaaggattttatgactaccccaatccggcttttgaacaagaagaattctttgaaaaccggcaggaaatccaagaccttaaacatgatattaaaaaggtactggtagcaggtgccggtgtccttggctctcaaattgcctaccaaacagcaactggtggcttcgatgttgtcttatatgatatttctgaggatgctttggaagctggtaaggaaaaattagaagctagtgcaaaagattacgctgaagacatgggtgtttcccaagaccaagcgaatgactatttaaatcaaattaagctaacttctgatattgaagaggcagcagacgatgtagacttggttattgaagctgtttcggaaaatcctgatgtcaaagaatccttctacagtgacctttgtcaagttattccggataaaacaggtattgcaaccaatacctcaaccctcctaccgtctgatctcgaaggaatgactgaccggccagaaaaatttgcagctcttcactttgccaaccagatctggaaacaaaatactggcgaggtcatgccgggaacacaaacttctgatgaatttttcgatcaattgcaagcttttgcccgagatattcacctccttgtccttcctctccgaaaagaaaaagctggttatttgattaactccatgctgacgccccacttgctgagtgctttagacttgctagcatctggtgctgctgacttggagaccatcgaccgaacttggatgattggttatgatgaagacagaggaccttttgctacgattgaccgggtgggtctacaaacaactaaggacattgccgaacttagattagatcaagcagaagacgaccaggagaaagagtcgcttggacggatcatcgacctcttacaagaaaaaatcgataaaggcgaaagcggggctgctgatggcaaaggcttctacacctatcctgacccagcttaccagtccgaagactttttaaaagcctaa

SEQ ID NO: 878 - protein, 602 aa, Alloiococcus otitidis
MVAGGGVLGSQIAFQSAVHDFDVTLYDIDEEAAKAARKKIEAYIPRYVEDLGLDEDDLQKAADSIKITTDLKEAAQDADLVVEAIAENLDIKKDFYSDLNELAKEDTIFATNSSALLPSDFKDATGRTDKFLALHFANEIWDRNMAEVMGTKDTNSEVYETVKQFARDIGMVPTELNFEKAGYVLNTLLIPVLRSARELFSKEIAKYEDIDRVWLRGHNSSLGPFGMLDIVGLATPLEQAKSLYEESGEDWHKTFIDFAQDKIDKGESGKQDGKGFYDYPNPAFEQEEFFENRQEIQDLKHDIKKVLVAGAGVLGSQIAYQTATGGFDVVLYDISEDALEAGKEKLEASAKDYAEDMGVSQDQANDYLNQIKLTSDIEEAADDVDLVIEAVSENPDVKESFYSDLCQVIPDKTGIATNTSTLLPSDLEGMTDRPEKFAALHFANQIWKQNTGEVMPGTQTSDEFFDQLQAFARDIHLLVLPLRKEKAGYLINSMLTPHLLSALDLLASGAADLETIDRTWMIGYDEDRGPFATIDRVGLQTTKDIAELRLDQAEDDQEKESLGRIIDLLQEKIDKGESGAADGKGFYTYPDPAYQSEDFLKA

SEQ ID NO: 879 - DNA, 1836 bp, Alloiococcus otitidis; identical to SEQ ID NO: 877
  CDS (13)..(1833)

SEQ ID NO: 880 - protein, 607 aa, Alloiococcus otitidis
MVKNVMVAGGGVLGSQIAFQSAVHDFDVTLYDIDEEAAKAARKKIEAYIPRYVEDLGLDEDDLQKAADSIKITTDLKEAAQDADLVVEAIAENLDIKKDFYSDLNELAKEDTIFATNSSALLPSDFKDATGRTDKFLALHFANEIWDRNMAEVMGTKDTNSEVYETVKQFARDIGMVPTELNFEKAGYVLNTLLIPVLRSARELFSKEIAKYEDIDRVWLRGHNSSLGPFGMLDIVGLATPLEQAKSLYEESGEDWHKTFIDFAQDKIDKGESGKQDGKGFYDYPNPAFEQEEFFENRQEIQDLKHDIKKVLVAGAGVLGSQIAYQTATGGFDVVLYDISEDALEAGKEKLEASAKDYAEDMGVSQDQANDYLNQIKLTSDIEEAADDVDLVIEAVSENPDVKESFYSDLCQVIPDKTGIATNTSTLLPSDLEGMTDRPEKFAALHFANQIWKQNTGEVMPGTQTSDEFFDQLQAFARDIHLLVLPLRKEKAGYLINSMLTPHLLSALDLLASGAADLETIDRTWMIGYDEDRGPFATIDRVGLQTTKDIAELRLDQAEDDQEKESLGRIIDLLQEKIDKGESGAADGKGFYTYPDPAYQSEDFLKA

SEQ ID NO: 881 - DNA, 1836 bp, Alloiococcus otitidis; identical to SEQ ID NO: 877
  CDS (4)..(1833)

SEQ ID NO: 882 - protein, 610 aa, Alloiococcus otitidis
MFILVKNVMVAGGGVLGSQIAFQSAVHDFDVTLYDIDEEAAKAARKKIEAYIPRYVEDLGLDEDDLQKAADSIKITTDLKEAAQDADLVVEAIAENLDIKKDFYSDLNELAKEDTIFATNSSALLPSDFKDATGRTDKFLALHFANEIWDRNMAEVMGTKDTNSEVYETVKQFARDIGMVPTELNFEKAGYVLNTLLIPVLRSARELFSKEIAKYEDIDRVWLRGHNSSLGPFGMLDIVGLATPLEQAKSLYEESGEDWHKTFIDFAQDKIDKGESGKQDGKGFYDYPNPAFEQEEFFENRQEIQDLKHDIKKVLVAGAGVLGSQIAYQTATGGFDVVLYDISEDALEAGKEKLEASAKDYAEDMGVSQDQANDYLNQIKLTSDIEEAADDVDLVIEAVSENPDVKESFYSDLCQVIPDKTGIATNTSTLLPSDLEGMTDRPEKFAALHFANQIWKQNTGEVMPGTQTSDEFFDQLQAFARDIHLLVLPLRKEKAGYLINSMLTPHLLSALDLLASGAADLETIDRTWMIGYDEDRGPFATIDRVGLQTTKDIAELRLDQAEDDQEKESLGRIIDLLQEKIDKGESGAADGKGFYTYPDPAYQSEDFLKA

SEQ ID NO: 883 - DNA, 717 bp, Alloiococcus otitidis
  CDS (301)..(714)
actactgccagaccatcatggaagaggagggagaccatggccaaccaccagcaaacctgcctaaattcagtgcctatttttaaccacctggatgacgcctccttggcaattatatccaagaaggtctaccacaagactatttccaagggccaatccttgttcaaagctggcgaccggactgacgctctttatgtcgtccacaggggaggtcttaaagtttaccgcctcttgcacaatggccgggaacaggtggttcagatactgggtccaggtgattttattggggaaagtcatgtctttatggaagagactgtccatgacgattatgcccaagccttggtggattctaggatttgtaccatccacaaggcagatttagaccgaatcatacttgatcatccagaaatttccctcaaaattatcgaaattatgtccaaacgcctagacgactcctataaacaaaccagtcaggtggggacagaaaaagttggacaagccctcgccatgtttctactagacctggtcgacaatgatagtgaaagcccggtggtcaaactgcccatgtcccggaaagacttggcctcctatttggggactaggtctgaaaccatcagccgaaaatttaaagaattagaagagaaagggcttattacccagaagaccagggccgatatccaaatcaataacttggaccacttgctttattacactagctaa

SEQ ID NO: 884 - protein, 138 aa, Alloiococcus otitidis
MEETVHDDYAQALVDSRICTIHKADLDRIILDHPEISLKIIEIMSKRLDDSYKQTSQVGTEKVGQALAMFLLDLVDNDSESPVVKLPMSRKDLASYLGTRSETISRKFKELEEKGLITQKTRADIQINNLDHLLYYTS

SEQ ID NO: 885 - DNA, 717 bp, Alloiococcus otitidis; identical to SEQ ID NO: 883
  CDS (37)..(714)

SEQ ID NO: 886 - protein, 226 aa, Alloiococcus otitidis
MANHQQTCLNSVPIFNHLDDASLAIISKKVYHKTISKGQSLFKAGDRTDALYVVHRGGLKVYRLLHNGREQVVQILGPGDFIGESHVFMEETVHDDYAQALVDSRICTIHKADLDRIILDHPEISLKIIEIMSKRLDDSYKQTSQVGTEKVGQALAMFLLDLVDNDSESPVVKLPMSRKDLASYLGTRSETISRKFKELEEKGLITQKTRADIQINNLDHLLYYTS

SEQ ID NO: 887 - DNA, 264 bp, Alloiococcus otitidis
  CDS (31)..(261)
atgaagtgtaaaataaaggagagagtaaacatgcaaatcgctactttaaaactggaagacttgacctgcccttcttgtcagcaaaagattgaagccagagtcaaggatgttcaaggtgttgacaaggacagtgtcaaagtactcttcaatgctagcaaggtcaagttaaaactagacgaagaggagacttcccttgaagctgtcgcaaataaaattgagtctttgggttaccaagttttaaaatccagtgctaaagaccaataa

SEQ ID NO: 888 - protein, 77 aa, Alloiococcus otitidis
MQIATLKLEDLTCPSCQQKIEARVKDVQGVDKDSVKVLFNASKVKLKLDEEETSLEAVANKIESLGYQVLKSSAKDQ

SEQ ID NO: 889 - DNA, 264 bp, Alloiococcus otitidis; identical to SEQ ID NO: 887
  CDS (1)..(261)

SEQ ID NO: 890 - protein, 87 aa, Alloiococcus otitidis
MKCKIKERVNMQIATLKLEDLTCPSCQQKIEARVKDVQGVDKDSVKVLFNASKVKLKLDEEETSLEAVANKIESLGYQVLKSSAKDQ

SEQ ID NO: 891 - DNA, 348 bp, Alloiococcus otitidis
  CDS (25)..(345)
gataatggtgaaaggaggaggaagatggacaagctaactgcatttctcaaagataaaaaagatgaattagacacttatactaaggccattaccaaggtacacggtcaggcccatccagaagtctttcaagtacggcaaatttacttgactatgcaagctaagatagaccagggagaggctgaattagaccaagaatttgaacaattagctcaagtgacgggacattacgacttgcccgaggatgcttgtcaagcttttagcaaggtttaccaagacttaaaacaagctgaccaattgagacggaatactaataagtccaacttgaagcagaagatagatgaagtgtaa

SEQ ID NO: 892 - protein, 107 aa, Alloiococcus otitidis
MDKLTAFLKDKKDELDTYTKAITKVHGQAHPEVFQVRQIYLTMQAKIDQGEAELDQEFEQLAQVTGHYDLPEDACQAFSKVYQDLKQADQLRRNTNKSNLKQKIDEV

SEQ ID NO: 893 - DNA, 1926 bp, Alloiococcus otitidis
  CDS (211)..(1923)
tcctatgtaagattaaagtatcaaaagatacagcaatgttactataggaggttaatcatgcaaaaagttaagatctggctactgggccataaaaatcagattatggtcggtcaagttattttacttattgtcggcatcatcggaaagtttgtctggcaatcaaggtccacttatttttggacttttgccctagcaggcatcctggggactttgcccatcctggtccaggccctggaagctttaaaagttaaagtggtttcgattgaggtcttagtctctatagcggccatcggggctatggccattgggaatgtggaagaagcggccgtggtgacctttcttttcctctttggttcctggttagaaggcaagaccctggcctatacccggtcctccatcaagggcctaagtcagatggccccagaaacagccctggtcaaagaagaagacgggtcctttcaagaaagggatgtagacttgctagatgaaggggatgtggtcttggttaaaacagggggcaaattggcagttgacgggactgtagtaaagggggaaggctacttgaatgaagctgctattagcggagaatcaagtcctgtccataaaagccagggcgatcaagctagggctgggactatactggaaaatggcagtcttcaagtacaagctgacaaggttggtgaagacacgacattcggccggattattagcctagttgaggaagcccaggatgccaagtcttcaactgaaaagtttatcgataaatttgccaaatattacactcctggcgtcctcttgcttggcattttggtgggactttttagtcaagatatagaattggccgttaccattttggtgcttggctgtcctggagcattggtcatcggggtcccggtgtcgaatgtggcagggatcggtaatggagctaaacagggtgttctcttaaaggggtctgagtcgattcaaactttcgctggagttgacaccatggtttttgacaaaacagggactttgaccctgggccaagctcaagttaccgatgcccagtattttagtgaagaccttgaccaagccctaagctacttggctagtttggaacaggaatcagaccaccctctagccaaagccatccttgcttatctgggagaccccagcccaagcagtttgaaagaagctgtcgacatccaggtcatcaagggtggcgggattacaggacaagtaggaggaattgcagtggcttgtggcaacctctacctgatggaaaaattagctatcccaatctccgaatcggtccgtcaagctagtttggcctaccaagaaaaaggaaactccatcgttctcacagctgttgacgggcaagtgaaaagtctgatgggcatccgtgaccaaatccggcccggcctccaaggtcacttggcacaattacgccagcatgggatcgataccatggtcctggcctccggtgacaaccaaaaaaccgtcgaccgggtcagtcaaagcctcggtttagaccaagccattggggggatgcttccagaagataaggtgaatttggtcaaggacttgcaagaatcaggacacaagttagcctttattggggacggtatcaacgacagcccctccctagcccaagctgacatcggcattgccatggggtcaggaacggatacagctatggatacctctgacttggttttggtccaatcagattttgaccatttgacccatgccttggggctcagccaagctaccagccggaatatgaagcagaatatcgcgatagctatctcggttgtggtggttttagtggctatgctcttgtggactccctggatgagtatgtctttggggatgctggtccatgaagggagtatcttgcttgttatttttaatgctatccgcttgttagcttacaaaaacaagtag

SEQ ID NO: 894 - protein, 571 aa, Alloiococcus otitidis
MPILVQALEALKVKVVSIEVLVSIAAIGAMAIGNVEEAAVVTFLFLFGSWLEGKTLAYTRSSIKGLSQMAPETALVKEEDGSFQERDVDLLDEGDVVLVKTGGKLAVDGTVVKGEGYLNEAAISGESSPVHKSQGDQARAGTILENGSLQVQADKVGEDTTFGRIISLVEEAQDAKSSTEKFIDKFAKYYTPGVLLLGILVGLFSQDIELAVTILVLGCPGALVIGVPVSNVAGIGNGAKQGVLLKGSESIQTFAGVDTMVFDKTGTLTLGQAQVTDAQYFSEDLDQALSYLASLEQESDHPLAKAILAYLGDPSPSSLKEAVDIQVIKGGGITGQVGGIAVACGNLYLMEKLAIPISESVRQASLAYQEKGNSIVLTAVDGQVKSLMGIRDQIRPGLQGHLAQLRQHGIDTMVLASGDNQKTVDRVSQSLGLDQAIGGMLPEDKVNLVKDLQESGHKLAFIGDGINDSPSLAQADIGIAMGSGTDTAMDTSDLVLVQSDFDHLTHALGLSQATSRNMKQNIAIAISVVVVLVAMLLWTPWMSMSLGMLVHEGSILLVIFNAIRLLAYKNK

SEQ ID NO: 895 - DNA, 1926 bp, Alloiococcus otitidis; identical to SEQ ID NO: 893
  CDS (58)..(1923)

SEQ ID NO: 896 - protein, 622 aa, Alloiococcus otitidis
MQKVKIWLLGHKNQIMVGQVILLIVGIIGKFVWQSRSTYFWTFALAGILGTLPILVQALEALKVKVVSIEVLVSIAAIGAMAIGNVEEAAVVTFLFLFGSWLEGKTLAYTRSSIKGLSQMAPETALVKEEDGSFQERDVDLLDEGDVVLVKTGGKLAVDGTVVKGEGYLNEAAISGESSPVHKSQGDQARAGTILENGSLQVQADKVGEDTTFGRIISLVEEAQDAKSSTEKFIDKFAKYYTPGVLLLGILVGLFSQDIELAVTILVLGCPGALVIGVPVSNVAGIGNGAKQGVLLKGSESIQTFAGVDTMVFDKTGTLTLGQAQVTDAQYFSEDLDQALSYLASLEQESDHPLAKAILAYLGDPSPSSLKEAVDIQVIKGGGITGQVGGIAVACGNLYLMEKLAIPISESVRQASLAYQEKGNSIVLTAVDGQVKSLMGIRDQIRPGLQGHLAQLRQHGIDTMVLASGDNQKTVDRVSQSLGLDQAIGGMLPEDKVNLVKDLQESGHKLAFIGDGINDSPSLAQADIGIAMGSGTDTAMDTSDLVLVQSDFDHLTHALGLSQATSRNMKQNIAIAISVVVVLVAMLLWTPWMSMSLGMLVHEGSILLVIFNAIRLLAYKNK

SEQ ID NO: 897 - DNA, 1845 bp, Alloiococcus otitidis
  CDS (481)..(1842)
gatgcaaggagatgttttattttggttaagaatgtaacgattgcaggcggtggcgttttaggttcgcagattgccttccagaccgctgtttccggctttaatgtaaccgtttatgacattgatgagaatgctgccaaatcagcccgcaaaaaaatcgacaacttcatcccaagctatgttgcagatttgggcaaagacgaagatgaattgaagaaaattgcggacaatataacttacaccactaacttgaaagaagcagcccaggatgctgatttggtgattgaagccattgccgaaaaccttgacattaaaagagacttctattctgacttgaatgaagcagctggcccagacactatttttgcgaccaacagctcctccctcctaccaagtgactttaaagatgctacaggccgtaaagacaagtttcttgccatccactttgccaatgaaatctggaaacggaatattgccgaagtaatgggaacagaagatactgacccagaagtttatcaaaccgttaaacaatttgcccaagacattcatatggtgccgatcgaattaaacttcgaaaaagcaggttatgtcctcaactccctccttatccctatcttagatgctgctaaggaactcttaggtaaaggcattgcaacagttgatgttatcgacaaaacttggatgaaggctgggggcaatggcttaggtccatttggtatcttagacatgataggcttacggacagacctagaaatttctaaaacaaaataccaaagcaaccaacaagactggttgaaaggctacatcgaggaagctgaagaaaaagttgaaaaaggccaaactggtaaacaagacggcaaaggcttctacgactaccctaacccagcttttgagtcagatgatttcttcaacaaccctgaagatattaaagaactcaaacacggctttaaaaaagttctggtagcaggtgccggtgtccttggttcacaaattgcctacttgactgccacaggcgacttccaagtggtcttgtacgatatcgaccaagatgctattgacagtggcaaggaaagactggaagacattgccaaacaatatgcaggagacatggacgtgtcccaagaccaagcagacaagtatttggacaagatcagcctaaccactgatatcaaagaggcggcagacgatgtagacttggtcattgaagcggtctccgaaaaccctgacatcaaacggtcattctacggtgacttgactgaagtcttgccagacaaagcttatattgcaaccaacacttcctccctccttccaagtgacctagaaggaatgactgaccggccagaaaaatttgcttcccttcacttcgctaaccgaatttggaaaaacaacaccggtgaagtcatgcccggtagccaaacttctgatgagttctttgacaaactcttggcctttgcccgggacatccacctattagtcctaccgcttaaaaaggaaaaagatggctatatcctaaactccatcttgatcccacaccttatcgcagccttggacttggttgctagtggtgcggctgaagttgaaacggttgataagacctggatgatcagccagcaagtcgaccgtggacctttcgctaagattgaccgaattggcctagaaacggttaaaaacattatcagcataagaagagacaaggctggcgacagtgaagaaggtcaaaaacttcaaaaaatcctagacctcttaaatgaaaaaatagataaaaacgaaggcggtatgggatctggcaaaggtttctacacctaccctgacccagcctttgaacaagatgccttcttaaaagcctag

SEQ ID NO: 898 - protein, 454 aa, Alloiococcus otitidis
MGTEDTDPEVYQTVKQFAQDIHMVPIELNFEKAGYVLNSLLIPILDAAKELLGKGIATVDVIDKTWMKAGGNGLGPFGILDMIGLRTDLEISKTKYQSNQQDWLKGYIEEAEEKVEKGQTGKQDGKGFYDYPNPAFESDDFFNNPEDIKELKHGFKKVLVAGAGVLGSQIAYLTATGDFQVVLYDIDQDAIDSGKERLEDIAKQYAGDMDVSQDQADKYLDKISLTTDIKEAADDVDLVIEAVSENPDIKRSFYGDLTEVLPDKAYIATNTSSLLPSDLEGMTDRPEKFASLHFANRIWKNNTGEVMPGSQTSDEFFDKLLAFARDIHLLVLPLKKEKDGYILNSILIPHLIAALDLVASGAAEVETVDKTWMISQQVDRGPFAKIDRIGLETVKNIISIRRDKAGDSEEGQKLQKILDLLNEKIDKNEGGMGSGKGFYTYPDPAFEQDAFLKA

SEQ ID NO: 899 - DNA, 1845 bp, Alloiococcus otitidis; identical to SEQ ID NO: 897
  CDS (277)..(1842)

SEQ ID NO: 900 - protein, 522 aa, Alloiococcus otitidis
MIEAIAENLDIKRDFYSDLNEAAGPDTIFATNSSSLLPSDFKDATGRKDKFLAIHFANEIWKRNIAEVMGTEDTDPEVYQTVKQFAQDIHMVPIELNFEKAGYVLNSLLIPILDAAKELLGKGIATVDVIDKTWMKAGGNGLGPFGILDMIGLRTDLEISKTKYQSNQQDWLKGYIEEAEEKVEKGQTGKQDGKGFYDYPNPAFESDDFFNNPEDIKELKHGFKKVLVAGAGVLGSQIAYLTATGDFQVVLYDIDQDAIDSGKERLEDIAKQYAGDMDVSQDQADKYLDKISLTTDIKEAADDVDLVIEAVSENPDIKRSFYGDLTEVLPDKAYIATNTSSLLPSDLEGMTDRPEKFASLHFANRIWKNNTGEVMPGSQTSDEFFDKLLAFARDIHLLVLPLKKEKDGYILNSILIPHLIAALDLVASGAAEVETVDKTWMISQQVDRGPFAKIDRIGLETVKNIISIRRDKAGDSEEGQKLQKILDLLNEKIDKNEGGMGSGKGFYTYPDPAFEQDAFLKA

SEQ ID NO: 901 - DNA, 1845 bp, Alloiococcus otitidis; identical to SEQ ID NO: 897
  CDS (22)..(1842)

SEQ ID NO: 902 - protein, 607 aa, Alloiococcus otitidis
MVKNVTIAGGGVLGSQIAFQTAVSGFNVTVYDIDENAAKSARKKIDNFIPSYVADLGKDEDELKKIADNITYTTNLKEAAQDADLVIEAIAENLDIKRDFYSDLNEAAGPDTIFATNSSSLLPSDFKDATGRKDKFLAIHFANEIWKRNIAEVMGTEDTDPEVYQTVKQFAQDIHMVPIELNFEKAGYVLNSLLIPILDAAKELLGKGIATVDVIDKTWMKAGGNGLGPFGILDMIGLRTDLEISKTKYQSNQQDWLKGYIEEAEEKVEKGQTGKQDGKGFYDYPNPAFESDDFFNNPEDIKELKHGFKKVLVAGAGVLGSQIAYLTATGDFQVVLYDIDQDAIDSGKERLEDIAKQYAGDMDVSQDQADKYLDKISLTTDIKEAADDVDLVIEAVSENPDIKRSFYGDLTEVLPDKAYIATNTSSLLPSDLEGMTDRPEKFASLHFANRIWKNNTGEVMPGSQTSDEFFDKLLAFARDIHLLVLPLKKEKDGYILNSILIPHLIAALDLVASGAAEVETVDKTWMISQQVDRGPFAKIDRIGLETVKNIISIRRDKAGDSEEGQKLQKILDLLNEKIDKNEGGMGSGKGFYTYPDPAFEQDAFLKA

SEQ ID NO: 903 - DNA, 246 bp, Alloiococcus otitidis
  CDS (13)..(243)
aatgaccgtttgatgtcagggttttcggagaccgcttcaatgaccaagtctacatcgtctgccgcctctttgatatcagtggttaggctgatcttgtccaaatacttgtctgcttggtcttgggacacgtccatgtctcctgcatattgtttggcaatgtcttccagtctttccttgccactgtcaatagcatcttggtcgatatcgtacaagaccacttggaagtcgcctgtggcagtcaagtag

SEQ ID NO: 904 - protein, 77 aa, Alloiococcus otitidis
MSGFSETASMTKSTSSAASLISVVRLILSKYLSAWSWDTSMSPAYCLAMSSSLSLPLSIASWSISYKTTWKSPVAVK

SEQ ID NO: 905 - DNA, 246 bp, Alloiococcus otitidis; identical to SEQ ID NO: 903
  CDS (10)..(243)

SEQ ID NO: 906 - protein, 78 aa, Alloiococcus otitidis
MMSGFSETASMTKSTSSAASLISVVRLILSKYLSAWSWDTSMSPAYCLAMSSSLSLPLSIASWSISYKTTWKSPVAVK

SEQ ID NO: 907 - DNA, 1254 bp, Alloiococcus otitidis
  CDS (40)..(1251)
gattggaagaaagacaaggaaagaaagggagttgtttgcatgattgaacacgttactattgcaggtggaggagtcttggggtcccaaattgccatccagactgctgtgtctggctttaaagtcaccatttacgatgtggtcgaagagggcttagatggggctaagaataaaattgaacagtacatcccccgctttgaaaaagaatcaaaaaaagactatagtcatgatgaattaagacaggcagctgacagcattacttacaccactgacatcaaggaggctgggaaagaagctgacttggtgattgaagccattattgagaaattgccagttaaaaaggacttttatcaagacctcaaccaggcttgcccagaccacaccctctttgctaccaacacttcaaccctcctgccctctgattttatggcagaaactggccgaccagaccaatttttagccatccactttgccaatgaaatctggcaccggaatattgctgaaataatgcggacggaaaagacatccgatgaaagctttgaccaggcagtcgactttgccaaggctattaacatggtccctatccccttgtttaaggagcagtcgggctatatcttaaacagcttactgagaccttttttcaatgctggctactacctcctagcgacaagcgatagttcagcccaggacattgaccgggcttggatccaggcaaccggtgcccatgacggaccctttagtattgttgaccacattgggattgaaacaccgaagaatatactccaagaccaggtagaagctgacccagaccaggctgaagactggcttaaggatacggttgccctatttgagtccatgattgaaaaaggtcaagggggtaaattagacggcaagggcttttatgactatgatgggacccctgccttccaagaagagggctttaccgaccaggccagtgatattggctttaaggattttggtcagacctcgcaagacccagacaagaaccgagaccaggccatctacactagacttttgaccagtgtcttagaaggggccttaaaactctatgttaagggagttagtgaaaaagataccatagaccaggtctggcaaatcacccgggatttagaatggggacctttctctgtgatccaagaaattgggccggaccaggtctaccaagtttttaaagatcggtacggcggtcgaccttctgacttggaaaaccaggttttagaagaactaaaaaattaa

SEQ ID NO: 908 - protein, 404 aa, Alloiococcus otitidis
MIEHVTIAGGGVLGSQIAIQTAVSGFKVTIYDVVEEGLDGAKNKIEQYIPRFEKESKKDYSHDELRQAADSITYTTDIKEAGKEADLVIEAIIEKLPVKKDFYQDLNQACPDHTLFATNTSTLLPSDFMAETGRPDQFLAIHFANEIWHRNIAEIMRTEKTSDESFDQAVDFAKAINMVPIPLFKEQSGYILNSLLRPFFNAGYYLLATSDSSAQDIDRAWIQATGAHDGPFSIVDHIGIETPKNILQDQVEADPDQAEDWLKDTVALFESMIEKGQGGKLDGKGFYDYDGTPAFQEEGFTDQASDIGFKDFGQTSQDPDKNRDQAIYTRLLTSVLEGALKLYVKGVSEKDTIDQVWQITRDLEWGPFSVIQEIGPDQVYQVFKDRYGGRPSDLENQVLEELKN

SEQ ID NO: 909 - DNA, 258 bp, Alloiococcus otitidis
  CDS (34)..(255)
cccgactgctccttaaacaaggggatagggaccatgttaatagccttggcaaagtcgactgcctggtcaaagctttcatcggatgtcttttccgtccgcattatttcagcaatattccggtgccagatttcattggcaaagtggatggctaaaaattggtctggtcggccagtttctgccataaaatcagagggcaggagggttgaagtgttggtagcaaagagggtgtggtctgggcaagcctggttgaggtcttga

SEQ ID NO: 910 - protein, 74 aa, Alloiococcus otitidis
MLIALAKSTAWSKLSSDVFSVRIISAIFRCQISLAKWMAKNWSGRPVSAIKSEGRRVEVLVAKRVWSGQAWLRS

SEQ ID NO: 911 - DNA, 645 bp, Alloiococcus otitidis
  CDS (166)..(642)
agcaaggtcttagcaacttgtcatatcgttttgatgactctgaagcttaaaggcctggtgaagtgcctggtatatctatatatggtcttgtgtgctataataggactgttatggtcctttaaggtcttacaaagactgattggtctaaagagaggagtttgtaagatggacaataaatttccgatgactaaaaagggtctcaaaagatcgcaaaagcgactagaggacttaaaaaaccagtccagcaaaatgcttgaccggatgaaagatgcgagggggaatgctgatatccccatcaattcagacttcaccttggccaaagatgaatacaagtatgttgaaaagcagatcaaggaaatggagaatatgctagacaatgtggtcttgattgaagaaggagagggtgaaagtccggtggtagccgtgggtaagacggttacctttagagaattaccagacggggaccaagagacttacaccattggcggtaaggcagaagctgaccccttggctggtattatttcctatgagtctcccatggcagtgtccttgttaggcaagcaggtcggtgaccaggtggaagtggaccttccccaagaaaaaatcaaggtggaaattgtcgacgttcacttggctgaggattaa

SEQ ID NO: 912 - protein, 159 aa, Alloiococcus otitidis
MDNKFPMTKKGLKRSQKRLEDLKNQSSKMLDRMKDARGNADIPINSDFTLAKDEYKYVEKQIKEMENMLDNVVLIEEGEGESPVVAVGKTVTFRELPDGDQETYTIGGKAEADPLAGIISYESPMAVSLLGKQVGDQVEVDLPQEKIKVEIVDVHLAED

SEQ ID NO: 913 - DNA, 645 bp, Alloiococcus otitidis; identical to SEQ ID NO: 911
  CDS (34)..(642)

SEQ ID NO: 914 - protein, 203 aa, Alloiococcus otitidis
MTLKLKGLVKCLVYLYMVLCAIIGLLWSFKVLQRLIGLKRGVCKMDNKFPMTKKGLKRSQKRLEDLKNQSSKMLDRMKDARGNADIPINSDFTLAKDEYKYVEKQIKEMENMLDNVVLIEEGEGESPVVAVGKTVTFRELPDGDQETYTIGGKAEADPLAGIISYESPMAVSLLGKQVGDQVEVDLPQEKIKVEIVDVHLAED

SEQ ID NO: 915 - DNA, 645 bp, Alloiococcus otitidis; identical to SEQ ID NO: 911
  CDS (31)..(642)

SEQ ID NO: 916 - protein, 204 aa, Alloiococcus otitidis
MMTLKLKGLVKCLVYLYMVLCAIIGLLWSFKVLQRLIGLKRGVCKMDNKFPMTKKGLKRSQKRLEDLKNQSSKMLDRMKDARGNADIPINSDFTLAKDEYKYVEKQIKEMENMLDNVVLIEEGEGESPVVAVGKTVTFRELPDGDQETYTIGGKAEADPLAGIISYESPMAVSLLGKQVGDQVEVDLPQEKIKVEIVDVHLAED

SEQ ID NO: 917 - DNA, 312 bp, Alloiococcus otitidis
  CDS (13)..(309)
gaggttttgcccatgactgataatccaaaagatatttccaaagaagaaatccaagacaaattagctgacttagacaattgggaattagtggagggcaagaaaattagcaagtcctattcctttgatgacttcaaacaagccctcgacttcaccaataaagttggccaagtagcagaggatatcaaccaccaccccaatatctttttaacctggggcaaggtcaagataaccatccacactttccaaaccaatagcttaaccgcaaatgacttcaaattagctcagaaaattgaccaaatcgatagccagtaa

SEQ ID NO: 918 - protein, 99 aa, Alloiococcus otitidis
MTDNPKDISKEEIQDKLADLDNWELVEGKKISKSYSFDDFKQALDFTNKVGQVAEDINHHPNIFLTWGKVKITIHTFQTNSLTANDFKLAQKIDQIDSQ

SEQ ID NO: 919 - DNA, 312 bp, Alloiococcus otitidis; identical to SEQ ID NO: 917
  CDS (7)..(309)

SEQ ID NO: 920 - protein, 101 aa, Alloiococcus otitidis
MPMTDNPKDISKEEIQDKLADLDNWELVEGKKISKSYSFDDFKQALDFTNKVGQVAEDINHHPNIFLTWGKVKITIHTFQTNSLTANDFKLAQKIDQIDSQ

SEQ ID NO: 921 - DNA, 570 bp, Alloiococcus otitidis
  CDS (91)..(567)
attattgtcaatataaggttgatattttgtaaagggaacattttatacacaattgtggataagtcagtggataagcgaagggagacatggatgcaggttaaagtcattgctgtgggtaagttgaaggaaaagtatttaaagaagggaattcaggagtatgctaagcgcttaggagcctatactaagtttgagattgtggaggtagcagatgaagaggcccccgaaaacttaagccaggcagaaatgaaccaggtcaaggctcttgaaggcgagcggattttacaaaagctttccagccaagaagttgtctttgccctggacctaaacggcaagcaaatgacttctgaagactttgcccagaccttggaggacaagatgacttacggccagagtaagttgacctttattattggagggtccttgggcttaagccaagaggttcttgaccgggcccagcaccaactttcctttggcccaatgaccttcccccaccaagtcatgcggttgattgtagccgagcaagtctaccgtgcctttcgaattatccgcaatgaaccctaccataaataa

SEQ ID NO: 922 - protein, 159 aa, Alloiococcus otitidis
MQVKVIAVGKLKEKYLKKGIQEYAKRLGAYTKFEIVEVADEEAPENLSQAEMNQVKALEGERILQKLSSQEVVFALDLNGKQMTSEDFAQTLEDKMTYGQSKLTFIIGGSLGLSQEVLDRAQHQLSFGPMTFPHQVMRLIVAEQVYRAFRIIRNEPYHK

SEQ ID NO: 923 - DNA, 570 bp, Alloiococcus otitidis; identical to SEQ ID NO: 921
  CDS (55)..(567)

SEQ ID NO: 924 - protein, 171 aa, Alloiococcus otitidis
MDKSVDKRRETWMQVKVIAVGKLKEKYLKKGIQEYAKRLGAYTKFEIVEVADEEAPENLSQAEMNQVKALEGERILQKLSSQEVVFALDLNGKQMTSEDFAQTLEDKMTYGQSKLTFIIGGSLGLSQEVLDRAQHQLSFGPMTFPHQVMRLIVAEQVYRAFRIIRNEPYHK

SEQ ID NO: 925 - DNA, 570 bp, Alloiococcus otitidis; identical to SEQ ID NO: 921
  CDS (19)..(567)

SEQ ID NO: 926 - protein, 183 aa, Alloiococcus otitidis
MIFCKGNILYTIVDKSVDKRRETWMQVKVIAVGKLKEKYLKKGIQEYAKRLGAYTKFEIVEVADEEAPENLSQAEMNQVKALEGERILQKLSSQEVVFALDLNGKQMTSEDFAQTLEDKMTYGQSKLTFIIGGSLGLSQEVLDRAQHQLSFGPMTFPHQVMRLIVAEQVYRAFRIIRNEPYHK

SEQ ID NO: 927 - DNA, 582 bp, Alloiococcus otitidis
  CDS (139)..(579)
tttctggggttaaccggacagttcctgtcgatattgacaatgacgggaccatggactgggaaatgtctgctatccaaacagatgcagccatcaaccctggcaactcaggtggtccttctggttaacgccagtggccaagtgatcgggatcaactctatgaagatttcctccaatgcagtggaaggcatgggcttttccatcccaagtaacgatgccgtatccattattgaagagttagaagccaatggtgaaattgttagaccaatcctaggtgtctccctcctagatattaacctcttgtctgaagagcaaatagctgaaatcaccggtacagaccaggaagttgaatccggtacagtcatcatggatgtctctccgggcacttctgccgacaatgctgacctagaagtcggagatattgtggttggctttaacggccaagaggttgaaaatagcatgcaactccgccaggctgtctacgaaacccgtgttggtgatgaagtagaaattgacattatccgtcaaggggaaagtatgaccctgccaattaccatggaaaccgaagatattctctcaatgtaa

SEQ ID NO: 928 - protein, 147 aa, Alloiococcus otitidis
MIGINSMKISSNAVEGMGFSIPSNDAVSIIEELEANGEIVRPILGVSLLDINLLSEEQIAEITGTDQEVESGTVIMDVSPGTSADNADLEVGDIVVGFNGQEVENSMQLRQAVYETRVGDEVEIDIIRQGESMTLPITMETEDILSM

SEQ ID NO: 929 - DNA, 582 bp, Alloiococcus otitidis; identical to SEQ ID NO: 927
  CDS (82)..(579)

SEQ ID NO: 930 - protein, 166 aa, Alloiococcus otitidis
MQPSTLATQVVLLVNASGQVIGINSMKISSNAVEGMGFSIPSNDAVSIIEELEANGEIVRPILGVSLLDINLLSEEQIAEITGTDQEVESGTVIMDVSPGTSADNADLEVGDIVVGFNGQEVENSMQLRQAVYETRVGDEVEIDIIRQGESMTLPITMETEDILSM

SEQ ID NO: 931 - DNA, 582 bp, Alloiococcus otitidis; identical to SEQ ID NO: 927
  CDS (40)..(579)

SEQ ID NO: 932 - protein, 180 aa, Alloiococcus otitidis
MTGPWTGKCLLSKQMQPSTLATQVVLLVNASGQVIGINSMKISSNAVEGMGFSIPSNDAVSIIEELEANGEIVRPILGVSLLDINLLSEEQIAEITGTDQEVESGTVIMDVSPGTSADNADLEVGDIVVGFNGQEVENSMQLRQAVYETRVGDEVEIDIIRQGESMTLPITMETEDILSM

SEQ ID NO: 933 - DNA, 582 bp, Alloiococcus otitidis; identical to SEQ ID NO: 927
  CDS (34)..(579)

SEQ ID NO: 934 - protein, 182 aa, Alloiococcus otitidis
MTMTGPWTGKCLLSKQMQPSTLATQVVLLVNASGQVIGINSMKISSNAVEGMGFSIPSNDAVSIIEELEANGEIVRPILGVSLLDINLLSEEQIAEITGTDQEVESGTVIMDVSPGTSADNADLEVGDIVVGFNGQEVENSMQLRQAVYETRVGDEVEIDIIRQGESMTLPITMETEDILSM

SEQ ID NO: 935 - DNA, 738 bp, Alloiococcus otitidis
  CDS (1)..(735)
atgaaaaagacacttaaatccttacttatcgcttctgccaccactttaaccttggcagcttgccaagaccctgaaagcggtcaagcacccaaccaggaagaagaaaccaccgaaaaccaggaaggccaagaccagggacaaaaccaagaaggccagcaagtggctgtccaaactgatgtgacccaagctgttgaaaatgtggaaaatgctgttgtgaccattatcaacaaacaacggatccaaaaccctttcagggagtttggcttagaattgccggaagaagaggaggcagaaggtgaccttggcgaagccggcaccggtagtggggctatttaccgaattgacggcgaccaagcctatattttcaccaacaaccacgtggtggaagggtccgatgccattgacgtcctcttctctaacggggagacagtcgaagctgaaatcgttggagctgatgaatacacagacttggctgtattggccattgatgcccagtatgccgatacagaagtagaatttggcgattcagagggcattaccctgggcgaaccagctgtggccattgggtctcctttaggcagtgactttgccttgtccgttacctctggggtagtttctggggttaaccggacagttcctgtcgatattgacaatgacgggaccatggactgggaaatgtctgctatccaaacagatgcagccatcaaccctggcaactcaggtggtccttctggttaa

SEQ ID NO: 936 - protein, 245 aa, Alloiococcus otitidis
MKKTLKSLLIASATTLTLAACQDPESGQAPNQEEETTENQEGQDQGQNQEGQQVAVQTDVTQAVENVENAVVTIINKQRIQNPFREFGLELPEEEEAEGDLGEAGTGSGAIYRIDGDQAYIFTNNHVVEGSDAIDVLFSNGETVEAEIVGADEYTDLAVLAIDAQYADTEVEFGDSEGITLGEPAVAIGSPLGSDFALSVTSGVVSGVNRTVPVDIDNDGTMDWEMSAIQTDAAINPGNSGGPSG

SEQ ID NO: 937 - DNA, 252 bp, Alloiococcus otitidis
  CDS (16)..(249)
atagccccactaccggtgccggcttcgccaaggtcaccttctgcctcctcttcttccggcaattctaagccaaactccctgaaagggttttggatccgttgtttgttgataatggtcacaacagcattttccacattttcaacagcttgggtcacatcagtttggacagccacttgctggccttcttggttttgtccctggtcttggccttcctggttttcggtggtttcttcttcctggttgggtgcttga

SEQ ID NO: 938 - protein, 78 aa, Alloiococcus otitidis
MPASPRSPSASSSSGNSKPNSLKGFWIRCLLIMVTTAFSTFSTAWVTSVWTATCWPSWFCPWSWPSWFSVVSSSWLGA

SEQ ID NO: 939 - DNA, 831 bp, Alloiococcus otitidis
  CDS (19)..(828)
agtgttaggagaattgtcatggataaggaaacaggagatgacatgcgggtaagcgtattagccagtggttcaactggtaatatgacttacattgaaacagaccaggtaaaattattagttgattgtggtttttcgggcaaaaaagcccaggaactcttggctaagattaaccgcaaacctgatgatttggatgggatcttggtcacccatgagcacaatgaccacattaagggtgtcggagtcttatctcgcaagtacgacttggatatctatgccaatgaagagacttggcaggccatgggtaagaagattggcaaggttgaccctgcccaccagcaccatttcttcaaagaccaaacgaaaatatttcaagacttggatgtgtccagttttggggtgtcacatgatgcagccaacccccaattttacagcttccaaaaggccaacaagcgttttgtcatcctgaccgatacaggttatgtcagtgaccggatgcgggcttacttgaagaatgcggatgcctacctttttgaaagcaaccatgacctatctctcttgcggatggggcggtatccttggcccctcaagcaacggattttaggcgacaagggccacctgtccaatgaagacagtgccttggccctgtcagaaatagtgggtgacaagacccggaatgtctttttgggacacttgagcttagaaaacaacatgaaaaatattgcccatgccacagccgaagagatcttagaccaaaaagacacaggtgtgaactaccagtatgaactgcacgatactgacccttatgaacccaatcccttgttcattgtctag

SEQ ID NO: 940 - protein, 270 aa, Alloiococcus otitidis
MDKETGDDMRVSVLASGSTGNMTYIETDQVKLLVDCGFSGKKAQELLAKINRKPDDLDGILVTHEHNDHIKGVGVLSRKYDLDIYANEETWQAMGKKIGKVDPAHQHHFFKDQTKIFQDLDVSSFGVSHDAANPQFYSFQKANKRFVILTDTGYVSDRMRAYLKNADAYLFESNHDLSLLRMGRYPWPLKQRILGDKGHLSNEDSALALSEIVGDKTRNVFLGHLSLENNMKNIAHATAEEILDQKDTGVNYQYELHDTDPYEPNPLFIV

SEQ ID NO: 941 - DNA, 348 bp, Alloiococcus otitidis
  CDS (7)..(345)
ttgattgtggtttttcgggcaaaaaagcccaggaactcttggctaagattaaccgcaaacctgatgatttggatgggatcttggtcacccatgagcacaatgaccacattaagggtgtcggagtcttatctcgcaagtacgacttggatatctatgccaatgaagagacttggcaggccatgggtaagaagattggcaaggttgaccctgcccaccagcaccatttcttcaaagaccaaacgaaaatatttcaagacttggatgtgtccagttttggggtgtcacatgatgcagccaacccccaattttacagcttccaaaaggccaacaagcgttttgtcatcctga

SEQ ID NO: 942 - protein, 113 aa, Alloiococcus otitidis
MVFRAKKPRNSWLRLTANLMIWMGSWSPMSTMTTLRVSESYLASTTWISMPMKRLGRPWVRRLARLTLPTSTISSKTKRKYFKTWMCPVLGCHMMQPTPNFTASKRPTSVLSS

SEQ ID NO: 943 - DNA, 348 bp, Alloiococcus otitidis; identical to SEQ ID NO: 941
  CDS (1)..(345)

SEQ ID NO: 944 - protein, 115 aa, Alloiococcus otitidis
MIVVFRAKKPRNSWLRLTANLMIWMGSWSPMSTMTTLRVSESYLASTTWISMPMKRLGRPWVRRLARLTLPTSTISSKTKRKYFKTWMCPVLGCHMMQPTPNFTASKRPTSVLSS

SEQ ID NO: 945 - DNA, 1050 bp, Alloiococcus otitidis
  CDS (70)..(1047)
gtggtttgtcaaaagtcaagacaaatggacaagcttggacgactttatggaccaaggaggcgatgtttaatggactttaaaaaaattgagaccatctttatcattgcctttgccattttaaatttgtatttatttaacagctataccaaccggtccagtctccactatgccaccagttttgacgacccggtcaatattgttgaacggatgaaccagtctgatatcaacctacccaactttgaagaagttgagcatgaggttaaggctgttcaagctgacgaccatgatttattggaagaagaagttattgacctagaagaccaggcaggttctgtctctagtgatgggtcctactatacttctttcctgtccaacccccttgaattagacggcaatcctaatgacggatttacagacagtgattatatggctattgacgagtttgtcaaatcagactatgttttatttggtcaggagtacagttatggcgagtttgatcctgaaacgagtcgctttatttactaccaaagtgttaatggtctaccggtcatggatgggacttcgcaaatatccttgtttatcgattccaacaacgatattttctcctaccaccagctctatgctgggccgatgacagaccaaggtgaggaggaagagaccattaccgacttggaagctgttcaaatcctctttcaaaacaatgacattccaccaggttcgactgttgacctgcctatcttgtcttaccaccggaccctcgacttagaagatttgagtatttataccccagtttgggtggtccgggtctcaactgcttccggtaagcaaagcttccgggttcacgctttaaatgggactattatccaaaacccagctgtctttccccttgaagaggaagaagaggaccaagagtcaggtgatgatgagggcgaccaggattttgaagaagctgacggtgaggatgatggccagaaccaagatccggctgaagacgacgatgaaggccaaaatgaccaggaccaaaatgcagaagaacagatgaatgattaa

SEQ ID NO: 946 - protein, 326 aa, Alloiococcus otitidis
MDFKKIETIFIIAFAILNLYLFNSYTNRSSLHYATSFDDPVNIVERMNQSDINLPNFEEVEHEVKAVQADDHDLLEEEVIDLEDQAGSVSSDGSYYTSFLSNPLELDGNPNDGFTDSDYMAIDEFVKSDYVLFGQEYSYGEFDPETSRFIYYQSVNGLPVMDGTSQISLFIDSNNDIFSYHQLYAGPMTDQGEEEETITDLEAVQILFQNNDIPPGSTVDLPILSYHRTLDLEDLSIYTPVWVVRVSTASGKQSFRVHALNGTIIQNPAVFPLEEEEEDQESGDDEGDQDFEEADGEDDGQNQDPAEDDDEGQNDQDQNAEEQMND

SEQ ID NO: 947 - DNA, 1050 bp, Alloiococcus otitidis; identical to SEQ ID NO: 945
  CDS (25)..(1047)

SEQ ID NO: 948 - protein, 341 aa, Alloiococcus otitidis
MDKLGRLYGPRRRCLMDFKKIETIFIIAFAILNLYLFNSYTNRSSLHYATSFDDPVNIVERMNQSDINLPNFEEVEHEVKAVQADDHDLLEEEVIDLEDQAGSVSSDGSYYTSFLSNPLELDGNPNDGFTDSDYMAIDEFVKSDYVLFGQEYSYGEFDPETSRFIYYQSVNGLPVMDGTSQISLFIDSNNDIFSYHQLYAGPMTDQGEEEETITDLEAVQILFQNNDIPPGSTVDLPILSYHRTLDLEDLSIYTPVWVVRVSTASGKQSFRVHALNGTIIQNPAVFPLEEEEEDQESGDDEGDQDFEEADGEDDGQNQDPAEDDDEGQNDQDQNAEEQMND

SEQ ID NO: 949 - DNA, 1050 bp, Alloiococcus otitidis; identical to SEQ ID NO: 945
  CDS (1)..(1047)

SEQ ID NO: 950 - protein, 349 aa, Alloiococcus otitidis
MVCQKSRQMDKLGRLYGPRRRCLMDFKKIETIFIIAFAILNLYLFNSYTNRSSLHYATSFDDPVNIVERMNQSDINLPNFEEVEHEVKAVQADDHDLLEEEVIDLEDQAGSVSSDGSYYTSFLSNPLELDGNPNDGFTDSDYMAIDEFVKSDYVLFGQEYSYGEFDPETSRFIYYQSVNGLPVMDGTSQISLFIDSNNDIFSYHQLYAGPMTDQGEEEETITDLEAVQILFQNNDIPPGSTVDLPILSYHRTLDLEDLSIYTPVWVVRVSTASGKQSFRVHALNGTIIQNPAVFPLEEEEEDQESGDDEGDQDFEEADGEDDGQNQDPAEDDDEGQNDQDQNAEEQMND

SEQ ID NO: 951 - DNA, 1308 bp, Alloiococcus otitidis
  CDS (7)..(1305)
actggcatgacctactcccgcatcaaacacgtcattttagccttgttgatcttactaagtatctatttgagttacaagatatgggtcccaatcagtgaccaggatgatggctatctttcccaaggggacaaccctagcccatccagcctagttgaacgagataccaatgaagtctactcccccaaccaatttatctaccaccaagaagatgaatcttggtcctatgacccgtctgtctttaacgatagctttagcaggaccattgaaagcatgagcttggacacattggatgaaggcgaggacttgtccctagatgactatcaagaccaggtagctgctagccagcagtccttggagttggtctttccggccccccttccttttggcttgtttgggacaagttttgaaaatatcccgactgacctggcagaccaagaatttgacagggtcttaatcgacttagaatccccccaggagatcgatttttataacagccaggcagaaagcttataccaggttgacctggtgagtttagacctaagtgaagccgaggacctcttggcagatgagggcaaccgcctctttagtgtttaccccgaaaaaattcaaaacaagtatgcctacctcccaaatacagaagtgacattgcaaaaccactaccatgttgtggaacgcctgccgaacagcctgtactccacccactttttccctgatccatccggtgttgagctccgggtgtctaataatatttcccgttacattgacttgcagaccgagttgcggattaacaatgcgagtgatgttttgacctacttccgccagataagtgatctgaatgaaatgtcaacaagtgagcgctttatagctagccgtagcgaactcaataccttggagaattggcccaatgaaattaaatatggtggggtcaacaaccaattcaagcaggtcgtctaccgaagatattatgatggctggccgatttttagtgaaggggacctgaatactctgacagaagtcggtgttttagaagaaggtttgtcccaactccgcttgccccttttgattatccaaacccccttgtctatcgatgaggatgcagaagttaatctagcttcaggagaagaagtcattgctgacttgaccagtgtggttgatttagacctggtccaagatttgaccattggctacacctgggatgactcgagagaagaagaacaagttgttaggttgacacctgagtggtttgtcaaaagtcaagacaaatggacaagcttggacgactttatggaccaaggaggcgatgtttaa

SEQ ID NO: 952 - protein, 433 aa, Alloiococcus otitidis
MTYSRIKHVILALLILLSIYLSYKIWVPISDQDDGYLSQGDNPSPSSLVERDTNEVYSPNQFIYHQEDESWSYDPSVFNDSFSRTIESMSLDTLDEGEDLSLDDYQDQVAASQQSLELVFPAPLPFGLFGTSFENIPTDLADQEFDRVLIDLESPQEIDFYNSQAESLYQVDLVSLDLSEAEDLLADEGNRLFSVYPEKIQNKYAYLPNTEVTLQNHYHVVERLPNSLYSTHFFPDPSGVELRVSNNISRYIDLQTELRINNASDVLTYFRQISDLNEMSTSERFIASRSELNTLENWPNEIKYGGVNNQFKQVVYRRYYDGWPIFSEGDLNTLTEVGVLEEGLSQLRLPLLIIQTPLSIDEDAEVNLASGEEVIADLTSVVDLDLVQDLTIGYTWDDSREEEQVVRLTPEWFVKSQDKWTSLDDFMDQGGDV

SEQ ID NO: 953 - DNA, 1908 bp, Alloiococcus otitidis
  CDS (97)..(1905)
agagtaagggagttaagcgttttggctaaaaagggcaagcagaaaagaataccttttatcagctccatttcgacaaaaattatctttgtcattgtcatgatccttctatttgccctgcaatttatcggggcaaattttattacgcagattgaacagaacctggtcagtaacttccaccaggagcgacgaaaccaggtttcctatatccaaacagtggtccgcccctacctggagctactccatgcccctgaacaagatgaggatattgacccccaagcagagatccaaaacctgattaatgactattcaggccctttggtaaccgaactgtctattattgacaccgattcgtccatcctggccttgagtgatgatacccggcaggggctggtcggccagctgactgacgatgatgcagcacgaaatgcggttatccaagggcagaattctacccagcaggtcattgatccggctacaggcaaccgccgctacaagattattgagccagtctattccagcgaggataatgccacggttatcggggcagtcagcttggaaagtaatattgagtcagtctacgatgaagtggatgagatcacctttgcctttatccaggcctccgtcttagccatcattgtgtctctagtcttggctaatattatctctcgggccatcaccaagccgattattgacatgcaagagttaaccaagaaaattgcggacggtgactattccggtcaattgactgtccacggtaacgacgagttgggtgagttgtccaatttgatcaaccacctgtcagaagaagtcgctacagcccaggaatccatagaatctgaacgtcgaagattggacatggttttgacacatatgacagatggagttattgcaacagaccggactggccgggtgaccactgtcaaccccatgggtctagaatttttagaccaggcagaagaagatgttaaaaaccaagacatccggaccttgattgacttgaacaaggagacccagctggaagatttggtaaaccagtccgatgatatttatattgaccccgaccataccgtggaaggcttgattctccgggccaccttctcagccatccagcgtcagtcgggttatgtggtcggttatgtttgtgtcctccacgatgtgactgagcaaatgcggattgattcagaacggaagcaatttgtctccaatgtctcccatgaattaagaacacccttgacctccatgcgaagttaccttgaagccttgtcggatggagcttggaaggacaaggacctggctccccgctttttacaagtcaccactgacgaaacagaccggatgatccggatggtggaagacctcctccaattgtctcggattgatactgggcggagccagttgaacttagagattattgatatcaaagaactgtttgaccatgttttaggccggtttgaaatgcttttgaattcaaatgattacagtggccagtcttattcgattgaacgcgacatcatggacgaagtggtctttgtcgaaattgacaccgaccgatttatccaggtcctagacaatattttaaacaatgctatcaagtactcccctgatgggtctaagattacaggacgggccagacataatacttataccgaccgggtggaattgtccatctctgaccaagggatggggattcctcaggccgacttaaacaaggtcttttcccgattttaccgggtagacaaggcccggtcccgagccatggggggaagtggcctaggtttggctatttctaaagaggttgtcgaacaacacggtggtaatatctgggtaagaagtgaagaaggggttggcaccaccttctatatttctcttccgattgtacctttcgaaagtgaggatgaactggcatga

SEQ ID NO: 954 - protein, 603 aa, Alloiococcus otitidis
MILLFALQFIGANFITQIEQNLVSNFHQERRNQVSYIQTVVRPYLELLHAPEQDEDIDPQAEIQNLINDYSGPLVTELSIIDTDSSILALSDDTRQGLVGQLTDDDAARNAVIQGQNSTQQVIDPATGNRRYKIIEPVYSSEDNATVIGAVSLESNIESVYDEVDEITFAFIQASVLAIIVSLVLANIISRAITKPIIDMQELTKKIADGDYSGQLTVHGNDELGELSNLINHLSEEVATAQESIESERRRLDMVLTHMTDGVIATDRTGRVTTVNPMGLEFLDQAEEDVKNQDIRTLIDLNKETQLEDLVNQSDDIYIDPDHTVEGLILRATFSAIQRQSGYVVGYVCVLHDVTEQMRIDSERKQFVSNVSHELRTPLTSMRSYLEALSDGAWKDKDLAPRFLQVTTDETDRMIRMVEDLLQLSRIDTGRSQLNLEIIDIKELFDHVLGRFEMLLNSNDYSGQSYSIERDIMDEVVFVEIDTDRFIQVLDNILNNAIKYSPDGSKITGRARHNTYTDRVELSISDQGMGIPQADLNKVFSRFYRVDKARSRAMGGSGLGLAISKEVVEQHGGNIWVRSEEGVGTTFYISLPIVPFESEDELA

SEQ ID NO: 955 - DNA, 1908 bp, Alloiococcus otitidis; identical to SEQ ID NO: 953
  CDS (22)..(1905)

SEQ ID NO: 956 - protein, 628 aa, Alloiococcus otitidis
MAKKGKQKRIPFISSISTKIIFVIVMILLFALQFIGANFITQIEQNLVSNFHQERRNQVSYIQTVVRPYLELLHAPEQDEDIDPQAEIQNLINDYSGPLVTELSIIDTDSSILALSDDTRQGLVGQLTDDDAARNAVIQGQNSTQQVIDPATGNRRYKIIEPVYSSEDNATVIGAVSLESNIESVYDEVDEITFAFIQASVLAIIVSLVLANIISRAITKPIIDMQELTKKIADGDYSGQLTVHGNDELGELSNLINHLSEEVATAQESIESERRRLDMVLTHMTDGVIATDRTGRVTTVNPMGLEFLDQAEEDVKNQDIRTLIDLNKETQLEDLVNQSDDIYIDPDHTVEGLILRATFSAIQRQSGYVVGYVCVLHDVTEQMRIDSERKQFVSNVSHELRTPLTSMRSYLEALSDGAWKDKDLAPRFLQVTTDETDRMIRMVEDLLQLSRIDTGRSQLNLEIIDIKELFDHVLGRFEMLLNSNDYSGQSYSIERDIMDEVVFVEIDTDRFIQVLDNILNNAIKYSPDGSKITGRARHNTYTDRVELSISDQGMGIPQADLNKVFSRFYRVDKARSRAMGGSGLGLAISKEVVEQHGGNIWVRSEEGVGTTFYISLPIVPFESEDELA

SEQ ID NO: 957 - DNA, 309 bp, Alloiococcus otitidis
  CDS (43)..(306)
atatcatcggactggtttaccaaatcttccagctgggtctccttgttcaagtcaatcaaggtccggatgtcttggtttttaacatcttcttctgcctggtctaaaaattctagacccatggggttgacagtggtcacccggccagtccggtctgttgcaataactccatctgtcatatgtgtcaaaaccatgtccaatcttcgacgttcagattctatggattcctgggctgtagcgacttcttctgacaggtggttgatcaaattggacaactcacccaactcgtcgttaccgtggacagtcaattga

SEQ ID NO: 958 - protein, 88 aa, Alloiococcus otitidis
MFKSIKVRMSWFLTSSSAWSKNSRPMGLTVVTRPVRSVAITPSVICVKTMSNLRRSDSMDSWAVATSSDRWLIKLDNSPNSSLPWTVN

SEQ ID NO: 959 - DNA, 720 bp, Alloiococcus otitidis
  CDS (28)..(717)
aggaggataataatgaagaaaatactagtggttgatgacgaaaaacctatttccgatattgtcaagtttaaccttgagaaggaaggctatgaagtcgtggttgcctttgacggcgaagaggccattgaggttgctaaccaagaaaaccctgacttgatcgtattggacttgatgctacccaaaaaggatggtttggaggttacccgcgaaatccgcaaaactcatgacatgccaattatcatggtcactgccaaagaccaagaaattgacaaggtcttaggtttagagatgggagccgatgactatgtaaccaagcctttctctaaccgggagttggctgcccgtgtcaaagctagtctaagacgtcaatcggttgtccaatcggctgaggagagtcaagaagaggaaaattccgacattacggtaggggatttaaccatccaccccgatgcttatattatttccaaaaaggatgagaccatcgaattgactcaccgggaatttgaactcttacactacttggccaaacacctcggtcaggtcatgacccgggaaaatttacttgagattgtttggggttatgactactttggtgatgtccgaactgtagatgtgactgttagacggctgcgggaaaaaattgaagacaatcccagccatcctaattatttggtaaccagaagaggagtaggctactacttgcgaaatcctgaagagtaa

SEQ ID NO: 960 - protein, 230 aa, Alloiococcus otitidis
MVDDEKPISDIVKFNLEKEGYEVVVAFDGEEAIEVANQENPDLIVLDLMLPKKDGLEVTREIRKTHDMPIIMVTAKDQEIDKVLGLEMGADDYVTKPFSNRELAARVKASLRRQSVVQSAEESQEEENSDITVGDLTIHPDAYIISKKDETIELTHREFELLHYLAKHLGQVMTRENLLEIVWGYDYFGDVRTVDVTVRRLREKIEDNPSHPNYLVTRRGVGYYLRNPEE

SEQ ID NO: 961 - DNA, 720 bp, Alloiococcus otitidis; identical to SEQ ID NO: 959
  CDS (13)..(717)

SEQ ID NO: 962 - protein, 235 aa, Alloiococcus otitidis
MKKILVVDDEKPISDIVKFNLEKEGYEVVVAFDGEEAIEVANQENPDLIVLDLMLPKKDGLEVTREIRKTHDMPIIMVTAKDQEIDKVLGLEMGADDYVTKPFSNRELAARVKASLRRQSVVQSAEESQEEENSDITVGDLTIHPDAYIISKKDETIELTHREFELLHYLAKHLGQVMTRENLLEIVWGYDYFGDVRTVDVTVRRLREKIEDNPSHPNYLVTRRGVGYYLRNPEE

SEQ ID NO: 963 - DNA, 525 bp, Alloiococcus otitidis
  CDS (34)..(522)
ggaatacaatacatattgagtggagagctgataatgggcgacaaaaaagaattaatactgaaggcagtgacagatggtcaagtgattccggtaaccgaggttaaggatgtcgtattttctgacaagatgataggggatggttacggcgtcgtcccttcaagcggggccatctattcacctgtgtctggtcagattagccagttagcaggcagtcaccacgcctactatattaacctggctgatgacaacaaaatcctgattcatgtgggaccggatgccatcttactcaatggccagggtctgaccagtcaagttaagcagggagacgaggtccaagcaggggacttgctcgggacaatcgacttggactacctgaagagcaagcgaccggacctggctatctcggttgtctttttgtttaacaaggacttggacctcaacgttgaggtctacccccaagaccaggcccaggccaagcaaagtcaggcttgtaaaataagttaccaagagcttgacaaccgctaa

SEQ ID NO: 964 - protein, 163 aa, Alloiococcus otitidis
MGDKKELILKAVTDGQVIPVTEVKDVVFSDKMIGDGYGVVPSSGAIYSPVSGQISQLAGSHHAYYINLADDNKILIHVGPDAILLNGQGLTSQVKQGDEVQAGDLLGTIDLDYLKSKRPDLAISVVFLFNKDLDLNVEVYPQDQAQAKQSQACKISYQELDNR

SEQ ID NO: 965 - DNA, 525 bp, Alloiococcus otitidis; identical to SEQ ID NO: 963
  CDS (16)..(522)

SEQ ID NO: 966 - protein, 169 aa, Alloiococcus otitidis
MSGELIMGDKKELILKAVTDGQVIPVTEVKDVVFSDKMIGDGYGVVPSSGAIYSPVSGQISQLAGSHHAYYINLADDNKILIHVGPDAILLNGQGLTSQVKQGDEVQAGDLLGTIDLDYLKSKRPDLAISVVFLFNKDLDLNVEVYPQDQAQAKQSQACKISYQELDNR

SEQ ID NO: 967 - DNA, 1350 bp, Alloiococcus otitidis
  CDS (31)..(1347)
aggctgccgtgtaaaaaaggagcagatgatatgtctggcagaatcaaaaaactcgtcctaaccctcctggctattggtcttatcctggccctctttcttttggcttggacctacttcagctcaagtggcccagaagttgcaggaggagaagacttagaagaagcagaagacctataccagtcgaccaccctctatgaacaagatcccatcaccgttaagggatttgcccagctccaggtggaccaaagctatacttatgaccctgaactgggagaaatcgaaaccgtccatgtggcagatggccaagaagttaaaaaaggcgaccgcttgtttacctaccggaagacagaccaggaatctttagttgaaatcgacgaactcaaacgagagcaaaccaagctctacaaccagagacaagccctccaagctagcctggccaatgcccaaaatgcttgggccaactaccaaaagcaagtcaatatacaagaaccactacttgcaagtcaagaccaggaggaagaagtgggtgaagaaggagtagagcctgacctagccttagacccccctgctgacgaccccgccagcatcaaggcagccatccaggaagtcaacctccaaatccaagacctggaagccaaactggcccaggcccaaaacagcctctaccaaaatgtcctagccaaggcagacgggacggtttacctggaccaaagaggacgggatgacaaccgccaggcttttatccgtttggtgggggaccaggtttacatccgaggctcggttaatgaatttgaattttttgccttgggagacaaccggattgtggacctcttcgtcccagctgaaaacaaggaattaaaaggcaagatggtggaatatgaccgcttcccaggttcgggccaagaaggaagccaaagttctgatgaagagaacctagactccggtatgtgggctggagacctgggaggagaccaagccagcaactttaactttacagtcaagccggatgactacattcaaccaggcttttccgttgaaatgctcatccaagtccccggtatcgccatcccttctgaagccattgtcctagaaggggacgaccagtatgtctttgcctaccaagaaaacagccaaaccgttaaaaaagtgaaactggagtcagaaccagctgggcaagcccaggtaaccaagcaggcagacctcaaggcagggacccaagtcatcctctatcctgacggtttagaagacggccagtctgtcagcctggataccggtatggaagaaggagacttggaagggatggaagactacggtgaggaagctgtaggtgaagcgatggaaggttggtag

SEQ ID NO: 968 - protein, 439 aa, Alloiococcus otitidis
MSGRIKKLVLTLLAIGLILALFLLAWTYFSSSGPEVAGGEDLEEAEDLYQSTTLYEQDPITVKGFAQLQVDQSYTYDPELGEIETVHVADGQEVKKGDRLFTYRKTDQESLVEIDELKREQTKLYNQRQALQASLANAQNAWANYQKQVNIQEPLLASQDQEEEVGEEGVEPDLALDPPADDPASIKAAIQEVNLQIQDLEAKLAQAQNSLYQNVLAKADGTVYLDQRGRDDNRQAFIRLVGDQVYIRGSVNEFEFFALGDNRIVDLFVPAENKELKGKMVEYDRFPGSGQEGSQSSDEENLDSGMWAGDLGGDQASNFNFTVKPDDYIQPGFSVEMLIQVPGIAIPSEAIVLEGDDQYVFAYQENSQTVKKVKLESEPAGQAQVTKQADLKAGTQVILYPDGLEDGQSVSLDTGMEEGDLEGMEDYGEEAVGEAMEGW

SEQ ID NO: 969 - DNA, 810 bp, Alloiococcus otitidis
  CDS (25)..(807)
agcgatggaaggttggtagaatcgatgacaagtaaagataccagtggcaaacaggcccttattaacatccaggacctcaacaagtcttacgacctggccggagaccggctccaagttcttaaaaacattaacctgaccatccacaagggggaatttatttccatcatggggccgtccggttctggtaagtcgaccctgatcaatgtcttgggatttttagacaatgattttgacggccaatattactttatgggcgacttggtccagtcctatagcgaccgggtcatctcaaactaccgtaaccaaaaagtaggtttcgtcttccaaagttttaacctggtcgaaaacatgaccgtcaaagacaatgtggccctccccctcctctaccagggcatgcgggccaaggacacagtagcaaaggtagctgcaatcttagaggatatgggattagctgacaaggtcaagaactacccccctgaactttcaggtggccaacgtcagcgggtagccattgcccgagccctggtcatgaaaccggaatttttaattgcagatgagccgaccggggccttagatagcaaaacctctgcctccatcatggccatcttaaagcggatcaatgaggaagaaggcgtgacggtggtcatggtgacccacgaccccactctccagtcctatgccagccgccacctggtcattactgacgggaagatagaagaaaaagaccgccaggaagcagaacgcctggccaatttatacaagcaagagcaagtgattgaaaaccaaggaggtggagtggatgaggcttag

SEQ ID NO: 970 - protein, 261 aa, Alloiococcus otitidis
MTSKDTSGKQALINIQDLNKSYDLAGDRLQVLKNINLTIHKGEFISIMGPSGSGKSTLINVLGFLDNDFDGQYYFMGDLVQSYSDRVISNYRNQKVGFVFQSFNLVENMTVKDNVALPLLYQGMRAKDTVAKVAAILEDMGLADKVKNYPPELSGGQRQRVAIARALVMKPEFLIADEPTGALDSKTSASIMAILKRINEEEGVTVVMVTHDPTLQSYASRHLVITDGKIEEKDRQEAERLANLYKQEQVIENQGGGVDEA

SEQ ID NO: 971 - DNA, 810 bp, Alloiococcus otitidis; identical to SEQ ID NO: 969
  CDS (13)..(807)

SEQ ID NO: 972 - protein, 265 aa, Alloiococcus otitidis
MVESMTSKDTSGKQALINIQDLNKSYDLAGDRLQVLKNINLTIHKGEFISIMGPSGSGKSTLINVLGFLDNDFDGQYYFMGDLVQSYSDRVISNYRNQKVGFVFQSFNLVENMTVKDNVALPLLYQGMRAKDTVAKVAAILEDMGLADKVKNYPPELSGGQRQRVAIARALVMKPEFLIADEPTGALDSKTSASIMAILKRINEEEGVTVVMVTHDPTLQSYASRHLVITDGKIEEKDRQEAERLANLYKQEQVIENQGGGVDEA

SEQ ID NO: 973 - DNA, 252 bp, Alloiococcus otitidis
  CDS (25)..(249)
cctaggagaccaccaacaagggtgatggcaattccttcaaatagaaattgcaattggatgctttttttgcttgcccccatcgcccggcggattccgatttccttggttcgctctgaaacggaaatatacatcatgttcatgacccccaccccagcaataaagagggagatagaggcaatgaaggtgatgaaaagggtgattagttgcaattgccggccgatttctgtcataaattcagacacatcatcgtag

SEQ ID NO: 974 - protein, 75 aa, Alloiococcus otitidis
MAIPSNRNCNWMLFLLAPIARRIPISLVRSETEIYIMFMTPTPAIKREIEAMKVMKRVISCNCRPISVINSDTSS

SEQ ID NO: 975 - DNA, 252 bp, Alloiococcus otitidis; identical to SEQ ID NO: 973
  CDS (22)..(249)

SEQ ID NO: 976 - protein, 76 aa, Alloiococcus otitidis
MMAIPSNRNCNWMLFLLAPIARRIPISLVRSETEIYIMFMTPTPAIKREIEAMKVMKRVISCNCRPISVINSDTSS

SEQ ID NO: 977 - DNA, 1299 bp, Alloiococcus otitidis
  CDS (97)..(1296)
ttgaaaaccaaggaggtggagtggatgaggcttagcgaactgcttaaaactgcctttctcaccatgaaactcaacaagaggcggaccatcctgaccatgtttgggatcgtcatcggcattgctgccgtcatcaccatcctctctttgggggccggctaccgcaagcaaatggtggactccttgaccaaggatagccagggccggattaaccaatctttttactttatcaacgaagagaccgtagatgactacctctccctaaaaccctttacagaggaaaacctggagacaatcaagaccatgccaggagtcctcgatgccgatttggggaacacggaggaagaagaacactacctggaagtaaaatcaaacgaatcttcagtcgggtcaccagatgatatggagggggagtacgaggataattatgttaatgtcaaaccttcagaaaatgtccaagctaaccttttagcaggccgggctttgaccaagctagacagtgaccgtcacctccgctatgccatgatcgattccgacctagcctccagacttttcccaaacgaactgaattttgatgccctcatccaccgaaccctcacggttgaaggccaggcttttaccttggtaggcatttatgaaagccaagagcccactgacccggaagcaatggacagcccttttcaggaagccatatccactccaccccaagtctacctaccccaggagacttttaccctgttaaatggaccagtcttccctgactttaacctaaacgtatactaccaagaaggtagcaacatggcccaaaccaaccgccaaatcaagaactacttggaagaagcgggaggcgaaaatgacaaggggtcttatgactacgatgatgtgtctgaatttatgacagaaatcggccggcaattgcaactaatcacccttttcatcaccttcattgcctctatctccctctttattgctggggtgggggtcatgaacatgatgtatatttccgtttcagagcgaaccaaggaaatcggaatccgccgggcgatgggggcaagcaaaaaaagcatccaattgcaatttctatttgaaggaattgccatcacccttgttggtggtctcctaggctatctcttgggtattggccttgcctttatcatctccaactacctcccctacaatgccatcatcgacctgccaactgccctggtctccgttatcgtctcaaccgttattggactggtcttctccgtttttccagcacggacagccgccaagaaaaatgtggtggaaatcttacgttaa

SEQ ID NO: 978 - protein, 400 aa, Alloiococcus otitidis
MFGIVIGIAAVITILSLGAGYRKQMVDSLTKDSQGRINQSFYFINEETVDDYLSLKPFTEENLETIKTMPGVLDADLGNTEEEEHYLEVKSNESSVGSPDDMEGEYEDNYVNVKPSENVQANLLAGRALTKLDSDRHLRYAMIDSDLASRLFPNELNFDALIHRTLTVEGQAFTLVGIYESQEPTDPEAMDSPFQEAISTPPQVYLPQETFTLLNGPVFPDFNLNVYYQEGSNMAQTNRQIKNYLEEAGGENDKGSYDYDDVSEFMTEIGRQLQLITLFITFIASISLFIAGVGVMNMMYISVSERTKEIGIRRAMGASKKSIQLQFLFEGIAITLVGGLLGYLLGIGLAFIISNYLPYNAIIDLPTALVSVIVSTVIGLVFSVFPARTAAKKNVVEILR

SEQ ID NO: 979 - DNA, 1299 bp, Alloiococcus otitidis; identical to SEQ ID NO: 977
  CDS (64)..(1296)

SEQ ID NO: 980 - protein, 411 aa, Alloiococcus otitidis
MKLNKRRTILTMFGIVIGIAAVITILSLGAGYRKQMVDSLTKDSQGRINQSFYFINEETVDDYLSLKPFTEENLETIKTMPGVLDADLGNTEEEEHYLEVKSNESSVGSPDDMEGEYEDNYVNVKPSENVQANLLAGRALTKLDSDRHLRYAMIDSDLASRLFPNELNFDALIHRTLTVEGQAFTLVGIYESQEPTDPEAMDSPFQEAISTPPQVYLPQETFTLLNGPVFPDFNLNVYYQEGSNMAQTNRQIKNYLEEAGGENDKGSYDYDDVSEFMTEIGRQLQLITLFITFIASISLFIAGVGVMNMMYISVSERTKEIGIRRAMGASKKSIQLQFLFEGIAITLVGGLLGYLLGIGLAFIISNYLPYNAIIDLPTALVSVIVSTVIGLVFSVFPARTAAKKNVVEILR

SEQ ID NO: 981 - DNA, 1299 bp, Alloiococcus otitidis; identical to SEQ ID NO: 977
  CDS (25)..(1296)

SEQ ID NO: 982 - protein, 424 aa, Alloiococcus otitidis
MRLSELLKTAFLTMKLNKRRTILTMFGIVIGIAAVITILSLGAGYRKQMVDSLTKDSQGRINQSFYFINEETVDDYLSLKPFTEENLETIKTMPGVLDADLGNTEEEEHYLEVKSNESSVGSPDDMEGEYEDNYVNVKPSENVQANLLAGRALTKLDSDRHLRYAMIDSDLASRLFPNELNFDALIHRTLTVEGQAFTLVGIYESQEPTDPEAMDSPFQEAISTPPQVYLPQETFTLLNGPVFPDFNLNVYYQEGSNMAQTNRQIKNYLEEAGGENDKGSYDYDDVSEFMTEIGRQLQLITLFITFIASISLFIAGVGVMNMMYISVSERTKEIGIRRAMGASKKSIQLQFLFEGIAITLVGGLLGYLLGIGLAFIISNYLPYNAIIDLPTALVSVIVSTVIGLVFSVFPARTAAKKNVVEILR

SEQ ID NO: 983 - DNA, 1299 bp, Alloiococcus otitidis; identical to SEQ ID NO: 977
  CDS (16)..(1296)

SEQ ID NO: 984 - protein, 427 aa, Alloiococcus otitidis
MEWMRLSELLKTAFLTMKLNKRRTILTMFGIVIGIAAVITILSLGAGYRKQMVDSLTKDSQGRINQSFYFINEETVDDYLSLKPFTEENLETIKTMPGVLDADLGNTEEEEHYLEVKSNESSVGSPDDMEGEYEDNYVNVKPSENVQANLLAGRALTKLDSDRHLRYAMIDSDLASRLFPNELNFDALIHRTLTVEGQAFTLVGIYESQEPTDPEAMDSPFQEAISTPPQVYLPQETFTLLNGPVFPDFNLNVYYQEGSNMAQTNRQIKNYLEEAGGENDKGSYDYDDVSEFMTEIGRQLQLITLFITFIASISLFIAGVGVMNMMYISVSERTKEIGIRRAMGASKKSIQLQFLFEGIAITLVGGLLGYLLGIGLAFIISNYLPYNAIIDLPTALVSVIVSTVIGLVFSVFPARTAAKKNVVEILR

SEQ ID NO: 985 - DNA, 1299 bp, Alloiococcus otitidis; identical to SEQ ID NO: 977
  CDS (1)..(1296)

SEQ ID NO: 986 - protein, 432 aa, Alloiococcus otitidis
MKTKEVEWMRLSELLKTAFLTMKLNKRRTILTMFGIVIGIAAVITILSLGAGYRKQMVDSLTKDSQGRINQSFYFINEETVDDYLSLKPFTEENLETIKTMPGVLDADLGNTEEEEHYLEVKSNESSVGSPDDMEGEYEDNYVNVKPSENVQANLLAGRALTKLDSDRHLRYAMIDSDLASRLFPNELNFDALIHRTLTVEGQAFTLVGIYESQEPTDPEAMDSPFQEAISTPPQVYLPQETFTLLNGPVFPDFNLNVYYQEGSNMAQTNRQIKNYLEEAGGENDKGSYDYDDVSEFMTEIGRQLQLITLFITFIASISLFIAGVGVMNMMYISVSERTKEIGIRRAMGASKKSIQLQFLFEGIAITLVGGLLGYLLGIGLAFIISNYLPYNAIIDLPTALVSVIVSTVIGLVFSVFPARTAAKKNVVEILR

SEQ ID NO: 987 - DNA, 480 bp, Alloiococcus otitidis
  CDS (1)..(477)
gtggtggtcgctggcccggtaaacttcaattacgtccccaaccttgaattgccccttgacctctttgaccccagcggccaggagactagacccctcttctttcatggccagactagccccgtcgtcaatattaatcgaggtttgggccttggcataaaaggtcatccattgcttgcgctgactgaggttttctgctttggccttgaacaaggtccctttgatgttctggttaagggcttggatcagggctgtatcggactgggaggaacagataaaaacagggactccagccttggtggccatttcagccgcttggatcttggtcgtcatgccacccgttccattggccgaccctgcacctccagccatctggtagaggtcgggtgtaatttggttaatgacaggcaggtggcgggcagtagggtcttggcttgggttgccggtgtaaaggccgtcaacatcggtcaacaataccagtaa

SEQ ID NO: 988 - protein, 159 aa, Alloiococcus otitidis
MVVAGPVNFNYVPNLELPLDLFDPSGQETRPLFFHGQTSPVVNINRGLGLGIKGHPLLALTEVFCFGLEQGPFDVLVKGLDQGCIGLGGTDKNRDSSLGGHFSRLDLGRHATRSIGRPCTSSHLVEVGCNLVNDRQVAGSRVLAWVAGVKAVNIGQQYQ

SEQ ID NO: 989 - DNA, 1128 bp, Alloiococcus otitidis
  CDS (124)..(1125)
tcaataaaaatcttgcttgcccaagtctggcttgtccaaggccaaacctgctattttccatctggcaggaggcttgaggtgtgttataatgcaggtaataaagagataaagttaggtaggattatggagaaaaaattatttgtttttaaagtagggacctcttccttgacccaagaggatggcagtttagaccggattaagttggcccggatcacccggcaattagcccaaatccaccagcaaggccacaaactggtcttggttagctcgggatcggtagctgctggctttagccggctcggacttagccactaccccagccggattgccgaaaaacaagcctctgccgctgtgggtcagggcctcttgatcgaagaatatacccacaacctgatgatggacagcatttgctcggcccaagttcttttgacccaagaagacttttccgatgccagacgttataaaaatgcctcccgtgccctccgtgtcttgctcaaccacggggctattcccatcattaacgaaaatgataccattgccattgaagaattgaaggtaggtgacaacgactccctgtccgcccaggtagcctccttactcaaggccgacttactggtattgttgaccgatgttgacggcctttacaccggcaacccaagccaagaccctactgcccgccacctgcctgtcattaaccaaattacacccgacctctaccagatggctggaggtgcagggtcggccaatggaacgggtggcatgacgaccaagatccaagcggctgaaatggccaccaaggctggagtccctgtttttatctgttcctcccagtccgatacagccctgatccaagcccttaaccagaacatcaaagggaccttgttcaaggccaaagcagaaaacctcagtcagcgcaagcaatggatgaccttttatgccaaggcccaaacctcgattaatattgacgacggggctagtctggccatgaaagaagaggggtctagtctcctggccgctggggtcaaagaggtcaaggggcaattcaaggttggggacgtaattgaagtttaccgggccagcgaccaccacttaatcggacgaggccgggccccggatgacggccgatga

SEQ ID NO: 990 - protein, 334 aa, Alloiococcus otitidis
MEKKLFVFKVGTSSLTQEDGSLDRIKLARITRQLAQIHQQGHKLVLVSSGSVAAGFSRLGLSHYPSRIAEKQASAAVGQGLLIEEYTHNLMMDSICSAQVLLTQEDFSDARRYKNASRALRVLLNHGAIPIINENDTIAIEELKVGDNDSLSAQVASLLKADLLVLLTDVDGLYTGNPSQDPTARHLPVINQITPDLYQMAGGAGSANGTGGMTTKIQAAEMATKAGVPVFICSSQSDTALIQALNQNIKGTLFKAKAENLSQRKQWMTFYAKAQTSINIDDGASLAMKEEGSSLLAAGVKEVKGQFKVGDVIEVYRASDHHLIGRGRAPDDGR

SEQ ID NO: 991 - DNA, 1128 bp, Alloiococcus otitidis; identical to SEQ ID NO: 989
  CDS (79)..(1125)

SEQ ID NO: 992 - protein, 349 aa, Alloiococcus otitidis
MCYNAGNKEIKLGRIMEKKLFVFKVGTSSLTQEDGSLDRIKLARITRQLAQIHQQGHKLVLVSSGSVAAGFSRLGLSHYPSRIAEKQASAAVGQGLLIEEYTHNLMMDSICSAQVLLTQEDFSDARRYKNASRALRVLLNHGAIPIINENDTIAIEELKVGDNDSLSAQVASLLKADLLVLLTDVDGLYTGNPSQDPTARHLPVINQITPDLYQMAGGAGSANGTGGMTTKIQAAEMATKAGVPVFICSSQSDTALIQALNQNIKGTLFKAKAENLSQRKQWMTFYAKAQTSINIDDGASLAMKEEGSSLLAAGVKEVKGQFKVGDVIEVYRASDHHLIGRGRAPDDGR

SEQ ID NO: 993 - DNA, 1128 bp, Alloiococcus otitidis; identical to SEQ ID NO: 989
  CDS (13)..(1125)

SEQ ID NO: 994 - protein, 371 aa, Alloiococcus otitidis
MLAQVWLVQGQTCYFPSGRRLEVCYNAGNKEIKLGRIMEKKLFVFKVGTSSLTQEDGSLDRIKLARITRQLAQIHQQGHKLVLVSSGSVAAGFSRLGLSHYPSRIAEKQASAAVGQGLLIEEYTHNLMMDSICSAQVLLTQEDFSDARRYKNASRALRVLLNHGAIPIINENDTIAIEELKVGDNDSLSAQVASLLKADLLVLLTDVDGLYTGNPSQDPTARHLPVINQITPDLYQMAGGAGSANGTGGMTTKIQAAEMATKAGVPVFICSSQSDTALIQALNQNIKGTLFKAKAENLSQRKQWMTFYAKAQTSINIDDGASLAMKEEGSSLLAAGVKEVKGQFKVGDVIEVYRASDHHLIGRGRAPDDGR

SEQ ID NO: 995 - DNA, 1266 bp, Alloiococcus otitidis
  CDS (121)..(1263)
gatagtttagaaaggacgacaattttgactacaactcaagcactactagtcagtttgctaaagaataaagcttctatcaaccaggcttctagccaggataaaaaccaggccttacaagccatggcggaccaacttttggccgaaaaagaccacattttacaagcaaatcaaaaagacatggcccaggcagaaggtaagatcggacaagtcatgcaagaccgcctcctcttaactgaaagtcgcattcaggacatggcccaggggatcttggaccttattgacctgcctgacccggctggccgaatcctggaccaatacgaagctaccaacggtctagtcattaacaagctagctgagccttttggtctgatcgccattatctatgaaagccggcccaatgtaacttccgatgcggcagccctggccctcaaaagtggcaatgccactatcttgcgcagtggcaaggaagccttccaaacttcccaagccattgtcacagccctcaagcacggtcttgccaccagccctattcctgacacagtcctggaactggtccaagataccagccgggcctcatcgatagaattaatgacagccaaggggcaggtagacctcctgatcccccggggtggcgctggcttgatccaggcagtggtcgaccaagccaccgtccctgtgatcgaaacaggaaccggcctctgccatatctacgttgacgcaagtgccaagttagacatggccttaaatatcgtcgaaaatgccaagtgtgaccggccctctgtttgcaatgcagccgaagccctactagtccaccaagaccaagccccaagctttttgcctcgcctagaagacagactaggcggccgggttgagctcctggcggatgaccaagcagctagctacctccaacaatttaccccagggacagaagaggacttccataccgaacacttggactacaagctatcggtcaaagtcgttccctctttagaagaggccattgaccacatcaactcccactccaccggccacagtgaagccattatcactgaagacgaccaggccaaggcagcatttacccgacaggtggactctgccgccctttatgtgaatgcttccacccggtttaccgacggcagtcaatttggcttgggttgcgaactaggcatttccacccaaaagatgcatgcccggggtcccatggggctcaatgaaatgactacctacaaatacgtcattgcaggcaatggccaaatccggcaataa

SEQ ID NO: 996 - protein, 381 aa, Alloiococcus otitidis
MADQLLAEKDHILQANQKDMAQAEGKIGQVMQDRLLLTESRIQDMAQGILDLIDLPDPAGRILDQYEATNGLVINKLAEPFGLIAIIYESRPNVTSDAAALALKSGNATILRSGKEAFQTSQAIVTALKHGLATSPIPDTVLELVQDTSRASSIELMTAKGQVDLLIPRGGAGLIQAVVDQATVPVIETGTGLCHIYVDASAKLDMALNIVENAKCDRPSVCNAAEALLVHQDQAPSFLPRLEDRLGGRVELLADDQAASYLQQFTPGTEEDFHTEHLDYKLSVKVVPSLEEAIDHINSHSTGHSEAIITEDDQAKAAFTRQVDSAALYVNASTRFTDGSQFGLGCELGISTQKMHARGPMGLNEMTTYKYVIAGNGQIRQ

SEQ ID NO: 997 - DNA, 1266 bp, Alloiococcus otitidis; identical to SEQ ID NO: 995
  CDS (25)..(1263)

SEQ ID NO: 998 - protein, 413 aa, Alloiococcus otitidis
MTTTQALLVSLLKNKASINQASSQDKNQALQAMADQLLAEKDHILQANQKDMAQAEGKIGQVMQDRLLLTESRIQDMAQGILDLIDLPDPAGRILDQYEATNGLVINKLAEPFGLIAIIYESRPNVTSDAAALALKSGNATILRSGKEAFQTSQAIVTALKHGLATSPIPDTVLELVQDTSRASSIELMTAKGQVDLLIPRGGAGLIQAVVDQATVPVIETGTGLCHIYVDASAKLDMALNIVENAKCDRPSVCNAAEALLVHQDQAPSFLPRLEDRLGGRVELLADDQAASYLQQFTPGTEEDFHTEHLDYKLSVKVVPSLEEAIDHINSHSTGHSEAIITEDDQAKAAFTRQVDSAALYVNASTRFTDGSQFGLGCELGISTQKMHARGPMGLNEMTTYKYVIAGNGQIRQ

SEQ ID NO: 999 - DNA, 849 bp, Alloiococcus otitidis
  CDS (64)..(846)
ctacctacaaatacgtcattgcaggcaatggccaaatccggcaataaggaaaggagttttaggatgaaaatcggttttatcggtctaggtcagatggggtccgccgtggctagggctgttgctaaaagccaagaaggggacttcctcttaagtaaccataaccaggacaaggcaaaagccctccaagcagacattggaggggaggttgtctccaaccaggccattgcccagtcaggagacctcatcttccttggggtcaaacccaatatactagtcccccttttaaaaaacttgaccgaaaaaaacccggtcaaggatgaaacagtgtgggtttccatggcggcaggcattcaactagaccgcctggctgaatttgtcccccaagaccggctaatccggatgatgcccaacactcccttaaggcttggagctggcatgaccacttatacctgctataaccctgacctaatctccctctttgaagacctcatggcccagtctggggaggtcaaattcctggacgaaaaagccatgaatgctgccacagccatcgcaggatgcggtccagcctttgcctaccaatttatcgaagccttaatcgatgccggcatccaaaacggcttgacttatggcgacagcaagctgctagccagccaaaccctgcttggggccggcctcatggtcaaatgcttagacgaccacccagcccagctccgccaccaggtcacttccccaggcgggtcgaccatagctgggtcggtatctctagagaaaaacaagttccgccacgccgtcatcgatgcggtcaactctgctttggcccaaaaccaaaagttaggggaagactag

SEQ ID NO: 1000 - protein, 261 aa, Alloiococcus otitidis
MKIGFIGLGQMGSAVARAVAKSQEGDFLLSNHNQDKAKALQADIGGEVVSNQAIAQSGDLIFLGVKPNILVPLLKNLTEKNPVKDETVWVSMAAGIQLDRLAEFVPQDRLIRMMPNTPLRLGAGMTTYTCYNPDLISLFEDLMAQSGEVKFLDEKAMNAATAIAGCGPAFAYQFIEALIDAGIQNGLTYGDSKLLASQTLLGAGLMVKCLDDHPAQLRHQVTSPGGSTIAGSVSLEKNKFRHAVIDAVNSALAQNQKLGED

SEQ ID NO: 1001 - DNA, 849 bp, Alloiococcus otitidis; identical to SEQ ID NO: 999
  CDS (28)..(846)

SEQ ID NO: 1002 - protein, 273 aa, Alloiococcus otitidis
MAKSGNKERSFRMKIGFIGLGQMGSAVARAVAKSQEGDFLLSNHNQDKAKALQADIGGEVVSNQAIAQSGDLIFLGVKPNILVPLLKNLTEKNPVKDETVWVSMAAGIQLDRLAEFVPQDRLIRMMPNTPLRLGAGMTTYTCYNPDLISLFEDLMAQSGEVKFLDEKAMNAATAIAGCGPAFAYQFIEALIDAGIQNGLTYGDSKLLASQTLLGAGLMVKCLDDHPAQLRHQVTSPGGSTIAGSVSLEKNKFRHAVIDAVNSALAQNQKLGED

SEQ ID NO: 1003 - DNA, 849 bp, Alloiococcus otitidis; identical to SEQ ID NO: 999
  CDS (19)..(846)

SEQ ID NO: 1004 - protein, 276 aa, Alloiococcus otitidis
MQAMAKSGNKERSFRMKIGFIGLGQMGSAVARAVAKSQEGDFLLSNHNQDKAKALQADIGGEVVSNQAIAQSGDLIFLGVKPNILVPLLKNLTEKNPVKDETVWVSMAAGIQLDRLAEFVPQDRLIRMMPNTPLRLGAGMTTYTCYNPDLISLFEDLMAQSGEVKFLDEKAMNAATAIAGCGPAFAYQFIEALIDAGIQNGLTYGDSKLLASQTLLGAGLMVKCLDDHPAQLRHQVTSPGGSTIAGSVSLEKNKFRHAVIDAVNSALAQNQKLGED

SEQ ID NO: 1005 - DNA, 450 bp, Alloiococcus otitidis
  CDS (10)..(447)
gaggttattatgtctactccctacattatcgctttgtctcttgtcattattgctattgttgccatagtcattgctgctgtcgtagcttcaaaaaaagtgaaaccaactcttaataaaatggattccttgtctgaaaatatcgaagatgccgtcgaccggtatgggaaagaaggtcaggccatccaagaccggatcgaaaaaatccaagaacgagtggcaatcacccaagtcgatgcccagcaaaaaataggatcgcttgatgaactacaagaccaattccaaagcttatcagcttcactagcctaccttaaagaccagagccaggacttttcacaatcttctcgtcaaaacttgactgacaagatcaaagaagaagggccagcctacctcaagctttaccaaaaagccttgaaaggcaccttcaaaaaacaaaaagaacgctatagctag

SEQ ID NO: 1006 - protein, 146 aa, Alloiococcus otitidis
MSTPYIIALSLVIIAIVAIVIAAVVASKKVKPTLNKMDSLSENIEDAVDRYGKEGQAIQDRIEKIQERVAITQVDAQQKIGSLDELQDQFQSLSASLAYLKDQSQDFSQSSRQNLTDKIKEEGPAYLKLYQKALKGTFKKQKERYS

SEQ ID NO: 1007 - DNA, 513 bp, Alloiococcus otitidis
  CDS (25)..(510)
tcatctgaacaaggagtggtttgcatgccaaaagttagcctatcaaaaacgatattcttaacagctggggccgcactcggagccctcttatttgcccctaaatcgggcaaagaattgcggaaagaccttaaaaaagaagccaaacgcttgggtggagaagccaaagtttatgccaacaacctaaaagatgacttcgatgaagcctaccaagaagccaaggtccaagcccaggaagaaaaagaagaggctgccaagcaagaagaagaattagcccggaccatagctgaaattgagcaagaacttgaagaaagagaccaggtgacccgccaagacgaccaaggtgacttaaatagagtcccagacaatgtcttggaagaccttgacctaggcgacaccaaaaacaccagccaagagcctcaccaagaccaggttgtcccccgcggtgaattagatgaagccttggatgaccaagacttagaagatgacccttctttccaagccaatcctgaataa

SEQ ID NO: 1008 - protein, 162 aa, Alloiococcus otitidis
MPKVSLSKTIFLTAGAALGALLFAPKSGKELRKDLKKEAKRLGGEAKVYANNLKDDFDEAYQEAKVQAQEEKEEAAKQEEELARTIAEIEQELEERDQVTRQDDQGDLNRVPDNVLEDLDLGDTKNTSQEPHQDQVVPRGELDEALDDQDLEDDPSFQANPE

SEQ ID NO: 1009 - DNA, 513 bp, Alloiococcus otitidis; identical to SEQ ID NO: 1007
  CDS (16)..(510)

SEQ ID NO: 1010 - protein, 165 aa, Alloiococcus otitidis
MVCMPKVSLSKTIFLTAGAALGALLFAPKSGKELRKDLKKEAKRLGGEAKVYANNLKDDFDEAYQEAKVQAQEEKEEAAKQEEELARTIAEIEQELEERDQVTRQDDQGDLNRVPDNVLEDLDLGDTKNTSQEPHQDQVVPRGELDEALDDQDLEDDPSFQANPE

SEQ ID NO: 1011 - DNA, 1473 bp, Alloiococcus otitidis
  CDS (1243)..(1470)
aataagcgaggatggtgttggatgaacagacagatgatcaaatacctggtgggccgcttgctcttttttaatggcttattcttgctcctccccctaggagtcagcttctattaccgagaagacttgagatacatactcagttacttgtccgtctcccttttttccttgcttcttggttatttaatgtctcacaatacccccaagcaatttaacatctatgccaaggaaggctttatcattgtcagtttaacctggcttttgatgtccttgatggggtccttgcctttcatcttaagcggggactttagctccgtttttgatgctattttcgagtctacttctggctttaccaccacagggatgaccattttaaatgatgtggaaattttgtctcggtccaaccacttctggcgggccttcacccagtttttagggggaatgggaatcctggtctttgccttggccatcctgccttcaaccgatagtgaatatatgaatgtcttaaaggcagaggtgacagggcctcgctacggcaaggtcatgccccggattacagagtcaacccgctacttgttttttatctacattagcttggctattcttgttgccttggccttggttttttttggtatgaaaccttttgacgccattatccatacttttggggtggcggccactgggggctttagcatgtacaatagcaatgtgtctttttataacagcatcgccattgaaagtgtcttggcagtggggatgcttctttttgggattaacttcaaccttttttttctggctatttcaggccacatcaaaaaagccttccagtatgatgaactcaagtggtatttggggattattggcttggcagtcctcttggtcagtgtcaatatttatttcgtctaccagtccttccccgaagccttccaccaagctggttttaccgtggtttctatgattacctcaaccgggattgagctgtcacccgttggggaatggcccattttctctaagtttatcctcctcctcttaatgattatcggtgggatggctgggtcgacttcaggtggtttcaaggtctcccgggtcttggttttagccaaaactatgtttgcagaggttaagcaaaatgcctatcctaaccgggttgtgaccatccattttgaagacgaacccctggatgagcgagttatccagtctactagtcgctatcttatcgtctatatttccacctttatcctcctcttgctctttatgaccctagagttttcttccttgtcagctgcctttagtattgtgacggcaaccttaaacaatactggcgtcacccttgggaccttgggcgaggtcgaaagcctggcagctgtcagccctctgagcaagctggtcctatcctttgctatgattgccggtcgtttagaaatttatcctctcttgattttcttaactccttctacctggcgccaccatatttaa

SEQ ID NO: 1012 - protein, 76 aa, Alloiococcus otitidis
MLFMTLEFSSLSAAFSIVTATLNNTGVTLGTLGEVESLAAVSPLSKLVLSFAMIAGRLEIYPLLIFLTPSTWRHHI

SEQ ID NO: 1013 - DNA, 1473 bp, Alloiococcus otitidis; identical to SEQ ID NO: 1011
  CDS (514)..(1470)

SEQ ID NO: 1014 - protein, 319 aa, Alloiococcus otitidis
MTGPRYGKVMPRITESTRYLFFIYISLAILVALALVFFGMKPFDAIIHTFGVAATGGFSMYNSNVSFYNSIAIESVLAVGMLLFGINFNLFFLAISGHIKKAFQYDELKWYLGIIGLAVLLVSVNIYFVYQSFPEAFHQAGFTVVSMITSTGIELSPVGEWPIFSKFILLLLMIIGGMAGSTSGGFKVSRVLVLAKTMFAEVKQNAYPNRVVTIHFEDEPLDERVIQSTSRYLIVYISTFILLLLFMTLEFSSLSAAFSIVTATLNNTGVTLGTLGEVESLAAVSPLSKLVLSFAMIAGRLEIYPLLIFLTPSTWRHHI

SEQ ID NO: 1015 - DNA, 1473 bp, Alloiococcus otitidis; identical to SEQ ID NO: 1011
  CDS (184)..(1470)

SEQ ID NO: 1016 - protein, 429 aa, Alloiococcus otitidis
MSHNTPKQFNIYAKEGFIIVSLTWLLMSLMGSLPFILSGDFSSVFDAIFESTSGFTTTGMTILNDVEILSRSNHFWRAFTQFLGGMGILVFALAILPSTDSEYMNVLKAEVTGPRYGKVMPRITESTRYLFFIYISLAILVALALVFFGMKPFDAIIHTFGVAATGGFSMYNSNVSFYNSIAIESVLAVGMLLFGINFNLFFLAISGHIKKAFQYDELKWYLGIIGLAVLLVSVNIYFVYQSFPEAFHQAGFTVVSMITSTGIELSPVGEWPIFSKFILLLLMIIGGMAGSTSGGFKVSRVLVLAKTMFAEVKQNAYPNRVVTIHFEDEPLDERVIQSTSRYLIVYISTFILLLLFMTLEFSSLSAAFSIVTATLNNTGVTLGTLGEVESLAAVSPLSKLVLSFAMIAGRLEIYPLLIFLTPSTWRHHI

SEQ ID NO: 1017 - DNA, 1473 bp, Alloiococcus otitidis; identical to SEQ ID NO: 1011
  CDS (22)..(1470)

SEQ ID NO: 1018 - protein, 483 aa, Alloiococcus otitidis
MNRQMIKYLVGRLLFFNGLFLLLPLGVSFYYREDLRYILSYLSVSLFSLLLGYLMSHNTPKQFNIYAKEGFIIVSLTWLLMSLMGSLPFILSGDFSSVFDAIFESTSGFTTTGMTILNDVEILSRSNHFWRAFTQFLGGMGILVFALAILPSTDSEYMNVLKAEVTGPRYGKVMPRITESTRYLFFIYISLAILVALALVFFGMKPFDAIIHTFGVAATGGFSMYNSNVSFYNSIAIESVLAVGMLLFGINFNLFFLAISGHIKKAFQYDELKWYLGIIGLAVLLVSVNIYFVYQSFPEAFHQAGFTVVSMITSTGIELSPVGEWPIFSKFILLLLMIIGGMAGSTSGGFKVSRVLVLAKTMFAEVKQNAYPNRVVTIHFEDEPLDERVIQSTSRYLIVYISTFILLLLFMTLEFSSLSAAFSIVTATLNNTGVTLGTLGEVESLAAVSPLSKLVLSFAMIAGRLEIYPLLIFLTPSTWRHHI

SEQ ID NO: 1019 - DNA, 321 bp, Alloiococcus otitidis
  CDS (7)..(318)
aaccttttgacgccattatccatacttttggggtggcggccactgggggctttagcatgtacaatagcaatgtgtctttttataacagcatcgccattgaaagtgtcttggcagtggggatgcttctttttgggattaacttcaaccttttttttctggctatttcaggccacatcaaaaaagccttccagtatgatgaactcaagtggtatttggggattattggcttggcagtcctcttggtcagtgtcaatatttatttcgtctaccagtccttccccgaagccttccaccaagctggttttaccgtggtttctatga

SEQ ID NO: 1020 - protein, 104 aa, Alloiococcus otitidis
MTPLSILLGWRPLGALACTIAMCLFITASPLKVSWQWGCFFLGLTSTFFFWLFQATSKKPSSMMNSSGIWGLLAWQSSWSVSIFISSTSPSPKPSTKLVLPWFL

SEQ ID NO: 1021 - DNA, 1437 bp, Alloiococcus otitidis
  CDS (76)..(1434)
aattactttaatatttgctatgattgggtctatatgagtggtccagccaggttactagagataggaaggttacagatgaacattattgttgctggtggtggcaaagttggggaactacttagtgttgagttgaccaatgaaggcaataatattaccttgattgaaaaaaacgagaaaaaattagagcgtttagtttataaaaatgatattacaggcgtcatcggaaactgtgtcgactataataccttggtggaggcccaggtggaagatggggatatttttattgccgtgacttctgaagatgaactcaatattatcgcttgtattatcgcccaaaaactgggggccaagcacaccattgcccgggtccgcaatcctgaatactcagcccacatcgattttatggaaaatgacctcaatatctccctcatgattaaccctgaaaaagaagcagcagaagacattatgcgggtcatccaatacccggaagctttgagtatcgaagaatttgccaatggccgggtcaacctatctgaattattgatcaaggaaaattcccccttgattgatgttaaaattagtgatttccgccagagatttggcaatattttggtgacggttgttttacgggatggccaaaccttgatcccaagtgggcaaactgtcctcaaagagggggatgaaatctacgttgtctcaaccaaggataaattaaatgaattctatgccaaggttaacggcaaggtgggccaaatcaaaacagccttgattataggcggtggtcggattacccactatcttattggcctactcttggacaagggtgtcaaagtcaaggtgatcgaacaaaacaccgatgcggccaagtcattgagctccctgtatcccaaatgtgtggtggtcgaaggggacgggactgaccagtccttcctggaagaagagcgaatcgggtcttatgatgcggtcatttccttgaccggggtggatgaaagcaatattttaacttcaatgtttgccatgaccttcgaccccaaaaaggttattaccaaggttagccggacggacctcttgcggattatgtccttgatggggtccattagcttgcagacgatcgtcacccccaaacgcctcattgcctacaagattatccgctatgttcgggccctcaagtaccactattcttcccactttgagaactttttccgggtggccaacaaccaggcagaagccatgcagtttgaagtggggtctgaatcaaaaatcattaatattcccttgattgacctcaagttaaaagatgatctcttgattgcctttattgtccgtggtgacgaccttcttttcccaactggtgctgaccgcatcttgcctggcgacaaggtgattgtggtgacgacccgccaaattctggatgagattgacgagatattgaaataa

SEQ ID NO: 1022 - protein, 453 aa, Alloiococcus otitidis
MNIIVAGGGKVGELLSVELTNEGNNITLIEKNEKKLERLVYKNDITGVIGNCVDYNTLVEAQVEDGDIFIAVTSEDELNIIACIIAQKLGAKHTIARVRNPEYSAHIDFMENDLNISLMINPEKEAAEDIMRVIQYPEALSIEEFANGRVNLSELLIKENSPLIDVKISDFRQRFGNILVTVVLRDGQTLIPSGQTVLKEGDEIYVVSTKDKLNEFYAKVNGKVGQIKTALIIGGGRITHYLIGLLLDKGVKVKVIEQNTDAAKSLSSLYPKCVVVEGDGTDQSFLEEERIGSYDAVISLTGVDESNILTSMFAMTFDPKKVITKVSRTDLLRIMSLMGSISLQTIVTPKRLIAYKIIRYVRALKYHYSSHFENFFRVANNQAEAMQFEVGSESKIINIPLIDLKLKDDLLIAFIVRGDDLLFPTGADRILPGDKVIVVTTRQILDEIDEILK

SEQ ID NO: 1023 - DNA, 1437 bp, Alloiococcus otitidis; identical to SEQ ID NO: 1021
  CDS (34)..(1434)

SEQ ID NO: 1024 - protein, 467 aa, Alloiococcus otitidis
MSGPARLLEIGRLQMNIIVAGGGKVGELLSVELTNEGNNITLIEKNEKKLERLVYKNDITGVIGNCVDYNTLVEAQVEDGDIFIAVTSEDELNIIACIIAQKLGAKHTIARVRNPEYSAHIDFMENDLNISLMINPEKEAAEDIMRVIQYPEALSIEEFANGRVNLSELLIKENSPLIDVKISDFRQRFGNILVTVVLRDGQTLIPSGQTVLKEGDEIYVVSTKDKLNEFYAKVNGKVGQIKTALIIGGGRITHYLIGLLLDKGVKVKVIEQNTDAAKSLSSLYPKCVVVEGDGTDQSFLEEERIGSYDAVISLTGVDESNILTSMFAMTFDPKKVITKVSRTDLLRIMSLMGSISLQTIVTPKRLIAYKIIRYVRALKYHYSSHFENFFRVANNQAEAMQFEVGSESKIINIPLIDLKLKDDLLIAFIVRGDDLLFPTGADRILPGDKVIVVTTRQILDEIDEILK

SEQ ID NO: 1025 - DNA, 288 bp, Alloiococcus otitidis
  CDS (31)..(285)
cgtttattgacctggagggcagcaaagaaggtgatcggtccgatacggccaataatcatcaagagcatcaaaatggtctggctaagccggctgaggctagcggttaaattgggcgaaaccccaacggtggccagagcagaaatgacttcaaatacaatgtactcaaatttaactcccatgtcaaagatgctgattaaaaaggaagagagcaaggttaagatgacaaacatgatcccaatgaccaaggcttttctagcaatatttttgctgatggagtggtggtggtag

SEQ ID NO: 1026 - protein, 85 aa, Alloiococcus otitidis
MIGPIRPIIIKSIKMVWLSRLRLAVKLGETPTVARAEMTSNTMYSNLTPMSKMLIKKEESKVKMTNMIPMTKAFLAIFLLMEWWW

SEQ ID NO: 1027 - DNA, 288 bp, Alloiococcus otitidis; identical to SEQ ID NO: 1025
  CDS (7)..(285)

SEQ ID NO: 1028 - protein, 93 aa, Alloiococcus otitidis
MTWRAAKKVIGPIRPIIIKSIKMVWLSRLRLAVKLGETPTVARAEMTSNTMYSNLTPMSKMLIKKEESKVKMTNMIPMTKAFLAIFLLMEWWW

SEQ ID NO: 1029 - DNA, 1392 bp, Alloiococcus otitidis
  CDS (871)..(1389)
ggagatgctacgatgaaaagcttacataaacaccgcctttctaccccatttaaaatcgtcttaagttttttatttatcatcctagtgggatctttaatcttaaacctgccaatttcccaaactaaccagtcccaggccagctattttgaccacttgtttaccaccgtttccatgatttgtgtgactggactttttacccaaccagtctacctcacctacaacacctttggccaattggtctgcatggtcttgattaaaaccgggggcttaggcctattaactttggtagcagccatttttatcggaattaaccaccggatcaaccacagccaaaccgtccttttgactgagtccctcaaccgctttgaccagtcccagtttcctaattttatcattatgattcttaaaatgactagtttcttggaagccatcggtgcctttatcctgtcttttgtctttgtcccacagtttggttggctgaaagggattttcaattcctttttcatttccatttcagcctttaacaatgcaggctttgacaatataggaccgaccagtttaattaactatgcccaaaaccctgtcatcaatattgtcgtccccctcctcatcattgctgggggcctaggcttttcagtctggttcgaagttctggctatcgccaagtctgctatccggtcccgctttcggcaagatcgcatcccctttaaagagatttccgtccacacccgaatggttttatcggtcaccatcttcctactgctggctgggaccctggccttcttgttgacagaatggtccaacccccaaaccattggaagctacagcttggttgataaagtccaagtaggcttcttccaatcggctactatgcgaacagccggcttttccaccattgactatacccagatgattttaccttctttccttattgccttcgtcttaatgtttgttggcgggtcacccgggtcaacagctggtggggtgaaaacctctagtgtcatgcttattattttactaattaaaaatgaaatattccaggaagatagccttaactaccaccaccactccatcagcaaaaatattgctagaaaagccttggtcattgggatcatgtttgtcatcttaaccttgctctcttcctttttaatcagcatctttgacatgggagttaaatttgagtacattgtatttgaagtcatttctgctctggccaccgttggggtttcgcccaatttaaccgctagcctcagccggcttagccagaccattttgatgctcttgatgattattggccgtatcggaccgatcaccttctttgctgccctccaggtcaataaacgtcaaaaagtaaatgtgaaatacgctaaaggacatgtcttaataggatag

SEQ ID NO: 1030 - protein, 173 aa, Alloiococcus otitidis
MRTAGFSTIDYTQMILPSFLIAFVLMFVGGSPGSTAGGVKTSSVMLIILLIKNEIFQEDSLNYHHHSISKNIARKALVIGIMFVILTLLSSFLISIFDMGVKFEYIVFEVISALATVGVSPNLTASLSRLSQTILMLLMIIGRIGPITFFAALQVNKRQKVNVKYAKGHVLIG

SEQ ID NO: 1031 - DNA, 1392 bp, Alloiococcus otitidis; identical to SEQ ID NO: 1029
  CDS (733)..(1389)

SEQ ID NO: 1032 - protein, 219 aa, Alloiococcus otitidis
MVLSVTIFLLLAGTLAFLLTEWSNPQTIGSYSLVDKVQVGFFQSATMRTAGFSTIDYTQMILPSFLIAFVLMFVGGSPGSTAGGVKTSSVMLIILLIKNEIFQEDSLNYHHHSISKNIARKALVIGIMFVILTLLSSFLISIFDMGVKFEYIVFEVISALATVGVSPNLTASLSRLSQTILMLLMIIGRIGPITFFAALQVNKRQKVNVKYAKGHVLIG

SEQ ID NO: 1033 - DNA, 1392 bp, Alloiococcus otitidis; identical to SEQ ID NO: 1029
  CDS (397)..(1389)

SEQ ID NO: 1034 - protein, 331 aa, Alloiococcus otitidis
MILKMTSFLEAIGAFILSFVFVPQFGWLKGIFNSFFISISAFNNAGFDNIGPTSLINYAQNPVINIVVPLLIIAGGLGFSVWFEVLAIAKSAIRSRFRQDRIPFKEISVHTRMVLSVTIFLLLAGTLAFLLTEWSNPQTIGSYSLVDKVQVGFFQSATMRTAGFSTIDYTQMILPSFLIAFVLMFVGGSPGSTAGGVKTSSVMLIILLIKNEIFQEDSLNYHHHSISKNIARKALVIGIMFVILTLLSSFLISIFDMGVKFEYIVFEVISALATVGVSPNLTASLSRLSQTILMLLMIIGRIGPITFFAALQVNKRQKVNVKYAKGHVLIG

SEQ ID NO: 1035 - DNA, 1392 bp, Alloiococcus otitidis; identical to SEQ ID NO: 1029
  CDS (244)..(1389)

SEQ ID NO: 1036 - protein, 382 aa, Alloiococcus otitidis
MVLIKTGGLGLLTLVAAIFIGINHRINHSQTVLLTESLNRFDQSQFPNFIIMILKMTSFLEAIGAFILSFVFVPQFGWLKGIFNSFFISISAFNNAGFDNIGPTSLINYAQNPVINIVVPLLIIAGGLGFSVWFEVLAIAKSAIRSRFRQDRIPFKEISVHTRMVLSVTIFLLLAGTLAFLLTEWSNPQTIGSYSLVDKVQVGFFQSATMRTAGFSTIDYTQMILPSFLIAFVLMFVGGSPGSTAGGVKTSSVMLIILLIKNEIFQEDSLNYHHHSISKNIARKALVIGIMFVILTLLSSFLISIFDMGVKFEYIVFEVISALATVGVSPNLTASLSRLSQTILMLLMIIGRIGPITFFAALQVNKRQKVNVKYAKGHVLIG

SEQ ID NO: 1037 - DNA, 1392 bp, Alloiococcus otitidis; identical to SEQ ID NO: 1029
  CDS (235)..(1389)

SEQ ID NO: 1038 - protein, 385 aa, Alloiococcus otitidis
MVCMVLIKTGGLGLLTLVAAIFIGINHRINHSQTVLLTESLNRFDQSQFPNFIIMILKMTSFLEAIGAFILSFVFVPQFGWLKGIFNSFFISISAFNNAGFDNIGPTSLINYAQNPVINIVVPLLIIAGGLGFSVWFEVLAIAKSAIRSRFRQDRIPFKEISVHTRMVLSVTIFLLLAGTLAFLLTEWSNPQTIGSYSLVDKVQVGFFQSATMRTAGFSTIDYTQMILPSFLIAFVLMFVGGSPGSTAGGVKTSSVMLIILLIKNEIFQEDSLNYHHHSISKNIARKALVIGIMFVILTLLSSFLISIFDMGVKFEYIVFEVISALATVGVSPNLTASLSRLSQTILMLLMIIGRIGPITFFAALQVNKRQKVNVKYAKGHVLIG

SEQ ID NO: 1039 - DNA, 1392 bp, Alloiococcus otitidis; identical to SEQ ID NO: 1029
  CDS (13)..(1389)

SEQ ID NO: 1040 - protein, 459 aa, Alloiococcus otitidis
MKSLHKHRLSTPFKIVLSFLFIILVGSLILNLPISQTNQSQASYFDHLFTTVSMICVTGLFTQPVYLTYNTFGQLVCMVLIKTGGLGLLTLVAAIFIGINHRINHSQTVLLTESLNRFDQSQFPNFIIMILKMTSFLEAIGAFILSFVFVPQFGWLKGIFNSFFISISAFNNAGFDNIGPTSLINYAQNPVINIVVPLLIIAGGLGFSVWFEVLAIAKSAIRSRFRQDRIPFKEISVHTRMVLSVTIFLLLAGTLAFLLTEWSNPQTIGSYSLVDKVQVGFFQSATMRTAGFSTIDYTQMILPSFLIAFVLMFVGGSPGSTAGGVKTSSVMLIILLIKNEIFQEDSLNYHHHSISKNIARKALVIGIMFVILTLLSSFLISIFDMGVKFEYIVFEVISALATVGVSPNLTASLSRLSQTILMLLMIIGRIGPITFFAALQVNKRQKVNVKYAKGHVLIG

SEQ ID NO: 1041 - DNA, 666 bp, Alloiococcus otitidis
  CDS (10)..(663)
gagattagaatggcccaaacaattggagtacttggtttaggcatatttggttctaccattgccaaagaacttggtcgccaacaccacaatgtcattgccattgactgcaatgaggaaaatgtcaaccgaattgacccttacatcagccagggaattgtgggtgactttacccagtatgacctattaaaggaagtagccatcgaacaatgtgaccaggttgttatagcggctggtacttccttagaagcttgtgtcttagccattatgcacttgaaagagttaggtgtgcgaaacatcactgccaaatcaaagaaccaagactacatgaagattatgaaggaactcggtgcaactagggtcatccggccagagtatgaaatgggcttgcggaccgctcgtaagattatgaaaccccgcctcatggacatcatcgacttagatgacaaaacctccataatcgaatttaaaccacctcgggattgggtaggaagaactttatcaaacttaaaactacgtcagaccttttcgttaaatgttatcggactaaaagattcatctagccagaaacgaacctaccaagtagaccccaatgaagtgattaacgaagataccatcttaattgtcattggagacagcaatgaaattgaaaactttcgactagattaa

SEQ ID NO: 1042 - protein, 218 aa, Alloiococcus otitidis
MAQTIGVLGLGIFGSTIAKELGRQHHNVIAIDCNEENVNRIDPYISQGIVGDFTQYDLLKEVAIEQCDQVVIAAGTSLEACVLAIMHLKELGVRNITAKSKNQDYMKIMKELGATRVIRPEYEMGLRTARKIMKPRLMDIIDLDDKTSIIEFKPPRDWVGRTLSNLKLRQTFSLNVIGLKDSSSQKRTYQVDPNEVINEDTILIVIGDSNEIENFRLD

SEQ ID NO: 1043 - DNA, 1122 bp, Alloiococcus otitidis
  CDS (19)..(1119)
acaaaggagaggctgttcatgtctgaggaatatcaagcaccaagacaagtcagagatttggaaattatcaacacttatgacctggaaaaatttgccgaagaggtcgtatccaagggaggttatggctacctgtcaggtgggtcaggagacgaatttaccctaagacgaaatatcgaagtatggaataagaagggaatcttgcctcgtcttttagctgacgttgaaaagcctgagacaaacacttccatcctaggtcaggacctcaaagttccctttattatggctcctattgccgcccatggtctggcccatgagtccaaagaagcaggaaccgctaaggggatagctgaattcggtggatcgatcatgtccatttctgcttattcaggagcgaattttgacgaaatagcagcaggcttaaatggcaatgcccgatggttccagatttacatgtccaaagatgatgaattaaacaaaaatattatcgatgaagctaaggctgatggagcttcagctattatcttaactgctgatgccactgtgtcaggtaaccgggatacagatgaccgcaaccactttgtctatccttttggcatgcccattgtgtctcgttacttgaaaggtggggctaagaatatgtcactcaacaatatttacggccagtccaaacaaaagatatccgttcatgacgtgaccttcctagctgattactccaatttgccagtctttgtcaaaggtgtccaagctccagaagatgccttaacagcgattgaagcaggggcttctggcatttgggtgtccaaccacggtggacggcaattggacggggccccaggatcttttgaatccttggaagggattgccaaggctgtatctggccgggttcccattgtttttgactccggtatccggcggggtgagcacatcttcaaggccctagcatccggagctgatatcgtggctttgggtcgaccagtcttgtacggattagccctgggaggctggaaaggagtacggtctgttttcgaatactttgagagagacttgaaacgggttatgcagctagctgggactcaaaccattcaagatattaaagaaagccagttaattgacctaaactag

SEQ ID NO: 1044 - protein, 367 aa, Alloiococcus otitidis
MSEEYQAPRQVRDLEIINTYDLEKFAEEVVSKGGYGYLSGGSGDEFTLRRNIEVWNKKGILPRLLADVEKPETNTSILGQDLKVPFIMAPIAAHGLAHESKEAGTAKGIAEFGGSIMSISAYSGANFDEIAAGLNGNARWFQIYMSKDDELNKNIIDEAKADGASAIILTADATVSGNRDTDDRNHFVYPFGMPIVSRYLKGGAKNMSLNNIYGQSKQKISVHDVTFLADYSNLPVFVKGVQAPEDALTAIEAGASGIWVSNHGGRQLDGAPGSFESLEGIAKAVSGRVPIVFDSGIRRGEHIFKALASGADIVALGRPVLYGLALGGWKGVRSVFEYFERDLKRVMQLAGTQTIQDIKESQLIDLN

SEQ ID NO: 1045 - DNA, 276 bp, Alloiococcus otitidis
  CDS (7)..(273)
ccggcaatggtgggtaaaaagccaaagtggatgacattttcctcattgcttttaatttcgtgtttggcctggtccaggatggttaaaatttggtcggctcgctcgtataaaattttaccagtaggggtcaaggcaaagcttttggttgaccggtctctggtgatcagctgggtttcaaattcctcctccaaacgttttaaggcgatagaaatggaaggctgtgaaacgaaaaaggcctcagctgtcttggtaaagcttgagcaatctgctaagtag

SEQ ID NO: 1046 - protein, 89 aa, Alloiococcus otitidis
MVGKKPKWMTFSSLLLISCLAWSRMVKIWSARSYKILPVGVKAKLLVDRSLVISWVSNSSSKRFKAIEMEGCETKKASAVLVKLEQSAK

SEQ ID NO: 1047 - DNA, 321 bp, Alloiococcus otitidis
  CDS (7)..(318)
acttgcttgagctggaaaactttttccctgaggctttggttaaaggctgcttgggcttcggtcagttttaagtttttattaatgaccaaggctgtggtaaattccgggccctctttaagagggatggtcaccaaatcaggtcggtcgtggaccaagacatcatggataaggccgactgacaagctggaagcaataagggagtggacggattggatttccttggcaaaggtaacctgggaggtctggatgccaaccttgcccatccagttggagacgatttggtggtggacgtatttttcgtccagggtgaccaaggagtag

SEQ ID NO: 1048 - protein, 104 aa, Alloiococcus otitidis
MSWKTFSLRLWLKAAWASVSFKFLLMTKAVVNSGPSLRGMVTKSGRSWTKTSWIRPTDKLEAIREWTDWISLAKVTWEVWMPTLPIQLETIWWWTYFSSRVTKE

SEQ ID NO: 1049 - DNA, 999 bp, Alloiococcus otitidis
  CDS (109)..(996)
aggggcaaatatgctattattataatatgtaataaggagattgaagggcttagcacaaaggctttggccctaatagaagacacatggatattggagaagattcttgctatgaaaattcaagatttagtatactaccgctacttagcagattgctcaagctttaccaagacagctgaggcctttttcgtttcacagccttccatttctatcgccttaaaacgtttggaggaggaatttgaaacccagctgatcaccagagaccggtcaaccaaaagctttgccttgacccctactggtaaaattttatacgagcgagccgaccaaattttaaccatcctggaccaggccaaacacgaaattaaaagcaatgaggaaaatgtcatccactttggctttttacccaccattgccggctacttcttgccacgcttaatgcccaatatggcggaatttgtccagtctatccaattggtcgaagatgaaagctccaaacacatgctccaactcctggaagacggaattgtctctgctgccatcactggtctaccagaccatgacctagagggagactgggcagagatttaccccatcgatacaagacctctctccatttgcgttcccaagtcccaccctttagccaataatagggaagtgactctcaaccaaattcgaaactactccttggtcaccctggacgaaaaatacgtccaccaccaaatcgtctccaactggatgggcaaggttggcatccagacctcccaggttacctttgccaaggaaatccaatccgtccactcccttattgcttccagcttgtcagtcggccttatccatgatgtcttggtccacgaccgacctgatttggtgaccatccctcttaaagagggcccggaatttaccacagccttggtcattaataaaaacttaaaactgaccgaagcccaagcagcctttaaccaaagcctcagggaaaaagttttccagctcaagcaagtctag

SEQ ID NO: 1050 - protein, 296 aa, Alloiococcus otitidis
MKIQDLVYYRYLADCSSFTKTAEAFFVSQPSISIALKRLEEEFETQLITRDRSTKSFALTPTGKILYERADQILTILDQAKHEIKSNEENVIHFGFLPTIAGYFLPRLMPNMAEFVQSIQLVEDESSKHMLQLLEDGIVSAAITGLPDHDLEGDWAEIYPIDTRPLSICVPKSHPLANNREVTLNQIRNYSLVTLDEKYVHHQIVSNWMGKVGIQTSQVTFAKEIQSVHSLIASSLSVGLIHDVLVHDRPDLVTIPLKEGPEFTTALVINKNLKLTEAQAAFNQSLREKVFQLKQV

SEQ ID NO: 1051 - DNA, 999 bp, Alloiococcus otitidis; identical to SEQ ID NO: 1049
  CDS (64)..(996)

SEQ ID NO: 1052 - protein, 311 aa, Alloiococcus otitidis
MALIEDTWILEKILAMKIQDLVYYRYLADCSSFTKTAEAFFVSQPSISIALKRLEEEFETQLITRDRSTKSFALTPTGKILYERADQILTILDQAKHEIKSNEENVIHFGFLPTIAGYFLPRLMPNMAEFVQSIQLVEDESSKHMLQLLEDGIVSAAITGLPDHDLEGDWAEIYPIDTRPLSICVPKSHPLANNREVTLNQIRNYSLVTLDEKYVHHQIVSNWMGKVGIQTSQVTFAKEIQSVHSLIASSLSVGLIHDVLVHDRPDLVTIPLKEGPEFTTALVINKNLKLTEAQAAFNQSLREKVFQLKQV

SEQ ID NO: 1053 - DNA, 420 bp, Alloiococcus otitidis
  CDS (19)..(417)
ctaggaggtatatcccgaatgaaaaagaaaaaagtagcttttatatgtgttcataattcttgtagaagtcagattgcagaatcactaggtaaacaccttgcctcagatgtttttgaaagctattctgctggatctgaattaaaaactaatatcaaccaggatgccgtacggttaatgaaagatttatatggaattgatatggaactaagtcaatatccaaagttaatttctgaaattcctagtccggacatagctatttcaatgggctgcgatgttacctgtccttttataggcaaggaatttgatgcagactggaatttggacgatccaagtggtaaatcagacaaagaattcaaactaataattgagacaatagaagaaaaaatactagatttaaagaaagggcttagtagttattaa

SEQ ID NO: 1054 - protein, 133 aa, Alloiococcus otitidis
MKKKKVAFICVHNSCRSQIAESLGKHLASDVFESYSAGSELKTNINQDAVRLMKDLYGIDMELSQYPKLISEIPSPDIAISMGCDVTCPFIGKEFDADWNLDDPSGKSDKEFKLIIETIEEKILDLKKGLSSY

SEQ ID NO: 1055 - DNA, 1293 bp, Alloiococcus otitidis
  CDS (88)..(1290)
ggggtaagccttttccagaaactagcagtcagaatgggcctgccctttaagaaaaaaatcgaccattatacaggaggagagtgtcttatgattaaaaatgttcttgttgctggaggaggcgtcctcggatcacaaattgccctacaaacagcagtcagtggttttaaggtaacagtctatgacatatctgaagatagcttgcaagcttccaaagaaaaaatggaaggctttatccctcgttaccaagaagaatccaagaaagactttggccaccaagcattagaccaagcactagcggatattatctttaccaccgacttgaaagaagcggcccaggatgctgacttggttgtagaagctgttccagagaaactagatatcaaagaagatttttacaagcaattagctcaagttgcccctgaccacaccatttttgcaaccaacacttctacccttcttccttcttctttcatggaagcaactagcagagaagaccgttttgttgctcttcacttcgctaatgaaatttggaaaaagaacactggtgaagttatgaaaacagagaagactacagacgaaactttccaaactgttatggactttgctgaagatattgccatggttcctattccaatctataaagaaaaaccaggctatattttaaatacactttttgtacctttcttgcaaagtggtagtgaactccactattccggttttgcttcagcttatgatgtagaccgggcttggataaaaaccactggcgacgactttggtccatttggtggtatggatattgtaggtatcgaaaccgttaaaaacgttaaccaatccaacctcgccttaggaatttatcctgatgaagaatggatccacaatgccattaaagattacaatgatctaattgaacaaggacgaggcggtaaattaaacggcaaaggttactacaactatgatggaattccagaattcttgcaagatgactttttagctgatactccacaagtggctatcgaagattacggaaaagaatcggatgatccagaagtggataaggttctacacatctataactttatctcaactggtatttttaaagcagcattagagttagtcgtcaacggttatagtgaagccgacatggtagataaagtttgggaaaccacacatggttggggaccttttaagcgaatgaaagaaattggctttgatcaagttcgccagaccattgaaaaatcattaggtaaccaagcaacacaggaagaaagaaaactcttgtcctactttgaataa

SEQ ID NO: 1056 - protein, 401 aa, Alloiococcus otitidis
MIKNVLVAGGGVLGSQIALQTAVSGFKVTVYDISEDSLQASKEKMEGFIPRYQEESKKDFGHQALDQALADIIFTTDLKEAAQDADLVVEAVPEKLDIKEDFYKQLAQVAPDHTIFATNTSTLLPSSFMEATSREDRFVALHFANEIWKKNTGEVMKTEKTTDETFQTVMDFAEDIAMVPIPIYKEKPGYILNTLFVPFLQSGSELHYSGFASAYDVDRAWIKTTGDDFGPFGGMDIVGIETVKNVNQSNLALGIYPDEEWIHNAIKDYNDLIEQGRGGKLNGKGYYNYDGIPEFLQDDFLADTPQVAIEDYGKESDDPEVDKVLHIYNFISTGIFKAALELVVNGYSEADMVDKVWETTHGWGPFKRMKEIGFDQVRQTIEKSLGNQATQEERKLLSYFE

SEQ ID NO: 1057 - DNA, 1293 bp, Alloiococcus otitidis; identical to SEQ ID NO: 1055
  CDS (34)..(1290)

SEQ ID NO: 1058 - protein, 419 aa, Alloiococcus otitidis
MGLPFKKKIDHYTGGECLMIKNVLVAGGGVLGSQIALQTAVSGFKVTVYDISEDSLQASKEKMEGFIPRYQEESKKDFGHQALDQALADIIFTTDLKEAAQDADLVVEAVPEKLDIKEDFYKQLAQVAPDHTIFATNTSTLLPSSFMEATSREDRFVALHFANEIWKKNTGEVMKTEKTTDETFQTVMDFAEDIAMVPIPIYKEKPGYILNTLFVPFLQSGSELHYSGFASAYDVDRAWIKTTGDDFGPFGGMDIVGIETVKNVNQSNLALGIYPDEEWIHNAIKDYNDLIEQGRGGKLNGKGYYNYDGIPEFLQDDFLADTPQVAIEDYGKESDDPEVDKVLHIYNFISTGIFKAALELVVNGYSEADMVDKVWETTHGWGPFKRMKEIGFDQVRQTIEKSLGNQATQEERKLLSYFE

SEQ ID NO: 1059 - DNA, 633 bp, Alloiococcus otitidis
  CDS (19)..(630)
gaagtgtctggggcggccatgaccgtggtgaatggccggatctatgcaggctattccctcttgttagaccccgactatgaagtgatggacaccgttctcagacccaacagtaagaaaatcaagtcccacggggtcaagtcagtccggtctcggattgggagtctgcgtcaggctctggcgccagaataccaggacatctcggtttgggacttctcagacaaggtcttacaggaactcttaggaatcagtgacttaaaccaggctaagcggtacaccttaacagaggatgactgggctgggatcgaccagattgcccgggatcgctacaataactgggactggacttatggccactttggcgactttgactaccaggtggatgaacgcttcgaaggggtgggcaccctccatgttggcctgaaaatcaaggatgccatcattgaccatatccaaattaccggagacttctttagtgtcaaaaaccggacagagctagaagatcggctccaaggtgtccgcttagatagaaaggccctggaagaagccttgtcggatatggacctagctagttatattaacaagatggaccaagaccaatttatcaatttcattttggaaatcccgacttcttaa

SEQ ID NO: 1060 - protein, 204 aa, Alloiococcus otitidis
MTVVNGRIYAGYSLLLDPDYEVMDTVLRPNSKKIKSHGVKSVRSRIGSLRQALAPEYQDISVWDFSDKVLQELLGISDLNQAKRYTLTEDDWAGIDQIARDRYNNWDWTYGHFGDFDYQVDERFEGVGTLHVGLKIKDAIIDHIQITGDFFSVKNRTELEDRLQGVRLDRKALEEALSDMDLASYINKMDQDQFINFILEIPTS

SEQ ID NO: 1061 - DNA, 633 bp, Alloiococcus otitidis; identical to SEQ ID NO: 1059
  CDS (4)..(630)

SEQ ID NO: 1062 - protein, 209 aa, Alloiococcus otitidis
MSGAAMTVVNGRIYAGYSLLLDPDYEVMDTVLRPNSKKIKSHGVKSVRSRIGSLRQALAPEYQDISVWDFSDKVLQELLGISDLNQAKRYTLTEDDWAGIDQIARDRYNNWDWTYGHFGDFDYQVDERFEGVGTLHVGLKIKDAIIDHIQITGDFFSVKNRTELEDRLQGVRLDRKALEEALSDMDLASYINKMDQDQFINFILEIPTS

SEQ ID NO: 1063 - DNA, 477 bp, Alloiococcus otitidis
  CDS (46)..(474)
ccttggggcttgcctcggaaagaagatagcttaggaggacttgccatgtatttaattgaacctatacgagacggccagtgggtttatgacttaggtaccatcctctccctccatgcctacgtgcgggatgaaatttttttagatgatgatatcatcatcccctacctggtcaaccctgcagtccaaattggtcttaaccaaaatgcttacgaagaagttaacctcccctacttagaagaacagggccttgacctggtccgccgggaaacgggcggggggacggtctacttggatgaccggaatatgagttactgcttttttatccggaccgacaagcccaatgatgtttttgggaattttaaactcatctatgaccccattgtcaaggtcttgaaaaagatgggggtccaggctttggaccaggaagggcggaacgatttaactctggatggtaagaagtgtctggggcggccatga

SEQ ID NO: 1064 - protein, 143 aa, Alloiococcus otitidis
MYLIEPIRDGQWVYDLGTILSLHAYVRDEIFLDDDIIIPYLVNPAVQIGLNQNAYEEVNLPYLEEQGLDLVRRETGGGTVYLDDRNMSYCFFIRTDKPNDVFGNFKLIYDPIVKVLKKMGVQALDQEGRNDLTLDGKKCLGRP

SEQ ID NO: 1065 - DNA, 477 bp, Alloiococcus otitidis; identical to SEQ ID NO: 1063
  CDS (10)..(474)

SEQ ID NO: 1066 - protein, 155 aa, Alloiococcus otitidis
MPRKEDSLGGLAMYLIEPIRDGQWVYDLGTILSLHAYVRDEIFLDDDIIIPYLVNPAVQIGLNQNAYEEVNLPYLEEQGLDLVRRETGGGTVYLDDRNMSYCFFIRTDKPNDVFGNFKLIYDPIVKVLKKMGVQALDQEGRNDLTLDGKKCLGRP

SEQ ID NO: 1067 - DNA, 336 bp, Alloiococcus otitidis
  CDS (4)..(333)
agaatgactaagcgaaaaaatgaattgtttgtagacaaacaaggtgacgaatacgttattagtatgacacctgagatgcaagatgacgttgggactgttggttttgtcgaatttgtcgacaaggatgacatcaaagaaggcgacaccctagctaacattgaagcttctaaaacagtcttagacgttttaagtccacttgctggtagaattgttgcccgccatgaagaagccgaaaaaaatccagaactattgaactcttctaaacaagaagaaagctggattgtccgcttgggtgaggtttcggaagaagaatataacaaactagaagacgcataa

SEQ ID NO: 1068 - protein, 110 aa, Alloiococcus otitidis
MTKRKNELFVDKQGDEYVISMTPEMQDDVGTVGFVEFVDKDDIKEGDTLANIEASKTVLDVLSPLAGRIVARHEEAEKNPELLNSSKQEESWIVRLGEVSEEEYNKLEDA

SEQ ID NO: 1069 - DNA, 1233 bp, Alloiococcus otitidis
  CDS (13)..(1230)
gaggaatcaaccatgtcggattcaaacgatcactaccaagacctgttagaaccctttcgcttagccaatggggtccagttagccaaccgctttaccctcaaccccattaccaccaatgcttccacccgggaaggctttgtcaccgaagaggagactgcctatgccgcccgaaggagcaagtcagcccccctccaggtgactacagctgcttatattgaagactacggccaattgttcaaatacgggcctagtgtccgcaatgacgcctttattccgggcctaagccagctagcccatgccatgaaaaaagacggggccaaggctatcttacaactggtccacaatggccgctttgccaagatcgccctccaagactacggggcagtttacgggcccagccccctccacctccatacaccaatcgaacatgatgtcatccccatgtccaaacgcaaaatcaaccatgtcatcgaccaatacgcccaggcaaccagacgggccattgaggctggatttgacggggtggaaatctccaatgcccagcgtcttttgccccaacaatttttctcccccttctccaaccaaagatcggatgagtacggccctcaaaacctagacgaccggtctcggttcggagtagaggtcacccaagccatccaaaaggttattgatgacttggcaccaaaagactttatcctgggcttccggggaaccccagaagaaacgcggggagctcaagttggctatacggtcgatgaattcaatggctatgtggaccgcctcctggaagttgccgatctccactactatgccatcgcttcctggggcaaacatatctacctcaacaaggtccgggcccaagaccaccagggccaattggtcaataaagtagtctatgaccactttaaaggccggctacccattattgcgactggtagcataaacagcccagacaaggcccgacaagccttaaaacatgccgatttggtgggcatgtcttccgccttcgtcaccgaacctgactttgtcttaaaactccagaagggacgggcccaagatattgacctgggtcttgaagcccaagacctgtctgacctggctattccaaaaaaagccttccaagacattatggaactgatggatatcggaggatccatcccccaagaaggccgggaccaactccggggcttggctgaccaggattcgacttcctactttaaagaatttaaataa

SEQ ID NO: 1070 - protein, 406 aa, Alloiococcus otitidis
MSDSNDHYQDLLEPFRLANGVQLANRFTLNPITTNASTREGFVTEEETAYAARRSKSAPLQVTTAAYIEDYGQLFKYGPSVRNDAFIPGLSQLAHAMKKDGAKAILQLVHNGRFAKIALQDYGAVYGPSPLHLHTPIEHDVIPMSKRKINHVIDQYAQATRRAIEAGFDGVEISNAQRLLPQQFFSPFSNQRSDEYGPQNLDDRSRFGVEVTQAIQKVIDDLAPKDFILGFRGTPEETRGAQVGYTVDEFNGYVDRLLEVADLHYYAIASWGKHIYLNKVRAQDHQGQLVNKVVYDHFKGRLPIIATGSINSPDKARQALKHADLVGMSSAFVTEPDFVLKLQKGRAQDIDLGLEAQDLSDLAIPKKAFQDIMELMDIGGSIPQEGRDQLRGLADQDSTSYFKEFK

SEQ ID NO: 1071 - DNA, 291 bp, Alloiococcus otitidis
  CDS (34)..(288)
gggatttctgaattagtggttgttggagctaccatggctgccgaaagcggcatggaccttgacaacaacttctactttgaagatacttccaatacttccaaatggttcagattaaactttgttgttcctgaagataaggttgacgatgaagtcttgaacaaggttttggatgaataccaaagccaagaaaccttagactatgccaatgaaacaggcgaaggtttctatgctggttgggaaaatgatgacaatccaaacgaagactacgaagaatacgctgaccaacaataa

SEQ ID NO: 1072 - protein, 85 aa, Alloiococcus otitidis
MAAESGMDLDNNFYFEDTSNTSKWFRLNFVVPEDKVDDEVLNKVLDEYQSQETLDYANETGEGFYAGWENDDNPNEDYEEYADQQ

SEQ ID NO: 1073 - DNA, 291 bp, Alloiococcus otitidis; identical to SEQ ID NO: 1071
  CDS (16)..(288)

SEQ ID NO: 1074 - protein, 91 aa, Alloiococcus otitidis
MVVGATMAAESGMDLDNNFYFEDTSNTSKWFRLNFVVPEDKVDDEVLNKVLDEYQSQETLDYANETGEGFYAGWENDDNPNEDYEEYADQQ

SEQ ID NO: 1075 - DNA, 765 bp, Alloiococcus otitidis
  CDS (40)..(762)
accatagatttcattaaccgaattctaggaggaaaagtaatgaaaaggttaaaatttgttactctagcagctgcatccttgaccttggtcgcctgtggtaatggggaccaggaagccgaccaagctgagcctgctgaaacagaagaagctgaaactggatcagaagcagaagacaccggccaagatactggtgaggaagcagaagattcagcggaagccgattctgaagcagaccaagaagagggtgaccaggactcaggtgaggcccaaaatgtcacagttggggtcgtcactgaccgggctgctgaaatttggggcgatgtgtccgaccgcttggaagagaaggaaaatatcaccatcgaacctgtcgttttgtctgactttagacagccaaacgaagcggtttccaatggtgaattggatgccaatgcctaccaatacatccccttcttgtatgaatacaatacagctgagggtgagaacttaagaccgattggctacttaagtgtcgaacccattggcatctgggcggtcgatggtattgaaacagttgatgatgtgccagaaggagcccaagtttccatctataacgacccaaccaacctgggaaactccttaacccacttggaaaaagctggccttatcagcttagatgaagatgctggcccaactcctacccaggatgacattgttgacaacccattgaacttagaatttgttgagttggaagctggacaaattccgcgttccttaggggatttctga

SEQ ID NO: 1076 - protein, 241 aa, Alloiococcus otitidis
MKRLKFVTLAAASLTLVACGNGDQEADQAEPAETEEAETGSEAEDTGQDTGEEAEDSAEADSEADQEEGDQDSGEAQNVTVGVVTDRAAEIWGDVSDRLEEKENITIEPVVLSDFRQPNEAVSNGELDANAYQYIPFLYEYNTAEGENLRPIGYLSVEPIGIWAVDGIETVDDVPEGAQVSIYNDPTNLGNSLTHLEKAGLISLDEDAGPTPTQDDIVDNPLNLEFVELEAGQIPRSLGDF

SEQ ID NO: 1077 - DNA, 435 bp, Alloiococcus otitidis
  CDS (73)..(432)
gcattggcatccaattcaccattggaaaccgcttcgtttggctgtctaaagtcagacaaaacgacaggttcgatggtgatattttccttctcttccaagcggtcggacacatcgccccaaatttcagcagcccggtcagtgacgaccccaactgtgacattttgggcctcacctgagtcctggtcaccctcttcttggtctgcttcagaatcggcttccgctgaatcttctgcttcctcaccagtatcttggccggtgtcttctgcttctgatccagtttcagcttcttctgtttcagcaggctcagcttggtcggcttcctggtccccattaccacaggcgaccaaggtcaaggatgcagctgctagagtaacaaattttaaccttttcattacttttcctcctagaattcggttaatgaaatctatggtttag

SEQ ID NO: 1078 - protein, 120 aa, Alloiococcus otitidis
MVIFSFSSKRSDTSPQISAARSVTTPTVTFWASPESWSPSSWSASESASAESSASSPVSWPVSSASDPVSASSVSAGSAWSASWSPLPQATKVKDAAARVTNFNLFITFPPRIRLMKSMV

SEQ ID NO: 1079 - DNA, 1407 bp, Alloiococcus otitidis
  CDS (130)..(1404)
aaagaccaggaaaggaagaagaccttggcaactaatattcatgaagaccgcctgccaccacaaaatattgaagcggagcaatccgtcttagggtccgtcctcttaaatgcagaagccttggtggcggccatggaatatgtggatgaagatgacttttaccggcgggcccaccagttgatctttaaggccatgatagacctctatgaagacaaccaggccattgatgtcattaccattaaagacaagctggaagccaatgaccagttggaggatatcgggggtgcctcttacctagctgagattgctggggtcaccccaaccgcagctaacgtgtcctattacgctaagattgtggaagatcggtctcttttgcgcaacttgattgcgacagctaatgagattgcccagtctggctacgaagaccatgacgatgtgccagaagttttaaacaatgctgagcagaagatcttgcaggtttctgaaaaacgaaaccggaccggctttgctagtatttcagaaatcctccaccaaaccatcgagcatattgatgaactccaccaaagggatgaagagatcaccgggatttcaactggctacccctacctggacaggatgacttcaggccttcatgaagatgagttgattattgtcgcagcaagaccgggtgtggggaaaacggcttttgccttgaatgtcgcccaaaatatcgggacagccacagatgaaactattgcgattttttcccttgagatgggggctgaacagctggtcaaccggatgttatgttcagaaggcagtattgatgccactaacctccgaaatggcaagctaacgccggaagaatatgaccgtttgtttgtggccatggggagcttgtctgaagctgatatttatattgatgacactcccggcatccggacagctgaaatccgggccaagtgccgccgcctggtccaagagaagggaagtctgggcttgattgtcattgactacctgcaattgatcgaaggagcttcaaactatgaatccagacagcagcaggtgtctgatatatctcggcagctgaagaagctttctaaggaactttctgtcccagttattgccctgtcacaactgtcccggagtgtggaacagagacaagacaagcggcccatcctcagtgacttgcgggaatcagggtcgattgaacaggatgccgatattgtggccttcctttaccgggaggactactaccaaaatgaagaagatatcgatgaggactttgtcgataatagcgtggaagtcattatcgaaaaaaaccggtcaggagctcgaggaacagtcaagttgaactttaagaaagagttcaacaaatttacctcgatttcttaccggtctgaagatgaagtcccagccaactttggctag

SEQ ID NO: 1080 - protein, 425 aa, Alloiococcus otitidis
MEYVDEDDFYRRAHQLIFKAMIDLYEDNQAIDVITIKDKLEANDQLEDIGGASYLAEIAGVTPTAANVSYYAKIVEDRSLLRNLIATANEIAQSGYEDHDDVPEVLNNAEQKILQVSEKRNRTGFASISEILHQTIEHIDELHQRDEEITGISTGYPYLDRMTSGLHEDELIIVAARPGVGKTAFALNVAQNIGTATDETIAIFSLEMGAEQLVNRMLCSEGSIDATNLRNGKLTPEEYDRLFVAMGSLSEADIYIDDTPGIRTAEIRAKCRRLVQEKGSLGLIVIDYLQLIEGASNYESRQQQVSDISRQLKKLSKELSVPVIALSQLSRSVEQRQDKRPILSDLRESGSIEQDADIVAFLYREDYYQNEEDIDEDFVDNSVEVIIEKNRSGARGTVKLNFKKEFNKFTSISYRSEDEVPANFG

SEQ ID NO: 1081 - DNA, 1407 bp, Alloiococcus otitidis; identical to SEQ ID NO: 1079
  CDS (121)..(1404)

SEQ ID NO: 1082 - protein, 428 aa, Alloiococcus otitidis
MAAMEYVDEDDFYRRAHQLIFKAMIDLYEDNQAIDVITIKDKLEANDQLEDIGGASYLAEIAGVTPTAANVSYYAKIVEDRSLLRNLIATANEIAQSGYEDHDDVPEVLNNAEQKILQVSEKRNRTGFASISEILHQTIEHIDELHQRDEEITGISTGYPYLDRMTSGLHEDELIIVAARPGVGKTAFALNVAQNIGTATDETIAIFSLEMGAEQLVNRMLCSEGSIDATNLRNGKLTPEEYDRLFVAMGSLSEADIYIDDTPGIRTAEIRAKCRRLVQEKGSLGLIVIDYLQLIEGASNYESRQQQVSDISRQLKKLSKELSVPVIALSQLSRSVEQRQDKRPILSDLRESGSIEQDADIVAFLYREDYYQNEEDIDEDFVDNSVEVIIEKNRSGARGTVKLNFKKEFNKFTSISYRSEDEVPANFG

SEQ ID NO: 1083 - DNA, 1407 bp, Alloiococcus otitidis; identical to SEQ ID NO: 1079
  CDS (25)..(1404)

SEQ ID NO: 1084 - protein, 460 aa, Alloiococcus otitidis
MATNIHEDRLPPQNIEAEQSVLGSVLLNAEALVAAMEYVDEDDFYRRAHQLIFKAMIDLYEDNQAIDVITIKDKLEANDQLEDIGGASYLAEIAGVTPTAANVSYYAKIVEDRSLLRNLIATANEIAQSGYEDHDDVPEVLNNAEQKILQVSEKRNRTGFASISEILHQTIEHIDELHQRDEEITGISTGYPYLDRMTSGLHEDELIIVAARPGVGKTAFALNVAQNIGTATDETIAIFSLEMGAEQLVNRMLCSEGSIDATNLRNGKLTPEEYDRLFVAMGSLSEADIYIDDTPGIRTAEIRAKCRRLVQEKGSLGLIVIDYLQLIEGASNYESRQQQVSDISRQLKKLSKELSVPVIALSQLSRSVEQRQDKRPILSDLRESGSIEQDADIVAFLYREDYYQNEEDIDEDFVDNSVEVIIEKNRSGARGTVKLNFKKEFNKFTSISYRSEDEVPANFG

SEQ ID NO: 1085 - DNA, 504 bp, Alloiococcus otitidis
  CDS (58)..(501)
ggctgggtctctagaagagtcaggccctgcttgaatagacaagaggaggatttgctcatggaagttattttactagaagatgtcaaaggtaccggcaaaaaaggtgaaattcaaaatgtatcggatggctatgctcgaaactttttgatcaaaaaaggcttggctaaagaagcaacttctggtgctaaaaaacaattgaaggcccaaaagaaagcccgtcaacgagaagagaaagaagcctttgaagaagccaagaaggaaaaagaaatcttagaaaacaatcccattgaaattgaagaaaaggctgctgaagatggccggctctttggatccattaccaccaagcaaattgccgagcatgtccatgaccaattagggatcgagttggacaaacgcaagatcaaccaaaaagttcaaatgcggtccattggtagccaagaagtggaagtgaaactccacaaggatgttacagcaagcttaatggtccgggtcaacgccaagtaa

SEQ ID NO: 1086 - protein, 148 aa, Alloiococcus otitidis
MEVILLEDVKGTGKKGEIQNVSDGYARNFLIKKGLAKEATSGAKKQLKAQKKARQREEKEAFEEAKKEKEILENNPIEIEEKAAEDGRLFGSITTKQIAEHVHDQLGIELDKRKINQKVQMRSIGSQEVEVKLHKDVTASLMVRVNAK

SEQ ID NO: 1087 - DNA, 504 bp, Alloiococcus otitidis; identical to SEQ ID NO: 1085
  CDS (31)..(501)

SEQ ID NO: 1088 - protein, 157 aa, Alloiococcus otitidis
MNRQEEDLLMEVILLEDVKGTGKKGEIQNVSDGYARNFLIKKGLAKEATSGAKKQLKAQKKARQREEKEAFEEAKKEKEILENNPIEIEEKAAEDGRLFGSITTKQIAEHVHDQLGIELDKRKINQKVQMRSIGSQEVEVKLHKDVTASLMVRVNAK

SEQ ID NO: 1089 - DNA, 2016 bp, Alloiococcus otitidis
  CDS (43)..(2013)
attaaaggagtacatatggaaaattctaaccatagcgaccgaatgccggttttattcggctcaaaatcgttaaaaacaattattacgattacttttgtcgcacatattatcttaaccttactaagtttcattggaagtgtttggcaaggtcttataatggttgtcgtttttttaattgcctggggctttggctttcgctttgttaaccagtatcatgaaaaactagacgaatatattatgaacttgtccttccgtattaaacggggggagcaagaagccattatcaaaatgcccatggggattatcctttacaacgatgacctagaaattgagtggatcaacccctatatgcaaaattatgtcaatgatgtggacaacttgatcggcaagtctattggggtggttcatgaatccatattagataagattgtgtcagataaagaattggaccagaatggtttgatcgattggggcgaaaaaacctaccattatgagatccaaaaaggcttgaaggctgtttatctcttggatgtgacagaatatgtagccgtgaagaaggagtatgaacattacaagccggtcattggctggcttttcttggacaactatgacgaagctgttaaagacttggatgaccgggaagtttcggccttggatagtttgctgaccacttatttgtctcgctgggctaaaaataatggtattttttataaaaaaacatctagcgaccgctttttgattatcttaagttacagtgaactgaagactgttgaagagaacaaatttaatattatagactatatcagggaacgaacttctaagcgcaatgtccctctaaccatttccatcgggctggcctatggggaagattccttcaataacctggctgacttggctcagaaaaacctagacctagctctcggtcgaggtggggaccaagctgtcgttaaggaagtgggttatgaaccacgatactacggaggtaaaaccaacccaaccgaaaaacggacccgggttcggtcacggatgatttcccaagccttgcaagaattgattattgaagccaacagtgtctatattatgggccatgctaaccctgatatggatgccatcgggtcttcctttgggattgcccggattgccatgatgttggaacaggaagcccaagtggtgattaaccccaatgacctggctaatgatgtgcaaaaactaatcaaggaaacggaaaaatattcagaaacctatgacaatattgtgacaccgaaagaagctgcagagcgaatcacagaagaagatattgtcatcttagtggaccaccacaagccaaccttgtccattgcaccggaattattgaacaagactaagcggaatgtggtgattgaccaccaccgccgtggggaagaatttaccgaaaaccctctcttggtttacatcgaaccctatgcttcttccacagctgaattgatcacagaattctttgaatatgtcccagtggaaggcaatcctattaacaagattgaagcgactgccctcctgggtgggattatcgttgacaccaacaacttcagcctccggactgggtccagaacctttaactccgcttcctacctccagtcagttggggctaatattaccttgatccaaagactcttgaaagaagacaaggaaacttacctggaacgcagtgaactctttaagaccattgaatttgccaagcatggttgtgctattgcggttggtagcgatgaccagattcaccatccggttacggcagcccagacggcggatgaaatgttgaatatgactgacgtggaagcttcctttgtgattaccaagcgggcagaaaacacagtcggcatctcagcaagaagtttgggtaaaatcaatgttcaacttataatggaagaaatgggtggtggtggacacctatccaatgcggccacccaaatcgatagccaaaccatccaagaagtcaaagacaacctgatcgatattattaattccttagatgattaa

SEQ ID NO: 1090 - protein, 657 aa, Alloiococcus otitidis
MPVLFGSKSLKTIITITFVAHIILTLLSFIGSVWQGLIMVVVFLIAWGFGFRFVNQYHEKLDEYIMNLSFRIKRGEQEAIIKMPMGIILYNDDLEIEWINPYMQNYVNDVDNLIGKSIGVVHESILDKIVSDKELDQNGLIDWGEKTYHYEIQKGLKAVYLLDVTEYVAVKKEYEHYKPVIGWLFLDNYDEAVKDLDDREVSALDSLLTTYLSRWAKNNGIFYKKTSSDRFLIILSYSELKTVEENKFNIIDYIRERTSKRNVPLTISIGLAYGEDSFNNLADLAQKNLDLALGRGGDQAVVKEVGYEPRYYGGKTNPTEKRTRVRSRMISQALQELIIEANSVYIMGHANPDMDAIGSSFGIARIAMMLEQEAQVVINPNDLANDVQKLIKETEKYSETYDNIVTPKEAAERITEEDIVILVDHHKPTLSIAPELLNKTKRNVVIDHHRRGEEFTENPLLVYIEPYASSTAELITEFFEYVPVEGNPINKIEATALLGGIIVDTNNFSLRTGSRTFNSASYLQSVGANITLIQRLLKEDKETYLERSELFKTIEFAKHGCAIAVGSDDQIHHPVTAAQTADEMLNMTDVEASFVITKRAENTVGISARSLGKINVQLIMEEMGGGGHLSNAATQIDSQTIQEVKDNLIDIINSLDD

SEQ ID NO: 1091 - DNA, 2016 bp, Alloiococcus otitidis; identical to SEQ ID NO: 1089
  CDS (16)..(2013)

SEQ ID NO: 1092 - protein, 666 aa, Alloiococcus otitidis
MENSNHSDRMPVLFGSKSLKTIITITFVAHIILTLLSFIGSVWQGLIMVVVFLIAWGFGFRFVNQYHEKLDEYIMNLSFRIKRGEQEAIIKMPMGIILYNDDLEIEWINPYMQNYVNDVDNLIGKSIGVVHESILDKIVSDKELDQNGLIDWGEKTYHYEIQKGLKAVYLLDVTEYVAVKKEYEHYKPVIGWLFLDNYDEAVKDLDDREVSALDSLLTTYLSRWAKNNGIFYKKTSSDRFLIILSYSELKTVEENKFNIIDYIRERTSKRNVPLTISIGLAYGEDSFNNLADLAQKNLDLALGRGGDQAVVKEVGYEPRYYGGKTNPTEKRTRVRSRMISQALQELIIEANSVYIMGHANPDMDAIGSSFGIARIAMMLEQEAQVVINPNDLANDVQKLIKETEKYSETYDNIVTPKEAAERITEEDIVILVDHHKPTLSIAPELLNKTKRNVVIDHHRRGEEFTENPLLVYIEPYASSTAELITEFFEYVPVEGNPINKIEATALLGGIIVDTNNFSLRTGSRTFNSASYLQSVGANITLIQRLLKEDKETYLERSELFKTIEFAKHGCAIAVGSDDQIHHPVTAAQTADEMLNMTDVEASFVITKRAENTVGISARSLGKINVQLIMEEMGGGGHLSNAATQIDSQTIQEVKDNLIDIINSLDD

SEQ ID NO: 1093 - DNA, 255 bp, Alloiococcus otitidis
  CDS (19)..(252)
gaaaaggaggcggataaaatggctggacgtcgcggaggaagaagacgtagaaaagttgacttttttgctgctaatcacattgactacatcgactacaaagatgtagacctactcaaacgtttcatttcagaacgaggaaaaatcttacctcgtcgagttactggaacttacgcaaaaaaccaacgtaaattaacgaaagcaattaaacgtgcacgttttatgggcttactgccttatgttgcggaagacaactag

SEQ ID NO: 1094 - protein, 78 aa, Alloiococcus otitidis
MAGRRGGRRRRKVDFFAANHIDYIDYKDVDLLKRFISERGKILPRRVTGTYAKNQRKLTKAIKRARFMGLLPYVAEDN

SEQ ID NO: 1095 - DNA, 567 bp, Alloiococcus otitidis
  CDS (91)..(564)
agaggagtaagtggattgatcaataatgttactttagttggaagattaacccgtgatgctgaactcagatatacaggtaacgggacagcagtgacatcttttaccattgctgcagaccgcccctttaaaaatagccaaggaaaccgggacgcagactttattaactgtgttgcttggcgtagaactgcagaaactgtcgccagttttacgaaaaaaggttccttggtaggggttgttggccggatccagacccgtaattatgaaaataatgaagggcggacggtttacgttactgaagtagttgttgaaagcttccaaatgttggagccgaaatcagttactgatagccgtcgttctcaaagcggccaaactgggggcaactaccaaggtcaaaatcaatctttcaacactcaaaactctaatgccttcaatcaaaatcagggacaaaacaacaattcatttggtcaaggcgacaatccatttgaccaaaatgattcccaagatgaagatccctttgaagctgatgatgattcaatccatattagtgacgacgatttacctttttaa

SEQ ID NO: 1096 - protein, 158 aa, Alloiococcus otitidis
MTSFTIAADRPFKNSQGNRDADFINCVAWRRTAETVASFTKKGSLVGVVGRIQTRNYENNEGRTVYVTEVVVESFQMLEPKSVTDSRRSQSGQTGGNYQGQNQSFNTQNSNAFNQNQGQNNNSFGQGDNPFDQNDSQDEDPFEADDDSIHISDDDLPF

SEQ ID NO: 1097 - DNA, 567 bp, Alloiococcus otitidis; identical to SEQ ID NO: 1095
  CDS (16)..(564)

SEQ ID NO: 1098 - protein, 183 aa, Alloiococcus otitidis
MINNVTLVGRLTRDAELRYTGNGTAVTSFTIAADRPFKNSQGNRDADFINCVAWRRTAETVASFTKKGSLVGVVGRIQTRNYENNEGRTVYVTEVVVESFQMLEPKSVTDSRRSQSGQTGGNYQGQNQSFNTQNSNAFNQNQGQNNNSFGQGDNPFDQNDSQDEDPFEADDDSIHISDDDLPF

SEQ ID NO: 1099 - DNA, 333 bp, Alloiococcus otitidis
  CDS (31)..(330)
gccaaaagaccaaaaggaggtgtcagtcaaatgaatcagacagcaaaatatgaaattctatatattattcgtcctgacctagatgaagatagtaaaaaggccttaattgaccgttataacactatcttgtcagacaatggagctgaaatttctgaatctaaagactgggctaagcgccgttttgcatatgaaatacaaggttacaaagaaggaacttaccacttggtaaccttcactactgaccaagtcgatgcaattaacgagtttgaacgcctagtccgcatcaatgatgatgtattacgtcacatggttgtccgtctagatacaaaataa

SEQ ID NO: 1100 - protein, 100 aa, Alloiococcus otitidis
MNQTAKYEILYIIRPDLDEDSKKALIDRYNTILSDNGAEISESKDWAKRRFAYEIQGYKEGTYHLVTFTTDQVDAINEFERLVRINDDVLRHMVVRLDTK

SEQ ID NO: 1101 - DNA, 2484 bp, Alloiococcus otitidis
  CDS (64)..(2481)
aggaggaaattgtttttggaagagagagatagccgtttagaacagattaagctgtccaaggagatgaaaaactcattcttagactatgccatgagtgtcatcgtctcccgggccctacccgatgtccgggacggcttgaagccggttcaccgaagaatcctgtacggaatgaatgaactgggcttaaccccggacaagtcttataaaaagtctgcccgtattgtaggggatgttatggggaaataccacccccacggtgacactgctatttatgactccatggtcagaatggcccaggacttttcttaccgagttcccttagtggacggccatgggaactttgggtcggttgacggggacggagctgctgccatgcggtataccgaagcccggatgtccaagatggccttggaactcctgcgagacatcaacaaggataccattgactaccacgataactatgatgggactgagtcggaacccgatatccttcctgcccgcttccccaacctcttagtcaacggggcttcggggattgctgttgggatggcaaccaatatcccaccccacaatcttaaggaagtcattgatgcctgcgtcctcttgatggaaaatgaggatgtgactgtggctgaccttatggaagtcttaccaggacctgactttccgactggggcttcccttattggtgtttctggcgtccgcaaggcttatgagaccggtcgtgggtccattaaattacgggccaagtcccggatcgatgtcgaccaaaaaggtaaggaaagaattattatcgacgaaattccttacatggtcaacaaggccaaattggtcgaaaagattgcggaactggctcgggacaagaaaattgacggcattaccgatttaaatgatgagtctgaccgggaaggcttgcggattgtgatcgatgtacgccgggatacttctgctggtatattacttaacaagctttacaaaatgacccaattgcaggtttcttttggctttaacatgctggctatcgtcgatggggtgcccaaaaccttgggcctcaaagacatcctgacccactacttagaccatcaaaaaactgttatccgcaggcggacagagtttgacaagaacaaggctgaatcgcgggcccacatcttagaagggcttcggactgccttagaccatatcgatgccattattaccattatccgtcagtcccagcaagctgaagaagccaaaagtcaattgatggcttcttatgacctctctgaccgtcaagcccaggcgattttagacatgcggatggtccggttgactggtttggaaagagagaaaattgaagatgaatacgctgaactcttagaaaaaatcgaggacttgcgtgacatcttggcccggccagaacggatcaagcaaattatcaaagaagaaatgatcgaaattgctgaaaaacacggccaagaccgcctaactgacatccgggttggggaagagttgagcattgaagacgaagacttgattgaagaagaagatatcatcattaccctgtctcgaaaaggctatatcaaacggatgccggctggagaattcaaggcccaaaaccgcggtggccgtggggttaaggggatgactaccaacgatggggactttgttgaacagctgactttctgttctagtcatgaccaaatcctcttctttaccaaccaaggcaaggtttataagatcaaggcctacgaaatcccggaatatgggcgtaatgccaagggaattcctgccatcaactttttaaatatagataaagatgaatatattcaagccatggtcaacttgactgaccaggcagatgaccaggaccaattcttctttgcgacaagacttggccgggtcaaacggacggcccagtctgaatttcaaaatatcagaagtagcgggttgaacgcgatcaatctaaatgaaggcgatgaattggttaacgtggtccctacccacaatgaccaggccattatcctggccagccagcaaggctatgcggtctactttgatgaaaaagatatccgtagcatgggtcgaggggctgcaggtgtccgtggaattcgcttaggtgatggcgacacagtggttgccatggaagtcttagagccgggccaagacgtattagtcattactgaaaaagggtacggcaaacgaacctcccaagaagagtacaccctccacaagcgagggggcaagggggttaaaacccttcatattaccgataagaatggtcccctaattggactgaaaactgtctctggtggtgaggacgtcatgattgtcaccgaccaaggtatcatgattcgtatcgaagccgacagcatctctcagacctcccgcctaacccaaggtgtccgtttaattcgacttgaagaagatagccgggtgtcaacggtagccctcattgatattgaccaagagcttgacaatcaagttaaccaaaccgttgaggaataa

SEQ ID NO: 1102 - protein, 806 aa, Alloiococcus otitidis
MKNSFLDYAMSVIVSRALPDVRDGLKPVHRRILYGMNELGLTPDKSYKKSARIVGDVMGKYHPHGDTAIYDSMVRMAQDFSYRVPLVDGHGNFGSVDGDGAAAMRYTEARMSKMALELLRDINKDTIDYHDNYDGTESEPDILPARFPNLLVNGASGIAVGMATNIPPHNLKEVIDACVLLMENEDVTVADLMEVLPGPDFPTGASLIGVSGVRKAYETGRGSIKLRAKSRIDVDQKGKERIIIDEIPYMVNKAKLVEKIAELARDKKIDGITDLNDESDREGLRIVIDVRRDTSAGILLNKLYKMTQLQVSFGFNMLAIVDGVPKTLGLKDILTHYLDHQKTVIRRRTEFDKNKAESRAHILEGLRTALDHIDAIITIIRQSQQAEEAKSQLMASYDLSDRQAQAILDMRMVRLTGLEREKIEDEYAELLEKIEDLRDILARPERIKQIIKEEMIEIAEKHGQDRLTDIRVGEELSIEDEDLIEEEDIIITLSRKGYIKRMPAGEFKAQNRGGRGVKGMTTNDGDFVEQLTFCSSHDQILFFTNQGKVYKIKAYEIPEYGRNAKGIPAINFLNIDKDEYIQAMVNLTDQADDQDQFFFATRLGRVKRTAQSEFQNIRSSGLNAINLNEGDELVNVVPTHNDQAIILASQQGYAVYFDEKDIRSMGRGAAGVRGIRLGDGDTVVAMEVLEPGQDVLVITEKGYGKRTSQEEYTLHKRGGKGVKTLHITDKNGPLIGLKTVSGGEDVMIVTDQGIMIRIEADSISQTSRLTQGVRLIRLEEDSRVSTVALIDIDQELDNQVNQTVEE

SEQ ID NO: 1103 - DNA, 2484 bp, Alloiococcus otitidis; identical to SEQ ID NO: 1101
  CDS (10)..(2481)

SEQ ID NO: 1104 - protein, 824 aa, Alloiococcus otitidis
MFLEERDSRLEQIKLSKEMKNSFLDYAMSVIVSRALPDVRDGLKPVHRRILYGMNELGLTPDKSYKKSARIVGDVMGKYHPHGDTAIYDSMVRMAQDFSYRVPLVDGHGNFGSVDGDGAAAMRYTEARMSKMALELLRDINKDTIDYHDNYDGTESEPDILPARFPNLLVNGASGIAVGMATNIPPHNLKEVIDACVLLMENEDVTVADLMEVLPGPDFPTGASLIGVSGVRKAYETGRGSIKLRAKSRIDVDQKGKERIIIDEIPYMVNKAKLVEKIAELARDKKIDGITDLNDESDREGLRIVIDVRRDTSAGILLNKLYKMTQLQVSFGFNMLAIVDGVPKTLGLKDILTHYLDHQKTVIRRRTEFDKNKAESRAHILEGLRTALDHIDAIITIIRQSQQAEEAKSQLMASYDLSDRQAQAILDMRMVRLTGLEREKIEDEYAELLEKIEDLRDILARPERIKQIIKEEMIEIAEKHGQDRLTDIRVGEELSIEDEDLIEEEDIIITLSRKGYIKRMPAGEFKAQNRGGRGVKGMTTNDGDFVEQLTFCSSHDQILFFTNQGKVYKIKAYEIPEYGRNAKGIPAINFLNIDKDEYIQAMVNLTDQADDQDQFFFATRLGRVKRTAQSEFQNIRSSGLNAINLNEGDELVNVVPTHNDQAIILASQQGYAVYFDEKDIRSMGRGAAGVRGIRLGDGDTVVAMEVLEPGQDVLVITEKGYGKRTSQEEYTLHKRGGKGVKTLHITDKNGPLIGLKTVSGGEDVMIVTDQGIMIRIEADSISQTSRLTQGVRLIRLEEDSRVSTVALIDIDQELDNQVNQTVEE

SEQ ID NO: 1105 - DNA, 285 bp, Alloiococcus otitidis
  CDS (58)..(282)
ccttttcgagacagggtaatgatgatatcttcttcttcaatcaagtcttcgtcttcaatgctcaactcttccccaacccggatgtcagttaggcggtcttggccgtgtttttcagcaatttcgatcatttcttctttgataatttgcttgatccgttctggccgggccaagatgtcacgcaagtcctcgattttttctaagagttcagcgtattcatcttcaattttctctctttccaaaccagtcaaccggaccatccgcatgtctaaaatcgcctgggcttga

SEQ ID NO: 1106 - protein, 75 aa, Alloiococcus otitidis
MLNSSPTRMSVRRSWPCFSAISIISSLIICLIRSGRAKMSRKSSIFSKSSAYSSSIFSLSKPVNRTIRMSKIAWA

SEQ ID NO: 1107 - DNA, 285 bp, Alloiococcus otitidis; identical to SEQ ID NO: 1105
  CDS (19)..(282)

SEQ ID NO: 1108 - protein, 88 aa, Alloiococcus otitidis
MMISSSSIKSSSSMLNSSPTRMSVRRSWPCFSAISIISSLIICLIRSGRAKMSRKSSIFSKSSAYSSSIFSLSKPVNRTIRMSKIAWA

SEQ ID NO: 1109 - DNA, 1956 bp, Alloiococcus otitidis
  CDS (7)..(1953)
cgtgtaatggctgaagatagaccattaacaccaaatgagttagcagaactgaaaaaaacatatgatgctagtcaaatccaagtcttagaaggcctagaagcagtcagagtacggccgggtatgtacattgggtccaccagcaaggaaggcctccaccacttggtatgggagatcgtggacaatgctattgacgaagctatggccggttatgccgacaagatttctgtttccattttggaaggcgacgtgatccaagtggctgataacggccggggcatcccggttgatatccaggaaaaaacaggccggccagctgttgaaactgtctttacagtcctccacgctggtgggaaatttggtggcggtggttacaaggtttccggtggtctgcacggtgtagggtcttctgtggtcaatgctctctccgaatacctccaagtccaggtgcaccgagatggtaaaatctaccaacaagtttacaagcggggcttggttgattctgacttggaagtggtgggtgagactgaccacactggaactattgttacctttaaggcagatagtttgatttttaaagacactacttcttatgacttcaataccttagccacccggatccgggagttggccttcttaaaccgaggcttgaatatttccatcgaagacaaacggcaagcaggcgggcagtctttgaactaccactatgaaggtgggatatcgagttatgttgaccacttgaattccagccgtgaagttctttatgagaccccaattttcttggaaggggaagaagaagggatttctgtggaaattgccctccagcataccgatagcttccatactaatttaatgagttttgccaataacatccacacctatgagggtggcatgcatatttccggcttcaagacagcccttacccgggcggtcaacgactatgcccggcagaataacttgctccgagagtcagaggataactttaccggcgatgacgttcgggaaggtctgacggtggttttgtcaatcaagcacccagacccccaatttgaaggacaaaccaagactaagctggggaactctgaagtcagagggataattgaccggctctttagccagcactttgaacgttacctcatggaaaatccaaaggttggtaagcggattgttgacaaggcgcttttggcttccaaagcccgccaagcagccaagagagcccgggaagtcacccggaagaaatcaggcttagaaattagcaacctaccaggtaaattagctgactgttcttccaaagatcctgaagaatccgaactctttattgtagaaggggattcagctggagggtcggctaagcaaggtcggtcccgggttttccaggctattttgccgattcgtggtaagattttgaatgtcgaaaaagccagcattgaccgtatcttagccaatgaagaaatccggtctctctttacagccatgggaactggcttcggggaagaatttaatgttgaagaagctcgctacaataagttaattatcatgacagatgctgatgttgacggagcccacattcggaccttgctcttgacccttctttaccggtatatgcggcccttgattgaagcaggtttcgtctacattgcccagccacccctctaccaggtcaagcaaggcaagaaggttaaatactttgatagtgaccgggaactggactcctacttgaaagaaattcctgactcacccaagccttctgtccaacgctacaaaggcttaggagaaatggatgctgagcagttgtgggaaaccaccatgaacccagaacaccgccgcttacttcgggtagacgtagacgacgccattgaggctgacactatttttgacatgttgatgggtgaggatgtcaaaccccggcgcgactttatcaaagaaaatgcccgttacgtggaaaatatcgatatctag

SEQ ID NO: 1110 - protein, 649 aa, Alloiococcus otitidis
MAEDRPLTPNELAELKKTYDASQIQVLEGLEAVRVRPGMYIGSTSKEGLHHLVWEIVDNAIDEAMAGYADKISVSILEGDVIQVADNGRGIPVDIQEKTGRPAVETVFTVLHAGGKFGGGGYKVSGGLHGVGSSVVNALSEYLQVQVHRDGKIYQQVYKRGLVDSDLEVVGETDHTGTIVTFKADSLIFKDTTSYDFNTLATRIRELAFLNRGLNISIEDKRQAGGQSLNYHYEGGISSYVDHLNSSREVLYETPIFLEGEEEGISVEIALQHTDSFHTNLMSFANNIHTYEGGMHISGFKTALTRAVNDYARQNNLLRESEDNFTGDDVREGLTVVLSIKHPDPQFEGQTKTKLGNSEVRGIIDRLFSQHFERYLMENPKVGKRIVDKALLASKARQAAKRAREVTRKKSGLEISNLPGKLADCSSKDPEESELFIVEGDSAGGSAKQGRSRVFQAILPIRGKILNVEKASIDRILANEEIRSLFTAMGTGFGEEFNVEEARYNKLIIMTDADVDGAHIRTLLLTLLYRYMRPLIEAGFVYIAQPPLYQVKQGKKVKYFDSDRELDSYLKEIPDSPKPSVQRYKGLGEMDAEQLWETTMNPEHRRLLRVDVDDAIEADTIFDMLMGEDVKPRRDFIKENARYVENIDI

SEQ ID NO: 1111 - DNA, 387 bp, Alloiococcus otitidis
  CDS (43)..(384)
cgagcttcttcaacattaaattcttccccgaagccagttcccatggctgtaaagagagaccggatttcttcattggctaagatacggtcaatgctggctttttcgacattcaaaatcttaccacgaatcggcaaaatagcctggaaaacccgggaccgaccttgcttagccgaccctccagctgaatccccttctacaataaagagttcggattcttcaggatctttggaagaacagtcagctaatttacctggtaggttgctaatttctaagcctgatttcttccgggtgacttcccgggctctcttggctgcttggcgggctttggaagccaaaagcgccttgtcaacaatccgcttaccaacctttggattttccatgaggtaa

SEQ ID NO: 1112 - protein, 114 aa, Alloiococcus otitidis
MAVKRDRISSLAKIRSMLAFSTFKILPRIGKIAWKTRDRPCLADPPAESPSTIKSSDSSGSLEEQSANLPGRLLISKPDFFRVTSRALLAAWRALEAKSALSTIRLPTFGFSMR

SEQ ID NO: 1113 - DNA, 1161 bp, Alloiococcus otitidis
  CDS (25)..(1158)
atcagcccaacaagtgtgatccagatgatcttggacgacctcgaattaaagggctttcgcaactaccaggaggccaatttacagttttcccccggggttaatgtcttccttggtgcaaacgcccaagggaaaaccaaccttttggaaagcatttatttcctgggcctggcccggagccaccggacagccaaggacaaagaattgatcaagtgggatgaggactttactcgggtcaagggcttggttcggacaagccacaactcttatcccttagagatttcagtgtccaaaacaggtaaacaagctaaaatgaaccacttggaccaaaataagttgagtcactatattgggaatttgaatattatcctctttgccccggaagacttggaattagttaagggtcccccagccactaggcgacggtttattgacattgaattgggtcagatgaacccaatctatctccaccaggtggtcgaataccaaagggttcttaaacagcgcaatcaatacttgaagctgtctaaccagcccaaaaaatttgaccagctttacctggaaattttgacggaccaattggcccaggcaggcagtcaagtgatttatgaccgcaagcaattttccaaggacttggaagctttggcccagcctatccaggccaatatttcccagtccaaggaagagttgacagtcaagtatgaaaccagcgtccaagatgacaatctgagtcaaaaggagtccatctactctaatcttttagacttgtacgaccaaaaccaggacaaggaattccgccggcagaccacggtagtaggcccccaccgagatgatttagccttttacgtcaatggacacaatgtccaaacttatgggtcccagggccagcagcggaccactagcttgtcggtcaagttggccgagattgacttgatgaaggacaaaacctcagaataccctgtcttgcttttagacgatgttctcagcgaattggacgacaaccgtcaaacccatttgctaaaaaccattgaaaataaagtccaagtttttttaacaacaaccagtctagaaggtgtcaaaattgaacttttaaaccaaccgaaaatttactcggtgacaagcggtcaagtgactgttgacagtgaccgtggacagggcgagtga

SEQ ID NO: 1114 - protein, 378 aa, Alloiococcus otitidis
MILDDLELKGFRNYQEANLQFSPGVNVFLGANAQGKTNLLESIYFLGLARSHRTAKDKELIKWDEDFTRVKGLVRTSHNSYPLEISVSKTGKQAKMNHLDQNKLSHYIGNLNIILFAPEDLELVKGPPATRRRFIDIELGQMNPIYLHQVVEYQRVLKQRNQYLKLSNQPKKFDQLYLEILTDQLAQAGSQVIYDRKQFSKDLEALAQPIQANISQSKEELTVKYETSVQDDNLSQKESIYSNLLDLYDQNQDKEFRRQTTVVGPHRDDLAFYVNGHNVQTYGSQGQQRTTSLSVKLAEIDLMKDKTSEYPVLLLDDVLSELDDNRQTHLLKTIENKVQVFLTTTSLEGVKIELLNQPKIYSVTSGQVTVDSDRGQGE

SEQ ID NO: 1115 - DNA, 1161 bp, Alloiococcus otitidis; identical to SEQ ID NO: 1113
  CDS (16)..(1158)

SEQ ID NO: 1116 - protein, 381 aa, Alloiococcus otitidis
MIQMILDDLELKGFRNYQEANLQFSPGVNVFLGANAQGKTNLLESIYFLGLARSHRTAKDKELIKWDEDFTRVKGLVRTSHNSYPLEISVSKTGKQAKMNHLDQNKLSHYIGNLNIILFAPEDLELVKGPPATRRRFIDIELGQMNPIYLHQVVEYQRVLKQRNQYLKLSNQPKKFDQLYLEILTDQLAQAGSQVIYDRKQFSKDLEALAQPIQANISQSKEELTVKYETSVQDDNLSQKESIYSNLLDLYDQNQDKEFRRQTTVVGPHRDDLAFYVNGHNVQTYGSQGQQRTTSLSVKLAEIDLMKDKTSEYPVLLLDDVLSELDDNRQTHLLKTIENKVQVFLTTTSLEGVKIELLNQPKIYSVTSGQVTVDSDRGQGE

SEQ ID NO: 1117 - DNA, 246 bp, Alloiococcus otitidis
  CDS (4)..(243)
ggagtgaaccctgtggcttttgagactgttacaattgatggggattacataaccctagcccagctcttaaagtttaccgatattatcagcagtggtggcatggccaagccttttttagcggaataccaggtctttttaaatggggacttggaagaccgacgtggcaagaaggtctacccgggtgaccttgtcgaaattccggctatccaagctagctttcaaattgaatcagcccaacaagtgtga

SEQ ID NO: 1118 - protein, 80 aa, Alloiococcus otitidis
MNPVAFETVTIDGDYITLAQLLKFTDIISSGGMAKPFLAEYQVFLNGDLEDRRGKKVYPGDLVEIPAIQASFQIESAQQV

SEQ ID NO: 1119 - DNA, 1218 bp, Alloiococcus otitidis
  CDS (445)..(1215)
agacctaatcattttttgaaatggagaaagacaaaaaccatctatggtatacttaagaacaaaaggaagtttggagggatttttttgaaattttcagtaaaacggacggaatttctaaaagtattaaaaaaagtacagattgcagtgtcttctaaaagtaccatcgctatcttgaccgggattaaattagaagcggataaccagggtttaaccttaaccggatctaactcggatatctcagttgaaagttacttatctgtgaccgatgaaggggcggatttggttattgatgagccggggcagattgtcttgcaaccagcccggttatttgccaatatcgtccaaaaattaccggacacccactttaaggtaaacgttagccaaggccagcaaacccaaatcacctcagcttcagcctcctttactatcaacggcattgacgccatgtcctacccccacttgccagatatcgacctggaggaatcctttaccctgccggttgacctctttaaaaacatgatcaaccagactgtcatcgcagtctccaaccatgaaagtcggcccatcctaactggggttaacctatctctcaaagagggccgactcaaggcagtggcaaccgacagccaccgtttgtcgcaacggtccatccaattagagtcagcgcctgatatttcctttgacattgtgataccaggtaagtctttgactgaactgactaagttgatggatgcagatgaagaagtccgggtagccatcagcgacaaccaaatcctatttgccctctccagcagccagttttactctcggctcctagaaggtaagtatcctgataccgaccgcttgatcccaggcgacaccccaacggaaatcaccttggacaccaaggaattacagggggctgttgaccgggcttccctcctctcccatgaagggaaaaacaatgtggtccaactcacagtgactgctgaaaagttggaaatcgaaggccagtcagctgaagtgggccatgtccaagaagaaattgactttggccacttccaaggccaagacttaaccatttctttcaaccccgactacttaaaagaggccttggctacctttggtcaaggagaaattaagttgaaattagtttcgaccttgcgaccctttgtcatcgtcccaagtgaggaccaaggagactttatccaacttattactccaatccgaacagcctaa

SEQ ID NO: 1120 - protein, 257 aa, Alloiococcus otitidis
MSYPHLPDIDLEESFTLPVDLFKNMINQTVIAVSNHESRPILTGVNLSLKEGRLKAVATDSHRLSQRSIQLESAPDISFDIVIPGKSLTELTKLMDADEEVRVAISDNQILFALSSSQFYSRLLEGKYPDTDRLIPGDTPTEITLDTKELQGAVDRASLLSHEGKNNVVQLTVTAEKLEIEGQSAEVGHVQEEIDFGHFQGQDLTISFNPDYLKEALATFGQGEIKLKLVSTLRPFVIVPSEDQGDFIQLITPIRTA

SEQ ID NO: 1121 - DNA, 1218 bp, Alloiococcus otitidis; identical to SEQ ID NO: 1119
  CDS (145)..(1215)

SEQ ID NO: 1122 - protein, 357 aa, Alloiococcus otitidis
MSSKSTIAILTGIKLEADNQGLTLTGSNSDISVESYLSVTDEGADLVIDEPGQIVLQPARLFANIVQKLPDTHFKVNVSQGQQTQITSASASFTINGIDAMSYPHLPDIDLEESFTLPVDLFKNMINQTVIAVSNHESRPILTGVNLSLKEGRLKAVATDSHRLSQRSIQLESAPDISFDIVIPGKSLTELTKLMDADEEVRVAISDNQILFALSSSQFYSRLLEGKYPDTDRLIPGDTPTEITLDTKELQGAVDRASLLSHEGKNNVVQLTVTAEKLEIEGQSAEVGHVQEEIDFGHFQGQDLTISFNPDYLKEALATFGQGEIKLKLVSTLRPFVIVPSEDQGDFIQLITPIRTA

SEQ ID NO: 1123 - DNA, 1218 bp, Alloiococcus otitidis; identical to SEQ ID NO: 1119
  CDS (16)..(1215)

SEQ ID NO: 1124 - protein, 400 aa, Alloiococcus otitidis
MKWRKTKTIYGILKNKRKFGGIFLKFSVKRTEFLKVLKKVQIAVSSKSTIAILTGIKLEADNQGLTLTGSNSDISVESYLSVTDEGADLVIDEPGQIVLQPARLFANIVQKLPDTHFKVNVSQGQQTQITSASASFTINGIDAMSYPHLPDIDLEESFTLPVDLFKNMINQTVIAVSNHESRPILTGVNLSLKEGRLKAVATDSHRLSQRSIQLESAPDISFDIVIPGKSLTELTKLMDADEEVRVAISDNQILFALSSSQFYSRLLEGKYPDTDRLIPGDTPTEITLDTKELQGAVDRASLLSHEGKNNVVQLTVTAEKLEIEGQSAEVGHVQEEIDFGHFQGQDLTISFNPDYLKEALATFGQGEIKLKLVSTLRPFVIVPSEDQGDFIQLITPIRTA

SEQ ID NO: 1125 - DNA, 1404 bp, Alloiococcus otitidis
  CDS (289)..(1401)
atctgtggaaaactccaagcgatcgtggtaaaatttggtgtatattattttttgtcaggaggaagaagattgaccgacaagcaagaattatggtcttttatccgagacaagtttcaagattctctcgccaaaattagctttgacgcctggataaactcagccgacttgatcgacatcagccaggacacggtgaccatccaagtccaatccaccttgcacaaggactattgggaaaacaatttaaccaatcagacagtccaatacctctatgagtattttggcaaggaaatgaccccccgctttgttaccgaagatgaaaaccaagcccaaatggaccagacccagctcgagaaccaaaagcaagacagccgccctcctgcctttaagccaagttctttaaatgacaaatacacttttgagacctttgtcattggcaagggcaaccagatggcccatgccgcagctttagttgtttccgaagagcctgggaccatctacaaccccctctttttctacgggggcgtgggtttgggcaaaactcacctcatgcatgctattggccaccaatacctccagctcaacccccaagccaatgttaagtatgtcacctcagaaaattttgccaacgactttattaactctatccaggaccggacccaggagagtttccgccaagaataccggaatgtggacttgcttttggttgatgacatccagttctttgccgacaaggaagggacccaggaagagtttttccacacctttaacgagctctatgacaagcgtaagcaaattgttttgactagtgaccgcttgcccaacgaaattcccaagcttcaggaacgtctggtctcccgctttgcctggggtctgtctgttgacattactccccctgacttggagacccggattgccatcttaaggaagaaggccaatgctgaacgactggaaatcccagacgaaactcttagctatattgcagggcaaattgactccaacatcagagagctggaaggggccctggtccgggtccaggccttttctgccatccaacaaagcgatatcaccaccagcctggcagcggacgccttgaaaagtatggttaaagtagacaagaaagaaaacttgtccatccccaccatccagcaaaaggtctgcaagcactttggcattaccctggcggagatgaaggggaaaaaacggaccaaacacattgtcattccccggcaagtagccatgtacctatcccgggaatacaccactagctccctgcccaaaatcggtaaggaatttggcggcaaggaccataccactgtcatccatgcccacgaaaaaattcaaaaattgatgaaagaagaccccgatctcaaacaggatatcgctgacttggaaaaacaattgtag

SEQ ID NO: 1126 - protein, 371 aa, Alloiococcus otitidis
MTPRFVTEDENQAQMDQTQLENQKQDSRPPAFKPSSLNDKYTFETFVIGKGNQMAHAAALVVSEEPGTIYNPLFFYGGVGLGKTHLMHAIGHQYLQLNPQANVKYVTSENFANDFINSIQDRTQESFRQEYRNVDLLLVDDIQFFADKEGTQEEFFHTFNELYDKRKQIVLTSDRLPNEIPKLQERLVSRFAWGLSVDITPPDLETRIAILRKKANAERLEIPDETLSYIAGQIDSNIRELEGALVRVQAFSAIQQSDITTSLAADALKSMVKVDKKENLSIPTIQQKVCKHFGITLAEMKGKKRTKHIVIPRQVAMYLSREYTTSSLPKIGKEFGGKDHTTVIHAHEKIQKLMKEDPDLKQDIADLEKQL

SEQ ID NO: 1127 - DNA, 1404 bp, Alloiococcus otitidis; identical to SEQ ID NO: 1125
  CDS (52)..(1401)

SEQ ID NO: 1128 - protein, 450 aa, Alloiococcus otitidis
MSGGRRLTDKQELWSFIRDKFQDSLAKISFDAWINSADLIDISQDTVTIQVQSTLHKDYWENNLTNQTVQYLYEYFGKEMTPRFVTEDENQAQMDQTQLENQKQDSRPPAFKPSSLNDKYTFETFVIGKGNQMAHAAALVVSEEPGTIYNPLFFYGGVGLGKTHLMHAIGHQYLQLNPQANVKYVTSENFANDFINSIQDRTQESFRQEYRNVDLLLVDDIQFFADKEGTQEEFFHTFNELYDKRKQIVLTSDRLPNEIPKLQERLVSRFAWGLSVDITPPDLETRIAILRKKANAERLEIPDETLSYIAGQIDSNIRELEGALVRVQAFSAIQQSDITTSLAADALKSMVKVDKKENLSIPTIQQKVCKHFGITLAEMKGKKRTKHIVIPRQVAMYLSREYTTSSLPKIGKEFGGKDHTTVIHAHEKIQKLMKEDPDLKQDIADLEKQL

SEQ ID NO: 1129 - DNA, 1404 bp, Alloiococcus otitidis; identical to SEQ ID NO: 1125
  CDS (25)..(1401)

SEQ ID NO: 1130 - protein, 459 aa, Alloiococcus otitidis
MVKFGVYYFLSGGRRLTDKQELWSFIRDKFQDSLAKISFDAWINSADLIDISQDTVTIQVQSTLHKDYWENNLTNQTVQYLYEYFGKEMTPRFVTEDENQAQMDQTQLENQKQDSRPPAFKPSSLNDKYTFETFVIGKGNQMAHAAALVVSEEPGTIYNPLFFYGGVGLGKTHLMHAIGHQYLQLNPQANVKYVTSENFANDFINSIQDRTQESFRQEYRNVDLLLVDDIQFFADKEGTQEEFFHTFNELYDKRKQIVLTSDRLPNEIPKLQERLVSRFAWGLSVDITPPDLETRIAILRKKANAERLEIPDETLSYIAGQIDSNIRELEGALVRVQAFSAIQQSDITTSLAADALKSMVKVDKKENLSIPTIQQKVCKHFGITLAEMKGKKRTKHIVIPRQVAMYLSREYTTSSLPKIGKEFGGKDHTTVIHAHEKIQKLMKEDPDLKQDIADLEKQL

SEQ ID NO: 1131 - DNA, 333 bp, Alloiococcus otitidis
  CDS (1)..(330)
ttgtttccgaagagcctgggaccatctacaaccccctctttttctacgggggcgtgggtttgggcaaaactcacctcatgcatgctattggccaccaatacctccagctcaacccccaagccaatgttaagtatgtcacctcagaaaattttgccaacgactttattaactctatccaggaccggacccaggagagtttccgccaagaataccggaatgtggacttgcttttggttgatgacatccagttctttgccgacaaggaagggacccaggaagagtttttccacacctttaacgagctctatgacaagcgtaagcaaattgttttga

SEQ ID NO: 1132 - protein, 110 aa, Alloiococcus otitidis
MFPKSLGPSTTPSFSTGAWVWAKLTSCMLLATNTSSSTPKPMLSMSPQKILPTTLLTLSRTGPRRVSAKNTGMWTCFWLMTSSSLPTRKGPRKSFSTPLTSSMTSVSKLF

SEQ ID NO: 1133 - DNA, 426 bp, Alloiococcus otitidis
  CDS (70)..(423)
aggtcgcctatttttttaaaccaggagactgggcaatggactgcattagaagataggagggcgaatttcatgaaaaaagcttaccgggttaagtctgacaaagacttccaaggggtgttccaaaagggcaagtcattcgccaaccgtcaatttgttgtctacgtcttggccaagccggaccaagaccacttccgcttgggggtatccgttgggaaaaaaattggcaatgccgttattcgcaaccggattaagcggaagatgcgtcaggcagtctttgaattagaccaagcaggcttgatcaaggattcggtcgactttgtggtcattgcccggccgcctgccaaggacatgagtgtggaccagtgcatcaagtcgttaaaacatgtctttaaactggcccaactacttcaagattcacctacataa

SEQ ID NO: 1134 - protein, 118 aa, Alloiococcus otitidis
MKKAYRVKSDKDFQGVFQKGKSFANRQFVVYVLAKPDQDHFRLGVSVGKKIGNAVIRNRIKRKMRQAVFELDQAGLIKDSVDFVVIARPPAKDMSVDQCIKSLKHVFKLAQLLQDSPT

SEQ ID NO: 1135 - DNA, 888 bp, Alloiococcus otitidis
  CDS (649)..(885)
tataaaaaagagaggaatagcatgattcaccaattaaagaaacacaagcgattaatcttaactttggctattgtgtcattggtcgtcctattaactgcatgtggccaggaagcccggcagaacttagaacccattggccccaatagcgaaggtttttgggaaggatttatcctatacaacttctcccgctttatcatttgggtctcagagttgtttgggggcaactacgggattgggattattgtcattaccattctttctcgcattttaatcctgcctttaacccacctccaaaacaagaatatgaaccagatgaatgacctccaaccccaaatgaaggccctccaggagaagtattcagcccgagattcagaaaccaagcagaaactacaagaagagcagcaaaagctctatgaagaaaatgacgttaaccccctcatgggctgcctacccctactggttcaaatgcccatcttcattgccgtctaccaagccgttagccggactccacaactggcaaccgagtcttttctgtgggttaacttaggggagccagacccttattacatctttccaattttggccggtctttttaccttgatcaactccctcttgatgcagtacggccgagaaggagcaggcggtaaggtgatgagctttattatgcccctctttattatcttgattactttccgcctctccagtggtcttgctttgtacttcaccgtctccaacatttttggggtcggccagaccttagttttgaacaaccccttcaaacggaagcgggaacaggaagaagctgagcgagcagagaaagaaaaagctcagcggcggaagagagccattcgcaaggccaaaaaagaaggcagaaatgtaaaaaaataa

SEQ ID NO: 1136 - protein, 79 aa, Alloiococcus otitidis
MMSFIMPLFIILITFRLSSGLALYFTVSNIFGVGQTLVLNNPFKRKREQEEAERAEKEKAQRRKRAIRKAKKEGRNVKK

SEQ ID NO: 1137 - DNA, 888 bp, Alloiococcus otitidis; identical to SEQ ID NO: 1135
  CDS (22)..(885)

SEQ ID NO: 1138 - protein, 288 aa, Alloiococcus otitidis
MIHQLKKHKRLILTLAIVSLVVLLTACGQEARQNLEPIGPNSEGFWEGFILYNFSRFIIWVSELFGGNYGIGIIVITILSRILILPLTHLQNKNMNQMNDLQPQMKALQEKYSARDSETKQKLQEEQQKLYEENDVNPLMGCLPLLVQMPIFIAVYQAVSRTPQLATESFLWVNLGEPDPYYIFPILAGLFTLINSLLMQYGREGAGGKVMSFIMPLFIILITFRLSSGLALYFTVSNIFGVGQTLVLNNPFKRKREQEEAERAEKEKAQRRKRAIRKAKKEGRNVKK

SEQ ID NO: 1139 - DNA, 234 bp, Alloiococcus otitidis
  CDS (10)..(231)
gactttcccttgcgttttactgtgacgacagcatccttggctccaaagcccaaaaatcctttggtagccggagtattgacttgtatctctgcttcagaacgggtgatgccaagctcttttagccctttttcaattgcttcttcttctgtctttgcctgggcagtgtacttctcaatcatttcatttcctccatccatcgccatctgttggcaatctttcacaagccttgtctaa

SEQ ID NO: 1140 - protein, 74 aa, Alloiococcus otitidis
MRFTVTTASLAPKPKNPLVAGVLTCISASERVMPSSFSPFSIASSSVFAWAVYFSIISFPPSIAICWQSFTSLV

SEQ ID NO: 1141 - DNA, 1098 bp, Alloiococcus otitidis
  CDS (28)..(1095)
acaaggcttgtgaaagattgccaacagatggcgatggatggaggaaatgaaatgattgagaagtacactgcccaggcaaagacagaagaagaagcaattgaaaaagggctaaaagagcttggcatcacccgttctgaagcagagatacaagtcaatactccggctaccaaaggatttttgggctttggagccaaggatgctgtcgtcacagtaaaacgcaagggaaagtctcaagttgaccaagtcctcgaagaaacggttcctaaaaactcccccctccaagatgccagtgctagcttggatgaggaagcaggtgacacaaaggatgcccctagttcaagccagtttcaagctgaccttgaaggccctgaacaagatacaggtgaccaggctaagtcaagccagtctcaagtcagtgaagcagactttgaccaagcaggttttgaacaagctgactcaagcaagtcagcccaaactacttctggccaggctagcccagcttcagtaaaaccactaactaaccagacccaagaccaagattcagaaattcaagtggaagggcaagcagacaagggaccgcgaaatacccggtcacgccaagatgccttcagccaggttcccatccaggaaaaccaggaagaccaagaggcgattagctttgtcaaagactacctcttaagcattattagccatatgggggtagatgatgtcaccatcgaaaccatccaggaccaacaatttatcaagtatgacattgatacccaggatgccggcttggtgatcggtcgccacgggaaggtcttaaacggcttgcaaaccctggcccaaatccagctccaccagcgggctgacaacaaactccacgcccatgtggatgccgaaaactaccgcagccgacgtaagggaacagtagagcacctggctaagaaaacggcccagcaggtcatcaacaccaaccagtccgttattttagaacccatgccggcccatgaacgtaagcagatccaccgccagcttagccgctacagtgaggtccagacccactccgaaggcaaagaaccccatcgttacttggtcgttgagcccaagcaggtttag

SEQ ID NO: 1142 - protein, 356 aa, Alloiococcus otitidis
MAMDGGNEMIEKYTAQAKTEEEAIEKGLKELGITRSEAEIQVNTPATKGFLGFGAKDAVVTVKRKGKSQVDQVLEETVPKNSPLQDASASLDEEAGDTKDAPSSSQFQADLEGPEQDTGDQAKSSQSQVSEADFDQAGFEQADSSKSAQTTSGQASPASVKPLTNQTQDQDSEIQVEGQADKGPRNTRSRQDAFSQVPIQENQEDQEAISFVKDYLLSIISHMGVDDVTIETIQDQQFIKYDIDTQDAGLVIGRHGKVLNGLQTLAQIQLHQRADNKLHAHVDAENYRSRRKGTVEHLAKKTAQQVINTNQSVILEPMPAHERKQIHRQLSRYSEVQTHSEGKEPHRYLVVEPKQV

SEQ ID NO: 1143 - DNA, 1098 bp, Alloiococcus otitidis; identical to SEQ ID NO: 1141
  CDS (10)..(1095)

SEQ ID NO: 1144 - protein, 362 aa, Alloiococcus otitidis
MKDCQQMAMDGGNEMIEKYTAQAKTEEEAIEKGLKELGITRSEAEIQVNTPATKGFLGFGAKDAVVTVKRKGKSQVDQVLEETVPKNSPLQDASASLDEEAGDTKDAPSSSQFQADLEGPEQDTGDQAKSSQSQVSEADFDQAGFEQADSSKSAQTTSGQASPASVKPLTNQTQDQDSEIQVEGQADKGPRNTRSRQDAFSQVPIQENQEDQEAISFVKDYLLSIISHMGVDDVTIETIQDQQFIKYDIDTQDAGLVIGRHGKVLNGLQTLAQIQLHQRADNKLHAHVDAENYRSRRKGTVEHLAKKTAQQVINTNQSVILEPMPAHERKQIHRQLSRYSEVQTHSEGKEPHRYLVVEPKQV

SEQ ID NO: 1145 - DNA, 1317 bp, Alloiococcus otitidis
  CDS (31)..(1314)
tcaataactgcttttttaggagctttgcagatgaattggaaagaaaccatcagtctcatcaacaccacccgggggaccggagacaagaaaaatttgaaccggatgcgacttttactcaaagagctaggtaatcctgaaacagacttgccggtcatccacgttgctggcaccaatggcaaagggacgacctgtgcttatattgcccacagcttggcccgtgctggttataaaacaggactttacaccagcccccacctggagcgggtcaatgaacggatccggattaatgaccgctacatatccgaccaagacttaatggctttgaccggtcaaattgcccccatcattgaccatctagaagactgcttgggtgagaaatactattcttttgaaattttaactgcccttgccttcttgtacttccagcaagcaggggtggactttttagttttagaaactggggtagggggaaaaattgatgcgaccaatgtggtgcccgctccactggtctcagtcattatctctattggctatgaccacacccatgtcttgggtaataccctggaagacattacccggcacaaggcagggattattaagaaaggctgtccggtggtggtgggccctcttgccgaccatttattggctattgttaaagaggtgtccaaagaaatggacagtaatttaaccattgtccatcccgacaagtttgacattgttcatcaaacccttgactaccagtcctttaaatacggtggggacttggttttagagactcaaatgattggtaaccaccagctggtaaacactgccctagcttatgaagccttgaagattgtccaacaatcttaccccgatttgacagatttagatatattagaaggcttgaagacgacccactggccaggccggatgcaaaagctatctgaccagccagtggttgttcttgatggggcccacaacgaaatcggggtcaaggctcttagacagtcaattgaccactttttccccggcaaaaaaatcacctattttgccggaatgatggtcgaaaaagacttcgccaaaatgtttgacctcctgggggaaacagctgataaattttacttgatttcacccgatttgactcgcggttttgatgtcgaccaagccgttcaatctttgactgacaagggctaccaggcttccagtgtggctagcctccaagccatcttagactacataaaccagcaagcaaaagcagatgaaattatcattatctttggctccctctacttggttggcgacttcctaaaactttaccatgaagcatccggttaa

SEQ ID NO: 1146 - protein, 428 aa, Alloiococcus otitidis
MNWKETISLINTTRGTGDKKNLNRMRLLLKELGNPETDLPVIHVAGTNGKGTTCAYIAHSLARAGYKTGLYTSPHLERVNERIRINDRYISDQDLMALTGQIAPIIDHLEDCLGEKYYSFEILTALAFLYFQQAGVDFLVLETGVGGKIDATNVVPAPLVSVIISIGYDHTHVLGNTLEDITRHKAGIIKKGCPVVVGPLADHLLAIVKEVSKEMDSNLTIVHPDKFDIVHQTLDYQSFKYGGDLVLETQMIGNHQLVNTALAYEALKIVQQSYPDLTDLDILEGLKTTHWPGRMQKLSDQPVVVLDGAHNEIGVKALRQSIDHFFPGKKITYFAGMMVEKDFAKMFDLLGETADKFYLISPDLTRGFDVDQAVQSLTDKGYQASSVASLQAILDYINQQAKADEIIIIFGSLYLVGDFLKLYHEASG

SEQ ID NO: 1147 - DNA, 1317 bp, Alloiococcus otitidis; identical to SEQ ID NO: 1145
  CDS (25)..(1314)

SEQ ID NO: 1148 - protein, 430 aa, Alloiococcus otitidis
MQMNWKETISLINTTRGTGDKKNLNRMRLLLKELGNPETDLPVIHVAGTNGKGTTCAYIAHSLARAGYKTGLYTSPHLERVNERIRINDRYISDQDLMALTGQIAPIIDHLEDCLGEKYYSFEILTALAFLYFQQAGVDFLVLETGVGGKIDATNVVPAPLVSVIISIGYDHTHVLGNTLEDITRHKAGIIKKGCPVVVGPLADHLLAIVKEVSKEMDSNLTIVHPDKFDIVHQTLDYQSFKYGGDLVLETQMIGNHQLVNTALAYEALKIVQQSYPDLTDLDILEGLKTTHWPGRMQKLSDQPVVVLDGAHNEIGVKALRQSIDHFFPGKKITYFAGMMVEKDFAKMFDLLGETADKFYLISPDLTRGFDVDQAVQSLTDKGYQASSVASLQAILDYINQQAKADEIIIIFGSLYLVGDFLKLYHEASG

SEQ ID NO: 1149 - DNA, 936 bp, Alloiococcus otitidis
  CDS (31)..(933)
aagtctgaacaaagtttaggaggatacttcatgtctcaagtcattgaattggtccctaattttagcgaaggggttaacgaagatatcatttctggcctcgtcaggcttgcccagtccacaccaggagccagcctcttggactactcggcagatagcaaccacaaccggacagtcctcagcttggtgggggggccagaatcgattaaagaagtggcctttgacctgatcaaatacgccaaagaccatattgacctgacccaacacaagggggcccacccacgcatgggagcaaccgatgtctgtcccttgatccccctcaaggataccagtatcgaagaatgtgtcgacctggcccaagaaattgctaaacgagttggggaggaattagacatcccgattttcttatatgaagcagcagccacagccccccaccgaaaaaatattgccaagattcgcaagggggagtttgaaggcatggccgacaagatcaaaaaagacaagtggcaaccagactacggcccagaccaagtccacccaacagcaggagcaactgctattggagcccgcatgcccctagtggcctttaatgtcaacctggataccgacaatattgacctggccaaccgaattgccaagatcgtccgtgggtcttctggtggtttcaaatactgcaaggccatcggggtgatgttggaagaccggcaagtcgcccaagtttccatgaatatggtcaactacaagaaaacccccctctaccgggtgctagaaaccatccgtttcgaagctaaacgctacggggttggcatcctaggaacagaaattgtgggcctaaccccggctgaggccctcattgattcagcgaactattacctacaaacagaagactttaaccctgatcaccaagttattgaaaatcagttattaaatgacctatag

SEQ ID NO: 1150 - protein, 301 aa, Alloiococcus otitidis
MSQVIELVPNFSEGVNEDIISGLVRLAQSTPGASLLDYSADSNHNRTVLSLVGGPESIKEVAFDLIKYAKDHIDLTQHKGAHPRMGATDVCPLIPLKDTSIEECVDLAQEIAKRVGEELDIPIFLYEAAATAPHRKNIAKIRKGEFEGMADKIKKDKWQPDYGPDQVHPTAGATAIGARMPLVAFNVNLDTDNIDLANRIAKIVRGSSGGFKYCKAIGVMLEDRQVAQVSMNMVNYKKTPLYRVLETIRFEAKRYGVGILGTEIVGLTPAEALIDSANYYLQTEDFNPDHQVIENQLLNDL

SEQ ID NO: 1151 - DNA, 372 bp, Alloiococcus otitidis
  CDS (37)..(369)
tctggttgccacttgtcttttttgatcttgtcggccatgccttcaaactcccccttgcgaatcttggcaatattttttcggtggggggctgtggctgctgcttcatataagaaaatcgggatgtctaattcctccccaactcgtttagcaatttcttgggccaggtcgacacattcttcgatactggtatccttgagggggatcaagggacagacatcggttgctcccatgcgtgggtgggcccccttgtgttgggtcaggtcaatatggtctttggcgtatttgatcaggtcaaaggccacttctttaatcgattctggcccccccaccaagctgaggactgtccggttgtggttgctatctgccgagtag

SEQ ID NO: 1152 - protein, 111 aa, Alloiococcus otitidis
MPSNSPLRILAIFFRWGAVAAASYKKIGMSNSSPTRLAISWARSTHSSILVSLRGIKGQTSVAPMRGWAPLCWVRSIWSLAYLIRSKATSLIDSGPPTKLRTVRLWLLSAE

SEQ ID NO: 1153 - DNA, 372 bp, Alloiococcus otitidis; identical to SEQ ID NO: 1151
  CDS (13)..(369)

SEQ ID NO: 1154 - protein, 119 aa, Alloiococcus otitidis
MSFLILSAMPSNSPLRILAIFFRWGAVAAASYKKIGMSNSSPTRLAISWARSTHSSILVSLRGIKGQTSVAPMRGWAPLCWVRSIWSLAYLIRSKATSLIDSGPPTKLRTVRLWLLSAE

SEQ ID NO: 1155 - DNA, 1458 bp, Alloiococcus otitidis
  CDS (1)..(1455)
atggcagattttagccaggatgcaaaggctctgcttgaattaattggtggtcgtgacaacattagtgccgtcacccactgtgccacccggatgcggtttgtactagtggacagtgacaaggcggatattgataaaattgaagacctggaatcagtaaaagggtcctttacccaagctggtcaattccaggtcattattggcaacaatgtgtcggagttctacaatgaatttgctaaaatgtcaggggtggaagaagcctcaaaagatgatgtcaaacaagctggtaagtccaatatgaactggctccaacaattgatggctaacctggcagagattttctctcccttgattccagccattgtgattggtggtttgattttaggtttccgtaatattattggggagattcaaatggacttcctgggaggtcaaaccatcgctgaaagctcccaattttgggctggtgtttttgacttcttgtggctgccgggtgaggcgattttccacttcctgccagttgggattacctgggccattacccgtaagatggggacgacccagattttagggattgtcttggggattaccctggtctccccccaactcttaaatgcttacgaggtcactgaaatcattgctggagagggtgaagtttggaactttggcttctttaccttagataagatcggctaccaagcccaagtcattccggctatgatggcgggctttatcttggtctacttagaacgctttttcagacgggtggtcccagaagccatttccatgatcttcgtccccctcttggccttggtcccaaccgtctttatcgcccacgctgtcattgggcccatcggttggaccttgggtacctggctagcccaaattgtccaatggggtcttagcgggtcgcttaactggctctttggctttctgtttggtggcttatatgcccctcttgtggttaccggtctccaccacatgaccaatgccatcgacctccagttagtggccgaatatcgtcagaccatcctctggcctatgattgccttctccaacattgcccaagggtcagcagtcttggctatctatttcaagaaccgtaaagacaagcaggaagcctctgtctccttgccggcagctatttctgcctacctaggggttaccgaacccgccctctttgggattaacatcaagtatgtctatccactggtggctgggatgattgggtcagcctttgccggtttgtggtcggtcctgtcttctacagcagctaatacaattggagttggtggtttgccaggcatccactcagctgccactggttcctttgtttccttcgccattggcatggccattgcctttgtcgtccctattgtttgtgtgtttatttttgaaaaaacaggtttcttaaccaaacaaaaaattgaagggatcccgattccaaaacttggtcgttaa

SEQ ID NO: 1156 - protein, 485 aa, Alloiococcus otitidis
MADFSQDAKALLELIGGRDNISAVTHCATRMRFVLVDSDKADIDKIEDLESVKGSFTQAGQFQVIIGNNVSEFYNEFAKMSGVEEASKDDVKQAGKSNMNWLQQLMANLAEIFSPLIPAIVIGGLILGFRNIIGEIQMDFLGGQTIAESSQFWAGVFDFLWLPGEAIFHFLPVGITWAITRKMGTTQILGIVLGITLVSPQLLNAYEVTEIIAGEGEVWNFGFFTLDKIGYQAQVIPAMMAGFILVYLERFFRRVVPEAISMIFVPLLALVPTVFIAHAVIGPIGWTLGTWLAQIVQWGLSGSLNWLFGFLFGGLYAPLVVTGLHHMTNAIDLQLVAEYRQTILWPMIAFSNIAQGSAVLAIYFKNRKDKQEASVSLPAAISAYLGVTEPALFGINIKYVYPLVAGMIGSAFAGLWSVLSSTAANTIGVGGLPGIHSAATGSFVSFAIGMAIAFVVPIVCVFIFEKTGFLTKQKIEGIPIPKLGR

SEQ ID NO: 1157 - DNA, 1701 bp, Alloiococcus otitidis
  CDS (64)..(1698)
aagagtttaaagatttggtggtctaccaggcctaccccaagtcctggcaggatacgaccggcaatggcaaggggggacttaaagggagtgacccagcgcctagcctatttagctgacctgggcattgacctgctatggctcaaccccttctacaagtcgccccaaaaagataatggctatgatatttccgactacaagtccattgacctcgactacgggacctgggaagacttggatgaattagtccaaaaagcaggcgaatacggaattggtctcatgtttgacatggtcttaaaccatgtttcgactgaccatgactggttccaaaaggctgcacaaggggacccctactaccaggacttcttttacatccgaccagccaaggatgacggcagcctacccaccaattgggagtccaagtttgggggaccagcctgggcaccctttcccggaagtgatgattactatctctgcctttatgacaagagccaggctgacttaaactggcacaatcccaatgtccgacaagccctctatgacgtggtcaacttttggattgacaagggggtcaagggtttccgctttgatgttttaaatgtgattggcaaggaccttgacctcaaggatgccgaggatggggtgggcaagaaagaatacaccgacacccccattgtccatgaatggatacaggagttaaaccgccacacctttggccgtcgtgacgacctggtgacggttggggagatgtcttctaccaccatccaagacagcattcaatactccaacccagactatcaggaactggatatggtctttagcttccaccacttgaaggtggactacaaggatggcgacaagtggaccttgatggactttgactttcaagagttaaaaaggctccttaacgactggcaagtaggcttgacccagggcgggggttggaatgccttgttttggaataaccacgaccagccccgggccaatagccggtttggtgaccccgaaaattacccctatgaaacggccaccatgctagcgaccaccatccatctcttgcgagggactccttatatctaccatggggaagaaattggcatgactaaccctaactttgactctattgacgactaccaggatgtggagtcccacaatgcctatcaaagcttagttgaaaatggccaaggcccagaccaggccctggccattatccaggacaagtccagggacaatggccggacccccatgcagtggactggggaagaccaggctggctttaccagtggccagccctggatcaaactggccccaaactacaaggaggtcaacacccaggttccagaccccagccaaaagatttttgcctactaccagaaactgatccgcctacggaaagattataaagtgatcagtcacggcgactaccaagggattcaactggaccacgaccagatttttgcctactccagagactaccaagggcagagactcctggtcctcaaccacttctaccccggccaggctacaattgagttggatgatggcttgttgagtgggtccagccgggtcttgatttctaattctggcgactggaccttagaaaagaactttaccatgggcccttatgaatcacagtggccttcttgcttgaataaggggttaaaaagtttgaaaactggcaaggcagcctcttggcatgtctag

SEQ ID NO: 1158 - protein, 545 aa, Alloiococcus otitidis
MARGDLKGVTQRLAYLADLGIDLLWLNPFYKSPQKDNGYDISDYKSIDLDYGTWEDLDELVQKAGEYGIGLMFDMVLNHVSTDHDWFQKAAQGDPYYQDFFYIRPAKDDGSLPTNWESKFGGPAWAPFPGSDDYYLCLYDKSQADLNWHNPNVRQALYDVVNFWIDKGVKGFRFDVLNVIGKDLDLKDAEDGVGKKEYTDTPIVHEWIQELNRHTFGRRDDLVTVGEMSSTTIQDSIQYSNPDYQELDMVFSFHHLKVDYKDGDKWTLMDFDFQELKRLLNDWQVGLTQGGGWNALFWNNHDQPRANSRFGDPENYPYETATMLATTIHLLRGTPYIYHGEEIGMTNPNFDSIDDYQDVESHNAYQSLVENGQGPDQALAIIQDKSRDNGRTPMQWTGEDQAGFTSGQPWIKLAPNYKEVNTQVPDPSQKIFAYYQKLIRLRKDYKVISHGDYQGIQLDHDQIFAYSRDYQGQRLLVLNHFYPGQATIELDDGLLSGSSRVLISNSGDWTLEKNFTMGPYESQWPSCLNKGLKSLKTGKAASWHV

SEQ ID NO: 1159 - DNA, 963 bp, Alloiococcus otitidis
  CDS (16)..(960)
acagggggtaggcaaatggaagcagaatacttaaacttaatgaaaaaagtgatggaagaaggcagtgaccggggtgaccggaccaaaacaggtgtccggtctctcttcggctaccaaatgcggtttgacctgtcccagggcttccccctcttaaccaccaagcgggtcgcttttggtctggtcaaatcagagcttctttggttccttaaaggagacactaatatcaagtacctcttggaccacaagaaccacatatgggacgagtgggcattcgaaaattatgtccagtcagaggactacaagggccctgacatgacagactttggccggcgagcggtgacagatccggaattcaaccaggtctaccaagcagaaatgaaaaagttcactgataaaatcctggccgatgaagattttgcccaaaagtatggcagcctaggcagtgtctatggagcccagtggcggtcctggcggggggctgacggccaagtcgtcgaccagatcagccgggttatcgacaacatcaagacccatccggaatccagacggcatatcgtctccgcctggaacccagcagaagtcgaccaaatggccttgcccccttgccacaccctcttccagttttatgtcgacaagggtcgtttgagctgtcaactctaccagcggtctgctgacatcttcttaggcgttccctttaatattgctagctacgccctcctgacccacctggttgcccatgagtgtggcttggaggttggcgactttgtccacaccctgggggatgcccacatctacagcaaccacttcgaccaggtcaaaacccagctggaccgagacccacgccctctgcccaacttggtcttaaaccctgacaagaccagcatttttgactttgacatggacgatatccagctggaaaactaccaccctcacaagggcattaaagccccaattgcggtctag

SEQ ID NO: 1160 - protein, 315 aa, Alloiococcus otitidis
MEAEYLNLMKKVMEEGSDRGDRTKTGVRSLFGYQMRFDLSQGFPLLTTKRVAFGLVKSELLWFLKGDTNIKYLLDHKNHIWDEWAFENYVQSEDYKGPDMTDFGRRAVTDPEFNQVYQAEMKKFTDKILADEDFAQKYGSLGSVYGAQWRSWRGADGQVVDQISRVIDNIKTHPESRRHIVSAWNPAEVDQMALPPCHTLFQFYVDKGRLSCQLYQRSADIFLGVPFNIASYALLTHLVAHECGLEVGDFVHTLGDAHIYSNHFDQVKTQLDRDPRPLPNLVLNPDKTSIFDFDMDDIQLENYHPHKGIKAPIAV

SEQ ID NO: 1161 - DNA, 684 bp, Alloiococcus otitidis
  CDS (151)..(681)
ggaaggaaaagaaaggtgactgattcaaaccagcttttagactccgtttataaacaatacgacgacttccaactctccaatatcaaccttgccctgaccaagggagagatcgtgggggttattggcccaaatggatcaggcaagaccagcttgttaaaggtcttggccggccaaataccagtagactcaggtagggtcagacccttagccaaggaagacttggcctttgtctttgaccaaaacaagttacttaatgatttgaccctttcggactaccaaaagatcttcccctccctctttcaccattgggagagccagacctttcaccactaccttgactattttggcctcccgcggcagaaaaagctcaaacagttttccaaaggaatgatcaaaaaattgaacattagccttgccctctcccaccaagctgactacttgcttttggatgaaatcaccagtgaccttgacccctttgtccgggaagaagtcttgagtgtcgttcaaaattatgtcactgaccgtcaagccgtcgccattttaaccagccatatcctagaagatgtcctgtccatcagtgacaaactgctggtgatgaaggctgggactattctggctaagcgagcgaccagcgactttcagacggtggaagagttaaaggcctatttaaaaactattttatga

SEQ ID NO: 1162 - protein, 177 aa, Alloiococcus otitidis
MLKVLAGQIPVDSGRVRPLAKEDLAFVFDQNKLLNDLTLSDYQKIFPSLFHHWESQTFHHYLDYFGLPRQKKLKQFSKGMIKKLNISLALSHQADYLLLDEITSDLDPFVREEVLSVVQNYVTDRQAVAILTSHILEDVLSISDKLLVMKAGTILAKRATSDFQTVEELKAYLKTIL

SEQ ID NO: 1163 - DNA, 684 bp, Alloiococcus otitidis; identical to SEQ ID NO: 1161
  CDS (16)..(681)

SEQ ID NO: 1164 - protein, 222 aa, Alloiococcus otitidis
MTDSNQLLDSVYKQYDDFQLSNINLALTKGEIVGVIGPNGSGKTSLLKVLAGQIPVDSGRVRPLAKEDLAFVFDQNKLLNDLTLSDYQKIFPSLFHHWESQTFHHYLDYFGLPRQKKLKQFSKGMIKKLNISLALSHQADYLLLDEITSDLDPFVREEVLSVVQNYVTDRQAVAILTSHILEDVLSISDKLLVMKAGTILAKRATSDFQTVEELKAYLKTIL

SEQ ID NO: 1165 - DNA, 666 bp, Alloiococcus otitidis
  CDS (421)..(663)
gggcggtttcacatgaaaggactccttatcaaagacctattgttaatgaaaaataagctgggccagggtcgaattttactttttattttggcctatatcctcatctcagccctggtatttaccgacctattctttttactgaatatcttcctactctttattttgatgaacacccaaacccatgtctatgtccaagaccaagaatcgggtttcttggaatttctccatactacgaccgacttgtcagtcaggcagaccgtcctagcccgttttttatcgtccggtattttctctcttgtcctcattatcttcttctttcttttatttgccggctttaacttccttgccggtttatttacctggctagaaatgctggttatttttgcagtcctcttggtcttctccctagcctatatcctcttgtccatgccctttctttacctattcctggaaaatggctttgtcatcttgttaatcttcctagccatcctcctggttttagggacgactttgttagaccttctcggacctggttttatgatcagactagcaagcttgcccactgccggtttggtaaccttagcagtactgtttggcctggccctctttcccctgtccttttggctctccttggtaattttaaacaagaagatgaaagaaacctaa

SEQ ID NO: 1166 - protein, 81 aa, Alloiococcus otitidis
MSMPFLYLFLENGFVILLIFLAILLVLGTTLLDLLGPGFMIRLASLPTAGLVTLAVLFGLALFPLSFWLSLVILNKKMKET

SEQ ID NO: 1167 - DNA, 666 bp, Alloiococcus otitidis; identical to SEQ ID NO: 1165
  CDS (241)..(663)

SEQ ID NO: 1168 - protein, 141 aa, Alloiococcus otitidis
MSVRQTVLARFLSSGIFSLVLIIFFFLLFAGFNFLAGLFTWLEMLVIFAVLLVFSLAYILLSMPFLYLFLENGFVILLIFLAILLVLGTTLLDLLGPGFMIRLASLPTAGLVTLAVLFGLALFPLSFWLSLVILNKKMKET

SEQ ID NO: 1169 - DNA, 666 bp, Alloiococcus otitidis; identical to SEQ ID NO: 1165
  CDS (40)..(663)

SEQ ID NO: 1170 - protein, 208 aa, Alloiococcus otitidis
MLMKNKLGQGRILLFILAYILISALVFTDLFFLLNIFLLFILMNTQTHVYVQDQESGFLEFLHTTTDLSVRQTVLARFLSSGIFSLVLIIFFFLLFAGFNFLAGLFTWLEMLVIFAVLLVFSLAYILLSMPFLYLFLENGFVILLIFLAILLVLGTTLLDLLGPGFMIRLASLPTAGLVTLAVLFGLALFPLSFWLSLVILNKKMKET

SEQ ID NO: 1171 - DNA, 666 bp, Alloiococcus otitidis; identical to SEQ ID NO: 1165
  CDS (13)..(663)

SEQ ID NO: 1172 - protein, 217 aa, Alloiococcus otitidis
MKGLLIKDLLLMKNKLGQGRILLFILAYILISALVFTDLFFLLNIFLLFILMNTQTHVYVQDQESGFLEFLHTTTDLSVRQTVLARFLSSGIFSLVLIIFFFLLFAGFNFLAGLFTWLEMLVIFAVLLVFSLAYILLSMPFLYLFLENGFVILLIFLAILLVLGTTLLDLLGPGFMIRLASLPTAGLVTLAVLFGLALFPLSFWLSLVILNKKMKET

SEQ ID NO: 1173 - DNA, 162 bp, Alloiococcus otitidis
  CDS (1)..(159)
atgaataagcatagaaaagtaattattattttgctagtgtccgttattgtaatacttctatcgtggaatacttgccatcaatcagattataagaaccaagtttcatctttctcacaagtcaatattcatttagtagaaaataaagagtcagtccaaatctaa

SEQ ID NO: 1174 - protein, 53 aa, Alloiococcus otitidis
MNKHRKVIIILLVSVIVILLSWNTCHQSDYKNQVSSFSQVNIHLVENKESVQI

SEQ ID NO: 1175 - DNA, 762 bp, Alloiococcus otitidis
  CDS (91)..(759)
gcattttttgcctggtggtttccttcggcattactatttttgccagtcgtggctttgagtgggaaaagatctattcatagggggtataagatgaaaatagtagaactaaaagggctaaccaagactgttcaagacggagagaagaaaatagatgtcttaaaaggcgtagatttatctctaacggatggacagagccttgccatagtcggcaaatctggttcgggcaaaacaactctgttaaatatcatctctctcctggacacagaatatagtggagaatataactttttaggcgaaagtctatccggtaaacaagccaaaaagctattcaaaaccaggactaaccatatagcgaatatatttcaaaattttcaattaatcaatgatttaaatgtcttacaaaatattgaaatgcctttaggctacagggggatcaaaaagaaggaaagggaaaagattgcaagtcaagcccttgcttcagtaggacttgaaggaagagaagctagtagggtcacaactttatccggcggtgaacaacaaaggatagcgatagctagggccatcgcttccaaacctaaactcctcttagctgatgaacccacaggaaacttagatgaaagaacagctaaggggattattgatctcttattagaattaaatcgtgatagccatatgtcaatgatcatcgttactcatgatatagatattgcaagtcaatgtaacaaattatatacattggaagaaggcatcctctatgaataa

SEQ ID NO: 1176 - protein, 223 aa, Alloiococcus otitidis
MKIVELKGLTKTVQDGEKKIDVLKGVDLSLTDGQSLAIVGKSGSGKTTLLNIISLLDTEYSGEYNFLGESLSGKQAKKLFKTRTNHIANIFQNFQLINDLNVLQNIEMPLGYRGIKKKEREKIASQALASVGLEGREASRVTTLSGGEQQRIAIARAIASKPKLLLADEPTGNLDERTAKGIIDLLLELNRDSHMSMIIVTHDIDIASQCNKLYTLEEGILYE

SEQ ID NO: 1177 - DNA, 762 bp, Alloiococcus otitidis; identical to SEQ ID NO: 1175
  CDS (49)..(759)

SEQ ID NO: 1178 - protein, 237 aa, Alloiococcus otitidis
MALSGKRSIHRGYKMKIVELKGLTKTVQDGEKKIDVLKGVDLSLTDGQSLAIVGKSGSGKTTLLNIISLLDTEYSGEYNFLGESLSGKQAKKLFKTRTNHIANIFQNFQLINDLNVLQNIEMPLGYRGIKKKEREKIASQALASVGLEGREASRVTTLSGGEQQRIAIARAIASKPKLLLADEPTGNLDERTAKGIIDLLLELNRDSHMSMIIVTHDIDIASQCNKLYTLEEGILYE

SEQ ID NO: 1179 - DNA, 762 bp, Alloiococcus otitidis; identical to SEQ ID NO: 1175
  CDS (40)..(759)

SEQ ID NO: 1180 - protein, 240 aa, Alloiococcus otitidis
MPVVALSGKRSIHRGYKMKIVELKGLTKTVQDGEKKIDVLKGVDLSLTDGQSLAIVGKSGSGKTTLLNIISLLDTEYSGEYNFLGESLSGKQAKKLFKTRTNHIANIFQNFQLINDLNVLQNIEMPLGYRGIKKKEREKIASQALASVGLEGREASRVTTLSGGEQQRIAIARAIASKPKLLLADEPTGNLDERTAKGIIDLLLELNRDSHMSMIIVTHDIDIASQCNKLYTLEEGILYE

SEQ ID NO: 1181 - DNA, 1134 bp, Alloiococcus otitidis
  CDS (13)..(1131)
gagggtgacgatatgtacgatttgtttcatatccaattaaatgttaaaaaacatttgttattttatttcctttttagcttagaattgattctttgctttaccctcatcttgatcggatttgatgaaaacaaggcctataaggaacgccaagaactttataccattgaaagccagaatgacttatatagcttaacagatgaaagtctgtttatgacagacttaagcctccatgaccatatcaatgacttaaatgctatgaatttaatatacggacatgtttctcatggagaatatatcaatgctagtggacaagtagcttcatttaaaattatcgaagcgagtgaatcgtttttcacagatatattaaaaataagtcctgacaagaattcggcctatttaagtcagaacttgaaccaaaaagttaagaggaataaaggaatgttaaatgatgggataagactggaaaatgacactcttgttctagataatcttaaattaaacctggaagatttgccagccaataaaacaagctataaacaagccattccgactaatgtctttgaattcggcgacattcagataagggagtcagtctttgttctgatgcaaccaactattgtgggaaaagcagatcaaacttttttaaaattaaaaaatgttcctaatcaaccgagtatagaaaataacttagccgaacttcttaatagagaggtctatgtcacggacttactagcagattttgaaaaagggagcaacagtcaagcagcttttgtacgcttatttgcttggatctcaacaatagctattcttattgttatttttgggacttccagtatgttcctcatctttgttaaggaaagaaaggaaaaaaataaaattcaatatttttatggagcttgtctttttcgtttgagaatccaactttttcttgaattattttttatcatgtgggtctcaatgattgtcagtcaagtatgtgcaaccctctttgagtcgattttgtcttcaccctattaccttattcgaccacagattaactcttttataggattaagcattttttgcctggtggtttccttcggcattactatttttgccagtcgtggctttgagtgggaaaagatctattcatag

SEQ ID NO: 1182 - protein, 373 aa, Alloiococcus otitidis
MYDLFHIQLNVKKHLLFYFLFSLELILCFTLILIGFDENKAYKERQELYTIESQNDLYSLTDESLFMTDLSLHDHINDLNAMNLIYGHVSHGEYINASGQVASFKIIEASESFFTDILKISPDKNSAYLSQNLNQKVKRNKGMLNDGIRLENDTLVLDNLKLNLEDLPANKTSYKQAIPTNVFEFGDIQIRESVFVLMQPTIVGKADQTFLKLKNVPNQPSIENNLAELLNREVYVTDLLADFEKGSNSQAAFVRLFAWISTIAILIVIFGTSSMFLIFVKERKEKNKIQYFYGACLFRLRIQLFLELFFIMWVSMIVSQVCATLFESILSSPYYLIRPQINSFIGLSIFCLVVSFGITIFASRGFEWEKIYS

SEQ ID NO: 1183 - DNA, 1068 bp, Alloiococcus otitidis
  CDS (652)..(1065)
ggtattggaaaaatgacccctatcctctatggcctagtcgttagaattagagaaaaaagccacaattaccgagttatacttttaaccgttctttcaatagccatttccttgtattttgtcatgatgtttctcagcaaacttggggaaacaaatcgtaaaattgcttactatgaaagccactacaacttgtttgaccagatcgttcagcttgatcgtattggaagtttaaaaggaaaaaacgacaattttaccactacaatcaatacaagcgactatattttatccaacaatcaaaagataaaaagcgaccttctggctagtgatgttaactataatcaatactaccgcctagattcagtcagtgaaaagcaatggaaggaatgctttgatggaagcccatctgcaattgtttcgcgcgaacttgctcgaaagttaaagttagacattggtgatcgttttcaactgaataactctagctatacagttaaagcgattagccaagacccctttttagaaaaaaagctcctcgtcccaatagacttgtataatagtcaaaaaaatcattcggtagatcgtattctaatcactatcaaggctaatgaaaatcttgataggattgcttctagtgacagtatattagctagggactcaatggaccaaatgatcgctagagagattaagagtttaaaccagtttttgctttttctgcttggattttttttagtcttttttctcatagctatcattaatattagtctcgtcttgacttccttgattcatctagatcaaaagaaccgaatcgttagacaggtctgtggcgagtccgatgggcaatatatagctagcacaattgtggaattcacattgatagtattgctttcttatcatgttgcggtcattttatattatatcctgcttcccttggtaccagaatttttctactttagcttaagcttagaagtttatgtaattgagcttgcctttgctaccatactagcttttgtcttggcagtaatctatgcacacaaacaatgtcaagctaatatagttattggcttaagagggtga

SEQ ID NO: 1184 - protein, 138 aa, Alloiococcus otitidis
MDQMIAREIKSLNQFLLFLLGFFLVFFLIAIINISLVLTSLIHLDQKNRIVRQVCGESDGQYIASTIVEFTLIVLLSYHVAVILYYILLPLVPEFFYFSLSLEVYVIELAFATILAFVLAVIYAHKQCQANIVIGLRG

SEQ ID NO: 1185 - DNA, 1068 bp, Alloiococcus otitidis; identical to SEQ ID NO: 1183
  CDS (121)..(1065)

SEQ ID NO: 1186 - protein, 315 aa, Alloiococcus otitidis
MMFLSKLGETNRKIAYYESHYNLFDQIVQLDRIGSLKGKNDNFTTTINTSDYILSNNQKIKSDLLASDVNYNQYYRLDSVSEKQWKECFDGSPSAIVSRELARKLKLDIGDRFQLNNSSYTVKAISQDPFLEKKLLVPIDLYNSQKNHSVDRILITIKANENLDRIASSDSILARDSMDQMIAREIKSLNQFLLFLLGFFLVFFLIAIINISLVLTSLIHLDQKNRIVRQVCGESDGQYIASTIVEFTLIVLLSYHVAVILYYILLPLVPEFFYFSLSLEVYVIELAFATILAFVLAVIYAHKQCQANIVIGLRG

SEQ ID NO: 1187 - DNA, 1068 bp, Alloiococcus otitidis; identical to SEQ ID NO: 1183
  CDS (13)..(1065)

SEQ ID NO: 1188 - protein, 351 aa, Alloiococcus otitidis
MTPILYGLVVRIREKSHNYRVILLTVLSIAISLYFVMMFLSKLGETNRKIAYYESHYNLFDQIVQLDRIGSLKGKNDNFTTTINTSDYILSNNQKIKSDLLASDVNYNQYYRLDSVSEKQWKECFDGSPSAIVSRELARKLKLDIGDRFQLNNSSYTVKAISQDPFLEKKLLVPIDLYNSQKNHSVDRILITIKANENLDRIASSDSILARDSMDQMIAREIKSLNQFLLFLLGFFLVFFLIAIINISLVLTSLIHLDQKNRIVRQVCGESDGQYIASTIVEFTLIVLLSYHVAVILYYILLPLVPEFFYFSLSLEVYVIELAFATILAFVLAVIYAHKQCQANIVIGLRG

SEQ ID NO: 1189 - DNA, 945 bp, Alloiococcus otitidis
  CDS (82)..(942)
gtgagaacaatgaagcaagttattataaagtattttccgctaatatttatcttactatttctaagttcatgtcgtcaggaaatggatgaagaaagcattaatgaagaattttatcaaacagaaaaaattgaaaataacgactaccaagtagaggaggtcgattttaaggctttaggaattgatcagctgtccggaattgactttgatgatgaaaaccaagaattgtatttaagcaatcgaagcaaggctactgtatcggtttacgatcaagatttaaaagctattaaaactatccaaaatgataggatggaattcccgagtttactttgcaaaagcaatgactttttatacgttttagatgataacacttcccaagttttccaatttactgattcagctgaattggtcaatattataaacttacctagcaaagaatcagattcctattatttagatatgaccgtctgggaaggtaatatttacttaaccttaaatacaccaaattttgaagattccaaaatattcaaagttcaggtcaatactggacaagttcattccattaaagataaatttatcggttttatgtatcaagattcagcaagtcttttatttacaaactcaatggtggcttttcaagaatcagaccaacttggttttaaaggtggggaaaaccatatttataaactagaaggggagaaattgctcaagcaaggtgacttgcttgagggtagtttcccaggggattttctgttaaaggatgatctctactatgtttatacaagtggttggtccagtatagaccgatacaatagtaattttgaatatcttgattccatagctagctttaatgaaagtgattttgaagctatgttaaagggtggatcaggtaaatacttcatcctgatgcccaatgaacaaaagttatttaaggtattggaaaaatga

SEQ ID NO: 1190 - protein, 287 aa, Alloiococcus otitidis
MDEESINEEFYQTEKIENNDYQVEEVDFKALGIDQLSGIDFDDENQELYLSNRSKATVSVYDQDLKAIKTIQNDRMEFPSLLCKSNDFLYVLDDNTSQVFQFTDSAELVNIINLPSKESDSYYLDMTVWEGNIYLTLNTPNFEDSKIFKVQVNTGQVHSIKDKFIGFMYQDSASLLFTNSMVAFQESDQLGFKGGENHIYKLEGEKLLKQGDLLEGSFPGDFLLKDDLYYVYTSGWSSIDRYNSNFEYLDSIASFNESDFEAMLKGGSGKYFILMPNEQKLFKVLEK

SEQ ID NO: 1191 - DNA, 945 bp, Alloiococcus otitidis; identical to SEQ ID NO: 1189
  CDS (10)..(942)

SEQ ID NO: 1192 - protein, 311 aa, Alloiococcus otitidis
MKQVIIKYFPLIFILLFLSSCRQEMDEESINEEFYQTEKIENNDYQVEEVDFKALGIDQLSGIDFDDENQELYLSNRSKATVSVYDQDLKAIKTIQNDRMEFPSLLCKSNDFLYVLDDNTSQVFQFTDSAELVNIINLPSKESDSYYLDMTVWEGNIYLTLNTPNFEDSKIFKVQVNTGQVHSIKDKFIGFMYQDSASLLFTNSMVAFQESDQLGFKGGENHIYKLEGEKLLKQGDLLEGSFPGDFLLKDDLYYVYTSGWSSIDRYNSNFEYLDSIASFNESDFEAMLKGGSGKYFILMPNEQKLFKVLEK

SEQ ID NO: 1193 - DNA, 945 bp, Alloiococcus otitidis; identical to SEQ ID NO: 1189
  CDS (1)..(942)

SEQ ID NO: 1194 - protein, 314 aa, Alloiococcus otitidis
MRTMKQVIIKYFPLIFILLFLSSCRQEMDEESINEEFYQTEKIENNDYQVEEVDFKALGIDQLSGIDFDDENQELYLSNRSKATVSVYDQDLKAIKTIQNDRMEFPSLLCKSNDFLYVLDDNTSQVFQFTDSAELVNIINLPSKESDSYYLDMTVWEGNIYLTLNTPNFEDSKIFKVQVNTGQVHSIKDKFIGFMYQDSASLLFTNSMVAFQESDQLGFKGGENHIYKLEGEKLLKQGDLLEGSFPGDFLLKDDLYYVYTSGWSSIDRYNSNFEYLDSIASFNESDFEAMLKGGSGKYFILMPNEQKLFKVLEK

SEQ ID NO: 1195 - DNA, 342 bp, Alloiococcus otitidis
  CDS (88)..(339)
ttacgaaaaagaagacaaaattacgaaacatataaattttatattgcaaacgaaatcaaattgatcgaatcatttggagggaaaattatgaaaaaacatatcgttacaatgttagcagcatgcacatttatgacggtttacgctacgagtgttgcagcaggatgtggcagctattacatctataaaacaagtactcctaaatgtcgtagcgaaaaatgcggcatttgggacagtaaagccttagttcaatatcaatattctaaaagaaaatgtgtcaaaaaggacaatactacttattggcaatacaagactgatcgggttcatattgattgcggctgttaa

SEQ ID NO: 1196 - protein, 84 aa, Alloiococcus otitidis
MKKHIVTMLAACTFMTVYATSVAAGCGSYYIYKTSTPKCRSEKCGIWDSKALVQYQYSKRKCVKKDNTTYWQYKTDRVHIDCGC

SEQ ID NO: 1197 - DNA, 342 bp, Alloiococcus otitidis; identical to SEQ ID NO: 1195
  CDS (61)..(339)

SEQ ID NO: 1198 - protein, 93 aa, Alloiococcus otitidis
MIESFGGKIMKKHIVTMLAACTFMTVYATSVAAGCGSYYIYKTSTPKCRSEKCGIWDSKALVQYQYSKRKCVKKDNTTYWQYKTDRVHIDCGC

SEQ ID NO: 1199 - DNA, 462 bp, Alloiococcus otitidis
  CDS (4)..(459)
tccatgattgggaaaaaaataaaagatattcgactgcaaaacaagtgttcacaaaaagaatttgccgaaaaaataaatgttactcggcaaaccgtttgtaattgggaaggggataagacggtccccgacatctataatatcttaactatatgtaaaacctttaattgtgatctttcatgttttgtagatgacaagccaaaagtgggtaaagaggaaattcaaaaggaagtcagtatccaaccgcattacatttacctgattgcactaacaggaatcttatcttggattattccttcattagtcgtggttaattttattgaactgattattttttattttttcataaaagtgaccaaagtcgagcggtacttgactttggggatttgcctgttttatacggcaacattttttatttattatgatttttattaccaagttttactttccttgcttccagtataa

SEQ ID NO: 1200 - protein, 152 aa, Alloiococcus otitidis
MIGKKIKDIRLQNKCSQKEFAEKINVTRQTVCNWEGDKTVPDIYNILTICKTFNCDLSCFVDDKPKVGKEEIQKEVSIQPHYIYLIALTGILSWIIPSLVVVNFIELIIFYFFIKVTKVERYLTLGICLFYTATFFIYYDFYYQVLLSLLPV

SEQ ID NO: 1201 - DNA, 483 bp, Alloiococcus otitidis
  CDS (25)..(480)
catccccttgtcaatatcggcgatgtgcatggagccacctttgccattacagaggccgtcttttttaccataaatttctgccatcatctgcttgatatcgcaacccttggcaatacagtggccgtggccccggtggttggacgcaatgaagtcgccatcgttaagcaggctaccaacaccagcggcaatggcttcttcccctgcatacaagtggacaaagccgataatttccccttggagaaagcggcggtggacctcatcttcaaagtggcgaatatcattcatctttttaaagagccatcttgcctggtcctgggtaaaactgacagcttcttcatcgagcttgacatcactttcagttatggcatgggcttgggtctgtctggctgcttgcttgctcattttttccattttcatttcctccctagcttaatgagttcggtccatcactatcttctgactcatctctccgataacttctga

SEQ ID NO: 1202 - protein, 152 aa, Alloiococcus otitidis
MHGATFAITEAVFFTINFCHHLLDIATLGNTVAVAPVVGRNEVAIVKQATNTSGNGFFPCIQVDKADNFPLEKAAVDLIFKVANIIHLFKEPSCLVLGKTDSFFIELDITFSYGMGLGLSGCLLAHFFHFHFLPSLMSSVHHYLLTHLSDNF

SEQ ID NO: 1203 - DNA, 360 bp, Alloiococcus otitidis
  CDS (73)..(357)
atttctgccatcatctgcttgatatcgcaacccttggcaatacagtggccgtggccccggtggttggacgcaatgaagtcgccatcgttaagcaggctaccaacaccagcggcaatggcttcttcccctgcatacaagtggacaaagccgataatttccccttggagaaagcggcggtggacctcatcttcaaagtggcgaatatcattcatctttttaaagagccatcttgcctggtcctgggtaaaactgacagcttcttcatcgagcttgacatcactttcagttatggcatgggcttgggtctgtctggctgcttgcttgctcattttttccattttcatttcctccctagcttaa

SEQ ID NO: 1204 - protein, 95 aa, Alloiococcus otitidis
MKSPSLSRLPTPAAMASSPAYKWTKPIISPWRKRRWTSSSKWRISFIFLKSHLAWSWVKLTASSSSLTSLSVMAWAWVCLAACLLIFSIFISSLA

SEQ ID NO: 1205 - DNA, 1359 bp, Alloiococcus otitidis
  CDS (13)..(1356)
cgaggtggaaatatgacacagtatgatctagtcatcattggtgctggtccaggtggttatgtggctgctgagcaggcagcccaggctggtcagaaggtgactgtcatcgaaaaggaagcgatcggtggggcttgtttaaatgtgggttgcattccctcaaagacttatttgcaatatgcccactgggtgaacactatttatcaagcaaatgaaagcggtgtcaattctcaattagaaaatatcgactttaaccgcttatatgagcggaagaatcaagtggtccaaagcctgcaaaatgggattcattctatttttaaggccaatgacattgactatatccaaggagaggccaaggtcaaggaggacaaaatttatgtggaagatagggaagttttctatcaaaagcttatactggctacgggatccagaccttttattccaagtcttaagggcttggacggggttgattatttaacgaccgatcgtttctttgatttaaaagaaatcccagaccatttagtcattataggaggtggtgtgataggggttgagatggcctttgccatgcgacccctaggagccgaggttagcttgttggaagtagcggatgatatattgctgagtgaagatgaggaagctagagcaatcattaaagccaagatggaagcgatgggaattgacctggaagtaaaggcagatattcaggaagtccaaaaagactcagttcaaacagggtcaaagacttatgaatttgaccaagtcctcctggctactggtcgccaggccaatttagacctggctcaagaccttggtttagccctgacaggagacggtcaatttgttcaagtggatagctattatcgaaccagcaaggctcacatctatgccataggggacttggtagacagtgcccagctcgcccatgtcgccagtcaggaaggaaagtgtgcggtcaaccatctaacccgccagccaagacaagcttttaaccagaaactgatcccaagttgtgtttacactgatccggaaattgctagctttggtttaagtgaagcagaggcccaggcggcaggttacaagacccgtctttaccggcaagcttttgcctctaatggccgggccctagcctctggtcagacagaaggctttgtgaaattagtagtcgatgaaagatttggtgagctcctaggaggggtggtggtaggtgcaggagcaagtgaaatgatccaccaactcttgaccctggtggccagtgaagctaccgttcatgagttggccaatgtcattgtcgcccacccgacactttcagaagttatcggagagatgagtcagaagatagtgatggaccgaactcattaa

SEQ ID NO: 1206 - protein, 448 aa, Alloiococcus otitidis
MTQYDLVIIGAGPGGYVAAEQAAQAGQKVTVIEKEAIGGACLNVGCIPSKTYLQYAHWVNTIYQANESGVNSQLENIDFNRLYERKNQVVQSLQNGIHSIFKANDIDYIQGEAKVKEDKIYVEDREVFYQKLILATGSRPFIPSLKGLDGVDYLTTDRFFDLKEIPDHLVIIGGGVIGVEMAFAMRPLGAEVSLLEVADDILLSEDEEARAIIKAKMEAMGIDLEVKADIQEVQKDSVQTGSKTYEFDQVLLATGRQANLDLAQDLGLALTGDGQFVQVDSYYRTSKAHIYAIGDLVDSAQLAHVASQEGKCAVNHLTRQPRQAFNQKLIPSCVYTDPEIASFGLSEAEAQAAGYKTRLYRQAFASNGRALASGQTEGFVKLVVDERFGELLGGVVVGAGASEMIHQLLTLVASEATVHELANVIVAHPTLSEVIGEMSQKIVMDRTH

SEQ ID NO: 1207 - DNA, 396 bp, Alloiococcus otitidis
  CDS (10)..(393)
aaggtcttcttgcaagatatagtctctaaatttttcgattgggtcggtgtcggccaattccttctctttgccatcttgttttttgtacttttgctcatcccctacatagtggccataattgcgataggtgacgcactcaaggaaggacggtccctcaccattgcgggcatgttcgatggcttctttggcagccgtataaacttcgaccacatctttcccatcaacccgggcactaggcatattataggcaatggcccggtctgctatggtgtcggaagcagaagcataccaggatggggtagactgggcaaaatagttgttttcgcacacaaagaccacaggggcattccagattttggccatgttcatgacttcatggaagttgccgatgtttga

SEQ ID NO: 1208 - protein, 128 aa, Alloiococcus otitidis
MQDIVSKFFDWVGVGQFLLFAILFFVLLLIPYIVAIIAIGDALKEGRSLTIAGMFDGFFGSRINFDHIFPINPGTRHIIGNGPVCYGVGSRSIPGWGRLGKIVVFAHKDHRGIPDFGHVHDFMEVADV

SEQ ID NO: 1209 - DNA, 1065 bp, Alloiococcus otitidis
  CDS (19)..(1062)
gctagggaggaaatgaaaatggaaaaaatgagcaagcaagcagccagacagacccaagcccatgccataactgaaagtgatgtcaagctcgatgaagaagctgtcagttttacccaggaccaggcaagatggctctttaaaaagatgaatgatattcgccactttgaagatgaggtccaccgccgctttctccaaggggaaattatcggctttgtccacttgtatgcaggggaagaagccattgccgctggtgttggtagcctgcttaacgatggcgacttcattgcgtccaaccaccggggccacggccactgtattgccaagggttgcgatatcaagcagatgatggcagaaatttatggtaaaaaagacggcctctgtaatggcaaaggtggctccatgcacatcgccgatattgacaaggggatgctaggggccaacggaatggttggtggtggtttcggtctcggactgggagctgccatgcggaataagtatttgaaaaacgataatgtaacggttgtcttctttggggatggagcctcaaacatcggcaacttccatgaagtcatgaacatggccaaaatctggaatgcccctgtggtctttgtgtgcgaaaacaactattttgcccagtctaccccatcctggtatgcttctgcttccgacaccatagcagaccgggccattgcctataatatgcctagtgcccgggttgatgggaaagatgtggtcgaagtttatacggctgccaaagaagccatcgaacatgcccgcaatggtgagggaccgtccttccttgagtgcgtcacctatcgcaattatggccactatgtaggggatgagcaaaagtacaaaaaacaagatggcaaagagaaggaattggccgacaccgacccaatcgaaaaatttagagactatatcttgcaagaagaccttttaagtgaagaagagttagacagtctagcggaagaatcgcaaaaggatattgaagcagcggttcaattcgctgaagacagtccagaaccagacccagaagccttgtatgaagacgtattagcttaa

SEQ ID NO: 1210 - protein, 348 aa, Alloiococcus otitidis
MEKMSKQAARQTQAHAITESDVKLDEEAVSFTQDQARWLFKKMNDIRHFEDEVHRRFLQGEIIGFVHLYAGEEAIAAGVGSLLNDGDFIASNHRGHGHCIAKGCDIKQMMAEIYGKKDGLCNGKGGSMHIADIDKGMLGANGMVGGGFGLGLGAAMRNKYLKNDNVTVVFFGDGASNIGNFHEVMNMAKIWNAPVVFVCENNYFAQSTPSWYASASDTIADRAIAYNMPSARVDGKDVVEVYTAAKEAIEHARNGEGPSFLECVTYRNYGHYVGDEQKYKKQDGKEKELADTDPIEKFRDYILQEDLLSEEELDSLAEESQKDIEAAVQFAEDSPEPDPEALYEDVLA

SEQ ID NO: 1211 - DNA, 1065 bp, Alloiococcus otitidis; identical to SEQ ID NO: 1209
  CDS (13)..(1062)

SEQ ID NO: 1212 - protein, 350 aa, Alloiococcus otitidis
MKMEKMSKQAARQTQAHAITESDVKLDEEAVSFTQDQARWLFKKMNDIRHFEDEVHRRFLQGEIIGFVHLYAGEEAIAAGVGSLLNDGDFIASNHRGHGHCIAKGCDIKQMMAEIYGKKDGLCNGKGGSMHIADIDKGMLGANGMVGGGFGLGLGAAMRNKYLKNDNVTVVFFGDGASNIGNFHEVMNMAKIWNAPVVFVCENNYFAQSTPSWYASASDTIADRAIAYNMPSARVDGKDVVEVYTAAKEAIEHARNGEGPSFLECVTYRNYGHYVGDEQKYKKQDGKEKELADTDPIEKFRDYILQEDLLSEEELDSLAEESQKDIEAAVQFAEDSPEPDPEALYEDVLA

SEQ ID NO: 1213 - DNA, 261 bp, Alloiococcus otitidis
  CDS (4)..(258)
gcgatggcttctttgaccgggacttcatccccgacatcagccgtaattttaatgattgtgccttcttcaggggcctccacatctgctgttagtttttctgagctgatcacagcaacgacatcgccttcactaacttcatccccttcctcgaccaaccattcatcaatcatgccttctttcatggttaggcctagggtgggcattctaatttctgtagccatagcttttccccctttaatgttgtctcaagtcgtcaattaa

SEQ ID NO: 1214 - protein, 85 aa, Alloiococcus otitidis
MASLTGTSSPTSAVILMIVPSSGASTSAVSFSELITATTSPSLTSSPSSTNHSSIMPSFMVRPRVGILISVAIAFPPLMLSQVVN

SEQ ID NO: 1215 - DNA, 1062 bp, Alloiococcus otitidis
  CDS (31)..(1059)
cttaagcacagtttgggaggggtagtaaaaatgactgaaatgacatttatgcaagcagtcaacaatgcactagacttggccatggaaaaagatgatacggttctgctgttgggtgaagatatttacggcgggtcaggcgttgaacacttagaagaaaaaaatgaagatgcctggggtggatctttcggtgtcctcaagggcttgggacccaagtatggggctgaccgggtgatcgacacacccatttctgaacacggttacatgtcggctgccgtcgggatggcggcgactgggcttagaccggtgcccgaattaatgtttaatgactttatcggctggtgccttgatgccatactcggccaagccaccaagttacgctatatgtttggggggaaagcgaaggttcctataaccgtccggactgctcatggggcaggggtttcggcttcagcccagcactccgggtcttactacggcatcttgggcaatattccaggcttgaatatcgtcgttccagccacaccccatgatgcgaaaggcctcctcttggcctgcattgaagatgacaatccctgctttttctttgaagataagaccttatatgggtctaagggagaagtgccggatgactactacaccattgagattggcaaggccaaagtcgttgaagaaggggaggacctcacccttgtaacgattggtaaaatgctttttgtcgcccaagaagccgctaaggaattgaaagaagaggggatttccactgagatcattgacttacgcactgttgccccatgggaccaggaaacagtccttgcctcagcccgaaaaacaggccgggtgattgtgatagatgaggacaacccccataacaatacagcaaccgatattgcctccgttattatgcgggaagcctttgactacctagacggtcctgttttgacggtttgtgcccccaacacccccgttccatttgcccgcaacttggaagccctctacattccggatgccgacaaggtgatcacagagggtgccgagttaattgacgacttgagacaacattaa

SEQ ID NO: 1216 - protein, 343 aa, Alloiococcus otitidis
MTEMTFMQAVNNALDLAMEKDDTVLLLGEDIYGGSGVEHLEEKNEDAWGGSFGVLKGLGPKYGADRVIDTPISEHGYMSAAVGMAATGLRPVPELMFNDFIGWCLDAILGQATKLRYMFGGKAKVPITVRTAHGAGVSASAQHSGSYYGILGNIPGLNIVVPATPHDAKGLLLACIEDDNPCFFFEDKTLYGSKGEVPDDYYTIEIGKAKVVEEGEDLTLVTIGKMLFVAQEAAKELKEEGISTEIIDLRTVAPWDQETVLASARKTGRVIVIDEDNPHNNTATDIASVIMREAFDYLDGPVLTVCAPNTPVPFARNLEALYIPDADKVITEGAELIDDLRQH

SEQ ID NO: 1217 - DNA, 1062 bp, Alloiococcus otitidis; identical to SEQ ID NO: 1215
  CDS (13)..(1059)

SEQ ID NO: 1218 - protein, 349 aa, Alloiococcus otitidis
MGGVVKMTEMTFMQAVNNALDLAMEKDDTVLLLGEDIYGGSGVEHLEEKNEDAWGGSFGVLKGLGPKYGADRVIDTPISEHGYMSAAVGMAATGLRPVPELMFNDFIGWCLDAILGQATKLRYMFGGKAKVPITVRTAHGAGVSASAQHSGSYYGILGNIPGLNIVVPATPHDAKGLLLACIEDDNPCFFFEDKTLYGSKGEVPDDYYTIEIGKAKVVEEGEDLTLVTIGKMLFVAQEAAKELKEEGISTEIIDLRTVAPWDQETVLASARKTGRVIVIDEDNPHNNTATDIASVIMREAFDYLDGPVLTVCAPNTPVPFARNLEALYIPDADKVITEGAELIDDLRQH

SEQ ID NO: 1219 - DNA, 1299 bp, Alloiococcus otitidis
  CDS (64)..(1296)
gacaacattaaagggggaaaagctatggctacagaaattagaatgcccaccctaggcctaaccatgaaagaaggcatgattgatgaatggttggtcgaggaaggggatgaagttagtgaaggcgatgtcgttgctgtgatcagctcagaaaaactaacagcagatgtggaggcccctgaagaaggcacaatcattaaaattacggctgatgtcggggatgaagtcccggtcaaagaagccatcgcttatgtcggtgagccgggtgaagaggttgaggaagaggctgacccggaaagggaggaggctggcgaagctggttcaggtgacgaggctggtgacccagaccaagaagaggacagtaacaaacaggctgaccaggaagctggcgaaaaatccccaagaaaagaagttagtgagtctcaaagttcacctggctctggtcaagatcggatttttatcactccggttgcccgtaaattagccgaagaagaaggttacgatatcgctcaaattaatgggactggtgctaacggacggattaccagaagagacgttgaggcttaccaaccagccagggaaggagttagcacaccagccgctcaagcagaatatggtcaaggtttagaaggcatgcggaagaccatcgcttcccggatgatgacttccttaaataccacagctcaagtgagtctccataccaaggctgatgtgaccgagttaatggcaatgcggcaagatgtcaaggacaaaattggtcgctccttggacaaaggcgaaatcagcctgcttagcctggttgccaaagccactattttggccttaaaagaccacccagaaatgaacggtttgtactatgatggggaatatacccagtatgacgaaatccacttaggcattgctgtcgatgctgaagaaggcttgtctgtgccggtgatcaaggatgcccagaccctgtccttaagtgccattggggaaagaacccgctacctgtctgaaggggtccgaaagggcaacttgcctggcgacttatacggtgggtctaccttctccatctccaacattggcagtgagggaatcgacttctttaccccaattatcaatacacctgaaattggtatcctaggggtcgggacagtcaggaatgaattgcaatttaacgaagataaagatattgtcgaacacagccagctaggcctaagcttgacctttgaccaccaaatcgttgacggtgcacccgcagcccggttcttagctagcattgtttcctacctggaaaacccttatgaattactgctttag

SEQ ID NO: 1220 - protein, 411 aa, Alloiococcus otitidis
MKEGMIDEWLVEEGDEVSEGDVVAVISSEKLTADVEAPEEGTIIKITADVGDEVPVKEAIAYVGEPGEEVEEEADPEREEAGEAGSGDEAGDPDQEEDSNKQADQEAGEKSPRKEVSESQSSPGSGQDRIFITPVARKLAEEEGYDIAQINGTGANGRITRRDVEAYQPAREGVSTPAAQAEYGQGLEGMRKTIASRMMTSLNTTAQVSLHTKADVTELMAMRQDVKDKIGRSLDKGEISLLSLVAKATILALKDHPEMNGLYYDGEYTQYDEIHLGIAVDAEEGLSVPVIKDAQTLSLSAIGERTRYLSEGVRKGNLPGDLYGGSTFSISNIGSEGIDFFTPIINTPEIGILGVGTVRNELQFNEDKDIVEHSQLGLSLTFDHQIVDGAPAARFLASIVSYLENPYELLL

SEQ ID NO: 1221 - DNA, 1299 bp, Alloiococcus otitidis; identical to SEQ ID NO: 1219
  CDS (25)..(1296)

SEQ ID NO: 1222 - protein, 424 aa, Alloiococcus otitidis
MATEIRMPTLGLTMKEGMIDEWLVEEGDEVSEGDVVAVISSEKLTADVEAPEEGTIIKITADVGDEVPVKEAIAYVGEPGEEVEEEADPEREEAGEAGSGDEAGDPDQEEDSNKQADQEAGEKSPRKEVSESQSSPGSGQDRIFITPVARKLAEEEGYDIAQINGTGANGRITRRDVEAYQPAREGVSTPAAQAEYGQGLEGMRKTIASRMMTSLNTTAQVSLHTKADVTELMAMRQDVKDKIGRSLDKGEISLLSLVAKATILALKDHPEMNGLYYDGEYTQYDEIHLGIAVDAEEGLSVPVIKDAQTLSLSAIGERTRYLSEGVRKGNLPGDLYGGSTFSISNIGSEGIDFFTPIINTPEIGILGVGTVRNELQFNEDKDIVEHSQLGLSLTFDHQIVDGAPAARFLASIVSYLENPYELLL

SEQ ID NO: 1223 - DNA, 1617 bp, Alloiococcus otitidis
  CDS (19)..(1614)
aaaagtggaggaatagtaatgaaagaactagtaaaggaattcaaatttcgaaatatagtcattatcctgctcctggctagtgtcagcttggctgaaattgccagtagtttcaccctgtccagagctgtcaattccattgttcaacctgacttgactaagtttgtccagtccattcttttaaccctccttatcttttttatttacttggccttcacctacttcaggatcgtctaccaggggcaaacggaagaaaaaatgaaggtctccttaagagagggactggtcgaccggctcgtcaaaacagactaccagaccttccaccaaaagaaaccagcaagctattcctcctggctgatgaatgatgtcaggcaggttgccactgactccatcagcccattttacgacctcttggctggcgttatctccctagtcctgagcctcctcaccctgctcaccctccactggcttttaatcgcctatactctcttgtcccttgccttgattttactccttccaagactctttaaatcaaccattgtccaggaaacaatcaagctcagccagggccatgaaagttacttaagtaaggtgactgactttttagctgcctatgatactctcttttcttaccgccagctcccctttatgaaagaccaactagctaaccaggccaaggacttgtccgataagtccttccactacaccaaagtcatggcttgggtggcggtggcaggtggcttgggcaatgtcttgggccaggtagggattatcgctctgaccggttacctagctttgaccggccaggtgacagtggggtccattatggtcaccaccagcctggcgggaaacatttttaacagctcaggtaacctgagccagatgatctcccggatccagtccagccagcctattttcgaaaaattccaaagggtccaggccagtcccaaaagcaaggagcaaacactgaccacccagcccctcactgggggctatagcttggaaaatgttcactttgcctacgcggacaagcaggtaattgataacttcacaatggactttcacctggccaagaactatgccattgttggggaaagtggcagtggcaagtccactctcttgaacctaatcggcggccggcttgaccactatcaaggctcgatccgcctggctggcaaggagcttagtcaggtgacttaccaggaactctttgaccaggtcctctacatcgaccaaaacccccacatctttgatgggacgatccgggaaaacttggaaatgggccagacctattccgatgaagaactctaccgggccttagaacaagtccaactggctgacttggtggctggtcaatcagacggcctggactactacattggtgaaggcgggaaaatgctgtccggcgggcaaaagcagcgcctgtctattgcccggtccctccttcgggataaaaaaatcctgctcttagatgaagtgacctccagtctggaccaggaaaccgctgtcagtatcgaaaaacttctcttaagtgatgaggaaaccagtgtgatcatgattacccacaatctccgggaccaagtggccaagctgattgaccacaccttagtggtcagttag

SEQ ID NO: 1224 - protein, 532 aa, Alloiococcus otitidis
MKELVKEFKFRNIVIILLLASVSLAEIASSFTLSRAVNSIVQPDLTKFVQSILLTLLIFFIYLAFTYFRIVYQGQTEEKMKVSLREGLVDRLVKTDYQTFHQKKPASYSSWLMNDVRQVATDSISPFYDLLAGVISLVLSLLTLLTLHWLLIAYTLLSLALILLLPRLFKSTIVQETIKLSQGHESYLSKVTDFLAAYDTLFSYRQLPFMKDQLANQAKDLSDKSFHYTKVMAWVAVAGGLGNVLGQVGIIALTGYLALTGQVTVGSIMVTTSLAGNIFNSSGNLSQMISRIQSSQPIFEKFQRVQASPKSKEQTLTTQPLTGGYSLENVHFAYADKQVIDNFTMDFHLAKNYAIVGESGSGKSTLLNLIGGRLDHYQGSIRLAGKELSQVTYQELFDQVLYIDQNPHIFDGTIRENLEMGQTYSDEELYRALEQVQLADLVAGQSDGLDYYIGEGGKMLSGGQKQRLSIARSLLRDKKILLLDEVTSSLDQETAVSIEKLLLSDEETSVIMITHNLRDQVAKLIDHTLVVS

SEQ ID NO: 1225 - DNA, 873 bp, Alloiococcus otitidis
  CDS (19)..(870)
gagaaagaaggggtcagcatgaccattggtgatttattaaaagaataccggctcaatatgggcctgaccttgagtgagatggctgctggcgtcttgtcaacctcttactatgccaaggtcgaaaaagaccaacaccggattacggccacagacctctttgacctgctggccagccatgccattcccttagatgactttttaaaccactacctgcaaacaccccactccttcaaaaaagacatggaagcgatcatcacccttcactaccagggggaccaggctgggatcaaaaaaattatggcagcctaccgcaagcttgatacagaaaaggcccagaccataattgccctaggggaaagttgcctctatgacttagaccaaggccgggctatttctgagaccagcagagacctgattaaggaaaaactcttttcccttccaaactggaacctctataagttatctatttatgctaactttgtctccttgtatgacatcccgagtaaccaggtctttgtctcggccaacttgtccaagaacttggaccaatacaataagggagagcgggaggtcatcggtgtcatcttgctgaactttatcgaagtcttgctagaccaaggcgagctggctctggccagctactacctagaccagacccaaaaagtcctggtcacccgtcccgaacagctctattaccatgttgtcatgcacttttacaagtccctggtccgctatttgcagggtcatggcccagaccatttagcccagtgccaggcccagttaaacttcctcaagaccaatggctacacccaagaggcggacagtttagcagcctttcttgaaaaaaattctcttgaaaaaaattccggctaa

SEQ ID NO: 1226 - protein, 284 aa, Alloiococcus otitidis
MTIGDLLKEYRLNMGLTLSEMAAGVLSTSYYAKVEKDQHRITATDLFDLLASHAIPLDDFLNHYLQTPHSFKKDMEAIITLHYQGDQAGIKKIMAAYRKLDTEKAQTIIALGESCLYDLDQGRAISETSRDLIKEKLFSLPNWNLYKLSIYANFVSLYDIPSNQVFVSANLSKNLDQYNKGEREVIGVILLNFIEVLLDQGELALASYYLDQTQKVLVTRPEQLYYHVVMHFYKSLVRYLQGHGPDHLAQCQAQLNFLKTNGYTQEADSLAAFLEKNSLEKNSG

SEQ ID NO: 1227 - DNA, 576 bp, Alloiococcus otitidis
  CDS (193)..(573)
gagatgattgtaatagaaggagttgacttcatgtctgttcgtgacctgacctatattgccttgttcacagccctcttagcagtatcttccatcctggtgatccctctttggccggtcccggtcaccctccaagtttttttcttcctcctcattccagccttgctgggacccttaaagggaagtctagccatcttgctctatatcgcactgggcttactgggcctccccgtcttggcaggggggacaggtggcttccagtctatctttagcccgtcttttggttttttaatcggtggcttcatccaggccatctacctggggaagaaactcagagaccccctcaattttaaaggggtcctcctccacatggtggtcgccatctttatcctctacttgttcggagttacccaccagtactttatcatgaaccgggtcatgatggtggaaattccctttggagcggtcattgtgaccaatatcctgaccttcttccccatcgacttgctcaaggccttcctagctacagccctctatctccggatccggtccctggattattttaaaaaccaggcctaa

SEQ ID NO: 1228 - protein, 127 aa, Alloiococcus otitidis
MLYIALGLLGLPVLAGGTGGFQSIFSPSFGFLIGGFIQAIYLGKKLRDPLNFKGVLLHMVVAIFILYLFGVTHQYFIMNRVMMVEIPFGAVIVTNILTFFPIDLLKAFLATALYLRIRSLDYFKNQA

SEQ ID NO: 1229 - DNA, 576 bp, Alloiococcus otitidis; identical to SEQ ID NO: 1227
  CDS (160)..(573)

SEQ ID NO: 1230 - protein, 138 aa, Alloiococcus otitidis
MLGPLKGSLAILLYIALGLLGLPVLAGGTGGFQSIFSPSFGFLIGGFIQAIYLGKKLRDPLNFKGVLLHMVVAIFILYLFGVTHQYFIMNRVMMVEIPFGAVIVTNILTFFPIDLLKAFLATALYLRIRSLDYFKNQA

SEQ ID NO: 1231 - DNA, 576 bp, Alloiococcus otitidis; identical to SEQ ID NO: 1227
  CDS (4)..(573)

SEQ ID NO: 1232 - protein, 190 aa, Alloiococcus otitidis
MIVIEGVDFMSVRDLTYIALFTALLAVSSILVIPLWPVPVTLQVFFFLLIPALLGPLKGSLAILLYIALGLLGLPVLAGGTGGFQSIFSPSFGFLIGGFIQAIYLGKKLRDPLNFKGVLLHMVVAIFILYLFGVTHQYFIMNRVMMVEIPFGAVIVTNILTFFPIDLLKAFLATALYLRIRSLDYFKNQA

SEQ ID NO: 1233 - DNA, 1197 bp, Alloiococcus otitidis
  CDS (19)..(1194)
actttagaaggtgatggaatgcagcaagcaatcaaagattatatcctagaccatgaagcagacatggttgagatgagacgttacctacaccaacaccccgaattatcatttgaggaagtggagacgacccaattcttcgtcgacaagttagaagaattaggcctcccttaccgaaccttagacccgactggtgtggtaacggaaattgaaggcgaccatccaggcaagaccgtcctcttgcggggggatatggatgccttggcaatcaacgaagccaatgaagtagactacaagtctcaaaatgaagggaagatgcatgcttgtggccacgatgggcatgtctccatgctctttttagccttgagagccttgaatgctaaccgggacttgattcacgggaccgtccgttttatcttccaaccagccgaagagatcggacaaggggctaagacagtggttggtcagggtgttacagagggagtcgacaatgtctttggcctccacattttatcagctgacgaaacccacaaggtatcagttgagccgggcccaatcctcgcagctggggacaagtttaccgtcaagtttaagggtgacggaggccacggtgcccaaccccatgccagtaaggatgccttgctcatgggagcccagttcgctaccaatgttcaagctgtggtatcccggacggtaaaccccctccaacctgcagtagtttcccttggccaatttgaatccggcagccggtttaacattatcccaggcgaatcgaccttggttggtactgtccgggtctttgacaacccaacccgggaaaagatagaagaaggaattcgcaagtatgcccaagccattgcccaggcctgggacgggcaagcagacgttgaatatgaacgcctagtcgaatttgtcgacaatgaccgggcttctgccgaactggcccaaaaagtggtcaccgaatccttcggggaagaaaacctccgccacaacccggcaaccatgggcagtgaagacttcggctacttctctcaacaagttcccggtacctttgcgacagtaggttgccggaaccccgaaaaaggcgctaactaccctcaccaccacccgaactttaacattgatgaggatgccttaaaaacaggtgctgaactctatgcccagtatgccttggcctacctggaccaggatgaattttaa

SEQ ID NO: 1234 - protein, 392 aa, Alloiococcus otitidis
MQQAIKDYILDHEADMVEMRRYLHQHPELSFEEVETTQFFVDKLEELGLPYRTLDPTGVVTEIEGDHPGKTVLLRGDMDALAINEANEVDYKSQNEGKMHACGHDGHVSMLFLALRALNANRDLIHGTVRFIFQPAEEIGQGAKTVVGQGVTEGVDNVFGLHILSADETHKVSVEPGPILAAGDKFTVKFKGDGGHGAQPHASKDALLMGAQFATNVQAVVSRTVNPLQPAVVSLGQFESGSRFNIIPGESTLVGTVRVFDNPTREKIEEGIRKYAQAIAQAWDGQADVEYERLVEFVDNDRASAELAQKVVTESFGEENLRHNPATMGSEDFGYFSQQVPGTFATVGCRNPEKGANYPHHHPNFNIDEDALKTGAELYAQYALAYLDQDEF

SEQ ID NO: 1235 - DNA, 1626 bp, Alloiococcus otitidis
  CDS (517)..(1623)
caagaaagtggtggacccatgtcaacttacataaaagcttattggaaggaaaacctccttcttttatttatcattactgttggggctggagcccagattttggctggtatcttaaatgcccgtgccctcaactccttgatcgcctttaattggacccagttcttctggtccatgctagctattatcctcatgctaggcttgtatgtcttgtctctcctcttccggattccctacgaagccaaggtcatccaactcatggtcacccagatccggacagatattacagaaagtttggaagacctcacctaccaggaattccaccaacacgaagcctcagcctttatctcctggcttaataacgacattaccactatcgaagcaactggctataccaacctctacgcctgtatcaccatgattatcgaagccctctttgcaactgtttctttaatcttcttccactggagtatcgttctttttgccttcgccatttcccttttaacttacttcctgcccatgctggtcaaaaaacgggtccaagacagtacccttgagatgacccaggaacaggaaaaatttgttggaacagtgaccagcgtcttgcaaggttttgacaccctcttttcctataacttggtctctcgtattagggaccgggtctaccaagcctcccaggacttggccgataaaaaagttgaccagcggaaacaattgacctatagtgccattcttggggcttccggcaacctcttaggccagagtggtatcttgattttaacgggttacctggccctccaacaaattgtaacgatcgggtccattaacgccaccgaggccttgagtaataagatctttaacagtgtgggcaatattaccaacactattttggagatcaaaagtattactcccatctttgaaaaattccaatccctcaaaaacactgaccggcctcaatcccaatcttttgaagtggccaacaacaccatctccctcaaccaattgaactatacttatgaccaaggagaccagctctgggaccagggtgtttcttatgacttcagccagaatgggaaatacgccatccttggcccaagtgggagtgggaaaagtaccctctttaatattttaaacggcaaactaaccgactaccaaggatccttgagaatttgtggcaatgagatcaaggaaaccaagggagaagatatccgggaggaagttatgtacctagaccaaaccccttatatttttgaagggaccattttggataatattagcctgggtgagacctttagtgaagaccaagtctggcaagccctggcagaagccggcctaacagactacgtcaaaggcttggcgaagggcctagataccccagtaggcgaaggcggccggtccctatccggtgggcaaaagcaacgtctggccttggcaaggggctttatccggcataaaaatattgtcttggtcgacgagggaacctccagtctggaccaagaagctgccctcaatattgaaagaaatcttgtcaccaacccccaattaaccgtcatcatgatcacccacaatctgaggtctgaaattgaagccgagctggatggagtcttggacctagctcagtttatctaa

SEQ ID NO: 1236 - protein, 369 aa, Alloiococcus otitidis
MLVKKRVQDSTLEMTQEQEKFVGTVTSVLQGFDTLFSYNLVSRIRDRVYQASQDLADKKVDQRKQLTYSAILGASGNLLGQSGILILTGYLALQQIVTIGSINATEALSNKIFNSVGNITNTILEIKSITPIFEKFQSLKNTDRPQSQSFEVANNTISLNQLNYTYDQGDQLWDQGVSYDFSQNGKYAILGPSGSGKSTLFNILNGKLTDYQGSLRICGNEIKETKGEDIREEVMYLDQTPYIFEGTILDNISLGETFSEDQVWQALAEAGLTDYVKGLAKGLDTPVGEGGRSLSGGQKQRLALARGFIRHKNIVLVDEGTSSLDQEAALNIERNLVTNPQLTVIMITHNLRSEIEAELDGVLDLAQFI

SEQ ID NO: 1237 - DNA, 1626 bp, Alloiococcus otitidis; identical to SEQ ID NO: 1235
  CDS (19)..(1623)

SEQ ID NO: 1238 - protein, 535 aa, Alloiococcus otitidis
MSTYIKAYWKENLLLLFIITVGAGAQILAGILNARALNSLIAFNWTQFFWSMLAIILMLGLYVLSLLFRIPYEAKVIQLMVTQIRTDITESLEDLTYQEFHQHEASAFISWLNNDITTIEATGYTNLYACITMIIEALFATVSLIFFHWSIVLFAFAISLLTYFLPMLVKKRVQDSTLEMTQEQEKFVGTVTSVLQGFDTLFSYNLVSRIRDRVYQASQDLADKKVDQRKQLTYSAILGASGNLLGQSGILILTGYLALQQIVTIGSINATEALSNKIFNSVGNITNTILEIKSITPIFEKFQSLKNTDRPQSQSFEVANNTISLNQLNYTYDQGDQLWDQGVSYDFSQNGKYAILGPSGSGKSTLFNILNGKLTDYQGSLRICGNEIKETKGEDIREEVMYLDQTPYIFEGTILDNISLGETFSEDQVWQALAEAGLTDYVKGLAKGLDTPVGEGGRSLSGGQKQRLALARGFIRHKNIVLVDEGTSSLDQEAALNIERNLVTNPQLTVIMITHNLRSEIEAELDGVLDLAQFI

SEQ ID NO: 1239 - DNA, 276 bp, Alloiococcus otitidis
  CDS (49)..(273)
gctaggtccaagactccatccagctcggcttcaatttcagacctcagattgtgggtgatcatgatgacggttaattgggggttggtgacaagatttctttcaatattgagggcagcttcttggtccagactggaggttccctcgtcgaccaagacaatatttttatgccggataaagccccttgccaaggccagacgttgcttttgcccaccggatagggaccggccgccttcgcctactggggtatctaggcccttcgccaagcctttgacgtag

SEQ ID NO: 1240 - protein, 75 aa, Alloiococcus otitidis
MWVIMMTVNWGLVTRFLSILRAASWSRLEVPSSTKTIFLCRIKPLAKARRCFCPPDRDRPPSPTGVSRPFAKPLT

SEQ ID NO: 1241 - DNA, 1746 bp, Alloiococcus otitidis
  CDS (34)..(1743)
ttaaagctgatatataccacaagggggattcatatgaaagaaaagctttataaggaattagtaaaagagttgtaccgagataataagttctatcttcttggtgctcttgccgtggcttttgggacagcagcgatcaatgttgccctctcttggttacttcaaatggctattgatattgctacgggagaagcgtctatgacttttatgcaagtcctttacttggcacttgcctttatcctcttaacaattattatcatggccctaaatgcctattttttcccccgttatattaaaagagcgatggtcaattataagcagtatttgctccaaaagcttttacgtaaaaacatagccgactttagccaactggggaaatcggtttatttatccgccctaaccaatgataccaaggtcattgaagagaaatacgtccggcaacaacttaccctcatcactgaaatcgtaaccttcattggggctttagcttttatgctgtacttatctgtattaatgaccctagtctccattgctatcaccatgattcctgtaatatcttcattaattacgggctcgcgcctagttaagattgagcaagttatttccgagaaaaattcgacttttgtgggcattatttcagactttatcaatggctttcccttggttaaaaactttaaggccgaaaaacaaattgcaaaacacttgggtcaaagcaatgaaaatttagaagaaaacaaaaaacaattagagaacagtcgattaactattaccttatttagtcaggggtctggcatttttacccagttggctgtcaccatgtttggagcttatttagtcctgaatgaccaaggctttacagctgggatgatcatttcctttgtgaatttaatgaactttatcattagcccagtggtcaacctgccgactatgatctcagaaagaagggctgccttgggactaatcaagaaggctgcctctttcctcgatccaggggaggctgacccagatcaagagatgactccactaaccagcctggaagaatcgattaaactacaatcagttccctttgcctatcctggaggggatacaatcctgaaagatcttgactgggagtttaaaaggggcaagtcctacgccatcgtaggggcttctggttcaggtaaatcaaccttattaaaattactgatgaaaaaccagcaaccagtatctggagatatttattatgaccaaattaacttgaaggatgccaaactagatgctttatatgaagaagtcagcctgatagaccaggatgtttttatttttaatgccagcattctagataacttgacaatgttccaagactttgacgaggaccaaattcaagaagtgattgaccaagcttccctccgcaagctagttaatgataaaggactctcctattcctgtggggaaaatggggttaacctatccggcggtgaaaagcaacgcattgccatcggaagagccttattgaaaaattcctcaatttttttaacagacgaagccacttctgccttagacaaggaaacggcttatcaaattacaaatgacattttaaacctaagtgaaaaaaccaaaattatgatcacccactctttggctaaaggcctattagaacagtatgatgaaattctggtcttaaagaatggcaatatagccgaatcaggcagttttgctgatttagttgaagcaaatggctactttaactacctgtattccattgcttaa

SEQ ID NO: 1242 - protein, 570 aa, Alloiococcus otitidis
MKEKLYKELVKELYRDNKFYLLGALAVAFGTAAINVALSWLLQMAIDIATGEASMTFMQVLYLALAFILLTIIIMALNAYFFPRYIKRAMVNYKQYLLQKLLRKNIADFSQLGKSVYLSALTNDTKVIEEKYVRQQLTLITEIVTFIGALAFMLYLSVLMTLVSIAITMIPVISSLITGSRLVKIEQVISEKNSTFVGIISDFINGFPLVKNFKAEKQIAKHLGQSNENLEENKKQLENSRLTITLFSQGSGIFTQLAVTMFGAYLVLNDQGFTAGMIISFVNLMNFIISPVVNLPTMISERRAALGLIKKAASFLDPGEADPDQEMTPLTSLEESIKLQSVPFAYPGGDTILKDLDWEFKRGKSYAIVGASGSGKSTLLKLLMKNQQPVSGDIYYDQINLKDAKLDALYEEVSLIDQDVFIFNASILDNLTMFQDFDEDQIQEVIDQASLRKLVNDKGLSYSCGENGVNLSGGEKQRIAIGRALLKNSSIFLTDEATSALDKETAYQITNDILNLSEKTKIMITHSLAKGLLEQYDEILVLKNGNIAESGSFADLVEANGYFNYLYSIA

SEQ ID NO: 1243 - DNA, 306 bp, Alloiococcus otitidis
  CDS (52)..(303)
tcaatgttgacttccacttgggccaaggtatccaggatttcctggcgcaagttgcggatcaacttggacaagtccccgtccatctggttgaccgccacctgcatggccttgtcggtcttggcccggatcatatccatgactgcttcagcttgggagaggtcaacccggccgttgagaaaggcccgcttggtaaattcgcccggttccgctaagcgggccccattgtttaacaccagctggaggaccttgttcacggctaaaatccccccgtggctgttgatttccaccacatcttccttggtatag

SEQ ID NO: 1244 - protein, 84 aa, Alloiococcus otitidis
MRINLDKSPSIWLTATCMALSVLARIISMTASAWERSTRPLRKARLVNSPGSAKRAPLFNTSWRTLFTAKIPPWLLISTTSSLV

SEQ ID NO: 1245 - DNA, 306 bp, Alloiococcus otitidis; identical to SEQ ID NO: 1243
  CDS (4)..(303)

SEQ ID NO: 1246 - protein, 100 aa, Alloiococcus otitidis
MLTSTWAKVSRISWRKLRINLDKSPSIWLTATCMALSVLARIISMTASAWERSTRPLRKARLVNSPGSAKRAPLFNTSWRTLFTAKIPPWLLISTTSSLV

SEQ ID NO: 1247 - DNA, 597 bp, Alloiococcus otitidis
  CDS (82)..(594)
gtagcatcccggtcccctgtttggccagagaaaaagaggtcagcgatcttgtcctctaagtcagtcaagcctaagtcggtcatggcagaagttgtgataaagtcagcatccggcagggcctggctgagccggtctaagtccaagtgttggtcaaggtcagacttgttcaagatgacaatccgcttgtggtctttggtagcttcaatcaaggccaggtcttcatcggtcaaggcttcatgttggttaaagaccaacaagaccaagtcagcatcctggatggccttgcgggaccgctcgaccccgattcgctccacctggtcttccgtgtcccgaatgccagctgtgtcgatcaagcggagggggacccccttgacactgacatactcttcgacaatgtcccgggtagtcccggccacatccgttacaatagccttttcttcccgcaagagtttgttgagcaggctggacttgcccacattgggccggccgataatagcagtggccaggccttctctaagaaccttgccttgctgggcggtttctaggagtgccttgacctggcttttgacagactgggctttttccaaaagcatttga

SEQ ID NO: 1248 - protein, 171 aa, Alloiococcus otitidis
MAEVVIKSASGRAWLSRSKSKCWSRSDLFKMTIRLWSLVASIKARSSSVKASCWLKTNKTKSASWMALRDRSTPIRSTWSSVSRMPAVSIKRRGTPLTLTYSSTMSRVVPATSVTIAFSSRKSLLSRLDLPTLGRPIIAVARPSLRTLPCWAVSRSALTWLLTDWAFSKSI

SEQ ID NO: 1249 - DNA, 597 bp, Alloiococcus otitidis; identical to SEQ ID NO: 1247
  CDS (49)..(594)

SEQ ID NO: 1250 - protein, 182 aa, Alloiococcus otitidis
MSSKSVKPKSVMAEVVIKSASGRAWLSRSKSKCWSRSDLFKMTIRLWSLVASIKARSSSVKASCWLKTNKTKSASWMALRDRSTPIRSTWSSVSRMPAVSIKRRGTPLTLTYSSTMSRVVPATSVTIAFSSRKSLLSRLDLPTLGRPIIAVARPSLRTLPCWAVSRSALTWLLTDWAFSKSI

SEQ ID NO: 1251 - DNA, 1401 bp, Alloiococcus otitidis
  CDS (13)..(1398)
ggaggtaaagtgatgtctttagattttgacaccattgcggctatttcaaccccaccaggtgaaggggggattgggattgtccggatttccggtgaagaagccattgccatagcagaccgggtttaccagatggggagcaaaaaaatttcggaccaggacagccacaccatccactacggccgggtggtagaccctaaaacggaccaggtggtggatgaagtcatggtgaccctgatgaaggctcccaaaacctataccaaggaagatgtggtggaaatcaacagccacggggggattttagccgtgaacaaggtcctccagctggtgttaaacaatggggcccgcttagcggaaccgggcgaatttaccaagcgggcctttctcaacggccgggttgacctctcccaagctgaagcagtcatggatatgatccgggccaagaccgacaaggccatgcaggtggcggtcaaccagatggacggggacttgtccaagttgatccgcaacttgcgccaggaaatcctggataccttggcccaagtggaagtcaacattgactacccggaatacgatgacgtggaagagatgacctctcaaatgcttttggaaaaagcccagtctgtcaaaagccaggtcaaggcactcctagaaaccgcccagcaaggcaaggttcttagagaaggcctggccactgctattatcggccggcccaatgtgggcaagtccagcctgctcaacaaactcttgcgggaagaaaaggctattgtaacggatgtggccgggactacccgggacattgtcgaagagtatgtcagtgtcaagggggtccccctccgcttgatcgacacagctggcattcgggacacggaagaccaggtggagcgaatcggggtcgagcggtcccgcaaggccatccaggatgctgacttggtcttgttggtctttaaccaacatgaagccttgaccgatgaagacctggccttgattgaagctaccaaagaccacaagcggattgtcatcttgaacaagtctgaccttgaccaacacttggacttagaccggctcagccaggccctgccggatgctgactttatcacaacttctgccatgaccgacttaggcttgactgacttagaggacaagatcgctgacctctttttctctggccaaacaggggaccgggatgctacttatgtctccaacacccgccacatttccctcctcaacaaggcagctgatgccttggatgaagtgattgaaggcatcgacttaggcatgccggttgacctggtccaggtcgacatgacccgggcctgggactatctaggggaaatcaccggcgacagcgtccaagatgaattgattacccaactattcagccagttctgcctgggtaaatag

SEQ ID NO: 1252 - protein, 462 aa, Alloiococcus otitidis
MSLDFDTIAAISTPPGEGGIGIVRISGEEAIAIADRVYQMGSKKISDQDSHTIHYGRVVDPKTDQVVDEVMVTLMKAPKTYTKEDVVEINSHGGILAVNKVLQLVLNNGARLAEPGEFTKRAFLNGRVDLSQAEAVMDMIRAKTDKAMQVAVNQMDGDLSKLIRNLRQEILDTLAQVEVNIDYPEYDDVEEMTSQMLLEKAQSVKSQVKALLETAQQGKVLREGLATAIIGRPNVGKSSLLNKLLREEKAIVTDVAGTTRDIVEEYVSVKGVPLRLIDTAGIRDTEDQVERIGVERSRKAIQDADLVLLVFNQHEALTDEDLALIEATKDHKRIVILNKSDLDQHLDLDRLSQALPDADFITTSAMTDLGLTDLEDKIADLFFSGQTGDRDATYVSNTRHISLLNKAADALDEVIEGIDLGMPVDLVQVDMTRAWDYLGEITGDSVQDELITQLFSQFCLGK

SEQ ID NO: 1253 - DNA, 1401 bp, Alloiococcus otitidis; identical to SEQ ID NO: 1251
  CDS (10)..(1398)

SEQ ID NO: 1254 - protein, 463 aa, Alloiococcus otitidis
MMSLDFDTIAAISTPPGEGGIGIVRISGEEAIAIADRVYQMGSKKISDQDSHTIHYGRVVDPKTDQVVDEVMVTLMKAPKTYTKEDVVEINSHGGILAVNKVLQLVLNNGARLAEPGEFTKRAFLNGRVDLSQAEAVMDMIRAKTDKAMQVAVNQMDGDLSKLIRNLRQEILDTLAQVEVNIDYPEYDDVEEMTSQMLLEKAQSVKSQVKALLETAQQGKVLREGLATAIIGRPNVGKSSLLNKLLREEKAIVTDVAGTTRDIVEEYVSVKGVPLRLIDTAGIRDTEDQVERIGVERSRKAIQDADLVLLVFNQHEALTDEDLALIEATKDHKRIVILNKSDLDQHLDLDRLSQALPDADFITTSAMTDLGLTDLEDKIADLFFSGQTGDRDATYVSNTRHISLLNKAADALDEVIEGIDLGMPVDLVQVDMTRAWDYLGEITGDSVQDELITQLFSQFCLGK

SEQ ID NO: 1255 - DNA, 2001 bp, Alloiococcus otitidis
  CDS (106)..(1998)
ccgccagttcggtctcatcccaagctattttttgcccaagcaagccagcctaagattttcaaacgaaagacaagactgaccctggaaatagaaaggaagtcattgatggaaagataccaagctggaacgtacgatgtcattgtagtgggagcaggtcatgccgggtcagaagcagccttggcagctgcccgtttaggggctaagaccttgctggtaaccatcagcctggacatggtggcccacatgccctgcaacccatctttaggtggtcctgccaaggggattgtcgtccgcgaaattgacgctttaggtggggaaatggggcggaatatcgacaaggcctatattcaaatgcggatgctcaacaccgcaaaaggcccagctgtccgagccctaagagcccaagctgacaagcatatttactccaatgaaatgaaaaaaaccctagaacgccaagaaaacctggacctcaaacaaagtgtggtcaacgaactcattgtcgaagacggcgtggtcaaaggagtcgtcacccactcaggtgcttcctacactgcccaagctgtggtcttaacagccgggacctcttcaagagggcaaattgtggtaggcgacttgaaatactcctccggccccaacaacaccctagcctccattaaactctctgaaaacctcttggacctaggctttgaactggaccggtttaaaacaggaaccccaccgcggatcaacaagcggaccatccactacggtgagaccgaaatccaggaaggccacaagacccccaaccatttttcttatgaaagcaaggatgaagactacctagaagaccaagagccttgctttttaacctacaccaactcggactcccacgatattatccgggacaacttggaacgagcccctatgttcaccgggattgtcgacggggtaggggcccgttactgcccttccattgaagacaaggtggtccggttctcagacaagccccgccaccaaattttcctggaaccagaaggcctggacaccgacgaaatttatgtccaaggcttgtcttcctccctgccagaagacgtgcaactggaagttctgaagaccatccctggcctggaagacgtggagatgatgcggaccggctatgccattgaatacgatgtcatcaccccccaccaactccgcccttccttggaaaccaagctcgttgacggtctgtttacggccggccaaatgaacgggaccagtggctatgaggaagcaggaggccaagggattgtagccggcatcaacgctgtccgcaagattagaggccaagagccctttgtcatgaaacgggacgaaagctatatcggggtcatgatcgacgacctggtcaccaagggaaccaacgaaccctaccgtctcttaacctcccgggcggaataccggctcctcctccgccacgacaatgccgacttccgtttgaccgagaagggttatgaacttggcttgatttcccaagaccgctatgaccgcttcttggagaaaaaagctatcgtggaaaaagaactagaccggctcaagtcagcccgactgaccccaagcgatgtccacgactacttggaagcaaaaggcgaaccccagctcaaggacggcaagcaagcctatgactttttgaaacgcccttatgtgacctatgaggacctgatggaatttgtccctgctccagaaaaactgggacgttacgaggcagaacaggttgaaatttccatcaagtacgaaggctacatcgaaaaagccaaacgcaaggcggataagatcaagcggatggagaacaagcggattccagaccagatcgactacacccaaatcaacggtttggcgaccgaagccattgaaaaactggaccttatccggccggaaaccattgcccaggctagtcggatcagcggggtcaatccagcagacatctctatcctcatggtttacgtcgaacaaggccaagtccacaaggcgaaccaggcttag

SEQ ID NO: 1256 - protein, 631 aa, Alloiococcus otitidis
MERYQAGTYDVIVVGAGHAGSEAALAAARLGAKTLLVTISLDMVAHMPCNPSLGGPAKGIVVREIDALGGEMGRNIDKAYIQMRMLNTAKGPAVRALRAQADKHIYSNEMKKTLERQENLDLKQSVVNELIVEDGVVKGVVTHSGASYTAQAVVLTAGTSSRGQIVVGDLKYSSGPNNTLASIKLSENLLDLGFELDRFKTGTPPRINKRTIHYGETEIQEGHKTPNHFSYESKDEDYLEDQEPCFLTYTNSDSHDIIRDNLERAPMFTGIVDGVGARYCPSIEDKVVRFSDKPRHQIFLEPEGLDTDEIYVQGLSSSLPEDVQLEVLKTIPGLEDVEMMRTGYAIEYDVITPHQLRPSLETKLVDGLFTAGQMNGTSGYEEAGGQGIVAGINAVRKIRGQEPFVMKRDESYIGVMIDDLVTKGTNEPYRLLTSRAEYRLLLRHDNADFRLTEKGYELGLISQDRYDRFLEKKAIVEKELDRLKSARLTPSDVHDYLEAKGEPQLKDGKQAYDFLKRPYVTYEDLMEFVPAPEKLGRYEAEQVEISIKYEGYIEKAKRKADKIKRMENKRIPDQIDYTQINGLATEAIEKLDLIRPETIAQASRISGVNPADISILMVYVEQGQVHKANQA

SEQ ID NO: 1257 - DNA, 2001 bp, Alloiococcus otitidis; identical to SEQ ID NO: 1255
  CDS (103)..(1998)

SEQ ID NO: 1258 - protein, 632 aa, Alloiococcus otitidis
MMERYQAGTYDVIVVGAGHAGSEAALAAARLGAKTLLVTISLDMVAHMPCNPSLGGPAKGIVVREIDALGGEMGRNIDKAYIQMRMLNTAKGPAVRALRAQADKHIYSNEMKKTLERQENLDLKQSVVNELIVEDGVVKGVVTHSGASYTAQAVVLTAGTSSRGQIVVGDLKYSSGPNNTLASIKLSENLLDLGFELDRFKTGTPPRINKRTIHYGETEIQEGHKTPNHFSYESKDEDYLEDQEPCFLTYTNSDSHDIIRDNLERAPMFTGIVDGVGARYCPSIEDKVVRFSDKPRHQIFLEPEGLDTDEIYVQGLSSSLPEDVQLEVLKTIPGLEDVEMMRTGYAIEYDVITPHQLRPSLETKLVDGLFTAGQMNGTSGYEEAGGQGIVAGINAVRKIRGQEPFVMKRDESYIGVMIDDLVTKGTNEPYRLLTSRAEYRLLLRHDNADFRLTEKGYELGLISQDRYDRFLEKKAIVEKELDRLKSARLTPSDVHDYLEAKGEPQLKDGKQAYDFLKRPYVTYEDLMEFVPAPEKLGRYEAEQVEISIKYEGYIEKAKRKADKIKRMENKRIPDQIDYTQINGLATEAIEKLDLIRPETIAQASRISGVNPADISILMVYVEQGQVHKANQA

SEQ ID NO: 1259 - DNA, 447 bp, Alloiococcus otitidis
  CDS (40)..(444)
cccaattgggcttggtctgggctttcctcttcagggggattggcttgggcttgtttttcttctttcaagatggtcttgatatcagccaggagttcttcagcagttggggcagactcctcttctttttcctcttcgtgcttgaactgccgggtgatggtgttgacccccttgatgatgataaagaggacgatggagattaggaaaaaattgatgatggattgtaaaaaggctcccactcccaactcggctgacccaatggaaatggtcatgccactgatgtccgagttacctgagagagctgcaataatcggtccaatcagatcttcaacgagggagttgacgatggcggtaaaagctgcccccatgacaaccccaatggcaaggtctaaaacattcccctgcatgataaactctttaaattccttaaacatggttgcgctcctttga

SEQ ID NO: 1260 - protein, 135 aa, Alloiococcus otitidis
MAWACFSSFKMVLISARSSSAVGADSSSFSSSCLNCRVMVLTPLMMIKRTMEIRKKLMMDCKKAPTPNSADPMEMVMPLMSELPERAAIIGPIRSSTRELTMAVKAAPMTTPMARSKTFPCMINSLNSLNMVALL

SEQ ID NO: 1261 - DNA, 474 bp, Alloiococcus otitidis
  CDS (28)..(471)
gacttgatcattcaaaggagcgcaaccatgtttaaggaatttaaagagtttatcatgcaggggaatgttttagaccttgccattggggttgtcatgggggcagcttttaccgccatcgtcaactccctcgttgaagatctgattggaccgattattgcagctctctcaggtaactcggacatcagtggcatgaccatttccattgggtcagccgagttgggagtgggagcctttttacaatccatcatcaattttttcctaatctccatcgtcctctttatcatcatcaagggggtcaacaccatcacccggcagttcaagcacgaagaggaaaaagaagaggagtctgccccaactgctgaagaactcctggctgatatcaagaccatcttgaaagaagaaaaacaagcccaagccaatccccctgaagaggaaagcccagaccaagcccaattgggtcaattagaagaataa

SEQ ID NO: 1262 - protein, 148 aa, Alloiococcus otitidis
MFKEFKEFIMQGNVLDLAIGVVMGAAFTAIVNSLVEDLIGPIIAALSGNSDISGMTISIGSAELGVGAFLQSIINFFLISIVLFIIIKGVNTITRQFKHEEEKEEESAPTAEELLADIKTILKEEKQAQANPPEEESPDQAQLGQLEE

SEQ ID NO: 1263 - DNA, 474 bp, Alloiococcus otitidis; identical to SEQ ID NO: 1261
  CDS (4)..(471)

SEQ ID NO: 1264 - protein, 156 aa, Alloiococcus otitidis
MIIQRSATMFKEFKEFIMQGNVLDLAIGVVMGAAFTAIVNSLVEDLIGPIIAALSGNSDISGMTISIGSAELGVGAFLQSIINFFLISIVLFIIIKGVNTITRQFKHEEEKEEESAPTAEELLADIKTILKEEKQAQANPPEEESPDQAQLGQLEE

SEQ ID NO: 1265 - DNA, 1386 bp, Alloiococcus otitidis
  CDS (904)..(1383)
ccgagtcgaacctggcaaggaggaagactagctatggatcttgtgcttgtaggtcaaatgctagccgtggcagttttcggctctctcctatacaccctgcttggggtcatccctggcaccgacgaaacagctgtcctggccccggtcaccctggtcttggccttgaccggaatcccgccccaagtcctcctctgcttttttatcgcggccattgtctccaagatgattaccggcaatattccagtcggcgtggtcggcatcccctcaggtgtcatgtctgcccctatgattccagcagccatgaacttgaaacaggaaggtctaaccgacaccagcatccggaaaatgtcagctgggtccttggtgggaactgttttggccatccccctcagttttttgctggcctcctttttagtcccctttggccaagctatttcagacaatgccactttgatctttatgatcggaaccctctttttggccctcatgtccaaaaacaaggtcatgcccctcctagccatcctgcccctgtccatcctcttccaagggctcaaccagctctattggggcctggaaattttgccagagggggaggaagtctttatttctttcttcctggccattaccattggccccttgatggtcaaccttttggaactcttaagtggcgggtcggttgctgagaaattcaagcgagagacgtatctaaagacgaccatcagccaaacagagaccaagtccagcctcaacccctttcagatcttgtctagaagggaattgtcctccagtgttttggccaccgtcttaggggttatcaccttcttcatgtcccccgtgggaatgatggttttcatcggcgaaagcctggctcaacgcgaaaaagaccagctggaccggtccaagatgacagtcacggtcatgaacgccttaaacaatgcctcttatatcgccggcatcctgatccccctgctggctattgggattcctttaagcggggtggcgattggtccgggcaatgccctctttaacgctccccctgtctacaccttggacaacaacctctaccatcagttgacgacaggcgaatttgtcctgccggttgtcctgggggctggggtggcgattgccatcacctactttattaccgtccgctatgccaaggaaattaccctctttatcttttcaaaaatcccccatgaagccatattaggcctcttccttgcccttgtggtggtcctggcctacatggatgctggctggttaaacgtcttcggtgtcttattgatcgccagcatttccggaatcttcaaccgctggggcgtcaactacggtgtccaattcatggtcctctatgcctccagtggctttatcggccttttggtctag

SEQ ID NO: 1266 - protein, 160 aa, Alloiococcus otitidis
MTVTVMNALNNASYIAGILIPLLAIGIPLSGVAIGPGNALFNAPPVYTLDNNLYHQLTTGEFVLPVVLGAGVAIAITYFITVRYAKEITLFIFSKIPHEAILGLFLALVVVLAYMDAGWLNVFGVLLIASISGIFNRWGVNYGVQFMVLYASSGFIGLLV

SEQ ID NO: 1267 - DNA, 1386 bp, Alloiococcus otitidis; identical to SEQ ID NO: 1265
  CDS (763)..(1383)

SEQ ID NO: 1268 - protein, 207 aa, Alloiococcus otitidis
MSRRELSSSVLATVLGVITFFMSPVGMMVFIGESLAQREKDQLDRSKMTVTVMNALNNASYIAGILIPLLAIGIPLSGVAIGPGNALFNAPPVYTLDNNLYHQLTTGEFVLPVVLGAGVAIAITYFITVRYAKEITLFIFSKIPHEAILGLFLALVVVLAYMDAGWLNVFGVLLIASISGIFNRWGVNYGVQFMVLYASSGFIGLLV

SEQ ID NO: 1269 - DNA, 1386 bp, Alloiococcus otitidis; identical to SEQ ID NO: 1265
  CDS (307)..(1383)

SEQ ID NO: 1270 - protein, 359 aa, Alloiococcus otitidis
MKQEGLTDTSIRKMSAGSLVGTVLAIPLSFLLASFLVPFGQAISDNATLIFMIGTLFLALMSKNKVMPLLAILPLSILFQGLNQLYWGLEILPEGEEVFISFFLAITIGPLMVNLLELLSGGSVAEKFKRETYLKTTISQTETKSSLNPFQILSRRELSSSVLATVLGVITFFMSPVGMMVFIGESLAQREKDQLDRSKMTVTVMNALNNASYIAGILIPLLAIGIPLSGVAIGPGNALFNAPPVYTLDNNLYHQLTTGEFVLPVVLGAGVAIAITYFITVRYAKEITLFIFSKIPHEAILGLFLALVVVLAYMDAGWLNVFGVLLIASISGIFNRWGVNYGVQFMVLYASSGFIGLLV

SEQ ID NO: 1271 - DNA, 1386 bp, Alloiococcus otitidis; identical to SEQ ID NO: 1265
  CDS (34)..(1383)

SEQ ID NO: 1272 - protein, 450 aa, Alloiococcus otitidis
MDLVLVGQMLAVAVFGSLLYTLLGVIPGTDETAVLAPVTLVLALTGIPPQVLLCFFIAAIVSKMITGNIPVGVVGIPSGVMSAPMIPAAMNLKQEGLTDTSIRKMSAGSLVGTVLAIPLSFLLASFLVPFGQAISDNATLIFMIGTLFLALMSKNKVMPLLAILPLSILFQGLNQLYWGLEILPEGEEVFISFFLAITIGPLMVNLLELLSGGSVAEKFKRETYLKTTISQTETKSSLNPFQILSRRELSSSVLATVLGVITFFMSPVGMMVFIGESLAQREKDQLDRSKMTVTVMNALNNASYIAGILIPLLAIGIPLSGVAIGPGNALFNAPPVYTLDNNLYHQLTTGEFVLPVVLGAGVAIAITYFITVRYAKEITLFIFSKIPHEAILGLFLALVVVLAYMDAGWLNVFGVLLIASISGIFNRWGVNYGVQFMVLYASSGFIGLLV

SEQ ID NO: 1273 - DNA, 807 bp, Alloiococcus otitidis
  CDS (64)..(804)
tggggctgggcttctttctggtcactccagctagtgactccctcaaactcttggccgggatctttggcatcgtcctggcaactgtcatcaactccctcctcttcaagcccaagcggcagattgaccgagtcgaacctggcaaggaggaagactagctatggatcttgtgcttgtaggtcaaatgctagccgtggcagttttcggctctctcctatacaccctgcttggggtcatccctggcaccgacgaaacagctgtcctggccccggtcaccctggtcttggccttgaccggaatcccgccccaagtcctcctctgcttttttatcgcggccattgtctccaagatgattaccggcaatattccagtcggcgtggtcggcatcccctcaggtgtcatgtctgcccctatgattccagcagccatgaacttgaaacaggaaggtctaaccgacaccagcatccggaaaatgtcagctgggtccttggtgggaactgttttggccatccccctcagttttttgctggcctcctttttagtcccctttggccaagctatttcagacaatgccactttgatctttatgatcggaaccctctttttggccctcatgtccaaaaacaaggtcatgcccctcctagccatcctgcccctgtccatcctcttccaagggctcaaccagctctattggggcctggaaattttgccagagggggaggaagtctttatttctttcttcctggccattaccattggccccttgatggtcaaccttttggaactcttaagtggcgggtcggttgctga

SEQ ID NO: 1274 - protein, 247 aa, Alloiococcus otitidis
MASSWQLSSTPSSSSPSGRLTESNLARRKTSYGSCACRSNASRGSFRLSPIHPAWGHPWHRRNSCPGPGHPGLGLDRNPAPSPPLLFYRGHCLQDDYRQYSSRRGRHPLRCHVCPYDSSSHELETGRSNRHQHPENVSWVLGGNCFGHPPQFFAGLLFSPLWPSYFRQCHFDLYDRNPLFGPHVQKQGHAPPSHPAPVHPLPRAQPALLGPGNFARGGGSLYFFLPGHYHWPLDGQPFGTLKWRVGC

SEQ ID NO: 1275 - DNA, 807 bp, Alloiococcus otitidis; identical to SEQ ID NO: 1273
  CDS (34)..(804)

SEQ ID NO: 1276 - protein, 257 aa, Alloiococcus otitidis
MTPSNSWPGSLASSWQLSSTPSSSSPSGRLTESNLARRKTSYGSCACRSNASRGSFRLSPIHPAWGHPWHRRNSCPGPGHPGLGLDRNPAPSPPLLFYRGHCLQDDYRQYSSRRGRHPLRCHVCPYDSSSHELETGRSNRHQHPENVSWVLGGNCFGHPPQFFAGLLFSPLWPSYFRQCHFDLYDRNPLFGPHVQKQGHAPPSHPAPVHPLPRAQPALLGPGNFARGGGSLYFFLPGHYHWPLDGQPFGTLKWRVGC

SEQ ID NO: 1277 - DNA, 507 bp, Alloiococcus otitidis
  CDS (25)..(504)
agctggttgagcccttggaagaggatggacaggggcaggatggctaggaggggcatgaccttgtttttggacatgagggccaaaaagagggttccgatcataaagatcaaagtggcattgtctgaaatagcttggccaaaggggactaaaaaggaggccagcaaaaaactgagggggatggccaaaacagttcccaccaaggacccagctgacattttccggatgctggtgtcggttagaccttcctgtttcaagttcatggctgctggaatcataggggcagacatgacacctgaggggatgccgaccacgccgactggaatattgccggtaatcatcttggagacaatggccgcgataaaaaagcagaggaggacttggggcgggattccggtcaaggccaagaccagggtgaccggggccaggacagctgtttcgtcggtgccagggatgaccccaagcagggtgtataggagagagccgaaaactgccacggctagcatttga

SEQ ID NO: 1278 - protein, 160 aa, Alloiococcus otitidis
MDRGRMARRGMTLFLDMRAKKRVPIIKIKVALSEIAWPKGTKKEASKKLRGMAKTVPTKDPADIFRMLVSVRPSCFKFMAAGIIGADMTPEGMPTTPTGILPVIILETMAAIKKQRRTWGGIPVKAKTRVTGARTAVSSVPGMTPSRVYRREPKTATASI

SEQ ID NO: 1279 - DNA, 507 bp, Alloiococcus otitidis; identical to SEQ ID NO: 1277
  CDS (7)..(504)

SEQ ID NO: 1280 - protein, 166 aa, Alloiococcus otitidis
MSPWKRMDRGRMARRGMTLFLDMRAKKRVPIIKIKVALSEIAWPKGTKKEASKKLRGMAKTVPTKDPADIFRMLVSVRPSCFKFMAAGIIGADMTPEGMPTTPTGILPVIILETMAAIKKQRRTWGGIPVKAKTRVTGARTAVSSVPGMTPSRVYRREPKTATASI

SEQ ID NO: 1281 - DNA, 270 bp, Alloiococcus otitidis
  CDS (16)..(267)
gataggaaggttctaatgaaaaatcctgatggtaaaaaagaccaactctatgaagtctggggcgatgtcattgccgtcaagcccctcctcttttccctagccttggcgacggtaatggggctgggcttctttctggtcactccagctagtgactccctcaaactcttggccgggatctttggcatcgtcctggcaactgtcatcaactccctcctcttcaagcccaagcggcagattgaccgagtcgaacctggcaaggaggaagactag

SEQ ID NO: 1282 - protein, 84 aa, Alloiococcus otitidis
MKNPDGKKDQLYEVWGDVIAVKPLLFSLALATVMGLGFFLVTPASDSLKLLAGIFGIVLATVINSLLFKPKRQIDRVEPGKEED

SEQ ID NO: 1283 - DNA, 804 bp, Alloiococcus otitidis
  CDS (229)..(801)
gccgttttggccgtctttaccgtcgcgaacaatgacgctatcgattggttcatcactttccccgtcaagggtaatgatagtgtaagtgccattaccgttatcaacgactcgaacgtagttgccgtccttgccgtcttgaccatcacgaacgatgacactattaattggttcatcactttccccgtcaagggtaatgatagtgtaagtgccattaccgttatcaacgacttgaacatagttgccgtccttgccgtcggctccatcttcaccatcgtcaccgtcttgaccgtctttcacgaaggttcggttagtttcttcataagtgacttctccagtaattgggttggtgagtggactttctacgataatccaggagcctgcattgccgtcactgtcaaagccactttccacactaacccgtggactgagaccgttttggccgtctttaccgtcgcgaacaatgacgctatcgattggttcatcactttccccgtcaagggtaatgatagtgtaagtgccattaccgttatcaacgactcgaacgtagttgccgtccttgccgtcttgaccatcacgaacgatgacactattaattggttcatcactttccccgtcaagggtaatgatagtgtaagtgccattaccgttatcaacgacttgaacatagttgccgtccttgccgtcggctccatcttcaccatcgtcaccgtcttgaccgtcttttacgaaggttcggttggtttcttcataagtgacttccccagtgattgggttggtgagtggactttctacgataatccatga

SEQ ID NO: 1284 - protein, 191 aa, Alloiococcus otitidis
MNIVAVLAVGSIFTIVTVLTVFHEGSVSFFISDFSSNWVGEWTFYDNPGACIAVTVKATFHTNPWTETVLAVFTVANNDAIDWFITFPVKGNDSVSAITVINDSNVVAVLAVLTITNDDTINWFITFPVKGNDSVSAITVINDLNIVAVLAVGSIFTIVTVLTVFYEGSVGFFISDFPSDWVGEWTFYDNP

SEQ ID NO: 1285 - DNA, 804 bp, Alloiococcus otitidis; identical to SEQ ID NO: 1283
  CDS (7)..(801)

SEQ ID NO: 1286 - protein, 265 aa, Alloiococcus otitidis
MAVFTVANNDAIDWFITFPVKGNDSVSAITVINDSNVVAVLAVLTITNDDTINWFITFPVKGNDSVSAITVINDLNIVAVLAVGSIFTIVTVLTVFHEGSVSFFISDFSSNWVGEWTFYDNPGACIAVTVKATFHTNPWTETVLAVFTVANNDAIDWFITFPVKGNDSVSAITVINDSNVVAVLAVLTITNDDTINWFITFPVKGNDSVSAITVINDLNIVAVLAVGSIFTIVTVLTVFYEGSVGFFISDFPSDWVGEWTFYDNP

SEQ ID NO: 1287 - DNA, 363 bp, Alloiococcus otitidis
  CDS (118)..(360)
aagacggtcaagacggtgacgatggtgaagatggagccgacggcaaggacggcaactatgttcaagtcgttgataacggtaatggcacttacactatcattacccttgacggggaaagtgatgaaccaattaatagtgtcatcgttcgtgatggtcaagacggcaaggacggcaactacgttcgagtcgttgataacggtaatggcacttacactatcattacccttgacggggaaagtgatgaaccaatcgatagcgtcattgttcgcgacggtaaagacggccaaaacggtctcagtccacgggttagtgtggaaagtggctttgacagtgacggcaatgcaggctcctggattatcgtag

SEQ ID NO: 1288 - protein, 81 aa, Alloiococcus otitidis
MMNQLIVSSFVMVKTARTATTFESLITVMALTLSLPLTGKVMNQSIASLFATVKTAKTVSVHGLVWKVALTVTAMQAPGLS

SEQ ID NO: 1289 - DNA, 363 bp, Alloiococcus otitidis; identical to SEQ ID NO: 1287
  CDS (22)..(360)

SEQ ID NO: 1290 - protein, 113 aa, Alloiococcus otitidis
MVKMEPTARTATMFKSLITVMALTLSLPLTGKVMNQLIVSSFVMVKTARTATTFESLITVMALTLSLPLTGKVMNQSIASLFATVKTAKTVSVHGLVWKVALTVTAMQAPGLS

SEQ ID NO: 1291 - DNA, 363 bp, Alloiococcus otitidis; identical to SEQ ID NO: 1287
  CDS (16)..(360)

SEQ ID NO: 1292 - protein, 115 aa, Alloiococcus otitidis
MTMVKMEPTARTATMFKSLITVMALTLSLPLTGKVMNQLIVSSFVMVKTARTATTFESLITVMALTLSLPLTGKVMNQSIASLFATVKTAKTVSVHGLVWKVALTVTAMQAPGLS

SEQ ID NO: 1293 - DNA, 540 bp, Alloiococcus otitidis
  CDS (7)..(537)
gccgttttggccgtcttcaccatcgtcaccgtcttgaccgtctttcacgaaggttcggttggtttcttcataagtgacttccccagtgattggattggtcaatggactttctacgataatccaggagcctgcattgccgtcactgtcaatgccgctttccacactaacccgtggactgaggccgttttggccgtcttcaccatcgtcaccgtcttgaccgtcttttacgaaggttcggttggtttcttcataagtgacttccccagtgattgggttggtgagtggactttctacgataatccaggagcctgcattgccgtcactgtcaatgccgctttccacactaacccgtggactgaggccgttttggccgtcttcaccatcgtcaccgtcttgaccgtctttcacgaaggttcggttagtttcttcataagtgacttctccagtaattgggttggtgagtggactttctacgataatccaggagcctgcattgccgtcactgtcaatgccgctttccacactaacccgtgggcttag

SEQ ID NO: 1294 - protein, 177 aa, Alloiococcus otitidis
MAVFTIVTVLTVFHEGSVGFFISDFPSDWIGQWTFYDNPGACIAVTVNAAFHTNPWTEAVLAVFTIVTVLTVFYEGSVGFFISDFPSDWVGEWTFYDNPGACIAVTVNAAFHTNPWTEAVLAVFTIVTVLTVFHEGSVSFFISDFSSNWVGEWTFYDNPGACIAVTVNAAFHTNPWA

SEQ ID NO: 1295 - DNA, 297 bp, Alloiococcus otitidis
  CDS (22)..(294)
aagacggtcaagacggtgacgatggtgaagatggagccgacggcaaggacggcaactatgttcaagtcgttgataacggtaatggcacttacactatcattacccttgacggggaaagtgatgaaccaattaatagtgtcatcgttcgtgatggtcaagacggcaaggacggcaactacgttcgagtcgttgataacggtaatggcacttacactatcattacccttgacggggaaagtgatgaaccaatcgatagcgtcattgttcgcgacggtaaagacggccaaaacggcctaa

SEQ ID NO: 1296 - protein, 91 aa, Alloiococcus otitidis
MVKMEPTARTATMFKSLITVMALTLSLPLTGKVMNQLIVSSFVMVKTARTATTFESLITVMALTLSLPLTGKVMNQSIASLFATVKTAKTA

SEQ ID NO: 1297 - DNA, 297 bp, Alloiococcus otitidis; identical to SEQ ID NO: 1295
  CDS (16)..(294)

SEQ ID NO: 1298 - protein, 93 aa, Alloiococcus otitidis
MTMVKMEPTARTATMFKSLITVMALTLSLPLTGKVMNQLIVSSFVMVKTARTATTFESLITVMALTLSLPLTGKVMNQSIASLFATVKTAKTA

SEQ ID NO: 1299 - DNA, 723 bp, Alloiococcus otitidis
  CDS (178)..(720)
ttgaccgtcttcgccatttgcaacaaaggttcgatcaagctcagcacctgtgttgcgatctttaatgataatccatacaccggttctgccacccagttcaccaggttgagtgcttgcagtgatggattgaccgtcacggacagttacactgctaattggagtatcagttgcgccatcgtgggtaataatggtgtaagtgccattgccgttgtcaacgactcgaacgtagttaccgtccttgccgtcggctccatcttcaccatcgtcaccgtcttgaccgtcttttacgaaggttcggttggtttcttcataagtgacttccccagtgattggattggtcaatggactttccacgataatccaggagcctgcattgccgtcactgtcaaagccactttccacactaacccgtggactgaggccgttttggccgtctttaccgtcgcgaacaatgacactattaattggttcatcactttccccgtcaagggtaatgatagtgtaagtgccattaccgttatcaacgacttgaacatagttgccgtctttgccgtcggctccatcttcaccatcgtcaccgtcttgaccgtcttttacgaaggttcggttggtttcttcataagtgacttccccagtgattggattggtcaatggactttctacgataatccaggagcctgcattgccgtcactgtcaatgccgctttccacactaacccgtga

SEQ ID NO: 1300 - protein, 181 aa, Alloiococcus otitidis
MGNNGVSAIAVVNDSNVVTVLAVGSIFTIVTVLTVFYEGSVGFFISDFPSDWIGQWTFHDNPGACIAVTVKATFHTNPWTEAVLAVFTVANNDTINWFITFPVKGNDSVSAITVINDLNIVAVFAVGSIFTIVTVLTVFYEGSVGFFISDFPSDWIGQWTFYDNPGACIAVTVNAAFHTNP

SEQ ID NO: 1301 - DNA, 723 bp, Alloiococcus otitidis; identical to SEQ ID NO: 1299
  CDS (1)..(720)

SEQ ID NO: 1302 - protein, 240 aa, Alloiococcus otitidis
MTVFAICNKGSIKLSTCVAIFNDNPYTGSATQFTRLSACSDGLTVTDSYTANWSISCAIVGNNGVSAIAVVNDSNVVTVLAVGSIFTIVTVLTVFYEGSVGFFISDFPSDWIGQWTFHDNPGACIAVTVKATFHTNPWTEAVLAVFTVANNDTINWFITFPVKGNDSVSAITVINDLNIVAVFAVGSIFTIVTVLTVFYEGSVGFFISDFPSDWIGQWTFYDNPGACIAVTVNAAFHTNP

SEQ ID NO: 1303 - DNA, 255 bp, Alloiococcus otitidis
  CDS (22)..(252)
aagacggtcaagacggtgacgatggtgaagatggagccgacggcaaagacggcaactatgttcaagtcgttgataacggtaatggcacttacactatcattacccttgacggggaaagtgatgaaccaattaatagtgtcattgttcgcgacggtaaagacggccaaaacggcctcagtccacgggttagtgtggaaagtggctttgacagtgacggcaatgcaggctcctggattatcgtggaaagtccattga

SEQ ID NO: 1304 - protein, 77 aa, Alloiococcus otitidis
MVKMEPTAKTATMFKSLITVMALTLSLPLTGKVMNQLIVSLFATVKTAKTASVHGLVWKVALTVTAMQAPGLSWKVH

SEQ ID NO: 1305 - DNA, 255 bp, Alloiococcus otitidis; identical to SEQ ID NO: 1303
  CDS (16)..(252)

SEQ ID NO: 1306 - protein, 79 aa, Alloiococcus otitidis
MTMVKMEPTAKTATMFKSLITVMALTLSLPLTGKVMNQLIVSLFATVKTAKTASVHGLVWKVALTVTAMQAPGLSWKVH

SEQ ID NO: 1307 - DNA, 405 bp, Alloiococcus otitidis
  CDS (16)..(402)
ttgtcacaggacctaatggggaacacatctctaccgacactattttccacggacgagatggccaagatggtgactcagtcaaagttcgtgataaccaagatggcagctacaccattatcgctgttgatggtgaaggcaatgaagaagtcgttggaaccattcgaaatggtaaagacggcgaaaaaggtgagaaaggcgacaaaggtgacaagggtgaaccaggtcgcgatggtcaagacggttcaaatgctggtaacatcattatcgataacaccaacatcaacaccaatgaaaatggcgacattgtcattaccattgaaggccaagacccagtcgtcattccaaacccagataagcttgccaacccaatccaaaacatgcacattgatgaccaaggcaacttaa

SEQ ID NO: 1308 - protein, 129 aa, Alloiococcus otitidis
MGNTSLPTLFSTDEMAKMVTQSKFVITKMAATPLSLLMVKAMKKSLEPFEMVKTAKKVRKATKVTRVNQVAMVKTVQMLVTSLSITPTSTPMKMATLSLPLKAKTQSSFQTQISLPTQSKTCTLMTKAT

SEQ ID NO: 1309 - DNA, 504 bp, Alloiococcus otitidis
  CDS (19)..(501)
tttggtcttgaccgtcagttggttgacttgattgggctgccggctggtctccaggttggtcagtttcacctggagtttgacccggttgttcaggtacttcaggacttgttccaggtttgtcagtgtctccgtcagattcgcctggttgatcagcgtccggttgacctggcttgtcggtgtccacatctggttgatcaccatctggtaagcctggtttgtcttgacctggctcgtcagtgttgtcaccatctgattgatctggagtttcacccgattgatcagttccaggtttatcgccagagttatcggaatcgtctcctggagtttgtccaggttcgtcattaccaggttcgtcagtgtcatccccaggttggcctggtgctacagggacatcatcagattcgcctggtttaccaccagaattatcggaatcatcgcctggagtttgacctggttgttcaggtgcttcaggacttgtacctggtttgtcagtgtcaccgttag

SEQ ID NO: 1310 - protein, 161 aa, Alloiococcus otitidis
MVDLIGLPAGLQVGQFHLEFDPVVQVLQDLFQVCQCLRQIRLVDQRPVDLACRCPHLVDHHLVSLVCLDLARQCCHHLIDLEFHPIDQFQVYRQSYRNRLLEFVQVRHYQVRQCHPQVGLVLQGHHQIRLVYHQNYRNHRLEFDLVVQVLQDLYLVCQCHR

SEQ ID NO: 1311 - DNA, 702 bp, Alloiococcus otitidis
  CDS (88)..(699)
ccccaagtcaaccaggtgataaccaaccaggtgaggctccaggtcaagaagagccaggtgaatccaacggtgactctggcaaacctgatgataaaccaggtcaagacaagccaggcgaaccaggtgatgataccggccaccctgacgacaaaccaggtcaagaggaaccaggcttaccagatggtgatcaaccagatgatgacgaaccaggacaaaccccaggagacgattccgataatactggtgaaaaaccaggcactgatcaaccaggtgaaattccaggtcaatcagatggtgataacaccgataaacctggtcaaacaggagatgacaccgataagccaggcgaaccaggtgatggtaccggccaaccaggcgataaaccagatcaagtggaaccaggccaacctgacgaaggtaataccgataaacctggtcaaccaggtgaggatacagacgaaccaggccaaccaggtgagactccaggtcaatcagacggtgacaacactgataaacctggtcaaccagatgaggacaccgacaaaccaggtcaaccggacgatgaccaaccaggcgaatctaacggtgacactgacaaaccaggtacaagtcctgaagcacctgaacaaccaggtcaaactccaggcgatgattccgataattctggtggtaaaccaggcgaatctgatgatgtccctgtag

SEQ ID NO: 1312 - protein, 204 aa, Alloiococcus otitidis
MINQVKTSQANQVMIPATLTTNQVKRNQAYQMVINQMMTNQDKPQETIPIILVKNQALINQVKFQVNQMVITPINLVKQEMTPISQANQVMVPANQAINQIKWNQANLTKVIPINLVNQVRIQTNQANQVRLQVNQTVTTLINLVNQMRTPTNQVNRTMTNQANLTVTLTNQVQVLKHLNNQVKLQAMIPIILVVNQANLMMSL

SEQ ID NO: 1313 - DNA, 702 bp, Alloiococcus otitidis; identical to SEQ ID NO: 1311
  CDS (16)..(699)

SEQ ID NO: 1314 - protein, 228 aa, Alloiococcus otitidis
MITNQVRLQVKKSQVNPTVTLANLMINQVKTSQANQVMIPATLTTNQVKRNQAYQMVINQMMTNQDKPQETIPIILVKNQALINQVKFQVNQMVITPINLVKQEMTPISQANQVMVPANQAINQIKWNQANLTKVIPINLVNQVRIQTNQANQVRLQVNQTVTTLINLVNQMRTPTNQVNRTMTNQANLTVTLTNQVQVLKHLNNQVKLQAMIPIILVVNQANLMMSL

SEQ ID NO: 1315 - DNA, 9570 bp, Alloiococcus otitidis
  CDS (52)..(9567)
aggagagatttaatggttggtaaaaataactttaaactaagacgggagaaaatggggaacaaattctaccgttattccatcaaacgcttgtccattggggtagcgtctgttgctgtttcagcaggctttttgtttgctggacgggaggctgtcaatgttaaggcggctgaagtttcagacgaaaatcaggccctaagtcaagaacttgacccagaccaaaacccagccttaagtgaaggttctggtgtagaagaccaggagacttgggaaattcctagtaaattcggtactgaacttcctgatctagacgaagaactcctcgaaggcattgacgacgaccaggaacttctacaagaagtagaaggccaatcaccggaggaagcgccagaagaagccaagggtcatgaagaagaaagccaagacatcgaaactgaggacgactcagaccatacacctagccaaaacgagctggaccaaaacgagctggaagaaaccctgaccgaggatccagacgaggatgaccctgaggaagaccaagctgaccaaaatgatcaagagggtcaagttgatgaagccggtcaatgggaagaagaccagactgaccaagatgataacagagaaggtcaaaatcgagaagacttaggtcaaccggatcaagaagctgttacaagacctgacctagacggcgacaaaacagatgaaagcaaaccagctgaccattcgggggatagtagtgaagaagggtcagttaaacctgaactctccttgagaaactacatagacccagagggtaaaagcctgactgaaatcatcacagatggcttcgtcaaagcgaccctggacgatcaagaattagatattgtccgacaagacggtcacctcttgctcaaccaacctctccaaacaaatggcagattacaactagaagccattaacgcggcaggggtaaccaaccgacgggattttgacctaaaagaagacggtacactcaaccccattaaacttgtggagaacaagctcgaaaatggccggttacaagattctactgctgacagttcaagccaatattctaaccgtgctgccaacccacaacctaccgcaggcacaactcgatcagctaacaccttaagtcgtgctgccaatgacaacctttctccccaaagtggccgggatgtgagtaatgaggtaatagttgaaggtaatttacaagtcccaactgattcatacactgttgctagatttttgggaataccaattaaaaagactggtaattatatccaaccaactagtggtgacagtatttatttcacactttcagttcaagttcctgaaactgttactagtggagactatattgacttgcattacgctccagaaattgccattggtcaggttgatgtaaatgctcgcacaggcttatcttttagagaacgtagattacacgaacaaatatatggcactcctagaccaacaattactgatggaaatggcgatatcattgcctatatagaagatgatcgtgaaaacaatatcatccgttatactttcacagattatgttgatagaaaatcgaatgtccgattttctcacacattaaatcactggattgatttaggagaagcacagaacactggggagtatcctttatattatagaattggtgacgaagttttcagagaggatacttttatagactatcgtcaaaacgtcagaagaaatggaccagcatctacatcgtctgtcataaactgggtcgatgataaaactaatacatttagagcaacagcctatttcaacattgacaacaattatattggaacagaaggcagagttttttatatcacagctacggaaggaacagaacccggagctccgaatgctatcaatatggattcattggacatacgggtttaccgcgtgtcagatggtagggtattaccagaaagtagagcttttgatccagttgcagttggagcagaggatattactgatcaagttaatgtcgaaagttatttaacaagtgataatgcgacagaagatggagactactggattgacgcgccaaccaataactctgacacctatattatggtagtccatggaacatttgatcccgatcgtctagggcctcaaggtgaatttggtatgcaagtacagtcaaatgatgttgattatgagacaggccagcaggctggacatacatcatacctagtatattctgtggaagccctatccggtgagggcaataatataatcgaaggtggaggcgaagataaagaagaagaaaaaggccctctttttgaaatgaccgttgaggatactggatatggtactaaatttgtagaatcagataggcccggttggacaggtattcgagaagttagacctggtcaaaatggacgcgtccgagttttatacgttcacgttaacccagaccaaattcctggctttaccccagatgattttgtcaatatccgcggccaatactaccaagaagtctcccgtgaagttatccaagagtcagaagaccaaattgtcgaatactccctaccaagaattgtcaattcaattagaagaccagacggtagcattgaatttatttataacgatggacacacctttactgttccgccagctcctacccctcagacccttgttccggttgtagagactgaccgaggccaaggtccatcaaatccaagtgacgataatattcgaagttatttgactgacaattacaatggtgacacacgtcttggtacatgggtaaccattaaaaaccctactggtaactatactattaccggcgaaccagaatttattgaaagttatcgttttattccagatggtgcaaatggtgaaagaggtaaagatggccgttcagttactatcgacttggtagatggtgaagtagaaggtcgagaaggcacatgggtttttgtctatcaacttgatcttgaaggcaaccaaggcgaattgattgatagtgaatttattccagatggccaagatggtcacaaagttgttattgagaatagaacaccccaaggctttgacgtagttatcctagatggagagggtcaagaacttgatcgtgaaactgtctcccacggtgccaaaggtgacccaggtgaagacggaataaatccagtcattctaaccgccagaggtcaaggaccagcagatccaagttatgctctggaagttattaacgaaccaggaaaatacaatggaccttatgtttcaggtttatggatcaccatttattctccaattggtagaactagcactggggaacctagatacagagaagacgttcgattcattccagatggtcaaaatggtgaaaatggtcgcgatggtcttacaccacgtgttcgtcttgaagatggatcagatgccttggataactcaggcaaatgggtgattgtggaatacccagtcatcgacccaacaactggtgaacttgtagtagatccagtaaacaacgaacctgtttatagtgaaattcaacgtgagtttattcaagatggcgaagacggccttactccacgtgttactgtggaaagcggctttgatagtgatggtaatgctggttcatggattatcgtagaaagtccactcaccaacccaatcactggggaagtcacttatgaagaaaccaaccgaaccttcgtaaaagacggtcaagacggtgacgatggtgaagatggagccgacggcaaggacggcaactatgttcaagtcgttgataacggtaatggcacttacactatcattacccttgacggggaaagtgatgaaccaattaatagtgtcatcgttcgtgatggtcaagacggcaaggacggcaactacgttcgagtcgttgataacggtaatggcacttacactatcattacccttgacggggaaagtgatgaaccaatcgatagcgtcattgttcgcgacggtaaagacggccaaaacggtctcagtccacgggttagtgtggaaagtggctttgacagtgacggcaatgcaggctcctggattatcgtagaaagtccactcaccaacccaattactggagaagtcacttatgaagaaactaaccgaaccttcgtgaaagacggtcaagacggtgacgatggtgaagatggagccgacggcaaggacggcaactatgttcaagtcgttgataacggtaatggcacttacactatcattacccttgacggggaaagtgatgaaccaattaatagtgtcatcgttcgtgatggtcaagacggcaaggacggcaactacgttcgagtcgttgataacggtaatggcacttacactatcattacccttgacggggaaagtgatgaaccaatcgatagcgtcattgttcgcgacggtaaagacggccaaaacggcctaagcccacgggttagtgtggaaagcggcattgacagtgacggcaatgcaggctcctggattatcgtagaaagtccactcaccaacccaattactggagaagtcacttatgaagaaactaaccgaaccttcgtgaaagacggtcaagacggtgacgatggtgaagacggccaaaacggcctcagtccacgggttagtgtggaaagcggcattgacagtgacggcaatgcaggctcctggattatcgtagaaagtccactcaccaacccaatcactggggaagtcacttatgaagaaaccaaccgaaccttcgtaaaagacggtcaagacggtgacgatggtgaagacggccaaaacggcctcagtccacgggttagtgtggaaagcggcattgacagtgacggcaatgcaggctcctggattatcgtagaaagtccattgaccaatccaatcactggggaagtcacttatgaagaaaccaaccgaaccttcgtgaaagacggtcaagacggtgacgatggtgaagacggccaaaacggcctaagcccacgggttagtgtggaaagcggcattgacagtgatggcaatgcaggctcctggattatcgtagaaagtccattgaccaatccaatcactggggaagtcacttatgaagaaaccaaccgaaccttcgtgaaagacggtcaagacggtgacgatggtgaagacggccaaaacggcctaagctcacgggttagtgtggaaagcggcattgacagtgacggcaatgcaggctcctggattatcgtagaaagtccattgaccaatccaatcactggggaagtcacttatgaagaaaccaaccgaaccttcgtaaaagacggtcaagacggtgacgatggtgaagatggagccgacggcaaagacggcaactatgttcaagtcgttgataacggtaatggcacttacactatcattacccttgacggggaaagtgatgaaccaattaatagtgtcattgttcgcgacggtaaagacggccaaaacggcctcagtccacgggttagtgtggaaagtggctttgacagtgacggcaatgcaggctcctggattatcgtggaaagtccattgaccaatccaatcactggggaagtcacttatgaagaaaccaaccgaaccttcgtaaaagacggtcaagacggtgacgatggtgaagatggagccgacggcaaggacggtaactacgttcgagtcgttgacaacggcaatggcacttacaccattattacccacgatggcgcaactgatactccaattagcagtgtaactgtccgtgacggtcaatccatcactgcaagcactcaacctggtgaactgggtggcagaaccggtgtatggattatcattaaagatcgcaacacaggtgctgagcttgatcgaacctttgttgcaaatggcgaagacggtcaatcaattaccgcaaatgttgaatcaggtgttgttaacgaacgtccaggcacatgggttattattcgagaccgtgaaactggtcaagaacttgatcgaaacttcatctatgatggtcaatctattattgcttcagtcgaaccaggtacactaggtgatcgaccaggtacatgggttatcattaaagatcgtcatactggtgatgagatagatcgaaacttcatttacaacggtcaaaatggcgaagacggtcaatctattacggcaaatgttgaaccaggcgtcttcaacggtcgtccaggcacatgggtcattattcgagaccgcgataccaaccaagaaatagaccgtaacttcatttttgacggccaaaatggtaaggacggtaattacgttcaagttgtagaaaatgacgatggcacttacaccattatcacccttgacggggaaaccgatgagccaatcaatagtgttgtcgttcatgatggcgacaaaggtgacccaggtcgcgatggtaactatgttgaattagttgccaatgatgatggaacttacactatcattaaccgagatggtgaaactcatgaggaactaagtcgtgcgactattcgagatggtgagaatggtaaagatggtaactatgttcaagtgattgacaatggcaacggtagctacaccattgtcacccgcaagggggaaacccatgagccaatcaatagcgtcaccgttcgcgacggcgaaaaaggcgagaaaggtgacccaggtcgttccatcaccgcacaagttgaacgtggtgaacaaaatggtcgaccaggcacatggattaacatttatgaagtgaatctagatggcagtcgtggctcattaattgatcgagaattcgtttttgacggaaaagatgggcaagcaccaaccatccgaactgagccaatcaaagatcgagagggaaatgatcttggcattcaagtgattgtcacaggacctaatggggaacacatctctaccgacactattttccacggacgagatggccaagatggtgactcagtcaaagttcgtgataaccaagatggcagctacaccattatcgctgttgatggtgaaggcaatgaagaagtcgttggaaccattcgaaatggtaaagacggcgaaaaaggtgagaaaggcgacaaaggtgacaagggtgaaccaggtcgcgatggtcaagacggttcaaatgctggtaacatcattatcgataacaccaacatcaacaccaatgaaaatggcgacattgtcattaccattgaaggccaagacccagtcgtcattccaaacccagataagcttgccaacccaatccaaaacatgcacattgatgaccaaggcaacttaattgttgaactgtcagatggccgaaccattaatgctggctatgctcgtggccctcaaggcgaaccagggaaagatggcaagtcgccaattatttccactcgagaagtcagcgaagggatcgagatcactgtcaccaacccagatggcagccaacactctcacatcgttcgtcacggtgaagatggccaagctgctcgcatcatttcaactgttaaagatgaacacggcaacacccgactcatctttaacgacggaaccgaagtagtcatttctggttacgaaaacggtgaaaaagatccaaataccggcaacattattaatgttaacctcaccattaatgttgttaaggaaggttcaactgaccaaccaagtcgtgtcttgacacaagccaatatcgacaaccgaggccacttgatcctcacttactcaaatggtgagaccgaagacctcggtaaagtgactgcttctactgaccgaactgtcgttacggctttagtcaacagcgataacgaattgattctggtctacaatgatggcagcacccagaatgcaggtcagattgacattaaagaaggtccacgaggcaaatctgcctacgaattgtggctcgaagctggtaacactggtagccttcaagacttccttgattccttgaaaggcgaagacggtaaagatgctgaagttggtaaagtcgttcaatctgttgatattaacctcgatggcgacttagtgattaactacactgacaattctcagcaaatcatccacaactacccatctagccaagatccgtctgctaatggcattaaagatgctcgtgttgatgcgaacggtgacttgattatcaccttagacgacggtagccaaattaatgccggcaatgttcgcggacctcaaggcgagccaggagctgacggccgaggcatagccaatatccgaatcgaaaataacaacctagtcgtcgtttacaccgacttctccgttaacatcatcggccaattgaccccaagtcaaccaggtgataaccaaccaggtgaggctccaggtcaagaagagccaggtgaatccaacggtgactctggcaaacctgatgataaaccaggtcaagacaagccaggcgaaccaggtgatgataccggccaccctgacgacaaaccaggtcaagaggaaccaggcttaccagatggtgatcaaccagatgatgacgaaccaggacaaaccccaggagacgattccgataatactggtgaaaaaccaggcactgatcaaccaggtgaaattccaggtcaatcagatggtgataacaccgataaacctggtcaaacaggagatgacaccgataagccaggcgaaccaggtgatggtaccggccaaccaggcgataaaccagatcaagtggaaccaggccaacctgacgaaggtaataccgataaacctggtcaaccaggtgaggatacagacgaaccaggccaaccaggtgagactccaggtcaatcagacggtgacaacactgataaacctggtcaaccagatgaggacaccgacaaaccaggtcaaccggacgatgaccaaccaggcgaatctaacggtgacactgacaaaccaggtacaagtcctgaagcacctgaacaaccaggtcaaactccaggcgatgattccgataattctggtggtaaaccaggcgaatctgatgatgtccctgtagcaccaggccaacctggggatgacactgacgaacctggtaatgacgaacctggacaaactccaggagacgattccgataactctggcgataaacctggaactgatcaatcgggtgaaactccagatcaatcagatggtgacaacactgacgagccaggtcaagacaaaccaggcttaccagatggtgatcaaccagatgtggacaccgacaagccaggtcaaccggacgctgatcaaccaggcgaatctgacggagacactgacaaacctggaacaagtcctgaagtacctgaacaaccgggtcaaactccaggtgaaactgaccaacctggagaccagccggcagcccaatcaagtcaaccaactgacggtcaagaccaaactaaaccagtttcaggtagcgaccgcaaccagtcagatgaagaattgacttacacccgttctggtttccctggaactcaaggcagcaaagactttagctttgttcaagacccagaagatgcaactccttctgacaacttgaccaaagatgaaggccaacgtctgccagacacagcaagtctaacttgggtcttaggtctaattggcgcaagctccttaatgggaggatctgccctagccctcaaagaccgcaagcgaaaataa

SEQ ID NO: 1316 - protein, 3172 aa, Alloiococcus otitidis
MGNKFYRYSIKRLSIGVASVAVSAGFLFAGREAVNVKAAEVSDENQALSQELDPDQNPALSEGSGVEDQETWEIPSKFGTELPDLDEELLEGIDDDQELLQEVEGQSPEEAPEEAKGHEEESQDIETEDDSDHTPSQNELDQNELEETLTEDPDEDDPEEDQADQNDQEGQVDEAGQWEEDQTDQDDNREGQNREDLGQPDQEAVTRPDLDGDKTDESKPADHSGDSSEEGSVKPELSLRNYIDPEGKSLTEIITDGFVKATLDDQELDIVRQDGHLLLNQPLQTNGRLQLEAINAAGVTNRRDFDLKEDGTLNPIKLVENKLENGRLQDSTADSSSQYSNRAANPQPTAGTTRSANTLSRAANDNLSPQSGRDVSNEVIVEGNLQVPTDSYTVARFLGIPIKKTGNYIQPTSGDSIYFTLSVQVPETVTSGDYIDLHYAPEIAIGQVDVNARTGLSFRERRLHEQIYGTPRPTITDGNGDIIAYIEDDRENNIIRYTFTDYVDRKSNVRFSHTLNHWIDLGEAQNTGEYPLYYRIGDEVFREDTFIDYRQNVRRNGPASTSSVINWVDDKTNTFRATAYFNIDNNYIGTEGRVFYITATEGTEPGAPNAINMDSLDIRVYRVSDGRVLPESRAFDPVAVGAEDITDQVNVESYLTSDNATEDGDYWIDAPTNNSDTYIMVVHGTFDPDRLGPQGEFGMQVQSNDVDYETGQQAGHTSYLVYSVEALSGEGNNIIEGGGEDKEEEKGPLFEMTVEDTGYGTKFVESDRPGWTGIREVRPGQNGRVRVLYVHVNPDQIPGFTPDDFVNIRGQYYQEVSREVIQESEDQIVEYSLPRIVNSIRRPDGSIEFIYNDGHTFTVPPAPTPQTLVPVVETDRGQGPSNPSDDNIRSYLTDNYNGDTRLGTWVTIKNPTGNYTITGEPEFIESYRFIPDGANGERGKDGRSVTIDLVDGEVEGREGTWVFVYQLDLEGNQGELIDSEFIPDGQDGHKVVIENRTPQGFDVVILDGEGQELDRETVSHGAKGDPGEDGINPVILTARGQGPADPSYALEVINEPGKYNGPYVSGLWITIYSPIGRTSTGEPRYREDVRFIPDGQNGENGRDGLTPRVRLEDGSDALDNSGKWVIVEYPVIDPTTGELVVDPVNNEPVYSEIQREFIQDGEDGLTPRVTVESGFDSDGNAGSWIIVESPLTNPITGEVTYEETNRTFVKDGQDGDDGEDGADGKDGNYVQVVDNGNGTYTIITLDGESDEPINSVIVRDGQDGKDGNYVRVVDNGNGTYTIITLDGESDEPIDSVIVRDGKDGQNGLSPRVSVESGFDSDGNAGSWIIVESPLTNPITGEVTYEETNRTFVKDGQDGDDGEDGADGKDGNYVQVVDNGNGTYTIITLDGESDEPINSVIVRDGQDGKDGNYVRVVDNGNGTYTIITLDGESDEPIDSVIVRDGKDGQNGLSPRVSVESGIDSDGNAGSWIIVESPLTNPITGEVTYEETNRTFVKDGQDGDDGEDGQNGLSPRVSVESGIDSDGNAGSWIIVESPLTNPITGEVTYEETNRTFVKDGQDGDDGEDGQNGLSPRVSVESGIDSDGNAGSWIIVESPLTNPITGEVTYEETNRTFVKDGQDGDDGEDGQNGLSPRVSVESGIDSDGNAGSWIIVESPLTNPITGEVTYEETNRTFVKDGQDGDDGEDGQNGLSSRVSVESGIDSDGNAGSWIIVESPLTNPITGEVTYEETNRTFVKDGQDGDDGEDGADGKDGNYVQVVDNGNGTYTIITLDGESDEPINSVIVRDGKDGQNGLSPRVSVESGFDSDGNAGSWIIVESPLTNPITGEVTYEETNRTFVKDGQDGDDGEDGADGKDGNYVRVVDNGNGTYTIITHDGATDTPISSVTVRDGQSITASTQPGELGGRTGVWIIIKDRNTGAELDRTFVANGEDGQSITANVESGVVNERPGTWVIIRDRETGQELDRNFIYDGQSIIASVEPGTLGDRPGTWVIIKDRHTGDEIDRNFIYNGQNGEDGQSITANVEPGVFNGRPGTWVIIRDRDTNQEIDRNFIFDGQNGKDGNYVQVVENDDGTYTIITLDGETDEPINSVVVHDGDKGDPGRDGNYVELVANDDGTYTIINRDGETHEELSRATIRDGENGKDGNYVQVIDNGNGSYTIVTRKGETHEPINSVTVRDGEKGEKGDPGRSITAQVERGEQNGRPGTWINIYEVNLDGSRGSLIDREFVFDGKDGQAPTIRTEPIKDREGNDLGIQVIVTGPNGEHISTDTIFHGRDGQDGDSVKVRDNQDGSYTIIAVDGEGNEEVVGTIRNGKDGEKGEKGDKGDKGEPGRDGQDGSNAGNIIIDNTNINTNENGDIVITIEGQDPVVIPNPDKLANPIQNMHIDDQGNLIVELSDGRTINAGYARGPQGEPGKDGKSPIISTREVSEGIEITVTNPDGSQHSHIVRHGEDGQAARIISTVKDEHGNTRLIFNDGTEVVISGYENGEKDPNTGNIINVNLTINVVKEGSTDQPSRVLTQANIDNRGHLILTYSNGETEDLGKVTASTDRTVVTALVNSDNELILVYNDGSTQNAGQIDIKEGPRGKSAYELWLEAGNTGSLQDFLDSLKGEDGKDAEVGKVVQSVDINLDGDLVINYTDNSQQIIHNYPSSQDPSANGIKDARVDANGDLIITLDDGSQINAGNVRGPQGEPGADGRGIANIRIENNNLVVVYTDFSVNIIGQLTPSQPGDNQPGEAPGQEEPGESNGDSGKPDDKPGQDKPGEPGDDTGHPDDKPGQEEPGLPDGDQPDDDEPGQTPGDDSDNTGEKPGTDQPGEIPGQSDGDNTDKPGQTGDDTDKPGEPGDGTGQPGDKPDQVEPGQPDEGNTDKPGQPGEDTDEPGQPGETPGQSDGDNTDKPGQPDEDTDKPGQPDDDQPGESNGDTDKPGTSPEAPEQPGQTPGDDSDNSGGKPGESDDVPVAPGQPGDDTDEPGNDEPGQTPGDDSDNSGDKPGTDQSGETPDQSDGDNTDEPGQDKPGLPDGDQPDVDTDKPGQPDADQPGESDGDTDKPGTSPEVPEQPGQTPGETDQPGDQPAAQSSQPTDGQDQTKPVSGSDRNQSDEELTYTRSGFPGTQGSKDFSFVQDPEDATPSDNLTKDEGQRLPDTASLTWVLGLIGASSLMGGSALALKDRKRK

SEQ ID NO: 1317 - DNA, 9570 bp, Alloiococcus otitidis; identical to SEQ ID NO: 1315
  CDS (13)..(9567)

SEQ ID NO: 1318 - protein, 3185 aa, Alloiococcus otitidis
MVGKNNFKLRREKMGNKFYRYSIKRLSIGVASVAVSAGFLFAGREAVNVKAAEVSDENQALSQELDPDQNPALSEGSGVEDQETWEIPSKFGTELPDLDEELLEGIDDDQELLQEVEGQSPEEAPEEAKGHEEESQDIETEDDSDHTPSQNELDQNELEETLTEDPDEDDPEEDQADQNDQEGQVDEAGQWEEDQTDQDDNREGQNREDLGQPDQEAVTRPDLDGDKTDESKPADHSGDSSEEGSVKPELSLRNYIDPEGKSLTEIITDGFVKATLDDQELDIVRQDGHLLLNQPLQTNGRLQLEAINAAGVTNRRDFDLKEDGTLNPIKLVENKLENGRLQDSTADSSSQYSNRAANPQPTAGTTRSANTLSRAANDNLSPQSGRDVSNEVIVEGNLQVPTDSYTVARFLGIPIKKTGNYIQPTSGDSIYFTLSVQVPETVTSGDYIDLHYAPEIAIGQVDVNARTGLSFRERRLHEQIYGTPRPTITDGNGDIIAYIEDDRENNIIRYTFTDYVDRKSNVRFSHTLNHWIDLGEAQNTGEYPLYYRIGDEVFREDTFIDYRQNVRRNGPASTSSVINWVDDKTNTFRATAYFNIDNNYIGTEGRVFYITATEGTEPGAPNAINMDSLDIRVYRVSDGRVLPESRAFDPVAVGAEDITDQVNVESYLTSDNATEDGDYWIDAPTNNSDTYIMVVHGTFDPDRLGPQGEFGMQVQSNDVDYETGQQAGHTSYLVYSVEALSGEGNNIIEGGGEDKEEEKGPLFEMTVEDTGYGTKFVESDRPGWTGIREVRPGQNGRVRVLYVHVNPDQIPGFTPDDFVNIRGQYYQEVSREVIQESEDQIVEYSLPRIVNSIRRPDGSIEFIYNDGHTFTVPPAPTPQTLVPVVETDRGQGPSNPSDDNIRSYLTDNYNGDTRLGTWVTIKNPTGNYTITGEPEFIESYRFIPDGANGERGKDGRSVTIDLVDGEVEGREGTWVFVYQLDLEGNQGELIDSEFIPDGQDGHKVVIENRTPQGFDVVILDGEGQELDRETVSHGAKGDPGEDGINPVILTARGQGPADPSYALEVINEPGKYNGPYVSGLWITIYSPIGRTSTGEPRYREDVRFIPDGQNGENGRDGLTPRVRLEDGSDALDNSGKWVIVEYPVIDPTTGELVVDPVNNEPVYSEIQREFIQDGEDGLTPRVTVESGFDSDGNAGSWIIVESPLTNPITGEVTYEETNRTFVKDGQDGDDGEDGADGKDGNYVQVVDNGNGTYTIITLDGESDEPINSVIVRDGQDGKDGNYVRVVDNGNGTYTIITLDGESDEPIDSVIVRDGKDGQNGLSPRVSVESGFDSDGNAGSWIIVESPLTNPITGEVTYEETNRTFVKDGQDGDDGEDGADGKDGNYVQVVDNGNGTYTIITLDGESDEPINSVIVRDGQDGKDGNYVRVVDNGNGTYTIITLDGESDEPIDSVIVRDGKDGQNGLSPRVSVESGIDSDGNAGSWIIVESPLTNPITGEVTYEETNRTFVKDGQDGDDGEDGQNGLSPRVSVESGIDSDGNAGSWIIVESPLTNPITGEVTYEETNRTFVKDGQDGDDGEDGQNGLSPRVSVESGIDSDGNAGSWIIVESPLTNPITGEVTYEETNRTFVKDGQDGDDGEDGQNGLSPRVSVESGIDSDGNAGSWIIVESPLTNPITGEVTYEETNRTFVKDGQDGDDGEDGQNGLSSRVSVESGIDSDGNAGSWIIVESPLTNPITGEVTYEETNRTFVKDGQDGDDGEDGADGKDGNYVQVVDNGNGTYTIITLDGESDEPINSVIVRDGKDGQNGLSPRVSVESGFDSDGNAGSWIIVESPLTNPITGEVTYEETNRTFVKDGQDGDDGEDGADGKDGNYVRVVDNGNGTYTIITHDGATDTPISSVTVRDGQSITASTQPGELGGRTGVWIIIKDRNTGAELDRTFVANGEDGQSITANVESGVVNERPGTWVIIRDRETGQELDRNFIYDGQSIIASVEPGTLGDRPGTWVIIKDRHTGDEIDRNFIYNGQNGEDGQSITANVEPGVFNGRPGTWVIIRDRDTNQEIDRNFIFDGQNGKDGNYVQVVENDDGTYTIITLDGETDEPINSVVVHDGDKGDPGRDGNYVELVANDDGTYTIINRDGETHEELSRATIRDGENGKDGNYVQVIDNGNGSYTIVTRKGETHEPINSVTVRDGEKGEKGDPGRSITAQVERGEQNGRPGTWINIYEVNLDGSRGSLIDREFVFDGKDGQAPTIRTEPIKDREGNDLGIQVIVTGPNGEHISTDTIFHGRDGQDGDSVKVRDNQDGSYTIIAVDGEGNEEVVGTIRNGKDGEKGEKGDKGDKGEPGRDGQDGSNAGNIIIDNTNINTNENGDIVITIEGQDPVVIPNPDKLANPIQNMHIDDQGNLIVELSDGRTINAGYARGPQGEPGKDGKSPIISTREVSEGIEITVTNPDGSQHSHIVRHGEDGQAARIISTVKDEHGNTRLIFNDGTEVVISGYENGEKDPNTGNIINVNLTINVVKEGSTDQPSRVLTQANIDNRGHLILTYSNGETEDLGKVTASTDRTVVTALVNSDNELILVYNDGSTQNAGQIDIKEGPRGKSAYELWLEAGNTGSLQDFLDSLKGEDGKDAEVGKVVQSVDINLDGDLVINYTDNSQQIIHNYPSSQDPSANGIKDARVDANGDLIITLDDGSQINAGNVRGPQGEPGADGRGIANIRIENNNLVVVYTDFSVNIIGQLTPSQPGDNQPGEAPGQEEPGESNGDSGKPDDKPGQDKPGEPGDDTGHPDDKPGQEEPGLPDGDQPDDDEPGQTPGDDSDNTGEKPGTDQPGEIPGQSDGDNTDKPGQTGDDTDKPGEPGDGTGQPGDKPDQVEPGQPDEGNTDKPGQPGEDTDEPGQPGETPGQSDGDNTDKPGQPDEDTDKPGQPDDDQPGESNGDTDKPGTSPEAPEQPGQTPGDDSDNSGGKPGESDDVPVAPGQPGDDTDEPGNDEPGQTPGDDSDNSGDKPGTDQSGETPDQSDGDNTDEPGQDKPGLPDGDQPDVDTDKPGQPDADQPGESDGDTDKPGTSPEVPEQPGQTPGETDQPGDQPAAQSSQPTDGQDQTKPVSGSDRNQSDEELTYTRSGFPGTQGSKDFSFVQDPEDATPSDNLTKDEGQRLPDTASLTWVLGLIGASSLMGGSALALKDRKRK

SEQ ID NO: 1319 - DNA, 261 bp, Alloiococcus otitidis
  CDS (28)..(258)
tccatccccttggaaaaagacacaggggtggtaaagaagacggcagtatccggttcattaatatcacccagaacgtcttccacagccttcaagaccaagtcccgttctgcctggctgtccacgaccgtcataatcatcttactattgtgcttatcttcttttaattccgcaaacatggaaaacatgggtgactggttggcaatcaggctggcccatcccaccactatctatcacagttgccccatggatttcatattctaa

SEQ ID NO: 1320 - protein, 77 aa, Alloiococcus otitidis
MVKKTAVSGSLISPRTSSTAFKTKSRSAWLSTTVIIILLLCLSSFNSANMENMGDWLAIRLAHPTTIYHSCPMDFIF

SEQ ID NO: 1321 - DNA, 261 bp, Alloiococcus otitidis; identical to SEQ ID NO: 1319
  CDS (10)..(258)

SEQ ID NO: 1322 - protein, 83 aa, Alloiococcus otitidis
MEKDTGVVKKTAVSGSLISPRTSSTAFKTKSRSAWLSTTVIIILLLCLSSFNSANMENMGDWLAIRLAHPTTIYHSCPMDFIF

SEQ ID NO: 1323 - DNA, 261 bp, Alloiococcus otitidis
  CDS (4)..(258)
atagtggtgggatgggccagcctgattgccaaccagtcacccatgttttccatgtttgcggaattaaaagaagataagcacaatagtaagatgattatgacggtcgtggacagccaggcagaacgggacttggtcttgaaggctgtggaagacgttctgggtgatattaatgaaccggatactgccgtcttctttaccacccctgtgtctttttccaaggggatggactaccacgaggacgacgaggggactgttgaatga

SEQ ID NO: 1324 - protein, 85 aa, Alloiococcus otitidis
MVGWASLIANQSPMFSMFAELKEDKHNSKMIMTVVDSQAERDLVLKAVEDVLGDINEPDTAVFFTTPVSFSKGMDYHEDDEGTVE

SEQ ID NO: 1325 - DNA, 1164 bp, Alloiococcus otitidis
  CDS (430)..(1161)
atgatgaacacaccattatatattgcaattatcttactagctgggctagtaggtggcaggctggcccaagctttgaaattaccgtctgttaccggctatttattagctggttttttacttggacctagtgtctttaaccttgttacccctgaagtcagtgagttttttggcatcgtgacggattttgccattggccttttgtcaatttcggttgggatggaattacaccgaagcgttttgaaaaataacgggcgaaatctcataattatatccctagggaagagcctagtaacttttgcattagttacagccgttacttattttttgggaatgggcttttatcaagcagtgatcttaggggtagtttctttaactatttctcctcctggtgttttggaaattgttaaggagcgcaaagctcgtggagagatgaccaacaatttactcaatttggtggctttagacaacttgacctgtatcacccttttcggtctggtcttgtccctagtcgaatctgctatgaaagctaatttcgtctttactgatgttctaatctctattgtcagagatattggattgggtctcgtatttggtattctagccggttggatctttgcctactttgtcgaaaagcaagttctacaagataaacttttggtaattattattgctattattatgattcataatggtttggcccagctattggatctgtcagctgtattgatggctatcatcaccgggattactatcaccaacttgaccaacaacaccacccgggttgcttcaacctttgagcggatcaacctgccagtcaatgtcatgttcctgaccctgtctggtgcccacattgaaattagcatcatttaccaggttgggattatcgggcttggttacattgtcagtcgctttatcggccgggcaggtggggcctacctctttgccaagttgaccagctttaaagagtcaaccaagcgcaatatcggcttaggcctcgtcccccaagctggcatcgccattgggttggtttccattgctgagcaaaccattccctctatggccgggaccctgtctggtgtcctcttgaccggggttattttcttcgaaatccttggccctctcattgtcgaaaaaggactagagcgggcaggcgaagtaaactag

SEQ ID NO: 1326 - protein, 244 aa, Alloiococcus otitidis
MTNNLLNLVALDNLTCITLFGLVLSLVESAMKANFVFTDVLISIVRDIGLGLVFGILAGWIFAYFVEKQVLQDKLLVIIIAIIMIHNGLAQLLDLSAVLMAIITGITITNLTNNTTRVASTFERINLPVNVMFLTLSGAHIEISIIYQVGIIGLGYIVSRFIGRAGGAYLFAKLTSFKESTKRNIGLGLVPQAGIAIGLVSIAEQTIPSMAGTLSGVLLTGVIFFEILGPLIVEKGLERAGEVN

SEQ ID NO: 1327 - DNA, 1164 bp, Alloiococcus otitidis; identical to SEQ ID NO: 1325
  CDS (238)..(1161)

SEQ ID NO: 1328 - protein, 308 aa, Alloiococcus otitidis
MKNNGRNLIIISLGKSLVTFALVTAVTYFLGMGFYQAVILGVVSLTISPPGVLEIVKERKARGEMTNNLLNLVALDNLTCITLFGLVLSLVESAMKANFVFTDVLISIVRDIGLGLVFGILAGWIFAYFVEKQVLQDKLLVIIIAIIMIHNGLAQLLDLSAVLMAIITGITITNLTNNTTRVASTFERINLPVNVMFLTLSGAHIEISIIYQVGIIGLGYIVSRFIGRAGGAYLFAKLTSFKESTKRNIGLGLVPQAGIAIGLVSIAEQTIPSMAGTLSGVLLTGVIFFEILGPLIVEKGLERAGEVN

SEQ ID NO: 1329 - DNA, 1164 bp, Alloiococcus otitidis; identical to SEQ ID NO: 1325
  CDS (73)..(1161)

SEQ ID NO: 1330 - protein, 363 aa, Alloiococcus otitidis
MKLPSVTGYLLAGFLLGPSVFNLVTPEVSEFFGIVTDFAIGLLSISVGMELHRSVLKNNGRNLIIISLGKSLVTFALVTAVTYFLGMGFYQAVILGVVSLTISPPGVLEIVKERKARGEMTNNLLNLVALDNLTCITLFGLVLSLVESAMKANFVFTDVLISIVRDIGLGLVFGILAGWIFAYFVEKQVLQDKLLVIIIAIIMIHNGLAQLLDLSAVLMAIITGITITNLTNNTTRVASTFERINLPVNVMFLTLSGAHIEISIIYQVGIIGLGYIVSRFIGRAGGAYLFAKLTSFKESTKRNIGLGLVPQAGIAIGLVSIAEQTIPSMAGTLSGVLLTGVIFFEILGPLIVEKGLERAGEVN

SEQ ID NO: 1331 - DNA, 1164 bp, Alloiococcus otitidis; identical to SEQ ID NO: 1325
  CDS (1)..(1161)

SEQ ID NO: 1332 - protein, 387 aa, Alloiococcus otitidis
MMNTPLYIAIILLAGLVGGRLAQALKLPSVTGYLLAGFLLGPSVFNLVTPEVSEFFGIVTDFAIGLLSISVGMELHRSVLKNNGRNLIIISLGKSLVTFALVTAVTYFLGMGFYQAVILGVVSLTISPPGVLEIVKERKARGEMTNNLLNLVALDNLTCITLFGLVLSLVESAMKANFVFTDVLISIVRDIGLGLVFGILAGWIFAYFVEKQVLQDKLLVIIIAIIMIHNGLAQLLDLSAVLMAIITGITITNLTNNTTRVASTFERINLPVNVMFLTLSGAHIEISIIYQVGIIGLGYIVSRFIGRAGGAYLFAKLTSFKESTKRNIGLGLVPQAGIAIGLVSIAEQTIPSMAGTLSGVLLTGVIFFEILGPLIVEKGLERAGEVN

SEQ ID NO: 1333 - DNA, 480 bp, Alloiococcus otitidis
  CDS (40)..(477)
aaaccaagactgaaacgagccgtgaaaagaggcataaagatgaaaatccaaatcaaagcgaccccagatatgaccgcacaggacatgatccaagtctatatcttgcgggggcaggtcttttcggaagaacaaaaaattaccgagtcagaagctgaccaagatgactaccaggccttgcatgtcctgttaaaggatggagacgacttggttggttacgctagaatccttgaccggggcgaccaccaggcaattggccgggtcttaatcgctaaaagccaccggggccgaggactggggcggtgtatgctccaggaggtcctggactatatcggaccaggaaaagaagtgagactggcagctcaatcctatgttcaggacctctaccggtctttgggctttaccaaggtgtctgacgaatacatggaagcaggtatcccccatgtggatatggtactggcagaaaaacgtctgccggactag

SEQ ID NO: 1334 - protein, 146 aa, Alloiococcus otitidis
MKIQIKATPDMTAQDMIQVYILRGQVFSEEQKITESEADQDDYQALHVLLKDGDDLVGYARILDRGDHQAIGRVLIAKSHRGRGLGRCMLQEVLDYIGPGKEVRLAAQSYVQDLYRSLGFTKVSDEYMEAGIPHVDMVLAEKRLPD

SEQ ID NO: 1335 - DNA, 480 bp, Alloiococcus otitidis; identical to SEQ ID NO: 1333
  CDS (22)..(477)

SEQ ID NO: 1336 - protein, 152 aa, Alloiococcus otitidis
MKRGIKMKIQIKATPDMTAQDMIQVYILRGQVFSEEQKITESEADQDDYQALHVLLKDGDDLVGYARILDRGDHQAIGRVLIAKSHRGRGLGRCMLQEVLDYIGPGKEVRLAAQSYVQDLYRSLGFTKVSDEYMEAGIPHVDMVLAEKRLPD

SEQ ID NO: 1337 - DNA, 411 bp, Alloiococcus otitidis
  CDS (22)..(408)
tggcggatagtgttagacagcttgaaggccaccaccagggcaaaaatgatgacaatgatcagcatgggggtgacttccgtatcgccgatggtcacaatttcccggctcatccagttcgattcacccaagaaggagaagatgtacatcatggagatgaacaggaggatccaagttcccaccttgttcaccactgtttgcacccggtcggaccggacagccttgttaatcagccggatgaaaaataaacccagcccccaaatcaagaccatgcccaggatagccgttagccaaaataaaaaccttgattgctctaatgtattgagaaattccaccctatcagtccattctatcttcaaattacttacaattttaataataatcgtcatttatcttcaatgcaagaccccttga

SEQ ID NO: 1338 - protein, 129 aa, Alloiococcus otitidis
MKATTRAKMMTMISMGVTSVSPMVTISRLIQFDSPKKEKMYIMEMNRRIQVPTLFTTVCTRSDRTALLISRMKNKPSPQIKTMPRIAVSQNKNLDCSNVLRNSTLSVHSIFKLLTILIIIVIYLQCKTP

SEQ ID NO: 1339 - DNA, 1131 bp, Alloiococcus otitidis
  CDS (1)..(1128)
atgacgattattattaaaattgtaagtaatttgaagatagaatggactgatagggtggaatttctcaatacattagagcaatcaaggtttttattttggctaacggctatcctgggcatggtcttgatttgggggctgggtttatttttcatccggctgattaacaaggctgtccggtccgaccgggtgcaaacagtggtgaacaaggtgggaacttggatcctcctgttcatctccatgatgtacatcttctccttcttgggtgaatcgaactggatgagccgggaaattgtgaccatcggcgatacggaagtcacccccatgctgatcattgtcatcatttttgccctggtggtggccttcaagctgtctaacactatccgccattacctcctgcctccagtttatgaccgctatgaaattgaccggggtcctcgagcgaccattaacacccttctccactacaccattattattgttatgatcgccttctccctctcctcactgggcttcaacttctctagcttgaccgtctttgccggcgttgttggggttggggttggttttggtttgaaaaacatcatgaacaactttatttccggcctcattatcctctttgaccgcactatcgaagttggtgaccgggtagtaattgacgacacctttaccgatatcgaggaaatcaaaatccgctacactatcgtccggacccgactcaatgaacggattattatccccaactcttatttcttggaaaataaattcatcaaccgatctttcactaacaaacgtcttcgagtgacaatcgaagttggtgtcgaatatggggaggatttggacttggcagaagaagaattgatcgagtcgatctatgacctccaggccactaaatatggtaggctcttgtctaaccctttgccggaggtctatgttgagaattttgatgaatacaacgtcagtctagttctctttttctggattgatgaccaggccgagcaagctgagtttgtcttgccttccgaggcccgcaagatcatttacaaacgtttctatgaagctggtgttagctttgccttcccacgccaagacctttacttgcttaacaagcaatttgaaaaccaagccaaataa

SEQ ID NO: 1340 - protein, 376 aa, Alloiococcus otitidis
MTIIIKIVSNLKIEWTDRVEFLNTLEQSRFLFWLTAILGMVLIWGLGLFFIRLINKAVRSDRVQTVVNKVGTWILLFISMMYIFSFLGESNWMSREIVTIGDTEVTPMLIIVIIFALVVAFKLSNTIRHYLLPPVYDRYEIDRGPRATINTLLHYTIIIVMIAFSLSSLGFNFSSLTVFAGVVGVGVGFGLKNIMNNFISGLIILFDRTIEVGDRVVIDDTFTDIEEIKIRYTIVRTRLNERIIIPNSYFLENKFINRSFTNKRLRVTIEVGVEYGEDLDLAEEELIESIYDLQATKYGRLLSNPLPEVYVENFDEYNVSLVLFFWIDDQAEQAEFVLPSEARKIIYKRFYEAGVSFAFPRQDLYLLNKQFENQAK

SEQ ID NO: 1341 - DNA, 291 bp, Alloiococcus otitidis
  CDS (61)..(288)
tggtcacccacagcatcaccctcaaggtcttttatgaaatttggaaggactacaaccaaattgaggaataccaaggcgactttcccaattgtgtcgtcctcaactatgaatacgaagatggcaagttttctcttgttgatgtcactagccacgacttctcccagctccaagacatgtcaaacttttaagaaaaaaccgaacagccagaaagctgttcggttttccttcgttagggctatggttagcgagggggtacgagaaactggttttatttataacgtaggtttttaa

SEQ ID NO: 1342 - protein, 76 aa, Alloiococcus otitidis
MRNTKATFPIVSSSTMNTKMASFLLLMSLATTSPSSKTCQTFKKKPNSQKAVRFSFVRAMVSEGVRETGFIYNVGF

SEQ ID NO: 1343 - DNA, 291 bp, Alloiococcus otitidis; identical to SEQ ID NO: 1341
  CDS (34)..(288)

SEQ ID NO: 1344 - protein, 85 aa, Alloiococcus otitidis
MKFGRTTTKLRNTKATFPIVSSSTMNTKMASFLLLMSLATTSPSSKTCQTFKKKPNSQKAVRFSFVRAMVSEGVRETGFIYNVGF

SEQ ID NO: 1345 - DNA, 615 bp, Alloiococcus otitidis
  CDS (13)..(612)
ggagcaagccatatgaccaagcgcaacttttattttgtcagacatggggaaaccctttttaacctacaaggacggattcaaggctcgtccgactcccccttaaccaagcgtgggattgaacaaggcaagatcgctggccagtacttcaaggaccaaggcattcgctttgattctgcctattcttcaacccaagagcgggccagtgacaccctagaattgatcaccgacttggattacaccagggtcaaaggcttgaaagagtgggactttggcacttacgaagcttatccgtcctacctggttccaagagaccaattttttacctacttcccccaatttggaggcgaaagcttggatgatgtgatcaaacgggtcaaccaaagcgtccaggatattgtgacaaaggataacggccagtccatcctagtggtcacccacagcatcaccctcaaggtcttttatgaaatttggaaggactacaaccaaattgaggaataccaaggcgactttcccaattgtgtcgtcctcaactatgaatacgaagatggcaagttttctcttgttgatgtcactagccacgacttctcccagctccaagacatgtcaaacttttaa

SEQ ID NO: 1346 - protein, 200 aa, Alloiococcus otitidis
MTKRNFYFVRHGETLFNLQGRIQGSSDSPLTKRGIEQGKIAGQYFKDQGIRFDSAYSSTQERASDTLELITDLDYTRVKGLKEWDFGTYEAYPSYLVPRDQFFTYFPQFGGESLDDVIKRVNQSVQDIVTKDNGQSILVVTHSITLKVFYEIWKDYNQIEEYQGDFPNCVVLNYEYEDGKFSLVDVTSHDFSQLQDMSNF

SEQ ID NO: 1347 - DNA, 489 bp, Alloiococcus otitidis
  CDS (52)..(486)
gaagattttttaggttataataggtttactactacactaggaggtataattatgtcattttcatcttttgttaaaggtgccctcttcggcgctggggttgctttactatttgcgcctaagagcggtgaagaaacccgtaaagatatccgcaaaaaatttgaagaatcgaaagatgcagccaatgaatatgctgagcttgctaaagaaaaaggccaagaattaggcgaagttgctggggaagcaggcgaaaacatccgcatcaccctaaccaactcagctaaagacttgcaagactctctagacaaaacttccaaagagcttcaaagtgaagcggaagacttgaaagacgacatttctgaatctgcttcaaaagcagctagcgaagtcaaagacactgctgaagacgttaaggaagaagcagacgatgcaaccgaagacgtcattcaagaagcgaaagacgcgaaagaagaagctgaagacgcaaaataa

SEQ ID NO: 1348 - protein, 145 aa, Alloiococcus otitidis
MSFSSFVKGALFGAGVALLFAPKSGEETRKDIRKKFEESKDAANEYAELAKEKGQELGEVAGEAGENIRITLTNSAKDLQDSLDKTSKELQSEAEDLKDDISESASKAASEVKDTAEDVKEEADDATEDVIQEAKDAKEEAEDAK

SEQ ID NO: 1349 - DNA, 306 bp, Alloiococcus otitidis
  CDS (61)..(303)
agctctttggaagttttgtctagagagtcttgcaagtctttagctgagttggttagggtgatgcggatgttttcgcctgcttccccagcaacttcgcctaattcttggcctttttctttagcaagctcagcatattcattggctgcatctttcgattcttcaaattttttgcggatatctttacgggtttcttcaccgctcttaggcgcaaatagtaaagcaaccccagcgccgaagagggcacctttaacaaaagatgaaaatgacataattatacctcctagtgtagtagtaaacctattataa

SEQ ID NO: 1350 - protein, 81 aa, Alloiococcus otitidis
MRMFSPASPATSPNSWPFSLASSAYSLAASFDSSNFLRISLRVSSPLLGANSKATPAPKRAPLTKDENDIIIPPSVVVNLL

SEQ ID NO: 1351 - DNA, 306 bp, Alloiococcus otitidis; identical to SEQ ID NO: 1349
  CDS (58)..(303)

SEQ ID NO: 1352 - protein, 82 aa, Alloiococcus otitidis
MMRMFSPASPATSPNSWPFSLASSAYSLAASFDSSNFLRISLRVSSPLLGANSKATPAPKRAPLTKDENDIIIPPSVVVNLL

SEQ ID NO: 1353 - DNA, 306 bp, Alloiococcus otitidis; identical to SEQ ID NO: 1349
  CDS (49)..(303)

SEQ ID NO: 1354 - protein, 85 aa, Alloiococcus otitidis
MVRVMRMFSPASPATSPNSWPFSLASSAYSLAASFDSSNFLRISLRVSSPLLGANSKATPAPKRAPLTKDENDIIIPPSVVVNLL

SEQ ID NO: 1355 - DNA, 135 bp, Alloiococcus otitidis
  CDS (1)..(132)
atggtagtggaggagggtttggaccaagccccgggtggtattaatattgaggccggttttttggctgatctcattcaaagtcagctggctctcatcctggctaaagcaattaataatggtaaaggcccgggctag

SEQ ID NO: 1356 - protein, 44 aa, Alloiococcus otitidis
MVVEEGLDQAPGGINIEAGFLADLIQSQLALILAKAINNGKGPG

SEQ ID NO: 1357 - DNA, 861 bp, Alloiococcus otitidis
  CDS (304)..(858)
aaatacccttggtcaaagactttctcattagaatatattaatattcattataccataaaaaatggggtgaatcctcttatgactactaataaaaagaattacaagattatccagtctctagcccgggcctttaccattattaattgctttagccaggatgagagccagctgactttgaatgagatcagccaaaaaaccggcctcaatattaataccacccggggcttggtccaaaccctcctccactaccattacctggcttacgatgaggcggccaacacttaccggctaggtttggtttttatggaaaaagctcggattgcccagtttgaatttaacaaccggctgattaacctggttcgcagcgacctccagcaactagcggatgtctttgccgtttccacccggatgatgtccatcgaaggaacccaggcgcctattgtcatggaagccaaaccctcccaggcaaggtattccctggtcgtccatgagtcaactgagttccccctctatgccacagcgactggcaaactgattttagccaacttggacccggactatcgggaccaggtgattgaccaatttgaatggaaggagtttggccccaacaaccacactgacaaggaaagcctgctgaaagacttggcccagatcaaagaccagggaatctcgattgaaaatcaggaactgggtcttgggttttcctccttggctgtccccgtcttccaagagggggctttagtttactccttgtctttgaccacaacggacgaaatcttaaaggttaagcaaaaccagatgctaaaaggactgaagcaaatccgggacaagctcaaccaagccttggcttctcttgcttaa

SEQ ID NO: 1358 - protein, 185 aa, Alloiococcus otitidis
MEKARIAQFEFNNRLINLVRSDLQQLADVFAVSTRMMSIEGTQAPIVMEAKPSQARYSLVVHESTEFPLYATATGKLILANLDPDYRDQVIDQFEWKEFGPNNHTDKESLLKDLAQIKDQGISIENQELGLGFSSLAVPVFQEGALVYSLSLTTTDEILKVKQNQMLKGLKQIRDKLNQALASLA

SEQ ID NO: 1359 - DNA, 861 bp, Alloiococcus otitidis; identical to SEQ ID NO: 1357
  CDS (79)..(858)

SEQ ID NO: 1360 - protein, 260 aa, Alloiococcus otitidis
MTTNKKNYKIIQSLARAFTIINCFSQDESQLTLNEISQKTGLNINTTRGLVQTLLHYHYLAYDEAANTYRLGLVFMEKARIAQFEFNNRLINLVRSDLQQLADVFAVSTRMMSIEGTQAPIVMEAKPSQARYSLVVHESTEFPLYATATGKLILANLDPDYRDQVIDQFEWKEFGPNNHTDKESLLKDLAQIKDQGISIENQELGLGFSSLAVPVFQEGALVYSLSLTTTDEILKVKQNQMLKGLKQIRDKLNQALASLA

SEQ ID NO: 1361 - DNA, 861 bp, Alloiococcus otitidis; identical to SEQ ID NO: 1357
  CDS (67)..(858)

SEQ ID NO: 1362 - protein, 264 aa, Alloiococcus otitidis
MNPLMTTNKKNYKIIQSLARAFTIINCFSQDESQLTLNEISQKTGLNINTTRGLVQTLLHYHYLAYDEAANTYRLGLVFMEKARIAQFEFNNRLINLVRSDLQQLADVFAVSTRMMSIEGTQAPIVMEAKPSQARYSLVVHESTEFPLYATATGKLILANLDPDYRDQVIDQFEWKEFGPNNHTDKESLLKDLAQIKDQGISIENQELGLGFSSLAVPVFQEGALVYSLSLTTTDEILKVKQNQMLKGLKQIRDKLNQALASLA

SEQ ID NO: 1363 - DNA, 2754 bp, Alloiococcus otitidis
  CDS (763)..(2751)
ctattacatacgaaaaaagaaagcagggtgttccacatcgtgaaacaacaaaatgaaggtgtccaccgtaaagttttgagaaaagtcaagaaacactttgtagctgttaccttatctggacttgtcctagctggtatttcagcccaagatgtccaagcccaagaaggtcaagcaagtgacggaagcaatttgggtcaaggcttagcctccgaccaagctcctgaaggttcagacgatgaagttctagcgactttgagtcaagcggatgaccaggggcaaagtgcattgaatgtttcagcagctgaaggggaaggcgctgacgaccaagttactgctagttcagctgagtcaggtcaagcccttgccaatcctgaaccagaccaaggagtttcggaccaagagccaggcctagctgccgaccccggtcaagcagtttcagaccaagaccaagctagccaaggtcaagcggatgatcaaggccaagaagctgcaagtaatccagttgctgaaggcgaaagctctgaaggagagacagaagaaactcctagccaagaccaaactgcagactcagatgccgaccaaggtcaagaccaagaaagctctgtccaagcggaagccagcccagaagtttccttggaccatgcgccaaacttgaaattgccgcctgttcctgagcgaccagccggcacccgtcgtgcaaccattggctttaccaacgacctccatggccggatcacccgtcaaggggagtctgactacgacatgggcttgggtcacatcaagactatctttgatgcttaccgtcaattagcggacgaattcctcttacttgacgcgggcgacaccgttcacgggactaccctggtcaacctgacagagggcgaaaacattatccgcctaatgaatgaaatgggttaccacgccatgacaaccgggaaccacgaatacaactacggttttgatcgcttgaaagagttggaagaacaggctgactttgaatttgtggcttccaatgttaaagacactgagggcaatgacctcttcaagtcctttaccgaatgggaagttttcggtgaaaaaatcggtattatcggcctagctacccaaggaacctatacttctacccacccgaataatgtagaaggtattgtctttaccgatgaagtccaagctatttccgaccaaattgaagccttgtctgaagaattcagcaagtttatcgtcctttctcacgtgggttacggggttgaccaagaaatcgcccgacaaaaccctgaagtagaactgattatcgggggccactcccacacaccagtaattggtggagcttacgtggacggtaatgacaagaccttgatcacccaagcttgggaacacggtaaattgatcggtctagtccaccttgattttgacgaaaacggcaatattgttcaaaaaactgcccaacaccttaccctagctgagaacttagaccaaatcttagaagacctaccatccagtacggtagggaacccagaagatatcctagctgttgagggcagtgaagaagacccagttatcaaggaaatgcttgaggaaatccaagctgaagtggaaagagaactgggcgaagttatcggatcgactagtgtggtccttaacggggaacgtgattttgtccgacgaggggaaaccaacctgggtaacttgatcaccgatgctgttcgagaatttactggtgctgaaattgccttcatcaatggtggcggaatccgggccagcattgatgccggcgagattaccctaggcgatgtcgtttccgtcctaccatttatcaacctagtggaaacagtcaacgttccaggttctgtcatccttgaagccttggaacacggtagccgtcaataccctgaacaaaacggtggtttcttgcacgcatccggcttgaagtacattgtggatgctactcgtgagccaggccaacgtgttgtttacgttgaagtcaacggtgaagtgctagacccagaccggacctacaatttggcaaccaacgacttcctcctagctggtggggacggctacaccatgtttgccgactatgacgttgaattggtcactggggaattgttctctgatgttctcatcaactacattcgccaacaagacggcccgattgcacctgaaacagaaggccgaattactgttagcgacgaagccttggatgctgatagcctcgctagacttgtggctgaaatcactgacagagatgacttggaaggccagattccagatgagtcagaaactgacccagatggtgaagttgaaagtccagatgaagacggtcaaacaccaggtgatgaccaagaagttgaggatcctgaagaggacggtcaaggagcaggtgacgacagccaaacttcagatggtgacttgactccagttccagctgaccctcaagaagatgaccaagtggttgtcccagctgactacgaaagagctgctaaggcacttgaccaagtcctagccgaaattgaaaaagcttttggccctgactttgttgaccgcttgctggaatctgctagcctagaagaattagcagagctagctgaccgctaccaagcaggtcaagtgactacagaagacttgagtcaagtagccgaaacgagtcaaaaagctggccaaaacctaccagacactgccacagctggctggttactgggagcactcggactgctttccctatcaggcggccttgtcctcactaaaaaagactaa

SEQ ID NO: 1364 - protein, 663 aa, Alloiococcus otitidis
MGLGHIKTIFDAYRQLADEFLLLDAGDTVHGTTLVNLTEGENIIRLMNEMGYHAMTTGNHEYNYGFDRLKELEEQADFEFVASNVKDTEGNDLFKSFTEWEVFGEKIGIIGLATQGTYTSTHPNNVEGIVFTDEVQAISDQIEALSEEFSKFIVLSHVGYGVDQEIARQNPEVELIIGGHSHTPVIGGAYVDGNDKTLITQAWEHGKLIGLVHLDFDENGNIVQKTAQHLTLAENLDQILEDLPSSTVGNPEDILAVEGSEEDPVIKEMLEEIQAEVERELGEVIGSTSVVLNGERDFVRRGETNLGNLITDAVREFTGAEIAFINGGGIRASIDAGEITLGDVVSVLPFINLVETVNVPGSVILEALEHGSRQYPEQNGGFLHASGLKYIVDATREPGQRVVYVEVNGEVLDPDRTYNLATNDFLLAGGDGYTMFADYDVELVTGELFSDVLINYIRQQDGPIAPETEGRITVSDEALDADSLARLVAEITDRDDLEGQIPDESETDPDGEVESPDEDGQTPGDDQEVEDPEEDGQGAGDDSQTSDGDLTPVPADPQEDDQVVVPADYERAAKALDQVLAEIEKAFGPDFVDRLLESASLEELAELADRYQAGQVTTEDLSQVAETSQKAGQNLPDTATAGWLLGALGLLSLSGGLVLTKKD

SEQ ID NO: 1365 - DNA, 2754 bp, Alloiococcus otitidis; identical to SEQ ID NO: 1363
  CDS (76)..(2751)

SEQ ID NO: 1366 - protein, 892 aa, Alloiococcus otitidis
MRKVKKHFVAVTLSGLVLAGISAQDVQAQEGQASDGSNLGQGLASDQAPEGSDDEVLATLSQADDQGQSALNVSAAEGEGADDQVTASSAESGQALANPEPDQGVSDQEPGLAADPGQAVSDQDQASQGQADDQGQEAASNPVAEGESSEGETEETPSQDQTADSDADQGQDQESSVQAEASPEVSLDHAPNLKLPPVPERPAGTRRATIGFTNDLHGRITRQGESDYDMGLGHIKTIFDAYRQLADEFLLLDAGDTVHGTTLVNLTEGENIIRLMNEMGYHAMTTGNHEYNYGFDRLKELEEQADFEFVASNVKDTEGNDLFKSFTEWEVFGEKIGIIGLATQGTYTSTHPNNVEGIVFTDEVQAISDQIEALSEEFSKFIVLSHVGYGVDQEIARQNPEVELIIGGHSHTPVIGGAYVDGNDKTLITQAWEHGKLIGLVHLDFDENGNIVQKTAQHLTLAENLDQILEDLPSSTVGNPEDILAVEGSEEDPVIKEMLEEIQAEVERELGEVIGSTSVVLNGERDFVRRGETNLGNLITDAVREFTGAEIAFINGGGIRASIDAGEITLGDVVSVLPFINLVETVNVPGSVILEALEHGSRQYPEQNGGFLHASGLKYIVDATREPGQRVVYVEVNGEVLDPDRTYNLATNDFLLAGGDGYTMFADYDVELVTGELFSDVLINYIRQQDGPIAPETEGRITVSDEALDADSLARLVAEITDRDDLEGQIPDESETDPDGEVESPDEDGQTPGDDQEVEDPEEDGQGAGDDSQTSDGDLTPVPADPQEDDQVVVPADYERAAKALDQVLAEIEKAFGPDFVDRLLESASLEELAELADRYQAGQVTTEDLSQVAETSQKAGQNLPDTATAGWLLGALGLLSLSGGLVLTKKD

SEQ ID NO: 1367 - DNA, 2754 bp, Alloiococcus otitidis; identical to SEQ ID NO: 1363
  CDS (40)..(2751)

SEQ ID NO: 1368 - protein, 904 aa, Alloiococcus otitidis
MKQQNEGVHRKVLRKVKKHFVAVTLSGLVLAGISAQDVQAQEGQASDGSNLGQGLASDQAPEGSDDEVLATLSQADDQGQSALNVSAAEGEGADDQVTASSAESGQALANPEPDQGVSDQEPGLAADPGQAVSDQDQASQGQADDQGQEAASNPVAEGESSEGETEETPSQDQTADSDADQGQDQESSVQAEASPEVSLDHAPNLKLPPVPERPAGTRRATIGFTNDLHGRITRQGESDYDMGLGHIKTIFDAYRQLADEFLLLDAGDTVHGTTLVNLTEGENIIRLMNEMGYHAMTTGNHEYNYGFDRLKELEEQADFEFVASNVKDTEGNDLFKSFTEWEVFGEKIGIIGLATQGTYTSTHPNNVEGIVFTDEVQAISDQIEALSEEFSKFIVLSHVGYGVDQEIARQNPEVELIIGGHSHTPVIGGAYVDGNDKTLITQAWEHGKLIGLVHLDFDENGNIVQKTAQHLTLAENLDQILEDLPSSTVGNPEDILAVEGSEEDPVIKEMLEEIQAEVERELGEVIGSTSVVLNGERDFVRRGETNLGNLITDAVREFTGAEIAFINGGGIRASIDAGEITLGDVVSVLPFINLVETVNVPGSVILEALEHGSRQYPEQNGGFLHASGLKYIVDATREPGQRVVYVEVNGEVLDPDRTYNLATNDFLLAGGDGYTMFADYDVELVTGELFSDVLINYIRQQDGPIAPETEGRITVSDEALDADSLARLVAEITDRDDLEGQIPDESETDPDGEVESPDEDGQTPGDDQEVEDPEEDGQGAGDDSQTSDGDLTPVPADPQEDDQVVVPADYERAAKALDQVLAEIEKAFGPDFVDRLLESASLEELAELADRYQAGQVTTEDLSQVAETSQKAGQNLPDTATAGWLLGALGLLSLSGGLVLTKKD

SEQ ID NO: 1369 - DNA, 2754 bp, Alloiococcus otitidis; identical to SEQ ID NO: 1363
  CDS (28)..(2751)

SEQ ID NO: 1370 - protein, 908 aa, Alloiococcus otitidis
MFHIVKQQNEGVHRKVLRKVKKHFVAVTLSGLVLAGISAQDVQAQEGQASDGSNLGQGLASDQAPEGSDDEVLATLSQADDQGQSALNVSAAEGEGADDQVTASSAESGQALANPEPDQGVSDQEPGLAADPGQAVSDQDQASQGQADDQGQEAASNPVAEGESSEGETEETPSQDQTADSDADQGQDQESSVQAEASPEVSLDHAPNLKLPPVPERPAGTRRATIGFTNDLHGRITRQGESDYDMGLGHIKTIFDAYRQLADEFLLLDAGDTVHGTTLVNLTEGENIIRLMNEMGYHAMTTGNHEYNYGFDRLKELEEQADFEFVASNVKDTEGNDLFKSFTEWEVFGEKIGIIGLATQGTYTSTHPNNVEGIVFTDEVQAISDQIEALSEEFSKFIVLSHVGYGVDQEIARQNPEVELIIGGHSHTPVIGGAYVDGNDKTLITQAWEHGKLIGLVHLDFDENGNIVQKTAQHLTLAENLDQILEDLPSSTVGNPEDILAVEGSEEDPVIKEMLEEIQAEVERELGEVIGSTSVVLNGERDFVRRGETNLGNLITDAVREFTGAEIAFINGGGIRASIDAGEITLGDVVSVLPFINLVETVNVPGSVILEALEHGSRQYPEQNGGFLHASGLKYIVDATREPGQRVVYVEVNGEVLDPDRTYNLATNDFLLAGGDGYTMFADYDVELVTGELFSDVLINYIRQQDGPIAPETEGRITVSDEALDADSLARLVAEITDRDDLEGQIPDESETDPDGEVESPDEDGQTPGDDQEVEDPEEDGQGAGDDSQTSDGDLTPVPADPQEDDQVVVPADYERAAKALDQVLAEIEKAFGPDFVDRLLESASLEELAELADRYQAGQVTTEDLSQVAETSQKAGQNLPDTATAGWLLGALGLLSLSGGLVLTKKD

SEQ ID NO: 1371 - DNA, 279 bp, Alloiococcus otitidis
  CDS (34)..(276)
ccaccggctgtaaaccattcaacctggtcgaccttgtccaaggtgatcttgagggctttctcagccttttggttagcttcgggttcagcaccccggcgccgagcttcttttaaaacatctttgccgtcagtacctttcaaaccaacccggccgcccataccggcaatcgggttaatcagtagcgcaactttttttaccattttattcaccttcctatacattcttcgacacctacaacctaccacacttgctaagatttcactagcgaaaacgttttaa

SEQ ID NO: 1372 - protein, 81 aa, Alloiococcus otitidis
MSKVILRAFSAFWLASGSAPRRRASFKTSLPSVPFKPTRPPIPAIGLISSATFFTILFTFLYILRHLQPTTLAKISLAKTF

SEQ ID NO: 1373 - DNA, 1197 bp, Alloiococcus otitidis
  CDS (76)..(1194)
aacgttttcgctagtgaaatcttagcaagtgtggtaggttgtaggtgtcgaagaatgtataggaaggtgaataaaatggtaaaaaaagttgcgctactgattaacccgattgccggtatgggcggccgggttggtttgaaaggtactgacggcaaagatgttttaaaagaagctcggcgccggggtgctgaacccgaagctaaccaaaaggctgagaaagccctcaagatcaccttggacaaggtcgaccaggttgaatggtttacagccggtggtcagatgggggaagacctcctcaacaaatatgaccaaaaccccgatgtcctatactctggtaaggaagaaacaggacctgatgatacagaaagtttccttaaagaagttttgaaccaggacgacatcgatattctcttgtttgtcggtggggacgggactgctcgtgatgtggcgaaaactattcaattggaaattccagcattagggattccagctggagttaaaatccactccccagtctttgctacttcaccagaaaatgcgggagaacttcttgccggctacctcaatgatgaaatccagtcggttaacgaaaaagaagttattgatattgaagaagaagctttcagacaggatgaagtggtgaccgaagtttatggttacctcaatgttccccacgatgaaagccacatgcagaacttgaagtcaccttcgcctcaaagtgaccatgaagctaaagtttcggcttgcttggacgtgatcgaccggatggaagaggatgtctactatattattgggtcagggacaacccttgttccaatcatggaagagttggacctggaagttaccaagcttggagtcgacattattaaaaacaaaaaattggtgaaaaaagatgcttcagagtctgacatcctagaaatcatcaaagataacccggctaaattgatcgtgaccccaatgggtggtcaaggctacctctttggtcgcggcaacccacaaatttcttcaaaagttctgagccagctggataaagacgatattacgattgtctccactcccggaaaaatcagaaccttaaataaccggcctttcttgatttacaccggggatgctgacttggatgaccgcttgtccggctactataaagttgtggtgggttatgaaaacctcaagatgtacaagctaaaaagagcttaa

SEQ ID NO: 1374 - protein, 373 aa, Alloiococcus otitidis
MVKKVALLINPIAGMGGRVGLKGTDGKDVLKEARRRGAEPEANQKAEKALKITLDKVDQVEWFTAGGQMGEDLLNKYDQNPDVLYSGKEETGPDDTESFLKEVLNQDDIDILLFVGGDGTARDVAKTIQLEIPALGIPAGVKIHSPVFATSPENAGELLAGYLNDEIQSVNEKEVIDIEEEAFRQDEVVTEVYGYLNVPHDESHMQNLKSPSPQSDHEAKVSACLDVIDRMEEDVYYIIGSGTTLVPIMEELDLEVTKLGVDIIKNKKLVKKDASESDILEIIKDNPAKLIVTPMGGQGYLFGRGNPQISSKVLSQLDKDDITIVSTPGKIRTLNNRPFLIYTGDADLDDRLSGYYKVVVGYENLKMYKLKRA

SEQ ID NO: 1375 - DNA, 1197 bp, Alloiococcus otitidis; identical to SEQ ID NO: 1373
  CDS (55)..(1194)

SEQ ID NO: 1376 - protein, 380 aa, Alloiococcus otitidis
MYRKVNKMVKKVALLINPIAGMGGRVGLKGTDGKDVLKEARRRGAEPEANQKAEKALKITLDKVDQVEWFTAGGQMGEDLLNKYDQNPDVLYSGKEETGPDDTESFLKEVLNQDDIDILLFVGGDGTARDVAKTIQLEIPALGIPAGVKIHSPVFATSPENAGELLAGYLNDEIQSVNEKEVIDIEEEAFRQDEVVTEVYGYLNVPHDESHMQNLKSPSPQSDHEAKVSACLDVIDRMEEDVYYIIGSGTTLVPIMEELDLEVTKLGVDIIKNKKLVKKDASESDILEIIKDNPAKLIVTPMGGQGYLFGRGNPQISSKVLSQLDKDDITIVSTPGKIRTLNNRPFLIYTGDADLDDRLSGYYKVVVGYENLKMYKLKRA

SEQ ID NO: 1377 - DNA, 1197 bp, Alloiococcus otitidis; identical to SEQ ID NO: 1373
  CDS (31)..(1194)

SEQ ID NO: 1378 - protein, 388 aa, Alloiococcus otitidis
MVGCRCRRMYRKVNKMVKKVALLINPIAGMGGRVGLKGTDGKDVLKEARRRGAEPEANQKAEKALKITLDKVDQVEWFTAGGQMGEDLLNKYDQNPDVLYSGKEETGPDDTESFLKEVLNQDDIDILLFVGGDGTARDVAKTIQLEIPALGIPAGVKIHSPVFATSPENAGELLAGYLNDEIQSVNEKEVIDIEEEAFRQDEVVTEVYGYLNVPHDESHMQNLKSPSPQSDHEAKVSACLDVIDRMEEDVYYIIGSGTTLVPIMEELDLEVTKLGVDIIKNKKLVKKDASESDILEIIKDNPAKLIVTPMGGQGYLFGRGNPQISSKVLSQLDKDDITIVSTPGKIRTLNNRPFLIYTGDADLDDRLSGYYKVVVGYENLKMYKLKRA

SEQ ID NO: 1379 - DNA, 306 bp, Alloiococcus otitidis
  CDS (4)..(303)
agcttgctggttatagacttggaccctgctttgctagggaatatcgctaatccagggaatgtgcttggatcgtcagagaccatttccatatcacaaagtctcggcaagttgaacatggggcaaaagcaaataagcttgacccaactagccaagttcaccacattttgtcaagctacccaaatccaaaaaaccgacaaacaatttaaaacattaataaaccatttccaaagtaaaccctctaactttaaatgttcaggcctatcccttatcatgccagatgaagggctaaaaagagcctggaagtaa

SEQ ID NO: 1380 - protein, 100 aa, Alloiococcus otitidis
MLVIDLDPALLGNIANPGNVLGSSETISISQSLGKLNMGQKQISLTQLAKFTTFCQATQIQKTDKQFKTLINHFQSKPSNFKCSGLSLIMPDEGLKRAWK

SEQ ID NO: 1381 - DNA, 240 bp, Alloiococcus otitidis
  CDS (13)..(237)
aataggcctgtaatgttaccttggtcgtcaatgtcgatacggttagcagctggttctttaggaagacctggcattttcatgatgttaccagacttagcaacaatgaagccagcaccagcagaaacagttaagtcttggatagtgatagtgaagccagttggtgcacccaatgctttcttatcatctgagaaggagaattgggtcttagccatacaaattggtaatttgtcgtggccgtga

SEQ ID NO: 1382 - protein, 75 aa, Alloiococcus otitidis
MLPWSSMSIRLAAGSLGRPGIFMMLPDLATMKPAPAETVKSWIVIVKPVGAPNAFLSSEKENWVLAIQIGNLSWP

SEQ ID NO: 1383 - DNA, 1719 bp, Alloiococcus otitidis
  CDS (52)..(1716)
taccggtctgtggcacaagtaaaaacagcagaaataggaggagttttgttaatgaaatcggacattgaaatcgctcaggaagcaacaggtctacctattgaagaagttgctgacaagctagggatcaaacacgacctcttagaaccatacggcaacgacaaagctaaagtagactttacaaaacttgacttagacgcagctaacttcggtaagttggtcctcgtaacagccattacacctacgccagctggggaaggtaaaaccactacctctatcggtctagttgatggtttgaacaaaatcggtaaaaaagcagccgttgccatgcgtgaaccatccttaggaccagtctttggtgttaaaggtggagctgctggtggtggatactcacaagttatcccaatggaagacatcaaccttcactttaccggtgacttgcacgcaattggcattgcaactaacttgattgcagctttaattgacaaccacatccaccatggtaatgaactggacattgatgtgaaccggattgaatggcgtcgtgttgttgacatgaacgaccgtcaactccgtaacattgcaaatggtttaggccgacgtgcagacggtgtgcctcgagaagacggctatgacatcgttgttgcatctgaaattatggcggccctatgcctatcagatagcctctctgaattaaaagaaaaaatcggtaaaatggtcgttgcttacaaccacgacaatgaccctgtaactgttgctgacctacaaggccaaggtgctgcagcagccctactaaaagaagccattaaacctaacttggttcaaaccttggaagggaaccctgcctttgtccacggtggaccattcgcaaacattgctcacggatgctcttctgtcctagcaactaaagtcgcaatggctcacgctgactacactgttactgaaggtggattcggtgctgaccttggtgctgaaaaattcatcgacatcaaagctcgtcaagctgacatcaaacctgatacagcagttgtcgttgcaactattcgtgcccttaaaatgcacggtggcgtagacaaaaaagaattggaaactgaaaacgtccaagctctacgtgacggtatgccaaacttggttcgccacgttaacaaccttaaaaatgtctttggcattaacccaatcgttgcgatcaaccaattcccaactgatactgacgatgaaattcaagcacttaaagaagagtgtgaaaaagaagacatcaaagttgtcctagctactaactttgctgaaggtggcgacggagctaaagacttggcaaatgcagtcgttgaagcttctgaagcaggcaatgacttcaaatttgcttacgatgtcaacgactctatcgaagataaaattgaaaccttggttaaagacatttacggcggtgaaaaagttgaattcacccgcaaagccaaagctaaaatccgtaaattcaaacgtcacggccacgacaaattaccaatttgtatggctaagacccaattctccttctcagatgataagaaagcattgggtgcaccaactggcttcactatcactatccaagacttaactgtttctgctggtgctggcttcattgttgctaagtctggtaacatcatgaaaatgccaggtcttcctaaagaaccagctgctaaccgtatcgacattgacgaccaaggtaacattacaggcctattctaa

SEQ ID NO: 1384 - protein, 555 aa, Alloiococcus otitidis
MKSDIEIAQEATGLPIEEVADKLGIKHDLLEPYGNDKAKVDFTKLDLDAANFGKLVLVTAITPTPAGEGKTTTSIGLVDGLNKIGKKAAVAMREPSLGPVFGVKGGAAGGGYSQVIPMEDINLHFTGDLHAIGIATNLIAALIDNHIHHGNELDIDVNRIEWRRVVDMNDRQLRNIANGLGRRADGVPREDGYDIVVASEIMAALCLSDSLSELKEKIGKMVVAYNHDNDPVTVADLQGQGAAAALLKEAIKPNLVQTLEGNPAFVHGGPFANIAHGCSSVLATKVAMAHADYTVTEGGFGADLGAEKFIDIKARQADIKPDTAVVVATIRALKMHGGVDKKELETENVQALRDGMPNLVRHVNNLKNVFGINPIVAINQFPTDTDDEIQALKEECEKEDIKVVLATNFAEGGDGAKDLANAVVEASEAGNDFKFAYDVNDSIEDKIETLVKDIYGGEKVEFTRKAKAKIRKFKRHGHDKLPICMAKTQFSFSDDKKALGAPTGFTITIQDLTVSAGAGFIVAKSGNIMKMPGLPKEPAANRIDIDDQGNITGLF

SEQ ID NO: 1385 - DNA, 1719 bp, Alloiococcus otitidis; identical to SEQ ID NO: 1383
  CDS (46)..(1716)

SEQ ID NO: 1386 - protein, 557 aa, Alloiococcus otitidis
MLMKSDIEIAQEATGLPIEEVADKLGIKHDLLEPYGNDKAKVDFTKLDLDAANFGKLVLVTAITPTPAGEGKTTTSIGLVDGLNKIGKKAAVAMREPSLGPVFGVKGGAAGGGYSQVIPMEDINLHFTGDLHAIGIATNLIAALIDNHIHHGNELDIDVNRIEWRRVVDMNDRQLRNIANGLGRRADGVPREDGYDIVVASEIMAALCLSDSLSELKEKIGKMVVAYNHDNDPVTVADLQGQGAAAALLKEAIKPNLVQTLEGNPAFVHGGPFANIAHGCSSVLATKVAMAHADYTVTEGGFGADLGAEKFIDIKARQADIKPDTAVVVATIRALKMHGGVDKKELETENVQALRDGMPNLVRHVNNLKNVFGINPIVAINQFPTDTDDEIQALKEECEKEDIKVVLATNFAEGGDGAKDLANAVVEASEAGNDFKFAYDVNDSIEDKIETLVKDIYGGEKVEFTRKAKAKIRKFKRHGHDKLPICMAKTQFSFSDDKKALGAPTGFTITIQDLTVSAGAGFIVAKSGNIMKMPGLPKEPAANRIDIDDQGNITGLF

SEQ ID NO: 1387 - DNA, 1719 bp, Alloiococcus otitidis; identical to SEQ ID NO: 1383
  CDS (10)..(1716)

SEQ ID NO: 1388 - protein, 569 aa, Alloiococcus otitidis
MAQVKTAEIGGVLLMKSDIEIAQEATGLPIEEVADKLGIKHDLLEPYGNDKAKVDFTKLDLDAANFGKLVLVTAITPTPAGEGKTTTSIGLVDGLNKIGKKAAVAMREPSLGPVFGVKGGAAGGGYSQVIPMEDINLHFTGDLHAIGIATNLIAALIDNHIHHGNELDIDVNRIEWRRVVDMNDRQLRNIANGLGRRADGVPREDGYDIVVASEIMAALCLSDSLSELKEKIGKMVVAYNHDNDPVTVADLQGQGAAAALLKEAIKPNLVQTLEGNPAFVHGGPFANIAHGCSSVLATKVAMAHADYTVTEGGFGADLGAEKFIDIKARQADIKPDTAVVVATIRALKMHGGVDKKELETENVQALRDGMPNLVRHVNNLKNVFGINPIVAINQFPTDTDDEIQALKEECEKEDIKVVLATNFAEGGDGAKDLANAVVEASEAGNDFKFAYDVNDSIEDKIETLVKDIYGGEKVEFTRKAKAKIRKFKRHGHDKLPICMAKTQFSFSDDKKALGAPTGFTITIQDLTVSAGAGFIVAKSGNIMKMPGLPKEPAANRIDIDDQGNITGLF

SEQ ID NO: 1389 - DNA, 309 bp, Alloiococcus otitidis
  CDS (49)..(306)
gcctgggacaagggttcgaaatcacttgcatcccggtcaatcaactcgatgaagtggtccttgctttggtcatactggtcaatcgtgtcttttaagaaggccctctcttcatcagacatcttcttattggttgagaaccgcatagccatcaagatagcagcaattcctaaacttgccgtcacaccagcagctgcaccgccacctggtgttgggtcgttggaggctaacttgttgacaaagtcggttactttgagttctttcatcagggcaccacctaatctacatcatgcaatagcttggttcctttaa

SEQ ID NO: 1390 - protein, 86 aa, Alloiococcus otitidis
MKWSLLWSYWSIVSFKKALSSSDIFLLVENRIAIKIAAIPKLAVTPAAAPPPGVGSLEANLLTKSVTLSSFIRAPPNLHHAIAWFL

SEQ ID NO: 1391 - DNA, 900 bp, Alloiococcus otitidis
  CDS (46)..(897)
ttggtccttttgacaaaattaaaacaaagagttaggaggcaaaatatggctaaaattttagatggcaaggaagttgccaaggccatccgtgccaaggcaaaagaagatgcccaagccctcaatgaaaagggaattgagcccaagttggctgttttgcgtgtggacgaaaatgagtcctccaaggcttacgagaaatctgccatcaagcagatggaaaaatgcggcattaaagctgaagcccacactgaacttggggttgaaagcactgaagatatgcttgaagtcattgacaagttaaaccaagatgactccattactggcattatctgcatgcaacccttcccagaaggtattgaccgggctcaagtggccgaaaaactccatccctttaaggacgtggatgccttaaaccctgtcaacctagggaaattattaaacaatgacccttcagctatggctccttccactgcccaagcagtgattgagatcttagactattatgactatgacttagaaggtgctgaagttgcggttgtcggttctagcccagtcgttggtaagcccttacaagtcatgttaaccaaccgcaatgcgacaatttctaacacccatgtctacaccaaagacaattccatccacaccaaattagctgacattttagtttcagcaacgggtgctttgggactgattggccctgacctggtgaaagacggtgcaactgtgattgatgttggctttggttacaaggacggcaaggcaacaggggacgttcgctttgacgaagtagaacccaaagcttcagctattaccccagtccctggtggtgttggctcagtcactacagccgttttagcttcccaagtgattaaaggaaccaagctattgcatgatgtagattag

SEQ ID NO: 1392 - protein, 284 aa, Alloiococcus otitidis
MAKILDGKEVAKAIRAKAKEDAQALNEKGIEPKLAVLRVDENESSKAYEKSAIKQMEKCGIKAEAHTELGVESTEDMLEVIDKLNQDDSITGIICMQPFPEGIDRAQVAEKLHPFKDVDALNPVNLGKLLNNDPSAMAPSTAQAVIEILDYYDYDLEGAEVAVVGSSPVVGKPLQVMLTNRNATISNTHVYTKDNSIHTKLADILVSATGALGLIGPDLVKDGATVIDVGFGYKDGKATGDVRFDEVEPKASAITPVPGGVGSVTTAVLASQVIKGTKLLHDVD

SEQ ID NO: 1393 - DNA, 900 bp, Alloiococcus otitidis; identical to SEQ ID NO: 1391
  CDS (1)..(897)

SEQ ID NO: 1394 - protein, 299 aa, Alloiococcus otitidis
MVLLTKLKQRVRRQNMAKILDGKEVAKAIRAKAKEDAQALNEKGIEPKLAVLRVDENESSKAYEKSAIKQMEKCGIKAEAHTELGVESTEDMLEVIDKLNQDDSITGIICMQPFPEGIDRAQVAEKLHPFKDVDALNPVNLGKLLNNDPSAMAPSTAQAVIEILDYYDYDLEGAEVAVVGSSPVVGKPLQVMLTNRNATISNTHVYTKDNSIHTKLADILVSATGALGLIGPDLVKDGATVIDVGFGYKDGKATGDVRFDEVEPKASAITPVPGGVGSVTTAVLASQVIKGTKLLHDVD

SEQ ID NO: 1395 - DNA, 456 bp, Alloiococcus otitidis
  CDS (22)..(453)
tgtagattaggtggtgccctgatgaaagaactcaaagtaaccgactttgtcaacaagttagcctccaacgacccaacaccaggtggcggtgcagctgctggtgtgacggcaagtttaggaattgctgctatcttgatggctatgcggttctcaaccaataagaagatgtctgatgaagagagggccttcttaaaagacacgattgaccagtatgaccaaagcaaggaccacttcatcgagttgattgaccgggatgcaagtgatttcgaacccttgtcccaggcttatggcctgcctaaggagacagacgaggaaaaagaaaaacggaaggctgctatccaagaaggcctgaaaacaggccagccagcctccggtagaactcttagaagaagtggaggccgtttgccaagatctagaaaaagttgtccctttgatcaagaaaagcattatttctga

SEQ ID NO: 1396 - protein, 144 aa, Alloiococcus otitidis
MKELKVTDFVNKLASNDPTPGGGAAAGVTASLGIAAILMAMRFSTNKKMSDEERAFLKDTIDQYDQSKDHFIELIDRDASDFEPLSQAYGLPKETDEEKEKRKAAIQEGLKTGQPASGRTLRRSGGRLPRSRKSCPFDQEKHYF

SEQ ID NO: 1397 - DNA, 297 bp, Alloiococcus otitidis
  CDS (112)..(294)
aaacaggccagccagcctccggtagaactcttagaagaagtggaggccgtttgccaagatctagaaaaagttgtccctttgatcaagaaaagcattatttctgaccttggtgtgggcgtgcaaatgctccggtcagccatctactcttcttcccttaacttaaacattaatgccggtcaattgaaggacccggacttgagtcaagactaccggcaactcgcaacagacaaggttgaccaattagcccaaacacttgatacgatctaccaacaagttcaagctattttagctgactaa

SEQ ID NO: 1398 - protein, 61 aa, Alloiococcus otitidis
MGVQMLRSAIYSSSLNLNINAGQLKDPDLSQDYRQLATDKVDQLAQTLDTIYQQVQAILAD

SEQ ID NO: 1399 - DNA, 297 bp, Alloiococcus otitidis; identical to SEQ ID NO: 1397
  CDS (40)..(294)

SEQ ID NO: 1400 - protein, 85 aa, Alloiococcus otitidis
MEAVCQDLEKVVPLIKKSIISDLGVGVQMLRSAIYSSSLNLNINAGQLKDPDLSQDYRQLATDKVDQLAQTLDTIYQQVQAILAD

SEQ ID NO: 1401 - DNA, 276 bp, Alloiococcus otitidis
  CDS (4)..(273)
atcatgtcgtcaagcataccgccatcatctttaatgattgcagtgtattgtgccttaccgtcttctttgattttacgggtgtcattggtgatgatggtgttgaaccagtcaaaggcattttctttgcctgatttaacgacaatctcacccatgtgggaagtgtcgaaaataccaactttttcacgaactgcatcgtgttcttcttggattttagtgaattggattggaaggccccagccaccaaagtcggtgatttttagacccttatcaaggtag

SEQ ID NO: 1402 - protein, 90 aa, Alloiococcus otitidis
MSSSIPPSSLMIAVYCALPSSLILRVSLVMMVLNQSKAFSLPDLTTISPMWEVSKIPTFSRTASCSSWILVNWIGRPQPPKSVIFRPLSR

SEQ ID NO: 1403 - DNA, 1182 bp, Alloiococcus otitidis
  CDS (46)..(1179)
ctgactaagttagtccaatacggaacaatacaaaggagagatcatatgtctgaagcacaatttgacgaaaacggattgaaaaaaacgcctctatacgattactaccttgataagggtctaaaaatcaccgactttggtggctggggccttccaatccaattcactaaaatccaagaagaacacgatgcagttcgtgaaaaagttggtattttcgacacttcccacatgggtgagattgtcgttaaatcaggcaaagaaaatgcctttgactggttcaacaccatcatcaccaatgacacccgtaaaatcaaagaagacggtaaggcacaatacactgcaatcattaaagatgatggcggtatgcttgacgacatgatttactaccgggttaacaaagacgaattagttgccactccaaatggtgccaacactgacaaaatttacgaatggttggttgaccacaacaaagacggtgctgttgaagttgtcaacgaaacctttgactggggcttaattccagttcaaggaccaaatgccgaagaattggttagccgcttaactgatgctgacctggcttccattgaatactactcttacttgcctgaccaaaccctagctggtgttgataatgttcaaatttcacgtaccggctatactggtgaagcaggtttcgagctttacattccttacgatgatgtcctaaccgtttggaacaaattgctggaagaaggccaagacttaggcgtaactgaatgtgcccttggtgctcgtgacacccttcgtcttgaagcaggacttccactttacggtaacgactttgacgagtcggttaacccagttgctggtggggttgcctttgcagtgcctaagaaaaaagaagttgactacgttggccgcgacgctattgttgcttaccgtgaaggtgaccaagttaaagaaacttctcgtggtttcactgttgacggcacaaaaattccgcgacaaggcatggacgttaaaaacaaagacggcgaaaaaattggtgtggtaacttctgcaaccaaatcaccaacattcggtaacccaattggtttcatccgactcgaccgttcttacaaaccaggagacaccgttattatcgatgttcgtggtaaagacgttgaagcaacattgaacaaaaaagattggcttgacaacaaataa

SEQ ID NO: 1404 - protein, 378 aa, Alloiococcus otitidis
MSEAQFDENGLKKTPLYDYYLDKGLKITDFGGWGLPIQFTKIQEEHDAVREKVGIFDTSHMGEIVVKSGKENAFDWFNTIITNDTRKIKEDGKAQYTAIIKDDGGMLDDMIYYRVNKDELVATPNGANTDKIYEWLVDHNKDGAVEVVNETFDWGLIPVQGPNAEELVSRLTDADLASIEYYSYLPDQTLAGVDNVQISRTGYTGEAGFELYIPYDDVLTVWNKLLEEGQDLGVTECALGARDTLRLEAGLPLYGNDFDESVNPVAGGVAFAVPKKKEVDYVGRDAIVAYREGDQVKETSRGFTVDGTKIPRQGMDVKNKDGEKIGVVTSATKSPTFGNPIGFIRLDRSYKPGDTVIIDVRGKDVEATLNKKDWLDNK

SEQ ID NO: 1405 - DNA, 369 bp, Alloiococcus otitidis
  CDS (7)..(366)
ttaattatggcagaagtatattatacagaagatcacgattggattgaaatcctagaaggtaagaaagcgcgtgttggtattagtgaatacgcagcagaagaattaggtgacattgttcacgttgaacttccagaagttgacgatgaattcgatgctgacgaagagatcgggacagttgaatctgttaaatccttctcagaagtcgtccttccatttgctgtcaaagtaactaaaatcaacgaagacctagaagacgaacctgaaattgtcaacgaagatcctgaaggtaaaggttggttcttcgaagtcgaagcagaagatgaaattgacacatctgacttatcaactgaagacgacacagacgaataa

SEQ ID NO: 1406 - protein, 120 aa, Alloiococcus otitidis
MAEVYYTEDHDWIEILEGKKARVGISEYAAEELGDIVHVELPEVDDEFDADEEIGTVESVKSFSEVVLPFAVKVTKINEDLEDEPEIVNEDPEGKGWFFEVEAEDEIDTSDLSTEDDTDE

SEQ ID NO: 1407 - DNA, 1461 bp, Alloiococcus otitidis
  CDS (112)..(1458)
cgttttccgtccttgagactaggtccttctgtggcgaccaaccagcctaacccagatactatttggcataagatcattgcagagaacgaaatcaaacataaggagtgtagaatggtgcattttagatatttaccaaatacagataaagaccgcgaggaaatgttagatgtcattggcgccaaagatattatggacctctaccgggacgttcctgaagaagtccaacgtaaagagccaatgaacttgcctaagcctttgtcagaatatgaattgctaaaagaagctaaccgactagcttccaaaaacacaacttctaaccaagttccattcttcttaggtgcaggggtttatgaccaccatgtgcctacagttgtgaaacacgttattatgcgtcaagaattcttgactgcttatgtcccttaccaaccagaagtttcccaaggtgaactccaagccttgttcgaatggcaaaccatggtagctgagttaactggtatggacctagccaactctggtctatacgatggctacactgctatcggtgaagccaacaacctagctatcggtcaagtccgtaagtcagacaaggtcttgatttccaaagccgttaacccacaagggatccaaaccgcaaaaacttacggctttggtaaaaactatgacgttgaagaagttgaattaaatggggatatcaccgacctcgacgacttgaaagctaaacttgataaaaatgtagctgctgttgtcgtccaataccctaacttcttcggttctgttgaagacttaaaagcgatcaaagacctacttgaagactacaaaaccctacttgttgtttcaagtaacccacttgctcttgctaagttggaagcaccaggccacttgggtgctgacattgtcgttgggaacatccaaccatttggtatcccaatgcaattaggtggccctcacagtggttacttcgcagttaccaaaaaattaatgcgtaaggtaccatcccgtctcgttggggaatctgttgatgaagaaggcaaacgtggtttctccatggccttgtccactcgtgagcaacacatccgtcgtgaaaaagcgacatccaactattcttccaaccaagccctctttgccctagcttcagcagttgccttagctgcttacggtaaacaaggggtccaagaacttgctcaacgcaacattaacaatggtcactacttggctaaacagctacaagacaaaggttttgaacttcttaacagccgtccattcttcaacgaatttaccatcaagttagacaaagacgttgaagaagttaacaaagccctttacgacaaaggctatgtgggtggctacgatgcttcagatgcactggaacaagagggtgcctacttgcttgtggcaactgaaaaacgaacaaaagaagaaatcgacgactttgttcaagctttagcggaggtggctaaataa

SEQ ID NO: 1408 - protein, 449 aa, Alloiococcus otitidis
MVHFRYLPNTDKDREEMLDVIGAKDIMDLYRDVPEEVQRKEPMNLPKPLSEYELLKEANRLASKNTTSNQVPFFLGAGVYDHHVPTVVKHVIMRQEFLTAYVPYQPEVSQGELQALFEWQTMVAELTGMDLANSGLYDGYTAIGEANNLAIGQVRKSDKVLISKAVNPQGIQTAKTYGFGKNYDVEEVELNGDITDLDDLKAKLDKNVAAVVVQYPNFFGSVEDLKAIKDLLEDYKTLLVVSSNPLALAKLEAPGHLGADIVVGNIQPFGIPMQLGGPHSGYFAVTKKLMRKVPSRLVGESVDEEGKRGFSMALSTREQHIRREKATSNYSSNQALFALASAVALAAYGKQGVQELAQRNINNGHYLAKQLQDKGFELLNSRPFFNEFTIKLDKDVEEVNKALYDKGYVGGYDASDALEQEGAYLLVATEKRTKEEIDDFVQALAEVAK

SEQ ID NO: 1409 - DNA, 1461 bp, Alloiococcus otitidis; identical to SEQ ID NO: 1407
  CDS (31)..(1458)

SEQ ID NO: 1410 - protein, 476 aa, Alloiococcus otitidis
MATNQPNPDTIWHKIIAENEIKHKECRMVHFRYLPNTDKDREEMLDVIGAKDIMDLYRDVPEEVQRKEPMNLPKPLSEYELLKEANRLASKNTTSNQVPFFLGAGVYDHHVPTVVKHVIMRQEFLTAYVPYQPEVSQGELQALFEWQTMVAELTGMDLANSGLYDGYTAIGEANNLAIGQVRKSDKVLISKAVNPQGIQTAKTYGFGKNYDVEEVELNGDITDLDDLKAKLDKNVAAVVVQYPNFFGSVEDLKAIKDLLEDYKTLLVVSSNPLALAKLEAPGHLGADIVVGNIQPFGIPMQLGGPHSGYFAVTKKLMRKVPSRLVGESVDEEGKRGFSMALSTREQHIRREKATSNYSSNQALFALASAVALAAYGKQGVQELAQRNINNGHYLAKQLQDKGFELLNSRPFFNEFTIKLDKDVEEVNKALYDKGYVGGYDASDALEQEGAYLLVATEKRTKEEIDDFVQALAEVAK

SEQ ID NO: 1411 - DNA, 1461 bp, Alloiococcus otitidis; identical to SEQ ID NO: 1407
  CDS (13)..(1458)

SEQ ID NO: 1412 - protein, 482 aa, Alloiococcus otitidis
MRLGPSVATNQPNPDTIWHKIIAENEIKHKECRMVHFRYLPNTDKDREEMLDVIGAKDIMDLYRDVPEEVQRKEPMNLPKPLSEYELLKEANRLASKNTTSNQVPFFLGAGVYDHHVPTVVKHVIMRQEFLTAYVPYQPEVSQGELQALFEWQTMVAELTGMDLANSGLYDGYTAIGEANNLAIGQVRKSDKVLISKAVNPQGIQTAKTYGFGKNYDVEEVELNGDITDLDDLKAKLDKNVAAVVVQYPNFFGSVEDLKAIKDLLEDYKTLLVVSSNPLALAKLEAPGHLGADIVVGNIQPFGIPMQLGGPHSGYFAVTKKLMRKVPSRLVGESVDEEGKRGFSMALSTREQHIRREKATSNYSSNQALFALASAVALAAYGKQGVQELAQRNINNGHYLAKQLQDKGFELLNSRPFFNEFTIKLDKDVEEVNKALYDKGYVGGYDASDALEQEGAYLLVATEKRTKEEIDDFVQALAEVAK

SEQ ID NO: 1413 - DNA, 1494 bp, Alloiococcus otitidis
  CDS (4)..(1491)
ataatgttaattcaggactatgataaattaatttttgaaatttctactgaaggccatactgcttatgaccttcctgccagtgaaatcgaggattacgatttagactcagaactgggcgattactcccgtaaagaaccagcaagactcccagaagtgtcagagttgcaattactccgccactacactgccttgtctaaccgtaacttcggggttgaatcaggaccttacccactcggctcctgcaccatgaaatacaacccgaaagtcaacgaagaagtggctgctttagatggcttttcaaacatccaccccaaccaagaccctgaatctattcaaggggcaatggagttgatgtataaccttcaagaatacttgaaagaaattactcaatttgatgcggttaccttgcaaccagcagcaggtgcccacggtgagttggcttctatcctaaccttcaaagcttactttgaagcaatcggtgaaggcgaccaacgtaaaaccatccttatcccagacactgcccacgggaccaacccagctactgcagtggttgccggctatgacattgtcgaactcccttcaagagaagatggtttgattgacgtggaagctgttagagaagcagctggacctgatgttgcaggtatcatggtaaccaacccatccactgctggtctctttgaacaagatgccaaagaaattgcagacatcatccacgaagctggtggacttgtcttctacgacggtgcgaacttgaacgccatcatgggaatttcctctccagcagcaatgggctttgacgcttgccacatgaacttgcacaaaacctttaccggccctcacggtggtggtggaccaggttcaggcccaatcggtgtggtcgaaaaactagcaccatatattcctggaccaaacgtggtcaaagatggcgacaaatacgtctttgaaacaccagaaaaatcttacggccgaatcaaaggtgactttggtaactttggtgttaatgtccgtgcttacaactacatccgagcaatgggacctgaaggcttgcgtcgtgcttctgaagatgcggtcttaaatgccaactacctccgtgcccgggtcaaagaccactacaatgctccatttgaccaatttaacaaaaacgactttgtccttgacttgaccaacttcaagaaagaatacgatgttgtggccaaagatgtagggaaacgtctccttgactacggtgtccacgcaccaaccacctacttcccacttatcatccaagaatgcctcatggttgagccgactgatacagagtctaaacgcgaccttgactatacagctgatgtcttcatcaaaattgcggaagaaatcaaagaagatccagaactggttaaatcagctccatacaacaccccagttcgccgtatcgatgaagctcaaacctcacgtaaaccaatcttgaaatacaattttgaagaccacgaatcaccagcagacagcaagtaa

SEQ ID NO: 1414 - protein, 496 aa, Alloiococcus otitidis
MLIQDYDKLIFEISTEGHTAYDLPASEIEDYDLDSELGDYSRKEPARLPEVSELQLLRHYTALSNRNFGVESGPYPLGSCTMKYNPKVNEEVAALDGFSNIHPNQDPESIQGAMELMYNLQEYLKEITQFDAVTLQPAAGAHGELASILTFKAYFEAIGEGDQRKTILIPDTAHGTNPATAVVAGYDIVELPSREDGLIDVEAVREAAGPDVAGIMVTNPSTAGLFEQDAKEIADIIHEAGGLVFYDGANLNAIMGISSPAAMGFDACHMNLHKTFTGPHGGGGPGSGPIGVVEKLAPYIPGPNVVKDGDKYVFETPEKSYGRIKGDFGNFGVNVRAYNYIRAMGPEGLRRASEDAVLNANYLRARVKDHYNAPFDQFNKNDFVLDLTNFKKEYDVVAKDVGKRLLDYGVHAPTTYFPLIIQECLMVEPTDTESKRDLDYTADVFIKIAEEIKEDPELVKSAPYNTPVRRIDEAQTSRKPILKYNFEDHESPADSK

SEQ ID NO: 1415 - DNA, 531 bp, Alloiococcus otitidis
  CDS (67)..(528)
atcgtcacaggcatccgccatggcgtccacaataccccatctgcctttaatagtcagacaagtcgtgtggtcgttctcttcgatgaagcgaagacaaaattctgggaccacatttacgagacccaaaaagatcttttgcctgaacaatctaaagacttcttgttaggtgctattgaaaatgctagagatgaagctttaggaacagcgctcgtatttgaagaccacgaagccctagaccaaatgcccgcgaatgaaaatcggaccaatgtctacaaagaccagaactcagccatggtccactatgcaatttggttgcgcttaaaagaattgaacctaggtgctagcttgcagcactttaacctgggctatgagcagggctttgatgcggaaaccagaaaaatgtttgacctacctgatacttacgaactagttgctgagcttccatttggttccatcaatgaaccagcccaagaaaaagaccacattgacacccacaaggaagttcaagttcgaatcgaaacttcaaactaa

SEQ ID NO: 1416 - protein, 154 aa, Alloiococcus otitidis
MVVLFDEAKTKFWDHIYETQKDLLPEQSKDFLLGAIENARDEALGTALVFEDHEALDQMPANENRTNVYKDQNSAMVHYAIWLRLKELNLGASLQHFNLGYEQGFDAETRKMFDLPDTYELVAELPFGSINEPAQEKDHIDTHKEVQVRIETSN

SEQ ID NO: 1417 - DNA, 456 bp, Alloiococcus otitidis
  CDS (31)..(453)
ttgaatcctgctttaataattggtatatttatggttagaaaaatgattgattacgggggagcgactagtatggcagtttggattttgcaaataatcattggcctcgtcctctttgccatccactacggtgtcatgactaggctcacccccctggtctaccgcccgcaattcaagtggtatagcattgtcatttttgccttgctccttttaacccaggcctggacttggttctttacttggcccgaaagtttctcaaccatcttgcctttaaccatgtatgccagtattttcgctcctttatttggggttttgatctaccgggtctttcgctacctgaccaacccagaccgagacttgcaagtgaaatggcgtaacctcatgctctttacctatatcttactcttgcttatattgttatattttggctacttcgttttcgacttaatcttttactag

SEQ ID NO: 1418 - protein, 141 aa, Alloiococcus otitidis
MVRKMIDYGGATSMAVWILQIIIGLVLFAIHYGVMTRLTPLVYRPQFKWYSIVIFALLLLTQAWTWFFTWPESFSTILPLTMYASIFAPLFGVLIYRVFRYLTNPDRDLQVKWRNLMLFTYILLLLILLYFGYFVFDLIFY

SEQ ID NO: 1419 - DNA, 456 bp, Alloiococcus otitidis; identical to SEQ ID NO: 1417
  CDS (1)..(453)

SEQ ID NO: 1420 - protein, 151 aa, Alloiococcus otitidis
MNPALIIGIFMVRKMIDYGGATSMAVWILQIIIGLVLFAIHYGVMTRLTPLVYRPQFKWYSIVIFALLLLTQAWTWFFTWPESFSTILPLTMYASIFAPLFGVLIYRVFRYLTNPDRDLQVKWRNLMLFTYILLLLILLYFGYFVFDLIFY

SEQ ID NO: 1421 - DNA, 540 bp, Alloiococcus otitidis
  CDS (85)..(537)
atacttatctccttgagccttaaaaaaacagtccctggctgggttttccgaaaaggcatcatacacttccagcccaacttcataatggtcctggtcaatggaaggaccgacaaaagccaggacatcttctggccgagacccgtattgttcgaccatcagctggagggccttatgagaaatttgcttggctgtcccccgccagccagaatggaccaaggcttgggcccggttgaccgggtcataaaggaggactggggtgcagtcagcaaacttaaccagcaaggcaacattgctatagtcggtcaccaaaccatctgcttggtcaaagtggcggccaataatgtaagggtccccagatacaaggtcagccagtcggacttggtcagtgtggtcctgcttgagcgagtatacctccctgggttggacccccatttcatccagggcccggttgacttcctcaataagctggtcgccaattttagcctggcggaaattatagccctggccaaaaatttgatgggccaggccaagatctcttaa

SEQ ID NO: 1422 - protein, 151 aa, Alloiococcus otitidis
MVLVNGRTDKSQDIFWPRPVLFDHQLEGLMRNLLGCPPPARMDQGLGPVDRVIKEDWGAVSKLNQQGNIAIVGHQTICLVKVAANNVRVPRYKVSQSDLVSVVLLERVYLPGLDPHFIQGPVDFLNKLVANFSLAEIIALAKNLMGQAKIS

SEQ ID NO: 1423 - DNA, 540 bp, Alloiococcus otitidis; identical to SEQ ID NO: 1421
  CDS (13)..(537)

SEQ ID NO: 1424 - protein, 175 aa, Alloiococcus otitidis
MSLKKTVPGWVFRKGIIHFQPNFIMVLVNGRTDKSQDIFWPRPVLFDHQLEGLMRNLLGCPPPARMDQGLGPVDRVIKEDWGAVSKLNQQGNIAIVGHQTICLVKVAANNVRVPRYKVSQSDLVSVVLLERVYLPGLDPHFIQGPVDFLNKLVANFSLAEIIALAKNLMGQAKIS

SEQ ID NO: 1425 - DNA, 798 bp, Alloiococcus otitidis
  CDS (67)..(795)
taccgaccaaagattcattcatggtatactaggctaaatgaccgacttaggggagagagtgagtacatgttttccaaacgtttaagagatcttggcctggcccatcaaatttttggccagggctataatttccgccaggctaaaattggcgaccagcttattgaggaagtcaaccgggccctggatgaaatgggggtccaacccagggaggtatactcgctcaagcaggaccacactgaccaagtccgactggctgaccttgtatctggggacccttacattattggccgccactttgaccaagcagatggtttggtgaccgactatagcaatgttgccttgctggttaagtttgctgactgcaccccagtcctcctttatgacccggtcaaccgggcccaagccttggtccattctggctggcgggggacagccaagcaaatttctcataaggccctccagctgatggtcgaacaatacgggtctcggccagaagatgtcctggcttttgtcggtccttccattgaccaggaccattatgaagttgggctggaagtgtatgatgccttttcggaaaacccagccagggactgtttttttaaggctcaaggagataagtatttactgagtatgacccaagccaaccaggccttgctccttcaagcgggactgaaagaaaaaaatattgaagtctgtcaagtatcgacttacaacgatgaccgccttcactcggcccgtcagatggggccagactaccagcttaacgccatggtttccatgatcagcccccaagcttag

SEQ ID NO: 1426 - protein, 243 aa, Alloiococcus otitidis
MFSKRLRDLGLAHQIFGQGYNFRQAKIGDQLIEEVNRALDEMGVQPREVYSLKQDHTDQVRLADLVSGDPYIIGRHFDQADGLVTDYSNVALLVKFADCTPVLLYDPVNRAQALVHSGWRGTAKQISHKALQLMVEQYGSRPEDVLAFVGPSIDQDHYEVGLEVYDAFSENPARDCFFKAQGDKYLLSMTQANQALLLQAGLKEKNIEVCQVSTYNDDRLHSARQMGPDYQLNAMVSMISPQA

SEQ ID NO: 1427 - DNA, 657 bp, Alloiococcus otitidis
  CDS (4)..(654)
aagatgaaatttttcctagataccgcaaatgttgaagaaattaagcgtgtcaacgacttaggactagtggatggtgtcaccaccaaccccagcctgatctccaaagaaggccgtccatttgaagaagtgatcaaagaaatctgtagcgtagtggatggtccggtttcagcagaagtggtcggcttgacctatgacgaaatggtggcggaagcccgccaacttgcgcaatgggccgacaatgtggtagtgaaaattcccatgaccgaagacggattaaaagccgtcaacaccctatctcaagaaggaatcaagaccaatgtgaccttgatctttacggtctcccaaggcttaatggctgcgaaagcaggcgctacttatgtgagccccttcctagggagactggacgatatcgggtcagatggcctgggcttggtggctgacttgaaaacagtttttgacaattatgattacgacacagaaattatcgcagccagcatccgccacctgcctcacttggaagggtcagccttggccggtgctgatattgccactattcctggctctatcttccctaaactctggtcccaccccttgaccgactctggtatccaagccttcttagacgactggaaaaaatttgaagacagccaaaaataa

SEQ ID NO: 1428 - protein, 217 aa, Alloiococcus otitidis
MKFFLDTANVEEIKRVNDLGLVDGVTTNPSLISKEGRPFEEVIKEICSVVDGPVSAEVVGLTYDEMVAEARQLAQWADNVVVKIPMTEDGLKAVNTLSQEGIKTNVTLIFTVSQGLMAAKAGATYVSPFLGRLDDIGSDGLGLVADLKTVFDNYDYDTEIIAASIRHLPHLEGSALAGADIATIPGSIFPKLWSHPLTDSGIQAFLDDWKKFEDSQK

SEQ ID NO: 1429 - DNA, 411 bp, Alloiococcus otitidis
  CDS (16)..(408)
cgaaacaaagagaggatgctttccatgaagtttttacgttcgacactgggcttcttcttggccggtttgatggtcatgagtatctgggatgccttttttatcccatatggggtcttcgggggctttctagctgccttgattattatcttccctatgtggtacttgaaccactacattggccttatctacgaagcacccggggctggttatattgatatggggcttgggattggcatgtccggtcttttccgtgactttttcatgaacggggcggacttcggcctcttagctgagactttacccaccttgttatttgtgattgtcggtgcgattattggtgggattattgccgcagccatcgaaaatgatttgaaagcagatgaggactcagagaaaggcagtgaaggctaa

SEQ ID NO: 1430 - protein, 131 aa, Alloiococcus otitidis
MLSMKFLRSTLGFFLAGLMVMSIWDAFFIPYGVFGGFLAALIIIFPMWYLNHYIGLIYEAPGAGYIDMGLGIGMSGLFRDFFMNGADFGLLAETLPTLLFVIVGAIIGGIIAAAIENDLKADEDSEKGSEG

SEQ ID NO: 1431 - DNA, 351 bp, Alloiococcus otitidis
  CDS (7)..(348)
aggctaatgccattgacttcagctattacaaccatggttggggctgctcttttcccccttatgattcgtttggtatggggcaggttcgtcgatgacatcggtccacttggtggactcttggcagctggttttatcgttggcctgatgtggttggttaaccacggtattccctcaggtggccttattgtccaaaccggtgcctgggtggacatgggtcttgctgctggggtgggttgcttgaccgcagaccttttgaccagtgaccacaaatttgcaggggccctgccaaaaattctagcagccatcctaggcggtcttttagccggacttgttttatcctttgccctttaa

SEQ ID NO: 1432 - protein, 114 aa, Alloiococcus otitidis
MPLTSAITTMVGAALFPLMIRLVWGRFVDDIGPLGGLLAAGFIVGLMWLVNHGIPSGGLIVQTGAWVDMGLAAGVGCLTADLLTSDHKFAGALPKILAAILGGLLAGLVLSFAL

SEQ ID NO: 1433 - DNA, 1530 bp, Alloiococcus otitidis
  CDS (22)..(1527)
acaagcgaaaggacaagtgtcatggaagaatacatcctaaccattgaccaggggacgaccagttcccgggcagtcatttataataaaaaagcagaaactgtcgggagttcgcaaaaagaatttccccaatacttccctcaagacggttgggtcgagcacaatgctaatgaaatttggaattccgtccagtctgttatcgccggagcctttatcgaaagtggtatccagcccaagcagattgccggcattgggatcaccaaccagcgtgaaaccaccgtcatctgggacaagggaaccggcaagccagtttacaatgccgtggtctggcagtcccggcaaaccgcccacattgctaaccaactgatcaacgatggctaccaagacttgatccatcaaaagacaggtctcattatcgatgcctacttttcagcgaccaaggtgcggtggatcctagaccaaattgaaaatggtcaggaaagagctgaaaatggtgaactcctatttgggaccatagatacctggttggtttggaagttgaccaatggcgcggcccatgtgaccgactacaccaatgcagcccggaccatgctttttaacattaaggacttagaatgggaccaggaaatcttggatatcttgaatattccaaaggtcatgctaccggaagtccggtctaactctgaaatttacgggaaaaccgtttccttccacttctttggcaaggaagttcccatctccggcatggctggggaccagcaagcagccctctttgggcaaatggcctttaaccctggtgaggtgaaaaacacctatgggaccggggctttcattatcatgaataccggccaggaattaagctactccaaaaacaacctcctcaccactattggctacgggattaacggcaagatcaactatgccctagaagggtcgatctttgtcgccgggtcagccatccagtggatccgggacggtctggacatgattgaggactcagcagagtccgaaaacttggccaatgaatccaaaaataatgatgaggtctatattgtcccagcctttaccggtctcggagctccttactggaattccaatgccagggggtctgtctttggcctcacccgggctaccagcaaggcagactttgtcaaagctaccctccagtctttggcctaccaaacccgggacgtgattgataccatgatcaaggactccgaagtggacattgccttcttgaaggtggacgggggagcggccctcaacaactacctcatgcagttccaagcagacatcttaggggttgaaatcaagcgggccaaaaacttggaaaccaccgccttaggtgcagcctacctagctggtttggctgtgggatactgggaggacctggaagaattgcagaacttacaagaagtaggccaatcgtttgaacccaagatgaacgatgctaagaaggaaaagctctacaagggttggaaaaaagcagttgcagcgacagaaaaatttgctgaaatagatccagaagactag

SEQ ID NO: 1434 - protein, 502 aa, Alloiococcus otitidis
MEEYILTIDQGTTSSRAVIYNKKAETVGSSQKEFPQYFPQDGWVEHNANEIWNSVQSVIAGAFIESGIQPKQIAGIGITNQRETTVIWDKGTGKPVYNAVVWQSRQTAHIANQLINDGYQDLIHQKTGLIIDAYFSATKVRWILDQIENGQERAENGELLFGTIDTWLVWKLTNGAAHVTDYTNAARTMLFNIKDLEWDQEILDILNIPKVMLPEVRSNSEIYGKTVSFHFFGKEVPISGMAGDQQAALFGQMAFNPGEVKNTYGTGAFIIMNTGQELSYSKNNLLTTIGYGINGKINYALEGSIFVAGSAIQWIRDGLDMIEDSAESENLANESKNNDEVYIVPAFTGLGAPYWNSNARGSVFGLTRATSKADFVKATLQSLAYQTRDVIDTMIKDSEVDIAFLKVDGGAALNNYLMQFQADILGVEIKRAKNLETTALGAAYLAGLAVGYWEDLEELQNLQEVGQSFEPKMNDAKKEKLYKGWKKAVAATEKFAEIDPED

SEQ ID NO: 1435 - DNA, 1872 bp, Alloiococcus otitidis
  CDS (40)..(1869)
atgagatggttatgtgaatacgatagaaaaggtgggtttatgaacttatcaatcaaaaatcgacaggaaagcctggaagctcttgccagcaagcactttgacctcttgatcattggcgggggaatcactggagcaggcctagccttgcaagcggcagcatcaggactggaaacagccctgattgagatgcaggactttgccgaagggacctccagccggtctaccaagttggtccacgggggaatccgctacttaaaaaactttgacgtagaagtggtttccgataccgtcacagaacgggcggttgtccaacaagttgccccccacattcccaaggctacccccatgttaatccccgtttttgacgaaaaaggggccacttttgacagcttccgcttgaaggtagccatggacctttatgactccttagctggggtcaacaatactgaccaggctaactatgaaatgacccgggatgaagtggctaaacgtttaccagaattgtccaaagagaatctcgttggaggcgggaactacctagactacagcaactcggatgtccgcctagtgattgaaaatatcaagaaggcccatgaagatggagccgttgtggtcagccgtgtcaaagccattgactatcttttggacgacaatggacgggttaaaggtgtcaaagctcgggaccaactcactggacagaacttggacattcaatcgcggacagtggttaatgcgtctggtccttggagtgaccaagtccgcaacctgtcagctactgacaaggaagaggaagtccaccagatgcggccgaccaagggggtccacttggtaattgatgactccctgctcaaggttcctcaacccatttattttgacacaggcttgaatgatggtcgaatggtctttgtcattcctcgcgaaaacaagacctactttggcaccactgataccgactaccatggcgacttaacccagccgagcgttagccaggaagacgtggactacctcttggatgtcgtcaaccgccgcttccctaaagccaatatcaagctaactgacgtggaatcctcctgggctggactccggcctcttatcgcgggcaactcgtcttccgactacaacgggggagacagtggtaagatcgaggaagaaagttttgaccgcttgatccaggtggtcaaagaatacctggaagaccaggctagccgggaagacgtggaagacaccgtggctaacttggaagggtccttgtctgaacaatccttagacccatcagaagtttcccggggcagcaagctagacgtggacgaaaatggtctcatcaccattgctggtgggaaaattaccgactaccggaagatggctgaaggtgccttgaaaaaagtggccgagatcttgcgagacgacttcaaccgaccattccgcttgattaactccaaaacctaccctgtttcaggtgggcaaattgacccagctaatgttcaaaatgaattggaccttcttgtgcagcaaggggtcgagcgaggctttaagcaaaaggatgcagagtacctcaccaatctttacgggtccaatgtggagaagatatattcctctaaaggggactttccggaagatgaccgcttagaaagccgctacctctactccctctactatgccttggcccatgaagccatcttgaccccagtcgacttcttcttaagacgaaccaacctcatgcttttcaagcgggaccaagtggacaagatggtagaacccgtcttggacatcatggctgactacctgggctggagtgaagaagaaaaggaccactaccaaaaagacctagcagaaaccctaaacaaaaacgacttgaagtacctgaaaaaataa

SEQ ID NO: 1436 - protein, 610 aa, Alloiococcus otitidis
MNLSIKNRQESLEALASKHFDLLIIGGGITGAGLALQAAASGLETALIEMQDFAEGTSSRSTKLVHGGIRYLKNFDVEVVSDTVTERAVVQQVAPHIPKATPMLIPVFDEKGATFDSFRLKVAMDLYDSLAGVNNTDQANYEMTRDEVAKRLPELSKENLVGGGNYLDYSNSDVRLVIENIKKAHEDGAVVVSRVKAIDYLLDDNGRVKGVKARDQLTGQNLDIQSRTVVNASGPWSDQVRNLSATDKEEEVHQMRPTKGVHLVIDDSLLKVPQPIYFDTGLNDGRMVFVIPRENKTYFGTTDTDYHGDLTQPSVSQEDVDYLLDVVNRRFPKANIKLTDVESSWAGLRPLIAGNSSSDYNGGDSGKIEEESFDRLIQVVKEYLEDQASREDVEDTVANLEGSLSEQSLDPSEVSRGSKLDVDENGLITIAGGKITDYRKMAEGALKKVAEILRDDFNRPFRLINSKTYPVSGGQIDPANVQNELDLLVQQGVERGFKQKDAEYLTNLYGSNVEKIYSSKGDFPEDDRLESRYLYSLYYALAHEAILTPVDFFLRRTNLMLFKRDQVDKMVEPVLDIMADYLGWSEEEKDHYQKDLAETLNKNDLKYLKK

SEQ ID NO: 1437 - DNA, 1872 bp, Alloiococcus otitidis; identical to SEQ ID NO: 1435
  CDS (1)..(1869)

SEQ ID NO: 1438 - protein, 623 aa, Alloiococcus otitidis
MRWLCEYDRKGGFMNLSIKNRQESLEALASKHFDLLIIGGGITGAGLALQAAASGLETALIEMQDFAEGTSSRSTKLVHGGIRYLKNFDVEVVSDTVTERAVVQQVAPHIPKATPMLIPVFDEKGATFDSFRLKVAMDLYDSLAGVNNTDQANYEMTRDEVAKRLPELSKENLVGGGNYLDYSNSDVRLVIENIKKAHEDGAVVVSRVKAIDYLLDDNGRVKGVKARDQLTGQNLDIQSRTVVNASGPWSDQVRNLSATDKEEEVHQMRPTKGVHLVIDDSLLKVPQPIYFDTGLNDGRMVFVIPRENKTYFGTTDTDYHGDLTQPSVSQEDVDYLLDVVNRRFPKANIKLTDVESSWAGLRPLIAGNSSSDYNGGDSGKIEEESFDRLIQVVKEYLEDQASREDVEDTVANLEGSLSEQSLDPSEVSRGSKLDVDENGLITIAGGKITDYRKMAEGALKKVAEILRDDFNRPFRLINSKTYPVSGGQIDPANVQNELDLLVQQGVERGFKQKDAEYLTNLYGSNVEKIYSSKGDFPEDDRLESRYLYSLYYALAHEAILTPVDFFLRRTNLMLFKRDQVDKMVEPVLDIMADYLGWSEEEKDHYQKDLAETLNKNDLKYLKK

SEQ ID NO: 1439 - DNA, 255 bp, Alloiococcus otitidis
  CDS (31)..(252)
aaatttaccaggagaaaggaaaatgaccatatggattattttgaggccaagcggaagaaagaacgagggatgagcaatgctgagttcttaaactattactaccctgaactggttaaaagcaagaccattgtgattgttaatattgatgaaaatgatattatctcaacctaccaaacctcagattcccagatccggagtgtgggcatgctagaaattgccaaaaagcaaattctagacgatatggaaaatgattag

SEQ ID NO: 1440 - protein, 74 aa, Alloiococcus otitidis
MDYFEAKRKKERGMSNAEFLNYYYPELVKSKTIVIVNIDENDIISTYQTSDSQIRSVGMLEIAKKQILDDMEND

SEQ ID NO: 1441 - DNA, 1536 bp, Alloiococcus otitidis
  CDS (43)..(1533)
actaaaggcgaaaagttgaccaagctaaacaaggaggaaaccatgctatttagccaggatgcaagttattatgccgaccaagtgaaaaagggccaagtcaccccgctggaattggtggaagcggccttggaaaatattagaaagctcaacccgaccttaaatgctgtcacgactgtcattgctgagaacgccctccaagaggccagggaaaaaactgccctcctaggcaagctaactcctgaccaaagagctgacctgccagccttttacgggatccccaccctactcaaggacctgggccaacacttgaagggggtccggtcaacttccggggccgaaattctccaggactttgtccctgatgccaccaaccactacacccaggccttgcttgatgcaggttttattgtcgtcgggaccagcaatacccctgaattcggcttcaagggcgtttcagattccaaggcaaacggccccgtccagtcccccttccaaactggctacaatccaggtgggtctagcgggggagcagccgcagccctcaagtccggcatggtccctatagccatggccagtgatgggggtgggtcggtccggataccagctagctataccggtttaatcggactcaaaccttcccggggccggatcattgtaggtccagatggctaccggggctggcaaggggcgacagttaactttggcctgacccggtctgtccgagatacctgggccctcttaaaggtccttcaagctgaacaatatgaagccccatttatggtccctaaaatcacccaggaagcattaaccgacttaaaccgcccccttaaaattgcttattccctcgaaggagttatgggccaggacctatctgacttggctcggtctgctatactttttgccaaggaccagctggaaagattgggtcacaacttaactgaagatgaccccggtcttgatattgccaaaagcttcaagggctattacatgatgaacaccattgaggcagccaatatgctagacggaatccaagaaagcttgggccgtcctattcaatttgaagatgtggagcctctaacctggttgatgagccaggctgggaaaaatgttaaggccactgccttaagccgagttttggatgagtgggaccaaactagtgtctatttagaaaaatttttccaaaaatacgatgccattatcttccctatcgccaatggtccagctcccaagcagggacaatttgacccggaccaagacttgattaaccagatcaaaaacattgaccgcctagacccagaccaacaacaagacctgctctgggaatatttcacacccagccacaattacatgggctttaactctcatattaacctggccggccaaccctccatcgcccttcccctctaccaaacagaccaaggttggcctattggagtccaaatatggtcccggaaaggtgcggactacctcctcctccaaatcgctaagcaagtcgaagaagctggccaactgaaaacagacattcaaaaggtatag

SEQ ID NO: 1442 - protein, 497 aa, Alloiococcus otitidis
MLFSQDASYYADQVKKGQVTPLELVEAALENIRKLNPTLNAVTTVIAENALQEAREKTALLGKLTPDQRADLPAFYGIPTLLKDLGQHLKGVRSTSGAEILQDFVPDATNHYTQALLDAGFIVVGTSNTPEFGFKGVSDSKANGPVQSPFQTGYNPGGSSGGAAAALKSGMVPIAMASDGGGSVRIPASYTGLIGLKPSRGRIIVGPDGYRGWQGATVNFGLTRSVRDTWALLKVLQAEQYEAPFMVPKITQEALTDLNRPLKIAYSLEGVMGQDLSDLARSAILFAKDQLERLGHNLTEDDPGLDIAKSFKGYYMMNTIEAANMLDGIQESLGRPIQFEDVEPLTWLMSQAGKNVKATALSRVLDEWDQTSVYLEKFFQKYDAIIFPIANGPAPKQGQFDPDQDLINQIKNIDRLDPDQQQDLLWEYFTPSHNYMGFNSHINLAGQPSIALPLYQTDQGWPIGVQIWSRKGADYLLLQIAKQVEEAGQLKTDIQKV

SEQ ID NO: 1443 - DNA, 1536 bp, Alloiococcus otitidis; identical to SEQ ID NO: 1441
  CDS (16)..(1533)

SEQ ID NO: 1444 - protein, 506 aa, Alloiococcus otitidis
MTKLNKEETMLFSQDASYYADQVKKGQVTPLELVEAALENIRKLNPTLNAVTTVIAENALQEAREKTALLGKLTPDQRADLPAFYGIPTLLKDLGQHLKGVRSTSGAEILQDFVPDATNHYTQALLDAGFIVVGTSNTPEFGFKGVSDSKANGPVQSPFQTGYNPGGSSGGAAAALKSGMVPIAMASDGGGSVRIPASYTGLIGLKPSRGRIIVGPDGYRGWQGATVNFGLTRSVRDTWALLKVLQAEQYEAPFMVPKITQEALTDLNRPLKIAYSLEGVMGQDLSDLARSAILFAKDQLERLGHNLTEDDPGLDIAKSFKGYYMMNTIEAANMLDGIQESLGRPIQFEDVEPLTWLMSQAGKNVKATALSRVLDEWDQTSVYLEKFFQKYDAIIFPIANGPAPKQGQFDPDQDLINQIKNIDRLDPDQQQDLLWEYFTPSHNYMGFNSHINLAGQPSIALPLYQTDQGWPIGVQIWSRKGADYLLLQIAKQVEEAGQLKTDIQKV

SEQ ID NO: 1445 - DNA, 315 bp, Alloiococcus otitidis
  CDS (91)..(312)
aaatacaaccctagaaaagctaaagcttacaagggttttttgtttggtgttccgggttttcgggggtatttattgggaccttccttcttcttgtcaattagaatgatgtggcgctccccaccatcttccggcaggtcaaaggccgcatcccccctaaccttcccccctaatgtagcaatggctgctttggcctcttccaactcttggggagccgaactcgccttcatagcaataaaggtcccgcctaacttgtttaggggaaggcacaactccgccaaaacattcatccgagccactgcccgagcggtggtgtag

SEQ ID NO: 1446 - protein, 74 aa, Alloiococcus otitidis
MSIRMMWRSPPSSGRSKAASPLTFPPNVAMAALASSNSWGAELAFIAIKVPPNLFRGRHNSAKTFIRATARAVV

SEQ ID NO: 1447 - DNA, 315 bp, Alloiococcus otitidis; identical to SEQ ID NO: 1445
  CDS (40)..(312)

SEQ ID NO: 1448 - protein, 91 aa, Alloiococcus otitidis
MFGVPGFRGYLLGPSFFLSIRMMWRSPPSSGRSKAASPLTFPPNVAMAALASSNSWGAELAFIAIKVPPNLFRGRHNSAKTFIRATARAVV

SEQ ID NO: 1449 - DNA, 717 bp, Alloiococcus otitidis
  CDS (1)..(714)
atggacgttcaagcttttcaaaaacaggtaaaagcagacggttttgaccttaaccaggaccagttagaccaatttgaccggtatttaaagctcttgcaaagatggaatgaaaaggtgaacctaactgccatcacccagtcagaagaggtctacttaaagcatttttacgactccatctgcctggccaagtatgtggacctagcctctagcgactttagtctatgcgatgtagggtctggagctggcttcccttccttgcccttgaaaattttgtttcccaatctaagggtgaccattgtggactccttgagaaaacggattgacttcttgaaggtcttggtggaagaattgggcttgactggcgtggacctctaccatgaccgagccgagacttttggccagaacaaggacttccgggcttcctttgactacaccaccgctcgggcagtggctcggatgaatgttttggcggagttgtgccttcccctaaacaagttaggcgggacctttattgctatgaaggcgagttcggctccccaagagttggaagaggccaaagcagccattgctacattaggggggaaggttaggggggatgcggcctttgacctgccggaagatggtggggagcgccacatcattctaattgacaagaagaaggaaggtcccaataaatacccccgaaaacccggaacaccaaacaaaaaacccttgtaa

SEQ ID NO: 1450 - protein, 238 aa, Alloiococcus otitidis
MDVQAFQKQVKADGFDLNQDQLDQFDRYLKLLQRWNEKVNLTAITQSEEVYLKHFYDSICLAKYVDLASSDFSLCDVGSGAGFPSLPLKILFPNLRVTIVDSLRKRIDFLKVLVEELGLTGVDLYHDRAETFGQNKDFRASFDYTTARAVARMNVLAELCLPLNKLGGTFIAMKASSAPQELEEAKAAIATLGGKVRGDAAFDLPEDGGERHIILIDKKKEGPNKYPRKPGTPNKKPL

SEQ ID NO: 1451 - DNA, 882 bp, Alloiococcus otitidis
  CDS (109)..(879)
atacccccgaaaacccggaacaccaaacaaaaaacccttgtaagctttagcttttctagggttgtatttttagtaaaaaacagaaagacaggaaagcggagtgaaattatggcaaaggtcattgcaatagcaaatcaaaaaggcggtgtgggcaagaccaccacatccgttaacctgggtgcttctttggcccaccaaggcagtaaggttttactagttgatatggatgcccagggaaatgccaccagtggtctaggcattaaaaaaggagatgtggatgctgatatttacgacgtcctcatcaatgaaaaacccctggatgaagtgattatcccaaccagccgcaaggatatggcagtggctccggccaccatccaactagccggtgccgaggtggagttaaccaatattatggcccgggaaacccggctcaagcgggcgattgacgaacttaagactgattttgactacatcatcatcgactgccccccttccttgggtcacttgaccatcaatgcctttacagctagtgattccattatgatcccggtccagtgtgaatactatgccctagaaggtttgagccagcttttgaatacggtcagactggttcaaaagcactttaacgaaaacttgagtattgaaggagtcctcttgaccatgctcgatgcccgaaccaacctgggctttgaagtggtcgaagaggtcaagaaatatttccgcgaaaaagttcacgaaactattatcccccgcaatgtccgcttgtccgaagcccccagttacggcctgtccattatcgactatgatttcaagtctaagggtgcagaagtttacctggctttagcagaggaagtgaaagcaaatgagcgagcgcaagcgtaa

SEQ ID NO: 1452 - protein, 257 aa, Alloiococcus otitidis
MAKVIAIANQKGGVGKTTTSVNLGASLAHQGSKVLLVDMDAQGNATSGLGIKKGDVDADIYDVLINEKPLDEVIIPTSRKDMAVAPATIQLAGAEVELTNIMARETRLKRAIDELKTDFDYIIIDCPPSLGHLTINAFTASDSIMIPVQCEYYALEGLSQLLNTVRLVQKHFNENLSIEGVLLTMLDARTNLGFEVVEEVKKYFREKVHETIIPRNVRLSEAPSYGLSIIDYDFKSKGAEVYLALAEEVKANERAQA

SEQ ID NO: 1453 - DNA, 900 bp, Alloiococcus otitidis
  CDS (106)..(897)
aagcaaatgagcgagcgcaagcgtaaaggtctagggaagggaatcaacgcccttttcccagatgctgctaatttggaagagaacattaacactagcgaagagcgggtggttgacttagccgtggctgacttgcgacccaacccctaccaacctcgccacgactttaaccaaaacgccttagaagaattagccaaatctatcaagcaaaatggggtcttgcagcccatcattgtcagaaagtcccaggtcaagggttatgaaattgtagcgggagaaagacggttccgagcttctaaaatagcaggactagagacgatccctggcattgtccgggactttgacgaaaaggtcatgatgcaggtagccatcttggaaaacttacagcgggaagatttgaccgctttagaagaggccgacgcctatcacatgatgatggaaaaactttccctgacccaggaaaaggtggcccaagaactaggtaagagtcggtcttacattgccaaccacctccgcctccgcagtctgcctcaagctaccaaagacctcctccaagacggtagcctgtctatgggacaagcccggactcttttgggcttgaaagatccaggagctattaaccgcctggctaaaaaggcagtgaaggacaagctaacagtccgtcaactggagcaggaagttgctgactttaaccaagaaggcaagaaaaaagccaagccagctaccaagcccaagaagtcaatttttatcaccgatatcgaacgacgcctaacctcgcagatggataccaaagtcactattatcggtaaggaaaacaagggtaaaatccagattgaataccagtctttagacgacctgaacgacattctttacaagcaattgggcttggaagaagaatcctaa

SEQ ID NO: 1454 - protein, 264 aa, Alloiococcus otitidis
MVDLAVADLRPNPYQPRHDFNQNALEELAKSIKQNGVLQPIIVRKSQVKGYEIVAGERRFRASKIAGLETIPGIVRDFDEKVMMQVAILENLQREDLTALEEADAYHMMMEKLSLTQEKVAQELGKSRSYIANHLRLRSLPQATKDLLQDGSLSMGQARTLLGLKDPGAINRLAKKAVKDKLTVRQLEQEVADFNQEGKKKAKPATKPKKSIFITDIERRLTSQMDTKVTIIGKENKGKIQIEYQSLDDLNDILYKQLGLEEES

SEQ ID NO: 1455 - DNA, 900 bp, Alloiococcus otitidis; identical to SEQ ID NO: 1453
  CDS (7)..(897)

SEQ ID NO: 1456 - protein, 297 aa, Alloiococcus otitidis
MSERKRKGLGKGINALFPDAANLEENINTSEERVVDLAVADLRPNPYQPRHDFNQNALEELAKSIKQNGVLQPIIVRKSQVKGYEIVAGERRFRASKIAGLETIPGIVRDFDEKVMMQVAILENLQREDLTALEEADAYHMMMEKLSLTQEKVAQELGKSRSYIANHLRLRSLPQATKDLLQDGSLSMGQARTLLGLKDPGAINRLAKKAVKDKLTVRQLEQEVADFNQEGKKKAKPATKPKKSIFITDIERRLTSQMDTKVTIIGKENKGKIQIEYQSLDDLNDILYKQLGLEEES

SEQ ID NO: 1457 - DNA, 237 bp, Alloiococcus otitidis
  CDS (10)..(234)
aatattgaagtggaatttctacaatcgcagactaattgtagaatattgaatctgaaattttacaatcgcagaccaattgtagaattcgcccaaagcttaggcctggttgaccaggcagaaatttttgtcaacgagcaagttggcagcaaagctagcccagacaagaattttgtcaacgagcaagctggcagcaaagctagtccaggcagagatttttcaacaggcaagcaagaatga

SEQ ID NO: 1458 - protein, 75 aa, Alloiococcus otitidis
MEFLQSQTNCRILNLKFYNRRPIVEFAQSLGLVDQAEIFVNEQVGSKASPDKNFVNEQAGSKASPGRDFSTGKQE

SEQ ID NO: 1459 - DNA, 1101 bp, Alloiococcus otitidis
  CDS (1)..(1098)
atggcactaacagcaggtattgtcggcttgccaaatgtcggcaaatcaaccctatttaacgcaatcaccaaggcaggggcggaagcagcaaactaccctttcgctaccattgaccctaatgttgggattgtcgaagtccctgacccaagattggaccggttgacagacttggttcaaccggaaaagacggtcccaaccacctttgaatttaccgacattgctggtatcgtcaaaggggccagccagggagaaggcttgggcaataagtttttggccaatatccgagaagtcgacgccatttgtcatgtggttcgttgctttgacgacagcaacattacccacgtagacggcaaggtggacccagcttcggacatcgaaaccatcaacttggagctcatttttgctgaccaggaatccattgacaaacgttacgaaaaaacccgcaaacaggccagagccaaagatccggatgctgtagccaccctagctgttttagacaagatccgacctgcccttgaagaggggattccagtccgggctttggattttgatgaagaagaggaaaaaattgtcaaaagccttttcttgttgacctccaagccggttttatacattgctaatgtggcagaagagaacgtctcagatcctgaagccagcgactacctgcaaacggtcaaaaatattgccgaccaagaaggggcagaagtcgtcggcatttcagctgccatcgaagaagaaattgctgccttggacgacgatgaacgggaccttttcctagaagacctgggcatcgaagagccaggtttgaaccgggtcatccgccggtcttataacttgctgaacttgggaacctacttcacagccggtcctaaagaagtccgagcctggacctttactaaggggatgaaggctccgcaagcagctggtatcatccactctgactttgaacggggctttatccgggccgaaaccatttcttatgaagattttgatgacttgggaagcgaaaaagctgcccgggaagccggtaaactccggcaagaaggtaaggactatgtggtccaggacggcgatgtcatggaatttaagttcaatgtctaa

SEQ ID NO: 1460 - protein, 366 aa, Alloiococcus otitidis
MALTAGIVGLPNVGKSTLFNAITKAGAEAANYPFATIDPNVGIVEVPDPRLDRLTDLVQPEKTVPTTFEFTDIAGIVKGASQGEGLGNKFLANIREVDAICHVVRCFDDSNITHVDGKVDPASDIETINLELIFADQESIDKRYEKTRKQARAKDPDAVATLAVLDKIRPALEEGIPVRALDFDEEEEKIVKSLFLLTSKPVLYIANVAEENVSDPEASDYLQTVKNIADQEGAEVVGISAAIEEEIAALDDDERDLFLEDLGIEEPGLNRVIRRSYNLLNLGTYFTAGPKEVRAWTFTKGMKAPQAAGIIHSDFERGFIRAETISYEDFDDLGSEKAAREAGKLRQEGKDYVVQDGDVMEFKFNV

SEQ ID NO: 1461 - DNA, 786 bp, Alloiococcus otitidis
  CDS (61)..(783)
gttcaatgtctaacttggcactggttatttttaaccaggcctaggaaaaaagtaatgaggatggatcaaatggcaaaaaaagataaagaaaagaaggataagcaagaagaacaaagcccgaccttggaagaaatgcaggagcaaaacctaactttaatcaaaaaattaaccaataaaaacgaagactatgtagttaaactcaaccgccacttgaaagaactaggttgggatgatgaccaggtcaccgaagccttttatgacatgttaccgaatatcgttagagagcaggacaatggggtcttggcccgaaaactatacggaccggtgactgaacaagcggaccggctgacagctggacccaaccgccaaaaccaagccattgaaaagtcccccacctggcaactctatgtggacggggctctcttattgggaggtctcctagccttgattaacggggtcctccaactctttaccaatacggaagcgcagaatcctatggggatcgtcaccctcttggtcaacttcctattagctggggtggccattttggtgatcggcaactacgcaccggtgcccgggcaaaagggtagcttcctcaagtacatcttggcttcagtcttaaccatggtggtttggatgctggccttctccttcatcgctgccctcatcccaccagccatcaacccgcccctctctccagccgctagcatcatcatcggtatcatcgccttggtcgccaaatacttcttcaaacgaagcttcaatgtccaaggtagtttgatctaa

SEQ ID NO: 1462 - protein, 241 aa, Alloiococcus otitidis
MDQMAKKDKEKKDKQEEQSPTLEEMQEQNLTLIKKLTNKNEDYVVKLNRHLKELGWDDDQVTEAFYDMLPNIVREQDNGVLARKLYGPVTEQADRLTAGPNRQNQAIEKSPTWQLYVDGALLLGGLLALINGVLQLFTNTEAQNPMGIVTLLVNFLLAGVAILVIGNYAPVPGQKGSFLKYILASVLTMVVWMLAFSFIAALIPPAINPPLSPAASIIIGIIALVAKYFFKRSFNVQGSLI

SEQ ID NO: 1463 - DNA, 786 bp, Alloiococcus otitidis; identical to SEQ ID NO: 1461
  CDS (55)..(783)

SEQ ID NO: 1464 - protein, 243 aa, Alloiococcus otitidis
MRMDQMAKKDKEKKDKQEEQSPTLEEMQEQNLTLIKKLTNKNEDYVVKLNRHLKELGWDDDQVTEAFYDMLPNIVREQDNGVLARKLYGPVTEQADRLTAGPNRQNQAIEKSPTWQLYVDGALLLGGLLALINGVLQLFTNTEAQNPMGIVTLLVNFLLAGVAILVIGNYAPVPGQKGSFLKYILASVLTMVVWMLAFSFIAALIPPAINPPLSPAASIIIGIIALVAKYFFKRSFNVQGSLI

SEQ ID NO: 1465 - DNA, 984 bp, Alloiococcus otitidis
  CDS (19)..(981)
aataaaggagaagtcgttatgaaaaatatccaaaaaagtttagaattgcagtggttggaaatattgagtgaacgcagcagacccagttattatgtgcagaggcggctgagtcaagcccagctaggttaccagggtgagaaagattttgccaatttagttagtcagtatattcctgaccattggcggctggtccatgacctgacctttaagcgggccggccgccacttgcaaattgactttatcctggtggccccgcacactttatatctatttgaaataaaaaacttccaagcccactacaggttggaaggcagtaagttggttggcgacaatgggactgtttttcggaatattttttaccaggttgaaaatggaatagactacttaaaaacgcttttaggagccagggttccggttgaaggtcagctggtttttatggccgaccaagataaggtggattttggggaccttcatccaggagactacctcaagcgctggcaagttggagattatatcaaccaggcaaaagtcaagcgaccagttgctgggctaaatattccaagcatagcccagttcttgcaagaccaaagcattccttcccatgagggtctagattttttgggtagggaaagactttcagatattcgaaggggtatcatttgtgaagcttgtaaagggagtcaggtcaatcgtcagtcaagaactttcctgaaatgtagccagtgtgggcatagggaaagccagggccgggctatttaccggaccatttgcgattatgcggtcttgaattacaataagcctattcgcttgcaagatttagtccaatttatggaaggtcaggttaattataaaaccctttctaagtatttcagggattttaacggttcctataggctcgggaggcttgctgagctttatccagacaaggaattttcctacccaacaaggtcttgtgattgtgtgcattgccggggaaaagggtga

SEQ ID NO: 1466 - protein, 321 aa, Alloiococcus otitidis
MKNIQKSLELQWLEILSERSRPSYYVQRRLSQAQLGYQGEKDFANLVSQYIPDHWRLVHDLTFKRAGRHLQIDFILVAPHTLYLFEIKNFQAHYRLEGSKLVGDNGTVFRNIFYQVENGIDYLKTLLGARVPVEGQLVFMADQDKVDFGDLHPGDYLKRWQVGDYINQAKVKRPVAGLNIPSIAQFLQDQSIPSHEGLDFLGRERLSDIRRGIICEACKGSQVNRQSRTFLKCSQCGHRESQGRAIYRTICDYAVLNYNKPIRLQDLVQFMEGQVNYKTLSKYFRDFNGSYRLGRLAELYPDKEFSYPTRSCDCVHCRGKG

SEQ ID NO: 1467 - DNA, 552 bp, Alloiococcus otitidis
  CDS (37)..(549)
aagctagtgcctagcatcctcaaacaggaggccatcatggagaacatactttactacagctactttgaaacgaagctgacaaaattgctattgatgaaaacacaagtgggcctggcccgggtcgatactttgagtttagaagaagttcagcagactccctggtttaaaggctattttaaagaggcaaaactggtcaaatccaacccggttttcgaccgggaccgaaaacaattgttggaatactttgcaagagaccggtcagaatttgacctggacttggatgagcgtggaaccacctttcaaaaagaggtctggcaaaccttgcaagccatcccctatggccaaaccttgacctatgggggtctggctgacaaattgggccgatctagcaaggcagcccaagctgtgggccgggccctaggacaaaaccccttgttggtagtggttccctgccaccgaatcctttcccaagacggtaagctcaccggctaccgcggtggccttgccttaaagaaagccttgctggatgcggaaggtatagattataaataa

SEQ ID NO: 1468 - protein, 171 aa, Alloiococcus otitidis
MENILYYSYFETKLTKLLLMKTQVGLARVDTLSLEEVQQTPWFKGYFKEAKLVKSNPVFDRDRKQLLEYFARDRSEFDLDLDERGTTFQKEVWQTLQAIPYGQTLTYGGLADKLGRSSKAAQAVGRALGQNPLLVVVPCHRILSQDGKLTGYRGGLALKKALLDAEGIDYK

SEQ ID NO: 1469 - DNA, 552 bp, Alloiococcus otitidis; identical to SEQ ID NO: 1467
  CDS (7)..(549)

SEQ ID NO: 1470 - protein, 181 aa, Alloiococcus otitidis
MPSILKQEAIMENILYYSYFETKLTKLLLMKTQVGLARVDTLSLEEVQQTPWFKGYFKEAKLVKSNPVFDRDRKQLLEYFARDRSEFDLDLDERGTTFQKEVWQTLQAIPYGQTLTYGGLADKLGRSSKAAQAVGRALGQNPLLVVVPCHRILSQDGKLTGYRGGLALKKALLDAEGIDYK

SEQ ID NO: 1471 - DNA, 663 bp, Alloiococcus otitidis
  CDS (22)..(660)
tattttacggaaggagaccctatgtcagtgattgttttagctggaatgattggagcaggcaagagtacttacaccaactttatttcacgggaattaaactcccaggccttttatgaatcggtggacgacaaccccttattggaaaagttttacgatgacccggtgcgttgggctttttccttacagattttctttttaaacacccgctttcgcagcattaaggctgccctccgccaccgccacaatgtcctggaccggtccatttatgaggatgagcttttcacccggattaattttatgcaaggcaatatgagccaggctgaaatggacctttacaccgacttgctggccaatatgatggaagaaattgccggcatgcctaagaaagcacctgacctcttaatctacttgcgtggtcctttagaaacgcacttagaccggatccgtaagcggggccggccctatgagcaagtggagggagaccccggcctcctcgactattacaagatcctccacaaccactacgacgactggtttaaatcctatgaccaaagccccaccctggtgatcaacatcgaccaatttgacttggaacaggaagaggaccaaaaggcagtcatggctatggttagggacaagttgaaagacattggggcagattaa

SEQ ID NO: 1472 - protein, 213 aa, Alloiococcus otitidis
MSVIVLAGMIGAGKSTYTNFISRELNSQAFYESVDDNPLLEKFYDDPVRWAFSLQIFFLNTRFRSIKAALRHRHNVLDRSIYEDELFTRINFMQGNMSQAEMDLYTDLLANMMEEIAGMPKKAPDLLIYLRGPLETHLDRIRKRGRPYEQVEGDPGLLDYYKILHNHYDDWFKSYDQSPTLVINIDQFDLEQEEDQKAVMAMVRDKLKDIGAD

SEQ ID NO: 1473 - DNA, 774 bp, Alloiococcus otitidis
  CDS (40)..(771)
actcaaattaagagttttaacagaggaaggagatttggtatgaaggcaaaaattattgcccaccggggtttttcgagccggcagcttgaaaacacccaaccagcctttgaagcagccgaccagtttggggtggacgggattgagtgcgacctgcaaatgactaaggacggccatttggtcatctaccatgatgcggatttaaatcgtctggctggtttaccagttagtataggagactgtaatttggaccaaatccagggcttgaccctaaagcaagctggttttacggggacaatcccgactctagtggattatttagactggttgcaaggcaaggacctcctagccaatattgaaattaaaagtcacaagaggccccttaaccaagttgaagagaaagtggtatacctggttcaatcctatggtctatcccaacgagttttaatttccagcttcgacgtggagattttgcgggcggttaaaaacttagatccagacctcaacctagcctacctggttgatagttggaatgaagccatgctgaaccgactagcctctataaagccaggctacatccatatttaccagcaaattttaaaccaagaccgggtcgactttcttcaccggcagggctatctcatcaacacttataccgtcaattcacttcaagcaatcgaccgaatgctagaatttggggtggacgggttgatttcggactatccagaccgggtggctgaccggctagccaaagcctctatttctaaattggtctag

SEQ ID NO: 1474 - protein, 244 aa, Alloiococcus otitidis
MKAKIIAHRGFSSRQLENTQPAFEAADQFGVDGIECDLQMTKDGHLVIYHDADLNRLAGLPVSIGDCNLDQIQGLTLKQAGFTGTIPTLVDYLDWLQGKDLLANIEIKSHKRPLNQVEEKVVYLVQSYGLSQRVLISSFDVEILRAVKNLDPDLNLAYLVDSWNEAMLNRLASIKPGYIHIYQQILNQDRVDFLHRQGYLINTYTVNSLQAIDRMLEFGVDGLISDYPDRVADRLAKASISKLV

SEQ ID NO: 1475 - DNA, 720 bp, Alloiococcus otitidis
  CDS (16)..(717)
aattggaggcacattatggaagtaaaagtattcgattcggtaactgaggcatcgcgtgaagcacttgaattgttccagtcagcactcaatgatggggcaaaaacctttggtttagcgaccgggtcaacgccagagaaactttacgaattaatgcgagggtcaagcattgatttttcacaagccacctccatcaacttggatgagtactacggcctagctagtgaccacccgcaaagctataactactacatgcacaagcaactttttgatgccaaaccctttgccaaaaactacctgccagatgggaccaatgaaaatcctcaagaagaaagggaccgctacaaccaaatcattgccgacaaccccatcgacctccagcttttagggatcggggaaaatggccatgttggttttaacgaacctggctcaccctttgattcccatacacgactggtagacttgaccgactcgaccatccaagccaacaaacgcttcttcgattccgaagctgacgtgcccaaacaagcctacagtatgggcttggctgacatcatgagtgcagaccaggtgatcttgatggcctttggggcaaaaaaagcctgggcggtcaatcaaatggttaacggtccggtgactgaagatgtccctgccagcatcttgcaaaaacacgacaatgttattgtgattgtcgaccgggatgcagctcctgaagaaaagtaa

SEQ ID NO: 1476 - protein, 234 aa, Alloiococcus otitidis
MEVKVFDSVTEASREALELFQSALNDGAKTFGLATGSTPEKLYELMRGSSIDFSQATSINLDEYYGLASDHPQSYNYYMHKQLFDAKPFAKNYLPDGTNENPQEERDRYNQIIADNPIDLQLLGIGENGHVGFNEPGSPFDSHTRLVDLTDSTIQANKRFFDSEADVPKQAYSMGLADIMSADQVILMAFGAKKAWAVNQMVNGPVTEDVPASILQKHDNVIVIVDRDAAPEEK

SEQ ID NO: 1477 - DNA, 387 bp, Alloiococcus otitidis
  CDS (22)..(384)
gcaggagaaaggagcccctatatggccatctttagtcaattattttggatattgttattttccctctttggcgaagttttatcggtcttgattgctcccatctttccagtgccggggagtgttttaggtttgattttgatgtttactgccttgcggaccggcctcttaagccgggaccgggttcaggaggttagcaactggctgaccagtaacatgggcctctttttcatcccaccgggcgtggccattatatcctactttgatctcctggccactatttggtggcaggttttaattgtgattgtggtgactgccacactcatgatggtctttgtgggccggcttgttcaaactattaagcacaagcgcgaccacaaaacctcataa

SEQ ID NO: 1478 - protein, 121 aa, Alloiococcus otitidis
MAIFSQLFWILLFSLFGEVLSVLIAPIFPVPGSVLGLILMFTALRTGLLSRDRVQEVSNWLTSNMGLFFIPPGVAIISYFDLLATIWWQVLIVIVVTATLMMVFVGRLVQTIKHKRDHKTS

SEQ ID NO: 1479 - DNA, 345 bp, Alloiococcus otitidis
  CDS (10)..(342)
aacaataaattggtaatggggatggtcagcggtgctaaggcaacaacggtaatcccggttaccacaatggtcaaggcagacatggccccttgcaggtcgcctaactcaattgcccgggctgtccccatggcatgtgaagcagcacccaaggctacaccctgggcaagggggtctgtaatgcctgctagtcttaaaatttccttgccaaaggtcgctccgaagataccggtaaaaaccaccacggcaactgttagagggacaatcccacctaaatttgcggatacccccaccgcaatggctgtggtgatggatttaggaatcagggtcgccacaatatcggcctga

SEQ ID NO: 1480 - protein, 111 aa, Alloiococcus otitidis
MVMGMVSGAKATTVIPVTTMVKADMAPCRSPNSIARAVPMACEAAPKATPWARGSVMPASLKISLPKVAPKIPVKTTTATVRGTIPPKFADTPTAMAVVMDLGIRVATISA

SEQ ID NO: 1481 - DNA, 729 bp, Alloiococcus otitidis
  CDS (436)..(726)
ttcagtttagcaaggagcttgcaaatgtttgagaccatcatcaactcgcccgtcctgtggattaccatgacggttggcttgtatcttttaggcgattttttaaagcaaaagtggcccaagcccttttttaaccccctctttttcgggactctagccctcattcttattctactgatttttgacattccccttgagacctatgatgcgggtggccaagtggttagcctttttatcacaccggcaacggttgccttggctattaagctggatgagaattttgactacttgaaagaccactatatttctatcctgaccggtattgtcttaggtgtactcttccatacggtcatcatctacatcctgggcctactatttcgttttcaggccgatattgtggcgaccctgattcctaaatccatcaccacagccattgcggtgggggtatccgcaaatttaggtgggattgtccctctaacagttgccgtggtggtttttaccggtatcttcggagcgacctttggcaaggaaattttaagactagcaggcattacagacccccttgcccagggtgtagccttgggtgctgcttcacatgccatggggacagcccgggcaattgagttaggcgacctgcaaggggccatgtctgccttgaccattgtggtaaccgggattaccgttgttgccttagcaccgctgaccatccccattaccaatttattgttttaa

SEQ ID NO: 1482 - protein, 97 aa, Alloiococcus otitidis
MGVSANLGGIVPLTVAVVVFTGIFGATFGKEILRLAGITDPLAQGVALGAASHAMGTARAIELGDLQGAMSALTIVVTGITVVALAPLTIPITNLLF

SEQ ID NO: 1483 - DNA, 729 bp, Alloiococcus otitidis; identical to SEQ ID NO: 1481
  CDS (25)..(726)

SEQ ID NO: 1484 - protein, 234 aa, Alloiococcus otitidis
MFETIINSPVLWITMTVGLYLLGDFLKQKWPKPFFNPLFFGTLALILILLIFDIPLETYDAGGQVVSLFITPATVALAIKLDENFDYLKDHYISILTGIVLGVLFHTVIIYILGLLFRFQADIVATLIPKSITTAIAVGVSANLGGIVPLTVAVVVFTGIFGATFGKEILRLAGITDPLAQGVALGAASHAMGTARAIELGDLQGAMSALTIVVTGITVVALAPLTIPITNLLF

SEQ ID NO: 1485 - DNA, 729 bp, Alloiococcus otitidis; identical to SEQ ID NO: 1481
  CDS (19)..(726)

SEQ ID NO: 1486 - protein, 236 aa, Alloiococcus otitidis
MQMFETIINSPVLWITMTVGLYLLGDFLKQKWPKPFFNPLFFGTLALILILLIFDIPLETYDAGGQVVSLFITPATVALAIKLDENFDYLKDHYISILTGIVLGVLFHTVIIYILGLLFRFQADIVATLIPKSITTAIAVGVSANLGGIVPLTVAVVVFTGIFGATFGKEILRLAGITDPLAQGVALGAASHAMGTARAIELGDLQGAMSALTIVVTGITVVALAPLTIPITNLLF

SEQ ID NO: 1487 - DNA, 1296 bp, Alloiococcus otitidis
  CDS (22)..(1293)
actaaaaatggaggaattatcatgagtaaaaaagactatcaaaatctagaaaccttatgtgtccaagcaggttacgatcccaaaagtggcgagcccagaattgcaccgattgttcagtctacaacctttaagtatgataagacccaaacagttgctgatttgtttgacctaaaagagtctggcttcttctatacccggctagggaacccaaccattgacgcccttgagcaaagagtcgctgcccttgatggaggagcagctgctgtggccacttcatcaggccagtctgctagcttaaatgctgttttaaacattacaaatgctggcgataatattgtcgtcttaaataatatctatggcggaacttataacctctttggcactacccttaaaaattgggggattgaagcaagatttgttccctctaatgatctcgaagcggccgaaagtcaaattgatgataagaccacattaatctatggtgaagtcttggccaacccctcaaccgctatcctggatattgaaaaatatgccgaccttgcccactcccacaacatccccctcgtcctggacaataccctgacaacgccagccctagttaagccaattgattatggttgtgatgtggttgtttactcttccaccaagtacttggacggccacgcaactgcaatgggtggcttggtggttgattccgggaactttgattggaccaagggcgattacccgcaattgacccaaccggatgaaagctaccacggcctgatctttaccgagaactttggggaggctgcctatgccgctagaattagaacggtttgcttgagagatttggggaatatagcagcacctttcaatgcctttctaaccttaagagggatcgaaaccttagcccttagactggagcgacattccgaaaatgcccttaaagtcgcaaaattcttgcaagaccatgaaaaagttgaattcgtcaactatccattcctagaaacgaataaagactatgacttagcccagaaatacttaaaagctggcagtggcgtgatttcctttggtgttaaagggactcgtgaggatgcagcgaaatttattgaagccttagacttggtttctctagtggtcaatgttgcggatgtccggtcctacgccctccacccagcttcttccacccaccggcaactctccgacgaagaattagaggagtctggtatcacgcctaacttaattagactgtctgttggtatcgaaaatgtagatgatattattgccgatatcgaccaagccttaaaagcttaa

SEQ ID NO: 1488 - protein, 424 aa, Alloiococcus otitidis
MSKKDYQNLETLCVQAGYDPKSGEPRIAPIVQSTTFKYDKTQTVADLFDLKESGFFYTRLGNPTIDALEQRVAALDGGAAAVATSSGQSASLNAVLNITNAGDNIVVLNNIYGGTYNLFGTTLKNWGIEARFVPSNDLEAAESQIDDKTTLIYGEVLANPSTAILDIEKYADLAHSHNIPLVLDNTLTTPALVKPIDYGCDVVVYSSTKYLDGHATAMGGLVVDSGNFDWTKGDYPQLTQPDESYHGLIFTENFGEAAYAARIRTVCLRDLGNIAAPFNAFLTLRGIETLALRLERHSENALKVAKFLQDHEKVEFVNYPFLETNKDYDLAQKYLKAGSGVISFGVKGTREDAAKFIEALDLVSLVVNVADVRSYALHPASSTHRQLSDEELEESGITPNLIRLSVGIENVDDIIADIDQALKA

SEQ ID NO: 1489 - DNA, 999 bp, Alloiococcus otitidis
  CDS (40)..(996)
agtagggatccaatgcccttgatattaccagaaggtctgatgagcgaaagtcttttagaagaagaagcgatcgaaagacttgattcgaccaagattcggcagctagctgtcagacccttaaaagtagcaatcgttaacttaatgcccaataaagaagagacagagcggcaattcttaaaagtcctgtccgatccagtcctgccagtccagatcgacctggtccgggtggcaagccataaggccaaaaatacctcccaacaacacctggaacatttttataaaagcttggctgaaataaaaaatgccaagtacgatgggatgttgttcaccggtgccccccttgagcttttagactatgaagagatcgattattggtcagaactcaaagaattgttggactttgccaaagaaaatgtctattcaaccttgtttatttgctggtctgcccaagctgccctatatcattattacggcatcaagaattcgattgtcgaccagaaaatttttggcatctacgattatgaaaaaagagaagacagtaaattggttgaaggcttagaccaggttttctcagccccgcattcaagatggtcttgtgttgatgaaggtgaagtcgccagccatccggaattaaagattctagcttccaggcctgacaccggggtgagcattgtcaccaaccaagatagccggcaggtattttcctttggccactgggaatataatatagataccctccataaggaatatgaaagggatcttgcagaaaataaagatatccagcttcccaaaaattattaccttggtgatggtagccagcaaaagattagagatgattggaaggagtcgggcagcttattcttttcaaactggcttcacgatattatttatcaaggcaccccttatgacttagaaaacatcacggcccatatagaatctgaatctgccaatagccagtcctatgccagtcaatttgccaaagaaaatgagagaatatga

SEQ ID NO: 1490 - protein, 319 aa, Alloiococcus otitidis
MSESLLEEEAIERLDSTKIRQLAVRPLKVAIVNLMPNKEETERQFLKVLSDPVLPVQIDLVRVASHKAKNTSQQHLEHFYKSLAEIKNAKYDGMLFTGAPLELLDYEEIDYWSELKELLDFAKENVYSTLFICWSAQAALYHYYGIKNSIVDQKIFGIYDYEKREDSKLVEGLDQVFSAPHSRWSCVDEGEVASHPELKILASRPDTGVSIVTNQDSRQVFSFGHWEYNIDTLHKEYERDLAENKDIQLPKNYYLGDGSQQKIRDDWKESGSLFFSNWLHDIIYQGTPYDLENITAHIESESANSQSYASQFAKENERI

SEQ ID NO: 1491 - DNA, 999 bp, Alloiococcus otitidis; identical to SEQ ID NO: 1489
  CDS (13)..(996)

SEQ ID NO: 1492 - protein, 328 aa, Alloiococcus otitidis
MPLILPEGLMSESLLEEEAIERLDSTKIRQLAVRPLKVAIVNLMPNKEETERQFLKVLSDPVLPVQIDLVRVASHKAKNTSQQHLEHFYKSLAEIKNAKYDGMLFTGAPLELLDYEEIDYWSELKELLDFAKENVYSTLFICWSAQAALYHYYGIKNSIVDQKIFGIYDYEKREDSKLVEGLDQVFSAPHSRWSCVDEGEVASHPELKILASRPDTGVSIVTNQDSRQVFSFGHWEYNIDTLHKEYERDLAENKDIQLPKNYYLGDGSQQKIRDDWKESGSLFFSNWLHDIIYQGTPYDLENITAHIESESANSQSYASQFAKENERI

SEQ ID NO: 1493 - DNA, 957 bp, Alloiococcus otitidis
  CDS (19)..(954)
aagcaaaggatttttcacatgattttaaccgtaacccttaacccatccattgatgtctcctaccccttggacagcctaactatcgatggagtcaaccggatcagtgaagtttccaaaacgcctggtggtaaaggcctgaacgtttcccgggtcctccaacaattaggcggggacctggtgacaaccggttttatcggaggccaattcggggactttatccggcatgaactagaccaaattaacttgaaacacgactaccaaaatatcgacggccaaacccggacctgtattgccatcttgcatgacggtggcaagcaaaccgagattttggaatctggtcctgaaatttctgcccaagacagtcaagctttcaagaataaatttgctgacctagctgagcaagcttccaccatcaccatgtctggtagcctgcccaaaggcttagccaaggactactacaatgacctaattaagattggccaagatgctggggcccgggtcttgctagacacctctggccaaaccctgacaactgctgtcaaccaccctgtcaaaccctacttgatcaagccaaatgaagaagaagtcaaggccattaccggctctgaacttgacctagcagatcctgagtccatcaagtctgccttgaccgacccaagccttgatggaattgactggctggttgtttccctaggtaaagacggtgctgtagccaaagtagatgaccacttttaccaggtcaccattcccaccgtccaagccgtcaacccagttgggtcaggcgattccaccattgccggctttgccaaggctctagatgacggcaagcctgctgatgaagtcctcaaaactggtatgacctgtggtgtcctcaacgccatgtcaagcaaaaccggtgacatcgaccctgatcagttcgatgaaatttacagccaagttgaagttgaagacttgtag

SEQ ID NO: 1494 - protein, 312 aa, Alloiococcus otitidis
MILTVTLNPSIDVSYPLDSLTIDGVNRISEVSKTPGGKGLNVSRVLQQLGGDLVTTGFIGGQFGDFIRHELDQINLKHDYQNIDGQTRTCIAILHDGGKQTEILESGPEISAQDSQAFKNKFADLAEQASTITMSGSLPKGLAKDYYNDLIKIGQDAGARVLLDTSGQTLTTAVNHPVKPYLIKPNEEEVKAITGSELDLADPESIKSALTDPSLDGIDWLVVSLGKDGAVAKVDDHFYQVTIPTVQAVNPVGSGDSTIAGFAKALDDGKPADEVLKTGMTCGVLNAMSSKTGDIDPDQFDEIYSQVEVEDL

SEQ ID NO: 1495 - DNA, 552 bp, Alloiococcus otitidis
  CDS (37)..(549)
ctatgcaaaacgagatatagaaaggatttttcatcaatgaaaattgcgattggatgcgaccacatcgttaccgatatcaaaattgaaatggctgaccacttgagagaacaaggtcacgacgttatcgacgttggaacttacggttttaaacgaacccactacccaatctttggtaaaaaagttggggaattggtttcagctggcaaggttgacaaagggattgtcatctgcggaactggtgttggcattaccaacgctgccaacaagatcccaggtacccgggttgccttagtccgtgacttgatgactgccgtttatgctagagaagaattggatgccaacattatcggattcggtggtaaaattgtcggtggtttgatcatgaaagacatgatcgatgccttcttagacgctgactacaaggaaacagaagaaaacaaagaattaattgatgggatcgctgaaatcgaagctggccgtagccgggacttcgacccccaccaatttgatgaataccttgaaaaatgggaccaaggctactaccacgactaa

SEQ ID NO: 1496 - protein, 171 aa, Alloiococcus otitidis
MKIAIGCDHIVTDIKIEMADHLREQGHDVIDVGTYGFKRTHYPIFGKKVGELVSAGKVDKGIVICGTGVGITNAANKIPGTRVALVRDLMTAVYAREELDANIIGFGGKIVGGLIMKDMIDAFLDADYKETEENKELIDGIAEIEAGRSRDFDPHQFDEYLEKWDQGYYHD

SEQ ID NO: 1497 - DNA, 432 bp, Alloiococcus otitidis
  CDS (1)..(429)
atgaaagttatactaggtgccgaccaagatggattgcgtttgaaagatgtcttgaaagaccacatcgaaagccattacgattatgaagtccaagatgtcagtccagaagggtccaaaaactttgttgaatcatctaaggccattgcccaagccttgcaggaagatgaagatgcatacggcattgcaatcgacaagattggggctggctcttttatggctgctagcaagcacaagggtgttgtcgttgccgaaatttcggatgagcggtcagcctttatgacccgccaacacaacaatgcccgcatgatcaccttggggtctgatattgtggccgatgccatggctaaaagcatcaccgaccacttcctccaagctgaatacgacggtggccgtcaccaagtccgagtcgacatgttggatgacttgtgctag

SEQ ID NO: 1498 - protein, 143 aa, Alloiococcus otitidis
MKVILGADQDGLRLKDVLKDHIESHYDYEVQDVSPEGSKNFVESSKAIAQALQEDEDAYGIAIDKIGAGSFMAASKHKGVVVAEISDERSAFMTRQHNNARMITLGSDIVADAMAKSITDHFLQAEYDGGRHQVRVDMLDDLC

SEQ ID NO: 1499 - DNA, 786 bp, Alloiococcus otitidis
  CDS (67)..(783)
aaaattgttgagcaagagtcaaaggggggttgtatcgtgattaaggaagaacgcctagactatatcatggaccagcttaaggaccagaagtttgtcaaggtttcagaaattaccgaccagctcaatgtgacggatatgactgttcgccgggacttgcaggaattggagcggcaaaagctcatcatccgggttcatggtggggccaagctagctagcaaccggtcgaccccagaattgagccacctggacaaggttgaaattaacattgaggacaagcgagaaattgccaagaagattgccaaagagatcaatgataatgagacagttttcttgggtgcggggacaaccatcgagctcgtccatgattacctcactgccagcaatgttaaaattatcaccaactcctaccaccttttcaatcgtttcaagcacgatgaccaaatcgagttgattttaatcgggggcaggtatcgtgacattacgggttgttttgtagggactattgcaaatgacttcatcgaccggatttttgtccaaaagtcatttatcgggattaacggcatcacaccggaaggcatttacaccttcagtgagagcgagggcttaacccagcagttgatgctaaacaactcagaagtcaagtacattgtcggtgacaagtccaagtttaaccgcaaggacttctaccgtttctacaacctggaccaagccgactacttcatctccaatgacgatttagatgaagatgtcaaaagtgattacactgattttatagagattatttaa

SEQ ID NO: 1500 - protein, 239 aa, Alloiococcus otitidis
MDQLKDQKFVKVSEITDQLNVTDMTVRRDLQELERQKLIIRVHGGAKLASNRSTPELSHLDKVEINIEDKREIAKKIAKEINDNETVFLGAGTTIELVHDYLTASNVKIITNSYHLFNRFKHDDQIELILIGGRYRDITGCFVGTIANDFIDRIFVQKSFIGINGITPEGIYTFSESEGLTQQLMLNNSEVKYIVGDKSKFNRKDFYRFYNLDQADYFISNDDLDEDVKSDYTDFIEII

SEQ ID NO: 1501 - DNA, 786 bp, Alloiococcus otitidis; identical to SEQ ID NO: 1499
  CDS (37)..(783)

SEQ ID NO: 1502 - protein, 249 aa, Alloiococcus otitidis
MIKEERLDYIMDQLKDQKFVKVSEITDQLNVTDMTVRRDLQELERQKLIIRVHGGAKLASNRSTPELSHLDKVEINIEDKREIAKKIAKEINDNETVFLGAGTTIELVHDYLTASNVKIITNSYHLFNRFKHDDQIELILIGGRYRDITGCFVGTIANDFIDRIFVQKSFIGINGITPEGIYTFSESEGLTQQLMLNNSEVKYIVGDKSKFNRKDFYRFYNLDQADYFISNDDLDEDVKSDYTDFIEII

SEQ ID NO: 1503 - DNA, 1080 bp, Alloiococcus otitidis
  CDS (88)..(1077)
tcgtttataagtaaatcttatatcatcaaccattgccttgaggactttcactttaagccctttacaatgaagaaaaggagacataccatgccaaaaattagccagaaaaaataccaacacttgaaacaattatcaactgatgaggaatacatctcagccttggccatcgaccaacgtggctctttgaaaaaaatgatccaacaaggtggcggggttgacgacatccaagcagctgttgaagaattcaaggtggctatttcagaagaattaaccccttacgcttcttccatcttactagatcctgagtacggtatccctgcgtcaaaagctagagacgacaaggctggtttgctcctagcctacgaaaaaactggctatgatgcaactgaaccgggacgtttgccagacttgatcgatgacatgtctgtccaagtcattaaagaaaatggtgccaacgctgttaaattcttactctactatgacattgacgaaccagacgaaatcaatgaccaaaaacaccggttcactgaacgaattgggtctgaatgtaaggcagaagacattccgttcttcttagagatcgtgacctatgatagcaagattgacgacgcgaaaggcaaagaatatgccaaattaaaaccacgtaaggtcattgactctatcaaggaattctccaaagaccgctaccacgttgacgttttaaaactagaagtgcctgtcaacatgaactatgtggaaggttacggggatgatccggtttactctaaagaagaggcagcccaatactttagagaccaagccgcagcaaccgacattcctttcatctacttgagtgctggtgtgtcatctgaattgtttaatgaaaccctccgcttcgctaaagaagcaggcactgaattccacggggtcttgtgtggccgtgctacttggaagggtgctattgacgaatacgttaaaggtggcgacaaggctgcccgtgaatggttgcgaactcaaggagcttccaacatccaaaaactaaacgaagtcttgaaagagactgctactccttggaccgacctctacgaagtggagtcttaa

SEQ ID NO: 1504 - protein, 330 aa, Alloiococcus otitidis
MPKISQKKYQHLKQLSTDEEYISALAIDQRGSLKKMIQQGGGVDDIQAAVEEFKVAISEELTPYASSILLDPEYGIPASKARDDKAGLLLAYEKTGYDATEPGRLPDLIDDMSVQVIKENGANAVKFLLYYDIDEPDEINDQKHRFTERIGSECKAEDIPFFLEIVTYDSKIDDAKGKEYAKLKPRKVIDSIKEFSKDRYHVDVLKLEVPVNMNYVEGYGDDPVYSKEEAAQYFRDQAAATDIPFIYLSAGVSSELFNETLRFAKEAGTEFHGVLCGRATWKGAIDEYVKGGDKAAREWLRTQGASNIQKLNEVLKETATPWTDLYEVES

SEQ ID NO: 1505 - DNA, 1080 bp, Alloiococcus otitidis; identical to SEQ ID NO: 1503
  CDS (67)..(1077)

SEQ ID NO: 1506 - protein, 337 aa, Alloiococcus otitidis
MKKRRHTMPKISQKKYQHLKQLSTDEEYISALAIDQRGSLKKMIQQGGGVDDIQAAVEEFKVAISEELTPYASSILLDPEYGIPASKARDDKAGLLLAYEKTGYDATEPGRLPDLIDDMSVQVIKENGANAVKFLLYYDIDEPDEINDQKHRFTERIGSECKAEDIPFFLEIVTYDSKIDDAKGKEYAKLKPRKVIDSIKEFSKDRYHVDVLKLEVPVNMNYVEGYGDDPVYSKEEAAQYFRDQAAATDIPFIYLSAGVSSELFNETLRFAKEAGTEFHGVLCGRATWKGAIDEYVKGGDKAAREWLRTQGASNIQKLNEVLKETATPWTDLYEVES

SEQ ID NO: 1507 - DNA, 525 bp, Alloiococcus otitidis
  CDS (49)..(522)
aagagactgctactccttggaccgacctctacgaagtggagtcttaaaatggctgattttaaagacctttaccgcaaggacttgatcctaacttctcaagcaaacagcaaggaagctgttcttgaagaagtagcggccattctagaagacaaggacttggtcacctcagactttgcttcagaaattgtcaaacgggagtcttcttaccccactggcctagacttgtcagtggtcaaccccgactccccaaatgtggctattccccacacagaagccgactactgcaaaggtcaggctatcgtttatgtcaaattggaccaggaagtcactttccacaacatgatcaagccggaagaagacttggccgtcaagtacttgtttatgattatcaacaaccagggtggagaccaaacgactgtcctctctgacctcatggcctttttcacccaaccaggcaatatcgaccgattagaggaattggaggatgcggaagcagtctaccagttcttgtccggaaacaattag

SEQ ID NO: 1508 - protein, 158 aa, Alloiococcus otitidis
MADFKDLYRKDLILTSQANSKEAVLEEVAAILEDKDLVTSDFASEIVKRESSYPTGLDLSVVNPDSPNVAIPHTEADYCKGQAIVYVKLDQEVTFHNMIKPEEDLAVKYLFMIINNQGGDQTTVLSDLMAFFTQPGNIDRLEELEDAEAVYQFLSGNN

SEQ ID NO: 1509 - DNA, 366 bp, Alloiococcus otitidis
  CDS (67)..(363)
aggaattggaggatgcggaagcagtctaccagttcttgtccggaaacaattagaaagagggatattatggttaaaattttagcagcctgtggtgctgggattaacaccagccaccaaattaagtcagctgtcgaagaagaaatgaaaaaccggggctaccaagtccaagttgacaccacagtcatcaaagacattaccgaagatatcaatgacaaatacgacatctttacccccatttccaaaacagacttttccttcgatattaagattcctgtagttgaagcaggaccaatcttataccgagtgccagctatgtctaaaccggtctttgacgagatcgaatccatcattaaagacatccagtaa

SEQ ID NO: 1510 - protein, 99 aa, Alloiococcus otitidis
MVKILAACGAGINTSHQIKSAVEEEMKNRGYQVQVDTTVIKDITEDINDKYDIFTPISKTDFSFDIKIPVVEAGPILYRVPAMSKPVFDEIESIIKDIQ

SEQ ID NO: 1511 - DNA, 489 bp, Alloiococcus otitidis
  CDS (25)..(486)
gcaaagctaggggagattgccccaatggcctgggctgactcagtcaagaaaggcgaaatggctgttccggaccagaggaagagggggatggtgagggtgccgatgacaatcatccgcaaaagtttcccccggcagaccaccagcaaggctggggtcaccccgatgacaataagaccggccatgggtaggatatggttgcctggcaagactaaggcaatgatgaagaggataggggctaggatattggccactgcccacatttcggaccgagatgacaagaaaggccagtcaatcccaatcaaaacctgcttgcctcccaggcgtttatacatgagattggttaccccttgggagaagggttcagtggaagaggtcaaccaggacccaaccactgagaagagttccaaggaagcggcccccacaaagactaagaggaaggtcacgctaaggggttgccggcctaggatcccaacaaacaggcctagatag

SEQ ID NO: 1512 - protein, 154 aa, Alloiococcus otitidis
MAWADSVKKGEMAVPDQRKRGMVRVPMTIIRKSFPRQTTSKAGVTPMTIRPAMGRIWLPGKTKAMMKRIGARILATAHISDRDDKKGQSIPIKTCLPPRRLYMRLVTPWEKGSVEEVNQDPTTEKSSKEAAPTKTKRKVTLRGCRPRIPTNRPR

SEQ ID NO: 1513 - DNA, 1428 bp, Alloiococcus otitidis
  CDS (1054)..(1425)
cccaaaaccttcgaaggagacactatggattttgccagtatgaatttagagcccctggtgattggggctccagcacttatgtttattttaatcactgtattggcaatgattttaggggcccagttttccaaggccttccaagctggtctcaagctagggattggcctgattggggttggcctggtaatcaatggcctagccaacgcttttggcccggctttgatggactttatgggccaagttggcctggacctttccattatcgatgtgggttgggcgcccatagcggccatcacctggtcgtcggtctacaccttgttctttatcctggttttggtggtggagaacctcatcatgatctattgggacaagacccgaaccttggacgttgatattttcaacttctggcacctggctattattggcctcttggtcatgtattattccaataatattatcttagccactctcttagttatcttcctaggagccctcaagttgattaactcggatttgatgaagcccaccttcaatgacctcttgggaacgccagaatcaaacccaactacgaccacccacatcaactttttactcaaccccttaattttactggtggataaaatcattgacctcatctttcccaaactggaccaatacgactttgatgccgccgccttgaatgacaaggtcggcttttgggggagcaagtttgccattggttcctatctaggcctgtttgttgggatcctaggccggcaaccccttagcgtgaccttcctcttagtctttgtgggggccgcttccttggaactcttctcagtggttgggtcctggttgacctcttccactgaacccttctcccaaggggtaaccaatctcatgtataaacgcctgggaggcaagcaggttttgattgggattgactggcctttcttgtcatctcggtccgaaatgtgggcagtggccaatatcctagcccctatcctcttcatcattgccttagtcttgccaggcaaccatatcctacccatggccggtcttattgtcatcggggtgaccccagccttgctggtggtctgccgggggaaacttttgcggatgattgtcatcggcaccctcaccatccccctcttcctctggtccggaacagccatttcgcctttcttgactgagtcagcccaggccattggggcaatctcccctagctttgcttacgggattgggatttcccactctagcttggaaggcccagtcgaaaaattcctagccatcctactagggcaggcagggaatggctttaacctaggccccatcctcattgccttagcagcctttgccgtctacagccttctcttttactggtatgtccggcaaatgcggaagcggaatgcagactatgaagctagccaggcccaagcagaggaatag

SEQ ID NO: 1514 - protein, 124 aa, Alloiococcus otitidis
MTPALLVVCRGKLLRMIVIGTLTIPLFLWSGTAISPFLTESAQAIGAISPSFAYGIGISHSSLEGPVEKFLAILLGQAGNGFNLGPILIALAAFAVYSLLFYWYVRQMRKRNADYEASQAQAEE

SEQ ID NO: 1515 - DNA, 1428 bp, Alloiococcus otitidis; identical to SEQ ID NO: 1513
  CDS (676)..(1425)

SEQ ID NO: 1516 - protein, 250 aa, Alloiococcus otitidis
MNDKVGFWGSKFAIGSYLGLFVGILGRQPLSVTFLLVFVGAASLELFSVVGSWLTSSTEPFSQGVTNLMYKRLGGKQVLIGIDWPFLSSRSEMWAVANILAPILFIIALVLPGNHILPMAGLIVIGVTPALLVVCRGKLLRMIVIGTLTIPLFLWSGTAISPFLTESAQAIGAISPSFAYGIGISHSSLEGPVEKFLAILLGQAGNGFNLGPILIALAAFAVYSLLFYWYVRQMRKRNADYEASQAQAEE

SEQ ID NO: 1517 - DNA, 1428 bp, Alloiococcus otitidis; identical to SEQ ID NO: 1513
  CDS (25)..(1425)

SEQ ID NO: 1518 - protein, 467 aa, Alloiococcus otitidis
MDFASMNLEPLVIGAPALMFILITVLAMILGAQFSKAFQAGLKLGIGLIGVGLVINGLANAFGPALMDFMGQVGLDLSIIDVGWAPIAAITWSSVYTLFFILVLVVENLIMIYWDKTRTLDVDIFNFWHLAIIGLLVMYYSNNIILATLLVIFLGALKLINSDLMKPTFNDLLGTPESNPTTTTHINFLLNPLILLVDKIIDLIFPKLDQYDFDAAALNDKVGFWGSKFAIGSYLGLFVGILGRQPLSVTFLLVFVGAASLELFSVVGSWLTSSTEPFSQGVTNLMYKRLGGKQVLIGIDWPFLSSRSEMWAVANILAPILFIIALVLPGNHILPMAGLIVIGVTPALLVVCRGKLLRMIVIGTLTIPLFLWSGTAISPFLTESAQAIGAISPSFAYGIGISHSSLEGPVEKFLAILLGQAGNGFNLGPILIALAAFAVYSLLFYWYVRQMRKRNADYEASQAQAEE

SEQ ID NO: 1519 - DNA, 1797 bp, Alloiococcus otitidis
  CDS (451)..(1794)
agggtgacagattttcaaatcaaggacaagttttacttagacggagagccatttcaatttctttcgggggccatccattacttccgtatccctcgagctgactggcaccattccctatacaacttaaaagcgttgggcttcaacacagtggaaacctatgtgccttggaatgttcacgaaccagaacccggacactttgacttttcaggcaacttggatgtcaaggcctttattaaagaagctgaagaccttggcctttatgtcatcttaagacccagcccttacatttgtgccgaatgggaatacggtggcttgccaggctggatcatcaatgaagacctccaccctagaagctccgaccctgctttcttagaactggttgacaagttctttgccagactcttcaaagaagtgggcgacctccaatttacccatggtggtccaatcttgatgatgcaaatcgaaaacgaatacgggtcttatggggaagataagaactacttaaaaggtgtttacgatagtatgaaggctcacggggctgacgttcccctctgtacctcagacggggcctggctggctacccttcgagcaggaactttaacggatattgacgaagacatcctgattaccggcaacttcgggtccaaagccaaagagaactttggcaacttgaaagacttccacgacaagattggtaaagaatggccccttatggtcatggaattctggtgcggttggtttaaccgctggggtgaacccattgtcacccgggaaacagatgaattggtggaagccttaagagaggccatccaattgggcagtgtcaacctctacatgttccaaggtgggactaactttggctttatgaatggctgttctgcccgagggactcatgacctccaccagatcacttcttacgactacggtgctcccttagacgaacaaggcaatccaactgaaaaatactatgccatccaaaaaatgatcaaggaagaattccctgatatcgaccaggctgaaccccttgtcaaagagtccactgcacaagaaaatgtccagttggaagctaaggtcaacctggtagatagcctagaccaggtggcggaccgagtcgatagcttgtacacccggtccatggatgaattaggtcagcactatggctacatcctttaccaaactgactttgtcaaagatctggacgaagaagagcggctccgagttatcgatggccgagaccgggcccatgtcttcttaaatgaccgtcacttggctacccaataccaagaagaaattggcgaagacatcaccactggtcccttggaagagtctaacaagttggatgtcttggttgaaaatatgggtcgggtcaactacggccacaagcttttagccgacacccaggaaaaagggatccggcaaggggttacctcagacctccacttcttgacaaactggcgccagtacttgatcgactttgaccgggtcgaccaaattgactacagcttagaaaaagacttcaaagaaggcctgccaagtttctataaatttaaggtgacttttgatgacttagaagatacctatattgacttgtctgacttcggcaaggggattgtcctagtcaatggtcataacctaggtcggttctgggaccttggcccaaccttgtccctttacctccctaaagccttcctcaaagaaggggacaatgaggtcactattttcgaaacggaagggaaatatgcaccaagcctttcctttaaagctaaccatgtgtataaaaaaatggaagaggactag

SEQ ID NO: 1520 - protein, 448 aa, Alloiococcus otitidis
MMQIENEYGSYGEDKNYLKGVYDSMKAHGADVPLCTSDGAWLATLRAGTLTDIDEDILITGNFGSKAKENFGNLKDFHDKIGKEWPLMVMEFWCGWFNRWGEPIVTRETDELVEALREAIQLGSVNLYMFQGGTNFGFMNGCSARGTHDLHQITSYDYGAPLDEQGNPTEKYYAIQKMIKEEFPDIDQAEPLVKESTAQENVQLEAKVNLVDSLDQVADRVDSLYTRSMDELGQHYGYILYQTDFVKDLDEEERLRVIDGRDRAHVFLNDRHLATQYQEEIGEDITTGPLEESNKLDVLVENMGRVNYGHKLLADTQEKGIRQGVTSDLHFLTNWRQYLIDFDRVDQIDYSLEKDFKEGLPSFYKFKVTFDDLEDTYIDLSDFGKGIVLVNGHNLGRFWDLGPTLSLYLPKAFLKEGDNEVTIFETEGKYAPSLSFKANHVYKKMEED

SEQ ID NO: 1521 - DNA, 1797 bp, Alloiococcus otitidis; identical to SEQ ID NO: 1519
  CDS (148)..(1794)

SEQ ID NO: 1522 - protein, 549 aa, Alloiococcus otitidis
METYVPWNVHEPEPGHFDFSGNLDVKAFIKEAEDLGLYVILRPSPYICAEWEYGGLPGWIINEDLHPRSSDPAFLELVDKFFARLFKEVGDLQFTHGGPILMMQIENEYGSYGEDKNYLKGVYDSMKAHGADVPLCTSDGAWLATLRAGTLTDIDEDILITGNFGSKAKENFGNLKDFHDKIGKEWPLMVMEFWCGWFNRWGEPIVTRETDELVEALREAIQLGSVNLYMFQGGTNFGFMNGCSARGTHDLHQITSYDYGAPLDEQGNPTEKYYAIQKMIKEEFPDIDQAEPLVKESTAQENVQLEAKVNLVDSLDQVADRVDSLYTRSMDELGQHYGYILYQTDFVKDLDEEERLRVIDGRDRAHVFLNDRHLATQYQEEIGEDITTGPLEESNKLDVLVENMGRVNYGHKLLADTQEKGIRQGVTSDLHFLTNWRQYLIDFDRVDQIDYSLEKDFKEGLPSFYKFKVTFDDLEDTYIDLSDFGKGIVLVNGHNLGRFWDLGPTLSLYLPKAFLKEGDNEVTIFETEGKYAPSLSFKANHVYKKMEED

SEQ ID NO: 1523 - DNA, 1797 bp, Alloiococcus otitidis; identical to SEQ ID NO: 1519
  CDS (133)..(1794)

SEQ ID NO: 1524 - protein, 554 aa, Alloiococcus otitidis
MGFNTVETYVPWNVHEPEPGHFDFSGNLDVKAFIKEAEDLGLYVILRPSPYICAEWEYGGLPGWIINEDLHPRSSDPAFLELVDKFFARLFKEVGDLQFTHGGPILMMQIENEYGSYGEDKNYLKGVYDSMKAHGADVPLCTSDGAWLATLRAGTLTDIDEDILITGNFGSKAKENFGNLKDFHDKIGKEWPLMVMEFWCGWFNRWGEPIVTRETDELVEALREAIQLGSVNLYMFQGGTNFGFMNGCSARGTHDLHQITSYDYGAPLDEQGNPTEKYYAIQKMIKEEFPDIDQAEPLVKESTAQENVQLEAKVNLVDSLDQVADRVDSLYTRSMDELGQHYGYILYQTDFVKDLDEEERLRVIDGRDRAHVFLNDRHLATQYQEEIGEDITTGPLEESNKLDVLVENMGRVNYGHKLLADTQEKGIRQGVTSDLHFLTNWRQYLIDFDRVDQIDYSLEKDFKEGLPSFYKFKVTFDDLEDTYIDLSDFGKGIVLVNGHNLGRFWDLGPTLSLYLPKAFLKEGDNEVTIFETEGKYAPSLSFKANHVYKKMEED

SEQ ID NO: 1525 - DNA, 1797 bp, Alloiococcus otitidis; identical to SEQ ID NO: 1519
  CDS (4)..(1794)

SEQ ID NO: 1526 - protein, 597 aa, Alloiococcus otitidis
MTDFQIKDKFYLDGEPFQFLSGAIHYFRIPRADWHHSLYNLKALGFNTVETYVPWNVHEPEPGHFDFSGNLDVKAFIKEAEDLGLYVILRPSPYICAEWEYGGLPGWIINEDLHPRSSDPAFLELVDKFFARLFKEVGDLQFTHGGPILMMQIENEYGSYGEDKNYLKGVYDSMKAHGADVPLCTSDGAWLATLRAGTLTDIDEDILITGNFGSKAKENFGNLKDFHDKIGKEWPLMVMEFWCGWFNRWGEPIVTRETDELVEALREAIQLGSVNLYMFQGGTNFGFMNGCSARGTHDLHQITSYDYGAPLDEQGNPTEKYYAIQKMIKEEFPDIDQAEPLVKESTAQENVQLEAKVNLVDSLDQVADRVDSLYTRSMDELGQHYGYILYQTDFVKDLDEEERLRVIDGRDRAHVFLNDRHLATQYQEEIGEDITTGPLEESNKLDVLVENMGRVNYGHKLLADTQEKGIRQGVTSDLHFLTNWRQYLIDFDRVDQIDYSLEKDFKEGLPSFYKFKVTFDDLEDTYIDLSDFGKGIVLVNGHNLGRFWDLGPTLSLYLPKAFLKEGDNEVTIFETEGKYAPSLSFKANHVYKKMEED

SEQ ID NO: 1527 - DNA, 537 bp, Alloiococcus otitidis
  CDS (55)..(534)
aaaaatggaagaggactagcccaagggttattcccaaaaataaggaggaagaatatgataatcggttcaagaatagatggccgtctcatccacggccaggtagccaacttatgggggtctaagctccagctcgaccgttttatcgtcattgacgacaaggtgtctgaaagcgacgtggagaagtctggtttaagacttgccactcctgcttctatgcgcctgtctgttttgccgattgaccgggcagctaagcagctaaaggaagaccgctacaagtcacaacgggtcatgctagtggcgaagaacccgcaagtctaccttgccttggtggataagggagttgccattgacaaaattaatgtggggaacatgtcccaaactgaccaaactcggtccatcaccaactccattaacgtaacggacgaagacgttgaagtttttaaagagttgcggaacaaaggcatccagctcaccgcccaaatggtgcccaacgacaacgctaaagacttcatgaaattactcaaagaagaaagctaa

SEQ ID NO: 1528 - protein, 160 aa, Alloiococcus otitidis
MIIGSRIDGRLIHGQVANLWGSKLQLDRFIVIDDKVSESDVEKSGLRLATPASMRLSVLPIDRAAKQLKEDRYKSQRVMLVAKNPQVYLALVDKGVAIDKINVGNMSQTDQTRSITNSINVTDEDVEVFKELRNKGIQLTAQMVPNDNAKDFMKLLKEES

SEQ ID NO: 1529 - DNA, 936 bp, Alloiococcus otitidis
  CDS (133)..(933)
ggaggaagacaaatggatatagcattttggcagatacttttaattaccctgtattctggtttccagatttgggatgagttgcacccggtcacttcgatcgggtcacccctctttgccggattttttaccggcttggtcatgggggatatgacaacaggtctcttaatcggggcagggatgcagttgacaatcttaggtgtagggactttcgggggtgcctctcggattgacgcaaactccggtaccatcgtcgcaaccgtcttttccatcgggatcggtatggatccacaacaggctatgtcaaccttggctgttccagtagctagcctcttggtccaactcgacgtcttggctcgttttgccaacaccttcttccaacaccgaattgacacagcgattgaaaaccacgactacaaatccattgaacgcaactacttagcaggtctactaccatggtcactatctcgtatgattccaatctttattgtcctaactatcggaagtggtgtcatcacccaagctgttgaattcctaaacaatgaactcggttggttagcagaagggttaaccttagctggtgcggtactccctgcagttggttttgcaatcttgcttcgttacctaccagtcaaaaaacacctcccatacttaattttaggttttacaatcactgctatcttctctgagctattcaccgatgtatcccttattgggaacgaagttattggcctatctgaagaattcgcagctaacttcaacgaattgccacttcttgccatcttcttcatcggcctagctattacctacatctactacaaaaactctacttcaaaagctagcccagcaggtccaagtgacggtggttctagcccagaccaagaaagtttagaggcttctgacaatgcggagggagagattttagatgacgaactctaa

SEQ ID NO: 1530 - protein, 267 aa, Alloiococcus otitidis
MVMGDMTTGLLIGAGMQLTILGVGTFGGASRIDANSGTIVATVFSIGIGMDPQQAMSTLAVPVASLLVQLDVLARFANTFFQHRIDTAIENHDYKSIERNYLAGLLPWSLSRMIPIFIVLTIGSGVITQAVEFLNNELGWLAEGLTLAGAVLPAVGFAILLRYLPVKKHLPYLILGFTITAIFSELFTDVSLIGNEVIGLSEEFAANFNELPLLAIFFIGLAITYIYYKNSTSKASPAGPSDGGSSPDQESLEASDNAEGEILDDEL

SEQ ID NO: 1531 - DNA, 936 bp, Alloiococcus otitidis; identical to SEQ ID NO: 1529
  CDS (13)..(933)

SEQ ID NO: 1532 - protein, 307 aa, Alloiococcus otitidis
MDIAFWQILLITLYSGFQIWDELHPVTSIGSPLFAGFFTGLVMGDMTTGLLIGAGMQLTILGVGTFGGASRIDANSGTIVATVFSIGIGMDPQQAMSTLAVPVASLLVQLDVLARFANTFFQHRIDTAIENHDYKSIERNYLAGLLPWSLSRMIPIFIVLTIGSGVITQAVEFLNNELGWLAEGLTLAGAVLPAVGFAILLRYLPVKKHLPYLILGFTITAIFSELFTDVSLIGNEVIGLSEEFAANFNELPLLAIFFIGLAITYIYYKNSTSKASPAGPSDGGSSPDQESLEASDNAEGEILDDEL

SEQ ID NO: 1533 - DNA, 822 bp, Alloiococcus otitidis
  CDS (529)..(819)
atgacgaactctaatgaaaacaaaacaaactacaaattaaccgataaagactttagacagattaacttgcggtctctatttggcttccaaataggttggaactatgagcggatgcaagggtccggctacctttaccacatattgccccaactccgtaaaatgtatggggacaataccgatgaactaaaagaagctatgagaacccacaaccaattcttcaacacttcgccattctttaataccgtgattaccggtatcgacttgtccattgaggaaaaagaagggattgaagccgttgaatctgctgccggtgttaaggctggtttgatgggatcttttgccgcagttggggactccctcttcggtgctttggtgccagccatcttcggtgctatcggagccaaccttggggccaatggaaacccattagggatcttactttggatcattgctggaattgttatctgtgtgttcagatggagccaattaaaatatgcttaccggtcagggactaaactggtcagtgatttgcaaggccaattgtcagcctttacagatgctgctaccctacttggggttttcatggttggagccttggttgcaaccatgatcgatgtcaacatcggtatcagccctgagatagcgggtgttacagttgatgtccaaaatatctttgacatgattatgcccaaagcagttcctgcccttatcgtcggttttgtctactggttactaggacgggagaatatgacctcgaccaaggctatctttatagtccttattgtgtcagttatcctatctgctttaggtatcctcgtatag

SEQ ID NO: 1534 - protein, 97 aa, Alloiococcus otitidis
MQGQLSAFTDAATLLGVFMVGALVATMIDVNIGISPEIAGVTVDVQNIFDMIMPKAVPALIVGFVYWLLGRENMTSTKAIFIVLIVSVILSALGILV

SEQ ID NO: 1535 - DNA, 822 bp, Alloiococcus otitidis; identical to SEQ ID NO: 1533
  CDS (325)..(819)

SEQ ID NO: 1536 - protein, 165 aa, Alloiococcus otitidis
MMGSFAAVGDSLFGALVPAIFGAIGANLGANGNPLGILLWIIAGIVICVFRWSQLKYAYRSGTKLVSDLQGQLSAFTDAATLLGVFMVGALVATMIDVNIGISPEIAGVTVDVQNIFDMIMPKAVPALIVGFVYWLLGRENMTSTKAIFIVLIVSVILSALGILV

SEQ ID NO: 1537 - DNA, 822 bp, Alloiococcus otitidis; identical to SEQ ID NO: 1533
  CDS (160)..(819)

SEQ ID NO: 1538 - protein, 220 aa, Alloiococcus otitidis
MYGDNTDELKEAMRTHNQFFNTSPFFNTVITGIDLSIEEKEGIEAVESAAGVKAGLMGSFAAVGDSLFGALVPAIFGAIGANLGANGNPLGILLWIIAGIVICVFRWSQLKYAYRSGTKLVSDLQGQLSAFTDAATLLGVFMVGALVATMIDVNIGISPEIAGVTVDVQNIFDMIMPKAVPALIVGFVYWLLGRENMTSTKAIFIVLIVSVILSALGILV

SEQ ID NO: 1539 - DNA, 822 bp, Alloiococcus otitidis; identical to SEQ ID NO: 1533
  CDS (1)..(819)

SEQ ID NO: 1540 - protein, 273 aa, Alloiococcus otitidis
MTNSNENKTNYKLTDKDFRQINLRSLFGFQIGWNYERMQGSGYLYHILPQLRKMYGDNTDELKEAMRTHNQFFNTSPFFNTVITGIDLSIEEKEGIEAVESAAGVKAGLMGSFAAVGDSLFGALVPAIFGAIGANLGANGNPLGILLWIIAGIVICVFRWSQLKYAYRSGTKLVSDLQGQLSAFTDAATLLGVFMVGALVATMIDVNIGISPEIAGVTVDVQNIFDMIMPKAVPALIVGFVYWLLGRENMTSTKAIFIVLIVSVILSALGILV

SEQ ID NO: 1541 - DNA, 399 bp, Alloiococcus otitidis
  CDS (16)..(396)
ggaaggacggaaaaagtgaaacacttaattttagcaagtcacggcgacttatcacaagccatcaagaaaagtgccgaaatgattatgggcccacaagaaaacattacagctattagcttggaaccccaagaaagccaggaagacttcaaggccaagtttgaagaagccaagtctggcttggaagattttgtcgtcttcactgacctatctggtgggacccctaacaatgtcgtagcccgctacctcttagaaggggctgacttcccagtttatgctggcatgaacctgcctatggtcattgcctttgtcaacgctgaaatgttggaagaaggggacgtggactacagcgaaaaagccaaagaaaacatcctcaaaattaacgatatgttaggtaaataa

SEQ ID NO: 1542 - protein, 127 aa, Alloiococcus otitidis
MKHLILASHGDLSQAIKKSAEMIMGPQENITAISLEPQESQEDFKAKFEEAKSGLEDFVVFTDLSGGTPNNVVARYLLEGADFPVYAGMNLPMVIAFVNAEMLEEGDVDYSEKAKENILKINDMLGK

SEQ ID NO: 1543 - DNA, 1221 bp, Alloiococcus otitidis
  CDS (43)..(1218)
gtttgtgccccagttcattgcttaacttgtccaagtcattgtatgaaggagattgacatgtttaacaaaactgaccaagaattaaaagatttaggtgctgatatcaccacccgtgaaatcaagcagcagcctgctttatgggaagaagttatccaagactttaagacaaacggcgagtattatgccaatttcttgtccactattaaagaccgtcacgaccacacccgggttattttcaccggggcagggacctctgcctttgtcggcgaaagcatcaaagagtacttgaacaaggtagaaggagaaggcaaactttcctttgaagccattgccactaccgacttggttgccaccccggaatactacctaaaagaagatgtgccaaccgtcttggtctcctttgcccggtctgggaactcaccagagagtgtggcagcagtcaatgtagcagacaaaattgttaaggacctctaccacatcaccatcacttgttccaaagaaggaaaattggcccaagctgctgaaaaatcagacgacaacctcttgattttacagccagagctttccaatgaccaaggctttgctatgactgggtcttacacctgtatggccctatctgccctcttcttatttgacccaactgacctcagccaaaaaattgactgggctcggcaaattgtcaaattaggtgggcaagttatcgatcgggaagatgaaattgctgacctggttgctggtgacttcaaccgggtggtctacctgggcggggcgaacttctttggtctagccaaagaaagccagttgaagatcttagagctcacagctggtcaaatcgcaacccaatatgaaaccccactaggcttccgtcacgggccaaaatcctttgtcaatgaagagactattgtcatcctatttgctatcaatgatgcttacacccgccaatacgaagaagacatcatgaatgaagtctaccacgacaaaattgccaaccaggtcctctcagtctcaaccaaaaaattggaccacgatgccaagcaatttgtcttagacagtgaccttgaagtgccggatgcttacttggtcctcccatacgtcatcttgggtcagaccgtttccttgcataccgctgtcaaggtcggcaacaaaccagacaccccatccccaaccggaactgtcaaccgggttgtccaaggggttgtcatttacgactacgacaaataa

SEQ ID NO: 1544 - protein, 392 aa, Alloiococcus otitidis
MKEIDMFNKTDQELKDLGADITTREIKQQPALWEEVIQDFKTNGEYYANFLSTIKDRHDHTRVIFTGAGTSAFVGESIKEYLNKVEGEGKLSFEAIATTDLVATPEYYLKEDVPTVLVSFARSGNSPESVAAVNVADKIVKDLYHITITCSKEGKLAQAAEKSDDNLLILQPELSNDQGFAMTGSYTCMALSALFLFDPTDLSQKIDWARQIVKLGGQVIDREDEIADLVAGDFNRVVYLGGANFFGLAKESQLKILELTAGQIATQYETPLGFRHGPKSFVNEETIVILFAINDAYTRQYEEDIMNEVYHDKIANQVLSVSTKKLDHDAKQFVLDSDLEVPDAYLVLPYVILGQTVSLHTAVKVGNKPDTPSPTGTVNRVVQGVVIYDYDK

SEQ ID NO: 1545 - DNA, 1443 bp, Alloiococcus otitidis
  CDS (1072)..(1440)
ccacgaagccgaaatggaggaaagaaaatgagtactattattgaatttgccaacactatcttccagcccttgattgacttaggtgcacctgccatgatgtttatcttgctgaccattatggcccttttaatggggattaagttttccaaggccttggaaggtggtttgaagttagcagttgccttggttgggattggtttggttatcgatattttaaccggaagttttgccccagccttgcaagattttgtggcgtccactgggatttacctccccattattgacgtgggctgggcccctttggctactatcacttgggggtcagcttacaccctcttcttcttgatggtcttggtaattgttaacttagtcttactctacttaaacaaaacggacaccctggatgtggacatttttaacttttggcacttatccattattggccttttggtcatgtattattctgacaacctgctcatcgctaccctcctggtcattttcttaggtgttttgaaattcttcaattcagacttgatgaagccgacctttaacgacctcttggacatgcctgattctaacccgaccaccactacccaccttaatttcatgctcaacccccttatcatgctggtggataccgtcatcgaaaaactattccctttcatcgacaagtatgactttgatgcggctgaattgaacagtaaaattggcttttggggcagtaagtttgccatcggtgcttatttgggtgtttttgttggaattctaggccagcaagatgtagttgatattttccaactggcctttatcggagccgcttccttggaactcttctcaattgttgggacctggtttatcgatgctatggagccactctcacaagggattacagactttatgaataaacgcttgggaggacgccaagttttgattgggatcgactggcccttcctagcagcccggccggaaatgagggctgccgctaacgttatagcacctattatgcttctcttggccttgatcttaccgggcaaccaaatcctgccccttggtgggattatcgccattggtttgaccccagctttgctggtggtttgccggggtaaattgattcggatgatcttgatcgggtctttgatcattcctgtcttcctttggtctgggaccgccattgcccccttcgttaccaatgtggcccaaagcgtaggtgcgacacctcaaggcgttgaaactgggactatgattacccactccaccttggaaggcccggtcgaaaaatttttgggtatcttggtgggacaagcagctgacggctttaacctcatgcctattgtctatgccttgcttgctctagctgtttatagcttacttttcatttggtacgttcgccaaatgaaaaaacgaaatgcagaatacgcagcccaaaaagcagaggaaaaataa

SEQ ID NO: 1546 - protein, 123 aa, Alloiococcus otitidis
MTPALLVVCRGKLIRMILIGSLIIPVFLWSGTAIAPFVTNVAQSVGATPQGVETGTMITHSTLEGPVEKFLGILVGQAADGFNLMPIVYALLALAVYSLLFIWYVRQMKKRNAEYAAQKAEEK

SEQ ID NO: 1547 - DNA, 1443 bp, Alloiococcus otitidis; identical to SEQ ID NO: 1545
  CDS (118)..(1440)

SEQ ID NO: 1548 - protein, 441 aa, Alloiococcus otitidis
MALLMGIKFSKALEGGLKLAVALVGIGLVIDILTGSFAPALQDFVASTGIYLPIIDVGWAPLATITWGSAYTLFFLMVLVIVNLVLLYLNKTDTLDVDIFNFWHLSIIGLLVMYYSDNLLIATLLVIFLGVLKFFNSDLMKPTFNDLLDMPDSNPTTTTHLNFMLNPLIMLVDTVIEKLFPFIDKYDFDAAELNSKIGFWGSKFAIGAYLGVFVGILGQQDVVDIFQLAFIGAASLELFSIVGTWFIDAMEPLSQGITDFMNKRLGGRQVLIGIDWPFLAARPEMRAAANVIAPIMLLLALILPGNQILPLGGIIAIGLTPALLVVCRGKLIRMILIGSLIIPVFLWSGTAIAPFVTNVAQSVGATPQGVETGTMITHSTLEGPVEKFLGILVGQAADGFNLMPIVYALLALAVYSLLFIWYVRQMKKRNAEYAAQKAEEK

SEQ ID NO: 1549 - DNA, 1443 bp, Alloiococcus otitidis; identical to SEQ ID NO: 1545
  CDS (28)..(1440)

SEQ ID NO: 1550 - protein, 471 aa, Alloiococcus otitidis
MSTIIEFANTIFQPLIDLGAPAMMFILLTIMALLMGIKFSKALEGGLKLAVALVGIGLVIDILTGSFAPALQDFVASTGIYLPIIDVGWAPLATITWGSAYTLFFLMVLVIVNLVLLYLNKTDTLDVDIFNFWHLSIIGLLVMYYSDNLLIATLLVIFLGVLKFFNSDLMKPTFNDLLDMPDSNPTTTTHLNFMLNPLIMLVDTVIEKLFPFIDKYDFDAAELNSKIGFWGSKFAIGAYLGVFVGILGQQDVVDIFQLAFIGAASLELFSIVGTWFIDAMEPLSQGITDFMNKRLGGRQVLIGIDWPFLAARPEMRAAANVIAPIMLLLALILPGNQILPLGGIIAIGLTPALLVVCRGKLIRMILIGSLIIPVFLWSGTAIAPFVTNVAQSVGATPQGVETGTMITHSTLEGPVEKFLGILVGQAADGFNLMPIVYALLALAVYSLLFIWYVRQMKKRNAEYAAQKAEEK

SEQ ID NO: 1551 - DNA, 282 bp, Alloiococcus otitidis
  CDS (7)..(279)
actttcttggtccggtttagtttcctgttctttttggcttattgggctatccggttcttctggagtttttgcttctgcttgaccttctggggaaacttgtttgcctgtgtttgcttttgtgttttcgtttttgtcgcggttggctttttctgtttgaccccattcggctttttcaccaggctcaaagtcgccttcaccagcttggccctctacgacatcctctgtaaaaaagtctcctacttggcctgggtcttccgttatgaggtctccagcttggtctga

SEQ ID NO: 1552 - protein, 91 aa, Alloiococcus otitidis
MVRFSFLFFLAYWAIRFFWSFCFCLTFWGNLFACVCFCVFVFVAVGFFCLTPFGFFTRLKVAFTSLALYDILCKKVSYLAWVFRYEVSSLV

SEQ ID NO: 1553 - DNA, 321 bp, Alloiococcus otitidis
  CDS (28)..(318)
gtacctgcccaaccatctagactaataatgaaacgacggctacctccagaggcgttttccataatatctccagcttgttgggtcccgtgcaatccaaatgaatatccaggccccacccaagctacgtctgtttttaaaactcggactaaagctttgccaacttcatttgctaaatctctctgtaataatgggggcaatgactcatccggagtcaactcagattcagtccacaaaccagttacaacacctttatccctagcttcttcagcaaactttctaagatttaagatattgccttctaggctatcttcttgtccgtaa

SEQ ID NO: 1554 - protein, 97 aa, Alloiococcus otitidis
MKRRLPPEAFSIISPACWVPCNPNEYPGPTQATSVFKTRTKALPTSFAKSLCNNGGNDSSGVNSDSVHKPVTTPLSLASSANFLRFKILPSRLSSCP

SEQ ID NO: 1555 - DNA, 576 bp, Alloiococcus otitidis
  CDS (49)..(573)
gactggttggggctgcttcctcgtagtcaatattccattcaaagtctggtgctaggaagtcatagaccgagtctaccgaagtttccccttcgatgcttgggtagtctgtatcttcatcgtagtcaatgttccactcgaagtctggagcgaggaagtcatagaccgagtccaccgaagtttccccttcgatgcttgggtagtctgtatcttcgtcgtcgtcaatattccactcaaagactggggccaagaagtcatagaccgagtctaccgaagtttccccttcaatgcttgggtagtctgtgtcttcatcgtcgtcaatattccactcaaagactggagctaggaagtcatagaccgagtcaacagagagttctccttcaatggttgggtagtctgtgctttcttcgtcgtcaatgttccactcaaagactggagctaggaagtcatagaccgagtcaacagagagttctccttcaatggttgggtagtctgtatcttcttcgtcatcaatgttccactcaaagacgggtgctaggaagtcatagaccgaatcaacggagagttctccttcaatag

SEQ ID NO: 1556 - protein, 175 aa, Alloiococcus otitidis
MLGSHRPSLPKFPLRCLGSLYLHRSQCSTRSLERGSHRPSPPKFPLRCLGSLYLRRRQYSTQRLGPRSHRPSLPKFPLQCLGSLCLHRRQYSTQRLELGSHRPSQQRVLLQWLGSLCFLRRQCSTQRLELGSHRPSQQRVLLQWLGSLYLLRHQCSTQRRVLGSHRPNQRRVLLQ

SEQ ID NO: 1557 - DNA, 576 bp, Alloiococcus otitidis; identical to SEQ ID NO: 1555
  CDS (7)..(573)

SEQ ID NO: 1558 - protein, 189 aa, Alloiococcus otitidis
MGLLPRSQYSIQSLVLGSHRPSLPKFPLRCLGSLYLHRSQCSTRSLERGSHRPSPPKFPLRCLGSLYLRRRQYSTQRLGPRSHRPSLPKFPLQCLGSLCLHRRQYSTQRLELGSHRPSQQRVLLQWLGSLCFLRRQCSTQRLELGSHRPSQQRVLLQWLGSLYLLRHQCSTQRRVLGSHRPNQRRVLLQ

SEQ ID NO: 1559 - DNA, 5658 bp, Alloiococcus otitidis
  CDS (70)..(5655)
gtaatgctaggaaaaaacaataagaaagccaaggaaagatggaatgggcgaaaagttgaccacttttcattgaaaaaattgtctgtgggtgtggtctccgtagcggtatcttccagcttgttcttctttaacagccaagaggttgcagcagaagaaggggaaggaagtcaacaagttgaagctgtggccgaccacttgtcggacaaggccaaagacttggaagactcagaccaagctggagacctcataacggaagacccaggccaagtaggagacttttttacagaggatgtcgtagagggccaagctggtgaaggcgactttgagcctggtgaaaaagccgaatggggtcaaacagaaaaagccaaccgcgacaaaaacgaaaacacaaaagcaaacacaggcaaacaagtttccccagaaggtcaagcagaagcaaaaactccagaagaaccggatagcccaataagccaaaaagaacaggaaactaaaccggaccaagaaagtctacaaggctcaactagacaagcaatacctgaaactgaccagaaagaagaatctggagctgactgggaagcaaaagtatctaaagaatcacttgatcatgataacacagggcaactaaaagaagctcaggacaaagatactattgaaaatgtagaagaaagtgattatgaacgtactgaccagcatttaggtggaataaagtccattaaccataatcagaatcaaattgaaattgaatatgaaactggtcaaactgggcgggttgatatttataccgataaaattattcgtttccaggtagagcaagagggaaatgaatttgtcgatactcctgaaccttctcaacctgataaaccagctgaaatcattactaaggatcttgatgatttcgatgtaatcgtaccaacagtaacagaaacagaaaattattatgaaatcgctactgattcactagttttggaacttgataagaaacggggaacagctaagctttataaaaaaggtcaaaaagatcctttatttgaagaagctgagccacttcaattaagtgaagaaggaaccaaacaaacacttaagtcaaatgaaaatacttattattttggtggggggacgcaaaatggtcgtttttcccacaagggtgaacgcattaacatagttaatgaaaataattgggtagatggtggtgtagcttctcccaacccattttattggactactgacggatatggtgttatccgtcacaccttccaaccaggagtatatgattttgaaaagacagattcagaacgagttactactacacaccttgaaaaccggtttgatgctttctatattgtaggagatactcctcaagaaattcttcaacaatattatgaattgactggttatcctatagtgttaccagcttactctctttatgaaggtcatttaaatgcttacaaccgtgattattggatggaagttgaagaaggtactcctggtgctgtttactttgaagaactagatggctggttctttgaacttcaacctgaacaagctagccaatatccaagctgggtattaatcagagaaacattaacaggcgaacctggtgacttgaactatccatttacagcatcagcagtactggatcgttatcagcgaaatgatatgccactaggctggatattggtaaatgatggctatggagctggttacggacaagaagatagcctagaaggcaatatcttaaatcttagaaagtttgctgaagaagctagggataaaggtgttgtaactggtttgtggactgaatctgagttgactccggatgagtcattgcccccattattacagagagatttagcaaatgaagttggcaaagctttagtccgagttttaaaaacagacgtagcttgggtggggcctggatattcatttggattgcacgggacccaacaagctggagatattatggaaaacgcctctggaggtagccgtcgtttcattattagtctagatggttgggcaggtactcaacgaaacgctgctgtttggactggggatcaaaatggcggtgaatggaaatacattcgtttccacataccgacttatattggaactggattatctggtaaccccaatgttacttccgatatggatggtatatttgggggaagaaatccaattgttaacactagagattatcaatggaaaacctttactggcatgcagttaaacatggatggatggggcgataatccgaaaaccccatttacatttgatacaacaactacggatttaaatcggtcatatttaaaacttaaatcacaattaatgccttacacttatagtttaatgcaccatgctcttgagggagaaccgatcgttcgagcaatgtttattgattttccggatgaggaagttaattatactccggcagttaactatcaatttatgtttggtgaaaatttcctagtagctccaatttacgaaaatgtcaaaatggatgaaaacggtaatgatgttcgaaacaatatttatttaccaaaaggggaaaaatggattgactactataccggagaagtatatgacggaggttacttcttacacaattttgatgcacctatttggaaattacctgtctttgtgagagcaggggccattattcctatggctaaaccaagtaataatatcaaagaatatgacccatcatatcgtgcttttgatatttatccttacggtcaaacttccttcactttggttgaagatgacggttattcaatagattatcgacaaggtaaagtagctaaaacagtgattacttcaacacaagaagatgatcatgtttctattgaggtaaacccaactcaaggtgaattcgagggtcaggtcaaagaaaaaatcaatcaatttaacattaatgttacttcacaaccaggctcggttgacctgtttattgatggggagaaagttgagttagaaactgtatctagccaagaagagttcgaaaaagggactaatgttatttattatgatgctgaaccagatttaaatcaatattctactgaaggcggggccttctatggcaagcaattaataaaaaatccagttcttcggattaaaactgatttcgtttcaattaattcttctattaaattagaagttgaaggctttgtttatgacaaacctgtaaatcaagccacaggagatgtgagaggtgacgctccagacttaattgttgaagaagagggaataacaagcgatactattactttgacatggttggatgtcccaggggctcagcgttatgacttattagttgacgatattcttcatgtcaacattaaagagcctatttttacccaaactaatttaagacctgaaacatcctatactttccgagttagagctgtctttgatgaccatgtaactgagtggtccagtccaaaaactgttaaaacagctgaagatgatttttcatgggctattacagtgcaaaatattcaagctgacttcgatagtcagcctggacaagatatagaagccttagttgacggagatcctagtagccatttccactctcattgggataaagattctgttccaggccgaattcaaatggacatgggtaaagtttataccattaatcgtttggcttaccaaccaagaacagatggtggaactaatggcataattactaaaatggatattgcttattcaattgatggttctaactggcacagattagatgaaaatgtcgaatttcaaattagtccggacttaaaatttattgacttggatgaagctatacaagctcgttatttggtccttactattcttgagacagctgacaatgaatttatttcaggtaatgaattctatattttccaagagcctaatagtaaaccattagtagctggggatgtgaccggagacggtaaggttgattctagcgatattatgtctttcaaaaattatgctggcttacgacgaggagacagtgattttgacggatatatagaagtcgcggatctgaatcaaaacggttttatagatgcttatgatatttatctggctacaagacaactttcaagtcaagttagcccaggatcggaagaacctcaagaagtaaatggacatttaaccctagtcagtgataaaaaacaagttaatgctggcgatacatttactctgagtttagtggggcagaatctcaaaggagttcatgccattaatggggtaattccattgagtacaaatcagttgtctgctgatgaaaatataaaaatatctaatgaagttcaaaccatggagaatttttctcgtattcgaactcatgctaatggggaaactgttgcttatattattttggctaactataaaaatagtccttctattgaaggtaatagtgttattgcaagcataacacttaaagctgaagaagacttagatcttgaagagttactcgaaaacttgaatgatcaactctttttccttgttggtaaagatatgaaagttatccaaggactagttgaagaaacatcagagtcagacgaagactacccaactattgaaggagaactctccgttgattcggtctatgacttcctagcacccgtctttgagtggaacattgatgacgaagaagatacagactacccaaccattgaaggagaactctctgttgactcggtctatgacttcctagctccagtctttgagtggaacattgacgacgaagaaagcacagactacccaaccattgaaggagaactctctgttgactcggtctatgacttcctagctccagtctttgagtggaatattgacgacgatgaagacacagactacccaagcattgaaggggaaacttcggtagactcggtctatgacttcttggccccagtctttgagtggaatattgacgacgacgaagatacagactacccaagcatcgaaggggaaacttcggtggactcggtctatgacttcctcgctccagacttcgagtggaacattgactacgatgaagatacagactacccaagcatcgaaggggaaacttcggtagactcggtctatgacttcctagcaccagactttgaatggaatattgactacgaggaagcagccccaaccagtcctagcccagacccagatcatgaccaggatgacgatagtcaagatccagatggtgctagtggccaagctccagaccttgatgacttagagcctaaacctggtgatccagacgacagggaagacccacaagctgactcagatgaccaagaaggccaagttggtcaagatcctagcgacccagtggacagtcaagggactccaaaagctagcgtcaaaccagtcaaatctgacaaaacttccccagtagttccaagccaggacactggctccaaagaagctagccaggtcaaagacaacaaggcccttgactatttgcttaaacaggctaaagctgaaaaagctggaagtcagaaagcggccagccaacaccctcaaactgattctgcaagtcaggctaaagattccaaaggcaaggaagctttaccagacactgccacatcagcttgggctctgggagctcttggtttgtcagcccttcttttaggactgggcattcaaaagttcaaaaaagaagacaaagaagactag

SEQ ID NO: 1560 - protein, 1862 aa, Alloiococcus otitidis
MKKLSVGVVSVAVSSSLFFFNSQEVAAEEGEGSQQVEAVADHLSDKAKDLEDSDQAGDLITEDPGQVGDFFTEDVVEGQAGEGDFEPGEKAEWGQTEKANRDKNENTKANTGKQVSPEGQAEAKTPEEPDSPISQKEQETKPDQESLQGSTRQAIPETDQKEESGADWEAKVSKESLDHDNTGQLKEAQDKDTIENVEESDYERTDQHLGGIKSINHNQNQIEIEYETGQTGRVDIYTDKIIRFQVEQEGNEFVDTPEPSQPDKPAEIITKDLDDFDVIVPTVTETENYYEIATDSLVLELDKKRGTAKLYKKGQKDPLFEEAEPLQLSEEGTKQTLKSNENTYYFGGGTQNGRFSHKGERINIVNENNWVDGGVASPNPFYWTTDGYGVIRHTFQPGVYDFEKTDSERVTTTHLENRFDAFYIVGDTPQEILQQYYELTGYPIVLPAYSLYEGHLNAYNRDYWMEVEEGTPGAVYFEELDGWFFELQPEQASQYPSWVLIRETLTGEPGDLNYPFTASAVLDRYQRNDMPLGWILVNDGYGAGYGQEDSLEGNILNLRKFAEEARDKGVVTGLWTESELTPDESLPPLLQRDLANEVGKALVRVLKTDVAWVGPGYSFGLHGTQQAGDIMENASGGSRRFIISLDGWAGTQRNAAVWTGDQNGGEWKYIRFHIPTYIGTGLSGNPNVTSDMDGIFGGRNPIVNTRDYQWKTFTGMQLNMDGWGDNPKTPFTFDTTTTDLNRSYLKLKSQLMPYTYSLMHHALEGEPIVRAMFIDFPDEEVNYTPAVNYQFMFGENFLVAPIYENVKMDENGNDVRNNIYLPKGEKWIDYYTGEVYDGGYFLHNFDAPIWKLPVFVRAGAIIPMAKPSNNIKEYDPSYRAFDIYPYGQTSFTLVEDDGYSIDYRQGKVAKTVITSTQEDDHVSIEVNPTQGEFEGQVKEKINQFNINVTSQPGSVDLFIDGEKVELETVSSQEEFEKGTNVIYYDAEPDLNQYSTEGGAFYGKQLIKNPVLRIKTDFVSINSSIKLEVEGFVYDKPVNQATGDVRGDAPDLIVEEEGITSDTITLTWLDVPGAQRYDLLVDDILHVNIKEPIFTQTNLRPETSYTFRVRAVFDDHVTEWSSPKTVKTAEDDFSWAITVQNIQADFDSQPGQDIEALVDGDPSSHFHSHWDKDSVPGRIQMDMGKVYTINRLAYQPRTDGGTNGIITKMDIAYSIDGSNWHRLDENVEFQISPDLKFIDLDEAIQARYLVLTILETADNEFISGNEFYIFQEPNSKPLVAGDVTGDGKVDSSDIMSFKNYAGLRRGDSDFDGYIEVADLNQNGFIDAYDIYLATRQLSSQVSPGSEEPQEVNGHLTLVSDKKQVNAGDTFTLSLVGQNLKGVHAINGVIPLSTNQLSADENIKISNEVQTMENFSRIRTHANGETVAYIILANYKNSPSIEGNSVIASITLKAEEDLDLEELLENLNDQLFFLVGKDMKVIQGLVEETSESDEDYPTIEGELSVDSVYDFLAPVFEWNIDDEEDTDYPTIEGELSVDSVYDFLAPVFEWNIDDEESTDYPTIEGELSVDSVYDFLAPVFEWNIDDDEDTDYPSIEGETSVDSVYDFLAPVFEWNIDDDEDTDYPSIEGETSVDSVYDFLAPDFEWNIDYDEDTDYPSIEGETSVDSVYDFLAPDFEWNIDYEEAAPTSPSPDPDHDQDDDSQDPDGASGQAPDLDDLEPKPGDPDDREDPQADSDDQEGQVGQDPSDPVDSQGTPKASVKPVKSDKTSPVVPSQDTGSKEASQVKDNKALDYLLKQAKAEKAGSQKAASQHPQTDSASQAKDSKGKEALPDTATSAWALGALGLSALLLGLGIQKFKKEDKED

SEQ ID NO: 1561 - DNA, 5658 bp, Alloiococcus otitidis; identical to SEQ ID NO: 1559
  CDS (4)..(5655)

SEQ ID NO: 1562 - protein, 1884 aa, Alloiococcus otitidis
MLGKNNKKAKERWNGRKVDHFSLKKLSVGVVSVAVSSSLFFFNSQEVAAEEGEGSQQVEAVADHLSDKAKDLEDSDQAGDLITEDPGQVGDFFTEDVVEGQAGEGDFEPGEKAEWGQTEKANRDKNENTKANTGKQVSPEGQAEAKTPEEPDSPISQKEQETKPDQESLQGSTRQAIPETDQKEESGADWEAKVSKESLDHDNTGQLKEAQDKDTIENVEESDYERTDQHLGGIKSINHNQNQIEIEYETGQTGRVDIYTDKIIRFQVEQEGNEFVDTPEPSQPDKPAEIITKDLDDFDVIVPTVTETENYYEIATDSLVLELDKKRGTAKLYKKGQKDPLFEEAEPLQLSEEGTKQTLKSNENTYYFGGGTQNGRFSHKGERINIVNENNWVDGGVASPNPFYWTTDGYGVIRHTFQPGVYDFEKTDSERVTTTHLENRFDAFYIVGDTPQEILQQYYELTGYPIVLPAYSLYEGHLNAYNRDYWMEVEEGTPGAVYFEELDGWFFELQPEQASQYPSWVLIRETLTGEPGDLNYPFTASAVLDRYQRNDMPLGWILVNDGYGAGYGQEDSLEGNILNLRKFAEEARDKGVVTGLWTESELTPDESLPPLLQRDLANEVGKALVRVLKTDVAWVGPGYSFGLHGTQQAGDIMENASGGSRRFIISLDGWAGTQRNAAVWTGDQNGGEWKYIRFHIPTYIGTGLSGNPNVTSDMDGIFGGRNPIVNTRDYQWKTFTGMQLNMDGWGDNPKTPFTFDTTTTDLNRSYLKLKSQLMPYTYSLMHHALEGEPIVRAMFIDFPDEEVNYTPAVNYQFMFGENFLVAPIYENVKMDENGNDVRNNIYLPKGEKWIDYYTGEVYDGGYFLHNFDAPIWKLPVFVRAGAIIPMAKPSNNIKEYDPSYRAFDIYPYGQTSFTLVEDDGYSIDYRQGKVAKTVITSTQEDDHVSIEVNPTQGEFEGQVKEKINQFNINVTSQPGSVDLFIDGEKVELETVSSQEEFEKGTNVIYYDAEPDLNQYSTEGGAFYGKQLIKNPVLRIKTDFVSINSSIKLEVEGFVYDKPVNQATGDVRGDAPDLIVEEEGITSDTITLTWLDVPGAQRYDLLVDDILHVNIKEPIFTQTNLRPETSYTFRVRAVFDDHVTEWSSPKTVKTAEDDFSWAITVQNIQADFDSQPGQDIEALVDGDPSSHFHSHWDKDSVPGRIQMDMGKVYTINRLAYQPRTDGGTNGIITKMDIAYSIDGSNWHRLDENVEFQISPDLKFIDLDEAIQARYLVLTILETADNEFISGNEFYIFQEPNSKPLVAGDVTGDGKVDSSDIMSFKNYAGLRRGDSDFDGYIEVADLNQNGFIDAYDIYLATRQLSSQVSPGSEEPQEVNGHLTLVSDKKQVNAGDTFTLSLVGQNLKGVHAINGVIPLSTNQLSADENIKISNEVQTMENFSRIRTHANGETVAYIILANYKNSPSIEGNSVIASITLKAEEDLDLEELLENLNDQLFFLVGKDMKVIQGLVEETSESDEDYPTIEGELSVDSVYDFLAPVFEWNIDDEEDTDYPTIEGELSVDSVYDFLAPVFEWNIDDEESTDYPTIEGELSVDSVYDFLAPVFEWNIDDDEDTDYPSIEGETSVDSVYDFLAPVFEWNIDDDEDTDYPSIEGETSVDSVYDFLAPDFEWNIDYDEDTDYPSIEGETSVDSVYDFLAPDFEWNIDYEEAAPTSPSPDPDHDQDDDSQDPDGASGQAPDLDDLEPKPGDPDDREDPQADSDDQEGQVGQDPSDPVDSQGTPKASVKPVKSDKTSPVVPSQDTGSKEASQVKDNKALDYLLKQAKAEKAGSQKAASQHPQTDSASQAKDSKGKEALPDTATSAWALGALGLSALLLGLGIQKFKKEDKED

SEQ ID NO: 1563 - DNA, 1356 bp, Alloiococcus otitidis
  CDS (10)..(1353)
gaaagtattatgttgaaaaatgttgggaaatggttattgatgacttcaagtgtaggtttattattagctggttgtcaaaatgaaggtgaatctcaatcggcagaatcagggcaagaaggcgaagcagaaactacagaaattactttttggcactccatgggtggtagtgttggcgaagccttagataatttagttgaagagtataacgaatctcaagatcaagtccttgtaaacgcacaataccaaggagaatatgacgattcattgactaaaattcgatcttctgcatcaggctccaatcttggtgctgacttagtacaagtttttgaattaggtacaacatttatgaaagattcaggtatgattgttcctgttcaagaatacatagaccaagatgatgaatttaacattgatgacttagagcctaaccttgcagcgtactatactattgatgatcaactttactccatgccatttaactcatctactccattaatgtactataacaaagatatatttgatgaagcgggtgttgaagttccagaatctttagaagaaattggtgctattgctgaagatttggaatcagctggagctcagatgccagctgcagttggtgtttacggttggtacattgaacaatggttctcaaaaatggaagaagatatgtacaacaataatgatggtagggatggtcaggctactgaagttgtatttgacaataatggtggtatgcagaaaattttagacacttggaaagatctaaacgaccaagaagttttaccatcagttgggcgaggcgatgcaggtggcgctgaattttcatcaggtgatgcggcgattactcttcaatcaacagctggtttaagagaaattctagaccaagtgggggatcgtttcgaagtcggtactgcctacttccctaaagttactgaagatgatcaaggtggggtttccatcggtggagcttcattgtggatgattgactctgaagatcaagaaaaaatggacgcaacctgggactttatcaaattcctaacttctccagaggtacaagcacagtggaatgcagatactggatatttccctgtagtaactacagctcacgatgaagaagtctttcaacaaaatattgaagaatttcctcaatttgaaacagctattgatcaattacatgactcatcaccagaagaccaaggtgctttaactggtactagtcaggaaaatagacaaatatacgaaacacaggtagaaagattattaaacggtgaaatttcagtagaagaagctataaatgaaatggctagccaagttaaccaagctctagaagactatgatcctgctactgctgaataa

SEQ ID NO: 1564 - protein, 448 aa, Alloiococcus otitidis
MLKNVGKWLLMTSSVGLLLAGCQNEGESQSAESGQEGEAETTEITFWHSMGGSVGEALDNLVEEYNESQDQVLVNAQYQGEYDDSLTKIRSSASGSNLGADLVQVFELGTTFMKDSGMIVPVQEYIDQDDEFNIDDLEPNLAAYYTIDDQLYSMPFNSSTPLMYYNKDIFDEAGVEVPESLEEIGAIAEDLESAGAQMPAAVGVYGWYIEQWFSKMEEDMYNNNDGRDGQATEVVFDNNGGMQKILDTWKDLNDQEVLPSVGRGDAGGAEFSSGDAAITLQSTAGLREILDQVGDRFEVGTAYFPKVTEDDQGGVSIGGASLWMIDSEDQEKMDATWDFIKFLTSPEVQAQWNADTGYFPVVTTAHDEEVFQQNIEEFPQFETAIDQLHDSSPEDQGALTGTSQENRQIYETQVERLLNGEISVEEAINEMASQVNQALEDYDPATAE

SEQ ID NO: 1565 - DNA, 918 bp, Alloiococcus otitidis
  CDS (25)..(915)
gatcatcttgtgtcacaaaaggagatggattatatgagtaagaaaggaaatgggcaaacggatggaattatgacgaaagttgagccttggctatatcttgctccgtcaattattattttgagtatatttatgttttggcctttcattcaaactatttatagaagtctttttcaaacaaatagttttggagaaatgacagaatttattggtggaagccactaccaagatttattaacttctcaatcgttttggaatagtgtgactgttacctttatttttgtggttgtagttgttttgatcggaattgtcctaggctttattggggcaattctttgtcaaaaccattttccaggacttcaatttttctcaacctcttacgctactccaatggcaatagcttctgctggtatggctttaatctttcaagttatgttaaatccgtcaatcggttttattaataaggtcttaggtacttcaacaaactatttgacccagcctttaccggccttaattatcattggggtattaacgggatggctgaatagtgggatgaattttctttattttagtgctggtttagctggtattgataattcattatatgaaagtgcgtcaatggatggggctaatggtttacaaaaatttatatatattactcttccttcaatacgtccagtgtttttctttatcattgtgactaacatcattaacgctttccagggttttggacaaattaatattttaacccaaggtggtccaggtcaagcaacgaatgttattgtatatgatatttatcgcaatgcttttgaaaattatcgctatggctatgcatctgcagaatctgtcatcctcttcttactagtgatggtactgacgatatgtatgttcatgatcgaaaggggacgaaagaatggctag

SEQ ID NO: 1566 - protein, 297 aa, Alloiococcus otitidis
MDYMSKKGNGQTDGIMTKVEPWLYLAPSIIILSIFMFWPFIQTIYRSLFQTNSFGEMTEFIGGSHYQDLLTSQSFWNSVTVTFIFVVVVVLIGIVLGFIGAILCQNHFPGLQFFSTSYATPMAIASAGMALIFQVMLNPSIGFINKVLGTSTNYLTQPLPALIIIGVLTGWLNSGMNFLYFSAGLAGIDNSLYESASMDGANGLQKFIYITLPSIRPVFFFIIVTNIINAFQGFGQINILTQGGPGQATNVIVYDIYRNAFENYRYGYASAESVILFLLVMVLTICMFMIERGRKNG

SEQ ID NO: 1567 - DNA, 918 bp, Alloiococcus otitidis; identical to SEQ ID NO: 1565
  CDS (10)..(915)

SEQ ID NO: 1568 - protein, 302 aa, Alloiococcus otitidis
MSQKEMDYMSKKGNGQTDGIMTKVEPWLYLAPSIIILSIFMFWPFIQTIYRSLFQTNSFGEMTEFIGGSHYQDLLTSQSFWNSVTVTFIFVVVVVLIGIVLGFIGAILCQNHFPGLQFFSTSYATPMAIASAGMALIFQVMLNPSIGFINKVLGTSTNYLTQPLPALIIIGVLTGWLNSGMNFLYFSAGLAGIDNSLYESASMDGANGLQKFIYITLPSIRPVFFFIIVTNIINAFQGFGQINILTQGGPGQATNVIVYDIYRNAFENYRYGYASAESVILFLLVMVLTICMFMIERGRKNG

SEQ ID NO: 1569 - DNA, 846 bp, Alloiococcus otitidis
  CDS (46)..(843)
tcgaaaggggacgaaagaatggctagaaaattggactttaaaaagatgggtctcctgtttttaaatatagtttattggatcattttgctctttcctctattttatgcaatctttatggcgatgaaatctccgtcagaattgtatgatccggaatctatattcttccctactgatccaacattacagaactttgtgaatgtatttaacgttgctcctattgggcgctatattatgaactcgttgattgtatcaatttttatcacaatttttcaacttctgacttcgaccttagcggcctatgcgtttcgttttctaaattttaaaggatctaatgctatttatagtttaatcttagcgactatgatgattcctggcgaagcagtcattatatcacaatttttaatggtaagtggctggggatggactgatactctttatgtattaattattccgtttatggtctctgcttttaacattttcctatgtcgtcaagcattagataattttccgtatgaagtttatgaagcttctaaaatggatgggtgttcccactttaggtttgtttttaccattatgatcccactcattcgacctacattaggggctatggctgttcagtcattcctacttggctggaatatgtatatgtggcccttgctagttaccaatgttgatgaagctcgaacagttcaaatcggtttaagcatgttgaatagtattgattcacagtctcttgtactaatggttgcaggagtagtcatttgtatgattcctagcttactcatctttgtatttggacaacgtaacatgattcgaggattaatgtcaggagcagtgaaaggataa

SEQ ID NO: 1570 - protein, 266 aa, Alloiococcus otitidis
MGLLFLNIVYWIILLFPLFYAIFMAMKSPSELYDPESIFFPTDPTLQNFVNVFNVAPIGRYIMNSLIVSIFITIFQLLTSTLAAYAFRFLNFKGSNAIYSLILATMMIPGEAVIISQFLMVSGWGWTDTLYVLIIPFMVSAFNIFLCRQALDNFPYEVYEASKMDGCSHFRFVFTIMIPLIRPTLGAMAVQSFLLGWNMYMWPLLVTNVDEARTVQIGLSMLNSIDSQSLVLMVAGVVICMIPSLLIFVFGQRNMIRGLMSGAVKG

SEQ ID NO: 1571 - DNA, 846 bp, Alloiococcus otitidis; identical to SEQ ID NO: 1569
  CDS (19)..(843)

SEQ ID NO: 1572 - protein, 275 aa, Alloiococcus otitidis
MARKLDFKKMGLLFLNIVYWIILLFPLFYAIFMAMKSPSELYDPESIFFPTDPTLQNFVNVFNVAPIGRYIMNSLIVSIFITIFQLLTSTLAAYAFRFLNFKGSNAIYSLILATMMIPGEAVIISQFLMVSGWGWTDTLYVLIIPFMVSAFNIFLCRQALDNFPYEVYEASKMDGCSHFRFVFTIMIPLIRPTLGAMAVQSFLLGWNMYMWPLLVTNVDEARTVQIGLSMLNSIDSQSLVLMVAGVVICMIPSLLIFVFGQRNMIRGLMSGAVKG

SEQ ID NO: 1573 - DNA, 1140 bp, Alloiococcus otitidis
  CDS (13)..(1137)
aaggataatagtatggcaaacttagaactaaaaaatgttgataaggtttatgaggatggctttcaagccgtaaaaaatattaacataaaaagtgacgaaaaagaatttatagttctcgttggtccgtctggtagtgggaagtcaacaactttacgtttaattgctggtttggaagaagtaagttcaggtgacttatttattgatggagaaaaaatcaccggactagatcctaagaatagaaatatagctatggtttttcaatcgtatgccctataccctcacatgactgtcagaaaaaatatgacctttgcattgaaactaagtggaatttcaaaaagcgaacgaaataaaatagctgatcaggtagccgaagctttagatatttctagcttaatggataaaaagccagatgccttatctggtggtcaacgtcaacgagttgctttgggaagagctatggtgagaaatcctaaagtttttctattagatgagccattgtcaaatttagatgctaaattaagggtttcaacacgatctaaaatttctaacctataccaaatgcttgatgctacttttgtttatgtgacgcatgaccaaactgaagcaatgaccatgggaactagggtagctgttatgaaccaaggacaaatagaacaattcgatacaccagttaatctttattacaatccacgtaatcgctttgtagcagaatttataggttctccccaaatgaatatgctagaaggtaagattatagacgatcagaataaacgaatgataaaaatagctgggcaaaaaaaaccactaccaaattctattgcacaacgtttaaactatgataaaaaagacggcactgtattagttggtatccgcccagaagactttgactatcatcaagacgacaaagcccaactaactttggaagttataccaaagcgtgtggagcaagtagggtcagatacaatgatatatttcttccagaaagataatgaaatggaatattgtgctcgtttatctcctgcacgtccaattgctttgaataaagcaattaaagttgatgtagagctagaacgcttgtacctttttgatacagaaaccaataatactctactcagtcctgtggaattggaggaaatttaa

SEQ ID NO: 1574 - protein, 375 aa, Alloiococcus otitidis
MANLELKNVDKVYEDGFQAVKNINIKSDEKEFIVLVGPSGSGKSTTLRLIAGLEEVSSGDLFIDGEKITGLDPKNRNIAMVFQSYALYPHMTVRKNMTFALKLSGISKSERNKIADQVAEALDISSLMDKKPDALSGGQRQRVALGRAMVRNPKVFLLDEPLSNLDAKLRVSTRSKISNLYQMLDATFVYVTHDQTEAMTMGTRVAVMNQGQIEQFDTPVNLYYNPRNRFVAEFIGSPQMNMLEGKIIDDQNKRMIKIAGQKKPLPNSIAQRLNYDKKDGTVLVGIRPEDFDYHQDDKAQLTLEVIPKRVEQVGSDTMIYFFQKDNEMEYCARLSPARPIALNKAIKVDVELERLYLFDTETNNTLLSPVELEEI

SEQ ID NO: 1575 - DNA, 786 bp, Alloiococcus otitidis
  CDS (151)..(783)
tactctactcagtcctgtggaattggaggaaatttaagattggatattattgctcatcggggatttagttccttgtatcccgaaaatactgccttagcttttaaaaaagctgttgaatatcccatttggggaatagagtgcgatgtccatatgactaaagatggtcaagttgttatctgtcatgatgaacgaattgaccgaacctcaaatggtaaaggattaattaaagatttaagtctatcccaactgcgagaatataatttctatgggaaatttccagaacaagctagcgaggatactttaatctggaccctagaggaattttttgagtggtttgcagaagaagcaataaaagtaaatatagagttaaaaacaaatatatttccttatccaggaatagtagatgccgtagcggattctattgagaagtatgatatgttagatagggttataatttcatcatttaaccatgaatcaattttagatataaaggcaagattgcccgaaatacagacagcttttttaacaatgagtttaatggtagaacctcatcaatatttgttaaaccatagtgttgatgcttatcatccattgtatttttcagtaaatgaaagaatcgtcaagggctgtcatagtcattcgatcaaggttcatccttacacaatagatgatctagagaatgtgcaaaaaatgtacgatcttggtgtggatgctgtgattactaatcaagtagataaagtatataattatttgaatcgacaattgaaagtcatacaagaagcttaa

SEQ ID NO: 1576 - protein, 211 aa, Alloiococcus otitidis
MTKDGQVVICHDERIDRTSNGKGLIKDLSLSQLREYNFYGKFPEQASEDTLIWTLEEFFEWFAEEAIKVNIELKTNIFPYPGIVDAVADSIEKYDMLDRVIISSFNHESILDIKARLPEIQTAFLTMSLMVEPHQYLLNHSVDAYHPLYFSVNERIVKGCHSHSIKVHPYTIDDLENVQKMYDLGVDAVITNQVDKVYNYLNRQLKVIQEA

SEQ ID NO: 1577 - DNA, 786 bp, Alloiococcus otitidis; identical to SEQ ID NO: 1575
  CDS (40)..(783)

SEQ ID NO: 1578 - protein, 248 aa, Alloiococcus otitidis
MDIIAHRGFSSLYPENTALAFKKAVEYPIWGIECDVHMTKDGQVVICHDERIDRTSNGKGLIKDLSLSQLREYNFYGKFPEQASEDTLIWTLEEFFEWFAEEAIKVNIELKTNIFPYPGIVDAVADSIEKYDMLDRVIISSFNHESILDIKARLPEIQTAFLTMSLMVEPHQYLLNHSVDAYHPLYFSVNERIVKGCHSHSIKVHPYTIDDLENVQKMYDLGVDAVITNQVDKVYNYLNRQLKVIQEA

SEQ ID NO: 1579 - DNA, 300 bp, Alloiococcus otitidis
  CDS (37)..(297)
ctgtccgggcgtaggagtagaattgtcaattttcttttgaagtgtaggatccgaatcattcgattgatatttaaacgactgttctgcttcaacttcctttcctgccatattataataagcacgattaatcacatggccagtattggtttggatttgaatcccacgggcgcttccgttagccatacctcctgtgtaaatttctgcaaagttctccccatagaccatattagttttaaatttttgattgaaatcatcaatagtcaagtggttattatttccatttttaatccaaaaagttag

SEQ ID NO: 1580 - protein, 87 aa, Alloiococcus otitidis
MKCRIRIIRLIFKRLFCFNFLSCHIIISTINHMASIGLDLNPTGASVSHTSCVNFCKVLPIDHISFKFLIEIINSQVVIISIFNPKS

SEQ ID NO: 1581 - DNA, 6558 bp, Alloiococcus otitidis
  CDS (58)..(6555)
aaggagaatggaaatgggcaagaaaaaaattattgtagatcttttttatactctacaatggtattaggcattgtttctttgagtaattccaacaaggtatcagctaatacatattccgaagatgtaaatgatatagttaatattgaagatactactaaagtgactagtagcgaggaattagttaataaaaatgaagctgaactagctactaatttttctgatggatatccagctagtcaagaaaaaaaagacgagaataacgacaaagttgctaatgctttagaagtgggtaacgagactgttgatgaagaagatataaataaagacaacgatttggacttgactgaagaatctattggattagaggatagtgctttagaaagatctacttttgaaactagcagtcaggttaatactaagcccagagttcgcgaagctagtggccctctttctaaagaggacattagaagtttaacggttgctgatctagaagaaaaatcttcgaatgccgaagaaaatagcgattcgaatggtacagatgattcagaatataatgcagattctagcgataaggaaagtaaccaacaagtaaatacagatatctatatttcagaaattcttcctgataatattggtaccgatcgatttgaattttttgaagttacaaatacaactaaagagccaataactttaaatgataaatataatttttcttacggctacaataatacaaacgatacaagtgaagatgtacctttatcttatgaggatcaagtggtcatttatcctcaaaatccagctgttttttggttaagttaccagacggatagtcttaattcctttgatcataatgaggaggactttcgtgctcattttggaattgatcggggaattccactataccgaattgtaggccaaaaaggtatggctaacaatggagatcgaagcattagagtttggaaggatgggaacttaatcaactggtcttattatgaagctgatgacgtgtctccgggtagctcagtcaaatatgaagtcccagatgatcctaaacaacgatcaatgcagttgtttcaaagcaatgctgccccatcaccaggatggattgaagattataataaacagtacagagcgtaccctaaactaattgtatctgaaatcatgcctgatacaactggtaaagatgaatttgaatattttgaagtcactaacattactaacgaagctatctttttaaacagtggttatagttttgcatatgggtataataataatgaagatacaagttcggatgttccattacttgttatttcttcagaaaatataatttttgagccaaaagaatctgttgttttttggttaagttatactaatgatgacttagattctttctctcgtactgaagatgagtttaggcaagaatttaatgtacctagtacaactaaaatttatcgtgttattggtcaaccgggaatggcaaacaatggaaatcggagtataagaatttataaagatggtgagttggataattggtctttttatgaagatgaatttgtagctcctaatgaatcagtgtcttatcgtttacctagcgacccatcaaatagaagtatggatatttatgaggttaaagttgagtatggcaacccagggaaagtggaatttgatcagctcattcctaataaaaaggaagagcaaaaggttgatatccctcgtcctttaaccgctcctccattagtagttacagaattacttgtcgatactgaaaatacaagtggttcagatgcttacgagtttattgaaatagccaatttttcaactcaacctatagatttctcacatttcattatcaattatttatacccagaagattatgatacaaacacgaatactattctgtggccttctcgcccttcagatattactattcagccaggtcaaactctaactttttggattaaaaatggaaataataaccacttgactattgatgatttcaatcaaaaatttaaaactaatatggtctatggggagaactttgcagaaatttacacaggaggtatggctaacggaagcgcccgtgggattcaaatccaaaccaatactggccatgtgattaatcgtgcttattataatatggcaggaaaggaagttgaagcagaacagtcgtttaaatatcaatcgaatgattcggatcctacacttcaaaagaaaattgacaattctactcctacgcccggacagttagaggactaccagattccagacaatttctatgaatttaataacgaaataaccactccaagtattcaaaatttgtctccagatatattttatagagacaagcctttagatctgatattttacgtacttgacgagaatttagtaacaaccgttgtcctagagatacaaacttcagctgatgacgaaacaactacttatttcctagaaatagaccaagagggaatagctacacaccgcatcgaaccagctgatttaactggaaaagattggattaattacagaataacggcttataatattcaaggacaaagcactgaacatacttctcgtactgaattagctaatccacaagattcttcaataagttttaaccttaatgacgggtcgtgggtttctgatttaacttcagtgattgctactggagatacattagaagatattgttagactagagattaatggtcagagcgtttcaacagctccatctttagcggataacccagtttttgcttttgaagcgactagtaccgatacttattttttgaatggtgtggtagtagacggggatacattgtatattttcgatgaagggacatattcagatattgaaacaatatcagttgatattccacaagattataaaaaggaaaacaatactttaacagtcagtattgtcgctggaactaaagccaaaactggtattgatccagatgagaataatgatgacttcgaagttaagggtatgcgactagtcttgccagatggtagaacactgtctccaaaaggatataacgatcctcaagaatacattaggatgggggatagtgacggaaaatatgactatattaatttagtgtttgaaataccatttgatgcctttattgggaatcgatacttatttaatccgaacaattatcaagatggcccacatactattactgctaccaatcaagctggtgagaaagaaacaattactattatggttgataaaacgggcccagttattgagactaacattgcacctggctcttacttgaaaggtgaaataaaactgagtgctaaagtttatgatactggaatcggtttgaaagattatgctctatacttagatgggcaggaaattaataataatcataagacttcatccgtaattttgccagctggtgagcatatttttcaagtagtagctgtcgataaattaggaaatcaaacaaaacatgaaattagcttcattactcctgaagagaatccttctgccagtaattttctgcctgggaatggtgaaattgtgactagtaactcattgaatttacaagccacagttgaggatcctacaaatgacatattaaaagttatttttaagttgggtgagaagattgacgttgactctccgagagttcaacttaatattggcacagtaaacgatgccttagaagttgagcgtggagaagcgaacaagttgacgtcggaagaaattgaaagcttatcagaattggatggagacactgttgatgtagagtcagtagaagctttcccatatcaaatttttgaaataaatgtagggcaaagggagccaggatccatggttcgctttagttggtcaggcgaagctgatggtcgagctcaagtccggttatatgtctttaaccatgaagaaaatacttggtatgagttagatagacatttgaccgggaacttagaaaagggtcagcgagaacaatttgagttgactggcatggtagaagttgatcaatttacagatgatacccataacatcaaatttttagttcagcattctttaggttatgccggacctaactatagttatcgtacaagtgaaatcatacctaatcatcctgatgatgaaccacgttcagagtatgattttacatttgcttggcaagctgatacacaatactacaatgaacaatatttccaacaccaagcttcaattcatgattttattattgaccaacgggaaaatatgaatattcaatatgttgttcactctggggatatagtagacaattatgatcaactctaccagtggttgaatgcaaatagggaatataaaagattagatgatgctggcataccatacggtgtattggcaggtaatcatgatgtaggtaataaaattaatgacttcaccttatatagtaaattctttggtgaagatagatttttggataatccatggtatatggagagtcataaagataatcgtggacactatgatctaatttcagctggtgggattgactttatcattgttcacatgagttgggaacctggtaaggaagaaatcgactggatgaataaggtacttgctgaacacccagaacgagttgctattttaaataaccatgagtttttacaaacaactggaggtttgggtatttatccacaaagaattatggatgaagttattgcaaaaaaccctaatgtaagaatggtaatgtctggtcactaccacgatgcatatacgagaatagattattttgatgataatggggatgggataccagatcgtactgtgacttctatgttatttgactatcaagggcttcctgaaggaggactgggattcctgagattacttcactttgataatgtaaatgaagtggtcaaagtacgtacctattcagaatctttgcgaacatacaactccgatgatccttcattgcttggcgaaacggaagaaacacgctatatctatcaagaatttgacttgccttatgcccaacttggtattgttccagaaggacgaatcttatcaacagataaaattaacgttgaagttttatcaaataaaccaatttcaagtcaaagtggtattgaaccatctagcaatgtctctgctgaaattgaaggtgcagaaaccgggacttatgattggtttatacacttaagtgatgcttatggaggagaatattactcaccaatccatcgtgttcactaccgtaaagttgaagagtcaaaacaagatattgtttctaaagttccagtagaatacgaagtgattgttaatcagacttctgaactctttcaaggtgaaagtcgtgtagttcaaaaaggatcttttggagaaaaaacgattatcactagagggggccaagttatatttgatgagataactaaagaacctattaattgcattgttgaaataggtacaagaagtttagaaaacccatatgaattagatgtttataccttgtattactacggtcagaagactagaggtacaagcggagcatttactgtaaaagctaaaagtttagatgaggcaaaaagatattttcgtaatttggttgttgagaatgacttaggagatttggattggtcatatgattcagaaagaaaaattttttatgctaaagaaaaagatatgaaagaattaccaacttttgaaggcgagacttcagatgactcggtttatgacttcttagccccagtcttcgagtggaatattgacgacgaggaagacacagaccacccaagcattgaaggggaaacatccgtggactcggtctatgacttcctagctccggactttaaatggaatatcgattacgagggagacacagactacccaaccatcgaaggggaaacatcggtagactcggtctatgacttcctagcaccagacttcgagtggaacattgatgacgaggaagacaaagactacccaactattgaaggggaaacatcggtagactcggtctatgacttcctagcaccagactttgaatggaatattgactacgaggaagcagccccaaccagtcctagccctgacccagatcatgaccaggatgacgatagtcaagatccagatgatggtagtggccaagctccagaccttgatgacttagtacctaaacctggtgatccaaacgacagggaagacccacaagctgacttaaatgatccgaaaggccgggacgatcaagatgctagcgacccagtggacagtcaagagactccaaaagctagcgtcaaaccagtcaaatctgacaaaacttccccattagttccaagcaaggacactggctccaaagaagctagccaggccaaagacaacaaggcccttgactacttgcttaaacaggctaaaggcgaaaaagctacaagccagaaagctgcaagccaaaaccctcaaaatgattcagcaagccagggcaaagatcccaaagacaaggaaactttaccagacactgccacatcagcctgggctctaggagctcttggattgtcagcccttctttcaggactgggcattcataagttcaaaaaagaagacaaagaaggctag

SEQ ID NO: 1582 - protein, 2166 aa, Alloiococcus otitidis
MVLGIVSLSNSNKVSANTYSEDVNDIVNIEDTTKVTSSEELVNKNEAELATNFSDGYPASQEKKDENNDKVANALEVGNETVDEEDINKDNDLDLTEESIGLEDSALERSTFETSSQVNTKPRVREASGPLSKEDIRSLTVADLEEKSSNAEENSDSNGTDDSEYNADSSDKESNQQVNTDIYISEILPDNIGTDRFEFFEVTNTTKEPITLNDKYNFSYGYNNTNDTSEDVPLSYEDQVVIYPQNPAVFWLSYQTDSLNSFDHNEEDFRAHFGIDRGIPLYRIVGQKGMANNGDRSIRVWKDGNLINWSYYEADDVSPGSSVKYEVPDDPKQRSMQLFQSNAAPSPGWIEDYNKQYRAYPKLIVSEIMPDTTGKDEFEYFEVTNITNEAIFLNSGYSFAYGYNNNEDTSSDVPLLVISSENIIFEPKESVVFWLSYTNDDLDSFSRTEDEFRQEFNVPSTTKIYRVIGQPGMANNGNRSIRIYKDGELDNWSFYEDEFVAPNESVSYRLPSDPSNRSMDIYEVKVEYGNPGKVEFDQLIPNKKEEQKVDIPRPLTAPPLVVTELLVDTENTSGSDAYEFIEIANFSTQPIDFSHFIINYLYPEDYDTNTNTILWPSRPSDITIQPGQTLTFWIKNGNNNHLTIDDFNQKFKTNMVYGENFAEIYTGGMANGSARGIQIQTNTGHVINRAYYNMAGKEVEAEQSFKYQSNDSDPTLQKKIDNSTPTPGQLEDYQIPDNFYEFNNEITTPSIQNLSPDIFYRDKPLDLIFYVLDENLVTTVVLEIQTSADDETTTYFLEIDQEGIATHRIEPADLTGKDWINYRITAYNIQGQSTEHTSRTELANPQDSSISFNLNDGSWVSDLTSVIATGDTLEDIVRLEINGQSVSTAPSLADNPVFAFEATSTDTYFLNGVVVDGDTLYIFDEGTYSDIETISVDIPQDYKKENNTLTVSIVAGTKAKTGIDPDENNDDFEVKGMRLVLPDGRTLSPKGYNDPQEYIRMGDSDGKYDYINLVFEIPFDAFIGNRYLFNPNNYQDGPHTITATNQAGEKETITIMVDKTGPVIETNIAPGSYLKGEIKLSAKVYDTGIGLKDYALYLDGQEINNNHKTSSVILPAGEHIFQVVAVDKLGNQTKHEISFITPEENPSASNFLPGNGEIVTSNSLNLQATVEDPTNDILKVIFKLGEKIDVDSPRVQLNIGTVNDALEVERGEANKLTSEEIESLSELDGDTVDVESVEAFPYQIFEINVGQREPGSMVRFSWSGEADGRAQVRLYVFNHEENTWYELDRHLTGNLEKGQREQFELTGMVEVDQFTDDTHNIKFLVQHSLGYAGPNYSYRTSEIIPNHPDDEPRSEYDFTFAWQADTQYYNEQYFQHQASIHDFIIDQRENMNIQYVVHSGDIVDNYDQLYQWLNANREYKRLDDAGIPYGVLAGNHDVGNKINDFTLYSKFFGEDRFLDNPWYMESHKDNRGHYDLISAGGIDFIIVHMSWEPGKEEIDWMNKVLAEHPERVAILNNHEFLQTTGGLGIYPQRIMDEVIAKNPNVRMVMSGHYHDAYTRIDYFDDNGDGIPDRTVTSMLFDYQGLPEGGLGFLRLLHFDNVNEVVKVRTYSESLRTYNSDDPSLLGETEETRYIYQEFDLPYAQLGIVPEGRILSTDKINVEVLSNKPISSQSGIEPSSNVSAEIEGAETGTYDWFIHLSDAYGGEYYSPIHRVHYRKVEESKQDIVSKVPVEYEVIVNQTSELFQGESRVVQKGSFGEKTIITRGGQVIFDEITKEPINCIVEIGTRSLENPYELDVYTLYYYGQKTRGTSGAFTVKAKSLDEAKRYFRNLVVENDLGDLDWSYDSERKIFYAKEKDMKELPTFEGETSDDSVYDFLAPVFEWNIDDEEDTDHPSIEGETSVDSVYDFLAPDFKWNIDYEGDTDYPTIEGETSVDSVYDFLAPDFEWNIDDEEDKDYPTIEGETSVDSVYDFLAPDFEWNIDYEEAAPTSPSPDPDHDQDDDSQDPDDGSGQAPDLDDLVPKPGDPNDREDPQADLNDPKGRDDQDASDPVDSQETPKASVKPVKSDKTSPLVPSKDTGSKEASQAKDNKALDYLLKQAKGEKATSQKAASQNPQNDSASQGKDPKDKETLPDTATSAWALGALGLSALLSGLGIHKFKKEDKEG

SEQ ID NO: 1583 - DNA, 1722 bp, Alloiococcus otitidis
  CDS (892)..(1719)
agtctaatagagataaacaaaaagtgtaaaagctatttaaacatgaaagtggggaagaaaatggagaaaatagtgcaaactatcgaaaaagctagacccttttttgaaaaagtaagtaaaaacaaatatttacgatcgctgatgaatggttttatcgcattaatgcctgtcgttatgttttcaagtatttttatgctgatagcgtttgttcccaatatttttggtttttattggagcgaagatgcaacagagctattgctaacaccatataattatactatgggatttatgggattagttatttctgggacaatagctaagtctctgaccgattcttttaataaagatcttccgctggatgaacaaattgcaccaatgtcaacgattgtagcagctatattagggatgttgtttttatctacggatctcacagaagcagggataacgactgattacttaggaacttctggtattattgcggcgtttgtgtcagcggttattgtcgtaaatacttattattacttcattaagaaaaatataacaattaatttgccaaatgaagtaccaggcaatgttgcttcggcctttgaagatataatgcctttttcagtcagtattatcctaatttatattgtggatcttgttactcgctattttgtagggaataattttgctcaatttgttattgaattatttcaaccattgtttcaagttgcagattcctatgtaggattaataataattgcttttgcagtctcttttttctggttcattggtatacatgggccatcagttgttttgccagcagtaacagctattatgtatcaaaacttagaattaaaccaagagctgatacaagctggggagcaagcttttcatacactaactcctatgacaaattcatttgttattacaatgggtggtaccggtgctacatttgttgtcccatttatttttatgtggctagctagatctaaacgaaataaagcagttggaaaagcagcatttattccaacatcgtttggggttaatgaaccaattttatttgggggaccattaattttaaatcctatattctttgtcccttttgttcttgccccagtgacaaatgttattctatataaattattcgtagatttattctctatgaatgctttgtctttatacttaccgtggacaactccaggaccattaggtttagtcatgagtaccggctttgctccgctatcatttattttagcaatactgattttagcagtagattttgctatttactatccgttctttaaagtatacgataaacagatactagaagaagaaatggaaaatgaagaaggctctgtggatgaagaagaaatagaagaaacagatatgagtgagctgactgataatatcgatgataaagaggtgaaagttttagtcttatgtgctggtggtggcacaagcagacaattggcaaattccctaaatgctggtgctgaagaatttgatctttccctaactgctgtcggagaacaatacggtagccataatgatatgttaccaaattttgatttagttgtattggccccacaagtagcatcgaactatagtgatattaaaccttcaacagataaattaaatataaaattagctaaaacaggtggccaggaatatatatccttaactcaggatcctgaaaaatcacttaagtttgtttataatttgttaaacgaagagtag

SEQ ID NO: 1584 - protein, 276 aa, Alloiococcus otitidis
MTNSFVITMGGTGATFVVPFIFMWLARSKRNKAVGKAAFIPTSFGVNEPILFGGPLILNPIFFVPFVLAPVTNVILYKLFVDLFSMNALSLYLPWTTPGPLGLVMSTGFAPLSFILAILILAVDFAIYYPFFKVYDKQILEEEMENEEGSVDEEEIEETDMSELTDNIDDKEVKVLVLCAGGGTSRQLANSLNAGAEEFDLSLTAVGEQYGSHNDMLPNFDLVVLAPQVASNYSDIKPSTDKLNIKLAKTGGQEYISLTQDPEKSLKFVYNLLNEE

SEQ ID NO: 1585 - DNA, 1722 bp, Alloiococcus otitidis; identical to SEQ ID NO: 1583
  CDS (142)..(1719)

SEQ ID NO: 1586 - protein, 526 aa, Alloiococcus otitidis
MNGFIALMPVVMFSSIFMLIAFVPNIFGFYWSEDATELLLTPYNYTMGFMGLVISGTIAKSLTDSFNKDLPLDEQIAPMSTIVAAILGMLFLSTDLTEAGITTDYLGTSGIIAAFVSAVIVVNTYYYFIKKNITINLPNEVPGNVASAFEDIMPFSVSIILIYIVDLVTRYFVGNNFAQFVIELFQPLFQVADSYVGLIIIAFAVSFFWFIGIHGPSVVLPAVTAIMYQNLELNQELIQAGEQAFHTLTPMTNSFVITMGGTGATFVVPFIFMWLARSKRNKAVGKAAFIPTSFGVNEPILFGGPLILNPIFFVPFVLAPVTNVILYKLFVDLFSMNALSLYLPWTTPGPLGLVMSTGFAPLSFILAILILAVDFAIYYPFFKVYDKQILEEEMENEEGSVDEEEIEETDMSELTDNIDDKEVKVLVLCAGGGTSRQLANSLNAGAEEFDLSLTAVGEQYGSHNDMLPNFDLVVLAPQVASNYSDIKPSTDKLNIKLAKTGGQEYISLTQDPEKSLKFVYNLLNEE

SEQ ID NO: 1587 - DNA, 1722 bp, Alloiococcus otitidis; identical to SEQ ID NO: 1583
  CDS (61)..(1719)

SEQ ID NO: 1588 - protein, 553 aa, Alloiococcus otitidis
MEKIVQTIEKARPFFEKVSKNKYLRSLMNGFIALMPVVMFSSIFMLIAFVPNIFGFYWSEDATELLLTPYNYTMGFMGLVISGTIAKSLTDSFNKDLPLDEQIAPMSTIVAAILGMLFLSTDLTEAGITTDYLGTSGIIAAFVSAVIVVNTYYYFIKKNITINLPNEVPGNVASAFEDIMPFSVSIILIYIVDLVTRYFVGNNFAQFVIELFQPLFQVADSYVGLIIIAFAVSFFWFIGIHGPSVVLPAVTAIMYQNLELNQELIQAGEQAFHTLTPMTNSFVITMGGTGATFVVPFIFMWLARSKRNKAVGKAAFIPTSFGVNEPILFGGPLILNPIFFVPFVLAPVTNVILYKLFVDLFSMNALSLYLPWTTPGPLGLVMSTGFAPLSFILAILILAVDFAIYYPFFKVYDKQILEEEMENEEGSVDEEEIEETDMSELTDNIDDKEVKVLVLCAGGGTSRQLANSLNAGAEEFDLSLTAVGEQYGSHNDMLPNFDLVVLAPQVASNYSDIKPSTDKLNIKLAKTGGQEYISLTQDPEKSLKFVYNLLNEE

SEQ ID NO: 1589 - DNA, 1722 bp, Alloiococcus otitidis; identical to SEQ ID NO: 1583
  CDS (43)..(1719)

SEQ ID NO: 1590 - protein, 559 aa, Alloiococcus otitidis
MKVGKKMEKIVQTIEKARPFFEKVSKNKYLRSLMNGFIALMPVVMFSSIFMLIAFVPNIFGFYWSEDATELLLTPYNYTMGFMGLVISGTIAKSLTDSFNKDLPLDEQIAPMSTIVAAILGMLFLSTDLTEAGITTDYLGTSGIIAAFVSAVIVVNTYYYFIKKNITINLPNEVPGNVASAFEDIMPFSVSIILIYIVDLVTRYFVGNNFAQFVIELFQPLFQVADSYVGLIIIAFAVSFFWFIGIHGPSVVLPAVTAIMYQNLELNQELIQAGEQAFHTLTPMTNSFVITMGGTGATFVVPFIFMWLARSKRNKAVGKAAFIPTSFGVNEPILFGGPLILNPIFFVPFVLAPVTNVILYKLFVDLFSMNALSLYLPWTTPGPLGLVMSTGFAPLSFILAILILAVDFAIYYPFFKVYDKQILEEEMENEEGSVDEEEIEETDMSELTDNIDDKEVKVLVLCAGGGTSRQLANSLNAGAEEFDLSLTAVGEQYGSHNDMLPNFDLVVLAPQVASNYSDIKPSTDKLNIKLAKTGGQEYISLTQDPEKSLKFVYNLLNEE

SEQ ID NO: 1591 - DNA, 1437 bp, Alloiococcus otitidis
  CDS (28)..(1434)
ggagaattactaatgaccaataagtcgatgtttacagacgaattcctattcggtagtgcttcagctgcatatcattttgaaggtgcttttgataaagatggaaagggcccttcagtatcagatgttataccccattctccaatggatggtcgaactgaaagacctgaagaagggaatttaaaacacagagctgtagaattttacgatcgttataaagatgatgttgcattatttggagaactaggtttaagatcttttagaacatctattgcttggacaagaatttatcctaagggtatagaagaagaaccaaatgaaaagggtttacaattttatgatgacttgtttgatgaattattatcacatggaattgagccgataataactattactcacacaggggaaatgcctttgtatttagcagataattataatggctttgctaataaggaaacaattgaattttacctaaaatatgttaaaacaattgtggaacgctaccaagacaaggttaagtattggctgacttttaatgaagtaaatatttctggaatgcagccgttttttcaagcaggtgtgtctcaagatcctgaaactattgatgattcagtaattgctcaaattcatcacaatatgtttgtagcaaattctagagcaatagaaataattaaaaatatcaattctgatttgatggttggatgcacaacaaccattggacctgtgtatgcaatgacgccaaagcctgaggatggattagcccagtattttgatactagggaaatgtttttccacacagatgtacacgtctttggtaaatatcctaaatggaaaattaagcaattggaagatagaggaattaaaatagatgtaactgacgaagaattgtccataataaataataatacagttgattttgttgcctacagttactatcaaagtggtgtatccgaatctggaagtgaagagaacgatggcgatgttaacgttattagtaagaaaaaaaatcctgaattagaagttaatgaatggaattgggtcatcgatcctgtcggtttgagaattattcttaatatggtatgggatagatatgaacttcctcaatttattgtagaaaatggtgtttcaaaactagaagaactagagcgtgacgaaaatggagaattgactgtaaaagacaactatcgtattgaaggccttcgagattatttaatccaattaaatgaagccattgctgatggtgtggaagtgattggttatactaattgggcagttatggattttgtaagtggctcaaccggtacaatgaaaaaaagatggggctttatatttgttgattattatgatgattggacaggtagtatggagcgatataaaaaacaaagttttgactggtatagtaaagtaattgaaagtaatggagaatatttgtttgaataa

SEQ ID NO: 1592 - protein, 469 aa, Alloiococcus otitidis
MFTDEFLFGSASAAYHFEGAFDKDGKGPSVSDVIPHSPMDGRTERPEEGNLKHRAVEFYDRYKDDVALFGELGLRSFRTSIAWTRIYPKGIEEEPNEKGLQFYDDLFDELLSHGIEPIITITHTGEMPLYLADNYNGFANKETIEFYLKYVKTIVERYQDKVKYWLTFNEVNISGMQPFFQAGVSQDPETIDDSVIAQIHHNMFVANSRAIEIIKNINSDLMVGCTTTIGPVYAMTPKPEDGLAQYFDTREMFFHTDVHVFGKYPKWKIKQLEDRGIKIDVTDEELSIINNNTVDFVAYSYYQSGVSESGSEENDGDVNVISKKKNPELEVNEWNWVIDPVGLRIILNMVWDRYELPQFIVENGVSKLEELERDENGELTVKDNYRIEGLRDYLIQLNEAIADGVEVIGYTNWAVMDFVSGSTGTMKKRWGFIFVDYYDDWTGSMERYKKQSFDWYSKVIESNGEYLFE

SEQ ID NO: 1593 - DNA, 1437 bp, Alloiococcus otitidis; identical to SEQ ID NO: 1591
  CDS (13)..(1434)

SEQ ID NO: 1594 - protein, 474 aa, Alloiococcus otitidis
MTNKSMFTDEFLFGSASAAYHFEGAFDKDGKGPSVSDVIPHSPMDGRTERPEEGNLKHRAVEFYDRYKDDVALFGELGLRSFRTSIAWTRIYPKGIEEEPNEKGLQFYDDLFDELLSHGIEPIITITHTGEMPLYLADNYNGFANKETIEFYLKYVKTIVERYQDKVKYWLTFNEVNISGMQPFFQAGVSQDPETIDDSVIAQIHHNMFVANSRAIEIIKNINSDLMVGCTTTIGPVYAMTPKPEDGLAQYFDTREMFFHTDVHVFGKYPKWKIKQLEDRGIKIDVTDEELSIINNNTVDFVAYSYYQSGVSESGSEENDGDVNVISKKKNPELEVNEWNWVIDPVGLRIILNMVWDRYELPQFIVENGVSKLEELERDENGELTVKDNYRIEGLRDYLIQLNEAIADGVEVIGYTNWAVMDFVSGSTGTMKKRWGFIFVDYYDDWTGSMERYKKQSFDWYSKVIESNGEYLFE

SEQ ID NO: 1595 - DNA, 333 bp, Alloiococcus otitidis
  CDS (16)..(330)
aaggaatatattgatatggacagagaagaagttggaatgattggttttgagatcgtatcatatgctggagaagctagatcccaattattagaagctctcaaattggctgaatcaggagagtatgatgaagcagaatcattagtagaaaaagcaaatgaaacattaaacgaagcacacaactctcaaactaaaatgttacaaaaagaagctaatggagaacatgtagatattggtttcataatgattcatggccaagatcacttaatgactgcccttttattgaaagatatagttaaacactttattcagctttataaaaaagttaatagttaa

SEQ ID NO: 1596 - protein, 105 aa, Alloiococcus otitidis
MDREEVGMIGFEIVSYAGEARSQLLEALKLAESGEYDEAESLVEKANETLNEAHNSQTKMLQKEANGEHVDIGFIMIHGQDHLMTALLLKDIVKHFIQLYKKVNS

SEQ ID NO: 1597 - DNA, 1308 bp, Alloiococcus otitidis; identical to SEQ ID NO: 869
  CDS (13)..(1305)

SEQ ID NO: 1598 - protein, 431 aa, Alloiococcus otitidis; identical to SEQ ID NO: 314

SEQ ID NO: 1599 - DNA, 933 bp, Alloiococcus otitidis
  CDS (22)..(930)
tctcctactcgatttttggtgatgaaaaaggccagtagattccttatcattagtcaagtccaattaaaggagaatctacatgacctactcaataatatacgaaaattgtttgatctgaaagacccaaatattatttttgatacctctttttttgaacgcattcgaggggtggagcataaaatcatcaccgcttggctgacctatactcctgagacttgtgccaagtgtgggacaaccaatgaagcttttacggtgattaaaaatgggtccaagatctctcgtattctgttgggacacctgaatttaagccccatcaccttaaaattaaaaaaacaacgcttcttctgtaaagcttgtcatcaaagcttttgtgcagagactgctttggtcgaccgtcactgttttatttcaaacttagttaagctggccgttgctttagaactccaacagacccaagccatgacggacattgcccatcgcctaacggtatcgccctctactgtgatccgagtcttagaggcagtaggggagactttggatcccgataccactcgcttaccgaaacatttattgtttgatgaattcaagtctgtcaaagcagccaagggagccatgagttttgtctatgccgatagcgaaaacagaaagctcatcaatattgttgaaaaccgacaacagtcggaacttctttcttatttccaccgctatccttatcccgttcgacaagcggtcgagaccgtcaccattgacatgtacagtccttatctttcggttattgcctcctgtttccccaacgcacggattatcattgaccgcttccatattgttcaacacttgaaccgggccttgaatcgttgtcgagtggaggtcatgaatcaattgcgctatagtcgcccccgagactaccgtaaactaaagaaactgtggaaatga

SEQ ID NO: 1600 - protein, 303 aa, Alloiococcus otitidis
MKKASRFLIISQVQLKENLHDLLNNIRKLFDLKDPNIIFDTSFFERIRGVEHKIITAWLTYTPETCAKCGTTNEAFTVIKNGSKISRILLGHLNLSPITLKLKKQRFFCKACHQSFCAETALVDRHCFISNLVKLAVALELQQTQAMTDIAHRLTVSPSTVIRVLEAVGETLDPDTTRLPKHLLFDEFKSVKAAKGAMSFVYADSENRKLINIVENRQQSELLSYFHRYPYPVRQAVETVTIDMYSPYLSVIASCFPNARIIIDRFHIVQHLNRALNRCRVEVMNQLRYSRPRDYRKLKKLWK

SEQ ID NO: 1601 - DNA, 933 bp, Alloiococcus otitidis; identical to SEQ ID NO: 1599
  CDS (19)..(930)

SEQ ID NO: 1602 - protein, 304 aa, Alloiococcus otitidis
MMKKASRFLIISQVQLKENLHDLLNNIRKLFDLKDPNIIFDTSFFERIRGVEHKIITAWLTYTPETCAKCGTTNEAFTVIKNGSKISRILLGHLNLSPITLKLKKQRFFCKACHQSFCAETALVDRHCFISNLVKLAVALELQQTQAMTDIAHRLTVSPSTVIRVLEAVGETLDPDTTRLPKHLLFDEFKSVKAAKGAMSFVYADSENRKLINIVENRQQSELLSYFHRYPYPVRQAVETVTIDMYSPYLSVIASCFPNARIIIDRFHIVQHLNRALNRCRVEVMNQLRYSRPRDYRKLKKLWK

SEQ ID NO: 1603 - DNA, 933 bp, Alloiococcus otitidis; identical to SEQ ID NO: 1599
  CDS (16)..(930)

SEQ ID NO: 1604 - protein, 305 aa, Alloiococcus otitidis
MVMKKASRFLIISQVQLKENLHDLLNNIRKLFDLKDPNIIFDTSFFERIRGVEHKIITAWLTYTPETCAKCGTTNEAFTVIKNGSKISRILLGHLNLSPITLKLKKQRFFCKACHQSFCAETALVDRHCFISNLVKLAVALELQQTQAMTDIAHRLTVSPSTVIRVLEAVGETLDPDTTRLPKHLLFDEFKSVKAAKGAMSFVYADSENRKLINIVENRQQSELLSYFHRYPYPVRQAVETVTIDMYSPYLSVIASCFPNARIIIDRFHIVQHLNRALNRCRVEVMNQLRYSRPRDYRKLKKLWK

SEQ ID NO: 1605 - DNA, 408 bp, Alloiococcus otitidis
  CDS (67)..(405)
gtcttgaagaatgagtgggatctcgatttcattcactatcagactcaccgactctttgaaggggtcatgaccgaaaaaatgatcgtggattaccttttaaacttagatgaagattttgcctggatctaccacttaatcaataacgtcaagcatgccctccatacgaaccaattccatgcttttcaggctgctctcgaacagagtcgccaacgtccgttaaaacgctatgtgcggacggccttccaatcacttgaacgttacttgactccgatcgaagccagtttccattatgccttatcgaatggccccattgaaggaatgaacaataagaccaaaaccttaaaacgaaccggttatggctaccgtcattttcaacacttccgttaccgcagtttaatctttaactga

SEQ ID NO: 1606 - protein, 113 aa, Alloiococcus otitidis
MTEKMIVDYLLNLDEDFAWIYHLINNVKHALHTNQFHAFQAALEQSRQRPLKRYVRTAFQSLERYLTPIEASFHYALSNGPIEGMNNKTKTLKRTGYGYRHFQHFRYRSLIFN

SEQ ID NO: 1607 - DNA, 408 bp, Alloiococcus otitidis; identical to SEQ ID NO: 1605
  CDS (4)..(405)

SEQ ID NO: 1608 - protein, 134 aa, Alloiococcus otitidis
MKNEWDLDFIHYQTHRLFEGVMTEKMIVDYLLNLDEDFAWIYHLINNVKHALHTNQFHAFQAALEQSRQRPLKRYVRTAFQSLERYLTPIEASFHYALSNGPIEGMNNKTKTLKRTGYGYRHFQHFRYRSLIFN

SEQ ID NO: 1609 - DNA, 99 bp, Alloiococcus otitidis
  CDS (1)..(96)
gtggtcttatacttttggattaaaaatttagaatttaaaaatatagagaaattaggttctatctctattaatgtaagcgcattaatattatggttttag

SEQ ID NO: 1610 - protein, 32 aa, Alloiococcus otitidis
MVLYFWIKNLEFKNIEKLGSISINVSALILWF

SEQ ID NO: 1611 - DNA, 879 bp, Alloiococcus otitidis
  CDS (13)..(876)
aggagaatctacatgacctactcaaatgatatacgaaaattgtttgatttgaaagacccaaatattatttttgataccgcttctttttcagcccctgctgaacgcattcggggggtggagcataaaatcatcactgctcggctgacctatactcctgagacttgtgccaagtgtgggacaaccaatgaagcttttacggtgattaaaaatgggtccaagatctctcgtattctgttgggacacctgaatttaagccccatcaccttaaaattaaaaaaacaacgcttcttctgtaaagcttgtcatcaaagcttttgtgcagagactgctttggtcgaccgtcactgttttatttcaaacttagttaagctggccgttgctttagaactccaacagacccaagccatgacggacattgcccatcgcctaacggtatcgccctctactgtgatccgagtcttagaggcagtaggggagactttggatcccgataccactcgcttaccgaaacatttattgtttgatgaattcaagtctgtcaaagcagccaagggagccatgagttttgtctatgccgatagcgaaaacagaaagctcatcaatattgttgaaaaccgacaacagtcggaacttctttcttatttccaccgctatccttatcccgttcgacaagcggtcgagaccgtcaccattgacatgtacagtccttatctttcggttattgcctcctgtttccccaacgcacggattatcattgaccgcttccatattgttcaacacttgaaccgggccttgaatcgttgtcgagtggaggtcatgaatcaattgcgctatagtcgccctcgagactaccgtaaactaaagaaactgtggaaatga

SEQ ID NO: 1612 - protein, 288 aa, Alloiococcus otitidis
MTYSNDIRKLFDLKDPNIIFDTASFSAPAERIRGVEHKIITARLTYTPETCAKCGTTNEAFTVIKNGSKISRILLGHLNLSPITLKLKKQRFFCKACHQSFCAETALVDRHCFISNLVKLAVALELQQTQAMTDIAHRLTVSPSTVIRVLEAVGETLDPDTTRLPKHLLFDEFKSVKAAKGAMSFVYADSENRKLINIVENRQQSELLSYFHRYPYPVRQAVETVTIDMYSPYLSVIASCFPNARIIIDRFHIVQHLNRALNRCRVEVMNQLRYSRPRDYRKLKKLWK

SEQ ID NO: 1613 - DNA, 468 bp, Alloiococcus otitidis
  CDS (67)..(465)
gtcttaaagaatgagtgggatctcgatttcactcactatcagactcaccgactctttgaaggggttatgaccgaaaaaatgatagtggattacctcttaaacttagatgaagattttgcctggatctaccacttaatcaataacgccaagcatgccctccatacgaatcgattccatgcgtttcaggctgctctcgaacagagtcgccagcgtccgttaaaacgctatgtgcggacggccttccaatcgcttgaacgctacttgactccgatcgaagccagtttccattatgccttatcgaatggccccattgaaggaatgaacaataaaaccaaaaccttaaaacgaaccggttatggctaccgtcgttttcaacacttccgttaccgcattttaatcatcaaccggttgacagagacgaaggggcagtcggggcgaccggtcttacgacccaagcagacggcttaa

SEQ ID NO: 1614 - protein, 133 aa, Alloiococcus otitidis
MTEKMIVDYLLNLDEDFAWIYHLINNAKHALHTNRFHAFQAALEQSRQRPLKRYVRTAFQSLERYLTPIEASFHYALSNGPIEGMNNKTKTLKRTGYGYRRFQHFRYRILIINRLTETKGQSGRPVLRPKQTA

SEQ ID NO: 1615 - DNA, 1194 bp, Alloiococcus otitidis
  CDS (355)..(1191)
ttaatccgaaggaatcaaaaaaagaagggcgatcgcccctctctttcatctcaccaacactacttgacaaagaaccaaaaaactataaaaatcaatactgttctaggtaatgagaaagaattggctgatttcttacaagaacttttgaaagaaaatggtattccatcaaaacaagttgagtatagcccaggtcgtaatggattaattgctacttttgaaggtgaggaacccggttcggtacttggtttctcaggacatttagatgtggtaccagtaggtgaagttgagtgggagaatgatccatttgctgctgttgaaaaagatggaaaagtatatggccgtggttcttgtgatatgaaatctggacttatatcagctattgttgctttaattagatttaagcaaaacaaagaaaaatttaaggggacaattaagtttattataactgtaggtgaagaaacgtcttcccttggagctactcagttagtaaaagcaggatacgctgatgacttggatgccatgatcattaatgagcctactgatttaaaagtaggtgtagcacataagggagcattatggccacgaattactacttatggtaaaacggcacatggatctatgccacatagaggtgttaatgctataaataatatggtcaaattgattaatgaattaaataataccattgattttttgcaatataatgatgagttgttgggggaaccgacttcaagtataaatattatacgtggtggtagcgggactaatgttgtaccagataaagctactattgaaattgatatccgaacagttcctcaacaagaccattctcagatcaaaaaagacattgaagaaattttagagaacttatccagaaaagatgatgattttaaatacgaaattgagtatgttaatgacttgctagcaattaaaacagatactgaagatccatttactcatctagtcagttcttcagtgcaagaggttttagaagatagtgccactgtctttgcaccatcatattatacagatgggtcagaatttgtgttagctgataaagattttccaatcataataataggtccaggtgaggaagaaatggctcatcagccaaacgagtatgtagacatagaaaagttctatgacatgatagagattaatacaaaaataatgaaaaacttttttgcgcaataa

SEQ ID NO: 1616 - protein, 279 aa, Alloiococcus otitidis
MKSGLISAIVALIRFKQNKEKFKGTIKFIITVGEETSSLGATQLVKAGYADDLDAMIINEPTDLKVGVAHKGALWPRITTYGKTAHGSMPHRGVNAINNMVKLINELNNTIDFLQYNDELLGEPTSSINIIRGGSGTNVVPDKATIEIDIRTVPQQDHSQIKKDIEEILENLSRKDDDFKYEIEYVNDLLAIKTDTEDPFTHLVSSSVQEVLEDSATVFAPSYYTDGSEFVLADKDFPIIIIGPGEEEMAHQPNEYVDIEKFYDMIEINTKIMKNFFAQ

SEQ ID NO: 1617 - DNA, 1194 bp, Alloiococcus otitidis; identical to SEQ ID NO: 1615
  CDS (265)..(1191)

SEQ ID NO: 1618 - protein, 309 aa, Alloiococcus otitidis
MVPVGEVEWENDPFAAVEKDGKVYGRGSCDMKSGLISAIVALIRFKQNKEKFKGTIKFIITVGEETSSLGATQLVKAGYADDLDAMIINEPTDLKVGVAHKGALWPRITTYGKTAHGSMPHRGVNAINNMVKLINELNNTIDFLQYNDELLGEPTSSINIIRGGSGTNVVPDKATIEIDIRTVPQQDHSQIKKDIEEILENLSRKDDDFKYEIEYVNDLLAIKTDTEDPFTHLVSSSVQEVLEDSATVFAPSYYTDGSEFVLADKDFPIIIIGPGEEEMAHQPNEYVDIEKFYDMIEINTKIMKNFFAQ

SEQ ID NO: 1619 - DNA, 1194 bp, Alloiococcus otitidis; identical to SEQ ID NO: 1615
  CDS (64)..(1191)

SEQ ID NO: 1620 - protein, 376 aa, Alloiococcus otitidis
MTKNQKTIKINTVLGNEKELADFLQELLKENGIPSKQVEYSPGRNGLIATFEGEEPGSVLGFSGHLDVVPVGEVEWENDPFAAVEKDGKVYGRGSCDMKSGLISAIVALIRFKQNKEKFKGTIKFIITVGEETSSLGATQLVKAGYADDLDAMIINEPTDLKVGVAHKGALWPRITTYGKTAHGSMPHRGVNAINNMVKLINELNNTIDFLQYNDELLGEPTSSINIIRGGSGTNVVPDKATIEIDIRTVPQQDHSQIKKDIEEILENLSRKDDDFKYEIEYVNDLLAIKTDTEDPFTHLVSSSVQEVLEDSATVFAPSYYTDGSEFVLADKDFPIIIIGPGEEEMAHQPNEYVDIEKFYDMIEINTKIMKNFFAQ

SEQ ID NO: 1621 - DNA, 732 bp, Alloiococcus otitidis
  CDS (151)..(729)
accatggataattatatggaagttgccaatcactggactctatggattgcgggagcaccattggctattttaacagttgttcaaggggtattatttttaagaaaagctttgaaggtcagaaaagaagttgatctgaccaaagacgaggctatgaaagcattgcgtgtaggagctactgcctcaattggtcctgcatttggtgtatttgttgtgatgttaggcttaatggctgctataggtgcccctttcgcttggatgcgtttaacaaccattggttctgcccctatccaattatcagctgctcaacaagctgccgaagctatgggtactacgttaggtggcgaaggttacggagctgtgcactttgctaacgcagcttgggttctttctttaaatgggatgtcatggctaatagtaacaggactattcgcacataaaatggacgatataaaagagaaagtttccggtggagatccacgcatagtaggtgtcttaggatcaggtgctatgataggagcttttgcttacttgttttcttctgagttttttacagggttagaacgtcctgatactgctggatatttagcggctctgctggcttctggtgtttctatgataggtcttagtttactagctaaaaaatacccgaaattagcagaatacaatttgggtattgctatgattattggcatggctgcagctgttattgtgaataatttcgttggctattaa

SEQ ID NO: 1622 - protein, 193 aa, Alloiococcus otitidis
MKALRVGATASIGPAFGVFVVMLGLMAAIGAPFAWMRLTTIGSAPIQLSAAQQAAEAMGTTLGGEGYGAVHFANAAWVLSLNGMSWLIVTGLFAHKMDDIKEKVSGGDPRIVGVLGSGAMIGAFAYLFSSEFFTGLERPDTAGYLAALLASGVSMIGLSLLAKKYPKLAEYNLGIAMIIGMAAAVIVNNFVGY

SEQ ID NO: 1623 - DNA, 732 bp, Alloiococcus otitidis; identical to SEQ ID NO: 1621
  CDS (4)..(729)

SEQ ID NO: 1624 - protein, 242 aa, Alloiococcus otitidis
MDNYMEVANHWTLWIAGAPLAILTVVQGVLFLRKALKVRKEVDLTKDEAMKALRVGATASIGPAFGVFVVMLGLMAAIGAPFAWMRLTTIGSAPIQLSAAQQAAEAMGTTLGGEGYGAVHFANAAWVLSLNGMSWLIVTGLFAHKMDDIKEKVSGGDPRIVGVLGSGAMIGAFAYLFSSEFFTGLERPDTAGYLAALLASGVSMIGLSLLAKKYPKLAEYNLGIAMIIGMAAAVIVNNFVGY

SEQ ID NO: 1625 - DNA, 324 bp, Alloiococcus otitidis
  CDS (94)..(321)
cgagcagtacaaaaaagaatttacagcgcctataatccgtatcggacgaatttcccaatttatcgcaatcgttttaagttttattccagcgatatggctttggtggtatttcggattatttccgggctggtcaagtatattaaatggatggatattggtactttccatttttggtgtttatgctatagtagaacctatttcatactttccgacactaggcctaccgggaacatatttatcttttttatcggggaatatctccaatatgcgtgtcccagcatctgcaattgcccaagagagtttaggggtcgaagaggggactaa

SEQ ID NO: 1626 - protein, 76 aa, Alloiococcus otitidis
MALVVFRIISGLVKYIKWMDIGTFHFWCLCYSRTYFILSDTRPTGNIFIFFIGEYLQYACPSICNCPREFRGRRGD

SEQ ID NO: 1627 - DNA, 693 bp, Alloiococcus otitidis
  CDS (34)..(690)
tttcgttggctattaaggaaggagaaagtaattatggtaaataacgagcagtacaaaaaagaatttacagcgcctataatccgtatcggacgaatttcccaatttatcgcaatcgttttaagttttattccagcgatatggctttggtggtatttcggattatttccgggctggtcaagtatattaaatggatggatattggtactttccatttttggtgtttatgctatagtagaacctatttcatactttccgacactaggcctaccgggaacatatttatcttttttatcggggaatatctccaatatgcgtgtcccagcatctgcaattgcccaagagagtttaggggtcgaagaggggactaaaaaggcagaacttatttctacaattgggattgtgggatctattatacttaatatcattttgataacactgggtgcattctttggaagtaccattttacaagttttaccggacacaattgttgaggcatttagctatgtttctccagctatctttggagctatgttcttcatgtttgtattaagaagtttttctattggaatatttgcaatagtagttgcgcttactttaggtttcttaggtatttttccagagtggttaagcatattagtttgtactttctcctccattttctttggactgtggttgtatcgtcgagagaaataa

SEQ ID NO: 1628 - protein, 219 aa, Alloiococcus otitidis
MVNNEQYKKEFTAPIIRIGRISQFIAIVLSFIPAIWLWWYFGLFPGWSSILNGWILVLSIFGVYAIVEPISYFPTLGLPGTYLSFLSGNISNMRVPASAIAQESLGVEEGTKKAELISTIGIVGSIILNIILITLGAFFGSTILQVLPDTIVEAFSYVSPAIFGAMFFMFVLRSFSIGIFAIVVALTLGFLGIFPEWLSILVCTFSSIFFGLWLYRREK

SEQ ID NO: 1629 - DNA, 393 bp, Alloiococcus otitidis
  CDS (61)..(390)
gaagcgccgaatcaattggtgttggttctcactgctgcctcgttcgtaagaagcatagggatggcagaagaaagaaaggatgtctttggagacttgtctttacctgggacctacctccacttaaatggcgagccacttggggaatttgacagccactatgaccaggtgcgagccttcttacaagacaagggcttcagctttcaaaattttggggtgagcggtcatgccactaaggaggacttgctggggattgcccaggctatcggggctaaaaagacccttgcttggcatacttttgaacccgacaagttccgccaggctttagagggtgaagggttggacactttccaagttgagccaggggaagtatttaccgaagaagatttcttgtaa

SEQ ID NO: 1630 - protein, 110 aa, Alloiococcus otitidis
MAEERKDVFGDLSLPGTYLHLNGEPLGEFDSHYDQVRAFLQDKGFSFQNFGVSGHATKEDLLGIAQAIGAKKTLAWHTFEPDKFRQALEGEGLDTFQVEPGEVFTEEDFL

SEQ ID NO: 1631 - DNA, 393 bp, Alloiococcus otitidis; identical to SEQ ID NO: 1629
  CDS (16)..(390)

SEQ ID NO: 1632 - protein, 125 aa, Alloiococcus otitidis
MVLVLTAASFVRSIGMAEERKDVFGDLSLPGTYLHLNGEPLGEFDSHYDQVRAFLQDKGFSFQNFGVSGHATKEDLLGIAQAIGAKKTLAWHTFEPDKFRQALEGEGLDTFQVEPGEVFTEEDFL

SEQ ID NO: 1633 - DNA, 318 bp, Alloiococcus otitidis
  CDS (7)..(315)
accaaattgattcagctactgataccttgggcaaggctaagttttggggcaattgggatatgtttggcggcgactttatggtctcttgggtcaagcggcaaagaatcaaagtggccaatgaggagattacagatatttcctatgcagttgatcatttgcgccaagagctggccgatgtggacatggtcttaccggagacggttagtgacaccctgtctgacaatatttgggacctttggctggacaatttttttaccgactatatggtccaaggcaagatcaaggaagccatcaagcaattggaggactttcgtctag

SEQ ID NO: 1634 - protein, 103 aa, Alloiococcus otitidis
MIQLLIPWARLSFGAIGICLAATLWSLGSSGKESKWPMRRLQIFPMQLIICAKSWPMWTWSYRRRLVTPCLTIFGTFGWTIFLPTIWSKARSRKPSSNWRTFV

SEQ ID NO: 1635 - DNA, 546 bp, Alloiococcus otitidis
  CDS (73)..(543)
atttatgttttttctagtcctttttcggccaaaacagggtataatatgaagcaaataaggaggttgacagctatggaccggttagttgaattagaggaagctagggatgcagcggttgacgttttagaccaaattgattcagctactgataccttgggcaaggctaagttttggggcaattgggatatgtttggcggcgactttatggtctcttgggtcaagcggcaaagaatcaaagtggccaatgaggagattacagatatttcctatgcagttgatcatttgcgccaagagctggccgatgtggacatggtcttaccggagacggttagtgacaccctgtctgacaatatttgggacctttggctggacaatttttttaccgactatatggtccaaggcaagatcaaggaagccatcaagcaattggaggactttcgtctagttatcgaagacctgatcgttaaaatagacacggaaatcgacctcttggaagacggactggaaggggaagaagacgacccattcgaggatgagatttggtag

SEQ ID NO: 1636 - protein, 157 aa, Alloiococcus otitidis
MDRLVELEEARDAAVDVLDQIDSATDTLGKAKFWGNWDMFGGDFMVSWVKRQRIKVANEEITDISYAVDHLRQELADVDMVLPETVSDTLSDNIWDLWLDNFFTDYMVQGKIKEAIKQLEDFRLVIEDLIVKIDTEIDLLEDGLEGEEDDPFEDEIW

SEQ ID NO: 1637 - DNA, 546 bp, Alloiococcus otitidis; identical to SEQ ID NO: 1635
  CDS (46)..(543)

SEQ ID NO: 1638 - protein, 166 aa, Alloiococcus otitidis
MKQIRRLTAMDRLVELEEARDAAVDVLDQIDSATDTLGKAKFWGNWDMFGGDFMVSWVKRQRIKVANEEITDISYAVDHLRQELADVDMVLPETVSDTLSDNIWDLWLDNFFTDYMVQGKIKEAIKQLEDFRLVIEDLIVKIDTEIDLLEDGLEGEEDDPFEDEIW

SEQ ID NO: 1639 - DNA, 705 bp, Alloiococcus otitidis
  CDS (28)..(702)
gacatatccattaaggagccatcacttttgagaaatttcaaccgatctgagccttttacttttttcaaccagattttccgctttagtgtcaaaagcaatttgatctggtcccttttcaacctccccgtcttcctctttatcatcttacagatctttgccaaggactttaccgcagccatcttatccaccatcctcttgctgttctccttacccctcctcgttttcccggcaacggctagtctctttgccttgatccgggactttattgtcaacgaggaagaagaccaagtcatgaaccgctatctggggtattttaaaggcaattacttgcggaactttgcggacggactcctctttaacgtagcgatgggcttgttggcctccttttatgcctttatctcatctctctccattgtcctcaaccttctcatcatacttgtcggtctcctcttcttgatcttaacttgcaattacctgatctttgcgagttatggctacaatattggcgaggccatagcaagtgccgtccaactaattttctccgactacaagatccccctctaccaattgatagccctagtgatttttctattagtagctcactacattccaattttactgcccatctttgccgtctccctctttatctgtgccctaacccttatcatgcattaccggttgggacaagattctttattcaaataa

SEQ ID NO: 1640 - protein, 225 aa, Alloiococcus otitidis
MRNFNRSEPFTFFNQIFRFSVKSNLIWSLFNLPVFLFIILQIFAKDFTAAILSTILLLFSLPLLVFPATASLFALIRDFIVNEEEDQVMNRYLGYFKGNYLRNFADGLLFNVAMGLLASFYAFISSLSIVLNLLIILVGLLFLILTCNYLIFASYGYNIGEAIASAVQLIFSDYKIPLYQLIALVIFLLVAHYIPILLPIFAVSLFICALTLIMHYRLGQDSLFK

SEQ ID NO: 1641 - DNA, 1332 bp, Alloiococcus otitidis
  CDS (13)..(1329)
ctaggtgagcttatgcaacaaattcaaattttgtctacgaccgatgtgcacgcttatgcacaagaaggtttaaaccaggtggctgactttatcaacgagtccagcctcctagttgacaatggggacttcctaaccgggagtccccaagctactttccactatattcagtctgaccctagtcccattgttaaagtggccaaccgtctgggctatgacattatgatcccgggcaaccatgacctggactatggcctagactggttggtcacccaagtccagaagctagaggccacttatatttgtgctaatctctttgacagtgaaggtgagcgaatcttccccccttatgccatcaagacggtccaaggggtgaaagttggggttattggcctcttaaccggtggctacagccaaatcgcccggccagaagtgcgccagcagaccttggtgggagatgccctggaagcagtcgaccaatggctggacgagattgctagtcaagttgacttagtcctagtagcctaccacggtggctttagcctggaccccatgacaggccaccgctacaattaccctaacttggaagaccaggccggagaaatcctggcggcttatccccagattgacggccttattgccggccaccagcacttcaccaatgctgggatcactccttctggcacaagctatgtccagccaggaactcggggccgctacttgggctaccagtcctttaatattaaaagcgattggccgaagcaagctccggctaggactagtgaagaaggaaaagtcgatgaccgtcccgccaattcaagtcacagaaaagctaagccagttggaagcaatcccctacctctcggaaaaaatactggtcaaaaacaagtcactgccgaccaggccaagctagtaaccttacaagccgacgaagctgagacaaccgacccaaactatgaagcctggttgggaacttccctccagggacaagacttaatcgactttatcacacataactttcaagccgacctttactttttagactttccagagaacttgacctaccgagacctcagccactacctggatgtggtcttccctcttaaaagctacgccttcaaaggatgggaagtcaaaaaatacggcaaaaacttggccctgcctgcctcaagcaaggatcaagtcaacctggaaagggaggcccgagaccgcttagatgaccaaaaaacctaccaagttctggcttcaggcgagatcaacctgccccaagcccgcctggtgaccccacacgtctacaatttatttgacaactttattttgtggcacaagcggtaa

SEQ ID NO: 1642 - protein, 439 aa, Alloiococcus otitidis
MQQIQILSTTDVHAYAQEGLNQVADFINESSLLVDNGDFLTGSPQATFHYIQSDPSPIVKVANRLGYDIMIPGNHDLDYGLDWLVTQVQKLEATYICANLFDSEGERIFPPYAIKTVQGVKVGVIGLLTGGYSQIARPEVRQQTLVGDALEAVDQWLDEIASQVDLVLVAYHGGFSLDPMTGHRYNYPNLEDQAGEILAAYPQIDGLIAGHQHFTNAGITPSGTSYVQPGTRGRYLGYQSFNIKSDWPKQAPARTSEEGKVDDRPANSSHRKAKPVGSNPLPLGKNTGQKQVTADQAKLVTLQADEAETTDPNYEAWLGTSLQGQDLIDFITHNFQADLYFLDFPENLTYRDLSHYLDVVFPLKSYAFKGWEVKKYGKNLALPASSKDQVNLEREARDRLDDQKTYQVLASGEINLPQARLVTPHVYNLFDNFILWHKR

SEQ ID NO: 1643 - DNA, 357 bp, Alloiococcus otitidis
  CDS (70)..(354)
caggccaccgctacaattaccctaacttggaagaccaggccggagaaatcctggcggcttatccccagattgacggccttattgccggccaccagcacttcaccaatgctgggatcactccttctggcacaagctatgtccagccaggaactcggggccgctacttgggctaccagtcctttaatattaaaagcgattggccgaagcaagctccggctaggactagtgaagaaggaaaagtcgatgaccgtcccgccaattcaagtcacagaaaagctaagccagttggaagcaatcccctacctctcggaaaaaatactggtcaaaaacaagtcactgccgaccaggccaagctag

SEQ ID NO: 1644 - protein, 95 aa, Alloiococcus otitidis
MTALLPATSTSPMLGSLLLAQAMSSQELGAATWATSPLILKAIGRSKLRLGLVKKEKSMTVPPIQVTEKLSQLEAIPYLSEKILVKNKSLPTRPS

SEQ ID NO: 1645 - DNA, 783 bp, Alloiococcus otitidis
  CDS (331)..(780)
atgagtcaaaaaagattaaaattcgataccaaaaaattcttctttattatcttagccttagttattctatccatgctggccctggactattccaacctgagtcagttttctttggacaacctagtttcgacctttattggtctgaccagtccggaatgggcttatatttatacgggaacgggcgagtccctcatccctcttatggtcgaaaccattgccatagctttttacggcaccatcatcgggtcactaatttccatcccctttatcctgcttagttccaatattatctggggccaaaatagctttgtcccaaaagttggccggtttttgctcgatatcttgcgggctatccctaccttgatttatggtttgatcttcgttattgtggtcggtcccggaccctttgccggtgccctggccctgggtttgcaactggttggtaccttggccaagcaagttgcggaggccatggataccattgactcaacacccattgaaggcttggaatcttctggcgcaaccagcttccaaaccttccaatacgctatcctgccacagaccatcagtcctgccttcacttatattatgatcaacttcgaaatttccatccggtccgctaccacactcggtttggttggggctggtgggatcggggccccaattatctttgccttacaagcccgtaactggccccgggtctccattatcctcctggccatcattatcattgtcttaatctttgaccaattgtcttcctggatccggaaaaaattaggttag

SEQ ID NO: 1646 - protein, 150 aa, Alloiococcus otitidis
MLDILRAIPTLIYGLIFVIVVGPGPFAGALALGLQLVGTLAKQVAEAMDTIDSTPIEGLESSGATSFQTFQYAILPQTISPAFTYIMINFEISIRSATTLGLVGAGGIGAPIIFALQARNWPRVSIILLAIIIIVLIFDQLSSWIRKKLG

SEQ ID NO: 1647 - DNA, 783 bp, Alloiococcus otitidis; identical to SEQ ID NO: 1645
  CDS (1)..(780)

SEQ ID NO: 1648 - protein, 260 aa, Alloiococcus otitidis
MSQKRLKFDTKKFFFIILALVILSMLALDYSNLSQFSLDNLVSTFIGLTSPEWAYIYTGTGESLIPLMVETIAIAFYGTIIGSLISIPFILLSSNIIWGQNSFVPKVGRFLLDILRAIPTLIYGLIFVIVVGPGPFAGALALGLQLVGTLAKQVAEAMDTIDSTPIEGLESSGATSFQTFQYAILPQTISPAFTYIMINFEISIRSATTLGLVGAGGIGAPIIFALQARNWPRVSIILLAIIIIVLIFDQLSSWIRKKLG

SEQ ID NO: 1649 - DNA, 804 bp, Alloiococcus otitidis
  CDS (217)..(801)
ccaagacaagaggggggcataggcttgaaattaaaagatactattcacgacaagctaccccaaaagctcctcatcttggtcattatcctcctcctattcttcatgtctgcccaagctattaactcatcttggtcagatgtcttttctgaccagtcttacttagtcaactttctaaacggctttgcccgacctgacttcgcctatattcctgacctcttggttccgattttggaaaccctggccatgtcgcttgctgggaccttttttggtgtcatcctagccatccctgcagcttttttggggactgaaattgtgaccaaaaacaagctggttaccttcatcttccggaccttcttctcccttgtccggaccattcctaacctccttttgggggcaatctttgtaaccatcattgggattggatctttcactggggttgtaaccatcaccatctttacctttggggttgtctcccagtggctttacgcagcaatcgaaaacattgacctgggccccttggagtctgatgaagcagttggggccacccgctttcaaattgcccttaactccgtttggccccaagtagaatttttggtctggtcctacagcctttttgcctttgagatcaatgtccgagcttctgctgttttaggatacgttggagcgggtgggattggaaccatgttgaacgcccaaatgagcctcctccgctatgaccgggtagccgtcattatcctctttatcctgctcatggttgtgatcattgactggatcaccggcttaatagagaaggagatggcctaa

SEQ ID NO: 1650 - protein, 195 aa, Alloiococcus otitidis
MVPILETLAMSLAGTFFGVILAIPAAFLGTEIVTKNKLVTFIFRTFFSLVRTIPNLLLGAIFVTIIGIGSFTGVVTITIFTFGVVSQWLYAAIENIDLGPLESDEAVGATRFQIALNSVWPQVEFLVWSYSLFAFEINVRASAVLGYVGAGGIGTMLNAQMSLLRYDRVAVIILFILLMVVIIDWITGLIEKEMA

SEQ ID NO: 1651 - DNA, 804 bp, Alloiococcus otitidis; identical to SEQ ID NO: 1649
  CDS (103)..(801)

SEQ ID NO: 1652 - protein, 233 aa, Alloiococcus otitidis
MSAQAINSSWSDVFSDQSYLVNFLNGFARPDFAYIPDLLVPILETLAMSLAGTFFGVILAIPAAFLGTEIVTKNKLVTFIFRTFFSLVRTIPNLLLGAIFVTIIGIGSFTGVVTITIFTFGVVSQWLYAAIENIDLGPLESDEAVGATRFQIALNSVWPQVEFLVWSYSLFAFEINVRASAVLGYVGAGGIGTMLNAQMSLLRYDRVAVIILFILLMVVIIDWITGLIEKEMA

SEQ ID NO: 1653 - DNA, 804 bp, Alloiococcus otitidis; identical to SEQ ID NO: 1649
  CDS (25)..(801)

SEQ ID NO: 1654 - protein, 259 aa, Alloiococcus otitidis
MKLKDTIHDKLPQKLLILVIILLLFFMSAQAINSSWSDVFSDQSYLVNFLNGFARPDFAYIPDLLVPILETLAMSLAGTFFGVILAIPAAFLGTEIVTKNKLVTFIFRTFFSLVRTIPNLLLGAIFVTIIGIGSFTGVVTITIFTFGVVSQWLYAAIENIDLGPLESDEAVGATRFQIALNSVWPQVEFLVWSYSLFAFEINVRASAVLGYVGAGGIGTMLNAQMSLLRYDRVAVIILFILLMVVIIDWITGLIEKEMA

SEQ ID NO: 1655 - DNA, 282 bp, Alloiococcus otitidis
  CDS (31)..(279)
agccactgggagacaaccccaaaggtaaagatggtgatggttacaaccccagtgaaagatccaatcccaatgatggttacaaagattgcccccaaaaggaggttaggaatggtccggacaagggagaagaaggtccggaagatgaaggtaaccagcttgtttttggtcacaatttcagtccccaaaaaagctgcagggatggctaggatgacaccaaaaaaggtcccagcaagcgacatggccagggtttccaaaatcggaaccaagaggtcaggaatatag

SEQ ID NO: 1656 - protein, 83 aa, Alloiococcus otitidis
MVMVTTPVKDPIPMMVTKIAPKRRLGMVRTREKKVRKMKVTSLFLVTISVPKKAAGMARMTPKKVPASDMARVSKIGTKRSGI

SEQ ID NO: 1657 - DNA, 768 bp, Alloiococcus otitidis
  CDS (1)..(765)
atgattgaatttaaaaacgcccgcattgtttacagcaacggaactgtcggtttaaacaatgtcaacctcaaaattgataagggggaatttatcgccattatcggactttctggtgccggcaagtccaccctcctgcggtccattaaccgcctgatcgacctcactgaaggtgaaatttttatcgacaacaagtccattacccaggccaagcctaaagaactacggcacatgagacggaatatcggtatgatcttccaacactttaacctggttagaagaaacaccgtccaaagaaatgtcctctcaggtcgtttgggctattacagcaattgggaatctttgattggcaaattctccaaagaagactaccagaaagttgaacaagctctagaccaagtccggctgggtgacaagttgaaaacccggtccggtgacttatcaggcggtcaacagcagcgagtctccattgcccggaccttggttcaagaagctgatattatcttagcagatgaacctgttgcttccttggaccccattacctctaagtctgtcatggatgatatccggaccattaaccaggacttaaataagactgtgttagtaaacattcactccattgaccttgcccgggaatacgccgaccgcgttattgggatgcggagtggggagattgtctttgacggcccaaccgaagaagccaccgaccagcgcttaggtgaaatttacggacaagacatcttctctgaccaagacaagaggggggcatag

SEQ ID NO: 1658 - protein, 255 aa, Alloiococcus otitidis
MIEFKNARIVYSNGTVGLNNVNLKIDKGEFIAIIGLSGAGKSTLLRSINRLIDLTEGEIFIDNKSITQAKPKELRHMRRNIGMIFQHFNLVRRNTVQRNVLSGRLGYYSNWESLIGKFSKEDYQKVEQALDQVRLGDKLKTRSGDLSGGQQQRVSIARTLVQEADIILADEPVASLDPITSKSVMDDIRTINQDLNKTVLVNIHSIDLAREYADRVIGMRSGEIVFDGPTEEATDQRLGEIYGQDIFSDQDKRGA

SEQ ID NO: 1659 - DNA, 942 bp, Alloiococcus otitidis
  CDS (43)..(939)
ggagtgaatattttggaaaaaatgatgcggaaattttgtttaatgtcggctgctacgctcgctttagttgggtgtaataacgaaggtgacacagaatcagctgagggtggcgacacttctcctgagaccttacaagttcagtttgtcccaaccaacaacgatggctccatggaagctatggcagagcctttcgaagactacctgtccgaacaattagacagagacgttaacgttacactggcgactgacttttctaccattgtccaagccatggggtcaggccaggttgacttgggaatcatgccacctgccgcctacgtccaagctcgagacatgggagcagctgaagctgtcttgtcctcagaactggaagcctatgaccgggaaactggagagcctctagaaggggaaacaaccccatctttcaaaggagaagtcctcgttaaagcagacagcgacttgcagaacttagaagacttggctggagctaacattgccaccttgtctccttcttctgctgctggttacatctaccctgtggctgaaatgaacgaagcaggtatcgacctcagtggtatcactttcaccaccgttaacgacattccatctcaattgacagctgtcctcaacggtcaacaagatgccgcctttgtctttgaaggagcccgctatgttttccaagacgctgtgggtgacaacgatttagttgaagatttgcgtgtcctttacctgactgaaggtgacattcctaacgatgccatcgcggttcaacctgacatggaccaagacctaaaagaccaaattgctgaggctttcagacaaatgcctgaagacgaaaccggtcaagaagtcatgggcttatggggccaccaagactacactgaacctgacgaagaagcctacgacaccttaaaccaatacactgaactggctgctgactaa

SEQ ID NO: 1660 - protein, 299 aa, Alloiococcus otitidis
MSAATLALVGCNNEGDTESAEGGDTSPETLQVQFVPTNNDGSMEAMAEPFEDYLSEQLDRDVNVTLATDFSTIVQAMGSGQVDLGIMPPAAYVQARDMGAAEAVLSSELEAYDRETGEPLEGETTPSFKGEVLVKADSDLQNLEDLAGANIATLSPSSAAGYIYPVAEMNEAGIDLSGITFTTVNDIPSQLTAVLNGQQDAAFVFEGARYVFQDAVGDNDLVEDLRVLYLTEGDIPNDAIAVQPDMDQDLKDQIAEAFRQMPEDETGQEVMGLWGHQDYTEPDEEAYDTLNQYTELAAD

SEQ ID NO: 1661 - DNA, 942 bp, Alloiococcus otitidis; identical to SEQ ID NO: 1659
  CDS (22)..(939)

SEQ ID NO: 1662 - protein, 306 aa, Alloiococcus otitidis
MMRKFCLMSAATLALVGCNNEGDTESAEGGDTSPETLQVQFVPTNNDGSMEAMAEPFEDYLSEQLDRDVNVTLATDFSTIVQAMGSGQVDLGIMPPAAYVQARDMGAAEAVLSSELEAYDRETGEPLEGETTPSFKGEVLVKADSDLQNLEDLAGANIATLSPSSAAGYIYPVAEMNEAGIDLSGITFTTVNDIPSQLTAVLNGQQDAAFVFEGARYVFQDAVGDNDLVEDLRVLYLTEGDIPNDAIAVQPDMDQDLKDQIAEAFRQMPEDETGQEVMGLWGHQDYTEPDEEAYDTLNQYTELAAD

SEQ ID NO: 1663 - DNA, 942 bp, Alloiococcus otitidis; identical to SEQ ID NO: 1659
  CDS (13)..(939)

SEQ ID NO: 1664 - protein, 309 aa, Alloiococcus otitidis
MEKMMRKFCLMSAATLALVGCNNEGDTESAEGGDTSPETLQVQFVPTNNDGSMEAMAEPFEDYLSEQLDRDVNVTLATDFSTIVQAMGSGQVDLGIMPPAAYVQARDMGAAEAVLSSELEAYDRETGEPLEGETTPSFKGEVLVKADSDLQNLEDLAGANIATLSPSSAAGYIYPVAEMNEAGIDLSGITFTTVNDIPSQLTAVLNGQQDAAFVFEGARYVFQDAVGDNDLVEDLRVLYLTEGDIPNDAIAVQPDMDQDLKDQIAEAFRQMPEDETGQEVMGLWGHQDYTEPDEEAYDTLNQYTELAAD

SEQ ID NO: 1665 - DNA, 942 bp, Alloiococcus otitidis; identical to SEQ ID NO: 1659
  CDS (4)..(939)

SEQ ID NO: 1666 - protein, 312 aa, Alloiococcus otitidis
MNILEKMMRKFCLMSAATLALVGCNNEGDTESAEGGDTSPETLQVQFVPTNNDGSMEAMAEPFEDYLSEQLDRDVNVTLATDFSTIVQAMGSGQVDLGIMPPAAYVQARDMGAAEAVLSSELEAYDRETGEPLEGETTPSFKGEVLVKADSDLQNLEDLAGANIATLSPSSAAGYIYPVAEMNEAGIDLSGITFTTVNDIPSQLTAVLNGQQDAAFVFEGARYVFQDAVGDNDLVEDLRVLYLTEGDIPNDAIAVQPDMDQDLKDQIAEAFRQMPEDETGQEVMGLWGHQDYTEPDEEAYDTLNQYTELAAD

SEQ ID NO: 1667 - DNA, 171 bp, Alloiococcus otitidis
  CDS (1)..(168)
atggaatattttgttatattaaaagttaataagacatccaaagcttgttcctggctcctacccaagatgcttgtagctaatggcctcgtcaaagatattttgtcacttgtatttaatcttagctttgcatataatgaaagtgatatcttaaagtgctttcacaaaagatag

SEQ ID NO: 1668 - protein, 56 aa, Alloiococcus otitidis
MEYFVILKVNKTSKACSWLLPKMLVANGLVKDILSLVFNLSFAYNESDILKCFHKR

SEQ ID NO: 1669 - DNA, 690 bp, Alloiococcus otitidis
  CDS (7)..(687)
aaatcaatggacgccaaccgtatcaaacaaataaggtcactgattgaatttttgagccgcattttgggggaccattacgaaattgtttttcatgtgattactgaagacaaaacctatatcgacacgattattaacggccatattagtggcagaaccgaggattctcctttaactaagtttgccttggaattaatcgagtccaaggtttaccttgagcggcactatgtgacccactacaagaccgttaccaaggataataagcgattgcaggggtcgaccttttttattatggatgaagacaatcaaacgattgacggtatgttatgttttaacctagactattctgggcgggtggacttggccaatgctattttaaaagacctcaacctgtccttgctgccgggtgagttgcagactgaaagtttagaagttgaaccggcggaagacgatttcactgaaatcctgtcagaaagcgtcaaggataccatcaaacaattcattggtgtggacttacaaaccgacaacttgaccctgacccaggaagccaggatggatattgttaaagttttagaagagaaaaatattttccaactaaaaggagcagtaaccgaggtagcagaccttctgggggtttctgaaccgaccatttaccgctacagggcaaaaattcaaaaagaaaaaatgaactaa

SEQ ID NO: 1670 - protein, 227 aa, Alloiococcus otitidis
MDANRIKQIRSLIEFLSRILGDHYEIVFHVITEDKTYIDTIINGHISGRTEDSPLTKFALELIESKVYLERHYVTHYKTVTKDNKRLQGSTFFIMDEDNQTIDGMLCFNLDYSGRVDLANAILKDLNLSLLPGELQTESLEVEPAEDDFTEILSESVKDTIKQFIGVDLQTDNLTLTQEARMDIVKVLEEKNIFQLKGAVTEVADLLGVSEPTIYRYRAKIQKEKMN

SEQ ID NO: 1671 - DNA, 1113 bp, Alloiococcus otitidis
  CDS (889)..(1110)
ctgcgctttcaaatactagtaatctattattgtgatgataataaattattatcaatacgaaaaagaaaggaggctaatttggtggatttagttattggtattgtactgctcttgctggtgctggctttctttactttgtttaccttcaaggctccctatggtcggaagaccatgagtgcctttgcggatgcctcggtggcaactcttttggttgaagctttcctgagttcatttgttgggaatgtttttggcattgagtttttttcaaatttaggtgatgccgctggttcattaggtggggcagccacagccttgttggtcatcatggcaattggcggttctccagtcaatgcggttttaatcggagcttccatctacggctttgggattttgcctggcctcgttgtgggctatgtcatgtcttacttagtgaagtggattgaagacaagattccagaaggtgttgacctcttggtaatgatcttgttcttagctcctttatcaagaggactggccttgatcagtgacccggttgttacagccctcctatccaatattggccgggctattgcagccagcgctgaaagtgccccagcagtgatgggctttgtcgttggagggattatggcagttgtgggctcttccccaatttcgtccatggctctgtcggctatgctccaactgaccggtctcccaatggcggcgaccaccatggccatttggtcttcatcctttatcaacttggtcatgtacagccagctcaacttgggcggcaagagagaaactttgtcagtttttgttgagccgaagacccaagtcgacctgacatcagccaacccgcttcccatctacctagccaatattattggcggagggatatccggatcagtggttgccttgatgggaatgaacaacatggcttccagtacagcaacccctttcgcaggtttggccgttatgtttgcctataaccccgtccaacaagttatactagcagccttgatcactgtggtcatcggggccgtggttgcttttatcgttgctaaaatttggcacaaccgtcacctcccaattaccacagcagctgatttgagtgctagtgaacattcttaa

SEQ ID NO: 1672 - protein, 74 aa, Alloiococcus otitidis
MVALMGMNNMASSTATPFAGLAVMFAYNPVQQVILAALITVVIGAVVAFIVAKIWHNRHLPITTAADLSASEHS

SEQ ID NO: 1673 - DNA, 1113 bp, Alloiococcus otitidis; identical to SEQ ID NO: 1671
  CDS (625)..(1110)

SEQ ID NO: 1674 - protein, 162 aa, Alloiococcus otitidis
MAVVGSSPISSMALSAMLQLTGLPMAATTMAIWSSSFINLVMYSQLNLGGKRETLSVFVEPKTQVDLTSANPLPIYLANIIGGGISGSVVALMGMNNMASSTATPFAGLAVMFAYNPVQQVILAALITVVIGAVVAFIVAKIWHNRHLPITTAADLSASEHS

SEQ ID NO: 1675 - DNA, 1113 bp, Alloiococcus otitidis; identical to SEQ ID NO: 1671
  CDS (172)..(1110)

SEQ ID NO: 1676 - protein, 313 aa, Alloiococcus otitidis
MSAFADASVATLLVEAFLSSFVGNVFGIEFFSNLGDAAGSLGGAATALLVIMAIGGSPVNAVLIGASIYGFGILPGLVVGYVMSYLVKWIEDKIPEGVDLLVMILFLAPLSRGLALISDPVVTALLSNIGRAIAASAESAPAVMGFVVGGIMAVVGSSPISSMALSAMLQLTGLPMAATTMAIWSSSFINLVMYSQLNLGGKRETLSVFVEPKTQVDLTSANPLPIYLANIIGGGISGSVVALMGMNNMASSTATPFAGLAVMFAYNPVQQVILAALITVVIGAVVAFIVAKIWHNRHLPITTAADLSASEHS

SEQ ID NO: 1677 - DNA, 1113 bp, Alloiococcus otitidis; identical to SEQ ID NO: 1671
  CDS (136)..(1110)

SEQ ID NO: 1678 - protein, 325 aa, Alloiococcus otitidis
MFTFKAPYGRKTMSAFADASVATLLVEAFLSSFVGNVFGIEFFSNLGDAAGSLGGAATALLVIMAIGGSPVNAVLIGASIYGFGILPGLVVGYVMSYLVKWIEDKIPEGVDLLVMILFLAPLSRGLALISDPVVTALLSNIGRAIAASAESAPAVMGFVVGGIMAVVGSSPISSMALSAMLQLTGLPMAATTMAIWSSSFINLVMYSQLNLGGKRETLSVFVEPKTQVDLTSANPLPIYLANIIGGGISGSVVALMGMNNMASSTATPFAGLAVMFAYNPVQQVILAALITVVIGAVVAFIVAKIWHNRHLPITTAADLSASEHS

SEQ ID NO: 1679 - DNA, 1113 bp, Alloiococcus otitidis; identical to SEQ ID NO: 1671
  CDS (82)..(1110)

SEQ ID NO: 1680 - protein, 343 aa, Alloiococcus otitidis
MDLVIGIVLLLLVLAFFTLFTFKAPYGRKTMSAFADASVATLLVEAFLSSFVGNVFGIEFFSNLGDAAGSLGGAATALLVIMAIGGSPVNAVLIGASIYGFGILPGLVVGYVMSYLVKWIEDKIPEGVDLLVMILFLAPLSRGLALISDPVVTALLSNIGRAIAASAESAPAVMGFVVGGIMAVVGSSPISSMALSAMLQLTGLPMAATTMAIWSSSFINLVMYSQLNLGGKRETLSVFVEPKTQVDLTSANPLPIYLANIIGGGISGSVVALMGMNNMASSTATPFAGLAVMFAYNPVQQVILAALITVVIGAVVAFIVAKIWHNRHLPITTAADLSASEHS

SEQ ID NO: 1681 - DNA, 1113 bp, Alloiococcus otitidis; identical to SEQ ID NO: 1671
  CDS (79)..(1110)

SEQ ID NO: 1682 - protein, 344 aa, Alloiococcus otitidis
MVDLVIGIVLLLLVLAFFTLFTFKAPYGRKTMSAFADASVATLLVEAFLSSFVGNVFGIEFFSNLGDAAGSLGGAATALLVIMAIGGSPVNAVLIGASIYGFGILPGLVVGYVMSYLVKWIEDKIPEGVDLLVMILFLAPLSRGLALISDPVVTALLSNIGRAIAASAESAPAVMGFVVGGIMAVVGSSPISSMALSAMLQLTGLPMAATTMAIWSSSFINLVMYSQLNLGGKRETLSVFVEPKTQVDLTSANPLPIYLANIIGGGISGSVVALMGMNNMASSTATPFAGLAVMFAYNPVQQVILAALITVVIGAVVAFIVAKIWHNRHLPITTAADLSASEHS

SEQ ID NO: 1683 - DNA, 1374 bp, Alloiococcus otitidis
  CDS (25)..(1371)
tttatgaataggagtgtgttaaatatggctaaggaaattgccggaaaaacagtcgaacaatggacccaggctaacccctacatccatgacattgtggatggcaaacccgttttctgggtcaatgacaagaaaggaaactttgaagcagaaaaagaccaagtccaattctctgcagaggacatcaaagatgcagccgaccgttgggatcgttttgcaccgtggtttgaaattgcttttgatgacaccaaggagacaaaaggcattatcgaaggtccttacactcgaattgataactttaaagcagatgtggaaaaacgctacgatgtcgacatagctggtaatatgtacgtcaaacgggatgatctcttgccaatcgctgggaccatcaaggctcgtggggctatttatgaagtcatccaccacgctgaagagttagccatcgaaaaaggcttattgtccggttatgatgatgactacaccaaatttgcttcagatgaattcaaagatgccttcagcaattacagtgtagttgtcggaacaaccggtaacctcggtatttcggtcggggtcactgccgcagcatttggcttccaatcgattgtccacatgtcctctgatgccaaacaatggaaaaaagacttcttgcgcaaaaatggggccgaagtagtcgaacacaacactgactttactgaagcggtcaatcaaggacgtcgagcttctgaagcagaccctaactcttactttgttgatgatgaagattctatctatctctacttgggctacaccacagctgctcaacgtctggctaaacagctagaagatgacggcattaaagtggacgatgaccacccactcttcttatggttaccatgtggtgttggtggttctccaggtggtattacctttggggctaaacacatttttggcgacaatgtccacgccttctttgctgaaccaacccatgttccttccttgctactcggtattttaaccggtcagttctccgccgttcacgtcggcgactttggcattgatggccaaactgtcatggacgggctagctgtgcctcgtacttcccaatttgtgtcacaggtgatggaacacttctttgacggaggttacaccttaaccgatgatgaagccaaccataacttgacccgtctctacgatactgaagaaattttcctagaaccagcagcgactgctggactatcaggccctgcctacctcttcaagtctgaagaagggcaaaaatatattaaagacaaaggcttgaacatggacaatgccacccacattgcctggggaaccggtggctcaatggttcctgaagaagaccggaaagtcttctaccaagctggtgtcgaaaaataa

SEQ ID NO: 1684 - protein, 449 aa, Alloiococcus otitidis
MAKEIAGKTVEQWTQANPYIHDIVDGKPVFWVNDKKGNFEAEKDQVQFSAEDIKDAADRWDRFAPWFEIAFDDTKETKGIIEGPYTRIDNFKADVEKRYDVDIAGNMYVKRDDLLPIAGTIKARGAIYEVIHHAEELAIEKGLLSGYDDDYTKFASDEFKDAFSNYSVVVGTTGNLGISVGVTAAAFGFQSIVHMSSDAKQWKKDFLRKNGAEVVEHNTDFTEAVNQGRRASEADPNSYFVDDEDSIYLYLGYTTAAQRLAKQLEDDGIKVDDDHPLFLWLPCGVGGSPGGITFGAKHIFGDNVHAFFAEPTHVPSLLLGILTGQFSAVHVGDFGIDGQTVMDGLAVPRTSQFVSQVMEHFFDGGYTLTDDEANHNLTRLYDTEEIFLEPAATAGLSGPAYLFKSEEGQKYIKDKGLNMDNATHIAWGTGGSMVPEEDRKVFYQAGVEK

SEQ ID NO: 1685 - DNA, 1374 bp, Alloiococcus otitidis; identical to SEQ ID NO: 1683
  CDS (4)..(1371)

SEQ ID NO: 1686 - protein, 456 aa, Alloiococcus otitidis
MNRSVLNMAKEIAGKTVEQWTQANPYIHDIVDGKPVFWVNDKKGNFEAEKDQVQFSAEDIKDAADRWDRFAPWFEIAFDDTKETKGIIEGPYTRIDNFKADVEKRYDVDIAGNMYVKRDDLLPIAGTIKARGAIYEVIHHAEELAIEKGLLSGYDDDYTKFASDEFKDAFSNYSVVVGTTGNLGISVGVTAAAFGFQSIVHMSSDAKQWKKDFLRKNGAEVVEHNTDFTEAVNQGRRASEADPNSYFVDDEDSIYLYLGYTTAAQRLAKQLEDDGIKVDDDHPLFLWLPCGVGGSPGGITFGAKHIFGDNVHAFFAEPTHVPSLLLGILTGQFSAVHVGDFGIDGQTVMDGLAVPRTSQFVSQVMEHFFDGGYTLTDDEANHNLTRLYDTEEIFLEPAATAGLSGPAYLFKSEEGQKYIKDKGLNMDNATHIAWGTGGSMVPEEDRKVFYQAGVEK

SEQ ID NO: 1687 - DNA, 1329 bp, Alloiococcus otitidis
  CDS (22)..(1326)
aagattaggagagtggcaaaaatgattgacatgaagcagttgaaaaatgattttgaagctgtcgcccaaaatttagaaacccgcgggactagccgggaagacttgcaaaaggccctggactactatacccaaagaactcaattggtagctgaattagacaagttgcggaacaagcgaaataccgtatcagaagagattggcaagcaaaaacgtgcgggtcaagacgctgacgaccaagtccaagaaatgcgggacctgggaaaagaaattgaggccaaagaaaaacgagtccgcgagctagaggatgctgaatttgaaatcatggcccgggttcccaatattgcagctgaagacattccagttggcgaagatgaagatgccaatgaagaaatccaccgcaaaggcgaccagcccagctttgactttgaacccaaagcccactatgaattaggggaagacttagggattttagactttgaaaatggagcccgggtagccggttctcgcttcttgtactatcttggcttgggggctcgcttggaacgggcggtttataactttatgctaacccagcaacatgagaatggttatgtagaaatgattaccccttacttggtcaatgacaatgccatgtacgggaccggccagtaccctaaatttaccgaagatacctaccgggtggataatgttgacgaccgcagcatgagcttgattccaaccgctgaagttcccttgaccaactacttcggagacaatatttgggacaaggcagacctgccctttaaggtgacagccctatctccttgcttccggtcagaagcgggttcagctggacgggacacccggggcttgatccgcttgcaccagttccacaaggttgaaatggtccgaatttctactccagaagattcatttaaccagttagaagaaatgactgcaaatgccgaagacatcttggctaaattgggcttgccttaccgtcgtattgtcttgagtactggagacatgggcttttctgcaactaaaacctatgatgtggaagtctggctaccagcccaagatacctaccgggaaatttcttcctgttctaactgttacgacttccaagctagacgggctaagatccgcttgagagatgaggatggcaatgtccgcctcgcccacaccttgaacgggtctggtctggcagttggacggaccgttgctgcgattatggaaaactaccaaaatgcagacgggtcaattgacattccagaagttctggtcccttacatgggtggcattacccaaatcaataaagaaaacgcccttggtaaaaaagttaaatag

SEQ ID NO: 1688 - protein, 435 aa, Alloiococcus otitidis
MIDMKQLKNDFEAVAQNLETRGTSREDLQKALDYYTQRTQLVAELDKLRNKRNTVSEEIGKQKRAGQDADDQVQEMRDLGKEIEAKEKRVRELEDAEFEIMARVPNIAAEDIPVGEDEDANEEIHRKGDQPSFDFEPKAHYELGEDLGILDFENGARVAGSRFLYYLGLGARLERAVYNFMLTQQHENGYVEMITPYLVNDNAMYGTGQYPKFTEDTYRVDNVDDRSMSLIPTAEVPLTNYFGDNIWDKADLPFKVTALSPCFRSEAGSAGRDTRGLIRLHQFHKVEMVRISTPEDSFNQLEEMTANAEDILAKLGLPYRRIVLSTGDMGFSATKTYDVEVWLPAQDTYREISSCSNCYDFQARRAKIRLRDEDGNVRLAHTLNGSGLAVGRTVAAIMENYQNADGSIDIPEVLVPYMGGITQINKENALGKKVK

SEQ ID NO: 1689 - DNA, 1329 bp, Alloiococcus otitidis; identical to SEQ ID NO: 1687
  CDS (13)..(1326)

SEQ ID NO: 1690 - protein, 438 aa, Alloiococcus otitidis
MAKMIDMKQLKNDFEAVAQNLETRGTSREDLQKALDYYTQRTQLVAELDKLRNKRNTVSEEIGKQKRAGQDADDQVQEMRDLGKEIEAKEKRVRELEDAEFEIMARVPNIAAEDIPVGEDEDANEEIHRKGDQPSFDFEPKAHYELGEDLGILDFENGARVAGSRFLYYLGLGARLERAVYNFMLTQQHENGYVEMITPYLVNDNAMYGTGQYPKFTEDTYRVDNVDDRSMSLIPTAEVPLTNYFGDNIWDKADLPFKVTALSPCFRSEAGSAGRDTRGLIRLHQFHKVEMVRISTPEDSFNQLEEMTANAEDILAKLGLPYRRIVLSTGDMGFSATKTYDVEVWLPAQDTYREISSCSNCYDFQARRAKIRLRDEDGNVRLAHTLNGSGLAVGRTVAAIMENYQNADGSIDIPEVLVPYMGGITQINKENALGKKVK

SEQ ID NO: 1691 - DNA, 1338 bp, Alloiococcus otitidis
  CDS (163)..(1335)
ggcccacccacaggctcttgtcttgggtgggctttattttgtcgggttttttcactggagttaccagctaactcaaaatttattaaaccaaacattagttcttattattggtctagtcacaaatcatgctataatagaagcaattcaaaacaggaaaattggatgcaaggagctgatgggatgcggattttacatacggcggactggcacctagggaagatcgtcaatgagttctccctcttggacgaccaggtagccatgcttgaccaattaattgacattataaaagaagagaaaattgatgccctcttgatggcaggcgacctctacgaccggggggtgccgcctaagcaagcagttttagcctttaacgacttcctcaaccgaatgatggctgaagtcaggatccctattctaatgattgcgggcaaccacgacagcaatgaaagactagaattcgggaccggcttgtttaaggcaagtgacgtttatatagaaggaacttttaagcctaagactaggatggtggatttaggcggggttcatgtctacctcatgccctttgctgaccatatttgggtccggcaagaattggatatggaagaccagattaaaaatctggaagaagccatccaagtccaggttgaccggattgtccaaggtcctgactttgaccctcatgtctttaacatcctgaccatgcacggctatgtggtcaaccagagcagagattcgattgaagagtcggactccgaacgccccttaagtatcgggaccaccgaatatgtggatgcttccattttcgacgactttgactatgtagccctgggtcacttgcatggtccccaaaaggtaaagcgggagtccatccgctacagtggctccttgctcaagtactctaaatctgaagtcaaccaccacaagcaagtggttattctggatatcgaccaggaccgggacccggccttgaatcttgagacccgagacctcatcccgaaccgggacatgcgggttttgcgcgggagttttgacgacttggtccaaggccagtctgacgactatatcttttttgaactagaagacccggcttatattatggatgccatgtcccgtttgcgcaaaaaataccccaatgccatggggatcgattatgtccatttaaaaggaagacaagtcgatcctgcaaggggtcaagatgccaaagacatgcgacacttggctattgacgacctcttccagcagtttttccaaaagtatagggggaaagacctgaccgaccagcaattggaaatagtccaagaagttgccaaccaggcgatccaggaaggagatgaataa

SEQ ID NO: 1692 - protein, 391 aa, Alloiococcus otitidis
MQGADGMRILHTADWHLGKIVNEFSLLDDQVAMLDQLIDIIKEEKIDALLMAGDLYDRGVPPKQAVLAFNDFLNRMMAEVRIPILMIAGNHDSNERLEFGTGLFKASDVYIEGTFKPKTRMVDLGGVHVYLMPFADHIWVRQELDMEDQIKNLEEAIQVQVDRIVQGPDFDPHVFNILTMHGYVVNQSRDSIEESDSERPLSIGTTEYVDASIFDDFDYVALGHLHGPQKVKRESIRYSGSLLKYSKSEVNHHKQVVILDIDQDRDPALNLETRDLIPNRDMRVLRGSFDDLVQGQSDDYIFFELEDPAYIMDAMSRLRKKYPNAMGIDYVHLKGRQVDPARGQDAKDMRHLAIDDLFQQFFQKYRGKDLTDQQLEIVQEVANQAIQEGDE

SEQ ID NO: 1693 - DNA, 246 bp, Alloiococcus otitidis
  CDS (7)..(243)
aggtggatggccagacttgtgagaccaagatttcggaatccaaaagggccatggaagacttactgggactcactgctgaccagttcaagcagattgtcatgctgcctcaaggagagttccgcaagctccttaccgctagcagtaaggacaaggaggcaatcttccgcaatatttttaaaacggataatttccagatctttgaaaagatcttatccgatcgctacaagtcctacaaggcagatttag

SEQ ID NO: 1694 - protein, 79 aa, Alloiococcus otitidis
MARLVRPRFRNPKGPWKTYWDSLLTSSSRLSCCLKESSASSLPLAVRTRRQSSAIFLKRIISRSLKRSYPIATSPTRQI

SEQ ID NO: 1695 - DNA, 420 bp, Alloiococcus otitidis
  CDS (31)..(417)
gtttggtcagcctctttaaaagctgcttctttggccttgacctcttctttgatggcttggattttttgggcatcaaccaaagcctgggccaggtcattttccttacggtcggcctcctgcccagcttggtctagcctggtctttttagcttcggcttccttcagtttatcccgccactggggcaattgccataatttttggtctaggtctgctttggcttcttggtttgcttttaatttttccagcttgtctttttcctggtcccgggcttgggactggttcaccttcaaggtctcaagggcttcaaaccgctgggccaagtcttgccaaagtcccttctctttttccaattgctggcggtttgcttccatttttgggatagcagcaagtttttcttggtgggcttggatttgcttttga

SEQ ID NO: 1696 - protein, 129 aa, Alloiococcus otitidis
MALTSSLMAWIFWASTKAWARSFSLRSASCPAWSSLVFLASASFSLSRHWGNCHNFWSRSALASWFAFNFSSLSFSWSRAWDWFTFKVSRASNRWAKSCQSPFSFSNCWRFASIFGIAASFSWWAWICF

SEQ ID NO: 1697 - DNA, 3075 bp, Alloiococcus otitidis
  CDS (1)..(3072)
atgagacctgttcaattagtcatgagtgcctttggtccttttaaggacaaggtcgttatcgattttagccagttcaaccaagcctctctatttcttttgacgggaccaacagggtctggcaaaacgactatctttgatgctatctcctatgccctctacgggtcagccagtggccaggtccgggatactagcactctcaagtccgattacgcagacggcagccagctctgctatgtcgacttcacctttaccctaggcgaaaaaactgtccaagtttgccgccagcccaagcagatcggccccggcaagaccaaggctggggtccagttgaatgccgagtttaacctaaaggtggatggccagacttgtgagaccaagatttcggaatccaaaagggccatggaagacttactgggactcactgctgaccagttcaagcagattgtcatgctgcctcaaggagagttccgcaagctccttaccgctagcagtaaggacaaggaggcaatcttccgcaatatttttaaaacggataatttccagatctttgaaaagatcttatccgatcgctacaagtcctacaaggcagatttagacaactcccaaaccaaattggaccaagttcttgatgccattcaggtggaagattgggataaaaacactaaactctgccaggctgttaaagaagaagactattctagcataatggaggagcttagccaggaaattgaccgggaccaagcccaagtcggtgccttagaccaggctattaagaaattagagggggacttgaaccggctcaataagtacattgaaaatcggcaagaattggaccggcttatcctgcaaaagaaagacttaaaccaggctcaggaccaaatcaaggcctaccagaagagtttagaccaggctgatcaagctaaaaacttgcaggaagtggaccaaaaacgggccaagacccaggataacttaagccaaaaccagcaagctaaagagaagctggacagcaagttagcaggtttggaaaaagaagagaagcaagttcaaaagcaaatccaagcccaccaagaaaaacttgctgctatcccaaaaatggaagcaaaccgccagcaattggaaaaagagaagggactttggcaagacttggcccagcggtttgaagcccttgagaccttgaaggtgaaccagtcccaagcccgggaccaggaaaaagacaagctggaaaaattaaaagcaaaccaagaagccaaagcagacctagaccaaaaattatggcaattgccccagtggcgggataaactgaaggaagccgaagctaaaaagaccaggctagaccaagctgggcaggaggccgaccgtaaggaaaatgacctggcccaggctttggttgatgcccaaaaaatccaagccatcaaagaagaggtcaaggccaaagaagcagcttttaaagaggctgaccaaacttatgtcaagcttggccaggcctattttgccaaccaagcggcccttttagctgatcaattagaagaggaccagccctgcccggtttgtgggtccacccaccacccagcaccggcccattttgaccagggggaagtcaccaaggctgccttggatgcaagtgaagcggctaaaaaccaggcccaagcagccctgacccaggtggaaagcagtttgcaccaccggcaagaagccttggccaaagccctaagaccctaccaagtcagccagcctgacttggaagaagcccacaaccgggcctatcttgaccgaaagcaattgcaagaagaagctaaggaaatggcatcccgaattgaggacttgaaccaggccctagcccaagaaccaggctggcgcgaccaggtagaaagctactctcaggacatagaagccctccaggccgacttgcagaccctcaaaaccaacttggaccgcgaccagactgaccaagccaaactggaagccgaagttgaggacttgcaaggccaattaagtcaggagtctaaggaccaggttgaagcaagcatccaagatatcacggctaagatagagggtatccggcaaagggaaaaagacttgcaagctcaccaggcccaagtcaaccaagacctgacccaaaaccggaccagctttaattacacaaaggaccggatccaagaattggataaagaattccaagactactccaaagaattcaatgacttggccgctaaaagtgaaatcggttctgactaccagtcttatttgattagtgaccaggaaattgaccggcggaaaaatgtaattgaccaacaccaggaggcacaaattaaagtggcttcaggcttggagaacgttaaaagcaaactacctccagcagaagaccaggttagtttagaagaagccaaagcccaaaaagaagacctgggtcggcagaaggcagggcttcaaggccaacgagaccaggtcaatgttcgcaaagaagccaacaaaacacacttagcagacatccaaaaatactaccaagaacaagctagtatctacaagactgccagcctttacaaagacttgagtgacctggcaggcggcaagtcggctgaaaccaaccggatttcctttgaacgttatgtcctaggggtctactttgatgagattttacaagctgctaacttgcgcctcgaccagatgaccagtggccgttttaacctagagcggcagcgggacaactttaaaggaagtggtggcaaggggttagacctagaagttttcgaccaatttaccggcaagaaacgaccggtctcttccttatctggtggggaaatgttcaaggcctctctttctttggcattaggcttaagtgacgtgatccaagggcaattgggtggggtccaggtcgacaccctctttgtggatgaaggctttggtaccctagatcccgactccctagaccaggctgtccaagttttaatggaactcaaccaaactggccgcctggttgggatcatctcccacgttgaagagctcaaagcccgtatttcctctaaaattgtccttaagcgccaacaaaccggcagtcaagtggaaattgaagtctaa

SEQ ID NO: 1698 - protein, 1024 aa, Alloiococcus otitidis
MRPVQLVMSAFGPFKDKVVIDFSQFNQASLFLLTGPTGSGKTTIFDAISYALYGSASGQVRDTSTLKSDYADGSQLCYVDFTFTLGEKTVQVCRQPKQIGPGKTKAGVQLNAEFNLKVDGQTCETKISESKRAMEDLLGLTADQFKQIVMLPQGEFRKLLTASSKDKEAIFRNIFKTDNFQIFEKILSDRYKSYKADLDNSQTKLDQVLDAIQVEDWDKNTKLCQAVKEEDYSSIMEELSQEIDRDQAQVGALDQAIKKLEGDLNRLNKYIENRQELDRLILQKKDLNQAQDQIKAYQKSLDQADQAKNLQEVDQKRAKTQDNLSQNQQAKEKLDSKLAGLEKEEKQVQKQIQAHQEKLAAIPKMEANRQQLEKEKGLWQDLAQRFEALETLKVNQSQARDQEKDKLEKLKANQEAKADLDQKLWQLPQWRDKLKEAEAKKTRLDQAGQEADRKENDLAQALVDAQKIQAIKEEVKAKEAAFKEADQTYVKLGQAYFANQAALLADQLEEDQPCPVCGSTHHPAPAHFDQGEVTKAALDASEAAKNQAQAALTQVESSLHHRQEALAKALRPYQVSQPDLEEAHNRAYLDRKQLQEEAKEMASRIEDLNQALAQEPGWRDQVESYSQDIEALQADLQTLKTNLDRDQTDQAKLEAEVEDLQGQLSQESKDQVEASIQDITAKIEGIRQREKDLQAHQAQVNQDLTQNRTSFNYTKDRIQELDKEFQDYSKEFNDLAAKSEIGSDYQSYLISDQEIDRRKNVIDQHQEAQIKVASGLENVKSKLPPAEDQVSLEEAKAQKEDLGRQKAGLQGQRDQVNVRKEANKTHLADIQKYYQEQASIYKTASLYKDLSDLAGGKSAETNRISFERYVLGVYFDEILQAANLRLDQMTSGRFNLERQRDNFKGSGGKGLDLEVFDQFTGKKRPVSSLSGGEMFKASLSLALGLSDVIQGQLGGVQVDTLFVDEGFGTLDPDSLDQAVQVLMELNQTGRLVGIISHVEELKARISSKIVLKRQQTGSQVEIEV

SEQ ID NO: 1699 - DNA, 636 bp, Alloiococcus otitidis
  CDS (16)..(633)
caaaggagttttgatatgttgcagacaatcttatcggcagggggagtctttgtggctaccagcatcgattacctggttattttgaccctaatttttgcccaagtttccgggaaccagcacaaggctgccatttatgccggccagtacctggggaccgggatcttagttggggtcagcttgcttgcagcctatgtggtcaactttcttcctgaagattggctggtcggcttgctgggcttgattcccatcttcttaggaatccgtcaagccactcagggagaagatgatgataaggcggatggggcagtatttgaccagctagagcaaaaccagtctcgccaagttttttggactatgaccctcctaaccatttcttctggcggggacaatttaggagtttacctgccctactttgcttccttagcatggcaggaaatagtggtcgccctcttcgtttttgttatcggaattgttatcctttgcgagctcagccaaaaattgtctgagaccccctttatctctcaaacagttgaaaaatacgaacgagtcctagtcccgcttgtccttgtcatacttggactttacattatgtttgaggctggaactttgcaaaaattgttaagcatgaccgtttag

SEQ ID NO: 1700 - protein, 206 aa, Alloiococcus otitidis
MLQTILSAGGVFVATSIDYLVILTLIFAQVSGNQHKAAIYAGQYLGTGILVGVSLLAAYVVNFLPEDWLVGLLGLIPIFLGIRQATQGEDDDKADGAVFDQLEQNQSRQVFWTMTLLTISSGGDNLGVYLPYFASLAWQEIVVALFVFVIGIVILCELSQKLSETPFISQTVEKYERVLVPLVLVILGLYIMFEAGTLQKLLSMTV

SEQ ID NO: 1701 - DNA, 162 bp, Alloiococcus otitidis
  CDS (1)..(159)
atggtgtatcctggttcattatttgtcggcttgtggataggcgaccaatcagttgccacagggggactgggtcttttaaaacgatcgttattatcaaatttaggcttaagtataaggtatttactggatttctcgaacaacaaacgttatatgagaatttag

SEQ ID NO: 1702 - protein, 53 aa, Alloiococcus otitidis
MVYPGSLFVGLWIGDQSVATGGLGLLKRSLLSNLGLSIRYLLDFSNNKRYMRI

SEQ ID NO: 1703 - DNA, 237 bp, Alloiococcus otitidis
  CDS (7)..(234)
gtgaagttgaccgggttaagattgttaaaaccaacactaattttgatgcaccccttagccaacgctttgtgccccaagctagagtccttcctgttttccaaggcgacgacctaccggaggccaaagcagccattgaaaatgcgggcgacttgccagatgatacccagtatttatgggttgttggccatgttccacaaacaagtgaagtcggctctaccactggccttgtccgcgtga

SEQ ID NO: 1704 - protein, 76 aa, Alloiococcus otitidis
MTGLRLLKPTLILMHPLANALCPKLESFLFSKATTYRRPKQPLKMRATCQMIPSIYGLLAMFHKQVKSALPLALSA

SEQ ID NO: 1705 - DNA, 237 bp, Alloiococcus otitidis; identical to SEQ ID NO: 1703
  CDS (1)..(234)

SEQ ID NO: 1706 - protein, 78 aa, Alloiococcus otitidis
MKLTGLRLLKPTLILMHPLANALCPKLESFLFSKATTYRRPKQPLKMRATCQMIPSIYGLLAMFHKQVKSALPLALSA

SEQ ID NO: 1707 - DNA, 5799 bp, Alloiococcus otitidis
  CDS (16)..(5796)
gaaaggagtgtaagcatgcacaccaaacgtttaaagactttggtcgcttttctcttgtcatttctttttgtaacaaatatttggcaagttcaagcggaagaagacccggctgccccggctctagaatcccaattagtggatgaaggccagggaaaccaggttgagcttcctgcagaaaatgaagagagatcaaaagattctttaactcaaacgccccctagtttgactagtggatgggaacaagaccaggcaaatggccagtcttactccccggcagaccaaggattatctcgtcagcagaccgcaccgcctgctggtaatttaaatccaggcagccaagtccagcaaggggcaagtcgtgagagtcagcaagggtctgtgggaagccagtctgaaactgaaagttcagaagattcagatgatgacgaccctaaccctgctggctcagaagatggcggggagactttatcaggagcccccgactcagcagtcgttgaagaaaaccaagcagactcagtctatgtaggaggtccaaaccaacaagagggtgctggacctgaccaagctgatcttccccaggcagaggaggaagagcctaatgttgagggagccaagtctagccaagaatctaaagacgaaccctcaaccaagcagaaactgaccgaggaaccttcccagtctaaccctaaaggccaaacccggttagctcctgaacggccagttaccaatgccaagtcaaatgcccaccgttacccagtcttgactatcggtggcgacccaagtgaacgacactttacttggtattcggacaattctgaccagggttactttgagattgccccatataatgaagcaggagacttctcccaaggccaagtgattgaagggaaaacgttccaagaaaacaacacccaccatgacttcttcggccgaaatgttccagacttatacaacacccaggtgaaaattgagggtcttgaagaagacacgacttacatgtaccggttctggaatgacgaagaaaacaagtctgacatttacacctttaaaactcacccagctggcgattttgacttcttaattgtcggtgacccccaactcgggtcaggcgacgacctagtagaagatatccgtggctggcaagaaaccttggacaccatgctagcagttcacccagaccctaactttttactcagtgttggggaccaggtcgaaattgcatggcgtgaaagagaatatgctggttttatcgaacaagatggcctcaacgaaatcaccttagcacccattgttgggaaccacgacaccttcaacccagcattttctgagcactttgccttaccaaatgtgcaagcagaagggaaaacagaagcagggtctaactactactttacttacaataacgccctattcgttgccctaaacttggaaaacaccaactttgaagaacatgaaagaaccctgcaacaagccattgaagcgactagtgaccaagacattgactggcgggttgtgaccttccaccggtccctattctcaccagccaaccactccatgaccaaccacaccaagtacttgcgtgaaaatgtggcacccttgatgaacaagtatcagattgacattgttctatctggtcacgaccacgcttatgccagaagtcatgttatggacgggactgagccacaaattgagtggactgaagctaaccaggcgccaacagagtatgttgaccctgaaggtgttatttacctcacctttaactcttctagtggcagcaagttttacgacttagaagaattccacgacttccttgccgtccgcaaccaagagtaccagaccaacttctccatcgcccatgtgactgaaaatacctttgaagtcgtcacttaccgaactgcagacttgagtgaagttgaccgggttaagattgttaaaaccaacactaattttgatgcaccccttagccaacgctttgtgccccaagctagagtccttcctgttttccaaggcgacgacctaccggaggccaaagcagccattgaaaatgcgggcgacttgccagatgatacccagtatttatgggttgttggccatgttccacaaacaagtgaagtcggctctaccactggccttgtccgcgtgaactacagtgatggttctcaagaagacatccctgtttgggtcgaaatcattgaaaagagacacgttgaattggttgacccaatttggggcaagctagaagccaaagcagcagatgaaaacaataccattcgcatttccgttatttctgatagccacattttagccaaagatctaattgccccaacgaaagaatactatgacatgctgaacttggatgctaagttctttacccaatcggaagaagtttttaaagaaagtcttcgcatcattgaccaaagaggcgttgactatgtcttgatccccggtgacttgacccgggatggggaacatgagacttacgactttattgttcgtacccttaacgaatatgtgcaaaaaggcttgcaagaaggtcgtgaccgtcgtgtctttgtcgtaccaggcaaccacgacatcaacaatccacttgcctacgactttgccaactccaccaagctgcccctttacacaccgcaggatttccaagacgacttccaagaattggtatatgatcaagctttagcaatctacaatgagtcagacatttaccaagactacttggctgaagttaacgaaagagttgaccaagctgaatcagaagaatactatgcccaaggtcacttgtcttacgtttcaagaattgacattggtgaccgcaatggacagggtggcattactattctagccattgactctgctatctactcagctgatgtgactcaatctggtcaaaacagccaagaaacaggcgggattatcacggagcctttgatgaactggttggtccaacaagcctaccaagctcacgggcgaaatgatattgtggtcgctatggcccaccacgcctttatcccacacttctacaaccaggaagaattcttgtctgattatatcctccgcaactggaacgtgccttaccaaagtgataacccactccttgatggcaaaaccccgatggaagtttttgccgacaatggcattcacttcctctttaccggacacattcacgacaacgacatttcttcctttacaactcctgaaggcaacaccctttacgacatcgaaactgggtcttcggtcagctatccaggacctgttcgtcacatgacctttatcaacgatatcgatagtcaaaacacccgtcaagttgctatttcagaaatggattcagtccgaacttttgaatacattgatgctgacggatcagttcaattgatggaagactatgtaaactatactcgagaaaacactgtcactcctcgctttgtagcgattcagattgttaacttgatcagcgactacctcaaaccttcccgtgacctgatcaattccttcttaccattaccaattcctgctcctgcccaagcccctcttcttgtcggcttagtcagtagcctcttagggacaccagaagctcctgccttccaaacttctattccagttttaggcaatgtctccctttactgggagtccgatcctactggtttaggcagactcgttgctcaagtaggaaaccggtctaacaaccgcctttacatcgaaggggaaaacttggtcactttcatcaacgacttgcttgatgagttggaccaaaaagtccttaatgaagaccaattgatcaaccgattagaaggtttagtcgaagaactctttgccgttccagtttacacccatgaagatgggagagtccggacccttcaagaattgggagttgacacctacctcggccttgctggtggagaagaaagtgtcaaacctgaattagcttgggttcgagaagcaggccagcaactgaaagaccaaaacggcctttacgctgtagtccaatacattgaagagccgcttatcgactggatttctaacttcctttcaagcgttcaattcgacctcggccagcacttacaagctagtggatttgttccagtacttggcttgccgttcattagaggcctcttgccgactaatgctgaaagtttattgggaaccattcttggctttttaggcattgacgactacaaagccttcatctcttactgggtgaattctgacctagctcgttacattatcgacccactaaatgttccggttggggaccttgttatttcatttaacgatgaacttttcaaaaccaacccgcaatacgcttacctttacgacaatgacaccagtatggctgttcaacgagacccagttgtcaaaaatggtcgggtgcaaattcaagatgcccaaaccgttaacttggtcggtgactttacagcgaacttgattccatctgtccgtgtcctcgtaaatggtcagcctgtccaagcagaagttgacttccaagaaggtaaaattgttgcccgcctcagcaatgaattggtggacggagaccaagttgctttccaactttcccactacaacgaccgggctaacccaattaccttacagtcggctgtcgaaactttcactgttcagcaagaagaacctaaccaagacttagccatcttagttggcctcttgcttaaggaaatccgtcaattaagagaagagctgcaagggcaagacccagtagaccttcaaccgatcttagacagattggaccaattggaagcagctcttgccaaccaagaaccgacagacttacaacctgtcttggaccgcattgaaagcttagaaaccaccatcctgttgctcttagctcatatcgctcaattagaacaatctcttgcagaccaagaaccggtgggcttgcaacctgtcttagaccgaattgaccaattggaagcaagcattcagccattacttgaccgcattgccgcactggaagaagcacttgctaaccaagagacagtagacttacagccaatcttggaccaaattgcagatttgcaagccagtatccaaccgctacttgcacgtattgcaacgttagaagaagctcttgctaaccaagcaccggttaatcaagaactgttggaccgaattgctgaactagaaaaatctcttgcagatcaaaaagcagccaaccaagccctacaagaccgaattgcagaattggaagcagctaataaagtgcaacaagaccgcattgaagacttagaagcaactaacaaagtactacaaaatcgaattgcggaactggaagcagctttaaaaggtcaaaaaccagatgaccaagatgcaaatcgggaccgagaagcagaattggaagcagctttagccaaacaaaaagcagccaaccaagctctacaagaccgaattgcagaattggaagcagctcataaagcgcaacaagaccaaattgttgatttagaagaagctcttaaagatcaaaagctagaaactccccaaacagaccacgagtcaaaagatcaaactgagactcctgaaaaaggactttctgaacaagcttctaaatctaaaccaaatcaattcgttaaccttaaaaacaaagcaaacagtgtggcacaaagccaatctgctaaagtgtcaacaccggtggtgaaccaagtcaaggtatcgcaagaagagtctcaaccagcttcaactaaacaaggtcagacattaccagacacagatgctgaactttggattttagctggactaagcatgaccttcttgctagctggcttttcccttcctgtattagagaaataa

SEQ ID NO: 1708 - protein, 1927 aa, Alloiococcus otitidis
MHTKRLKTLVAFLLSFLFVTNIWQVQAEEDPAAPALESQLVDEGQGNQVELPAENEERSKDSLTQTPPSLTSGWEQDQANGQSYSPADQGLSRQQTAPPAGNLNPGSQVQQGASRESQQGSVGSQSETESSEDSDDDDPNPAGSEDGGETLSGAPDSAVVEENQADSVYVGGPNQQEGAGPDQADLPQAEEEEPNVEGAKSSQESKDEPSTKQKLTEEPSQSNPKGQTRLAPERPVTNAKSNAHRYPVLTIGGDPSERHFTWYSDNSDQGYFEIAPYNEAGDFSQGQVIEGKTFQENNTHHDFFGRNVPDLYNTQVKIEGLEEDTTYMYRFWNDEENKSDIYTFKTHPAGDFDFLIVGDPQLGSGDDLVEDIRGWQETLDTMLAVHPDPNFLLSVGDQVEIAWREREYAGFIEQDGLNEITLAPIVGNHDTFNPAFSEHFALPNVQAEGKTEAGSNYYFTYNNALFVALNLENTNFEEHERTLQQAIEATSDQDIDWRVVTFHRSLFSPANHSMTNHTKYLRENVAPLMNKYQIDIVLSGHDHAYARSHVMDGTEPQIEWTEANQAPTEYVDPEGVIYLTFNSSSGSKFYDLEEFHDFLAVRNQEYQTNFSIAHVTENTFEVVTYRTADLSEVDRVKIVKTNTNFDAPLSQRFVPQARVLPVFQGDDLPEAKAAIENAGDLPDDTQYLWVVGHVPQTSEVGSTTGLVRVNYSDGSQEDIPVWVEIIEKRHVELVDPIWGKLEAKAADENNTIRISVISDSHILAKDLIAPTKEYYDMLNLDAKFFTQSEEVFKESLRIIDQRGVDYVLIPGDLTRDGEHETYDFIVRTLNEYVQKGLQEGRDRRVFVVPGNHDINNPLAYDFANSTKLPLYTPQDFQDDFQELVYDQALAIYNESDIYQDYLAEVNERVDQAESEEYYAQGHLSYVSRIDIGDRNGQGGITILAIDSAIYSADVTQSGQNSQETGGIITEPLMNWLVQQAYQAHGRNDIVVAMAHHAFIPHFYNQEEFLSDYILRNWNVPYQSDNPLLDGKTPMEVFADNGIHFLFTGHIHDNDISSFTTPEGNTLYDIETGSSVSYPGPVRHMTFINDIDSQNTRQVAISEMDSVRTFEYIDADGSVQLMEDYVNYTRENTVTPRFVAIQIVNLISDYLKPSRDLINSFLPLPIPAPAQAPLLVGLVSSLLGTPEAPAFQTSIPVLGNVSLYWESDPTGLGRLVAQVGNRSNNRLYIEGENLVTFINDLLDELDQKVLNEDQLINRLEGLVEELFAVPVYTHEDGRVRTLQELGVDTYLGLAGGEESVKPELAWVREAGQQLKDQNGLYAVVQYIEEPLIDWISNFLSSVQFDLGQHLQASGFVPVLGLPFIRGLLPTNAESLLGTILGFLGIDDYKAFISYWVNSDLARYIIDPLNVPVGDLVISFNDELFKTNPQYAYLYDNDTSMAVQRDPVVKNGRVQIQDAQTVNLVGDFTANLIPSVRVLVNGQPVQAEVDFQEGKIVARLSNELVDGDQVAFQLSHYNDRANPITLQSAVETFTVQQEEPNQDLAILVGLLLKEIRQLREELQGQDPVDLQPILDRLDQLEAALANQEPTDLQPVLDRIESLETTILLLLAHIAQLEQSLADQEPVGLQPVLDRIDQLEASIQPLLDRIAALEEALANQETVDLQPILDQIADLQASIQPLLARIATLEEALANQAPVNQELLDRIAELEKSLADQKAANQALQDRIAELEAANKVQQDRIEDLEATNKVLQNRIAELEAALKGQKPDDQDANRDREAELEAALAKQKAANQALQDRIAELEAAHKAQQDQIVDLEEALKDQKLETPQTDHESKDQTETPEKGLSEQASKSKPNQFVNLKNKANSVAQSQSAKVSTPVVNQVKVSQEESQPASTKQGQTLPDTDAELWILAGLSMTFLLAGFSLPVLEK

SEQ ID NO: 1709 - DNA, 714 bp, Alloiococcus otitidis
  CDS (109)..(711)
gcaagcatgctctatgacaggtcagttcttgggctattagcgggttccggggttgcttgcaatctagaaaatgtaaccggtgtcaaagcaaacaataggagggctaatatggtagagcgatttaaagataaggttgttgttgtgacgggggctggtcaaggttttggtgagcagttttccaaggacttcttggctgaaggagccaaggtagctatgttggacatccaggccgacaaggtgaaggaaacagccgctcgattagatacgactggggcatcgactcttgcaggcgagattgatgtttctgatcccgattcagtcaaaaaggcttttgaaaaagtttatcaggaatttggtcatgtccaggttttggtcaataatgccgggattacccgggatgcaatgttccacaagatgaccctagaccagtgggaccaggccgttaaggtttctttatatggaactttttactgttcaaaagaagtgatcgatgatatgcgggaccaggaatatggtcggattatcaatctccagtccatggcccttgccggtaatattgggcaaacgaactacggagctgctaaggcggggattggtggcttgaccaagtctatggccaaagaagttggtcggaaaaatgttacggtcaacggaattgcacccaggcttgatgaacacggatattgtcaaaaccagttccagaagatatcttaa

SEQ ID NO: 1710 - protein, 201 aa, Alloiococcus otitidis
MVERFKDKVVVVTGAGQGFGEQFSKDFLAEGAKVAMLDIQADKVKETAARLDTTGASTLAGEIDVSDPDSVKKAFEKVYQEFGHVQVLVNNAGITRDAMFHKMTLDQWDQAVKVSLYGTFYCSKEVIDDMRDQEYGRIINLQSMALAGNIGQTNYGAAKAGIGGLTKSMAKEVGRKNVTVNGIAPRLDEHGYCQNQFQKIS

SEQ ID NO: 1711 - DNA, 714 bp, Alloiococcus otitidis; identical to SEQ ID NO: 1709
  CDS (7)..(711)

SEQ ID NO: 1712 - protein, 235 aa, Alloiococcus otitidis
MLYDRSVLGLLAGSGVACNLENVTGVKANNRRANMVERFKDKVVVVTGAGQGFGEQFSKDFLAEGAKVAMLDIQADKVKETAARLDTTGASTLAGEIDVSDPDSVKKAFEKVYQEFGHVQVLVNNAGITRDAMFHKMTLDQWDQAVKVSLYGTFYCSKEVIDDMRDQEYGRIINLQSMALAGNIGQTNYGAAKAGIGGLTKSMAKEVGRKNVTVNGIAPRLDEHGYCQNQFQKIS

SEQ ID NO: 1713 - DNA, 1230 bp, Alloiococcus otitidis
  CDS (37)..(1227)
attaagacattcattcaagcaaaaggagcgagttttatgggactgatggaaaaagccaattgccaacaagccattcgggagatgaccgacttacgtcactacctccacgaacaccctgagcggtctaaccaggagcaccagacctctgacctgctcaagggttactgccgggacatgaacttagagattttagaaactgccaacacgggttttgtagccattttagatactggcaagcccggcaaaaccctgggcttgcggaccgacctggatgctctgccccttgaagaagatgagtacaacctaaagcaagaaaagaaatatgtctccaaaaatcctggcgtcatgcatgcttgcggtcatgacggccacatgtccatcctggttggggcgatgaagtccctggtcaatattaaggccgacttaaaaggaaaaattgtctttatttttgaagaagctgaagaaaacaactccggtatccagcccatgattgatttgctcaaggagtctggtcttcacttcgatgccatttacggtaaccacgtggcttcttttatcgaaactggcaaaatcgtagccagtccaggacccgtcatggcaggtcagcgggtcttcacctttaccatcaaaggtaaaagtgggcacgggtctagacctgaccaggctgtcaaccctatctttgtcggtagccaaatcctaaacgcttggaccaatgcctgggtcaaccaagtggatgtgaccaagacagtgactctgggaatcggtcaattccatgccggggatgcctacaatattatcccaagcaaggcttctatttcagggtctatgcggttttttgaccaggaagctggccaaaaagctttcgacatcctccaagaagtcgcccagaatacggcctgggcccacaaggcttcagtggaagtcgatggccacccccaaagtctactgcctgttgtcgcaaatgatgaagacctcagccagcttgcccgccaagctatccaagaccaattcggcccggaagccctggtagaagaaaattggtttgcctccgaaagctttggccgttaccgagagttggcccctatttgcttctgcctagtaggcatccaaaatgaccaagtcggatcaggctctggccaccacaccgaagcctttgactttgacgatggggccttaacttatgggattaaaaccatgacccaatttgccattaattttttgacccaataa

SEQ ID NO: 1714 - protein, 397 aa, Alloiococcus otitidis
MGLMEKANCQQAIREMTDLRHYLHEHPERSNQEHQTSDLLKGYCRDMNLEILETANTGFVAILDTGKPGKTLGLRTDLDALPLEEDEYNLKQEKKYVSKNPGVMHACGHDGHMSILVGAMKSLVNIKADLKGKIVFIFEEAEENNSGIQPMIDLLKESGLHFDAIYGNHVASFIETGKIVASPGPVMAGQRVFTFTIKGKSGHGSRPDQAVNPIFVGSQILNAWTNAWVNQVDVTKTVTLGIGQFHAGDAYNIIPSKASISGSMRFFDQEAGQKAFDILQEVAQNTAWAHKASVEVDGHPQSLLPVVANDEDLSQLARQAIQDQFGPEALVEENWFASESFGRYRELAPICFCLVGIQNDQVGSGSGHHTEAFDFDDGALTYGIKTMTQFAINFLTQ

SEQ ID NO: 1715 - DNA, 597 bp, Alloiococcus otitidis
  CDS (91)..(594)
gcgactctttcgggtcacaagcgggaaaaatttttgagcaaaggagggaagacagtgaaaaaagagatcctatatgtagacggctataacatgatcggagcatggcccaacctggttcccctgcaaaggcagaaccggatcggggatgccagggacttgctcttggatattttaagcaattatgccaagtatacggggatgaagatcaagttggtctttgatgcccagtttgttcctggcatcactaaacgctacgaccagtacgaggtcgaagtggtgtttacccgggaagaccagacggcggatagttatatcgaaaaagccgtgggggaggagaactacctcctgtccaatgtctttgtggccacatctgatttagctgagcagtggattgtttttcaaagaggggcagtccgcaagtcggccaatgagttatggaaagatattaaagaagccaacaagaagattcaagcagacactactttttaccaaattaacaaccgcaaacgccattcccccctgtccgacaaagaccaagctgctctttaccaactttactggaagatggttaacaaggataaaaaaccagaccaatga

SEQ ID NO: 1716 - protein, 168 aa, Alloiococcus otitidis
MIGAWPNLVPLQRQNRIGDARDLLLDILSNYAKYTGMKIKLVFDAQFVPGITKRYDQYEVEVVFTREDQTADSYIEKAVGEENYLLSNVFVATSDLAEQWIVFQRGAVRKSANELWKDIKEANKKIQADTTFYQINNRKRHSPLSDKDQAALYQLYWKMVNKDKKPDQ

SEQ ID NO: 1717 - DNA, 597 bp, Alloiococcus otitidis; identical to SEQ ID NO: 1715
  CDS (55)..(594)

SEQ ID NO: 1718 - protein, 180 aa, Alloiococcus otitidis
MKKEILYVDGYNMIGAWPNLVPLQRQNRIGDARDLLLDILSNYAKYTGMKIKLVFDAQFVPGITKRYDQYEVEVVFTREDQTADSYIEKAVGEENYLLSNVFVATSDLAEQWIVFQRGAVRKSANELWKDIKEANKKIQADTTFYQINNRKRHSPLSDKDQAALYQLYWKMVNKDKKPDQ

SEQ ID NO: 1719 - DNA, 597 bp, Alloiococcus otitidis; identical to SEQ ID NO: 1715
  CDS (34)..(594)

SEQ ID NO: 1720 - protein, 187 aa, Alloiococcus otitidis
MSKGGKTVKKEILYVDGYNMIGAWPNLVPLQRQNRIGDARDLLLDILSNYAKYTGMKIKLVFDAQFVPGITKRYDQYEVEVVFTREDQTADSYIEKAVGEENYLLSNVFVATSDLAEQWIVFQRGAVRKSANELWKDIKEANKKIQADTTFYQINNRKRHSPLSDKDQAALYQLYWKMVNKDKKPDQ

SEQ ID NO: 1721 - DNA, 594 bp, Alloiococcus otitidis
  CDS (43)..(591)
ggggagttgtttatcgaaaaggagtttagcctgacggaacttatggttttggttctacagtcagttgatggggacgtatatcaagcgcttgttgaagaatgcaagccagtgatttacaaggctattggaggccggtatattgcaggttacgaccaagaagacttgtttcaagaggccaatattgttttactcagggccattgaaaattaccaatttgggtctgatatccgcttcatgccctactttagccattgcctaaaaaaccactacaattcgctaggccgaaaaagtctagccaacaagcgtaagagcttgaaccaggccatttcaatggactacctggcagaagtttcgggccatgaatttttcttaaccaagttgggcaaacaatttgacccagccgagaaaatgatggccaacgaatcctaccaggcctatacctctagcttgtccaagtttgaaatggacgtctttaagttatacctaaagaaccactcgcttgaccagattgcccaagagctagggcaggacttggtcaaggtcaaaagtgcagtttaccgctgcaactcaaaattgaaaaaaagctttagttag

SEQ ID NO: 1722 - protein, 183 aa, Alloiococcus otitidis
MVLVLQSVDGDVYQALVEECKPVIYKAIGGRYIAGYDQEDLFQEANIVLLRAIENYQFGSDIRFMPYFSHCLKNHYNSLGRKSLANKRKSLNQAISMDYLAEVSGHEFFLTKLGKQFDPAEKMMANESYQAYTSSLSKFEMDVFKLYLKNHSLDQIAQELGQDLVKVKSAVYRCNSKLKKSFS

SEQ ID NO: 1723 - DNA, 594 bp, Alloiococcus otitidis; identical to SEQ ID NO: 1721
  CDS (7)..(591)

SEQ ID NO: 1724 - protein, 195 aa, Alloiococcus otitidis
MFIEKEFSLTELMVLVLQSVDGDVYQALVEECKPVIYKAIGGRYIAGYDQEDLFQEANIVLLRAIENYQFGSDIRFMPYFSHCLKNHYNSLGRKSLANKRKSLNQAISMDYLAEVSGHEFFLTKLGKQFDPAEKMMANESYQAYTSSLSKFEMDVFKLYLKNHSLDQIAQELGQDLVKVKSAVYRCNSKLKKSFS

SEQ ID NO: 1725 - DNA, 501 bp, Alloiococcus otitidis
  CDS (67)..(498)
accggtcctgtgatacatttaagtcaccatcataggaataaagacttgccaacaggaggtaaacaaatggagtacaaacgttcaggtagtgatattttagtccggctcgacaagggcgacaaaatcaaagaatgcttgacggaactggcgaaagcagaacagatccaaaccggttttgtatccggtattggggctgtggaccaagtcgaactcagctattttctacccgaggaacaaaaatatcaaacgaaaaaatttgaaggctcttttgaagtcttgtccttaaaaggaaccctatcaatttttgacaaaaaaccccaccagcacctccatatcatcttgggccaggaggattattcaaccattggcggtcacttggaagaagcccgggtcaatatcaccctggaactcgacatcaaggtcttggtcaacctcggtgtcaaacgagaaaccgaccctgacctaaatatccaagccttgaaattccaagacgtggagtaa

SEQ ID NO: 1726 - protein, 144 aa, Alloiococcus otitidis
MEYKRSGSDILVRLDKGDKIKECLTELAKAEQIQTGFVSGIGAVDQVELSYFLPEEQKYQTKKFEGSFEVLSLKGTLSIFDKKPHQHLHIILGQEDYSTIGGHLEEARVNITLELDIKVLVNLGVKRETDPDLNIQALKFQDVE

SEQ ID NO: 1727 - DNA, 501 bp, Alloiococcus otitidis; identical to SEQ ID NO: 1725
  CDS (46)..(498)

SEQ ID NO: 1728 - protein, 151 aa, Alloiococcus otitidis
MPTGGKQMEYKRSGSDILVRLDKGDKIKECLTELAKAEQIQTGFVSGIGAVDQVELSYFLPEEQKYQTKKFEGSFEVLSLKGTLSIFDKKPHQHLHIILGQEDYSTIGGHLEEARVNITLELDIKVLVNLGVKRETDPDLNIQALKFQDVE

SEQ ID NO: 1729 - DNA, 501 bp, Alloiococcus otitidis; identical to SEQ ID NO: 1725
  CDS (10)..(498)

SEQ ID NO: 1730 - protein, 163 aa, Alloiococcus otitidis
MIHLSHHHRNKDLPTGGKQMEYKRSGSDILVRLDKGDKIKECLTELAKAEQIQTGFVSGIGAVDQVELSYFLPEEQKYQTKKFEGSFEVLSLKGTLSIFDKKPHQHLHIILGQEDYSTIGGHLEEARVNITLELDIKVLVNLGVKRETDPDLNIQALKFQDVE

SEQ ID NO: 1731 - DNA, 1086 bp, Alloiococcus otitidis
  CDS (856)..(1083)
atgaccaaggattatgaccgcgattgggatgactttgattctggacgggactgggatgacttggacccagaccaagaatttcagtcagaccagtctgatgaccattacttggatgatgaaaaagacagtgaccacttaaaagaccgggaagacttgatcttctcccgggccgataaggattcagattatgatgataactcttctgccttgactgaggaagaaagggaccagctccaaggtcaaaaggaaggggaggcagactataaccaggaagaggctgaccaaaaagatgctggtgtctctgccaaacaggtgggggcttacatctaccgctttattggctttatcctctttgccctagtcctcctctccaattatatggtctttgctggaattggcgtccccaatagccgggccgatattgccgaaacctacctcaacttagtcactccagccagctttacctatagtatttggattttgatttttattggggtggcagccagcctccttgctaaatatatccaccctagcgaccaggtctttttaattgaatacaagaaagtccgtttttttaactggttgtggatggtcttgaacattatctgggttttcaccctagccaatgaacaattaggggtagccagcttggtggccctcatttacaccttagtaattggcctcctgtcgaaccgggttaaggttaaagatagtctgaagagcaagttttttaccatccggattccagtgggtctccactttggctggatgattatctcaaccttcaccactttctcttactacctcgtagacctgggattagatggtactggcttccagggagttgtttgggccatgatcgccatggttctgatggttctgctttgcctttacttctaccgccaagaccggaacttagccatcttccttccttccctatggctattggtgggggtcttagtccaacaagctccctcaagctcttttgcctatgcttccacctccgtctttatcttaagcgtcctcttctttatcggaggcattgctttagccgccataaccatcttccagggttacaagaaatag

SEQ ID NO: 1732 - protein, 76 aa, Alloiococcus otitidis
MIAMVLMVLLCLYFYRQDRNLAIFLPSLWLLVGVLVQQAPSSSFAYASTSVFILSVLFFIGGIALAAITIFQGYKK

SEQ ID NO: 1733 - DNA, 1086 bp, Alloiococcus otitidis; identical to SEQ ID NO: 1731
  CDS (313)..(1083)

SEQ ID NO: 1734 - protein, 257 aa, Alloiococcus otitidis
MGAYIYRFIGFILFALVLLSNYMVFAGIGVPNSRADIAETYLNLVTPASFTYSIWILIFIGVAASLLAKYIHPSDQVFLIEYKKVRFFNWLWMVLNIIWVFTLANEQLGVASLVALIYTLVIGLLSNRVKVKDSLKSKFFTIRIPVGLHFGWMIISTFTTFSYYLVDLGLDGTGFQGVVWAMIAMVLMVLLCLYFYRQDRNLAIFLPSLWLLVGVLVQQAPSSSFAYASTSVFILSVLFFIGGIALAAITIFQGYKK

SEQ ID NO: 1735 - DNA, 1086 bp, Alloiococcus otitidis; identical to SEQ ID NO: 1731
  CDS (1)..(1083)

SEQ ID NO: 1736 - protein, 361 aa, Alloiococcus otitidis
MTKDYDRDWDDFDSGRDWDDLDPDQEFQSDQSDDHYLDDEKDSDHLKDREDLIFSRADKDSDYDDNSSALTEEERDQLQGQKEGEADYNQEEADQKDAGVSAKQVGAYIYRFIGFILFALVLLSNYMVFAGIGVPNSRADIAETYLNLVTPASFTYSIWILIFIGVAASLLAKYIHPSDQVFLIEYKKVRFFNWLWMVLNIIWVFTLANEQLGVASLVALIYTLVIGLLSNRVKVKDSLKSKFFTIRIPVGLHFGWMIISTFTTFSYYLVDLGLDGTGFQGVVWAMIAMVLMVLLCLYFYRQDRNLAIFLPSLWLLVGVLVQQAPSSSFAYASTSVFILSVLFFIGGIALAAITIFQGYKK

SEQ ID NO: 1737 - DNA, 1047 bp, Alloiococcus otitidis
  CDS (28)..(1044)
ggattagcaaaaaggagagttagccacatgggatactttggtgatacaaaacacaaaaaagtcttacgtaagtccaaaaaacaatggattacagttggtttaacatcagcagccctgggtctagctggtttggtgcaaacttctgaattcgttagtgctgcagaagacccagaagttgacaaccctgctgagcaattgaattctgatgatcaggaagatgaaggtgaccaggcagcaggtggtgaccaaggtcaagccaccacagctgaagcccaagttgaagccttgctgaacaactacatagaaagaatcaaccagggtcaagaagatgactctagcctctacgctgcttttgttagtgacgtttccgctatcgaaggggcggatgtaagtcaagctgtcgaccgattagctcaagcagtcgctaataaagtggctcaggctgaccaagtccaggaaggccaaactgaacaaggccaaggtcaagcacagtctggtcaagctcctgcagagtcccacactggtgaaggtcaagagggaactgaccaggctgaagagactgaaccgagccagggtcaagcaagtcctgaccaagctccacaaggccaagaagaggccgaccaagcggatgttgcaggtcaaagccaagcaccagatcaagactcgggtgcccaaccacaagtggtgccttttgctgctcagcctcaagctgaccaagtcaaagacgctgacctggatgcccacctgggtgaacctcgccacgtcgatgggaccccaatggaagagcgccaggttgacattgaactaaaccaagcctatgtccaagatgcccttgaacaacgtatccgggacttcagacgccaagcttatgatgttaacctcccatttagatatgaagactatgaccgaccagctggagctaacccaaataccaaccgcctccaaacagcagcaagagaagctggtttttacgatagagaatcctatgccaatggtttccagtggagtgaccgcctagaagactacgctatcccaacgggcgactga

SEQ ID NO: 1738 - protein, 339 aa, Alloiococcus otitidis
MGYFGDTKHKKVLRKSKKQWITVGLTSAALGLAGLVQTSEFVSAAEDPEVDNPAEQLNSDDQEDEGDQAAGGDQGQATTAEAQVEALLNNYIERINQGQEDDSSLYAAFVSDVSAIEGADVSQAVDRLAQAVANKVAQADQVQEGQTEQGQGQAQSGQAPAESHTGEGQEGTDQAEETEPSQGQASPDQAPQGQEEADQADVAGQSQAPDQDSGAQPQVVPFAAQPQADQVKDADLDAHLGEPRHVDGTPMEERQVDIELNQAYVQDALEQRIRDFRRQAYDVNLPFRYEDYDRPAGANPNTNRLQTAAREAGFYDRESYANGFQWSDRLEDYAIPTGD

SEQ ID NO: 1739 - DNA, 2385 bp, Alloiococcus otitidis
  CDS (259)..(2382)
aagactacgctatcccaacgggcgactgaactcctaaccactggctaccactcaggcaactacagccactaccgacctgacagacacgacaataaaacagctggtagacgggttcaacaccagtacattagtgaaaacggtgagactacccactcagcaccagaaaacatccacgctttacgtgatgatgatatccacactgcctttgattactgggcaccaagagaaattgagaacttgagacgggtagacggtagcatgaaatacggtggtcaatccgttacaactacccacatccactccattcttaacccagtccacaccatctttggcggggccagtgttcagttagcagaaggatctggggttaatgctgaccgggctaacgtccttattgccagcaagtgggatgaaccggccaatggtcacgaggactccggttattcccgccaaggaacctaccgggtaaccgtccaaaccaagcaaggcggtccaaaattacctggtgaggttgacccgaatgcccaagccccagttgaagacaaaggggtggcataccaaccaattccattccaaacccaagaaaacttcaaccctgacctagctgttggtgctgttgaaacagtccaagaaggtcaagagggctggactgctaacggtgtgactgttaaagaagcccttgacgaagttgttgaatacggcccagaagaaaaaactgaagactttgaaacaaaatatgaagtcaactttgaattggacctaggcgaaagcaaggttcgccaagaaggccaaagaggtgtggcccactataacccactcactggtgacttggtgaaagtccttagcgaaaaacaagacaaaattgttgaagttggggcttacgaaggtgaagttccttacgacaccgtccgtagaccagtcgttggcctagaccaagaacgggtggttcagattgggtctgacggtacagcttactttgacagtgaaggtaacttgtacgaaaccgaccgcaatacagctcctcaagatgaaatcgttgaatacccagctgaagcccgtccagtcccttatgctaaaaaccgtattcctagccgggaccttcaattaggggaaagcaaggttatccaagctggtcaacctggcctagcttactacgatgaagaaggcaacaagctggatgtaccagaaaatgtggatccaaaaactgaaattattgcatacggctaccaagttcaggaatttaaaccaggccaagaagaaaatccaggccaaagccgaactgcaaatcctgccccagcaggcaacagccgatcagcaaatccaacaccaactggccaaagccgagctgccaaccctgaaccagcaggcaacagccggtcaacaaatccaacaccagctggccaaagccgaactgcaaatcctgccccagcaggcaacagccggtcagcaaatccagaaccagccggccaaagcagaactgcaaaccctgcaccaaccggtcaaagtcgcacagctaaacctgaaccaagtcttaaagacctagctgacagtttaaaagctaaccgggctaaacaagctgaccttgctaacaaagtagctgaagccaaccaagctcaagatgatgcagataaagctccagtaaaagtggaaaaaccatcaaaagctggaaacactgacttggaaaacaaagctgcagataagcaagcatctgctgaaaaagttaaggtcgaaaaaccagaagctaacaacaatgcagagtttcctgaattggctgaactcctccaagcccttcacaaaggccaaatcgaacaagccttgaaaggctatgaccgggctaaagtccaggcttggcttcaagcccaggaagaagagagcggtcagttgaacaaggaagaaattgctggcttgcttcaagctttaagcgaagatcaagaaggacaggatggcgaccaggctgacccagctgaagaccaggccgatgatacaagtgaccttgaccaagtcttagcggatgcagaagacctacttgctgaatttaaccagctagtggaggctgaaaaagcccaaattctcaaagctcttcaagcaagtcaagatcctgctaaattggatgccttgattgaagcggcttacgaattgaacttgactcgagctaatgctagccaagtaaccccaacaagcagccaagctgaatcaagccaagaaaacagtcaagcagaacaagatcaagaaaaagccgaatcaagtaaagctaaacgagaacaaactgaatcacctgaccaaggtcaaaaattaccagctaccgcaaccagtgcttgggcactcggcctactcggtgtcaccacccttgtttcaggactcggcattaaaaaattcaaagactaa

SEQ ID NO: 1740 - protein, 708 aa, Alloiococcus otitidis
MKYGGQSVTTTHIHSILNPVHTIFGGASVQLAEGSGVNADRANVLIASKWDEPANGHEDSGYSRQGTYRVTVQTKQGGPKLPGEVDPNAQAPVEDKGVAYQPIPFQTQENFNPDLAVGAVETVQEGQEGWTANGVTVKEALDEVVEYGPEEKTEDFETKYEVNFELDLGESKVRQEGQRGVAHYNPLTGDLVKVLSEKQDKIVEVGAYEGEVPYDTVRRPVVGLDQERVVQIGSDGTAYFDSEGNLYETDRNTAPQDEIVEYPAEARPVPYAKNRIPSRDLQLGESKVIQAGQPGLAYYDEEGNKLDVPENVDPKTEIIAYGYQVQEFKPGQEENPGQSRTANPAPAGNSRSANPTPTGQSRAANPEPAGNSRSTNPTPAGQSRTANPAPAGNSRSANPEPAGQSRTANPAPTGQSRTAKPEPSLKDLADSLKANRAKQADLANKVAEANQAQDDADKAPVKVEKPSKAGNTDLENKAADKQASAEKVKVEKPEANNNAEFPELAELLQALHKGQIEQALKGYDRAKVQAWLQAQEEESGQLNKEEIAGLLQALSEDQEGQDGDQADPAEDQADDTSDLDQVLADAEDLLAEFNQLVEAEKAQILKALQASQDPAKLDALIEAAYELNLTRANASQVTPTSSQAESSQENSQAEQDQEKAESSKAKREQTESPDQGQKLPATATSAWALGLLGVTTLVSGLGIKKFKD

SEQ ID NO: 1741 - DNA, 2385 bp, Alloiococcus otitidis; identical to SEQ ID NO: 1739
  CDS (238)..(2382)

SEQ ID NO: 1742 - protein, 715 aa, Alloiococcus otitidis
MRRVDGSMKYGGQSVTTTHIHSILNPVHTIFGGASVQLAEGSGVNADRANVLIASKWDEPANGHEDSGYSRQGTYRVTVQTKQGGPKLPGEVDPNAQAPVEDKGVAYQPIPFQTQENFNPDLAVGAVETVQEGQEGWTANGVTVKEALDEVVEYGPEEKTEDFETKYEVNFELDLGESKVRQEGQRGVAHYNPLTGDLVKVLSEKQDKIVEVGAYEGEVPYDTVRRPVVGLDQERVVQIGSDGTAYFDSEGNLYETDRNTAPQDEIVEYPAEARPVPYAKNRIPSRDLQLGESKVIQAGQPGLAYYDEEGNKLDVPENVDPKTEIIAYGYQVQEFKPGQEENPGQSRTANPAPAGNSRSANPTPTGQSRAANPEPAGNSRSTNPTPAGQSRTANPAPAGNSRSANPEPAGQSRTANPAPTGQSRTAKPEPSLKDLADSLKANRAKQADLANKVAEANQAQDDADKAPVKVEKPSKAGNTDLENKAADKQASAEKVKVEKPEANNNAEFPELAELLQALHKGQIEQALKGYDRAKVQAWLQAQEEESGQLNKEEIAGLLQALSEDQEGQDGDQADPAEDQADDTSDLDQVLADAEDLLAEFNQLVEAEKAQILKALQASQDPAKLDALIEAAYELNLTRANASQVTPTSSQAESSQENSQAEQDQEKAESSKAKREQTESPDQGQKLPATATSAWALGLLGVTTLVSGLGIKKFKD

SEQ ID NO: 1743 - DNA, 144 bp, Alloiococcus otitidis
  CDS (1)..(141)
gtggtcaaaggaaaggtgttgcttggtaagatagctagctctggcgtcccggtcaagattgagaaaaatccaattcaagaacattacattcagtttgaaaatgatgtcgctgccagaacaattagacgaaaagagccagcatga

SEQ ID NO: 1744 - protein, 47 aa, Alloiococcus otitidis
MVKGKVLLGKIASSGVPVKIEKNPIQEHYIQFENDVAARTIRRKEPA

SEQ ID NO: 1745 - DNA, 1263 bp, Alloiococcus otitidis
  CDS (115)..(1260)
caagcaccggttagagggaccaagcttgtaaatgtaaaggagaaaattatgattcgagaagaccacccatcttttttgcccattattatcggtactgacttaaacgcctatactatggcaacttccttttataagcgttacggaatcaagcctgttttagtcggcaagctccacatgttttttaccatggaaagcgacattatccaaaccatccactacgacaagcaactcaccgaccccaaacgctttgaagaaaccctgcaaatcattgctgaccactatagcaaactctatgaccagctgattttaatcggaaccaatgatatctacatcaacctgatgatcgaccaccaggattttttacgtcaatactatcttttgaacattcctagccctcaagtccgggaccaattgttttataagaaagccttctatgaatactgtgcccaggaaggaatcgacattcccaaaacggtcttctacaactgtgcccaaccagctgatgtagacctggacttcaccttccctgtcgtggtcaaacccagcgatgtggtagcctatcaaatggctggcttacacgaggtcaacaagctccacttcatcggcaaccaagaccagctccaagctgtcctagatgaagtgcaagctgctgactaccagtctgacttgattatccaggaatacattcctggtgatgacagccagatgtgggatgctgtatattacggcagccaagatggccagggccaactcattaccctggcccaagtcctcctccaagaacgcaagtcccacttggttggggcctacaccgccctggtcacccgctacaacaagcccctgatggaaaaattagctaactttttagaaaaaattggctacaccggatttgccaactttgacatcaagtatgaccaaagagacggcaagttcaaagtctttgaagtgaacatccgccaaggccggtcctcctcttatatctgctacaacaaccatgccatggcccagtacctagtagacgacttaatttatcataaacccaagcaccgccactacttgcaagaggactttctctactcggtcgtccctggctttgtcctcaagcgggccatccatgatgacaagctaagagctgaggtcaagaccttgatcaaggcgggcaggtttgccaaccccctccatgccaaaggggacggctacaacaagcattggctgcaaatggtcaagcgccagtatgaatacgccaagcagtatttgaaataa

SEQ ID NO: 1746 - protein, 382 aa, Alloiococcus otitidis
MATSFYKRYGIKPVLVGKLHMFFTMESDIIQTIHYDKQLTDPKRFEETLQIIADHYSKLYDQLILIGTNDIYINLMIDHQDFLRQYYLLNIPSPQVRDQLFYKKAFYEYCAQEGIDIPKTVFYNCAQPADVDLDFTFPVVVKPSDVVAYQMAGLHEVNKLHFIGNQDQLQAVLDEVQAADYQSDLIIQEYIPGDDSQMWDAVYYGSQDGQGQLITLAQVLLQERKSHLVGAYTALVTRYNKPLMEKLANFLEKIGYTGFANFDIKYDQRDGKFKVFEVNIRQGRSSSYICYNNHAMAQYLVDDLIYHKPKHRHYLQEDFLYSVVPGFVLKRAIHDDKLRAEVKTLIKAGRFANPLHAKGDGYNKHWLQMVKRQYEYAKQYLK

SEQ ID NO: 1747 - DNA, 1263 bp, Alloiococcus otitidis; identical to SEQ ID NO: 1745
  CDS (49)..(1260)

SEQ ID NO: 1748 - protein, 404 aa, Alloiococcus otitidis
MIREDHPSFLPIIIGTDLNAYTMATSFYKRYGIKPVLVGKLHMFFTMESDIIQTIHYDKQLTDPKRFEETLQIIADHYSKLYDQLILIGTNDIYINLMIDHQDFLRQYYLLNIPSPQVRDQLFYKKAFYEYCAQEGIDIPKTVFYNCAQPADVDLDFTFPVVVKPSDVVAYQMAGLHEVNKLHFIGNQDQLQAVLDEVQAADYQSDLIIQEYIPGDDSQMWDAVYYGSQDGQGQLITLAQVLLQERKSHLVGAYTALVTRYNKPLMEKLANFLEKIGYTGFANFDIKYDQRDGKFKVFEVNIRQGRSSSYICYNNHAMAQYLVDDLIYHKPKHRHYLQEDFLYSVVPGFVLKRAIHDDKLRAEVKTLIKAGRFANPLHAKGDGYNKHWLQMVKRQYEYAKQYLK

SEQ ID NO: 1749 - DNA, 1653 bp, Alloiococcus otitidis
  CDS (106)..(1650)
cttcttgtttcatttttaatcttatctgaaacaaatgatttttcaactcttttttatcttactttaaaagttttagttaggagccttagcttgtaccgtatctctatgaaagacttgcatgccctattagctagcaagcagcagttgaaagaagtggtcggtcccgaccaagtttggcattacaatttgcctcaaggggaattggccgaccaagtttttgacaaactttcctacaattcccaaactgcctcctcagacacccttttcttttgcaagggtgcttcctttaaaagagactacctagcccaggcggttgaccagggtgtccaagtctatatttccgaaaaattgtatcaaggcctggatgcttatgccatcattgtccgtgacatccgccagaccatggccctagtcgctaaggctttttaccaggctccagatgaaaaattgaccctgattggcattaccgggaccaagggcaagacaaccacaagttacctcctcaaatccatcctggaccaggaccaagccggtaagacagctattatttcaaccttggggatttccttagacggccagacccaagaagaagcctccctgaccactcctgaagccttggacctctaccagatgattgcccgggcccaagaccaggggatggaccaattgattatggaagtatctagccaagcctacaagatggaccgggtctatggactgactttcgactttggagccttcttaaatatttcgcctgaccatatcggccctaatgagcacccagatatggaagattacttctattgtaaaagtcgtttggttaaacattccaagttggccttgctcaacgctggacttgaccagctagactacttaaaagaccttagccaaaaaaatggcggtcaggtccaagtttacggccaagatcccaagacttgtgactactattttgaggttaacaaccaggacagccgccgctttgccattaaaagccaaagccctgatgacttggccattgatggggattaccaatttgaaatgttgggtgattttaacaaggagaatgccctttgtgccgctcttatagcggggcatttagaagttgggcaagaggccatttaccaaggaatagcccaggcccaagtgccaggacggatgcagcattatacttatggcaacaatcacatctatgtagactttgcccacaattacatcagcttgaaaaatctttttgattttgcccaagaccaacacccggaccacaccatggtggttgtcttgggggcccctggcaacaagggggtgtctcgccgcaaggatatgggatacttgctgtcccaataccaaggggaagttatcttgaccgaagatgaccccaattttgaagacgttcaagctatctgccaagaaattgcccaatacattgatggccccatccaggtgacctttaatgataaccggataaatgccatccaagacctcctagagtccttaaccccagaaagtcaaaaagtcatcctgcttgcaggcaaggggtccgaccagtacatgctgcggcggggtgtgaaggaagattatgcgggagaccacaaattggttgaagcatttttaaaccagcaaaagacttcttctcatgagaagcttgagggttag

SEQ ID NO: 1750 - protein, 515 aa, Alloiococcus otitidis
MKDLHALLASKQQLKEVVGPDQVWHYNLPQGELADQVFDKLSYNSQTASSDTLFFCKGASFKRDYLAQAVDQGVQVYISEKLYQGLDAYAIIVRDIRQTMALVAKAFYQAPDEKLTLIGITGTKGKTTTSYLLKSILDQDQAGKTAIISTLGISLDGQTQEEASLTTPEALDLYQMIARAQDQGMDQLIMEVSSQAYKMDRVYGLTFDFGAFLNISPDHIGPNEHPDMEDYFYCKSRLVKHSKLALLNAGLDQLDYLKDLSQKNGGQVQVYGQDPKTCDYYFEVNNQDSRRFAIKSQSPDDLAIDGDYQFEMLGDFNKENALCAALIAGHLEVGQEAIYQGIAQAQVPGRMQHYTYGNNHIYVDFAHNYISLKNLFDFAQDQHPDHTMVVVLGAPGNKGVSRRKDMGYLLSQYQGEVILTEDDPNFEDVQAICQEIAQYIDGPIQVTFNDNRINAIQDLLESLTPESQKVILLAGKGSDQYMLRRGVKEDYAGDHKLVEAFLNQQKTSSHEKLEG

SEQ ID NO: 1751 - DNA, 1653 bp, Alloiococcus otitidis; identical to SEQ ID NO: 1749
  CDS (91)..(1650)

SEQ ID NO: 1752 - protein, 520 aa, Alloiococcus otitidis
MYRISMKDLHALLASKQQLKEVVGPDQVWHYNLPQGELADQVFDKLSYNSQTASSDTLFFCKGASFKRDYLAQAVDQGVQVYISEKLYQGLDAYAIIVRDIRQTMALVAKAFYQAPDEKLTLIGITGTKGKTTTSYLLKSILDQDQAGKTAIISTLGISLDGQTQEEASLTTPEALDLYQMIARAQDQGMDQLIMEVSSQAYKMDRVYGLTFDFGAFLNISPDHIGPNEHPDMEDYFYCKSRLVKHSKLALLNAGLDQLDYLKDLSQKNGGQVQVYGQDPKTCDYYFEVNNQDSRRFAIKSQSPDDLAIDGDYQFEMLGDFNKENALCAALIAGHLEVGQEAIYQGIAQAQVPGRMQHYTYGNNHIYVDFAHNYISLKNLFDFAQDQHPDHTMVVVLGAPGNKGVSRRKDMGYLLSQYQGEVILTEDDPNFEDVQAICQEIAQYIDGPIQVTFNDNRINAIQDLLESLTPESQKVILLAGKGSDQYMLRRGVKEDYAGDHKLVEAFLNQQKTSSHEKLEG

SEQ ID NO: 1753 - DNA, 594 bp, Alloiococcus otitidis
  CDS (145)..(591)
aattattatctgaaagtgggaaaatccatgcaaaaccgtagccgtaccacccgtttaaccgtcagtgctttattgattgcgattgggattttaattccaatcgttatgccctttaagattgttattgagccggcttcctttaccttggccagccacctacccatctttatcgccatgtttatttcacccagcatgggggcagttgtctctatctttacagcggttggctttctcctagctggttttccgatcgtggtcaccttgcgggccttcagccacattatttttgccgtcatcgggggccacttgatccggggccggcagaacgacatcctctcaagcccctggaaaagccaagccttttccgtcttcctcgccttgatccacgccctatctgaaatggccgtggtctccctcttcttctttggtgttgtcccaggggtggaataccaggaaggttttttctacacagtattcttgcttattggggtctcaactttcatccacagcctgatggactttattttggcccaaattgtttggaatgtcattctcaaacggaccacttggctatctgagattacggctaaataa

SEQ ID NO: 1754 - protein, 149 aa, Alloiococcus otitidis
MASHLPIFIAMFISPSMGAVVSIFTAVGFLLAGFPIVVTLRAFSHIIFAVIGGHLIRGRQNDILSSPWKSQAFSVFLALIHALSEMAVVSLFFFGVVPGVEYQEGFFYTVFLLIGVSTFIHSLMDFILAQIVWNVILKRTTWLSEITAK

SEQ ID NO: 1755 - DNA, 594 bp, Alloiococcus otitidis; identical to SEQ ID NO: 1753
  CDS (28)..(591)

SEQ ID NO: 1756 - protein, 188 aa, Alloiococcus otitidis
MQNRSRTTRLTVSALLIAIGILIPIVMPFKIVIEPASFTLASHLPIFIAMFISPSMGAVVSIFTAVGFLLAGFPIVVTLRAFSHIIFAVIGGHLIRGRQNDILSSPWKSQAFSVFLALIHALSEMAVVSLFFFGVVPGVEYQEGFFYTVFLLIGVSTFIHSLMDFILAQIVWNVILKRTTWLSEITAK

SEQ ID NO: 1757 - DNA, 594 bp, Alloiococcus otitidis; identical to SEQ ID NO: 1753
  CDS (16)..(591)

SEQ ID NO: 1758 - protein, 192 aa, Alloiococcus otitidis
MGKSMQNRSRTTRLTVSALLIAIGILIPIVMPFKIVIEPASFTLASHLPIFIAMFISPSMGAVVSIFTAVGFLLAGFPIVVTLRAFSHIIFAVIGGHLIRGRQNDILSSPWKSQAFSVFLALIHALSEMAVVSLFFFGVVPGVEYQEGFFYTVFLLIGVSTFIHSLMDFILAQIVWNVILKRTTWLSEITAK

SEQ ID NO: 1759 - DNA, 228 bp, Alloiococcus otitidis
  CDS (1)..(225)
atgtttcagccatggttctcaattcctttccttgacctgagtttactgtttaagtctctcagttttactttgatgcctgtattcgctaggcaaaaaggacaggtcctggtttggttagcaggttccatgtccaacttggcactggcactgaccttggtggcagttgcaggttacttcttttggggcggtttttttcttctcactgaccagggcttggagctggtctaa

SEQ ID NO: 1760 - protein, 75 aa, Alloiococcus otitidis
MFQPWFSIPFLDLSLLFKSLSFTLMPVFARQKGQVLVWLAGSMSNLALALTLVAVAGYFFWGGFFLLTDQGLELV

SEQ ID NO: 1761 - DNA, 468 bp, Alloiococcus otitidis
  CDS (28)..(465)
aaataccatcaaaaaggaggtctttggatgagagcaagtattagtcagtctgagtgggaagtgatgcgggtggcctgggcccagagtcgggtgaccaaccgcgaaatttacgaagtcttagctgataagaccgagtggaagatgtccacggttaaaaccctggttagacgcttgtgcgacaagggctttctcagaccggaaaaagagtccagggaatatacctaccgccccctcatttcgcagaaccaggccttggctgtagctggccaggacatgttcaagcagatttgcaacaaggaggtgggggctgtcttgattgattttatcagagaagccccaatgagccaggctgacttagaccagctccaagccctggtcagtgagaagaaaaaaaccgccccaaaagaagtaacctgcaactgccaccaaggtcagtgccagtgccaagttggacatggaacctgctaa

SEQ ID NO: 1762 - protein, 146 aa, Alloiococcus otitidis
MRASISQSEWEVMRVAWAQSRVTNREIYEVLADKTEWKMSTVKTLVRRLCDKGFLRPEKESREYTYRPLISQNQALAVAGQDMFKQICNKEVGAVLIDFIREAPMSQADLDQLQALVSEKKKTAPKEVTCNCHQGQCQCQVGHGTC

SEQ ID NO: 1763 - DNA, 372 bp, Alloiococcus otitidis
  CDS (28)..(369)
ggcaggacatcagctaccaccccgtcaatgccagcttggctggctagtgcttgggcagttttttcattgtcaccggtcagcatcatgacttcaatcccctggtctctaatgctttggatggcctctttagctgaatctttcaagaggtctgccacagcgaaaatagctaggatctggctgtcatcagctaaaaacataggggtcttgccttggtcagccaagtcatttacttggtctttaatgctttcatccaagtctattccttcttggtccatcaatttctggttaccaaaaaagatggtttggccgtcaacctgggccgaaatccccatacctgattgggcttggaagtcactggactggccgacctga

SEQ ID NO: 1764 - protein, 114 aa, Alloiococcus otitidis
MPAWLASAWAVFSLSPVSIMTSIPWSLMLWMASLAESFKRSATAKIARIWLSSAKNIGVLPWSAKSFTWSLMLSSKSIPSWSINFWLPKKMVWPSTWAEIPIPDWAWKSLDWPT

SEQ ID NO: 1765 - DNA, 2520 bp, Alloiococcus otitidis
  CDS (1336)..(2517)
acagtaaactcaggtcaaggaaaggaattgagaaccatggctgaaacatttacagtagaaggcatgacctgtgccgcctgtgcccagacggtagagagtgcggccgctaaaactgctggtgttgaggaagcctccgtcaacctagccagtgaaaaactccaagttgaaaccagtgaaaattttaaggaagaagacctccgccaggctgttaagaaggcaggctacgccctagccttggctgagccggtccaaaaagtttttgccatctcggacatgacttgtgcctcttgtgcccagaccatcgaagagactgtctccaagctagaaggagccaaggaagtttcggttaacctggccagcgaaaaaatgaccgtgacctatgaccccagcaaactatcaatccgccagattgaagatgctgtggaccaggccggctattcggcccggctaaaagaagaccggtcaagtcaaagtgaccaagttggcaaagaccagcccttatccaaaaaagacagctacaagaaaaaaaccattatcggctttgcctttatggtccccttaatggtcattgccatgggacccatgctgggcatgcccttacccgacttcctggaccccatgaccagccccttgaactttgccctcttgcaactagccctgaccatcccggtggttttaacaggtttgccttactaccggcaaggttttaagaccctcttggctggccatcccaatatgaatgccctgattgccttggggactgcagccgccttcctttattcgttaggggcgactggggccattgctgtgacaggccggtctgacctagccatgatgctctactacgaaaccactgccatgattttaaccctccactccctaggcaagtatttggaagagcgagctaaagggcagatgtcccaagcagttgaaagcctgctcaacctagctgccaagactgcccggattgtccatgacggtcaggaggaagaagttgccattgaagaagtagtgccaggggatgtcatccgggtcaagccgggcgagaaaatgccggtggatggtcggattatttccggccggacctcagtggatgagtccatgttaactggggaaagcttaccggttgaaaaggacttagaagatgaagtgatcggggccacccttaatcaaaacgggaccattgactaccgggccaccaaggtgggggacgataccactttggctcagattatcgacctggtagatcaagcccaggcatcgaaagcccccattgcccaaacggctgacaaggtaacccagtactttgtcccggctgttatcggcctggccctcttgtcctccctggcttggttggtctttggccagtccttcctttttgccctcaccatcgccatctccgtcttagtgattgcctgcccatgtgccttgggtctagctacaccaactgccattatggtagcaaccggaaaaggagcccagcatggggtcttaattaagtcaggccaggccttggaaggcttgcaagcaattgacaccatggtctttgacaagactgggacccttaccaaggggcaacccgaatgtactgacattatttccttgccaggccatgactatgatgaagcagacctcctctacctggcagctagtgccgaaaaagggtctgaacacgccttggctcaggctattttagacaaggctgaagcagaaggtgttcaggtcggccagtccagtgacttccaagcccaatcaggtatggggatttcggcccaggttgacggccaaaccatcttttttggtaaccagaaattgatggaccaagaaggaatagacttggatgaaagcattaaagaccaagtaaatgacttggctgaccaaggcaagacccctatgtttttagctgatgacagccagatcctagctattttcgctgtggcagacctcttgaaagattcagctaaagaggccatccaaagcattagagaccaggggattgaagtcatgatgctgaccggtgacaatgaaaaaactgcccaagcactagccagccaagctggcattgacggggtggtagctgatgtcctgcctcaagataagtcagaccagatagccaagttaaaagaccaaggcaagtcagtggccatggttggcgacggcattaatgatgccccagccttggcccaagcagatgttggtctggcaattgggactgggactgatgtagccgtcgattcggctgatgtggttctcatgcgggatgacttaaaagaagtgacgacagccgttgaactctcccgggccagcttgaaaaacatcaagcaaaaccttttctgggccttcttatacaacagcctaggtatcccggtagccatgggggttctcttcctctttggcgggccactcttgagtcccgaaattgcagccttggccatgagcctgtcttctgtttcggtcttactcaatgcatcccggcttaaaggctttaaacccagccacgcccaggtcagcccaagttag

SEQ ID NO: 1766 - protein, 394 aa, Alloiococcus otitidis
MSSLAWLVFGQSFLFALTIAISVLVIACPCALGLATPTAIMVATGKGAQHGVLIKSGQALEGLQAIDTMVFDKTGTLTKGQPECTDIISLPGHDYDEADLLYLAASAEKGSEHALAQAILDKAEAEGVQVGQSSDFQAQSGMGISAQVDGQTIFFGNQKLMDQEGIDLDESIKDQVNDLADQGKTPMFLADDSQILAIFAVADLLKDSAKEAIQSIRDQGIEVMMLTGDNEKTAQALASQAGIDGVVADVLPQDKSDQIAKLKDQGKSVAMVGDGINDAPALAQADVGLAIGTGTDVAVDSADVVLMRDDLKEVTTAVELSRASLKNIKQNLFWAFLYNSLGIPVAMGVLFLFGGPLLSPEIAALAMSLSSVSVLLNASRLKGFKPSHAQVSPS

SEQ ID NO: 1767 - DNA, 2520 bp, Alloiococcus otitidis; identical to SEQ ID NO: 1765
  CDS (685)..(2517)

SEQ ID NO: 1768 - protein, 611 aa, Alloiococcus otitidis
MPYYRQGFKTLLAGHPNMNALIALGTAAAFLYSLGATGAIAVTGRSDLAMMLYYETTAMILTLHSLGKYLEERAKGQMSQAVESLLNLAAKTARIVHDGQEEEVAIEEVVPGDVIRVKPGEKMPVDGRIISGRTSVDESMLTGESLPVEKDLEDEVIGATLNQNGTIDYRATKVGDDTTLAQIIDLVDQAQASKAPIAQTADKVTQYFVPAVIGLALLSSLAWLVFGQSFLFALTIAISVLVIACPCALGLATPTAIMVATGKGAQHGVLIKSGQALEGLQAIDTMVFDKTGTLTKGQPECTDIISLPGHDYDEADLLYLAASAEKGSEHALAQAILDKAEAEGVQVGQSSDFQAQSGMGISAQVDGQTIFFGNQKLMDQEGIDLDESIKDQVNDLADQGKTPMFLADDSQILAIFAVADLLKDSAKEAIQSIRDQGIEVMMLTGDNEKTAQALASQAGIDGVVADVLPQDKSDQIAKLKDQGKSVAMVGDGINDAPALAQADVGLAIGTGTDVAVDSADVVLMRDDLKEVTTAVELSRASLKNIKQNLFWAFLYNSLGIPVAMGVLFLFGGPLLSPEIAALAMSLSSVSVLLNASRLKGFKPSHAQVSPS

SEQ ID NO: 1769 - DNA, 2520 bp, Alloiococcus otitidis; identical to SEQ ID NO: 1765
  CDS (37)..(2517)

SEQ ID NO: 1770 - protein, 827 aa, Alloiococcus otitidis
MAETFTVEGMTCAACAQTVESAAAKTAGVEEASVNLASEKLQVETSENFKEEDLRQAVKKAGYALALAEPVQKVFAISDMTCASCAQTIEETVSKLEGAKEVSVNLASEKMTVTYDPSKLSIRQIEDAVDQAGYSARLKEDRSSQSDQVGKDQPLSKKDSYKKKTIIGFAFMVPLMVIAMGPMLGMPLPDFLDPMTSPLNFALLQLALTIPVVLTGLPYYRQGFKTLLAGHPNMNALIALGTAAAFLYSLGATGAIAVTGRSDLAMMLYYETTAMILTLHSLGKYLEERAKGQMSQAVESLLNLAAKTARIVHDGQEEEVAIEEVVPGDVIRVKPGEKMPVDGRIISGRTSVDESMLTGESLPVEKDLEDEVIGATLNQNGTIDYRATKVGDDTTLAQIIDLVDQAQASKAPIAQTADKVTQYFVPAVIGLALLSSLAWLVFGQSFLFALTIAISVLVIACPCALGLATPTAIMVATGKGAQHGVLIKSGQALEGLQAIDTMVFDKTGTLTKGQPECTDIISLPGHDYDEADLLYLAASAEKGSEHALAQAILDKAEAEGVQVGQSSDFQAQSGMGISAQVDGQTIFFGNQKLMDQEGIDLDESIKDQVNDLADQGKTPMFLADDSQILAIFAVADLLKDSAKEAIQSIRDQGIEVMMLTGDNEKTAQALASQAGIDGVVADVLPQDKSDQIAKLKDQGKSVAMVGDGINDAPALAQADVGLAIGTGTDVAVDSADVVLMRDDLKEVTTAVELSRASLKNIKQNLFWAFLYNSLGIPVAMGVLFLFGGPLLSPEIAALAMSLSSVSVLLNASRLKGFKPSHAQVSPS

SEQ ID NO: 1771 - DNA, 2520 bp, Alloiococcus otitidis; identical to SEQ ID NO: 1765
  CDS (28)..(2517)

SEQ ID NO: 1772 - protein, 830 aa, Alloiococcus otitidis
MRTMAETFTVEGMTCAACAQTVESAAAKTAGVEEASVNLASEKLQVETSENFKEEDLRQAVKKAGYALALAEPVQKVFAISDMTCASCAQTIEETVSKLEGAKEVSVNLASEKMTVTYDPSKLSIRQIEDAVDQAGYSARLKEDRSSQSDQVGKDQPLSKKDSYKKKTIIGFAFMVPLMVIAMGPMLGMPLPDFLDPMTSPLNFALLQLALTIPVVLTGLPYYRQGFKTLLAGHPNMNALIALGTAAAFLYSLGATGAIAVTGRSDLAMMLYYETTAMILTLHSLGKYLEERAKGQMSQAVESLLNLAAKTARIVHDGQEEEVAIEEVVPGDVIRVKPGEKMPVDGRIISGRTSVDESMLTGESLPVEKDLEDEVIGATLNQNGTIDYRATKVGDDTTLAQIIDLVDQAQASKAPIAQTADKVTQYFVPAVIGLALLSSLAWLVFGQSFLFALTIAISVLVIACPCALGLATPTAIMVATGKGAQHGVLIKSGQALEGLQAIDTMVFDKTGTLTKGQPECTDIISLPGHDYDEADLLYLAASAEKGSEHALAQAILDKAEAEGVQVGQSSDFQAQSGMGISAQVDGQTIFFGNQKLMDQEGIDLDESIKDQVNDLADQGKTPMFLADDSQILAIFAVADLLKDSAKEAIQSIRDQGIEVMMLTGDNEKTAQALASQAGIDGVVADVLPQDKSDQIAKLKDQGKSVAMVGDGINDAPALAQADVGLAIGTGTDVAVDSADVVLMRDDLKEVTTAVELSRASLKNIKQNLFWAFLYNSLGIPVAMGVLFLFGGPLLSPEIAALAMSLSSVSVLLNASRLKGFKPSHAQVSPS

SEQ ID NO: 1773 - DNA, 237 bp, Alloiococcus otitidis
  CDS (31)..(234)
cccttcccataccaaaaggaggtgagtgtgatggataaaagctttaaagtgtctggcatgtcctgccaaaattgtgccaagacagtggaaaaacacctcaaagactccgaccaggttcttgaggccaaggtcgatttagaaagtcaaacagcccgggttcaatctgaccttgacttaggcccagatgacttgaacgtcgccttggaagacaccccctaccgtattgaaaaaaactga

SEQ ID NO: 1774 - protein, 68 aa, Alloiococcus otitidis
MDKSFKVSGMSCQNCAKTVEKHLKDSDQVLEAKVDLESQTARVQSDLDLGPDDLNVALEDTPYRIEKN

SEQ ID NO: 1775 - DNA, 234 bp, Alloiococcus otitidis
  CDS (7)..(231)
aggaaggtggcaaaatggttaaagcgtacctaccctttcgctttcgctacacccctattgtacaaaccgtgctcattaagtttacaaaagatcctgactacctctaccattcccttgaacttcaggtttttgaccaaaatggcaaacgctatgcccaagtcttggcttggcgaccagatggttacaaggatgtctaccaagaagccggtctctccttggaccagggtgaattaa

SEQ ID NO: 1776 - protein, 75 aa, Alloiococcus otitidis
MAKWLKRTYPFAFATPLLYKPCSLSLQKILTTSTIPLNFRFLTKMANAMPKSWLGDQMVTRMSTKKPVSPWTRVN

SEQ ID NO: 1777 - DNA, 1029 bp, Alloiococcus otitidis
  CDS (10)..(1026)
tttttatttatgaaggaaggtggcaaaatggttaaagcgtacctaccctttcgctttcgctacacccctattgtacaaaccgtgctcattaagtttacaaaagatcctgactacctctaccattcccttgaacttcaggtttttgaccaaaatggcaaacgctatgcccaagtcttggcttggcgaccagatggttacaaggatgtctaccaagaagccggtctctccttggaccagggtgaattaaacatggtcgttggtggtagaggggtaggagatttccaagaaacggctagctttgggccgactacttttgaagaaacagatggccaagttcggatcaaattctcttttactgataagaatagacgggagatagtcttttctgtcgtggaagacttggaagatggtgtccacctgtcctggttgccttccatcggggcccagtgggacgacccaacttcagttccccttttatttctttacgagtttgactttgtcaaaaagaatggcagccaactagacttcactattgacggggtggaccatcaagtggacccctatgcctttcccaagggtttccagtcccggttagatatcgagtactccttagaatcagtcatgaccaactttaatgaagctagggaagaagagcttttgcaactagacttggatgagtctggcaaggccagccggggggaccaagactaccactaccaaatcgcaggggataaaccccacctggaaaaaatggtcatgaaggagggccaccaccctgttgcggttgaatttgaacctgccttcccagattacaccgaaattgaggagagtgtgcctcaatttggtcaattttccattaaaccctcccaagaactaggggacttaacaggcaagtataatgtagtcaagcaggaaaataaagtcattatcaacctggctttttcagaaggttggaaccccaaccaaggggagacttacttcgacctgatccgccagcggacgaccacccgtcctaacggattggtataa

SEQ ID NO: 1778 - protein, 339 aa, Alloiococcus otitidis
MKEGGKMVKAYLPFRFRYTPIVQTVLIKFTKDPDYLYHSLELQVFDQNGKRYAQVLAWRPDGYKDVYQEAGLSLDQGELNMVVGGRGVGDFQETASFGPTTFEETDGQVRIKFSFTDKNRREIVFSVVEDLEDGVHLSWLPSIGAQWDDPTSVPLLFLYEFDFVKKNGSQLDFTIDGVDHQVDPYAFPKGFQSRLDIEYSLESVMTNFNEAREEELLQLDLDESGKASRGDQDYHYQIAGDKPHLEKMVMKEGHHPVAVEFEPAFPDYTEIEESVPQFGQFSIKPSQELGDLTGKYNVVKQENKVIINLAFSEGWNPNQGETYFDLIRQRTTTRPNGLV

SEQ ID NO: 1779 - DNA, 504 bp, Alloiococcus otitidis
  CDS (31)..(501)
acttccaaaccatattcggtgttttctaagatggttcggtgggggaagaggccgaaattttggaagaccatggaaattttttcccggcggatatcccgcaaggcttcatcgtccatgtccataatattctggtcatcaattaaaacctgtccttcagttggttcaatcaaccggttcaacatccgaaccaaggtcgacttcccggacccggacaagcccatgatgacaaaaatttcaccttttttgatattgagatctgctcggctaaccccaacagtagctcctgtcttttcaaggatttcatcttttttctttccttggtcaagtaggtcagccgccttgtctatttggcttttcttgccaaagatcttagttaaacctttgacatctatcttcgtttcatttcccaactatctgtcctcctcatatacaaaaacaaggcaaataaataggttactgcacattccatgtagtaaccgcccattccttcaatcgattttgtga

SEQ ID NO: 1780 - protein, 157 aa, Alloiococcus otitidis
MVRWGKRPKFWKTMEIFSRRISRKASSSMSIIFWSSIKTCPSVGSINRFNIRTKVDFPDPDKPMMTKISPFLILRSARLTPTVAPVFSRISSFFFPWSSRSAALSIWLFLPKILVKPLTSIFVSFPNYLSSSYTKTRQINRLLHIPCSNRPFLQSIL

SEQ ID NO: 1781 - DNA, 504 bp, Alloiococcus otitidis; identical to SEQ ID NO: 1779
  CDS (19)..(501)

SEQ ID NO: 1782 - protein, 161 aa, Alloiococcus otitidis
MFSKMVRWGKRPKFWKTMEIFSRRISRKASSSMSIIFWSSIKTCPSVGSINRFNIRTKVDFPDPDKPMMTKISPFLILRSARLTPTVAPVFSRISSFFFPWSSRSAALSIWLFLPKILVKPLTSIFVSFPNYLSSSYTKTRQINRLLHIPCSNRPFLQSIL

SEQ ID NO: 1783 - DNA, 1257 bp, Alloiococcus otitidis
  CDS (190)..(1254)
ttgggaaatgaaacgaagatagatgtcaaaggtttaactaagatctttggcaagaaaagccaaatagacaaggcggctgacctacttgaccaaggaaagaaaaaagatgaaatccttgaaaagacaggagctactgttggggttagccgagcagatctcaatatcaaaaaaggtgaaatttttgtcatcatgggcttgtccgggtccgggaagtcgaccttggttcggatgttgaaccggttgattgaaccaactgaaggacaggttttaattgatgaccagaatattatggacatggacgatgaagccttgcgggatatccgccgggaaaaaatttccatggtcttccaaaatttcggcctcttcccccaccgaaccatcttagaaaacaccgaatatggtttggaagttcaagggattggcaaggaagagcgccaagagaaagctgagcgtgccttagacaatgctggtcttttgtcttacaaggaccaaaaaccgggtcaattgtctggtgggatgcagcagcgggttggcttagcccgagccttggccaatgatcctgagatcctactcatggacgaagccttttctgccttagaccccttgatccgccgagacatgcaagacgaattgattgaaatgcaagaagctctacaaaaaaccatcgtcttcattacccacgacttaaatgagtcgcttcgactaggggaccggattgccattatgaaagatggggaagtcgttcaagtggggactggtgaggaaatcttaaccaacccagccaatgactatgtcaaacgctttgttaaagatgtggaccggtctaagattattacggccgaaaacatcatgcagcggtcagctaacttgaacattgcccacgacggtcctcgtgtggctaagcaacggatggaagacgagaacctcagcaatatgctggttatcgacaaggaaagaaaacttcaaggttacgttacagatgatgatgtagtgaaagccattcgcgatggcttgaaattggaagatatcttgcggaaagatattccaactgtttccaaagataagctgatgaatgagctttacgatattattagcgatatccaaacaccaattgccgtgaccgacgacaacaacaaattgctgggcattatcatccgtaaatatatcttggatgccctagctcagcaaaatgcagttgttgaagaggatgaccctcaagcagacgataaccaagcggaggtgaaagacaatggataa

SEQ ID NO: 1784 - protein, 355 aa, Alloiococcus otitidis
MGLSGSGKSTLVRMLNRLIEPTEGQVLIDDQNIMDMDDEALRDIRREKISMVFQNFGLFPHRTILENTEYGLEVQGIGKEERQEKAERALDNAGLLSYKDQKPGQLSGGMQQRVGLARALANDPEILLMDEAFSALDPLIRRDMQDELIEMQEALQKTIVFITHDLNESLRLGDRIAIMKDGEVVQVGTGEEILTNPANDYVKRFVKDVDRSKIITAENIMQRSANLNIAHDGPRVAKQRMEDENLSNMLVIDKERKLQGYVTDDDVVKAIRDGLKLEDILRKDIPTVSKDKLMNELYDIISDIQTPIAVTDDNNKLLGIIIRKYILDALAQQNAVVEEDDPQADDNQAEVKDNG

SEQ ID NO: 1785 - DNA, 1257 bp, Alloiococcus otitidis; identical to SEQ ID NO: 1783
  CDS (1)..(1254)

SEQ ID NO: 1786 - protein, 418 aa, Alloiococcus otitidis
MGNETKIDVKGLTKIFGKKSQIDKAADLLDQGKKKDEILEKTGATVGVSRADLNIKKGEIFVIMGLSGSGKSTLVRMLNRLIEPTEGQVLIDDQNIMDMDDEALRDIRREKISMVFQNFGLFPHRTILENTEYGLEVQGIGKEERQEKAERALDNAGLLSYKDQKPGQLSGGMQQRVGLARALANDPEILLMDEAFSALDPLIRRDMQDELIEMQEALQKTIVFITHDLNESLRLGDRIAIMKDGEVVQVGTGEEILTNPANDYVKRFVKDVDRSKIITAENIMQRSANLNIAHDGPRVAKQRMEDENLSNMLVIDKERKLQGYVTDDDVVKAIRDGLKLEDILRKDIPTVSKDKLMNELYDIISDIQTPIAVTDDNNKLLGIIIRKYILDALAQQNAVVEEDDPQADDNQAEVKDNG

SEQ ID NO: 1787 - DNA, 864 bp, Alloiococcus otitidis
  CDS (415)..(861)
aagacaatggataataccttgtttattgacttaattccagagataccttttactcaatggtttgccgacatcatttcttggttaaccgacaacttatcagccttctttaaccttataagtgatggggctgagtggctcatggatgccatgacagccatcttgctgattattcccccagaaatctttatcatcttaattggggtcttggcctactttgcagctaagaaaaccttctccctgccaactttttccgttgtagcacttttttacatctacaaccaaggtttgtgggaagaattgatgtttacaaccacccttgtcatcctatccagcttgatatccattgtgattgggataccagttgggatctggatgtccaagagccaaacagtgaacaatgtggttcagcccattttggactttatgcagaccatgccggccttcgtttacttgattccggcagtggccttcttcggaattgggatggtgccaggggtcttctcctctgttatctacgctgcaccacctgttatccgctttaccaacttggggatccgggaagttgacgatgagatgattgaagctgcagaatcctttgggtcaacctcccgccagcgtctatttaaagttgagttacctttagctaaatctacaatcatggctggtattaaccagactgttatgttagccttgtccatggtcgtcatcgcttcaatgatcggggcaccaggcttaggtgaccaagtcgtccgagccctccaacaagctcgttcaggcccaggtttcgtagccggctttgcccttgttggtctagctattgtgatggaccggatcttacaaggctttggccaggaccaagactag

SEQ ID NO: 1788 - protein, 149 aa, Alloiococcus otitidis
MDFMQTMPAFVYLIPAVAFFGIGMVPGVFSSVIYAAPPVIRFTNLGIREVDDEMIEAAESFGSTSRQRLFKVELPLAKSTIMAGINQTVMLALSMVVIASMIGAPGLGDQVVRALQQARSGPGFVAGFALVGLAIVMDRILQGFGQDQD

SEQ ID NO: 1789 - DNA, 864 bp, Alloiococcus otitidis; identical to SEQ ID NO: 1787
  CDS (7)..(861)

SEQ ID NO: 1790 - protein, 285 aa, Alloiococcus otitidis
MDNTLFIDLIPEIPFTQWFADIISWLTDNLSAFFNLISDGAEWLMDAMTAILLIIPPEIFIILIGVLAYFAAKKTFSLPTFSVVALFYIYNQGLWEELMFTTTLVILSSLISIVIGIPVGIWMSKSQTVNNVVQPILDFMQTMPAFVYLIPAVAFFGIGMVPGVFSSVIYAAPPVIRFTNLGIREVDDEMIEAAESFGSTSRQRLFKVELPLAKSTIMAGINQTVMLALSMVVIASMIGAPGLGDQVVRALQQARSGPGFVAGFALVGLAIVMDRILQGFGQDQD

SEQ ID NO: 1791 - DNA, 987 bp, Alloiococcus otitidis
  CDS (25)..(984)
attttagaaggagcgtattcatttatgaacttgaagaaattcggactagctgctctttcagcatctgcccttttcttgactgcttgcggtcaagaagacggtgcggccgatgtggaaagtgtcgtcgacggtgaggaaattgaattggcttacgttgattgggacagtgagattgcgtccacccacgttattggcgaagttctagaaagcttgggctatgacgtaaccctcaccagtttagacaatgctgtcatgtggcagtccgttgccaatggagatgctgatgccatggtttcagcttggttacctcacactcacggggaccaagaagctgaatatggcgaccaaatggaccacgtagggaccaacctagaaggggccaaaattggtttgggtgtcccaacttacatggaagtggactccattgctgacttgaccgatgaagctgaacaaaccatcactggtatcgaagccggtgctggggttgtccaatcagctgaacaagcccttgaagactacgacaacttgagtgactggactgttgctacttcttcttctggtgctatggtgactgaactagaaacagccatcaacaatgaagaagacattgtagtcactgcttggtcaccgcactggaaattccaaaccttcgaccttaaatatctagatgacccagaagaatcatttggtggcgatgaaaccatcgaaacttacgccagagaaggcctagaagaagatatgccagaagcatactctgtcttagaaaacttctactgggagctagatgaaatggaagaagttatgctgaatatttctgaaggggcagaaccagaagacgcagcggctcaatgggttgaagaaaaccaagaccgtgtcagcgaatggactgccaatgtttcaagcgaaagtcaagaccaagatgaccaagctgaagatgatcaagcggatgaccaagctgacgacggcacagaagatgatgctgcctaa

SEQ ID NO: 1792 - protein, 320 aa, Alloiococcus otitidis
MNLKKFGLAALSASALFLTACGQEDGAADVESVVDGEEIELAYVDWDSEIASTHVIGEVLESLGYDVTLTSLDNAVMWQSVANGDADAMVSAWLPHTHGDQEAEYGDQMDHVGTNLEGAKIGLGVPTYMEVDSIADLTDEAEQTITGIEAGAGVVQSAEQALEDYDNLSDWTVATSSSGAMVTELETAINNEEDIVVTAWSPHWKFQTFDLKYLDDPEESFGGDETIETYAREGLEEDMPEAYSVLENFYWELDEMEEVMLNISEGAEPEDAAAQWVEENQDRVSEWTANVSSESQDQDDQAEDDQADDQADDGTEDDAA

SEQ ID NO: 1793 - DNA, 1083 bp, Alloiococcus otitidis
  CDS (262)..(1080)
ggaataagaaaggagacgtgttcggtgaaaggcaaaatactaaaaactttagcaagtacaggaattttaacagcaggtttggtccttgctggatgtgcagatgaccagtctgaggaagtgaccgagactctagtcgatggggatgaaattgagctcacctatgttaactgggatacggagctggcttccacccacgttgtcggccaagtcttagaagatgtgggttatgatgttaccttaaccagtgtggagagtccgattatgtggcaatccattgcttctggcgagtctgacgccatggtagcgggctggttgccttatacccacgccggtgagtttgagcagtatggcgacgatattgtcagcctgggaattaactatgaagatgccttaattggcctcgttgtccccgaatatatggaaggcttggactccatcgaagacttggaagaccaaattgaggacaagaccatagtggggattgaacggggtgccggtaccgttgaagcagctgagcgggccctagaagactatggcaaggaagattgggaagtcatcgcctcttcctctggtgccatggtgaccgaattgcgccaggccattaacaatgaagaagacattattgtcactggctggaccccccactggaagtttattgaatttgacctaaaaatgttggacgaccctaaaaacagcttcggggagtctgaatatattgaaacctttgcccgggaaggctttaccgaagaccacccagttgctgctaccatcctcggcaacttctactgggagcaagaagagtttgaatccgttatgctcgacatcaatgaaggagtcgaagaagaccaagcggctaagaactttatccaagataatcctgaactcgtggaatcttggctagaaggtgcagaagaagcagccgaaaccggtcaagctgtcggggtgagcgaagaaaaagaccaaggtagccaaggtcaaggggacttgccgacccctggtgaagatggagaagaaggcgacccggaagatgacccagaagctgaccaagacggtgaagaagctgatgaccaagaagcagcttaa

SEQ ID NO: 1794 - protein, 273 aa, Alloiococcus otitidis
MWQSIASGESDAMVAGWLPYTHAGEFEQYGDDIVSLGINYEDALIGLVVPEYMEGLDSIEDLEDQIEDKTIVGIERGAGTVEAAERALEDYGKEDWEVIASSSGAMVTELRQAINNEEDIIVTGWTPHWKFIEFDLKMLDDPKNSFGESEYIETFAREGFTEDHPVAATILGNFYWEQEEFESVMLDINEGVEEDQAAKNFIQDNPELVESWLEGAEEAAETGQAVGVSEEKDQGSQGQGDLPTPGEDGEEGDPEDDPEADQDGEEADDQEAA

SEQ ID NO: 1795 - DNA, 1083 bp, Alloiococcus otitidis; identical to SEQ ID NO: 1793
  CDS (79)..(1080)

SEQ ID NO: 1796 - protein, 334 aa, Alloiococcus otitidis
MVLAGCADDQSEEVTETLVDGDEIELTYVNWDTELASTHVVGQVLEDVGYDVTLTSVESPIMWQSIASGESDAMVAGWLPYTHAGEFEQYGDDIVSLGINYEDALIGLVVPEYMEGLDSIEDLEDQIEDKTIVGIERGAGTVEAAERALEDYGKEDWEVIASSSGAMVTELRQAINNEEDIIVTGWTPHWKFIEFDLKMLDDPKNSFGESEYIETFAREGFTEDHPVAATILGNFYWEQEEFESVMLDINEGVEEDQAAKNFIQDNPELVESWLEGAEEAAETGQAVGVSEEKDQGSQGQGDLPTPGEDGEEGDPEDDPEADQDGEEADDQEAA

SEQ ID NO: 1797 - DNA, 1083 bp, Alloiococcus otitidis; identical to SEQ ID NO: 1793
  CDS (25)..(1080)

SEQ ID NO: 1798 - protein, 352 aa, Alloiococcus otitidis
MKGKILKTLASTGILTAGLVLAGCADDQSEEVTETLVDGDEIELTYVNWDTELASTHVVGQVLEDVGYDVTLTSVESPIMWQSIASGESDAMVAGWLPYTHAGEFEQYGDDIVSLGINYEDALIGLVVPEYMEGLDSIEDLEDQIEDKTIVGIERGAGTVEAAERALEDYGKEDWEVIASSSGAMVTELRQAINNEEDIIVTGWTPHWKFIEFDLKMLDDPKNSFGESEYIETFAREGFTEDHPVAATILGNFYWEQEEFESVMLDINEGVEEDQAAKNFIQDNPELVESWLEGAEEAAETGQAVGVSEEKDQGSQGQGDLPTPGEDGEEGDPEDDPEADQDGEEADDQEAA

SEQ ID NO: 1799 - DNA, 318 bp, Alloiococcus otitidis
  CDS (118)..(315)
attctctgccccgtatggtccgttttgaaaaaaagaggtaacacgaaagcctccgcctccgttatctctagtgtaaggagtcatgacacttacactagaaacaaggaggaatgtacgatggcaaaaacatggttagaaaacaaactagacatttacttggaagatgaagagaatgacaagaccatccgcaaggggtttaacaatatcgtggaagaagccagcgaccagcaagttagtgacttcgcaaacgcggtggccagcctctaccactttgacaagtcccatgccgttttaagccagtcctataccatagactaa

SEQ ID NO: 1800 - protein, 66 aa, Alloiococcus otitidis
MAKTWLENKLDIYLEDEENDKTIRKGFNNIVEEASDQQVSDFANAVASLYHFDKSHAVLSQSYTID

SEQ ID NO: 1801 - DNA, 318 bp, Alloiococcus otitidis; identical to SEQ ID NO: 1799
  CDS (25)..(315)

SEQ ID NO: 1802 - protein, 97 aa, Alloiococcus otitidis
MKKRGNTKASASVISSVRSHDTYTRNKEECTMAKTWLENKLDIYLEDEENDKTIRKGFNNIVEEASDQQVSDFANAVASLYHFDKSHAVLSQSYTID

SEQ ID NO: 1803 - DNA, 264 bp, Alloiococcus otitidis
  CDS (28)..(261)
aaggaaagcaaagaaagaggtaggaccatggaaaaacgactcgaactcttgtttatcaatagcctgggtaaaaacactagcctgacaatttctgaccctaaggcaggcttgaccccagaagacattaaagcagccatggaccagctagttcaagctggcctggttgaagtggaaggtgtccaacgttaccaagctgttcgcggggcgcgttatgtgacccggcaggtggacgagattttcacccaagaaccaggagaaaattaa

SEQ ID NO: 1804 - protein, 78 aa, Alloiococcus otitidis
MEKRLELLFINSLGKNTSLTISDPKAGLTPEDIKAAMDQLVQAGLVEVEGVQRYQAVRGARYVTRQVDEIFTQEPGEN

SEQ ID NO: 1805 - DNA, 636 bp, Alloiococcus otitidis
  CDS (25)..(633)
aggactgaaaggaaggttggagtcatgaagtggttgagtcggatcttgattgttgttgggataggctttctgattgcctttggctacacgatttatgaccatgctaactcgacatcggttaccctagaagaagcccaggtggccctggaagaaagccgggcccaggctgctgaagctggggacggggaccaggatggccaagatggggcgagtgacatcgatatccaaaactaccagcctgaagctggggaggcttttggggtcttagatattcccaaactcgaccggagcattggcattgtagccggaacggatgcagactctcttaagaagggggtaggtcacgttgagaatacagtcttccctggccaaggcgaacaaattgtcctctctggccaccgggataccgtcttccgggactttggcgaattagaaattggcgacaattttatcgttcaaatgccttacggggactatgaatatgagattcaggactatgaaattgtcgaccgggatgatacctccgtcatccggcctatgggggaagaagtcttagtggtttcaacctgctacccctttgaattttacggttttgcccctgaccgctttgttttctattgttaccccgttgaataa

SEQ ID NO: 1806 - protein, 203 aa, Alloiococcus otitidis
MKWLSRILIVVGIGFLIAFGYTIYDHANSTSVTLEEAQVALEESRAQAAEAGDGDQDGQDGASDIDIQNYQPEAGEAFGVLDIPKLDRSIGIVAGTDADSLKKGVGHVENTVFPGQGEQIVLSGHRDTVFRDFGELEIGDNFIVQMPYGDYEYEIQDYEIVDRDDTSVIRPMGEEVLVVSTCYPFEFYGFAPDRFVFYCYPVE

SEQ ID NO: 1807 - DNA, 804 bp, Alloiococcus otitidis
  CDS (229)..(801)
atcatatatcttaagccagctggtcaagacgcaagtgttttgcccggcttgttttctttttcgactctgctaggaggaatggatttgaccaaactagcgattagcctggttcgaggctaccaaaaatatatctcccccctcttccccccttcttgccgctatcaacctacctgcagtcagtacaccatccaagctattgaaaagcatgggaccttgaagggggctgtcatgggattggcccggatcatccgctgtaacccctttgtccaaggggggtatgatgaggttccggattatttcacccttagacggaatccagacagccaggcccaatatgaagcggatcaaagcttgaccagggaggacttaatcgacctcctcttggctgactaccaaaaggacctggtttataatgaccagggcttagaagcaagcttggcccaaaaaatagactaccgcaagctagacctgggcctcctagatgaagactatctagacggcatgcgggcctacacagaagacttaggcttaagcccggctaacttcagcctagtccaggtagaaaaggtaaaagaccaagagactcctccaaagggggaccccaccagcttggtcaaccaggctctgggcggtgggtccgcaagctacctcctcttggaagaccaggtgggaatcttagacgggtcaccagactatttggccctagacttggtcctggcctttggggtaagggaagtggatgtccaggacaaatcaagtcgtttattgcactacttacgggtcttagaccaagtccaagtttaa

SEQ ID NO: 1808 - protein, 191 aa, Alloiococcus otitidis
MGLARIIRCNPFVQGGYDEVPDYFTLRRNPDSQAQYEADQSLTREDLIDLLLADYQKDLVYNDQGLEASLAQKIDYRKLDLGLLDEDYLDGMRAYTEDLGLSPANFSLVQVEKVKDQETPPKGDPTSLVNQALGGGSASYLLLEDQVGILDGSPDYLALDLVLAFGVREVDVQDKSSRLLHYLRVLDQVQV

SEQ ID NO: 1809 - DNA, 804 bp, Alloiococcus otitidis; identical to SEQ ID NO: 1807
  CDS (79)..(801)

SEQ ID NO: 1810 - protein, 241 aa, Alloiococcus otitidis
MDLTKLAISLVRGYQKYISPLFPPSCRYQPTCSQYTIQAIEKHGTLKGAVMGLARIIRCNPFVQGGYDEVPDYFTLRRNPDSQAQYEADQSLTREDLIDLLLADYQKDLVYNDQGLEASLAQKIDYRKLDLGLLDEDYLDGMRAYTEDLGLSPANFSLVQVEKVKDQETPPKGDPTSLVNQALGGGSASYLLLEDQVGILDGSPDYLALDLVLAFGVREVDVQDKSSRLLHYLRVLDQVQV

SEQ ID NO: 1811 - DNA, 804 bp, Alloiococcus otitidis; identical to SEQ ID NO: 1807
  CDS (40)..(801)

SEQ ID NO: 1812 - protein, 254 aa, Alloiococcus otitidis
MPGLFSFSTLLGGMDLTKLAISLVRGYQKYISPLFPPSCRYQPTCSQYTIQAIEKHGTLKGAVMGLARIIRCNPFVQGGYDEVPDYFTLRRNPDSQAQYEADQSLTREDLIDLLLADYQKDLVYNDQGLEASLAQKIDYRKLDLGLLDEDYLDGMRAYTEDLGLSPANFSLVQVEKVKDQETPPKGDPTSLVNQALGGGSASYLLLEDQVGILDGSPDYLALDLVLAFGVREVDVQDKSSRLLHYLRVLDQVQV

SEQ ID NO: 1813 - DNA, 708 bp, Alloiococcus otitidis
  CDS (76)..(705)
ctaaaggaggcggctcttgtgaatattttgatcgcagacgatgaccgggaaatttgtgacttgctggaaatttacatgaaacatgaaagctaccaggtggaaaaagcctacaatggccaggaagccttggataaaatacgcctccaggactttgactgcctgatcctggacgtcatgatgccggtaaaggatggcctagctgtggtcaaggaagtcagggaaaagtccaccctgcctattttgatgctgagtgctaaaacttctgatgttgacaagattaggggactgtccaatggggcagatgactatgtggtcaaaccctttaacccccttgaagtggtagcccgggtcaaaagcctcttgcgccggtcctcctacaaggaaatggatgtcaaggacaagggggaactcaaggtggggcctattgtgatccgcaaggaagagcatgaggtggaaaccttagacggtcagcccatccagctgactgccctggaatttggcatcctgcaccttttagccagcaaccccaacaaggtttttaacgccgacgagattttcgaaaaggtttggcagcaagaaagtttagttccagccaagacagtcatggtccatgtctcccacctccgggacaagctggaaaaagcaaccggtggcgaaaagatcatcaagactgtctggggcgtgggctataagattgaaggagaatag

SEQ ID NO: 1814 - protein, 210 aa, Alloiococcus otitidis
MKHESYQVEKAYNGQEALDKIRLQDFDCLILDVMMPVKDGLAVVKEVREKSTLPILMLSAKTSDVDKIRGLSNGADDYVVKPFNPLEVVARVKSLLRRSSYKEMDVKDKGELKVGPIVIRKEEHEVETLDGQPIQLTALEFGILHLLASNPNKVFNADEIFEKVWQQESLVPAKTVMVHVSHLRDKLEKATGGEKIIKTVWGVGYKIEGE

SEQ ID NO: 1815 - DNA, 708 bp, Alloiococcus otitidis; identical to SEQ ID NO: 1813
  CDS (28)..(705)

SEQ ID NO: 1816 - protein, 226 aa, Alloiococcus otitidis
MIADDDREICDLLEIYMKHESYQVEKAYNGQEALDKIRLQDFDCLILDVMMPVKDGLAVVKEVREKSTLPILMLSAKTSDVDKIRGLSNGADDYVVKPFNPLEVVARVKSLLRRSSYKEMDVKDKGELKVGPIVIRKEEHEVETLDGQPIQLTALEFGILHLLASNPNKVFNADEIFEKVWQQESLVPAKTVMVHVSHLRDKLEKATGGEKIIKTVWGVGYKIEGE

SEQ ID NO: 1817 - DNA, 708 bp, Alloiococcus otitidis; identical to SEQ ID NO: 1813
  CDS (19)..(705)

SEQ ID NO: 1818 - protein, 229 aa, Alloiococcus otitidis
MNILIADDDREICDLLEIYMKHESYQVEKAYNGQEALDKIRLQDFDCLILDVMMPVKDGLAVVKEVREKSTLPILMLSAKTSDVDKIRGLSNGADDYVVKPFNPLEVVARVKSLLRRSSYKEMDVKDKGELKVGPIVIRKEEHEVETLDGQPIQLTALEFGILHLLASNPNKVFNADEIFEKVWQQESLVPAKTVMVHVSHLRDKLEKATGGEKIIKTVWGVGYKIEGE

SEQ ID NO: 1819 - DNA, 1176 bp, Alloiococcus otitidis
  CDS (13)..(1173)
aggaagtggacgatgaagttaacccggtcggaaaaaatcagtttagtcatggaagccttggtaactgcagctattgttattttagtctatttggctacctacaatattttgacctggctggcccgctatctcttgcgctaccatgaaaattcctacctctctcagctcttggctggtctccgggatacaccttactggggcatgaccccggttgttattgtcttcttgaccattgccatggttacctttatctactggcggctcaaaagacggcagcggcaatatgaactggcccatattatagatgaactccaccatattgctgatggggactttagccaccggattgaaaaagcaggctatagttctgaaatgcagcacgtgattgactctatccataccctggttgagtcagccgtggctgctatggaagaggagcggcggattgaacaaaccaaggatgaattgatcaccaatgttagccatgatatccggactcccctgacttctattattggctatattggcctaattgaatcaggggcctataataatgaagaagaatttgaccgctatcttagtgtggcctctaacaaggccaagcaaatgaagcggctggttgatgacctcttcgaatacatcaaggtccgccagccttccactaaactcaacatttcccactttgacatggtccagctagtggaacaactggccatcgattttgagctggacctggaccagcaagagactgacctgaccattgaacccagccaggactccattatgatggacggggatgccgagcaattagtccgtttgatgaacaacctggtctccaatgccttgaagtatggccaagctggtcagaagatcaaaattaccattaaccaagaatatgaccaagtcagactccaagtggccaataacggtagtgacctgccccaagagcgattggatttgatttttgaccgcttttaccgcttggaagagtcccgatcttctgaaattgaagggactggccttggccttcctattagtaaaagtattgcccagcttcaccacggaagtattgaagccaaaagccaggatgggtggaccatctttgaagtagtcctccccctcacttaccaagaaaaccaggaagggagagacggccatgtcaggtcacaagcttaa

SEQ ID NO: 1820 - protein, 387 aa, Alloiococcus otitidis
MKLTRSEKISLVMEALVTAAIVILVYLATYNILTWLARYLLRYHENSYLSQLLAGLRDTPYWGMTPVVIVFLTIAMVTFIYWRLKRRQRQYELAHIIDELHHIADGDFSHRIEKAGYSSEMQHVIDSIHTLVESAVAAMEEERRIEQTKDELITNVSHDIRTPLTSIIGYIGLIESGAYNNEEEFDRYLSVASNKAKQMKRLVDDLFEYIKVRQPSTKLNISHFDMVQLVEQLAIDFELDLDQQETDLTIEPSQDSIMMDGDAEQLVRLMNNLVSNALKYGQAGQKIKITINQEYDQVRLQVANNGSDLPQERLDLIFDRFYRLEESRSSEIEGTGLGLPISKSIAQLHHGSIEAKSQDGWTIFEVVLPLTYQENQEGRDGHVRSQA

SEQ ID NO: 1821 - DNA, 1362 bp, Alloiococcus otitidis
  CDS (46)..(1359)
tcctccccctcacttaccaagaaaaccaggaagggagagacggccatgtcaggtcacaagcttaaaaaaaccatcttgaccgggatcctagccctattaatttggtctccaagccaagtctgggcccaagaggatattgatgtccaagctgacagtgcccttttgctggatgcctcgacccggcaaattttatatgaagataatattgatgaggtcaagcccattgcttctttaaccaagatcctggtccagtaccttgtcttggaagaaattgaccaagggaatgtaaactggcaagaccaagttagtatttcgcccttccttgaagacttgagccaggactttgaactggccaatgtccccttgtttgcagaccaaacttattccgtttccgaactcttttatgccctgtctgtttactcagccaatgcagccaccatggccttggcagaatacatggaagggtctgaggaagcctttgtctaccggatgcgggacctagttgcaagctttgggattgaagatgcccatttggttaacaccacgggcttacataattcatttttagctggccggcatatcccaggcagtcaggcagaggacgataacaccatgtcggctaggagcatggccatcattgctagccgcttgctagaagaccatcctgacatcttagactattccagccagtccttctatgaatttgagacaggctatggggtctttgaggtggaaaaccgcaacaagatgctagaaggtctatcccatgaataccctggggttaaggggatgaagactgggaccacggaatcctctggccggagctttattggctattatgatggggaaaatggtgaaagacctcttttagccctggtctttaacgctggcgacctggaccaagagtctgaccgctttaaacgttttgaggaaacagccaaactctttgactatggccgggagtcttggcaggttgagaacttgttagatagtccgtcctgggctgaccagctagagggcctaccagtggctgacggccaagctgaccaggtggatttggaagttgaagcccaagaatcctttgaatttatggccttgcaagatcagcagagtccctaccagttaagcatagacttggatccggcttttacagatggtgagggtttgctccaagccccaattcaagcaggggaccaggtgggggacttggtttttgacctggattctggagtcagctacttggacggcagttcaaagagtcaagtttccttccccctttatgctaaggagtcagttagccgggataacttccttgtccaagcctggcagaacttcattgactggctaagaagtattttttaa

SEQ ID NO: 1822 - protein, 438 aa, Alloiococcus otitidis
MSGHKLKKTILTGILALLIWSPSQVWAQEDIDVQADSALLLDASTRQILYEDNIDEVKPIASLTKILVQYLVLEEIDQGNVNWQDQVSISPFLEDLSQDFELANVPLFADQTYSVSELFYALSVYSANAATMALAEYMEGSEEAFVYRMRDLVASFGIEDAHLVNTTGLHNSFLAGRHIPGSQAEDDNTMSARSMAIIASRLLEDHPDILDYSSQSFYEFETGYGVFEVENRNKMLEGLSHEYPGVKGMKTGTTESSGRSFIGYYDGENGERPLLALVFNAGDLDQESDRFKRFEETAKLFDYGRESWQVENLLDSPSWADQLEGLPVADGQADQVDLEVEAQESFEFMALQDQQSPYQLSIDLDPAFTDGEGLLQAPIQAGDQVGDLVFDLDSGVSYLDGSSKSQVSFPLYAKESVSRDNFLVQAWQNFIDWLRSIF

SEQ ID NO: 1823 - DNA, 285 bp, Alloiococcus otitidis
  CDS (7)..(282)
ggaatattggggatcccgctagccaggtcaaaaatctggtcttccacttgggctaggtcactgtcgaccgtcttaatgtcttggcccacttttttcatattgtcaatagcctcttgggcatcctcattcttacctttcttctcagagatctgcttggtgacttcattccgttctttcttcaaagattctgaacgctgtattaaatcacgccgtttttggtcaagggatagcaagtggtcgacttggtcatctgaaactcctcggctttccaagagtttcttataa

SEQ ID NO: 1824 - protein, 92 aa, Alloiococcus otitidis
MGIPLARSKIWSSTWARSLSTVLMSWPTFFILSIASWASSFLPFFSEICLVTSFRSFFKDSERCIKSRRFWSRDSKWSTWSSETPRLSKSFL

SEQ ID NO: 1825 - DNA, 1281 bp, Alloiococcus otitidis
  CDS (4)..(1278)
accatgttagatatgaaagccatgcgcacgcaaccagaccattataagaaactcttggaaagccgaggagtttcagatgaccaagtcgaccacttgctatcccttgaccaaaaacggcgtgatttaatacagcgttcagaatctttgaagaaagaacggaatgaagtcaccaagcagatctctgagaagaaaggtaagaatgaggatgcccaagaggctattgacaatatgaaaaaagtgggccaagacattaagacggtcgacagtgacctagcccaagtggaagaccagatttttgacctggctagcgggatccccaatattcctcacgagtctgtcccagtaggcccgggcgaagaagacaatgtggaagtgcgtcgttggggcgatgacttaatcccgcaatttgagggtgagcccaaagcccactgggacattgggaccgacctgggtatcttagactttgaacgggcgaccaaggtagcttcatctcgttttgtctactaccgcaagctaggggctagactggagcgggccctctataactttatgctggacaagcatgtggaccaggaaggttatgaggaagtgatccctccttacctagccaacgaccagaccatgtatgggactggccaattccctaaatttaaagaagatgtctaccaggttgacggccaccctcttaccttgattccaacttctgaagtgcctttgaccaacttctaccaggatgaaatccttgaagaagaagacctcccccaatacctaacagccttgaccccaagctaccggtcagaagcagggtctgccggacgggacaccagggggattatccgcctccaccaattcaacaaggtggagatggtcaaattttccaaaccagaagactcttttgatgaattggaaaaaatggtagccaatgctgagggaatcttgcaagatttaaaactgccttaccgggttatcaccctgtcaacaggagacatgggcttttctgccaccaagacctatgacttggaagtttggatcccagcccaaaacacctaccgggagatatcatcatgttccaactgtggtgacttccaagctagaagggctaagattcgctaccgccatgatgagggccaaatcgactatgtccacaccctaaatgggtcaggccttgcagttggtcggactgtggcagctattctagaaaactaccagcagcctgatgggtccgtcaagattcctgatgttctcgtcccttatatgaacaatattaaatacattaaataa

SEQ ID NO: 1826 - protein, 425 aa, Alloiococcus otitidis
MLDMKAMRTQPDHYKKLLESRGVSDDQVDHLLSLDQKRRDLIQRSESLKKERNEVTKQISEKKGKNEDAQEAIDNMKKVGQDIKTVDSDLAQVEDQIFDLASGIPNIPHESVPVGPGEEDNVEVRRWGDDLIPQFEGEPKAHWDIGTDLGILDFERATKVASSRFVYYRKLGARLERALYNFMLDKHVDQEGYEEVIPPYLANDQTMYGTGQFPKFKEDVYQVDGHPLTLIPTSEVPLTNFYQDEILEEEDLPQYLTALTPSYRSEAGSAGRDTRGIIRLHQFNKVEMVKFSKPEDSFDELEKMVANAEGILQDLKLPYRVITLSTGDMGFSATKTYDLEVWIPAQNTYREISSCSNCGDFQARRAKIRYRHDEGQIDYVHTLNGSGLAVGRTVAAILENYQQPDGSVKIPDVLVPYMNNIKYIK

SEQ ID NO: 1827 - DNA, 555 bp, Alloiococcus otitidis
  CDS (76)..(552)
aaaagtgagcgaaaggggagctttcacatgtcagatctaaaagttgcgaatttttcaggcggttgtttctggtgcatggtccgtccctttgaagaagaagacgggattgaatcggttgtctcaggctataccggcggacatgtagccaatccgacttatgaacaagtgtgctctaacacgactggccacactgaagcggttcaaatcacctatgacccagacaaggtttcatacaaggacttggttgaaatttactggcaacaaaccgacccaaccgatgcaggcggtcaatttgccgaccgtggggactcttaccgccccgttatcttttacggtaaccaagaagaaaaagaaattgccgaacagtccaagcaagacttagaaaattctggacgcttcaatgatcctattgtgaccgaaatcaaagaacggtctaccttctatccggcagaagaataccaccaagacttttacaagaaaaatccaacccattacaagatgtaccgcaagggatcaggccggcaagactttattgaagaaaattggcaagactag

SEQ ID NO: 1828 - protein, 159 aa, Alloiococcus otitidis
MVRPFEEEDGIESVVSGYTGGHVANPTYEQVCSNTTGHTEAVQITYDPDKVSYKDLVEIYWQQTDPTDAGGQFADRGDSYRPVIFYGNQEEKEIAEQSKQDLENSGRFNDPIVTEIKERSTFYPAEEYHQDFYKKNPTHYKMYRKGSGRQDFIEENWQD

SEQ ID NO: 1829 - DNA, 555 bp, Alloiococcus otitidis; identical to SEQ ID NO: 1827
  CDS (28)..(552)

SEQ ID NO: 1830 - protein, 175 aa, Alloiococcus otitidis
MSDLKVANFSGGCFWCMVRPFEEEDGIESVVSGYTGGHVANPTYEQVCSNTTGHTEAVQITYDPDKVSYKDLVEIYWQQTDPTDAGGQFADRGDSYRPVIFYGNQEEKEIAEQSKQDLENSGRFNDPIVTEIKERSTFYPAEEYHQDFYKKNPTHYKMYRKGSGRQDFIEENWQD

SEQ ID NO: 1831 - DNA, 207 bp, Alloiococcus otitidis
  CDS (1)..(204)
atgcaacttgatatgccgatgatcggggtcgaaccgatacgcccgcaatgggcactggattttgagtccagcgcgtctgccagttccgccacatcggcaggtcataagcaaaaagaggcacggaccggatttgaaccggcgatagaggttttgcagacctcggccttaccacttggcgaccgcgccaaaatgaaactgggctactag

SEQ ID NO: 1832 - protein, 68 aa, Alloiococcus otitidis
MQLDMPMIGVEPIRPQWALDFESSASASSATSAGHKQKEARTGFEPAIEVLQTSALPLGDRAKMKLGY

SEQ ID NO: 1833 - DNA, 261 bp, Alloiococcus otitidis
  CDS (7)..(258)
caactggtgcaccagcggtgcgtccatcccagtcctctcgtactaaggatagctctcttcaaatctccaacgcccgcgacggatagggaccgaactgtctcacgacgttctgaacccagctcgcgtaccgctttaatgggcgaacagcccaacccttgggaccgacttcagccccaggatgcgatgagccgacatcgaggtgccaaacctccccgtcgatgtgaactcttgggggagataagcctgttatccccagggtag

SEQ ID NO: 1834 - protein, 84 aa, Alloiococcus otitidis
MHQRCVHPSPLVLRIALFKSPTPATDRDRTVSRRSEPSSRTALMGEQPNPWDRLQPQDAMSRHRGAKPPRRCELLGEISLLSPG

SEQ ID NO: 1835 - DNA, 882 bp, Alloiococcus otitidis
  CDS (100)..(879)
agaaaggaagtttcaataatgacaaagagaaaaagaaaaaataagtatcacagcaaaaaatttagaaatgggaattctcctaactttagcggacagcacatgttgcataataaaaaattgataaaggatattgtaaaccttgctcacatttcaaaaagtgacctggtattagaattgggagctggtaaaggggcacttacgaaagttttaagtaatcaggcaggaagggtgctcgcagttgaaaacgataaaaaatatataagagaattacaccaacttgaattgcaaaatacaaaaataattcaacaagacattttgaaattatccttacccagaaagccctatgtcgttgtttcaaacattccatttgccattacaacaccgataatgaaaatgcttctcaataaaccttcaagcccctttcaaagcggatttattattatagaaaaaggggctgccaaaagatttacatcaaattttgttaaaaactcatatgtagttgcttggaaaatgtggttcgatattcaatgtgttaaaacaattgcaaaaaagaatttctcgccaaaaccaagagttgatgccgcattaatcaaaataactcgaaaaactaaacctattgtagcttataaagattacttaactttttggggtttagccgattatctaatgaaaaaccctaagttacctatcgatttagcattagggggtatatttaccaaagctcaaattagacatttaaaaaagggacttcaactaaagaaggaacttacagttggaaatttgtccgaaaaacaatggggatttatatttgaaaccatgaagcaatatgttccgaaattcagatggccaagaatcaagaaatctaaattaaagtacttatag

SEQ ID NO: 1836 - protein, 260 aa, Alloiococcus otitidis
MLHNKKLIKDIVNLAHISKSDLVLELGAGKGALTKVLSNQAGRVLAVENDKKYIRELHQLELQNTKIIQQDILKLSLPRKPYVVVSNIPFAITTPIMKMLLNKPSSPFQSGFIIIEKGAAKRFTSNFVKNSYVVAWKMWFDIQCVKTIAKKNFSPKPRVDAALIKITRKTKPIVAYKDYLTFWGLADYLMKNPKLPIDLALGGIFTKAQIRHLKKGLQLKKELTVGNLSEKQWGFIFETMKQYVPKFRWPRIKKSKLKYL

SEQ ID NO: 1837 - DNA, 882 bp, Alloiococcus otitidis; identical to SEQ ID NO: 1835
  CDS (19)..(879)

SEQ ID NO: 1838 - protein, 287 aa, Alloiococcus otitidis
MTKRKRKNKYHSKKFRNGNSPNFSGQHMLHNKKLIKDIVNLAHISKSDLVLELGAGKGALTKVLSNQAGRVLAVENDKKYIRELHQLELQNTKIIQQDILKLSLPRKPYVVVSNIPFAITTPIMKMLLNKPSSPFQSGFIIIEKGAAKRFTSNFVKNSYVVAWKMWFDIQCVKTIAKKNFSPKPRVDAALIKITRKTKPIVAYKDYLTFWGLADYLMKNPKLPIDLALGGIFTKAQIRHLKKGLQLKKELTVGNLSEKQWGFIFETMKQYVPKFRWPRIKKSKLKYL

SEQ ID NO: 1839 - DNA, 1263 bp, Alloiococcus otitidis
  CDS (523)..(1260)
ggagtggataaaatgaatggaattttatcgttatttgaaagcctgggatccgggctgttttcagtcatcgggtccttactaggcggcatcattctcttgctcattgcctggctgattgccttcctatttaagaaagcaatcaccaaaggtcttacagcagtgaaattggatgctaaattggtggactggaaatttgccagtaccaaggcagacggccagcaaaccgtcaatgcactcggccaagttgtttattaccttgtatgggtgctcttcttacctgggatttttgcaacctttggcttggaaacgattggccaacccattgctaacatgattaatacagccttggacttcctacctaatattatcggtgctattgttgttgtcatccttggtgtgtttgctgctaaatttgttcgtaacttgacttacaacttcttggttgcaaccaatgttgattcttacttgaatcgtttcttaaacggtggcagtgacgacagtaatcaagctgaagaatcaaacttgtccctaaccaaaaccctatcaaccttagtttacatcctcgtattgcttccaatcttattggtagctatcgagacactaaacatccaatcaatcggtcaaccaattgctttactactcaccactatcttatcagctatccctaacattattgtggcagctatcttacttggtgttggcttcgtagctgctcgatttgtcagccaaatcttaactgacttgttaagaggaactggtttaaacaaatactctgaagccctaaacagtaaagtcaatgtgaacctagaccttgctaaattaactggtcaagttgttgccgttgttgttggtttactctttgttgttgaagccatctcagcccttaacttaaccattctaaacgctgttggtgctgcaatcattgcttacattccaagcgtattagtagctggtatcttggctcttgtcgctttcctactcggagaattcctttcttctctaattagcaaagctacttcaagtcacttggcaaccagcctcgttaaaggacttgtttatggtctagcagcatttatgattctagaccaattgaactttgcaacaaacattgttaacgttgcattcttcttcttaattggtgcacttgcaattgcttttgcccttgcctttggtcttggtggccgcgactttgcccgccgtcaacttgaaaaagctgacgaccaaattgacaaagaaagcaaagacaatgataacttaaactaa

SEQ ID NO: 1840 - protein, 246 aa, Alloiococcus otitidis
MSLTKTLSTLVYILVLLPILLVAIETLNIQSIGQPIALLLTTILSAIPNIIVAAILLGVGFVAARFVSQILTDLLRGTGLNKYSEALNSKVNVNLDLAKLTGQVVAVVVGLLFVVEAISALNLTILNAVGAAIIAYIPSVLVAGILALVAFLLGEFLSSLISKATSSHLATSLVKGLVYGLAAFMILDQLNFATNIVNVAFFFLIGALAIAFALAFGLGGRDFARRQLEKADDQIDKESKDNDNLN

SEQ ID NO: 1841 - DNA, 1263 bp, Alloiococcus otitidis; identical to SEQ ID NO: 1839
  CDS (13)..(1260)

SEQ ID NO: 1842 - protein, 416 aa, Alloiococcus otitidis
MNGILSLFESLGSGLFSVIGSLLGGIILLLIAWLIAFLFKKAITKGLTAVKLDAKLVDWKFASTKADGQQTVNALGQVVYYLVWVLFLPGIFATFGLETIGQPIANMINTALDFLPNIIGAIVVVILGVFAAKFVRNLTYNFLVATNVDSYLNRFLNGGSDDSNQAEESNLSLTKTLSTLVYILVLLPILLVAIETLNIQSIGQPIALLLTTILSAIPNIIVAAILLGVGFVAARFVSQILTDLLRGTGLNKYSEALNSKVNVNLDLAKLTGQVVAVVVGLLFVVEAISALNLTILNAVGAAIIAYIPSVLVAGILALVAFLLGEFLSSLISKATSSHLATSLVKGLVYGLAAFMILDQLNFATNIVNVAFFFLIGALAIAFALAFGLGGRDFARRQLEKADDQIDKESKDNDNLN

SEQ ID NO: 1843 - DNA, 1263 bp, Alloiococcus otitidis; identical to SEQ ID NO: 1839
  CDS (4)..(1260)

SEQ ID NO: 1844 - protein, 419 aa, Alloiococcus otitidis
MDKMNGILSLFESLGSGLFSVIGSLLGGIILLLIAWLIAFLFKKAITKGLTAVKLDAKLVDWKFASTKADGQQTVNALGQVVYYLVWVLFLPGIFATFGLETIGQPIANMINTALDFLPNIIGAIVVVILGVFAAKFVRNLTYNFLVATNVDSYLNRFLNGGSDDSNQAEESNLSLTKTLSTLVYILVLLPILLVAIETLNIQSIGQPIALLLTTILSAIPNIIVAAILLGVGFVAARFVSQILTDLLRGTGLNKYSEALNSKVNVNLDLAKLTGQVVAVVVGLLFVVEAISALNLTILNAVGAAIIAYIPSVLVAGILALVAFLLGEFLSSLISKATSSHLATSLVKGLVYGLAAFMILDQLNFATNIVNVAFFFLIGALAIAFALAFGLGGRDFARRQLEKADDQIDKESKDNDNLN

SEQ ID NO: 1845 - DNA, 693 bp, Alloiococcus otitidis
  CDS (64)..(690)
cttaagaatatttatgacatattatataattgtttaatatgtcatattgcaaaggaggaggcaatgaagctaagtgaccggcagaaaaaaattattaacttagttaaagagcatgagccaattactggggaccagatttcagacaagctaggcctgtccaagccgactatccggccagacctttcacttttgacctcagctgagatcttgattgccaaacccaaagtcggctacttatacaaccaacattatgttactccctttatcatcagtgatatggcccagcgtccggtagaagaagtcatgaaggttcccatcattgtggataaggaaactcctattattgaggctatcaaccgagttttcctagaagatgcaggttctctctatgtgacagataacagccagctagtggggattgtctctcgcaaggacctcctgaaagcggccttgatggggtcagatgtccagcagttgactgtgagttttgtcatgagccgggcacccaatttggtcacggttaaccacactgattccttggcagctgcttgtaaaaaattggtcctccataaggtcaatagtctgcccgttttggagtacgaccaagagactggccaggaaaaaattgtcggtaaactgtccaagacggttataaccaatgtcttttactcgatattagaaggagagcaataa

SEQ ID NO: 1846 - protein, 209 aa, Alloiococcus otitidis
MKLSDRQKKIINLVKEHEPITGDQISDKLGLSKPTIRPDLSLLTSAEILIAKPKVGYLYNQHYVTPFIISDMAQRPVEEVMKVPIIVDKETPIIEAINRVFLEDAGSLYVTDNSQLVGIVSRKDLLKAALMGSDVQQLTVSFVMSRAPNLVTVNHTDSLAAACKKLVLHKVNSLPVLEYDQETGQEKIVGKLSKTVITNVFYSILEGEQ

SEQ ID NO: 1847 - DNA, 837 bp, Alloiococcus otitidis
  CDS (10)..(834)
ggaggtagcatggtgagtgaattatccatatatgtcttatcggattcaatcggggacacggcccagcaagtggtccggtccattaccgctcaatttccccaagttaacgttaaattgcggcgtttttccaatgtcctaaccgaaaaagccattgaccagatttttaagttgatggacccggctaaaagtaacctagtcttttacacttttgtcgaagagagcctagcagactatatgaaggttcaactagatcaagttggcattaggggcattgatatcattagccctggcctccaggcgatagagcttttaacaggccaagagccagataaggaggctggccggattcggaagacggatgatgagtatttcgaccggatcaaggccattgaatttgctgtccgctatgacgatggccaggaacctcatggtgttttaaaggctgatttgaccttgattggggtttctcgtacttccaagacccccttgtccatgtacttggccaacaagggttacaaggtggccaacatcccccttttcccagagaataaaccgcccaaggagctcttccaagtttcgccttcaaaggtagtgggcttgaccaatagtgtcaactacctgaaccaggttcggaaggagcggttgaagtcttatggcatgtccacccagtcccggtatgtggacaagaagcgaattttagaagaactccagtacggggaagaaatcatgaagcaaatcggttgtttaaagataaatgttgaaagtaaggccattgaagaaaccgctgccgagatcctccaatacttagaaggactccagcaaaaggataaaaagtaa

SEQ ID NO: 1848 - protein, 275 aa, Alloiococcus otitidis
MVSELSIYVLSDSIGDTAQQVVRSITAQFPQVNVKLRRFSNVLTEKAIDQIFKLMDPAKSNLVFYTFVEESLADYMKVQLDQVGIRGIDIISPGLQAIELLTGQEPDKEAGRIRKTDDEYFDRIKAIEFAVRYDDGQEPHGVLKADLTLIGVSRTSKTPLSMYLANKGYKVANIPLFPENKPPKELFQVSPSKVVGLTNSVNYLNQVRKERLKSYGMSTQSRYVDKKRILEELQYGEEIMKQIGCLKINVESKAIEETAAEILQYLEGLQQKDKK

SEQ ID NO: 1849 - DNA, 2640 bp, Alloiococcus otitidis
  CDS (25)..(2637)
aaagtaaagaaaaaggagtttaatatgcagttagtttataactttaaagaaggtaaccgtgacatgaaagcccttttaggtgggaagggggctaacctagctgagatgaccagccttggcttgaatgtcccaccgggctttaccctaactactgaagcttgccagcgttacaaccaggacccagaatctggcttgtggaaggaattaaaggacggggttttagaagaagttaaaaagctggaagcggaaacaggaaaaggctttggtgatgagacccatcccctcctcttttcagtccggtccggggcggctgaatccatgccaggtatgatggatacagttttaaatttaggcttgaatgaccaatcagtggtagggctggctaagtcgactgaaaatgaccgctttgcctacgacagttaccgccgttttattcaaatgtttgctgatgttgtcaagggcgtccccctagctcaatttgagtacctcttagaagaccgcaaagaaagcaagggggtagaagaagatactgacttagatgcccaagatatggtccagcttgtccaagcttacaaggttcgctaccaagaaacggtaggggaaagcttcccccaagaccccatggaccaattgtttgaggcagtggaagccgtttttgcctcgtggaacaacgaccgggctgttttataccgggaaatcaatgaaattacaggccttttagggacagcggtcaacgttcaaaccatggtatttggcaatatggggcaggagtcgggaactggggtcatgtttacccggaatccagcaaatggccagaaagagcttttcggcgaatacttgatcaatgcccaaggggaagatgtagtagccggtgtccggactccgcaagcgattgccagtttaaatgacgatatgccagacctctaccaagagttagagactgtggctcaaaagttggaaagtcattacttagacatgcaagatattgaattcaccattgaaaacagaaacttgtacctcctccaaacccggactggtaagcggaccgctcaggctgccatcaagattgccaatgacctcttcctggagggccttatcacggccgaagacagtgttaccaagctcaccagccagcaactggagacccttatgcacccccgctttgacccagatgccctagaccaagcagacaaaattggccagggcctagctgcctcaccaggagcagcagttggccgggtttgcttttcggttgaggcagttgaaagcaccgtccaggcaggggattctgctattttagtccgccgggaaacctcgcctgaagatttggcaggtatggtcaaggcggctggtgttttaacctctagaggagggatgacctcccacgctgcagttgttgcccgggggatgggtaagtgctgtgtggccggttgttcagatataaaagtggatagcgaccacgggaccttcacctaccagggggggcaagtccaagaaggggactatatttccatcgatggctccactggttccgtctacctgggccaagttgccatgagtggggccttgatggatgaccagtatgatgcttttatggaccgagttaacgatgctaaaagaatggcagtccgcaccaatgccgatacaccaaaagatgttcaatccgctttagactttggggcagaaggaatcggcctagtccggactgagcacatgttctttggtcaaggtcgaattagtgaagtgcggaagatgatcctggccaagtcaagagaagaccggcaagtttatgtagaccgcctctaccaattccagaaagaggactttgtcagcatctaccaggtaacccagtccctacccgttactgtccgtttactagacccacccctccacgaatttttaccccatgaagaccaggctatccaggcaatcgctcaggatatggatttaagccgagaagaagtggccaagcggatcgaggtcttacaagaagtcaaccccatgctaggccaccggggcgttcggctgggaattacctatcctgaagtcactgccatgcaagtttcggccatcatcgatgcggccattgaagtcaagcaagacatgggctatgatattaagcctgaaattatggtgcctttggtaggtcaaatccaagagttcaaacaggttaaagaccaaattgaagtcctggtccaagaccggttggaagaggctggggtcgacctggactacagtattggaactatgattgaaattccacgggcttgcttgatagctgaccaattggcccaggaagctgacttctttagctttgggaccaatgacttaacccagatgactttcggttattcccgggatgacgccggaagttttatcccaacttatatcgaaaatgggattatggaagaagatcccttcaaaactattgaccaagaaggggttggggctatggttaaacttgcggtcgacaaagctcggtccgttaagccagacattaagttaggtatttgcggagaacatgggggggatgccaaatccatccacttctttgattccttaggcttagactatgtatcttgctcaccctaccgggttccaattgcccgtttagcagcagcccaggccagtcaagagtag

SEQ ID NO: 1850 - protein, 871 aa, Alloiococcus otitidis
MQLVYNFKEGNRDMKALLGGKGANLAEMTSLGLNVPPGFTLTTEACQRYNQDPESGLWKELKDGVLEEVKKLEAETGKGFGDETHPLLFSVRSGAAESMPGMMDTVLNLGLNDQSVVGLAKSTENDRFAYDSYRRFIQMFADVVKGVPLAQFEYLLEDRKESKGVEEDTDLDAQDMVQLVQAYKVRYQETVGESFPQDPMDQLFEAVEAVFASWNNDRAVLYREINEITGLLGTAVNVQTMVFGNMGQESGTGVMFTRNPANGQKELFGEYLINAQGEDVVAGVRTPQAIASLNDDMPDLYQELETVAQKLESHYLDMQDIEFTIENRNLYLLQTRTGKRTAQAAIKIANDLFLEGLITAEDSVTKLTSQQLETLMHPRFDPDALDQADKIGQGLAASPGAAVGRVCFSVEAVESTVQAGDSAILVRRETSPEDLAGMVKAAGVLTSRGGMTSHAAVVARGMGKCCVAGCSDIKVDSDHGTFTYQGGQVQEGDYISIDGSTGSVYLGQVAMSGALMDDQYDAFMDRVNDAKRMAVRTNADTPKDVQSALDFGAEGIGLVRTEHMFFGQGRISEVRKMILAKSREDRQVYVDRLYQFQKEDFVSIYQVTQSLPVTVRLLDPPLHEFLPHEDQAIQAIAQDMDLSREEVAKRIEVLQEVNPMLGHRGVRLGITYPEVTAMQVSAIIDAAIEVKQDMGYDIKPEIMVPLVGQIQEFKQVKDQIEVLVQDRLEEAGVDLDYSIGTMIEIPRACLIADQLAQEADFFSFGTNDLTQMTFGYSRDDAGSFIPTYIENGIMEEDPFKTIDQEGVGAMVKLAVDKARSVKPDIKLGICGEHGGDAKSIHFFDSLGLDYVSCSPYRVPIARLAAAQASQE

SEQ ID NO: 1851 - DNA, 264 bp, Alloiococcus otitidis
  CDS (7)..(261)
ttaggggtggaaaacgtgtatttacttaatttaaatgttgtctacttagaatcagttgttaacccagaagccgaaagagtcaaggaagccttgaaacggcagggggaagaccaagtgaaagatatcaaaattggtcgtagctaccaacttgaactcgaggcagacagtgaggaagcagcccaagcttacgggcatgccttagctgaacgtttattagtcaacaaggccatggaagactatacactttcaattgaggaggcttaa

SEQ ID NO: 1852 - protein, 85 aa, Alloiococcus otitidis
MENVYLLNLNVVYLESVVNPEAERVKEALKRQGEDQVKDIKIGRSYQLELEADSEEAAQAYGHALAERLLVNKAMEDYTLSIEEA

SEQ ID NO: 1853 - DNA, 663 bp, Alloiococcus otitidis
  CDS (70)..(660)
ggaggcttaagggtgaaagcagctgttattacttatccgggaacaagcgggggccaaactagccaggccttgctcgaaaaattaggctttgaagtagatatcgtcaagtcaagtgaccacttgggccaagacctagacctagttttggttgctgatggcagtgcctatggcggagccgttagacctggtgctattgctagtcttgaccctatcagccaagacattaaagactttgctgaccacggcaaggttgtcatcggcctcggcaatggttttcaaattttgaccgagttagacttattgcccgggtattttatgaaaaaccccaacttgtcctacatcagtaagatggtaaaagtagagaccaagccagactacctagtgacagaccataatccaatcgacctgtttatctctaacaagcaggctagctaccagctcagtgaccaagacttgagtcaacttgaagcaaatgaccaggttttaatgacttaccaagatgacgagacaaattcaagccatgccatagccggtgtcaccaacaaggaaaacaatgtctttggtcttatgccgctattggaccgccaccaggaccaagacatcacttctgacttggggctaactttaacccgagacatcctcaaagagaaaggactggtctaa

SEQ ID NO: 1854 - protein, 197 aa, Alloiococcus otitidis
MLEKLGFEVDIVKSSDHLGQDLDLVLVADGSAYGGAVRPGAIASLDPISQDIKDFADHGKVVIGLGNGFQILTELDLLPGYFMKNPNLSYISKMVKVETKPDYLVTDHNPIDLFISNKQASYQLSDQDLSQLEANDQVLMTYQDDETNSSHAIAGVTNKENNVFGLMPLLDRHQDQDITSDLGLTLTRDILKEKGLV

SEQ ID NO: 1855 - DNA, 663 bp, Alloiococcus otitidis; identical to SEQ ID NO: 1853
  CDS (13)..(660)

SEQ ID NO: 1856 - protein, 216 aa, Alloiococcus otitidis
MKAAVITYPGTSGGQTSQALLEKLGFEVDIVKSSDHLGQDLDLVLVADGSAYGGAVRPGAIASLDPISQDIKDFADHGKVVIGLGNGFQILTELDLLPGYFMKNPNLSYISKMVKVETKPDYLVTDHNPIDLFISNKQASYQLSDQDLSQLEANDQVLMTYQDDETNSSHAIAGVTNKENNVFGLMPLLDRHQDQDITSDLGLTLTRDILKEKGLV

SEQ ID NO: 1857 - DNA, 363 bp, Alloiococcus otitidis
  CDS (40)..(360)
aagattccaagacttacttggaatggggtttgtctgaagatgaataccaagaaatcaccaagcaaattggccgccttcccaactacactgaaacaggcatttactctggcatgtggtcagaacactgctcttataaaagctcagcctccatcttgcggaacttttatacccagggcgaccaagttgtccaaggccctggcgaaggggcaggaacacttgatattggagacggacaaggggtcgtttttaaaatggaaagtcacaactccccatcagccgtcgaaccctatgaaggggcagcaacgggtgtcggcggggtcgtccgtgacgtcttctccattggggcccaacccattgccctag

(The sequence listing continues in the following parts.)
